United States Patent Application Publication US 2007/0134655 A1 - sequence listing, part 6

SEQ ID NO: 198496 - RNA, 32 nt, Human
gggcgccuguaauuccagcuacucaggagucu

SEQ ID NO: 198497 - RNA, 32 nt, Human
gggcgccuguaauuccagcuacucaggggguu

SEQ ID NO: 198498 - RNA, 32 nt, Human
gggcgccuguaauuccagcuacucgggaggcu

SEQ ID NO: 198499 - RNA, 32 nt, Human
gggcgccuguaauuccagcuacucuggaagcu

SEQ ID NO: 198500 - RNA, 32 nt, Human
gggcgccuguagccccagcuacucgggaggcu

SEQ ID NO: 198501 - RNA, 32 nt, Human
gggcgccuguagccccagcuacuugggaggcu

SEQ ID NO: 198502 - RNA, 32 nt, Human
gggcgccuguagucccagcuacgugggaggcu

SEQ ID NO: 198503 - RNA, 32 nt, Human
gggcgccuguagucccagcuacucaggaggcu

SEQ ID NO: 198504 - RNA, 32 nt, Human
gggcgccuguagucccagcuacucgggagacu

SEQ ID NO: 198505 - RNA, 32 nt, Human
gggcgccuguagucccagcuacucgggaggcu

SEQ ID NO: 198506 - RNA, 32 nt, Human
gggcgccuguagucccagcuacucggggcgcu

SEQ ID NO: 198507 - RNA, 32 nt, Human
gggcgccuguagucccagcuacucugaagacu

SEQ ID NO: 198508 - RNA, 32 nt, Human
gggcgccuguagucccagcuacucuggaggcu

SEQ ID NO: 198509 - RNA, 32 nt, Human
gggcgccuguagucccagcuacuggggaggcu

SEQ ID NO: 198510 - RNA, 32 nt, Human
gggcgccuguagucccagcuacuuggaaggcu

SEQ ID NO: 198511 - RNA, 32 nt, Human
gggcgccuguagucccagcuacuugggaagcu

SEQ ID NO: 198512 - RNA, 32 nt, Human
gggcgccuguagucccagcuacuugggaggca

SEQ ID NO: 198513 - RNA, 32 nt, Human
gggcgccuguagucccagcuacuugggaggcu

SEQ ID NO: 198514 - RNA, 32 nt, Human
gggcgccuguagucccagcuacuugguaggcu

SEQ ID NO: 198515 - RNA, 32 nt, Human
gggcgccuguagucccagcuaugcgagaggcu

SEQ ID NO: 198516 - RNA, 32 nt, Human
gggcgccuguagucccagcuauucgggaggcu

SEQ ID NO: 198517 - RNA, 32 nt, Human
gggcgccuguagucccagcuauuugggaggcu

SEQ ID NO: 198518 - RNA, 32 nt, Human
gggcgccuguagucccagcugcucgggaggcu

SEQ ID NO: 198519 - RNA, 32 nt, Human
gggcgccuguagucucagcuacucgggaggcu

SEQ ID NO: 198520 - RNA, 32 nt, Human
gggcgccuguaguuccagcuacucgggaggcu

SEQ ID NO: 198521 - RNA, 32 nt, Human
gggcgccuguaguucuagcuacucuggaggcu

SEQ ID NO: 198522 - RNA, 32 nt, Human
gggcgccuguaucccagcuacucgggaggcug

SEQ ID NO: 198523 - RNA, 32 nt, Human
gggcgccuguauucccagcuacucgggaggcu

SEQ ID NO: 198524 - RNA, 32 nt, Human
gggcgccuguauucccagcuacuggggaggcu

SEQ ID NO: 198525 - RNA, 32 nt, Human
gggcgccuguauucccagcuucucgggaggcu

SEQ ID NO: 198526 - RNA, 32 nt, Human
gggcgccuguggucccagcuacucgggaggcu

SEQ ID NO: 198527 - RNA, 32 nt, Human
gggcgccuguggucccagcuacuggggaggcu

SEQ ID NO: 198528 - RNA, 32 nt, Human
gggcgccugugguccuagcuacucgggaggcu

SEQ ID NO: 198529 - RNA, 32 nt, Human
gggcgccuguuaucccagcuacuugggaggcu

SEQ ID NO: 198530 - RNA, 32 nt, Human
gggcgccuguucucuguccggaccagccagcg

SEQ ID NO: 198531 - RNA, 32 nt, Human
gggcgccuuuagucgcagcuacuggggaggcu

SEQ ID NO: 198532 - RNA, 23 nt, Human
gggcgcgagagcggcgcuggggg

SEQ ID NO: 198533 - RNA, 22 nt, Human
gggcgcgagcaauacucaggca

SEQ ID NO: 198534 - RNA, 32 nt, Human
gggcgcgagccgcggcggcgccgcugcgggag

SEQ ID NO: 198535 - RNA, 32 nt, Human
gggcgcgaggcugaagccacugggauuugacg

SEQ ID NO: 198536 - RNA, 32 nt, Human
gggcgcgauggcggaggcuguacugagggucg

SEQ ID NO: 198537 - RNA, 22 nt, Human
gggcgcgcaccccagcauucca

SEQ ID NO: 198538 - RNA, 21 nt, Human
gggcgcgcaguagagcagcag

SEQ ID NO: 198539 - RNA, 32 nt, Human
gggcgcgccgccucugccccgcggcgagggug

SEQ ID NO: 198540 - RNA, 32 nt, Human
gggcgcgccucugcacuaacucaggccaggua

SEQ ID NO: 198541 - RNA, 18 nt, Human
gggcgcgcggcggggcgg

SEQ ID NO: 198542 - RNA, 19 nt, Human
gggcgcgcggggccugcgg

SEQ ID NO: 198543 - RNA, 32 nt, Human
gggcgcgcuagugcucguuguagccuuuugcu

SEQ ID NO: 198544 - RNA, 18 nt, Human
gggcgcgcucccuccuua

SEQ ID NO: 198545 - RNA, 20 nt, Human
gggcgcgcucugcaaagggg

SEQ ID NO: 198546 - RNA, 32 nt, Human
gggcgcgcugggaugucacagaguuggaguca

SEQ ID NO: 198547 - RNA, 32 nt, Human
gggcgcgcuuucucccugcgggucucaguaau

SEQ ID NO: 198548 - RNA, 32 nt, Human
gggcgcggaccagacagaccucgggucaggcc

SEQ ID NO: 198549 - RNA, 32 nt, Human
gggcgcggaggaugaggccgcugccuggcgcu

SEQ ID NO: 198550 - RNA, 32 nt, Human
gggcgcggcaccgcaccgcucccuucaccuug

SEQ ID NO: 198551 - RNA, 32 nt, Human
gggcgcggccuccggcggaggagggaacagcu

SEQ ID NO: 198552 - RNA, 32 nt, Human
gggcgcgggagagagcgcgggcggccgccggg

SEQ ID NO: 198553 - RNA, 22 nt, Human
gggcgcgggaggaggaaguaga

SEQ ID NO: 198554 - RNA, 32 nt, Human
gggcgcgggaggaggaaguagagcccgggacc

SEQ ID NO: 198555 - RNA, 32 nt, Human
gggcgcgggaguacgcgagagcagggaugggg

SEQ ID NO: 198556 - RNA, 32 nt, Human
gggcgcgggagugagagagggugagucagcca

SEQ ID NO: 198557 - RNA, 32 nt, Human
gggcgcgguaagagguggcggcgggcagaggg

SEQ ID NO: 198558 - RNA, 23 nt, Human
gggcgcgguggcucaagccugua

SEQ ID NO: 198559 - RNA, 23 nt, Human
gggcgcgguggcucacaccugua

SEQ ID NO: 198560 - RNA, 23 nt, Human
gggcgcgguggcucacaucugua

SEQ ID NO: 198561 - RNA, 23 nt, Human
gggcgcgguggcucacgccugua

SEQ ID NO: 198562 - RNA, 23 nt, Human
gggcgcgguggcucaucccugua

SEQ ID NO: 198563 - RNA, 23 nt, Human
gggcgcgguggcucaugccugua

SEQ ID NO: 198564 - RNA, 23 nt, Human
gggcgcgguggcucaugcuugua

SEQ ID NO: 198565 - RNA, 23 nt, Human
gggcgcgguggcucgugcuugua

SEQ ID NO: 198566 - RNA, 23 nt, Human
gggcgcgguggcuuaugccugua

SEQ ID NO: 198567 - RNA, 23 nt, Human
gggcgcggugguucaugccugua

SEQ ID NO: 198568 - RNA, 32 nt, Human
gggcgcguggaggaggaggaaaaggagggaaa

SEQ ID NO: 198569 - RNA, 32 nt, Human
gggcgcgugguuuucccaucucaucccuggag

SEQ ID NO: 198570 - RNA, 32 nt, Human
gggcgcuagccuggcccgacugggcgaguccc

SEQ ID NO: 198571 - RNA, 32 nt, Human
gggcgcucacugagcaccaugugucaucacag

SEQ ID NO: 198572 - RNA, 32 nt, Human
gggcgcucagaggcgguugugagcagugcaga

SEQ ID NO: 198573 - RNA, 20 nt, Human
gggcgcucagugacaagggc

SEQ ID NO: 198574 - RNA, 19 nt, Human
gggcgcuccaagaagaggc

SEQ ID NO: 198575 - RNA, 19 nt, Human
gggcgcucccagaaggagc

SEQ ID NO: 198576 - RNA, 32 nt, Human
gggcgcucccagagcaaacgaggucccugaga

SEQ ID NO: 198577 - RNA, 21 nt, Human
gggcgcuccccggccacaggc

SEQ ID NO: 198578 - RNA, 22 nt, Human
gggcgcuccccugagcccgggc

SEQ ID NO: 198579 - RNA, 26 nt, Human
gggcgcuccgggcucugagcccgcag

SEQ ID NO: 198580 - RNA, 21 nt, Human
gggcgcuccucaggcaaaggg

SEQ ID NO: 198581 - RNA, 32 nt, Human
gggcgcuccucccagcuguaccggccacugca

SEQ ID NO: 198582 - RNA, 18 nt, Human
gggcgcucgcagggggca

SEQ ID NO: 198583 - RNA, 20 nt, Human
gggcgcucggaccaggcagc

SEQ ID NO: 198584 - RNA, 32 nt, Human
gggcgcucuccucacccccacgucuccugggu

SEQ ID NO: 198585 - RNA, 32 nt, Human
gggcgcucucugaggacagagcugguggggcg

SEQ ID NO: 198586 - RNA, 32 nt, Human
gggcgcucuggcccucccuuccuuaagcccag

SEQ ID NO: 198587 - RNA, 32 nt, Human
gggcgcugagccaggggcaggcgcuggaaaca

SEQ ID NO: 198588 - RNA, 32 nt, Human
gggcgcugaggcaggagaaucgcucgaaccca

SEQ ID NO: 198589 - RNA, 19 nt, Human
gggcgcugcagaggggcug

SEQ ID NO: 198590 - RNA, 32 nt, Human
gggcgcugcgugggcccugcacuugcugaggu

SEQ ID NO: 198591 - RNA, 32 nt, Human
gggcgcuggccacgucgcccugggugaccuuc

SEQ ID NO: 198592 - RNA, 23 nt, Human
gggcgcuggccuaccuccugagg

SEQ ID NO: 198593 - RNA, 32 nt, Human
gggcgcugggagaagcggggcagcgcugagcc

SEQ ID NO: 198594 - RNA, 32 nt, Human
gggcgcugggaggccggcgcggcggcugggag

SEQ ID NO: 198595 - RNA, 32 nt, Human
gggcgcuggggaaucuuccuccccagcccccg

SEQ ID NO: 198596 - RNA, 32 nt, Human
gggcgcuggggcccaacugcucugcuccguau

SEQ ID NO: 198597 - RNA, 32 nt, Human
gggcgcugguaaucccagcuacucagguggcu

SEQ ID NO: 198598 - RNA, 32 nt, Human
gggcgcugguugggcuuggagcucaggcugcu

SEQ ID NO: 198599 - RNA, 32 nt, Human
gggcgcuguccgacgccugccccaccaugucc

SEQ ID NO: 198600 - RNA, 32 nt, Human
gggcgcugugagaguaucaagagguacugagg

SEQ ID NO: 198601 - RNA, 19 nt, Human
gggcgcugugaguggggug

SEQ ID NO: 198602 - RNA, 32 nt, Human
gggcgcugugcgucuccaguccgggaccgaag

SEQ ID NO: 198603 - RNA, 23 nt, Human
gggcgcuguggcucacaccugua

SEQ ID NO: 198604 - RNA, 32 nt, Human
gggcgcuguucuugcaaggauccucuguugaa

SEQ ID NO: 198605 - RNA, 32 nt, Human
gggcgcuugaguugcugagaugcaaggaauuc

SEQ ID NO: 198606 - RNA, 24 nt, Human
gggcgcuugccaagggccaggcug

SEQ ID NO: 198607 - RNA, 16 nt, Human
gggcggaacacacuug

SEQ ID NO: 198608 - RNA, 32 nt, Human
gggcggaagaggaggaggaggaggaggaaggg

SEQ ID NO: 198609 - RNA, 32 nt, Human
gggcggaaggaggagagguguugcgguuugcc

SEQ ID NO: 198610 - RNA, 32 nt, Human
gggcggaaggcagcugcacagagcagggccac

SEQ ID NO: 198611 - RNA, 32 nt, Human
gggcggaagggccuguggacagcccacccagg

SEQ ID NO: 198612 - RNA, 32 nt, Human
gggcggacaacaaacgacauuuccuuugggac

SEQ ID NO: 198613 - RNA, 17 nt, Human
gggcggaccgcggcagg

SEQ ID NO: 198614 - RNA, 32 nt, Human
gggcggagaacaagucggcuguggagaugcgg

SEQ ID NO: 198615 - RNA, 20 nt, Human
gggcggagacugcggggcgg

SEQ ID NO: 198616 - RNA, 32 nt, Human
gggcggagagagaaggaaggaggugguugugc

SEQ ID NO: 198617 - RNA, 19 nt, Human
gggcggagagagggggcag

SEQ ID NO: 198618 - RNA, 18 nt, Human
gggcggagagggggacag

SEQ ID NO: 198619 - RNA, 32 nt, Human
gggcggagcugaggacaggccuuggcuggucc

SEQ ID NO: 198620 - RNA, 24 nt, Human
gggcggaggagacccaggaagcug

SEQ ID NO: 198621 - RNA, 32 nt, Human
gggcggaggcggcggccagggaggaagcggag

SEQ ID NO: 198622 - RNA, 21 nt, Human
gggcggaggcggcgggagcgg

SEQ ID NO: 198623 - RNA, 21 nt, Human
gggcggaggcggcgggcgagg

SEQ ID NO: 198624 - RNA, 32 nt, Human
gggcggagggaggagagcagguuucagauccu

SEQ ID NO: 198625 - RNA, 32 nt, Human
gggcggaggggaggggcagggggcggugccac

SEQ ID NO: 198626 - RNA, 19 nt, Human
gggcggagguugcagugag

SEQ ID NO: 198627 - RNA, 32 nt, Human
gggcggagugcggggcagaggggugggggcug

SEQ ID NO: 198628 - RNA, 32 nt, Human
gggcggaguuuccaagauaacagcuauugugu

SEQ ID NO: 198629 - RNA, 22 nt, Human
gggcggaucaccugaggucagg

SEQ ID NO: 198630 - RNA, 20 nt, Human
gggcggaucacgaggucagg

SEQ ID NO: 198631 - RNA, 22 nt, Human
gggcggaucagcagaggucagg

SEQ ID NO: 198632 - RNA, 22 nt, Human
gggcggaucgcuugagcccagg

SEQ ID NO: 198633 - RNA, 22 nt, Human
gggcggaucgguugagcucagg

SEQ ID NO: 198634 - RNA, 32 nt, Human
gggcggaucucccuggccagcagggaugggag

SEQ ID NO: 198635 - RNA, 32 nt, Human
gggcggauggagccucaccacgccugaguccc

SEQ ID NO: 198636 - RNA, 22 nt, Human
gggcggauugccugagcucagg

SEQ ID NO: 198637 - RNA, 32 nt, Human
gggcggcagagcuggagugacgggagcuagug

SEQ ID NO: 198638 - RNA, 24 nt, Human
gggcggcagagugagacucugucu

SEQ ID NO: 198639 - RNA, 20 nt, Human
gggcggcagcagcagcuucc

SEQ ID NO: 198640 - RNA, 32 nt, Human
gggcggcaggaucagagugaaagcagaggcgu

SEQ ID NO: 198641 - RNA, 32 nt, Human
gggcggcagggcagugccacggcuggcugcag

SEQ ID NO: 198642 - RNA, 32 nt, Human
gggcggcaucggucagaagcaccaagacugag

SEQ ID NO: 198643 - RNA, 20 nt, Human
gggcggccacaauuucgcgc

SEQ ID NO: 198644 - RNA, 21 nt, Human
gggcggccacagauuacacug

SEQ ID NO: 198645 - RNA, 23 nt, Human
gggcggccagagcagcacagcug

SEQ ID NO: 198646 - RNA, 32 nt, Human
gggcggccauggagcugggcagcugcuucaag

SEQ ID NO: 198647 - RNA, 18 nt, Human
gggcggccauucgggcag

SEQ ID NO: 198648 - RNA, 32 nt, Human
gggcggcccagccucugagucccguggggccc

SEQ ID NO: 198649 - RNA, 32 nt, Human
gggcggccccuggacgaaggucugaaucccga

SEQ ID NO: 198650 - RNA, 19 nt, Human
gggcggcccggcaagcagc

SEQ ID NO: 198651 - RNA, 32 nt, Human
gggcggcccuggaggagacggaggccgcgggu

SEQ ID NO: 198652 - RNA, 18 nt, Human
gggcggcccuggccgggg

SEQ ID NO: 198653 - RNA, 23 nt, Human
gggcggccgaaaggggggcggug

SEQ ID NO: 198654 - RNA, 22 nt, Human
gggcggccgaggcaggaagcug

SEQ ID NO: 198655 - RNA, 32 nt, Human
gggcggccuacaaggcagcccagaaucuacug

SEQ ID NO: 198656 - RNA, 32 nt, Human
gggcggccugagaagauauuauggcugcugcc

SEQ ID NO: 198657 - RNA, 32 nt, Human
gggcggccugcaggaaccugcuccagguggac

SEQ ID NO: 198658 - RNA, 32 nt, Human
gggcggcgagauuguuuuuggugauuuggauu

SEQ ID NO: 198659 - RNA, 32 nt, Human
gggcggcgcacgagcaggagcgcccacggagc

SEQ ID NO: 198660 - RNA, 20 nt, Human
gggcggcgcgagggaggcug

SEQ ID NO: 198661 - RNA, 32 nt, Human
gggcggcggcgccgaggggaggagagcggccc

SEQ ID NO: 198662 - RNA, 32 nt, Human
gggcggcggcgccgggggcaugcgggugagcc

SEQ ID NO: 198663 - RNA, 32 nt, Human
gggcggcggcggccgaggcugaaggaagaugg

SEQ ID NO: 198664 - RNA, 21 nt, Human
gggcggcggcggcggcugcgg

SEQ ID NO: 198665 - RNA, 25 nt, Human
gggcggcggcggcggugggaggagg

SEQ ID NO: 198666 - RNA, 32 nt, Human
gggcggcggcgggguguguguccucuguuaag

SEQ ID NO: 198667 - RNA, 32 nt, Human
gggcggcggcuccugcuggaugcagcuccuug

SEQ ID NO: 198668 - RNA, 17 nt, Human
gggcggcgggccugcag

SEQ ID NO: 198669 - RNA, 32 nt, Human
gggcggcgggcggcgagcgggggaagauggcg

SEQ ID NO: 198670 - RNA, 32 nt, Human
gggcggcgggcggcugggucugugcauuucug

SEQ ID NO: 198671 - RNA, 32 nt, Human
gggcggcggugcagcccagcagccuggagaug

SEQ ID NO: 198672 - RNA, 32 nt, Human
gggcggcggugcuggagguugcggcggcggcu

SEQ ID NO: 198673 - RNA, 32 nt, Human
gggcggcgucacugcacccuccgccaggcucc

SEQ ID NO: 198674 - RNA, 32 nt, Human
gggcggcgugggaggcugggccgcagugagug

SEQ ID NO: 198675 - RNA, 32 nt, Human
gggcggcuauaaucccagccacucgggaggcu

SEQ ID NO: 198676 - RNA, 18 nt, Human
gggcggcucggggcccag

SEQ ID NO: 198677 - RNA, 32 nt, Human
gggcggcugaaagcuggaggggccaagacuga

SEQ ID NO: 198678 - RNA, 32 nt, Human
gggcggcugagacgcaagacuugcuugaaccc

SEQ ID NO: 198679 - RNA, 32 nt, Human
gggcggcugcagcugcugccuccacuucccua

SEQ ID NO: 198680 - RNA, 23 nt, Human
gggcggcugcguagcuguggucc

SEQ ID NO: 198681 - RNA, 32 nt, Human
gggcggcuggagccccugcacacacaauggaa

SEQ ID NO: 198682 - RNA, 32 nt, Human
gggcggcuggcgcgcacuacacgcuugggaac

SEQ ID NO: 198683 - RNA, 32 nt, Human
gggcggcugggcaggcggcaggaaugcugcgc

SEQ ID NO: 198684 - RNA, 32 nt, Human
gggcggcuugcuguccagccugugugggggcc

SEQ ID NO: 198685 - RNA, 23 nt, Human
gggcggcuugucccaggcugcug

SEQ ID NO: 198686 - RNA, 32 nt, Human
gggcgggaagcgaagaggcgggcgggccagcg

SEQ ID NO: 198687 - RNA, 18 nt, Human
gggcgggaaggggcacgg

SEQ ID NO: 198688 - RNA, 32 nt, Human
gggcgggaaggugcucccuggauauacucugu

SEQ ID NO: 198689 - RNA, 32 nt, Human
gggcgggacagcggcccccuggagggggcagu

SEQ ID NO: 198690 - RNA, 32 nt, Human
gggcgggacaugcacacaaugugaaacagaca

SEQ ID NO: 198691 - RNA, 32 nt, Human
gggcgggacuccucccuggggguggggcuccu

SEQ ID NO: 198692 - RNA, 32 nt, Human
gggcgggagaagaaugaauccucugagguccc

SEQ ID NO: 198693 - RNA, 32 nt, Human
gggcgggagagaggaagagaggggagcgcggu

SEQ ID NO: 198694 - RNA, 32 nt, Human
gggcgggagcgggggcgagggagcaggagcgg

SEQ ID NO: 198695 - RNA, 19 nt, Human
gggcgggagcucggcgcgg

SEQ ID NO: 198696 - RNA, 18 nt, Human
gggcgggaggaggcgcgg

SEQ ID NO: 198697 - RNA, 21 nt, Human
gggcgggaggaguggcagcgg

SEQ ID NO: 198698 - RNA, 32 nt, Human
gggcgggagggagggaguggaggagccgggga

SEQ ID NO: 198699 - RNA, 22 nt, Human
gggcgggagggcguaguggcgg

SEQ ID NO: 198700 - RNA, 32 nt, Human
gggcgggaggggcgcgccauggaggcgccggg

SEQ ID NO: 198701 - RNA, 32 nt, Human
gggcgggcacagaaccagccuccugaauucca

SEQ ID NO: 198702 - RNA, 18 nt, Human
gggcgggcagcagcuccc

SEQ ID NO: 198703 - RNA, 32 nt, Human
gggcgggcaggaagcccucucccaagaucgag

SEQ ID NO: 198704 - RNA, 32 nt, Human
gggcgggcaggaccccgucuccccaggugucg

SEQ ID NO: 198705 - RNA, 32 nt, Human
gggcgggcagggagguauuuauuuauuuauuc

SEQ ID NO: 198706 - RNA, 32 nt, Human
gggcgggcaguggauaguaagacuuacugcag

SEQ ID NO: 198707 - RNA, 32 nt, Human
gggcgggccaggacaucagcgccgaccuggac

SEQ ID NO: 198708 - RNA, 32 nt, Human
gggcgggccauggcggcgaaccugagccggaa

SEQ ID NO: 198709 - RNA, 32 nt, Human
gggcgggccucugggcagaggaugcaauggca

SEQ ID NO: 198710 - RNA, 20 nt, Human
gggcgggcgcaagggggcgg

SEQ ID NO: 198711 - RNA, 32 nt, Human
gggcgggcgcgccgggccuggggaaggggcgg

SEQ ID NO: 198712 - RNA, 21 nt, Human
gggcgggcgcggggggcgcgg

SEQ ID NO: 198713 - RNA, 32 nt, Human
gggcgggcggccgggagccauggagcgcggcc

SEQ ID NO: 198714 - RNA, 32 nt, Human
gggcgggcggcgcggaguagguggcggcggcc

SEQ ID NO: 198715 - RNA, 32 nt, Human
gggcgggcggggagcugccucggguggccucg

SEQ ID NO: 198716 - RNA, 24 nt, Human
gggcgggcggugggcggggcgcgg

SEQ ID NO: 198717 - RNA, 32 nt, Human
gggcgggcuccaggcuccagccagaacuuuac

SEQ ID NO: 198718 - RNA, 32 nt, Human
gggcgggcugaggagacgcucucuccacggcu

SEQ ID NO: 198719 - RNA, 32 nt, Human
gggcgggcuggcucuuuugcagcuugugauuu

SEQ ID NO: 198720 - RNA, 32 nt, Human
gggcgggcuuuuggcaggcagaucuuacuagu

SEQ ID NO: 198721 - RNA, 32 nt, Human
gggcggggaaauucauauccccuguucgucuc

SEQ ID NO: 198722 - RNA, 32 nt, Human
gggcggggaccgagcuagcggagccagcgcag

SEQ ID NO: 198723 - RNA, 32 nt, Human
gggcggggagaagggaaggacucgaugguacc

SEQ ID NO: 198724 - RNA, 32 nt, Human
gggcggggagaagggcuagcauccccauccaa

SEQ ID NO: 198725 - RNA, 32 nt, Human
gggcggggagagaggcgcgaggcggcagacac

SEQ ID NO: 198726 - RNA, 32 nt, Human
gggcggggagcacaggccguguccgcucgcuu

SEQ ID NO: 198727 - RNA, 32 nt, Human
gggcggggagcagacucgggggccaaggccca

SEQ ID NO: 198728 - RNA, 32 nt, Human
gggcggggagcggagcuuccuccucugagggc

SEQ ID NO: 198729 - RNA, 17 nt, Human
gggcggggagggggcag

SEQ ID NO: 198730 - RNA, 17 nt, Human
gggcggggaggggggug

SEQ ID NO: 198731 - RNA, 32 nt, Human
gggcggggcagauggcgagggagcggggcgag

SEQ ID NO: 198732 - RNA, 21 nt, Human
gggcggggcaggaccgaccuc

SEQ ID NO: 198733 - RNA, 17 nt, Human
gggcggggcaggggcag

SEQ ID NO: 198734 - RNA, 18 nt, Human
gggcggggccgggcccgg

SEQ ID NO: 198735 - RNA, 15 nt, Human
gggcggggccucuga

SEQ ID NO: 198736 - RNA, 32 nt, Human
gggcggggcgcgcggugacagcgcgggguugg

SEQ ID NO: 198737 - RNA, 32 nt, Human
gggcggggcugagagaggguaucagggacagg

SEQ ID NO: 198738 - RNA, 32 nt, Human
gggcggggcuucccugaccugaaggcgucggg

SEQ ID NO: 198739 - RNA, 32 nt, Human
gggcgggggcaggcauggacagcugggccaug

SEQ ID NO: 198740 - RNA, 16 nt, Human
gggcgggggcggggug

SEQ ID NO: 198741 - RNA, 32 nt, Human
gggcgggguagggaugcagcugugcugcauuc

SEQ ID NO: 198742 - RNA, 21 nt, Human
gggcgggguaggggagggcag

SEQ ID NO: 198743 - RNA, 17 nt, Human
gggcggggugggggcag

SEQ ID NO: 198744 - RNA, 32 nt, Human
gggcggggugugaggcgcugcggacgggguug

SEQ ID NO: 198745 - RNA, 32 nt, Human
gggcgggugccacaccugugcgggcaagggcg

SEQ ID NO: 198746 - RNA, 32 nt, Human
gggcgggugugcaggcucacaggcucuggaaa

SEQ ID NO: 198747 - RNA, 32 nt, Human
gggcgguagaggggagguugggguuggagcag

SEQ ID NO: 198748 - RNA, 32 nt, Human
gggcgguccgggguggugggaaagcgccaagc

SEQ ID NO: 198749 - RNA, 32 nt, Human
gggcggucggugcucccugcuuuccaggguuc

SEQ ID NO: 198750 - RNA, 32 nt, Human
gggcggugacauauuggaccagaagaggcacu

SEQ ID NO: 198751 - RNA, 21 nt, Human
gggcggugccggcgccggaga

SEQ ID NO: 198752 - RNA, 32 nt, Human
gggcgguggagguggugaggaggaucuuuaaa

SEQ ID NO: 198753 - RNA, 32 nt, Human
gggcggugggaggcggcggcggcggcggcgcu

SEQ ID NO: 198754 - RNA, 32 nt, Human
gggcggugggcagggugcagcagugagcaaaa

SEQ ID NO: 198755 - RNA, 32 nt, Human
gggcggugggugggaugguggagcagccuggg

SEQ ID NO: 198756 - RNA, 32 nt, Human
gggcgguguccaggggcgguuccagugaucag

SEQ ID NO: 198757 - RNA, 32 nt, Human
gggcggugugggcucuggaagugcauggucca

SEQ ID NO: 198758 - RNA, 32 nt, Human
gggcggugugugugccaugucacagcauggcc

SEQ ID NO: 198759 - RNA, 32 nt, Human
gggcgguucuagcucuucccacccucacugcg

SEQ ID NO: 198760 - RNA, 32 nt, Human
gggcgguuuaaccauuugaggcuuuuccuucu

SEQ ID NO: 198761 - RNA, 32 nt, Human
gggcguacggagguggcagcugugggaggagg

SEQ ID NO: 198762 - RNA, 23 nt, Human
gggcguaguggcacaugccugua

SEQ ID NO: 198763 - RNA, 23 nt, Human
gggcguaguggugcaugccugua

SEQ ID NO: 198764 - RNA, 32 nt, Human
gggcguaguuccuaauccccuuuccgggcagc

SEQ ID NO: 198765 - RNA, 16 nt, Human
gggcgucacguggcag

SEQ ID NO: 198766 - RNA, 18 nt, Human
gggcgucagcagcggcgg

SEQ ID NO: 198767 - RNA, 20 nt, Human
gggcgucagggauccugcug

SEQ ID NO: 198768 - RNA, 32 nt, Human
gggcgucaguuuucucuggcucgcuccccuuu

SEQ ID NO: 198769 - RNA, 20 nt, Human
gggcguccagaaggccaggc

SEQ ID NO: 198770 - RNA, 24 nt, Human
gggcgucccaagagccgcuggcug

SEQ ID NO: 198771 - RNA, 24 nt, Human
gggcgucccaagagcugcuggcug

SEQ ID NO: 198772 - RNA, 32 nt, Human
gggcgucccacuggcucugaucuugcuuccug

SEQ ID NO: 198773 - RNA, 24 nt, Human
gggcgucccgaaagcggcuggcug

SEQ ID NO: 198774 - RNA, 24 nt, Human
gggcgucccgagagcaguuggcug

SEQ ID NO: 198775 - RNA, 25 nt, Human
gggcgucccgagagccggcuggcug

SEQ ID NO: 198776 - RNA, 23 nt, Human
gggcgucccgagagcggcuggcu

SEQ ID NO: 198777 - RNA, 23 nt, Human
gggcgucccgagcgagcuggcug

SEQ ID NO: 198778 - RNA, 25 nt, Human
gggcgucccggaacacggcuggcug

SEQ ID NO: 198779 - RNA, 25 nt, Human
gggcgucccggaagauggcuggcug

SEQ ID NO: 198780 - RNA, 24 nt, Human
gggcgucccggaagcagcugguug

SEQ ID NO: 198781 - RNA, 32 nt, Human
gggcgucccucuccucucuccccagucucuag

SEQ ID NO: 198782 - RNA, 18 nt, Human
gggcguccgcgguggcug

SEQ ID NO: 198783 - RNA, 32 nt, Human
gggcgucuagggccucgcuucaagguuacuga

SEQ ID NO: 198784 - RNA, 20 nt, Human
gggcgucuccgcggcuacug

SEQ ID NO: 198785 - RNA, 32 nt, Human
gggcgucugcagcugcccugcccgugcccgcc

SEQ ID NO: 198786 - RNA, 32 nt, Human
gggcgucuugguugaaucuuuugcuacaaacc

SEQ ID NO: 198787 - RNA, 32 nt, Human
gggcgugagccaccgcgcccagcuucuggaaa

SEQ ID NO: 198788 - RNA, 32 nt, Human
gggcgugaggcgaggaaggagggguguuaggc

SEQ ID NO: 198789 - RNA, 32 nt, Human
gggcgugaugcugcuggcacugguuggguacc

SEQ ID NO: 198790 - RNA, 32 nt, Human
gggcgugcagcuccgaagcucuuuggaccuag

SEQ ID NO: 198791 - RNA, 32 nt, Human
gggcgugccucuaguuccagcuacucgggagu

SEQ ID NO: 198792 - RNA, 16 nt, Human
gggcgugcuccaggca

SEQ ID NO: 198793 - RNA, 32 nt, Human
gggcgugcucucucagacacacaacucagcua

SEQ ID NO: 198794 - RNA, 32 nt, Human
gggcgugcugggaucucgaggcggggccucug

SEQ ID NO: 198795 - RNA, 32 nt, Human
gggcguggaagagacuggccgcgcacaugcgu

SEQ ID NO: 198796 - RNA, 32 nt, Human
gggcguggaagcucugcaucccuucucccaua

SEQ ID NO: 198797 - RNA, 32 nt, Human
gggcguggagacggcgggggagguggaggugc

SEQ ID NO: 198798 - RNA, 32 nt, Human
gggcguggagagaauucuucuguggguccucu

SEQ ID NO: 198799 - RNA, 23 nt, Human
gggcguggaggcucaugccugua

SEQ ID NO: 198800 - RNA, 17 nt, Human
gggcguggaguggcgug

SEQ ID NO: 198801 - RNA, 23 nt, Human
gggcguggcggcacaugccugua

SEQ ID NO: 198802 - RNA, 32 nt, Human
gggcguggcggggaggaggaggaggacaagga

SEQ ID NO: 198803 - RNA, 32 nt, Human
gggcguggcugcugugucuguguguugugggg

SEQ ID NO: 198804 - RNA, 32 nt, Human
gggcguggcuuccuggugaugggaagggucuu

SEQ ID NO: 198805 - RNA, 32 nt, Human
gggcgugggaggcagaagacacugaagaauuu

SEQ ID NO: 198806 - RNA, 32 nt, Human
gggcgugggagggagagaggcggggaaaagca

SEQ ID NO: 198807 - RNA, 32 nt, Human
gggcguggggcgcgcugcggagcggagccgcg

SEQ ID NO: 198808 - RNA, 23 nt, Human
gggcgugguagcgggugccugua

SEQ ID NO: 198809 - RNA, 23 nt, Human
gggcgugguagcucaugccugua

SEQ ID NO: 198810 - RNA, 23 nt, Human
gggcguggugacacgugccugua

SEQ ID NO: 198811 - RNA, 32 nt, Human
gggcguggugcaugccuguaaucccagccacu

SEQ ID NO: 198812 - RNA, 32 nt, Human
gggcgugguggacugaaaggccccgaggucac

SEQ ID NO: 198813 - RNA, 32 nt, Human
gggcgugguggaggaaggggugcuggaacaau

SEQ ID NO: 198814 - RNA, 23 nt, Human
gggcgugguggcacacgccugua

SEQ ID NO: 198815 - RNA, 23 nt, Human
gggcgugguggcacacuccugua

SEQ ID NO: 198816 - RNA, 23 nt, Human
gggcgugguggcacaugccugua

SEQ ID NO: 198817 - RNA, 23 nt, Human
gggcgugguggcacauuccugua

SEQ ID NO: 198818 - RNA, 23 nt, Human
gggcgugguggcacgcaccugua

SEQ ID NO: 198819 - RNA, 23 nt, Human
gggcgugguggcacgcgccugua

SEQ ID NO: 198820 - RNA, 23 nt, Human
gggcgugguggcaggcaccugua

SEQ ID NO: 198821 - RNA, 23 nt, Human
gggcgugguggcaggcgccugua

SEQ ID NO: 198822 - RNA, 23 nt, Human
gggcgugguggcaggugccugua

SEQ ID NO: 198823 - RNA, 23 nt, Human
gggcgugguggcgcaugccugua

SEQ ID NO: 198824 - RNA, 23 nt, Human
gggcgugguggcgcgugccugug

SEQ ID NO: 198825 - RNA, 23 nt, Human
gggcgugguggcgggagccugua

SEQ ID NO: 198826 - RNA, 23 nt, Human
gggcgugguggcgggcaccugua

SEQ ID NO: 198827 - RNA, 23 nt, Human
gggcgugguggcgggccccugua

SEQ ID NO: 198828 - RNA, 23 nt, Human
gggcgugguggcgggcgccugua

SEQ ID NO: 198829 - RNA, 23 nt, Human
gggcgugguggcgggugccugua

SEQ ID NO: 198830 - RNA, 23 nt, Human
gggcgugguggcgugugccugua

SEQ ID NO: 198831 - RNA, 23 nt, Human
gggcgugguggcucaagccugua

SEQ ID NO: 198832 - RNA, 23 nt, Human
gggcgugguggcucacaccugua

SEQ ID NO: 198833 - RNA, 23 nt, Human
gggcgugguggcucacacuugua

SEQ ID NO: 198834 - RNA, 23 nt, Human
gggcgugguggcucacgccugua

SEQ ID NO: 198835 - RNA, 20 nt, Human
gggcgugguggcucaugccu

SEQ ID NO: 198836 - RNA, 23 nt, Human
gggcgugguggcucaugccugua

SEQ ID NO: 198837 - RNA, 23 nt, Human
gggcgugguggcuccugccugua

SEQ ID NO: 198838 - RNA, 23 nt, Human
gggcgugguggcucucgccugua

SEQ ID NO: 198839 - RNA, 23 nt, Human
gggcgugguggcuggugccugua

SEQ ID NO: 198840 - RNA, 32 nt, Human
gggcguggugggcacccguaaucccagcuacu

SEQ ID NO: 198841 - RNA, 32 nt, Human
gggcguggugggcgccuguaaucccagcugcu

SEQ ID NO: 198842 - RNA, 23 nt, Human
gggcgugguggugcaugccugua

SEQ ID NO: 198843 - RNA, 23 nt, Human
gggcgugguggugcucaccugua

SEQ ID NO: 198844 - RNA, 23 nt, Human
gggcgugguggugggcaccugua

SEQ ID NO: 198845 - RNA, 23 nt, Human
gggcguggugguggguacuugua

SEQ ID NO: 198846 - RNA, 23 nt, Human
gggcguggugguucacgccugua

SEQ ID NO: 198847 - RNA, 32 nt, Human
gggcgugugcaggaguuugacaguggccugcu

SEQ ID NO: 198848 - RNA, 18 nt, Human
gggcgugugcucugcggg

SEQ ID NO: 198849 - RNA, 32 nt, Human
gggcgugugguuuccuguugucucaccuuuaa

SEQ ID NO: 198850 - RNA, 32 nt, Human
gggcgugugucgucccagcuacuugugaggcu

SEQ ID NO: 198851 - RNA, 32 nt, Human
gggcguucagggucccucagcugcagugugaa

SEQ ID NO: 198852 - RNA, 32 nt, Human
gggcguugagcacagcgcgggccaggccgaac

SEQ ID NO: 198853 - RNA, 32 nt, Human
gggcguugccuggguucuugggagagagggga

SEQ ID NO: 198854 - RNA, 21 nt, Human
gggcguuuaggacugggcguc

SEQ ID NO: 198855 - RNA, 32 nt, Human
gggcguuugagaccagccuggucaacauggcg

SEQ ID NO: 198856 - RNA, 32 nt, Human
gggcguuuguuuuauucuugguguuuucagug

SEQ ID NO: 198857 - RNA, 32 nt, Human
gggcuaaacaacugggacucuggagagucugu

SEQ ID NO: 198858 - RNA, 32 nt, Human
gggcuaaagaggaaggaggggaggaggucgcu

SEQ ID NO: 198859 - RNA, 32 nt, Human
gggcuaaagaggaggacgaagaaaagcagagc

SEQ ID NO: 198860 - RNA, 23 nt, Human
gggcuaaagcaggagggacgacc

SEQ ID NO: 198861 - RNA, 20 nt, Human
gggcuaaagucauccaguga

SEQ ID NO: 198862 - RNA, 31 nt, Human
gggcuaaaguugugucuuaugccaagcggaa

SEQ ID NO: 198863 - RNA, 32 nt, Human
gggcuaaaugcugcuaucauaggcauccauau

SEQ ID NO: 198864 - RNA, 32 nt, Human
gggcuaaaugugacaaaccgagaagauggcca

SEQ ID NO: 198865 - RNA, 32 nt, Human
gggcuaacauaguccucacacagggcugagaa

SEQ ID NO: 198866 - RNA, 32 nt, Human
gggcuaaccaauauuuucaaaagaacuucauc

SEQ ID NO: 198867 - RNA, 32 nt, Human
gggcuaaccagcuccugauggccugagccagg

SEQ ID NO: 198868 - RNA, 32 nt, Human
gggcuaacccccagaauacugguaggggccaa

SEQ ID NO: 198869 - RNA, 32 nt, Human
gggcuaaggcaggcacacaguggcggagaaga

SEQ ID NO: 198870 - RNA, 32 nt, Human
gggcuaagggcugcucaguuuccuucagcggg

SEQ ID NO: 198871 - RNA, 32 nt, Human
gggcuaagggggaggguuucaaagggagcgca

SEQ ID NO: 198872 - RNA, 27 nt, Human
gggcuaaguauuaggccuucccaggga

SEQ ID NO: 198873 - RNA, 32 nt, Human
gggcuaagucagccaggcaggcugucaggccc

SEQ ID NO: 198874 - RNA, 32 nt, Human
gggcuacaaaggacccuaacugugggacucag

SEQ ID NO: 198875 - RNA, 20 nt, Human
gggcuacacaguaguuccaa

SEQ ID NO: 198876 - RNA, 24 nt, Human
gggcuacagagcgagacucuaccu

SEQ ID NO: 198877 - RNA, 24 nt, Human
gggcuacagagugaaacucugucu

SEQ ID NO: 198878 - RNA, 24 nt, Human
gggcuacagagugagacuccaucu

SEQ ID NO: 198879 - RNA, 24 nt, Human
gggcuacagagugagacuccgucu

SEQ ID NO: 198880 - RNA, 32 nt, Human
gggcuacagaugucugcucucuggaccccacg

SEQ ID NO: 198881 - RNA, 32 nt, Human
gggcuacagcuaugcgccaccaugcccagcua

SEQ ID NO: 198882 - RNA, 32 nt, Human
gggcuacaggcagcuggagaaaggggcccagc

SEQ ID NO: 198883 - RNA, 32 nt, Human
gggcuacaggcauauaccaccaugcccaacua

SEQ ID NO: 198884 - RNA, 32 nt, Human
gggcuacagucucuuguccuggacccuguagg

SEQ ID NO: 198885 - RNA, 32 nt, Human
gggcuacauagugagaccacaucucuacuaga

SEQ ID NO: 198886 - RNA, 32 nt, Human
gggcuacauccagcaacauccucaaggucuuc

SEQ ID NO: 198887 - RNA, 32 nt, Human
gggcuacauccuggcucggugggaucugacga

SEQ ID NO: 198888 - RNA, 32 nt, Human
gggcuacaugacgaaacuccaucucuaucaaa

SEQ ID NO: 198889 - RNA, 32 nt, Human
gggcuacccaagcagaaaccccacauuucaag

SEQ ID NO: 198890 - RNA, 32 nt, Human
gggcuacccacugcuuacucagggaccaggca

SEQ ID NO: 198891 - RNA, 27 nt, Human
gggcuaccuaggacccagcccagcuug

SEQ ID NO: 198892 - RNA, 28 nt, Human
gggcuaccuagggacccagcucaacuug

SEQ ID NO: 198893 - RNA, 32 nt, Human
gggcuaccugggugguugaggggacugacauu

SEQ ID NO: 198894 - RNA, 32 nt, Human
gggcuaccuguuaggaacaugaauaccuuaca

SEQ ID NO: 198895 - RNA, 32 nt, Human
gggcuaccuucuccgauuggauuugcauuugu

SEQ ID NO: 198896 - RNA, 32 nt, Human
gggcuacgagcugcucauccagaaguuccuca

SEQ ID NO: 198897 - RNA, 32 nt, Human
gggcuacucagccucagguagcuggugccaga

SEQ ID NO: 198898 - RNA, 32 nt, Human
gggcuacuccacccuguccaccauggaccgca

SEQ ID NO: 198899 - RNA, 32 nt, Human
gggcuacugcagggaccugagccacaucgccg

SEQ ID NO: 198900 - RNA, 32 nt, Human
gggcuacugcagggaccugagccacaucgcug

SEQ ID NO: 198901 - RNA, 32 nt, Human
gggcuacugcagggaccugagccacauugcca

SEQ ID NO: 198902 - RNA, 32 nt, Human
gggcuagaacucuccaaggucuugcccccggc

SEQ ID NO: 198903 - RNA, 32 nt, Human
gggcuagagaaguaaagaucagcuggaaguca

SEQ ID NO: 198904 - RNA, 32 nt, Human
gggcuagagacaagcaccagccugcaguggag

SEQ ID NO: 198905 - RNA, 20 nt, Human
gggcuagagagcaccugaca

SEQ ID NO: 198906 - RNA, 32 nt, Human
gggcuagagaggacuaaggaaaacagagagag

SEQ ID NO: 198907 - RNA, 32 nt, Human
gggcuagagcaggucuucaucaugccuugucu

SEQ ID NO: 198908 - RNA, 32 nt, Human
gggcuagaggacagagaaagagaauagaauga

SEQ ID NO: 198909 - RNA, 32 nt, Human
gggcuagagguggaggaggcaguccugggaau

SEQ ID NO: 198910 - RNA, 32 nt, Human
gggcuagcagaggccggcccuggccaucggga

SEQ ID NO: 198911 - RNA, 17 nt, Human
gggcuagcagcagaggc

SEQ ID NO: 198912 - RNA, 32 nt, Human
gggcuagccucaaacuccugggcucaagcgau

SEQ ID NO: 198913 - RNA, 19 nt, Human
gggcuagcuucucacagca

SEQ ID NO: 198914 - RNA, 22 nt, Human
gggcuaggaaaaggcgcagugg

SEQ ID NO: 198915 - RNA, 26 nt, Human
gggcuaggaaugccgccauccgggga

SEQ ID NO: 198916 - RNA, 18 nt, Human
gggcuaggaggcucgggc

SEQ ID NO: 198917 - RNA, 32 nt, Human
gggcuaggaugagagacagagggugugauggu

SEQ ID NO: 198918 - RNA, 24 nt, Human
gggcuaggcagugugaccuaggga

SEQ ID NO: 198919 - RNA, 32 nt, Human
gggcuaggcugcagccugccuccuggggacuc

SEQ ID NO: 198920 - RNA, 22 nt, Human
gggcuaggcuggagcccaggga

SEQ ID NO: 198921 - RNA, 32 nt, Human
gggcuagggacugagggcuacuuuuggaaaga

SEQ ID NO: 198922 - RNA, 32 nt, Human
gggcuagggagguggcuggagcuucugcccug

SEQ ID NO: 198923 - RNA, 21 nt, Human
gggcuagggcagaagccugug

SEQ ID NO: 198924 - RNA, 19 nt, Human
gggcuaggggagggggcug

SEQ ID NO: 198925 - RNA, 32 nt, Human
gggcuagguguggcucaugccuguaaucccag

SEQ ID NO: 198926 - RNA, 32 nt, Human
gggcuaggugugguggcucaggccuguaaucc

SEQ ID NO: 198927 - RNA, 32 nt, Human
gggcuagucucgaacuccugaccucaggugau

SEQ ID NO: 198928 - RNA, 32 nt, Human
gggcuagucucgaacuccugaccugaagcgau

SEQ ID NO: 198929 - RNA, 32 nt, Human
gggcuagucuguucuucccggacaucuucugg

SEQ ID NO: 198930 - RNA, 32 nt, Human
gggcuaucgagaggagcucacugugggauggg

SEQ ID NO: 198931 - RNA, 32 nt, Human
gggcuaucugagggugugaugggugaagcugu

SEQ ID NO: 198932 - RNA, 32 nt, Human
gggcuaucuugcucccccuuccacugugggca

SEQ ID NO: 198933 - RNA, 32 nt, Human
gggcuaugaaggaguccucuuaaguuugauag

SEQ ID NO: 198934 - RNA, 32 nt, Human
gggcuaugacacccucuuuggggcucuauggu

SEQ ID NO: 198935 - RNA, 32 nt, Human
gggcuaugcaccugcaggcacguguguaugca

SEQ ID NO: 198936 - RNA, 32 nt, Human
gggcuaugccuaggcaaacuacuaacaugcau

SEQ ID NO: 198937 - RNA, 32 nt, Human
gggcuauggaaagggagacuguuucagaggac

SEQ ID NO: 198938 - RNA, 32 nt, Human
gggcuaugucccuucuggaggcucaagggaug

SEQ ID NO: 198939 - RNA, 32 nt, Human
gggcuaugucccuucuggaggcuuaagggaug

SEQ ID NO: 198940 - RNA, 32 nt, Human
gggcuauguuuuucauucuuuugaggcugguu

SEQ ID NO: 198941 - RNA, 32 nt, Human
gggcuauuccucuccacccagaaggcugggaa

SEQ ID NO: 198942 - RNA, 31 nt, Human
gggcuauugcuucucccuugcuucaaagaau

SEQ ID NO: 198943 - RNA, 32 nt, Human
gggcucaaaagaugacacgcgccagagcugga

SEQ ID NO: 198944 - RNA, 32 nt, Human
gggcucaaacuaaauucaaagaaguacuuuau

SEQ ID NO: 198945 - RNA, 32 nt, Human
gggcucaaagauccucccgccuuggucuccca

SEQ ID NO: 198946 - RNA, 23 nt, Human
gggcucaagagauccuccugccu

SEQ ID NO: 198947 - RNA, 23 nt, Human
gggcucaagaggccacuuaggga

SEQ ID NO: 198948 - RNA, 32 nt, Human
gggcucaagaugaaugggagggagagauuuga

SEQ ID NO: 198949 - RNA, 21 nt, Human
gggcucaagcaacucuuccac

SEQ ID NO: 198950 - RNA, 23 nt, Human
gggcucaagcaagccuccugccu

SEQ ID NO: 198951 - RNA, 23 nt, Human
gggcucaagcaauccuccugccu

SEQ ID NO: 198952 - RNA, 23 nt, Human
gggcucaagcaauccuccugucu

SEQ ID NO: 198953 - RNA, 23 nt, Human
gggcucaagcaauucuucugccu

SEQ ID NO: 198954 - RNA, 23 nt, Human
gggcucaagcaauuuuccugccu

SEQ ID NO: 198955 - RNA, 32 nt, Human
gggcucaagccuggcccuggcccgcagcacac

SEQ ID NO: 198956 - RNA, 32 nt, Human
gggcucaagccuguauuccagcacuuugggag

SEQ ID NO: 198957 - RNA, 23 nt, Human
gggcucaagcgacccuccugccu

SEQ ID NO: 198958 - RNA, 23 nt, Human
gggcucaagcgauccucccaccu

SEQ ID NO: 198959 - RNA, 23 nt, Human
gggcucaagcgauccuccugccu

SEQ ID NO: 198960 - RNA, 23 nt, Human
gggcucaagcgauccuccuggcu

SEQ ID NO: 198961 - RNA, 23 nt, Human
gggcucaagcgauccuucugccu

SEQ ID NO: 198962 - RNA, 22 nt, Human
gggcucaaggauccuccugccu

SEQ ID NO: 198963 - RNA, 23 nt, Human
gggcucaagggauccuccugccu

SEQ ID NO: 198964 - RNA, 21 nt, Human
gggcucaagugauucuuccac

SEQ ID NO: 198965 - RNA, 32 nt, Human
gggcucaagugucaaaggaggcucccuaccuu

SEQ ID NO: 198966 - RNA, 22 nt, Human
gggcucaaguucucauuccauu

SEQ ID NO: 198967 - RNA, 32 nt, Human
gggcucaaugauucuccugucucagccuccca

SEQ ID NO: 198968 - RNA, 22 nt, Human
gggcucacaacuucucuucacu

SEQ ID NO: 198969 - RNA, 21 nt, Human
gggcucacaccuguaauccca

SEQ ID NO: 198970 - RNA, 32 nt, Human
gggcucacaccuguaaucccagcacuuuggga

SEQ ID NO: 198971 - RNA, 32 nt, Human
gggcucacacuggccuccagggcugugcaacu

SEQ ID NO: 198972 - RNA, 32 nt, Human
gggcucacagucugguagaggaagcacaugaa

SEQ ID NO: 198973 - RNA, 32 nt, Human
gggcucacaucuccuuccucuggccaguccac

SEQ ID NO: 198974 - RNA, 32 nt, Human
gggcucaccucccugguucaagcgauuguccc

SEQ ID NO: 198975 - RNA, 32 nt, Human
gggcucaccuguguuuccucaguggcuccacc

SEQ ID NO: 198976 - RNA, 32 nt, Human
gggcucacgccugaaaucccagcacuuuggga

SEQ ID NO: 198977 - RNA, 32 nt, Human
gggcucacgccugcaaucccagagcuuuggga

SEQ ID NO: 198978 - RNA, 32 nt, Human
gggcucacgccuguaaucccaacacuuuggga

SEQ ID NO: 198979 - RNA, 32 nt, Human
gggcucacgccuguaaucccagcacuuuggga

SEQ ID NO: 198980 - RNA, 32 nt, Human
gggcucacgccuguaaucucagcacuuuggga

SEQ ID NO: 198981 - RNA, 32 nt, Human
gggcucacugauaaaacucaucagucccaccc

SEQ ID NO: 198982 - RNA, 32 nt, Human
gggcucacugcaaccuccgccucccugguuca

SEQ ID NO: 198983 - RNA, 32 nt, Human
gggcucacugcaaccuccuccuccuggauuca

SEQ ID NO: 198984 - RNA, 32 nt, Human
gggcucacugcaaccucugccucccggguucc

SEQ ID NO: 198985 - RNA, 32 nt, Human
gggcucacugcaaccucugccuuccagguuca

SEQ ID NO: 198986 - RNA, 32 nt, Human
gggcucacugcaaccuucaccuccagguucaa

SEQ ID NO: 198987 - RNA, 32 nt, Human
gggcucacugcaagcuccggcucccggguuca

SEQ ID NO: 198988 - RNA, 32 nt, Human
gggcucacugcagccucaaccucccagguuca

SEQ ID NO: 198989 - RNA, 32 nt, Human
gggcucacugcagccuugaccucccaggcuca

SEQ ID NO: 198990 - RNA, 32 nt, Human
gggcucacugcaggcuguggagaggucaugcu

SEQ ID NO: 198991 - RNA, 32 nt, Human
gggcucacugcauagacaccccauaccccagg

SEQ ID NO: 198992 - RNA, 32 nt, Human
gggcucagaagcaggggccacagcuggaguaa

SEQ ID NO: 198993 - RNA, 32 nt, Human
gggcucagacaccagcaacagccucuugggau

SEQ ID NO: 198994 - RNA, 32 nt, Human
gggcucagagagucccagcccuaaggguguga

SEQ ID NO: 198995 - RNA, 32 nt, Human
gggcucagcaaugccauuucaguggcuuccca

SEQ ID NO: 198996 - RNA, 32 nt, Human
gggcucagcccaggcagccagcuuugggcuga

SEQ ID NO: 198997 - RNA, 22 nt, Human
gggcucagcggggacagcuccu

SEQ ID NO: 198998 - RNA, 19 nt, Human
gggcucagcucaguccccu

SEQ ID NO: 198999 - RNA, 32 nt, Human
gggcucagcucaguccccuugucuguccuccc

SEQ ID NO: 199000 - RNA, 24 nt, Human
gggcucagcuuggcugccugccuc

SEQ ID NO: 199001 - RNA, 20 nt, Human
gggcucaggacccagcccag

SEQ ID NO: 199002 - RNA, 32 nt, Human
gggcucaggaggucuggaucugugaugagauc

SEQ ID NO: 199003 - RNA, 32 nt, Human
gggcucaggaggucuggaucugugaugagaug

SEQ ID NO: 199004 - RNA, 32 nt, Human
gggcucaggagucggagaccagccugggcaac

SEQ ID NO: 199005 - RNA, 17 nt, Human
gggcucaggaguggggu

SEQ ID NO: 199006 - RNA, 25 nt, Human
gggcucaggcccugggcucugaacc

SEQ ID NO: 199007 - RNA, 32 nt, Human
gggcucaggcuggugugggaugcagccggccg

SEQ ID NO: 199008 - RNA, 28 nt, Human
gggcucagggcugcugccuuccuguccu

SEQ ID NO: 199009 - RNA, 20 nt, Human
gggcucagggggccacaagg

SEQ ID NO: 199010 - RNA, 32 nt, Human
gggcucagggggccacaaggaggcaggucggg

SEQ ID NO: 199011 - RNA, 32 nt, Human
gggcucaggguuggccagcuugcagaggagca

SEQ ID NO: 199012 - RNA, 32 nt, Human
gggcucagguuccaagacucagcugccuaauc

SEQ ID NO: 199013 - RNA, 32 nt, Human
gggcucagucaccccgagagugcacagugcua

SEQ ID NO: 199014 - RNA, 19 nt, Human
gggcucagugcagggaggc

SEQ ID NO: 199015 - RNA, 17 nt, Human
gggcucaguggaggcag

SEQ ID NO: 199016 - RNA, 23 nt, Human
gggcucaguggcucacaccugua

SEQ ID NO: 199017 - RNA, 23 nt, Human
gggcucaguggcucaugccugua

SEQ ID NO: 199018 - RNA, 25 nt, Human
gggcucaguggggcuucucuucccu

SEQ ID NO: 199019 - RNA, 32 nt, Human
gggcucauaccuguaaucccggcacuuuggga

SEQ ID NO: 199020 - RNA, 32 nt, Human
gggcucaucacuggccuggggagggcuugaca

SEQ ID NO: 199021 - RNA, 32 nt, Human
gggcucaugccuguaaucccagcacuuuggga

SEQ ID NO: 199022 - RNA, 24 nt, Human
gggcucauggcuccaggcggcagg

SEQ ID NO: 199023 - RNA, 25 nt, Human
gggcucaugugauccucccaccuca

SEQ ID NO: 199024 - RNA, 32 nt, Human
gggcucaugugucuuccgucuuuuggaaggag

SEQ ID NO: 199025 - RNA, 24 nt, Human
gggcucauucuucuuggcucacca

SEQ ID NO: 199026 - RNA, 32 nt, Human
gggcucauugcaaccuccgccucccggcuuca

SEQ ID NO: 199027 - RNA, 32 nt, Human
gggcucauugcaaccucugccucccggguuca

SEQ ID NO: 199028 - RNA, 20 nt, Human
gggcuccaacuccuccuugc

SEQ ID NO: 199029 - RNA, 32 nt, Human
gggcuccaacuggguacagccugggugcaguu

SEQ ID NO: 199030 - RNA, 32 nt, Human
gggcuccaagccaggaaaggugaacagaaacc

SEQ ID NO: 199031 - RNA, 32 nt, Human
gggcuccaagccccagcguggggaagggcccu

SEQ ID NO: 199032 - RNA, 32 nt, Human
gggcuccacaaggcagcucagacuuggcaagg

SEQ ID NO: 199033 - RNA, 25 nt, Human
gggcuccacagcgguccggcggcgg

SEQ ID NO: 199034 - RNA, 32 nt, Human
gggcuccaccagacccugaugcugcuacguau

SEQ ID NO: 199035 - RNA, 32 nt, Human
gggcuccaccagcuccacauccugggcagaca

SEQ ID NO: 199036 - RNA, 32 nt, Human
gggcuccaccugcucacccgccugcagaucug

SEQ ID NO: 199037 - RNA, 21 nt, Human
gggcuccacucgucugccccu

SEQ ID NO: 199038 - RNA, 32 nt, Human
gggcuccagaaacuaccugggcucggccgacc

SEQ ID NO: 199039 - RNA, 22 nt, Human
gggcuccagacacaccugaaca

SEQ ID NO: 199040 - RNA, 32 nt, Human
gggcuccagagucccucggucucaggucaugg

SEQ ID NO: 199041 - RNA, 32 nt, Human
gggcuccagcagcuccagcccagagcacucgg

SEQ ID NO: 199042 - RNA, 32 nt, Human
gggcuccagcaggaguggaggcuggucugggc

SEQ ID NO: 199043 - RNA, 32 nt, Human
gggcuccagcaggaguggaggcuggucugggg

SEQ ID NO: 199044 - RNA, 32 nt, Human
gggcuccagcugugacccagacuccgccagga

SEQ ID NO: 199045 - RNA, 32 nt, Human
gggcuccagcuuaaaggagagcagaggggguc

SEQ ID NO: 199046 - RNA, 32 nt, Human
gggcuccaggcggcugcggcagcucugguaac

SEQ ID NO: 199047 - RNA, 32 nt, Human
gggcuccagggacuggaguguaaugcucggug

SEQ ID NO: 199048 - RNA, 32 nt, Human
gggcuccagggugggacagggugggcgggggu

SEQ ID NO: 199049 - RNA, 32 nt, Human
gggcuccaguguuuagagaaggacagucagag

SEQ ID NO: 199050 - RNA, 32 nt, Human
gggcuccaugucugcuuagaggcugccaugcu

SEQ ID NO: 199051 - RNA, 32 nt, Human
gggcuccauugauucauuccuuccucacucaa

SEQ ID NO: 199052 - RNA, 32 nt, Human
gggcuccauuucuuggacuuaaaaugcauuau

SEQ ID NO: 199053 - RNA, 32 nt, Human
gggcucccaaaguacugggauuacaggcauga

SEQ ID NO: 199054 - RNA, 32 nt, Human
gggcucccaaagugcugggauuacagacguga

SEQ ID NO: 199055 - RNA, 32 nt, Human
gggcucccaaagugcugggauuacagauguga

SEQ ID NO: 199056 - RNA, 32 nt, Human
gggcucccaaagugcugggauuacaggcguga

SEQ ID NO: 199057 - RNA, 32 nt, Human
gggcucccaaagugcugggauuauagguguga

SEQ ID NO: 199058 - RNA, 32 nt, Human
gggcucccaaaguguugggauuacaggcauga

SEQ ID NO: 199059 - RNA, 32 nt, Human
gggcucccaaaguguugggauuacaggcguga

SEQ ID NO: 199060 - RNA, 32 nt, Human
gggcucccaaaguguugggauuacaggugugu

SEQ ID NO: 199061 - RNA, 32 nt, Human
gggcucccaacaugcuggcauuacagguauga

SEQ ID NO: 199062 - RNA, 23 nt, Human
gggcucccacagcacccugccuc

SEQ ID NO: 199063 - RNA, 32 nt, Human
gggcucccacugucugccccagggugcggagu

SEQ ID NO: 199064 - RNA, 32 nt, Human
gggcucccacuugccaugggacucgcagcugg

SEQ ID NO: 199065 - RNA, 32 nt, Human
gggcucccaguucaggaugggccacagggcgu

SEQ ID NO: 199066 - RNA, 32 nt, Human
gggcucccauccucaucucucuccuugacugg

SEQ ID NO: 199067 - RNA, 32 nt, Human
gggcucccauucugguagagggagacagucua

SEQ ID NO: 199068 - RNA, 32 nt, Human
gggcuccccagccugucagacccuugcuggcu

SEQ ID NO: 199069 - RNA, 32 nt, Human
gggcuccccagccuguggggcuggcuuccuug

SEQ ID NO: 199070 - RNA, 22 nt, Human
gggcucccccugcccagcgcuc

SEQ ID NO: 199071 - RNA, 21 nt, Human
gggcucccccugccugccucu

SEQ ID NO: 199072 - RNA, 32 nt, Human
gggcucccccuucauggccucugcaccuccac

SEQ ID NO: 199073 - RNA, 19 nt, Human
gggcuccccgcagcccccu

SEQ ID NO: 199074 - RNA, 32 nt, Human
gggcuccccucgggcccagcguggcgcagggg

SEQ ID NO: 199075 - RNA, 32 nt, Human
gggcuccccugcuccuuucccuucccuguacu

SEQ ID NO: 199076 - RNA, 28 nt, Human
gggcuccccugugcugccuagcucgucu

SEQ ID NO: 199077 - RNA, 32 nt, Human
gggcucccuucccaccucucucacuccuugaa

SEQ ID NO: 199078 - RNA, 20 nt, Human
gggcuccgagagggggcgac

SEQ ID NO: 199079 - RNA, 19 nt, Human
gggcuccgcagaggagcag

SEQ ID NO: 199080 - RNA, 32 nt, Human
gggcuccgccacugcaugcucccgccggaccg

SEQ ID NO: 199081 - RNA, 32 nt, Human
gggcuccgcuuuggggaggggcagcagguuua

SEQ ID NO: 199082 - RNA, 32 nt, Human
gggcuccggagagcagcaggaagcacucccag

SEQ ID NO: 199083 - RNA, 32 nt, Human
gggcuccggccugggauguuucugaacuuugg

SEQ ID NO: 199084 - RNA, 32 nt, Human
gggcuccgggcggcagaggcugaggugucagg

SEQ ID NO: 199085 - RNA, 21 nt, Human
gggcuccggucccggcggcag

SEQ ID NO: 199086 - RNA, 32 nt, Human
gggcuccuaaagugcugggauuacaggcguga

SEQ ID NO: 199087 - RNA, 32 nt, Human
gggcuccuaacaguguaacuuauugugucccc

SEQ ID NO: 199088 - RNA, 32 nt, Human
gggcuccuagcggggaaaaggaaggggauaac

SEQ ID NO: 199089 - RNA, 32 nt, Human
gggcuccuaucaggcugggugugcgagugucc

SEQ ID NO: 199090 - RNA, 32 nt, Human
gggcuccucacuugccaguaggggcggccggg

SEQ ID NO: 199091 - RNA, 32 nt, Human
gggcuccucauugcucccaucugccucugcug

SEQ ID NO: 199092 - RNA, 32 nt, Human
gggcuccuccacccuuuugucuucauacugca

SEQ ID NO: 199093 - RNA, 32 nt, Human
gggcuccuccaggacaagggcacacaacuggu

SEQ ID NO: 199094 - RNA, 32 nt, Human
gggcuccucuacugcacaagggccagucccca

SEQ ID NO: 199095 - RNA, 32 nt, Human
gggcuccucuacuggaucuacacucuguccca

SEQ ID NO: 199096 - RNA, 32 nt, Human
gggcuccucucuucccaguaggggcggccggg

SEQ ID NO: 199097 - RNA, 32 nt, Human
gggcuccucucuucccaguaggggcggcuggg

SEQ ID NO: 199098 - RNA, 32 nt, Human
gggcuccugacuguagcaggugguagggcugg

SEQ ID NO: 199099 - RNA, 32 nt, Human
gggcuccugaugcuggccaggaguggugcuag

SEQ ID NO: 199100 - RNA, 20 nt, Human
gggcuccugauuucucuuca

SEQ ID NO: 199101 - RNA, 18 nt, Human
gggcuccugcauccagcu

SEQ ID NO: 199102 - RNA, 32 nt, Human
gggcuccugccugagguccucagaaucccacu

SEQ ID NO: 199103 - RNA, 32 nt, Human
gggcuccugccugcuccuccuguguuagcucu

SEQ ID NO: 199104 - RNA, 19 nt, Human
gggcuccuggcagcccccu

SEQ ID NO: 199105 - RNA, 32 nt, Human
gggcuccuggcaggaggaccuggaguuuucag

SEQ ID NO: 199106 - RNA, 32 nt, Human
gggcuccuggcuccugccccuugcacaccacc

SEQ ID NO: 199107 - RNA, 32 nt, Human
gggcuccugggaacagggcucagaggcaggcg

SEQ ID NO: 199108 - RNA, 32 nt, Human
gggcuccuggggacccaggacaccuggccacg

SEQ ID NO: 199109 - RNA, 32 nt, Human
gggcuccuggggacgaggaguguggggcaccu

SEQ ID NO: 199110 - RNA, 32 nt, Human
gggcuccuggggagccacuggggagggggugg

SEQ ID NO: 199111 - RNA, 32 nt, Human
gggcuccuguagucccagcuacucaggaggcu

SEQ ID NO: 199112 - RNA, 32 nt, Human
gggcuccuguagucccagcuacucaggauucu

SEQ ID NO: 199113 - RNA, 32 nt, Human
gggcuccuguagucccagcuacuugggaggcu

SEQ ID NO: 199114 - RNA, 32 nt, Human
gggcuccugucucacacuaucucccugcccuc

SEQ ID NO: 199115 - RNA, 32 nt, Human
gggcuccuugcuggugggcaguggguuguaaa

SEQ ID NO: 199116 - RNA, 32 nt, Human
gggcucgaaccugaauguucucuucgcugugg

SEQ ID NO: 199117 - RNA, 32 nt, Human
gggcucgagcggcggcggccucaggccggggg

SEQ ID NO: 199118 - RNA, 32 nt, Human
gggcucgagggcccugagggagcggcaccuag

SEQ ID NO: 199119 - RNA, 32 nt, Human
gggcucgagucccggcccgagcgcggcgucgg

SEQ ID NO: 199120 - RNA, 21 nt, Human
gggcucgaucuuggcucacca

SEQ ID NO: 199121 - RNA, 19 nt, Human
gggcucgccugcucagcuc

SEQ ID NO: 199122 - RNA, 32 nt, Human
gggcucgcggagccaggucuccaccucugggc

SEQ ID NO: 199123 - RNA, 32 nt, Human
gggcucgcucugagaggacgcggcggcagcgg

SEQ ID NO: 199124 - RNA, 32 nt, Human
gggcucggccgcccccucccacaucagucucc

SEQ ID NO: 199125 - RNA, 19 nt, Human
gggcucggcgggggcgcgg

SEQ ID NO: 199126 - RNA, 32 nt, Human
gggcucgggacaacuucugggguggggugcaa

SEQ ID NO: 199127 - RNA, 20 nt, Human
gggcucgggacuggccacca

SEQ ID NO: 199128 - RNA, 32 nt, Human
gggcucgggagaguccuugaguacggagaccg

SEQ ID NO: 199129 - RNA, 18 nt, Human
gggcucgggcuccggcuc

SEQ ID NO: 199130 - RNA, 23 nt, Human
gggcucgggcuccgggggcggcg

SEQ ID NO: 199131 - RNA, 21 nt, Human
gggcucgggcucuggggccgc

SEQ ID NO: 199132 - RNA, 19 nt, Human
gggcucgggcuuugucacc

SEQ ID NO: 199133 - RNA, 22 nt, Human
gggcucggggcagggacucacc

SEQ ID NO: 199134 - RNA, 32 nt, Human
gggcucggggugcuuugggugccuggaauugg

SEQ ID NO: 199135 - RNA, 32 nt, Human
gggcucguacuagaaagccacaggagaggucg

SEQ ID NO: 199136 - RNA, 19 nt, Human
gggcucgucaguagggcug

SEQ ID NO: 199137 - RNA, 20 nt, Human
gggcucgugcaggagaacug

SEQ ID NO: 199138 - RNA, 32 nt, Human
gggcucgugcugugcuucauucaccucuccau

SEQ ID NO: 199139 - RNA, 32 nt, Human
gggcucuaacagugcuuacugcagccuugugu

SEQ ID NO: 199140 - RNA, 32 nt, Human
gggcucuacagggcagcagagcagagcaaaag

SEQ ID NO: 199141 - RNA, 32 nt, Human
gggcucuaccuccccuggccugggugaguugg

SEQ ID NO: 199142 - RNA, 32 nt, Human
gggcucuacugaggccucuccccugggggcuc

SEQ ID NO: 199143 - RNA, 32 nt, Human
gggcucuagggagggggcuguggcugcugggg

SEQ ID NO: 199144 - RNA, 32 nt, Human
gggcucucacaugggguaggggagccauacuc

SEQ ID NO: 199145 - RNA, 32 nt, Human
gggcucuccagaaacggagcccaucuaaccaa

SEQ ID NO: 199146 - RNA, 32 nt, Human
gggcucucccccaggauuuugguguuuugacu

SEQ ID NO: 199147 - RNA, 32 nt, Human
gggcucuccuccucgcggcggaugggugaccu

SEQ ID NO: 199148 - RNA, 32 nt, Human
gggcucucggggaaggugucgggggcccccua

SEQ ID NO: 199149 - RNA, 32 nt, Human
gggcucucucagaaacuucaggagauguuaga

SEQ ID NO: 199150 - RNA, 32 nt, Human
gggcucucuccacgauucuggcuguuugccca

SEQ ID NO: 199151 - RNA, 32 nt, Human
gggcucucucccccagcuucuacaccugggcu

SEQ ID NO: 199152 - RNA, 22 nt, Human
gggcucucuccugggcucagca

SEQ ID NO: 199153 - RNA, 32 nt, Human
gggcucucugcucucuccuuagggagcucgag

SEQ ID NO: 199154 - RNA, 32 nt, Human
gggcucucuugggcuuuauccaugucuuuaga

SEQ ID NO: 199155 - RNA, 32 nt, Human
gggcucugaaacaugagugugcaucagaauca

SEQ ID NO: 199156 - RNA, 20 nt, Human
gggcucugacccaagugggg

SEQ ID NO: 199157 - RNA, 32 nt, Human
gggcucugacucugaucccucccagggagccu

SEQ ID NO: 199158 - RNA, 32 nt, Human
gggcucugagaaaaacuggagcugaucucaag

SEQ ID NO: 199159 - RNA, 32 nt, Human
gggcucugagagguggagucgggguggcagcg

SEQ ID NO: 199160 - RNA, 32 nt, Human
gggcucugagccaggggaggggagggagcgag

SEQ ID NO: 199161 - RNA, 26 nt, Human
gggcucugaggagugggcgcugggag

SEQ ID NO: 199162 - RNA, 18 nt, Human
gggcucugaugggggcug

SEQ ID NO: 199163 - RNA, 32 nt, Human
gggcucugcaauuccccucugcugcugucccu

SEQ ID NO: 199164 - RNA, 21 nt, Human
gggcucugccuccuaccaaga

SEQ ID NO: 199165 - RNA, 32 nt, Human
gggcucugcuacugcuggcgcucaucacagcc

SEQ ID NO: 199166 - RNA, 32 nt, Human
gggcucugcucggaaaucguccuggcccaacu

SEQ ID NO: 199167 - RNA, 32 nt, Human
gggcucugcucucuccccgccugcuuccccuc

SEQ ID NO: 199168 - RNA, 32 nt, Human
gggcucugcugagaaggaaggcagcccaggag

SEQ ID NO: 199169 - RNA, 32 nt, Human
gggcucugcuggccaaauggggccacagacca

SEQ ID NO: 199170 - RNA, 32 nt, Human
gggcucugcuucugccaggaccacaccgaggg

SEQ ID NO: 199171 - RNA, 32 nt, Human
gggcucuggaaaccacauggcuucaccugucc

SEQ ID NO: 199172 - RNA, 32 nt, Human
gggcucuggcauuugacuaccuuacuuugagu

SEQ ID NO: 199173 - RNA, 32 nt, Human
gggcucuggccaacccucagaaacccucacaa

SEQ ID NO: 199174 - RNA, 32 nt, Human
gggcucuggcucagguugcagacagcugagaa

SEQ ID NO: 199175 - RNA, 21 nt, Human
gggcucugggaggggagagac

SEQ ID NO: 199176 - RNA, 32 nt, Human
gggcucugggcgcuccuggcuccaguccggug

SEQ ID NO: 199177 - RNA, 32 nt, Human
gggcucuggggaggggaaggcagcaagccugu

SEQ ID NO: 199178 - RNA, 32 nt, Human
gggcucugggggcagagguggcaggaauggug

SEQ ID NO: 199179 - RNA, 19 nt, Human
gggcucuggggguggggug

SEQ ID NO: 199180 - RNA, 24 nt, Human
gggcucugggugacgcaugccucu

SEQ ID NO: 199181 - RNA, 32 nt, Human
gggcucugggugugugcgcuuggcgugcaggg

SEQ ID NO: 199182 - RNA, 32 nt, Human
gggcucuggguugggguaggggaagggagggu

SEQ ID NO: 199183 - RNA, 23 nt, Human
gggcucuggucuccacagauggc

SEQ ID NO: 199184 - RNA, 32 nt, Human
gggcucugucagccgccaccucugggaaagag

SEQ ID NO: 199185 - RNA, 32 nt, Human
gggcucuguccaggugccuggccagucagcag

SEQ ID NO: 199186 - RNA, 32 nt, Human
gggcucugugggcucccccugcuccacaggua

SEQ ID NO: 199187 - RNA, 32 nt, Human
gggcucugugggcucccccugggcucuguggg

SEQ ID NO: 199188 - RNA, 32 nt, Human
gggcucuguguccagcucucauggcccagggc

SEQ ID NO: 199189 - RNA, 32 nt, Human
gggcucuguuuuauugacauuuuccuuccuug

SEQ ID NO: 199190 - RNA, 32 nt, Human
gggcucuucagcccuccugggagcucaguggc

SEQ ID NO: 199191 - RNA, 22 nt, Human
gggcucuucaguuaaaaagggg

SEQ ID NO: 199192 - RNA, 32 nt, Human
gggcucuucccgccggguccucccuccccaga

SEQ ID NO: 199193 - RNA, 32 nt, Human
gggcucuuccgccugugguucccaccaugcuc

SEQ ID NO: 199194 - RNA, 32 nt, Human
gggcucuucuacugccagggcuuggcuccacc

SEQ ID NO: 199195 - RNA, 23 nt, Human
gggcucuucuggcagggggucug

SEQ ID NO: 199196 - RNA, 32 nt, Human
gggcucuugccuggccuaggccugguuccugg

SEQ ID NO: 199197 - RNA, 25 nt, Human
gggcucuugcgucuccagcucacca

SEQ ID NO: 199198 - RNA, 32 nt, Human
gggcucuuggaugagcugcucuccauucuaga

SEQ ID NO: 199199 - RNA, 32 nt, Human
gggcucuuguuggccgcacguggcagugcagc

SEQ ID NO: 199200 - RNA, 18 nt, Human
gggcucuuuggcugaaga

SEQ ID NO: 199201 - RNA, 32 nt, Human
gggcugaaaucauuuguucuccuucacauuga

SEQ ID NO: 199202 - RNA, 32 nt, Human
gggcugaaaugagccagugccccaggucugcu

SEQ ID NO: 199203 - RNA, 32 nt, Human
gggcugaacagcugcauucgagacugguggag

SEQ ID NO: 199204 - RNA, 20 nt, Human
gggcugaagcgaaggggggu

SEQ ID NO: 199205 - RNA, 32 nt, Human
gggcugaaggaggcgggggugguguagggccc

SEQ ID NO: 199206 - RNA, 32 nt, Human
gggcugaaggaucaugggugccaagucucugc

SEQ ID NO: 199207 - RNA, 32 nt, Human
gggcugaaggcaggggccacucacaggccagg

SEQ ID NO: 199208 - RNA, 32 nt, Human
gggcugaagguugaagaggugagcacggccaa

SEQ ID NO: 199209 - RNA, 32 nt, Human
gggcugacagugagaggaugcagcccgguguc

SEQ ID NO: 199210 - RNA, 32 nt, Human
gggcugaccacagccugagaaagaaggucugg

SEQ ID NO: 199211 - RNA, 32 nt, Human
gggcugaccccagcuuccaggggacugucacu

SEQ ID NO: 199212 - RNA, 19 nt, Human
gggcugacccgagcuccag

SEQ ID NO: 199213 - RNA, 21 nt, Human
gggcugacccuucagcaacgg

SEQ ID NO: 199214 - RNA, 20 nt, Human
gggcugacgauggggggcug

SEQ ID NO: 199215 - RNA, 19 nt, Human
gggcugacgcuaacaggag

SEQ ID NO: 199216 - RNA, 21 nt, Human
gggcugacgucgcgcugggaa

SEQ ID NO: 199217 - RNA, 32 nt, Human
gggcugacuccaggaccuccaggaugaggcag

SEQ ID NO: 199218 - RNA, 32 nt, Human
gggcugacugggugggggcagcucccagcgag

SEQ ID NO: 199219 - RNA, 26 nt, Human
gggcugacuuggcucugggaucacca

SEQ ID NO: 199220 - RNA, 19 nt, Human
gggcugagaaaggggcagg

SEQ ID NO: 199221 - RNA, 32 nt, Human
gggcugagagcauguaccagaucaagaaugag

SEQ ID NO: 199222 - RNA, 22 nt, Human
gggcugagaggggagggggcgg

SEQ ID NO: 199223 - RNA, 32 nt, Human
gggcugagaggguggacgaguucagguuuguu

SEQ ID NO: 199224 - RNA, 32 nt, Human
gggcugagcagcacuggcauugaaaaauauaa

SEQ ID NO: 199225 - RNA, 32 nt, Human
gggcugagcccagccuccaucuuugccucuca

SEQ ID NO: 199226 - RNA, 32 nt, Human
gggcugagccuuccuuaugaugacuuuguucu

SEQ ID NO: 199227 - RNA, 17 nt, Human
gggcugagcgcacucuu

SEQ ID NO: 199228 - RNA, 32 nt, Human
gggcugaggaagcacagcagcaucuucaaaca

SEQ ID NO: 199229 - RNA, 32 nt, Human
gggcugaggagagaaaagggugauuagcgugg

SEQ ID NO: 199230 - RNA, 32 nt, Human
gggcugaggaggaggagcagggggugcugcgu

SEQ ID NO: 199231 - RNA, 32 nt, Human
gggcugaggaggguucagaggauuguggucuc

SEQ ID NO: 199232 - RNA, 32 nt, Human
gggcugaggcaccugcagucacccacacucug

SEQ ID NO: 199233 - RNA, 20 nt, Human
gggcugaggcagguggauca

SEQ ID NO: 199234 - RNA, 32 nt, Human
gggcugaggcaggugguagggcuggcacuuau

SEQ ID NO: 199235 - RNA, 32 nt, Human
gggcugaggccacagccgcaucuugucaggcu

SEQ ID NO: 199236 - RNA, 32 nt, Human
gggcugaggccugcuggacagauggcuggcca

SEQ ID NO: 199237 - RNA, 32 nt, Human
gggcugaggccugcuuugugucggcagggucu

SEQ ID NO: 199238 - RNA, 32 nt, Human
gggcugaggcuggacaauggugugaacccagg

SEQ ID NO: 199239 - RNA, 20 nt, Human
gggcugagggcaauucuguc

SEQ ID NO: 199240 - RNA, 32 nt, Human
gggcugagggccuggaggugggcucgcacccc

SEQ ID NO: 199241 - RNA, 32 nt, Human
gggcugagggccuuguggaggauggucggugg

SEQ ID NO: 199242 - RNA, 32 nt, Human
gggcugaggggcugcaaggagaaguugcaucc

SEQ ID NO: 199243 - RNA, 32 nt, Human
gggcugaggggugggagggagggcagagcucu

SEQ ID NO: 199244 - RNA, 32 nt, Human
gggcugaggucucccugguagaacuaagggag

SEQ ID NO: 199245 - RNA, 32 nt, Human
gggcugagguuagaaggugcagagcguggaag

SEQ ID NO: 199246 - RNA, 32 nt, Human
gggcugagucacccuccaugcccacccgucau

SEQ ID NO: 199247 - RNA, 18 nt, Human
gggcugaguggggggucc

SEQ ID NO: 199248 - RNA, 32 nt, Human
gggcugaguggggucgggugaggcagagguca

SEQ ID NO: 199249 - RNA, 21 nt, Human
gggcugaguucuuccagguca

SEQ ID NO: 199250 - RNA, 32 nt, Human
gggcugauaccuccuugcucuuccuagaugcc

SEQ ID NO: 199251 - RNA, 32 nt, Human
gggcugauccugccucagcuguguggccaugu

SEQ ID NO: 199252 - RNA, 32 nt, Human
gggcugaucucgaacuccugaccucaagugau

SEQ ID NO: 199253 - RNA, 32 nt, Human
gggcugauuguauuuaccuucuaccucuuggc

SEQ ID NO: 199254 - RNA, 19 nt, Human
gggcugcaaagcggggggc

SEQ ID NO: 199255 - RNA, 32 nt, Human
gggcugcaagcuggaggguggugcaggccuug

SEQ ID NO: 199256 - RNA, 32 nt, Human
gggcugcaagggcuguuccuccaccuuucugu

SEQ ID NO: 199257 - RNA, 32 nt, Human
gggcugcaaugccaccagagaacgugauguca

SEQ ID NO: 199258 - RNA, 32 nt, Human
gggcugcacagcccugaggggucagugcuggg

SEQ ID NO: 199259 - RNA, 32 nt, Human
gggcugcaccugcaucuucugaucaccuggcc

SEQ ID NO: 199260 - RNA, 32 nt, Human
gggcugcaccugccaggaccuaauguucuuag

SEQ ID NO: 199261 - RNA, 32 nt, Human
gggcugcacgcagggacuugcccacaucuucu

SEQ ID NO: 199262 - RNA, 18 nt, Human
gggcugcacgcggcuggc

SEQ ID NO: 199263 - RNA, 32 nt, Human
gggcugcacgcuccccuccauccccaucggcc

SEQ ID NO: 199264 - RNA, 32 nt, Human
gggcugcacucagcaggcugcuugagugggag

SEQ ID NO: 199265 - RNA, 32 nt, Human
gggcugcacugagcuugucuucaggaaaccag

SEQ ID NO: 199266 - RNA, 23 nt, Human
gggcugcacuggaacaacacaga

SEQ ID NO: 199267 - RNA, 20 nt, Human
gggcugcacugugagcgcug

SEQ ID NO: 199268 - RNA, 32 nt, Human
gggcugcagaccugcacagccugucacagcau

SEQ ID NO: 199269 - RNA, 32 nt, Human
gggcugcagagccuggaccaaugcccagaauc

SEQ ID NO: 199270 - RNA, 32 nt, Human
gggcugcagaguggucagggcacggaaagcca

SEQ ID NO: 199271 - RNA, 18 nt, Human
gggcugcagcacgcggug

SEQ ID NO: 199272 - RNA, 32 nt, Human
gggcugcagcaugggcagaaaacgcugaccug

SEQ ID NO: 199273 - RNA, 32 nt, Human
gggcugcagggcugcgggcgcuugguucggcc

SEQ ID NO: 199274 - RNA, 32 nt, Human
gggcugcagggugcuugcuucggaacaagcuc

SEQ ID NO: 199275 - RNA, 32 nt, Human
gggcugcagugagccgagauugugccacugca

SEQ ID NO: 199276 - RNA, 32 nt, Human
gggcugcaugcgaaugugguuugcuaagaagg

SEQ ID NO: 199277 - RNA, 25 nt, Human
gggcugcauggaccucagggggcug

SEQ ID NO: 199278 - RNA, 32 nt, Human
gggcugccaaaaaggccaccugugcuucacca

SEQ ID NO: 199279 - RNA, 32 nt, Human
gggcugccaccagcucuccacccuccugguuc

SEQ ID NO: 199280 - RNA, 32 nt, Human
gggcugccagaagagagagaggcagagagcag

SEQ ID NO: 199281 - RNA, 19 nt, Human
gggcugccagccucaggca

SEQ ID NO: 199282 - RNA, 32 nt, Human
gggcugccaggaacaggaggcgugggaaacuc

SEQ ID NO: 199283 - RNA, 18 nt, Human
gggcugccaggcuggcug

SEQ ID NO: 199284 - RNA, 24 nt, Human
gggcugcccagcuggacagauggc

SEQ ID NO: 199285 - RNA, 22 nt, Human
gggcugcccccacccgaaagac

SEQ ID NO: 199286 - RNA, 20 nt, Human
gggcugccccgcagaggggc

SEQ ID NO: 199287 - RNA, 32 nt, Human
gggcugccccucagagaugguggggagggucu

SEQ ID NO: 199288 - RNA, 32 nt, Human
gggcugcccuccugcuggacacucaggacagc

SEQ ID NO: 199289 - RNA, 32 nt, Human
gggcugcccugagucugggacuucugccucca

SEQ ID NO: 199290 - RNA, 32 nt, Human
gggcugcccugugguccagucugaggcccuuu

SEQ ID NO: 199291 - RNA, 18 nt, Human
gggcugccgaggggaggc

SEQ ID NO: 199292 - RNA, 32 nt, Human
gggcugccgcaggcacacaggccagagcuucg

SEQ ID NO: 199293 - RNA, 18 nt, Human
gggcugccgggggcgcgg

SEQ ID NO: 199294 - RNA, 24 nt, Human
gggcugccguggcugcagaugcca

SEQ ID NO: 199295 - RNA, 32 nt, Human
gggcugccucaagggguuguccacgcagguug

SEQ ID NO: 199296 - RNA, 32 nt, Human
gggcugccucagucuucagugcugauuguguc

SEQ ID NO: 199297 - RNA, 32 nt, Human
gggcugccucugaauccuuucucuaaccagag

SEQ ID NO: 199298 - RNA, 32 nt, Human
gggcugccuggcagagagccuugcuguuuaca

SEQ ID NO: 199299 - RNA, 32 nt, Human
gggcugcgacgcccucccugguggagcaacag

SEQ ID NO: 199300 - RNA, 19 nt, Human
gggcugcgagccgggaggc

SEQ ID NO: 199301 - RNA, 20 nt, Human
gggcugcgagcgcggagggc

SEQ ID NO: 199302 - RNA, 19 nt, Human
gggcugcgaggucaggcug

SEQ ID NO: 199303 - RNA, 19 nt, Human
gggcugcgcaggcgggaag

SEQ ID NO: 199304 - RNA, 20 nt, Human
gggcugcgccuccggggcug

SEQ ID NO: 199305 - RNA, 20 nt, Human
gggcugcgcgcccaggucug

SEQ ID NO: 199306 - RNA, 19 nt, Human
gggcugcgcgcuggcgcug

SEQ ID NO: 199307 - RNA, 20 nt, Human
gggcugcgcgcugggagcug

SEQ ID NO: 199308 - RNA, 18 nt, Human
gggcugcgcggcggaggc

SEQ ID NO: 199309 - RNA, 22 nt, Human
gggcugcgcgggccgcccaggg

SEQ ID NO: 199310 - RNA, 19 nt, Human
gggcugcgcggggccgggc

SEQ ID NO: 199311 - RNA, 32 nt, Human
gggcugcgcgucuccagccucugcacacacau

SEQ ID NO: 199312 - RNA, 20 nt, Human
gggcugcgcuagcugggcug

SEQ ID NO: 199313 - RNA, 32 nt, Human
gggcugcgcuggggagguuguggugcagcuga

SEQ ID NO: 199314 - RNA, 19 nt, Human
gggcugcgcuguccagcug

SEQ ID NO: 199315 - RNA, 19 nt, Human
gggcugcggagaggcgggc

SEQ ID NO: 199316 - RNA, 21 nt, Human
gggcugcggaggggcgcgcug

SEQ ID NO: 199317 - RNA, 20 nt, Human
gggcugcggcaguaaaguug

SEQ ID NO: 199318 - RNA, 19 nt, Human
gggcugcggccccgggcug

SEQ ID NO: 199319 - RNA, 19 nt, Human
gggcugcggccccgggucc

SEQ ID NO: 199320 - RNA, 20 nt, Human
gggcugcggccuaggggucc

SEQ ID NO: 199321 - RNA, 21 nt, Human
gggcugcggcggcggcggcug

SEQ ID NO: 199322 - RNA, 19 nt, Human
gggcugcggcggcugaggc

SEQ ID NO: 199323 - RNA, 20 nt, Human
gggcugcggcguacaggcug

SEQ ID NO: 199324 - RNA, 19 nt, Human
gggcugcggcucgaggcca

SEQ ID NO: 199325 - RNA, 20 nt, Human
gggcugcggcucugaggcug

SEQ ID NO: 199326 - RNA, 20 nt, Human
gggcugcggcuguggggcug

SEQ ID NO: 199327 - RNA, 32 nt, Human
gggcugcggcuuguacugccucuuguccugua

SEQ ID NO: 199328 - RNA, 17 nt, Human
gggcugcgggaggcggc

SEQ ID NO: 199329 - RNA, 32 nt, Human
gggcugcgggaggcggggguuggcgugccuga

SEQ ID NO: 199330 - RNA, 17 nt, Human
gggcugcgggcagaggc

SEQ ID NO: 199331 - RNA, 19 nt, Human
gggcugcgggcggcggggc

SEQ ID NO: 199332 - RNA, 19 nt, Human
gggcugcgggcuccaggca

SEQ ID NO: 199333 - RNA, 21 nt, Human
gggcugcggggaagaggggcu

SEQ ID NO: 199334 - RNA, 19 nt, Human
gggcugcggggcagggcug

SEQ ID NO: 199335 - RNA, 20 nt, Human
gggcugcggggucaggggcu

SEQ ID NO: 199336 - RNA, 19 nt, Human
gggcugcggguggggcgcg

SEQ ID NO: 199337 - RNA, 19 nt, Human
gggcugcggguuagggggc

SEQ ID NO: 199338 - RNA, 32 nt, Human
gggcugcgguaggccagcggugggcuggcggu

SEQ ID NO: 199339 - RNA, 21 nt, Human
gggcugcggugcccagaggcu

SEQ ID NO: 199340 - RNA, 17 nt, Human
gggcugcgguggaggcu

SEQ ID NO: 199341 - RNA, 21 nt, Human
gggcugcguacgucagagcug

SEQ ID NO: 199342 - RNA, 24 nt, Human
gggcugcguacgugcaggaggcgc

SEQ ID NO: 199343 - RNA, 19 nt, Human
gggcugcguaggggagcug

SEQ ID NO: 199344 - RNA, 18 nt, Human
gggcugcgucaaggucug

SEQ ID NO: 199345 - RNA, 21 nt, Human
gggcugcgucugcaaaggggc

SEQ ID NO: 199346 - RNA, 19 nt, Human
gggcugcgugauguggcug

SEQ ID NO: 199347 - RNA, 21 nt, Human
gggcugcgugcacacuggcug

SEQ ID NO: 199348 - RNA, 18 nt, Human
gggcugcgugcaguaagc

SEQ ID NO: 199349 - RNA, 20 nt, Human
gggcugcgugcagugggagc

SEQ ID NO: 199350 - RNA, 19 nt, Human
gggcugcgugcauugaggc

SEQ ID NO: 199351 - RNA, 18 nt, Human
gggcugcgugccgggggc

SEQ ID NO: 199352 - RNA, 32 nt, Human
gggcugcguggaacaggcgcaggugugugaug

SEQ ID NO: 199353 - RNA, 18 nt, Human
gggcugcguggcacagcu

SEQ ID NO: 199354 - RNA, 21 nt, Human
gggcugcguggggagggggcu

SEQ ID NO: 199355 - RNA, 20 nt, Human
gggcugcgugugggaggcug

SEQ ID NO: 199356 - RNA, 19 nt, Human
gggcugcguuugggagcug

SEQ ID NO: 199357 - RNA, 32 nt, Human
gggcugcuacagugaccaggacuuucuggcca

SEQ ID NO: 199358 - RNA, 32 nt, Human
gggcugcucacuucccaucaccucucacagcc

SEQ ID NO: 199359 - RNA, 20 nt, Human
gggcugcucagccucaggca

SEQ ID NO: 199360 - RNA, 32 nt, Human
gggcugcucagggcagcugccgaagguggagc

SEQ ID NO: 199361 - RNA, 22 nt, Human
gggcugcucagugccugccucu

SEQ ID NO: 199362 - RNA, 32 nt, Human
gggcugcucagugccugccucugacaaaauua

SEQ ID NO: 199363 - RNA, 25 nt, Human
gggcugcuccccaacaccugccucu

SEQ ID NO: 199364 - RNA, 32 nt, Human
gggcugcuccccugggcccagcuccccucccu

SEQ ID NO: 199365 - RNA, 32 nt, Human
gggcugcucccucuccgugcucugccuggugg

SEQ ID NO: 199366 - RNA, 32 nt, Human
gggcugcucggaggcagaggcagcaagaggcg

SEQ ID NO: 199367 - RNA, 31 nt, Human
gggcugcucggagucaccuguuggaauggac

SEQ ID NO: 199368 - RNA, 32 nt, Human
gggcugcucucgaacuccugaccucaggugau

SEQ ID NO: 199369 - RNA, 20 nt, Human
gggcugcucucgaggggggc

SEQ ID NO: 199370 - RNA, 25 nt, Human
gggcugcucuuaagcagggggccug

SEQ ID NO: 199371 - RNA, 19 nt, Human
gggcugcugaggagaccug

SEQ ID NO: 199372 - RNA, 32 nt, Human
gggcugcugcagcugcaugggugccugcugcu

SEQ ID NO: 199373 - RNA, 19 nt, Human
gggcugcugccuggggggc

SEQ ID NO: 199374 - RNA, 31 nt, Human
gggcugcugcuacuggagccugcguggaagg

SEQ ID NO: 199375 - RNA, 32 nt, Human
gggcugcugcucccccuucuuucugucuuucc

SEQ ID NO: 199376 - RNA, 21 nt, Human
gggcugcuggaggccagacug

SEQ ID NO: 199377 - RNA, 32 nt, Human
gggcugcuggcuccugcccugcuuccugugau

SEQ ID NO: 199378 - RNA, 32 nt, Human
gggcugcugggagcguagccacgucugcucca

SEQ ID NO: 199379 - RNA, 32 nt, Human
gggcugcuggugggaaaugggagccagggcag

SEQ ID NO: 199380 - RNA, 19 nt, Human
gggcugcugugcaggcggc

SEQ ID NO: 199381 - RNA, 32 nt, Human
gggcugcuucuccaccucccccaaacccugcu

SEQ ID NO: 199382 - RNA, 32 nt, Human
gggcugcuugaguguggccccaccuccuggga

SEQ ID NO: 199383 - RNA, 32 nt, Human
gggcugcuuugcuuugggagguucuuguuggu

SEQ ID NO: 199384 - RNA, 19 nt, Human
gggcuggaaaagccggcgc

SEQ ID NO: 199385 - RNA, 32 nt, Human
gggcuggaagaggauggcagaggcugcugggc

SEQ ID NO: 199386 - RNA, 17 nt, Human
gggcuggaagaggcggc

SEQ ID NO: 199387 - RNA, 21 nt, Human
gggcuggaagaggcggcggcg

SEQ ID NO: 199388 - RNA, 22 nt, Human
gggcuggaaggaagucacggug

SEQ ID NO: 199389 - RNA, 32 nt, Human
gggcuggaaggacaggccugcccaugcaggag

SEQ ID NO: 199390 - RNA, 22 nt, Human
gggcuggaauaggaagccagug

SEQ ID NO: 199391 - RNA, 32 nt, Human
gggcuggaaugauuucagcucacugcaaccuu

SEQ ID NO: 199392 - RNA, 32 nt, Human
gggcuggacaaggaagcagagagcagaagaaa

SEQ ID NO: 199393 - RNA, 32 nt, Human
gggcuggacacgguuguggauccagagaagag

SEQ ID NO: 199394 - RNA, 21 nt, Human
gggcuggacaggacacacucu

SEQ ID NO: 199395 - RNA, 19 nt, Human
gggcuggacagggcaaggu

SEQ ID NO: 199396 - RNA, 21 nt, Human
gggcuggacgaggaggcgacg

SEQ ID NO: 199397 - RNA, 19 nt, Human
gggcuggacggggacgagg

SEQ ID NO: 199398 - RNA, 32 nt, Human
gggcuggacucuuccugcaggaaaggcugggc

SEQ ID NO: 199399 - RNA, 32 nt, Human
gggcuggacuggacgccucuccccgcccggcc

SEQ ID NO: 199400 - RNA, 32 nt, Human
gggcuggagaaggcagacccacccuuaaucug

SEQ ID NO: 199401 - RNA, 32 nt, Human
gggcuggagacucagcguguguuuggcaaccg

SEQ ID NO: 199402 - RNA, 32 nt, Human
gggcuggagagggagagaggagcggaagcuga

SEQ ID NO: 199403 - RNA, 32 nt, Human
gggcuggagagggggaggccuucgggaagagg

SEQ ID NO: 199404 - RNA, 32 nt, Human
gggcuggagaggguggcaggcagugguugugg

SEQ ID NO: 199405 - RNA, 32 nt, Human
gggcuggagcccagagagggagugagaugaca

SEQ ID NO: 199406 - RNA, 32 nt, Human
gggcuggagcccagcaggagccgggaacugcc

SEQ ID NO: 199407 - RNA, 32 nt, Human
gggcuggagccgcgggaccagcgccugaggug

SEQ ID NO: 199408 - RNA, 32 nt, Human
gggcuggagcggggaucugaugaaaaggucag

SEQ ID NO: 199409 - RNA, 32 nt, Human
gggcuggaggcagagaguguaagugugcagcc

SEQ ID NO: 199410 - RNA, 32 nt, Human
gggcuggaggccagaggugucagcaacacugu

SEQ ID NO: 199411 - RNA, 23 nt, Human
gggcuggaggccggcgucgggga

SEQ ID NO: 199412 - RNA, 32 nt, Human
gggcuggaggcuggggcaggaacauggauccu

SEQ ID NO: 199413 - RNA, 32 nt, Human
gggcuggagggcugugugugguccuucccugg

SEQ ID NO: 199414 - RNA, 32 nt, Human
gggcuggaggggaagaggggccccgaggaugg

SEQ ID NO: 199415 - RNA, 32 nt, Human
gggcuggaggggcaguguugcuguucauagau

SEQ ID NO: 199416 - RNA, 20 nt, Human
gggcuggagggggcagagug

SEQ ID NO: 199417 - RNA, 17 nt, Human
gggcuggaggggggcag

SEQ ID NO: 199418 - RNA, 32 nt, Human
gggcuggaggugcugguagcugaggggacggg

SEQ ID NO: 199419 - RNA, 32 nt, Human
gggcuggaggugggggugggggcagccaaguc

SEQ ID NO: 199420 - RNA, 32 nt, Human
gggcuggaguucagguccugccccagagaaau

SEQ ID NO: 199421 - RNA, 32 nt, Human
gggcuggauagcuucccagcacccucagagcc

SEQ ID NO: 199422 - RNA, 21 nt, Human
gggcuggaucggcgaccggug

SEQ ID NO: 199423 - RNA, 32 nt, Human
gggcuggaucugggggcuagcagugaguaccc

SEQ ID NO: 199424 - RNA, 25 nt, Human
gggcuggauggaguggggugcggug

SEQ ID NO: 199425 - RNA, 19 nt, Human
gggcuggaugggacgcagg

SEQ ID NO: 199426 - RNA, 32 nt, Human
gggcuggauuuggagccaggguccagguugua

SEQ ID NO: 199427 - RNA, 32 nt, Human
gggcuggcaacuuagagguggggagcagagaa

SEQ ID NO: 199428 - RNA, 22 nt, Human
gggcuggcaaggcccccggagg

SEQ ID NO: 199429 - RNA, 32 nt, Human
gggcuggcaaggggauauucagcucugcaaag

SEQ ID NO: 199430 - RNA, 32 nt, Human
gggcuggcaccugggcacagugcuuccaggua

SEQ ID NO: 199431 - RNA, 20 nt, Human
gggcuggcaccugggcgcgg

SEQ ID NO: 199432 - RNA, 32 nt, Human
gggcuggcacucgauaccucuggcaagaggau

SEQ ID NO: 199433 - RNA, 20 nt, Human
gggcuggcagaggacaggug

SEQ ID NO: 199434 - RNA, 19 nt, Human
gggcuggcagaggggacag

SEQ ID NO: 199435 - RNA, 32 nt, Human
gggcuggccaucgccucgcacagcgugugccu

SEQ ID NO: 199436 - RNA, 21 nt, Human
gggcuggccggaggggcaggu

SEQ ID NO: 199437 - RNA, 32 nt, Human
gggcuggccucgaacuccugaccccaggugau

SEQ ID NO: 199438 - RNA, 20 nt, Human
gggcuggcgggggcgcugug

SEQ ID NO: 199439 - RNA, 32 nt, Human
gggcuggcgguacccacccagcccaagggagu

SEQ ID NO: 199440 - RNA, 32 nt, Human
gggcuggcguccaaggauuugagcccugucga

SEQ ID NO: 199441 - RNA, 32 nt, Human
gggcuggcucugcgcccugccuaccuguccag

SEQ ID NO: 199442 - RNA, 32 nt, Human
gggcuggcugagagccgcaggagcagcaggcu

SEQ ID NO: 199443 - RNA, 32 nt, Human
gggcuggcuggcucagugggcagcagggacag

SEQ ID NO: 199444 - RNA, 32 nt, Human
gggcuggcugugguggagaauguagcgcaacc

SEQ ID NO: 199445 - RNA, 32 nt, Human
gggcuggcuuugugcccuaaccccugggaugc

SEQ ID NO: 199446 - RNA, 23 nt, Human
gggcuggcuuuugaggggcgcgg

SEQ ID NO: 199447 - RNA, 30 nt, Human
gggcugggaagccagaaggacgaugcugag

SEQ ID NO: 199448 - RNA, 22 nt, Human
gggcugggaaugaagcgaugua

SEQ ID NO: 199449 - RNA, 32 nt, Human
gggcugggaauggaggggagaauuucuagggg

SEQ ID NO: 199450 - RNA, 22 nt, Human
gggcugggaauggggacacggu

SEQ ID NO: 199451 - RNA, 20 nt, Human
gggcugggaccagccccuag

SEQ ID NO: 199452 - RNA, 32 nt, Human
gggcugggacccggggaagguuugagggcccu

SEQ ID NO: 199453 - RNA, 32 nt, Human
gggcugggacugcugcuggggugcaggugagg

SEQ ID NO: 199454 - RNA, 32 nt, Human
gggcugggagaggcagacccacccuuaaucug

SEQ ID NO: 199455 - RNA, 32 nt, Human
gggcugggagcagaggucgcggagguggcgag

SEQ ID NO: 199456 - RNA, 32 nt, Human
gggcugggaggcggcggcggcggcucgggcug

SEQ ID NO: 199457 - RNA, 32 nt, Human
gggcugggagggagagaccggagcagcgccag

SEQ ID NO: 199458 - RNA, 32 nt, Human
gggcugggagggagagcccugggagcccaggg

SEQ ID NO: 199459 - RNA, 18 nt, Human
gggcugggauggggacgg

SEQ ID NO: 199460 - RNA, 32 nt, Human
gggcugggcaccaccagugugugggcagcacc

SEQ ID NO: 199461 - RNA, 32 nt, Human
gggcugggcaggacccucccacacaccugcac

SEQ ID NO: 199462 - RNA, 19 nt, Human
gggcugggcaggggcggug

SEQ ID NO: 199463 - RNA, 32 nt, Human
gggcugggcaggggcgguggaggacucaggaa

SEQ ID NO: 199464 - RNA, 32 nt, Human
gggcugggcagguccuggggaggcugagacug

SEQ ID NO: 199465 - RNA, 20 nt, Human
gggcugggcccacccaggga

SEQ ID NO: 199466 - RNA, 20 nt, Human
gggcugggcccagcgaggug

SEQ ID NO: 199467 - RNA, 32 nt, Human
gggcugggccuggagugaagcuggaagggcua

SEQ ID NO: 199468 - RNA, 19 nt, Human
gggcugggcgcggggccgg

SEQ ID NO: 199469 - RNA, 19 nt, Human
gggcugggcgcggggcgcg

SEQ ID NO: 199470 - RNA, 20 nt, Human
gggcugggcggcggcggcgg

SEQ ID NO: 199471 - RNA, 32 nt, Human
gggcugggcggcggggacagcggggacggcac

SEQ ID NO: 199472 - RNA, 21 nt, Human
gggcugggcggggcgccggug

SEQ ID NO: 199473 - RNA, 32 nt, Human
gggcugggcuccaggccagcauccagguccag

SEQ ID NO: 199474 - RNA, 20 nt, Human
gggcugggcucugggcggug

SEQ ID NO: 199475 - RNA, 32 nt, Human
gggcugggcugcagguccuggcguugugcugg

SEQ ID NO: 199476 - RNA, 32 nt, Human
gggcugggcuguagaagaguuguuggggaagg

SEQ ID NO: 199477 - RNA, 32 nt, Human
gggcuggggaaagacggcaccgggaaacucug

SEQ ID NO: 199478 - RNA, 32 nt, Human
gggcuggggaaggacguggcucugaagacgga

SEQ ID NO: 199479 - RNA, 21 nt, Human
gggcuggggagcaggcaggug

SEQ ID NO: 199480 - RNA, 19 nt, Human
gggcuggggagcucaggca

SEQ ID NO: 199481 - RNA, 32 nt, Human
gggcuggggagcucaguucccauugcuugugc

SEQ ID NO: 199482 - RNA, 18 nt, Human
gggcuggggagggggcug

SEQ ID NO: 199483 - RNA, 16 nt, Human
gggcuggggagggggu

SEQ ID NO: 199484 - RNA, 32 nt, Human
gggcuggggagugucauggggguggggacagg

SEQ ID NO: 199485 - RNA, 32 nt, Human
gggcuggggauggaugggagggaaggggaggg

SEQ ID NO: 199486 - RNA, 32 nt, Human
gggcuggggcacccuccgacggcagagccucc

SEQ ID NO: 199487 - RNA, 32 nt, Human
gggcuggggcagagaaaggaagggaacuggag

SEQ ID NO: 199488 - RNA, 32 nt, Human
gggcuggggcaggaggggagugaggcagguga

SEQ ID NO: 199489 - RNA, 32 nt, Human
gggcuggggccccagaggugggcuagguguaa

SEQ ID NO: 199490 - RNA, 21 nt, Human
gggcuggggccgggcgcagug

SEQ ID NO: 199491 - RNA, 32 nt, Human
gggcuggggccuggcccccuccugucuuccuc

SEQ ID NO: 199492 - RNA, 32 nt, Human
gggcuggggcggagcuggggucugggcagugc

SEQ ID NO: 199493 - RNA, 18 nt, Human
gggcuggggcggcggcgg

SEQ ID NO: 199494 - RNA, 32 nt, Human
gggcuggggcucugguguagaccauggaccaa

SEQ ID NO: 199495 - RNA, 32 nt, Human
gggcuggggcugagcagcgauccugcuuuguc

SEQ ID NO: 199496 - RNA, 32 nt, Human
gggcuggggcugggagcacacacgcugggacc

SEQ ID NO: 199497 - RNA, 32 nt, Human
gggcuggggcuggggcugguuagaccacuucu

SEQ ID NO: 199498 - RNA, 32 nt, Human
gggcugggggacacgggcacucacuggaugga

SEQ ID NO: 199499 - RNA, 19 nt, Human
gggcugggggaggcgggug

SEQ ID NO: 199500 - RNA, 32 nt, Human
gggcugggggccuggagugucucacuuggggg

SEQ ID NO: 199501 - RNA, 19 nt, Human
gggcuggggggaggaggca

SEQ ID NO: 199502 - RNA, 17 nt, Human
gggcuggggguggggug

SEQ ID NO: 199503 - RNA, 32 nt, Human
gggcugggggugggugggcagggcuuuaugcc

SEQ ID NO: 199504 - RNA, 23 nt, Human
gggcuggggguuggucuuggaaa

SEQ ID NO: 199505 - RNA, 17 nt, Human
gggcuggggucaggggg

SEQ ID NO: 199506 - RNA, 32 nt, Human
gggcuggggugagcucagggaggggaagagga

SEQ ID NO: 199507 - RNA, 32 nt, Human
gggcuggggugagggcuggugguuggugaaag

SEQ ID NO: 199508 - RNA, 20 nt, Human
gggcugggguggagggcggg

SEQ ID NO: 199509 - RNA, 32 nt, Human
gggcugggguggcaauggcgguuuggucccuc

SEQ ID NO: 199510 - RNA, 32 nt, Human
gggcuggguaccaaugcugcaggucaacagcu

SEQ ID NO: 199511 - RNA, 32 nt, Human
gggcuggguggaggagagaguggcacccucug

SEQ ID NO: 199512 - RNA, 32 nt, Human
gggcuggguggagguguggcugggcugggggc

SEQ ID NO: 199513 - RNA, 20 nt, Human
gggcugggugggaggcggug

SEQ ID NO: 199514 - RNA, 18 nt, Human
gggcuggguggggcgcca

SEQ ID NO: 199515 - RNA, 18 nt, Human
gggcuggguuaccugggc

SEQ ID NO: 199516 - RNA, 32 nt, Human
gggcugguacccaggccuggagcagcgguaca

SEQ ID NO: 199517 - RNA, 32 nt, Human
gggcugguagguggggcgagacuugcuggcuu

SEQ ID NO: 199518 - RNA, 32 nt, Human
gggcuggucaguugcauccagagaugccuccc

SEQ ID NO: 199519 - RNA, 32 nt, Human
gggcuggucaucuuugcaggucccgacacuaa

SEQ ID NO: 199520 - RNA, 32 nt, Human
gggcugguccagcggcggcggaggcuggcgcu

SEQ ID NO: 199521 - RNA, 32 nt, Human
gggcuggucgaagccugaagccgcaguauguc

SEQ ID NO: 199522 - RNA, 32 nt, Human
gggcuggucuaaaacuccugaccucaagugau

SEQ ID NO: 199523 - RNA, 32 nt, Human
gggcuggucucaaacuccuaaggucauccacc

SEQ ID NO: 199524 - RNA, 32 nt, Human
gggcuggucucaaacuccugaccucaagugau

SEQ ID NO: 199525 - RNA, 32 nt, Human
gggcuggucucaaacuccugaccuccggugau

SEQ ID NO: 199526 - RNA, 32 nt, Human
gggcuggucucaaacuccugaccucuggugau

SEQ ID NO: 199527 - RNA, 32 nt, Human
gggcuggucucaaacuccugaccucuugaucc

SEQ ID NO: 199528 - RNA, 32 nt, Human
gggcuggucucgaacucccaaccucaggugau

SEQ ID NO: 199529 - RNA, 32 nt, Human
gggcuggucucgaacucccgaccucaagugau

SEQ ID NO: 199530 - RNA, 32 nt, Human
gggcuggucucgaacucccgaccucaggugau

SEQ ID NO: 199531 - RNA, 32 nt, Human
gggcuggucucgaacuccuaaccucaagugau

SEQ ID NO: 199532 - RNA, 32 nt, Human
gggcuggucucgaacuccugaccacagguaau

SEQ ID NO: 199533 - RNA, 32 nt, Human
gggcuggucucgaacuccugaccucaggugau

SEQ ID NO: 199534 - RNA, 32 nt, Human
gggcuggucucgaacuccugaccuuaaaugag

SEQ ID NO: 199535 - RNA, 32 nt, Human
gggcuggucucgaacucuugaccucgggugau

SEQ ID NO: 199536 - RNA, 32 nt, Human
gggcuggucucugacaggcucagcuggagagg

SEQ ID NO: 199537 - RNA, 32 nt, Human
gggcuggucucuggagcuguucugccagagug

SEQ ID NO: 199538 - RNA, 24 nt, Human
gggcuggucuuagauaggaaugca

SEQ ID NO: 199539 - RNA, 32 nt, Human
gggcuggucuugaacuccugaccucaaguaau

SEQ ID NO: 199540 - RNA, 32 nt, Human
gggcuggucuugaacuccugaccucagguaau

SEQ ID NO: 199541 - RNA, 32 nt, Human
gggcuggucuugaacuccugacuucaagugau

SEQ ID NO: 199542 - RNA, 32 nt, Human
gggcuggucuugaacuccugagcucaagugau

SEQ ID NO: 199543 - RNA, 32 nt, Human
gggcuggucuugaacuuccgaccucaggugau

SEQ ID NO: 199544 - RNA, 32 nt, Human
gggcuggugagcgccccuguccccagccccca

SEQ ID NO: 199545 - RNA, 32 nt, Human
gggcuggugaggccggcccugccccucccuag

SEQ ID NO: 199546 - RNA, 32 nt, Human
gggcuggugagguuggggagaaaggaagagcu

SEQ ID NO: 199547 - RNA, 20 nt, Human
gggcuggugccacgccccag

SEQ ID NO: 199548 - RNA, 20 nt, Human
gggcuggugcccggcccagg

SEQ ID NO: 199549 - RNA, 32 nt, Human
gggcuggugcucauggcacuuccuucuugcuc

SEQ ID NO: 199550 - RNA, 18 nt, Human
gggcugguggcuggggga

SEQ ID NO: 199551 - RNA, 20 nt, Human
gggcuggugggcaggggggu

SEQ ID NO: 199552 - RNA, 32 nt, Human
gggcuggugggguggaggaugcugaguggugg

SEQ ID NO: 199553 - RNA, 20 nt, Human
gggcuggugucaggcccagg

SEQ ID NO: 199554 - RNA, 32 nt, Human
gggcuggugucagugagaaaaauuuaucaaug

SEQ ID NO: 199555 - RNA, 32 nt, Human
gggcuggugugggcuugggauccuccugguga

SEQ ID NO: 199556 - RNA, 20 nt, Human
gggcuggugugugggagcug

SEQ ID NO: 199557 - RNA, 19 nt, Human
gggcugguuaggcccagca

SEQ ID NO: 199558 - RNA, 32 nt, Human
gggcugguuccuucuagaggcuccagcggagg

SEQ ID NO: 199559 - RNA, 32 nt, Human
gggcugguugagggucauacagaaagucagug

SEQ ID NO: 199560 - RNA, 32 nt, Human
gggcugguuucaaacuccugaccucaguugau

SEQ ID NO: 199561 - RNA, 32 nt, Human
gggcugguuucuccucuuggcccuggccuaca

SEQ ID NO: 199562 - RNA, 32 nt, Human
gggcuguaaaaucuguccccagaacuggagag

SEQ ID NO: 199563 - RNA, 21 nt, Human
gggcuguaagcaagcucaggc

SEQ ID NO: 199564 - RNA, 21 nt, Human
gggcuguacauccagcuacag

SEQ ID NO: 199565 - RNA, 22 nt, Human
gggcuguacauccagcuacaga

SEQ ID NO: 199566 - RNA, 32 nt, Human
gggcuguaggagcuuguuuagcccaccugcau

SEQ ID NO: 199567 - RNA, 32 nt, Human
gggcuguagggagggcagggggaggagaguau

SEQ ID NO: 199568 - RNA, 21 nt, Human
gggcuguagggggaggcagug

SEQ ID NO: 199569 - RNA, 32 nt, Human
gggcuguaggucgcugugcugugugauccccc

SEQ ID NO: 199570 - RNA, 21 nt, Human
gggcuguauugaagugggcug

SEQ ID NO: 199571 - RNA, 32 nt, Human
gggcuguauuuggaagaagaggcgcugccucc

SEQ ID NO: 199572 - RNA, 32 nt, Human
gggcuguauuuggagaucaugggcugauucca

SEQ ID NO: 199573 - RNA, 32 nt, Human
gggcugucaaaaccaggguaaccuccuacaug

SEQ ID NO: 199574 - RNA, 32 nt, Human
gggcugucaauaacccccuuccucacuggcca

SEQ ID NO: 199575 - RNA, 19 nt, Human
gggcuguccaggcaaugac

SEQ ID NO: 199576 - RNA, 32 nt, Human
gggcuguccaugcacuccagcacacagcccgg

SEQ ID NO: 199577 - RNA, 19 nt, Human
gggcuguccccacacugac

SEQ ID NO: 199578 - RNA, 20 nt, Human
gggcugucccucugggcggc

SEQ ID NO: 199579 - RNA, 18 nt, Human
gggcuguccugggggcug

SEQ ID NO: 199580 - RNA, 32 nt, Human
gggcugucgcccaggccuaagugagucgugug

SEQ ID NO: 199581 - RNA, 19 nt, Human
gggcugucgucacgacgac

SEQ ID NO: 199582 - RNA, 32 nt, Human
gggcugucuaacugauggucaggaagaacuuc

SEQ ID NO: 199583 - RNA, 32 nt, Human
gggcugucugcagaaacccccaucaagagcug

SEQ ID NO: 199584 - RNA, 32 nt, Human
gggcugucuuauccacauuuggcuccaccucu

SEQ ID NO: 199585 - RNA, 32 nt, Human
gggcugucuuccuagcuugcagacaagugccu

SEQ ID NO: 199586 - RNA, 32 nt, Human
gggcugucuuggucacugcugagacccacagg

SEQ ID NO: 199587 - RNA, 20 nt, Human
gggcugugagagggaggcug

SEQ ID NO: 199588 - RNA, 19 nt, Human
gggcugugagaggggccgg

SEQ ID NO: 199589 - RNA, 18 nt, Human
gggcugugaggagggcug

SEQ ID NO: 199590 - RNA, 19 nt, Human
gggcugugaugaguggcug

SEQ ID NO: 199591 - RNA, 21 nt, Human
gggcugugcacccccagcggg

SEQ ID NO: 199592 - RNA, 32 nt, Human
gggcugugcaccugccucccacugacccagac

SEQ ID NO: 199593 - RNA, 21 nt, Human
gggcugugcagaagggggcug

SEQ ID NO: 199594 - RNA, 32 nt, Human
gggcugugccagcucccagagcuucggaagaa

SEQ ID NO: 199595 - RNA, 32 nt, Human
gggcugugcccaggccacagagcagcugcagg

SEQ ID NO: 199596 - RNA, 19 nt, Human
gggcugugccgcagagcug

SEQ ID NO: 199597 - RNA, 19 nt, Human
gggcugugccguggagcug

SEQ ID NO: 199598 - RNA, 32 nt, Human
gggcugugccugaggcuggcugggggcaggac

SEQ ID NO: 199599 - RNA, 19 nt, Human
gggcugugcuagggaccug

SEQ ID NO: 199600 - RNA, 19 nt, Human
gggcugugcugaggggcug

SEQ ID NO: 199601 - RNA, 22 nt, Human
gggcugugcuggggccagacug

SEQ ID NO: 199602 - RNA, 16 nt, Human
gggcuguggaggcgac

SEQ ID NO: 199603 - RNA, 18 nt, Human
gggcuguggcaaaggcug

SEQ ID NO: 199604 - RNA, 32 nt, Human
gggcuguggcacgugggcggagacugaguggc

SEQ ID NO: 199605 - RNA, 20 nt, Human
gggcuguggcgugggggcug

SEQ ID NO: 199606 - RNA, 20 nt, Human
gggcugugggaagggggcug

SEQ ID NO: 199607 - RNA, 32 nt, Human
gggcugugggacuggcuggaggccugccugug

SEQ ID NO: 199608 - RNA, 21 nt, Human
gggcugugggcaggggaccug

SEQ ID NO: 199609 - RNA, 18 nt, Human
gggcugugggcggagcug

SEQ ID NO: 199610 - RNA, 32 nt, Human
gggcugugggcgugagaccugccccuccucuc

SEQ ID NO: 199611 - RNA, 32 nt, Human
gggcugugggcuucugggucugugccgacaaa

SEQ ID NO: 199612 - RNA, 20 nt, Human
gggcugugggguaggggcug

SEQ ID NO: 199613 - RNA, 32 nt, Human
gggcuguggugaggaugaaggggucuggcagc

SEQ ID NO: 199614 - RNA, 21 nt, Human
gggcugugucagaauuaugua

SEQ ID NO: 199615 - RNA, 32 nt, Human
gggcugugucugggugagggauggcgggguac

SEQ ID NO: 199616 - RNA, 19 nt, Human
gggcugugugaaggcacug

SEQ ID NO: 199617 - RNA, 32 nt, Human
gggcugugugaucucuucaggguggggugguc

SEQ ID NO: 199618 - RNA, 20 nt, Human
gggcugugugugggaggcug

SEQ ID NO: 199619 - RNA, 32 nt, Human
gggcuguuagcucggcugggcacgggcggcuc

SEQ ID NO: 199620 - RNA, 32 nt, Human
gggcuguuccugggccuggcucuuacaggcuc

SEQ ID NO: 199621 - RNA, 32 nt, Human
gggcuguucugagcuuuaggcaagagaagaga

SEQ ID NO: 199622 - RNA, 32 nt, Human
gggcuguucugggcaccuggaagcacaguggg

SEQ ID NO: 199623 - RNA, 32 nt, Human
gggcuguuggcugggggcaugggggaggcucu

SEQ ID NO: 199624 - RNA, 32 nt, Human
gggcuguugguggagguuguacugugguacca

SEQ ID NO: 199625 - RNA, 32 nt, Human
gggcuuaaaagaaccccaguaccgacuaagca

SEQ ID NO: 199626 - RNA, 32 nt, Human
gggcuuaaagcccgcugcuccuuuucgguaga

SEQ ID NO: 199627 - RNA, 32 nt, Human
gggcuuaaaucaugggcuaucucuccacagcc

SEQ ID NO: 199628 - RNA, 32 nt, Human
gggcuuaaaucucaaacuuuguuaggaguaac

SEQ ID NO: 199629 - RNA, 32 nt, Human
gggcuuaacacaugaaauggguggcacagauc

SEQ ID NO: 199630 - RNA, 23 nt, Human
gggcuuaagcaauccuccugccu

SEQ ID NO: 199631 - RNA, 32 nt, Human
gggcuuaaguggguugcuuccaggcagaagca

SEQ ID NO: 199632 - RNA, 32 nt, Human
gggcuuacaacaaaagcaguucuuccuaaggc

SEQ ID NO: 199633 - RNA, 32 nt, Human
gggcuuaccuaccuuucuacugcaucauauuc

SEQ ID NO: 199634 - RNA, 32 nt, Human
gggcuuacugacaguugcccagaucugaaggg

SEQ ID NO: 199635 - RNA, 32 nt, Human
gggcuuagcaccacccaccaaauguucuuuuc

SEQ ID NO: 199636 - RNA, 32 nt, Human
gggcuuaggaaaacaauccaacucccuagccc

SEQ ID NO: 199637 - RNA, 32 nt, Human
gggcuuauggguggagguugggaagaggauga

SEQ ID NO: 199638 - RNA, 32 nt, Human
gggcuucaaccagggacauccaaaccggaagc

SEQ ID NO: 199639 - RNA, 32 nt, Human
gggcuucaaguggucacaaagaggguggcugu

SEQ ID NO: 199640 - RNA, 31 nt, Human
gggcuucacagcuugaguuaaccuugcuuuu

SEQ ID NO: 199641 - RNA, 32 nt, Human
gggcuucacaguuuacaaagcgcuuucucaua

SEQ ID NO: 199642 - RNA, 32 nt, Human
gggcuucacaugccacuggaaacaacagacuc

SEQ ID NO: 199643 - RNA, 32 nt, Human
gggcuucacccaggaugacguacaggcugcag

SEQ ID NO: 199644 - RNA, 23 nt, Human
gggcuucagaauucagccugagg

SEQ ID NO: 199645 - RNA, 32 nt, Human
gggcuucagaauucagccugagggcaaugggg

SEQ ID NO: 199646 - RNA, 21 nt, Human
gggcuucagaggauuuggaga

SEQ ID NO: 199647 - RNA, 32 nt, Human
gggcuucagaguggguuggaaaaauggaggug

SEQ ID NO: 199648 - RNA, 32 nt, Human
gggcuucagaugcguccauguccugguaaugg

SEQ ID NO: 199649 - RNA, 32 nt, Human
gggcuucagauuccccaucugaauauaauaga

SEQ ID NO: 199650 - RNA, 32 nt, Human
gggcuucagcagccacaccagcccagcccagc

SEQ ID NO: 199651 - RNA, 32 nt, Human
gggcuucagcaggagcccuggacucaucauca

SEQ ID NO: 199652 - RNA, 23 nt, Human
gggcuucagccaggugcucgaga

SEQ ID NO: 199653 - RNA, 32 nt, Human
gggcuucagccugucccgggguugccugaggc

SEQ ID NO: 199654 - RNA, 21 nt, Human
gggcuucagcgaggcgggagg

SEQ ID NO: 199655 - RNA, 22 nt, Human
gggcuucagcgggaggcagcag

SEQ ID NO: 199656 - RNA, 18 nt, Human
gggcuucaggacgcggga

SEQ ID NO: 199657 - RNA, 32 nt, Human
gggcuucaucccugugaaggcacagggccugc

SEQ ID NO: 199658 - RNA, 32 nt, Human
gggcuucauccuuccagggaggagaagaggga

SEQ ID NO: 199659 - RNA, 32 nt, Human
gggcuuccacauuaaggugauccgggaccaga

SEQ ID NO: 199660 - RNA, 32 nt, Human
gggcuuccagccuccagaacugugagaaauaa

SEQ ID NO: 199661 - RNA, 21 nt, Human
gggcuuccccgcugccgggaa

SEQ ID NO: 199662 - RNA, 32 nt, Human
gggcuuccccuccaaaggaccuucugcagugg

SEQ ID NO: 199663 - RNA, 32 nt, Human
gggcuucccucgcuucccgguauuguuugcaa

SEQ ID NO: 199664 - RNA, 17 nt, Human
gggcuuccgcagccccc

SEQ ID NO: 199665 - RNA, 18 nt, Human
gggcuuccgcagcccccu

SEQ ID NO: 199666 - RNA, 32 nt, Human
gggcuuccgcugggacuaggaucagggugugg

SEQ ID NO: 199667 - RNA, 32 nt, Human
gggcuuccugcaggcauccucaguccacacuu

SEQ ID NO: 199668 - RNA, 21 nt, Human
gggcuuccugcccccuccuug

SEQ ID NO: 199669 - RNA, 32 nt, Human
gggcuuccugccgucccccgacugccucauuc

SEQ ID NO: 199670 - RNA, 25 nt, Human
gggcuuccuuucucggggcugggaa

SEQ ID NO: 199671 - RNA, 22 nt, Human
gggcuuccuuuggggccgggaa

SEQ ID NO: 199672 - RNA, 32 nt, Human
gggcuucgagaaagggcccggcaggaggagaa

SEQ ID NO: 199673 - RNA, 32 nt, Human
gggcuucgcuuccuuagccuugcucaggugca

SEQ ID NO: 199674 - RNA, 23 nt, Human
gggcuucggcagucggcuggggg

SEQ ID NO: 199675 - RNA, 25 nt, Human
gggcuucggccuccggcgucgggaa

SEQ ID NO: 199676 - RNA, 21 nt, Human
gggcuucgggggcaccgggga

SEQ ID NO: 199677 - RNA, 32 nt, Human
gggcuucuaccaccauccccugaauugggaau

SEQ ID NO: 199678 - RNA, 32 nt, Human
gggcuucucagcgggucaagugcaguaccugg

SEQ ID NO: 199679 - RNA, 32 nt, Human
gggcuucucagcuccccucccuuccagcccag

SEQ ID NO: 199680 - RNA, 30 nt, Human
gggcuucuccacgcuuugcuccuggcuugu

SEQ ID NO: 199681 - RNA, 32 nt, Human
gggcuucuccccucgcugcugcacccuggcuu

SEQ ID NO: 199682 - RNA, 32 nt, Human
gggcuucucucauccaugcuggaauuucauuu

SEQ ID NO: 199683 - RNA, 32 nt, Human
gggcuucucugggagcucuccaguggcacugc

SEQ ID NO: 199684 - RNA, 32 nt, Human
gggcuucugcaaccgcuuuccacggguuccac

SEQ ID NO: 199685 - RNA, 32 nt, Human
gggcuucugcaggcuucagccauccacuucac

SEQ ID NO: 199686 - RNA, 32 nt, Human
gggcuucugcgcuguuguuggggaagggaccc

SEQ ID NO: 199687 - RNA, 32 nt, Human
gggcuucugcucuucucaccagaaagaacauu

SEQ ID NO: 199688 - RNA, 32 nt, Human
gggcuucuggaaagcuagaggcugggcugagc

SEQ ID NO: 199689 - RNA, 17 nt, Human
gggcuucuggauggaca

SEQ ID NO: 199690 - RNA, 32 nt, Human
gggcuucugggcagacucuggucaagaagcau

SEQ ID NO: 199691 - RNA, 23 nt, Human
gggcuucugggcaggcucacgca

SEQ ID NO: 199692 - RNA, 32 nt, Human
gggcuucugggccagccaugcccacgccccuc

SEQ ID NO: 199693 - RNA, 21 nt, Human
gggcuucuggggcguugggaa

SEQ ID NO: 199694 - RNA, 32 nt, Human
gggcuucuguaauuccagcuacuugggaggcu

SEQ ID NO: 199695 - RNA, 32 nt, Human
gggcuucuucuccccuucuuccuuuccccuuu

SEQ ID NO: 199696 - RNA, 23 nt, Human
gggcuucuuuuccgcaaaugcca

SEQ ID NO: 199697 - RNA, 32 nt, Human
gggcuugaaguaggagcccagcaaagaaccac

SEQ ID NO: 199698 - RNA, 32 nt, Human
gggcuugaagugaaggaacagaggcagggggu

SEQ ID NO: 199699 - RNA, 32 nt, Human
gggcuugaggaucaaaugaggggcuccaccca

SEQ ID NO: 199700 - RNA, 32 nt, Human
gggcuugaggggugauggaggcagguuccccu

SEQ ID NO: 199701 - RNA, 32 nt, Human
gggcuugagucucugcaguggggcugagcccg

SEQ ID NO: 199702 - RNA, 32 nt, Human
gggcuugaucuccauucucugcuuugcugcau

SEQ ID NO: 199703 - RNA, 32 nt, Human
gggcuugaugggcuugucuuccaggcacaccc

SEQ ID NO: 199704 - RNA, 32 nt, Human
gggcuugauuccugccuaucccugccagauac

SEQ ID NO: 199705 - RNA, 32 nt, Human
gggcuugauuuguuuagacugaaggaagacgu

SEQ ID NO: 199706 - RNA, 32 nt, Human
gggcuugcaacuuagcucacaccugaccaauc

SEQ ID NO: 199707 - RNA, 32 nt, Human
gggcuugcccccgugugguccucggagcggcc

SEQ ID NO: 199708 - RNA, 32 nt, Human
gggcuugcccuccaccuuggacuuggaagaag

SEQ ID NO: 199709 - RNA, 32 nt, Human
gggcuugccggccagacuucucuccccugcgg

SEQ ID NO: 199710 - RNA, 32 nt, Human
gggcuugcuccugcaaccaguaucuccuugga

SEQ ID NO: 199711 - RNA, 32 nt, Human
gggcuugcugggaagagaggcgaagccagguc

SEQ ID NO: 199712 - RNA, 21 nt, Human
gggcuugcugggccucugaga

SEQ ID NO: 199713 - RNA, 32 nt, Human
gggcuuggaaggagacaggaauggggcgagga

SEQ ID NO: 199714 - RNA, 19 nt, Human
gggcuuggagaaggggcug

SEQ ID NO: 199715 - RNA, 32 nt, Human
gggcuuggagcagccuugcucaccacuguguc

SEQ ID NO: 199716 - RNA, 32 nt, Human
gggcuuggaguggggcuggugcccgggacaga

SEQ ID NO: 199717 - RNA, 32 nt, Human
gggcuuggcaggggcccagcuggggcugggcc

SEQ ID NO: 199718 - RNA, 32 nt, Human
gggcuuggcgaaugcacgucugccugagaacc

SEQ ID NO: 199719 - RNA, 32 nt, Human
gggcuuggcggaggacccagaauggcacugag

SEQ ID NO: 199720 - RNA, 32 nt, Human
gggcuuggcuggggcuuccugcccugagcgcg

SEQ ID NO: 199721 - RNA, 18 nt, Human
gggcuugggacccuggag

SEQ ID NO: 199722 - RNA, 32 nt, Human
gggcuugggagccuacgagguugcagucugga

SEQ ID NO: 199723 - RNA, 32 nt, Human
gggcuugggaugauuauaacggguggucuccu

SEQ ID NO: 199724 - RNA, 32 nt, Human
gggcuugggauguuaacaggagccaaaaggag

SEQ ID NO: 199725 - RNA, 32 nt, Human
gggcuuggggaaagccuguuccucucugacuc

SEQ ID NO: 199726 - RNA, 32 nt, Human
gggcuuggggagggagguucaccugaggagga

SEQ ID NO: 199727 - RNA, 32 nt, Human
gggcuuggggccugagcgcaguggcucaugcc

SEQ ID NO: 199728 - RNA, 32 nt, Human
gggcuuggggcuguggugagcaugaagugaaa

SEQ ID NO: 199729 - RNA, 32 nt, Human
gggcuugggggcagucaggaggaagcuggcca

SEQ ID NO: 199730 - RNA, 32 nt, Human
gggcuugggugaggaagggggcacaggagccg

SEQ ID NO: 199731 - RNA, 32 nt, Human
gggcuugggugcgaguccaggcaaggcaggac

SEQ ID NO: 199732 - RNA, 32 nt, Human
gggcuuggucucaaggacucacugauuacaua

SEQ ID NO: 199733 - RNA, 23 nt, Human
gggcuugguggcucaugccugua

SEQ ID NO: 199734 - RNA, 32 nt, Human
gggcuugugcauuucccagccaugucugguuc

SEQ ID NO: 199735 - RNA, 32 nt, Human
gggcuugugccucacuaccggccuccuauucu

SEQ ID NO: 199736 - RNA, 32 nt, Human
gggcuuguugagaagaggggugcccagccuga

SEQ ID NO: 199737 - RNA, 32 nt, Human
gggcuuguugcagucagcaggugugggcuuag

SEQ ID NO: 199738 - RNA, 32 nt, Human
gggcuuguugccuccccucucugagcccccau

SEQ ID NO: 199739 - RNA, 32 nt, Human
gggcuuuacauacauugaccuuccauucacug

SEQ ID NO: 199740 - RNA, 32 nt, Human
gggcuuuagccaagccaccuacugccaggaau

SEQ ID NO: 199741 - RNA, 32 nt, Human
gggcuuuagccuccccugaccaucugcucaug

SEQ ID NO: 199742 - RNA, 32 nt, Human
gggcuuuaggaucaggcugaauaugaggacaa

SEQ ID NO: 199743 - RNA, 32 nt, Human
gggcuuuaucuauuuggcuuuugaagccccug

SEQ ID NO: 199744 - RNA, 32 nt, Human
gggcuuuccccauaucuucucucccccaccuu

SEQ ID NO: 199745 - RNA, 32 nt, Human
gggcuuuccuauccucccaaagacucagcucc

SEQ ID NO: 199746 - RNA, 20 nt, Human
gggcuuuccugcaggggggu

SEQ ID NO: 199747 - RNA, 32 nt, Human
gggcuuucuggaacugcuggcuggguugcugc

SEQ ID NO: 199748 - RNA, 32 nt, Human
gggcuuucuggcccccuuccucaccucuucca

SEQ ID NO: 199749 - RNA, 24 nt, Human
gggcuuugcagccugcagaugcca

SEQ ID NO: 199750 - RNA, 32 nt, Human
gggcuuugcagggcggccagugcagugaugcc

SEQ ID NO: 199751 - RNA, 32 nt, Human
gggcuuugccuagggguggguugcccuguaua

SEQ ID NO: 199752 - RNA, 32 nt, Human
gggcuuugcucaccacuuuagcucaggacucu

SEQ ID NO: 199753 - RNA, 32 nt, Human
gggcuuugcugaagucucaggcugccgagagc

SEQ ID NO: 199754 - RNA, 32 nt, Human
gggcuuugcugaggcccagcuggugcugaccc

SEQ ID NO: 199755 - RNA, 23 nt, Human
gggcuuugcuggcuucccagaga

SEQ ID NO: 199756 - RNA, 32 nt, Human
gggcuuugcuggguccaucacagaagagucuc

SEQ ID NO: 199757 - RNA, 32 nt, Human
gggcuuuggcaacuauggugcucaggugauua

SEQ ID NO: 199758 - RNA, 32 nt, Human
gggcuuuggccugggcagcuuccacuuucugc

SEQ ID NO: 199759 - RNA, 22 nt, Human
gggcuuuggggucuucuggaaa

SEQ ID NO: 199760 - RNA, 32 nt, Human
gggcuuuggguauaaaggagggggauucuacg

SEQ ID NO: 199761 - RNA, 32 nt, Human
gggcuuugguuccuggcuucugggagccuuuu

SEQ ID NO: 199762 - RNA, 23 nt, Human
gggcuuugucuguucucuucauu

SEQ ID NO: 199763 - RNA, 32 nt, Human
gggcuuugugccagaccaucucuaacuuaauc

SEQ ID NO: 199764 - RNA, 32 nt, Human
gggcuuugugccucaaaccccaaggagaccau

SEQ ID NO: 199765 - RNA, 32 nt, Human
gggcuuuguggaugcccagcuggugcugaccc

SEQ ID NO: 199766 - RNA, 32 nt, Human
gggcuuuuagccacagcuguuuuaagacuucu

SEQ ID NO: 199767 - RNA, 32 nt, Human
gggcuuuuauccaccuugaaucccuauccucc

SEQ ID NO: 199768 - RNA, 32 nt, Human
gggcuuuucuguagcauaaaagaacaguucau

SEQ ID NO: 199769 - RNA, 32 nt, Human
gggcuuuuggggagaugaagagccaagaaguc

SEQ ID NO: 199770 - RNA, 32 nt, Human
gggcuuuuggggauggggcagcaaaguuggga

SEQ ID NO: 199771 - RNA, 21 nt, Human
gggcuuuuguaucucuucauu

SEQ ID NO: 199772 - RNA, 32 nt, Human
gggcuuuugugccaggagugggugggacacag

SEQ ID NO: 199773 - RNA, 21 nt, Human
gggcuuuuguuaucuuucacu

SEQ ID NO: 199774 - RNA, 32 nt, Human
gggcuuuuucaugucuguaacaugguauuggc

SEQ ID NO: 199775 - RNA, 32 nt, Human
gggcuuuuucuaaagaggauggcagaacuucc

SEQ ID NO: 199776 - RNA, 32 nt, Human
gggcuuuuucucucaugcauucccuggccugg

SEQ ID NO: 199777 - RNA, 32 nt, Human
ggggaaaaacaguauaucaccauuggguagag

SEQ ID NO: 199778 - RNA, 32 nt, Human
ggggaaaacgggcagucugcucugcugcucug

SEQ ID NO: 199779 - RNA, 22 nt, Human
ggggaaaacucauggucacgaa

SEQ ID NO: 199780 - RNA, 23 nt, Human
ggggaaaacuucaaagagccgga

SEQ ID NO: 199781 - RNA, 32 nt, Human
ggggaaaagaugauucugggucuuucccuuga

SEQ ID NO: 199782 - RNA, 19 nt, Human
ggggaaaaggggggcgcug

SEQ ID NO: 199783 - RNA, 19 nt, Human
ggggaaaauaaagagcaga

SEQ ID NO: 199784 - RNA, 24 nt, Human
ggggaaaauccccgaagaggcaga

SEQ ID NO: 199785 - RNA, 32 nt, Human
ggggaaaauggcggcguccucccuggaacaga

SEQ ID NO: 199786 - RNA, 19 nt, Human
ggggaaaauguuuugguuu

SEQ ID NO: 199787 - RNA, 32 nt, Human
ggggaaaauugcccucaauugagaaccacugg

SEQ ID NO: 199788 - RNA, 31 nt, Human
ggggaaacacuuuucacugcagaguuugcuu

SEQ ID NO: 199789 - RNA, 32 nt, Human
ggggaaacaugauagaggaaggaaguugguug

SEQ ID NO: 199790 - RNA, 21 nt, Human
ggggaaaccccgucucuacua

SEQ ID NO: 199791 - RNA, 32 nt, Human
ggggaaacccuccaccuccuugcaggcuuguu

SEQ ID NO: 199792 - RNA, 32 nt, Human
ggggaaacgggcuggugcaguggugucaucuu

SEQ ID NO: 199793 - RNA, 32 nt, Human
ggggaaacugaggcccagggaggagaguaacu

SEQ ID NO: 199794 - RNA, 32 nt, Human
ggggaaagagaagcccagacaaacagcagaug

SEQ ID NO: 199795 - RNA, 32 nt, Human
ggggaaagaggaucuuccagcucugcaaaaac

SEQ ID NO: 199796 - RNA, 32 nt, Human
ggggaaagagggaggaaggggaggggccucca

SEQ ID NO: 199797 - RNA, 21 nt, Human
ggggaaagagggauucuaggg

SEQ ID NO: 199798 - RNA, 20 nt, Human
ggggaaagcagccaugcucc

SEQ ID NO: 199799 - RNA, 32 nt, Human
ggggaaagcagcugugugugauagcuuggaag

SEQ ID NO: 199800 - RNA, 32 nt, Human
ggggaaagcugaggcaggagaauugcuucaau

SEQ ID NO: 199801 - RNA, 32 nt, Human
ggggaaaggaagggaagggagggaggucuguu

SEQ ID NO: 199802 - RNA, 32 nt, Human
ggggaaaggagagggcggaaaaggaccagcgg

SEQ ID NO: 199803 - RNA, 32 nt, Human
ggggaaaggaggugggggcggggaguauugaa

SEQ ID NO: 199804 - RNA, 32 nt, Human
ggggaaagggaagucugaagcucaguuggcca

SEQ ID NO: 199805 - RNA, 32 nt, Human
ggggaaagggagcacacggggaggacguuggg

SEQ ID NO: 199806 - RNA, 32 nt, Human
ggggaaagggggugggacagggacucggggcu

SEQ ID NO: 199807 - RNA, 21 nt, Human
ggggaaaguccuuuuuugccc

SEQ ID NO: 199808 - RNA, 32 nt, Human
ggggucuggcuccccuccucuggcagagguuu

SEQ ID NO: 199809 - RNA, 32 nt, Human
ggggucuggcuugcccccucccugggccucca

SEQ ID NO: 199810 - RNA, 32 nt, Human
ggggucugggcagucccuccucuccccagugu

SEQ ID NO: 199811 - RNA, 32 nt, Human
ggggucuggggcaucccuggagcucagaagcc

SEQ ID NO: 199812 - RNA, 32 nt, Human
ggggucuggggccuggagagacccucccaccc

SEQ ID NO: 199813 - RNA, 32 nt, Human
ggggucugguaccagcccuagaacucagcguu

SEQ ID NO: 199814 - RNA, 32 nt, Human
ggggucugucccuucccaagcaagacauuugu

SEQ ID NO: 199815 - RNA, 19 nt, Human
ggggucugugcuccagguc

SEQ ID NO: 199816 - RNA, 32 nt, Human
ggggucuguggcugcugggcuggcggggcgca

SEQ ID NO: 199817 - RNA, 32 nt, Human
ggggucuguggcuggagggagcugggaugcag

SEQ ID NO: 199818 - RNA, 32 nt, Human
ggggucuuccucuguugcccaggcuggagugc

SEQ ID NO: 199819 - RNA, 32 nt, Human
ggggucuucuccugaagccugacuccauggga

SEQ ID NO: 199820 - RNA, 21 nt, Human
ggggucuugaagagggggcag

SEQ ID NO: 199821 - RNA, 32 nt, Human
ggggucuugcccugucacccaggcugggguac

SEQ ID NO: 199822 - RNA, 32 nt, Human
ggggucuuuacucauuuauuuuauggguaaag

SEQ ID NO: 199823 - RNA, 32 nt, Human
ggggugaaaaauuggcccuuguaugggaggug

SEQ ID NO: 199824 - RNA, 19 nt, Human
ggggugaaagugagggagg

SEQ ID NO: 199825 - RNA, 32 nt, Human
ggggugaacaugugcaggaacagcuagaggcc

SEQ ID NO: 199826 - RNA, 32 nt, Human
ggggugaaggggacccaggccugugacagcca

SEQ ID NO: 199827 - RNA, 32 nt, Human
ggggugaaucagaccccauuccugccuucggg

SEQ ID NO: 199828 - RNA, 32 nt, Human
ggggugaaucaucaguccuggggaagaaccca

SEQ ID NO: 199829 - RNA, 21 nt, Human
ggggugacaaucucagcucca

SEQ ID NO: 199830 - RNA, 32 nt, Human
ggggugacaccaggacacagggacagguucug

SEQ ID NO: 199831 - RNA, 32 nt, Human
ggggugacagaggcauucaagccagacuccau

SEQ ID NO: 199832 - RNA, 32 nt, Human
ggggugacagcgaaacgugagaccauccaguu

SEQ ID NO: 199833 - RNA, 21 nt, Human
ggggugaccggugaggggagg

SEQ ID NO: 199834 - RNA, 31 nt, Human
ggggugacgccuucugggccugccacuguuc

SEQ ID NO: 199835 - RNA, 32 nt, Human
ggggugacugccucugagucauuguguuuuuc

SEQ ID NO: 199836 - RNA, 32 nt, Human
ggggugacuggguagaggccaggagaaaggaa

SEQ ID NO: 199837 - RNA, 32 nt, Human
ggggugacuucugcuuugguccuuccaccacc

SEQ ID NO: 199838 - RNA, 32 nt, Human
ggggugagaagacaagaugaagaaaagccuua

SEQ ID NO: 199839 - RNA, 32 nt, Human
ggggugagagaagaggguucuuaucgcgucuc

SEQ ID NO: 199840 - RNA, 20 nt, Human
ggggugagagaggagacaga

SEQ ID NO: 199841 - RNA, 32 nt, Human
ggggugagagcauucuugcaucaugugagauc

SEQ ID NO: 199842 - RNA, 32 nt, Human
ggggugagaggaggcccaggaggagagagagc

SEQ ID NO: 199843 - RNA, 32 nt, Human
ggggugagaggcaagggaagugauagcauuaa

SEQ ID NO: 199844 - RNA, 32 nt, Human
ggggugagagggcacggcucuccucugccagu

SEQ ID NO: 199845 - RNA, 32 nt, Human
ggggugaggaaggguaaggggcagggcugguu

SEQ ID NO: 199846 - RNA, 32 nt, Human
ggggugaggagagagcaagagggcagggguga

SEQ ID NO: 199847 - RNA, 32 nt, Human
ggggugaggcaugucuuuccagaacuuucccu

SEQ ID NO: 199848 - RNA, 32 nt, Human
ggggugaggccagccaagucccuguguuacga

SEQ ID NO: 199849 - RNA, 32 nt, Human
ggggugagggagaaggaggagagagcccaugu

SEQ ID NO: 199850 - RNA, 32 nt, Human
ggggugagggggaaugcccuuccaauauggcu

SEQ ID NO: 199851 - RNA, 17 nt, Human
ggggugaggggggccgg

SEQ ID NO: 199852 - RNA, 32 nt, Human
ggggugagucaccacaccccaccccuuggcac

SEQ ID NO: 199853 - RNA, 32 nt, Human
ggggugagugugaaaggugcugauggcccuca

SEQ ID NO: 199854 - RNA, 32 nt, Human
ggggugaguuuucugugcuacaagcaccuguc

SEQ ID NO: 199855 - RNA, 32 nt, Human
ggggugauaugagagcgagcccagggaaggac

SEQ ID NO: 199856 - RNA, 27 nt, Human
ggggugauauguauacuuuugcuucac

SEQ ID NO: 199857 - RNA, 32 nt, Human
ggggugauggaugaugaaccuggcaagucaca

SEQ ID NO: 199858 - RNA, 24 nt, Human
ggggugauggcaggggaguggagg

SEQ ID NO: 199859 - RNA, 32 nt, Human
ggggugauggccagggcaggcugggagggaca

SEQ ID NO: 199860 - RNA, 32 nt, Human
ggggugauggggaauaggagggcaggggugag

SEQ ID NO: 199861 - RNA, 32 nt, Human
ggggugauggugcugguagguucugguaauuu

SEQ ID NO: 199862 - RNA, 32 nt, Human
ggggugaugguguaauuguuaaccucauuucc

SEQ ID NO: 199863 - RNA, 32 nt, Human
ggggugauuuggaaaagaagaccuggguggaa

SEQ ID NO: 199864 - RNA, 32 nt, Human
ggggugcaagcuuggggcuccgucuggugcug

SEQ ID NO: 199865 - RNA, 32 nt, Human
ggggugcaaggcagagaggccaagccagccug

SEQ ID NO: 199866 - RNA, 31 nt, Human
ggggugcaaguguccaccaaaccagauaggc

SEQ ID NO: 199867 - RNA, 32 nt, Human
ggggugcaaguguccaccaaaccagauaggca

SEQ ID NO: 199868 - RNA, 32 nt, Human
ggggugcacagcccugugggagcagcuuggcu

SEQ ID NO: 199869 - RNA, 32 nt, Human
ggggugcacaguccacagcugaagagcaaggu

SEQ ID NO: 199870 - RNA, 32 nt, Human
ggggugcagaaaagggguccucgaggcggagc

SEQ ID NO: 199871 - RNA, 18 nt, Human
ggggugcagccccuggca

SEQ ID NO: 199872 - RNA, 23 nt, Human
ggggugcagcgcuucacaaugcu

SEQ ID NO: 199873 - RNA, 32 nt, Human
ggggugcagcuggucuggauaauagcuuacag

SEQ ID NO: 199874 - RNA, 32 nt, Human
ggggugcagcuggucuggauagauagcuuaca

SEQ ID NO: 199875 - RNA, 18 nt, Human
ggggugcagcugucaggu

SEQ ID NO: 199876 - RNA, 32 nt, Human
ggggugcaggaauuuauccugccugcagguga

SEQ ID NO: 199877 - RNA, 32 nt, Human
ggggugcaggcgggcagcacugagggacccug

SEQ ID NO: 199878 - RNA, 17 nt, Human
ggggugcagugagcuca

SEQ ID NO: 199879 - RNA, 32 nt, Human
ggggugcauagcucggagaugcagucccccug

SEQ ID NO: 199880 - RNA, 32 nt, Human
ggggugccaaguuuggggagcagccccuggcu

SEQ ID NO: 199881 - RNA, 32 nt, Human
ggggugccacaugucucagaucugccauuguc

SEQ ID NO: 199882 - RNA, 16 nt, Human
ggggugccacgccuuc

SEQ ID NO: 199883 - RNA, 32 nt, Human
ggggugccacugcugccuggacugcuggugca

SEQ ID NO: 199884 - RNA, 32 nt, Human
ggggugccagggccuggcuggguccagcggcu

SEQ ID NO: 199885 - RNA, 32 nt, Human
ggggugcccagcccggcacccagcgcuuucgc

SEQ ID NO: 199886 - RNA, 32 nt, Human
ggggugcccagcugccugucagacccugagga

SEQ ID NO: 199887 - RNA, 32 nt, Human
ggggugccccuccaccuuccucuggaauccaa

SEQ ID NO: 199888 - RNA, 32 nt, Human
ggggugccccucuccuucuuagcuaucauugc

SEQ ID NO: 199889 - RNA, 32 nt, Human
ggggugccucggccccuccagccccgggccgg

SEQ ID NO: 199890 - RNA, 32 nt, Human
ggggugccuggcaggcucacccccaggggccg

SEQ ID NO: 199891 - RNA, 32 nt, Human
ggggugcgcacagcagcaggcuuucuguaccc

SEQ ID NO: 199892 - RNA, 18 nt, Human
ggggugcgcaccuggaug

SEQ ID NO: 199893 - RNA, 32 nt, Human
ggggugcgcuuguaaucccagcuacucaggag

SEQ ID NO: 199894 - RNA, 32 nt, Human
ggggugcgcuuguaaucccagcuacucgggag

SEQ ID NO: 199895 - RNA, 32 nt, Human
ggggugcggagcgggacuuggagcagccgccg

SEQ ID NO: 199896 - RNA, 32 nt, Human
ggggugcggcaggagcaggaacagagacucug

SEQ ID NO: 199897 - RNA, 32 nt, Human
ggggugcggggaggggaaggacgccuccaagc

SEQ ID NO: 199898 - RNA, 19 nt, Human
ggggugcggggccagcuca

SEQ ID NO: 199899 - RNA, 17 nt, Human
ggggugcguuaguguca

SEQ ID NO: 199900 - RNA, 32 nt, Human
ggggugcuagagguggggcaugguggcuggaa

SEQ ID NO: 199901 - RNA, 32 nt, Human
ggggugcucaaaggauuuaaaggaguucuaau

SEQ ID NO: 199902 - RNA, 32 nt, Human
ggggugcuccuggccuggaguggguggaggcc

SEQ ID NO: 199903 - RNA, 32 nt, Human
ggggugcucggcagugcugaaggagccuggga

SEQ ID NO: 199904 - RNA, 32 nt, Human
ggggugcucugcccucuacccuugggccaccu

SEQ ID NO: 199905 - RNA, 32 nt, Human
ggggugcugcccgggcaggccauguuggggag

SEQ ID NO: 199906 - RNA, 32 nt, Human
ggggugcugccugggcaggccauguuggggag

SEQ ID NO: 199907 - RNA, 32 nt, Human
ggggugcugcugacccagcccugcugcugcuc

SEQ ID NO: 199908 - RNA, 32 nt, Human
ggggugcugcuggcccuccugcaggccuucug

SEQ ID NO: 199909 - RNA, 32 nt, Human
ggggugcuggggcaccugggccgcaucccuug

SEQ ID NO: 199910 - RNA, 32 nt, Human
ggggugcuuucugcccagugggucuuggcaua

SEQ ID NO: 199911 - RNA, 32 nt, Human
gggguggaaaggacagagcccaggcgaccuag

SEQ ID NO: 199912 - RNA, 32 nt, Human
gggguggaaaguugaacuccaugucugaggac

SEQ ID NO: 199913 - RNA, 32 nt, Human
gggguggaacacagcauuuugucaagcacugu

SEQ ID NO: 199914 - RNA, 32 nt, Human
gggguggaagugcucccuucugugggcuccag

SEQ ID NO: 199915 - RNA, 32 nt, Human
gggguggaaguguggugacacagugaauggga

SEQ ID NO: 199916 - RNA, 32 nt, Human
gggguggacaacauucaacacugcagaauggg

SEQ ID NO: 199917 - RNA, 21 nt, Human
gggguggacaccacucaggga

SEQ ID NO: 199918 - RNA, 32 nt, Human
gggguggagagguggggugggguggggugugg

SEQ ID NO: 199919 - RNA, 32 nt, Human
gggguggagccgggggaaggguggggagggga

SEQ ID NO: 199920 - RNA, 32 nt, Human
gggguggagcgggggagucggccucgccagug

SEQ ID NO: 199921 - RNA, 32 nt, Human
gggguggagcuggaggagucucagcuggauga

SEQ ID NO: 199922 - RNA, 32 nt, Human
gggguggaggaagagcuuuggggaagaugagg

SEQ ID NO: 199923 - RNA, 32 nt, Human
gggguggaggcugggcugggcccugugggcug

SEQ ID NO: 199924 - RNA, 32 nt, Human
gggguggaggcuggggccacacugcgggacag

SEQ ID NO: 199925 - RNA, 32 nt, Human
gggguggagggcagaggagaaacugcgucagg

SEQ ID NO: 199926 - RNA, 16 nt, Human
gggguggagggccuuc

SEQ ID NO: 199927 - RNA, 32 nt, Human
gggguggaggggaauuagucugucccagcuag

SEQ ID NO: 199928 - RNA, 32 nt, Human
gggguggaggguggaggagggagcaggaacag

SEQ ID NO: 199929 - RNA, 32 nt, Human
gggguggagggugggacacaugaggauguaua

SEQ ID NO: 199930 - RNA, 19 nt, Human
gggguggagguugcaguga

SEQ ID NO: 199931 - RNA, 32 nt, Human
gggguggauugggaggugaguggaggagaguc

SEQ ID NO: 199932 - RNA, 32 nt, Human
gggguggcacaggggucccacagcaggucuuc

SEQ ID NO: 199933 - RNA, 32 nt, Human
gggguggcaggcaggguggggcacugugagcu

SEQ ID NO: 199934 - RNA, 32 nt, Human
gggguggccacaucggcuuccuggaagggcug

SEQ ID NO: 199935 - RNA, 32 nt, Human
gggguggccaugagauucagcccuguggaggu

SEQ ID NO: 199936 - RNA, 32 nt, Human
gggguggccugccagacccaggaguggagggc

SEQ ID NO: 199937 - RNA, 20 nt, Human
gggguggcgggucgggggga

SEQ ID NO: 199938 - RNA, 32 nt, Human
gggguggcguuugggaacuugugcccccuaaa

SEQ ID NO: 199939 - RNA, 17 nt, Human
gggguggcuccuggcca

SEQ ID NO: 199940 - RNA, 25 nt, Human
gggguggcuguuggaggaagggagg

SEQ ID NO: 199941 - RNA, 32 nt, Human
gggguggcuuauggcuucuuuauccucugauu

SEQ ID NO: 199942 - RNA, 32 nt, Human
ggggugggaacccaggagguggaguggcuggg

SEQ ID NO: 199943 - RNA, 32 nt, Human
ggggugggaaccuggggugugguuccagaaau

SEQ ID NO: 199944 - RNA, 32 nt, Human
ggggugggaaggugcagagagggcaggaggga

SEQ ID NO: 199945 - RNA, 22 nt, Human
ggggugggagagaagauacaga

SEQ ID NO: 199946 - RNA, 32 nt, Human
ggggugggagagaauauuugagggagggcugg

SEQ ID NO: 199947 - RNA, 32 nt, Human
ggggugggagaggagguagauggggaagaaau

SEQ ID NO: 199948 - RNA, 32 nt, Human
ggggugggagcaagggacagggagcagggcag

SEQ ID NO: 199949 - RNA, 32 nt, Human
ggggugggagccaaaaagaguugagaggccag

SEQ ID NO: 199950 - RNA, 32 nt, Human
ggggugggagcuguugccgaagcugccacagc

SEQ ID NO: 199951 - RNA, 32 nt, Human
ggggugggaggcagcaggggucagccugggca

SEQ ID NO: 199952 - RNA, 32 nt, Human
ggggugggaggggcuucccguuauccacgagg

SEQ ID NO: 199953 - RNA, 32 nt, Human
ggggugggagugaaugcuaaaagcagaucguc

SEQ ID NO: 199954 - RNA, 32 nt, Human
ggggugggaguggggagcaggaauugcacuca

SEQ ID NO: 199955 - RNA, 32 nt, Human
ggggugggaucggggagcaggaagccuguggg

SEQ ID NO: 199956 - RNA, 32 nt, Human
ggggugggaucuuccccggaaguuuugguuaa

SEQ ID NO: 199957 - RNA, 32 nt, Human
ggggugggauggccagaggaggggacaguguu

SEQ ID NO: 199958 - RNA, 19 nt, Human
ggggugggcaggggcgcgg

SEQ ID NO: 199959 - RNA, 32 nt, Human
ggggugggcgcgaaggaagugggacgaggcua

SEQ ID NO: 199960 - RNA, 32 nt, Human
ggggugggcguugccuggguucuugggagaga

SEQ ID NO: 199961 - RNA, 32 nt, Human
ggggugggcucuucaacaucucaggcuguggc

SEQ ID NO: 199962 - RNA, 32 nt, Human
ggggugggcugcagaacggggugggaacuggg

SEQ ID NO: 199963 - RNA, 32 nt, Human
ggggugggcuggaguccucuccagagaggcuc

SEQ ID NO: 199964 - RNA, 32 nt, Human
gggguggggaagagagacgucagcgggaccug

SEQ ID NO: 199965 - RNA, 32 nt, Human
gggguggggacccagaguuagcaguggggaug

SEQ ID NO: 199966 - RNA, 32 nt, Human
gggguggggacugccaagccacccuaagaccu

SEQ ID NO: 199967 - RNA, 32 nt, Human
gggguggggaggacaaggggguggguaagggg

SEQ ID NO: 199968 - RNA, 32 nt, Human
gggguggggagggagaaggugguagcuuaugu

SEQ ID NO: 199969 - RNA, 32 nt, Human
gggguggggaugaagaauugacugggagcuga

SEQ ID NO: 199970 - RNA, 31 nt, Human
gggguggggcagagagaauacugacagcaga

SEQ ID NO: 199971 - RNA, 32 nt, Human
gggguggggccagccaaucagcgaucagacuc

SEQ ID NO: 199972 - RNA, 32 nt, Human
gggguggggccccagccgagaucacagcgcga

SEQ ID NO: 199973 - RNA, 32 nt, Human
gggguggggccccagcuggagguuauaaaaca

SEQ ID NO: 199974 - RNA, 32 nt, Human
gggguggggccuaggacucugcauuucuuaca

SEQ ID NO: 199975 - RNA, 32 nt, Human
gggguggggcucaccuguccucuuaagggaag

SEQ ID NO: 199976 - RNA, 32 nt, Human
gggguggggcuggacgucaggagccaagaugg

SEQ ID NO: 199977 - RNA, 32 nt, Human
gggguggggcugggaccacagguggcuucucu

SEQ ID NO: 199978 - RNA, 32 nt, Human
gggguggggcugugggggcagcugggguugga

SEQ ID NO: 199979 - RNA, 32 nt, Human
ggggugggggcaggcaggaggcauggauggga

SEQ ID NO: 199980 - RNA, 32 nt, Human
ggggugggggcaggggacucugggcaguaugu

SEQ ID NO: 199981 - RNA, 32 nt, Human
ggggugggggcugggugcaguggcucacaccu

SEQ ID NO: 199982 - RNA, 16 nt, Human
gggguggggggcucuc

SEQ ID NO: 199983 - RNA, 32 nt, Human
gggguggggguauguugggaggcguggcggga

SEQ ID NO: 199984 - RNA, 32 nt, Human
ggggugggggucccugagcucauguggugccc

SEQ ID NO: 199985 - RNA, 32 nt, Human
ggggugggggugccaggugagguggagcauuc

SEQ ID NO: 199986 - RNA, 32 nt, Human
gggguggggguggagugggggcuuccaggugg

SEQ ID NO: 199987 - RNA, 32 nt, Human
gggguggggguggaucacuugaggucaggagu

SEQ ID NO: 199988 - RNA, 32 nt, Human
gggguggggugaggcccggcuagccuccucuc

SEQ ID NO: 199989 - RNA, 32 nt, Human
gggguggggugaggggauggagagggagggcu

SEQ ID NO: 199990 - RNA, 32 nt, Human
gggguggggugagguaggaccggcggagaggu

SEQ ID NO: 199991 - RNA, 32 nt, Human
gggguggggugaguccaaagaagcacgggcug

SEQ ID NO: 199992 - RNA, 32 nt, Human
gggguggggugucuggggcagcugcaguggcu

SEQ ID NO: 199993 - RNA, 32 nt, Human
gggguggguacugaggccugcucaggcccugg

SEQ ID NO: 199994 - RNA, 32 nt, Human
ggggugggugagagagacaggcagcucggauu

SEQ ID NO: 199995 - RNA, 32 nt, Human
ggggugggugagguguggggagcccagccccu

SEQ ID NO: 199996 - RNA, 32 nt, Human
ggggugggugcccgaagguugcaugauggaau

SEQ ID NO: 199997 - RNA, 32 nt, Human
ggggugggugccugggugggugccuggcugug

SEQ ID NO: 199998 - RNA, 32 nt, Human
gggguggguggaggaggagggcacgugucugc

SEQ ID NO: 199999 - RNA, 32 nt, Human
ggggugggugggcagaggacgggguaauguga

SEQ ID NO: 200000 - RNA, 32 nt, Human
gggguggguggggccaggaggaagauggcggc

SEQ ID NO: 200001 - RNA, 32 nt, Human
ggggugggugguggccugggaggcagggccug

SEQ ID NO: 200002 - RNA, 19 nt, Human
gggguggugccaagggugg

SEQ ID NO: 200003 - RNA, 32 nt, Human
gggguggugccacugcgcuccagccuggggga

SEQ ID NO: 200004 - RNA, 32 nt, Human
gggguggugcugcugcuaugagcugcaccauc

SEQ ID NO: 200005 - RNA, 32 nt, Human
gggguggugcuggaguccaggugacaguuccu

SEQ ID NO: 200006 - RNA, 22 nt, Human
ggggugguggagagauggaagg

SEQ ID NO: 200007 - RNA, 32 nt, Human
gggguggugggcaguggggaauagaugguuga

SEQ ID NO: 200008 - RNA, 32 nt, Human
ggggugguggggcgggggcccggugcuggccg

SEQ ID NO: 200009 - RNA, 18 nt, Human
gggguggugggggugcug

SEQ ID NO: 200010 - RNA, 25 nt, Human
ggggugguggucaacgggagggagg

SEQ ID NO: 200011 - RNA, 17 nt, Human
ggggugguguagggccc

SEQ ID NO: 200012 - RNA, 17 nt, Human
ggggugguuaaagggag

SEQ ID NO: 200013 - RNA, 32 nt, Human
ggggugguugaggcuaaguugggaucuaggag

SEQ ID NO: 200014 - RNA, 32 nt, Human
gggguguagaugggggaacugugaauacuuga

SEQ ID NO: 200015 - RNA, 32 nt, Human
gggguguagugaggacccacggggagccuggg

SEQ ID NO: 200016 - RNA, 32 nt, Human
ggggugucaaaccugcagccaccagcuucuga

SEQ ID NO: 200017 - RNA, 18 nt, Human
ggggugucacagacccuc

SEQ ID NO: 200018 - RNA, 32 nt, Human
ggggugucauuuaucaaccucucuccagccca

SEQ ID NO: 200019 - RNA, 32 nt, Human
gggguguccugggcagggaaggucagugucac

SEQ ID NO: 200020 - RNA, 16 nt, Human
gggguguccuguccuc

SEQ ID NO: 200021 - RNA, 32 nt, Human
ggggugucucagggugggcagugggggugggg

SEQ ID NO: 200022 - RNA, 18 nt, Human
ggggugucucggggcccu

SEQ ID NO: 200023 - RNA, 32 nt, Human
ggggugucugccucucugcagguguucaccac

SEQ ID NO: 200024 - RNA, 32 nt, Human
ggggugugaauggugggcgggagcagcuaugu

SEQ ID NO: 200025 - RNA, 32 nt, Human
ggggugugccuguagucccagcuacuugagag

SEQ ID NO: 200026 - RNA, 32 nt, Human
ggggugugcucugggugggaggagcagcguac

SEQ ID NO: 200027 - RNA, 32 nt, Human
ggggugugcugcugcugcuccccagcccacca

SEQ ID NO: 200028 - RNA, 32 nt, Human
gggguguggaagggcaagcugcaccaaagacg

SEQ ID NO: 200029 - RNA, 32 nt, Human
gggguguggagcagccaagauggagccggcag

SEQ ID NO: 200030 - RNA, 32 nt, Human
gggguguggcaggaggacaggaaugcagugga

SEQ ID NO: 200031 - RNA, 32 nt, Human
ggggugugggaaggguaccacagaucaggccg

SEQ ID NO: 200032 - RNA, 32 nt, Human
ggggugugggcuagguuauaaggaagugguac

SEQ ID NO: 200033 - RNA, 16 nt, Human
gggguguggggcccuc

SEQ ID NO: 200034 - RNA, 32 nt, Human
gggguguggggugugggcuggaagcacuggcu

SEQ ID NO: 200035 - RNA, 32 nt, Human
ggggugugggugaccugcccucaaaccuugcc

SEQ ID NO: 200036 - RNA, 32 nt, Human
gggguguggugcuggcuagaggucccugcccc

SEQ ID NO: 200037 - RNA, 19 nt, Human
gggguguguaacaggguca

SEQ ID NO: 200038 - RNA, 20 nt, Human
gggguguguaugaagggggg

SEQ ID NO: 200039 - RNA, 22 nt, Human
ggggugugucccacaaacgcug

SEQ ID NO: 200040 - RNA, 29 nt, Human
ggggugugucuguaggugucucugggccu

SEQ ID NO: 200041 - RNA, 21 nt, Human
ggggugugugagugaaggggg

SEQ ID NO: 200042 - RNA, 32 nt, Human
ggggugugugggcugccucagcuggcagaggg

SEQ ID NO: 200043 - RNA, 32 nt, Human
ggggugugugggcugucucagcuggcagaggg

SEQ ID NO: 200044 - RNA, 32 nt, Human
gggguguguguaggcuucagagacaugggauc

SEQ ID NO: 200045 - RNA, 32 nt, Human
gggguguuccagggugcauguuuccuucccau

SEQ ID NO: 200046 - RNA, 32 nt, Human
gggguguucccucugcugaugauggaugcccc

SEQ ID NO: 200047 - RNA, 32 nt, Human
gggguguucugguuuugagaacggcagaccca

SEQ ID NO: 200048 - RNA, 32 nt, Human
gggguguugagugaggggugacccaggaagaa

SEQ ID NO: 200049 - RNA, 21 nt, Human
gggguguugcggagaagggag

SEQ ID NO: 200050 - RNA, 32 nt, Human
gggguguugcuggagcagaugagauaaaaucc

SEQ ID NO: 200051 - RNA, 32 nt, Human
gggguguuuuucucccccuccccuguccccgc

SEQ ID NO: 200052 - RNA, 32 nt, Human
gggguuaaaaguuauaagacagcagugauacc

SEQ ID NO: 200053 - RNA, 32 nt, Human
gggguuaauaaauggcuuauccuucucuccaa

SEQ ID NO: 200054 - RNA, 23 nt, Human
gggguuaauccguauucugcggg

SEQ ID NO: 200055 - RNA, 32 nt, Human
gggguuacagugagcuguggucacaccacugu

SEQ ID NO: 200056 - RNA, 17 nt, Human
gggguuaccuccaugug

SEQ ID NO: 200057 - RNA, 32 nt, Human
gggguuaggaagggagaggcagcucuuccuuc

SEQ ID NO: 200058 - RNA, 32 nt, Human
gggguuagggcaaaacauucaaacuucaucag

SEQ ID NO: 200059 - RNA, 20 nt, Human
gggguuauuucugugccaga

SEQ ID NO: 200060 - RNA, 32 nt, Human
gggguucaagcaauccucccaccucaacccac

SEQ ID NO: 200061 - RNA, 32 nt, Human
gggguucaagcgauccucccaccucagccucc

SEQ ID NO: 200062 - RNA, 19 nt, Human
gggguucacauagggcccc

SEQ ID NO: 200063 - RNA, 21 nt, Human
gggguucacauagggccccag

SEQ ID NO: 200064 - RNA, 32 nt, Human
gggguucaccuugccugcugccuagacaaagc

SEQ ID NO: 200065 - RNA, 32 nt, Human
gggguucaggaauccgugcauguggccagggc

SEQ ID NO: 200066 - RNA, 32 nt, Human
gggguucaugaggcaagaguggauggagccug

SEQ ID NO: 200067 - RNA, 22 nt, Human
gggguuccaggucuccaguggg

SEQ ID NO: 200068 - RNA, 32 nt, Human
gggguuccaugaguuaucaugaauuuuaaagu

SEQ ID NO: 200069 - RNA, 32 nt, Human
gggguucccaggagccaugcguggccugcaga

SEQ ID NO: 200070 - RNA, 32 nt, Human
gggguucccaucaucccucccugauauuguau

SEQ ID NO: 200071 - RNA, 22 nt, Human
gggguucccuacuucgaaucca

SEQ ID NO: 200072 - RNA, 32 nt, Human
gggguuccuccaccgucagggcccaggcuccu

SEQ ID NO: 200073 - RNA, 32 nt, Human
gggguuccucuaaccagaaccagcuuccuagc

SEQ ID NO: 200074 - RNA, 32 nt, Human
gggguuccugcucugccccugcccguccccac

SEQ ID NO: 200075 - RNA, 32 nt, Human
gggguucuagaaaauauagguuccuauaauaa

SEQ ID NO: 200076 - RNA, 32 nt, Human
gggguucucccagaagugaggggccuuucccu

SEQ ID NO: 200077 - RNA, 32 nt, Human
gggguucucuugguuuugucauguggaaagug

SEQ ID NO: 200078 - RNA, 32 nt, Human
gggguucuggaagacggcagagcugccgccau

SEQ ID NO: 200079 - RNA, 32 nt, Human
gggguucuggggaccagggaggugcagguguc

SEQ ID NO: 200080 - RNA, 32 nt, Human
gggguucuguacuaauuuccauggccgguggc

SEQ ID NO: 200081 - RNA, 32 nt, Human
gggguucuuagaacuuuuugugguguguguug

SEQ ID NO: 200082 - RNA, 18 nt, Human
gggguugacacaaugcug

SEQ ID NO: 200083 - RNA, 32 nt, Human
gggguugacgaaggagaagcauucagagggca

SEQ ID NO: 200084 - RNA, 32 nt, Human
gggguugagccccagcugagccgagggcucgc

SEQ ID NO: 200085 - RNA, 32 nt, Human
gggguugagcuggcaccccgggaugugaugua

SEQ ID NO: 200086 - RNA, 32 nt, Human
gggguugaugccagacaucaccagguuguaga

SEQ ID NO: 200087 - RNA, 23 nt, Human
gggguugcacagacagacccugu

SEQ ID NO: 200088 - RNA, 17 nt, Human
gggguugcacuggucug

SEQ ID NO: 200089 - RNA, 32 nt, Human
gggguugcagagcucaggagccaguccuggcc

SEQ ID NO: 200090 - RNA, 32 nt, Human
gggguugcagugaccugagauugcgccauugc

SEQ ID NO: 200091 - RNA, 32 nt, Human
gggguugcagugagccaagaucacaccacugc

SEQ ID NO: 200092 - RNA, 32 nt, Human
gggguugcagugagccaagaucgugccacugc

SEQ ID NO: 200093 - RNA, 32 nt, Human
gggguugcagugagccgagaucacaccacugc

SEQ ID NO: 200094 - RNA, 32 nt, Human
gggguugcagugagccgagaucuggccauugc

SEQ ID NO: 200095 - RNA, 32 nt, Human
gggguugcagugagccgagauugcgccacugc

SEQ ID NO: 200096 - RNA, 32 nt, Human
gggguugcagugagcugagacggugucacugc

SEQ ID NO: 200097 - RNA, 32 nt, Human
gggguugcagugagucgagaucgccccauugu

SEQ ID NO: 200098 - RNA, 32 nt, Human
gggguugcaguggcuuggggguaggugccaug

SEQ ID NO: 200099 - RNA, 17 nt, Human
gggguugccacacaaca

SEQ ID NO: 200100 - RNA, 32 nt, Human
gggguugccaucccgggguacaugucaccagu

SEQ ID NO: 200101 - RNA, 32 nt, Human
gggguugccgaggcaaccuccaagucccagau

SEQ ID NO: 200102 - RNA, 32 nt, Human
gggguugccugggaccagguccucagaaacug

SEQ ID NO: 200103 - RNA, 32 nt, Human
gggguugcgucugaggccugcccccugggcug

SEQ ID NO: 200104 - RNA, 32 nt, Human
gggguugcuccuggaugcugucugggaggcuu

SEQ ID NO: 200105 - RNA, 20 nt, Human
gggguuggaagagccgucug

SEQ ID NO: 200106 - RNA, 32 nt, Human
gggguuggagccagcgaccgucgguagcagca

SEQ ID NO: 200107 - RNA, 32 nt, Human
gggguuggaggugagaaucccagguaggguag

SEQ ID NO: 200108 - RNA, 32 nt, Human
gggguuggagugagccaggacugugacacugc

SEQ ID NO: 200109 - RNA, 32 nt, Human
gggguuggauguguauagacaaaaagaauuau

SEQ ID NO: 200110 - RNA, 32 nt, Human
gggguuggcaccucugccccgacagaaugggg

SEQ ID NO: 200111 - RNA, 32 nt, Human
gggguuggcucccacagcuuuuggcaguuccu

SEQ ID NO: 200112 - RNA, 32 nt, Human
gggguuggcuucccuggcaugauggacaaagg

SEQ ID NO: 200113 - RNA, 22 nt, Human
gggguugggaagcacagucugg

SEQ ID NO: 200114 - RNA, 32 nt, Human
gggguugggaggaaggugggaaugguuaauag

SEQ ID NO: 200115 - RNA, 32 nt, Human
gggguuggggacacauagacacccucagugga

SEQ ID NO: 200116 - RNA, 32 nt, Human
gggguuggggcgcggaggaggagcagcagcgg

SEQ ID NO: 200117 - RNA, 32 nt, Human
gggguugggggcugugucucuccaucccuuag

SEQ ID NO: 200118 - RNA, 32 nt, Human
gggguuggggguggaggucuagaggugagcuc

SEQ ID NO: 200119 - RNA, 32 nt, Human
gggguugggguggagggugcggcccggaguug

SEQ ID NO: 200120 - RNA, 23 nt, Human
gggguuggguguacggguucugu

SEQ ID NO: 200121 - RNA, 32 nt, Human
gggguugguaacaccuggaaagaaggacucuu

SEQ ID NO: 200122 - RNA, 32 nt, Human
gggguugguagcagagaaagagaagagaacag

SEQ ID NO: 200123 - RNA, 32 nt, Human
gggguuggucaaggccaccucugccucuaguc

SEQ ID NO: 200124 - RNA, 32 nt, Human
gggguugguggaggguggaggcaguucugcca

SEQ ID NO: 200125 - RNA, 20 nt, Human
gggguugguucuucagguca

SEQ ID NO: 200126 - RNA, 32 nt, Human
gggguuguaaauuccagguguuacacugaccu

SEQ ID NO: 200127 - RNA, 32 nt, Human
gggguuguagugagccaaguucgugccaucgg

SEQ ID NO: 200128 - RNA, 32 nt, Human
gggguugugaggacucuggggaagaaaagcca

SEQ ID NO: 200129 - RNA, 20 nt, Human
gggguugugauccagcucca

SEQ ID NO: 200130 - RNA, 32 nt, Human
gggguugugggguggaggcuggcagcugaaag

SEQ ID NO: 200131 - RNA, 32 nt, Human
gggguuguggguggucagggagagguagggug

SEQ ID NO: 200132 - RNA, 32 nt, Human
gggguuguggugagccgagacugugucauugc

SEQ ID NO: 200133 - RNA, 32 nt, Human
gggguuguggugagccgugaucaugccauugc

SEQ ID NO: 200134 - RNA, 32 nt, Human
gggguugugugugguuucuuucuuuugaauuu

SEQ ID NO: 200135 - RNA, 32 nt, Human
gggguuguucuauacaccuguguccuuacccc

SEQ ID NO: 200136 - RNA, 32 nt, Human
gggguuguugugagccaagauugcaccacggc

SEQ ID NO: 200137 - RNA, 32 nt, Human
gggguuucaaugcuguugggaaccaggaaggu

SEQ ID NO: 200138 - RNA, 32 nt, Human
gggguuucaccaugguagccaggcuggucuca

SEQ ID NO: 200139 - RNA, 18 nt, Human
gggguuucaccauguugg

SEQ ID NO: 200140 - RNA, 32 nt, Human
gggguuucaccauguuggucaggauggucuca

SEQ ID NO: 200141 - RNA, 32 nt, Human
gggguuucaccauguuggucaggauggucuug

SEQ ID NO: 200142 - RNA, 32 nt, Human
gggguuucaccauguuggucaggcuggucuug

SEQ ID NO: 200143 - RNA, 20 nt, Human
gggguuucacccgggcccuc

SEQ ID NO: 200144 - RNA, 32 nt, Human
gggguuucacccuauuggucaggcuggucuug

SEQ ID NO: 200145 - RNA, 32 nt, Human
gggguuucacuauauuggccaggcuggucucg

SEQ ID NO: 200146 - RNA, 32 nt, Human
gggguuucacucugucacccaggcugggaauu

SEQ ID NO: 200147 - RNA, 32 nt, Human
gggguuucagugagcugagaucaugccacugc

SEQ ID NO: 200148 - RNA, 32 nt, Human
gggguuuccuucaaacucuuggcuccaccuag

SEQ ID NO: 200149 - RNA, 32 nt, Human
gggguuucgccagguuggccaggcuggucuug

SEQ ID NO: 200150 - RNA, 32 nt, Human
gggguuucgccauguuacacuggcugguguug

SEQ ID NO: 200151 - RNA, 32 nt, Human
gggguuucguccuguuacccaggcugguuuug

SEQ ID NO: 200152 - RNA, 32 nt, Human
gggguuucuagacuggggccuggccaccccuu

SEQ ID NO: 200153 - RNA, 32 nt, Human
gggguuucuccacauuggucaggcuggucuug

SEQ ID NO: 200154 - RNA, 32 nt, Human
gggguuucuccacguuggccaggcuggucuca

SEQ ID NO: 200155 - RNA, 32 nt, Human
gggguuucuccauauuggucaggcuggucuug

SEQ ID NO: 200156 - RNA, 32 nt, Human
gggguuucuccaugguggucaggcuggucucg

SEQ ID NO: 200157 - RNA, 32 nt, Human
gggguuucuccaugucggucaggcuggucucg

SEQ ID NO: 200158 - RNA, 32 nt, Human
gggguuucuccauguuagucaggcuggucucc

SEQ ID NO: 200159 - RNA, 32 nt, Human
gggguuucuccauguuggccaggcuggucuug

SEQ ID NO: 200160 - RNA, 32 nt, Human
gggguuucuccauguuggucaggcuggccucg

SEQ ID NO: 200161 - RNA, 32 nt, Human
gggguuucuccauguuggucaggcuggucuca

SEQ ID NO: 200162 - RNA, 32 nt, Human
gggguuucuccauguuggucaggcuggucucg

SEQ ID NO: 200163 - RNA, 32 nt, Human
gggguuucuccauguuggucaggcuggucucu

SEQ ID NO: 200164 - RNA, 32 nt, Human
gggguuucuccauguuggucaggcuggucuga

SEQ ID NO: 200165 - RNA, 32 nt, Human
gggguuucuccauguuggucaggcuggucuua

SEQ ID NO: 200166 - RNA, 32 nt, Human
gggguuucuccauguuggucaggcuggucuuc

SEQ ID NO: 200167 - RNA, 32 nt, Human
gggguuucuccauguuggucaggcuggucuug

SEQ ID NO: 200168 - RNA, 32 nt, Human
gggguuucuccauguuucccaggcuggucuca

SEQ ID NO: 200169 - RNA, 32 nt, Human
gggguuucugccuuugcuucucuugucauucu

SEQ ID NO: 200170 - RNA, 31 nt, Human
gggguuugacuucucccagcgcagaugagag

SEQ ID NO: 200171 - RNA, 32 nt, Human
gggguuugaguggagguauggagccagagagg

SEQ ID NO: 200172 - RNA, 32 nt, Human
gggguuugggagucaggccugggcaggacccu

SEQ ID NO: 200173 - RNA, 32 nt, Human
gggguuuggggagcuuggccgauucgucuauc

SEQ ID NO: 200174 - RNA, 32 nt, Human
gggguuugguaaugagaaaccaggacaggcca

SEQ ID NO: 200175 - RNA, 32 nt, Human
gggguuugucaugggggaacugcccuuuaaau

SEQ ID NO: 200176 - RNA, 32 nt, Human
gggguuuguugaugaaccuccacccccacccc

SEQ ID NO: 200177 - RNA, 32 nt, Human
gggguuuuccuugagcguugcccauuacuuua

SEQ ID NO: 200178 - RNA, 32 nt, Human
gggguuuucuaugugaaacacaugccaguuuu

SEQ ID NO: 200179 - RNA, 32 nt, Human
gggguuuucuguccauccugugcaguauuugg

SEQ ID NO: 200180 - RNA, 32 nt, Human
gggguuuugguagaauuggaccuacucuagga

SEQ ID NO: 200181 - RNA, 32 nt, Human
gggguuuuugcugucccuccccucagcgccga

SEQ ID NO: 200182 - RNA, 32 nt, Human
ggguaaaacuaggacacagaaaacauugggaa

SEQ ID NO: 200183 - RNA, 32 nt, Human
ggguaaaaugagcucagggggcagugaggugc

SEQ ID NO: 200184 - RNA, 32 nt, Human
ggguaaacaggcucuguauccguggcagcggc

SEQ ID NO: 200185 - RNA, 32 nt, Human
ggguaaagagaaaaggagggagaagggaagga

SEQ ID NO: 200186 - RNA, 32 nt, Human
ggguaaagguaaaaaugagauuuggaauagug

SEQ ID NO: 200187 - RNA, 32 nt, Human
ggguaaaguaccaccugcuacucagaaagcua

SEQ ID NO: 200188 - RNA, 32 nt, Human
ggguaaaucucuucugcggaaucucagaaagu

SEQ ID NO: 200189 - RNA, 32 nt, Human
ggguaaauuauauacauauauguaugaaugua

SEQ ID NO: 200190 - RNA, 32 nt, Human
ggguaaauucucagauuuccaaacugcuguac

SEQ ID NO: 200191 - RNA, 32 nt, Human
ggguaacaaagugagacccccaucucuacaaa

SEQ ID NO: 200192 - RNA, 23 nt, Human
ggguaacaaagugagaccucccu

SEQ ID NO: 200193 - RNA, 32 nt, Human
ggguaacacagcaacggagaacagaugcaggu

SEQ ID NO: 200194 - RNA, 32 nt, Human
ggguaacacagcccuggauucucccagauauu

SEQ ID NO: 200195 - RNA, 32 nt, Human
ggguaacacagguccugcuguggccuuuccuu

SEQ ID NO: 200196 - RNA, 32 nt, Human
ggguaacacccugggaguuuuaguagcuugag

SEQ ID NO: 200197 - RNA, 32 nt, Human
ggguaacaccucaaaccuauggauucauucac

SEQ ID NO: 200198 - RNA, 32 nt, Human
ggguaacacuuccaaauaugggaggaaaggac

SEQ ID NO: 200199 - RNA, 32 nt, Human
ggguaacagacccaaaagccgaugggacggcc

SEQ ID NO: 200200 - RNA, 24 nt, Human
ggguaacagagcaagacucugucu

SEQ ID NO: 200201 - RNA, 22 nt, Human
ggguaacagagcgagacuuucu

SEQ ID NO: 200202 - RNA, 24 nt, Human
ggguaacagagggagacucugucu

SEQ ID NO: 200203 - RNA, 24 nt, Human
ggguaacagagugagacuccaucu

SEQ ID NO: 200204 - RNA, 22 nt, Human
ggguaacagagugagacugucu

SEQ ID NO: 200205 - RNA, 22 nt, Human
ggguaacagcgagacucugucu

SEQ ID NO: 200206 - RNA, 32 nt, Human
ggguaacaggcagagauuggaacaguuuggag

SEQ ID NO: 200207 - RNA, 32 nt, Human
ggguaacaggcagaggcuggaacaguuuggag

SEQ ID NO: 200208 - RNA, 32 nt, Human
ggguaacaggcagagguuagaacaauuuggag

SEQ ID NO: 200209 - RNA, 32 nt, Human
ggguaacaggcagagguuggaacaguuuggag

SEQ ID NO: 200210 - RNA, 24 nt, Human
ggguaacauagugagacccuaucu

SEQ ID NO: 200211 - RNA, 32 nt, Human
ggguaacaucacaguagauucgucuucuggau

SEQ ID NO: 200212 - RNA, 32 nt, Human
ggguaacauggccagaccccaucucuauuuau

SEQ ID NO: 200213 - RNA, 32 nt, Human
ggguaacauggugaaaucccauaucuacaaaa

SEQ ID NO: 200214 - RNA, 32 nt, Human
ggguaaccagcagaagguaacagaacgaggcu

SEQ ID NO: 200215 - RNA, 32 nt, Human
ggguaacccugccuuguucugucauccagggc

SEQ ID NO: 200216 - RNA, 32 nt, Human
ggguaaccuugauauuuguauuuuaauaguac

SEQ ID NO: 200217 - RNA, 21 nt, Human
ggguaacggaacagccaccua

SEQ ID NO: 200218 - RNA, 31 nt, Human
ggguaacggcgagcgcguggggccaagaaag

SEQ ID NO: 200219 - RNA, 32 nt, Human
ggguaacggcuccugggccucucccgggucaa

SEQ ID NO: 200220 - RNA, 32 nt, Human
ggguaacggucgcuggugaguuuaaaugagca

SEQ ID NO: 200221 - RNA, 32 nt, Human
ggguaacuggaggcggggccagggccucagcg

SEQ ID NO: 200222 - RNA, 32 nt, Human
ggguaagaaagggcacauggcacaguuaaagu

SEQ ID NO: 200223 - RNA, 32 nt, Human
ggguaagacauucugggguuucuugaaucuug

SEQ ID NO: 200224 - RNA, 32 nt, Human
ggguaagacuaaaucuguaagcucuuugaaac

SEQ ID NO: 200225 - RNA, 24 nt, Human
ggguaagagagcgagacucugccu

SEQ ID NO: 200226 - RNA, 32 nt, Human
ggguaagaggggcuggcucucagucccugccu

SEQ ID NO: 200227 - RNA, 32 nt, Human
ggguaagcuaacugggcggagguggaggugca

SEQ ID NO: 200228 - RNA, 32 nt, Human
ggguaagcuagagagaaaaagaaagaacuguc

SEQ ID NO: 200229 - RNA, 32 nt, Human
ggguaaggacagugggauuuaugugaacauca

SEQ ID NO: 200230 - RNA, 32 nt, Human
ggguaaggacuugccagagaacuacaacgagg

SEQ ID NO: 200231 - RNA, 22 nt, Human
ggguaaggaggcucccaucccg

SEQ ID NO: 200232 - RNA, 32 nt, Human
ggguaagggcacauguggaagcaaagaaaccu

SEQ ID NO: 200233 - RNA, 32 nt, Human
ggguaagggcagugccugcugugccuguuggc

SEQ ID NO: 200234 - RNA, 20 nt, Human
ggguaagggggcuucugaug

SEQ ID NO: 200235 - RNA, 32 nt, Human
ggguaagggucuucccuugagcuccagggggu

SEQ ID NO: 200236 - RNA, 32 nt, Human
ggguaaggugucccucggaucuguccucuucg

SEQ ID NO: 200237 - RNA, 32 nt, Human
ggguaagugguuuucuucucugcuuggcaguu

SEQ ID NO: 200238 - RNA, 32 nt, Human
ggguaaguguccccucauuuuagagaaagauc

SEQ ID NO: 200239 - RNA, 32 nt, Human
ggguaauauauugugacaauuuuugcaacuua

SEQ ID NO: 200240 - RNA, 32 nt, Human
ggguaauauggcaaaaccccaucucuacuaaa

SEQ ID NO: 200241 - RNA, 32 nt, Human
ggguaaucaucuuuacuucugguuccugaaau

SEQ ID NO: 200242 - RNA, 32 nt, Human
ggguaauggagaugaccaguccacacugauaa

SEQ ID NO: 200243 - RNA, 18 nt, Human
ggguaaugugaaggccca

SEQ ID NO: 200244 - RNA, 32 nt, Human
ggguaauuggcuucucaguccugaaggacuau

SEQ ID NO: 200245 - RNA, 22 nt, Human
ggguacaaaggucuggccuccu

SEQ ID NO: 200246 - RNA, 32 nt, Human
ggguacaacagcuuuggaauacauucugguuu

SEQ ID NO: 200247 - RNA, 32 nt, Human
ggguacaaccaccaugacaacugccgggaggg

SEQ ID NO: 200248 - RNA, 32 nt, Human
ggguacacauuuccuaucuuccuccagcuucc

SEQ ID NO: 200249 - RNA, 20 nt, Human
ggguacagaagaggcuucag

SEQ ID NO: 200250 - RNA, 32 nt, Human
ggguacagaugggcauaggugcagugagugca

SEQ ID NO: 200251 - RNA, 32 nt, Human
ggguacagcaggcagggacuaugcugaagugg

SEQ ID NO: 200252 - RNA, 32 nt, Human
ggguacagccucccuccuggcugcuuucacgg

SEQ ID NO: 200253 - RNA, 21 nt, Human
ggguacaggaagcugugugca

SEQ ID NO: 200254 - RNA, 32 nt, Human
ggguacaggaggaggacgccgcagaggugcgu

SEQ ID NO: 200255 - RNA, 32 nt, Human
ggguacaggggcugcgcagaguuuguccccga

SEQ ID NO: 200256 - RNA, 32 nt, Human
ggguacaggugauuggcugagcacagacugcg

SEQ ID NO: 200257 - RNA, 32 nt, Human
ggguacaggugggcacaagugcagaaggugca

SEQ ID NO: 200258 - RNA, 32 nt, Human
ggguacaggugggcauaggugcagugagugca

SEQ ID NO: 200259 - RNA, 32 nt, Human
ggguacaguuguucaggcugugcacugcacaa

SEQ ID NO: 200260 - RNA, 22 nt, Human
ggguacauaugugaacauucca

SEQ ID NO: 200261 - RNA, 32 nt, Human
ggguacaucacucagccuuucuggacccaauu

SEQ ID NO: 200262 - RNA, 32 nt, Human
ggguaccaacagcugcucgcuguucccauguc

SEQ ID NO: 200263 - RNA, 32 nt, Human
ggguaccaagcacuuugcagacugcuuuaccu

SEQ ID NO: 200264 - RNA, 32 nt, Human
ggguaccacaaaccgcaugggaugucuaggaa

SEQ ID NO: 200265 - RNA, 32 nt, Human
ggguaccaggagcugaggagugugagcgugcc

SEQ ID NO: 200266 - RNA, 20 nt, Human
ggguacccccgcggcugggc

SEQ ID NO: 200267 - RNA, 20 nt, Human
ggguaccccuccacagcgac

SEQ ID NO: 200268 - RNA, 32 nt, Human
ggguaccgggcgcgggcagagcgcggcggcgc

SEQ ID NO: 200269 - RNA, 32 nt, Human
ggguaccgucuucucccuauucccucucucuc

SEQ ID NO: 200270 - RNA, 32 nt, Human
ggguaccuauaaucccagcuacucgggaggcu

SEQ ID NO: 200271 - RNA, 32 nt, Human
ggguaccuauaaucccagcuacuugggaggcu

SEQ ID NO: 200272 - RNA, 32 nt, Human
ggguaccucauuuugucccuugacuuuagugu

SEQ ID NO: 200273 - RNA, 32 nt, Human
ggguaccuguaaucccagcuacuagggaggcu

SEQ ID NO: 200274 - RNA, 32 nt, Human
ggguaccuguaaucccagcuacucaggaggcu

SEQ ID NO: 200275 - RNA, 32 nt, Human
ggguaccuguaaucccagcuacucgggaggcu

SEQ ID NO: 200276 - RNA, 32 nt, Human
ggguaccuguaaucccagcuacuugggaggcu

SEQ ID NO: 200277 - RNA, 32 nt, Human
ggguaccuguaaucccaguuacuuuggaggcu

SEQ ID NO: 200278 - RNA, 32 nt, Human
ggguaccuguagucccagcuacuagggaggcu

SEQ ID NO: 200279 - RNA, 32 nt, Human
ggguaccuguagucccagcuacuccggaggcu

SEQ ID NO: 200280 - RNA, 32 nt, Human
ggguacgaagggaggacaagugcagugucgug

SEQ ID NO: 200281 - RNA, 32 nt, Human
ggguacguucaagaggaaggugccucgugaac

SEQ ID NO: 200282 - RNA, 32 nt, Human
ggguacuaggcaguuuccaaaguagcauggua

SEQ ID NO: 200283 - RNA, 32 nt, Human
ggguacuccaggucucuccaaacugcuauaua

SEQ ID NO: 200284 - RNA, 32 nt, Human
ggguacucugacugcaacaucuuucaccccau

SEQ ID NO: 200285 - RNA, 32 nt, Human
ggguacugcccauccagcacccaugucaugcc

SEQ ID NO: 200286 - RNA, 32 nt, Human
ggguacugggccucaacgggaaccugagacag

SEQ ID NO: 200287 - RNA, 32 nt, Human
ggguacuggggccugccgcauccuguccuguc

SEQ ID NO: 200288 - RNA, 32 nt, Human
ggguacugggucccccucagcacccuccacag

SEQ ID NO: 200289 - RNA, 32 nt, Human
ggguacugguaguaccagcuacucgagaggcu

SEQ ID NO: 200290 - RNA, 32 nt, Human
ggguacuguguuacugccugggugguaggauc

SEQ ID NO: 200291 - RNA, 32 nt, Human
ggguacuguuacugugaugcuauugacuuagu

SEQ ID NO: 200292 - RNA, 18 nt, Human
ggguacuuagaggcccag

SEQ ID NO: 200293 - RNA, 22 nt, Human
ggguacuucguagacucugccu

SEQ ID NO: 200294 - RNA, 32 nt, Human
ggguacuugguacuuaguuugcauuuacuauc

SEQ ID NO: 200295 - RNA, 32 nt, Human
ggguacuugguggggacggaggagcuagggac

SEQ ID NO: 200296 - RNA, 32 nt, Human
ggguacuuugguagccugaguggucuuuuuca

SEQ ID NO: 200297 - RNA, 32 nt, Human
ggguagaaaacuucaaggaaaauaagugaaau

SEQ ID NO: 200298 - RNA, 32 nt, Human
ggguagaaagagacucucguguggagguuaca

SEQ ID NO: 200299 - RNA, 32 nt, Human
ggguagaagagauuccagaaucaucaucugug

SEQ ID NO: 200300 - RNA, 32 nt, Human
ggguagaagcggaagccaggggcagaggcugg

SEQ ID NO: 200301 - RNA, 20 nt, Human
ggguagaaggcaaagcugcc

SEQ ID NO: 200302 - RNA, 32 nt, Human
ggguagaaggcggagccggagccccggaaccc

SEQ ID NO: 200303 - RNA, 32 nt, Human
ggguagacccuccagccccaauagcccuagua

SEQ ID NO: 200304 - RNA, 32 nt, Human
ggguagaccuaaggguguuuguuagucucaaa

SEQ ID NO: 200305 - RNA, 32 nt, Human
ggguagagacgggguuucaccguguuagccaa

SEQ ID NO: 200306 - RNA, 19 nt, Human
ggguagaggaaaggcucca

SEQ ID NO: 200307 - RNA, 32 nt, Human
ggguagaggagaagguugaagcuguggagcua

SEQ ID NO: 200308 - RNA, 32 nt, Human
ggguagaggccaggagaaaggaaagaguugua

SEQ ID NO: 200309 - RNA, 32 nt, Human
ggguagaggcuucuuagauucucccagcaucc

SEQ ID NO: 200310 - RNA, 21 nt, Human
ggguagagggacauccaggga

SEQ ID NO: 200311 - RNA, 32 nt, Human
ggguagagucagugacagggaggcagcccucc

SEQ ID NO: 200312 - RNA, 32 nt, Human
ggguagagucauggccucgagcacaggugacc

SEQ ID NO: 200313 - RNA, 32 nt, Human
ggguagagucucccaagccaaaauuuugacau

SEQ ID NO: 200314 - RNA, 32 nt, Human
ggguagauaagaaaugacucugggagaggauu

SEQ ID NO: 200315 - RNA, 22 nt, Human
ggguagaucacuugaggucagg

SEQ ID NO: 200316 - RNA, 32 nt, Human
ggguagcaacagcaucuuccacaguuuuccaa

SEQ ID NO: 200317 - RNA, 32 nt, Human
ggguagcaaucuuguugccacaugugcagcaa

SEQ ID NO: 200318 - RNA, 32 nt, Human
ggguagcacaucaaaauggugaugaaccuggc

SEQ ID NO: 200319 - RNA, 18 nt, Human
ggguagcagcagaggcag

SEQ ID NO: 200320 - RNA, 32 nt, Human
ggguagcagcuggugggacacugaucugugag

SEQ ID NO: 200321 - RNA, 32 nt, Human
ggguagcaggugccuggagucucagguggcug

SEQ ID NO: 200322 - RNA, 32 nt, Human
ggguagcagugucucaagaguggucaaaagcu

SEQ ID NO: 200323 - RNA, 32 nt, Human
ggguagcauaugggaacuucaucucuaauuuu

SEQ ID NO: 200324 - RNA, 32 nt, Human
ggguagcauggcagaggcuggagaggauuaac

SEQ ID NO: 200325 - RNA, 32 nt, Human
ggguagccagaggcuggggcggcuguggagcc

SEQ ID NO: 200326 - RNA, 32 nt, Human
ggguagccagguguuacaaaggugcugcuccu

SEQ ID NO: 200327 - RNA, 32 nt, Human
ggguagcccauguuaugugacuaucuuuauga

SEQ ID NO: 200328 - RNA, 32 nt, Human
ggguagccuggaacagggagacgguguggaga

SEQ ID NO: 200329 - RNA, 32 nt, Human
ggguagccugggauuaggccucaucaucaucc

SEQ ID NO: 200330 - RNA, 32 nt, Human
ggguagcugggagcucuggucagucccaguga

SEQ ID NO: 200331 - RNA, 32 nt, Human
ggguaggaagggugggaagggagaagcagaca

SEQ ID NO: 200332 - RNA, 32 nt, Human
ggguaggaaugagcaaguugggaauuuuagac

SEQ ID NO: 200333 - RNA, 32 nt, Human
ggguaggagaacagccauuccacauguguucc

SEQ ID NO: 200334 - RNA, 21 nt, Human
ggguaggagacagcugggagg

SEQ ID NO: 200335 - RNA, 32 nt, Human
ggguaggagagagaggccuaagaggcucacug

SEQ ID NO: 200336 - RNA, 21 nt, Human
ggguaggaggcagggccgcug

SEQ ID NO: 200337 - RNA, 32 nt, Human
ggguaggagggccaggcaaaguucaccagcuu

SEQ ID NO: 200338 - RNA, 32 nt, Human
ggguaggaggggcguuagagccagcagggacc

SEQ ID NO: 200339 - RNA, 32 nt, Human
ggguaggagggugggaaggaaacaaccauguc

SEQ ID NO: 200340 - RNA, 32 nt, Human
ggguaggagugcaacccaggagcaacgcucaa

SEQ ID NO: 200341 - RNA, 32 nt, Human
ggguaggagugggcguggcggagccagcuccg

SEQ ID NO: 200342 - RNA, 32 nt, Human
ggguaggcaagaggaauagaaaagggaagaau

SEQ ID NO: 200343 - RNA, 32 nt, Human
ggguaggcagcaaagaagaaagagugcgauau

SEQ ID NO: 200344 - RNA, 32 nt, Human
ggguaggcaggcacagagugcugucugcugag

SEQ ID NO: 200345 - RNA, 32 nt, Human
ggguaggcagugccugcuucugcuccaucagg

SEQ ID NO: 200346 - RNA, 32 nt, Human
ggguaggccaaguggagguaucagggacgucg

SEQ ID NO: 200347 - RNA, 32 nt, Human
ggguaggccuguagacuaacgcuguuuacacc

SEQ ID NO: 200348 - RNA, 32 nt, Human
ggguaggcugagucaugaaagggacaucauua

SEQ ID NO: 200349 - RNA, 31 nt, Human
ggguagggaauacuggagauauuuguacaga

SEQ ID NO: 200350 - RNA, 21 nt, Human
ggguagggagacaagcagcag

SEQ ID NO: 200351 - RNA, 32 nt, Human
ggguagggagagaagcugagaccaggaccggu

SEQ ID NO: 200352 - RNA, 32 nt, Human
ggguagggagagaguaucaggagcucaguguu

SEQ ID NO: 200353 - RNA, 32 nt, Human
ggguagggagagaguaucaggagcucaguuuu

SEQ ID NO: 200354 - RNA, 32 nt, Human
ggguagggagcugucuaauccaagucccaggc

SEQ ID NO: 200355 - RNA, 32 nt, Human
ggguagggcacaccuccccacagccacccucc

SEQ ID NO: 200356 - RNA, 32 nt, Human
ggguagggccuguucccaccacccuagcugga

SEQ ID NO: 200357 - RNA, 32 nt, Human
ggguagggcugaaaguccuaaccuucuaaucc

SEQ ID NO: 200358 - RNA, 32 nt, Human
ggguaggggaagcccagggugggcagggggug

SEQ ID NO: 200359 - RNA, 32 nt, Human
ggguaggggcaucauuucagugagaaucagau

SEQ ID NO: 200360 - RNA, 32 nt, Human
ggguaggggccaggccccuccaggccgucacu

SEQ ID NO: 200361 - RNA, 32 nt, Human
ggguaggggccaggcuagccugagugcaccca

SEQ ID NO: 200362 - RNA, 32 nt, Human
ggguaggggcugggaacagugugcaaggcagc

SEQ ID NO: 200363 - RNA, 32 nt, Human
ggguaggggugaggguauaaguagaucagagu

SEQ ID NO: 200364 - RNA, 31 nt, Human
ggguagggguuucagccccacccucaggaag

SEQ ID NO: 200365 - RNA, 32 nt, Human
ggguagggguuucagccccacccucaggaaga

SEQ ID NO: 200366 - RNA, 32 nt, Human
ggguagggucucucaguaaaucaagucccuua

SEQ ID NO: 200367 - RNA, 32 nt, Human
ggguaggugagguguugggcaguugugggaac

SEQ ID NO: 200368 - RNA, 32 nt, Human
ggguagguucuggaggcucaagcaacaaggag

SEQ ID NO: 200369 - RNA, 32 nt, Human
ggguagguuuguuuggaacagaaaucaaagac

SEQ ID NO: 200370 - RNA, 32 nt, Human
ggguaguacccagccugcuccccgaguccagc

SEQ ID NO: 200371 - RNA, 32 nt, Human
ggguagucacauuaauagaagauucaugagug

SEQ ID NO: 200372 - RNA, 19 nt, Human
ggguaguccgcccccuccu

SEQ ID NO: 200373 - RNA, 32 nt, Human
ggguagugaaggaauaaugagagaaggcaggc

SEQ ID NO: 200374 - RNA, 32 nt, Human
ggguagugagcgguguuucaggaugugagggc

SEQ ID NO: 200375 - RNA, 32 nt, Human
ggguagugaggauagagaaaaaguguuugucu

SEQ ID NO: 200376 - RNA, 30 nt, Human
ggguagugccuguaaucagaaaacaacuua

SEQ ID NO: 200377 - RNA, 32 nt, Human
ggguaguggagggauuuuguccccagcagugg

SEQ ID NO: 200378 - RNA, 32 nt, Human
ggguaguggggaggucagggaggcggggccaa

SEQ ID NO: 200379 - RNA, 32 nt, Human
ggguaguuagcuauuucugggugacccagucu

SEQ ID NO: 200380 - RNA, 32 nt, Human
ggguaguuccugcugugagugguuacagcuga

SEQ ID NO: 200381 - RNA, 32 nt, Human
ggguaguuggggucccagaaagccggggguag

SEQ ID NO: 200382 - RNA, 32 nt, Human
ggguaguuuaucaauccucccgccucauccuu

SEQ ID NO: 200383 - RNA, 32 nt, Human
ggguaguuucuccagucuccccagucuguugg

SEQ ID NO: 200384 - RNA, 32 nt, Human
ggguaguuuucuaucugucaugggcucuagca

SEQ ID NO: 200385 - RNA, 32 nt, Human
ggguauaagccccagcccugcucauucccacu

SEQ ID NO: 200386 - RNA, 32 nt, Human
ggguauagacccaggagaggaagguuaagaga

SEQ ID NO: 200387 - RNA, 32 nt, Human
ggguauagaguauagaggcuauuucuauaauu

SEQ ID NO: 200388 - RNA, 32 nt, Human
ggguauauucacacgauggaaucccagacugc

SEQ ID NO: 200389 - RNA, 31 nt, Human
ggguaucacagcugugucagugccauggccc

SEQ ID NO: 200390 - RNA, 32 nt, Human
ggguaucagcaacuguccucaucagucuccau

SEQ ID NO: 200391 - RNA, 32 nt, Human
ggguaucccuuuaggauggaacuagguccugg

SEQ ID NO: 200392 - RNA, 32 nt, Human
ggguauccugacuguuggaccccugguccagg

SEQ ID NO: 200393 - RNA, 32 nt, Human
ggguaucgucgugggacuuggaaauuuguugu

SEQ ID NO: 200394 - RNA, 32 nt, Human
ggguaucuccaccucuccaacacaagcucaau

SEQ ID NO: 200395 - RNA, 32 nt, Human
ggguaucuggacaacagagaugccaugauauc

SEQ ID NO: 200396 - RNA, 32 nt, Human
ggguaucugugccuugcccucccugagagggg

SEQ ID NO: 200397 - RNA, 32 nt, Human
ggguaucuucauagcagccuaggaaaccuuaa

SEQ ID NO: 200398 - RNA, 32 nt, Human
ggguaucuuggcugaaaauuuuguuuuacaua

SEQ ID NO: 200399 - RNA, 28 nt, Human
ggguaucuuggugcugccuguauugguc

SEQ ID NO: 200400 - RNA, 32 nt, Human
ggguaucuuuucaacuuuaauagagacuauuc

SEQ ID NO: 200401 - RNA, 32 nt, Human
ggguaugcaagccuaaaucuuuguacacuuug

SEQ ID NO: 200402 - RNA, 31 nt, Human
ggguaugcagucuucugacaucccacagagc

SEQ ID NO: 200403 - RNA, 32 nt, Human
ggguaugcguggguguauguuugggaagaaaa

SEQ ID NO: 200404 - RNA, 32 nt, Human
ggguaugcuucaugaccuguguuuuggugagu

SEQ ID NO: 200405 - RNA, 32 nt, Human
ggguaugggaaugagcacauaacacuauggac

SEQ ID NO: 200406 - RNA, 32 nt, Human
ggguauggggugaagcuucuucugcugucucu

SEQ ID NO: 200407 - RNA, 32 nt, Human
ggguaugggugaguggcagagggguaaggaga

SEQ ID NO: 200408 - RNA, 32 nt, Human
ggguauggucuugagccaguaaucuuuguacu

SEQ ID NO: 200409 - RNA, 23 nt, Human
ggguauggugacucaugccugua

SEQ ID NO: 200410 - RNA, 23 nt, Human
ggguaugguggcacaugccugua

SEQ ID NO: 200411 - RNA, 23 nt, Human
ggguaugguggcucacaacugua

SEQ ID NO: 200412 - RNA, 23 nt, Human
ggguaugguggcucaugccugua

SEQ ID NO: 200413 - RNA, 23 nt, Human
ggguauggugguacaugccugua

SEQ ID NO: 200414 - RNA, 18 nt, Human
ggguauggugguggugga

SEQ ID NO: 200415 - RNA, 32 nt, Human
ggguauguaaugggguggaauuacugguucau

SEQ ID NO: 200416 - RNA, 32 nt, Human
ggguaugugguggaugccagggcgugcuccag

SEQ ID NO: 200417 - RNA, 32 nt, Human
ggguauguucuucauagguagugcuugugucu

SEQ ID NO: 200418 - RNA, 32 nt, Human
ggguauuaugaauaauaucacaggguguacag

SEQ ID NO: 200419 - RNA, 32 nt, Human
ggguauucagagugggcugggccccugggcga

SEQ ID NO: 200420 - RNA, 32 nt, Human
ggguauucagaugccaccuacaugcuuauuuu

SEQ ID NO: 200421 - RNA, 32 nt, Human
ggguauugagagccagugggcuuuuguguagc

SEQ ID NO: 200422 - RNA, 31 nt, Human
ggguauuggacaauuuguagcuaagacuccc

SEQ ID NO: 200423 - RNA, 32 nt, Human
ggguauuggggaaggcaggaaagggaaaagga

SEQ ID NO: 200424 - RNA, 32 nt, Human
ggguauuugccuggcuuuguugcuucucuauc

SEQ ID NO: 200425 - RNA, 25 nt, Human
ggguauuuuucuuggggguggagua

SEQ ID NO: 200426 - RNA, 32 nt, Human
gggucaaagaaggaggaggaggguggggagcu

SEQ ID NO: 200427 - RNA, 32 nt, Human
gggucaacaaauuuuugugucugugaggggcc

SEQ ID NO: 200428 - RNA, 32 nt, Human
gggucaaccaggaagugaaggauuggaagaga

SEQ ID NO: 200429 - RNA, 32 nt, Human
gggucaacccuguaauuccagcacuuugggag

SEQ ID NO: 200430 - RNA, 23 nt, Human
gggucaagauagcagcagcaggu

SEQ ID NO: 200431 - RNA, 32 nt, Human
gggucaagcagaagaggaaggcagggauccca

SEQ ID NO: 200432 - RNA, 32 nt, Human
gggucaagcagaggaggaaggcagggguacca

SEQ ID NO: 200433 - RNA, 32 nt, Human
gggucaagcaguggaggaaggcagggauccca

SEQ ID NO: 200434 - RNA, 32 nt, Human
gggucaagccugcucugccacaggguuggaug

SEQ ID NO: 200435 - RNA, 32 nt, Human
gggucaaggagaggaggaagacagggauccua

SEQ ID NO: 200436 - RNA, 19 nt, Human
gggucaaggcagaggcagg

SEQ ID NO: 200437 - RNA, 32 nt, Human
gggucaaggugguaagcugugcagugaaguca

SEQ ID NO: 200438 - RNA, 32 nt, Human
gggucaagucagagggcucuaccuggaaggac

SEQ ID NO: 200439 - RNA, 32 nt, Human
gggucaagugaucuuuaugggaugccuauuua

SEQ ID NO: 200440 - RNA, 32 nt, Human
gggucaaguucaguacuugguaauaagacaaa

SEQ ID NO: 200441 - RNA, 32 nt, Human
gggucaaguuugggugacuggugcagaguuac

SEQ ID NO: 200442 - RNA, 32 nt, Human
gggucacaacagcaauugcguuucuaaaacau

SEQ ID NO: 200443 - RNA, 19 nt, Human
gggucacaagaggcuccag

SEQ ID NO: 200444 - RNA, 31 nt, Human
gggucacacagcuaaagccgaggugaccagu

SEQ ID NO: 200445 - RNA, 32 nt, Human
gggucacaccuguaaucccagcacuuugggag

SEQ ID NO: 200446 - RNA, 32 nt, Human
gggucacacugggucugggggcucccuggagc

SEQ ID NO: 200447 - RNA, 32 nt, Human
gggucacagagggagccgcaggguuggcagcg

SEQ ID NO: 200448 - RNA, 32 nt, Human
gggucacagcuggucuguguguccaguucccu

SEQ ID NO: 200449 - RNA, 32 nt, Human
gggucacagggacagugcagagccaggaccag

SEQ ID NO: 200450 - RNA, 32 nt, Human
gggucacaggucagggagguccuggccgucca

SEQ ID NO: 200451 - RNA, 32 nt, Human
gggucacagguuaccgucucuuucagcucacc

SEQ ID NO: 200452 - RNA, 32 nt, Human
gggucacagucucccugaaggagcugcagagu

SEQ ID NO: 200453 - RNA, 32 nt, Human
gggucacagugauagggccacccuggauggga

SEQ ID NO: 200454 - RNA, 32 nt, Human
gggucacaucuguaaucucagcucuuuggaag

SEQ ID NO: 200455 - RNA, 32 nt, Human
gggucacaugaacagauguugcaguguaccug

SEQ ID NO: 200456 - RNA, 32 nt, Human
gggucacaugacaaagccccaucucuacaaaa

SEQ ID NO: 200457 - RNA, 31 nt, Human
gggucacaugagagagaacaaauggcugugg

SEQ ID NO: 200458 - RNA, 17 nt, Human
gggucaccaagugcaag

SEQ ID NO: 200459 - RNA, 21 nt, Human
gggucaccagcugagauguca

SEQ ID NO: 200460 - RNA, 32 nt, Human
gggucaccagcugagaugucaccugcuuuauu

SEQ ID NO: 200461 - RNA, 32 nt, Human
gggucacccaaauagcugagugcaguccuugc

SEQ ID NO: 200462 - RNA, 32 nt, Human
gggucacccagucacauugggaagggcuguga

SEQ ID NO: 200463 - RNA, 32 nt, Human
gggucacccugcagguucccauaaaaacgauu

SEQ ID NO: 200464 - RNA, 32 nt, Human
gggucacccugcuucuugcccugcugugugug

SEQ ID NO: 200465 - RNA, 32 nt, Human
gggucacccuuguggggccuggacaugacgca

SEQ ID NO: 200466 - RNA, 32 nt, Human
gggucaccugggaagagucugcagagccuuug

SEQ ID NO: 200467 - RNA, 21 nt, Human
gggucacgcagcuuccuggug

SEQ ID NO: 200468 - RNA, 32 nt, Human
gggucacgccuguaaucccagcacuuugggag

SEQ ID NO: 200469 - RNA, 18 nt, Human
gggucacgcggcgggcac

SEQ ID NO: 200470 - RNA, 32 nt, Human
gggucacggcggcggggagagguggagccgcg

SEQ ID NO: 200471 - RNA, 32 nt, Human
gggucacuccagcccgggccucccagaacacc

SEQ ID NO: 200472 - RNA, 32 nt, Human
gggucacuccugggggaugacggcguggacga

SEQ ID NO: 200473 - RNA, 32 nt, Human
gggucacugaaccacugcuucucuuccgaaag

SEQ ID NO: 200474 - RNA, 32 nt, Human
gggucacugaaccacugcuucucuuuugaaag

SEQ ID NO: 200475 - RNA, 32 nt, Human
gggucacugcaaacuccgccucccagguucac

SEQ ID NO: 200476 - RNA, 32 nt, Human
gggucacugcaaccuccgccucccggguucaa

SEQ ID NO: 200477 - RNA, 32 nt, Human
gggucacugcaaccucuaccuccaggguucaa

SEQ ID NO: 200478 - RNA, 32 nt, Human
gggucacugcaaccucugccuccuggguucaa

SEQ ID NO: 200479 - RNA, 32 nt, Human
gggucacugcaagcucugccucccaaguucau

SEQ ID NO: 200480 - RNA, 32 nt, Human
gggucacugcagcugccuggaccugcugaccg

SEQ ID NO: 200481 - RNA, 32 nt, Human
gggucacuuuaaaaacuacuagcuucaacuac

SEQ ID NO: 200482 - RNA, 32 nt, Human
gggucagaagagagggugaguccuccagaacu

SEQ ID NO: 200483 - RNA, 32 nt, Human
gggucagaagauuccugaagcugggguuggug

SEQ ID NO: 200484 - RNA, 32 nt, Human
gggucagaagcagggacuggggcaggcgagcc

SEQ ID NO: 200485 - RNA, 32 nt, Human
gggucagaccaacagccaguguccucagaugg

SEQ ID NO: 200486 - RNA, 32 nt, Human
gggucagaccaccauccggguacucuaagucc

SEQ ID NO: 200487 - RNA, 32 nt, Human
gggucagagcuagagaccuacagggaagagua

SEQ ID NO: 200488 - RNA, 31 nt, Human
gggucagaggagagagacugaauuggacuaa

SEQ ID NO: 200489 - RNA, 32 nt, Human
gggucagaggucaggaaggagaaccuggggag

SEQ ID NO: 200490 - RNA, 32 nt, Human
gggucagaugcugcugugagaggcacagagcc

SEQ ID NO: 200491 - RNA, 32 nt, Human
gggucagaugcuguggacucugggaccugcag

SEQ ID NO: 200492 - RNA, 32 nt, Human
gggucagauggagagaccucuagggagaaaga

SEQ ID NO: 200493 - RNA, 20 nt, Human
gggucagauucggcggcagg

SEQ ID NO: 200494 - RNA, 32 nt, Human
gggucagcagagcccaggaggcgacacugccc

SEQ ID NO: 200495 - RNA, 19 nt, Human
gggucagcagagcugccau

SEQ ID NO: 200496 - RNA, 32 nt, Human
gggucagcagaggggcgcucacgcucucgcca

SEQ ID NO: 200497 - RNA, 32 nt, Human
gggucagcaggcagagacagggccaaggcccc

SEQ ID NO: 200498 - RNA, 32 nt, Human
gggucagcaguggaaugaagggccuuagaacc

SEQ ID NO: 200499 - RNA, 19 nt, Human
gggucagcauggaaauuca

SEQ ID NO: 200500 - RNA, 32 nt, Human
gggucagccagagguuccuccaggcaggagcu

SEQ ID NO: 200501 - RNA, 32 nt, Human
gggucagcccaagauucuucagucuggacuau

SEQ ID NO: 200502 - RNA, 32 nt, Human
gggucagccugcugugcccacacacacccacu

SEQ ID NO: 200503 - RNA, 32 nt, Human
gggucagccuuccgggaacuggagucugucuc

SEQ ID NO: 200504 - RNA, 20 nt, Human
gggucagcucuggauucaua

SEQ ID NO: 200505 - RNA, 32 nt, Human
gggucagcucuuccuuauguuccugaaggaaa

SEQ ID NO: 200506 - RNA, 32 nt, Human
gggucaggaaggaaggagaggcuuuuccagaa

SEQ ID NO: 200507 - RNA, 32 nt, Human
gggucaggagagaaugggggaggaggcgguca

SEQ ID NO: 200508 - RNA, 32 nt, Human
gggucaggaguucgagaccacccuggacaaua

SEQ ID NO: 200509 - RNA, 32 nt, Human
gggucaggcauuggucugacuugcugugaaga

SEQ ID NO: 200510 - RNA, 32 nt, Human
gggucaggccgccagccggaggcugcaccaga

SEQ ID NO: 200511 - RNA, 22 nt, Human
gggucagggaagacugggccuc

SEQ ID NO: 200512 - RNA, 32 nt, Human
gggucagggaaggagcauggacuggggucagu

SEQ ID NO: 200513 - RNA, 20 nt, Human
gggucagggaaugagccagg

SEQ ID NO: 200514 - RNA, 22 nt, Human
gggucagggaccuccucagcag

SEQ ID NO: 200515 - RNA, 21 nt, Human
gggucagggagauugcagaag

SEQ ID NO: 200516 - RNA, 20 nt, Human
gggucagggaggaaagcugg

SEQ ID NO: 200517 - RNA, 21 nt, Human
gggucagggaggaaaggcaga

SEQ ID NO: 200518 - RNA, 23 nt, Human
gggucagggaggaaaggcagaag

SEQ ID NO: 200519 - RNA, 21 nt, Human
gggucagggaggaggaacggu

SEQ ID NO: 200520 - RNA, 32 nt, Human
gggucagggaggaggaacggugggggugggca

SEQ ID NO: 200521 - RNA, 22 nt, Human
gggucagggaggggucuagagg

SEQ ID NO: 200522 - RNA, 32 nt, Human
gggucagggagguggagacacugcugaaauca

SEQ ID NO: 200523 - RNA, 32 nt, Human
gggucagggaugagccaagggaagagagacag

SEQ ID NO: 200524 - RNA, 32 nt, Human
gggucagggccaagcccucagcaucugcuccu

SEQ ID NO: 200525 - RNA, 23 nt, Human
gggucagggcuggagggcacagg

SEQ ID NO: 200526 - RNA, 32 nt, Human
gggucagggcuggagggcacaggcagagggca

SEQ ID NO: 200527 - RNA, 19 nt, Human
gggucaggggacagcuucu

SEQ ID NO: 200528 - RNA, 32 nt, Human
gggucagggggccacagagaaggggcagcuga

SEQ ID NO: 200529 - RNA, 32 nt, Human
gggucagggguuguuucuaccugcuuugucua

SEQ ID NO: 200530 - RNA, 23 nt, Human
gggucagggugcugaggcaacag

SEQ ID NO: 200531 - RNA, 20 nt, Human
gggucaggguggggcaacag

SEQ ID NO: 200532 - RNA, 32 nt, Human
gggucagguagagugagcuggggagggaagug

SEQ ID NO: 200533 - RNA, 23 nt, Human
gggucaggugucgaaccagcagg

SEQ ID NO: 200534 - RNA, 32 nt, Human
gggucagucuccaaacuggaguuugguggcua

SEQ ID NO: 200535 - RNA, 32 nt, Human
gggucaguuaaugcuacaguuacuguauagca

SEQ ID NO: 200536 - RNA, 32 nt, Human
gggucaguuagaaccagaguauggagagucug

SEQ ID NO: 200537 - RNA, 32 nt, Human
gggucaguugaugcaaggaagggaaacaagga

SEQ ID NO: 200538 - RNA, 32 nt, Human
gggucauaaagaggaggagaaacagggugagu

SEQ ID NO: 200539 - RNA, 32 nt, Human
gggucauagggucacuucaccugacccaggcc

SEQ ID NO: 200540 - RNA, 32 nt, Human
gggucaucacccaggcucuggggcugaggagg

SEQ ID NO: 200541 - RNA, 32 nt, Human
gggucaucugacaucaggagaaucacuugaac

SEQ ID NO: 200542 - RNA, 32 nt, Human
gggucaugcacugagguccacagaccuacugc

SEQ ID NO: 200543 - RNA, 32 nt, Human
gggucauggaaauguguauuuucuccaaaccu

SEQ ID NO: 200544 - RNA, 32 nt, Human
gggucaugggcccugagcuggcccaggagacc

SEQ ID NO: 200545 - RNA, 32 nt, Human
gggucauguuuugugguuaauucccccacaua

SEQ ID NO: 200546 - RNA, 32 nt, Human
gggucauuacuuuuugcaauagcacacucaaa

SEQ ID NO: 200547 - RNA, 32 nt, Human
gggucauuguagccucaaccucccaggcucca

SEQ ID NO: 200548 - RNA, 32 nt, Human
gggucauugugcugguaaaagccucuauuacg

SEQ ID NO: 200549 - RNA, 32 nt, Human
gggucauuuggugccaaacauggaggugggca

SEQ ID NO: 200550 - RNA, 32 nt, Human
ggguccaaaaugucaaaggacucugcaugcug

SEQ ID NO: 200551 - RNA, 32 nt, Human
ggguccaaacacuccucuuccuccaggucauu

SEQ ID NO: 200552 - RNA, 32 nt, Human
ggguccaaagggcacuccugcccacgcccagg

SEQ ID NO: 200553 - RNA, 23 nt, Human
ggguccaacgaagccccaugagc

SEQ ID NO: 200554 - RNA, 25 nt, Human
ggguccaagccccagcucuuccacu

SEQ ID NO: 200555 - RNA, 32 nt, Human
ggguccacagucacucuuugugccucaguuua

SEQ ID NO: 200556 - RNA, 22 nt, Human
ggguccacauagaaaagcaaga

SEQ ID NO: 200557 - RNA, 32 nt, Human
ggguccaccaccccaaaccccuccacgaagac

SEQ ID NO: 200558 - RNA, 32 nt, Human
ggguccacguuucuccccggcuccucugggcu

SEQ ID NO: 200559 - RNA, 32 nt, Human
ggguccagaacagggaugucuaccugguaaua

SEQ ID NO: 200560 - RNA, 32 nt, Human
ggguccagaaggagggggugaccuccggccag

SEQ ID NO: 200561 - RNA, 32 nt, Human
ggguccagagagaagggagugggugggcaggg

SEQ ID NO: 200562 - RNA, 32 nt, Human
ggguccagagccuaauuuauauucacuauccu

SEQ ID NO: 200563 - RNA, 32 nt, Human
ggguccagagccucgugagaggucaccgggau

SEQ ID NO: 200564 - RNA, 32 nt, Human
ggguccagagucucacucuguugcccaggcug

SEQ ID NO: 200565 - RNA, 32 nt, Human
ggguccagaugguccaggcccucuccauggac

SEQ ID NO: 200566 - RNA, 32 nt, Human
ggguccagccuggcuagaguuagaaggcagac

SEQ ID NO: 200567 - RNA, 32 nt, Human
ggguccagcuacucaggaggccaaggugggag

SEQ ID NO: 200568 - RNA, 32 nt, Human
ggguccagcuacucgggaggcugaggcaggag

SEQ ID NO: 200569 - RNA, 32 nt, Human
ggguccagcucuguucagggugggacuccagg

SEQ ID NO: 200570 - RNA, 32 nt, Human
ggguccagcuuauccugggugcucugugauca

SEQ ID NO: 200571 - RNA, 23 nt, Human
ggguccaggagcaccucugucca

SEQ ID NO: 200572 - RNA, 32 nt, Human
ggguccaggagguggaggcugcagugagcuau

SEQ ID NO: 200573 - RNA, 32 nt, Human
ggguccaggccacccccucagccuccacagcc

SEQ ID NO: 200574 - RNA, 15 nt, Human
ggguccagggcccuc

SEQ ID NO: 200575 - RNA, 16 nt, Human
ggguccagggccucuc

SEQ ID NO: 200576 - RNA, 18 nt, Human
ggguccaggggccucuga

SEQ ID NO: 200577 - RNA, 32 nt, Human
ggguccaggguagaaaaacaauaaccaguggg

SEQ ID NO: 200578 - RNA, 32 nt, Human
ggguccaggucaccagccugacugcacacagc

SEQ ID NO: 200579 - RNA, 32 nt, Human
ggguccagucauugcugcugggcacagcgagg

SEQ ID NO: 200580 - RNA, 32 nt, Human
ggguccagugcucaguuucuaaccucacacag

SEQ ID NO: 200581 - RNA, 32 nt, Human
ggguccaguggaggaagaaggaaggagaggcu

SEQ ID NO: 200582 - RNA, 23 nt, Human
ggguccaguggcucacaccugua

SEQ ID NO: 200583 - RNA, 32 nt, Human
ggguccaucagcaguuuuucuuccugcauuua

SEQ ID NO: 200584 - RNA, 32 nt, Human
ggguccauccagggggacccucuccuuucugu

SEQ ID NO: 200585 - RNA, 32 nt, Human
ggguccaucucuaggggccuucccucccaggu

SEQ ID NO: 200586 - RNA, 32 nt, Human
ggguccauuucucuuggauguaaaggaguccu

SEQ ID NO: 200587 - RNA, 32 nt, Human
gggucccaaauacacacccgaguccugccaaa

SEQ ID NO: 200588 - RNA, 32 nt, Human
gggucccaacccccucccucugcuggaguuuc

SEQ ID NO: 200589 - RNA, 32 nt, Human
gggucccacacaggaugguccuuguaggagac

SEQ ID NO: 200590 - RNA, 32 nt, Human
gggucccaccagacuucugcccaccaggccua

SEQ ID NO: 200591 - RNA, 17 nt, Human
gggucccacccagugga

SEQ ID NO: 200592 - RNA, 32 nt, Human
gggucccacugccuguccagccuggcucccuu

SEQ ID NO: 200593 - RNA, 19 nt, Human
gggucccagaagggggcag

SEQ ID NO: 200594 - RNA, 31 nt, Human
gggucccagagaguuuggaguguaggauucc

SEQ ID NO: 200595 - RNA, 32 nt, Human
gggucccagagccugcucugugcacugacccc

SEQ ID NO: 200596 - RNA, 32 nt, Human
gggucccagccuggccaccagcuucccucugc

SEQ ID NO: 200597 - RNA, 23 nt, Human
gggucccagcgauucuccugccu

SEQ ID NO: 200598 - RNA, 32 nt, Human
gggucccagcgugcccuggccuuggcuuuucg

SEQ ID NO: 200599 - RNA, 32 nt, Human
gggucccagcuacucaggaggcugagguugga

SEQ ID NO: 200600 - RNA, 32 nt, Human
gggucccagcugugugauuaagaagucaacug

SEQ ID NO: 200601 - RNA, 32 nt, Human
gggucccagguaagcuggcaagaggaaagggc

SEQ ID NO: 200602 - RNA, 32 nt, Human
gggucccaguguucccuccacucccgaguggc

SEQ ID NO: 200603 - RNA, 32 nt, Human
gggucccauauaggugagggaagccugaaaaa

SEQ ID NO: 200604 - RNA, 23 nt, Human
gggucccauguccagcugccucu

SEQ ID NO: 200605 - RNA, 32 nt, Human
ggguccccagaccucugcucccagagcucaug

SEQ ID NO: 200606 - RNA, 32 nt, Human
ggguccccagcccaggagguggcuggauugca

SEQ ID NO: 200607 - RNA, 32 nt, Human
ggguccccaucaccugcuucacggccaucccu

SEQ ID NO: 200608 - RNA, 18 nt, Human
gggucccccaggacagua

SEQ ID NO: 200609 - RNA, 32 nt, Human
gggucccccgcggggcccucgcgugcggucac

SEQ ID NO: 200610 - RNA, 32 nt, Human
gggucccccuggggcccucuuuacugucacgu

SEQ ID NO: 200611 - RNA, 32 nt, Human
gggucccccuucccugccgucaucagguuccc

SEQ ID NO: 200612 - RNA, 24 nt, Human
gggucccccuugcugucugccucu

SEQ ID NO: 200613 - RNA, 32 nt, Human
ggguccccgagcucugcagcgagcccugggac

SEQ ID NO: 200614 - RNA, 32 nt, Human
ggguccccgggcgaacagaggcugcgguggac

SEQ ID NO: 200615 - RNA, 16 nt, Human
ggguccccgggugcag

SEQ ID NO: 200616 - RNA, 32 nt, Human
ggguccccuccagccagcucuuuggcggcagc

SEQ ID NO: 200617 - RNA, 32 nt, Human
ggguccccuccaggaaccaaggaguggcccuc

SEQ ID NO: 200618 - RNA, 32 nt, Human
ggguccccuccccagcucccuugggaaggaca

SEQ ID NO: 200619 - RNA, 32 nt, Human
ggguccccuccccuccugcugcucuggagugc

SEQ ID NO: 200620 - RNA, 32 nt, Human
ggguccccuccccucucagcauuuccuugucc

SEQ ID NO: 200621 - RNA, 32 nt, Human
ggguccccucucccucucccugcaauguccuu

SEQ ID NO: 200622 - RNA, 32 nt, Human
ggguccccugcaaccucccaucaaaggaugac

SEQ ID NO: 200623 - RNA, 22 nt, Human
ggguccccugcccaccugccuc

SEQ ID NO: 200624 - RNA, 32 nt, Human
ggguccccuugcugcugugggcucccuguccc

SEQ ID NO: 200625 - RNA, 32 nt, Human
gggucccgcagaagaaaacauggcugccaaag

SEQ ID NO: 200626 - RNA, 32 nt, Human
gggucccgcuggcuguccccuugucggccuga

SEQ ID NO: 200627 - RNA, 32 nt, Human
gggucccguccgcaccggcacccggcccagcc

SEQ ID NO: 200628 - RNA, 32 nt, Human
gggucccuagagugguccugcagcagccccug

SEQ ID NO: 200629 - RNA, 32 nt, Human
gggucccuccacccuugucuccugugcggcca

SEQ ID NO: 200630 - RNA, 32 nt, Human
gggucccucccucccuccuucccaaagcagau

SEQ ID NO: 200631 - RNA, 32 nt, Human
gggucccucuuuugggguacaaaggaaaggac

SEQ ID NO: 200632 - RNA, 32 nt, Human
gggucccugcagcgcuuccucccgcagccccc

SEQ ID NO: 200633 - RNA, 32 nt, Human
gggucccugccugguguucaccccagaagcua

SEQ ID NO: 200634 - RNA, 32 nt, Human
gggucccugcuggcauuccuucucuguacuag

SEQ ID NO: 200635 - RNA, 32 nt, Human
gggucccuggcgaggcagacgcugcgggugga

SEQ ID NO: 200636 - RNA, 32 nt, Human
gggucccugggcaacagucccuaggcuaagac

SEQ ID NO: 200637 - RNA, 32 nt, Human
gggucccuguccccacccuugugcacucacau

SEQ ID NO: 200638 - RNA, 32 nt, Human
gggucccuguccuccuauccugacuccugccc

SEQ ID NO: 200639 - RNA, 32 nt, Human
gggucccugucuuucucaacaggcagccccag

SEQ ID NO: 200640 - RNA, 32 nt, Human
gggucccuuacuagagagguugagugaauuug

SEQ ID NO: 200641 - RNA, 23 nt, Human
gggucccuuccauuucccaucca

SEQ ID NO: 200642 - RNA, 32 nt, Human
gggucccuuggacuggccuccuuguucaugac

SEQ ID NO: 200643 - RNA, 32 nt, Human
gggucccuugucugggaguggggugaagagcc

SEQ ID NO: 200644 - RNA, 32 nt, Human
gggucccuuugugagugucucagucuagaggu

SEQ ID NO: 200645 - RNA, 32 nt, Human
ggguccgaaauaaucuucuguguccuucaguu

SEQ ID NO: 200646 - RNA, 21 nt, Human
ggguccgaagcaucucaguca

SEQ ID NO: 200647 - RNA, 32 nt, Human
ggguccgaagcaucucagucacacgccuccac

SEQ ID NO: 200648 - RNA, 32 nt, Human
ggguccgagagggaagcuggcugggcuggcug

SEQ ID NO: 200649 - RNA, 24 nt, Human
ggguccgcacugcucugccuaaga

SEQ ID NO: 200650 - RNA, 25 nt, Human
ggguccgcggcugcucugccuggga

SEQ ID NO: 200651 - RNA, 25 nt, Human
ggguccggccggacggugucgggag

SEQ ID NO: 200652 - RNA, 30 nt, Human
ggguccggccucucccugccuguggccccu

SEQ ID NO: 200653 - RNA, 32 nt, Human
ggguccggccucucccugccuguggccccucc

SEQ ID NO: 200654 - RNA, 32 nt, Human
ggguccggcugacugcagagccugugugugag

SEQ ID NO: 200655 - RNA, 32 nt, Human
ggguccgggugccuucccagggguuagaggau

SEQ ID NO: 200656 - RNA, 18 nt, Human
ggguccgucugaguggga

SEQ ID NO: 200657 - RNA, 32 nt, Human
ggguccgugaagcccaggccaggcagccaaau

SEQ ID NO: 200658 - RNA, 32 nt, Human
ggguccgugcuuugccucccccggcuccgagg

SEQ ID NO: 200659 - RNA, 32 nt, Human
ggguccuaauggcagcagaaccacugacagag

SEQ ID NO: 200660 - RNA, 32 nt, Human
ggguccuaauuuuccuccugucuaacuggagg

SEQ ID NO: 200661 - RNA, 32 nt, Human
ggguccuagccaccggugucuccuucuacauc

SEQ ID NO: 200662 - RNA, 32 nt, Human
ggguccuagcccagugcuucuccaacacugaa

SEQ ID NO: 200663 - RNA, 32 nt, Human
ggguccucagcccuccugccugggcuauggcu

SEQ ID NO: 200664 - RNA, 32 nt, Human
ggguccucaguggauguaggcugggcgccgcg

SEQ ID NO: 200665 - RNA, 32 nt, Human
ggguccucccacccucucuccucccaccccac

SEQ ID NO: 200666 - RNA, 32 nt, Human
ggguccuccugagucccguagccucauuucuu

SEQ ID NO: 200667 - RNA, 32 nt, Human
ggguccucgggcaugaacgcgagcccaaagug

SEQ ID NO: 200668 - RNA, 32 nt, Human
ggguccucucuaucuagcuccagccucucgcc

SEQ ID NO: 200669 - RNA, 32 nt, Human
ggguccucugcccucugcaggugaccucauca

SEQ ID NO: 200670 - RNA, 32 nt, Human
ggguccucuugguucugccugcagccugccug

SEQ ID NO: 200671 - RNA, 32 nt, Human
ggguccugaauccacucuccuaucaccuuugg

SEQ ID NO: 200672 - RNA, 16 nt, Human
ggguccugaccugggg

SEQ ID NO: 200673 - RNA, 32 nt, Human
ggguccugagcaccugcuucaugaaggaagau

SEQ ID NO: 200674 - RNA, 32 nt, Human
ggguccugagggagagcugcagugagaaguug

SEQ ID NO: 200675 - RNA, 32 nt, Human
ggguccugagucuccagagcucggugaggcgu

SEQ ID NO: 200676 - RNA, 32 nt, Human
ggguccugaugccucuguuuccaaacaaggua

SEQ ID NO: 200677 - RNA, 32 nt, Human
ggguccugcagccucaauagccuggagagcaa

SEQ ID NO: 200678 - RNA, 32 nt, Human
ggguccugccaguuccaggagggccaugucug

SEQ ID NO: 200679 - RNA, 32 nt, Human
ggguccugcccgaggucuccauccucgguuuc

SEQ ID NO: 200680 - RNA, 32 nt, Human
ggguccugcucaccaucuguaccccuggcuug

SEQ ID NO: 200681 - RNA, 32 nt, Human
ggguccugcugugccaucucccugugcgccug

SEQ ID NO: 200682 - RNA, 32 nt, Human
ggguccuggagucccgccgccugcugcccggc

SEQ ID NO: 200683 - RNA, 32 nt, Human
ggguccuggcgcggggaagggguggaagggug

SEQ ID NO: 200684 - RNA, 32 nt, Human
ggguccugggagguggucgcccugcagugcaa

SEQ ID NO: 200685 - RNA, 32 nt, Human
ggguccugggcccggugaccgcaggccucagc

SEQ ID NO: 200686 - RNA, 32 nt, Human
ggguccugggcugggauagcucaacaggaagu

SEQ ID NO: 200687 - RNA, 21 nt, Human
ggguccuggggcaccugccuu

SEQ ID NO: 200688 - RNA, 32 nt, Human
ggguccuggguccuagaccaggacuuccugug

SEQ ID NO: 200689 - RNA, 22 nt, Human
ggguccugugagcgccgccucu

SEQ ID NO: 200690 - RNA, 25 nt, Human
ggguccugugcuggcuccugccccu

SEQ ID NO: 200691 - RNA, 32 nt, Human
ggguccugugugucgugcauuguugauagauu

SEQ ID NO: 200692 - RNA, 32 nt, Human
ggguccuucaaguuagcucaggaggcuuggaa

SEQ ID NO: 200693 - RNA, 30 nt, Human
ggguccuucaggccaccuccccaaugagcc

SEQ ID NO: 200694 - RNA, 32 nt, Human
ggguccuugcccagucagauggugugccaguc

SEQ ID NO: 200695 - RNA, 32 nt, Human
ggguccuugcgcgccgcggcucagggaggagc

SEQ ID NO: 200696 - RNA, 32 nt, Human
ggguccuuggagaaguggaggugugcauggug

SEQ ID NO: 200697 - RNA, 32 nt, Human
ggguccuuggcaggccugagggccagugggga

SEQ ID NO: 200698 - RNA, 32 nt, Human
ggguccuuggucccaucuaccuccucuucauc

SEQ ID NO: 200699 - RNA, 32 nt, Human
ggguccuugucccaucugccuuuggcagaggg

SEQ ID NO: 200700 - RNA, 32 nt, Human
ggguccuugugagcuccuuaucuguaggaugu

SEQ ID NO: 200701 - RNA, 32 nt, Human
ggguccuugugccaguccuccccuuuuugugu

SEQ ID NO: 200702 - RNA, 32 nt, Human
ggguccuugugucccugccgcugaagaauggg

SEQ ID NO: 200703 - RNA, 24 nt, Human
ggguccuuuucccacucuuccacu

SEQ ID NO: 200704 - RNA, 32 nt, Human
gggucgaaggccagugcuccaggccuucuuca

SEQ ID NO: 200705 - RNA, 32 nt, Human
gggucgaccccauacagagaacucagcuugaa

SEQ ID NO: 200706 - RNA, 24 nt, Human
gggucgagcgccugagauccuguu

SEQ ID NO: 200707 - RNA, 32 nt, Human
gggucgaggcugcuuccguuuccaucccggac

SEQ ID NO: 200708 - RNA, 32 nt, Human
gggucgagugcggcucaagccuguaaucccag

SEQ ID NO: 200709 - RNA, 32 nt, Human
gggucgaucacugaggucaggaguucgagacu

SEQ ID NO: 200710 - RNA, 32 nt, Human
gggucgaugggugcuccucucccugcaggcug

SEQ ID NO: 200711 - RNA, 20 nt, Human
gggucgcaccgggcuagcug

SEQ ID NO: 200712 - RNA, 18 nt, Human
gggucgcagcccaggccc

SEQ ID NO: 200713 - RNA, 21 nt, Human
gggucgcagcgagcucugccu

SEQ ID NO: 200714 - RNA, 32 nt, Human
gggucgccacuccucugcuacacagcacggcu

SEQ ID NO: 200715 - RNA, 32 nt, Human
gggucgccacugcacccagccugugucuucca

SEQ ID NO: 200716 - RNA, 18 nt, Human
gggucgccccgccggcgc

SEQ ID NO: 200717 - RNA, 32 nt, Human
gggucgcgcggcugugugugaggagugagccu

SEQ ID NO: 200718 - RNA, 18 nt, Human
gggucgcggaggaggcag

SEQ ID NO: 200719 - RNA, 32 nt, Human
gggucgcucuccgcuguuuccucugccaccau

SEQ ID NO: 200720 - RNA, 32 nt, Human
gggucgcugcagccucaaccuccugggcucaa

SEQ ID NO: 200721 - RNA, 32 nt, Human
gggucggauucugccaguuucugcucugcagc

SEQ ID NO: 200722 - RNA, 32 nt, Human
gggucggccgcaauccagccugggcggagccg

SEQ ID NO: 200723 - RNA, 32 nt, Human
gggucggccucuuccuccugaucagcuccaga

SEQ ID NO: 200724 - RNA, 32 nt, Human
gggucggcucgugcucaucauccugugcuccg

SEQ ID NO: 200725 - RNA, 32 nt, Human
gggucgggagggagguauauugggaggagggu

SEQ ID NO: 200726 - RNA, 32 nt, Human
gggucgggaguggugagggaaggguggcgcau

SEQ ID NO: 200727 - RNA, 19 nt, Human
gggucgggcgcggaggcuc

SEQ ID NO: 200728 - RNA, 32 nt, Human
gggucgggcugggccagcugggguagagcgga

SEQ ID NO: 200729 - RNA, 32 nt, Human
gggucggggacugaggcaguagagggaggcga

SEQ ID NO: 200730 - RNA, 32 nt, Human
gggucggggcggaucagcuuucccugggcaca

SEQ ID NO: 200731 - RNA, 32 nt, Human
gggucggggucugaggcuugggcgcugccugg

SEQ ID NO: 200732 - RNA, 23 nt, Human
gggucggguaggaccccuacugg

SEQ ID NO: 200733 - RNA, 32 nt, Human
gggucggucaucuauuucccagacacaggaaa

SEQ ID NO: 200734 - RNA, 19 nt, Human
gggucguccucccccagca

SEQ ID NO: 200735 - RNA, 32 nt, Human
gggucgucuaagugagaggaaaagggagaggg

SEQ ID NO: 200736 - RNA, 22 nt, Human
gggucgucuggccugcuugcug

SEQ ID NO: 200737 - RNA, 19 nt, Human
gggucgugcgggcugacug

SEQ ID NO: 200738 - RNA, 18 nt, Human
gggucguggcucagguca

SEQ ID NO: 200739 - RNA, 32 nt, Human
gggucgugugugagacgcaugugcuccacccc

SEQ ID NO: 200740 - RNA, 32 nt, Human
gggucuacaggcacaacugcugccucacaaca

SEQ ID NO: 200741 - RNA, 32 nt, Human
gggucuaccuuccugaaucauuuuuaggaguc

SEQ ID NO: 200742 - RNA, 32 nt, Human
gggucuagaggaaugaguguccaggcagaguu

SEQ ID NO: 200743 - RNA, 32 nt, Human
gggucuaggcagcaguggauggugcaggggaa

SEQ ID NO: 200744 - RNA, 32 nt, Human
gggucuaugaguagcuguguaugaauaaauau

SEQ ID NO: 200745 - RNA, 22 nt, Human
gggucucaaccccuccccacca

SEQ ID NO: 200746 - RNA, 32 nt, Human
gggucucaccauguuguccagccuggucucaa

SEQ ID NO: 200747 - RNA, 32 nt, Human
gggucucaccugucaguuguuugcugaguuua

SEQ ID NO: 200748 - RNA, 32 nt, Human
gggucucaccugucgcuggagugcaguggugu

SEQ ID NO: 200749 - RNA, 32 nt, Human
gggucucacugucacccagucuggaguggagu

SEQ ID NO: 200750 - RNA, 24 nt, Human
gggucucagagcgagagcugcgga

SEQ ID NO: 200751 - RNA, 32 nt, Human
gggucucaggcuggcgauucaccccgucuccg

SEQ ID NO: 200752 - RNA, 32 nt, Human
gggucucagggaccuguguccuuccgccucca

SEQ ID NO: 200753 - RNA, 19 nt, Human
gggucucagggcccuggga

SEQ ID NO: 200754 - RNA, 32 nt, Human
gggucucaggggugccuggugaauucugcacu

SEQ ID NO: 200755 - RNA, 32 nt, Human
gggucucagguaugaguggcagagggagcagu

SEQ ID NO: 200756 - RNA, 32 nt, Human
gggucucaguuucuucaucugggaaaugggga

SEQ ID NO: 200757 - RNA, 32 nt, Human
gggucucaguuuuccccaucuggacccuugcg

SEQ ID NO: 200758 - RNA, 19 nt, Human
gggucuccacaagaggggc

SEQ ID NO: 200759 - RNA, 32 nt, Human
gggucuccacgaggacagaggcugcuuuggac

SEQ ID NO: 200760 - RNA, 32 nt, Human
gggucuccauggugggggucucucaccuucuu

SEQ ID NO: 200761 - RNA, 32 nt, Human
gggucucccagagugaacuuggugcucuaagu

SEQ ID NO: 200762 - RNA, 21 nt, Human
gggucuccccucaccccugca

SEQ ID NO: 200763 - RNA, 32 nt, Human
gggucucccgcuuccuccuccugcuccaaggg

SEQ ID NO: 200764 - RNA, 22 nt, Human
gggucucccucagggccgggag

SEQ ID NO: 200765 - RNA, 32 nt, Human
gggucucccucccucacuucugcccuuucccu

SEQ ID NO: 200766 - RNA, 18 nt, Human
gggucucccucuguugcc

SEQ ID NO: 200767 - RNA, 32 nt, Human
gggucucccuggcaauggccacagccuccagg

SEQ ID NO: 200768 - RNA, 32 nt, Human
gggucuccgccgcucgggacccggcuaggcgg

SEQ ID NO: 200769 - RNA, 32 nt, Human
gggucuccgggggagggcagaggcuuugcccu

SEQ ID NO: 200770 - RNA, 32 nt, Human
gggucuccuccccucaugucucccaggggguc

SEQ ID NO: 200771 - RNA, 32 nt, Human
gggucuccuccuccucguuugcugccuccucc

SEQ ID NO: 200772 - RNA, 32 nt, Human
gggucuccuccuccucuuccuucaucgcuucu

SEQ ID NO: 200773 - RNA, 32 nt, Human
gggucuccucuccccagccagaaaccccaaag

SEQ ID NO: 200774 - RNA, 32 nt, Human
gggucuccugcugggguccugaugccucuguu

SEQ ID NO: 200775 - RNA, 32 nt, Human
gggucuccuggaccuugacagagcagcuaacu

SEQ ID NO: 200776 - RNA, 32 nt, Human
gggucuccuggguaagggaagcaagagcagac

SEQ ID NO: 200777 - RNA, 22 nt, Human
gggucucgacccuggaccuccu

SEQ ID NO: 200778 - RNA, 32 nt, Human
gggucucgcuuugucaccuaagcuggagugca

SEQ ID NO: 200779 - RNA, 21 nt, Human
gggucucggcuugccaggaag

SEQ ID NO: 200780 - RNA, 23 nt, Human
gggucucggggcgggcgccgcgg

SEQ ID NO: 200781 - RNA, 20 nt, Human
gggucucggggcucuggaga

SEQ ID NO: 200782 - RNA, 32 nt, Human
gggucucuaccuggucuccaucaacagagcca

SEQ ID NO: 200783 - RNA, 32 nt, Human
gggucucucaaagacacagguccuguccccug

SEQ ID NO: 200784 - RNA, 32 nt, Human
gggucucucaccuucuugacccucucuccauc

SEQ ID NO: 200785 - RNA, 21 nt, Human
gggucucuccucucccuugca

SEQ ID NO: 200786 - RNA, 32 nt, Human
gggucucucuccuagcugcuacccaggaccuc

SEQ ID NO: 200787 - RNA, 21 nt, Human
gggucucuggggggcuggaga

SEQ ID NO: 200788 - RNA, 32 nt, Human
gggucucugucacccaggcuggagugcagugc

SEQ ID NO: 200789 - RNA, 32 nt, Human
gggucucugucgcccaggcuggggugcagugg

SEQ ID NO: 200790 - RNA, 22 nt, Human
gggucucuuauccaucccugca

SEQ ID NO: 200791 - RNA, 32 nt, Human
gggucucuucacuuugaugagugacaugaaca

SEQ ID NO: 200792 - RNA, 32 nt, Human
gggucucuucuaccugcauucuaaaacauuca

SEQ ID NO: 200793 - RNA, 32 nt, Human
gggucugaaagcucgcuugagaauaggaaacu

SEQ ID NO: 200794 - RNA, 32 nt, Human
gggucugacaguaacagaaaccucagcacugg

SEQ ID NO: 200795 - RNA, 31 nt, Human
gggucugagcaccucccucaugcagacagag

SEQ ID NO: 200796 - RNA, 32 nt, Human
gggucugagccaagccccucgacuccucacug

SEQ ID NO: 200797 - RNA, 32 nt, Human
gggucugagccccagcugaagggacugagccu

SEQ ID NO: 200798 - RNA, 31 nt, Human
gggucugaggagagagaauggccagagagug

SEQ ID NO: 200799 - RNA, 19 nt, Human
gggucugaggccugggaga

SEQ ID NO: 200800 - RNA, 32 nt, Human
gggucugaggggagagaagcacaccaggggcg

SEQ ID NO: 200801 - RNA, 32 nt, Human
gggucugaggggcaggggaggcccauaucuug

SEQ ID NO: 200802 - RNA, 32 nt, Human
gggucugagucaucuccuccuagaguggguca

SEQ ID NO: 200803 - RNA, 32 nt, Human
gggucugcaacuuuggaaaacuccucuucaca

SEQ ID NO: 200804 - RNA, 32 nt, Human
gggucugcaagugccccucagcaggaacagcu

SEQ ID NO: 200805 - RNA, 32 nt, Human
gggucugcacuccuugcugucuucccagcacc

SEQ ID NO: 200806 - RNA, 32 nt, Human
gggucugcagugagcuaucuaugauggcacca

SEQ ID NO: 200807 - RNA, 32 nt, Human
gggucugcaucacugccaucagaaagguuacu

SEQ ID NO: 200808 - RNA, 32 nt, Human
gggucugccccaggacuccuggguggaccucc

SEQ ID NO: 200809 - RNA, 21 nt, Human
gggucugccccucccuucuca

SEQ ID NO: 200810 - RNA, 32 nt, Human
gggucugccucucccagcccacugacucaaau

SEQ ID NO: 200811 - RNA, 25 nt, Human
gggucugccugguccuugagccccu

SEQ ID NO: 200812 - RNA, 32 nt, Human
gggucugcggggacacagggaaggcggacggc

SEQ ID NO: 200813 - RNA, 32 nt, Human
gggucugcuaccugccgggauaagguggccca

SEQ ID NO: 200814 - RNA, 32 nt, Human
gggucugcucaccccaacacaugccuucccuc

SEQ ID NO: 200815 - RNA, 32 nt, Human
gggucugcuccugggaauggggugggagccac

SEQ ID NO: 200816 - RNA, 32 nt, Human
gggucugcucuaagcugcagcaagagaaacug

SEQ ID NO: 200817 - RNA, 32 nt, Human
gggucugcugccccagccuggcagcaggaacc

SEQ ID NO: 200818 - RNA, 32 nt, Human
gggucugcuuaacugccaagagcagguccugg

SEQ ID NO: 200819 - RNA, 32 nt, Human
gggucugcuuggagaggccaaaauucagggug

SEQ ID NO: 200820 - RNA, 32 nt, Human
gggucuggaacaccaggcugagguccugauca

SEQ ID NO: 200821 - RNA, 32 nt, Human
gggucuggaagggccuucucuccaagcuggga

SEQ ID NO: 200822 - RNA, 32 nt, Human
gggucuggaggaggggacaugaggugagaggu

SEQ ID NO: 200823 - RNA, 32 nt, Human
gggucuggcacccugcagcccagguccccacu

SEQ ID NO: 200824 - RNA, 32 nt, Human
gggucuggcggacgcgucccaccccaggcucu

SEQ ID NO: 200825 - RNA, 32 nt, Human
gggucuggcuugcccaggcuggagugcggugg

SEQ ID NO: 200826 - RNA, 32 nt, Human
gggucuggcuugcccccucccugggccuccau

SEQ ID NO: 200827 - RNA, 32 nt, Human
gggucugggaccccgcucagcauggcugcagg

SEQ ID NO: 200828 - RNA, 32 nt, Human
gggucugggacgcaguugggagugcaaagggc

SEQ ID NO: 200829 - RNA, 24 nt, Human
gggucugggcagcaccucugguca

SEQ ID NO: 200830 - RNA, 32 nt, Human
gggucugggcagggcaguagaggucagaaggg

SEQ ID NO: 200831 - RNA, 21 nt, Human
gggucugggcagggcugggca

SEQ ID NO: 200832 - RNA, 32 nt, Human
gggucugggcagucccuccucuccccaguguc

SEQ ID NO: 200833 - RNA, 32 nt, Human
gggucugggcccacccuucacaacugccuuuc

SEQ ID NO: 200834 - RNA, 32 nt, Human
gggucuggggcaucccuggagcucagaagcca

SEQ ID NO: 200835 - RNA, 32 nt, Human
gggucugggggccccgcugggguggaggccca

SEQ ID NO: 200836 - RNA, 18 nt, Human
gggucugggggccucuga

SEQ ID NO: 200837 - RNA, 32 nt, Human
gggucuggggugcagcccugccagcaucaaga

SEQ ID NO: 200838 - RNA, 32 nt, Human
gggucuggucccacgccgccucugcucagacc

SEQ ID NO: 200839 - RNA, 32 nt, Human
gggucugguccuggggaagguuugggggcggg

SEQ ID NO: 200840 - RNA, 23 nt, Human
gggucugguggcucaugccugua

SEQ ID NO: 200841 - RNA, 32 nt, Human
gggucugguggggacugaauucccuggcccug

SEQ ID NO: 200842 - RNA, 32 nt, Human
gggucugucaguggcaggaggccgugcugugu

SEQ ID NO: 200843 - RNA, 32 nt, Human
gggucugucuuccuuaucaucgggguggcagc

SEQ ID NO: 200844 - RNA, 32 nt, Human
gggucugugaaucugggcucucccuccaugcu

SEQ ID NO: 200845 - RNA, 32 nt, Human
gggucugugcugcuguuacuguuaaccauuua

SEQ ID NO: 200846 - RNA, 18 nt, Human
gggucuguggcugggagg

SEQ ID NO: 200847 - RNA, 32 nt, Human
gggucuguggguggugauggaggagggacuca

SEQ ID NO: 200848 - RNA, 32 nt, Human
gggucuguggguuccaaaguccuggccaccug

SEQ ID NO: 200849 - RNA, 32 nt, Human
gggucuguuccuucuugagccugccugcaggg

SEQ ID NO: 200850 - RNA, 32 nt, Human
gggucuguugccuaggcgggagugcaguggca

SEQ ID NO: 200851 - RNA, 32 nt, Human
gggucuguuucucagcaucauggaugcagggg

SEQ ID NO: 200852 - RNA, 25 nt, Human
gggucuuaggagguauggucggaga

SEQ ID NO: 200853 - RNA, 32 nt, Human
gggucuucaaccuguggcgacaggaggcaggg

SEQ ID NO: 200854 - RNA, 32 nt, Human
gggucuucauuuucucuuauuuuguuuucucu

SEQ ID NO: 200855 - RNA, 32 nt, Human
gggucuucccgguaccggcaggccgcggcggg

SEQ ID NO: 200856 - RNA, 32 nt, Human
gggucuuccguguuagacagugucacauaaua

SEQ ID NO: 200857 - RNA, 32 nt, Human
gggucuuccucuuccccucuuuaccauccccc

SEQ ID NO: 200858 - RNA, 32 nt, Human
gggucuuccugguccccaccuccuggggccga

SEQ ID NO: 200859 - RNA, 32 nt, Human
gggucuuccugucacccaggcuggaguacagu

SEQ ID NO: 200860 - RNA, 32 nt, Human
gggucuucgaaacccucuccccacagccccuc

SEQ ID NO: 200861 - RNA, 23 nt, Human
gggucuucuacucccucccugca

SEQ ID NO: 200862 - RNA, 32 nt, Human
gggucuucuguggaagaugcagaaggaggaag

SEQ ID NO: 200863 - RNA, 32 nt, Human
gggucuugacuggagugcaguggugcgaucgu

SEQ ID NO: 200864 - RNA, 16 nt, Human
gggucuugagcccagg

SEQ ID NO: 200865 - RNA, 32 nt, Human
gggucuugaugagcuuccggguuuauggauuc

SEQ ID NO: 200866 - RNA, 32 nt, Human
gggucuugaugaggacagaaguuuagaguagg

SEQ ID NO: 200867 - RNA, 32 nt, Human
gggucuugcaagcagccuccugggcagucgua

SEQ ID NO: 200868 - RNA, 32 nt, Human
gggucuugccuuuucaauuccuguguuuuggu

SEQ ID NO: 200869 - RNA, 32 nt, Human
gggucuugcuucuguggcccaggcuggagugc

SEQ ID NO: 200870 - RNA, 32 nt, Human
gggucuuggagaggaaggacuuagggaggcag

SEQ ID NO: 200871 - RNA, 32 nt, Human
gggucuuggccuggaaccuuccagagaggagg

SEQ ID NO: 200872 - RNA, 29 nt, Human
gggucuuggcugcugccuuacuucccaga

SEQ ID NO: 200873 - RNA, 32 nt, Human
gggucuuggcugcugccuuacuucccagaggc

SEQ ID NO: 200874 - RNA, 32 nt, Human
gggucuugggacacccuccaguaccuggcuca

SEQ ID NO: 200875 - RNA, 32 nt, Human
gggucuugguccaccuuccagcacaaggagcu

SEQ ID NO: 200876 - RNA, 32 nt, Human
gggucuugguguccuaguaaagaauguucacg

SEQ ID NO: 200877 - RNA, 20 nt, Human
gggucuuguacauacuguaa

SEQ ID NO: 200878 - RNA, 32 nt, Human
gggucuuguccaccauucccaggacucugcca

SEQ ID NO: 200879 - RNA, 32 nt, Human
gggucuuucacccaggcuggagugcagugcug

SEQ ID NO: 200880 - RNA, 32 nt, Human
gggucuuucaggaagagacaccagccugucuc

SEQ ID NO: 200881 - RNA, 32 nt, Human
gggucuuucuaccuagucaugagggcagggau

SEQ ID NO: 200882 - RNA, 32 nt, Human
gggucuuugaacacaccucucuccuuuccuuu

SEQ ID NO: 200883 - RNA, 32 nt, Human
gggucuuugcacauccugcucuuuccgccugg

SEQ ID NO: 200884 - RNA, 32 nt, Human
gggucuuugcccacucuuguuucgcuuuggag

SEQ ID NO: 200885 - RNA, 32 nt, Human
gggucuuugcccucucccuuguggcuccuguc

SEQ ID NO: 200886 - RNA, 32 nt, Human
gggucuuugcuuccccagccagccucuccuca

SEQ ID NO: 200887 - RNA, 32 nt, Human
gggugaaaacucagaagaaagcucagaguuga

SEQ ID NO: 200888 - RNA, 32 nt, Human
gggugaaaaguauggcagugggagacuaagau

SEQ ID NO: 200889 - RNA, 32 nt, Human
gggugaaaccucccauuggccaaaggacacgg

SEQ ID NO: 200890 - RNA, 32 nt, Human
gggugaaaucuucuccccaugacuauguuuuc

SEQ ID NO: 200891 - RNA, 32 nt, Human
gggugaacacacaggcuggcugcucugggcag

SEQ ID NO: 200892 - RNA, 32 nt, Human
gggugaacagaaugggcggcugugcugggagu

SEQ ID NO: 200893 - RNA, 32 nt, Human
gggugaacaggaaaugccuuguggaaacagga

SEQ ID NO: 200894 - RNA, 32 nt, Human
gggugaacaucuuuccaguaaccagguagucc

SEQ ID NO: 200895 - RNA, 32 nt, Human
gggugaacugaggggaguagagggagagggca

SEQ ID NO: 200896 - RNA, 32 nt, Human
gggugaacugauugaggaagggucuauugucu

SEQ ID NO: 200897 - RNA, 32 nt, Human
gggugaagcauuauggucuaaugauucaaaug

SEQ ID NO: 200898 - RNA, 20 nt, Human
gggugaagccagagguggcu

SEQ ID NO: 200899 - RNA, 32 nt, Human
gggugaagccagggagggagacaggagggcag

SEQ ID NO: 200900 - RNA, 23 nt, Human
gggugaagccaucccaaggcuga

SEQ ID NO: 200901 - RNA, 32 nt, Human
gggugaaggagaggacugaugagaagggcuug

SEQ ID NO: 200902 - RNA, 24 nt, Human
gggugaaggagugagacccugucu

SEQ ID NO: 200903 - RNA, 32 nt, Human
gggugaaggcaaggaacaaccaccuggccucc

SEQ ID NO: 200904 - RNA, 32 nt, Human
gggugaaggcccagagaccagcagaacggcau

SEQ ID NO: 200905 - RNA, 32 nt, Human
gggugaagggcacggguccuuguuuuuggguu

SEQ ID NO: 200906 - RNA, 32 nt, Human
gggugaaguaaaauaguaugaacaauuaagag

SEQ ID NO: 200907 - RNA, 32 nt, Human
gggugaagucgcagcuucacuuacaccagcug

SEQ ID NO: 200908 - RNA, 32 nt, Human
gggugaaguuggcaggggagagcuugacacuu

SEQ ID NO: 200909 - RNA, 32 nt, Human
gggugaauggaaugagcuggagcuugaacaaa

SEQ ID NO: 200910 - RNA, 32 nt, Human
gggugaauguggagagcacauggccaugucuu

SEQ ID NO: 200911 - RNA, 32 nt, Human
gggugaauguucauaugcucccaauucacguu

SEQ ID NO: 200912 - RNA, 32 nt, Human
gggugaauguugcucccuucgauacacagaug

SEQ ID NO: 200913 - RNA, 24 nt, Human
gggugacaaagcaagacccugucu

SEQ ID NO: 200914 - RNA, 24 nt, Human
gggugacaaagcaagacuccaucu

SEQ ID NO: 200915 - RNA, 24 nt, Human
gggugacaaagcaagacugugucu

SEQ ID NO: 200916 - RNA, 24 nt, Human
gggugacaaagcaagauucugucu

SEQ ID NO: 200917 - RNA, 30 nt, Human
gggugacaaagcaagauucugucucgaaac

SEQ ID NO: 200918 - RNA, 24 nt, Human
gggugacaaaguaagacccugccu

SEQ ID NO: 200919 - RNA, 24 nt, Human
gggugacaaaguaagacccugucu

SEQ ID NO: 200920 - RNA, 24 nt, Human
gggugacaaagucagacuccaucu

SEQ ID NO: 200921 - RNA, 23 nt, Human
gggugacaaagugagacccuguc

SEQ ID NO: 200922 - RNA, 24 nt, Human
gggugacaaagugagacccugucu

SEQ ID NO: 200923 - RNA, 24 nt, Human
gggugacaaagugagacuccaucu

SEQ ID NO: 200924 - RNA, 22 nt, Human
gggugacaaagugagacucccu

SEQ ID NO: 200925 - RNA, 23 nt, Human
gggugacaaagugagacuccguc

SEQ ID NO: 200926 - RNA, 24 nt, Human
gggugacaaagugagacucuaucu

SEQ ID NO: 200927 - RNA, 25 nt, Human
gggugacaagaauaaaggcucugcc

SEQ ID NO: 200928 - RNA, 21 nt, Human
gggugacaagaguaucuaccu

SEQ ID NO: 200929 - RNA, 25 nt, Human
gggugacaagagugagaccccgucu

SEQ ID NO: 200930 - RNA, 25 nt, Human
gggugacaagagugagacuccgucu

SEQ ID NO: 200931 - RNA, 32 nt, Human
gggugacaaguaccuucugccuccuccauucu

SEQ ID NO: 200932 - RNA, 32 nt, Human
gggugacaaguggucaaggagcuguggccaca

SEQ ID NO: 200933 - RNA, 32 nt, Human
gggugacaaugcacacaugcugggcaaaaggg

SEQ ID NO: 200934 - RNA, 32 nt, Human
gggugacacagcaagaccccaucuccacaaac

SEQ ID NO: 200935 - RNA, 24 nt, Human
gggugacacagcaagacuccaucu

SEQ ID NO: 200936 - RNA, 24 nt, Human
gggugacacagcgagacuccgucu

SEQ ID NO: 200937 - RNA, 23 nt, Human
gggugacacagugagacccuguc

SEQ ID NO: 200938 - RNA, 24 nt, Human
gggugacagaacaagacucugucu

SEQ ID NO: 200939 - RNA, 22 nt, Human
gggugacagaacaagacugucu

SEQ ID NO: 200940 - RNA, 24 nt, Human
gggugacagaaccagacccugucu

SEQ ID NO: 200941 - RNA, 24 nt, Human
gggugacagaacgagacuccaccu

SEQ ID NO: 200942 - RNA, 24 nt, Human
gggugacagaacgagacuccgucu

SEQ ID NO: 200943 - RNA, 24 nt, Human
gggugacagaacgagacucugucu

SEQ ID NO: 200944 - RNA, 24 nt, Human
gggugacagaaggaggcucugccu

SEQ ID NO: 200945 - RNA, 32 nt, Human
gggugacagaagugggacaggagaaguuuucc

SEQ ID NO: 200946 - RNA, 24 nt, Human
gggugacagaauaagaccccgucu

SEQ ID NO: 200947 - RNA, 23 nt, Human
gggugacagaauaagacccucuu

SEQ ID NO: 200948 - RNA, 24 nt, Human
gggugacagaaugagaccccgucu

SEQ ID NO: 200949 - RNA, 22 nt, Human
gggugacagaaugagaccccug

SEQ ID NO: 200950 - RNA, 24 nt, Human
gggugacagaaugagacccuguuu

SEQ ID NO: 200951 - RNA, 22 nt, Human
gggugacagaaugagacucugu

SEQ ID NO: 200952 - RNA, 24 nt, Human
gggugacagaaugugacucugucu

SEQ ID NO: 200953 - RNA, 24 nt, Human
gggugacagaccgagacccugucu

SEQ ID NO: 200954 - RNA, 24 nt, Human
gggugacagaccgagacucugucu

SEQ ID NO: 200955 - RNA, 24 nt, Human
gggugacagacuaagacuccgucu

SEQ ID NO: 200956 - RNA, 24 nt, Human
gggugacagagaaagacccugucu

SEQ ID NO: 200957 - RNA, 24 nt, Human
gggugacagagaaggacuccgucu

SEQ ID NO: 200958 - RNA, 28 nt, Human
gggugacagagacagugagacucugucu

SEQ ID NO: 200959 - RNA, 24 nt, Human
gggugacagagagagacccugucu

SEQ ID NO: 200960 - RNA, 24 nt, Human
gggugacagagagagacuccgucu

SEQ ID NO: 200961 - RNA, 24 nt, Human
gggugacagagagauacccugucu

SEQ ID NO: 200962 - RNA, 24 nt, Human
gggugacagagcaaaacugugucu

SEQ ID NO: 200963 - RNA, 23 nt, Human
gggugacagagcaagaccccguc

SEQ ID NO: 200964 - RNA, 22 nt, Human
gggugacagagcaagacccugu

SEQ ID NO: 200965 - RNA, 24 nt, Human
gggugacagagcaagacccugucu

SEQ ID NO: 200966 - RNA, 24 nt, Human
gggugacagagcaagacccuguuu

SEQ ID NO: 200967 - RNA, 22 nt, Human
gggugacagagcaagaccuucu

SEQ ID NO: 200968 - RNA, 24 nt, Human
gggugacagagcaagacuacaucu

SEQ ID NO: 200969 - RNA, 24 nt, Human
gggugacagagcaagacuccaucu

SEQ ID NO: 200970 - RNA, 24 nt, Human
gggugacagagcaagacuccgccu

SEQ ID NO: 200971 - RNA, 23 nt, Human
gggugacagagcaagacuccguc

SEQ ID NO: 200972 - RNA, 24 nt, Human
gggugacagagcaagacuccgucu

SEQ ID NO: 200973 - RNA, 20 nt, Human
gggugacagagcaagacucu

SEQ ID NO: 200974 - RNA, 24 nt, Human
gggugacagagcaagacucugccu

SEQ ID NO: 200975 - RNA, 24 nt, Human
gggugacagagcaagacucugucu

SEQ ID NO: 200976 - RNA, 24 nt, Human
gggugacagagcaagacugcguuu

SEQ ID NO: 200977 - RNA, 24 nt, Human
gggugacagagcaagacugugucu

SEQ ID NO: 200978 - RNA, 22 nt, Human
gggugacagagcaagacuuccu

SEQ ID NO: 200979 - RNA, 24 nt, Human
gggugacagagcaagacuuggucu

SEQ ID NO: 200980 - RNA, 21 nt, Human
gggugacagagcaagagucug

SEQ ID NO: 200981 - RNA, 24 nt, Human
gggugacagagcaagaucuugucu

SEQ ID NO: 200982 - RNA, 22 nt, Human
gggugacagagcaagauuccgu

SEQ ID NO: 200983 - RNA, 24 nt, Human
gggugacagagcaagauuccgucu

SEQ ID NO: 200984 - RNA, 28 nt, Human
gggugacagagcaagugagacccugucu

SEQ ID NO: 200985 - RNA, 24 nt, Human
gggugacagagcaauacccugucu

SEQ ID NO: 200986 - RNA, 24 nt, Human
gggugacagagcaggacccugucu

SEQ ID NO: 200987 - RNA, 22 nt, Human
gggugacagagccacuccgucu

SEQ ID NO: 200988 - RNA, 24 nt, Human
gggugacagagccagacuccaucu

SEQ ID NO: 200989 - RNA, 24 nt, Human
gggugacagagccagacuccgucu

SEQ ID NO: 200990 - RNA, 24 nt, Human
gggugacagagccagacucugucu

SEQ ID NO: 200991 - RNA, 24 nt, Human
gggugacagagcgaaacuccaucu

SEQ ID NO: 200992 - RNA, 24 nt, Human
gggugacagagcgagaaucagucu

SEQ ID NO: 200993 - RNA, 24 nt, Human
gggugacagagcgagaccaugucu

SEQ ID NO: 200994 - RNA, 20 nt, Human
gggugacagagcgagacccu

SEQ ID NO: 200995 - RNA, 24 nt, Human
gggugacagagcgagacccugucu

SEQ ID NO: 200996 - RNA, 22 nt, Human
gggugacagagcgagaccgucu

SEQ ID NO: 200997 - RNA, 24 nt, Human
gggugacagagcgagaccuugucu

SEQ ID NO: 200998 - RNA, 19 nt, Human
gggugacagagcgagacuc

SEQ ID NO: 200999 - RNA, 24 nt, Human
gggugacagagcgagacucagucu

SEQ ID NO: 201000 - RNA, 24 nt, Human
gggugacagagcgagacuccaccu

SEQ ID NO: 201001 - RNA, 24 nt, Human
gggugacagagcgagacuccaucu

SEQ ID NO: 201002 - RNA, 22 nt, Human
gggugacagagcgagacuccgu

SEQ ID NO: 201003 - RNA, 24 nt, Human
gggugacagagcgagacuccgucu

SEQ ID NO: 201004 - RNA, 24 nt, Human
gggugacagagcgagacucuaucu

SEQ ID NO: 201005 - RNA, 24 nt, Human
gggugacagagcgagacucuggcu

SEQ ID NO: 201006 - RNA, 24 nt, Human
gggugacagagcgagacucugucu

SEQ ID NO: 201007 - RNA, 24 nt, Human
gggugacagagcgagacugcgucu

SEQ ID NO: 201008 - RNA, 22 nt, Human
gggugacagagcgagacugucu

SEQ ID NO: 201009 - RNA, 24 nt, Human
gggugacagagcgagacugugucu

SEQ ID NO: 201010 - RNA, 24 nt, Human
gggugacagagcgagacuguguuu

SEQ ID NO: 201011 - RNA, 24 nt, Human
gggugacagagcgagacuuugucu

SEQ ID NO: 201012 - RNA, 26 nt, Human
gggugacagagcgugagacuccgucu

SEQ ID NO: 201013 - RNA, 24 nt, Human
gggugacagagcuagacucugucu

SEQ ID NO: 201014 - RNA, 21 nt, Human
gggugacagaggcucucuccu

SEQ ID NO: 201015 - RNA, 24 nt, Human
gggugacagagggaaacuccaucu

SEQ ID NO: 201016 - RNA, 24 nt, Human
gggugacagagggagacccugucu

SEQ ID NO: 201017 - RNA, 24 nt, Human
gggugacagagggagacuccaucu

SEQ ID NO: 201018 - RNA, 24 nt, Human
gggugacagagggagacuccgucu

SEQ ID NO: 201019 - RNA, 24 nt, Human
gggugacagagggagacucugucu

SEQ ID NO: 201020 - RNA, 24 nt, Human
gggugacagaguaacacucugucu

SEQ ID NO: 201021 - RNA, 24 nt, Human
gggugacagaguaagacccuaucu

SEQ ID NO: 201022 - RNA, 24 nt, Human
gggugacagaguaagacccugucu

SEQ ID NO: 201023 - RNA, 24 nt, Human
gggugacagaguaagacuccaugu

SEQ ID NO: 201024 - RNA, 24 nt, Human
gggugacagaguaagacuccgucu

SEQ ID NO: 201025 - RNA, 24 nt, Human
gggugacagaguaggugcucugcu

SEQ ID NO: 201026 - RNA, 24 nt, Human
gggugacagagucagacccugucu

SEQ ID NO: 201027 - RNA, 23 nt, Human
gggugacagagucagacuccguc

SEQ ID NO: 201028 - RNA, 24 nt, Human
gggugacagagugaaacuccaucu

SEQ ID NO: 201029 - RNA, 24 nt, Human
gggugacagagugagacacugucu

SEQ ID NO: 201030 - RNA, 24 nt, Human
gggugacagagugagacagucucc

SEQ ID NO: 201031 - RNA, 24 nt, Human
gggugacagagugagaccauguuu

SEQ ID NO: 201032 - RNA, 21 nt, Human
gggugacagagugagaccccc

SEQ ID NO: 201033 - RNA, 22 nt, Human
gggugacagagugagacccccu

SEQ ID NO: 201034 - RNA, 24 nt, Human
gggugacagagugagacccgugcu

SEQ ID NO: 201035 - RNA, 20 nt, Human
gggugacagagugagacccu

SEQ ID NO: 201036 - RNA, 24 nt, Human
gggugacagagugagacccuaucu

SEQ ID NO: 201037 - RNA, 21 nt, Human
gggugacagagugagacccug

SEQ ID NO: 201038 - RNA, 24 nt, Human
gggugacagagugagacccugccu

SEQ ID NO: 201039 - RNA, 24 nt, Human
gggugacagagugagacccuggcu

SEQ ID NO: 201040 - RNA, 23 nt, Human
gggugacagagugagacccuguc

SEQ ID NO: 201041 - RNA, 24 nt, Human
gggugacagagugagacccugucu

SEQ ID NO: 201042 - RNA, 23 nt, Human
gggugacagagugagacccuguu

SEQ ID NO: 201043 - RNA, 22 nt, Human
gggugacagagugagaccgucu

SEQ ID NO: 201044 - RNA, 24 nt, Human
gggugacagagugagaccuggucu

SEQ ID NO: 201045 - RNA, 20 nt, Human
gggugacagagugagacgcc

SEQ ID NO: 201046 - RNA, 24 nt, Human
gggugacagagugagacucagucu

SEQ ID NO: 201047 - RNA, 24 nt, Human
gggugacagagugagacuccaacu

SEQ ID NO: 201048 - RNA, 24 nt, Human
gggugacagagugagacuccaccu

SEQ ID NO: 201049 - RNA, 23 nt, Human
gggugacagagugagacuccauc

SEQ ID NO: 201050 - RNA, 24 nt, Human
gggugacagagugagacuccaucu

SEQ ID NO: 201051 - RNA, 24 nt, Human
gggugacagagugagacuccgacu

SEQ ID NO: 201052 - RNA, 24 nt, Human
gggugacagagugagacuccgccu

SEQ ID NO: 201053 - RNA, 24 nt, Human
gggugacagagugagacuccgucu

SEQ ID NO: 201054 - RNA, 24 nt, Human
gggugacagagugagacuccguuu

SEQ ID NO: 201055 - RNA, 24 nt, Human
gggugacagagugagacucugucu

SEQ ID NO: 201056 - RNA, 24 nt, Human
gggugacagagugagacucuguuu

SEQ ID NO: 201057 - RNA, 24 nt, Human
gggugacagagugagacucuuguc

SEQ ID NO: 201058 - RNA, 22 nt, Human
gggugacagagugagacugucu

SEQ ID NO: 201059 - RNA, 24 nt, Human
gggugacagagugagauccugucu

SEQ ID NO: 201060 - RNA, 23 nt, Human
gggugacagagugagaucugccu

SEQ ID NO: 201061 - RNA, 24 nt, Human
gggugacagagugagaugcuaucu

SEQ ID NO: 201062 - RNA, 24 nt, Human
gggugacagagugagauuccgccu

SEQ ID NO: 201063 - RNA, 24 nt, Human
gggugacagagugagauuccgucu

SEQ ID NO: 201064 - RNA, 24 nt, Human
gggugacagagugagauucugucu

SEQ ID NO: 201065 - RNA, 32 nt, Human
gggugacagagugagauucugucucaaaagca

SEQ ID NO: 201066 - RNA, 24 nt, Human
gggugacagagugaggcccugucu

SEQ ID NO: 201067 - RNA, 22 nt, Human
gggugacagagugaggcugucu

SEQ ID NO: 201068 - RNA, 28 nt, Human
gggugacagagugagugagacuccaucu

SEQ ID NO: 201069 - RNA, 26 nt, Human
gggugacagagugagugagacucugc

SEQ ID NO: 201070 - RNA, 24 nt, Human
gggugacagagugauacuccaucu

SEQ ID NO: 201071 - RNA, 22 nt, Human
gggugacagagugauacugucu

SEQ ID NO: 201072 - RNA, 24 nt, Human
gggugacagagugggacuccaucu

SEQ ID NO: 201073 - RNA, 24 nt, Human
gggugacagauccagacucugucu

SEQ ID NO: 201074 - RNA, 28 nt, Human
gggugacagauuaagcaagacucugucu

SEQ ID NO: 201075 - RNA, 32 nt, Human
gggugacagcaugguaaugaaggacagugagg

SEQ ID NO: 201076 - RNA, 22 nt, Human
gggugacagcgagacccugucu

SEQ ID NO: 201077 - RNA, 24 nt, Human
gggugacagcgcgagacuccaucu

SEQ ID NO: 201078 - RNA, 22 nt, Human
gggugacagcuagacccugucu

SEQ ID NO: 201079 - RNA, 24 nt, Human
gggugacagggcaagacccugucu

SEQ ID NO: 201080 - RNA, 24 nt, Human
gggugacagggcgagacucugucu

SEQ ID NO: 201081 - RNA, 24 nt, Human
gggugacagggugagacccugucu

SEQ ID NO: 201082 - RNA, 24 nt, Human
gggugacagggugagacucugucu

SEQ ID NO: 201083 - RNA, 32 nt, Human
gggugacagucaagucacaaucaagccuggug

SEQ ID NO: 201084 - RNA, 22 nt, Human
gggugacagugaaacuccaucu

SEQ ID NO: 201085 - RNA, 24 nt, Human
gggugacagugcgagacccugucu

SEQ ID NO: 201086 - RNA, 24 nt, Human
gggugacagugugagacccagccu

SEQ ID NO: 201087 - RNA, 24 nt, Human
gggugacagugugagacucugucu

SEQ ID NO: 201088 - RNA, 32 nt, Human
gggugacagugugagauucugucucagaaaaa

SEQ ID NO: 201089 - RNA, 20 nt, Human
gggugacauagagcauucua

SEQ ID NO: 201090 - RNA, 24 nt, Human
gggugacauagcaagacccugucu

SEQ ID NO: 201091 - RNA, 31 nt, Human
gggugacauagcuagaaaguggagaagcuca

SEQ ID NO: 201092 - RNA, 32 nt, Human
gggugacauauguaaucccagcacuuugggag

SEQ ID NO: 201093 - RNA, 26 nt, Human
gggugacauggugagaccuugucucc

SEQ ID NO: 201094 - RNA, 29 nt, Human
gggugaccaacggggccccagggcuccua

SEQ ID NO: 201095 - RNA, 18 nt, Human
gggugaccccaccgccua

SEQ ID NO: 201096 - RNA, 15 nt, Human
gggugaccccucaca

SEQ ID NO: 201097 - RNA, 20 nt, Human
gggugaccccuucaucucca

SEQ ID NO: 201098 - RNA, 32 nt, Human
gggugaccugcuuccccaaaggccaacagcau

SEQ ID NO: 201099 - RNA, 32 nt, Human
gggugaccuggaauucgaauucuguuucccuu

SEQ ID NO: 201100 - RNA, 22 nt, Human
gggugaccuggcagccgccccu

SEQ ID NO: 201101 - RNA, 23 nt, Human
gggugacgagugaaacuccaucu

SEQ ID NO: 201102 - RNA, 23 nt, Human
gggugacgagugagacuccaucu

SEQ ID NO: 201103 - RNA, 21 nt, Human
gggugacgauaagaccaccua

SEQ ID NO: 201104 - RNA, 24 nt, Human
gggugacggagugagacuccaucu

SEQ ID NO: 201105 - RNA, 32 nt, Human
gggugacugacuggccugggccuggggugggg

SEQ ID NO: 201106 - RNA, 24 nt, Human
gggugacugagcaagacucugccu

SEQ ID NO: 201107 - RNA, 24 nt, Human
gggugacugagcgagacucugucu

SEQ ID NO: 201108 - RNA, 32 nt, Human
gggugacugcaaccacugccucccagguucaa

SEQ ID NO: 201109 - RNA, 32 nt, Human
gggugacugcagcugcucagcuccccuccccc

SEQ ID NO: 201110 - RNA, 32 nt, Human
gggugacugccucugagucauuguguuuuuca

SEQ ID NO: 201111 - RNA, 25 nt, Human
gggugacuggcccagaaugaugcuu

SEQ ID NO: 201112 - RNA, 32 nt, Human
gggugacuguagucucagcuacucgggaggau

SEQ ID NO: 201113 - RNA, 32 nt, Human
gggugacuuccuggucaccaaggcagugcaug

SEQ ID NO: 201114 - RNA, 17 nt, Human
gggugagaaacuggaua

SEQ ID NO: 201115 - RNA, 32 nt, Human
gggugagaacagauguuccucuggccuucuug

SEQ ID NO: 201116 - RNA, 21 nt, Human
gggugagaaccugccuuccua

SEQ ID NO: 201117 - RNA, 32 nt, Human
gggugagaagggcagggguguccugaugcaaa

SEQ ID NO: 201118 - RNA, 32 nt, Human
gggugagaccccaagagacagccugggccggu

SEQ ID NO: 201119 - RNA, 32 nt, Human
gggugagacgcuggcccuccuuacagccuaga

SEQ ID NO: 201120 - RNA, 32 nt, Human
gggugagagagaagcugggagagcagagaaaa

SEQ ID NO: 201121 - RNA, 32 nt, Human
gggugagagaggaagcaaggagagggugugug

SEQ ID NO: 201122 - RNA, 32 nt, Human
gggugagagguucccgcggcucagggaagaug

SEQ ID NO: 201123 - RNA, 32 nt, Human
gggugagauccccagcccugugagccuguagg

SEQ ID NO: 201124 - RNA, 32 nt, Human
gggugagcagagccuggagccccgggcaggca

SEQ ID NO: 201125 - RNA, 32 nt, Human
gggugagcagaggcauuuaucuccauguuaac

SEQ ID NO: 201126 - RNA, 32 nt, Human
gggugagcgaggucaccaugccagcuucccag

SEQ ID NO: 201127 - RNA, 32 nt, Human
gggugagcucacaaccaccauucagucaagug

SEQ ID NO: 201128 - RNA, 32 nt, Human
gggugagcuggcagggacacacugccuuuggg

SEQ ID NO: 201129 - RNA, 23 nt, Human
gggugagcugugaguggggcuga

SEQ ID NO: 201130 - RNA, 32 nt, Human
gggugagcugugggggaggccaguuacaaggu

SEQ ID NO: 201131 - RNA, 32 nt, Human
gggugaggaccaaggaccuggcuggucacuuc

SEQ ID NO: 201132 - RNA, 32 nt, Human
gggugaggacuggagagcaccagcacuggaac

SEQ ID NO: 201133 - RNA, 32 nt, Human
gggugaggagcugccagucauguccagaugga

SEQ ID NO: 201134 - RNA, 32 nt, Human
gggugaggaggaagaggaggaggaagaggagg

SEQ ID NO: 201135 - RNA, 32 nt, Human
gggugaggaggcgacagagggagaggaggaag

SEQ ID NO: 201136 - RNA, 23 nt, Human
gggugaggaggucgcgccggaag

SEQ ID NO: 201137 - RNA, 32 nt, Human
gggugaggagguggaaggagccggguggaugc

SEQ ID NO: 201138 - RNA, 32 nt, Human
gggugaggccugagggagggaggcgcauggaa

SEQ ID NO: 201139 - RNA, 32 nt, Human
gggugaggcgaugugaacaaaggucugugaaa

SEQ ID NO: 201140 - RNA, 20 nt, Human
gggugaggcggcgagggcgg

SEQ ID NO: 201141 - RNA, 19 nt, Human
gggugaggcggcggcgcgg

SEQ ID NO: 201142 - RNA, 32 nt, Human
gggugaggcuaggaguuggcuaguguguaugu

SEQ ID NO: 201143 - RNA, 32 nt, Human
gggugaggcuugccagggaaacuccuaagugg

SEQ ID NO: 201144 - RNA, 32 nt, Human
gggugagggacagcacagcagagguguggcuu

SEQ ID NO: 201145 - RNA, 32 nt, Human
gggugagggaggacaggccaguagggggaggg

SEQ ID NO: 201146 - RNA, 32 nt, Human
gggugagggcaggcuggcugcucugacaccau

SEQ ID NO: 201147 - RNA, 32 nt, Human
gggugagggcaucccugcuggggagaaaccuc

SEQ ID NO: 201148 - RNA, 32 nt, Human
gggugagggccaccuccacacccacccccucu

SEQ ID NO: 201149 - RNA, 32 nt, Human
gggugagggcggagcugaagugacagcggagg

SEQ ID NO: 201150 - RNA, 32 nt, Human
gggugagggcuggcccuaaacaucugccuaau

SEQ ID NO: 201151 - RNA, 32 nt, Human
gggugaggggauggaggaaggcgaguuuucag

SEQ ID NO: 201152 - RNA, 32 nt, Human
gggugagggggaagaauacggggguucccaga

SEQ ID NO: 201153 - RNA, 32 nt, Human
gggugagggguucuccucugaggugcuugcaa

SEQ ID NO: 201154 - RNA, 32 nt, Human
gggugaggugacaucucauccccucacugaag

SEQ ID NO: 201155 - RNA, 32 nt, Human
gggugaggugacccuugaccuccugggaucgc

SEQ ID NO: 201156 - RNA, 32 nt, Human
gggugagguggagggggugguccucaguccaa

SEQ ID NO: 201157 - RNA, 23 nt, Human
gggugagguuggugugagacuga

SEQ ID NO: 201158 - RNA, 32 nt, Human
gggugagguuggugugagacugacggugccuc

SEQ ID NO: 201159 - RNA, 32 nt, Human
gggugaguccgucucaggucucgacaauuagc

SEQ ID NO: 201160 - RNA, 32 nt, Human
gggugagucuguuuuccucucuggaccucagu

SEQ ID NO: 201161 - RNA, 32 nt, Human
gggugaguguuagcuggcuaggguugcuggaa

SEQ ID NO: 201162 - RNA, 32 nt, Human
gggugauaaaugggcuagagaggcagaggaag

SEQ ID NO: 201163 - RNA, 25 nt, Human
gggugauaagagugagacucugucu

SEQ ID NO: 201164 - RNA, 32 nt, Human
gggugauacaagagauucuguugguuguucag

SEQ ID NO: 201165 - RNA, 24 nt, Human
gggugauagaacaagacccugucu

SEQ ID NO: 201166 - RNA, 24 nt, Human
gggugauagagcaagacccuaucu

SEQ ID NO: 201167 - RNA, 22 nt, Human
gggugauagcccagacucugcc

SEQ ID NO: 201168 - RNA, 32 nt, Human
gggugauagccucgaggagacuggggcugcca

SEQ ID NO: 201169 - RNA, 32 nt, Human
gggugauagggagggcagccagaaaagacagc

SEQ ID NO: 201170 - RNA, 15 nt, Human
gggugauagggcccu

SEQ ID NO: 201171 - RNA, 32 nt, Human
gggugauaugcugauuuucauugugcacaugg

SEQ ID NO: 201172 - RNA, 32 nt, Human
gggugaucagaugccagcaccauguuuucauu

SEQ ID NO: 201173 - RNA, 32 nt, Human
gggugaucugcugaccuuguucacucaugaag

SEQ ID NO: 201174 - RNA, 32 nt, Human
gggugaugagacaguuauacuuucaacugcca

SEQ ID NO: 201175 - RNA, 20 nt, Human
gggugaugcagaggccacag

SEQ ID NO: 201176 - RNA, 23 nt, Human
gggugaugcagaggccacaggug

SEQ ID NO: 201177 - RNA, 32 nt, Human
gggugaugcagggacugaggggaacccuggga

SEQ ID NO: 201178 - RNA, 32 nt, Human
gggugaugccaucuacccugccccuguccacc

SEQ ID NO: 201179 - RNA, 24 nt, Human
gggugauggagcaagacuccaucu

SEQ ID NO: 201180 - RNA, 32 nt, Human
gggugauggccuucccccucuuggccgggacg

SEQ ID NO: 201181 - RNA, 25 nt, Human
gggugaugggagugagacccugucu

SEQ ID NO: 201182 - RNA, 31 nt, Human
gggugaugggcagcacaggaggcccguccug

SEQ ID NO: 201183 - RNA, 32 nt, Human
gggugauguggaaucugcuuuuugaaaccugc

SEQ ID NO: 201184 - RNA, 30 nt, Human
gggugauguggaccccggagcuggcaauuc

SEQ ID NO: 201185 - RNA, 32 nt, Human
gggugauguucugcaagguguggcuuuggcug

SEQ ID NO: 201186 - RNA, 32 nt, Human
gggugauuacaggcaccagugcagugaugauu

SEQ ID NO: 201187 - RNA, 32 nt, Human
gggugauucaguccagugauuggguuuguggc

SEQ ID NO: 201188 - RNA, 32 nt, Human
gggugauucucaguguccucuggucauugcuc

SEQ ID NO: 201189 - RNA, 32 nt, Human
gggugauuuagggaaguggaaaagcaagauac

SEQ ID NO: 201190 - RNA, 32 nt, Human
gggugauuuguugauuggcaaugaggauaaaa

SEQ ID NO: 201191 - RNA, 32 nt, Human
gggugauuuugaaaugggacaaucuuuuaaug

SEQ ID NO: 201192 - RNA, 32 nt, Human
gggugcaaacaugacugggaccuaagagccag

SEQ ID NO: 201193 - RNA, 32 nt, Human
gggugcaaagcaguaauuagucaaaguucaac

SEQ ID NO: 201194 - RNA, 32 nt, Human
gggugcaaggagcaaggacggggccaaggucg

SEQ ID NO: 201195 - RNA, 23 nt, Human
gggugcaauggcucaugccugua

SEQ ID NO: 201196 - RNA, 32 nt, Human
gggugcaccauggacauguguacauugagguu

SEQ ID NO: 201197 - RNA, 32 nt, Human
gggugcaccuauuaugggaggcuggagugcaa

SEQ ID NO: 201198 - RNA, 32 nt, Human
gggugcaccuuuucucuuuacugugacucacc

SEQ ID NO: 201199 - RNA, 32 nt, Human
gggugcagaaaccucuugccuccagauuuggg

SEQ ID NO: 201200 - RNA, 20 nt, Human
gggugcagacagcacaguca

SEQ ID NO: 201201 - RNA, 32 nt, Human
gggugcagagaccugagggcuugagguugccu

SEQ ID NO: 201202 - RNA, 32 nt, Human
gggugcagagguggaggcccggggagaggcac

SEQ ID NO: 201203 - RNA, 32 nt, Human
gggugcagaugaugccugggcagauguggagg

SEQ ID NO: 201204 - RNA, 22 nt, Human
gggugcagauuuccaacauuca

SEQ ID NO: 201205 - RNA, 20 nt, Human
gggugcagcacaccaacaug

SEQ ID NO: 201206 - RNA, 20 nt, Human
gggugcagcacaccagcaug

SEQ ID NO: 201207 - RNA, 20 nt, Human
gggugcagcacuggaccccu

SEQ ID NO: 201208 - RNA, 16 nt, Human
gggugcagcaggcuca

SEQ ID NO: 201209 - RNA, 19 nt, Human
gggugcagcccccggguua

SEQ ID NO: 201210 - RNA, 32 nt, Human
gggugcagccccuggcagacugacaguguggc

SEQ ID NO: 201211 - RNA, 20 nt, Human
gggugcagcgcaccagcaug

SEQ ID NO: 201212 - RNA, 20 nt, Human
gggugcagcgcccacuguca

SEQ ID NO: 201213 - RNA, 32 nt, Human
gggugcagcggacuugcuccagccugggugag

SEQ ID NO: 201214 - RNA, 23 nt, Human
gggugcagcggcucaugccugua

SEQ ID NO: 201215 - RNA, 32 nt, Human
gggugcaggaaaccauccagaaugcugcuucc

SEQ ID NO: 201216 - RNA, 32 nt, Human
gggugcaggacgccuggucugccuuguggguc

SEQ ID NO: 201217 - RNA, 32 nt, Human
gggugcaggagacagagaggggcugggggcgu

SEQ ID NO: 201218 - RNA, 32 nt, Human
gggugcaggagcagaagguggggaggguuaua

SEQ ID NO: 201219 - RNA, 32 nt, Human
gggugcaggagccagugucuguugucgggacu

SEQ ID NO: 201220 - RNA, 32 nt, Human
gggugcaggagcgcagaggccaugcucugcca

SEQ ID NO: 201221 - RNA, 32 nt, Human
gggugcaggcaugcacacacacgauggaauau

SEQ ID NO: 201222 - RNA, 18 nt, Human
gggugcaggcuucaggca

SEQ ID NO: 201223 - RNA, 22 nt, Human
gggugcagggaccaagauguca

SEQ ID NO: 201224 - RNA, 32 nt, Human
gggugcaggggaggggcgggagguggagcagg

SEQ ID NO: 201225 - RNA, 22 nt, Human
gggugcaggggcccccgaccuc

SEQ ID NO: 201226 - RNA, 23 nt, Human
gggugcaguggcucacaccugua

SEQ ID NO: 201227 - RNA, 22 nt, Human
gggugcaguggcucacacugua

SEQ ID NO: 201228 - RNA, 23 nt, Human
gggugcaguggcucacgccugua

SEQ ID NO: 201229 - RNA, 20 nt, Human
gggugcaguggcucauaccu

SEQ ID NO: 201230 - RNA, 23 nt, Human
gggugcaguggcucaugccugua

SEQ ID NO: 201231 - RNA, 23 nt, Human
gggugcaguggcucaugccugug

SEQ ID NO: 201232 - RNA, 21 nt, Human
gggugcaguggcucgccugua

SEQ ID NO: 201233 - RNA, 23 nt, Human
gggugcaguggcuuaugcuugua

SEQ ID NO: 201234 - RNA, 32 nt, Human
gggugcauauacguagagucugaacaggugcu

SEQ ID NO: 201235 - RNA, 32 nt, Human
gggugcaucccuggacaucagcucuucauuau

SEQ ID NO: 201236 - RNA, 32 nt, Human
gggugcaugcaugucccccacccuccacaguc

SEQ ID NO: 201237 - RNA, 32 nt, Human
gggugcaugccuggaaucccagcuacuugaga

SEQ ID NO: 201238 - RNA, 32 nt, Human
gggugcauuuuccucucauuauugagaacugu

SEQ ID NO: 201239 - RNA, 19 nt, Human
gggugccaagaguccagcu

SEQ ID NO: 201240 - RNA, 32 nt, Human
gggugccacacuuaggcugagcugcagguuuu

SEQ ID NO: 201241 - RNA, 32 nt, Human
gggugccacugaggcagcggagggaggcagga

SEQ ID NO: 201242 - RNA, 32 nt, Human
gggugccacugaugggggaugagggaaggccc

SEQ ID NO: 201243 - RNA, 32 nt, Human
gggugccagaacucaagguucaguggacacau

SEQ ID NO: 201244 - RNA, 31 nt, Human
gggugccagagaggcggaagaggaggccuga

SEQ ID NO: 201245 - RNA, 32 nt, Human
gggugccagagccuggggcuccugggcugcag

SEQ ID NO: 201246 - RNA, 32 nt, Human
gggugccaggagagcaggccacagugcuaaga

SEQ ID NO: 201247 - RNA, 32 nt, Human
gggugcccacacugagugaggaagggaaugga

SEQ ID NO: 201248 - RNA, 17 nt, Human
gggugcccagacagggg

SEQ ID NO: 201249 - RNA, 32 nt, Human
gggugcccauggagccucagaaaugccacccg

SEQ ID NO: 201250 - RNA, 32 nt, Human
gggugccccagccuuggugaggacaguguugg

SEQ ID NO: 201251 - RNA, 24 nt, Human
gggugcccccuagggcgacaggag

SEQ ID NO: 201252 - RNA, 32 nt, Human
gggugccccgaggaggaggguggguggguccu

SEQ ID NO: 201253 - RNA, 32 nt, Human
gggugccccuccaccuuccucuggaauccaag

SEQ ID NO: 201254 - RNA, 28 nt, Human
gggugcccgggaugagccucauccggaa

SEQ ID NO: 201255 - RNA, 21 nt, Human
gggugcccgggcccugggccc

SEQ ID NO: 201256 - RNA, 32 nt, Human
gggugcccguaaucccagcuacucaggaggcu

SEQ ID NO: 201257 - RNA, 32 nt, Human
gggugcccuagacuuaguccuuaucuuguccu

SEQ ID NO: 201258 - RNA, 32 nt, Human
gggugcccuccagaccuggggacugagugggg

SEQ ID NO: 201259 - RNA, 32 nt, Human
gggugcccuccagagaggggcugcuaccuccc

SEQ ID NO: 201260 - RNA, 32 nt, Human
gggugcccuccaggaaccaaggggcgguucuc

SEQ ID NO: 201261 - RNA, 19 nt, Human
gggugccgaggcucaggca

SEQ ID NO: 201262 - RNA, 32 nt, Human
gggugccggccacaccugaagugccagcauuu

SEQ ID NO: 201263 - RNA, 32 nt, Human
gggugccgggacuccggccgcagugucgccgc

SEQ ID NO: 201264 - RNA, 15 nt, Human
gggugccgggcccuu

SEQ ID NO: 201265 - RNA, 20 nt, Human
gggugccggggccucugaug

SEQ ID NO: 201266 - RNA, 23 nt, Human
gggugccguggcucaugccugua

SEQ ID NO: 201267 - RNA, 32 nt, Human
gggugccuauagucccagcuacucuggaggcu

SEQ ID NO: 201268 - RNA, 32 nt, Human
gggugccuccagccugagacaucaggggagag

SEQ ID NO: 201269 - RNA, 32 nt, Human
gggugccucccaggaccugggagcugacucua

SEQ ID NO: 201270 - RNA, 31 nt, Human
gggugccucucggaggagccuguguccaccu

SEQ ID NO: 201271 - RNA, 32 nt, Human
gggugccugaagcuauagugcaaugguuccca

SEQ ID NO: 201272 - RNA, 32 nt, Human
gggugccugcagccuuccacuccugccccgcc

SEQ ID NO: 201273 - RNA, 20 nt, Human
gggugccugcaggggagcug

SEQ ID NO: 201274 - RNA, 32 nt, Human
gggugccugccccucacugugcaucucuggga

SEQ ID NO: 201275 - RNA, 32 nt, Human
gggugccugccuggggcuuggggcucuguacg

SEQ ID NO: 201276 - RNA, 32 nt, Human
gggugccugcucuccuugcccugggccagccc

SEQ ID NO: 201277 - RNA, 32 nt, Human
gggugccugcugcugauaacauucggauggag

SEQ ID NO: 201278 - RNA, 32 nt, Human
gggugccugcuguccgucccgcuuucauguua

SEQ ID NO: 201279 - RNA, 32 nt, Human
gggugccuggagucccagcuacucgggaggcu

SEQ ID NO: 201280 - RNA, 32 nt, Human
gggugccugggccuccccaggagcuguggacu

SEQ ID NO: 201281 - RNA, 32 nt, Human
gggugccuguaaccccagcuacuugggaggcu

SEQ ID NO: 201282 - RNA, 32 nt, Human
gggugccuguaaccucagcuacuugggaggcu

SEQ ID NO: 201283 - RNA, 32 nt, Human
gggugccuguaaucagcuacucgggaggcuga

SEQ ID NO: 201284 - RNA, 32 nt, Human
gggugccuguaauccaacuacccaggaggcug

SEQ ID NO: 201285 - RNA, 32 nt, Human
gggugccuguaaucccagauacucaggaggcu

SEQ ID NO: 201286 - RNA, 32 nt, Human
gggugccuguaaucccagauagucaggaggcu

SEQ ID NO: 201287 - RNA, 20 nt, Human
gggugccuguaaucccagcu

SEQ ID NO: 201288 - RNA, 32 nt, Human
gggugccuguaaucccagcuacaugggagccu

SEQ ID NO: 201289 - RNA, 32 nt, Human
gggugccuguaaucccagcuacgugggaggcu

SEQ ID NO: 201290 - RNA, 32 nt, Human
gggugccuguaaucccagcuacucaagaggcu

SEQ ID NO: 201291 - RNA, 32 nt, Human
gggugccuguaaucccagcuacucaggaggca

SEQ ID NO: 201292 - RNA, 32 nt, Human
gggugccuguaaucccagcuacucaggaggcu

SEQ ID NO: 201293 - RNA, 32 nt, Human
gggugccuguaaucccagcuacucgggagacu

SEQ ID NO: 201294 - RNA, 32 nt, Human
gggugccuguaaucccagcuacucgggaggcu

SEQ ID NO: 201295 - RNA, 32 nt, Human
gggugccuguaaucccagcuacucgggagguu

SEQ ID NO: 201296 - RNA, 32 nt, Human
gggugccuguaaucccagcuacuggggaggcu

SEQ ID NO: 201297 - RNA, 32 nt, Human
gggugccuguaaucccagcuacuugggaagcu

SEQ ID NO: 201298 - RNA, 32 nt, Human
gggugccuguaaucccagcuacuugggaggca

SEQ ID NO: 201299 - RNA, 32 nt, Human
gggugccuguaaucccagcuacuugggaggcu

SEQ ID NO: 201300 - RNA, 32 nt, Human
gggugccuguaaucccagcuauucaggaggcu

SEQ ID NO: 201301 - RNA, 32 nt, Human
gggugccuguaaucccagcuccuugggaggcu

SEQ ID NO: 201302 - RNA, 32 nt, Human
gggugccuguaaucccagcuucuuaggaggcu

SEQ ID NO: 201303 - RNA, 20 nt, Human
gggugccuguaaucccaguu

SEQ ID NO: 201304 - RNA, 32 nt, Human
gggugccuguaaucccaguuacucaggaggcu

SEQ ID NO: 201305 - RNA, 32 nt, Human
gggugccuguaaucccaguuacuugggaggcu

SEQ ID NO: 201306 - RNA, 20 nt, Human
gggugccuguaaucccggcu

SEQ ID NO: 201307 - RNA, 32 nt, Human
gggugccuguaaucccggcuacucaggaggcu

SEQ ID NO: 201308 - RNA, 32 nt, Human
gggugccuguaauccuagcuacuugggaggcu

SEQ ID NO: 201309 - RNA, 32 nt, Human
gggugccuguaaucucagcuacucgggaggcu

SEQ ID NO: 201310 - RNA, 32 nt, Human
gggugccuguaaucucagcuacuugagaggcu

SEQ ID NO: 201311 - RNA, 32 nt, Human
gggugccuguaauuccagccacucgagaggcu

SEQ ID NO: 201312 - RNA, 20 nt, Human
gggugccuguagucccagcu

SEQ ID NO: 201313 - RNA, 32 nt, Human
gggugccuguagucccagcuacucaggaggcu

SEQ ID NO: 201314 - RNA, 32 nt, Human
gggugccuguagucccagcuacucgggaggcu

SEQ ID NO: 201315 - RNA, 32 nt, Human
gggugccuguagucccagcuacucuggaggcu

SEQ ID NO: 201316 - RNA, 32 nt, Human
gggugccuguagucccagcuacuugggaggcu

SEQ ID NO: 201317 - RNA, 32 nt, Human
gggugccuguagucccagcuauuugggaggcu

SEQ ID NO: 201318 - RNA, 32 nt, Human
gggugccuguagucccagcugcucgggaggcu

SEQ ID NO: 201319 - RNA, 32 nt, Human
gggugccuguaguuccagcuacuugggaggcu

SEQ ID NO: 201320 - RNA, 32 nt, Human
gggugccuguauugccagcuacucggaaggcu

SEQ ID NO: 201321 - RNA, 32 nt, Human
gggugccuguggucccagcuacucgggacgcu

SEQ ID NO: 201322 - RNA, 32 nt, Human
gggugccuguggucccagcuacuggggaggcu

SEQ ID NO: 201323 - RNA, 32 nt, Human
gggugccuguggucccagcugcucggaaggcu

SEQ ID NO: 201324 - RNA, 32 nt, Human
gggugccuguggucccagcugcuugggaggcu

SEQ ID NO: 201325 - RNA, 32 nt, Human
gggugccuuuagucccagcucuuugggaagcu

SEQ ID NO: 201326 - RNA, 32 nt, Human
gggugccuuucugucuugcuuccagggggcug

SEQ ID NO: 201327 - RNA, 32 nt, Human
gggugccuuuggugaggacugcacacccuccu

SEQ ID NO: 201328 - RNA, 32 nt, Human
gggugcgaccaagcccuggcuccagcucuagc

SEQ ID NO: 201329 - RNA, 17 nt, Human
gggugcgagggggccag

SEQ ID NO: 201330 - RNA, 23 nt, Human
gggugcgcgcucggcgccgggag

SEQ ID NO: 201331 - RNA, 32 nt, Human
gggugcgcucagagacacgggcaagcaugccu

SEQ ID NO: 201332 - RNA, 32 nt, Human
gggugcgcucagucacuggugccugagaggaa

SEQ ID NO: 201333 - RNA, 17 nt, Human
gggugcgcuccaauuca

SEQ ID NO: 201334 - RNA, 32 nt, Human
gggugcgcuccgacagcucaaguucacgcggg

SEQ ID NO: 201335 - RNA, 32 nt, Human
gggugcgcuggugaaguggcccagggaagugc

SEQ ID NO: 201336 - RNA, 32 nt, Human
gggugcgcuguggcucaugccuguaauccuag

SEQ ID NO: 201337 - RNA, 32 nt, Human
gggugcgcuuguaaucccagcuacucaggagg

SEQ ID NO: 201338 - RNA, 32 nt, Human
gggugcgcuuguaaucccagcuacucgggagg

SEQ ID NO: 201339 - RNA, 32 nt, Human
gggugcggacggcggaggcggcgggacugguc

SEQ ID NO: 201340 - RNA, 32 nt, Human
gggugcggagagagcaccuuuuugcuuuucga

SEQ ID NO: 201341 - RNA, 32 nt, Human
gggugcggagccgccgguggcccagccgcuca

SEQ ID NO: 201342 - RNA, 32 nt, Human
gggugcggaugcagccugcaaucccagcuacu

SEQ ID NO: 201343 - RNA, 32 nt, Human
gggugcggcagggcaggagcuuggcagagaga

SEQ ID NO: 201344 - RNA, 32 nt, Human
gggugcggcgcgggugggggagggcggacccg

SEQ ID NO: 201345 - RNA, 32 nt, Human
gggugcgggccgagcccgaggggaagaaccug

SEQ ID NO: 201346 - RNA, 32 nt, Human
gggugcgggcugggguuuucuccugggcguca

SEQ ID NO: 201347 - RNA, 32 nt, Human
gggugcggggcaguucacucugucucccaggc

SEQ ID NO: 201348 - RNA, 23 nt, Human
gggugcgguggcgcgugccugug

SEQ ID NO: 201349 - RNA, 23 nt, Human
gggugcgguggcucacaccugua

SEQ ID NO: 201350 - RNA, 23 nt, Human
gggugcgguggcucaccccugua

SEQ ID NO: 201351 - RNA, 23 nt, Human
gggugcgguggcucacgccugua

SEQ ID NO: 201352 - RNA, 23 nt, Human
gggugcgguggcucacgucugua

SEQ ID NO: 201353 - RNA, 23 nt, Human
gggugcgguggcucaggccugua

SEQ ID NO: 201354 - RNA, 20 nt, Human
gggugcgguggcucaugccu

SEQ ID NO: 201355 - RNA, 21 nt, Human
gggugcgguggcucaugccug

SEQ ID NO: 201356 - RNA, 23 nt, Human
gggugcgguggcucaugccugua

SEQ ID NO: 201357 - RNA, 23 nt, Human
gggugcgguggcucccgccugua

SEQ ID NO: 201358 - RNA, 23 nt, Human
gggugcgguggcucucgccugua

SEQ ID NO: 201359 - RNA, 23 nt, Human
gggugcggugguucacaccugua

SEQ ID NO: 201360 - RNA, 32 nt, Human
gggugcuacaggcuugucuuucuaagugacau

SEQ ID NO: 201361 - RNA, 32 nt, Human
gggugcuaccucaguguuguaguuucugauac

SEQ ID NO: 201362 - RNA, 32 nt, Human
gggugcuagagcuguuuagagagggccuguug

SEQ ID NO: 201363 - RNA, 32 nt, Human
gggugcuaucagagccucucccacaccacuau

SEQ ID NO: 201364 - RNA, 17 nt, Human
gggugcuauucugugaa

SEQ ID NO: 201365 - RNA, 32 nt, Human
gggugcucacgcccccggcauguggccgcccu

SEQ ID NO: 201366 - RNA, 32 nt, Human
gggugcucagcagagcgugagccaccagggaa

SEQ ID NO: 201367 - RNA, 32 nt, Human
gggugcucaggaaaugauuuucaaccaacuuc

SEQ ID NO: 201368 - RNA, 32 nt, Human
gggugcucagggcugacacguccaccccagug

SEQ ID NO: 201369 - RNA, 32 nt, Human
gggugcuccggcagggcaggaugggaaggcgu

SEQ ID NO: 201370 - RNA, 32 nt, Human
gggugcuccugccuuaggucugaggcccuguc

SEQ ID NO: 201371 - RNA, 32 nt, Human
gggugcuccugcucugcacuccagaaacaccc

SEQ ID NO: 201372 - RNA, 32 nt, Human
gggugcucuacaccucagguuaccaggccuga

SEQ ID NO: 201373 - RNA, 17 nt, Human
gggugcucucccugcag

SEQ ID NO: 201374 - RNA, 32 nt, Human
gggugcucuccucuugagcucagcuucugauu

SEQ ID NO: 201375 - RNA, 32 nt, Human
gggugcucugggcuggagcgagggccagguuu

SEQ ID NO: 201376 - RNA, 19 nt, Human
gggugcucuggguggggug

SEQ ID NO: 201377 - RNA, 32 nt, Human
gggugcucugggugggguggcccagugacuug

SEQ ID NO: 201378 - RNA, 32 nt, Human
gggugcucuguuuccccaccguucccaggugu

SEQ ID NO: 201379 - RNA, 21 nt, Human
gggugcucuucccccuccuua

SEQ ID NO: 201380 - RNA, 32 nt, Human
gggugcucuuucucugugccugcuccuuauga

SEQ ID NO: 201381 - RNA, 18 nt, Human
gggugcugaaggcuccag

SEQ ID NO: 201382 - RNA, 32 nt, Human
gggugcugacacagucccucugggagagcucu

SEQ ID NO: 201383 - RNA, 20 nt, Human
gggugcugagauuacaggug

SEQ ID NO: 201384 - RNA, 32 nt, Human
gggugcugagauuacaggugugagccacccug

SEQ ID NO: 201385 - RNA, 18 nt, Human
gggugcugagcccgcucc

SEQ ID NO: 201386 - RNA, 32 nt, Human
gggugcugaggcgggaggauuacuugagccca

SEQ ID NO: 201387 - RNA, 32 nt, Human
gggugcugagggagcgccagagugcgcuacgg

SEQ ID NO: 201388 - RNA, 32 nt, Human
gggugcugagugcagggggugccuucaccugg

SEQ ID NO: 201389 - RNA, 22 nt, Human
gggugcugaguugggugauuuc

SEQ ID NO: 201390 - RNA, 32 nt, Human
gggugcugccacuccagcaggcgucgguucaa

SEQ ID NO: 201391 - RNA, 32 nt, Human
gggugcugccagcugcucccaaugugccgaug

SEQ ID NO: 201392 - RNA, 17 nt, Human
gggugcugcgcggcggc

SEQ ID NO: 201393 - RNA, 32 nt, Human
gggugcugcuuuguucucaggcugcuccucca

SEQ ID NO: 201394 - RNA, 32 nt, Human
gggugcuggacacaguguuggggaagacugug

SEQ ID NO: 201395 - RNA, 32 nt, Human
gggugcuggagggagagcucggggcccagccc

SEQ ID NO: 201396 - RNA, 32 nt, Human
gggugcuggaugguagagaauuuugucaguca

SEQ ID NO: 201397 - RNA, 32 nt, Human
gggugcuggcagcccucccucgcucuuggugc

SEQ ID NO: 201398 - RNA, 32 nt, Human
gggugcugggagaggguugggggcagggggca

SEQ ID NO: 201399 - RNA, 32 nt, Human
gggugcugggauuacagacgugagccaccacc

SEQ ID NO: 201400 - RNA, 18 nt, Human
gggugcugggauuacagg

SEQ ID NO: 201401 - RNA, 32 nt, Human
gggugcugggauuacaggcaucagccacugca

SEQ ID NO: 201402 - RNA, 20 nt, Human
gggugcugggauuacaggug

SEQ ID NO: 201403 - RNA, 32 nt, Human
gggugcugggauuacaggugugagccaccaug

SEQ ID NO: 201404 - RNA, 32 nt, Human
gggugcuggggaggggcugguaggagggaggg

SEQ ID NO: 201405 - RNA, 32 nt, Human
gggugcuggggaugcauccaaagugguugucu

SEQ ID NO: 201406 - RNA, 16 nt, Human
gggugcuggggcccuu

SEQ ID NO: 201407 - RNA, 32 nt, Human
gggugcuggucccugcccccugccccaccccu

SEQ ID NO: 201408 - RNA, 32 nt, Human
gggugcuggugugucuuggugccuggacuuga

SEQ ID NO: 201409 - RNA, 32 nt, Human
gggugcugugagccaccuccagccucgggugg

SEQ ID NO: 201410 - RNA, 23 nt, Human
gggugcuguggcucacgccugua

SEQ ID NO: 201411 - RNA, 32 nt, Human
gggugcuguguugagucagcaggcauggggug

SEQ ID NO: 201412 - RNA, 32 nt, Human
gggugcuuaccucccugcuaggcaugcagggg

SEQ ID NO: 201413 - RNA, 20 nt, Human
gggugcuuagcuccagagca

SEQ ID NO: 201414 - RNA, 32 nt, Human
gggugcuuccaagagaacaucagaggucauca

SEQ ID NO: 201415 - RNA, 32 nt, Human
gggugcuugguggaagucagcagggcaucugg

SEQ ID NO: 201416 - RNA, 32 nt, Human
gggugcuuguaguuccagcuacucaggaggcu

SEQ ID NO: 201417 - RNA, 32 nt, Human
gggugcuuucuugagcccccaguucucugucc

SEQ ID NO: 201418 - RNA, 32 nt, Human
ggguggaaaauggcagagcugcagauguuacu

SEQ ID NO: 201419 - RNA, 32 nt, Human
ggguggaacaagaccagagauccagagcaaaa

SEQ ID NO: 201420 - RNA, 32 nt, Human
ggguggaacacgaggucaggaguucgagauca

SEQ ID NO: 201421 - RNA, 32 nt, Human
ggguggaagaggagaggguggaaggggaauaa

SEQ ID NO: 201422 - RNA, 32 nt, Human
ggguggaagagggaguagcugauuucuuugaa

SEQ ID NO: 201423 - RNA, 32 nt, Human
ggguggaaggagugccuggcccuggggaggac

SEQ ID NO: 201424 - RNA, 31 nt, Human
ggguggaagggacccuccucacuggauggug

SEQ ID NO: 201425 - RNA, 32 nt, Human
ggguggaagggagcagguucccaaugaagccc

SEQ ID NO: 201426 - RNA, 32 nt, Human
ggguggaagggagggucagggaagaaacccac

SEQ ID NO: 201427 - RNA, 32 nt, Human
ggguggaaugcaugugugggggcagagguuau

SEQ ID NO: 201428 - RNA, 32 nt, Human
ggguggaauuccaggguugagagacuccccug

SEQ ID NO: 201429 - RNA, 32 nt, Human
ggguggacagaacaaggcccugucucuauuuu

SEQ ID NO: 201430 - RNA, 32 nt, Human
ggguggacaggcugagccccucccaacagcag

SEQ ID NO: 201431 - RNA, 32 nt, Human
ggguggaccccauccagucuguugaaggccug

SEQ ID NO: 201432 - RNA, 32 nt, Human
ggguggacgauggacagccagagcaggaaggu

SEQ ID NO: 201433 - RNA, 32 nt, Human
ggguggacgucucagugcacacgcaggaacau

SEQ ID NO: 201434 - RNA, 32 nt, Human
ggguggacugaccggucuucugaccucuggcu

SEQ ID NO: 201435 - RNA, 32 nt, Human
ggguggacugagucccacucagcuucagguag

SEQ ID NO: 201436 - RNA, 32 nt, Human
ggguggacuuuaagcauggugacagaugguau

SEQ ID NO: 201437 - RNA, 32 nt, Human
ggguggagagagacauaaaucuggccuacgug

SEQ ID NO: 201438 - RNA, 32 nt, Human
ggguggagaggugggguggggugggguguggu

SEQ ID NO: 201439 - RNA, 32 nt, Human
ggguggagaguccugcaucauagccaccaaau

SEQ ID NO: 201440 - RNA, 18 nt, Human
ggguggagaugccgccua

SEQ ID NO: 201441 - RNA, 32 nt, Human
ggguggagcacuguggacugaaugccuguguc

SEQ ID NO: 201442 - RNA, 32 nt, Human
ggguggaggaagaggaagggccaaacuagcug

SEQ ID NO: 201443 - RNA, 32 nt, Human
ggguggaggaagagggcaggcgaggcgggaag

SEQ ID NO: 201444 - RNA, 32 nt, Human
ggguggaggagcuacggcgccgccggcgggag

SEQ ID NO: 201445 - RNA, 32 nt, Human
ggguggaggaguuccuggagaaggacaggagg

SEQ ID NO: 201446 - RNA, 32 nt, Human
ggguggaggauaacaggguagauucacuugug

SEQ ID NO: 201447 - RNA, 19 nt, Human
ggguggaggcgccauccua

SEQ ID NO: 201448 - RNA, 32 nt, Human
ggguggaggggaagggugggucucaguuagca

SEQ ID NO: 201449 - RNA, 17 nt, Human
ggguggaggggagggac

SEQ ID NO: 201450 - RNA, 16 nt, Human
ggguggaggggccgga

SEQ ID NO: 201451 - RNA, 32 nt, Human
ggguggagguccugggugggcuaaggcgugag

SEQ ID NO: 201452 - RNA, 32 nt, Human
ggguggaggugugggagcugaugggagaauga

SEQ ID NO: 201453 - RNA, 19 nt, Human
ggguggagguugcagugag

SEQ ID NO: 201454 - RNA, 32 nt, Human
ggguggaguaagggggagacugaugcuagucc

SEQ ID NO: 201455 - RNA, 32 nt, Human
ggguggaguugagugugcucugggcuuggaca

SEQ ID NO: 201456 - RNA, 32 nt, Human
ggguggaucaaaaggaacuguccuucagccca

SEQ ID NO: 201457 - RNA, 20 nt, Human
ggguggaucacaagcucagg

SEQ ID NO: 201458 - RNA, 22 nt, Human
ggguggaucacaugaggccagg

SEQ ID NO: 201459 - RNA, 22 nt, Human
ggguggaucacccgaggucagg

SEQ ID NO: 201460 - RNA, 22 nt, Human
ggguggaucaccugaggccagg

SEQ ID NO: 201461 - RNA, 20 nt, Human
ggguggaucaccugagguca

SEQ ID NO: 201462 - RNA, 21 nt, Human
ggguggaucaccugaggucag

SEQ ID NO: 201463 - RNA, 22 nt, Human
ggguggaucaccugaggucagg

SEQ ID NO: 201464 - RNA, 20 nt, Human
ggguggaucacgaggucagg

SEQ ID NO: 201465 - RNA, 20 nt, Human
ggguggaucacuuaagguca

SEQ ID NO: 201466 - RNA, 20 nt, Human
ggguggaucacuugagauca

SEQ ID NO: 201467 - RNA, 22 nt, Human
ggguggaucacuugagaucagg

SEQ ID NO: 201468 - RNA, 20 nt, Human
ggguggaucacuugaggcca

SEQ ID NO: 201469 - RNA, 22 nt, Human
ggguggaucacuugaggccagg

SEQ ID NO: 201470 - RNA, 22 nt, Human
ggguggaucacuugaggccggg

SEQ ID NO: 201471 - RNA, 22 nt, Human
ggguggaucacuugaggucagg

SEQ ID NO: 201472 - RNA, 22 nt, Human
ggguggaucacuugagguuagg

SEQ ID NO: 201473 - RNA, 19 nt, Human
ggguggaucaugaggucag

SEQ ID NO: 201474 - RNA, 20 nt, Human
ggguggaucaugaggucagg

SEQ ID NO: 201475 - RNA, 32 nt, Human
ggguggaucaugaggucaggaggaucaugagg

SEQ ID NO: 201476 - RNA, 22 nt, Human
ggguggaucgcuugagcacagg

SEQ ID NO: 201477 - RNA, 32 nt, Human
ggguggaugaggguuuaugguccucugaucau

SEQ ID NO: 201478 - RNA, 32 nt, Human
ggguggaugauaccauuuccugaccccguuuu

SEQ ID NO: 201479 - RNA, 32 nt, Human
ggguggauggagaagagguugcugauuaaaau

SEQ ID NO: 201480 - RNA, 32 nt, Human
ggguggauggugcuugccgcguaucauggcug

SEQ ID NO: 201481 - RNA, 29 nt, Human
ggguggauguugugugugcuggggagggg

SEQ ID NO: 201482 - RNA, 22 nt, Human
ggguggauuaccugaggucagg

SEQ ID NO: 201483 - RNA, 22 nt, Human
ggguggauugcuugaacccagg

SEQ ID NO: 201484 - RNA, 21 nt, Human
ggguggauugcuugagcccag

SEQ ID NO: 201485 - RNA, 22 nt, Human
ggguggauugcuugagcccagg

SEQ ID NO: 201486 - RNA, 22 nt, Human
ggguggauugcuugaggccagg

SEQ ID NO: 201487 - RNA, 22 nt, Human
ggguggauugcuugaugccagg

SEQ ID NO: 201488 - RNA, 32 nt, Human
ggguggcaagaggauuuuugaccuggauuuau

SEQ ID NO: 201489 - RNA, 32 nt, Human
ggguggcacacagcagucuuugugccagaacu

SEQ ID NO: 201490 - RNA, 32 nt, Human
ggguggcacagccuggcuugagugguggcaug

SEQ ID NO: 201491 - RNA, 31 nt, Human
ggguggcacaggggucccacagcaggucuuc

SEQ ID NO: 201492 - RNA, 32 nt, Human
ggguggcaccugccaggccaagggucagggug

SEQ ID NO: 201493 - RNA, 32 nt, Human
ggguggcaccugccucucccaccuccagucuu

SEQ ID NO: 201494 - RNA, 19 nt, Human
ggguggcacggaggggcug

SEQ ID NO: 201495 - RNA, 32 nt, Human
ggguggcacugagcuaugagucccggggaugg

SEQ ID NO: 201496 - RNA, 32 nt, Human
ggguggcacugccacaucccacuggcagaaac

SEQ ID NO: 201497 - RNA, 32 nt, Human
ggguggcagaagcagcaggugacaggagcagg

SEQ ID NO: 201498 - RNA, 24 nt, Human
ggguggcagagcgagacccugucu

SEQ ID NO: 201499 - RNA, 32 nt, Human
ggguggcagaggagaagaaucgcuugaaccug

SEQ ID NO: 201500 - RNA, 32 nt, Human
ggguggcagaggauuguuuggccaggucugug

SEQ ID NO: 201501 - RNA, 32 nt, Human
ggguggcagaggucucuuugcuucauucagcc

SEQ ID NO: 201502 - RNA, 24 nt, Human
ggguggcagagugagacccugucu

SEQ ID NO: 201503 - RNA, 24 nt, Human
ggguggcagagugagacucugucu

SEQ ID NO: 201504 - RNA, 32 nt, Human
ggguggcagcagccagaggaggaauauggcgc

SEQ ID NO: 201505 - RNA, 32 nt, Human
ggguggcagccccaggcucuuugcauaauccu

SEQ ID NO: 201506 - RNA, 32 nt, Human
ggguggcagcgcccagccuggccccaagcaug

SEQ ID NO: 201507 - RNA, 32 nt, Human
ggguggcagggacuggagucaguuggagagug

SEQ ID NO: 201508 - RNA, 32 nt, Human
ggguggcauccaggcugcccguguguugcacc

SEQ ID NO: 201509 - RNA, 32 nt, Human
ggguggccaaggggcguuuccucugcuuuugg

SEQ ID NO: 201510 - RNA, 32 nt, Human
ggguggccacaccucuaucccggcuuuggugc

SEQ ID NO: 201511 - RNA, 19 nt, Human
ggguggccaccccuccuua

SEQ ID NO: 201512 - RNA, 32 nt, Human
ggguggccacgucacaaccucugaucucagac

SEQ ID NO: 201513 - RNA, 32 nt, Human
ggguggccagaaacuaaacagcaaaagcaaag

SEQ ID NO: 201514 - RNA, 32 nt, Human
ggguggccagaagucccugcgguccuacuggc

SEQ ID NO: 201515 - RNA, 32 nt, Human
ggguggccagccaagaggacguggggcaggug

SEQ ID NO: 201516 - RNA, 32 nt, Human
ggguggccagggguggugagggcaguucugca

SEQ ID NO: 201517 - RNA, 24 nt, Human
ggguggccaguuuccauguggcuu

SEQ ID NO: 201518 - RNA, 20 nt, Human
ggguggcccacccauuucca

SEQ ID NO: 201519 - RNA, 32 nt, Human
ggguggccccuccagugcgcuccccagagcag

SEQ ID NO: 201520 - RNA, 32 nt, Human
ggguggcccuggaauguguagaagggguguca

SEQ ID NO: 201521 - RNA, 32 nt, Human
ggguggcccuggcagaaccacugccugaagaa

SEQ ID NO: 201522 - RNA, 23 nt, Human
ggguggccgaggcaggaagauca

SEQ ID NO: 201523 - RNA, 32 nt, Human
ggguggccuccaggccaagggcuugggcccca

SEQ ID NO: 201524 - RNA, 32 nt, Human
ggguggccuccccucugucugccugguggagg

SEQ ID NO: 201525 - RNA, 32 nt, Human
ggguggccugggcggaggcuaugguggggcca

SEQ ID NO: 201526 - RNA, 32 nt, Human
ggguggccuugggaggagagggccaggcuguc

SEQ ID NO: 201527 - RNA, 32 nt, Human
ggguggcgcgccugccuuuucuaguuuuauac

SEQ ID NO: 201528 - RNA, 32 nt, Human
ggguggcggccaggaggaaaggcagaaagggg

SEQ ID NO: 201529 - RNA, 32 nt, Human
ggguggcggcccuggggauggggaaggagcag

SEQ ID NO: 201530 - RNA, 32 nt, Human
ggguggcggcuccggcggaugucaggaaugcu

SEQ ID NO: 201531 - RNA, 32 nt, Human
ggguggcgugugugugccacauauuuccccgu

SEQ ID NO: 201532 - RNA, 32 nt, Human
ggguggcuacagugucaauggaggaucugggg

SEQ ID NO: 201533 - RNA, 32 nt, Human
ggguggcuaugcaggaaggagccaaagagggg

SEQ ID NO: 201534 - RNA, 18 nt, Human
ggguggcucacacacucu

SEQ ID NO: 201535 - RNA, 32 nt, Human
ggguggcucauuuccuggccgcuccugggcuu

SEQ ID NO: 201536 - RNA, 32 nt, Human
ggguggcucggcucgggaggcuugggacccca

SEQ ID NO: 201537 - RNA, 32 nt, Human
ggguggcucugccucaucacccagcaagccug

SEQ ID NO: 201538 - RNA, 32 nt, Human
ggguggcucugggagcaguugugcugcgggcu

SEQ ID NO: 201539 - RNA, 32 nt, Human
ggguggcucuguccuaccuccacucucugccc

SEQ ID NO: 201540 - RNA, 32 nt, Human
ggguggcugaccccaugcucagccucuagggg

SEQ ID NO: 201541 - RNA, 32 nt, Human
ggguggcugcagauggagcagcuuggacuuua

SEQ ID NO: 201542 - RNA, 19 nt, Human
ggguggcugcccucagggg

SEQ ID NO: 201543 - RNA, 21 nt, Human
ggguggcugcgucugaaggcu

SEQ ID NO: 201544 - RNA, 32 nt, Human
ggguggcugcugcuucccuugugcacuugggu

SEQ ID NO: 201545 - RNA, 32 nt, Human
ggguggcuggcagaggggacccccaggagccu

SEQ ID NO: 201546 - RNA, 32 nt, Human
ggguggcugggaggggaagggaagggagaggc

SEQ ID NO: 201547 - RNA, 20 nt, Human
ggguggcugggguaggggcu

SEQ ID NO: 201548 - RNA, 16 nt, Human
ggguggcugggugggg

SEQ ID NO: 201549 - RNA, 32 nt, Human
ggguggcuguggggcguggcaggaggggccua

SEQ ID NO: 201550 - RNA, 32 nt, Human
ggguggcuuccaagccucacuucuccaguguu

SEQ ID NO: 201551 - RNA, 32 nt, Human
ggguggcuuccaguggucuucagucugucgug

SEQ ID NO: 201552 - RNA, 27 nt, Human
gggugggaaagacucaaaggggcgcuu

SEQ ID NO: 201553 - RNA, 32 nt, Human
gggugggaaaggcuuuaucagguaucaucaac

SEQ ID NO: 201554 - RNA, 32 nt, Human
gggugggaagagggccaucugccugaauguaa

SEQ ID NO: 201555 - RNA, 32 nt, Human
gggugggaagggaagagagggauaagaaaaua

SEQ ID NO: 201556 - RNA, 21 nt, Human
gggugggaagggagaagcaga

SEQ ID NO: 201557 - RNA, 32 nt, Human
gggugggaagggagccuucucaguccucucuc

SEQ ID NO: 201558 - RNA, 32 nt, Human
gggugggaaguguggcugguaaccuggcagcc

SEQ ID NO: 201559 - RNA, 32 nt, Human
gggugggaauuguucaagaaaaaccugggaga

SEQ ID NO: 201560 - RNA, 32 nt, Human
gggugggaccacugcaagcucgagaccuugcu

SEQ ID NO: 201561 - RNA, 32 nt, Human
gggugggacucugcagggguguccuuguccac

SEQ ID NO: 201562 - RNA, 32 nt, Human
gggugggagacagggcuuuuucucucccucug

SEQ ID NO: 201563 - RNA, 32 nt, Human
gggugggagagaagaaaagggaaagaagcuga

SEQ ID NO: 201564 - RNA, 32 nt, Human
gggugggagagccagagcaaagaggcagagau

SEQ ID NO: 201565 - RNA, 32 nt, Human
gggugggagaggagguagauggggaagaaaua

SEQ ID NO: 201566 - RNA, 32 nt, Human
gggugggagagggaagaggagagaaaagacag

SEQ ID NO: 201567 - RNA, 32 nt, Human
gggugggagagggaagcaaugaggaggaucuc

SEQ ID NO: 201568 - RNA, 32 nt, Human
gggugggagaggggagaggagagaguuuggga

SEQ ID NO: 201569 - RNA, 32 nt, Human
gggugggagagugcuacagucuguaugucugu

SEQ ID NO: 201570 - RNA, 32 nt, Human
gggugggagcaguuugaaggaguaagccuggu

SEQ ID NO: 201571 - RNA, 32 nt, Human
gggugggaggagaaggaggaagaggaggaagg

SEQ ID NO: 201572 - RNA, 32 nt, Human
gggugggaggagccagcggccggggagguucu

SEQ ID NO: 201573 - RNA, 32 nt, Human
gggugggaggggacuccaggaggagggaccag

SEQ ID NO: 201574 - RNA, 32 nt, Human
gggugggagggugggagggugggggaacacaa

SEQ ID NO: 201575 - RNA, 32 nt, Human
gggugggagggugggccauggagggcaucuga

SEQ ID NO: 201576 - RNA, 32 nt, Human
gggugggagggugggggaacacaaagagaaaa

SEQ ID NO: 201577 - RNA, 32 nt, Human
gggugggaggguggguacaggccagggauauu

SEQ ID NO: 201578 - RNA, 19 nt, Human
gggugggaggucccggagu

SEQ ID NO: 201579 - RNA, 32 nt, Human
gggugggagguggcaguagucuuagccugugc

SEQ ID NO: 201580 - RNA, 32 nt, Human
gggugggaucggggagcaggaagccugugggc

SEQ ID NO: 201581 - RNA, 32 nt, Human
gggugggaugggaggggguagagggagccagg

SEQ ID NO: 201582 - RNA, 32 nt, Human
gggugggauguggccuuuuggcuggucccguc

SEQ ID NO: 201583 - RNA, 32 nt, Human
gggugggcaaaugcagaagggagccagugucg

SEQ ID NO: 201584 - RNA, 32 nt, Human
gggugggcacccgucaggcugaccagaaggug

SEQ ID NO: 201585 - RNA, 32 nt, Human
gggugggcagagccaccaggaacccagacacc

SEQ ID NO: 201586 - RNA, 19 nt, Human
gggugggcaggcucagaca

SEQ ID NO: 201587 - RNA, 32 nt, Human
gggugggcagggaugcacaaggcucuacucca

SEQ ID NO: 201588 - RNA, 32 nt, Human
gggugggcagggcugggagaacuuuguacagu

SEQ ID NO: 201589 - RNA, 18 nt, Human
gggugggcaggggggcug

SEQ ID NO: 201590 - RNA, 32 nt, Human
gggugggcagucaggguugcaggacuguaaua

SEQ ID NO: 201591 - RNA, 32 nt, Human
gggugggcauagccaaggggguuccagggccg

SEQ ID NO: 201592 - RNA, 32 nt, Human
gggugggcauggaacaggaugggcagagaaag

SEQ ID NO: 201593 - RNA, 32 nt, Human
gggugggccacagccauggugggaguggccug

SEQ ID NO: 201594 - RNA, 32 nt, Human
gggugggccauggagggcaucugaauacagga

SEQ ID NO: 201595 - RNA, 21 nt, Human
gggugggcccacgcugggagg

SEQ ID NO: 201596 - RNA, 32 nt, Human
gggugggcccucaguggugaagcaccgcugcc

SEQ ID NO: 201597 - RNA, 32 nt, Human
gggugggccuagaaaguguccucagcccugcc

SEQ ID NO: 201598 - RNA, 20 nt, Human
gggugggccucaaccaccug

SEQ ID NO: 201599 - RNA, 25 nt, Human
gggugggcgaacccagagggacgcu

SEQ ID NO: 201600 - RNA, 32 nt, Human
gggugggcgaccugggcgggucccaggcacug

SEQ ID NO: 201601 - RNA, 32 nt, Human
gggugggcgcggcaucuucagcgacucuucga

SEQ ID NO: 201602 - RNA, 32 nt, Human
gggugggcgugggccgcacagcgcggcagggc

SEQ ID NO: 201603 - RNA, 21 nt, Human
gggugggcguuuggggcccuc

SEQ ID NO: 201604 - RNA, 32 nt, Human
gggugggcucagcuccagggagaggccaccca

SEQ ID NO: 201605 - RNA, 19 nt, Human
gggugggcugcagcuuccu

SEQ ID NO: 201606 - RNA, 32 nt, Human
gggugggcugggugggguggggaugagggccc

SEQ ID NO: 201607 - RNA, 17 nt, Human
gggugggcuucaggcca

SEQ ID NO: 201608 - RNA, 32 nt, Human
gggugggcuuggcugcagccgccagccccgug

SEQ ID NO: 201609 - RNA, 32 nt, Human
gggugggcuuuggucuuagcacuuuccuucuc

SEQ ID NO: 201610 - RNA, 32 nt, Human
ggguggggaaacucuuaacaccuuccagauac

SEQ ID NO: 201611 - RNA, 32 nt, Human
ggguggggaaaggggcaaaaagaaugaucuua

SEQ ID NO: 201612 - RNA, 32 nt, Human
ggguggggaagagagacgucagcgggaccuga

SEQ ID NO: 201613 - RNA, 32 nt, Human
ggguggggaaggaggucacagccaagaaaacu

SEQ ID NO: 201614 - RNA, 32 nt, Human
ggguggggaaggcugagcaaagggggagcagc

SEQ ID NO: 201615 - RNA, 32 nt, Human
ggguggggaaggggugucucaccugagcugac

SEQ ID NO: 201616 - RNA, 32 nt, Human
ggguggggacaggccagugacgaagagaggga

SEQ ID NO: 201617 - RNA, 32 nt, Human
ggguggggaccagcuggccacauggugcugcu

SEQ ID NO: 201618 - RNA, 32 nt, Human
ggguggggagaaaagacuuuaagggaggagag

SEQ ID NO: 201619 - RNA, 20 nt, Human
ggguggggagaaccacacua

SEQ ID NO: 201620 - RNA, 32 nt, Human
ggguggggagaagcaugaagcagugagcagag

SEQ ID NO: 201621 - RNA, 32 nt, Human
ggguggggagaaggggaggaggccucggccgg

SEQ ID NO: 201622 - RNA, 32 nt, Human
ggguggggagagaggguggaggguuuuauaaa

SEQ ID NO: 201623 - RNA, 32 nt, Human
ggguggggagagcacucucagcagggaacggc

SEQ ID NO: 201624 - RNA, 32 nt, Human
ggguggggagccaaggguggacuuuaagcaug

SEQ ID NO: 201625 - RNA, 32 nt, Human
ggguggggagcuggcagggcagaggagguagu

SEQ ID NO: 201626 - RNA, 32 nt, Human
ggguggggagcuggggcaagaugaggcaccag

SEQ ID NO: 201627 - RNA, 32 nt, Human
ggguggggaggcaggugagaccacucacggca

SEQ ID NO: 201628 - RNA, 32 nt, Human
ggguggggaggcaucccauccagccucagagg

SEQ ID NO: 201629 - RNA, 32 nt, Human
ggguggggaggcgagagcagcuuagccuccuc

SEQ ID NO: 201630 - RNA, 32 nt, Human
ggguggggaugaagaauugacugggagcugag

SEQ ID NO: 201631 - RNA, 32 nt, Human
ggguggggcagccccaagccuccuggggaggc

SEQ ID NO: 201632 - RNA, 32 nt, Human
ggguggggccagaugggagggagcugguggga

SEQ ID NO: 201633 - RNA, 32 nt, Human
ggguggggcccacuccaugaagacagcaguca

SEQ ID NO: 201634 - RNA, 32 nt, Human
ggguggggcccagggaggauggggagggagug

SEQ ID NO: 201635 - RNA, 32 nt, Human
ggguggggccuguaugugcccucugcccucag

SEQ ID NO: 201636 - RNA, 32 nt, Human
ggguggggcuccugccugcuccauggagcaga

SEQ ID NO: 201637 - RNA, 32 nt, Human
ggguggggcugcaggcagucuacuggcaggac

SEQ ID NO: 201638 - RNA, 32 nt, Human
gggugggggaacaaaccccuaugcacuuuucu

SEQ ID NO: 201639 - RNA, 32 nt, Human
gggugggggaggaucacggggucaggagaucg

SEQ ID NO: 201640 - RNA, 32 nt, Human
gggugggggaggcaggaggaggcugagcguag

SEQ ID NO: 201641 - RNA, 32 nt, Human
gggugggggagggagagggcaguuuguaguau

SEQ ID NO: 201642 - RNA, 32 nt, Human
gggugggggcagccuccaccuccuggauucaa

SEQ ID NO: 201643 - RNA, 32 nt, Human
gggugggggcauuggucacauaugaccaguaa

SEQ ID NO: 201644 - RNA, 32 nt, Human
gggugggggccagaggauucagggccggaggu

SEQ ID NO: 201645 - RNA, 32 nt, Human
gggugggggccucgcauucagugcgaguggcu

SEQ ID NO: 201646 - RNA, 32 nt, Human
gggugggggcuacuaugcugggaaaggccagg

SEQ ID NO: 201647 - RNA, 32 nt, Human
gggugggggcuagagaggaagcagggaguauc

SEQ ID NO: 201648 - RNA, 32 nt, Human
gggugggggcuggggcggcagguguccucguc

SEQ ID NO: 201649 - RNA, 32 nt, Human
gggugggggcuguccugcucaccugugugccc

SEQ ID NO: 201650 - RNA, 32 nt, Human
gggugggggcuguggcccugcccuuggcacca

SEQ ID NO: 201651 - RNA, 31 nt, Human
gggugggggcuucucccucuacccagggcug

SEQ ID NO: 201652 - RNA, 32 nt, Human
gggugggggucugccauucccucccccaggcc

SEQ ID NO: 201653 - RNA, 32 nt, Human
gggugggggugagggcagaaccagccgaggga

SEQ ID NO: 201654 - RNA, 32 nt, Human
gggugggggugaggucauauaguucaaacuaa

SEQ ID NO: 201655 - RNA, 32 nt, Human
ggguggggguggaucacuugaggucaggaguu

SEQ ID NO: 201656 - RNA, 32 nt, Human
gggugggguacaaccaccaugacaacugccgg

SEQ ID NO: 201657 - RNA, 32 nt, Human
gggugggguacacagacacagggugggggugg

SEQ ID NO: 201658 - RNA, 32 nt, Human
gggugggguaggcagaugggccaaggugacca

SEQ ID NO: 201659 - RNA, 32 nt, Human
ggguggggucauagggucacuucaccugaccc

SEQ ID NO: 201660 - RNA, 32 nt, Human
ggguggggucuggaacuugucggguuggacag

SEQ ID NO: 201661 - RNA, 20 nt, Human
ggguggggugaguggaagaa

SEQ ID NO: 201662 - RNA, 32 nt, Human
ggguggggugggaguagguagagcugagaaua

SEQ ID NO: 201663 - RNA, 32 nt, Human
ggguggggugggggcagaggagaggcggauac

SEQ ID NO: 201664 - RNA, 32 nt, Human
gggugggguggggguguauuccuugggggaug

SEQ ID NO: 201665 - RNA, 32 nt, Human
gggugggguuucaccugcgaacaucagacuga

SEQ ID NO: 201666 - RNA, 32 nt, Human
ggguggguaagcccaggauuugcacaugaccu

SEQ ID NO: 201667 - RNA, 32 nt, Human
ggguggguauccagauggucccaugaguaggg

SEQ ID NO: 201668 - RNA, 32 nt, Human
gggugggucaccagcagaagaagccgaacccc

SEQ ID NO: 201669 - RNA, 32 nt, Human
gggugggucugccucucccagcccacugacuc

SEQ ID NO: 201670 - RNA, 32 nt, Human
gggugggugcugcugagggauugggcuucuag

SEQ ID NO: 201671 - RNA, 32 nt, Human
ggguggguggagcuggggagggcaugggcagg

SEQ ID NO: 201672 - RNA, 32 nt, Human
ggguggguggagggguuugcagugugggaaug

SEQ ID NO: 201673 - RNA, 32 nt, Human
ggguggguggggagcuuuuggggaggacaggu

SEQ ID NO: 201674 - RNA, 32 nt, Human
ggguggguggguagguagacaguuugaugaua

SEQ ID NO: 201675 - RNA, 32 nt, Human
ggguggguggguggauaucuuaauuuuuauuu

SEQ ID NO: 201676 - RNA, 32 nt, Human
ggguggguggguggggaagaaaugggcccagc

SEQ ID NO: 201677 - RNA, 32 nt, Human
gggugggugguggaggcugcgagggugcacgg

SEQ ID NO: 201678 - RNA, 32 nt, Human
ggguggguguggggacgcgggagccagugucg

SEQ ID NO: 201679 - RNA, 32 nt, Human
gggugggugugugguccauguucagcguucua

SEQ ID NO: 201680 - RNA, 22 nt, Human
gggugguagugugacccugccu

SEQ ID NO: 201681 - RNA, 32 nt, Human
ggguggucaacagaaaccccaucccugcccau

SEQ ID NO: 201682 - RNA, 19 nt, Human
ggguggucaggaaccaccu

SEQ ID NO: 201683 - RNA, 32 nt, Human
gggugguccuguuucuagacauggaagcuuag

SEQ ID NO: 201684 - RNA, 32 nt, Human
ggguggucucaaacuccugaccugaggcgauc

SEQ ID NO: 201685 - RNA, 32 nt, Human
ggguggucucaaacuccugggcucaagcgaac

SEQ ID NO: 201686 - RNA, 32 nt, Human
ggguggucucaaacuccugggcucaagugauc

SEQ ID NO: 201687 - RNA, 32 nt, Human
ggguggucucaaacuccugugcucaagugacc

SEQ ID NO: 201688 - RNA, 32 nt, Human
ggguggucuguaacuccugagcucagaugauc

SEQ ID NO: 201689 - RNA, 32 nt, Human
ggguggucuuuagcacaaagacuugcaugcag

SEQ ID NO: 201690 - RNA, 32 nt, Human
ggguggugaccccaggagggaggcaggggagg

SEQ ID NO: 201691 - RNA, 32 nt, Human
ggguggugcaccuggcagggguccuugaguga

SEQ ID NO: 201692 - RNA, 32 nt, Human
ggguggugcaggcucccaaacucaggcuuuca

SEQ ID NO: 201693 - RNA, 32 nt, Human
ggguggugccacugcgcuccagccugggggag

SEQ ID NO: 201694 - RNA, 32 nt, Human
ggguggugccuggccugggaggucaguggaua

SEQ ID NO: 201695 - RNA, 32 nt, Human
ggguggugcuauaauguggcacuggaucuuga

SEQ ID NO: 201696 - RNA, 19 nt, Human
gggugguggagaggagagg

SEQ ID NO: 201697 - RNA, 32 nt, Human
gggugguggaggcagccuucagugagcaugga

SEQ ID NO: 201698 - RNA, 32 nt, Human
gggugguggaggcugcgagggugcacggccgg

SEQ ID NO: 201699 - RNA, 32 nt, Human
gggugguggaggugggcaguggcaccaugacg

SEQ ID NO: 201700 - RNA, 21 nt, Human
ggguggugggaugaugucaua

SEQ ID NO: 201701 - RNA, 32 nt, Human
ggguggugggcgucugaaaagucgccaccaug

SEQ ID NO: 201702 - RNA, 32 nt, Human
gggugguggggugggagcuacuagauagaaca

SEQ ID NO: 201703 - RNA, 31 nt, Human
ggguggugggugggguggggugggcauggaa

SEQ ID NO: 201704 - RNA, 32 nt, Human
ggguggugguggugguggaggugcagaagaag

SEQ ID NO: 201705 - RNA, 32 nt, Human
ggguggugguuccaaugagacagggcacacca

SEQ ID NO: 201706 - RNA, 32 nt, Human
ggguggugugccaggaccucaggcugggccuu

SEQ ID NO: 201707 - RNA, 32 nt, Human
gggugguuauguuugcaugcuuaagcacacau

SEQ ID NO: 201708 - RNA, 20 nt, Human
gggugguuggggauggggug

SEQ ID NO: 201709 - RNA, 32 nt, Human
gggugguuguaaggcuggauugaaauaugcau

SEQ ID NO: 201710 - RNA, 32 nt, Human
gggugguugucuauuugucugucuucagucuu

SEQ ID NO: 201711 - RNA, 32 nt, Human
ggguguaaaaccagagauuauuuguaugcuca

SEQ ID NO: 201712 - RNA, 23 nt, Human
ggguguagaccggaauccugcug

SEQ ID NO: 201713 - RNA, 32 nt, Human
ggguguagagagaauggaggggaccaaaaaga

SEQ ID NO: 201714 - RNA, 32 nt, Human
ggguguaggaagaggggugagggguaguuuuu

SEQ ID NO: 201715 - RNA, 17 nt, Human
ggguguaggagggggug

SEQ ID NO: 201716 - RNA, 32 nt, Human
ggguguagguuucugaggugugccauuggggc

SEQ ID NO: 201717 - RNA, 23 nt, Human
ggguguaguggcucacgccugua

SEQ ID NO: 201718 - RNA, 23 nt, Human
ggguguaguggcucaugccugua

SEQ ID NO: 201719 - RNA, 23 nt, Human
ggguguaguggcucaugcuugua

SEQ ID NO: 201720 - RNA, 32 nt, Human
gggugucaaaagaaauugcucucugaugaggc

SEQ ID NO: 201721 - RNA, 32 nt, Human
gggugucaacucccuggaaaacagugaaguga

SEQ ID NO: 201722 - RNA, 32 nt, Human
gggugucacacagcaggcacacagcaggggcu

SEQ ID NO: 201723 - RNA, 20 nt, Human
gggugucacagagccugccg

SEQ ID NO: 201724 - RNA, 23 nt, Human
gggugucacccagucccacaagc

SEQ ID NO: 201725 - RNA, 32 nt, Human
gggugucagcccugaaggagaacucacuucag

SEQ ID NO: 201726 - RNA, 17 nt, Human
gggugucaggaaggcag

SEQ ID NO: 201727 - RNA, 32 nt, Human
gggugucaggacagugaggcugagaugacaga

SEQ ID NO: 201728 - RNA, 23 nt, Human
gggugucauugugcauaccugua

SEQ ID NO: 201729 - RNA, 32 nt, Human
ggguguccaggcucccauccauggcccagccc

SEQ ID NO: 201730 - RNA, 32 nt, Human
ggguguccaguuacaggagcugagcacacugg

SEQ ID NO: 201731 - RNA, 32 nt, Human
ggguguccaugugcacccggccuggaugccag

SEQ ID NO: 201732 - RNA, 18 nt, Human
gggugucccaggagcccu

SEQ ID NO: 201733 - RNA, 17 nt, Human
gggugucccggagcccu

SEQ ID NO: 201734 - RNA, 32 nt, Human
gggugucccugggagcccuggaaaugugcaua

SEQ ID NO: 201735 - RNA, 24 nt, Human
ggguguccgaguugccgccggaga

SEQ ID NO: 201736 - RNA, 17 nt, Human
ggguguccggggacccu

SEQ ID NO: 201737 - RNA, 32 nt, Human
ggguguccucaccccuucccuggccucugggc

SEQ ID NO: 201738 - RNA, 32 nt, Human
ggguguccugcaccggggccugggcaggaggg

SEQ ID NO: 201739 - RNA, 32 nt, Human
ggguguccugcagugguguugaagcucugggg

SEQ ID NO: 201740 - RNA, 32 nt, Human
ggguguccugggcugaauuuccugggcacuuc

SEQ ID NO: 201741 - RNA, 32 nt, Human
ggguguccuguugauugaggggagacagcaug

SEQ ID NO: 201742 - RNA, 32 nt, Human
gggugucgagcccucuggcagaggguuaaccu

SEQ ID NO: 201743 - RNA, 32 nt, Human
gggugucgcaguuaaagucagaggagacaagc

SEQ ID NO: 201744 - RNA, 32 nt, Human
gggugucuauguccaagucaccccuacucagc

SEQ ID NO: 201745 - RNA, 19 nt, Human
gggugucucagggucccuc

SEQ ID NO: 201746 - RNA, 32 nt, Human
gggugucucagguucuguguguccuugugugc

SEQ ID NO: 201747 - RNA, 32 nt, Human
gggugucucuagccugcagagugcagugagug

SEQ ID NO: 201748 - RNA, 18 nt, Human
gggugucugcccccuccu

SEQ ID NO: 201749 - RNA, 32 nt, Human
gggugucugccucuucccuccaccuccucccc

SEQ ID NO: 201750 - RNA, 32 nt, Human
gggugucugcuagccucaaccuccuggggcag

SEQ ID NO: 201751 - RNA, 19 nt, Human
gggugucuggccucagaga

SEQ ID NO: 201752 - RNA, 32 nt, Human
gggugucuguauccugcaggaggacgccccua

SEQ ID NO: 201753 - RNA, 32 nt, Human
gggugucuuguccugucccagggccaaacccc

SEQ ID NO: 201754 - RNA, 32 nt, Human
gggugucuuuucucccugggccuggugaccuc

SEQ ID NO: 201755 - RNA, 23 nt, Human
gggugugaagaggaggagggaga

SEQ ID NO: 201756 - RNA, 32 nt, Human
gggugugacucugaggaagccuuuuuaauucu

SEQ ID NO: 201757 - RNA, 32 nt, Human
gggugugacugauucccagccuguggcagggc

SEQ ID NO: 201758 - RNA, 21 nt, Human
gggugugagacggcggggcgg

SEQ ID NO: 201759 - RNA, 32 nt, Human
gggugugagaugggugccuccccucugccucc

SEQ ID NO: 201760 - RNA, 32 nt, Human
gggugugagccagggagguguggaagucaccu

SEQ ID NO: 201761 - RNA, 32 nt, Human
gggugugagccucccuucuccucaagccggag

SEQ ID NO: 201762 - RNA, 32 nt, Human
gggugugaggccccagccuggagccaggcacu

SEQ ID NO: 201763 - RNA, 32 nt, Human
gggugugaggccuggccugggcccagaugcug

SEQ ID NO: 201764 - RNA, 32 nt, Human
gggugugaguggggugguugggaguggugcca

SEQ ID NO: 201765 - RNA, 32 nt, Human
gggugugcaaccugggcuccucugccucacug

SEQ ID NO: 201766 - RNA, 32 nt, Human
gggugugcagagcugagguugccacacaccug

SEQ ID NO: 201767 - RNA, 32 nt, Human
gggugugccaggagaagggcaugaagcgagga

SEQ ID NO: 201768 - RNA, 23 nt, Human
gggugugcccugcaccugccucu

SEQ ID NO: 201769 - RNA, 19 nt, Human
gggugugccgggcuggcug

SEQ ID NO: 201770 - RNA, 32 nt, Human
gggugugccuguagucccagcuacuugagagg

SEQ ID NO: 201771 - RNA, 32 nt, Human
gggugugcgcugaacuuugggccccgcgggag

SEQ ID NO: 201772 - RNA, 32 nt, Human
ggguguggaagaggaaagugugaagcaaggga

SEQ ID NO: 201773 - RNA, 24 nt, Human
ggguguggaagggcaagcugcacc

SEQ ID NO: 201774 - RNA, 32 nt, Human
ggguguggacccagacguggaguggagugauu

SEQ ID NO: 201775 - RNA, 32 nt, Human
ggguguggagagaaucaggugagccacagagc

SEQ ID NO: 201776 - RNA, 19 nt, Human
ggguguggaggaagggagg

SEQ ID NO: 201777 - RNA, 32 nt, Human
ggguguggaggaggggaagggaggaaugggcc

SEQ ID NO: 201778 - RNA, 32 nt, Human
ggguguggaggcagugggaugaacugggggac

SEQ ID NO: 201779 - RNA, 32 nt, Human
ggguguggagugaaagagucacuguggugggg

SEQ ID NO: 201780 - RNA, 32 nt, Human
ggguguggaguggggaggagccugggcagccu

SEQ ID NO: 201781 - RNA, 21 nt, Human
ggguguggauaagacucugcc

SEQ ID NO: 201782 - RNA, 32 nt, Human
ggguguggccccagggcgguucuuggauguaa

SEQ ID NO: 201783 - RNA, 23 nt, Human
ggguguggcggugcacgccugua

SEQ ID NO: 201784 - RNA, 19 nt, Human
ggguguggcgguugccgua

SEQ ID NO: 201785 - RNA, 32 nt, Human
ggguguggcugggccugucacccuggggcccu

SEQ ID NO: 201786 - RNA, 32 nt, Human
ggguguggcuucuguggcuuucauuugaguau

SEQ ID NO: 201787 - RNA, 31 nt, Human
gggugugggagcagagaaaauugugaaagug

SEQ ID NO: 201788 - RNA, 32 nt, Human
ggguguggggaaaugaguuuucuuugauaguu

SEQ ID NO: 201789 - RNA, 32 nt, Human
ggguguggggaucagacaggcuuuuguaugug

SEQ ID NO: 201790 - RNA, 32 nt, Human
gggugugggggcccugggugaaugcugcugcc

SEQ ID NO: 201791 - RNA, 18 nt, Human
ggguguggggguggagug

SEQ ID NO: 201792 - RNA, 32 nt, Human
ggguguggggucuggcuuuguacauaacucau

SEQ ID NO: 201793 - RNA, 17 nt, Human
gggugugggguggggug

SEQ ID NO: 201794 - RNA, 32 nt, Human
ggguguggggugugggcuggaagcacuggcuc

SEQ ID NO: 201795 - RNA, 23 nt, Human
gggugugguagugcaugccugua

SEQ ID NO: 201796 - RNA, 32 nt, Human
ggguguggucucucagcuguucugcccucaua

SEQ ID NO: 201797 - RNA, 23 nt, Human
ggguguggugacucacagccgua

SEQ ID NO: 201798 - RNA, 32 nt, Human
ggguguggugcuggcuagaggucccugccccu

SEQ ID NO: 201799 - RNA, 32 nt, Human
gggugugguggaggggaaggccacgugcucca

SEQ ID NO: 201800 - RNA, 23 nt, Human
gggugugguggcaaaugccugua

SEQ ID NO: 201801 - RNA, 23 nt, Human
gggugugguggcacacaccagua

SEQ ID NO: 201802 - RNA, 23 nt, Human
gggugugguggcacacaccugua

SEQ ID NO: 201803 - RNA, 23 nt, Human
gggugugguggcacacgccugua

SEQ ID NO: 201804 - RNA, 23 nt, Human
gggugugguggcacaugccugua

SEQ ID NO: 201805 - RNA, 23 nt, Human
gggugugguggcacuucucugua

SEQ ID NO: 201806 - RNA, 23 nt, Human
gggugugguggcagacaccugug

SEQ ID NO: 201807 - RNA, 23 nt, Human
gggugugguggcaggcaccugua

SEQ ID NO: 201808 - RNA, 23 nt, Human
gggugugguggcaugcaccugua

SEQ ID NO: 201809 - RNA, 23 nt, Human
gggugugguggcaugcaucugua

SEQ ID NO: 201810 - RNA, 23 nt, Human
gggugugguggcgagcaccugua

SEQ ID NO: 201811 - RNA, 23 nt, Human
gggugugguggcgcacgccugua

SEQ ID NO: 201812 - RNA, 23 nt, Human
gggugugguggcgcaugccugua

SEQ ID NO: 201813 - RNA, 23 nt, Human
gggugugguggcgcgugcuugua

SEQ ID NO: 201814 - RNA, 23 nt, Human
gggugugguggcgggcgccugua

SEQ ID NO: 201815 - RNA, 23 nt, Human
gggugugguggcgggugccugua

SEQ ID NO: 201816 - RNA, 23 nt, Human
gggugugguggcgugcgccugua

SEQ ID NO: 201817 - RNA, 23 nt, Human
gggugugguggcucacaccugua

SEQ ID NO: 201818 - RNA, 23 nt, Human
gggugugguggcucacgccugua

SEQ ID NO: 201819 - RNA, 23 nt, Human
gggugugguggcucaugccugua

SEQ ID NO: 201820 - RNA, 20 nt, Human
gggugugguggcugaugccu

SEQ ID NO: 201821 - RNA, 23 nt, Human
gggugugguggcuggcgccugua

SEQ ID NO: 201822 - RNA, 32 nt, Human
ggguguggugggcaccuguaguuccagcuacu

SEQ ID NO: 201823 - RNA, 23 nt, Human
ggguguggugguaggcaccugua

SEQ ID NO: 201824 - RNA, 22 nt, Human
gggugugguggugcacaccugu

SEQ ID NO: 201825 - RNA, 23 nt, Human
gggugugguggugcaugccugua

SEQ ID NO: 201826 - RNA, 22 nt, Human
gggugugguggugggcaccugu

SEQ ID NO: 201827 - RNA, 23 nt, Human
gggugugguggugggcaccugua

SEQ ID NO: 201828 - RNA, 23 nt, Human
gggugugguggugggcaccugug

SEQ ID NO: 201829 - RNA, 23 nt, Human
ggguguggugguucacaccugua

SEQ ID NO: 201830 - RNA, 23 nt, Human
ggguguggugucgggcaccugua

SEQ ID NO: 201831 - RNA, 23 nt, Human
gggugugguguugaguaucugua

SEQ ID NO: 201832 - RNA, 23 nt, Human
gggugugguguugggcaccugua

SEQ ID NO: 201833 - RNA, 32 nt, Human
ggguguguaccacugccucuggcuuuauuuug

SEQ ID NO: 201834 - RNA, 18 nt, Human
ggguguguagguggggag

SEQ ID NO: 201835 - RNA, 21 nt, Human
ggguguguauccaucuggcug

SEQ ID NO: 201836 - RNA, 20 nt, Human
ggguguguaucuuaauguug

SEQ ID NO: 201837 - RNA, 32 nt, Human
gggugugugaguggcuaugauccuaguugucc

SEQ ID NO: 201838 - RNA, 32 nt, Human
gggugugugcugcguucacagguguuucugcg

SEQ ID NO: 201839 - RNA, 32 nt, Human
ggguguguuugcucuuuuccaugcccaugcaa

SEQ ID NO: 201840 - RNA, 32 nt, Human
ggguguguuugggaagcagcugcccacagcuc

SEQ ID NO: 201841 - RNA, 32 nt, Human
ggguguuagagaaugagagggaaagagagaga

SEQ ID NO: 201842 - RNA, 32 nt, Human
ggguguuagcacugugguggucucugguccac

SEQ ID NO: 201843 - RNA, 32 nt, Human
ggguguuagcuccaaagagaugccauugcuga

SEQ ID NO: 201844 - RNA, 32 nt, Human
ggguguucagaggcagcaccaccacacaguca

SEQ ID NO: 201845 - RNA, 32 nt, Human
ggguguucccagcagcccuggcuugggggcuu

SEQ ID NO: 201846 - RNA, 32 nt, Human
ggguguuccggcagggcaggaugggaaggcgu

SEQ ID NO: 201847 - RNA, 32 nt, Human
ggguguuccucagagaucccccaaacuggggu

SEQ ID NO: 201848 - RNA, 32 nt, Human
ggguguucgagaagaccagggaagggacccuu

SEQ ID NO: 201849 - RNA, 18 nt, Human
ggguguucgcggggcccu

SEQ ID NO: 201850 - RNA, 32 nt, Human
ggguguugagccacucugacucagccaauaau

SEQ ID NO: 201851 - RNA, 32 nt, Human
ggguguugccagguguggcuggggaagggucu

SEQ ID NO: 201852 - RNA, 32 nt, Human
ggguguugcuuuuccucuuaagggccucagaa

SEQ ID NO: 201853 - RNA, 32 nt, Human
ggguguugggaugggauaucagaggaagaagc

SEQ ID NO: 201854 - RNA, 32 nt, Human
ggguguugggggagacaggagagagaucccac

SEQ ID NO: 201855 - RNA, 24 nt, Human
ggguguugguucagaauggcacuu

SEQ ID NO: 201856 - RNA, 32 nt, Human
ggguguugucugcagaaccaccaccuugaaag

SEQ ID NO: 201857 - RNA, 32 nt, Human
ggguguuguucuggcccucaccugccggcgcc

SEQ ID NO: 201858 - RNA, 19 nt, Human
ggguguuguugaagggagg

SEQ ID NO: 201859 - RNA, 21 nt, Human
ggguguuguuuucuccugagg

SEQ ID NO: 201860 - RNA, 32 nt, Human
ggguguuucuaaagcaacuccccaccaaccuc

SEQ ID NO: 201861 - RNA, 32 nt, Human
ggguguuuucagaaagaugaagaagaaaacau

SEQ ID NO: 201862 - RNA, 32 nt, Human
ggguguuuucauuuuggguuuguuucuucuac

SEQ ID NO: 201863 - RNA, 32 nt, Human
ggguuaaaaacauuuuggaaaauaugauuuua

SEQ ID NO: 201864 - RNA, 32 nt, Human
ggguuaaaaagcuaccuauugaauacuauguu

SEQ ID NO: 201865 - RNA, 32 nt, Human
ggguuaaagcugccuccagccucaggagcagu

SEQ ID NO: 201866 - RNA, 22 nt, Human
ggguuaaauucccuuggucuuu

SEQ ID NO: 201867 - RNA, 32 nt, Human
ggguuaacaucuguguuaggggaggucaccuu

SEQ ID NO: 201868 - RNA, 32 nt, Human
ggguuaagagcaggacguuugagguugcacag

SEQ ID NO: 201869 - RNA, 32 nt, Human
ggguuaagagcucagaguucagacagguccaa

SEQ ID NO: 201870 - RNA, 31 nt, Human
ggguuaagugagaggagacuguacuuuguuu

SEQ ID NO: 201871 - RNA, 32 nt, Human
ggguuaauacagaugacccagaccugacauua

SEQ ID NO: 201872 - RNA, 32 nt, Human
ggguuaaugucagguaagaaacuugaguggac

SEQ ID NO: 201873 - RNA, 32 nt, Human
ggguuaauuacugccauuccuuucuaagugug

SEQ ID NO: 201874 - RNA, 32 nt, Human
ggguuacaccuguaaucccagcacuuugggag

SEQ ID NO: 201875 - RNA, 19 nt, Human
ggguuacaggcaugagcca

SEQ ID NO: 201876 - RNA, 32 nt, Human
ggguuacaggcaugcaccaccaugccuggcua

SEQ ID NO: 201877 - RNA, 20 nt, Human
ggguuaccccacaagggggc

SEQ ID NO: 201878 - RNA, 32 nt, Human
ggguuacccugggcacuggccuagagccucac

SEQ ID NO: 201879 - RNA, 24 nt, Human
ggguuacggagugagacuccgucu

SEQ ID NO: 201880 - RNA, 32 nt, Human
ggguuacgggcagaggagaaagcacaugccaa

SEQ ID NO: 201881 - RNA, 32 nt, Human
ggguuacugcaaccucugccccucgggauuca

SEQ ID NO: 201882 - RNA, 32 nt, Human
ggguuacuggaagccgggacugcuagggcugg

SEQ ID NO: 201883 - RNA, 32 nt, Human
ggguuagacccuguucagagguguggccaauu

SEQ ID NO: 201884 - RNA, 32 nt, Human
ggguuagaccuacagggggucuggcugguguu

SEQ ID NO: 201885 - RNA, 32 nt, Human
ggguuagagccaagcugcacaauuuaauauau

SEQ ID NO: 201886 - RNA, 32 nt, Human
ggguuagaguccauuuacaaagcugccaggaa

SEQ ID NO: 201887 - RNA, 32 nt, Human
ggguuagcagaugccagcagugccugcccgug

SEQ ID NO: 201888 - RNA, 32 nt, Human
ggguuagcagcugcugcauuuccccggcuggc

SEQ ID NO: 201889 - RNA, 32 nt, Human
ggguuagcauuuugcauuagcacuucgaaaua

SEQ ID NO: 201890 - RNA, 32 nt, Human
ggguuagcuugucccuccccucccucuucagc

SEQ ID NO: 201891 - RNA, 32 nt, Human
ggguuaggaagggagaggcagcucuuccuuca

SEQ ID NO: 201892 - RNA, 32 nt, Human
ggguuaggacuacuuaaccucuauucccacuc

SEQ ID NO: 201893 - RNA, 32 nt, Human
ggguuaggagggagcagaugagcccaggauga

SEQ ID NO: 201894 - RNA, 32 nt, Human
ggguuagggaaagcggaggaggaaagcgaggg

SEQ ID NO: 201895 - RNA, 32 nt, Human
ggguuaggggauaaugggagggaaggcagauu

SEQ ID NO: 201896 - RNA, 31 nt, Human
ggguuauacagacagaauaccagccuuuuaa

SEQ ID NO: 201897 - RNA, 32 nt, Human
ggguuauauacuccuagguccugggacagaau

SEQ ID NO: 201898 - RNA, 32 nt, Human
ggguuauaucuggcuucucuccagaccugcuu

SEQ ID NO: 201899 - RNA, 32 nt, Human
ggguuauauuggagagccagucuucugcgguu

SEQ ID NO: 201900 - RNA, 32 nt, Human
ggguuaucaguugcuggcugugccugagcagc

SEQ ID NO: 201901 - RNA, 32 nt, Human
ggguuaucuccucucauacaucaagccccaga

SEQ ID NO: 201902 - RNA, 32 nt, Human
ggguuaugaaaagaagcucagagcagagcacc

SEQ ID NO: 201903 - RNA, 32 nt, Human
ggguuaugaacccaguguagagaccacccacc

SEQ ID NO: 201904 - RNA, 32 nt, Human
ggguuaugagagagccucaaaagagagggcaa

SEQ ID NO: 201905 - RNA, 32 nt, Human
ggguuauguguaugugccauuuaugugagugu

SEQ ID NO: 201906 - RNA, 32 nt, Human
ggguuauuaugccacaucuccaugaaaaugca

SEQ ID NO: 201907 - RNA, 31 nt, Human
ggguuauuuaguaaaguuuguugaaaacaaa

SEQ ID NO: 201908 - RNA, 21 nt, Human
ggguucaaaaacucccccacu

SEQ ID NO: 201909 - RNA, 23 nt, Human
ggguucaaacaauucuccugccu

SEQ ID NO: 201910 - RNA, 32 nt, Human
ggguucaaacaauucugucucugccucccaag

SEQ ID NO: 201911 - RNA, 23 nt, Human
ggguucaaacaauuuuccugccu

SEQ ID NO: 201912 - RNA, 23 nt, Human
ggguucaaacgauucuccuaccu

SEQ ID NO: 201913 - RNA, 23 nt, Human
ggguucaaacgauuguccugccu

SEQ ID NO: 201914 - RNA, 23 nt, Human
ggguucaaccgauucuccugccu

SEQ ID NO: 201915 - RNA, 23 nt, Human
ggguucaagagacucuccugccu

SEQ ID NO: 201916 - RNA, 23 nt, Human
ggguucaagagauucuccugccu

SEQ ID NO: 201917 - RNA, 23 nt, Human
ggguucaagcaagucuccugccu

SEQ ID NO: 201918 - RNA, 23 nt, Human
ggguucaagcaauccucccaccu

SEQ ID NO: 201919 - RNA, 23 nt, Human
ggguucaagcaauccuccugccu

SEQ ID NO: 201920 - RNA, 23 nt, Human
ggguucaagcaauucuccagccu

SEQ ID NO: 201921 - RNA, 21 nt, Human
ggguucaagcaauucucccau

SEQ ID NO: 201922 - RNA, 21 nt, Human
ggguucaagcaauucuccuac

SEQ ID NO: 201923 - RNA, 23 nt, Human
ggguucaagcaauucuccuaccu

SEQ ID NO: 201924 - RNA, 23 nt, Human
ggguucaagcaauucuccugccu

SEQ ID NO: 201925 - RNA, 23 nt, Human
ggguucaagcaauucuccugucu

SEQ ID NO: 201926 - RNA, 32 nt, Human
ggguucaagcaauucuguggcuucagccuccg

SEQ ID NO: 201927 - RNA, 23 nt, Human
ggguucaagcaauucuucugccu

SEQ ID NO: 201928 - RNA, 21 nt, Human
ggguucaagcaguucucccgc

SEQ ID NO: 201929 - RNA, 32 nt, Human
ggguucaagccaccccagaggauuccuugcua

SEQ ID NO: 201930 - RNA, 23 nt, Human
ggguucaagccauucuccucccu

SEQ ID NO: 201931 - RNA, 22 nt, Human
ggguucaagcgauccucccacu

SEQ ID NO: 201932 - RNA, 23 nt, Human
ggguucaagcgauccuccugccu

SEQ ID NO: 201933 - RNA, 23 nt, Human
ggguucaagcgauuacucccacu

SEQ ID NO: 201934 - RNA, 23 nt, Human
ggguucaagcgauuauccugccu

SEQ ID NO: 201935 - RNA, 23 nt, Human
ggguucaagcgauuccccugccu

SEQ ID NO: 201936 - RNA, 23 nt, Human
ggguucaagcgauuccucugccu

SEQ ID NO: 201937 - RNA, 23 nt, Human
ggguucaagcgauucuccagccu

SEQ ID NO: 201938 - RNA, 21 nt, Human
ggguucaagcgauucucccac

SEQ ID NO: 201939 - RNA, 22 nt, Human
ggguucaagcgauucucccacc

SEQ ID NO: 201940 - RNA, 21 nt, Human
ggguucaagcgauucucccgc

SEQ ID NO: 201941 - RNA, 21 nt, Human
ggguucaagcgauucuccuac

SEQ ID NO: 201942 - RNA, 23 nt, Human
ggguucaagcgauucuccuaccu

SEQ ID NO: 201943 - RNA, 23 nt, Human
ggguucaagcgauucuccugccu

SEQ ID NO: 201944 - RNA, 23 nt, Human
ggguucaagcgauuguccugccu

SEQ ID NO: 201945 - RNA, 22 nt, Human
ggguucaaggauucuccugccu

SEQ ID NO: 201946 - RNA, 23 nt, Human
ggguucaagggauucuccugccu

SEQ ID NO: 201947 - RNA, 21 nt, Human
ggguucaagugacccucccac

SEQ ID NO: 201948 - RNA, 21 nt, Human
ggguucaagugauccucccac

SEQ ID NO: 201949 - RNA, 21 nt, Human
ggguucaagugauucucccac

SEQ ID NO: 201950 - RNA, 21 nt, Human
ggguucaagugauucuuccac

SEQ ID NO: 201951 - RNA, 23 nt, Human
ggguucaaucgauucuccugccu

SEQ ID NO: 201952 - RNA, 32 nt, Human
ggguucaauuucauucuucuucauaugaauau

SEQ ID NO: 201953 - RNA, 32 nt, Human
ggguucacaagaaagauccucgcuacugacau

SEQ ID NO: 201954 - RNA, 32 nt, Human
ggguucacaagcaauucucaugccucagccuc

SEQ ID NO: 201955 - RNA, 32 nt, Human
ggguucacaagucacauucaggggcugagucc

SEQ ID NO: 201956 - RNA, 32 nt, Human
ggguucacagaauccuggcagcagcuccaguc

SEQ ID NO: 201957 - RNA, 32 nt, Human
ggguucacugcaaccuccgccucuuggguuca

SEQ ID NO: 201958 - RNA, 32 nt, Human
ggguucacugcaaccucugccuccagguucaa

SEQ ID NO: 201959 - RNA, 32 nt, Human
ggguucacugcaaccucugccuccugggcuca

SEQ ID NO: 201960 - RNA, 32 nt, Human
ggguucagacuucacacugugaguucagacuc

SEQ ID NO: 201961 - RNA, 32 nt, Human
ggguucagaguuuccgucagaugcagugaaau

SEQ ID NO: 201962 - RNA, 32 nt, Human
ggguucagcugaccaaguagcagagaagucuu

SEQ ID NO: 201963 - RNA, 32 nt, Human
ggguucagggucggagggagaagauggcuuuc

SEQ ID NO: 201964 - RNA, 23 nt, Human
ggguucaggugauucuccucccu

SEQ ID NO: 201965 - RNA, 32 nt, Human
ggguucaguaguuugggaagggagcuggggga

SEQ ID NO: 201966 - RNA, 32 nt, Human
ggguucaguggaaauguuuggaacucugaagg

SEQ ID NO: 201967 - RNA, 23 nt, Human
ggguucaguucugcuccuccacu

SEQ ID NO: 201968 - RNA, 32 nt, Human
ggguucaugcuggagaaaagcuuuagagugua

SEQ ID NO: 201969 - RNA, 32 nt, Human
ggguucaugggaacaggggcgggugugacuug

SEQ ID NO: 201970 - RNA, 32 nt, Human
ggguuccaaccauaggaacacacugaugcuca

SEQ ID NO: 201971 - RNA, 23 nt, Human
ggguuccaacgauucuccugccu

SEQ ID NO: 201972 - RNA, 32 nt, Human
ggguuccaaucgagucaagaaaagccuggggu

SEQ ID NO: 201973 - RNA, 23 nt, Human
ggguuccagcaauucuccugccu

SEQ ID NO: 201974 - RNA, 22 nt, Human
ggguuccagcagccuggggcag

SEQ ID NO: 201975 - RNA, 23 nt, Human
ggguuccagcgauucuccugccu

SEQ ID NO: 201976 - RNA, 32 nt, Human
ggguuccaggaagcugggaagggagaugucag

SEQ ID NO: 201977 - RNA, 32 nt, Human
ggguuccagggacugguggagguggauggcag

SEQ ID NO: 201978 - RNA, 21 nt, Human
ggguuccagggccacccagug

SEQ ID NO: 201979 - RNA, 32 nt, Human
ggguuccaggguggggcucaggaggggagcgg

SEQ ID NO: 201980 - RNA, 32 nt, Human
ggguuccaguuacacagccacagccuggaagc

SEQ ID NO: 201981 - RNA, 31 nt, Human
ggguuccaguuucagaguucucauuauuacu

SEQ ID NO: 201982 - RNA, 32 nt, Human
ggguuccauuuaggagcuuucuagaaaguuga

SEQ ID NO: 201983 - RNA, 32 nt, Human
ggguucccaauacaaaaauaccuacugcugag

SEQ ID NO: 201984 - RNA, 32 nt, Human
ggguucccagacugaauugucagugagcggag

SEQ ID NO: 201985 - RNA, 22 nt, Human
ggguucccaggccaccuccucu

SEQ ID NO: 201986 - RNA, 32 nt, Human
ggguucccaggccaccuccucuguucugaggc

SEQ ID NO: 201987 - RNA, 32 nt, Human
ggguucccauuuucgcuuuccucugguuugaa

SEQ ID NO: 201988 - RNA, 22 nt, Human
ggguuccccaucgucugccccu

SEQ ID NO: 201989 - RNA, 24 nt, Human
ggguuccccccuccccccaccuuu

SEQ ID NO: 201990 - RNA, 23 nt, Human
ggguucccccucccaugccccuc

SEQ ID NO: 201991 - RNA, 32 nt, Human
ggguucccccuucccuuuucuccuucccuacu

SEQ ID NO: 201992 - RNA, 23 nt, Human
ggguuccccggcaccccagccuc

SEQ ID NO: 201993 - RNA, 23 nt, Human
ggguuccccggccaggccuccuc

SEQ ID NO: 201994 - RNA, 22 nt, Human
ggguuccccugcuuccaaccuc

SEQ ID NO: 201995 - RNA, 32 nt, Human
ggguuccccuuccuucuagagcagaaaaggga

SEQ ID NO: 201996 - RNA, 28 nt, Human
ggguucccgucugcugccucucggagag

SEQ ID NO: 201997 - RNA, 32 nt, Human
ggguucccucaagaggaagugagcggugcugu

SEQ ID NO: 201998 - RNA, 32 nt, Human
ggguucccucacugcuagucagcuucuuuugg

SEQ ID NO: 201999 - RNA, 21 nt, Human
ggguucccucagcccagcccu

SEQ ID NO: 202000 - RNA, 32 nt, Human
ggguucccucauuaccccucugggcuuagucc

SEQ ID NO: 202001 - RNA, 21 nt, Human
ggguucccuucgcccagcucu

SEQ ID NO: 202002 - RNA, 25 nt, Human
ggguucccuucuugggccugccucu

SEQ ID NO: 202003 - RNA, 32 nt, Human
ggguuccucacuucccaguaggggcggccggg

SEQ ID NO: 202004 - RNA, 32 nt, Human
ggguuccucagaccaucuccuucauucugggc

SEQ ID NO: 202005 - RNA, 32 nt, Human
ggguuccuccagccaggcucucagggaagguc

SEQ ID NO: 202006 - RNA, 32 nt, Human
ggguuccucccaggagcucuggagguacagga

SEQ ID NO: 202007 - RNA, 32 nt, Human
ggguuccucccaggauacgcccgagcggaaga

SEQ ID NO: 202008 - RNA, 21 nt, Human
ggguuccugaccccugccccu

SEQ ID NO: 202009 - RNA, 32 nt, Human
ggguuccugauaguccugugaccaugcggaag

SEQ ID NO: 202010 - RNA, 22 nt, Human
ggguuccugcagcagcuggagg

SEQ ID NO: 202011 - RNA, 32 nt, Human
ggguuccuggcgggcguuucugaaaagcaaag

SEQ ID NO: 202012 - RNA, 23 nt, Human
ggguuccugggcccaccugcucu

SEQ ID NO: 202013 - RNA, 32 nt, Human
ggguuccuuccaccauauaacccacacccaga

SEQ ID NO: 202014 - RNA, 32 nt, Human
ggguucgagguggaggcugcagcugaaggugg

SEQ ID NO: 202015 - RNA, 32 nt, Human
ggguucgcacaucuaaggaggagaagaagcau

SEQ ID NO: 202016 - RNA, 32 nt, Human
ggguucgcauucucucuuucuuuuccucuuuc

SEQ ID NO: 202017 - RNA, 32 nt, Human
ggguucgcggguucuccgccucagcuuccuag

SEQ ID NO: 202018 - RNA, 23 nt, Human
ggguucgggcaauucuccugccu

SEQ ID NO: 202019 - RNA, 32 nt, Human
ggguucgugccuccuagccuaggaaacuuaaa

SEQ ID NO: 202020 - RNA, 32 nt, Human
ggguucuaaaggacagcaccagcgggacagcc

SEQ ID NO: 202021 - RNA, 32 nt, Human
ggguucuagauuugaacucugcugugaaguga

SEQ ID NO: 202022 - RNA, 32 nt, Human
ggguucucaccgagcccuugacugccuggaua

SEQ ID NO: 202023 - RNA, 32 nt, Human
ggguucucaggccaucccguuggggcugucgc

SEQ ID NO: 202024 - RNA, 18 nt, Human
ggguucucaggcuggcug

SEQ ID NO: 202025 - RNA, 32 nt, Human
ggguucucaguaggaaugcuggugcugucuaa

SEQ ID NO: 202026 - RNA, 32 nt, Human
ggguucucagugcuuucuacugcacagagugg

SEQ ID NO: 202027 - RNA, 32 nt, Human
ggguucuccaccugccccagagcuucucaagg

SEQ ID NO: 202028 - RNA, 32 nt, Human
ggguucuccgccucagcuuccuaguagcuggg

SEQ ID NO: 202029 - RNA, 32 nt, Human
ggguucuccucggaacagagggcagaugaggc

SEQ ID NO: 202030 - RNA, 32 nt, Human
ggguucuccugccucacccucccgaguagcug

SEQ ID NO: 202031 - RNA, 32 nt, Human
ggguucucguggccgcggcagcgcggucucug

SEQ ID NO: 202032 - RNA, 32 nt, Human
ggguucucuagcucugaccucugggugacccc

SEQ ID NO: 202033 - RNA, 32 nt, Human
ggguucucucacccucuuucucuuuccuuccc

SEQ ID NO: 202034 - RNA, 32 nt, Human
ggguucucuccccuccuuccuguuccucuuau

SEQ ID NO: 202035 - RNA, 32 nt, Human
ggguucucugguuugcugccuccugaccacau

SEQ ID NO: 202036 - RNA, 32 nt, Human
ggguucugcagcuguaaggaacucccagguca

SEQ ID NO: 202037 - RNA, 32 nt, Human
ggguucugccuagucaacguuauuugucgucc

SEQ ID NO: 202038 - RNA, 32 nt, Human
ggguucugcucagaccauaggaggccaaccca

SEQ ID NO: 202039 - RNA, 32 nt, Human
ggguucuggcgucccucuccccaaaauccuca

SEQ ID NO: 202040 - RNA, 32 nt, Human
ggguucugggagaggcaggugaauguccuaag

SEQ ID NO: 202041 - RNA, 32 nt, Human
ggguucuguagggucaggaaggggcggcuggc

SEQ ID NO: 202042 - RNA, 32 nt, Human
ggguucugucaugaagggaguagcaccuuuug

SEQ ID NO: 202043 - RNA, 32 nt, Human
ggguucugucuugccuucauguggaccuucau

SEQ ID NO: 202044 - RNA, 32 nt, Human
ggguucuguggaguguccagagaccuuggguu

SEQ ID NO: 202045 - RNA, 32 nt, Human
ggguucuguuucuccccuuggcugccuguaag

SEQ ID NO: 202046 - RNA, 32 nt, Human
ggguucuuaccaggaugggcucugaagauaag

SEQ ID NO: 202047 - RNA, 32 nt, Human
ggguucuuacuccguagcccaggcuggagugc

SEQ ID NO: 202048 - RNA, 32 nt, Human
ggguucuucgggugugaucauauaucauaaag

SEQ ID NO: 202049 - RNA, 32 nt, Human
ggguucuucuucguccucuguccucugcccag

SEQ ID NO: 202050 - RNA, 32 nt, Human
ggguucuucuuugagccaacuguuuucacaga

SEQ ID NO: 202051 - RNA, 32 nt, Human
ggguucuugaugucuacucugcaugaagcccu

SEQ ID NO: 202052 - RNA, 32 nt, Human
ggguucuugcagcuggcaccagcccucccggc

SEQ ID NO: 202053 - RNA, 32 nt, Human
ggguucuuggccaggcuguaggugguggcuca

SEQ ID NO: 202054 - RNA, 32 nt, Human
ggguucuugggcaguggcugugggagcaggaa

SEQ ID NO: 202055 - RNA, 31 nt, Human
ggguugaacguugcaacuaggguggagauca

SEQ ID NO: 202056 - RNA, 32 nt, Human
ggguugaagaaagcggagggcagccgccugcg

SEQ ID NO: 202057 - RNA, 32 nt, Human
ggguugaagggagggggaaggcaggccagaag

SEQ ID NO: 202058 - RNA, 32 nt, Human
ggguugaccuucuccccuucuggcuuuccacc

SEQ ID NO: 202059 - RNA, 32 nt, Human
ggguugacugucuagaaaggaggaaucagagg

SEQ ID NO: 202060 - RNA, 32 nt, Human
ggguugagacacgccccugcccucucuccuuu

SEQ ID NO: 202061 - RNA, 32 nt, Human
ggguugagcagaggagaaaaucagacagaugg

SEQ ID NO: 202062 - RNA, 32 nt, Human
ggguugagccucuacuuucuucuugccaccuu

SEQ ID NO: 202063 - RNA, 32 nt, Human
ggguugagccugggugggaggguaccaggagu

SEQ ID NO: 202064 - RNA, 32 nt, Human
ggguugagcuuagugauccucucucaaaccac

SEQ ID NO: 202065 - RNA, 32 nt, Human
ggguugaggaagagauaagucaggagcaaaaa

SEQ ID NO: 202066 - RNA, 20 nt, Human
ggguugaggcuggccauguc

SEQ ID NO: 202067 - RNA, 18 nt, Human
ggguugaggggccccguc

SEQ ID NO: 202068 - RNA, 22 nt, Human
ggguugagggguccuuucuguc

SEQ ID NO: 202069 - RNA, 19 nt, Human
ggguugagggugucuuguc

SEQ ID NO: 202070 - RNA, 32 nt, Human
ggguugaggugcuucuccccacucugcucucg

SEQ ID NO: 202071 - RNA, 32 nt, Human
ggguugaugggggaggcguggggaagggaaag

SEQ ID NO: 202072 - RNA, 23 nt, Human
ggguugaugugggguucaggaug

SEQ ID NO: 202073 - RNA, 32 nt, Human
ggguugauguggguugccaguuagggaugugg

SEQ ID NO: 202074 - RNA, 20 nt, Human
ggguugcaacccaacucugu

SEQ ID NO: 202075 - RNA, 32 nt, Human
ggguugcaggaggaggagcugggcagggccug

SEQ ID NO: 202076 - RNA, 32 nt, Human
ggguugcaggccauggaggagggaccuccacu

SEQ ID NO: 202077 - RNA, 20 nt, Human
ggguugcaggcccgggccuc

SEQ ID NO: 202078 - RNA, 32 nt, Human
ggguugcagugagccgagaucacaccacugca

SEQ ID NO: 202079 - RNA, 32 nt, Human
ggguugcagugagccgagaucaugccacugca

SEQ ID NO: 202080 - RNA, 32 nt, Human
ggguugcagugagccgagaucuggccauugca

SEQ ID NO: 202081 - RNA, 32 nt, Human
ggguugcagugagccgagaugucaccacugcc

SEQ ID NO: 202082 - RNA, 32 nt, Human
ggguugcagugagccgagauugcgccacugca

SEQ ID NO: 202083 - RNA, 32 nt, Human
ggguugcaguugguugagugggcaguugacau

SEQ ID NO: 202084 - RNA, 32 nt, Human
ggguugcaucagccuccucugccugcagcucc

SEQ ID NO: 202085 - RNA, 32 nt, Human
ggguugcaucccucggaagagcgaaggaauga

SEQ ID NO: 202086 - RNA, 32 nt, Human
ggguugcauuauugauuugauucucaguuugg

SEQ ID NO: 202087 - RNA, 32 nt, Human
ggguugccagaggcccuggagggaaggacagu

SEQ ID NO: 202088 - RNA, 32 nt, Human
ggguugcccaggguggagugcaguggcaggau

SEQ ID NO: 202089 - RNA, 32 nt, Human
ggguugcccgggagggguggcgggagcggucc

SEQ ID NO: 202090 - RNA, 32 nt, Human
ggguugcccuuggcuucuccucccucuacuca

SEQ ID NO: 202091 - RNA, 31 nt, Human
ggguugccucuuuucugccaugugggaagag

SEQ ID NO: 202092 - RNA, 32 nt, Human
ggguugccugcagggacuuuugcucugcuguc

SEQ ID NO: 202093 - RNA, 32 nt, Human
ggguugccugggaacagucucuccccaagauc

SEQ ID NO: 202094 - RNA, 32 nt, Human
ggguugccugggaccagguccucagaaacugu

SEQ ID NO: 202095 - RNA, 32 nt, Human
ggguugcgccccggaggcggaucucaggcacc

SEQ ID NO: 202096 - RNA, 32 nt, Human
ggguugcugggucauagggcagguguaauuuu

SEQ ID NO: 202097 - RNA, 32 nt, Human
ggguugcuugagcucaggaguuugagaccagc

SEQ ID NO: 202098 - RNA, 32 nt, Human
ggguugcuugagcucaggaguuugagaccagg

SEQ ID NO: 202099 - RNA, 32 nt, Human
ggguugcuugagcuccggagcuugagaccagc

SEQ ID NO: 202100 - RNA, 32 nt, Human
ggguugcuugggccacugcccucuccacaccc

SEQ ID NO: 202101 - RNA, 32 nt, Human
ggguuggaagucagggaggcuaauuuggggaa

SEQ ID NO: 202102 - RNA, 32 nt, Human
ggguuggaauccagccccaccucuuuuaugcc

SEQ ID NO: 202103 - RNA, 32 nt, Human
ggguuggagaggagguguggucucagcaggcg

SEQ ID NO: 202104 - RNA, 32 nt, Human
ggguuggagcagcccuccugugccugaggcca

SEQ ID NO: 202105 - RNA, 32 nt, Human
ggguuggagcagucucuccggaaggggagggg

SEQ ID NO: 202106 - RNA, 32 nt, Human
ggguuggaggcuggggaccuaagguaagcacc

SEQ ID NO: 202107 - RNA, 32 nt, Human
ggguuggaggucuggacagggagcccaguccc

SEQ ID NO: 202108 - RNA, 32 nt, Human
ggguuggauaccuguggugugacaccuucugc

SEQ ID NO: 202109 - RNA, 32 nt, Human
ggguuggauccagugguuagguuuuagaaagg

SEQ ID NO: 202110 - RNA, 19 nt, Human
ggguuggauggcggcagga

SEQ ID NO: 202111 - RNA, 19 nt, Human
ggguuggauguccaagaug

SEQ ID NO: 202112 - RNA, 21 nt, Human
ggguuggauuaucucaagaug

SEQ ID NO: 202113 - RNA, 32 nt, Human
ggguuggauuugcuguucuugccugcagggcc

SEQ ID NO: 202114 - RNA, 32 nt, Human
ggguuggcacagaaguccugucugagguccua

SEQ ID NO: 202115 - RNA, 32 nt, Human
ggguuggcaguggagagcaggcuggagaggag

SEQ ID NO: 202116 - RNA, 32 nt, Human
ggguuggccucuuccuccuccccugccaggcc

SEQ ID NO: 202117 - RNA, 18 nt, Human
ggguuggcggggcggggg

SEQ ID NO: 202118 - RNA, 32 nt, Human
ggguuggcuugggacugggagagaaaggaagu

SEQ ID NO: 202119 - RNA, 25 nt, Human
ggguugggacccagcaagggcacuu

SEQ ID NO: 202120 - RNA, 32 nt, Human
ggguugggagaaagguggcggugcuuucggag

SEQ ID NO: 202121 - RNA, 32 nt, Human
ggguugggagcuugggcaggccagcuucaccc

SEQ ID NO: 202122 - RNA, 32 nt, Human
ggguugggaggugaccagggguccccauugug

SEQ ID NO: 202123 - RNA, 32 nt, Human
ggguugggaugggggugugggcaggggaaaac

SEQ ID NO: 202124 - RNA, 32 nt, Human
ggguugggaugguccaugagugaacagucuug

SEQ ID NO: 202125 - RNA, 32 nt, Human
ggguugggccagggaagggugugcaaaaacua

SEQ ID NO: 202126 - RNA, 32 nt, Human
ggguugggccggaagguggaagagccugccaa

SEQ ID NO: 202127 - RNA, 32 nt, Human
ggguugggccuacuucucaccugggccuaucu

SEQ ID NO: 202128 - RNA, 32 nt, Human
ggguugggcugcaggccuggccgugagcgggg

SEQ ID NO: 202129 - RNA, 32 nt, Human
ggguuggggagcaggccagauggagguggugg

SEQ ID NO: 202130 - RNA, 32 nt, Human
ggguuggggagggugauuuaugaccaaguaga

SEQ ID NO: 202131 - RNA, 32 nt, Human
ggguuggggcaggccagagcaaggcggucuca

SEQ ID NO: 202132 - RNA, 32 nt, Human
ggguuggggcugggacucuggaggcuccuccc

SEQ ID NO: 202133 - RNA, 32 nt, Human
ggguuggggguggaggucuagaggugagcuca

SEQ ID NO: 202134 - RNA, 17 nt, Human
ggguuggggguggggug

SEQ ID NO: 202135 - RNA, 32 nt, Human
ggguuggggguggucagagcauugugggaggg

SEQ ID NO: 202136 - RNA, 32 nt, Human
ggguuggggugaggccacaugcggaggggcgg

SEQ ID NO: 202137 - RNA, 32 nt, Human
ggguugggguugggacuggagcuggccuuggg

SEQ ID NO: 202138 - RNA, 32 nt, Human
ggguugggugggaaggaaggcuggggguuuug

SEQ ID NO: 202139 - RNA, 19 nt, Human
ggguuggguguccaagaug

SEQ ID NO: 202140 - RNA, 32 nt, Human
ggguuggguuccugaaugcaccauaaucgcug

SEQ ID NO: 202141 - RNA, 18 nt, Human
ggguugguaauucaggau

SEQ ID NO: 202142 - RNA, 32 nt, Human
ggguuggugagguuccgcugagggcggccggg

SEQ ID NO: 202143 - RNA, 32 nt, Human
ggguuggugccuggcacugguguugcuccauu

SEQ ID NO: 202144 - RNA, 32 nt, Human
ggguugguguguuuccccuuguguaccagagc

SEQ ID NO: 202145 - RNA, 32 nt, Human
ggguugguugggggaggaaguggggaggagug

SEQ ID NO: 202146 - RNA, 32 nt, Human
ggguuguaaacaugugguaguaccagaguauu

SEQ ID NO: 202147 - RNA, 20 nt, Human
ggguuguauacagacucugu

SEQ ID NO: 202148 - RNA, 32 nt, Human
ggguugucacuuaaguuuggagugcaguggca

SEQ ID NO: 202149 - RNA, 32 nt, Human
ggguugucagcaggugagugccgugcucugac

SEQ ID NO: 202150 - RNA, 32 nt, Human
ggguugucaggcggagcugguaggggagcugc

SEQ ID NO: 202151 - RNA, 32 nt, Human
ggguuguccaggguguccucagucucuaugug

SEQ ID NO: 202152 - RNA, 24 nt, Human
ggguuguccuuccccccagcaaau

SEQ ID NO: 202153 - RNA, 32 nt, Human
ggguugucuuucuccucuccuacauccauuuc

SEQ ID NO: 202154 - RNA, 32 nt, Human
ggguugucuuugcaugggugggggacuucccg

SEQ ID NO: 202155 - RNA, 32 nt, Human
ggguugugaaauggggugucuccuuccaggau

SEQ ID NO: 202156 - RNA, 32 nt, Human
ggguugugccuguaaucccagcuacuugggag

SEQ ID NO: 202157 - RNA, 20 nt, Human
ggguugugcgcagaaggcug

SEQ ID NO: 202158 - RNA, 32 nt, Human
ggguugugggcuggcggggcugugggaagggg

SEQ ID NO: 202159 - RNA, 32 nt, Human
ggguugugggggcagagggggucugugaaucu

SEQ ID NO: 202160 - RNA, 32 nt, Human
ggguuguggggugagaggaugugaguggccgg

SEQ ID NO: 202161 - RNA, 32 nt, Human
ggguugugggguggaggcuggcagcugaaaga

SEQ ID NO: 202162 - RNA, 31 nt, Human
ggguuguggguggucagggagagguagggug

SEQ ID NO: 202163 - RNA, 32 nt, Human
ggguuguggguggucagggagagguagggugg

SEQ ID NO: 202164 - RNA, 32 nt, Human
ggguuguggguuucuguucagugagaacgcaa

SEQ ID NO: 202165 - RNA, 32 nt, Human
ggguuguggugagccgagacugugucauugca

SEQ ID NO: 202166 - RNA, 32 nt, Human
ggguuguggugagggaaaaugcagugagggga

SEQ ID NO: 202167 - RNA, 32 nt, Human
ggguuguguggaaggagauuugggagaaggga

SEQ ID NO: 202168 - RNA, 32 nt, Human
ggguuguuaccugccugucucucccagcuucu

SEQ ID NO: 202169 - RNA, 32 nt, Human
ggguuguuaggcuuuucugccugcuccugcuu

SEQ ID NO: 202170 - RNA, 32 nt, Human
ggguuguugagugaggggagcgugggaugggg

SEQ ID NO: 202171 - RNA, 32 nt, Human
ggguuguugcgggaucucacaggcuuuaaacc

SEQ ID NO: 202172 - RNA, 32 nt, Human
ggguuguugcugcuuugcuucguguuuucuuc

SEQ ID NO: 202173 - RNA, 32 nt, Human
ggguuguuugguuuugguuuucacugucucug

SEQ ID NO: 202174 - RNA, 32 nt, Human
ggguuuaaaaggagauuugaugccauggcaaa

SEQ ID NO: 202175 - RNA, 23 nt, Human
ggguuuaagcaauucuccugccu

SEQ ID NO: 202176 - RNA, 23 nt, Human
ggguuuaagcgauucuccugccu

SEQ ID NO: 202177 - RNA, 32 nt, Human
ggguuuaggaugaaccauuuuaaggaugccaa

SEQ ID NO: 202178 - RNA, 32 nt, Human
ggguuuaggggcugggacacucacagccccag

SEQ ID NO: 202179 - RNA, 32 nt, Human
ggguuuagucccugccucaccuuggggaugga

SEQ ID NO: 202180 - RNA, 32 nt, Human
ggguuuauagggggaggaggaggcaggugguc

SEQ ID NO: 202181 - RNA, 32 nt, Human
ggguuuauaucuucccuuugagcagcauucua

SEQ ID NO: 202182 - RNA, 32 nt, Human
ggguuuaucaucagaaggagagagacccgagg

SEQ ID NO: 202183 - RNA, 32 nt, Human
ggguuuaugacugccaaguuugcccaguacag

SEQ ID NO: 202184 - RNA, 20 nt, Human
ggguuucaccauauugguca

SEQ ID NO: 202185 - RNA, 20 nt, Human
ggguuucaccauguugccca

SEQ ID NO: 202186 - RNA, 20 nt, Human
ggguuucaccauguugcuca

SEQ ID NO: 202187 - RNA, 20 nt, Human
ggguuucaccauguuggcca

SEQ ID NO: 202188 - RNA, 20 nt, Human
ggguuucaccauguugucca

SEQ ID NO: 202189 - RNA, 32 nt, Human
ggguuucacccagcuacucaggaggcugaggc

SEQ ID NO: 202190 - RNA, 32 nt, Human
ggguuucacccuguugcccaggcuaucucaaa

SEQ ID NO: 202191 - RNA, 20 nt, Human
ggguuucaccguguuggcca

SEQ ID NO: 202192 - RNA, 32 nt, Human
ggguuucacugagggguagaaguggcucucag

SEQ ID NO: 202193 - RNA, 32 nt, Human
ggguuucacuguguuggcccagcuggucucaa

SEQ ID NO: 202194 - RNA, 24 nt, Human
ggguuucagagaauaggccgggag

SEQ ID NO: 202195 - RNA, 32 nt, Human
ggguuucagagcagagcuccuggccagagcgu

SEQ ID NO: 202196 - RNA, 21 nt, Human
ggguuucagaguggccggaga

SEQ ID NO: 202197 - RNA, 32 nt, Human
ggguuucagaucuggcuuuuguuaacauuuug

SEQ ID NO: 202198 - RNA, 32 nt, Human
ggguuucagcaacucagugucacagaauaaaa

SEQ ID NO: 202199 - RNA, 32 nt, Human
ggguuucaggcccugaagguucuugaggaucu

SEQ ID NO: 202200 - RNA, 32 nt, Human
ggguuucauguuucaccguguuguccaggcug

SEQ ID NO: 202201 - RNA, 32 nt, Human
ggguuuccagagagagucaugcuggaggagaa

SEQ ID NO: 202202 - RNA, 32 nt, Human
ggguuuccaggcccccugccccuuccccacaa

SEQ ID NO: 202203 - RNA, 32 nt, Human
ggguuucccagaccagggguucagaggagacu

SEQ ID NO: 202204 - RNA, 32 nt, Human
ggguuuccccuauguccaaugacuguagacgg

SEQ ID NO: 202205 - RNA, 32 nt, Human
ggguuuccguuuugguucccuuucauacagag

SEQ ID NO: 202206 - RNA, 32 nt, Human
ggguuuccuaggacccaguuccucauguaagg

SEQ ID NO: 202207 - RNA, 18 nt, Human
ggguuuccugaaguggga

SEQ ID NO: 202208 - RNA, 32 nt, Human
ggguuuccuggaccacccacugcuucucccca

SEQ ID NO: 202209 - RNA, 32 nt, Human
ggguuuccugguguuuccucugacucuagugc

SEQ ID NO: 202210 - RNA, 32 nt, Human
ggguuuccuucugcuucacucuuuccuucccc

SEQ ID NO: 202211 - RNA, 24 nt, Human
ggguuucgggaagguguugaggaa

SEQ ID NO: 202212 - RNA, 32 nt, Human
ggguuucggguuucaccauguuggccagguug

SEQ ID NO: 202213 - RNA, 32 nt, Human
ggguuucuacagcugcuccccacuuucucgga

SEQ ID NO: 202214 - RNA, 32 nt, Human
ggguuucuagccccagaucuagccggguugag

SEQ ID NO: 202215 - RNA, 32 nt, Human
ggguuucucacaccccauaugucugucccuug

SEQ ID NO: 202216 - RNA, 32 nt, Human
ggguuucucauuuccuccuguggcuacauagu

SEQ ID NO: 202217 - RNA, 20 nt, Human
ggguuucuccauguugguca

SEQ ID NO: 202218 - RNA, 32 nt, Human
ggguuucucccaggauaggugaaaggguuaaa

SEQ ID NO: 202219 - RNA, 32 nt, Human
ggguuucugaaugucugugaauuucagagguc

SEQ ID NO: 202220 - RNA, 32 nt, Human
ggguuucugucugagccugagguuugcucucu

SEQ ID NO: 202221 - RNA, 32 nt, Human
ggguuucuuccauguugcccaggcuggucucg

SEQ ID NO: 202222 - RNA, 32 nt, Human
ggguuucuucccacucagggcaaggaagagaa

SEQ ID NO: 202223 - RNA, 32 nt, Human
ggguuucuuccucugaaaaggaaugaacacgg

SEQ ID NO: 202224 - RNA, 32 nt, Human
ggguuucuuuguccucaagguacuguucuguu

SEQ ID NO: 202225 - RNA, 32 nt, Human
ggguuucuuuucugcugggccaaggcgcuuug

SEQ ID NO: 202226 - RNA, 32 nt, Human
ggguuugaagccaggaggagagaugcagucuu

SEQ ID NO: 202227 - RNA, 18 nt, Human
ggguuugacaaccacuua

SEQ ID NO: 202228 - RNA, 32 nt, Human
ggguuugaguugaggaccaaagugccauagcg

SEQ ID NO: 202229 - RNA, 32 nt, Human
ggguuugauucugaaaucuuucuaccuguugc

SEQ ID NO: 202230 - RNA, 32 nt, Human
ggguuugcaaaagcagaucaccaauauguacc

SEQ ID NO: 202231 - RNA, 32 nt, Human
ggguuugcaaaauuuuguaaacuuuuuguguu

SEQ ID NO: 202232 - RNA, 32 nt, Human
ggguuugcacuccugugagaaucuaaugccuc

SEQ ID NO: 202233 - RNA, 31 nt, Human
ggguuugcaguuuucugaguaggugaguuuu

SEQ ID NO: 202234 - RNA, 32 nt, Human
ggguuugcauucuccccuuggcuauuuaacca

SEQ ID NO: 202235 - RNA, 16 nt, Human
ggguuugccauugcua

SEQ ID NO: 202236 - RNA, 32 nt, Human
ggguuugcuggguggguaugggggagggggag

SEQ ID NO: 202237 - RNA, 32 nt, Human
ggguuugcuguuguuauugaucaucuggcuac

SEQ ID NO: 202238 - RNA, 32 nt, Human
ggguuugcuuugagagaaagugggugcagaau

SEQ ID NO: 202239 - RNA, 32 nt, Human
ggguuuggagcagcccugccccucgcugugaa

SEQ ID NO: 202240 - RNA, 32 nt, Human
ggguuuggagcuuauuugaauggaagagguca

SEQ ID NO: 202241 - RNA, 32 nt, Human
ggguuuggaggcggccgccaggcccaggcccg

SEQ ID NO: 202242 - RNA, 21 nt, Human
ggguuuggcaaaacucaggca

SEQ ID NO: 202243 - RNA, 32 nt, Human
ggguuuggcaaugggaaggcaaacaaauuuaa

SEQ ID NO: 202244 - RNA, 32 nt, Human
ggguuugggauugacacuggaggcagauaguu

SEQ ID NO: 202245 - RNA, 32 nt, Human
ggguuugggcgaaguuggaugugcaaacaacu

SEQ ID NO: 202246 - RNA, 32 nt, Human
ggguuuggggagcaggaggcagacauguguug

SEQ ID NO: 202247 - RNA, 32 nt, Human
ggguuuggggucggggacagagcagugaccau

SEQ ID NO: 202248 - RNA, 32 nt, Human
ggguuugggugaggccuggaggcuucagaggu

SEQ ID NO: 202249 - RNA, 32 nt, Human
ggguuugggugugggugcacacaaagcaagca

SEQ ID NO: 202250 - RNA, 32 nt, Human
ggguuugguaccccuuccuggcuucagaaaga

SEQ ID NO: 202251 - RNA, 32 nt, Human
ggguuugguuuaccuauuaaaccaucauugac

SEQ ID NO: 202252 - RNA, 32 nt, Human
ggguuugguuuugucuaggcagccucuggcca

SEQ ID NO: 202253 - RNA, 32 nt, Human
ggguuuguaccagaggaggaggcuggggugga

SEQ ID NO: 202254 - RNA, 32 nt, Human
ggguuuguagggacaugaucagcauccugauu

SEQ ID NO: 202255 - RNA, 32 nt, Human
ggguuuguagggguccucaagugccuuuguga

SEQ ID NO: 202256 - RNA, 32 nt, Human
ggguuuguccucugaugagaaucuaaugucgc

SEQ ID NO: 202257 - RNA, 32 nt, Human
ggguuugucugucccugacuucugccucugag

SEQ ID NO: 202258 - RNA, 31 nt, Human
ggguuugucuucugugugccuguguccucau

SEQ ID NO: 202259 - RNA, 32 nt, Human
ggguuugugccgugcugcuuuccaaauaggua

SEQ ID NO: 202260 - RNA, 32 nt, Human
ggguuugugcgugugugucugcuuagcggucu

SEQ ID NO: 202261 - RNA, 31 nt, Human
ggguuuguuucuucuacuaugccaagcuggu

SEQ ID NO: 202262 - RNA, 18 nt, Human
ggguuuuacagggcccuu

SEQ ID NO: 202263 - RNA, 32 nt, Human
ggguuuuaccacugcacgaccaucuggcucuc

SEQ ID NO: 202264 - RNA, 25 nt, Human
ggguuuuacuggcuggugcugggaa

SEQ ID NO: 202265 - RNA, 32 nt, Human
ggguuuuagacugaacuucgguguuuucuuga

SEQ ID NO: 202266 - RNA, 32 nt, Human
ggguuuuaguggcauugccuuccuucacuaaa

SEQ ID NO: 202267 - RNA, 32 nt, Human
ggguuuucaaucuuggauuggagguggggguu

SEQ ID NO: 202268 - RNA, 32 nt, Human
ggguuuucacaucucuguacugugccugccuc

SEQ ID NO: 202269 - RNA, 32 nt, Human
ggguuuucaccaugguggccaggcuggucucg

SEQ ID NO: 202270 - RNA, 21 nt, Human
ggguuuucaccauguuggcca

SEQ ID NO: 202271 - RNA, 21 nt, Human
ggguuuucaccauguugguca

SEQ ID NO: 202272 - RNA, 32 nt, Human
ggguuuucaguauuuguaagcauuucagcaga

SEQ ID NO: 202273 - RNA, 32 nt, Human
ggguuuucaguuauugcaaagaaaugaagaga

SEQ ID NO: 202274 - RNA, 32 nt, Human
ggguuuuccugauacugggauuccgggauucc

SEQ ID NO: 202275 - RNA, 32 nt, Human
ggguuuucuccucaucaaaagcauuucuuaag

SEQ ID NO: 202276 - RNA, 32 nt, Human
ggguuuucucgccgagucuccuggggcggucc

SEQ ID NO: 202277 - RNA, 32 nt, Human
ggguuuucucuugcccaauccccaccuaauaa

SEQ ID NO: 202278 - RNA, 32 nt, Human
ggguuuucuuaccaagcaucccugaccuccug

SEQ ID NO: 202279 - RNA, 32 nt, Human
ggguuuucuuucuccuccuccaaccuuggcgg

SEQ ID NO: 202280 - RNA, 32 nt, Human
ggguuuugagcagguugggguauggugccugu

SEQ ID NO: 202281 - RNA, 32 nt, Human
ggguuuugagccacugcugcugcugccauugu

SEQ ID NO: 202282 - RNA, 32 nt, Human
ggguuuugaggaggccacagagccaacagcuu

SEQ ID NO: 202283 - RNA, 32 nt, Human
ggguuuugauauuggcuuagcugccagucucc

SEQ ID NO: 202284 - RNA, 32 nt, Human
ggguuuuggaugggaagggaaggguggcuguc

SEQ ID NO: 202285 - RNA, 32 nt, Human
ggguuuuggcauagccuguguuugcagugaga

SEQ ID NO: 202286 - RNA, 32 nt, Human
ggguuuuuagggggauuaaaugaaguauacag

SEQ ID NO: 202287 - RNA, 32 nt, Human
ggguuuuuccaucaggagcaaauggaauccag

SEQ ID NO: 202288 - RNA, 19 nt, Human
ggguuuuuucuacacuguc

SEQ ID NO: 202289 - RNA, 32 nt, Human
gguaaaaacuguuaacacuaaccugaaguuuu

SEQ ID NO: 202290 - RNA, 32 nt, Human
gguaaaaaggccccaacauagcuguauuuaua

SEQ ID NO: 202291 - RNA, 32 nt, Human
gguaaaaauguucuccccuucuguggauuguu

SEQ ID NO: 202292 - RNA, 32 nt, Human
gguaaaacacagauuuuugggcuccacuccaa

SEQ ID NO: 202293 - RNA, 32 nt, Human
gguaaaacaugcuggugaaccagggguguuga

SEQ ID NO: 202294 - RNA, 32 nt, Human
gguaaaaccacgaagggagggaagggaaguca

SEQ ID NO: 202295 - RNA, 32 nt, Human
gguaaaaccacuacccucagagagagccaaaa

SEQ ID NO: 202296 - RNA, 21 nt, Human
gguaaaaccccaucucuacua

SEQ ID NO: 202297 - RNA, 21 nt, Human
gguaaaaccccauuucuacua

SEQ ID NO: 202298 - RNA, 21 nt, Human
gguaaaaccccgucucuacua

SEQ ID NO: 202299 - RNA, 21 nt, Human
gguaaaacccugucucuacua

SEQ ID NO: 202300 - RNA, 32 nt, Human
gguaaaacggaggaggugcgggacgcggagac

SEQ ID NO: 202301 - RNA, 32 nt, Human
gguaaaacuggagacugggggaaagugacuac

SEQ ID NO: 202302 - RNA, 32 nt, Human
gguaaaagagcugagggcucucuucagggagc

SEQ ID NO: 202303 - RNA, 32 nt, Human
gguaaaagcaccaggggguuaaucuuggcuca

SEQ ID NO: 202304 - RNA, 32 nt, Human
gguaaaagcuuucugcaaagcuuuucugcucc

SEQ ID NO: 202305 - RNA, 32 nt, Human
gguaaaaggaaaggaaggaaggaaaaagcagc

SEQ ID NO: 202306 - RNA, 32 nt, Human
gguaaaaggagaaacugagagguguccugcag

SEQ ID NO: 202307 - RNA, 32 nt, Human
gguaaaagucaucuaaggaggcguugucugga

SEQ ID NO: 202308 - RNA, 32 nt, Human
gguaaaauccaaaggaagauguuuacccucuu

SEQ ID NO: 202309 - RNA, 32 nt, Human
gguaaaaucuagauccuaucuaaaaauaugua

SEQ ID NO: 202310 - RNA, 32 nt, Human
gguaaaaucucuucugucacacacagaugaac

SEQ ID NO: 202311 - RNA, 32 nt, Human
gguaaacaaagacaugggauuuucuuacauga

SEQ ID NO: 202312 - RNA, 32 nt, Human
gguaaacacaaaucaugucaauaaagguaguc

SEQ ID NO: 202313 - RNA, 32 nt, Human
gguaaacaggcaggagccagguugugcagugc

SEQ ID NO: 202314 - RNA, 32 nt, Human
gguaaaccaagaaucuagggaguggccaaacu

SEQ ID NO: 202315 - RNA, 20 nt, Human
gguaaaccccaucucuacua

SEQ ID NO: 202316 - RNA, 32 nt, Human
gguaaacuccuuauaaaaagcaaauaccugga

SEQ ID NO: 202317 - RNA, 32 nt, Human
gguaaacugaugcuuucagauccaucgguuua

SEQ ID NO: 202318 - RNA, 32 nt, Human
gguaaacuguaagcccacacuuaaccuuguca

SEQ ID NO: 202319 - RNA, 32 nt, Human
gguaaacuucauugaggaggugauguuuaaac

SEQ ID NO: 202320 - RNA, 32 nt, Human
gguaaacuugagcaucuuuucacuuuccagua

SEQ ID NO: 202321 - RNA, 32 nt, Human
gguaaagaaagaaggaaggagggaggaaagga

SEQ ID NO: 202322 - RNA, 32 nt, Human
gguaaagaaauggugucuauguagacuuaaua

SEQ ID NO: 202323 - RNA, 32 nt, Human
gguaaagagaaaaggagggagaagggaaggaa

SEQ ID NO: 202324 - RNA, 32 nt, Human
gguaaagagagggacuguaggaaguagaaaug

SEQ ID NO: 202325 - RNA, 32 nt, Human
gguaaagcaagaaaacucaagcugcagcugga

SEQ ID NO: 202326 - RNA, 32 nt, Human
gguaaagcaguuagcuagcaccuggcacaugg

SEQ ID NO: 202327 - RNA, 32 nt, Human
gguaaagccauccucccgccucagccuuucga

SEQ ID NO: 202328 - RNA, 32 nt, Human
gguaaagccauugggagguaaugaggguggag

SEQ ID NO: 202329 - RNA, 32 nt, Human
gguaaagccauuucguccucuccaguuugggg

SEQ ID NO: 202330 - RNA, 20 nt, Human
gguaaagcuaaguacuauug

SEQ ID NO: 202331 - RNA, 32 nt, Human
gguaaagcuuagcagagaaucaugggagcuaa

SEQ ID NO: 202332 - RNA, 32 nt, Human
gguaaaggaaagagcagguguggggguuaagc

SEQ ID NO: 202333 - RNA, 32 nt, Human
gguaaaggagaaaauaaugggaaagugcuugu

SEQ ID NO: 202334 - RNA, 31 nt, Human
gguaaaggcaugucucccauuugggaacuga

SEQ ID NO: 202335 - RNA, 32 nt, Human
gguaaaggcucaggcuguuaguagccgcagag

SEQ ID NO: 202336 - RNA, 32 nt, Human
gguaaagggaccagagagaaggagucaccugc

SEQ ID NO: 202337 - RNA, 32 nt, Human
gguaaaguaaggggagaaagugaagugacuuc

SEQ ID NO: 202338 - RNA, 32 nt, Human
gguaaaguaauaugacuaauuucuccaguuga

SEQ ID NO: 202339 - RNA, 32 nt, Human
gguaaagucaauguacacuuccuccuuauugg

SEQ ID NO: 202340 - RNA, 32 nt, Human
gguaaaguuaucauuuccucagucuuuucuuu

SEQ ID NO: 202341 - RNA, 32 nt, Human
gguaaauaaaguggguccuggaaucuuuuagg

SEQ ID NO: 202342 - RNA, 32 nt, Human
gguaaauaugucugagaagaaacggugcaaga

SEQ ID NO: 202343 - RNA, 32 nt, Human
gguaaauauuccagaauccauaugaaauucau

SEQ ID NO: 202344 - RNA, 32 nt, Human
gguaaauccaagagaaaugauccuauccaaag

SEQ ID NO: 202345 - RNA, 32 nt, Human
gguaaauguucuguugugauuguuaacauucc

SEQ ID NO: 202346 - RNA, 32 nt, Human
gguaacaaagugagacccccaucucuacaaaa

SEQ ID NO: 202347 - RNA, 32 nt, Human
gguaacaagaggagcaggaagcaaggccagcc

SEQ ID NO: 202348 - RNA, 32 nt, Human
gguaacaauggguggucuucugauuuuuauuu

SEQ ID NO: 202349 - RNA, 20 nt, Human
gguaacaauuaaaauuuuaa

SEQ ID NO: 202350 - RNA, 32 nt, Human
gguaacaccaaaacagaaugggugcagacgcu

SEQ ID NO: 202351 - RNA, 32 nt, Human
gguaacaccacugcacuccaaccugggcaaca

SEQ ID NO: 202352 - RNA, 18 nt, Human
gguaacacccccacccca

SEQ ID NO: 202353 - RNA, 32 nt, Human
gguaacagaagagaagacuguggagccagcua

SEQ ID NO: 202354 - RNA, 32 nt, Human
gguaacagacuggagugaggagacugaggaga

SEQ ID NO: 202355 - RNA, 21 nt, Human
gguaacagagugagacugucu

SEQ ID NO: 202356 - RNA, 32 nt, Human
gguaacagauggagcuccuuccuagcuaggga

SEQ ID NO: 202357 - RNA, 32 nt, Human
gguaacaggcugggugcaauggcucacaccua

SEQ ID NO: 202358 - RNA, 32 nt, Human
gguaacagggcacaccccucuaguuucauggg

SEQ ID NO: 202359 - RNA, 32 nt, Human
gguaacauacugcacacauuguucugcauguu

SEQ ID NO: 202360 - RNA, 32 nt, Human
gguaacaucaucaggccgggugcaguggcucc

SEQ ID NO: 202361 - RNA, 32 nt, Human
gguaacaugcagcuuuuuccucucauagcauu

SEQ ID NO: 202362 - RNA, 32 nt, Human
gguaacauggccagaccccaucucuauuuaua

SEQ ID NO: 202363 - RNA, 32 nt, Human
gguaaccagcuaacucuugggcucaggcaccc

SEQ ID NO: 202364 - RNA, 32 nt, Human
gguaacccaaccgguaccacagauccgguucc

SEQ ID NO: 202365 - RNA, 32 nt, Human
gguaaccccaaaccuccaaaacuccugccccu

SEQ ID NO: 202366 - RNA, 32 nt, Human
gguaaccccagccauggaccgucaguggcugg

SEQ ID NO: 202367 - RNA, 32 nt, Human
gguaacccggccccucuggcccuucccucaag

SEQ ID NO: 202368 - RNA, 32 nt, Human
gguaacccuuacacuccugguuugagacagua

SEQ ID NO: 202369 - RNA, 24 nt, Human
gguaaccggagugcugguaucuaa

SEQ ID NO: 202370 - RNA, 32 nt, Human
gguaaccgggacccgugcucugcuccugucgc

SEQ ID NO: 202371 - RNA, 32 nt, Human
ggugaauuuuuaaucagcaauauugccugugc

SEQ ID NO: 202372 - RNA, 32 nt, Human
ggugacaaaggaaugagugaaugaguaaggag

SEQ ID NO: 202373 - RNA, 32 nt, Human
ggugacaaagugucacaggugugaugcauuac

SEQ ID NO: 202374 - RNA, 20 nt, Human
ggugacaacagaggggguag

SEQ ID NO: 202375 - RNA, 32 nt, Human
ggugacaagaggagacagggacagguucuguc

SEQ ID NO: 202376 - RNA, 32 nt, Human
ggugacacacuaugguauuugaguguuuuaag

SEQ ID NO: 202377 - RNA, 32 nt, Human
ggugacacagagccggcccuguccucgguucu

SEQ ID NO: 202378 - RNA, 32 nt, Human
ggugacacauggcugcauuuugaaggacagau

SEQ ID NO: 202379 - RNA, 21 nt, Human
ggugacacccaccccagggug

SEQ ID NO: 202380 - RNA, 32 nt, Human
ggugacaccugagaauuccucccucucacccc

SEQ ID NO: 202381 - RNA, 32 nt, Human
ggugacacgaggacacagggacagguucuauc

SEQ ID NO: 202382 - RNA, 19 nt, Human
ggugacacgaggggacuga

SEQ ID NO: 202383 - RNA, 32 nt, Human
ggugacacucagggauguggucaucaacuucu

SEQ ID NO: 202384 - RNA, 32 nt, Human
ggugacacugcacucgccucacuagggagcug

SEQ ID NO: 202385 - RNA, 32 nt, Human
ggugacacuggcauugcuggguggugaugccc

SEQ ID NO: 202386 - RNA, 32 nt, Human
ggugacacugggaggugggagggccaggccaa

SEQ ID NO: 202387 - RNA, 23 nt, Human
ggugacagaaugagacccugucu

SEQ ID NO: 202388 - RNA, 23 nt, Human
ggugacagaaugagacucuaucu

SEQ ID NO: 202389 - RNA, 20 nt, Human
ggugacagaauguucugccu

SEQ ID NO: 202390 - RNA, 23 nt, Human
ggugacagacagagacucugucu

SEQ ID NO: 202391 - RNA, 23 nt, Human
ggugacagagcaagacccugucu

SEQ ID NO: 202392 - RNA, 21 nt, Human
ggugacagagcaagacuacau

SEQ ID NO: 202393 - RNA, 23 nt, Human
ggugacagagcaagacuccaucu

SEQ ID NO: 202394 - RNA, 23 nt, Human
ggugacagagcaagacuccggcu

SEQ ID NO: 202395 - RNA, 32 nt, Human
ggugacagagccaaauggggcugcaguugcug

SEQ ID NO: 202396 - RNA, 23 nt, Human
ggugacagagcgagacccugucu

SEQ ID NO: 202397 - RNA, 23 nt, Human
ggugacagagcgagacuccaucu

SEQ ID NO: 202398 - RNA, 23 nt, Human
ggugacagagcgagacuccgucu

SEQ ID NO: 202399 - RNA, 23 nt, Human
ggugacagagggagacucucuca

SEQ ID NO: 202400 - RNA, 23 nt, Human
ggugacagagugagaaccugucu

SEQ ID NO: 202401 - RNA, 23 nt, Human
ggugacagagugagacccugucu

SEQ ID NO: 202402 - RNA, 23 nt, Human
ggugacagagugagaccucgucu

SEQ ID NO: 202403 - RNA, 23 nt, Human
ggugacagagugagacuccaccu

SEQ ID NO: 202404 - RNA, 23 nt, Human
ggugacagagugagacuccaucc

SEQ ID NO: 202405 - RNA, 23 nt, Human
ggugacagagugagacuccaucu

SEQ ID NO: 202406 - RNA, 23 nt, Human
ggugacagagugagacuccgucu

SEQ ID NO: 202407 - RNA, 23 nt, Human
ggugacagagugagacucugucu

SEQ ID NO: 202408 - RNA, 25 nt, Human
ggugacagcaggucugagguugcau

SEQ ID NO: 202409 - RNA, 25 nt, Human
ggugacagcuacgcuggagugcagu

SEQ ID NO: 202410 - RNA, 19 nt, Human
ggugacagcugacucugcc

SEQ ID NO: 202411 - RNA, 32 nt, Human
ggugacagcugcaagccagggaugaagaaaga

SEQ ID NO: 202412 - RNA, 32 nt, Human
ggugacaggaaggcugggagcagcuuuguuaa

SEQ ID NO: 202413 - RNA, 32 nt, Human
ggugacaggcccaggaaccaaugcuacucauu

SEQ ID NO: 202414 - RNA, 32 nt, Human
ggugacaggccugggccucugcaacugcccug

SEQ ID NO: 202415 - RNA, 32 nt, Human
ggugacaggcuggccugcagucagcaucauug

SEQ ID NO: 202416 - RNA, 20 nt, Human
ggugacagggagccugcagg

SEQ ID NO: 202417 - RNA, 19 nt, Human
ggugacagggguuccugga

SEQ ID NO: 202418 - RNA, 32 nt, Human
ggugacaggugaccgcacacaugugggugcca

SEQ ID NO: 202419 - RNA, 32 nt, Human
ggugacagugaugaaaggaaugcuugaucuga

SEQ ID NO: 202420 - RNA, 32 nt, Human
ggugacaguuccugaaggggcuucugggaaau

SEQ ID NO: 202421 - RNA, 32 nt, Human
ggugacaguuuccugaggagagggguguaucc

SEQ ID NO: 202422 - RNA, 32 nt, Human
ggugacauauguaaucccagcacuuugggagg

SEQ ID NO: 202423 - RNA, 32 nt, Human
ggugacauccacaaaugcaguuuuagaagcag

SEQ ID NO: 202424 - RNA, 32 nt, Human
ggugacaugacacaggcagagcagaguggcac

SEQ ID NO: 202425 - RNA, 32 nt, Human
ggugacaugagaacaccgacccagggaauggg

SEQ ID NO: 202426 - RNA, 32 nt, Human
ggugacaugauuugguuagaagcacaagcaaa

SEQ ID NO: 202427 - RNA, 32 nt, Human
ggugacauggugccaucaggaggcggcugcug

SEQ ID NO: 202428 - RNA, 32 nt, Human
ggugacauuuauuuugacaaguuuuaggcauc

SEQ ID NO: 202429 - RNA, 22 nt, Human
ggugaccaaaggccuggcuaca

SEQ ID NO: 202430 - RNA, 24 nt, Human
ggugaccaacgggagggcuucuca

SEQ ID NO: 202431 - RNA, 32 nt, Human
ggugaccaagaggcagaagagcagagcagucg

SEQ ID NO: 202432 - RNA, 32 nt, Human
ggugaccaaggcaggaggaucucuugaggcca

SEQ ID NO: 202433 - RNA, 16 nt, Human
ggugaccacacuucca

SEQ ID NO: 202434 - RNA, 32 nt, Human
ggugaccacagcugcaguuagggaagggagcc

SEQ ID NO: 202435 - RNA, 32 nt, Human
ggugaccacauuaagcccaguauuccaguugg

SEQ ID NO: 202436 - RNA, 32 nt, Human
ggugaccacuuaauugcuuuccugccuccuug

SEQ ID NO: 202437 - RNA, 32 nt, Human
ggugaccagcuguccuaguuugcccaggacuc

SEQ ID NO: 202438 - RNA, 32 nt, Human
ggugaccaggguaccccaggaggcaugaugug

SEQ ID NO: 202439 - RNA, 32 nt, Human
ggugaccauacagcuagggcugaggaugggaa

SEQ ID NO: 202440 - RNA, 32 nt, Human
ggugacccaagaggcaggguuggggccuggac

SEQ ID NO: 202441 - RNA, 32 nt, Human
ggugacccacagcucugggccucuuuuugccc

SEQ ID NO: 202442 - RNA, 32 nt, Human
ggugacccacugcuucagcugguugaccuccc

SEQ ID NO: 202443 - RNA, 32 nt, Human
ggugacccaggaagaacgugucagagacagug

SEQ ID NO: 202444 - RNA, 32 nt, Human
ggugaccccaacagcacagagaacagccaacg

SEQ ID NO: 202445 - RNA, 32 nt, Human
ggugaccccagaguucuucagaccugugucug

SEQ ID NO: 202446 - RNA, 32 nt, Human
ggugaccccagccucaucuucuaggccuuuuc

SEQ ID NO: 202447 - RNA, 32 nt, Human
ggugaccccucagccaacagcccuaacauuug

SEQ ID NO: 202448 - RNA, 32 nt, Human
ggugaccccugccauuuaccagcagcccuggc

SEQ ID NO: 202449 - RNA, 32 nt, Human
ggugaccccugcccucagcucucaccagcgac

SEQ ID NO: 202450 - RNA, 32 nt, Human
ggugaccccuuuucagcuucugcugggcuggg

SEQ ID NO: 202451 - RNA, 32 nt, Human
ggugacccgggcccugaccuucucccucuucc

SEQ ID NO: 202452 - RNA, 18 nt, Human
ggugacccuacccuugag

SEQ ID NO: 202453 - RNA, 32 nt, Human
ggugacccuguggagcauugagccaugccagc

SEQ ID NO: 202454 - RNA, 32 nt, Human
ggugacccuuacacuucagccucccaaguagc

SEQ ID NO: 202455 - RNA, 32 nt, Human
ggugaccgagaggaggaguagagugugcccuu

SEQ ID NO: 202456 - RNA, 32 nt, Human
ggugaccgaggguggcacagccuggcuugagu

SEQ ID NO: 202457 - RNA, 20 nt, Human
ggugaccgcagccccuugga

SEQ ID NO: 202458 - RNA, 19 nt, Human
ggugaccgccaccacgccc

SEQ ID NO: 202459 - RNA, 32 nt, Human
ggugaccggccaccccagggcagucccccagc

SEQ ID NO: 202460 - RNA, 32 nt, Human
ggugaccuaggcagcauuagaaucacuuauuu

SEQ ID NO: 202461 - RNA, 30 nt, Human
ggugaccuaguagaguguaauggggaaggg

SEQ ID NO: 202462 - RNA, 32 nt, Human
ggugaccuccugucacucacugaggccaucag

SEQ ID NO: 202463 - RNA, 32 nt, Human
ggugaccugcagagacuuccugccuggaacuc

SEQ ID NO: 202464 - RNA, 32 nt, Human
ggugaccugcagcccggcccaccagccgccac

SEQ ID NO: 202465 - RNA, 32 nt, Human
ggugaccugcccucaaaccuugccugccaccu

SEQ ID NO: 202466 - RNA, 32 nt, Human
ggugaccugccuggucccugacucugcaagcc

SEQ ID NO: 202467 - RNA, 32 nt, Human
ggugaccugcucaugucagcuucuuccccuuu

SEQ ID NO: 202468 - RNA, 32 nt, Human
ggugaccugcuggcccucagaucaauggucgu

SEQ ID NO: 202469 - RNA, 32 nt, Human
ggugaccuggccagaggggcuggugaggggca

SEQ ID NO: 202470 - RNA, 32 nt, Human
ggugaccugggcccaagucucucaucagcccc

SEQ ID NO: 202471 - RNA, 32 nt, Human
ggugaccuguaaguugcagaggaggguggagu

SEQ ID NO: 202472 - RNA, 32 nt, Human
ggugaccugugcgccuagccugcgcagggaau

SEQ ID NO: 202473 - RNA, 32 nt, Human
ggugaccuguucucuagcugugaucuuaccac

SEQ ID NO: 202474 - RNA, 32 nt, Human
ggugaccuguucugugcuugaaugugcugaau

SEQ ID NO: 202475 - RNA, 24 nt, Human
ggugaccuucuggaugccuuuaac

SEQ ID NO: 202476 - RNA, 32 nt, Human
ggugacgacucuugcgcgcacacacacauaca

SEQ ID NO: 202477 - RNA, 17 nt, Human
ggugacgaugaccaccu

SEQ ID NO: 202478 - RNA, 31 nt, Human
ggugacgaugcccucucagccaacacugcca

SEQ ID NO: 202479 - RNA, 32 nt, Human
ggugacgaugcucugguucuccggcgucgggg

SEQ ID NO: 202480 - RNA, 32 nt, Human
ggugacgccguggccgcagggucuccauuuug

SEQ ID NO: 202481 - RNA, 18 nt, Human
ggugacgcgagcucugcc

SEQ ID NO: 202482 - RNA, 32 nt, Human
ggugacgcugcccagacucacaagagcucggg

SEQ ID NO: 202483 - RNA, 32 nt, Human
ggugacggccuaaaaagugaccaucuagacau

SEQ ID NO: 202484 - RNA, 21 nt, Human
ggugacgggcacucacuccca

SEQ ID NO: 202485 - RNA, 32 nt, Human
ggugacggugaucucggggugggcaggacucc

SEQ ID NO: 202486 - RNA, 32 nt, Human
ggugacguccaggucacaggcugcagcgaggu

SEQ ID NO: 202487 - RNA, 32 nt, Human
ggugacguuuuccagagcaacagugugacgug

SEQ ID NO: 202488 - RNA, 32 nt, Human
ggugacguuuucuaucagacgugcucccuccc

SEQ ID NO: 202489 - RNA, 32 nt, Human
ggugacuaaggugacuuuguauauucaucuua

SEQ ID NO: 202490 - RNA, 32 nt, Human
ggugacuaggcuuaggugagaucgugagggug

SEQ ID NO: 202491 - RNA, 32 nt, Human
ggugacuagggagggauuaggaaauuagaggu

SEQ ID NO: 202492 - RNA, 32 nt, Human
ggugacucaagaaguuguuuaagccuaggccu

SEQ ID NO: 202493 - RNA, 23 nt, Human
ggugacucacaccuauaauccca

SEQ ID NO: 202494 - RNA, 20 nt, Human
ggugacucacaccuguaauc

SEQ ID NO: 202495 - RNA, 20 nt, Human
ggugacucacgccugucauc

SEQ ID NO: 202496 - RNA, 20 nt, Human
ggugacucacgucuguaauc

SEQ ID NO: 202497 - RNA, 23 nt, Human
ggugacucauaccuguaauccca

SEQ ID NO: 202498 - RNA, 20 nt, Human
ggugacucaugccuguaauc

SEQ ID NO: 202499 - RNA, 23 nt, Human
ggugacucaugccuguaauccca

SEQ ID NO: 202500 - RNA, 32 nt, Human
ggugacucaugccuguaaucccugcacuuugg

SEQ ID NO: 202501 - RNA, 20 nt, Human
ggugacucaugcuuguaauc

SEQ ID NO: 202502 - RNA, 32 nt, Human
ggugacuccagccucuuucuccuggaggucac

SEQ ID NO: 202503 - RNA, 32 nt, Human
ggugacuccaugauggacgaucuugcucccag

SEQ ID NO: 202504 - RNA, 20 nt, Human
ggugacucgcaccuguaauc

SEQ ID NO: 202505 - RNA, 20 nt, Human
ggugacucucugcccuugga

SEQ ID NO: 202506 - RNA, 21 nt, Human
ggugacucucugcccuuggac

SEQ ID NO: 202507 - RNA, 32 nt, Human
ggugacucuggaggaagaggugggcccccgug

SEQ ID NO: 202508 - RNA, 23 nt, Human
ggugacucuuguacucccuugag

SEQ ID NO: 202509 - RNA, 32 nt, Human
ggugacugaauuugggccucuuguacaguuaa

SEQ ID NO: 202510 - RNA, 32 nt, Human
ggugacugagacaaacugccagcugccacugg

SEQ ID NO: 202511 - RNA, 32 nt, Human
ggugacugagaggcucaggacagagcauugca

SEQ ID NO: 202512 - RNA, 32 nt, Human
ggugacugaggcggguggauugcuugagccca

SEQ ID NO: 202513 - RNA, 31 nt, Human
ggugacugccucugagucauuguguuuuuca

SEQ ID NO: 202514 - RNA, 32 nt, Human
ggugacuggcccagccgcaccgcgucucccgc

SEQ ID NO: 202515 - RNA, 32 nt, Human
ggugacuggcuuuucguucuguguucuuggcu

SEQ ID NO: 202516 - RNA, 21 nt, Human
ggugacugggaggccuugaac

SEQ ID NO: 202517 - RNA, 32 nt, Human
ggugacugguucuucaggaacugugaaggugg

SEQ ID NO: 202518 - RNA, 18 nt, Human
ggugacugucuacacgca

SEQ ID NO: 202519 - RNA, 32 nt, Human
ggugacugucuccuggaaauguuaugcagcuc

SEQ ID NO: 202520 - RNA, 32 nt, Human
ggugacugugcacuccaguucucuccagauga

SEQ ID NO: 202521 - RNA, 20 nt, Human
ggugacuguggcagcgggag

SEQ ID NO: 202522 - RNA, 20 nt, Human
ggugacuucaucucuucgaa

SEQ ID NO: 202523 - RNA, 32 nt, Human
ggugacuuccaagagugacuccgucggaggaa

SEQ ID NO: 202524 - RNA, 32 nt, Human
ggugacuuccaucaagcuauacauacccuucu

SEQ ID NO: 202525 - RNA, 32 nt, Human
ggugacuuccucgccucucccaccccaugcau

SEQ ID NO: 202526 - RNA, 21 nt, Human
ggugacuucucagagccugaa

SEQ ID NO: 202527 - RNA, 32 nt, Human
ggugacuucucccuccccggccucagguuugc

SEQ ID NO: 202528 - RNA, 32 nt, Human
ggugacuucuguuuuggaggugaaguggaaga

SEQ ID NO: 202529 - RNA, 19 nt, Human
ggugacuugaaacccugag

SEQ ID NO: 202530 - RNA, 20 nt, Human
ggugacuuucacccugcaac

SEQ ID NO: 202531 - RNA, 21 nt, Human
ggugacuuucaugugcuugaa

SEQ ID NO: 202532 - RNA, 21 nt, Human
ggugacuuucugaugacugaa

SEQ ID NO: 202533 - RNA, 20 nt, Human
ggugacuuugaagacuugga

SEQ ID NO: 202534 - RNA, 22 nt, Human
ggugacuuugguagcccuugag

SEQ ID NO: 202535 - RNA, 23 nt, Human
ggugacuuugguagcccuugagc

SEQ ID NO: 202536 - RNA, 32 nt, Human
ggugacuuuucuugaugcaaagcucugauucc

SEQ ID NO: 202537 - RNA, 32 nt, Human
ggugagaaacccuacaaaugugcucaauguga

SEQ ID NO: 202538 - RNA, 32 nt, Human
ggugagaaauacagcucccacaguugugcucu

SEQ ID NO: 202539 - RNA, 32 nt, Human
ggugagaaccuggguugcagacaggaaucuua

SEQ ID NO: 202540 - RNA, 32 nt, Human
ggugagaagaggcagacagugacgaugguagg

SEQ ID NO: 202541 - RNA, 32 nt, Human
ggugagaagagugaugaccauccuuuuccuua

SEQ ID NO: 202542 - RNA, 32 nt, Human
ggugagaagccgcuucccagacugucagggcc

SEQ ID NO: 202543 - RNA, 32 nt, Human
ggugagaauggggaggcaagaucucagggaca

SEQ ID NO: 202544 - RNA, 32 nt, Human
ggugagacagaggguggggaggauagugucug

SEQ ID NO: 202545 - RNA, 32 nt, Human
ggugagacccagccggggaagccucuccaacu

SEQ ID NO: 202546 - RNA, 21 nt, Human
ggugagaccccaucucuacua

SEQ ID NO: 202547 - RNA, 32 nt, Human
ggugagaccccucccuuccagaauccaggccc

SEQ ID NO: 202548 - RNA, 32 nt, Human
ggugagaccccuggcaguugccuacaccccug

SEQ ID NO: 202549 - RNA, 32 nt, Human
ggugagacccuccauguaugauuauuaugaca

SEQ ID NO: 202550 - RNA, 32 nt, Human
ggugagacccuuguuggcagccagacaagggu

SEQ ID NO: 202551 - RNA, 32 nt, Human
ggugagaccuguccgcccaccuucccuccacu

SEQ ID NO: 202552 - RNA, 32 nt, Human
ggugagacuucagagccuguucccucuccucc

SEQ ID NO: 202553 - RNA, 32 nt, Human
ggugagagaaagagggaggagugagagagaac

SEQ ID NO: 202554 - RNA, 32 nt, Human
ggugagagaaguacaaagguugcagugcugag

SEQ ID NO: 202555 - RNA, 32 nt, Human
ggugagagacacauuccccucgcugcucccaa

SEQ ID NO: 202556 - RNA, 32 nt, Human
ggugagagaccagaaagcaauggaggccggag

SEQ ID NO: 202557 - RNA, 19 nt, Human
ggugagagagacucuggcu

SEQ ID NO: 202558 - RNA, 32 nt, Human
ggugagagagcgagacagguggcaagaaccau

SEQ ID NO: 202559 - RNA, 32 nt, Human
ggugagagaggaagcaaggagagggugugugu

SEQ ID NO: 202560 - RNA, 32 nt, Human
ggugagagaggcccugaagauagaagccaggc

SEQ ID NO: 202561 - RNA, 32 nt, Human
ggugagagcuaucaacuguggcacgguucauu

SEQ ID NO: 202562 - RNA, 32 nt, Human
ggugagagcugguaaucccagcuacucaugag

SEQ ID NO: 202563 - RNA, 32 nt, Human
ggugagagcuucaccugucccuccuggcuugu

SEQ ID NO: 202564 - RNA, 32 nt, Human
ggugagaggaaggggagcggcuccugugcauu

SEQ ID NO: 202565 - RNA, 32 nt, Human
ggugagaggagaaaggagcuuaucccccagac

SEQ ID NO: 202566 - RNA, 32 nt, Human
ggugagaggagaaggagggagggaaaaggggu

SEQ ID NO: 202567 - RNA, 32 nt, Human
ggugagaggaugacacgucugccggcuccuug

SEQ ID NO: 202568 - RNA, 32 nt, Human
ggugagaggauuccuugaggccaggguucgag

SEQ ID NO: 202569 - RNA, 32 nt, Human
ggugagaggccagugcccugccccacccugga

SEQ ID NO: 202570 - RNA, 32 nt, Human
ggugagaggcggcugaagaguugcuguauucu

SEQ ID NO: 202571 - RNA, 32 nt, Human
ggugagagugugugucuuugcacacacagugc

SEQ ID NO: 202572 - RNA, 32 nt, Human
ggugagauggccuuggguugcccuuggcuucu

SEQ ID NO: 202573 - RNA, 20 nt, Human
ggugagcaauaaaguaucug

SEQ ID NO: 202574 - RNA, 19 nt, Human
ggugagcacguccaucuca

SEQ ID NO: 202575 - RNA, 32 nt, Human
ggugagcacugcagccucccugggcauucccu

SEQ ID NO: 202576 - RNA, 23 nt, Human
ggugagcagaucaccugagguca

SEQ ID NO: 202577 - RNA, 32 nt, Human
ggugagcagcuggaggccggacaguguucguc

SEQ ID NO: 202578 - RNA, 32 nt, Human
ggugagcaugguguccccacagcccaggccac

SEQ ID NO: 202579 - RNA, 32 nt, Human
ggugagccaaggacaaccacacagaaagccag

SEQ ID NO: 202580 - RNA, 19 nt, Human
ggugagccagaggguucca

SEQ ID NO: 202581 - RNA, 32 nt, Human
ggugagcccaauggcuagagggcucugcucca

SEQ ID NO: 202582 - RNA, 32 nt, Human
ggugagccccaguuuccagggcagcugauuga

SEQ ID NO: 202583 - RNA, 32 nt, Human
ggugagccccugcaagguggggugggugugcu

SEQ ID NO: 202584 - RNA, 32 nt, Human
ggugagccgaagccacacaggagccauggaag

SEQ ID NO: 202585 - RNA, 32 nt, Human
ggugagccuccugguguagaguucuuuugucu

SEQ ID NO: 202586 - RNA, 32 nt, Human
ggugagccuuacuucucuuccugggcuagccu

SEQ ID NO: 202587 - RNA, 32 nt, Human
ggugagcgaguuucacucugaugcaacagaaa

SEQ ID NO: 202588 - RNA, 19 nt, Human
ggugagcgcuguaaucuga

SEQ ID NO: 202589 - RNA, 32 nt, Human
ggugagcggacccgcgcuggggugcggggcag

SEQ ID NO: 202590 - RNA, 23 nt, Human
ggugagcggaucaccugaaguca

SEQ ID NO: 202591 - RNA, 23 nt, Human
ggugagcggaucaccugagguca

SEQ ID NO: 202592 - RNA, 32 nt, Human
ggugagcggggcccacccugcccagcucaggg

SEQ ID NO: 202593 - RNA, 32 nt, Human
ggugagcgucuggcgcaggucuggacccuuug

SEQ ID NO: 202594 - RNA, 32 nt, Human
ggugagcuauauggaguuaagcauuuuuauac

SEQ ID NO: 202595 - RNA, 32 nt, Human
ggugagcucacugucaucgcgcauccacuuga

SEQ ID NO: 202596 - RNA, 32 nt, Human
ggugagcucugccccaucagcccuuggagauu

SEQ ID NO: 202597 - RNA, 32 nt, Human
ggugagcugaguagcuggguuucuggaggaua

SEQ ID NO: 202598 - RNA, 32 nt, Human
ggugagcuggcaccagcuccuguggaauguuu

SEQ ID NO: 202599 - RNA, 32 nt, Human
ggugagcuggggaaggaagugagcauggccuc

SEQ ID NO: 202600 - RNA, 21 nt, Human
ggugaggaaacacugaccaua

SEQ ID NO: 202601 - RNA, 22 nt, Human
ggugaggaaacugcgacuggga

SEQ ID NO: 202602 - RNA, 32 nt, Human
ggugaggaaagaaauaaauaagugauucuaau

SEQ ID NO: 202603 - RNA, 32 nt, Human
ggugaggaacgccacagacagagccacccuag

SEQ ID NO: 202604 - RNA, 32 nt, Human
ggugaggaaggguuuaaccucacuggaaggaa

SEQ ID NO: 202605 - RNA, 32 nt, Human
ggugaggaauacuguaucuaucauucaacaag

SEQ ID NO: 202606 - RNA, 32 nt, Human
ggugaggacacagcaggcccaggaccauggcu

SEQ ID NO: 202607 - RNA, 32 nt, Human
ggugaggacacauugccccaugagacaguccc

SEQ ID NO: 202608 - RNA, 21 nt, Human
ggugaggacgggaucugugga

SEQ ID NO: 202609 - RNA, 32 nt, Human
ggugaggacuccauccuccuguuccauucauc

SEQ ID NO: 202610 - RNA, 32 nt, Human
ggugaggacucugccuccuugccugccuacaa

SEQ ID NO: 202611 - RNA, 32 nt, Human
ggugaggacucugccuggggcucugcugaugg

SEQ ID NO: 202612 - RNA, 32 nt, Human
ggugaggacugcaccuuaaccugggcacuggg

SEQ ID NO: 202613 - RNA, 32 nt, Human
ggugaggacuugacuuuccucccagagcucag

SEQ ID NO: 202614 - RNA, 32 nt, Human
ggugaggagacccuguccuaaauuuaaaauaa

SEQ ID NO: 202615 - RNA, 32 nt, Human
ggugaggagcuugccuagagucaguccaggag

SEQ ID NO: 202616 - RNA, 32 nt, Human
ggugaggaggaagaggaggaggaagaggagga

SEQ ID NO: 202617 - RNA, 32 nt, Human
ggugaggaggcagagaguggugcaggcugggu

SEQ ID NO: 202618 - RNA, 32 nt, Human
ggugaggaggcaggaagcaccuccgguuggag

SEQ ID NO: 202619 - RNA, 32 nt, Human
ggugaggaggggcggagcuuccagaacaaagg

SEQ ID NO: 202620 - RNA, 23 nt, Human
ggugaggcaagaagcucugggga

SEQ ID NO: 202621 - RNA, 32 nt, Human
ggugaggcaggaagguuucaguucaguggaga

SEQ ID NO: 202622 - RNA, 32 nt, Human
ggugaggcagggcugaaaacugcccuugggcu

SEQ ID NO: 202623 - RNA, 32 nt, Human
ggugaggcauagggaauguggggaagaggcuu

SEQ ID NO: 202624 - RNA, 32 nt, Human
ggugaggcccgugguagagaucauucugaaca

SEQ ID NO: 202625 - RNA, 32 nt, Human
ggugaggcggagcagagguuuaauggaggugu

SEQ ID NO: 202626 - RNA, 32 nt, Human
ggugaggcuccggaucucaggagcagcccuga

SEQ ID NO: 202627 - RNA, 32 nt, Human
ggugaggcugggaggaggaagacugagguaga

SEQ ID NO: 202628 - RNA, 32 nt, Human
ggugaggcugggcccuuccugcugggaaaagc

SEQ ID NO: 202629 - RNA, 32 nt, Human
ggugaggcuggugccaucugucugcuucagac

SEQ ID NO: 202630 - RNA, 21 nt, Human
ggugagggaacuaaaccugug

SEQ ID NO: 202631 - RNA, 32 nt, Human
ggugagggaagacgccuuucuccuccaaccca

SEQ ID NO: 202632 - RNA, 32 nt, Human
ggugagggaauccagacucccuucucucaagg

SEQ ID NO: 202633 - RNA, 32 nt, Human
ggugagggaccacuugggacagaggaagcaau

SEQ ID NO: 202634 - RNA, 32 nt, Human
ggugagggagaaagaagaccaagugugugaac

SEQ ID NO: 202635 - RNA, 32 nt, Human
ggugagggaggcauuucauuccagagcagaag

SEQ ID NO: 202636 - RNA, 32 nt, Human
ggugagggagggccaagccaggaggauuuguc

SEQ ID NO: 202637 - RNA, 22 nt, Human
ggugagggaggggccccaggag

SEQ ID NO: 202638 - RNA, 31 nt, Human
ggugagggcaaaggauuuguuuuucaaauua

SEQ ID NO: 202639 - RNA, 32 nt, Human
ggugagggcuguaaguggcgcgauucgcggca

SEQ ID NO: 202640 - RNA, 32 nt, Human
ggugaggggagggagagcauuaggaaaaacag

SEQ ID NO: 202641 - RNA, 19 nt, Human
ggugaggggccaggaucca

SEQ ID NO: 202642 - RNA, 32 nt, Human
ggugaggggcccgagguggcagaggaaggggg

SEQ ID NO: 202643 - RNA, 18 nt, Human
ggugaggggcuccugcca

SEQ ID NO: 202644 - RNA, 32 nt, Human
ggugaggggugugaggccccagccuggagcca

SEQ ID NO: 202645 - RNA, 32 nt, Human
ggugagggucagcaggaaaacaugaacaaaug

SEQ ID NO: 202646 - RNA, 32 nt, Human
ggugagggucaucuucacgagcaaagagaacc

SEQ ID NO: 202647 - RNA, 32 nt, Human
ggugagggucuccagccucagggccuggcuuc

SEQ ID NO: 202648 - RNA, 32 nt, Human
ggugagggugagaaugaggugggagcuggugg

SEQ ID NO: 202649 - RNA, 32 nt, Human
ggugagggugagcagagauguguguggacauc

SEQ ID NO: 202650 - RNA, 32 nt, Human
ggugagggugugagccccgggcugauggccuc

SEQ ID NO: 202651 - RNA, 32 nt, Human
ggugaggguuuaaacagacagaaagacagaca

SEQ ID NO: 202652 - RNA, 32 nt, Human
ggugagguauuuucacugcccucccuggagag

SEQ ID NO: 202653 - RNA, 32 nt, Human
ggugagguccaaagaggagagcuguucagcuu

SEQ ID NO: 202654 - RNA, 32 nt, Human
ggugaggugaguguggcgcucaaggagcagca

SEQ ID NO: 202655 - RNA, 32 nt, Human
ggugaggugguguuugccugcggucccagcua

SEQ ID NO: 202656 - RNA, 20 nt, Human
ggugagguucucagccacca

SEQ ID NO: 202657 - RNA, 32 nt, Human
ggugaguaacuugcccauuucuccacagagac

SEQ ID NO: 202658 - RNA, 32 nt, Human
ggugagucccacuugagcgcuuccuguugaau

SEQ ID NO: 202659 - RNA, 32 nt, Human
ggugaguccuucagaacgcucuacucuggaag

SEQ ID NO: 202660 - RNA, 32 nt, Human
ggugagucuaggacagauuuuacguggagagu

SEQ ID NO: 202661 - RNA, 32 nt, Human
ggugagucuguggccuucucuccagggccccc

SEQ ID NO: 202662 - RNA, 32 nt, Human
ggugagucuugacucccuuccaacacagaugc

SEQ ID NO: 202663 - RNA, 32 nt, Human
ggugagucuuuuccuguggagguuuggucucc

SEQ ID NO: 202664 - RNA, 32 nt, Human
ggugagugauccucccacaguggacuuccaaa

SEQ ID NO: 202665 - RNA, 32 nt, Human
ggugagugccuguaaucacagcuacuugggag

SEQ ID NO: 202666 - RNA, 32 nt, Human
ggugagugccuguaaucccagcuacucgggag

SEQ ID NO: 202667 - RNA, 32 nt, Human
ggugagugccuguaaucccagcuacuugggag

SEQ ID NO: 202668 - RNA, 32 nt, Human
ggugagugccuguaaucucaguuacucaggag

SEQ ID NO: 202669 - RNA, 32 nt, Human
ggugagugccuguagucccagcuacucaggag

SEQ ID NO: 202670 - RNA, 32 nt, Human
ggugagugcuggcauggcucuaccucccaacc

SEQ ID NO: 202671 - RNA, 32 nt, Human
ggugaguggagguagaaaaaugaugagaaaug

SEQ ID NO: 202672 - RNA, 32 nt, Human
ggugaguggggaggggcuuuccugagccugga

SEQ ID NO: 202673 - RNA, 32 nt, Human
ggugaguguggcugggggugcagagagcgcac

SEQ ID NO: 202674 - RNA, 32 nt, Human
ggugaguguguauuuacuguaguuuugccuga

SEQ ID NO: 202675 - RNA, 32 nt, Human
ggugaguguugugacaggcucagaccugaucc

SEQ ID NO: 202676 - RNA, 32 nt, Human
ggugaguugaaggaaugggauauggagccaca

SEQ ID NO: 202677 - RNA, 32 nt, Human
ggugaguugaguguggcugggagagugggagg

SEQ ID NO: 202678 - RNA, 32 nt, Human
ggugaguugggagcacguuccugcacguggcu

SEQ ID NO: 202679 - RNA, 23 nt, Human
ggugaguuuugccagccauggcc

SEQ ID NO: 202680 - RNA, 32 nt, Human
ggugaguuuuggccuuggcaugguuggcaugg

SEQ ID NO: 202681 - RNA, 32 nt, Human
ggugauaaaaagagcacucuugagugggugcc

SEQ ID NO: 202682 - RNA, 32 nt, Human
ggugauaauaaaaacuugucugugauauggug

SEQ ID NO: 202683 - RNA, 32 nt, Human
ggugauaaucuccccuuccucuucuugaugga

SEQ ID NO: 202684 - RNA, 32 nt, Human
ggugauaauggucuuccuggaagaaaaggaga

SEQ ID NO: 202685 - RNA, 32 nt, Human
ggugauaccucaccccuguaaucccagcacuu

SEQ ID NO: 202686 - RNA, 32 nt, Human
ggugauacuguacuccagccugagcaacagag

SEQ ID NO: 202687 - RNA, 32 nt, Human
ggugauacuucugcugguuucuuuaccuucug

SEQ ID NO: 202688 - RNA, 22 nt, Human
ggugauagagcaagacucuguc

SEQ ID NO: 202689 - RNA, 32 nt, Human
ggugauaggcuuccacacaggucuccagaagc

SEQ ID NO: 202690 - RNA, 32 nt, Human
ggugauagggucucgcucugucaccaggcugg

SEQ ID NO: 202691 - RNA, 32 nt, Human
ggugauauuuaauaugcauguauguaucuaaa

SEQ ID NO: 202692 - RNA, 32 nt, Human
ggugaucaagccugcucaggugaccccacuca

SEQ ID NO: 202693 - RNA, 32 nt, Human
ggugaucagauaagcuccagcccaaauggaac

SEQ ID NO: 202694 - RNA, 32 nt, Human
ggugaucagaugcagaagcauuacacaguggc

SEQ ID NO: 202695 - RNA, 18 nt, Human
ggugaucagcaggggcag

SEQ ID NO: 202696 - RNA, 32 nt, Human
ggugaucaucuugucccuucucugccuuagug

SEQ ID NO: 202697 - RNA, 32 nt, Human
ggugaucauucgagagcagacagaaggggagu

SEQ ID NO: 202698 - RNA, 22 nt, Human
ggugauccacaugacucugccu

SEQ ID NO: 202699 - RNA, 20 nt, Human
ggugauccacccaccuucca

SEQ ID NO: 202700 - RNA, 32 nt, Human
ggugaucccagccagggccccgagcgcagagg

SEQ ID NO: 202701 - RNA, 32 nt, Human
ggugauccccuccuggugguaacagcacaccu

SEQ ID NO: 202702 - RNA, 32 nt, Human
ggugauccgcuggccucggccucccagagugc

SEQ ID NO: 202703 - RNA, 32 nt, Human
ggugaucgccuauuacugacagucucauugua

SEQ ID NO: 202704 - RNA, 32 nt, Human
ggugaucugcauuuucauaauaaaguguccua

SEQ ID NO: 202705 - RNA, 32 nt, Human
ggugaucugcccuccuuggccucccagagugc

SEQ ID NO: 202706 - RNA, 32 nt, Human
ggugaucugccgaccagaggccuuaaacucug

SEQ ID NO: 202707 - RNA, 32 nt, Human
ggugaucugccugccuuggccucccagauugc

SEQ ID NO: 202708 - RNA, 32 nt, Human
ggugaucuucccacucagacuccugcguagcu

SEQ ID NO: 202709 - RNA, 32 nt, Human
ggugaugaacuccaagcugggcuuggacgugg

SEQ ID NO: 202710 - RNA, 32 nt, Human
ggugaugacaucugccaccucugccacuaccc

SEQ ID NO: 202711 - RNA, 32 nt, Human
ggugaugacuccuacaucuaaguggccccucc

SEQ ID NO: 202712 - RNA, 29 nt, Human
ggugaugagacacccuagggaaaucacuc

SEQ ID NO: 202713 - RNA, 32 nt, Human
ggugaugaggaagugggagcucagggaggacc

SEQ ID NO: 202714 - RNA, 32 nt, Human
ggugaugaugcgcaggucucauugguuucauu

SEQ ID NO: 202715 - RNA, 32 nt, Human
ggugaugcacagaugucacugggaaacccaaa

SEQ ID NO: 202716 - RNA, 32 nt, Human
ggugaugcacugugcccagccauuccaggauu

SEQ ID NO: 202717 - RNA, 19 nt, Human
ggugaugccagggauucca

SEQ ID NO: 202718 - RNA, 32 nt, Human
ggugaugccuaacuuuuccagcaaagaugaug

SEQ ID NO: 202719 - RNA, 32 nt, Human
ggugaugcucaggcucugccaccgucggcaac

SEQ ID NO: 202720 - RNA, 32 nt, Human
ggugaugcugagaagcagagggcgcccucaga

SEQ ID NO: 202721 - RNA, 29 nt, Human
ggugaugcugccucucuguggaucccugg

SEQ ID NO: 202722 - RNA, 32 nt, Human
ggugaugcuguuguugcuggucuagagacuau

SEQ ID NO: 202723 - RNA, 32 nt, Human
ggugaugcuuguuugcaaauugcccacucgug

SEQ ID NO: 202724 - RNA, 32 nt, Human
ggugauggaaucaaaaagaacuucuccauccu

SEQ ID NO: 202725 - RNA, 32 nt, Human
ggugauggcagccauggacacaggccagagag

SEQ ID NO: 202726 - RNA, 32 nt, Human
ggugauggcugcaguccaguuuugugaugcug

SEQ ID NO: 202727 - RNA, 32 nt, Human
ggugauggggcagggcugggucucaguauccu

SEQ ID NO: 202728 - RNA, 32 nt, Human
ggugaugguauuugaagguagggccuuuagga

SEQ ID NO: 202729 - RNA, 32 nt, Human
ggugauggucccauuaaacuuccacucugcaa

SEQ ID NO: 202730 - RNA, 32 nt, Human
ggugauguauuuuugucuucuuccccuuugcc

SEQ ID NO: 202731 - RNA, 32 nt, Human
ggugaugucuguaaucccagcaguuugcaaac

SEQ ID NO: 202732 - RNA, 32 nt, Human
ggugaugugagucugggcugggccacaggucc

SEQ ID NO: 202733 - RNA, 32 nt, Human
ggugauguuaccacagucccauuugucugcag

SEQ ID NO: 202734 - RNA, 32 nt, Human
ggugauuaaagaaaauuacucuucaagacuga

SEQ ID NO: 202735 - RNA, 32 nt, Human
ggugauucauggcucugugaauuugaggugaa

SEQ ID NO: 202736 - RNA, 32 nt, Human
ggugauucauuugcagcaaaauacuggcuugu

SEQ ID NO: 202737 - RNA, 32 nt, Human
ggugauucucaccucugccugcuuaugugggg

SEQ ID NO: 202738 - RNA, 32 nt, Human
ggugauucucuucuaugccucucuccaacgcc

SEQ ID NO: 202739 - RNA, 32 nt, Human
ggugauugcugcugggaugguggugaaugacu

SEQ ID NO: 202740 - RNA, 32 nt, Human
ggugauuggcugcugcagcccacccccuagcc

SEQ ID NO: 202741 - RNA, 32 nt, Human
ggugauugguccugcugccaucucacugauga

SEQ ID NO: 202742 - RNA, 32 nt, Human
ggugauugugccacugcacuccagccugggcg

SEQ ID NO: 202743 - RNA, 18 nt, Human
ggugauuuaugcccugaa

SEQ ID NO: 202744 - RNA, 32 nt, Human
ggugauuucuauuuucuucuguauacuuuucu

SEQ ID NO: 202745 - RNA, 32 nt, Human
ggugauuucugauuuugacaugaccuugagca

SEQ ID NO: 202746 - RNA, 32 nt, Human
ggugauuugugaaacaguugcugugaacuuuc

SEQ ID NO: 202747 - RNA, 19 nt, Human
ggugcaaacacagcucucu

SEQ ID NO: 202748 - RNA, 19 nt, Human
ggugcaaacauagcucccu

SEQ ID NO: 202749 - RNA, 32 nt, Human
ggugcaaaccuccagccccugcccguuucucu

SEQ ID NO: 202750 - RNA, 32 nt, Human
ggugcaaagacccugagguugaaguguccugg

SEQ ID NO: 202751 - RNA, 32 nt, Human
ggugcaaaggaaaggugggugagggaagcaga

SEQ ID NO: 202752 - RNA, 32 nt, Human
ggugcaacccacagcaaagcccugaccugacc

SEQ ID NO: 202753 - RNA, 32 nt, Human
ggugcaacgggggccucacagcacagagugac

SEQ ID NO: 202754 - RNA, 32 nt, Human
ggugcaacgguucagaacagcaaccaaauaaa

SEQ ID NO: 202755 - RNA, 32 nt, Human
ggugcaacuucuaagaguuuuccuguaaguaa

SEQ ID NO: 202756 - RNA, 32 nt, Human
ggugcaacuucugcuucauucucucuuugacu

SEQ ID NO: 202757 - RNA, 32 nt, Human
ggugcaagaaaauuuauguucucacaaaacua

SEQ ID NO: 202758 - RNA, 22 nt, Human
ggugcaagagacagagccccca

SEQ ID NO: 202759 - RNA, 32 nt, Human
ggugcaagcgaacuuagugacuccuugaggug

SEQ ID NO: 202760 - RNA, 32 nt, Human
ggugcaaggcuggagaaugggguaugauggcu

SEQ ID NO: 202761 - RNA, 32 nt, Human
ggugcaagggccucuuucaaaaugaacccacu

SEQ ID NO: 202762 - RNA, 32 nt, Human
ggugcaagucucccccugcaccccucccccag

SEQ ID NO: 202763 - RNA, 24 nt, Human
ggugcaagugauuguccugccuca

SEQ ID NO: 202764 - RNA, 32 nt, Human
ggugcaagugguagggacaagcagugaggugg

SEQ ID NO: 202765 - RNA, 20 nt, Human
ggugcaaguguagcauguca

SEQ ID NO: 202766 - RNA, 32 nt, Human
ggugcaauaagaauuuagggagaaauguuguu

SEQ ID NO: 202767 - RNA, 32 nt, Human
ggugcaaucucacugcaagcucugccucccag

SEQ ID NO: 202768 - RNA, 32 nt, Human
ggugcaaugacugcagcaccuccugggcuuac

SEQ ID NO: 202769 - RNA, 32 nt, Human
ggugcaaugggggagcuggcagaggagagaga

SEQ ID NO: 202770 - RNA, 32 nt, Human
ggugcaauguucuugagagguggggaccuaau

SEQ ID NO: 202771 - RNA, 32 nt, Human
ggugcacacagcaggugcagugcugucaccug

SEQ ID NO: 202772 - RNA, 32 nt, Human
ggugcacacaucugucccauguaugcagugag

SEQ ID NO: 202773 - RNA, 32 nt, Human
ggugcacaccuguaaucccagcuacucaggag

SEQ ID NO: 202774 - RNA, 32 nt, Human
ggugcacaccuguaaucccagcuacucgggag

SEQ ID NO: 202775 - RNA, 32 nt, Human
ggugcacaccuguaaucccagcuacuugggag

SEQ ID NO: 202776 - RNA, 32 nt, Human
ggugcacaccuguaaucccaguuacucaggag

SEQ ID NO: 202777 - RNA, 32 nt, Human
ggugcacagcaagacugauaaccacagugucc

SEQ ID NO: 202778 - RNA, 32 nt, Human
ggugcacaggacaaauaaaaacaaauaauuuc

SEQ ID NO: 202779 - RNA, 32 nt, Human
ggugcacaggucccucccaccugggcccuggg

SEQ ID NO: 202780 - RNA, 32 nt, Human
ggugcacaucuguaaucccaguuacuugggag

SEQ ID NO: 202781 - RNA, 32 nt, Human
ggugcaccacugccgucauuucagcuucuggc

SEQ ID NO: 202782 - RNA, 32 nt, Human
ggugcaccacugcgugaccuccaggcagccac

SEQ ID NO: 202783 - RNA, 32 nt, Human
ggugcaccaucuuccuccauuugacuuuuuaa

SEQ ID NO: 202784 - RNA, 32 nt, Human
ggugcaccauuaauaaccagcacuaguccaac

SEQ ID NO: 202785 - RNA, 32 nt, Human
ggugcacccaggcugcagggugaggccaggca

SEQ ID NO: 202786 - RNA, 32 nt, Human
ggugcacccugaccccauucagcagaaauugc

SEQ ID NO: 202787 - RNA, 32 nt, Human
ggugcaccgucuuccuccauuugacuuuuuaa

SEQ ID NO: 202788 - RNA, 32 nt, Human
ggugcaccugcuuugaaaaacaguuuggcagu

SEQ ID NO: 202789 - RNA, 18 nt, Human
ggugcaccuguaguccca

SEQ ID NO: 202790 - RNA, 32 nt, Human
ggugcacgccuguaacccagcuacucaggagg

SEQ ID NO: 202791 - RNA, 32 nt, Human
ggugcacgccuguaaucccagcuacucaggag

SEQ ID NO: 202792 - RNA, 32 nt, Human
ggugcacgccuguaaucccagcuacucgggag

SEQ ID NO: 202793 - RNA, 32 nt, Human
ggugcacgccuguaauccccagauacucggga

SEQ ID NO: 202794 - RNA, 32 nt, Human
ggugcacgccuguaaucucagcuacuugggag

SEQ ID NO: 202795 - RNA, 32 nt, Human
ggugcacgccugugaucccagcuacucgggag

SEQ ID NO: 202796 - RNA, 32 nt, Human
ggugcacgccuuuaaucccagcuacucgggag

SEQ ID NO: 202797 - RNA, 32 nt, Human
ggugcacgcuuguaaucccagcuacucaggag

SEQ ID NO: 202798 - RNA, 32 nt, Human
ggugcacgucuguaaucccagcugcucgggag

SEQ ID NO: 202799 - RNA, 32 nt, Human
ggugcacuaagccguagcggcagcagcagcca

SEQ ID NO: 202800 - RNA, 32 nt, Human
ggugcacuacagccucuuuccccgugucccgu

SEQ ID NO: 202801 - RNA, 32 nt, Human
ggugcacucagcugcacugcccagagcuguga

SEQ ID NO: 202802 - RNA, 32 nt, Human
ggugcacucagcugcccagggccucugggaca

SEQ ID NO: 202803 - RNA, 32 nt, Human
ggugcacuccuguaaucccagcuacucagaag

SEQ ID NO: 202804 - RNA, 32 nt, Human
ggugcagaagcagcaggaggcacuugaggagc

SEQ ID NO: 202805 - RNA, 32 nt, Human
ggugcagaagugaccgcggagacucugcuuca

SEQ ID NO: 202806 - RNA, 32 nt, Human
ggugcagaccaaacuuuaacaccuuuagccuu

SEQ ID NO: 202807 - RNA, 32 nt, Human
ggugcagacccaugggauccaaagggaaguug

SEQ ID NO: 202808 - RNA, 32 nt, Human
ggugcagacguggaacgcggaggcagggagag

SEQ ID NO: 202809 - RNA, 19 nt, Human
ggugcagacguuuaaccca

SEQ ID NO: 202810 - RNA, 32 nt, Human
ggugcagacugccccgugcucuggcuugcagc

SEQ ID NO: 202811 - RNA, 27 nt, Human
ggugcagagaagcuggacuucuguggg

SEQ ID NO: 202812 - RNA, 22 nt, Human
ggugcagagcaagacucugucu

SEQ ID NO: 202813 - RNA, 32 nt, Human
ggugcagcacuuccagcgggacacgcugugcg

SEQ ID NO: 202814 - RNA, 32 nt, Human
ggugcagcagagacccagguggcuguggggug

SEQ ID NO: 202815 - RNA, 32 nt, Human
ggugcagcagagccgagccggccgcgcuccga

SEQ ID NO: 202816 - RNA, 32 nt, Human
ggugcagcaggcggcgggaugcggcggggcgg

SEQ ID NO: 202817 - RNA, 32 nt, Human
ggugcagcagugagcaaaacucuugccccacg

SEQ ID NO: 202818 - RNA, 20 nt, Human
ggugcagcaguggaacaucu

SEQ ID NO: 202819 - RNA, 32 nt, Human
ggugcagccagccugcuccgagcuccccugca

SEQ ID NO: 202820 - RNA, 32 nt, Human
ggugcagccagcugcucagagagaccuggccu

SEQ ID NO: 202821 - RNA, 32 nt, Human
ggugcagcccagcagccuggagaugucagcac

SEQ ID NO: 202822 - RNA, 32 nt, Human
ggugcagcccagggucaggcccuucagagcca

SEQ ID NO: 202823 - RNA, 26 nt, Human
ggugcagcccccggcauugaccuccu

SEQ ID NO: 202824 - RNA, 32 nt, Human
ggugcagccccuggcagacugacaguguggcc

SEQ ID NO: 202825 - RNA, 20 nt, Human
ggugcagcccucgaccuccu

SEQ ID NO: 202826 - RNA, 32 nt, Human
ggugcagccgcugcucaaagaaaaugaacggc

SEQ ID NO: 202827 - RNA, 32 nt, Human
ggugcagccguuuuggaaaauagccuggcauu

SEQ ID NO: 202828 - RNA, 18 nt, Human
ggugcagccuagccuccu

SEQ ID NO: 202829 - RNA, 32 nt, Human
ggugcagcggacuugcuccagccugggugagg

SEQ ID NO: 202830 - RNA, 32 nt, Human
ggugcagcuccugucugcuuucccucgccucc

SEQ ID NO: 202831 - RNA, 32 nt, Human
ggugcagcugaccucccuccccuugugcagac

SEQ ID NO: 202832 - RNA, 32 nt, Human
ggugcaggaagcuucaucugaagauguccugg

SEQ ID NO: 202833 - RNA, 32 nt, Human
ggugcaggagaacagcucugugauaccauuua

SEQ ID NO: 202834 - RNA, 32 nt, Human
ggugcaggagccaagaccugaggguggaagug

SEQ ID NO: 202835 - RNA, 18 nt, Human
ggugcaggccaaccucuu

SEQ ID NO: 202836 - RNA, 19 nt, Human
ggugcaggccaccaugccc

SEQ ID NO: 202837 - RNA, 32 nt, Human
ggugcaggccuguaaucccagcuacucgggag

SEQ ID NO: 202838 - RNA, 32 nt, Human
ggugcaggcugcauggccgggcggggcggugu

SEQ ID NO: 202839 - RNA, 32 nt, Human
ggugcaggcuuagucuuaagccuccaaaggcc

SEQ ID NO: 202840 - RNA, 32 nt, Human
ggugcagggaagcacuccacacccucacccag

SEQ ID NO: 202841 - RNA, 32 nt, Human
ggugcagggacuucccuuugcaagggguaaca

SEQ ID NO: 202842 - RNA, 32 nt, Human
ggugcagggagggagaggcaggggagagagaa

SEQ ID NO: 202843 - RNA, 32 nt, Human
ggugcagggcagcagggcagccagugaaccac

SEQ ID NO: 202844 - RNA, 32 nt, Human
ggugcagggcagcagggggcacagugaagugc

SEQ ID NO: 202845 - RNA, 32 nt, Human
ggugcagggccuucccggggagccacagaauc

SEQ ID NO: 202846 - RNA, 32 nt, Human
ggugcagggcuagacacgaagcuuaaacuauu

SEQ ID NO: 202847 - RNA, 32 nt, Human
ggugcaggggaggggcgggagguggagcaggg

SEQ ID NO: 202848 - RNA, 32 nt, Human
ggugcaggucaucacaggacggcuccugggca

SEQ ID NO: 202849 - RNA, 22 nt, Human
ggugcaguagcucaugccugua

SEQ ID NO: 202850 - RNA, 32 nt, Human
ggugcaguaggugcaggugagcacaggugcag

SEQ ID NO: 202851 - RNA, 32 nt, Human
ggugcaguaguguggaguggaugaguguucca

SEQ ID NO: 202852 - RNA, 32 nt, Human
ggugcagucacuucuguaggcuucaagaggcu

SEQ ID NO: 202853 - RNA, 32 nt, Human
ggugcaguccaggaguauggaguagggcagaa

SEQ ID NO: 202854 - RNA, 32 nt, Human
ggugcaguccugcaccuuucucccucucugga

SEQ ID NO: 202855 - RNA, 32 nt, Human
ggugcagucgggaagggagaugugacggauga

SEQ ID NO: 202856 - RNA, 32 nt, Human
ggugcagucuguuucuccccuagacucugggc

SEQ ID NO: 202857 - RNA, 32 nt, Human
ggugcagugagcuaugauugcaccauugcacc

SEQ ID NO: 202858 - RNA, 21 nt, Human
ggugcagugccggcccagcua

SEQ ID NO: 202859 - RNA, 19 nt, Human
ggugcagugcguucauuca

SEQ ID NO: 202860 - RNA, 23 nt, Human
ggugcagugcugucaccuggcug

SEQ ID NO: 202861 - RNA, 22 nt, Human
ggugcagugcuguguguaucua

SEQ ID NO: 202862 - RNA, 19 nt, Human
ggugcaguggcagcgggag

SEQ ID NO: 202863 - RNA, 22 nt, Human
ggugcaguggcccaugccugua

SEQ ID NO: 202864 - RNA, 22 nt, Human
ggugcaguggcucacaccugua

SEQ ID NO: 202865 - RNA, 22 nt, Human
ggugcaguggcucacaccugug

SEQ ID NO: 202866 - RNA, 22 nt, Human
ggugcaguggcucacaucugua

SEQ ID NO: 202867 - RNA, 22 nt, Human
ggugcaguggcucacgccugua

SEQ ID NO: 202868 - RNA, 22 nt, Human
ggugcaguggcucacuccugua

SEQ ID NO: 202869 - RNA, 22 nt, Human
ggugcaguggcucaggccugua

SEQ ID NO: 202870 - RNA, 22 nt, Human
ggugcaguggcucaugccugua

SEQ ID NO: 202871 - RNA, 32 nt, Human
ggugcaguggcucgccuguaaucccagcacuu

SEQ ID NO: 202872 - RNA, 22 nt, Human
ggugcaguggcuuacaccugua

SEQ ID NO: 202873 - RNA, 22 nt, Human
ggugcagugguucaugccugua

SEQ ID NO: 202874 - RNA, 22 nt, Human
ggugcagugugcuguccagaga

SEQ ID NO: 202875 - RNA, 32 nt, Human
ggugcaguuggaauagccaccugcugagcuuu

SEQ ID NO: 202876 - RNA, 32 nt, Human
ggugcauacccccagcgugguuuuggagaugg

SEQ ID NO: 202877 - RNA, 32 nt, Human
ggugcauaccuguaaucccagcuacucgggaa

SEQ ID NO: 202878 - RNA, 32 nt, Human
ggugcauauaccacugccccgcugcaggcuga

SEQ ID NO: 202879 - RNA, 21 nt, Human
ggugcaucaagaguuuuuuca

SEQ ID NO: 202880 - RNA, 32 nt, Human
ggugcaucacuugaggccaggaguucgagacc

SEQ ID NO: 202881 - RNA, 32 nt, Human
ggugcauccacgcacccccacccugggacuuu

SEQ ID NO: 202882 - RNA, 32 nt, Human
ggugcauccacucagggcagccaguguuggug

SEQ ID NO: 202883 - RNA, 32 nt, Human
ggugcaucucuuuuaaggauugguaauuacgc

SEQ ID NO: 202884 - RNA, 32 nt, Human
ggugcaugauacaaggagagguugucaucugg

SEQ ID NO: 202885 - RNA, 32 nt, Human
ggugcaugccaguaaucccagcuacuugggag

SEQ ID NO: 202886 - RNA, 32 nt, Human
ggugcaugcccguaaucccagcuacucgggag

SEQ ID NO: 202887 - RNA, 32 nt, Human
ggugcaugccgggacggcgguggguggugcau

SEQ ID NO: 202888 - RNA, 32 nt, Human
ggugcaugccgggcauagcacaugugucccug

SEQ ID NO: 202889 - RNA, 20 nt, Human
ggugcaugccuauaauccca

SEQ ID NO: 202890 - RNA, 32 nt, Human
ggugcaugccuauaaucccagcuacucaggag

SEQ ID NO: 202891 - RNA, 32 nt, Human
ggugcaugccuauaaucccagguacuugggag

SEQ ID NO: 202892 - RNA, 32 nt, Human
ggugcaugccugaaaucccagcuacuugggag

SEQ ID NO: 202893 - RNA, 32 nt, Human
ggugcaugccugcaaucccagcuacucagagg

SEQ ID NO: 202894 - RNA, 32 nt, Human
ggugcaugccuggaaucccagcuacuugagag

SEQ ID NO: 202895 - RNA, 32 nt, Human
ggugcaugccuguaaccccagcuacucgggaa

SEQ ID NO: 202896 - RNA, 32 nt, Human
ggugcaugccuguaacuccagauacuugggau

SEQ ID NO: 202897 - RNA, 32 nt, Human
ggugcaugccuguaauccaagauacucaggag

SEQ ID NO: 202898 - RNA, 32 nt, Human
ggugcaugccuguaauccagcuacuugggagg

SEQ ID NO: 202899 - RNA, 20 nt, Human
ggugcaugccuguaauccca

SEQ ID NO: 202900 - RNA, 32 nt, Human
ggugcaugccuguaaucccacuacuggggugg

SEQ ID NO: 202901 - RNA, 32 nt, Human
ggugcaugccuguaaucccagccacucaggag

SEQ ID NO: 202902 - RNA, 32 nt, Human
ggugcaugccuguaaucccagcuacccugaag

SEQ ID NO: 202903 - RNA, 32 nt, Human
ggugcaugccuguaaucccagcuacuagggag

SEQ ID NO: 202904 - RNA, 32 nt, Human
ggugcaugccuguaaucccagcuacucaggag

SEQ ID NO: 202905 - RNA, 32 nt, Human
ggugcaugccuguaaucccagcuacucgggag

SEQ ID NO: 202906 - RNA, 32 nt, Human
ggugcaugccuguaaucccagcuacucuggag

SEQ ID NO: 202907 - RNA, 32 nt, Human
ggugcaugccuguaaucccagcuacuuggaag

SEQ ID NO: 202908 - RNA, 32 nt, Human
ggugcaugccuguaaucccagcuacuugggag

SEQ ID NO: 202909 - RNA, 32 nt, Human
ggugcaugccuguaaucccagcugcucaggag

SEQ ID NO: 202910 - RNA, 32 nt, Human
ggugcaugccuguaaucccagcugcuggggag

SEQ ID NO: 202911 - RNA, 32 nt, Human
ggugcaugccuguaaucccagcugcuugggag

SEQ ID NO: 202912 - RNA, 32 nt, Human
ggugcaugccuguaaucccagcuucuugggag

SEQ ID NO: 202913 - RNA, 32 nt, Human
ggugcaugccuguaaucccaguuacucaggag

SEQ ID NO: 202914 - RNA, 32 nt, Human
ggugcaugccuguaaucccaguuacuccagag

SEQ ID NO: 202915 - RNA, 32 nt, Human
ggugcaugccuguaaucccugcuacuugggag

SEQ ID NO: 202916 - RNA, 32 nt, Human
ggugcaugccuguaauccuagcuacucaggag

SEQ ID NO: 202917 - RNA, 32 nt, Human
ggugcaugccuguaauccuagcuacucgggag

SEQ ID NO: 202918 - RNA, 32 nt, Human
ggugcaugccuguaauccuagcugcuugggug

SEQ ID NO: 202919 - RNA, 32 nt, Human
ggugcaugccuguaaucucagcuacucgggag

SEQ ID NO: 202920 - RNA, 32 nt, Human
ggugcaugccuguaaucucagcuacuugggag

SEQ ID NO: 202921 - RNA, 32 nt, Human
ggugcaugccuguaaucucagcugcuccggag

SEQ ID NO: 202922 - RNA, 32 nt, Human
ggugcaugccuguaauuccagcggcuuggaag

SEQ ID NO: 202923 - RNA, 32 nt, Human
ggugcaugccuguagucacagcuacuugggag

SEQ ID NO: 202924 - RNA, 32 nt, Human
ggugcaugccuguagucccaacuacucaggag

SEQ ID NO: 202925 - RNA, 32 nt, Human
ggugcaugccuguagucccagcuacucaggag

SEQ ID NO: 202926 - RNA, 32 nt, Human
ggugcaugccuguagucccagcuacucgggag

SEQ ID NO: 202927 - RNA, 32 nt, Human
ggugcaugccuguagucccagcuacucuggag

SEQ ID NO: 202928 - RNA, 32 nt, Human
ggugcaugccuguagucccagcuacuugagug

SEQ ID NO: 202929 - RNA, 32 nt, Human
ggugcaugccuguagucccagcuacuugggag

SEQ ID NO: 202930 - RNA, 32 nt, Human
ggugcaugccuguagucccagcuacuugggau

SEQ ID NO: 202931 - RNA, 32 nt, Human
ggugcaugccuguagucccagcugcucaggag

SEQ ID NO: 202932 - RNA, 32 nt, Human
ggugcaugccuguagucccagguacucaggag

SEQ ID NO: 202933 - RNA, 32 nt, Human
ggugcaugccuguagucccgguuacucgggag

SEQ ID NO: 202934 - RNA, 32 nt, Human
ggugcaugccuguaguccuagcuauuugggag

SEQ ID NO: 202935 - RNA, 32 nt, Human
ggugcaugccuguagucucagcuacucaggag

SEQ ID NO: 202936 - RNA, 32 nt, Human
ggugcaugccuguaguuccagcuacucaggac

SEQ ID NO: 202937 - RNA, 32 nt, Human
ggugcaugccuguaguuccagcuacucaggag

SEQ ID NO: 202938 - RNA, 32 nt, Human
ggugcaugccuguaguuccagcuacuugggag

SEQ ID NO: 202939 - RNA, 32 nt, Human
ggugcaugccuguaguugcagcuacucauggg

SEQ ID NO: 202940 - RNA, 32 nt, Human
ggugcaugccuguaucccagcuacuugggagg

SEQ ID NO: 202941 - RNA, 32 nt, Human
ggugcaugccuguauucccagcuacucaggag

SEQ ID NO: 202942 - RNA, 32 nt, Human
ggugcaugccuguauucucagcuacucgggag

SEQ ID NO: 202943 - RNA, 32 nt, Human
ggugcaugccugucauccaagcuacucaagag

SEQ ID NO: 202944 - RNA, 32 nt, Human
ggugcaugccugucaucccagcuacuccagag

SEQ ID NO: 202945 - RNA, 32 nt, Human
ggugcaugccugugaucccaacuacucgggag

SEQ ID NO: 202946 - RNA, 32 nt, Human
ggugcaugccugugauccuagcugcuggggag

SEQ ID NO: 202947 - RNA, 32 nt, Human
ggugcaugccugugauccuggcuacuucagag

SEQ ID NO: 202948 - RNA, 32 nt, Human
ggugcaugccugugauuccagcuacuugggag

SEQ ID NO: 202949 - RNA, 32 nt, Human
ggugcaugccuguggucccagcuacucaggag

SEQ ID NO: 202950 - RNA, 32 nt, Human
ggugcaugccuguggucccagcuacuugggag

SEQ ID NO: 202951 - RNA, 32 nt, Human
ggugcaugccuguggucucagcuacuugggag

SEQ ID NO: 202952 - RNA, 32 nt, Human
ggugcaugccuguugucccagcuacucaggag

SEQ ID NO: 202953 - RNA, 32 nt, Human
ggugcaugcuuauaaucccagcuacuugggag

SEQ ID NO: 202954 - RNA, 32 nt, Human
ggugcaugcuuguaaucccagcuacucagaag

SEQ ID NO: 202955 - RNA, 32 nt, Human
ggugcaugcuuguaauccuagcuacucaagag

SEQ ID NO: 202956 - RNA, 32 nt, Human
ggugcauggacucguaaagcugcuagggcccc

SEQ ID NO: 202957 - RNA, 32 nt, Human
ggugcauggagaaaaaggaagacccguacucu

SEQ ID NO: 202958 - RNA, 21 nt, Human
ggugcauggggcaggcgggag

SEQ ID NO: 202959 - RNA, 32 nt, Human
ggugcauguauaccuguguaacaaaccugcau

SEQ ID NO: 202960 - RNA, 32 nt, Human
ggugcaugucacagagagacaguucucaguca

SEQ ID NO: 202961 - RNA, 32 nt, Human
ggugcaugucagaugaucauauccaauucaua

SEQ ID NO: 202962 - RNA, 19 nt, Human
ggugcaugugccacacuca

SEQ ID NO: 202963 - RNA, 32 nt, Human
ggugcauuaaggagcucauggaagaugaggca

SEQ ID NO: 202964 - RNA, 32 nt, Human
ggugcauucuguuuccucuugaucucaaagca

SEQ ID NO: 202965 - RNA, 32 nt, Human
ggugcauugccuguagucccagcuacuuggga

SEQ ID NO: 202966 - RNA, 32 nt, Human
ggugcauugugccaccagcaggccacagcugu

SEQ ID NO: 202967 - RNA, 22 nt, Human
ggugccaaaaauacacgucuuu

SEQ ID NO: 202968 - RNA, 19 nt, Human
ggugccaaauggagugaag

SEQ ID NO: 202969 - RNA, 18 nt, Human
ggugccaaccagcuguca

SEQ ID NO: 202970 - RNA, 32 nt, Human
ggugccaagaaugagcacuguacuguggcagu

SEQ ID NO: 202971 - RNA, 32 nt, Human
ggugccaaggaaaugaggauggaggaaggaau

SEQ ID NO: 202972 - RNA, 32 nt, Human
ggugccaaggagaaaaauggccaguuaggauc

SEQ ID NO: 202973 - RNA, 32 nt, Human
ggugccaaugcauuccagccuggaugauggag

SEQ ID NO: 202974 - RNA, 32 nt, Human
ggugccaaugugcccuggcaccccugcagagg

SEQ ID NO: 202975 - RNA, 32 nt, Human
ggugccaauuucuuuuccuccuggggcauccu

SEQ ID NO: 202976 - RNA, 22 nt, Human
ggugccacaggcagcccuggga

SEQ ID NO: 202977 - RNA, 32 nt, Human
ggugccacagggcgggguucaggcugggguau

SEQ ID NO: 202978 - RNA, 32 nt, Human
ggugccaccaccaaagcacucuucccacccua

SEQ ID NO: 202979 - RNA, 20 nt, Human
ggugccaccaggcccaggga

SEQ ID NO: 202980 - RNA, 32 nt, Human
ggugccacccacugcacuggggccagcuggga

SEQ ID NO: 202981 - RNA, 32 nt, Human
ggugccacccucgccucacagccccggccccc

SEQ ID NO: 202982 - RNA, 32 nt, Human
ggugccacccucucccugccaggggccugggg

SEQ ID NO: 202983 - RNA, 23 nt, Human
ggugccaccggguuccccagggg

SEQ ID NO: 202984 - RNA, 32 nt, Human
ggugccacuacacuccagccuggguaaaagag

SEQ ID NO: 202985 - RNA, 32 nt, Human
ggugccacugcacuccaaccugggggacagag

SEQ ID NO: 202986 - RNA, 32 nt, Human
ggugccacugcacuccagaugaguacagaaga

SEQ ID NO: 202987 - RNA, 32 nt, Human
ggugccacugcacuccagccuaggugacagag

SEQ ID NO: 202988 - RNA, 32 nt, Human
ggugccacugcacuccagccuggcgacagagc

SEQ ID NO: 202989 - RNA, 32 nt, Human
ggugccacugcacuccagccugggcaacagag

SEQ ID NO: 202990 - RNA, 32 nt, Human
ggugccacugcacuccagccugggcgaaagag

SEQ ID NO: 202991 - RNA, 32 nt, Human
ggugccacugcacuccagccugggggacagag

SEQ ID NO: 202992 - RNA, 32 nt, Human
ggugccacugcacuccagccugggugacagag

SEQ ID NO: 202993 - RNA, 32 nt, Human
ggugccacugcacuccagccuggguggcagag

SEQ ID NO: 202994 - RNA, 32 nt, Human
ggugccacugcacuccagcuuaggugacagag

SEQ ID NO: 202995 - RNA, 32 nt, Human
ggugccacugcacuccagcuugggugacagag

SEQ ID NO: 202996 - RNA, 32 nt, Human
ggugccacugcacuccaguauggaugacauag

SEQ ID NO: 202997 - RNA, 32 nt, Human
ggugccacugcacuccagucugggcaacagag

SEQ ID NO: 202998 - RNA, 32 nt, Human
ggugccacugcacucuaaccugggcgacagag

SEQ ID NO: 202999 - RNA, 32 nt, Human
ggugccacugcacuucagccugggcaacagag

SEQ ID NO: 203000 - RNA, 32 nt, Human
ggugccacugcauuccagccugggcaacagag

SEQ ID NO: 203001 - RNA, 32 nt, Human
ggugccacugcauuccagccugggugacagaa

SEQ ID NO: 203002 - RNA, 24 nt, Human
ggugccacugccuguggguugcug

SEQ ID NO: 203003 - RNA, 32 nt, Human
ggugccacugcgcuccagccugggggaggggg

SEQ ID NO: 203004 - RNA, 32 nt, Human
ggugccacuggacuccagccugggagacagaa

SEQ ID NO: 203005 - RNA, 23 nt, Human
ggugccacuguaagguucucuca

SEQ ID NO: 203006 - RNA, 32 nt, Human
ggugccacuguacuccagccugggugauagga

SEQ ID NO: 203007 - RNA, 32 nt, Human
ggugccacuguaguccggccugggcaacagau

SEQ ID NO: 203008 - RNA, 32 nt, Human
ggugccagaacacgcagcugcccacacgcaag

SEQ ID NO: 203009 - RNA, 32 nt, Human
ggugccagaagcagcgaggagcuucagcuucc

SEQ ID NO: 203010 - RNA, 32 nt, Human
ggugccagagggcagggagcucgccuggggag

SEQ ID NO: 203011 - RNA, 32 nt, Human
ggugccagaguccucauguggcuuggaggaaa

SEQ ID NO: 203012 - RNA, 32 nt, Human
ggugccagagugagacacagcaggacccuucc

SEQ ID NO: 203013 - RNA, 32 nt, Human
ggugccagcaggggacacagacugcaaagaga

SEQ ID NO: 203014 - RNA, 23 nt, Human
ggugccagcccccuuggcccccu

SEQ ID NO: 203015 - RNA, 32 nt, Human
ggugccagccugacugagaagaggacgcuccc

SEQ ID NO: 203016 - RNA, 32 nt, Human
ggugccagccuucuccccagugagaacaguuu

SEQ ID NO: 203017 - RNA, 32 nt, Human
ggugccagcuacuuggaaggcugagguaggag

SEQ ID NO: 203018 - RNA, 32 nt, Human
ggugccaggacugggagggaaaguccagggcc

SEQ ID NO: 203019 - RNA, 23 nt, Human
ggugccaggaguucuagaccagc

SEQ ID NO: 203020 - RNA, 32 nt, Human
ggugccaggaguucuagaccagccuggccaac

SEQ ID NO: 203021 - RNA, 32 nt, Human
ggugccaggauggugggagaacuccgcuacag

SEQ ID NO: 203022 - RNA, 32 nt, Human
ggugccaggcagugcugagagcaguggggcau

SEQ ID NO: 203023 - RNA, 32 nt, Human
ggugccagggcccaccaugucgggguaugguu

SEQ ID NO: 203024 - RNA, 32 nt, Human
ggugccagguucuccccuugagcuccugcucc

SEQ ID NO: 203025 - RNA, 32 nt, Human
ggugccagugucgccccgccuccgggguagaa

SEQ ID NO: 203026 - RNA, 32 nt, Human
ggugccaucagcaggaggcacugugaagcacc

SEQ ID NO: 203027 - RNA, 32 nt, Human
ggugccaucgcacucuagccuggggaauagag

SEQ ID NO: 203028 - RNA, 21 nt, Human
ggugccaucgggggccugcug

SEQ ID NO: 203029 - RNA, 32 nt, Human
ggugccaucuccccaugguucauguggagcca

SEQ ID NO: 203030 - RNA, 32 nt, Human
ggugccaucugaagcccccuucccagguuucu

SEQ ID NO: 203031 - RNA, 32 nt, Human
ggugccaucugucugcuucagaccaccucagg

SEQ ID NO: 203032 - RNA, 22 nt, Human
ggugccaugaccccugcuuucu

SEQ ID NO: 203033 - RNA, 32 nt, Human
ggugccaugagcugagcucagugaguggagcu

SEQ ID NO: 203034 - RNA, 32 nt, Human
ggugccauucuuaugagccaaaaguuugucau

SEQ ID NO: 203035 - RNA, 32 nt, Human
ggugccauugaacuccagucugggcuauucag

SEQ ID NO: 203036 - RNA, 32 nt, Human
ggugccauugcaggugcccccuccaggccuga

SEQ ID NO: 203037 - RNA, 32 nt, Human
ggugccauugcccuccagccugggcaagaacu

SEQ ID NO: 203038 - RNA, 32 nt, Human
ggugccauugcucuccagccugggcgacaaga

SEQ ID NO: 203039 - RNA, 32 nt, Human
ggugcccaacagccuggcaucuucuuguuucu

SEQ ID NO: 203040 - RNA, 21 nt, Human
ggugcccaaugccuguucucu

SEQ ID NO: 203041 - RNA, 32 nt, Human
ggugcccacacugccgcuccagccuuccuggc

SEQ ID NO: 203042 - RNA, 32 nt, Human
ggugcccacagccgucuggcucagggacucca

SEQ ID NO: 203043 - RNA, 32 nt, Human
ggugcccacaguuggagcccaggggccauguu

SEQ ID NO: 203044 - RNA, 21 nt, Human
ggugcccacaucagcuccuca

SEQ ID NO: 203045 - RNA, 20 nt, Human
ggugcccacaucagcuccuu

SEQ ID NO: 203046 - RNA, 32 nt, Human
ggugcccaccaccaccccuggcuaaauuugua

SEQ ID NO: 203047 - RNA, 32 nt, Human
ggugcccaccauguuugcacuuuuaauaacuc

SEQ ID NO: 203048 - RNA, 32 nt, Human
ggugcccacccagcuacuggggaggcugaguc

SEQ ID NO: 203049 - RNA, 32 nt, Human
ggugcccagcucagggcagccagguggcucau

SEQ ID NO: 203050 - RNA, 32 nt, Human
ggugcccagcugcuugggaggcugagguagga

SEQ ID NO: 203051 - RNA, 32 nt, Human
ggugcccaggacgcaugggcucugaugggaag

SEQ ID NO: 203052 - RNA, 32 nt, Human
ggugcccagguggaggugcaguggggguaagg

SEQ ID NO: 203053 - RNA, 22 nt, Human
ggugcccaguuggccuuggaaa

SEQ ID NO: 203054 - RNA, 32 nt, Human
ggugcccauccagcccaggucccaggaucccu

SEQ ID NO: 203055 - RNA, 32 nt, Human
ggugcccaucuucucucuccuagagcccauac

SEQ ID NO: 203056 - RNA, 32 nt, Human
ggugcccaugaagaggagauuggccagugaga

SEQ ID NO: 203057 - RNA, 32 nt, Human
ggugcccaugaccacaaaguguagcagccucc

SEQ ID NO: 203058 - RNA, 26 nt, Human
ggugcccauuucuugggggcuuucca

SEQ ID NO: 203059 - RNA, 32 nt, Human
ggugccccaaaggacaaucucuaaagggguaa

SEQ ID NO: 203060 - RNA, 23 nt, Human
ggugccccacacagggcucucca

SEQ ID NO: 203061 - RNA, 32 nt, Human
ggugccccaccuuuuaaagcaauuaccguaag

SEQ ID NO: 203062 - RNA, 32 nt, Human
ggugccccagagacaggagcacaagugggauc

SEQ ID NO: 203063 - RNA, 32 nt, Human
ggugccccagcacgguggugcccaagccaacc

SEQ ID NO: 203064 - RNA, 32 nt, Human
ggugccccagccgccgcccaggaccaucaagc

SEQ ID NO: 203065 - RNA, 32 nt, Human
ggugccccaggucuguuaugggcacgggcugu

SEQ ID NO: 203066 - RNA, 32 nt, Human
ggugccccaucuagcugggugcaggggucacu

SEQ ID NO: 203067 - RNA, 17 nt, Human
ggugcccccacgagugg

SEQ ID NO: 203068 - RNA, 32 nt, Human
ggugcccccuuucugccagcaguucugguucu

SEQ ID NO: 203069 - RNA, 32 nt, Human
ggugccccguuggaaagcagauauuucccgga

SEQ ID NO: 203070 - RNA, 32 nt, Human
ggugccccuccaccuuccucuggaauccaagu

SEQ ID NO: 203071 - RNA, 32 nt, Human
ggugccccuggccuggccagcagugaauguag

SEQ ID NO: 203072 - RNA, 32 nt, Human
ggugccccugugagccucgaccuugcccccuc

SEQ ID NO: 203073 - RNA, 32 nt, Human
ggugcccgccaccacaccagccuaauuuuugu

SEQ ID NO: 203074 - RNA, 20 nt, Human
ggugcccgggcccugggccc

SEQ ID NO: 203075 - RNA, 22 nt, Human
ggugcccgggcggcagcggcag

SEQ ID NO: 203076 - RNA, 16 nt, Human
ggugcccguaauccca

SEQ ID NO: 203077 - RNA, 32 nt, Human
ggugcccguagaucugggaggccaggcuggca

SEQ ID NO: 203078 - RNA, 32 nt, Human
ggugcccgucauggaagaggcggccaugcugu

SEQ ID NO: 203079 - RNA, 32 nt, Human
ggugcccgucugcugaugugcccagccugugc

SEQ ID NO: 203080 - RNA, 32 nt, Human
ggugcccucacaggccaauagggaagccgagg

SEQ ID NO: 203081 - RNA, 32 nt, Human
ggugcccucagagccaccucugccugugaucg

SEQ ID NO: 203082 - RNA, 17 nt, Human
ggugcccucggguucag

SEQ ID NO: 203083 - RNA, 32 nt, Human
ggugcccucugccucuucaccccacaagaagc

SEQ ID NO: 203084 - RNA, 32 nt, Human
ggugcccugcagcugugccaguugggccacag

SEQ ID NO: 203085 - RNA, 32 nt, Human
ggugcccugccugcccuccugguacuguuguc

SEQ ID NO: 203086 - RNA, 32 nt, Human
ggugcccugccuggccccacccaugcucaggg

SEQ ID NO: 203087 - RNA, 22 nt, Human
ggugcccuggugagagcuccuu

SEQ ID NO: 203088 - RNA, 32 nt, Human
ggugcccugucccagccccagguccugugcag

SEQ ID NO: 203089 - RNA, 32 nt, Human
ggugcccugugcagggugccaccacagccuca

SEQ ID NO: 203090 - RNA, 32 nt, Human
ggugcccuucugucuguccacgucugccuagg

SEQ ID NO: 203091 - RNA, 32 nt, Human
ggugccgagcugccucaccagggagggccuug

SEQ ID NO: 203092 - RNA, 21 nt, Human
ggugccgaugggaccaggcug

SEQ ID NO: 203093 - RNA, 32 nt, Human
ggugccgcagaggaggugggaaagacgcuuuu

SEQ ID NO: 203094 - RNA, 32 nt, Human
ggugccgcagcacugcaccagcuucgccuugc

SEQ ID NO: 203095 - RNA, 32 nt, Human
ggugccgcaggcugggcuugcuaauaaagacc

SEQ ID NO: 203096 - RNA, 32 nt, Human
ggugccgcauuccugcacucagaagucugcag

SEQ ID NO: 203097 - RNA, 32 nt, Human
ggugccgccugcccgucucucucccauggagc

SEQ ID NO: 203098 - RNA, 32 nt, Human
ggugccgcuccagcuacucaggaggcugaggc

SEQ ID NO: 203099 - RNA, 32 nt, Human
ggugccgcugucaggagcagagccaggcccag

SEQ ID NO: 203100 - RNA, 32 nt, Human
ggugccggagccggagcggggagccaggcugc

SEQ ID NO: 203101 - RNA, 32 nt, Human
ggugccggaggcaggguucgggugcguagucg

SEQ ID NO: 203102 - RNA, 32 nt, Human
ggugccggcaucuccccuagcucaccaggccu

SEQ ID NO: 203103 - RNA, 32 nt, Human
ggugccggcggcccggagcagcgcggcccgcg

SEQ ID NO: 203104 - RNA, 32 nt, Human
ggugccggcugaggcagaggagaaacuauggg

SEQ ID NO: 203105 - RNA, 21 nt, Human
ggugccgggacuccggccgca

SEQ ID NO: 203106 - RNA, 18 nt, Human
ggugccggggguggggug

SEQ ID NO: 203107 - RNA, 32 nt, Human
ggugccggugccuguccccgggggcgccaugg

SEQ ID NO: 203108 - RNA, 23 nt, Human
ggugccgguggcggcggcggggg

SEQ ID NO: 203109 - RNA, 32 nt, Human
ggugccguccggcugcucagcugcuggcugga

SEQ ID NO: 203110 - RNA, 22 nt, Human
ggugccguggcucacaccugua

SEQ ID NO: 203111 - RNA, 22 nt, Human
ggugccguggcucacaucugua

SEQ ID NO: 203112 - RNA, 32 nt, Human
ggugccguugcacuccagccgggcaacaaggg

SEQ ID NO: 203113 - RNA, 21 nt, Human
ggugccuaacgguucugcuca

SEQ ID NO: 203114 - RNA, 32 nt, Human
ggugccuaccacacaggaaaccuugaagaaaa

SEQ ID NO: 203115 - RNA, 17 nt, Human
ggugccuacucauugua

SEQ ID NO: 203116 - RNA, 32 nt, Human
ggugccuacuucucauugucugauuucucauu

SEQ ID NO: 203117 - RNA, 32 nt, Human
ggugccuaguggaccucagacauggcucagcc

SEQ ID NO: 203118 - RNA, 16 nt, Human
ggugccuauaauccca

SEQ ID NO: 203119 - RNA, 32 nt, Human
ggugccuauagucccagcuacucuggaggcug

SEQ ID NO: 203120 - RNA, 24 nt, Human
ggugccuauauucaaggcucuuuc

SEQ ID NO: 203121 - RNA, 22 nt, Human
ggugccuaugcaaguucauuua

SEQ ID NO: 203122 - RNA, 32 nt, Human
ggugccuauuuauuggggaucugcauuccccg

SEQ ID NO: 203123 - RNA, 32 nt, Human
ggugccucaagaggaagauagacaggaggagg

SEQ ID NO: 203124 - RNA, 20 nt, Human
ggugccucacaucuguaauc

SEQ ID NO: 203125 - RNA, 20 nt, Human
ggugccucacgccuguaauc

SEQ ID NO: 203126 - RNA, 23 nt, Human
ggugccucacgccuguaauccca

SEQ ID NO: 203127 - RNA, 31 nt, Human
ggugccucagagagagacaagucuggaugag

SEQ ID NO: 203128 - RNA, 32 nt, Human
ggugccucagcagauaccagagcuuauucuua

SEQ ID NO: 203129 - RNA, 32 nt, Human
ggugccucaguccauggucaccaucgacacgu

SEQ ID NO: 203130 - RNA, 32 nt, Human
ggugccucagugccaagucaggagcugcuugu

SEQ ID NO: 203131 - RNA, 20 nt, Human
ggugccucaugccuguaauc

SEQ ID NO: 203132 - RNA, 32 nt, Human
ggugccuccacucagcucaauuccaguuuucu

SEQ ID NO: 203133 - RNA, 32 nt, Human
ggugccuccagccagagcucccugcgcucgcu

SEQ ID NO: 203134 - RNA, 32 nt, Human
ggugccuccagccucaacagugggcauggaca

SEQ ID NO: 203135 - RNA, 32 nt, Human
ggugccuccagccugagacaucaggggagagc

SEQ ID NO: 203136 - RNA, 32 nt, Human
ggugccucccccaacccccacacccaugcaga

SEQ ID NO: 203137 - RNA, 32 nt, Human
ggugccuccgccauagcuucugucgcuccauc

SEQ ID NO: 203138 - RNA, 23 nt, Human
ggugccucgcagggccucucuua

SEQ ID NO: 203139 - RNA, 32 nt, Human
ggugccucucguccaugcuccugggccccagc

SEQ ID NO: 203140 - RNA, 32 nt, Human
ggugccucucuggcccuccacugacuauaccc

SEQ ID NO: 203141 - RNA, 32 nt, Human
ggugccucucuggcccuccacugacuguaccc

SEQ ID NO: 203142 - RNA, 32 nt, Human
ggugccucugcagagagaucccugccugggac

SEQ ID NO: 203143 - RNA, 32 nt, Human
ggugccucugccauagcuucugucgccugugc

SEQ ID NO: 203144 - RNA, 32 nt, Human
ggugccucuuccacucuggagugaaguuaaug

SEQ ID NO: 203145 - RNA, 32 nt, Human
ggugccugaggcugaauggcuccaccccuccc

SEQ ID NO: 203146 - RNA, 32 nt, Human
ggugccugagucgcacagucucucccacccga

SEQ ID NO: 203147 - RNA, 32 nt, Human
ggugccugagucugcacgcuggcuucugaccc

SEQ ID NO: 203148 - RNA, 32 nt, Human
ggugccugcagauuacauucuccugggauucu

SEQ ID NO: 203149 - RNA, 32 nt, Human
ggugccugcagcaggagccaggaacgcccggc

SEQ ID NO: 203150 - RNA, 32 nt, Human
ggugccugcagccucuugucugguugaggacu

SEQ ID NO: 203151 - RNA, 32 nt, Human
ggugccugcaggaguccuggggccagcuggcc

SEQ ID NO: 203152 - RNA, 32 nt, Human
ggugccugcccaggauggguaggaaaugcuga

SEQ ID NO: 203153 - RNA, 21 nt, Human
ggugccugccccagccucuca

SEQ ID NO: 203154 - RNA, 32 nt, Human
ggugccugccuguaauccagcuacucaggagg

SEQ ID NO: 203155 - RNA, 32 nt, Human
ggugccugcuagccucaaucccccgaaguggg

SEQ ID NO: 203156 - RNA, 32 nt, Human
ggugccugcuguggcacagagcugggaaggcc

SEQ ID NO: 203157 - RNA, 32 nt, Human
ggugccuggagccagaggucggggaguaagca

SEQ ID NO: 203158 - RNA, 32 nt, Human
ggugccuggagucccagcuacucgggaggcug

SEQ ID NO: 203159 - RNA, 18 nt, Human
ggugccuggccugugcca

SEQ ID NO: 203160 - RNA, 32 nt, Human
ggugccugggagggcugcugcaguggggucug

SEQ ID NO: 203161 - RNA, 32 nt, Human
ggugccugggaggugggugugggggugguggg

SEQ ID NO: 203162 - RNA, 32 nt, Human
ggugccugggcuagggcugcaggcuggcuggc

SEQ ID NO: 203163 - RNA, 32 nt, Human
ggugccugggcuggguguggggcagggccugg

SEQ ID NO: 203164 - RNA, 32 nt, Human
ggugccugguuccucuggguugggagaggggc

SEQ ID NO: 203165 - RNA, 32 nt, Human
ggugccuguaaccccagcuacuugggaggcug

SEQ ID NO: 203166 - RNA, 32 nt, Human
ggugccuguaacucauuagacguacugaggca

SEQ ID NO: 203167 - RNA, 15 nt, Human
ggugccuguaauccc

SEQ ID NO: 203168 - RNA, 16 nt, Human
ggugccuguaauccca

SEQ ID NO: 203169 - RNA, 32 nt, Human
ggugccuguaaucccagcuacaugggagccug

SEQ ID NO: 203170 - RNA, 32 nt, Human
ggugccuguaaucccagcuacgugggaggcug

SEQ ID NO: 203171 - RNA, 32 nt, Human
ggugccuguaaucccagcuacucgggagacug

SEQ ID NO: 203172 - RNA, 32 nt, Human
ggugccuguaaucccagcuacucgggaggcug

SEQ ID NO: 203173 - RNA, 32 nt, Human
ggugccuguaaucccagcuacucgggagguug

SEQ ID NO: 203174 - RNA, 32 nt, Human
ggugccuguaaucccagcuacuggggaaagcu

SEQ ID NO: 203175 - RNA, 32 nt, Human
ggugccuguaaucccagcuacuggggaggcug

SEQ ID NO: 203176 - RNA, 32 nt, Human
ggugccuguaaucccagcuacuugagagucug

SEQ ID NO: 203177 - RNA, 32 nt, Human
ggugccuguaaucccagcuacuugggaagcug

SEQ ID NO: 203178 - RNA, 32 nt, Human
ggugccuguaaucccagcuacuugggagacug

SEQ ID NO: 203179 - RNA, 32 nt, Human
ggugccuguaaucccagcuacuugggaggcag

SEQ ID NO: 203180 - RNA, 32 nt, Human
ggugccuguaaucccagcuacuugggaggccg

SEQ ID NO: 203181 - RNA, 32 nt, Human
ggugccuguaaucccagcuacuugggaggcug

SEQ ID NO: 203182 - RNA, 32 nt, Human
ggugccuguaaucccagcuauucaggaggcug

SEQ ID NO: 203183 - RNA, 32 nt, Human
ggugccuguaaucccagcuccuugggaggcua

SEQ ID NO: 203184 - RNA, 16 nt, Human
ggugccuguaauccua

SEQ ID NO: 203185 - RNA, 16 nt, Human
ggugccuguaaucuca

SEQ ID NO: 203186 - RNA, 16 nt, Human
ggugccuguaauucca

SEQ ID NO: 203187 - RNA, 20 nt, Human
ggugccuguaggcuauggua

SEQ ID NO: 203188 - RNA, 16 nt, Human
ggugccuguaguccca

SEQ ID NO: 203189 - RNA, 32 nt, Human
ggugccuguagucccagccacuugggagucug

SEQ ID NO: 203190 - RNA, 32 nt, Human
ggugccuguagucccagcuacucaggaggcug

SEQ ID NO: 203191 - RNA, 32 nt, Human
ggugccuguagucccagcuacucgggaagcug

SEQ ID NO: 203192 - RNA, 32 nt, Human
ggugccuguagucccagcuacucgggaggcug

SEQ ID NO: 203193 - RNA, 32 nt, Human
ggugccuguagucccagcuacucuggaggcug

SEQ ID NO: 203194 - RNA, 32 nt, Human
ggugccuguagucccagcuacuugggacaccg

SEQ ID NO: 203195 - RNA, 32 nt, Human
ggugccuguagucccagcuacuugggaggcug

SEQ ID NO: 203196 - RNA, 32 nt, Human
ggugccuguagucccagcuagucgggaggcug

SEQ ID NO: 203197 - RNA, 32 nt, Human
ggugccuguagucccagcuaucugggaggcug

SEQ ID NO: 203198 - RNA, 32 nt, Human
ggugccuguagucccagcuauuugggaggcug

SEQ ID NO: 203199 - RNA, 32 nt, Human
ggugccuguagucccagcugcucgggaggcug

SEQ ID NO: 203200 - RNA, 32 nt, Human
ggugccuguccucuccugccuccugggauuca

SEQ ID NO: 203201 - RNA, 20 nt, Human
ggugccugugagcucaucuc

SEQ ID NO: 203202 - RNA, 32 nt, Human
ggugccugugagcucaucucccaggaugguga

SEQ ID NO: 203203 - RNA, 24 nt, Human
ggugccugugcuugaagguugcug

SEQ ID NO: 203204 - RNA, 32 nt, Human
ggugccuguggucccagcuacuggggaggcug

SEQ ID NO: 203205 - RNA, 32 nt, Human
ggugccuguggucccagcugcucggaaggcug

SEQ ID NO: 203206 - RNA, 32 nt, Human
ggugccuguggucccagcugcucgggaggcug

SEQ ID NO: 203207 - RNA, 32 nt, Human
ggugccuguggucccagcugcuugggaggcug

SEQ ID NO: 203208 - RNA, 20 nt, Human
ggugccuucagaggcucucu

SEQ ID NO: 203209 - RNA, 24 nt, Human
ggugccuucagggaaaguuuucuu

SEQ ID NO: 203210 - RNA, 32 nt, Human
ggugccuugcagagagacucacagcaacucuc

SEQ ID NO: 203211 - RNA, 32 nt, Human
ggugccuuuagucccagcucuuugggaagcug

SEQ ID NO: 203212 - RNA, 32 nt, Human
ggugcgaagcccagaggaggcggcuugggauc

SEQ ID NO: 203213 - RNA, 32 nt, Human
ggugcgacucucucccuuccucauccaccucu

SEQ ID NO: 203214 - RNA, 32 nt, Human
ggugcgagaguggcgggacugggugaagagug

SEQ ID NO: 203215 - RNA, 32 nt, Human
ggugcgagccacugcaccuggcccacauuuuu

SEQ ID NO: 203216 - RNA, 32 nt, Human
ggugcgagcccagauggcgagccccaggggau

SEQ ID NO: 203217 - RNA, 32 nt, Human
ggugcgagccuguaauuccagcuacuuggagg

SEQ ID NO: 203218 - RNA, 20 nt, Human
ggugcgauaaagaagaggac

SEQ ID NO: 203219 - RNA, 32 nt, Human
ggugcgaucuccaggcuuuuguccucaaaacc

SEQ ID NO: 203220 - RNA, 32 nt, Human
ggugcgauggcagagcgcggcccccgccgcug

SEQ ID NO: 203221 - RNA, 18 nt, Human
ggugcgauucuccugccu

SEQ ID NO: 203222 - RNA, 32 nt, Human
ggugcgcacagcccuugucggugccccggccc

SEQ ID NO: 203223 - RNA, 32 nt, Human
ggugcgcaccaccacacccggcuaguuucugu

SEQ ID NO: 203224 - RNA, 32 nt, Human
ggugcgcaccuggaugcuggauggggacggcu

SEQ ID NO: 203225 - RNA, 32 nt, Human
ggugcgcaccuguaaucccagccacucagaag

SEQ ID NO: 203226 - RNA, 32 nt, Human
ggugcgcaccuguaaucccagcuacuuggaag

SEQ ID NO: 203227 - RNA, 32 nt, Human
ggugcgcaccuguaaucccagcuacuugggag

SEQ ID NO: 203228 - RNA, 32 nt, Human
ggugcgcaccuguaauuccagcuacucgggag

SEQ ID NO: 203229 - RNA, 20 nt, Human
ggugcgcacgaccauaccca

SEQ ID NO: 203230 - RNA, 32 nt, Human
ggugcgcagaagacuggaggaggcggagcgcc

SEQ ID NO: 203231 - RNA, 32 nt, Human
ggugcgcagcgccgaggaaaagaauggggagg

SEQ ID NO: 203232 - RNA, 32 nt, Human
ggugcgcaggaguggcuggcuuugccuuguuc

SEQ ID NO: 203233 - RNA, 32 nt, Human
ggugcgcaguagcgggccuggccagcggcucg

SEQ ID NO: 203234 - RNA, 21 nt, Human
ggugcgccaaaagcuuuuuca

SEQ ID NO: 203235 - RNA, 32 nt, Human
ggugcgccugaguuccagcuacucaggaggcu

SEQ ID NO: 203236 - RNA, 32 nt, Human
ggugcgccugugcagcccucccagguggagua

SEQ ID NO: 203237 - RNA, 32 nt, Human
ggugcgcgcauguaaucccagcuacucgggag

SEQ ID NO: 203238 - RNA, 32 nt, Human
ggugcgcgccuguaaucccagcuacucaggag

SEQ ID NO: 203239 - RNA, 32 nt, Human
ggugcgcgcugucgcaaccugcccucauccug

SEQ ID NO: 203240 - RNA, 32 nt, Human
ggugcgcggggugcuccugggguggaggccuc

SEQ ID NO: 203241 - RNA, 31 nt, Human
ggugcgcucgcucagcaccuacucggccgcc

SEQ ID NO: 203242 - RNA, 32 nt, Human
ggugcgcugagcugcaacuucuuacuucccua

SEQ ID NO: 203243 - RNA, 32 nt, Human
ggugcgcuguggacacagcaguccgcggaauu

SEQ ID NO: 203244 - RNA, 32 nt, Human
ggugcgcuguggaucaagacacuuugguauga

SEQ ID NO: 203245 - RNA, 18 nt, Human
ggugcgcuuguaauccca

SEQ ID NO: 203246 - RNA, 32 nt, Human
ggugcgcuuguaaucccagcuacucaggaggc

SEQ ID NO: 203247 - RNA, 32 nt, Human
ggugcgcuuguaaucccagcuacucgggaggc

SEQ ID NO: 203248 - RNA, 32 nt, Human
ggugcggaaagccaggcaguugggacagaggu

SEQ ID NO: 203249 - RNA, 32 nt, Human
ggugcggacaguucagacucagcaguccuguu

SEQ ID NO: 203250 - RNA, 32 nt, Human
ggugcggagggagucccugaaacuucucccaa

SEQ ID NO: 203251 - RNA, 32 nt, Human
ggugcggaggggagucagagacccccggaugg

SEQ ID NO: 203252 - RNA, 32 nt, Human
ggugcggcagagagaggaaggcagggaggugc

SEQ ID NO: 203253 - RNA, 25 nt, Human
ggugcggcagggacacccgaccaca

SEQ ID NO: 203254 - RNA, 32 nt, Human
ggugcggcccaaggcccagcuggugcuggcug

SEQ ID NO: 203255 - RNA, 32 nt, Human
ggugcggccugguccggggaggagaacaugcc

SEQ ID NO: 203256 - RNA, 18 nt, Human
ggugcggcgcacgggcgg

SEQ ID NO: 203257 - RNA, 32 nt, Human
ggugcggcggugcuggagguugcggcggcggc

SEQ ID NO: 203258 - RNA, 32 nt, Human
ggugcggcgugaagaugcccuuuuuacccguu

SEQ ID NO: 203259 - RNA, 32 nt, Human
ggugcgggccgccaccacugcuccuugacucu

SEQ ID NO: 203260 - RNA, 32 nt, Human
ggugcgggcuccgaauucuuuccaauagucug

SEQ ID NO: 203261 - RNA, 32 nt, Human
ggugcggggagugucucugaggugaggccggg

SEQ ID NO: 203262 - RNA, 31 nt, Human
ggugcggggcugucucccggcugggacucgc

SEQ ID NO: 203263 - RNA, 32 nt, Human
ggugcgggggaggaggaggaggacgccgcggu

SEQ ID NO: 203264 - RNA, 32 nt, Human
ggugcggggugcuuucuccacccccacacucc

SEQ ID NO: 203265 - RNA, 32 nt, Human
ggugcggguggaguacugggaggcaggaggug

SEQ ID NO: 203266 - RNA, 32 nt, Human
ggugcggucuccccucuccaaaugccaccucu

SEQ ID NO: 203267 - RNA, 32 nt, Human
ggugcgguggaggcggccuugcgguggugcuu

SEQ ID NO: 203268 - RNA, 22 nt, Human
ggugcgguggcacgugccugua

SEQ ID NO: 203269 - RNA, 22 nt, Human
ggugcgguggcucaagccugua

SEQ ID NO: 203270 - RNA, 22 nt, Human
ggugcgguggcucacaccugua

SEQ ID NO: 203271 - RNA, 22 nt, Human
ggugcgguggcucacgccugua

SEQ ID NO: 203272 - RNA, 22 nt, Human
ggugcgguggcucacgucugua

SEQ ID NO: 203273 - RNA, 22 nt, Human
ggugcgguggcucacuccugua

SEQ ID NO: 203274 - RNA, 22 nt, Human
ggugcgguggcucauaccugua

SEQ ID NO: 203275 - RNA, 20 nt, Human
ggugcgguggcucaugccug

SEQ ID NO: 203276 - RNA, 22 nt, Human
ggugcgguggcucaugccugua

SEQ ID NO: 203277 - RNA, 22 nt, Human
ggugcgguggcucccgccugug

SEQ ID NO: 203278 - RNA, 22 nt, Human
ggugcgguggcucguaccugua

SEQ ID NO: 203279 - RNA, 32 nt, Human
ggugcgucuaagaugagggggccaggcggugg

SEQ ID NO: 203280 - RNA, 32 nt, Human
ggugcgucuguguuagcuucaaaggaaguugg

SEQ ID NO: 203281 - RNA, 18 nt, Human
ggugcgugacagugggag

SEQ ID NO: 203282 - RNA, 32 nt, Human
ggugcgugccuguaaucccaacuacuugggag

SEQ ID NO: 203283 - RNA, 32 nt, Human
ggugcgugccuguaaucccagcuacucaggag

SEQ ID NO: 203284 - RNA, 32 nt, Human
ggugcgugccuguaaucccagcuacucgggag

SEQ ID NO: 203285 - RNA, 32 nt, Human
ggugcgugccuguaaucccagcuacucggggg

SEQ ID NO: 203286 - RNA, 32 nt, Human
ggugcgugccuguagccucagcuacucgggug

SEQ ID NO: 203287 - RNA, 32 nt, Human
ggugcgugccuguagucccagcuacucagggc

SEQ ID NO: 203288 - RNA, 32 nt, Human
ggugcgugccuguagucccagcuacucgggag

SEQ ID NO: 203289 - RNA, 32 nt, Human
ggugcgugccuguagucccagcuacuuaggag

SEQ ID NO: 203290 - RNA, 32 nt, Human
ggugcgugccuguagucccagcuacuugggag

SEQ ID NO: 203291 - RNA, 32 nt, Human
ggugcgugccuguagucucagcuacucaggag

SEQ ID NO: 203292 - RNA, 32 nt, Human
ggugcgugccuguagugccagcuacucaggag

SEQ ID NO: 203293 - RNA, 32 nt, Human
ggugcgugccuguaguuccagcuacuugggag

SEQ ID NO: 203294 - RNA, 32 nt, Human
ggugcgugccuguauucccggccacucgggag

SEQ ID NO: 203295 - RNA, 32 nt, Human
ggugcgugccugugaucccagcugcucaggag

SEQ ID NO: 203296 - RNA, 32 nt, Human
ggugcguggagguggagccugcggcuggagua

SEQ ID NO: 203297 - RNA, 23 nt, Human
ggugcguggaucaccugagguca

SEQ ID NO: 203298 - RNA, 32 nt, Human
ggugcguguccccauucccugcaacagcaaau

SEQ ID NO: 203299 - RNA, 32 nt, Human
ggugcguguucacaaagcaaauauggccugua

SEQ ID NO: 203300 - RNA, 32 nt, Human
ggugcguugcagaauggugccuguggcaugau

SEQ ID NO: 203301 - RNA, 32 nt, Human
ggugcuaacacccccuucccagccucugggaa

SEQ ID NO: 203302 - RNA, 32 nt, Human
ggugcuaaguacuaccccuucaucuuccaugg

SEQ ID NO: 203303 - RNA, 32 nt, Human
ggugcuaauguaaaugguacuuaaacauuuuu

SEQ ID NO: 203304 - RNA, 32 nt, Human
ggugcuaauugcuuggaucuccuucauuagga

SEQ ID NO: 203305 - RNA, 32 nt, Human
ggugcuaccaaggaagagagcacacagauaag

SEQ ID NO: 203306 - RNA, 32 nt, Human
ggugcuaccuguuuggggcaaauguucaaaaa

SEQ ID NO: 203307 - RNA, 32 nt, Human
ggugcuacgaccagggugagaauaaagacguc

SEQ ID NO: 203308 - RNA, 32 nt, Human
ggugcuacugaacaugacagcuucuugucaug

SEQ ID NO: 203309 - RNA, 32 nt, Human
ggugcuagaaguucaggugagaacagggcaga

SEQ ID NO: 203310 - RNA, 32 nt, Human
ggugcuagcagcuucagcggaacagggugaga

SEQ ID NO: 203311 - RNA, 32 nt, Human
ggugcuagcuucccuuaaucuuccagcagcaa

SEQ ID NO: 203312 - RNA, 32 nt, Human
ggugcuaggauuacaggcaugagccaccgcac

SEQ ID NO: 203313 - RNA, 32 nt, Human
ggugcuaggauuauaggcuugagccaccaugc

SEQ ID NO: 203314 - RNA, 32 nt, Human
ggugcuaguuggucaacccugccugcauacau

SEQ ID NO: 203315 - RNA, 20 nt, Human
ggugcuauucuuuccugagg

SEQ ID NO: 203316 - RNA, 32 nt, Human
ggugcucaauuaaacauuacuguuuuccaugc

SEQ ID NO: 203317 - RNA, 21 nt, Human
ggugcucacaauugucucuca

SEQ ID NO: 203318 - RNA, 31 nt, Human
ggugcucacagcuguaaucccagcacuuuga

SEQ ID NO: 203319 - RNA, 32 nt, Human
ggugcucacagcuguaaucccagcacuuugag

SEQ ID NO: 203320 - RNA, 32 nt, Human
ggugcucacccaggccccgugucagucuucua

SEQ ID NO: 203321 - RNA, 32 nt, Human
ggugcucaccucuaccuccuguccucaggccg

SEQ ID NO: 203322 - RNA, 21 nt, Human
ggugcucacgagagagccuuu

SEQ ID NO: 203323 - RNA, 19 nt, Human
ggugcucacgccuguaauc

SEQ ID NO: 203324 - RNA, 32 nt, Human
ggugcucagagcaguguuucguguguguuuua

SEQ ID NO: 203325 - RNA, 32 nt, Human
ggugcucagcuggucugcacugaacgcaaccg

SEQ ID NO: 203326 - RNA, 32 nt, Human
ggugcucaggaacagguagaugaauuuugacu

SEQ ID NO: 203327 - RNA, 32 nt, Human
ggugcucaggaggcugaggcaggagaguggac

SEQ ID NO: 203328 - RNA, 21 nt, Human
ggugcucaggagggcuccuca

SEQ ID NO: 203329 - RNA, 22 nt, Human
ggugcucaggcugggcucucca

SEQ ID NO: 203330 - RNA, 32 nt, Human
ggugcucauaaguugcccagcccagggggaaa

SEQ ID NO: 203331 - RNA, 32 nt, Human
ggugcucauccaggggcccagaacagucccac

SEQ ID NO: 203332 - RNA, 32 nt, Human
ggugcucaucuagcugcuacuacuuucccuuc

SEQ ID NO: 203333 - RNA, 23 nt, Human
ggugcucaugaggugucuuugca

SEQ ID NO: 203334 - RNA, 32 nt, Human
ggugcucaugccaggcugacggguccagugcg

SEQ ID NO: 203335 - RNA, 24 nt, Human
ggugcucauggaggaggaccugau

SEQ ID NO: 203336 - RNA, 32 nt, Human
ggugcucauuccacacugguuagauacuucag

SEQ ID NO: 203337 - RNA, 32 nt, Human
ggugcucccacuccagggcccagcacaucucc

SEQ ID NO: 203338 - RNA, 32 nt, Human
ggugcucccagcugcccccaggacacugcccg

SEQ ID NO: 203339 - RNA, 32 nt, Human
ggugcucccagcugcccuccugcuucgggccu

SEQ ID NO: 203340 - RNA, 32 nt, Human
ggugcucccgcagcuucgccuccucucgucuu

SEQ ID NO: 203341 - RNA, 17 nt, Human
ggugcucccgcagggaa

SEQ ID NO: 203342 - RNA, 32 nt, Human
ggugcucccugagaugccagcaccugaacgac

SEQ ID NO: 203343 - RNA, 32 nt, Human
ggugcucccuggaagauggaucuugccuugug

SEQ ID NO: 203344 - RNA, 32 nt, Human
ggugcucccuucacacacccaggcuggagaga

SEQ ID NO: 203345 - RNA, 32 nt, Human
ggugcucccuuucugccagcaguucugguucu

SEQ ID NO: 203346 - RNA, 24 nt, Human
ggugcuccguggggaggguuucuu

SEQ ID NO: 203347 - RNA, 23 nt, Human
ggugcuccucggagcgggacuga

SEQ ID NO: 203348 - RNA, 32 nt, Human
ggugcuccugaacagaagauuuggcccucauu

SEQ ID NO: 203349 - RNA, 32 nt, Human
ggugcuccugccaccucccaccucucugaggg

SEQ ID NO: 203350 - RNA, 32 nt, Human
ggugcuccuuucccccuucuuuuauacaaguu

SEQ ID NO: 203351 - RNA, 32 nt, Human
ggugcucgccuguaaucccagcuacuugggag

SEQ ID NO: 203352 - RNA, 32 nt, Human
ggugcucggguguggagcuggagccauguguc

SEQ ID NO: 203353 - RNA, 22 nt, Human
ggugcucgugccgcucugcuca

SEQ ID NO: 203354 - RNA, 32 nt, Human
ggugcucucuucuccccacugugcccguccgc

SEQ ID NO: 203355 - RNA, 32 nt, Human
ggugcucugacccucacuccuucuucugaccc

SEQ ID NO: 203356 - RNA, 32 nt, Human
ggugcucuggaaauguugaggguggguuuuua

SEQ ID NO: 203357 - RNA, 22 nt, Human
ggugcucuuaaaaucucucuca

SEQ ID NO: 203358 - RNA, 32 nt, Human
ggugcucuucugcugggggacugaggcuggcc

SEQ ID NO: 203359 - RNA, 32 nt, Human
ggugcucuugcagccagggugagagcagccca

SEQ ID NO: 203360 - RNA, 32 nt, Human
ggugcucuugggauugcaaccagcgcaagcag

SEQ ID NO: 203361 - RNA, 18 nt, Human
ggugcucuuuuuugcuca

SEQ ID NO: 203362 - RNA, 17 nt, Human
ggugcugaaggcuccag

SEQ ID NO: 203363 - RNA, 32 nt, Human
ggugcugacaucuaugugcuagcugccucauc

SEQ ID NO: 203364 - RNA, 32 nt, Human
ggugcugaccaaaaaugucucaaagucaacag

SEQ ID NO: 203365 - RNA, 32 nt, Human
ggugcugacugaggccugcuucccccuccccc

SEQ ID NO: 203366 - RNA, 32 nt, Human
ggugcugacuucaaaguugccuggugaaggaa

SEQ ID NO: 203367 - RNA, 32 nt, Human
ggugcugagacuacaggugugagccaccacuc

SEQ ID NO: 203368 - RNA, 19 nt, Human
ggugcugagagugugggug

SEQ ID NO: 203369 - RNA, 32 nt, Human
ggugcugagauuacaggcgugagccaccgugc

SEQ ID NO: 203370 - RNA, 32 nt, Human
ggugcugagauuacaggugugagccacccugc

SEQ ID NO: 203371 - RNA, 32 nt, Human
ggugcugagauuacauguaugagccacugcac

SEQ ID NO: 203372 - RNA, 32 nt, Human
ggugcugagcccucaccucccuguuccaggcu

SEQ ID NO: 203373 - RNA, 22 nt, Human
ggugcugaggcggcggcugcgg

SEQ ID NO: 203374 - RNA, 32 nt, Human
ggugcugagggcaagagguggggaggagguca

SEQ ID NO: 203375 - RNA, 32 nt, Human
ggugcugaggucucagggaagcugguaacacu

SEQ ID NO: 203376 - RNA, 32 nt, Human
ggugcugauccaggaaccucugcugggggagu

SEQ ID NO: 203377 - RNA, 32 nt, Human
ggugcugaugaaaacugaggcagcagccuggu

SEQ ID NO: 203378 - RNA, 21 nt, Human
ggugcugauggagggcgggag

SEQ ID NO: 203379 - RNA, 32 nt, Human
ggugcugaugugugugcaugagcuguauguac

SEQ ID NO: 203380 - RNA, 32 nt, Human
ggugcugauuuagaggcaaaauugcagaauaa

SEQ ID NO: 203381 - RNA, 19 nt, Human
ggugcugcaacaaaaggag

SEQ ID NO: 203382 - RNA, 32 nt, Human
ggugcugcacucacuucugcccccuggggagu

SEQ ID NO: 203383 - RNA, 32 nt, Human
ggugcugcagcccucggcaguggggucaggcc

SEQ ID NO: 203384 - RNA, 32 nt, Human
ggugcugcaggaguguccugcccaugccccag

SEQ ID NO: 203385 - RNA, 32 nt, Human
ggugcugcaggaugacuggagcuguuccacgc

SEQ ID NO: 203386 - RNA, 32 nt, Human
ggugcugcaguggccauucuuguaguuauagc

SEQ ID NO: 203387 - RNA, 32 nt, Human
ggugcugcaguucaguaggaaaaagaaaugca

SEQ ID NO: 203388 - RNA, 32 nt, Human
ggugcugcauguggcccugcccacugugcuca

SEQ ID NO: 203389 - RNA, 32 nt, Human
ggugcugccacucacccccaccugaugagagg

SEQ ID NO: 203390 - RNA, 32 nt, Human
ggugcugccaguuggguggagaugucuagggg

SEQ ID NO: 203391 - RNA, 32 nt, Human
ggugcugccaucuucucuccccaccacccuuu

SEQ ID NO: 203392 - RNA, 24 nt, Human
ggugcugcccagcagccccugaga

SEQ ID NO: 203393 - RNA, 32 nt, Human
ggugcugcccagugccuugccugcugagcugg

SEQ ID NO: 203394 - RNA, 32 nt, Human
ggugcugccccagccaggaucuggucgcugcc

SEQ ID NO: 203395 - RNA, 32 nt, Human
ggugcugcccugcguggcugccagcuggccca

SEQ ID NO: 203396 - RNA, 22 nt, Human
ggugcugccggggcagcgggag

SEQ ID NO: 203397 - RNA, 32 nt, Human
ggugcugccgguggagcuucaggucuugauag

SEQ ID NO: 203398 - RNA, 32 nt, Human
ggugcugccuugcuucuguauuuccuuggauu

SEQ ID NO: 203399 - RNA, 32 nt, Human
ggugcugcgaggggaaggaaaagggaggcagc

SEQ ID NO: 203400 - RNA, 32 nt, Human
ggugcugcucaccgucuuccuccuccuggucu

SEQ ID NO: 203401 - RNA, 22 nt, Human
ggugcugcuccggcagcggcag

SEQ ID NO: 203402 - RNA, 31 nt, Human
ggugcugcucugucugggccagcuguugugu

SEQ ID NO: 203403 - RNA, 22 nt, Human
ggugcugcugcugauccgggga

SEQ ID NO: 203404 - RNA, 32 nt, Human
ggugcugcuggcuccccgccaccagcugggcc

SEQ ID NO: 203405 - RNA, 32 nt, Human
ggugcugcugucucuccuccagcaaggaaaca

SEQ ID NO: 203406 - RNA, 32 nt, Human
ggugcugcuuccaggaagauggaguagauaua

SEQ ID NO: 203407 - RNA, 30 nt, Human
ggugcuggaagccagacggaacaguguugg

SEQ ID NO: 203408 - RNA, 32 nt, Human
ggugcuggaaggcugguuagucugggaggagc

SEQ ID NO: 203409 - RNA, 32 nt, Human
ggugcuggaauuacaggcgugagccaccgcgc

SEQ ID NO: 203410 - RNA, 32 nt, Human
ggugcuggaauuacaggugugagccacugugc

SEQ ID NO: 203411 - RNA, 32 nt, Human
ggugcuggacuacccuugccuagauuuaaggc

SEQ ID NO: 203412 - RNA, 32 nt, Human
ggugcuggagcaguuccucacuauccugcccc

SEQ ID NO: 203413 - RNA, 23 nt, Human
ggugcuggcaggugcuggcggga

SEQ ID NO: 203414 - RNA, 22 nt, Human
ggugcuggcgguguggcggggg

SEQ ID NO: 203415 - RNA, 32 nt, Human
ggugcuggcuuuggugacaucacaaggccccu

SEQ ID NO: 203416 - RNA, 32 nt, Human
ggugcugggaaccugcuagcugagcacuucca

SEQ ID NO: 203417 - RNA, 32 nt, Human
ggugcugggacugcagggagagggcugugagg

SEQ ID NO: 203418 - RNA, 25 nt, Human
ggugcugggagacugagccuguggg

SEQ ID NO: 203419 - RNA, 32 nt, Human
ggugcugggaggagggagagggaggucacugg

SEQ ID NO: 203420 - RNA, 32 nt, Human
ggugcugggauuacaagcgugagccaccgcac

SEQ ID NO: 203421 - RNA, 23 nt, Human
ggugcugggauuacagacgugag

SEQ ID NO: 203422 - RNA, 32 nt, Human
ggugcugggauuacagacgugagccaccaccc

SEQ ID NO: 203423 - RNA, 32 nt, Human
ggugcugggauuacaggcacgagccacugugc

SEQ ID NO: 203424 - RNA, 32 nt, Human
ggugcugggauuacaggcauaagcuaccacgc

SEQ ID NO: 203425 - RNA, 32 nt, Human
ggugcugggauuacaggcaucagccacugcac

SEQ ID NO: 203426 - RNA, 23 nt, Human
ggugcugggauuacaggcaugag

SEQ ID NO: 203427 - RNA, 32 nt, Human
ggugcugggauuacaggcaugagccaccgugc

SEQ ID NO: 203428 - RNA, 19 nt, Human
ggugcugggauuacaggug

SEQ ID NO: 203429 - RNA, 32 nt, Human
ggugcugggauuacaggugugagccaccacac

SEQ ID NO: 203430 - RNA, 32 nt, Human
ggugcugggauuacaggugugagccaccaugc

SEQ ID NO: 203431 - RNA, 32 nt, Human
ggugcugggauuauaggcgugagccaccgcgc

SEQ ID NO: 203432 - RNA, 32 nt, Human
ggugcugggauuauaggcgugagccacugugc

SEQ ID NO: 203433 - RNA, 32 nt, Human
ggugcugggauugcagacgugagccaccacag

SEQ ID NO: 203434 - RNA, 32 nt, Human
ggugcugggauugcaggccugagccaccgcgc

SEQ ID NO: 203435 - RNA, 23 nt, Human
ggugcugggauugcaggcgugag

SEQ ID NO: 203436 - RNA, 32 nt, Human
ggugcugggauugcaggcgugagccaccaugc

SEQ ID NO: 203437 - RNA, 32 nt, Human
ggugcugggcuuuagagaacaugggaaggcgg

SEQ ID NO: 203438 - RNA, 18 nt, Human
ggugcuggggagugggag

SEQ ID NO: 203439 - RNA, 32 nt, Human
ggugcuggggcaaggccaucagcuucagagac

SEQ ID NO: 203440 - RNA, 32 nt, Human
ggugcugggguuacagguaugagccaccacac

SEQ ID NO: 203441 - RNA, 32 nt, Human
ggugcuggguaggccuuccuggucucuggccg

SEQ ID NO: 203442 - RNA, 32 nt, Human
ggugcugguacugagcccugaggagcccgggc

SEQ ID NO: 203443 - RNA, 32 nt, Human
ggugcugguaggagugguuggagagacuugcg

SEQ ID NO: 203444 - RNA, 32 nt, Human
ggugcuggucaccaggccacagcccaaggcag

SEQ ID NO: 203445 - RNA, 32 nt, Human
ggugcugguccuccucccuccuggccucgacc

SEQ ID NO: 203446 - RNA, 32 nt, Human
ggugcuggucuugggccaguucucccacgacg

SEQ ID NO: 203447 - RNA, 32 nt, Human
ggugcuggugagaacccagaaggagagucagc

SEQ ID NO: 203448 - RNA, 32 nt, Human
ggugcuggugcugcgccauccuuugugugccc

SEQ ID NO: 203449 - RNA, 20 nt, Human
ggugcugguggaggcagcgg

SEQ ID NO: 203450 - RNA, 32 nt, Human
ggugcugguggaggcagcggagcagaggcuca

SEQ ID NO: 203451 - RNA, 19 nt, Human
ggugcuggugggcugggag

SEQ ID NO: 203452 - RNA, 32 nt, Human
ggugcuggugguugugguggcagaugauauua

SEQ ID NO: 203453 - RNA, 32 nt, Human
ggugcuggugugucuuggugccuggacuugag

SEQ ID NO: 203454 - RNA, 32 nt, Human
ggugcuguagaggcccuggugcagaaaguggg

SEQ ID NO: 203455 - RNA, 32 nt, Human
ggugcugucaucugauccucaucacaacucau

SEQ ID NO: 203456 - RNA, 32 nt, Human
ggugcugugcagggcucccggaggacaggacc

SEQ ID NO: 203457 - RNA, 32 nt, Human
ggugcugugcugcuccacaaggcaaaacaaga

SEQ ID NO: 203458 - RNA, 19 nt, Human
ggugcugugggguuggaga

SEQ ID NO: 203459 - RNA, 32 nt, Human
ggugcugugggguuggagagcacuuggcccug

SEQ ID NO: 203460 - RNA, 32 nt, Human
ggugcuguggugagcuggccacuccagagcug

SEQ ID NO: 203461 - RNA, 32 nt, Human
ggugcugugguuuugucccuugccuuccugcc

SEQ ID NO: 203462 - RNA, 32 nt, Human
ggugcugugugcacggcagccuagccaguggg

SEQ ID NO: 203463 - RNA, 19 nt, Human
ggugcuguuacucaacuca

SEQ ID NO: 203464 - RNA, 32 nt, Human
ggugcuguucuugagcagcuugaccaccccaa

SEQ ID NO: 203465 - RNA, 32 nt, Human
ggugcuuaaggaguaaaauaauauguuccugg

SEQ ID NO: 203466 - RNA, 32 nt, Human
ggugcuucaguaaacccacgaauaaaagcagu

SEQ ID NO: 203467 - RNA, 32 nt, Human
ggugcuucccuuuuucuccucacaaggaggug

SEQ ID NO: 203468 - RNA, 32 nt, Human
ggugcuucucacuggacuuggugggaugcaug

SEQ ID NO: 203469 - RNA, 32 nt, Human
ggugcuucucauuuauucuuaaagcuacuggu

SEQ ID NO: 203470 - RNA, 24 nt, Human
ggugcuucuggaagucucugcuca

SEQ ID NO: 203471 - RNA, 32 nt, Human
ggugcuucuggccuccgugcucugcuucaccu

SEQ ID NO: 203472 - RNA, 32 nt, Human
ggugcuucuuccucuuuuccaggcucuggaga

SEQ ID NO: 203473 - RNA, 32 nt, Human
ggugcuucuugcaaaccaacccccugccugaa

SEQ ID NO: 203474 - RNA, 32 nt, Human
ggugcuugcuuucuccagccaucggagaccag

SEQ ID NO: 203475 - RNA, 32 nt, Human
ggugcuugggaccuuauuccuccagggagcag

SEQ ID NO: 203476 - RNA, 32 nt, Human
ggugcuuguaaucccagcuacuugggaggcug

SEQ ID NO: 203477 - RNA, 32 nt, Human
ggugcuuguuucucccucugccaugauuguaa

SEQ ID NO: 203478 - RNA, 32 nt, Human
ggugcuuuaaaacucaaaggcucuuuucagag

SEQ ID NO: 203479 - RNA, 32 nt, Human
ggugcuuucacacccacaucaaugcuccagac

SEQ ID NO: 203480 - RNA, 32 nt, Human
ggugcuuucacucaaccaagggggccacagca

SEQ ID NO: 203481 - RNA, 32 nt, Human
ggugcuuuccucaaccuccugcaccaccucca

SEQ ID NO: 203482 - RNA, 32 nt, Human
ggugcuuucucaguugaggagaggugggguua

SEQ ID NO: 203483 - RNA, 32 nt, Human
ggugcuuucuuuccucaucuccccacucccca

SEQ ID NO: 203484 - RNA, 19 nt, Human
ggugcuuucuuuuaguuca

SEQ ID NO: 203485 - RNA, 32 nt, Human
ggugcuuugggcucuccuuccuucucagacaa

SEQ ID NO: 203486 - RNA, 32 nt, Human
gguggaaacagccuguuuuucccauuuaaaca

SEQ ID NO: 203487 - RNA, 22 nt, Human
gguggaaacccagaacugcuga

SEQ ID NO: 203488 - RNA, 21 nt, Human
gguggaaacuaaggaccuagg

SEQ ID NO: 203489 - RNA, 32 nt, Human
gguggaaagagauagcagguggugcuaauuca

SEQ ID NO: 203490 - RNA, 23 nt, Human
gguggaaagauaagaagcagagg

SEQ ID NO: 203491 - RNA, 32 nt, Human
gguggaaagauggcccaggaauuugaggcuac

SEQ ID NO: 203492 - RNA, 32 nt, Human
gguggaaaggaagugaugucagugagugagcu

SEQ ID NO: 203493 - RNA, 32 nt, Human
gguggaaauagcaaaaacaaggcccaggcugg

SEQ ID NO: 203494 - RNA, 32 nt, Human
gguggaacagggucuccucuccccagccagaa

SEQ ID NO: 203495 - RNA, 20 nt, Human
gguggaacauccaguuccua

SEQ ID NO: 203496 - RNA, 32 nt, Human
gguggaaccagccccuccagccugggguccaa

SEQ ID NO: 203497 - RNA, 32 nt, Human
gguggaacugcaauuuaagcucagggagucug

SEQ ID NO: 203498 - RNA, 32 nt, Human
gguggaacuucccaggaggggaagggacagac

SEQ ID NO: 203499 - RNA, 32 nt, Human
gguggaagagaagaacuuugacuggccggcag

SEQ ID NO: 203500 - RNA, 32 nt, Human
gguggaagagacagugugggcugagagcagag

SEQ ID NO: 203501 - RNA, 32 nt, Human
gguggaagagcuuuuuaaucacuugcuuuuua

SEQ ID NO: 203502 - RNA, 32 nt, Human
gguggaagcuaaaggaacuugggcauucaggg

SEQ ID NO: 203503 - RNA, 32 nt, Human
gguggaagcugcagugagccaagaucacacca

SEQ ID NO: 203504 - RNA, 32 nt, Human
gguggaaggaaaguacacagaacuagacgcac

SEQ ID NO: 203505 - RNA, 32 nt, Human
gguggaaggacagagugcuggggacaagaacg

SEQ ID NO: 203506 - RNA, 32 nt, Human
gguggaaggagaagggcaggguggaaaaaguu

SEQ ID NO: 203507 - RNA, 32 nt, Human
gguggaaggagaaggggaagcaagcaccuucu

SEQ ID NO: 203508 - RNA, 20 nt, Human
gguggaaggcgcggaccuga

SEQ ID NO: 203509 - RNA, 32 nt, Human
gguggaaggcgcggaccugacagcauuccaau

SEQ ID NO: 203510 - RNA, 32 nt, Human
gguggaaggcuggagggcaggggugaggaggg

SEQ ID NO: 203511 - RNA, 32 nt, Human
gguggaagggccuguggcugcaaguuccugcc

SEQ ID NO: 203512 - RNA, 32 nt, Human
gguggaagguagucugagccacugccuuuccc

SEQ ID NO: 203513 - RNA, 21 nt, Human
gguggaaggugggaacagagg

SEQ ID NO: 203514 - RNA, 32 nt, Human
gguggaaguggauguggaggagugaccagacc

SEQ ID NO: 203515 - RNA, 32 nt, Human
gguggaauccacccaguuuugucugcuagcca

SEQ ID NO: 203516 - RNA, 32 nt, Human
gguggaauuugaacacuucucacuuuuuauug

SEQ ID NO: 203517 - RNA, 32 nt, Human
gguggacaaagucaacuuccacauguuugacg

SEQ ID NO: 203518 - RNA, 32 nt, Human
gguggacaaguuggggccagagaugauggcag

SEQ ID NO: 203519 - RNA, 32 nt, Human
gguggacaccaaggggcgagugugugacuagg

SEQ ID NO: 203520 - RNA, 32 nt, Human
gguggacaccuguaaucccagcuacucaggug

SEQ ID NO: 203521 - RNA, 32 nt, Human
gguggacacggaucugcugggcucugccuuaa

SEQ ID NO: 203522 - RNA, 32 nt, Human
gguggacagacaccucccuccaacuggcauuu

SEQ ID NO: 203523 - RNA, 32 nt, Human
gguggacagauggguagauguggcaggcaugu

SEQ ID NO: 203524 - RNA, 32 nt, Human
gguggacagcuaucaaccacuuauaacugagc

SEQ ID NO: 203525 - RNA, 32 nt, Human
gguggacagcugucuccugggguggguuggua

SEQ ID NO: 203526 - RNA, 32 nt, Human
gguggacaggcagagucugcaccugccgccug

SEQ ID NO: 203527 - RNA, 32 nt, Human
gguggacaucgucucugccacuccugacccag

SEQ ID NO: 203528 - RNA, 32 nt, Human
gguggacaugagaagcauuggcaucaggguaa

SEQ ID NO: 203529 - RNA, 32 nt, Human
gguggaccaggauauggaaaccaagguggugg

SEQ ID NO: 203530 - RNA, 32 nt, Human
gguggacccacacauugucuccacuccgaagc

SEQ ID NO: 203531 - RNA, 32 nt, Human
gguggacccacuggccugucagucucaauaaa

SEQ ID NO: 203532 - RNA, 32 nt, Human
gguggacccaggaggaguggcaggugguggcg

SEQ ID NO: 203533 - RNA, 32 nt, Human
gguggacccagggaacagccacuccccuccac

SEQ ID NO: 203534 - RNA, 21 nt, Human
gguggacccaucaggacccca

SEQ ID NO: 203535 - RNA, 23 nt, Human
gguggaccgcugcugaguccagg

SEQ ID NO: 203536 - RNA, 32 nt, Human
gguggaccuaaauuccuuaucauauccuuuau

SEQ ID NO: 203537 - RNA, 32 nt, Human
gguggaccugccgccaugcaggacgguaacuu

SEQ ID NO: 203538 - RNA, 32 nt, Human
gguggaccuggaccccucagagaugcucgacu

SEQ ID NO: 203539 - RNA, 32 nt, Human
gguggacgccuguaaucccagcuacuugggag

SEQ ID NO: 203540 - RNA, 18 nt, Human
gguggacgcugggccccg

SEQ ID NO: 203541 - RNA, 32 nt, Human
gguggacggcagggaucagggagccaggagcg

SEQ ID NO: 203542 - RNA, 19 nt, Human
gguggacuagacaaaguug

SEQ ID NO: 203543 - RNA, 20 nt, Human
gguggacuauguuaguaguu

SEQ ID NO: 203544 - RNA, 32 nt, Human
gguggacucacggcugcugggccccacgucaa

SEQ ID NO: 203545 - RNA, 21 nt, Human
gguggacucuaacaguaguug

SEQ ID NO: 203546 - RNA, 32 nt, Human
gguggacucucugcggcuucugagcacggagg

SEQ ID NO: 203547 - RNA, 18 nt, Human
gguggacugacuguguug

SEQ ID NO: 203548 - RNA, 22 nt, Human
gguggacugagccucacuucca

SEQ ID NO: 203549 - RNA, 32 nt, Human
gguggacugcagaggagagggauucagucuuc

SEQ ID NO: 203550 - RNA, 32 nt, Human
gguggacugugcccuucuuucccuucagagaa

SEQ ID NO: 203551 - RNA, 32 nt, Human
gguggacuucacuagugaaugucagugguaag

SEQ ID NO: 203552 - RNA, 32 nt, Human
gguggacuuggaggaggaacggcaagggccgg

SEQ ID NO: 203553 - RNA, 32 nt, Human
gguggagaaagagaaaggaaaugaagucccag

SEQ ID NO: 203554 - RNA, 19 nt, Human
gguggagaaagcauauccc

SEQ ID NO: 203555 - RNA, 32 nt, Human
gguggagaaagccagaaaacagaucuggaggc

SEQ ID NO: 203556 - RNA, 21 nt, Human
gguggagaaaguaaucuccuu

SEQ ID NO: 203557 - RNA, 21 nt, Human
gguggagaaagugagggccgu

SEQ ID NO: 203558 - RNA, 20 nt, Human
gguggagaacguggaccuga

SEQ ID NO: 203559 - RNA, 32 nt, Human
gguggagaagaagaaagccgaaguccuugaaa

SEQ ID NO: 203560 - RNA, 32 nt, Human
gguggagaagagagaagaggaagaggaagagg

SEQ ID NO: 203561 - RNA, 21 nt, Human
gguggagaaggagggggguga

SEQ ID NO: 203562 - RNA, 21 nt, Human
gguggagaaggaucaaccuga

SEQ ID NO: 203563 - RNA, 32 nt, Human
gguggagaaggggagcgcaggagcuccggcaa

SEQ ID NO: 203564 - RNA, 32 nt, Human
gguggagaaguagagagagggcaacagcuucc

SEQ ID NO: 203565 - RNA, 32 nt, Human
gguggagaauucaggagguguggccagugccc

SEQ ID NO: 203566 - RNA, 32 nt, Human
gguggagacagaaaaguauacauggauuuggc

SEQ ID NO: 203567 - RNA, 20 nt, Human
gguggagacucagccugaga

SEQ ID NO: 203568 - RNA, 32 nt, Human
gguggagagacacaccugcuccaauuucccca

SEQ ID NO: 203569 - RNA, 21 nt, Human
gguggagagacagcccacccu

SEQ ID NO: 203570 - RNA, 32 nt, Human
gguggagagagcuguggcugaggccuacccug

SEQ ID NO: 203571 - RNA, 18 nt, Human
gguggagagaggauucua

SEQ ID NO: 203572 - RNA, 22 nt, Human
gguggagagagggcaggaccug

SEQ ID NO: 203573 - RNA, 32 nt, Human
gguggagagauggaagggcaucagguguaggg

SEQ ID NO: 203574 - RNA, 32 nt, Human
gguggagagcaucuucccugacuucuuugccu

SEQ ID NO: 203575 - RNA, 32 nt, Human
gguggagagccgcggcccugaccacgaccaca

SEQ ID NO: 203576 - RNA, 32 nt, Human
gguggagagggaggggauaagagaggugcaug

SEQ ID NO: 203577 - RNA, 32 nt, Human
gguggagauacuaagcugucuguuauauuucc

SEQ ID NO: 203578 - RNA, 32 nt, Human
gguggagaucagaagccagggauuagagauug

SEQ ID NO: 203579 - RNA, 32 nt, Human
gguggagaugggcaccugcagcuuugccuuuu

SEQ ID NO: 203580 - RNA, 32 nt, Human
gguggagaugggggcggagggagcuggagcug

SEQ ID NO: 203581 - RNA, 32 nt, Human
gguggagauucccugucuucugagcccgagcc

SEQ ID NO: 203582 - RNA, 32 nt, Human
gguggagcacacugggaagcugugggccacgg

SEQ ID NO: 203583 - RNA, 32 nt, Human
gguggagcagaggggcucccucaccccgggca

SEQ ID NO: 203584 - RNA, 32 nt, Human
gguggagcagcagcucaagguccaggauauag

SEQ ID NO: 203585 - RNA, 20 nt, Human
gguggagcagguaggacuga

SEQ ID NO: 203586 - RNA, 32 nt, Human
gguggagcagguggacuggaguuucucuugag

SEQ ID NO: 203587 - RNA, 32 nt, Human
gguggagccaauucaccagcaggucccggcag

SEQ ID NO: 203588 - RNA, 32 nt, Human
gguggagccagagggagcccagugagugccgg

SEQ ID NO: 203589 - RNA, 32 nt, Human
gguggagccagccacugcaaauccuuuguguc

SEQ ID NO: 203590 - RNA, 32 nt, Human
gguggagcccauacccugccuucccugagggc

SEQ ID NO: 203591 - RNA, 32 nt, Human
gguggagccucagggccagggcaggcaggagc

SEQ ID NO: 203592 - RNA, 32 nt, Human
gguggagcggccuuuguugucuucccauuuag

SEQ ID NO: 203593 - RNA, 32 nt, Human
gguggagcgguggagggcgucacuggguuucg

SEQ ID NO: 203594 - RNA, 32 nt, Human
gguggagcguccaguggagaagaaggaagcga

SEQ ID NO: 203595 - RNA, 32 nt, Human
gguggagcguucaccagugaccuggaaggccc

SEQ ID NO: 203596 - RNA, 32 nt, Human
gguggagcugaagagccaagaggcucagaguc

SEQ ID NO: 203597 - RNA, 32 nt, Human
gguggagcugaagagccaggaggcucagaguc

SEQ ID NO: 203598 - RNA, 32 nt, Human
gguggagcugagaagaggaggaggugggggcu

SEQ ID NO: 203599 - RNA, 32 nt, Human
gguggagcuggggagggcaugggcaggccagc

SEQ ID NO: 203600 - RNA, 32 nt, Human
gguggagcugugacuggcugagcugcuguggc

SEQ ID NO: 203601 - RNA, 18 nt, Human
gguggagcuugcagugag

SEQ ID NO: 203602 - RNA, 32 nt, Human
gguggaggaacugcccuggccuagagaccaga

SEQ ID NO: 203603 - RNA, 32 nt, Human
gguggaggaaggcucugucacuccaggcauau

SEQ ID NO: 203604 - RNA, 31 nt, Human
gguggaggaagggcguccaugccaaggcccc

SEQ ID NO: 203605 - RNA, 32 nt, Human
gguggaggaagugcgaagccaugugaaggugc

SEQ ID NO: 203606 - RNA, 32 nt, Human
gguggaggaauagacuucuaguucauucuggg

SEQ ID NO: 203607 - RNA, 22 nt, Human
gguggaggagaaggggcccuga

SEQ ID NO: 203608 - RNA, 22 nt, Human
gguggaggagaauccggaccug

SEQ ID NO: 203609 - RNA, 32 nt, Human
gguggaggagcugagggagggagccauggaag

SEQ ID NO: 203610 - RNA, 32 nt, Human
gguggaggaggaggaggaagagguggaggagg

SEQ ID NO: 203611 - RNA, 32 nt, Human
gguggaggaggaggaggaggaggaaggcaaag

SEQ ID NO: 203612 - RNA, 32 nt, Human
gguggaggaggaggaggaggaggaggaggugg

SEQ ID NO: 203613 - RNA, 32 nt, Human
gguggaggaggaggaggaggaggugguggagg

SEQ ID NO: 203614 - RNA, 32 nt, Human
gguggaggaggaggaguuccucagggaguuug

SEQ ID NO: 203615 - RNA, 32 nt, Human
gguggaggaggaggcagagaggaguggagggc

SEQ ID NO: 203616 - RNA, 19 nt, Human
gguggaggaggagggucug

SEQ ID NO: 203617 - RNA, 32 nt, Human
gguggaggcaacagguuuuacugaugguguug

SEQ ID NO: 203618 - RNA, 21 nt, Human
gguggaggcagccuucaguga

SEQ ID NO: 203619 - RNA, 19 nt, Human
gguggaggccaggguucca

SEQ ID NO: 203620 - RNA, 32 nt, Human
gguggaggcccaggaaugggcgggcaggacac

SEQ ID NO: 203621 - RNA, 32 nt, Human
gguggaggcccaggcguugcuaggauugcauc

SEQ ID NO: 203622 - RNA, 31 nt, Human
gguggaggcccugcugggccugguccgcagc

SEQ ID NO: 203623 - RNA, 32 nt, Human
gguggaggccgaccaguagcugcagaccaggg

SEQ ID NO: 203624 - RNA, 32 nt, Human
gguggaggccucuguccuccacuuugaggcuc

SEQ ID NO: 203625 - RNA, 32 nt, Human
gguggaggcggcggaggcggcggcggaggcgg

SEQ ID NO: 203626 - RNA, 32 nt, Human
gguggaggcugcagcugaagguggcaggaacc

SEQ ID NO: 203627 - RNA, 32 nt, Human
gguggaggcuuagguagccggaccugccugcc

SEQ ID NO: 203628 - RNA, 32 nt, Human
gguggagggaaaauaauugauagaagaccaga

SEQ ID NO: 203629 - RNA, 32 nt, Human
gguggagggaaagcacuuugaagggaaguaag

SEQ ID NO: 203630 - RNA, 32 nt, Human
gguggagggaaggaaggagggagccggggagu

SEQ ID NO: 203631 - RNA, 32 nt, Human
gguggagggcgcgucagccacgggugggccuu

SEQ ID NO: 203632 - RNA, 21 nt, Human
gguggagggcggggcccugau

SEQ ID NO: 203633 - RNA, 32 nt, Human
gguggagggcugccaggaaacauggugcaagu

SEQ ID NO: 203634 - RNA, 32 nt, Human
gguggaggggaaaugagaguugcugguagcag

SEQ ID NO: 203635 - RNA, 21 nt, Human
gguggaggggaaggaccuuga

SEQ ID NO: 203636 - RNA, 19 nt, Human
gguggaggggcaggauucc

SEQ ID NO: 203637 - RNA, 21 nt, Human
gguggagggggaaugacagau

SEQ ID NO: 203638 - RNA, 32 nt, Human
gguggaggggugugggaaagaaaccagccaua

SEQ ID NO: 203639 - RNA, 18 nt, Human
gguggaggguggagaccu

SEQ ID NO: 203640 - RNA, 32 nt, Human
gguggagguaaggaagagucugguggggaguu

SEQ ID NO: 203641 - RNA, 32 nt, Human
gguggagguaggggccaaagaggcuuacacga

SEQ ID NO: 203642 - RNA, 32 nt, Human
gguggagguaguaaaggccauggccaugcaga

SEQ ID NO: 203643 - RNA, 32 nt, Human
gguggaggugagggggugagccuggaccugug

SEQ ID NO: 203644 - RNA, 21 nt, Human
gguggagguggaaaacgugau

SEQ ID NO: 203645 - RNA, 32 nt, Human
gguggaggugguggcagcagagguauuaugga

SEQ ID NO: 203646 - RNA, 32 nt, Human
gguggaggugugggguaugcaccugagcuccu

SEQ ID NO: 203647 - RNA, 32 nt, Human
gguggagguugaggccgugacuccaggggcau

SEQ ID NO: 203648 - RNA, 18 nt, Human
gguggagguugcagugag

SEQ ID NO: 203649 - RNA, 32 nt, Human
gguggagguugcagugagcugagaucgcacca

SEQ ID NO: 203650 - RNA, 32 nt, Human
gguggaguaggcacagauggaaaacugcugcc

SEQ ID NO: 203651 - RNA, 23 nt, Human
gguggagucagaaaccaaaguga

SEQ ID NO: 203652 - RNA, 32 nt, Human
gguggagucccagagcugcacaggguuuggcc

SEQ ID NO: 203653 - RNA, 26 nt, Human
gguggaguccugaaggagggccugau

SEQ ID NO: 203654 - RNA, 32 nt, Human
gguggagucucagaguccagggacugggagga

SEQ ID NO: 203655 - RNA, 32 nt, Human
gguggagucuugcugucuccccggcuggagcg

SEQ ID NO: 203656 - RNA, 32 nt, Human
gguggagugggcagaggugcaagagagggaug

SEQ ID NO: 203657 - RNA, 32 nt, Human
gguggaguggggagcuggcuucugcuggccag

SEQ ID NO: 203658 - RNA, 32 nt, Human
gguggaguucuagccccaucgccgacacgccc

SEQ ID NO: 203659 - RNA, 32 nt, Human
gguggaguucuuagcuauccuuggcuuucugu

SEQ ID NO: 203660 - RNA, 32 nt, Human
gguggaguuucagugagaauaaacgugucugc

SEQ ID NO: 203661 - RNA, 28 nt, Human
gguggauagagugcugccucuauccaca

SEQ ID NO: 203662 - RNA, 32 nt, Human
gguggauauucaaccagccccaccgccuaccc

SEQ ID NO: 203663 - RNA, 32 nt, Human
gguggaucaauugaggccaggaguuugagacc

SEQ ID NO: 203664 - RNA, 32 nt, Human
gguggaucacaaggucaggagaucgaaaccau

SEQ ID NO: 203665 - RNA, 32 nt, Human
gguggaucacaaggucaggagaucgagaccau

SEQ ID NO: 203666 - RNA, 32 nt, Human
gguggaucacccaaggucaggaguuugagacc

SEQ ID NO: 203667 - RNA, 32 nt, Human
gguggaucaccugaggccaggaagaccagccu

SEQ ID NO: 203668 - RNA, 32 nt, Human
gguggaucaccugaggccaggaguucaagacc

SEQ ID NO: 203669 - RNA, 32 nt, Human
gguggaucaccugaggccaggaguucgagacc

SEQ ID NO: 203670 - RNA, 32 nt, Human
gguggaucaccugaggccagguguuugagauc

SEQ ID NO: 203671 - RNA, 32 nt, Human
gguggaucaccugaggccgggaauuugagacc

SEQ ID NO: 203672 - RNA, 21 nt, Human
gguggaucaccugaggucagg

SEQ ID NO: 203673 - RNA, 21 nt, Human
gguggaucaccugagguuagg

SEQ ID NO: 203674 - RNA, 19 nt, Human
gguggaucacgaggucagg

SEQ ID NO: 203675 - RNA, 32 nt, Human
gguggaucacuugaagccaggaauucaagacg

SEQ ID NO: 203676 - RNA, 21 nt, Human
gguggaucacuugagcccagg

SEQ ID NO: 203677 - RNA, 21 nt, Human
gguggaucacuugagcucagg

SEQ ID NO: 203678 - RNA, 32 nt, Human
gguggaucacuugaggccaggaauucgagacc

SEQ ID NO: 203679 - RNA, 32 nt, Human
gguggaucacuugaggccaggaguucaagacc

SEQ ID NO: 203680 - RNA, 32 nt, Human
gguggaucacuugaggccaggaguucgagacc

SEQ ID NO: 203681 - RNA, 32 nt, Human
gguggaucacuugaggccaggaguuugaaacc

SEQ ID NO: 203682 - RNA, 32 nt, Human
gguggaucacuugaggccaggaguuugagacc

SEQ ID NO: 203683 - RNA, 21 nt, Human
gguggaucacuugaggucggg

SEQ ID NO: 203684 - RNA, 21 nt, Human
gguggaucaucugaggucagg

SEQ ID NO: 203685 - RNA, 19 nt, Human
gguggaucaugaggucagg

SEQ ID NO: 203686 - RNA, 32 nt, Human
gguggaucaugugaggccaggaguucgagaau

SEQ ID NO: 203687 - RNA, 23 nt, Human
gguggaucauuuaccaggaucca

SEQ ID NO: 203688 - RNA, 32 nt, Human
gguggaucauuugaggccaggaauucaagacc

SEQ ID NO: 203689 - RNA, 32 nt, Human
gguggaucauuugaggccaggaguucgauacc

SEQ ID NO: 203690 - RNA, 21 nt, Human
gguggaucccuugagcucagg

SEQ ID NO: 203691 - RNA, 32 nt, Human
gguggauccugcucccuguccacguccugugc

SEQ ID NO: 203692 - RNA, 20 nt, Human
gguggaucgcuugagccagg

SEQ ID NO: 203693 - RNA, 21 nt, Human
gguggaucgcuugagcccagg

SEQ ID NO: 203694 - RNA, 21 nt, Human
gguggaucgcuugagcucagg

SEQ ID NO: 203695 - RNA, 32 nt, Human
gguggaucgcuugaggccaggaauucgagacc

SEQ ID NO: 203696 - RNA, 32 nt, Human
gguggaucgcuugaggccaggaguucaagacc

SEQ ID NO: 203697 - RNA, 32 nt, Human
gguggaucucaguaaggagguagaguagauuu

SEQ ID NO: 203698 - RNA, 21 nt, Human
gguggaucucuugagcccagg

SEQ ID NO: 203699 - RNA, 32 nt, Human
gguggaugaagugguggacugccccuccacac

SEQ ID NO: 203700 - RNA, 32 nt, Human
gguggaugagacacaauuuccuauccagcaga

SEQ ID NO: 203701 - RNA, 32 nt, Human
gguggaugcagaggccaguccauauaccaccc

SEQ ID NO: 203702 - RNA, 32 nt, Human
gguggaugccuauaaucccagcuacucagaag

SEQ ID NO: 203703 - RNA, 32 nt, Human
gguggauggaugggugaggagggaucuccaua

SEQ ID NO: 203704 - RNA, 32 nt, Human
gguggauggccacuggcagugauggggaugga

SEQ ID NO: 203705 - RNA, 32 nt, Human
gguggauggggaggccagagggagcaaugagg

SEQ ID NO: 203706 - RNA, 32 nt, Human
gguggauggugcucauaaaaggccccagucgg

SEQ ID NO: 203707 - RNA, 32 nt, Human
gguggauguggcagcugagaucuacagggggc

SEQ ID NO: 203708 - RNA, 32 nt, Human
gguggauguuguugggggcuccagccuggagg

SEQ ID NO: 203709 - RNA, 18 nt, Human
gguggauuaccaguauug

SEQ ID NO: 203710 - RNA, 32 nt, Human
gguggauucacugguuggagugcguguuuucu

SEQ ID NO: 203711 - RNA, 32 nt, Human
gguggauucagcagaaggcaagaugguuauaa

SEQ ID NO: 203712 - RNA, 21 nt, Human
gguggauugccugaggucagg

SEQ ID NO: 203713 - RNA, 21 nt, Human
gguggauugcuugaacccagg

SEQ ID NO: 203714 - RNA, 21 nt, Human
gguggauugcuugagccaagg

SEQ ID NO: 203715 - RNA, 21 nt, Human
gguggauugcuugagcccagg

SEQ ID NO: 203716 - RNA, 21 nt, Human
gguggauugcuugagcucggg

SEQ ID NO: 203717 - RNA, 21 nt, Human
gguggauugcuugagcugagg

SEQ ID NO: 203718 - RNA, 32 nt, Human
gguggauugcuugaggccaggaguuagagacc

SEQ ID NO: 203719 - RNA, 21 nt, Human
gguggauugcuuugaggccag

SEQ ID NO: 203720 - RNA, 32 nt, Human
gguggauuuagaggaauccuggcuuucauuuu

SEQ ID NO: 203721 - RNA, 32 nt, Human
gguggauuuccacggcuucaucccuggcucca

SEQ ID NO: 203722 - RNA, 18 nt, Human
gguggauuugggcccagg

SEQ ID NO: 203723 - RNA, 23 nt, Human
gguggcaaagugagacccugucu

SEQ ID NO: 203724 - RNA, 32 nt, Human
gguggcaacuucuccuccugcggccgggagcg

SEQ ID NO: 203725 - RNA, 32 nt, Human
gguggcaagaagaucgggaagacugaguaggg

SEQ ID NO: 203726 - RNA, 32 nt, Human
gguggcaagguguuaaccucagaagaugaaua

SEQ ID NO: 203727 - RNA, 32 nt, Human
gguggcacagccuggcuugagugguggcaugu

SEQ ID NO: 203728 - RNA, 32 nt, Human
gguggcaccacugcacuccagccugggugaca

SEQ ID NO: 203729 - RNA, 32 nt, Human
gguggcaccacugcccuccagccuggaugaca

SEQ ID NO: 203730 - RNA, 32 nt, Human
gguggcaccacugccgucauuucagcuucugg

SEQ ID NO: 203731 - RNA, 32 nt, Human
gguggcaccacugccuucauuucagcuuccgg

SEQ ID NO: 203732 - RNA, 32 nt, Human
gguggcacccaggugagugacaucccaguuga

SEQ ID NO: 203733 - RNA, 32 nt, Human
gguggcaccgguggcccuggcugcaguucugg

SEQ ID NO: 203734 - RNA, 21 nt, Human
gguggcacgcaccugaucgca

SEQ ID NO: 203735 - RNA, 32 nt, Human
gguggcacuacugccaucauuucagcuucugg

SEQ ID NO: 203736 - RNA, 32 nt, Human
gguggcacuccaaccuccuccuaaaggcuggc

SEQ ID NO: 203737 - RNA, 32 nt, Human
gguggcacuguccacaaaucggcuucucugca

SEQ ID NO: 203738 - RNA, 32 nt, Human
gguggcagaaaaucacucccugcucaucauaa

SEQ ID NO: 203739 - RNA, 32 nt, Human
gguggcagaagaugcgauugacuggggcgacu

SEQ ID NO: 203740 - RNA, 32 nt, Human
gguggcagagaggcuccccuggggcugugggg

SEQ ID NO: 203741 - RNA, 32 nt, Human
gguggcagagggcagggucaucacccucuagc

SEQ ID NO: 203742 - RNA, 17 nt, Human
gguggcagcagaggcag

SEQ ID NO: 203743 - RNA, 32 nt, Human
gguggcagcaguguuggcaaggaggacucuga

SEQ ID NO: 203744 - RNA, 32 nt, Human
gguggcagcccagcucccaguucuuucccucu

SEQ ID NO: 203745 - RNA, 32 nt, Human
gguggcagccccggagccggggaaugugaaga

SEQ ID NO: 203746 - RNA, 17 nt, Human
gguggcagcggcugcag

SEQ ID NO: 203747 - RNA, 32 nt, Human
gguggcagcuucucccccuuccuucccacccc

SEQ ID NO: 203748 - RNA, 32 nt, Human
gguggcagcuugugccagagugacacaggcuu

SEQ ID NO: 203749 - RNA, 32 nt, Human
gguggcaggaagggacaagcuguggagcuggc

SEQ ID NO: 203750 - RNA, 32 nt, Human
gguggcaggaaggggcagccugggcucuggga

SEQ ID NO: 203751 - RNA, 32 nt, Human
gguggcaggacucaggcaugcagaggguagca

SEQ ID NO: 203752 - RNA, 32 nt, Human
gguggcaggagcugggggagaggacucucccc

SEQ ID NO: 203753 - RNA, 32 nt, Human
gguggcaggaggggugaaagaggagacacggc

SEQ ID NO: 203754 - RNA, 32 nt, Human
gguggcaggaguggcugugggagcagcagugg

SEQ ID NO: 203755 - RNA, 16 nt, Human
gguggcaggccaggga

SEQ ID NO: 203756 - RNA, 32 nt, Human
gguggcaggcgccguggcagggauccuggagc

SEQ ID NO: 203757 - RNA, 32 nt, Human
gguggcagggaggagagcaagagguggcugaa

SEQ ID NO: 203758 - RNA, 32 nt, Human
gguggcagggaggcggcguugcgguggcugca

SEQ ID NO: 203759 - RNA, 32 nt, Human
gguggcagggauggagguuacgcaugggcuca

SEQ ID NO: 203760 - RNA, 32 nt, Human
gguggcaggggcauuauagccugguggacaug

SEQ ID NO: 203761 - RNA, 32 nt, Human
gguggcagggggcuggcaugucagcacugccc

SEQ ID NO: 203762 - RNA, 32 nt, Human
gguggcagguauaacauggccauggacacucu

SEQ ID NO: 203763 - RNA, 32 nt, Human
gguggcaggugcaucugggcuugggggcuucu

SEQ ID NO: 203764 - RNA, 32 nt, Human
gguggcagugacugauguuugucucuagcuaa

SEQ ID NO: 203765 - RNA, 32 nt, Human
gguggcagugccuggggagauccgaggcuaug

SEQ ID NO: 203766 - RNA, 32 nt, Human
gguggcagugcugcgcggggcucccagccaau

SEQ ID NO: 203767 - RNA, 20 nt, Human
gguggcaguggaguagggaa

SEQ ID NO: 203768 - RNA, 32 nt, Human
gguggcaguuacugauagccaagcagauuuuu

SEQ ID NO: 203769 - RNA, 32 nt, Human
gguggcauacaucucagaacguggagaaugau

SEQ ID NO: 203770 - RNA, 32 nt, Human
gguggcauacgccuguaguccuagccacucag

SEQ ID NO: 203771 - RNA, 32 nt, Human
gguggcauaugcuggggguagggguagcauug

SEQ ID NO: 203772 - RNA, 28 nt, Human
gguggcauccaaccugccucauucggcc

SEQ ID NO: 203773 - RNA, 32 nt, Human
gguggcauccccugcccaugccuaccacccgc

SEQ ID NO: 203774 - RNA, 32 nt, Human
gguggcaugagcugcagcugcagcaguggcag

SEQ ID NO: 203775 - RNA, 32 nt, Human
gguggcaugagcugugugaagcgccucuaaau

SEQ ID NO: 203776 - RNA, 32 nt, Human
gguggcaugcaucugugcucccagcuccucac

SEQ ID NO: 203777 - RNA, 32 nt, Human
gguggcaugccuguguucccagcuacucagga

SEQ ID NO: 203778 - RNA, 32 nt, Human
gguggcaugggagaugucugugcuuggaggua

SEQ ID NO: 203779 - RNA, 32 nt, Human
gguggcaugucggucaggcacagcaggguccu

SEQ ID NO: 203780 - RNA, 32 nt, Human
gguggcauucuguuuugugaaaggaggaagga

SEQ ID NO: 203781 - RNA, 32 nt, Human
gguggcauuuugaaagagcgcugggcaagcag

SEQ ID NO: 203782 - RNA, 32 nt, Human
gguggccaaacccgagcugaaggaucccaucc

SEQ ID NO: 203783 - RNA, 32 nt, Human
gguggccaacagcuuccuggcugccaucuuuc

SEQ ID NO: 203784 - RNA, 32 nt, Human
gguggccaagguaggagaaucgcuugagcuca

SEQ ID NO: 203785 - RNA, 19 nt, Human
gguggccaauccagguggg

SEQ ID NO: 203786 - RNA, 20 nt, Human
gguggccacagggggccuga

SEQ ID NO: 203787 - RNA, 22 nt, Human
gguggccacggggaggccucuu

SEQ ID NO: 203788 - RNA, 32 nt, Human
gguggccacuuauaugaaccaagggaggaguc

SEQ ID NO: 203789 - RNA, 32 nt, Human
gguggccacuuauaugaaccaagggagggguc

SEQ ID NO: 203790 - RNA, 23 nt, Human
gguggccagaucaccugagguca

SEQ ID NO: 203791 - RNA, 32 nt, Human
gguggccagcccgcagagguggggugcugggg

SEQ ID NO: 203792 - RNA, 32 nt, Human
gguggccagcuacucaggaggcugaggcagga

SEQ ID NO: 203793 - RNA, 32 nt, Human
gguggccagcuccucacuuggcugagguccag

SEQ ID NO: 203794 - RNA, 32 nt, Human
gguggccagcugguuugggggauuugggccau

SEQ ID NO: 203795 - RNA, 32 nt, Human
gguggccagcuugccaguaccugagccggucg

SEQ ID NO: 203796 - RNA, 32 nt, Human
gguggccagggccagagcaggcggcccgcggg

SEQ ID NO: 203797 - RNA, 32 nt, Human
gguggccagucguauaccaucccuggaaggau

SEQ ID NO: 203798 - RNA, 32 nt, Human
gguggccaugccacucaugguugcuauggccg

SEQ ID NO: 203799 - RNA, 19 nt, Human
gguggccaugguaccgggg

SEQ ID NO: 203800 - RNA, 32 nt, Human
gguggcccaagugcucuugguggcccagcuug

SEQ ID NO: 203801 - RNA, 32 nt, Human
gguggcccacagacugcuguugcuuauagucc

SEQ ID NO: 203802 - RNA, 20 nt, Human
gguggcccacaucuguaauc

SEQ ID NO: 203803 - RNA, 23 nt, Human
gguggcccacgccuguaauccca

SEQ ID NO: 203804 - RNA, 32 nt, Human
gguggcccaggagaagucaggaagggagccca

SEQ ID NO: 203805 - RNA, 32 nt, Human
gguggcccagggagugugaggcugcagccuca

SEQ ID NO: 203806 - RNA, 20 nt, Human
gguggcccaugccuguaauc

SEQ ID NO: 203807 - RNA, 32 nt, Human
gguggccccacggccccuacaggcuggcccug

SEQ ID NO: 203808 - RNA, 22 nt, Human
gguggcccccugcccgauccac

SEQ ID NO: 203809 - RNA, 32 nt, Human
gguggccccgagagagccagggccauggaggc

SEQ ID NO: 203810 - RNA, 32 nt, Human
gguggccccugccugugucccucagcucccag

SEQ ID NO: 203811 - RNA, 32 nt, Human
gguggcccuccagugcuggcagguggccucac

SEQ ID NO: 203812 - RNA, 32 nt, Human
gguggcccuccccucaauuccacaccccagac

SEQ ID NO: 203813 - RNA, 32 nt, Human
gguggcccugaucccgaugacucugaaacaug

SEQ ID NO: 203814 - RNA, 32 nt, Human
gguggcccuggaucuuguggcugcaaucgguu

SEQ ID NO: 203815 - RNA, 32 nt, Human
gguggcccuuugggcucccuguccaggauuug

SEQ ID NO: 203816 - RNA, 32 nt, Human
gguggccgacugcugcuagcggccugccgcca

SEQ ID NO: 203817 - RNA, 18 nt, Human
gguggccgcccaccaggg

SEQ ID NO: 203818 - RNA, 32 nt, Human
gguggccgccuguaaucccagcuacucaggag

SEQ ID NO: 203819 - RNA, 32 nt, Human
gguggccggcagaaguuugccaucccaaaaau

SEQ ID NO: 203820 - RNA, 21 nt, Human
gguggccgggugugguggcuu

SEQ ID NO: 203821 - RNA, 32 nt, Human
gguggccguccugagggggaagugagaagggc

SEQ ID NO: 203822 - RNA, 32 nt, Human
gguggccgugcaauaaauaucugccgugaaca

SEQ ID NO: 203823 - RNA, 32 nt, Human
gguggccucaaaggaggcccugucccagccac

SEQ ID NO: 203824 - RNA, 32 nt, Human
gguggccucaagagcacacagagaagggaaga

SEQ ID NO: 203825 - RNA, 28 nt, Human
gguggccuccagggugccuccaccugac

SEQ ID NO: 203826 - RNA, 32 nt, Human
gguggccucccuugccuggugccugagugaag

SEQ ID NO: 203827 - RNA, 32 nt, Human
gguggccucggaggcaggcucuggagcugcuu

SEQ ID NO: 203828 - RNA, 32 nt, Human
gguggccucuccaagcccugguggugcugggg

SEQ ID NO: 203829 - RNA, 32 nt, Human
gguggccucugcaggccuaggugcagcuccuc

SEQ ID NO: 203830 - RNA, 32 nt, Human
gguggccugaagccugggggccaggcugccag

SEQ ID NO: 203831 - RNA, 32 nt, Human
gguggccugcacuccucagcuugugcugcccg

SEQ ID NO: 203832 - RNA, 32 nt, Human
gguggccugccagcacagccagugccaucagg

SEQ ID NO: 203833 - RNA, 32 nt, Human
gguggccuggagcagcagcccaugcuacucuc

SEQ ID NO: 203834 - RNA, 32 nt, Human
gguggccuggcuucaggggaagacaggagcca

SEQ ID NO: 203835 - RNA, 32 nt, Human
gguggccugggagcugcuuucuccccacuggc

SEQ ID NO: 203836 - RNA, 32 nt, Human
gguggccugggaggcagggccugggcagggcu

SEQ ID NO: 203837 - RNA, 32 nt, Human
gguggccugggcggaggcuaugguggggccag

SEQ ID NO: 203838 - RNA, 32 nt, Human
gguggccuggggacuggagggaccaggaugcu

SEQ ID NO: 203839 - RNA, 32 nt, Human
gguggccuguaaucccagcuacuugggaggcu

SEQ ID NO: 203840 - RNA, 32 nt, Human
gguggccuguagucccagcuaucccagagguc

SEQ ID NO: 203841 - RNA, 32 nt, Human
gguggccuguagugucagcuacucggaaggcu

SEQ ID NO: 203842 - RNA, 32 nt, Human
gguggccuucaggcuggacggcgcgggucagc

SEQ ID NO: 203843 - RNA, 32 nt, Human
gguggccuuccucuugcaguugaggccggcgc

SEQ ID NO: 203844 - RNA, 21 nt, Human
gguggccuuggugcuggcuuc

SEQ ID NO: 203845 - RNA, 32 nt, Human
gguggccuuuccugcugacacuccacgagcug

SEQ ID NO: 203846 - RNA, 32 nt, Human
gguggccuuugucacuuccuucugccuuccaa

SEQ ID NO: 203847 - RNA, 32 nt, Human
gguggcgacccacagcccugguaaucgcucgc

SEQ ID NO: 203848 - RNA, 20 nt, Human
gguggcgaguaaaagcugca

SEQ ID NO: 203849 - RNA, 32 nt, Human
gguggcgcaugccuauagucucagccuccaga

SEQ ID NO: 203850 - RNA, 20 nt, Human
gguggcgcaugccuguaguc

SEQ ID NO: 203851 - RNA, 21 nt, Human
gguggcgcaugccuguagucc

SEQ ID NO: 203852 - RNA, 32 nt, Human
gguggcgccauggacguggcccuaaacgcugu

SEQ ID NO: 203853 - RNA, 32 nt, Human
gguggcgcgcggugaggagagcgcggcgcccc

SEQ ID NO: 203854 - RNA, 32 nt, Human
gguggcgcuggaggcagcagcggcuggagcgg

SEQ ID NO: 203855 - RNA, 32 nt, Human
gguggcggaggggguggcucucacagggccca

SEQ ID NO: 203856 - RNA, 32 nt, Human
gguggcggaggugagaggauugcccgaaccca

SEQ ID NO: 203857 - RNA, 32 nt, Human
gguggcggcgggcagaggugaugucugggagc

SEQ ID NO: 203858 - RNA, 23 nt, Human
gguggcgggauggggagcagcuu

SEQ ID NO: 203859 - RNA, 32 nt, Human
gguggcggggcugcaagagccgggccuggccu

SEQ ID NO: 203860 - RNA, 32 nt, Human
gguggcggucaccuguaacccaagcuacuugg

SEQ ID NO: 203861 - RNA, 32 nt, Human
gguggcggugccuggggagauccgaggcuaug

SEQ ID NO: 203862 - RNA, 32 nt, Human
gguggcgguggaaguuaagggagucaggggcu

SEQ ID NO: 203863 - RNA, 32 nt, Human
gguggcgguggaggaggcggggcggcgggggc

SEQ ID NO: 203864 - RNA, 32 nt, Human
gguggcgguggaggggagaugggggcagggac

SEQ ID NO: 203865 - RNA, 32 nt, Human
gguggcgguggcugagcagaggacccggcggg

SEQ ID NO: 203866 - RNA, 32 nt, Human
gguggcgguuccauccuguacugcucccagcu

SEQ ID NO: 203867 - RNA, 32 nt, Human
gguggcgucuacccacccucccuucuagcaga

SEQ ID NO: 203868 - RNA, 32 nt, Human
gguggcgugcgcccgcacaaaggcgccgcguu

SEQ ID NO: 203869 - RNA, 32 nt, Human
gguggcuaaggcagauagacugcuugaaccca

SEQ ID NO: 203870 - RNA, 32 nt, Human
gguggcuacagccuuugugcuuuuaagagugg

SEQ ID NO: 203871 - RNA, 32 nt, Human
gguggcuacuacuucagguucuugccucagaa

SEQ ID NO: 203872 - RNA, 32 nt, Human
gguggcuacucugugccagagccuggggcucu

SEQ ID NO: 203873 - RNA, 32 nt, Human
gguggcuagacugcuacggcagcuucucugau

SEQ ID NO: 203874 - RNA, 32 nt, Human
gguggcuaggguggauggaucgcuugagccca

SEQ ID NO: 203875 - RNA, 32 nt, Human
gguggcuaugcucaccccaucucccuugagag

SEQ ID NO: 203876 - RNA, 20 nt, Human
gguggcucaagccuguaauc

SEQ ID NO: 203877 - RNA, 32 nt, Human
gguggcucacacaccucuaaucucagcgcuug

SEQ ID NO: 203878 - RNA, 32 nt, Human
gguggcucacacacucucauucacacacacaa

SEQ ID NO: 203879 - RNA, 23 nt, Human
gguggcucacacaggagaaucac

SEQ ID NO: 203880 - RNA, 23 nt, Human
gguggcucacacccauaauccca

SEQ ID NO: 203881 - RNA, 32 nt, Human
gguggcucacacccgacguaaucccagcacgu

SEQ ID NO: 203882 - RNA, 23 nt, Human
gguggcucacaccuauaauccca

SEQ ID NO: 203883 - RNA, 23 nt, Human
gguggcucacaccugcaauccca

SEQ ID NO: 203884 - RNA, 23 nt, Human
gguggcucacaccuguaacccca

SEQ ID NO: 203885 - RNA, 32 nt, Human
gguggcucacaccuguaauaaucccagcacuu

SEQ ID NO: 203886 - RNA, 20 nt, Human
gguggcucacaccuguaauc

SEQ ID NO: 203887 - RNA, 22 nt, Human
gguggcucacaccuguaauccc

SEQ ID NO: 203888 - RNA, 23 nt, Human
gguggcucacaccuguaauccca

SEQ ID NO: 203889 - RNA, 32 nt, Human
gguggcucacaccuguaaucccugcacuuugg

SEQ ID NO: 203890 - RNA, 23 nt, Human
gguggcucacaccuguaaucuca

SEQ ID NO: 203891 - RNA, 20 nt, Human
gguggcucacaccugucauc

SEQ ID NO: 203892 - RNA, 20 nt, Human
gguggcucacaccugugauc

SEQ ID NO: 203893 - RNA, 23 nt, Human
gguggcucacaccugugauccca

SEQ ID NO: 203894 - RNA, 32 nt, Human
gguggcucacaccuguggucucagccucccga

SEQ ID NO: 203895 - RNA, 19 nt, Human
gguggcucacaccuuaauc

SEQ ID NO: 203896 - RNA, 23 nt, Human
gguggcucacacguguaauccca

SEQ ID NO: 203897 - RNA, 23 nt, Human
gguggcucacacuuauaauccca

SEQ ID NO: 203898 - RNA, 20 nt, Human
gguggcucacacuuguaauc

SEQ ID NO: 203899 - RNA, 23 nt, Human
gguggcucacacuuguaauccca

SEQ ID NO: 203900 - RNA, 20 nt, Human
gguggcucacauguguaauc

SEQ ID NO: 203901 - RNA, 20 nt, Human
gguggcucaccccuguaauc

SEQ ID NO: 203902 - RNA, 23 nt, Human
gguggcucaccccuguaauccca

SEQ ID NO: 203903 - RNA, 32 nt, Human
gguggcucacccuagauuguggcccagaucuc

SEQ ID NO: 203904 - RNA, 20 nt, Human
gguggcucaccucuguaauc

SEQ ID NO: 203905 - RNA, 32 nt, Human
gguggcucaccuguaaucccagcacuuuggga

SEQ ID NO: 203906 - RNA, 23 nt, Human
gguggcucacgcauguaauccca

SEQ ID NO: 203907 - RNA, 23 nt, Human
gguggcucacgcccguaauccca

SEQ ID NO: 203908 - RNA, 22 nt, Human
gguggcucacgccuauaauccc

SEQ ID NO: 203909 - RNA, 23 nt, Human
gguggcucacgccuauaauccca

SEQ ID NO: 203910 - RNA, 23 nt, Human
gguggcucacgccuguaacccca

SEQ ID NO: 203911 - RNA, 23 nt, Human
gguggcucacgccuguaaccuca

SEQ ID NO: 203912 - RNA, 20 nt, Human
gguggcucacgccuguaauc

SEQ ID NO: 203913 - RNA, 22 nt, Human
gguggcucacgccuguaauccc

SEQ ID NO: 203914 - RNA, 23 nt, Human
gguggcucacgccuguaauccca

SEQ ID NO: 203915 - RNA, 32 nt, Human
gguggcucacgccuguaaucccugcauuuugg

SEQ ID NO: 203916 - RNA, 23 nt, Human
gguggcucacgccuguaaucuca

SEQ ID NO: 203917 - RNA, 20 nt, Human
gguggcucacgccuguaauu

SEQ ID NO: 203918 - RNA, 21 nt, Human
gguggcucacgccuguagucc

SEQ ID NO: 203919 - RNA, 23 nt, Human
gguggcucacgccugucauccca

SEQ ID NO: 203920 - RNA, 32 nt, Human
gguggcucacgccugugauaccagcacuuuug

SEQ ID NO: 203921 - RNA, 23 nt, Human
gguggcucacgccugugauccca

SEQ ID NO: 203922 - RNA, 32 nt, Human
gguggcucacgccugugauccuagcacuuugg

SEQ ID NO: 203923 - RNA, 20 nt, Human
gguggcucacgcuuguaauc

SEQ ID NO: 203924 - RNA, 23 nt, Human
gguggcucacgcuuguaauccca

SEQ ID NO: 203925 - RNA, 20 nt, Human
gguggcucacgucuauaauc

SEQ ID NO: 203926 - RNA, 20 nt, Human
gguggcucacgucuguaauc

SEQ ID NO: 203927 - RNA, 20 nt, Human
gguggcucacuccuguaauc

SEQ ID NO: 203928 - RNA, 23 nt, Human
gguggcucacuccuguaauccca

SEQ ID NO: 203929 - RNA, 20 nt, Human
gguggcucaggccuguaauc

SEQ ID NO: 203930 - RNA, 32 nt, Human
gguggcucaguuaaggaaugagaagauagagg

SEQ ID NO: 203931 - RNA, 20 nt, Human
gguggcucauaccuguaauc

SEQ ID NO: 203932 - RNA, 23 nt, Human
gguggcucauaccuguaauccca

SEQ ID NO: 203933 - RNA, 23 nt, Human
gguggcucauacguguaauccca

SEQ ID NO: 203934 - RNA, 23 nt, Human
gguggcucaucccuguaauccca

SEQ ID NO: 203935 - RNA, 32 nt, Human
gguggcucaugccaguaauugcagccucccuu

SEQ ID NO: 203936 - RNA, 20 nt, Human
gguggcucaugccuauaauc

SEQ ID NO: 203937 - RNA, 23 nt, Human
gguggcucaugccuauaauccca

SEQ ID NO: 203938 - RNA, 20 nt, Human
gguggcucaugccuauaauu

SEQ ID NO: 203939 - RNA, 23 nt, Human
gguggcucaugccuauuauccca

SEQ ID NO: 203940 - RNA, 23 nt, Human
gguggcucaugccuccaauccca

SEQ ID NO: 203941 - RNA, 20 nt, Human
gguggcucaugccucuaauc

SEQ ID NO: 203942 - RNA, 23 nt, Human
gguggcucaugccuguaaaccca

SEQ ID NO: 203943 - RNA, 20 nt, Human
gguggcucaugccuguaauc

SEQ ID NO: 203944 - RNA, 21 nt, Human
gguggcucaugccuguaaucc

SEQ ID NO: 203945 - RNA, 22 nt, Human
gguggcucaugccuguaauccc

SEQ ID NO: 203946 - RNA, 23 nt, Human
gguggcucaugccuguaauccca

SEQ ID NO: 203947 - RNA, 32 nt, Human
gguggcucaugccuguaaucccugcaauuugg

SEQ ID NO: 203948 - RNA, 32 nt, Human
gguggcucaugccuguaaucccugcacuuugg

SEQ ID NO: 203949 - RNA, 23 nt, Human
gguggcucaugccuguaaucgca

SEQ ID NO: 203950 - RNA, 23 nt, Human
gguggcucaugccuguaaucuca

SEQ ID NO: 203951 - RNA, 20 nt, Human
gguggcucaugccuguaguc

SEQ ID NO: 203952 - RNA, 21 nt, Human
gguggcucaugccuguagucc

SEQ ID NO: 203953 - RNA, 32 nt, Human
gguggcucaugccuguaguccuagcacuuugg

SEQ ID NO: 203954 - RNA, 32 nt, Human
gguggcucaugccuguauccagcacuuuggga

SEQ ID NO: 203955 - RNA, 23 nt, Human
gguggcucaugccugugauccca

SEQ ID NO: 203956 - RNA, 32 nt, Human
gguggcucaugccugugauccuagcacuuugc

SEQ ID NO: 203957 - RNA, 32 nt, Human
gguggcucaugccugugauccuagcacuuugg

SEQ ID NO: 203958 - RNA, 21 nt, Human
gguggcucaugccuguggucc

SEQ ID NO: 203959 - RNA, 23 nt, Human
gguggcucaugccuuuaauccca

SEQ ID NO: 203960 - RNA, 23 nt, Human
gguggcucaugcuuguaauccca

SEQ ID NO: 203961 - RNA, 32 nt, Human
gguggcucccaggaugccggcggcaguagcag

SEQ ID NO: 203962 - RNA, 32 nt, Human
gguggcucccuuuucaggacuagggcuuucuc

SEQ ID NO: 203963 - RNA, 32 nt, Human
gguggcuccuaugguaggaaggaugaccaggu

SEQ ID NO: 203964 - RNA, 32 nt, Human
gguggcuccugccugugauccuagcacuuugg

SEQ ID NO: 203965 - RNA, 23 nt, Human
gguggcucgugccuguaauccca

SEQ ID NO: 203966 - RNA, 21 nt, Human
gguggcucgugccuguagucc

SEQ ID NO: 203967 - RNA, 23 nt, Human
gguggcucucgccuauaauccca

SEQ ID NO: 203968 - RNA, 23 nt, Human
gguggcucucgccuguaauccca

SEQ ID NO: 203969 - RNA, 32 nt, Human
gguggcucucgggcggggguguugcgguggcu

SEQ ID NO: 203970 - RNA, 31 nt, Human
gguggcucuuccccaccuugccagcaggcuc

SEQ ID NO: 203971 - RNA, 21 nt, Human
gguggcucuugccuguagucc

SEQ ID NO: 203972 - RNA, 21 nt, Human
gguggcugacccaggauugca

SEQ ID NO: 203973 - RNA, 32 nt, Human
gguggcugacccagucccugggggaagcccug

SEQ ID NO: 203974 - RNA, 32 nt, Human
gguggcugagcaacacauucccaaguguaaga

SEQ ID NO: 203975 - RNA, 32 nt, Human
gguggcugaggcaagagaauugcuugaacccg

SEQ ID NO: 203976 - RNA, 32 nt, Human
gguggcugaggcaggagggauugcuugaaccu

SEQ ID NO: 203977 - RNA, 32 nt, Human
gguggcugaggcauaagaauugcuugagccug

SEQ ID NO: 203978 - RNA, 32 nt, Human
gguggcugaggcaugagaaucacuugaaccca

SEQ ID NO: 203979 - RNA, 21 nt, Human
gguggcugaugccuguaaucc

SEQ ID NO: 203980 - RNA, 32 nt, Human
gguggcugaugucgccacaguaccaugagguu

SEQ ID NO: 203981 - RNA, 32 nt, Human
gguggcugcacugucgcccagcagcgaguaaa

SEQ ID NO: 203982 - RNA, 32 nt, Human
gguggcugcagccucagagcccucccagguug

SEQ ID NO: 203983 - RNA, 21 nt, Human
gguggcugcaggucugagaca

SEQ ID NO: 203984 - RNA, 15 nt, Human
gguggcugccaggga

SEQ ID NO: 203985 - RNA, 32 nt, Human
gguggcugccucagggcagggugccuggcgga

SEQ ID NO: 203986 - RNA, 32 nt, Human
gguggcugccuguaaucccagcuacuccagaa

SEQ ID NO: 203987 - RNA, 32 nt, Human
gguggcugcgcaggguggagggaguggccagc

SEQ ID NO: 203988 - RNA, 20 nt, Human
gguggcugcgugugguggcu

SEQ ID NO: 203989 - RNA, 32 nt, Human
gguggcugcguuuuggaaggggacccagagag

SEQ ID NO: 203990 - RNA, 32 nt, Human
gguggcugcugaggccuugguggacagaggau

SEQ ID NO: 203991 - RNA, 32 nt, Human
gguggcugcugugcugugccuagaugcacgau

SEQ ID NO: 203992 - RNA, 21 nt, Human
gguggcugcuuugcagggcuu

SEQ ID NO: 203993 - RNA, 32 nt, Human
gguggcugcuuugcagggcuuuggcuguuacc

SEQ ID NO: 203994 - RNA, 32 nt, Human
gguggcuggaaaaagcaaacaaacaaacaaag

SEQ ID NO: 203995 - RNA, 32 nt, Human
gguggcuggcgugcugggcauggggccugcuc

SEQ ID NO: 203996 - RNA, 32 nt, Human
gguggcugggaagugaaacggagccagcggcu

SEQ ID NO: 203997 - RNA, 32 nt, Human
gguggcugggagagggauaguguuaggagaaa

SEQ ID NO: 203998 - RNA, 32 nt, Human
gguggcugggaggggguguggugggaaaaagu

SEQ ID NO: 203999 - RNA, 18 nt, Human
gguggcugggagguggcu

SEQ ID NO: 204000 - RNA, 20 nt, Human
gguggcugggcgugguggcu

SEQ ID NO: 204001 - RNA, 32 nt, Human
gguggcugggcugugguagugggcauaggcag

SEQ ID NO: 204002 - RNA, 32 nt, Human
gguggcuggggcuggagccaggaaaggcuuga

SEQ ID NO: 204003 - RNA, 32 nt, Human
gguggcugggggcagcaagggagcagcaaggc

SEQ ID NO: 204004 - RNA, 32 nt, Human
gguggcugggguggcagcugaucaugucagga

SEQ ID NO: 204005 - RNA, 32 nt, Human
gguggcugggucugugaaaaacaguggacagc

SEQ ID NO: 204006 - RNA, 18 nt, Human
gguggcugugcagguggc

SEQ ID NO: 204007 - RNA, 32 nt, Human
gguggcugugggcagugagcggaugugacugg

SEQ ID NO: 204008 - RNA, 20 nt, Human
gguggcuuacaccuguaauc

SEQ ID NO: 204009 - RNA, 20 nt, Human
gguggcuuacgccuguaauc

SEQ ID NO: 204010 - RNA, 21 nt, Human
gguggcuuacgccuguaaucc

SEQ ID NO: 204011 - RNA, 21 nt, Human
gguggcuuacgcuuguagucc

SEQ ID NO: 204012 - RNA, 21 nt, Human
gguggcuuaugccuguaaucc

SEQ ID NO: 204013 - RNA, 32 nt, Human
gguggcuuaugccuguaaucccugcacuuugg

SEQ ID NO: 204014 - RNA, 32 nt, Human
gguggcuucaugccucccuucucccagcucag

SEQ ID NO: 204015 - RNA, 32 nt, Human
gguggcuucuccugacuggcaggaugaccuua

SEQ ID NO: 204016 - RNA, 32 nt, Human
gguggcuucuguaaucccaggacuuugggagg

SEQ ID NO: 204017 - RNA, 32 nt, Human
gguggcuucuuugguugcuggcaguggcagca

SEQ ID NO: 204018 - RNA, 32 nt, Human
gguggcuugagguggaggagugauaugguuug

SEQ ID NO: 204019 - RNA, 32 nt, Human
gguggcuugugcuuguugucccggcuacuugg

SEQ ID NO: 204020 - RNA, 32 nt, Human
gguggcuuuccugcucuaaagcauuuugaugu

SEQ ID NO: 204021 - RNA, 23 nt, Human
gguggcuuuggugguugguucca

SEQ ID NO: 204022 - RNA, 32 nt, Human
gguggcuuugugaacaaagcauagcgguacag

SEQ ID NO: 204023 - RNA, 32 nt, Human
gguggcuuuuccuagaccccaaagaggugaau

SEQ ID NO: 204024 - RNA, 23 nt, Human
ggugggaaaucgucaggagccca

SEQ ID NO: 204025 - RNA, 32 nt, Human
ggugggaacauggucacccccacucugcauac

SEQ ID NO: 204026 - RNA, 32 nt, Human
ggugggaagagaagggagucagcucugacagc

SEQ ID NO: 204027 - RNA, 32 nt, Human
ggugggaagccuguaaucccagcuacuuggga

SEQ ID NO: 204028 - RNA, 19 nt, Human
ggugggaagcugaguccca

SEQ ID NO: 204029 - RNA, 32 nt, Human
ggugggaagcuggcaaucugcaccuuggggcc

SEQ ID NO: 204030 - RNA, 32 nt, Human
ggugggaaggcagagcaucaggagggaacagg

SEQ ID NO: 204031 - RNA, 32 nt, Human
ggugggaagugaugcagagagcccacccgugc

SEQ ID NO: 204032 - RNA, 32 nt, Human
ggugggaaguggggcuaggucuugccaacucc

SEQ ID NO: 204033 - RNA, 32 nt, Human
ggugggaauggaguggaggagggacuuccuuc

SEQ ID NO: 204034 - RNA, 32 nt, Human
ggugggaaugggggauguggagacugagcugu

SEQ ID NO: 204035 - RNA, 32 nt, Human
ggugggaaugugcugcuguuccgugagccuug

SEQ ID NO: 204036 - RNA, 32 nt, Human
ggugggacaaaaggggagaauuuggaagccag

SEQ ID NO: 204037 - RNA, 32 nt, Human
ggugggacaaaguuagaauugccugaagauca

SEQ ID NO: 204038 - RNA, 32 nt, Human
ggugggacaacaaagaggacaccauuuuucca

SEQ ID NO: 204039 - RNA, 20 nt, Human
ggugggacacccuucccugg

SEQ ID NO: 204040 - RNA, 32 nt, Human
ggugggacagagguggagacaggugcagugac

SEQ ID NO: 204041 - RNA, 32 nt, Human
ggugggacagggguucugcagcuguaaggaac

SEQ ID NO: 204042 - RNA, 21 nt, Human
ggugggaccaagcgaaauucc

SEQ ID NO: 204043 - RNA, 21 nt, Human
ggugggaccaaggagaugcca

SEQ ID NO: 204044 - RNA, 21 nt, Human
ggugggaccaccccucuuuca

SEQ ID NO: 204045 - RNA, 18 nt, Human
ggugggaccacccggcca

SEQ ID NO: 204046 - RNA, 23 nt, Human
ggugggaccagaaaucuuuauga

SEQ ID NO: 204047 - RNA, 32 nt, Human
ggugggaccaggaacucuacuauuaagggacg

SEQ ID NO: 204048 - RNA, 24 nt, Human
ggugggaccagggccaggguucca

SEQ ID NO: 204049 - RNA, 18 nt, Human
ggugggaccagggcucca

SEQ ID NO: 204050 - RNA, 20 nt, Human
ggugggaccauacagcccca

SEQ ID NO: 204051 - RNA, 21 nt, Human
ggugggacccacccaccccca

SEQ ID NO: 204052 - RNA, 18 nt, Human
ggugggacccagguaacc

SEQ ID NO: 204053 - RNA, 19 nt, Human
ggugggaccccaagcucca

SEQ ID NO: 204054 - RNA, 20 nt, Human
ggugggacccgcagccucca

SEQ ID NO: 204055 - RNA, 32 nt, Human
ggugggacccgggcgggcuccgggagggggcc

SEQ ID NO: 204056 - RNA, 32 nt, Human
ggugggacccucaaggacaggcuguagcccuc

SEQ ID NO: 204057 - RNA, 32 nt, Human
ggugggacccuccaugaaauggauggcacaaa

SEQ ID NO: 204058 - RNA, 18 nt, Human
ggugggaccucuuauucu

SEQ ID NO: 204059 - RNA, 32 nt, Human
ggugggacgggacugcagccucccagaggccc

SEQ ID NO: 204060 - RNA, 18 nt, Human
ggugggacuaggaacuca

SEQ ID NO: 204061 - RNA, 32 nt, Human
ggugggacucagcucagagucaguuuucagaa

SEQ ID NO: 204062 - RNA, 19 nt, Human
ggugggacuccagaauucc

SEQ ID NO: 204063 - RNA, 32 nt, Human
ggugggacuccagcucguguguccucauggag

SEQ ID NO: 204064 - RNA, 32 nt, Human
ggugggacuccaggugaauuacugaaccucug

SEQ ID NO: 204065 - RNA, 18 nt, Human
ggugggacucuugaucca

SEQ ID NO: 204066 - RNA, 32 nt, Human
ggugggacuucuaacagaucagccugaagaag

SEQ ID NO: 204067 - RNA, 32 nt, Human
ggugggacuugccggccaugaagaggaccuug

SEQ ID NO: 204068 - RNA, 32 nt, Human
ggugggagaaaagaaaguggguuaucaagggu

SEQ ID NO: 204069 - RNA, 32 nt, Human
ggugggagaaucgcuuaaccccagaaguuuga

SEQ ID NO: 204070 - RNA, 32 nt, Human
ggugggagaauggguguaggaggcaggcccca

SEQ ID NO: 204071 - RNA, 20 nt, Human
ggugggagacaggaguucca

SEQ ID NO: 204072 - RNA, 32 nt, Human
ggugggagagagaagcagagcgagagagagga

SEQ ID NO: 204073 - RNA, 32 nt, Human
ggugggagagagucaggcaggagccgaggccg

SEQ ID NO: 204074 - RNA, 32 nt, Human
ggugggagaggaagaaaguugggguucuccag

SEQ ID NO: 204075 - RNA, 32 nt, Human
ggugggagaggacggcggagggcagagcccgc

SEQ ID NO: 204076 - RNA, 32 nt, Human
ggugggagcaagggacagggagcagggcaggg

SEQ ID NO: 204077 - RNA, 32 nt, Human
ggugggagcaggaaggcuguuggggaaggaag

SEQ ID NO: 204078 - RNA, 32 nt, Human
ggugggagccaccgcacccagccugcaggucu

SEQ ID NO: 204079 - RNA, 32 nt, Human
ggugggagcccaguuggggagggagugaggag

SEQ ID NO: 204080 - RNA, 32 nt, Human
ggugggagccuguggcuuauggcuucacuuac

SEQ ID NO: 204081 - RNA, 32 nt, Human
ggugggaggaaaggaaagaagcaacagucacc

SEQ ID NO: 204082 - RNA, 32 nt, Human
ggugggaggagaaggaggaagaggaggaaggc

SEQ ID NO: 204083 - RNA, 32 nt, Human
ggugggaggaucaauugaggccagaguuugaa

SEQ ID NO: 204084 - RNA, 32 nt, Human
ggugggaggaucccuugaggccacaaguuuga

SEQ ID NO: 204085 - RNA, 23 nt, Human
ggugggaggauuacuggauccca

SEQ ID NO: 204086 - RNA, 32 nt, Human
ggugggaggauugcuugagccuaggaggucga

SEQ ID NO: 204087 - RNA, 32 nt, Human
ggugggaggauugcuugagccuaggaguugaa

SEQ ID NO: 204088 - RNA, 32 nt, Human
ggugggaggauugcuugaggccagccugggca

SEQ ID NO: 204089 - RNA, 32 nt, Human
ggugggaggauuggagguuggugggauagggg

SEQ ID NO: 204090 - RNA, 32 nt, Human
ggugggaggcacggggaagguuuuggaguaga

SEQ ID NO: 204091 - RNA, 32 nt, Human
ggugggagggagaaggaagggaagaaagggga

SEQ ID NO: 204092 - RNA, 32 nt, Human
ggugggagggaggaagaacggaagggagggaa

SEQ ID NO: 204093 - RNA, 21 nt, Human
ggugggagggcaucuucugug

SEQ ID NO: 204094 - RNA, 32 nt, Human
ggugggagggccuguccacacccuggaucccc

SEQ ID NO: 204095 - RNA, 32 nt, Human
ggugggagggcugagguggcacaggcugcucc

SEQ ID NO: 204096 - RNA, 32 nt, Human
ggugggaggggaaaacgcaucuuguuaauuau

SEQ ID NO: 204097 - RNA, 32 nt, Human
ggugggagggggcaacccccaguagcuuugcc

SEQ ID NO: 204098 - RNA, 32 nt, Human
ggugggaggggugggacagagguggagacagg

SEQ ID NO: 204099 - RNA, 32 nt, Human
ggugggaggugggagaggaagguggaguacua

SEQ ID NO: 204100 - RNA, 32 nt, Human
ggugggauccacacagcucagaacagcuggau

SEQ ID NO: 204101 - RNA, 23 nt, Human
ggugggaucgccacaggauuuca

SEQ ID NO: 204102 - RNA, 32 nt, Human
ggugggaucuagaugaccucuugaaauugucc

SEQ ID NO: 204103 - RNA, 22 nt, Human
ggugggaucugaccuuguguga

SEQ ID NO: 204104 - RNA, 32 nt, Human
ggugggauggcacugaaggccagcagacaggc

SEQ ID NO: 204105 - RNA, 32 nt, Human
ggugggauggcugaacugggggcccacugugg

SEQ ID NO: 204106 - RNA, 32 nt, Human
ggugggauggggaagaccaggagcagagucga

SEQ ID NO: 204107 - RNA, 32 nt, Human
ggugggaugggugucccuguccccagcccacc

SEQ ID NO: 204108 - RNA, 32 nt, Human
ggugggcaaggcacuugugagaaccaagaaug

SEQ ID NO: 204109 - RNA, 32 nt, Human
ggugggcaaggcagucagcaucaccagcaaua

SEQ ID NO: 204110 - RNA, 21 nt, Human
ggugggcaagggccccuaaga

SEQ ID NO: 204111 - RNA, 32 nt, Human
ggugggcacagccugcacgugcccggcccugc

SEQ ID NO: 204112 - RNA, 24 nt, Human
ggugggcacagccuggcagugugg

SEQ ID NO: 204113 - RNA, 32 nt, Human
ggugggcaccuguaaucccagauacucgggag

SEQ ID NO: 204114 - RNA, 32 nt, Human
ggugggcaccuguaaucccagcuacucaggag

SEQ ID NO: 204115 - RNA, 32 nt, Human
ggugggcaccuguaaucccagcuacucgggag

SEQ ID NO: 204116 - RNA, 32 nt, Human
ggugggcaccuguaaucccagcuacuuggaag

SEQ ID NO: 204117 - RNA, 32 nt, Human
ggugggcaccuguaaucccagcuacuugggag

SEQ ID NO: 204118 - RNA, 32 nt, Human
ggugggcaccuguaaucccagguacucgggag

SEQ ID NO: 204119 - RNA, 32 nt, Human
ggugggcaccuguaaucccaguuacucgggag

SEQ ID NO: 204120 - RNA, 32 nt, Human
ggugggcaccuguagucccagcaacucgggag

SEQ ID NO: 204121 - RNA, 32 nt, Human
ggugggcacgcaccaccuuccuucccuggcac

SEQ ID NO: 204122 - RNA, 19 nt, Human
ggugggcacguccacccca

SEQ ID NO: 204123 - RNA, 32 nt, Human
ggugggcacugagagacaagauuccugggccc

SEQ ID NO: 204124 - RNA, 32 nt, Human
ggugggcacugaggcacagaggaggccaagga

SEQ ID NO: 204125 - RNA, 21 nt, Human
ggugggcacugccagccguga

SEQ ID NO: 204126 - RNA, 32 nt, Human
ggugggcacugguaaucccagguacucaagag

SEQ ID NO: 204127 - RNA, 32 nt, Human
ggugggcagacagugaccucucuagguguguc

SEQ ID NO: 204128 - RNA, 32 nt, Human
ggugggcagccugggggaggcuuuccucgcaa

SEQ ID NO: 204129 - RNA, 32 nt, Human
ggugggcagcgcacuccagucuucccaggcua

SEQ ID NO: 204130 - RNA, 32 nt, Human
ggugggcagcuuuucugcuuuuucccuuccuc

SEQ ID NO: 204131 - RNA, 32 nt, Human
ggugggcaggcagguguucuguguugacgaga

SEQ ID NO: 204132 - RNA, 32 nt, Human
ggugggcagggacgagugaagugguuggggug

SEQ ID NO: 204133 - RNA, 32 nt, Human
ggugggcagggaggggucccagaggguagagc

SEQ ID NO: 204134 - RNA, 32 nt, Human
ggugggcagggcugugcaggucucaguaagga

SEQ ID NO: 204135 - RNA, 32 nt, Human
ggugggcaggggccucaugacaagcgacaagu

SEQ ID NO: 204136 - RNA, 32 nt, Human
ggugggcagggugcagcagugagcaaaacucu

SEQ ID NO: 204137 - RNA, 32 nt, Human
ggugggcagggugggagggaugcacgcguaug

SEQ ID NO: 204138 - RNA, 20 nt, Human
ggugggcaguaggaccacca

SEQ ID NO: 204139 - RNA, 32 nt, Human
ggugggcagugcagugggguggaguaagaaag

SEQ ID NO: 204140 - RNA, 32 nt, Human
ggugggcauagccucugugccugguggggucc

SEQ ID NO: 204141 - RNA, 32 nt, Human
ggugggcaugccacccucacacacacagcugg

SEQ ID NO: 204142 - RNA, 32 nt, Human
ggugggcaugcugggcaggcuugggggugaca

SEQ ID NO: 204143 - RNA, 32 nt, Human
ggugggcaugcuguccacuguguggugcuagg

SEQ ID NO: 204144 - RNA, 32 nt, Human
ggugggcauggaacaggaugggcagagaaagg

SEQ ID NO: 204145 - RNA, 32 nt, Human
ggugggccaggggcuucccagucugcacuuag

SEQ ID NO: 204146 - RNA, 32 nt, Human
ggugggccagucuguggaucagagaugcacca

SEQ ID NO: 204147 - RNA, 32 nt, Human
ggugggccagugcugcccagguuugugugucu

SEQ ID NO: 204148 - RNA, 32 nt, Human
ggugggcccagccagcuccugggguccccgcc

SEQ ID NO: 204149 - RNA, 32 nt, Human
ggugggcccagccugcccuuccuuccuccagc

SEQ ID NO: 204150 - RNA, 32 nt, Human
ggugggcccaggagggaacaggagccugagcc

SEQ ID NO: 204151 - RNA, 32 nt, Human
ggugggcccuggacaggugugugguccugcug

SEQ ID NO: 204152 - RNA, 19 nt, Human
ggugggccgcaggcgggaa

SEQ ID NO: 204153 - RNA, 32 nt, Human
ggugggccucugccuucucuucuguuuggcca

SEQ ID NO: 204154 - RNA, 32 nt, Human
ggugggccugaggggccugggcucagagucca

SEQ ID NO: 204155 - RNA, 32 nt, Human
ggugggccugcucucuguagacugaauucagc

SEQ ID NO: 204156 - RNA, 32 nt, Human
ggugggccugggaggaagauguuuacauuuuu

SEQ ID NO: 204157 - RNA, 32 nt, Human
ggugggcgccggggcucccgggaaucuaccuu

SEQ ID NO: 204158 - RNA, 32 nt, Human
ggugggcgccuguaaucccagccacuccagag

SEQ ID NO: 204159 - RNA, 32 nt, Human
ggugggcgccuguaaucccagcuacucagaag

SEQ ID NO: 204160 - RNA, 32 nt, Human
ggugggcgccuguaaucccagcuacucaggag

SEQ ID NO: 204161 - RNA, 32 nt, Human
ggugggcgccuguaaucccagcuacucgggag

SEQ ID NO: 204162 - RNA, 32 nt, Human
ggugggcgccuguaaucccagcuacuugggag

SEQ ID NO: 204163 - RNA, 32 nt, Human
ggugggcgccuguaaucccagcugcucaggag

SEQ ID NO: 204164 - RNA, 32 nt, Human
ggugggcgccuguaaucccaguuacucgggag

SEQ ID NO: 204165 - RNA, 32 nt, Human
ggugggcgccuguaaucucagcuacuugggag

SEQ ID NO: 204166 - RNA, 32 nt, Human
ggugggcgccuguaauuccagcuacucaggag

SEQ ID NO: 204167 - RNA, 32 nt, Human
ggugggcgccuguaauuccagcuacucagggg

SEQ ID NO: 204168 - RNA, 32 nt, Human
ggugggcgccuguaauuccagcuacucgggag

SEQ ID NO: 204169 - RNA, 32 nt, Human
ggugggcgccuguagucccagcagcuugggag

SEQ ID NO: 204170 - RNA, 32 nt, Human
ggugggcgcggauccaggguaagggguuaagg

SEQ ID NO: 204171 - RNA, 32 nt, Human
ggugggcggaggcaaagggggagccaggggcg

SEQ ID NO: 204172 - RNA, 32 nt, Human
ggugggcggagggagaccgggaggcacgggcg

SEQ ID NO: 204173 - RNA, 32 nt, Human
ggugggcggcaccauuguccagcagcugaguu

SEQ ID NO: 204174 - RNA, 32 nt, Human
ggugggcggcggcggcgaaaggggacggcaac

SEQ ID NO: 204175 - RNA, 32 nt, Human
ggugggcggcucauggugccacagccccuggc

SEQ ID NO: 204176 - RNA, 32 nt, Human
ggugggcggcugccuuuccuauacaguuuguc

SEQ ID NO: 204177 - RNA, 32 nt, Human
ggugggcggggagggaaggaagggagcgggcg

SEQ ID NO: 204178 - RNA, 32 nt, Human
ggugggcguagggcuggccagugccuuggccu

SEQ ID NO: 204179 - RNA, 31 nt, Human
ggugggcugaagaacuaccuguuggguacug

SEQ ID NO: 204180 - RNA, 32 nt, Human
ggugggcugcacucucaccuggaggcuccggg

SEQ ID NO: 204181 - RNA, 32 nt, Human
ggugggcuggacuucuaccugcccucaagggu

SEQ ID NO: 204182 - RNA, 32 nt, Human
ggugggcuguucagcuuccugcugcuggggcc

SEQ ID NO: 204183 - RNA, 32 nt, Human
ggugggcuucacuaaggaaauggggaagguuu

SEQ ID NO: 204184 - RNA, 32 nt, Human
ggugggcuuccaagguccugggugcagccggg

SEQ ID NO: 204185 - RNA, 22 nt, Human
gguggggaaaugaauccucccu

SEQ ID NO: 204186 - RNA, 21 nt, Human
gguggggaacuagcaguaguu

SEQ ID NO: 204187 - RNA, 32 nt, Human
gguggggaagccgccuccacccagggggcgug

SEQ ID NO: 204188 - RNA, 32 nt, Human
gguggggaagccggggagggcaguugaggacc

SEQ ID NO: 204189 - RNA, 32 nt, Human
gguggggacccauggucuguggaacugggaaa

SEQ ID NO: 204190 - RNA, 32 nt, Human
gguggggacggaggggaaagggaagccugggu

SEQ ID NO: 204191 - RNA, 32 nt, Human
gguggggacuccugagcccagccugggggcca

SEQ ID NO: 204192 - RNA, 32 nt, Human
gguggggacuccuguccuucauucagcucauc

SEQ ID NO: 204193 - RNA, 32 nt, Human
gguggggagaagcaugaagcagugagcagagc

SEQ ID NO: 204194 - RNA, 32 nt, Human
gguggggagagcuagcccaggccaggggucaa

SEQ ID NO: 204195 - RNA, 32 nt, Human
gguggggagagcuugcccucccucuuaagcug

SEQ ID NO: 204196 - RNA, 32 nt, Human
gguggggagagggaagaugggccccaccagcu

SEQ ID NO: 204197 - RNA, 32 nt, Human
gguggggagauuccggccuggagcucccaggg

SEQ ID NO: 204198 - RNA, 32 nt, Human
gguggggagcagcccagccucugugaucuucu

SEQ ID NO: 204199 - RNA, 32 nt, Human
gguggggagccccagccccggggccgcggggg

SEQ ID NO: 204200 - RNA, 32 nt, Human
gguggggaggagggauccaggguggggugaag

SEQ ID NO: 204201 - RNA, 32 nt, Human
gguggggaggcaucugcuccaacuggugcggg

SEQ ID NO: 204202 - RNA, 32 nt, Human
gguggggaggcucuuuaggcucaggagaagca

SEQ ID NO: 204203 - RNA, 32 nt, Human
gguggggaggcugaacuguuucugcuaagaga

SEQ ID NO: 204204 - RNA, 32 nt, Human
gguggggagggagagagagggagggagaggga

SEQ ID NO: 204205 - RNA, 32 nt, Human
gguggggagggagggagaggccgccacccccg

SEQ ID NO: 204206 - RNA, 32 nt, Human
gguggggagggagggagguuucagacuccagu

SEQ ID NO: 204207 - RNA, 32 nt, Human
gguggggagggcauauuuacaguuuuucccac

SEQ ID NO: 204208 - RNA, 32 nt, Human
gguggggaggggcaugaggcgcucgcaggcac

SEQ ID NO: 204209 - RNA, 32 nt, Human
gguggggagggugguuuacaggggugcucugu

SEQ ID NO: 204210 - RNA, 32 nt, Human
gguggggaguggacacuugcuucuucaguucu

SEQ ID NO: 204211 - RNA, 32 nt, Human
gguggggaugcagaacaacuggaacucuccua

SEQ ID NO: 204212 - RNA, 32 nt, Human
gguggggauggggacagaggacauaggggacu

SEQ ID NO: 204213 - RNA, 32 nt, Human
gguggggcacacacaaccagggagugccacgc

SEQ ID NO: 204214 - RNA, 32 nt, Human
gguggggcacugacugaacuggaacccaucga

SEQ ID NO: 204215 - RNA, 32 nt, Human
gguggggcaggcggagguugcaguaagccaag

SEQ ID NO: 204216 - RNA, 32 nt, Human
gguggggcagggagguggggguugggggagua

SEQ ID NO: 204217 - RNA, 32 nt, Human
gguggggcaguggagguugaggagaauguaua

SEQ ID NO: 204218 - RNA, 32 nt, Human
gguggggcaguggucccaauaggagacaaagg

SEQ ID NO: 204219 - RNA, 32 nt, Human
gguggggcaugguggggauuccagcaucugcg

SEQ ID NO: 204220 - RNA, 20 nt, Human
gguggggccagcgcugaaca

SEQ ID NO: 204221 - RNA, 32 nt, Human
gguggggcccagaacccugggagccaggaagg

SEQ ID NO: 204222 - RNA, 32 nt, Human
gguggggccccuccuccuccugagcuguaagg

SEQ ID NO: 204223 - RNA, 32 nt, Human
gguggggccuccaggugcagcuguggauggaa

SEQ ID NO: 204224 - RNA, 32 nt, Human
gguggggccuucuccccugcugccagaaccgc

SEQ ID NO: 204225 - RNA, 32 nt, Human
gguggggcgcagaagagaggggagcccuucuc

SEQ ID NO: 204226 - RNA, 32 nt, Human
gguggggcgcuggccucggugagggcacagca

SEQ ID NO: 204227 - RNA, 19 nt, Human
gguggggcggcagcgggag

SEQ ID NO: 204228 - RNA, 32 nt, Human
gguggggcgugcugggacuaugaagaguuacu

SEQ ID NO: 204229 - RNA, 32 nt, Human
gguggggcuaugccccuuggaguaaauacagc

SEQ ID NO: 204230 - RNA, 32 nt, Human
gguggggcuaugccccuuggaguaaauacggc

SEQ ID NO: 204231 - RNA, 32 nt, Human
gguggggcucagcaggaagugggaccagugcc

SEQ ID NO: 204232 - RNA, 32 nt, Human
gguggggcugccaggggagaccccgggagccg

SEQ ID NO: 204233 - RNA, 32 nt, Human
gguggggcugcggcucuggccucccaggccca

SEQ ID NO: 204234 - RNA, 32 nt, Human
gguggggcuggcugcccuuagggcauagagac

SEQ ID NO: 204235 - RNA, 32 nt, Human
ggugggggaagggccaggcagagcaggaagcc

SEQ ID NO: 204236 - RNA, 32 nt, Human
ggugggggagcuggggaagggugcaggcggga

SEQ ID NO: 204237 - RNA, 32 nt, Human
ggugggggaggcagggcaggagguuggagcag

SEQ ID NO: 204238 - RNA, 32 nt, Human
ggugggggagggagggagggaguuggcaguuu

SEQ ID NO: 204239 - RNA, 32 nt, Human
ggugggggauuagauguugacacugccugggg

SEQ ID NO: 204240 - RNA, 22 nt, Human
ggugggggccaccaaaaaccca

SEQ ID NO: 204241 - RNA, 32 nt, Human
ggugggggccugugggccagaggacuccauga

SEQ ID NO: 204242 - RNA, 32 nt, Human
ggugggggcgacuggccuuuuucccaugugug

SEQ ID NO: 204243 - RNA, 32 nt, Human
ggugggggcucagccaaugcugcccagccuga

SEQ ID NO: 204244 - RNA, 32 nt, Human
ggugggggcuccugcccuccuccaacaaccca

SEQ ID NO: 204245 - RNA, 32 nt, Human
ggugggggcugccuagugggaguuaggaccac

SEQ ID NO: 204246 - RNA, 32 nt, Human
ggugggggcugggggaagaggcuggcagaagu

SEQ ID NO: 204247 - RNA, 19 nt, Human
gguggggggccaggaucca

SEQ ID NO: 204248 - RNA, 32 nt, Human
gguggggguagaaaugucuuuuucuauugugu

SEQ ID NO: 204249 - RNA, 25 nt, Human
ggugggggucagguggacucuggga

SEQ ID NO: 204250 - RNA, 32 nt, Human
gguggggguccaggcuggaggggcccaaugua

SEQ ID NO: 204251 - RNA, 21 nt, Human
gguggggguugcaggacucca

SEQ ID NO: 204252 - RNA, 32 nt, Human
gguggggguugugugagagagagccagcgaag

SEQ ID NO: 204253 - RNA, 32 nt, Human
ggugggguagguggggaguaguguggccaggg

SEQ ID NO: 204254 - RNA, 32 nt, Human
gguggggucagggaggaaaggcagaagcuggg

SEQ ID NO: 204255 - RNA, 32 nt, Human
gguggggucaggggccagagugcaggggaggg

SEQ ID NO: 204256 - RNA, 32 nt, Human
gguggggugaagcccguggccacaggaggcuu

SEQ ID NO: 204257 - RNA, 32 nt, Human
gguggggugagguuggggcgauggccuuugga

SEQ ID NO: 204258 - RNA, 32 nt, Human
gguggggugcaggagacagagaggggcugggg

SEQ ID NO: 204259 - RNA, 32 nt, Human
ggugggguggggucauggguuuuguuguuuuu

SEQ ID NO: 204260 - RNA, 32 nt, Human
ggugggguggguggggucgggugguggagagg

SEQ ID NO: 204261 - RNA, 17 nt, Human
ggugggguguccagcac

SEQ ID NO: 204262 - RNA, 32 nt, Human
ggugggguuccccugggccaaacagugauuug

SEQ ID NO: 204263 - RNA, 32 nt, Human
ggugggguuguucaccucuguacagaccaucu

SEQ ID NO: 204264 - RNA, 32 nt, Human
ggugggguuucauguuucaccguguuguccag

SEQ ID NO: 204265 - RNA, 32 nt, Human
gguggguaccuguaaucccagcuacucaggag

SEQ ID NO: 204266 - RNA, 32 nt, Human
gguggguaccuguaaucccagcuacucgggag

SEQ ID NO: 204267 - RNA, 32 nt, Human
gguggguaccuguaaucccagcuacuugggag

SEQ ID NO: 204268 - RNA, 32 nt, Human
gguggguaccuguaaucccaguuacuuuggag

SEQ ID NO: 204269 - RNA, 24 nt, Human
gguggguacgagagggcuucuuca

SEQ ID NO: 204270 - RNA, 32 nt, Human
gguggguagacagaggagugaaccccaaaggu

SEQ ID NO: 204271 - RNA, 32 nt, Human
gguggguagaucaccugaggucgggaguucaa

SEQ ID NO: 204272 - RNA, 32 nt, Human
gguggguagaucaucugaggucaggaauucaa

SEQ ID NO: 204273 - RNA, 32 nt, Human
gguggguaggagagggaaagccagagugugau

SEQ ID NO: 204274 - RNA, 32 nt, Human
gguggguaguuucuuuuggaaaguacugugag

SEQ ID NO: 204275 - RNA, 32 nt, Human
gguggguauggagccagcuuaaagagaccugc

SEQ ID NO: 204276 - RNA, 23 nt, Human
ggugggucacgccuguaauccca

SEQ ID NO: 204277 - RNA, 18 nt, Human
ggugggucagcccuugaa

SEQ ID NO: 204278 - RNA, 32 nt, Human
ggugggucagccugggcugggaggcagccccg

SEQ ID NO: 204279 - RNA, 32 nt, Human
ggugggucgcccauggcgagauuagugcccuu

SEQ ID NO: 204280 - RNA, 32 nt, Human
ggugggucggucccggggaugcagcgcggggg

SEQ ID NO: 204281 - RNA, 32 nt, Human
ggugggucuaggcaggggaaauuggggugcca

SEQ ID NO: 204282 - RNA, 32 nt, Human
ggugggucucacgccacugggcucaagaugau

SEQ ID NO: 204283 - RNA, 32 nt, Human
ggugggucugaaucuagcaccaugacggaacu

SEQ ID NO: 204284 - RNA, 32 nt, Human
ggugggucuggccaauggagaugggacaggaa

SEQ ID NO: 204285 - RNA, 32 nt, Human
ggugggucuuggagaggaaggacuuagggagg

SEQ ID NO: 204286 - RNA, 32 nt, Human
ggugggugaaggccuggcuggaagagggugaa

SEQ ID NO: 204287 - RNA, 31 nt, Human
ggugggugacuucaagccuccaaagaccaga

SEQ ID NO: 204288 - RNA, 32 nt, Human
ggugggugagacagaggguggggaggauagug

SEQ ID NO: 204289 - RNA, 32 nt, Human
ggugggugagcagcaugggcuuugaggagcug

SEQ ID NO: 204290 - RNA, 32 nt, Human
ggugggugccuaggccugggcaguggauggcc

SEQ ID NO: 204291 - RNA, 32 nt, Human
ggugggugccuccccuccccucuuugucacuu

SEQ ID NO: 204292 - RNA, 32 nt, Human
ggugggugccuguaaccucagcuacuugggag

SEQ ID NO: 204293 - RNA, 32 nt, Human
ggugggugccuguaaucccagauacucaggag

SEQ ID NO: 204294 - RNA, 32 nt, Human
ggugggugccuguaaucccagcuacaugggag

SEQ ID NO: 204295 - RNA, 32 nt, Human
ggugggugccuguaaucccagcuacucaagag

SEQ ID NO: 204296 - RNA, 32 nt, Human
ggugggugccuguaaucccagcuacucaggag

SEQ ID NO: 204297 - RNA, 32 nt, Human
ggugggugccuguaaucccagcuacucgggag

SEQ ID NO: 204298 - RNA, 32 nt, Human
ggugggugccuguaaucccagcuacuugggaa

SEQ ID NO: 204299 - RNA, 32 nt, Human
ggugggugccuguaaucccagcuacuugggag

SEQ ID NO: 204300 - RNA, 32 nt, Human
ggugggugccuguaaucccagcuucuuaggag

SEQ ID NO: 204301 - RNA, 32 nt, Human
ggugggugccuguaaucccaguuacuugggag

SEQ ID NO: 204302 - RNA, 32 nt, Human
ggugggugccuguaauccuagcuacuugggag

SEQ ID NO: 204303 - RNA, 32 nt, Human
ggugggugccuguaaucucagcuacucgggag

SEQ ID NO: 204304 - RNA, 32 nt, Human
ggugggugccuguaguaccagcuauuuuaaag

SEQ ID NO: 204305 - RNA, 32 nt, Human
ggugggugccuguagucccagcuacucgggag

SEQ ID NO: 204306 - RNA, 32 nt, Human
ggugggugccuguagucccagcuacucuggag

SEQ ID NO: 204307 - RNA, 32 nt, Human
ggugggugccuguagucccagcuacuugggag

SEQ ID NO: 204308 - RNA, 32 nt, Human
ggugggugccuguaguuccagcuacuugggag

SEQ ID NO: 204309 - RNA, 32 nt, Human
gguggguggagcaguggugggagaagacugga

SEQ ID NO: 204310 - RNA, 20 nt, Human
gguggguggaucaccugagg

SEQ ID NO: 204311 - RNA, 32 nt, Human
gguggguggaucaccugaggucagggguucga

SEQ ID NO: 204312 - RNA, 32 nt, Human
gguggguggaucaccugaggucgggaguucga

SEQ ID NO: 204313 - RNA, 23 nt, Human
gguggguggaucacuugaggcca

SEQ ID NO: 204314 - RNA, 32 nt, Human
gguggguggaucaucugaggucaggaguucga

SEQ ID NO: 204315 - RNA, 32 nt, Human
gguggguggaucaucugaggucaggaguuuga

SEQ ID NO: 204316 - RNA, 32 nt, Human
gguggguggaucgccugaggucggggguuuga

SEQ ID NO: 204317 - RNA, 32 nt, Human
gguggguggggaccugugucagguguggauag

SEQ ID NO: 204318 - RNA, 32 nt, Human
gguggguggggucgggugguggagaggccuua

SEQ ID NO: 204319 - RNA, 32 nt, Human
gguggguggggugaaggaggaggcaggugggc

SEQ ID NO: 204320 - RNA, 32 nt, Human
gguggguggguauggagccagcuuaaagagac

SEQ ID NO: 204321 - RNA, 31 nt, Human
gguggguggguggauaucuuaauuuuuauuu

SEQ ID NO: 204322 - RNA, 32 nt, Human
gguggguggguuguuucugccgcucuguuugc

SEQ ID NO: 204323 - RNA, 32 nt, Human
gguggguggucacugagaccacucccuccccc

SEQ ID NO: 204324 - RNA, 32 nt, Human
gguggguggugcaggcuggauauaucacagaa

SEQ ID NO: 204325 - RNA, 32 nt, Human
gguggguggugcuugcuauaugcuuaccuuuu

SEQ ID NO: 204326 - RNA, 32 nt, Human
gguggguguggggucaaugcagugaggcucuc

SEQ ID NO: 204327 - RNA, 32 nt, Human
gguggguguuggagccccugagacaggggaua

SEQ ID NO: 204328 - RNA, 32 nt, Human
gguggguugggccugagaaccagggcacgggu

SEQ ID NO: 204329 - RNA, 32 nt, Human
gguggguuggugaaucuaucucaggccacugc

SEQ ID NO: 204330 - RNA, 22 nt, Human
gguggguuugggggaagggagg

SEQ ID NO: 204331 - RNA, 32 nt, Human
gguggguuuuccuauguucuugugauagugaa

SEQ ID NO: 204332 - RNA, 32 nt, Human
ggugguaaaaaucuuaguucaugugaagaaau

SEQ ID NO: 204333 - RNA, 32 nt, Human
ggugguaaacaacaaaggugauuucagauggc

SEQ ID NO: 204334 - RNA, 32 nt, Human
ggugguaaaggcauuuauaguccuuacuccag

SEQ ID NO: 204335 - RNA, 32 nt, Human
ggugguaaaggccaauaacucuucaggcugcc

SEQ ID NO: 204336 - RNA, 32 nt, Human
ggugguaacaugggcuucugucauuuucugaa

SEQ ID NO: 204337 - RNA, 32 nt, Human
ggugguaaggcaaggguaaaaggggagggagg

SEQ ID NO: 204338 - RNA, 32 nt, Human
ggugguaagggaggguaaagcagagagaaugu

SEQ ID NO: 204339 - RNA, 32 nt, Human
ggugguaaucagcagaccagaugcccagcaac

SEQ ID NO: 204340 - RNA, 32 nt, Human
ggugguaaugggagguagauugauaugauaaa

SEQ ID NO: 204341 - RNA, 32 nt, Human
ggugguacaacgcgaaggugugggaaggccgc

SEQ ID NO: 204342 - RNA, 32 nt, Human
ggugguacaugguggcagggacaggaccacac

SEQ ID NO: 204343 - RNA, 32 nt, Human
ggugguacccccuucucuccccagccccaugu

SEQ ID NO: 204344 - RNA, 32 nt, Human
ggugguagcacauaccuguaaucccagcuacu

SEQ ID NO: 204345 - RNA, 32 nt, Human
ggugguagcauacaccuguaguccuagcuacu

SEQ ID NO: 204346 - RNA, 32 nt, Human
ggugguagccaucaagcacuucccaggaucug

SEQ ID NO: 204347 - RNA, 23 nt, Human
ggugguaggaucaccugagguca

SEQ ID NO: 204348 - RNA, 32 nt, Human
ggugguaggcaaaggccagggggcaggugggg

SEQ ID NO: 204349 - RNA, 32 nt, Human
ggugguaguggugggagggaaaccaugucuug

SEQ ID NO: 204350 - RNA, 32 nt, Human
ggugguaguuuccgcagagcugugaaguuugg

SEQ ID NO: 204351 - RNA, 32 nt, Human
ggugguaugcaccuguagucccggcuacucag

SEQ ID NO: 204352 - RNA, 32 nt, Human
gguggucaaugauagaaagugccuaaacaucc

SEQ ID NO: 204353 - RNA, 32 nt, Human
gguggucagcccgccucggccucccagagugc

SEQ ID NO: 204354 - RNA, 32 nt, Human
gguggucaggaacaggggcagcucacgguggc

SEQ ID NO: 204355 - RNA, 32 nt, Human
gguggucaggagacagauucuagggaaagugc

SEQ ID NO: 204356 - RNA, 24 nt, Human
gguggucaggagagaaggccugau

SEQ ID NO: 204357 - RNA, 32 nt, Human
gguggucaggcagcuggagcagaaguggaaau

SEQ ID NO: 204358 - RNA, 22 nt, Human
gguggucagggaaggcuucuca

SEQ ID NO: 204359 - RNA, 32 nt, Human
gguggucaguaguucaagaccaggcuggccaa

SEQ ID NO: 204360 - RNA, 32 nt, Human
gguggucauagagcauuaaaccaaauaugagg

SEQ ID NO: 204361 - RNA, 32 nt, Human
gguggucauccaguaagcuaagguuaauuuau

SEQ ID NO: 204362 - RNA, 32 nt, Human
gguggucaugccaugagcagccuuauggagag

SEQ ID NO: 204363 - RNA, 22 nt, Human
gguggucaugccuguaauccca

SEQ ID NO: 204364 - RNA, 32 nt, Human
gguggucauggaggcaguuuuggugggauaga

SEQ ID NO: 204365 - RNA, 32 nt, Human
gguggucauggcagaggaggaagaugagggca

SEQ ID NO: 204366 - RNA, 32 nt, Human
gguggucauggcuggcacagggcucagguaca

SEQ ID NO: 204367 - RNA, 32 nt, Human
ggugguccaguaccuggcugagcugcugaagc

SEQ ID NO: 204368 - RNA, 20 nt, Human
gguggucccugcagaggggc

SEQ ID NO: 204369 - RNA, 27 nt, Human
ggugguccgcaaaaccucugccugaga

SEQ ID NO: 204370 - RNA, 26 nt, Human
ggugguccgcaaacaucugccugaga

SEQ ID NO: 204371 - RNA, 27 nt, Human
ggugguccgcaacagcccugccugaga

SEQ ID NO: 204372 - RNA, 27 nt, Human
ggugguccgcagaaucucugccugaga

SEQ ID NO: 204373 - RNA, 32 nt, Human
ggugguccgcgcugccccugcccugccucugu

SEQ ID NO: 204374 - RNA, 32 nt, Human
ggugguccugagcgccccuccuggccacgccg

SEQ ID NO: 204375 - RNA, 32 nt, Human
gguggucgugugugugcggaguccacggaagc

SEQ ID NO: 204376 - RNA, 32 nt, Human
gguggucuccacccugguucauaagaggcuaa

SEQ ID NO: 204377 - RNA, 32 nt, Human
gguggucuccggcuccuccuugcggcgcugac

SEQ ID NO: 204378 - RNA, 32 nt, Human
gguggucugaagcagacagggaaugggagagg

SEQ ID NO: 204379 - RNA, 32 nt, Human
gguggucugacugcacugucuccaucuuaugc

SEQ ID NO: 204380 - RNA, 32 nt, Human
gguggucuggaggcagcuccacgucacacagu

SEQ ID NO: 204381 - RNA, 32 nt, Human
gguggugaacaggguggauguggcguggcucc

SEQ ID NO: 204382 - RNA, 19 nt, Human
gguggugacaggcagcagg

SEQ ID NO: 204383 - RNA, 32 nt, Human
gguggugacaugugccuguaaucccagcuacu

SEQ ID NO: 204384 - RNA, 32 nt, Human
gguggugaccucccaccucuggucugguuaag

SEQ ID NO: 204385 - RNA, 32 nt, Human
gguggugagacaggccagcgugcaugacagug

SEQ ID NO: 204386 - RNA, 32 nt, Human
gguggugagagggacagaccaggcaggcugac

SEQ ID NO: 204387 - RNA, 32 nt, Human
gguggugagauggugccuccugcccucuccuc

SEQ ID NO: 204388 - RNA, 32 nt, Human
gguggugagccccaccagaugagcacagagug

SEQ ID NO: 204389 - RNA, 32 nt, Human
gguggugaggagggaaaggcagucagauucca

SEQ ID NO: 204390 - RNA, 32 nt, Human
gguggugaggcucaguuaccccugggcuuagg

SEQ ID NO: 204391 - RNA, 32 nt, Human
gguggugaugcuuaccugggaggcagagggug

SEQ ID NO: 204392 - RNA, 32 nt, Human
gguggugaugcuuugaacagggcccagguggg

SEQ ID NO: 204393 - RNA, 32 nt, Human
gguggugauggaggagggacucagggagaggc

SEQ ID NO: 204394 - RNA, 32 nt, Human
gguggugauucuggccauggccccucugccaa

SEQ ID NO: 204395 - RNA, 32 nt, Human
gguggugcagaugaccccguguacucggggcu

SEQ ID NO: 204396 - RNA, 20 nt, Human
gguggugcaugccuguaauc

SEQ ID NO: 204397 - RNA, 32 nt, Human
gguggugcaugccuguaaucccugcuacuugg

SEQ ID NO: 204398 - RNA, 32 nt, Human
gguggugccacugcacuccaaccugggggaca

SEQ ID NO: 204399 - RNA, 32 nt, Human
gguggugccacugcgcuccagccugggggagg

SEQ ID NO: 204400 - RNA, 32 nt, Human
gguggugccacuggcagagcugggaagucagg

SEQ ID NO: 204401 - RNA, 32 nt, Human
gguggugccccucugccugccugccccacugu

SEQ ID NO: 204402 - RNA, 32 nt, Human
gguggugcccugagccucgagcugcucucugu

SEQ ID NO: 204403 - RNA, 32 nt, Human
gguggugcggucuccaggccucccaggauucu

SEQ ID NO: 204404 - RNA, 32 nt, Human
gguggugcuccugguggcaguggcucucuggc

SEQ ID NO: 204405 - RNA, 32 nt, Human
gguggugcugcugcugcuucugaggcacuggg

SEQ ID NO: 204406 - RNA, 32 nt, Human
gguggugcuggagguggcugcagagagccacu

SEQ ID NO: 204407 - RNA, 32 nt, Human
ggugguggacauguucaggagcuguuugccug

SEQ ID NO: 204408 - RNA, 32 nt, Human
ggugguggagcagagcagccaucuuuuaagug

SEQ ID NO: 204409 - RNA, 32 nt, Human
ggugguggaggaggaggaggaggaggaaggca

SEQ ID NO: 204410 - RNA, 32 nt, Human
ggugguggaggcagccuucagugagcauggag

SEQ ID NO: 204411 - RNA, 32 nt, Human
ggugguggaggccaauacuuugccaaaccacg

SEQ ID NO: 204412 - RNA, 21 nt, Human
ggugguggaggcgcucucuca

SEQ ID NO: 204413 - RNA, 32 nt, Human
ggugguggaggcggcggaggcggcggcggagg

SEQ ID NO: 204414 - RNA, 32 nt, Human
ggugguggaguugcuggagguagaggagcuau

SEQ ID NO: 204415 - RNA, 32 nt, Human
ggugguggcacacgccuguaaucccagcuacu

SEQ ID NO: 204416 - RNA, 32 nt, Human
ggugguggcacgggcccucccucccagcgcuc

SEQ ID NO: 204417 - RNA, 32 nt, Human
ggugguggcauuugccccaugcccucaacgcg

SEQ ID NO: 204418 - RNA, 32 nt, Human
ggugguggccaucacuauuccugguggggcuu

SEQ ID NO: 204419 - RNA, 32 nt, Human
ggugguggccuguaaucccagcuacuugggag

SEQ ID NO: 204420 - RNA, 20 nt, Human
ggugguggcggcagaggagg

SEQ ID NO: 204421 - RNA, 32 nt, Human
ggugguggcgggagcagcgggagcagccggaa

SEQ ID NO: 204422 - RNA, 32 nt, Human
ggugguggcucacaucuguaaucccagcacuu

SEQ ID NO: 204423 - RNA, 32 nt, Human
ggugguggcucacgccuguaaucccagcaagu

SEQ ID NO: 204424 - RNA, 32 nt, Human
ggugguggcucacgccuguaaucccagcacuu

SEQ ID NO: 204425 - RNA, 32 nt, Human
ggugguggcucaugccuguaaucccagcacuu

SEQ ID NO: 204426 - RNA, 32 nt, Human
ggugguggcuuugccuuggauauuccucuucc

SEQ ID NO: 204427 - RNA, 32 nt, Human
gguggugggaagaaggaaggugggaagaagga

SEQ ID NO: 204428 - RNA, 32 nt, Human
gguggugggaaguagcugaagcaaagaaggaa

SEQ ID NO: 204429 - RNA, 32 nt, Human
gguggugggcaggcucgguaggcgggaaaggc

SEQ ID NO: 204430 - RNA, 32 nt, Human
gguggugggccaggccagcagugcuguggcca

SEQ ID NO: 204431 - RNA, 32 nt, Human
gguggugggcgauuguuguucuuaauucuucu

SEQ ID NO: 204432 - RNA, 32 nt, Human
gguggugggcuacucuggaggcccuugaggac

SEQ ID NO: 204433 - RNA, 32 nt, Human
ggugguggggagcagaggggcaggaccugcag

SEQ ID NO: 204434 - RNA, 32 nt, Human
ggugguggggccucaccuugaagagggaaguc

SEQ ID NO: 204435 - RNA, 32 nt, Human
ggugguggucccugggugggucagguagggca

SEQ ID NO: 204436 - RNA, 32 nt, Human
gguggugguggauagcaucacaagaaacgagc

SEQ ID NO: 204437 - RNA, 32 nt, Human
gguggugguggccgccuguaaucccagcuacu

SEQ ID NO: 204438 - RNA, 32 nt, Human
ggugguggugggcaccuguagucccagguacu

SEQ ID NO: 204439 - RNA, 32 nt, Human
ggugguggugucugucagacacacacaggucg

SEQ ID NO: 204440 - RNA, 32 nt, Human
gguggugguguuucuguuugaagaaacugaca

SEQ ID NO: 204441 - RNA, 32 nt, Human
gguggugucacaggauggugggggcggggcag

SEQ ID NO: 204442 - RNA, 32 nt, Human
gguggugucagugccauuaucuagcacccuga

SEQ ID NO: 204443 - RNA, 32 nt, Human
gguggugugcaccuguaguaaucccagcuacu

SEQ ID NO: 204444 - RNA, 32 nt, Human
gguggugugccuguagucccagcuacuuggga

SEQ ID NO: 204445 - RNA, 32 nt, Human
gguggugugccuguaguccuaguuacuuggga

SEQ ID NO: 204446 - RNA, 32 nt, Human
ggugguuacacaguugaccucugccuggcucc

SEQ ID NO: 204447 - RNA, 32 nt, Human
ggugguucaagauggcggcgcccaguggcacu

SEQ ID NO: 204448 - RNA, 32 nt, Human
ggugguucacaccucuaaucccugcacuuugg

SEQ ID NO: 204449 - RNA, 20 nt, Human
ggugguucacaccuguaauc

SEQ ID NO: 204450 - RNA, 23 nt, Human
ggugguucacaccuguaauccca

SEQ ID NO: 204451 - RNA, 23 nt, Human
ggugguucacgccuguaauccca

SEQ ID NO: 204452 - RNA, 32 nt, Human
ggugguucagccaagacagauguagacagagu

SEQ ID NO: 204453 - RNA, 32 nt, Human
ggugguucagccccuucuccaaccccuucaua

SEQ ID NO: 204454 - RNA, 32 nt, Human
ggugguucaggucuucccaguacucugggagc

SEQ ID NO: 204455 - RNA, 23 nt, Human
ggugguucaugccuguaauccca

SEQ ID NO: 204456 - RNA, 32 nt, Human
ggugguuccagcauccugccugccgccgccug

SEQ ID NO: 204457 - RNA, 32 nt, Human
ggugguuccugcccagcaugcccagcuccucc

SEQ ID NO: 204458 - RNA, 32 nt, Human
ggugguuccugggggaacagagacuggagaug

SEQ ID NO: 204459 - RNA, 32 nt, Human
ggugguucucaccuggggcuauaguaaaauca

SEQ ID NO: 204460 - RNA, 32 nt, Human
ggugguucuggcucagggucucagguugcauu

SEQ ID NO: 204461 - RNA, 32 nt, Human
ggugguugacuugugccuggcugcaguagcag

SEQ ID NO: 204462 - RNA, 32 nt, Human
ggugguugaggcaggaggauuguuugagcgag

SEQ ID NO: 204463 - RNA, 32 nt, Human
ggugguugagggugacuuuuccugcugccugg

SEQ ID NO: 204464 - RNA, 32 nt, Human
ggugguugcauccaaguaucugucuuucuuua

SEQ ID NO: 204465 - RNA, 32 nt, Human
ggugguugcucugucccucuagaagccucugc

SEQ ID NO: 204466 - RNA, 32 nt, Human
ggugguugcugaaggcuggaguggguguggca

SEQ ID NO: 204467 - RNA, 32 nt, Human
ggugguuggccagcccugccuucugcaugaga

SEQ ID NO: 204468 - RNA, 32 nt, Human
ggugguuggcucucccucuccucucucccucu

SEQ ID NO: 204469 - RNA, 32 nt, Human
ggugguugguuuucuccagagaagaacccuug

SEQ ID NO: 204470 - RNA, 23 nt, Human
ggugguuuacgaaguccucugga

SEQ ID NO: 204471 - RNA, 22 nt, Human
ggugguuucaccauguugguca

SEQ ID NO: 204472 - RNA, 32 nt, Human
ggugguuuccuuccucuucaggcagccaggcc

SEQ ID NO: 204473 - RNA, 32 nt, Human
gguguaaaaccucacaguaaacaucuuacaga

SEQ ID NO: 204474 - RNA, 32 nt, Human
gguguaaaccuacagccagcagcagucuggag

SEQ ID NO: 204475 - RNA, 32 nt, Human
gguguaaagcuggcccugccuccugggaagau

SEQ ID NO: 204476 - RNA, 32 nt, Human
gguguaaagggucuucugagcugcaguggcaa

SEQ ID NO: 204477 - RNA, 32 nt, Human
gguguaaauacccagugugcuuaugagucagu

SEQ ID NO: 204478 - RNA, 32 nt, Human
gguguaaaucaccacaccugggcugcuuuauu

SEQ ID NO: 204479 - RNA, 32 nt, Human
gguguaacuuaugugacucuagugcuuaacag

SEQ ID NO: 204480 - RNA, 32 nt, Human
gguguaagucaagcucuugaauauaacuggug

SEQ ID NO: 204481 - RNA, 32 nt, Human
gguguacacccacuguaacauuaggcguaauu

SEQ ID NO: 204482 - RNA, 32 nt, Human
gguguacagagcaugcaggccaugucugccag

SEQ ID NO: 204483 - RNA, 32 nt, Human
gguguacagcggacacauucaggaugagguga

SEQ ID NO: 204484 - RNA, 32 nt, Human
gguguacauauuauuucauuacccagguaaua

SEQ ID NO: 204485 - RNA, 32 nt, Human
gguguacaugcagcuacucgggaggcugaggc

SEQ ID NO: 204486 - RNA, 32 nt, Human
gguguaccauaccugagagcaccaggaagucg

SEQ ID NO: 204487 - RNA, 32 nt, Human
gguguacgauaaccaagagccacugagagagg

SEQ ID NO: 204488 - RNA, 32 nt, Human
gguguacgccuguaaucccagugacuugggag

SEQ ID NO: 204489 - RNA, 32 nt, Human
gguguacuguacguacacaggugcuggucgau

SEQ ID NO: 204490 - RNA, 23 nt, Human
gguguagaaacaaagggccuaau

SEQ ID NO: 204491 - RNA, 32 nt, Human
gguguagacgcugcuggccagcccuccccagc

SEQ ID NO: 204492 - RNA, 17 nt, Human
gguguagagagaagcuu

SEQ ID NO: 204493 - RNA, 32 nt, Human
gguguagagcaaggaagcacuucuucccaaga

SEQ ID NO: 204494 - RNA, 32 nt, Human
gguguagaugucugugucugugagaugccuuu

SEQ ID NO: 204495 - RNA, 32 nt, Human
gguguagcacagaagaaagaccuguguccuag

SEQ ID NO: 204496 - RNA, 32 nt, Human
gguguagcagcaguugaucagacugaaaaacg

SEQ ID NO: 204497 - RNA, 32 nt, Human
gguguagcugugaaaaucaucagaacucuuca

SEQ ID NO: 204498 - RNA, 32 nt, Human
gguguaggaacaaccucaguucugugaaaggc

SEQ ID NO: 204499 - RNA, 32 nt, Human
gguguaggagugcugaugagaggcagaggcuc

SEQ ID NO: 204500 - RNA, 32 nt, Human
gguguagggaccccuugaggggccaagcugac

SEQ ID NO: 204501 - RNA, 32 nt, Human
gguguagggcccagagaagcagaacagcccag

SEQ ID NO: 204502 - RNA, 32 nt, Human
gguguaggggccugugcccuuccagggccagu

SEQ ID NO: 204503 - RNA, 32 nt, Human
gguguaggggcugggagcuuggaggggguugu

SEQ ID NO: 204504 - RNA, 18 nt, Human
gguguagguucaugccca

SEQ ID NO: 204505 - RNA, 23 nt, Human
gguguagucugugucucugcgga

SEQ ID NO: 204506 - RNA, 32 nt, Human
gguguagugcacaccuguaaucccagguacuc

SEQ ID NO: 204507 - RNA, 32 nt, Human
gguguagugcaggcaggguggggaaaggacgg

SEQ ID NO: 204508 - RNA, 22 nt, Human
gguguagugccucaugccugua

SEQ ID NO: 204509 - RNA, 32 nt, Human
gguguagugccugucuccuacuucauucggaa

SEQ ID NO: 204510 - RNA, 22 nt, Human
gguguaguggcucacaccugua

SEQ ID NO: 204511 - RNA, 22 nt, Human
gguguaguggcucacgccugua

SEQ ID NO: 204512 - RNA, 22 nt, Human
gguguaguggcucaugccugua

SEQ ID NO: 204513 - RNA, 22 nt, Human
gguguaguuaccagaugaugaa

SEQ ID NO: 204514 - RNA, 32 nt, Human
gguguaucucacaaugcaaagacaugcuggcu

SEQ ID NO: 204515 - RNA, 32 nt, Human
gguguaugccuguaaucccagcuacucgggag

SEQ ID NO: 204516 - RNA, 32 nt, Human
gguguaugccuguagucccagccacucagaag

SEQ ID NO: 204517 - RNA, 32 nt, Human
gguguaugccuguagucccugcuacuugggag

SEQ ID NO: 204518 - RNA, 32 nt, Human
gguguaugcucacgccuccuguucuuucuuaa

SEQ ID NO: 204519 - RNA, 32 nt, Human
gguguaugggguagauggguggagagggaggg

SEQ ID NO: 204520 - RNA, 32 nt, Human
gguguaugggguccccaaaaggugcccgucaa

SEQ ID NO: 204521 - RNA, 29 nt, Human
gguguauggguguguguggguggguguga

SEQ ID NO: 204522 - RNA, 32 nt, Human
gguguauugagucugaagaggaugugcugugg

SEQ ID NO: 204523 - RNA, 32 nt, Human
gguguauugagucugaugaggaugugcugugg

SEQ ID NO: 204524 - RNA, 32 nt, Human
gguguauuuaccuuccuucccuuccugcuccc

SEQ ID NO: 204525 - RNA, 32 nt, Human
ggugucaagcaugagucaggcugagccugacu

SEQ ID NO: 204526 - RNA, 32 nt, Human
ggugucaagccccauucccucucuacucuuga

SEQ ID NO: 204527 - RNA, 32 nt, Human
ggugucaagcuccucaauaaacuugucuccac

SEQ ID NO: 204528 - RNA, 32 nt, Human
ggugucaccagccuguuuagccaaguagcuuu

SEQ ID NO: 204529 - RNA, 32 nt, Human
ggugucacccaggcuggagugcagugguguga

SEQ ID NO: 204530 - RNA, 23 nt, Human
ggugucaccuccguuggauagag

SEQ ID NO: 204531 - RNA, 20 nt, Human
ggugucaccuugggcgcgag

SEQ ID NO: 204532 - RNA, 32 nt, Human
ggugucacugcacuccagccugggugacagug

SEQ ID NO: 204533 - RNA, 32 nt, Human
ggugucacugccagcaccaggcacugcuuuca

SEQ ID NO: 204534 - RNA, 32 nt, Human
ggugucacuuccccuucccacccucacaucug

SEQ ID NO: 204535 - RNA, 23 nt, Human
ggugucacuuucaggcgaguagu

SEQ ID NO: 204536 - RNA, 32 nt, Human
ggugucagagguaggggaaccaggggcaagcu

SEQ ID NO: 204537 - RNA, 32 nt, Human
ggugucagccaccgcacccagccuggaguggc

SEQ ID NO: 204538 - RNA, 32 nt, Human
ggugucagccuaugucuuuauauugucaagau

SEQ ID NO: 204539 - RNA, 32 nt, Human
ggugucagcuacucgggaggcugaggcaggag

SEQ ID NO: 204540 - RNA, 32 nt, Human
ggugucaggccugcugcccuugccuuguccuc

SEQ ID NO: 204541 - RNA, 32 nt, Human
ggugucaggcugggguuagugagcagguuaca

SEQ ID NO: 204542 - RNA, 32 nt, Human
ggugucagggaaggaggaaccagcaagaccug

SEQ ID NO: 204543 - RNA, 32 nt, Human
ggugucagggcggggcagggguccccaguccu

SEQ ID NO: 204544 - RNA, 19 nt, Human
ggugucagugauggcuugg

SEQ ID NO: 204545 - RNA, 20 nt, Human
ggugucaguggcggcggcag

SEQ ID NO: 204546 - RNA, 32 nt, Human
ggugucaucagggaggaccugaugugcggggu

SEQ ID NO: 204547 - RNA, 32 nt, Human
ggugucauccaccuccuguccugcugcccugu

SEQ ID NO: 204548 - RNA, 24 nt, Human
ggugucaucguagguggccaccua

SEQ ID NO: 204549 - RNA, 25 nt, Human
ggugucaugaagaaaguucuguuca

SEQ ID NO: 204550 - RNA, 32 nt, Human
ggugucauuucuucuuuucccuguggcaucgu

SEQ ID NO: 204551 - RNA, 32 nt, Human
gguguccaaaaaucgacagccacugagaccgg

SEQ ID NO: 204552 - RNA, 32 nt, Human
gguguccaaacuuggggcuucccaggcaccug

SEQ ID NO: 204553 - RNA, 32 nt, Human
gguguccaacuggcccuauuuagaugauaaag

SEQ ID NO: 204554 - RNA, 32 nt, Human
gguguccaaggaugauauguacucccacccca

SEQ ID NO: 204555 - RNA, 32 nt, Human
gguguccacaugcacguguauauguauaucug

SEQ ID NO: 204556 - RNA, 19 nt, Human
gguguccacugacaaggag

SEQ ID NO: 204557 - RNA, 32 nt, Human
gguguccagacccugggauggggccuccggag

SEQ ID NO: 204558 - RNA, 32 nt, Human
gguguccaggagcuggaacccagagagcgucc

SEQ ID NO: 204559 - RNA, 32 nt, Human
gguguccaggcagaggaaacaggaaauguggc

SEQ ID NO: 204560 - RNA, 32 nt, Human
gguguccaggcucugccaggggagaggaaggu

SEQ ID NO: 204561 - RNA, 16 nt, Human
gguguccaggguccuc

SEQ ID NO: 204562 - RNA, 32 nt, Human
gguguccagugaaaauaaaaaugcaugccccu

SEQ ID NO: 204563 - RNA, 32 nt, Human
gguguccauccuuuccccaucccugccuccug

SEQ ID NO: 204564 - RNA, 32 nt, Human
gguguccaucuacaguaaaccccaccauuacc

SEQ ID NO: 204565 - RNA, 32 nt, Human
gguguccaucuucuugcuguugaggacccuga

SEQ ID NO: 204566 - RNA, 23 nt, Human
gguguccauggaacuuccucucu

SEQ ID NO: 204567 - RNA, 32 nt, Human
ggugucccagggacucugucagugccuucagc

SEQ ID NO: 204568 - RNA, 32 nt, Human
ggugucccagggacugugugcucaggagcacu

SEQ ID NO: 204569 - RNA, 25 nt, Human
ggugucccaguugggagcucgcuca

SEQ ID NO: 204570 - RNA, 32 nt, Human
gguguccccugaucccuucuuccaaauauaaa

SEQ ID NO: 204571 - RNA, 32 nt, Human
gguguccccuuguggguuuuccuggcacacag

SEQ ID NO: 204572 - RNA, 18 nt, Human
ggugucccggaaaggggc

SEQ ID NO: 204573 - RNA, 22 nt, Human
ggugucccucggggguucucuc

SEQ ID NO: 204574 - RNA, 32 nt, Human
ggugucccugaggagagggaggugggugcgcg

SEQ ID NO: 204575 - RNA, 32 nt, Human
ggugucccugccuggcccuccucuggucacuu

SEQ ID NO: 204576 - RNA, 32 nt, Human
ggugucccuuucuccuccccuaguguccuuaa

SEQ ID NO: 204577 - RNA, 32 nt, Human
gguguccgagaggcugguguaugcacugcuca

SEQ ID NO: 204578 - RNA, 32 nt, Human
gguguccguggguccgucugcccagccaucug

SEQ ID NO: 204579 - RNA, 32 nt, Human
gguguccuaaggagacuccuggaagcugaaug

SEQ ID NO: 204580 - RNA, 32 nt, Human
gguguccuaccugaacuccaaguucucaccau

SEQ ID NO: 204581 - RNA, 32 nt, Human
gguguccuagccagcuucccuucaccuggugu

SEQ ID NO: 204582 - RNA, 32 nt, Human
gguguccuccagccucucuggaugcuccaugg

SEQ ID NO: 204583 - RNA, 32 nt, Human
gguguccuccaucccccagugccuucacaucu

SEQ ID NO: 204584 - RNA, 32 nt, Human
gguguccuccuucaucccaggcugccaggcua

SEQ ID NO: 204585 - RNA, 32 nt, Human
gguguccucuguccaggccaucauggccucca

SEQ ID NO: 204586 - RNA, 32 nt, Human
gguguccugacugaagcacaggccauagcccc

SEQ ID NO: 204587 - RNA, 32 nt, Human
gguguccugcacugcauccugccuccuugcug

SEQ ID NO: 204588 - RNA, 32 nt, Human
gguguccugccagugguacuuucacagcuggg

SEQ ID NO: 204589 - RNA, 32 nt, Human
gguguccugggcagcaccaugaaugccuuuac

SEQ ID NO: 204590 - RNA, 32 nt, Human
gguguccugggcugugugggaccucagcaagg

SEQ ID NO: 204591 - RNA, 32 nt, Human
gguguccuucugaaaugcaugcccuguggcac

SEQ ID NO: 204592 - RNA, 18 nt, Human
gguguccuucugcacccu

SEQ ID NO: 204593 - RNA, 32 nt, Human
gguguccuugagaugcucacauuacugcccgg

SEQ ID NO: 204594 - RNA, 32 nt, Human
gguguccuuuggaggcaugguggaugaaaggc

SEQ ID NO: 204595 - RNA, 24 nt, Human
ggugucgaucuccugaccucguga

SEQ ID NO: 204596 - RNA, 32 nt, Human
ggugucgcccacccuucuuccccgggcaggcc

SEQ ID NO: 204597 - RNA, 23 nt, Human
ggugucgccugcucuggcugagu

SEQ ID NO: 204598 - RNA, 21 nt, Human
ggugucgcguacgggcuuccc

SEQ ID NO: 204599 - RNA, 32 nt, Human
ggugucgcucugcuggccuggccggcaacccc

SEQ ID NO: 204600 - RNA, 32 nt, Human
ggugucgcuuguaaucucagcuacuugggaga

SEQ ID NO: 204601 - RNA, 32 nt, Human
ggugucggauugcagugcgcucgcugaggcuc

SEQ ID NO: 204602 - RNA, 32 nt, Human
ggugucggccuagacacuuggaaauuguauuc

SEQ ID NO: 204603 - RNA, 32 nt, Human
ggugucggggaccugggcgcagauucauuccc

SEQ ID NO: 204604 - RNA, 18 nt, Human
ggugucggggggcggggg

SEQ ID NO: 204605 - RNA, 32 nt, Human
ggugucguuuagaucaggguaaggcagucagg

SEQ ID NO: 204606 - RNA, 32 nt, Human
ggugucuagaaacuuuuaaggggccgguucaa

SEQ ID NO: 204607 - RNA, 31 nt, Human
ggugucuaggcugaaggaguuggagaccuug

SEQ ID NO: 204608 - RNA, 32 nt, Human
ggugucuauaauuguagcacauggagaaagca

SEQ ID NO: 204609 - RNA, 20 nt, Human
ggugucucacaucuguaauc

SEQ ID NO: 204610 - RNA, 32 nt, Human
ggugucucacccuguugcccaggcuggaauac

SEQ ID NO: 204611 - RNA, 32 nt, Human
ggugucucccacgucuguguucuuauuugcag

SEQ ID NO: 204612 - RNA, 32 nt, Human
ggugucucccggguacagauggagucgucccg

SEQ ID NO: 204613 - RNA, 19 nt, Human
ggugucuccuucuacaucc

SEQ ID NO: 204614 - RNA, 32 nt, Human
ggugucucuagccugcagagugcagugaguga

SEQ ID NO: 204615 - RNA, 32 nt, Human
ggugucucucuacguugcccaggcuggucucg

SEQ ID NO: 204616 - RNA, 32 nt, Human
ggugucucugcagcuggccuccggagccuucc

SEQ ID NO: 204617 - RNA, 32 nt, Human
ggugucucuguacccgcggcuccugagucagu

SEQ ID NO: 204618 - RNA, 32 nt, Human
ggugucugaagugccuugggggcacccucauu

SEQ ID NO: 204619 - RNA, 32 nt, Human
ggugucugacccaccagcagugcaaugggcag

SEQ ID NO: 204620 - RNA, 32 nt, Human
ggugucugagaaccuccagcuucaccuccuuu

SEQ ID NO: 204621 - RNA, 32 nt, Human
ggugucugaggguugagguugcaguccuggaa

SEQ ID NO: 204622 - RNA, 32 nt, Human
ggugucugcaccuccuuucccucucuccaucu

SEQ ID NO: 204623 - RNA, 29 nt, Human
ggugucugcaugugugugugggugugaau

SEQ ID NO: 204624 - RNA, 32 nt, Human
ggugucugccacacccaaguucccaggcccug

SEQ ID NO: 204625 - RNA, 19 nt, Human
ggugucugcccccucuuua

SEQ ID NO: 204626 - RNA, 31 nt, Human
ggugucugccucucggagucugugcacaucu

SEQ ID NO: 204627 - RNA, 31 nt, Human
ggugucugccucucugcagguguucaccaca

SEQ ID NO: 204628 - RNA, 32 nt, Human
ggugucugcuagccucaaccuccuggggcagg

SEQ ID NO: 204629 - RNA, 32 nt, Human
ggugucugcuccaucagaccuggagcuuccaa

SEQ ID NO: 204630 - RNA, 32 nt, Human
ggugucugcuggcuccuccuugcucgccugcu

SEQ ID NO: 204631 - RNA, 32 nt, Human
ggugucuggagccgggccuggugacaggcauc

SEQ ID NO: 204632 - RNA, 32 nt, Human
ggugucuggccugaggucaauggugcaaagga

SEQ ID NO: 204633 - RNA, 32 nt, Human
ggugucuggggcaggaggaggccaacucacug

SEQ ID NO: 204634 - RNA, 32 nt, Human
ggugucuggguguuuggagguggccccguucu

SEQ ID NO: 204635 - RNA, 16 nt, Human
ggugucuguaauccca

SEQ ID NO: 204636 - RNA, 32 nt, Human
ggugucuguaaucccagcugugggagguugag

SEQ ID NO: 204637 - RNA, 32 nt, Human
ggugucugucuaggaaggaaggggugauugac

SEQ ID NO: 204638 - RNA, 32 nt, Human
ggugucugucucaggguacggugcaggcacag

SEQ ID NO: 204639 - RNA, 18 nt, Human
ggugucugucucuggcug

SEQ ID NO: 204640 - RNA, 32 nt, Human
ggugucuguggacccugcuucugaaguacaug

SEQ ID NO: 204641 - RNA, 32 nt, Human
ggugucuguggagcacccugcccucaccacag

SEQ ID NO: 204642 - RNA, 32 nt, Human
ggugucuucccgggcccugccagacccugcuc

SEQ ID NO: 204643 - RNA, 32 nt, Human
ggugucuuccuucagcccaugcccaccugguc

SEQ ID NO: 204644 - RNA, 32 nt, Human
ggugucuugugaaaggagggcaagcaaaagug

SEQ ID NO: 204645 - RNA, 32 nt, Human
ggugucuuucuuuccuuccuccuucuucucuc

SEQ ID NO: 204646 - RNA, 32 nt, Human
ggugucuuugaucaggaugacaugugccauuu

SEQ ID NO: 204647 - RNA, 17 nt, Human
ggugugaaaaccaucua

SEQ ID NO: 204648 - RNA, 32 nt, Human
ggugugaaaagcuugcagaaccagacagagaa

SEQ ID NO: 204649 - RNA, 32 nt, Human
ggugugaaccaccacacccagcccacuucugc

SEQ ID NO: 204650 - RNA, 32 nt, Human
ggugugaacccgggaggcagagcuugugguga

SEQ ID NO: 204651 - RNA, 32 nt, Human
ggugugaacugugguuuaacuguuuucuugua

SEQ ID NO: 204652 - RNA, 32 nt, Human
ggugugaaugcuguaccuuucugacaauaaau

SEQ ID NO: 204653 - RNA, 32 nt, Human
ggugugacacagccacagcagaggcaaggggu

SEQ ID NO: 204654 - RNA, 32 nt, Human
ggugugacaucucuguuauuguuuccagucaa

SEQ ID NO: 204655 - RNA, 32 nt, Human
ggugugacccucaggaagguuaagucaggagu

SEQ ID NO: 204656 - RNA, 32 nt, Human
ggugugacucgggagcugcacacaccugggug

SEQ ID NO: 204657 - RNA, 32 nt, Human
ggugugacugauucccagccuguggcagggcg

SEQ ID NO: 204658 - RNA, 32 nt, Human
ggugugagagagcauggcccagacaagcagcu

SEQ ID NO: 204659 - RNA, 32 nt, Human
ggugugagagggacagcucacgaggcuuggac

SEQ ID NO: 204660 - RNA, 32 nt, Human
ggugugagagugagggaagaggaagcuggaac

SEQ ID NO: 204661 - RNA, 32 nt, Human
ggugugagagugagggcagagggagcuggagc

SEQ ID NO: 204662 - RNA, 32 nt, Human
ggugugagagugaguggcgugcugggcaugaa

SEQ ID NO: 204663 - RNA, 32 nt, Human
ggugugagccaccacacccagccaacauuuuc

SEQ ID NO: 204664 - RNA, 32 nt, Human
ggugugagccaccacacccagccaauuagggc

SEQ ID NO: 204665 - RNA, 32 nt, Human
ggugugagccaccacacccagccaugaaucag

SEQ ID NO: 204666 - RNA, 32 nt, Human
ggugugagccaccacacccagcccaggcucau

SEQ ID NO: 204667 - RNA, 32 nt, Human
ggugugagccaccacacccagccucuauaucc

SEQ ID NO: 204668 - RNA, 32 nt, Human
ggugugagccaccacacccagccucuguaguu

SEQ ID NO: 204669 - RNA, 32 nt, Human
ggugugagccaccacacccggcccaacugcca

SEQ ID NO: 204670 - RNA, 32 nt, Human
ggugugagccaccacacccggccuauauuguu

SEQ ID NO: 204671 - RNA, 32 nt, Human
ggugugagccaccacacccggccuuaucuccu

SEQ ID NO: 204672 - RNA, 32 nt, Human
ggugugagccaccacacugggccaaugcuuaa

SEQ ID NO: 204673 - RNA, 32 nt, Human
ggugugagccaccacagccagccuaaaaauaa

SEQ ID NO: 204674 - RNA, 32 nt, Human
ggugugagccaccacauccagccuaacuuaca

SEQ ID NO: 204675 - RNA, 32 nt, Human
ggugugagccaccacgcccggccaagaacuuu

SEQ ID NO: 204676 - RNA, 19 nt, Human
ggugugagccaccaggccc

SEQ ID NO: 204677 - RNA, 32 nt, Human
ggugugagccacugcacccagccugugauguu

SEQ ID NO: 204678 - RNA, 32 nt, Human
ggugugagccacugcacccggccuccaagcca

SEQ ID NO: 204679 - RNA, 32 nt, Human
ggugugagccacugcaccuggccaugguuagu

SEQ ID NO: 204680 - RNA, 32 nt, Human
ggugugagccacugcaccuggccuccuuaaau

SEQ ID NO: 204681 - RNA, 32 nt, Human
ggugugagccacugcaccuggccuggagcuca

SEQ ID NO: 204682 - RNA, 32 nt, Human
ggugugagccacugccuggccuggccguaggu

SEQ ID NO: 204683 - RNA, 32 nt, Human
ggugugagccacugcgcccagccugaaucauu

SEQ ID NO: 204684 - RNA, 32 nt, Human
ggugugagccgcugggcccagccugguuaucu

SEQ ID NO: 204685 - RNA, 32 nt, Human
ggugugagccuguaaucccagcuacucagaag

SEQ ID NO: 204686 - RNA, 32 nt, Human
ggugugaggauagaauuucgaacaccaagagu

SEQ ID NO: 204687 - RNA, 32 nt, Human
ggugugaggccccagccuggagccaggcacug

SEQ ID NO: 204688 - RNA, 32 nt, Human
ggugugaggcggccucacagggccgggugggc

SEQ ID NO: 204689 - RNA, 32 nt, Human
ggugugagucugucaugagagcuguccugaau

SEQ ID NO: 204690 - RNA, 32 nt, Human
ggugugagugagcucuccagaauggcacaugg

SEQ ID NO: 204691 - RNA, 32 nt, Human
ggugugagugcagauauugcacugugucaccu

SEQ ID NO: 204692 - RNA, 23 nt, Human
ggugugaucuagaacagggcuca

SEQ ID NO: 204693 - RNA, 22 nt, Human
ggugugauggcucaugccugua

SEQ ID NO: 204694 - RNA, 22 nt, Human
ggugugauggugcaugccugua

SEQ ID NO: 204695 - RNA, 32 nt, Human
ggugugauugcacuccagcccaggggacaaug

SEQ ID NO: 204696 - RNA, 32 nt, Human
ggugugcacacaggccagugagcgguggccga

SEQ ID NO: 204697 - RNA, 32 nt, Human
ggugugcaccaccacagcuggcuaauucuauu

SEQ ID NO: 204698 - RNA, 32 nt, Human
ggugugcaccacugcucuucuuauggaguagc

SEQ ID NO: 204699 - RNA, 32 nt, Human
ggugugcaccuguaaucccagcuacucaggag

SEQ ID NO: 204700 - RNA, 32 nt, Human
ggugugcaccuguaaucccagcuacucgggag

SEQ ID NO: 204701 - RNA, 32 nt, Human
ggugugcaccuguaaucccagcuacuugggag

SEQ ID NO: 204702 - RNA, 32 nt, Human
ggugugcaccuguaaucccggcuacucggggg

SEQ ID NO: 204703 - RNA, 32 nt, Human
ggugugcaccuguaaucucagcuacucgggag

SEQ ID NO: 204704 - RNA, 32 nt, Human
ggugugcaccuguaauuccagcuacucgggag

SEQ ID NO: 204705 - RNA, 32 nt, Human
ggugugcacgugcacacaugugcacguuugua

SEQ ID NO: 204706 - RNA, 32 nt, Human
ggugugcagagcaagggagagugaaggaagcc

SEQ ID NO: 204707 - RNA, 22 nt, Human
ggugugcagaggaaagcugcau

SEQ ID NO: 204708 - RNA, 32 nt, Human
ggugugcagauggggaggggguacuggccuug

SEQ ID NO: 204709 - RNA, 32 nt, Human
ggugugcagcaacugcccuggagccccagccc

SEQ ID NO: 204710 - RNA, 32 nt, Human
ggugugcagcuauuugagggacuaagggaugg

SEQ ID NO: 204711 - RNA, 32 nt, Human
ggugugcagggcaggucagggaagggcagggu

SEQ ID NO: 204712 - RNA, 32 nt, Human
ggugugcaggggcagagaaggaagggaccagg

SEQ ID NO: 204713 - RNA, 24 nt, Human
ggugugcaguggccccauccagca

SEQ ID NO: 204714 - RNA, 32 nt, Human
ggugugcaguguccugacuguaagaucaaguc

SEQ ID NO: 204715 - RNA, 32 nt, Human
ggugugcaucuguaaucccagcuacuugggag

SEQ ID NO: 204716 - RNA, 32 nt, Human
ggugugcaucuguaaucccggcuacuugggag

SEQ ID NO: 204717 - RNA, 32 nt, Human
ggugugcauggauggagggugccugaggcugc

SEQ ID NO: 204718 - RNA, 32 nt, Human
ggugugccaagaggagguggguagaugggagu

SEQ ID NO: 204719 - RNA, 32 nt, Human
ggugugccacaggcugcaagcugcagggaauu

SEQ ID NO: 204720 - RNA, 32 nt, Human
ggugugccaggccacuuugguaucagaaauug

SEQ ID NO: 204721 - RNA, 32 nt, Human
ggugugccccaagugauccucccaccucucaa

SEQ ID NO: 204722 - RNA, 32 nt, Human
ggugugcccuggaggcuuagguuggucugagg

SEQ ID NO: 204723 - RNA, 32 nt, Human
ggugugcccuggggugccauggcugcuauucg

SEQ ID NO: 204724 - RNA, 32 nt, Human
ggugugccgcaaugagagucaaucucuauuga

SEQ ID NO: 204725 - RNA, 18 nt, Human
ggugugccuguaguccca

SEQ ID NO: 204726 - RNA, 32 nt, Human
ggugugcgccuauaaucccagcuacucaggag

SEQ ID NO: 204727 - RNA, 32 nt, Human
ggugugcgccuguaaucccagcuacuccggga

SEQ ID NO: 204728 - RNA, 32 nt, Human
ggugugcgccuguaaucccagcuacucgggag

SEQ ID NO: 204729 - RNA, 32 nt, Human
ggugugcgccuguaaucccagcuacucuggag

SEQ ID NO: 204730 - RNA, 32 nt, Human
ggugugcgccuguaaucccagcuacuugggag

SEQ ID NO: 204731 - RNA, 32 nt, Human
ggugugcgccuguaaucucagcuacucaagag

SEQ ID NO: 204732 - RNA, 32 nt, Human
ggugugcgccuguaauuccagcuacucgggag

SEQ ID NO: 204733 - RNA, 20 nt, Human
ggugugcgccuguaguccca

SEQ ID NO: 204734 - RNA, 32 nt, Human
ggugugcggggagggagccagggagugggugu

SEQ ID NO: 204735 - RNA, 32 nt, Human
ggugugcgugucuuuggggcauggaaguuggg

SEQ ID NO: 204736 - RNA, 32 nt, Human
ggugugcgugugugugcuugugugugcgcacg

SEQ ID NO: 204737 - RNA, 32 nt, Human
ggugugcucacugauccgccuccagggccacc

SEQ ID NO: 204738 - RNA, 32 nt, Human
ggugugcucacugugggggccaguuucuccuc

SEQ ID NO: 204739 - RNA, 32 nt, Human
ggugugcucccaggacuggcaugacagguguc

SEQ ID NO: 204740 - RNA, 32 nt, Human
ggugugcugaugugggaaguguuuacacaugg

SEQ ID NO: 204741 - RNA, 32 nt, Human
ggugugcugccugucugagcaagcuucccuag

SEQ ID NO: 204742 - RNA, 32 nt, Human
ggugugcugcugcugcuccccagcccaccagu

SEQ ID NO: 204743 - RNA, 32 nt, Human
ggugugcugggccccucucaggggcacuggcc

SEQ ID NO: 204744 - RNA, 32 nt, Human
ggugugcuggugcuggcgcugcugggucaggg

SEQ ID NO: 204745 - RNA, 32 nt, Human
ggugugcuguagcuccagccgggaugaggacu

SEQ ID NO: 204746 - RNA, 32 nt, Human
ggugugcugugggggucagacuccugaggcuc

SEQ ID NO: 204747 - RNA, 32 nt, Human
ggugugcuguuaggugaaagacuugcucagcu

SEQ ID NO: 204748 - RNA, 32 nt, Human
ggugugcuuccugcagagaugccucuggaguc

SEQ ID NO: 204749 - RNA, 32 nt, Human
gguguggaauggccuuccucucuaggugccug

SEQ ID NO: 204750 - RNA, 32 nt, Human
gguguggaccaugcugccuuguggagcuggga

SEQ ID NO: 204751 - RNA, 32 nt, Human
gguguggaccucuaggggcugucuccuccagg

SEQ ID NO: 204752 - RNA, 32 nt, Human
gguguggagagggaggcccaacagugaggagu

SEQ ID NO: 204753 - RNA, 32 nt, Human
gguguggagcagagcucgggaacucacagaaa

SEQ ID NO: 204754 - RNA, 32 nt, Human
gguguggagcagcaucccuggcuuccacccac

SEQ ID NO: 204755 - RNA, 32 nt, Human
gguguggagggaaaggcuuacacacaugugau

SEQ ID NO: 204756 - RNA, 32 nt, Human
gguguggaguggagagugacaggaaugugggg

SEQ ID NO: 204757 - RNA, 32 nt, Human
gguguggaguugaaugggcauggccaugagug

SEQ ID NO: 204758 - RNA, 32 nt, Human
gguguggaucccuagaugggagccggggaugg

SEQ ID NO: 204759 - RNA, 32 nt, Human
gguguggcagccaucucuccucccaggggucc

SEQ ID NO: 204760 - RNA, 32 nt, Human
gguguggcccucaggccuggugcugccuugga

SEQ ID NO: 204761 - RNA, 16 nt, Human
gguguggccugagaua

SEQ ID NO: 204762 - RNA, 32 nt, Human
gguguggccuucggguugacaugagaaagguc

SEQ ID NO: 204763 - RNA, 32 nt, Human
gguguggcucaugaaaucacagagcucagaga

SEQ ID NO: 204764 - RNA, 32 nt, Human
gguguggcugaaacggcaguugcucaagagca

SEQ ID NO: 204765 - RNA, 24 nt, Human
gguguggcugacucugagcccagg

SEQ ID NO: 204766 - RNA, 32 nt, Human
gguguggcugagccccagagccccagaaaccu

SEQ ID NO: 204767 - RNA, 18 nt, Human
gguguggcugcagcgggg

SEQ ID NO: 204768 - RNA, 32 nt, Human
gguguggcugcugaagccccacagcugugggc

SEQ ID NO: 204769 - RNA, 32 nt, Human
gguguggcuucccugcucacacccacacuggc

SEQ ID NO: 204770 - RNA, 32 nt, Human
gguguggcuuuguacaugcagaagaaugcuau

SEQ ID NO: 204771 - RNA, 32 nt, Human
ggugugggaacuuccccacggauggcggugga

SEQ ID NO: 204772 - RNA, 32 nt, Human
ggugugggaaggcagaagucccagggauccug

SEQ ID NO: 204773 - RNA, 32 nt, Human
ggugugggacaggcacuggccucagaccgggg

SEQ ID NO: 204774 - RNA, 32 nt, Human
ggugugggagagagaccugggcccgccagagg

SEQ ID NO: 204775 - RNA, 32 nt, Human
ggugugggaggaaaggcuccaucccccgcccc

SEQ ID NO: 204776 - RNA, 32 nt, Human
ggugugggaggaggccaccagauucagaauuc

SEQ ID NO: 204777 - RNA, 32 nt, Human
ggugugggaggcagaggugcugacguucugga

SEQ ID NO: 204778 - RNA, 32 nt, Human
ggugugggaguagccaccagccucccacugac

SEQ ID NO: 204779 - RNA, 32 nt, Human
ggugugggaucuggggagagcggcuggagaaa

SEQ ID NO: 204780 - RNA, 32 nt, Human
ggugugggaugaagccgacgaggggcucaguc

SEQ ID NO: 204781 - RNA, 32 nt, Human
ggugugggcaaggcccaggaaucuggagcauc

SEQ ID NO: 204782 - RNA, 20 nt, Human
ggugugggcagggcugguuc

SEQ ID NO: 204783 - RNA, 32 nt, Human
ggugugggcagugggaggcaagagugaagcag

SEQ ID NO: 204784 - RNA, 32 nt, Human
ggugugggcccaggcagggcuggggugugcug

SEQ ID NO: 204785 - RNA, 21 nt, Human
ggugugggcccuaaauucacu

SEQ ID NO: 204786 - RNA, 32 nt, Human
ggugugggccuguaaucgcagcuacucaggaa

SEQ ID NO: 204787 - RNA, 32 nt, Human
ggugugggcugagucccgggagccaaagggca

SEQ ID NO: 204788 - RNA, 22 nt, Human
gguguggggaagaggugggguu

SEQ ID NO: 204789 - RNA, 32 nt, Human
gguguggggaggacggggcaggacgcugcagc

SEQ ID NO: 204790 - RNA, 32 nt, Human
gguguggggcccuggauggcagcucuggccca

SEQ ID NO: 204791 - RNA, 32 nt, Human
gguguggggcucugcugggcuucucuugagca

SEQ ID NO: 204792 - RNA, 32 nt, Human
gguguggggcugggcauggucacuccugcugg

SEQ ID NO: 204793 - RNA, 32 nt, Human
gguguggggcuggguauggucacuccugcugg

SEQ ID NO: 204794 - RNA, 32 nt, Human
ggugugggggagccguuaggccucccaggucc

SEQ ID NO: 204795 - RNA, 32 nt, Human
ggugugggguuccguucucccuuccccuccca

SEQ ID NO: 204796 - RNA, 32 nt, Human
gguguggguagaggcuuuaagcauuaagagga

SEQ ID NO: 204797 - RNA, 32 nt, Human
ggugugggugcaauguggguguuuacacacau

SEQ ID NO: 204798 - RNA, 32 nt, Human
gguguggguggaagggcugggugucgaaauca

SEQ ID NO: 204799 - RNA, 20 nt, Human
gguguggguguccacgccca

SEQ ID NO: 204800 - RNA, 32 nt, Human
gguguggguguggguguaucugcugaguaagg

SEQ ID NO: 204801 - RNA, 32 nt, Human
gguguggguuacugggugcaggaugaacuguc

SEQ ID NO: 204802 - RNA, 32 nt, Human
gguguggguucgagaccuuccucugccaguuc

SEQ ID NO: 204803 - RNA, 22 nt, Human
ggugugguagcaggugccugua

SEQ ID NO: 204804 - RNA, 22 nt, Human
ggugugguagcgcacaccugua

SEQ ID NO: 204805 - RNA, 22 nt, Human
ggugugguaggaugcaccugua

SEQ ID NO: 204806 - RNA, 32 nt, Human
ggugugguagugcgugccugugaucccagcua

SEQ ID NO: 204807 - RNA, 32 nt, Human
gguguggucacucucaauucacuggcaaaugc

SEQ ID NO: 204808 - RNA, 32 nt, Human
gguguggucgaggcuccugaaagagaaagggc

SEQ ID NO: 204809 - RNA, 22 nt, Human
gguguggugacucaugccugua

SEQ ID NO: 204810 - RNA, 32 nt, Human
gguguggugcugcucccucaccuccaaaagag

SEQ ID NO: 204811 - RNA, 32 nt, Human
ggugugguggaagaggggaugagggaaagaaa

SEQ ID NO: 204812 - RNA, 19 nt, Human
ggugugguggacgccugug

SEQ ID NO: 204813 - RNA, 22 nt, Human
ggugugguggcacacaccagua

SEQ ID NO: 204814 - RNA, 22 nt, Human
ggugugguggcacaggccugua

SEQ ID NO: 204815 - RNA, 22 nt, Human
ggugugguggcacaugccugua

SEQ ID NO: 204816 - RNA, 22 nt, Human
ggugugguggcacgcaccagua

SEQ ID NO: 204817 - RNA, 22 nt, Human
ggugugguggcacgcaucugua

SEQ ID NO: 204818 - RNA, 22 nt, Human
ggugugguggcacgcgccugua

SEQ ID NO: 204819 - RNA, 22 nt, Human
ggugugguggcaggugcuugua

SEQ ID NO: 204820 - RNA, 22 nt, Human
ggugugguggcaugcgccugua

SEQ ID NO: 204821 - RNA, 22 nt, Human
ggugugguggcaugugccugug

SEQ ID NO: 204822 - RNA, 22 nt, Human
ggugugguggcccacgccugua

SEQ ID NO: 204823 - RNA, 22 nt, Human
ggugugguggcgcaagccugua

SEQ ID NO: 204824 - RNA, 22 nt, Human
ggugugguggcgcacaccugua

SEQ ID NO: 204825 - RNA, 22 nt, Human
ggugugguggcgcauaccugua

SEQ ID NO: 204826 - RNA, 22 nt, Human
ggugugguggcgcaugccugua

SEQ ID NO: 204827 - RNA, 22 nt, Human
ggugugguggcgcaugucugua

SEQ ID NO: 204828 - RNA, 22 nt, Human
ggugugguggcgggcgccugua

SEQ ID NO: 204829 - RNA, 22 nt, Human
ggugugguggcgggcgccugug

SEQ ID NO: 204830 - RNA, 22 nt, Human
ggugugguggcgugcgccugua

SEQ ID NO: 204831 - RNA, 22 nt, Human
ggugugguggcgugugccugug

SEQ ID NO: 204832 - RNA, 22 nt, Human
ggugugguggcucaagccugua

SEQ ID NO: 204833 - RNA, 22 nt, Human
ggugugguggcucacaccugua

SEQ ID NO: 204834 - RNA, 22 nt, Human
ggugugguggcucacaucugua

SEQ ID NO: 204835 - RNA, 22 nt, Human
ggugugguggcucacgcaugua

SEQ ID NO: 204836 - RNA, 22 nt, Human
ggugugguggcucacgccugua

SEQ ID NO: 204837 - RNA, 22 nt, Human
ggugugguggcucacgccugug

SEQ ID NO: 204838 - RNA, 24 nt, Human
ggugugguggcucacgcuuaugua

SEQ ID NO: 204839 - RNA, 22 nt, Human
ggugugguggcucacgucugua

SEQ ID NO: 204840 - RNA, 22 nt, Human
ggugugguggcucacuccugua

SEQ ID NO: 204841 - RNA, 22 nt, Human
ggugugguggcucaggccugua

SEQ ID NO: 204842 - RNA, 22 nt, Human
ggugugguggcucaugccugua

SEQ ID NO: 204843 - RNA, 22 nt, Human
ggugugguggcuccgaccugua

SEQ ID NO: 204844 - RNA, 22 nt, Human
ggugugguggcugacaucugua

SEQ ID NO: 204845 - RNA, 22 nt, Human
ggugugguggcuuaccccugua

SEQ ID NO: 204846 - RNA, 22 nt, Human
ggugugguggcuuacgccugua

SEQ ID NO: 204847 - RNA, 22 nt, Human
ggugugguggcuuaugccugua

SEQ ID NO: 204848 - RNA, 32 nt, Human
ggugugguggcuuuaaucccagcacuuuggga

SEQ ID NO: 204849 - RNA, 19 nt, Human
gguguggugggcaccugua

SEQ ID NO: 204850 - RNA, 32 nt, Human
ggugugguggggacccgggagugggucucacu

SEQ ID NO: 204851 - RNA, 22 nt, Human
ggugugguggggugcaccugua

SEQ ID NO: 204852 - RNA, 22 nt, Human
gguguggugguacacgccugua

SEQ ID NO: 204853 - RNA, 22 nt, Human
ggugugguggugcacaccugua

SEQ ID NO: 204854 - RNA, 22 nt, Human
ggugugguggugcaugccugua

SEQ ID NO: 204855 - RNA, 22 nt, Human
ggugugguggugcgcaccugug

SEQ ID NO: 204856 - RNA, 25 nt, Human
gguguggugguggcucacgccugua

SEQ ID NO: 204857 - RNA, 32 nt, Human
gguguggugguggcucacgccuguaaucccag

SEQ ID NO: 204858 - RNA, 22 nt, Human
ggugugguggugggcaccugua

SEQ ID NO: 204859 - RNA, 22 nt, Human
gguguggugguggguaccugua

SEQ ID NO: 204860 - RNA, 22 nt, Human
ggugugguggugugcaccugua

SEQ ID NO: 204861 - RNA, 22 nt, Human
gguguggugguucaugccugua

SEQ ID NO: 204862 - RNA, 32 nt, Human
ggugugguguccagcuguuaccagcuucugag

SEQ ID NO: 204863 - RNA, 32 nt, Human
ggugugguguccugccugucugccccagccca

SEQ ID NO: 204864 - RNA, 32 nt, Human
gguguguaccacugccucuggcuuuauuuugc

SEQ ID NO: 204865 - RNA, 20 nt, Human
gguguguagagaaaagcugc

SEQ ID NO: 204866 - RNA, 32 nt, Human
gguguguagugaucucagcucacugcaagcuc

SEQ ID NO: 204867 - RNA, 32 nt, Human
gguguguauguccaguccccagccaggcucug

SEQ ID NO: 204868 - RNA, 32 nt, Human
ggugugucacugcauccauugccaccuccugu

SEQ ID NO: 204869 - RNA, 32 nt, Human
ggugugucauuuccugcugcuuccagcuccau

SEQ ID NO: 204870 - RNA, 32 nt, Human
ggugugucauuuccuuuaauaggaccagggac

SEQ ID NO: 204871 - RNA, 32 nt, Human
gguguguccaaguccucccaaaggacagcagu

SEQ ID NO: 204872 - RNA, 32 nt, Human
ggugugucccaggagucggagaagcuggaaag

SEQ ID NO: 204873 - RNA, 32 nt, Human
ggugugucugugcugcccccuccagggcaggg

SEQ ID NO: 204874 - RNA, 32 nt, Human
ggugugucuguucucuccucugucccaggugc

SEQ ID NO: 204875 - RNA, 32 nt, Human
ggugugugaauuccuaccccgaacuggaagcc

SEQ ID NO: 204876 - RNA, 32 nt, Human
ggugugugacaucacaggccuggacauggcca

SEQ ID NO: 204877 - RNA, 32 nt, Human
ggugugugaccuggggaugguggagggucacc

SEQ ID NO: 204878 - RNA, 32 nt, Human
ggugugugacuauaaucccagcuacucgggag

SEQ ID NO: 204879 - RNA, 32 nt, Human
ggugugugacugcuguauguaucuuaucuuga

SEQ ID NO: 204880 - RNA, 32 nt, Human
ggugugugacuguaaucccagcuacucaggag

SEQ ID NO: 204881 - RNA, 32 nt, Human
ggugugugccuauaaucccagcuacucaggag

SEQ ID NO: 204882 - RNA, 32 nt, Human
ggugugugccuauaaucccagcuacuugggag

SEQ ID NO: 204883 - RNA, 32 nt, Human
ggugugugccuguaaucccagcuacucaggag

SEQ ID NO: 204884 - RNA, 32 nt, Human
ggugugugccuguaaucccagcuacucgggag

SEQ ID NO: 204885 - RNA, 32 nt, Human
ggugugugccuguaaucccggcuacuugggag

SEQ ID NO: 204886 - RNA, 32 nt, Human
ggugugugccuguaauccuagcuacucgggag

SEQ ID NO: 204887 - RNA, 32 nt, Human
ggugugugccuguaaugccagcuacucaggag

SEQ ID NO: 204888 - RNA, 32 nt, Human
ggugugugccuguaauuccagcuacucgggag

SEQ ID NO: 204889 - RNA, 32 nt, Human
ggugugugccuguagucccagcuacuauggag

SEQ ID NO: 204890 - RNA, 32 nt, Human
ggugugugccuguagucccagcuacuggcgag

SEQ ID NO: 204891 - RNA, 32 nt, Human
ggugugugccuguagucccagcuacuugugag

SEQ ID NO: 204892 - RNA, 32 nt, Human
ggugugugccuguaguccuagcugcuugggag

SEQ ID NO: 204893 - RNA, 32 nt, Human
ggugugugccuguagucucagcuacuugggag

SEQ ID NO: 204894 - RNA, 32 nt, Human
ggugugugccuguaguuccagcuacucaggag

SEQ ID NO: 204895 - RNA, 32 nt, Human
ggugugugccuguauuccuagcuacuuugaug

SEQ ID NO: 204896 - RNA, 32 nt, Human
ggugugugcuaccucacccagcuaauuucuaa

SEQ ID NO: 204897 - RNA, 32 nt, Human
ggugugugcucugucugucugucuuugucugu

SEQ ID NO: 204898 - RNA, 32 nt, Human
ggugugugcugcuaugacaucucuccagagcc

SEQ ID NO: 204899 - RNA, 32 nt, Human
ggugugugcuuguaaucccagcuacuugggag

SEQ ID NO: 204900 - RNA, 32 nt, Human
gguguguggagggucccugaugccgcuucccg

SEQ ID NO: 204901 - RNA, 32 nt, Human
gguguguggagguggcgggaggggucagugac

SEQ ID NO: 204902 - RNA, 21 nt, Human
gguguguggcaaguacuuuca

SEQ ID NO: 204903 - RNA, 32 nt, Human
gguguguggccaggcugcagagcugcgugccg

SEQ ID NO: 204904 - RNA, 32 nt, Human
gguguguggggucaggccagccacuuuccucc

SEQ ID NO: 204905 - RNA, 32 nt, Human
ggugugugucuguaaucccagcuacucggccu

SEQ ID NO: 204906 - RNA, 32 nt, Human
ggugugugucuguaaucccagcuacucgggag

SEQ ID NO: 204907 - RNA, 29 nt, Human
ggugugugucugugucuagggaaugcugg

SEQ ID NO: 204908 - RNA, 32 nt, Human
ggugugugucuuggugcauuggaaaaggaguc

SEQ ID NO: 204909 - RNA, 22 nt, Human
ggugugugugcauggggggcug

SEQ ID NO: 204910 - RNA, 32 nt, Human
ggugugugugccacccuuguccucuguccucu

SEQ ID NO: 204911 - RNA, 32 nt, Human
gguguguuacaggacccagcuggcccagcugc

SEQ ID NO: 204912 - RNA, 32 nt, Human
gguguguugcauuugagagaaggcaagaagaa

SEQ ID NO: 204913 - RNA, 32 nt, Human
gguguguugguaaacaguuuggaaaaguggcg

SEQ ID NO: 204914 - RNA, 32 nt, Human
gguguguuucagucaggaagcaucuaaauaug

SEQ ID NO: 204915 - RNA, 32 nt, Human
guaaucccagcacuuugggaggccaggaguuc

SEQ ID NO: 204916 - RNA, 32 nt, Human
guaaucccagcacuuugggaggcccagacugg

SEQ ID NO: 204917 - RNA, 32 nt, Human
guaaucccagcacuuugggaggccgugauggg

SEQ ID NO: 204918 - RNA, 32 nt, Human
guaaucccagcacuuugggaggccguggcggg

SEQ ID NO: 204919 - RNA, 32 nt, Human
guaaucccagcacuuugggaggccgugguggg

SEQ ID NO: 204920 - RNA, 32 nt, Human
guaaucccagcacuuugggaggcucagguggg

SEQ ID NO: 204921 - RNA, 32 nt, Human
guaaucccagcacuuugggaggcugaagcagg

SEQ ID NO: 204922 - RNA, 32 nt, Human
guaaucccagcacuuugggaggcugaaguggg

SEQ ID NO: 204923 - RNA, 32 nt, Human
guaaucccagcacuuugggaggcugagaaggg

SEQ ID NO: 204924 - RNA, 32 nt, Human
guaaucccagcacuuugggaggcugagacagg

SEQ ID NO: 204925 - RNA, 32 nt, Human
guaaucccagcacuuugggaggcugagacccg

SEQ ID NO: 204926 - RNA, 32 nt, Human
guaaucccagcacuuugggaggcugagacggg

SEQ ID NO: 204927 - RNA, 32 nt, Human
guaaucccagcacuuugggaggcugagauggg

SEQ ID NO: 204928 - RNA, 32 nt, Human
guaaucccagcacuuugggaggcugagaugug

SEQ ID NO: 204929 - RNA, 32 nt, Human
guaaucccagcacuuugggaggcugagcaagg

SEQ ID NO: 204930 - RNA, 32 nt, Human
guaaucccagcacuuugggaggcugagcugga

SEQ ID NO: 204931 - RNA, 32 nt, Human
guaaucccagcacuuugggaggcugaggaagg

SEQ ID NO: 204932 - RNA, 32 nt, Human
guaaucccagcacuuugggaggcugaggacag

SEQ ID NO: 204933 - RNA, 32 nt, Human
guaaucccagcacuuugggaggcugaggagag

SEQ ID NO: 204934 - RNA, 32 nt, Human
guaaucccagcacuuugggaggcugaggaggg

SEQ ID NO: 204935 - RNA, 29 nt, Human
guaaucccagcacuuugggaggcugaggc

SEQ ID NO: 204936 - RNA, 32 nt, Human
guaaucccagcacuuugggaggcugaggcaag

SEQ ID NO: 204937 - RNA, 32 nt, Human
guaaucccagcacuuugggaggcugaggcagg

SEQ ID NO: 204938 - RNA, 32 nt, Human
guaaucccagcacuuugggaggcugaggcugg

SEQ ID NO: 204939 - RNA, 32 nt, Human
guaaucccagcacuuugggaggcugagggggu

SEQ ID NO: 204940 - RNA, 32 nt, Human
guaaucccagcacuuugggaggcugagguagg

SEQ ID NO: 204941 - RNA, 32 nt, Human
guaaucccagcacuuugggaggcugaggugag

SEQ ID NO: 204942 - RNA, 32 nt, Human
guaaucccagcacuuugggaggcugaggugga

SEQ ID NO: 204943 - RNA, 32 nt, Human
guaaucccagcacuuugggaggcugagguggg

SEQ ID NO: 204944 - RNA, 32 nt, Human
guaaucccagcacuuugggaggcugcagcggg

SEQ ID NO: 204945 - RNA, 32 nt, Human
guaaucccagcacuuugggaggucaagguggg

SEQ ID NO: 204946 - RNA, 32 nt, Human
guaaucccagcacuuugggagucugaggugag

SEQ ID NO: 204947 - RNA, 32 nt, Human
guaaucccagcacuuugggagucugagguggg

SEQ ID NO: 204948 - RNA, 32 nt, Human
guaaucccagcacuuugggaugccauggcggg

SEQ ID NO: 204949 - RNA, 32 nt, Human
guaaucccagcacuuugggaugcugaagugag

SEQ ID NO: 204950 - RNA, 32 nt, Human
guaaucccagcacuuugggaugcugaggcggg

SEQ ID NO: 204951 - RNA, 32 nt, Human
guaaucccagcacuuugggauuacucccaggc

SEQ ID NO: 204952 - RNA, 32 nt, Human
guaaucccagcacuuugggauuacucccaguc

SEQ ID NO: 204953 - RNA, 32 nt, Human
guaaucccagcacuuugggauuacucccgggc

SEQ ID NO: 204954 - RNA, 32 nt, Human
guaaucccagcacuuuggggagcugaggcggg

SEQ ID NO: 204955 - RNA, 32 nt, Human
guaaucccagcacuuugggugggugaggcagg

SEQ ID NO: 204956 - RNA, 32 nt, Human
guaaucccagcacuuugugaggcugagguggg

SEQ ID NO: 204957 - RNA, 32 nt, Human
guaaucccagcacuuuguggggcugagggaga

SEQ ID NO: 204958 - RNA, 32 nt, Human
guaaucccagcacuuuugaggcugaggcgggc

SEQ ID NO: 204959 - RNA, 32 nt, Human
guaaucccagcacuuuugggaggcugagguug

SEQ ID NO: 204960 - RNA, 32 nt, Human
guaaucccagcauuugggaggcugaugugggu

SEQ ID NO: 204961 - RNA, 32 nt, Human
guaaucccagccaaggcuggcagaucacuuga

SEQ ID NO: 204962 - RNA, 19 nt, Human
guaaucccagcuacauggg

SEQ ID NO: 204963 - RNA, 19 nt, Human
guaaucccagcuacguggg

SEQ ID NO: 204964 - RNA, 32 nt, Human
guaaucccagcuacucggaggcugaggcacaa

SEQ ID NO: 204965 - RNA, 19 nt, Human
guaaucccagcuacucggg

SEQ ID NO: 204966 - RNA, 18 nt, Human
guaaucccagcuacuggg

SEQ ID NO: 204967 - RNA, 19 nt, Human
guaaucccagcuacuucgg

SEQ ID NO: 204968 - RNA, 19 nt, Human
guaaucccagcuacuuggg

SEQ ID NO: 204969 - RNA, 19 nt, Human
guaaucccagcuacuuugg

SEQ ID NO: 204970 - RNA, 19 nt, Human
guaaucccagcuccuuggg

SEQ ID NO: 204971 - RNA, 19 nt, Human
guaaucccagcugcuuggg

SEQ ID NO: 204972 - RNA, 32 nt, Human
guaaucccagcugcuugggaggcugaggcagg

SEQ ID NO: 204973 - RNA, 32 nt, Human
guaaucccagcugcuugggaggcugaggcagu

SEQ ID NO: 204974 - RNA, 32 nt, Human
guaaucccagcugcuugggaggcugagggcag

SEQ ID NO: 204975 - RNA, 32 nt, Human
guaaucccagcugcuugggaggcugagguagg

SEQ ID NO: 204976 - RNA, 19 nt, Human
guaaucccagcuucuuggg

SEQ ID NO: 204977 - RNA, 32 nt, Human
guaaucccagggugcugagauuacagguguga

SEQ ID NO: 204978 - RNA, 18 nt, Human
guaaucccaguacuuggg

SEQ ID NO: 204979 - RNA, 32 nt, Human
guaaucccagugcuuugggaggccaaggcagg

SEQ ID NO: 204980 - RNA, 19 nt, Human
guaaucccaguuacuuggg

SEQ ID NO: 204981 - RNA, 32 nt, Human
guaaucccaucaucuacucaggaggcugaggc

SEQ ID NO: 204982 - RNA, 32 nt, Human
guaaucccgccacugcacucuagccuggguga

SEQ ID NO: 204983 - RNA, 32 nt, Human
guaaucccgguauuugggaggcugaggcagaa

SEQ ID NO: 204984 - RNA, 19 nt, Human
guaaucccugcuacuuggg

SEQ ID NO: 204985 - RNA, 32 nt, Human
guaauccgagcuacucaggagcugaggcagaa

SEQ ID NO: 204986 - RNA, 32 nt, Human
guaauccucccaccccagccucccagguagcu

SEQ ID NO: 204987 - RNA, 32 nt, Human
guaauccugcaaucacuucugaccaggaguua

SEQ ID NO: 204988 - RNA, 31 nt, Human
guaauccugggguugguauguaggaggucua

SEQ ID NO: 204989 - RNA, 32 nt, Human
guaauccuuaccuguauacagugcagagccuu

SEQ ID NO: 204990 - RNA, 32 nt, Human
guaaucguuauguguguauauguaugugugua

SEQ ID NO: 204991 - RNA, 32 nt, Human
guaaucuaccccuucagaacacuggggaugaa

SEQ ID NO: 204992 - RNA, 32 nt, Human
guaaucucaaagaagcugcaaaguggauggau

SEQ ID NO: 204993 - RNA, 31 nt, Human
guaaucucaauaaauguggauugaaguuuuu

SEQ ID NO: 204994 - RNA, 32 nt, Human
guaaucucacuacacaggaggcugaggcagga

SEQ ID NO: 204995 - RNA, 19 nt, Human
guaaucucagcuacuuggg

SEQ ID NO: 204996 - RNA, 32 nt, Human
guaaucucagcuacuugggaggcugggcagaa

SEQ ID NO: 204997 - RNA, 32 nt, Human
guaaucuccauccaccauaggauagaguuaaa

SEQ ID NO: 204998 - RNA, 32 nt, Human
guaaucucuuucucuugcuuuuucuuucuuuc

SEQ ID NO: 204999 - RNA, 31 nt, Human
guaaucugacuucucacuuccuaaguucccu

SEQ ID NO: 205000 - RNA, 32 nt, Human
guaaucugauuugaauguuauaguugauaaua

SEQ ID NO: 205001 - RNA, 32 nt, Human
guaaucugcuuagagccacacagcuaugagua

SEQ ID NO: 205002 - RNA, 32 nt, Human
guaaucuuuacaagcauagcugccugcacucu

SEQ ID NO: 205003 - RNA, 32 nt, Human
guaaucuuuuaaccaguuuccuccuuaacagg

SEQ ID NO: 205004 - RNA, 32 nt, Human
guaaugaaacaaagaguucaagaaauaaguuu

SEQ ID NO: 205005 - RNA, 32 nt, Human
guaaugaagguaaacugagguaaugagagggg

SEQ ID NO: 205006 - RNA, 32 nt, Human
guaaugaccuggcugcucagccgggcccucac

SEQ ID NO: 205007 - RNA, 32 nt, Human
guaaugaggauguggagggcuggcucaaugcg

SEQ ID NO: 205008 - RNA, 32 nt, Human
guaaugaggugcagagguguggggaagaccug

SEQ ID NO: 205009 - RNA, 32 nt, Human
guaaugauacacagugaauucuuuuugacaaa

SEQ ID NO: 205010 - RNA, 32 nt, Human
guaaugaucacuuuggaagauuuccuuugcau

SEQ ID NO: 205011 - RNA, 32 nt, Human
guaaugaucugcaagucccggagagcaacagc

SEQ ID NO: 205012 - RNA, 32 nt, Human
guaaugaugaacacuuuacuauuugcuaacuu

SEQ ID NO: 205013 - RNA, 32 nt, Human
guaaugauggccucucucaaaagagaaaaaca

SEQ ID NO: 205014 - RNA, 32 nt, Human
guaaugauugaggauggggacugguuuguauc

SEQ ID NO: 205015 - RNA, 32 nt, Human
guaaugauuucuucuuuuccuauugaccagua

SEQ ID NO: 205016 - RNA, 32 nt, Human
guaaugcaaaauacuugaagcugcaguagcuu

SEQ ID NO: 205017 - RNA, 32 nt, Human
guaaugcagcucguuggguggcugaggcaggc

SEQ ID NO: 205018 - RNA, 32 nt, Human
guaaugcaggauuagaagaagcagagcucuag

SEQ ID NO: 205019 - RNA, 32 nt, Human
guaaugcagguguaggcaagagccagggcuag

SEQ ID NO: 205020 - RNA, 32 nt, Human
guaaugcagugcugugaccauagcccacugca

SEQ ID NO: 205021 - RNA, 21 nt, Human
guaaugcauaucauuagcccu

SEQ ID NO: 205022 - RNA, 32 nt, Human
guaaugccacucccacaaucucaggccuggua

SEQ ID NO: 205023 - RNA, 32 nt, Human
guaaugccuaucucuuggucuauuaaggaaag

SEQ ID NO: 205024 - RNA, 32 nt, Human
guaaugccucaguucauuuucaguuguuugau

SEQ ID NO: 205025 - RNA, 32 nt, Human
guaaugccuccugccugccucuuucaagaugg

SEQ ID NO: 205026 - RNA, 28 nt, Human
guaaugccuuggcugcucucagccccca

SEQ ID NO: 205027 - RNA, 32 nt, Human
guaaugcgcguccagauuucugaccucaugcu

SEQ ID NO: 205028 - RNA, 32 nt, Human
guaaugcuuauguauaaacauguauguaauau

SEQ ID NO: 205029 - RNA, 32 nt, Human
guaaugcuuucugguauacuucagaggcucca

SEQ ID NO: 205030 - RNA, 32 nt, Human
guaauggaaaacaaauucuuaugacuuugugg

SEQ ID NO: 205031 - RNA, 32 nt, Human
guaauggaaaaguguugccugccaccacccuc

SEQ ID NO: 205032 - RNA, 32 nt, Human
guaauggaagaagaggucagagagggagauuu

SEQ ID NO: 205033 - RNA, 32 nt, Human
guaauggagaaaggagcagucagcauucuucc

SEQ ID NO: 205034 - RNA, 32 nt, Human
guaauggagaagcaggcauagacagauucaga

SEQ ID NO: 205035 - RNA, 32 nt, Human
guaaugggauucacagcuucuggggauuagga

SEQ ID NO: 205036 - RNA, 32 nt, Human
guaaugguaaacacugguguguuuugaaguug

SEQ ID NO: 205037 - RNA, 32 nt, Human
guaauggugcuguucucgcucuucguggauua

SEQ ID NO: 205038 - RNA, 32 nt, Human
guaaugguggaggugugggcagaggagggagg

SEQ ID NO: 205039 - RNA, 32 nt, Human
guaaugguggccuggggcuucugaggcuucug

SEQ ID NO: 205040 - RNA, 32 nt, Human
guaaugguucuuuacacaucagucacaaguua

SEQ ID NO: 205041 - RNA, 32 nt, Human
guaaugguuggguuuaggaugaaccauuuuaa

SEQ ID NO: 205042 - RNA, 32 nt, Human
guaauguagggguugugagcacagacuuuggu

SEQ ID NO: 205043 - RNA, 32 nt, Human
guaauguaugucuacuggugggagacugugag

SEQ ID NO: 205044 - RNA, 32 nt, Human
guaauguauuguuauucagugcaaaauuauug

SEQ ID NO: 205045 - RNA, 32 nt, Human
guaaugugaucucacuguggcuuuuguuuuca

SEQ ID NO: 205046 - RNA, 32 nt, Human
guaauguugcaauaugaaccucccauugggcc

SEQ ID NO: 205047 - RNA, 32 nt, Human
guaauguuucuuaauucuccucuccuuucuua

SEQ ID NO: 205048 - RNA, 32 nt, Human
guaauuaacucauguacagccucauccuguau

SEQ ID NO: 205049 - RNA, 32 nt, Human
guaauuaaugauuuuauguuugguuacucuac

SEQ ID NO: 205050 - RNA, 32 nt, Human
guaauuaauugauccuugaugugauguucuuu

SEQ ID NO: 205051 - RNA, 32 nt, Human
guaauuacaguggaaugaguacuggacaagga

SEQ ID NO: 205052 - RNA, 32 nt, Human
guaauuaccauuuguugaacacauuaaugcua

SEQ ID NO: 205053 - RNA, 32 nt, Human
guaauuacuaaauuaugaggcuuugcuuuuug

SEQ ID NO: 205054 - RNA, 32 nt, Human
guaauuacuggccacaaaauaccaggugccag

SEQ ID NO: 205055 - RNA, 32 nt, Human
guaauuagaucuuuucuccaccugcaagaauc

SEQ ID NO: 205056 - RNA, 32 nt, Human
guaauuagcccggcuaauuuuguauuuuuagu

SEQ ID NO: 205057 - RNA, 32 nt, Human
guaauuauaauuuauaucaaaacguuugucaa

SEQ ID NO: 205058 - RNA, 32 nt, Human
guaauuauaguucuguuaccaagaauaaauaa

SEQ ID NO: 205059 - RNA, 32 nt, Human
guaauuaugagaggcugucauauaucaaagca

SEQ ID NO: 205060 - RNA, 32 nt, Human
guaauuaugauggcugagaaaugauucauuug

SEQ ID NO: 205061 - RNA, 32 nt, Human
guaauuauugauggcucugccugcuuaggacu

SEQ ID NO: 205062 - RNA, 32 nt, Human
guaauucaaaaauaggaaucuuuggcugcaaa

SEQ ID NO: 205063 - RNA, 32 nt, Human
guaauucagguuugaacccuuaggcuugugga

SEQ ID NO: 205064 - RNA, 32 nt, Human
guaauuccagcuacuuggaggcugaggcggga

SEQ ID NO: 205065 - RNA, 19 nt, Human
guaauuccagcuacuuggg

SEQ ID NO: 205066 - RNA, 32 nt, Human
guaauuccuguaaugucagauuuugauuuuac

SEQ ID NO: 205067 - RNA, 32 nt, Human
guaauuccuuccucucccuuguucccaaguag

SEQ ID NO: 205068 - RNA, 32 nt, Human
guaauucuauuaauagaaacagcuguguaaag

SEQ ID NO: 205069 - RNA, 32 nt, Human
guaauucugcugucucagccuccugcguagcu

SEQ ID NO: 205070 - RNA, 32 nt, Human
guaauucuucaccucuuuucucagcucccugc

SEQ ID NO: 205071 - RNA, 32 nt, Human
guaauucuuccucuucguucuucaccuggguu

SEQ ID NO: 205072 - RNA, 32 nt, Human
guaauucuucuccuuugucaaaugguauuuuu

SEQ ID NO: 205073 - RNA, 32 nt, Human
guaauugaggaaaaacugacagaugcuuuugc

SEQ ID NO: 205074 - RNA, 32 nt, Human
guaauugaguccauuuucaaguguggucaaga

SEQ ID NO: 205075 - RNA, 32 nt, Human
guaauugaucuuuccuuccuuccagagaaaga

SEQ ID NO: 205076 - RNA, 32 nt, Human
guaauugcaccacugcacuccagccuggguga

SEQ ID NO: 205077 - RNA, 32 nt, Human
guaauugcaucacugcacuccaaccugggcaa

SEQ ID NO: 205078 - RNA, 32 nt, Human
guaauugcauuugcuuuuguaauucuuaauga

SEQ ID NO: 205079 - RNA, 32 nt, Human
guaauuggagugaaagggcagagacccuggaa

SEQ ID NO: 205080 - RNA, 32 nt, Human
guaauuggcuaugaaguacuguggcagagcug

SEQ ID NO: 205081 - RNA, 32 nt, Human
guaauuggcugcgucuggcuaauucuaagcac

SEQ ID NO: 205082 - RNA, 32 nt, Human
guaauugggaaacuguucauuugaggauaaaa

SEQ ID NO: 205083 - RNA, 32 nt, Human
guaauugggagcacaaggggccucccaaaaag

SEQ ID NO: 205084 - RNA, 32 nt, Human
guaauuguaaccuuucaaaugaguuacgugaa

SEQ ID NO: 205085 - RNA, 32 nt, Human
guaauugucacuucuguugauuguacuccuga

SEQ ID NO: 205086 - RNA, 31 nt, Human
guaauugucauaucuuuacauguggauuaug

SEQ ID NO: 205087 - RNA, 32 nt, Human
guaauugucugagucugugcacguacuuuuag

SEQ ID NO: 205088 - RNA, 32 nt, Human
guaauugugaguaacucaccacuuuagcaggu

SEQ ID NO: 205089 - RNA, 31 nt, Human
guaauugugauuuaccugugccaaaggugcu

SEQ ID NO: 205090 - RNA, 32 nt, Human
guaauuguguuuugggggaaaguggggaauuu

SEQ ID NO: 205091 - RNA, 32 nt, Human
guaauuguugguuaucuuaaaacaucuguucu

SEQ ID NO: 205092 - RNA, 32 nt, Human
guaauuuaaaugguuccucuugaagcucaaau

SEQ ID NO: 205093 - RNA, 32 nt, Human
guaauuuaacaucaugauuaccaccuucgaag

SEQ ID NO: 205094 - RNA, 32 nt, Human
guaauuuaacuaaggcacaauggacuuguuua

SEQ ID NO: 205095 - RNA, 32 nt, Human
guaauuuacaaaccucucagcacuaauuagug

SEQ ID NO: 205096 - RNA, 32 nt, Human
guaauuuauagaacaaauauuugauaagcucc

SEQ ID NO: 205097 - RNA, 32 nt, Human
guaauuucacuuuagaagguuguauuaccuuc

SEQ ID NO: 205098 - RNA, 32 nt, Human
guaauuucauuccuuaacuuccuuuuccccac

SEQ ID NO: 205099 - RNA, 32 nt, Human
guaauuuccuuucuuuuuaaaccauaaauuag

SEQ ID NO: 205100 - RNA, 32 nt, Human
guaauuucugcacuucgcacuugagagaaggc

SEQ ID NO: 205101 - RNA, 32 nt, Human
guaauuucuuuggcaaccuuccuccucccuua

SEQ ID NO: 205102 - RNA, 32 nt, Human
guaauuugagaacuccuucaauuauauugacu

SEQ ID NO: 205103 - RNA, 32 nt, Human
guaauuugcauauaucuuuaauuauuucugug

SEQ ID NO: 205104 - RNA, 32 nt, Human
guaauuugcccagcugcuaacugugaagcaaa

SEQ ID NO: 205105 - RNA, 32 nt, Human
guaauuuggcaaagaucaaaaggcuaguauga

SEQ ID NO: 205106 - RNA, 32 nt, Human
guaauuuuaucuaaauuacagugcaguuuagu

SEQ ID NO: 205107 - RNA, 32 nt, Human
guaauuuuguguauucuuauuuacuuaacauu

SEQ ID NO: 205108 - RNA, 32 nt, Human
guacaaaaauuagcuggaugugguggugggcg

SEQ ID NO: 205109 - RNA, 32 nt, Human
guacaaaaauuagcugggcaugauggcacgca

SEQ ID NO: 205110 - RNA, 32 nt, Human
guacaaaaauuagcugggcgugguggcgcaca

SEQ ID NO: 205111 - RNA, 32 nt, Human
guacaaaaauuagcugggugugguggugcgug

SEQ ID NO: 205112 - RNA, 32 nt, Human
guacaaaaauuagcuggguguguuggcacaug

SEQ ID NO: 205113 - RNA, 32 nt, Human
guacaaaaauuagucagguaugguggcaugua

SEQ ID NO: 205114 - RNA, 32 nt, Human
guacaaaagacuucucucagaagauuaaacau

SEQ ID NO: 205115 - RNA, 30 nt, Human
guacaaaagcuucaaucagaaucacugugc

SEQ ID NO: 205116 - RNA, 32 nt, Human
guacaaaaggaaaaggagaaguuggaggugga

SEQ ID NO: 205117 - RNA, 32 nt, Human
guacaaaaguuagcuggucgugguggugcggg

SEQ ID NO: 205118 - RNA, 32 nt, Human
guacaaaaguuagucaggcaugguggcacaca

SEQ ID NO: 205119 - RNA, 32 nt, Human
guacaaaauaagauggccugggcagaguuggu

SEQ ID NO: 205120 - RNA, 32 nt, Human
guacaaaaucuguuccagggagcugcuuuugu

SEQ ID NO: 205121 - RNA, 32 nt, Human
guacaaaaugagucaggggaggccgugaagaa

SEQ ID NO: 205122 - RNA, 32 nt, Human
guacaaacacauucauguuucuuuuugucucc

SEQ ID NO: 205123 - RNA, 32 nt, Human
guacaaacagugcacacacaugaacauucauu

SEQ ID NO: 205124 - RNA, 32 nt, Human
guacaaaccagcugccucacuucuguuucaca

SEQ ID NO: 205125 - RNA, 32 nt, Human
guacaaacugaaaaagacaaaauaaguaaagc

SEQ ID NO: 205126 - RNA, 32 nt, Human
guacaaagugauaggaguagagcugugaauga

SEQ ID NO: 205127 - RNA, 32 nt, Human
guacaaauccuuguaaauaccccacacccucc

SEQ ID NO: 205128 - RNA, 32 nt, Human
guacaaaugcauuuuugguaacuuuccuccua

SEQ ID NO: 205129 - RNA, 32 nt, Human
guacaaauugucacucauuugaugacaccugg

SEQ ID NO: 205130 - RNA, 32 nt, Human
guacaacaauuagcagggcaugguggugcacg

SEQ ID NO: 205131 - RNA, 32 nt, Human
guacaacaucuuacgggaagagcauaguauuu

SEQ ID NO: 205132 - RNA, 32 nt, Human
guacaacaugcuacuuugcugaauacgguaga

SEQ ID NO: 205133 - RNA, 32 nt, Human
guacaaccaccaccaucuaguuccaaacauuu

SEQ ID NO: 205134 - RNA, 32 nt, Human
guacaacuaacgcaaccaagugugcuaaaaau

SEQ ID NO: 205135 - RNA, 32 nt, Human
guacaacuaacuauuugcauauaaugugauuu

SEQ ID NO: 205136 - RNA, 32 nt, Human
guacaacuccugugagggcuggagucuugggg

SEQ ID NO: 205137 - RNA, 32 nt, Human
guacaacugaggcugcagccagggccaauggg

SEQ ID NO: 205138 - RNA, 32 nt, Human
guacaagaaagaggcgguuucugcucuuaggg

SEQ ID NO: 205139 - RNA, 32 nt, Human
guacaagagaaaacggaagagagaggaaauga

SEQ ID NO: 205140 - RNA, 32 nt, Human
guacaagaguaguaucacauucacaggaugaa

SEQ ID NO: 205141 - RNA, 32 nt, Human
guacaagauauaauguaacuugcuguuuuagc

SEQ ID NO: 205142 - RNA, 32 nt, Human
guacaagauggaaaauccccuaccccucaaaa

SEQ ID NO: 205143 - RNA, 32 nt, Human
guacaagaugugggugauggaggggcuguuuc

SEQ ID NO: 205144 - RNA, 32 nt, Human
guacaagcaugcaccaacaguccuuaguuuug

SEQ ID NO: 205145 - RNA, 32 nt, Human
guacaagccaucaaggaggcaaaggagcagca

SEQ ID NO: 205146 - RNA, 32 nt, Human
guacaaggacaguuguguuacauggauauauu

SEQ ID NO: 205147 - RNA, 32 nt, Human
guacaagggcaaagacacuacagcugccugaa

SEQ ID NO: 205148 - RNA, 32 nt, Human
guacaagggcaggccagguaaggcuugggugu

SEQ ID NO: 205149 - RNA, 32 nt, Human
guacaaggggcccagugcuggccacacagcag

SEQ ID NO: 205150 - RNA, 32 nt, Human
guacaagguauuuacacauacaacuucauaua

SEQ ID NO: 205151 - RNA, 32 nt, Human
guacaagucaguaagccuuagggaaggugagu

SEQ ID NO: 205152 - RNA, 32 nt, Human
guacaaguccugggcaccuccucuuugccucc

SEQ ID NO: 205153 - RNA, 32 nt, Human
guacaagugcugucccgccccacugguggcuc

SEQ ID NO: 205154 - RNA, 32 nt, Human
guacaauauaaccucucaucucaggcuauuuu

SEQ ID NO: 205155 - RNA, 32 nt, Human
guacaauauuagagaaaggacaggcuuuuuau

SEQ ID NO: 205156 - RNA, 32 nt, Human
guacaaucacauaauuuugaaaauccauguag

SEQ ID NO: 205157 - RNA, 32 nt, Human
guacaaucuggagcccacagcugucggucaga

SEQ ID NO: 205158 - RNA, 32 nt, Human
guacaaugcaugcaucacagacuguauuugau

SEQ ID NO: 205159 - RNA, 32 nt, Human
guacaauggcacaaacacugcucacugcagcc

SEQ ID NO: 205160 - RNA, 32 nt, Human
guacaauggcgugaucucagcucacucugcaa

SEQ ID NO: 205161 - RNA, 32 nt, Human
guacaauuauacauuaauggcuguaaugugaa

SEQ ID NO: 205162 - RNA, 32 nt, Human
guacaauuucaauaaauaucuggacuuacugg

SEQ ID NO: 205163 - RNA, 32 nt, Human
guacacacaagaaggugggcugggcacuugga

SEQ ID NO: 205164 - RNA, 32 nt, Human
guacacacagaggcacaugugcacgcacacac

SEQ ID NO: 205165 - RNA, 22 nt, Human
guacacaccaccacgcccagcu

SEQ ID NO: 205166 - RNA, 32 nt, Human
guacacaccaugcccacauacaacauaccuau

SEQ ID NO: 205167 - RNA, 21 nt, Human
guacacaccugggccccaacu

SEQ ID NO: 205168 - RNA, 21 nt, Human
guacacaccuguaaucccagc

SEQ ID NO: 205169 - RNA, 22 nt, Human
guacacaccuguaaucccagcu

SEQ ID NO: 205170 - RNA, 21 nt, Human
guacacaccuguagucccagc

SEQ ID NO: 205171 - RNA, 22 nt, Human
guacacaccuguagucccagcu

SEQ ID NO: 205172 - RNA, 22 nt, Human
guacacaccuguggucccagcu

SEQ ID NO: 205173 - RNA, 32 nt, Human
guacacagaaucagaaaagauuauaaaagaaa

SEQ ID NO: 205174 - RNA, 32 nt, Human
guacacagauucacaacucauucagaacugua

SEQ ID NO: 205175 - RNA, 32 nt, Human
guacacagggcugcgcugucucuggcugcaga

SEQ ID NO: 205176 - RNA, 32 nt, Human
guacacaguagcagcugucaacagggccuacu

SEQ ID NO: 205177 - RNA, 32 nt, Human
guacacagugccuugcccauaauagguacuca

SEQ ID NO: 205178 - RNA, 32 nt, Human
guacacaucggucugauuauuuuguuuguuuu

SEQ ID NO: 205179 - RNA, 32 nt, Human
guacacaucuguccuauaucaaccuuaccacu

SEQ ID NO: 205180 - RNA, 31 nt, Human
guacacaugaacaaggccaguccuccauuuc

SEQ ID NO: 205181 - RNA, 32 nt, Human
guacacaugccuccuagaaacuacacuauggg

SEQ ID NO: 205182 - RNA, 32 nt, Human
guacacauuuccuaucuuccuccagcuuccag

SEQ ID NO: 205183 - RNA, 32 nt, Human
guacaccacuacacuccagccugggcaacaga

SEQ ID NO: 205184 - RNA, 32 nt, Human
guacaccauggaaaccccaucccugcuccuaa

SEQ ID NO: 205185 - RNA, 32 nt, Human
guacaccauggugguucaggcugcaguggcuc

SEQ ID NO: 205186 - RNA, 32 nt, Human
guacacccacccaaguacugaggugugacgcg

SEQ ID NO: 205187 - RNA, 32 nt, Human
guacacccaccugccucucuggcuccagaagc

SEQ ID NO: 205188 - RNA, 32 nt, Human
guacaccugaggcugcucacgucucacgccca

SEQ ID NO: 205189 - RNA, 24 nt, Human
guacaccugcaccauccagagaga

SEQ ID NO: 205190 - RNA, 32 nt, Human
guacaccugcugggaccacugaucucagaguu

SEQ ID NO: 205191 - RNA, 32 nt, Human
guacaccuguaauuccagcuacuugggaggcu

SEQ ID NO: 205192 - RNA, 32 nt, Human
guacaccuguagucucagcuacuuaggaggcu

SEQ ID NO: 205193 - RNA, 32 nt, Human
guacaccuguggucccagcuacucuggaggcu

SEQ ID NO: 205194 - RNA, 32 nt, Human
guacaccuguggucccagcuauuugggaggcu

SEQ ID NO: 205195 - RNA, 32 nt, Human
guacaccuuccagauggcacagcacuuuccca

SEQ ID NO: 205196 - RNA, 22 nt, Human
guacaccuuccucuccagaaga

SEQ ID NO: 205197 - RNA, 32 nt, Human
guacaccuugaauuaaguucuuaaacacaucu

SEQ ID NO: 205198 - RNA, 22 nt, Human
guacacgccuauaaucccagcu

SEQ ID NO: 205199 - RNA, 22 nt, Human
guacacgccuguaaucccagcu

SEQ ID NO: 205200 - RNA, 22 nt, Human
guacacgccuguaguccuagcu

SEQ ID NO: 205201 - RNA, 32 nt, Human
guacacgcuggaugccucucuccauccacccc

SEQ ID NO: 205202 - RNA, 32 nt, Human
guacacggauucaagacucaccaacgggcggg

SEQ ID NO: 205203 - RNA, 32 nt, Human
guacacgucugucaucccagcagcucuuaagg

SEQ ID NO: 205204 - RNA, 32 nt, Human
guacacucacugcgcccuuucugcugcuuggu

SEQ ID NO: 205205 - RNA, 32 nt, Human
guacacuccagccugggcaacaaugcgagauu

SEQ ID NO: 205206 - RNA, 32 nt, Human
guacacuccguaacuuccgaaaccuuauuucg

SEQ ID NO: 205207 - RNA, 32 nt, Human
guacacucucgcugugcugucauucuauauga

SEQ ID NO: 205208 - RNA, 32 nt, Human
guacacugaagccacaggcugguggccauguu

SEQ ID NO: 205209 - RNA, 32 nt, Human
guacacugaagccccugcuccacagaguagau

SEQ ID NO: 205210 - RNA, 32 nt, Human
guacacugacuuuggggccuggguguuggggu

SEQ ID NO: 205211 - RNA, 32 nt, Human
guacacugagggggcccaggccaggcuuugua

SEQ ID NO: 205212 - RNA, 29 nt, Human
guacacuggcugcugccuauccugucccu

SEQ ID NO: 205213 - RNA, 32 nt, Human
guacacuuuuccacuuucaaaaccuauuuuaa

SEQ ID NO: 205214 - RNA, 32 nt, Human
guacagaaaugguucuccguguggugggagga

SEQ ID NO: 205215 - RNA, 32 nt, Human
guacagaaauuagcugggugugauggcacaca

SEQ ID NO: 205216 - RNA, 32 nt, Human
guacagaacagcuccugagccagguggacaug

SEQ ID NO: 205217 - RNA, 32 nt, Human
guacagaagaaacccaguuccaaaaagguccc

SEQ ID NO: 205218 - RNA, 32 nt, Human
guacagaagucagaacuuuggguugggaauga

SEQ ID NO: 205219 - RNA, 32 nt, Human
guacagaauaggaacuucagaggcuuuguuua

SEQ ID NO: 205220 - RNA, 32 nt, Human
guacagaauuuuaucuacaguacugugagaca

SEQ ID NO: 205221 - RNA, 32 nt, Human
guacagacacuucacuuagccuagggggccuu

SEQ ID NO: 205222 - RNA, 32 nt, Human
guacagacauaguggcuugcagacccugaccc

SEQ ID NO: 205223 - RNA, 32 nt, Human
guacagacaugugcucuggggaauucugagga

SEQ ID NO: 205224 - RNA, 32 nt, Human
guacagacauuauuuccacucugguggauaag

SEQ ID NO: 205225 - RNA, 32 nt, Human
guacagacgggauguggccaggagaacagagc

SEQ ID NO: 205226 - RNA, 32 nt, Human
guacagacguaugcuuauuuuaaaauuuuauc

SEQ ID NO: 205227 - RNA, 32 nt, Human
guacagagaccagcucagucgucagagaaacc

SEQ ID NO: 205228 - RNA, 32 nt, Human
guacagagagcaucaaaaucaggucagaaaaa

SEQ ID NO: 205229 - RNA, 32 nt, Human
guacagagaugaacagaaaacuuuuucuuuau

SEQ ID NO: 205230 - RNA, 20 nt, Human
guacagagauuacuuggaga

SEQ ID NO: 205231 - RNA, 32 nt, Human
guacagagccagcaccaccaucugaugcccag

SEQ ID NO: 205232 - RNA, 31 nt, Human
guacagaggaaacucaagccuuaaauguuua

SEQ ID NO: 205233 - RNA, 32 nt, Human
guacagagggcaccugaacacggggcucucag

SEQ ID NO: 205234 - RNA, 32 nt, Human
guacagagucacaaccugagucuuuaguggaa

SEQ ID NO: 205235 - RNA, 32 nt, Human
guacagaugaaugugugugguaagaucuuuag

SEQ ID NO: 205236 - RNA, 31 nt, Human
guacagaugggcauaggugcagugagugcag

SEQ ID NO: 205237 - RNA, 17 nt, Human
guacagauugaugugaa

SEQ ID NO: 205238 - RNA, 32 nt, Human
guacagauuuccaguggauauuucaagcacag

SEQ ID NO: 205239 - RNA, 32 nt, Human
guacagcaauacaccauccagaagaacuugau

SEQ ID NO: 205240 - RNA, 32 nt, Human
guacagcaaugccaucauagcucacugaagcc

SEQ ID NO: 205241 - RNA, 20 nt, Human
guacagcaauuuaucuguuu

SEQ ID NO: 205242 - RNA, 32 nt, Human
guacagcacaguggcuuauaaggaaccagcag

SEQ ID NO: 205243 - RNA, 19 nt, Human
guacagcacccugccaguu

SEQ ID NO: 205244 - RNA, 32 nt, Human
guacagccaacagaggcccacaaggaccaggg

SEQ ID NO: 205245 - RNA, 32 nt, Human
guacagcccucggccuacaagcucuuuagucu

SEQ ID NO: 205246 - RNA, 32 nt, Human
guacagccugaacuuccacaacugcaacaauu

SEQ ID NO: 205247 - RNA, 32 nt, Human
guacagcuauccagagagacugggcuucaagg

SEQ ID NO: 205248 - RNA, 32 nt, Human
guacagcucccaggaacagcuaggugggaaag

SEQ ID NO: 205249 - RNA, 32 nt, Human
guacagcucccaggcucccgaagcuucccaca

SEQ ID NO: 205250 - RNA, 32 nt, Human
guacagcugcaaccgcgaccaugggcgggaag

SEQ ID NO: 205251 - RNA, 32 nt, Human
guacagcugcuccucccuuucauaaagcagcg

SEQ ID NO: 205252 - RNA, 32 nt, Human
guacagcugcugucccugcccuguccuguccu

SEQ ID NO: 205253 - RNA, 32 nt, Human
guacagcuuccuccucugacccuuuggcucuu

SEQ ID NO: 205254 - RNA, 32 nt, Human
guacagcuucuucuccucacccaguuuggcca

SEQ ID NO: 205255 - RNA, 32 nt, Human
guacaggacaaggugucaggugacuccuuccc

SEQ ID NO: 205256 - RNA, 19 nt, Human
guacaggacacagcucucu

SEQ ID NO: 205257 - RNA, 32 nt, Human
guacaggagagggcaggggcuccaggcccagc

SEQ ID NO: 205258 - RNA, 32 nt, Human
guacaggaggcaaauguuaucacuacacaugg

SEQ ID NO: 205259 - RNA, 32 nt, Human
guacaggaggcugaggugggaggaucacuuca

SEQ ID NO: 205260 - RNA, 32 nt, Human
guacaggauaaugccucaucccaaucagaugu

SEQ ID NO: 205261 - RNA, 32 nt, Human
guacaggcaacaggagaaaggaaucaaaccac

SEQ ID NO: 205262 - RNA, 32 nt, Human
guacaggcaauggcagaaggagaugcucaggg

SEQ ID NO: 205263 - RNA, 32 nt, Human
guacaggcacacaccaccacacccagcuaauu

SEQ ID NO: 205264 - RNA, 32 nt, Human
guacaggcaccugccaccacacccagcuaauu

SEQ ID NO: 205265 - RNA, 32 nt, Human
guacaggcacugucuucagcccgaguuccagg

SEQ ID NO: 205266 - RNA, 32 nt, Human
guacaggccugugugccacaccccagccuaac

SEQ ID NO: 205267 - RNA, 32 nt, Human
guacaggcugagacacagcccagagacugaac

SEQ ID NO: 205268 - RNA, 32 nt, Human
guacagggaagagacugagugucauggacuca

SEQ ID NO: 205269 - RNA, 32 nt, Human
guacagggaccuuggcagguggagaggaggau

SEQ ID NO: 205270 - RNA, 32 nt, Human
guacagggcucucaagccugagguuuucuucu

SEQ ID NO: 205271 - RNA, 32 nt, Human
guacaggggaagaguccucuugugcuugcuaa

SEQ ID NO: 205272 - RNA, 32 nt, Human
guacaggggcuggggucagggaaggaagaucu

SEQ ID NO: 205273 - RNA, 32 nt, Human
guacaggguguuuuguggcacaggauuaugua

SEQ ID NO: 205274 - RNA, 32 nt, Human
guacaggucaacaaaugaugacacagugaaca

SEQ ID NO: 205275 - RNA, 32 nt, Human
guacaggugggcauaggugcagugagugcagg

SEQ ID NO: 205276 - RNA, 32 nt, Human
guacagguuaacaucagcauuuucauuuugua

SEQ ID NO: 205277 - RNA, 32 nt, Human
guacagucacauagcaaggaugguuaaagccc

SEQ ID NO: 205278 - RNA, 32 nt, Human
guacagucagaaugguuucccuuguccuagaa

SEQ ID NO: 205279 - RNA, 31 nt, Human
guacagugaaugagagaaaucugccuggaaa

SEQ ID NO: 205280 - RNA, 32 nt, Human
guacagugaguugggagccguuaggcugaaug

SEQ ID NO: 205281 - RNA, 18 nt, Human
guacagugcugacaucug

SEQ ID NO: 205282 - RNA, 32 nt, Human
guacagugcuuuucuguauuaacugguucuua

SEQ ID NO: 205283 - RNA, 32 nt, Human
guacaguggcaacugaaaugcauuucagaaau

SEQ ID NO: 205284 - RNA, 32 nt, Human
guacaguggcacaaucacagcucauugcagcc

SEQ ID NO: 205285 - RNA, 24 nt, Human
guacaguggcgcacaccuguaauc

SEQ ID NO: 205286 - RNA, 24 nt, Human
guacaguggcucacaccuguaauc

SEQ ID NO: 205287 - RNA, 24 nt, Human
guacaguggcucacgccuguaauc

SEQ ID NO: 205288 - RNA, 24 nt, Human
guacaguggcucaugccuguaauc

SEQ ID NO: 205289 - RNA, 31 nt, Human
guacaguggguggaaagggcauuuggagcuc

SEQ ID NO: 205290 - RNA, 32 nt, Human
guacagugguauacccucagugccccaacagg

SEQ ID NO: 205291 - RNA, 32 nt, Human
guacagugguauagucugcauaugauuccuuc

SEQ ID NO: 205292 - RNA, 24 nt, Human
guacagugguucaugccuguaauc

SEQ ID NO: 205293 - RNA, 32 nt, Human
guacaguguguauguguguauguguguaugug

SEQ ID NO: 205294 - RNA, 32 nt, Human
guacaguuaaguuccuccuauuugccacuggg

SEQ ID NO: 205295 - RNA, 22 nt, Human
guacaguuauacauaccucucu

SEQ ID NO: 205296 - RNA, 32 nt, Human
guacaguucuguauuuguaaauucugucuuuc

SEQ ID NO: 205297 - RNA, 32 nt, Human
guacaguuguguagacgucuuccaaauaaauu

SEQ ID NO: 205298 - RNA, 32 nt, Human
guacauaaaaaccacacacaugcaugcacaca

SEQ ID NO: 205299 - RNA, 32 nt, Human
guacauaaaaugacgucugcuuuauaagcauu

SEQ ID NO: 205300 - RNA, 32 nt, Human
guacauaacuaccacaccaaccaccuccacuu

SEQ ID NO: 205301 - RNA, 32 nt, Human
guacauaacuauacaguaguguccagaauguu

SEQ ID NO: 205302 - RNA, 32 nt, Human
guacauaaucuagauuuuguuuucauaguuuu

SEQ ID NO: 205303 - RNA, 32 nt, Human
guacauaauguucccauuucuaugaacagcuc

SEQ ID NO: 205304 - RNA, 32 nt, Human
guacauacacauaugcagacacaugccagggc

SEQ ID NO: 205305 - RNA, 32 nt, Human
guacauacaguacucuuuuauuuuucuuuuaa

SEQ ID NO: 205306 - RNA, 32 nt, Human
guacauacaugcacauacucaaacaugcguac

SEQ ID NO: 205307 - RNA, 22 nt, Human
guacauacucaugcacaugacu

SEQ ID NO: 205308 - RNA, 32 nt, Human
guacauacuugccuuaacccaccuacauugug

SEQ ID NO: 205309 - RNA, 32 nt, Human
guacauauaguuaauaaugacacuguucauca

SEQ ID NO: 205310 - RNA, 32 nt, Human
guacauaugugcuggaauucuaacaagucaua

SEQ ID NO: 205311 - RNA, 32 nt, Human
guacaucacaucacggccugacagaguggccu

SEQ ID NO: 205312 - RNA, 32 nt, Human
guacaucacggcuucucucccacguuaagacu

SEQ ID NO: 205313 - RNA, 32 nt, Human
guacaucagccugucuuagccugagcugcuuu

SEQ ID NO: 205314 - RNA, 32 nt, Human
guacauccugcucuggcccagcuccccauagc

SEQ ID NO: 205315 - RNA, 32 nt, Human
guacaucucaguggcuggaggccaugccuuuu

SEQ ID NO: 205316 - RNA, 32 nt, Human
guacaucugccguggguucaagcgauucuccu

SEQ ID NO: 205317 - RNA, 32 nt, Human
guacaucuggggaccuagcaguuaggcuugac

SEQ ID NO: 205318 - RNA, 23 nt, Human
guacaucuuuuguaucuaugaua

SEQ ID NO: 205319 - RNA, 32 nt, Human
guacaugacccuuucuccuucaugccaggcuc

SEQ ID NO: 205320 - RNA, 32 nt, Human
guacaugacucagcaacauugacagggagcua

SEQ ID NO: 205321 - RNA, 32 nt, Human
guacaugagauggggagguugagggacaggau

SEQ ID NO: 205322 - RNA, 32 nt, Human
guacaugaggggcgcagagaugagcacacagc

SEQ ID NO: 205323 - RNA, 25 nt, Human
guacaugaguuagguucacuuucau

SEQ ID NO: 205324 - RNA, 32 nt, Human
guacaugauccacagcccugcggagccagguc

SEQ ID NO: 205325 - RNA, 32 nt, Human
guacaugccaucaucuccucacaacugcacca

SEQ ID NO: 205326 - RNA, 22 nt, Human
guacaugccuauagucccagcu

SEQ ID NO: 205327 - RNA, 22 nt, Human
guacaugccuguaaucccagcu

SEQ ID NO: 205328 - RNA, 32 nt, Human
guacaugccuguaaucccagcuacuugggagg

SEQ ID NO: 205329 - RNA, 32 nt, Human
guacaugccuguagcccuagcuacucuggagg

SEQ ID NO: 205330 - RNA, 32 nt, Human
guacaugccuguagucccagauacucgggagg

SEQ ID NO: 205331 - RNA, 32 nt, Human
guacaugcgccccacccccaugagccaguuca

SEQ ID NO: 205332 - RNA, 30 nt, Human
guacaugcuacaauaaaugcagcuggcagc

SEQ ID NO: 205333 - RNA, 32 nt, Human
guacaugcucugccuguggagacauggcuuuu

SEQ ID NO: 205334 - RNA, 20 nt, Human
guacauggaaacugugggac

SEQ ID NO: 205335 - RNA, 32 nt, Human
guacauggagaaaacgaggcuccuuccaguug

SEQ ID NO: 205336 - RNA, 32 nt, Human
guacauggagccucugcuguagcuguguguuc

SEQ ID NO: 205337 - RNA, 32 nt, Human
guacauggcaguguuuuaguuggcaauauaau

SEQ ID NO: 205338 - RNA, 32 nt, Human
guacaugggaggcaugugugugauguguacac

SEQ ID NO: 205339 - RNA, 32 nt, Human
guacaugggcaccaugcccuccuccucgugcu

SEQ ID NO: 205340 - RNA, 32 nt, Human
guacaugggcagcaggagugguaggaagagca

SEQ ID NO: 205341 - RNA, 21 nt, Human
guacauggggaccccagaaga

SEQ ID NO: 205342 - RNA, 32 nt, Human
guacauggugugaacucacucucagcugccaa

SEQ ID NO: 205343 - RNA, 32 nt, Human
guacauguaccaccucccuuuccucuuacugu

SEQ ID NO: 205344 - RNA, 19 nt, Human
guacaugugcacaaagcag

SEQ ID NO: 205345 - RNA, 24 nt, Human
guacaugugcacaacgugcagguu

SEQ ID NO: 205346 - RNA, 21 nt, Human
guacaugugcacaaugugcag

SEQ ID NO: 205347 - RNA, 24 nt, Human
guacaugugcacaaugugcagguu

SEQ ID NO: 205348 - RNA, 24 nt, Human
guacaugugcacauugugcagguu

SEQ ID NO: 205349 - RNA, 32 nt, Human
guacauuaaaaauucaauuaagagaagaguca

SEQ ID NO: 205350 - RNA, 32 nt, Human
guacauuaacauccccuuuucauuaccccauu

SEQ ID NO: 205351 - RNA, 32 nt, Human
guacauucaaugcauggaucaaucagugugau

SEQ ID NO: 205352 - RNA, 32 nt, Human
guacauucauuucuaaaauucacucaugcacc

SEQ ID NO: 205353 - RNA, 32 nt, Human
guacauuccaaaaacucuaaacuuuuuaaaga

SEQ ID NO: 205354 - RNA, 32 nt, Human
guacauucuagcuaccugcucucuccacuucu

SEQ ID NO: 205355 - RNA, 32 nt, Human
guacauucugcagugagaaacagugccccagc

SEQ ID NO: 205356 - RNA, 32 nt, Human
guacauucuucccauucuguauucuuguacaa

SEQ ID NO: 205357 - RNA, 32 nt, Human
guacauugaauggauuucagggacaguauguu

SEQ ID NO: 205358 - RNA, 32 nt, Human
guacauugcugggcuuccuaggcagaaauuca

SEQ ID NO: 205359 - RNA, 32 nt, Human
guacauuggccugccauaaagcauuuucaauu

SEQ ID NO: 205360 - RNA, 32 nt, Human
guacauuguguaaugaaugaaaagcacauaaa

SEQ ID NO: 205361 - RNA, 32 nt, Human
guacauuguugggcaggagugugugcaaacac

SEQ ID NO: 205362 - RNA, 32 nt, Human
guacauuuacaaaaauuaaccugacuuauuuu

SEQ ID NO: 205363 - RNA, 32 nt, Human
guacauuuuauagguaucaaagcaauggcuuu

SEQ ID NO: 205364 - RNA, 32 nt, Human
guacauuuugacugagcacuuagggcaucagg

SEQ ID NO: 205365 - RNA, 32 nt, Human
guacauuuuggucuucucugugguuuuauacu

SEQ ID NO: 205366 - RNA, 32 nt, Human
guaccaaaaauacaaaaaguuagcugggcaug

SEQ ID NO: 205367 - RNA, 32 nt, Human
guaccaaaacuugccaaauuccuccauggcca

SEQ ID NO: 205368 - RNA, 32 nt, Human
guaccaaaaugauuucuuugguaauuguguga

SEQ ID NO: 205369 - RNA, 32 nt, Human
guaccaaacugauuucaaaaguacuacauuga

SEQ ID NO: 205370 - RNA, 32 nt, Human
guaccaaagaggaguauggugggagagggagu

SEQ ID NO: 205371 - RNA, 32 nt, Human
guaccaaaggcaugguaccucagucugguauc

SEQ ID NO: 205372 - RNA, 32 nt, Human
guaccaacucaccucuauuuugucaguucaua

SEQ ID NO: 205373 - RNA, 32 nt, Human
guaccaagaccagcucagucagggagacccua

SEQ ID NO: 205374 - RNA, 32 nt, Human
guaccaaggagcugagggcugaggaagucuuu

SEQ ID NO: 205375 - RNA, 32 nt, Human
guaccaaguauuuccugcauuguugcuaaaau

SEQ ID NO: 205376 - RNA, 32 nt, Human
guaccaagugcuggugccagccuguuaccugu

SEQ ID NO: 205377 - RNA, 32 nt, Human
guaccacauauacuuucucuccuucuaucucc

SEQ ID NO: 205378 - RNA, 32 nt, Human
guaccacauucauuguuaaggaauggcugaug

SEQ ID NO: 205379 - RNA, 32 nt, Human
guaccaccagccaucugugguccuccauuugu

SEQ ID NO: 205380 - RNA, 32 nt, Human
guaccacccugccugccuccccaacaccgugg

SEQ ID NO: 205381 - RNA, 32 nt, Human
guaccaccucguaggguuguagaaagaccaag

SEQ ID NO: 205382 - RNA, 32 nt, Human
guaccacgucugcuggucuccagccuuguaug

SEQ ID NO: 205383 - RNA, 32 nt, Human
guaccacuacacuccagccugggcaacggagc

SEQ ID NO: 205384 - RNA, 32 nt, Human
guaccacucccagcacucacacauuccccaga

SEQ ID NO: 205385 - RNA, 32 nt, Human
guaccacugauggcccugcuuccucugaguga

SEQ ID NO: 205386 - RNA, 32 nt, Human
guaccacugcacuccaaccuggguuacagcau

SEQ ID NO: 205387 - RNA, 32 nt, Human
guaccacugcacuccagccuaggugacagggc

SEQ ID NO: 205388 - RNA, 32 nt, Human
guaccacugcacuccagccuggaugacagagu

SEQ ID NO: 205389 - RNA, 32 nt, Human
guaccacugcacuccagccuggcugacaguga

SEQ ID NO: 205390 - RNA, 32 nt, Human
guaccacugcacuccagccugggcaacagagc

SEQ ID NO: 205391 - RNA, 32 nt, Human
guaccacugcacuccagccugggcaacagagu

SEQ ID NO: 205392 - RNA, 32 nt, Human
guaccacugcacuccagccugggcgacagagc

SEQ ID NO: 205393 - RNA, 32 nt, Human
guaccacugcacuccagccugggcuacagauc

SEQ ID NO: 205394 - RNA, 32 nt, Human
guaccacugcacuccagccugggugacagagc

SEQ ID NO: 205395 - RNA, 32 nt, Human
guaccacugcacuccagccugggugacagagu

SEQ ID NO: 205396 - RNA, 32 nt, Human
guaccacugcacuccagccuggucaauggagu

SEQ ID NO: 205397 - RNA, 32 nt, Human
guaccacugcacuccagcucggggaacagagc

SEQ ID NO: 205398 - RNA, 32 nt, Human
guaccacugcacuccagucugggcaacagacg

SEQ ID NO: 205399 - RNA, 32 nt, Human
guaccacugcacuccagucugggcgacagagu

SEQ ID NO: 205400 - RNA, 32 nt, Human
guaccacugcacuccaguuuggcaacagagug

SEQ ID NO: 205401 - RNA, 32 nt, Human
guaccacugcacucuggccugggcaacaagag

SEQ ID NO: 205402 - RNA, 32 nt, Human
guaccacugccuucccuucuagcccaggagaa

SEQ ID NO: 205403 - RNA, 32 nt, Human
guaccacuguacuccagccugggcuggacagu

SEQ ID NO: 205404 - RNA, 32 nt, Human
guaccacuguauuccagccuggacgacugagu

SEQ ID NO: 205405 - RNA, 32 nt, Human
guaccagcaacagcucagcagagcuaugcgga

SEQ ID NO: 205406 - RNA, 32 nt, Human
guaccagcacuagcuggucaagggcaugacag

SEQ ID NO: 205407 - RNA, 32 nt, Human
guaccagcaggggaaaugccagaugcuuauaa

SEQ ID NO: 205408 - RNA, 32 nt, Human
guaccagcaguuuguauuugagcuucacaguu

SEQ ID NO: 205409 - RNA, 32 nt, Human
guaccagcccaccaccaccacagcaacccaga

SEQ ID NO: 205410 - RNA, 32 nt, Human
guaccagcggaaagcuggucucgucuccaacu

SEQ ID NO: 205411 - RNA, 32 nt, Human
guaccaggacagcagaaagacaucccggguag

SEQ ID NO: 205412 - RNA, 32 nt, Human
guaccaggaugccaccgcagaagaggaggagg

SEQ ID NO: 205413 - RNA, 32 nt, Human
guaccaggcugcagcguuucaggaaugaaaag

SEQ ID NO: 205414 - RNA, 32 nt, Human
guaccagggaaacugggugggugucugggugu

SEQ ID NO: 205415 - RNA, 32 nt, Human
guaccagggaaagggcuuaagguuagcagggc

SEQ ID NO: 205416 - RNA, 32 nt, Human
guaccagggacaccucaggacagauucucugg

SEQ ID NO: 205417 - RNA, 32 nt, Human
guaccagggccaugcaggcuuggaguccagag

SEQ ID NO: 205418 - RNA, 32 nt, Human
guaccagucaggacugguagacuuuaaugugg

SEQ ID NO: 205419 - RNA, 32 nt, Human
guaccagucuaccaccaccacagcaccccaga

SEQ ID NO: 205420 - RNA, 32 nt, Human
guaccagugggcaggaagaaagagugaggcaa

SEQ ID NO: 205421 - RNA, 32 nt, Human
guaccaguuuccauuccugggcugagauuguu

SEQ ID NO: 205422 - RNA, 32 nt, Human
guaccaguuuuguaggaaaagugguccagcaa

SEQ ID NO: 205423 - RNA, 32 nt, Human
guaccauaagcuaagaccagagccuuccuguc

SEQ ID NO: 205424 - RNA, 32 nt, Human
guaccauaauguauuuaaccagucuucuuuug

SEQ ID NO: 205425 - RNA, 32 nt, Human
guaccaucaggauauuuaacccuuuaagugcu

SEQ ID NO: 205426 - RNA, 32 nt, Human
guaccauccuugugcccugccucuuauucuca

SEQ ID NO: 205427 - RNA, 32 nt, Human
guaccaugagaugucaaaaccugggggcccgg

SEQ ID NO: 205428 - RNA, 32 nt, Human
guaccauggcacuccagccuggacaacaagag

SEQ ID NO: 205429 - RNA, 32 nt, Human
guaccaugugccacaacugcuguggcccccug

SEQ ID NO: 205430 - RNA, 32 nt, Human
guaccauguggcuguggcauugccgaggcugg

SEQ ID NO: 205431 - RNA, 32 nt, Human
guaccauuaucuucuuuugccuaaaauuacua

SEQ ID NO: 205432 - RNA, 25 nt, Human
guaccauugacaaugguggcuguca

SEQ ID NO: 205433 - RNA, 32 nt, Human
guaccauugcacuccagccugggcaacaagaa

SEQ ID NO: 205434 - RNA, 32 nt, Human
guaccauugcacuccagccugggcaacaagag

SEQ ID NO: 205435 - RNA, 32 nt, Human
guaccauugcacuccagccugggcaacagagc

SEQ ID NO: 205436 - RNA, 32 nt, Human
guaccauuugcucugugcugacugugguccua

SEQ ID NO: 205437 - RNA, 26 nt, Human
guaccauuuucuuguuuaacuuuagc

SEQ ID NO: 205438 - RNA, 23 nt, Human
guaccauuuuguaacucaacaaa

SEQ ID NO: 205439 - RNA, 22 nt, Human
guacccaaacauaacggaugua

SEQ ID NO: 205440 - RNA, 25 nt, Human
guacccaaauguacauauaccuggu

SEQ ID NO: 205441 - RNA, 32 nt, Human
guacccaaccaaagaugcuuaaaaaccuucua

SEQ ID NO: 205442 - RNA, 32 nt, Human
guacccacaagaagaugacuuccaucauacag

SEQ ID NO: 205443 - RNA, 32 nt, Human
guacccacccccgaauggugacgguagagcug

SEQ ID NO: 205444 - RNA, 32 nt, Human
guacccaccuacccggccugggcugaccaugg

SEQ ID NO: 205445 - RNA, 32 nt, Human
guacccagacagggaucugggccuucagagac

SEQ ID NO: 205446 - RNA, 23 nt, Human
guacccagacuugcauguaccug

SEQ ID NO: 205447 - RNA, 25 nt, Human
guacccagagugcauggcaccuggu

SEQ ID NO: 205448 - RNA, 32 nt, Human
guacccagaucaucaugaaaacaaauauugcg

SEQ ID NO: 205449 - RNA, 32 nt, Human
guacccagccuaucuuuuugauacuuuugaau

SEQ ID NO: 205450 - RNA, 32 nt, Human
guacccagccugggcaacagugcgagguuccg

SEQ ID NO: 205451 - RNA, 32 nt, Human
guacccagccugggccacagugcaagacucca

SEQ ID NO: 205452 - RNA, 32 nt, Human
guacccaggaggcagagauugcagugagcuga

SEQ ID NO: 205453 - RNA, 32 nt, Human
guacccaggaggcggagguuguagugagcuga

SEQ ID NO: 205454 - RNA, 32 nt, Human
guacccaggagguggagguugcagugagccga

SEQ ID NO: 205455 - RNA, 32 nt, Human
guacccaggagguggagguugcggugaacuga

SEQ ID NO: 205456 - RNA, 32 nt, Human
guacccaggcagaguggacggcauucagggcu

SEQ ID NO: 205457 - RNA, 32 nt, Human
guacccagugcugauggggugugcccacgugg

SEQ ID NO: 205458 - RNA, 32 nt, Human
guacccaguuagggguuggagcccccauauaa

SEQ ID NO: 205459 - RNA, 32 nt, Human
guacccaguucuucaggcugauuucccugacc

SEQ ID NO: 205460 - RNA, 32 nt, Human
guacccauguacauaugugaacuuuuucauau

SEQ ID NO: 205461 - RNA, 32 nt, Human
guaccccaagcugcuuucucuggaccaaugcu

SEQ ID NO: 205462 - RNA, 32 nt, Human
guaccccacagcugcauucaaacucaaaucug

SEQ ID NO: 205463 - RNA, 32 nt, Human
guaccccaccaccacucuggcuggcuuccaag

SEQ ID NO: 205464 - RNA, 32 nt, Human
guaccccagauggggaaauuugaaucacaugu

SEQ ID NO: 205465 - RNA, 32 nt, Human
guaccccagcuguuccggaggcugaggccagg

SEQ ID NO: 205466 - RNA, 24 nt, Human
guaccccaggcuggagugcaaugg

SEQ ID NO: 205467 - RNA, 32 nt, Human
guaccccauaaauauacaaaauuauuugucaa

SEQ ID NO: 205468 - RNA, 32 nt, Human
guaccccauaaauauguagaaauauuauaugu

SEQ ID NO: 205469 - RNA, 32 nt, Human
guacccccaaccccaaacuuucaccaaaagca

SEQ ID NO: 205470 - RNA, 32 nt, Human
guacccccacacaucucccacccaccugagcg

SEQ ID NO: 205471 - RNA, 32 nt, Human
guacccccagcugcugguuccugcacucuuau

SEQ ID NO: 205472 - RNA, 32 nt, Human
guacccccaggcuggcuagcccuucccuccau

SEQ ID NO: 205473 - RNA, 32 nt, Human
guacccccuccccagucuucgccuuccucuuu

SEQ ID NO: 205474 - RNA, 32 nt, Human
guaccccugagagcugccccagccugggguga

SEQ ID NO: 205475 - RNA, 32 nt, Human
guaccccugaggaaacaaaaaggaaaugagga

SEQ ID NO: 205476 - RNA, 32 nt, Human
guaccccugcacuccagcccagguuacagagc

SEQ ID NO: 205477 - RNA, 18 nt, Human
guaccccugcccccagcc

SEQ ID NO: 205478 - RNA, 32 nt, Human
guaccccugggcagugcuaccugggcacacac

SEQ ID NO: 205479 - RNA, 32 nt, Human
guaccccuguaaucccagcuacucgggaggcu

SEQ ID NO: 205480 - RNA, 32 nt, Human
guacccgagacugggaagaaaaagagguuuac

SEQ ID NO: 205481 - RNA, 32 nt, Human
guacccgccaccgccggugagccugggaagca

SEQ ID NO: 205482 - RNA, 32 nt, Human
guacccgcugcucucagcugggcccgugggug

SEQ ID NO: 205483 - RNA, 32 nt, Human
guacccgcuucugccaccuccuggaccuuccu

SEQ ID NO: 205484 - RNA, 32 nt, Human
guacccggcuguaaggcaagcugggaugcgcg

SEQ ID NO: 205485 - RNA, 25 nt, Human
guacccgggucacauaguaccuggu

SEQ ID NO: 205486 - RNA, 32 nt, Human
guacccguaccccugagguggggagggggagc

SEQ ID NO: 205487 - RNA, 32 nt, Human
guacccguggugagacaagacccagagcuacu

SEQ ID NO: 205488 - RNA, 32 nt, Human
guacccguugcagagccagggacaugaugcag

SEQ ID NO: 205489 - RNA, 32 nt, Human
guacccuagacuguugguaacugggauaacug

SEQ ID NO: 205490 - RNA, 21 nt, Human
guacccucaagaccccagaga

SEQ ID NO: 205491 - RNA, 32 nt, Human
guacccucaggggcaagguucccacuguuagc

SEQ ID NO: 205492 - RNA, 32 nt, Human
guacccuccaacccucaaugucccaagacuuu

SEQ ID NO: 205493 - RNA, 32 nt, Human
guacccuccccauacuuccaccagugaaagac

SEQ ID NO: 205494 - RNA, 32 nt, Human
guacccuccuccccucuccuacugucauucuu

SEQ ID NO: 205495 - RNA, 32 nt, Human
guacccucuaagauucauuagguugaaauccu

SEQ ID NO: 205496 - RNA, 32 nt, Human
guacccucugcccugcuggccuggugaugucc

SEQ ID NO: 205497 - RNA, 23 nt, Human
guacccucuucaagccccgguca

SEQ ID NO: 205498 - RNA, 32 nt, Human
guacccucuuucuugccacccuuuccaaugca

SEQ ID NO: 205499 - RNA, 32 nt, Human
guacccugcagaucugccccagaggagcaggu

SEQ ID NO: 205500 - RNA, 32 nt, Human
guacccugccccucucguccuccuggguagcc

SEQ ID NO: 205501 - RNA, 29 nt, Human
guacccugggcccacugcuguuucucuau

SEQ ID NO: 205502 - RNA, 32 nt, Human
guacccuguaaauaccugucauguccuucagg

SEQ ID NO: 205503 - RNA, 32 nt, Human
guacccuuggccaggacucuggugcccacccu

SEQ ID NO: 205504 - RNA, 32 nt, Human
guacccuuuaaaggagcuacagucauuuuauu

SEQ ID NO: 205505 - RNA, 22 nt, Human
guaccgaaguccucucuucuca

SEQ ID NO: 205506 - RNA, 32 nt, Human
guaccgagcucugucuguuccagccuacaucc

SEQ ID NO: 205507 - RNA, 32 nt, Human
guaccgaugauacuguuucuugcacugaauau

SEQ ID NO: 205508 - RNA, 32 nt, Human
guaccgcauuuuauagaugagauagcugaggc

SEQ ID NO: 205509 - RNA, 32 nt, Human
guaccgccagaagaagaggguggagcaggagg

SEQ ID NO: 205510 - RNA, 32 nt, Human
guaccgccgcccaggguggguggccagugagg

SEQ ID NO: 205511 - RNA, 32 nt, Human
guaccgccuuccuccccucuguccgcgccaug

SEQ ID NO: 205512 - RNA, 31 nt, Human
guaccgcgcuuagcgugccuguugaagucaa

SEQ ID NO: 205513 - RNA, 32 nt, Human
guaccgcgucuggaagaagaugcuugcaucug

SEQ ID NO: 205514 - RNA, 32 nt, Human
guaccgcuacugggcgcccucagucugcgcgg

SEQ ID NO: 205515 - RNA, 32 nt, Human
guaccgcugcacuccagccugggugauagagc

SEQ ID NO: 205516 - RNA, 32 nt, Human
guaccggaaauggcaggcacugucagauuucc

SEQ ID NO: 205517 - RNA, 32 nt, Human
guaccggaugcuagggggcuugcccacugccu

SEQ ID NO: 205518 - RNA, 23 nt, Human
guaccggggcuggagcggaguga

SEQ ID NO: 205519 - RNA, 32 nt, Human
guaccgggggcugaggcccagggaggucucgc

SEQ ID NO: 205520 - RNA, 32 nt, Human
guaccgguuugucaguucuuggugcucugugu

SEQ ID NO: 205521 - RNA, 32 nt, Human
guaccgucuucucccuauucccucucucuccc

SEQ ID NO: 205522 - RNA, 32 nt, Human
guaccuaacuauacacuuugauucagccugcu

SEQ ID NO: 205523 - RNA, 32 nt, Human
guaccuaaugucuccuacagaaacaccaucug

SEQ ID NO: 205524 - RNA, 32 nt, Human
guaccuaauuggagagguaggggugaccgggg

SEQ ID NO: 205525 - RNA, 32 nt, Human
guaccuacuagggcaccauaauacugcagcaa

SEQ ID NO: 205526 - RNA, 32 nt, Human
guaccuacuagguuccuccugaggguucaggu

SEQ ID NO: 205527 - RNA, 32 nt, Human
guaccuauccuuguguuucugaugcaguggua

SEQ ID NO: 205528 - RNA, 32 nt, Human
guaccuauugcacuccauccuggaugaaagag

SEQ ID NO: 205529 - RNA, 32 nt, Human
guaccucaagccccauuuccucacacuaagag

SEQ ID NO: 205530 - RNA, 32 nt, Human
guaccucacagcccccugugggcacagacacc

SEQ ID NO: 205531 - RNA, 32 nt, Human
guaccucacugcacagcuucuagguagccuuc

SEQ ID NO: 205532 - RNA, 32 nt, Human
guaccucagucugguauccagacugugaaauc

SEQ ID NO: 205533 - RNA, 32 nt, Human
guaccucauuaaaaauauaaaacuagcugggc

SEQ ID NO: 205534 - RNA, 32 nt, Human
guaccuccagccuguuuccucugaaguauacc

SEQ ID NO: 205535 - RNA, 32 nt, Human
guaccucgaggcaccauuccagccagggacgc

SEQ ID NO: 205536 - RNA, 32 nt, Human
guaccucuccaccauccuccagucguugcccu

SEQ ID NO: 205537 - RNA, 32 nt, Human
guaccucuccaccuugucucacagucuguuuc

SEQ ID NO: 205538 - RNA, 32 nt, Human
guaccucuuacacucccuguggcuccaacuuc

SEQ ID NO: 205539 - RNA, 32 nt, Human
guaccucuucuuuccuuggcuuccaugguagu

SEQ ID NO: 205540 - RNA, 32 nt, Human
guaccugagagguuuguggaaaagauggcaaa

SEQ ID NO: 205541 - RNA, 32 nt, Human
guaccugagcacugcugcuacuucuuccccca

SEQ ID NO: 205542 - RNA, 32 nt, Human
guaccugagcuuccucuucuccaucccugaga

SEQ ID NO: 205543 - RNA, 32 nt, Human
guaccugcagccaugagguucuggguguuuuu

SEQ ID NO: 205544 - RNA, 19 nt, Human
guaccugcaggcauggggg

SEQ ID NO: 205545 - RNA, 32 nt, Human
guaccugcagugcugcuuuucuugccuagacu

SEQ ID NO: 205546 - RNA, 23 nt, Human
guaccugcccccagcccuggcca

SEQ ID NO: 205547 - RNA, 22 nt, Human
guaccugcgaccgggaccauga

SEQ ID NO: 205548 - RNA, 32 nt, Human
guaccugcuacuguucuccccacauugcccag

SEQ ID NO: 205549 - RNA, 24 nt, Human
guaccugcucaccauuggucauga

SEQ ID NO: 205550 - RNA, 21 nt, Human
guaccugcucacuguuccgug

SEQ ID NO: 205551 - RNA, 21 nt, Human
guaccugcucagggccagcga

SEQ ID NO: 205552 - RNA, 32 nt, Human
guaccugcuccgugcccaacacaugcccucuc

SEQ ID NO: 205553 - RNA, 32 nt, Human
guaccuggaacuucagcucaaacauuuacgau

SEQ ID NO: 205554 - RNA, 32 nt, Human
guaccuggaggaacuccuacauuuuaggcuuu

SEQ ID NO: 205555 - RNA, 32 nt, Human
guaccuggaucuuccacacgagugggauucug

SEQ ID NO: 205556 - RNA, 32 nt, Human
guaccuggcacaggguucuguccucuucauuu

SEQ ID NO: 205557 - RNA, 32 nt, Human
guaccuggccuuuccuggacagacugaagagc

SEQ ID NO: 205558 - RNA, 32 nt, Human
guaccugggaagcgcagguugcagugagcuga

SEQ ID NO: 205559 - RNA, 32 nt, Human
guaccugggaauucuuccuaaauuacucugga

SEQ ID NO: 205560 - RNA, 32 nt, Human
guaccugggacugucuaccauugaagauuagc

SEQ ID NO: 205561 - RNA, 32 nt, Human
guaccugggaggaggagguugcagugagcuga

SEQ ID NO: 205562 - RNA, 32 nt, Human
guaccugggauuacaggcaugugccaccacac

SEQ ID NO: 205563 - RNA, 32 nt, Human
guaccugggauuacaggcaugugccaccacgc

SEQ ID NO: 205564 - RNA, 32 nt, Human
guaccugggauuauaggcacaagucaccaugc

SEQ ID NO: 205565 - RNA, 22 nt, Human
guaccugggccaggccaguggc

SEQ ID NO: 205566 - RNA, 32 nt, Human
guaccuguaagagguauuguauucuuggacuc

SEQ ID NO: 205567 - RNA, 32 nt, Human
guaccuuaacuucaaacauuucucuucagaaa

SEQ ID NO: 205568 - RNA, 32 nt, Human
guaccuuagcaaguugcucccucuccagggag

SEQ ID NO: 205569 - RNA, 32 nt, Human
guaccuuaggguuuugccauuguaaauggguc

SEQ ID NO: 205570 - RNA, 32 nt, Human
guaccuucacguggcacucucccuuuaugugu

SEQ ID NO: 205571 - RNA, 32 nt, Human
guaccuuccacauucucagguaucucauagca

SEQ ID NO: 205572 - RNA, 32 nt, Human
guaccuucuggccccaacccuugacucaacgg

SEQ ID NO: 205573 - RNA, 32 nt, Human
guaccuugccagggaagcaaaaauuggaauua

SEQ ID NO: 205574 - RNA, 32 nt, Human
guaccuugcccaggucuggcacauaguagagu

SEQ ID NO: 205575 - RNA, 32 nt, Human
guaccuugcugguacagacagggguggugggc

SEQ ID NO: 205576 - RNA, 32 nt, Human
guaccuuggaugagggguagccucccacugca

SEQ ID NO: 205577 - RNA, 32 nt, Human
guaccuuggcuucauuuaaaucauccugggag

SEQ ID NO: 205578 - RNA, 32 nt, Human
guaccuugugggcagugaugucauucggugcg

SEQ ID NO: 205579 - RNA, 32 nt, Human
guaccuugugucucuuucaagugccuuaaucc

SEQ ID NO: 205580 - RNA, 32 nt, Human
guaccuuucagaauguaagguacagcagcucc

SEQ ID NO: 205581 - RNA, 32 nt, Human
guaccuuuccaaggugaacagaacagcaagag

SEQ ID NO: 205582 - RNA, 32 nt, Human
guaccuuuggaguagguuuaccagagagagca

SEQ ID NO: 205583 - RNA, 32 nt, Human
guacgaaguugcucucaaagauggggaagucc

SEQ ID NO: 205584 - RNA, 32 nt, Human
guacgaaucuuagaaggaaggagggggagccc

SEQ ID NO: 205585 - RNA, 23 nt, Human
guacgacucacugagccaugcuc

SEQ ID NO: 205586 - RNA, 32 nt, Human
guacgacugucuggcccugaauuugcauggcu

SEQ ID NO: 205587 - RNA, 32 nt, Human
guacgaguguagacacugggcccauuggacgu

SEQ ID NO: 205588 - RNA, 32 nt, Human
guacgauacagaauguuacacagauacaguau

SEQ ID NO: 205589 - RNA, 32 nt, Human
guacgauaguuccggcaccggaaaagagggcu

SEQ ID NO: 205590 - RNA, 32 nt, Human
guacgauccaaaacauuguacccagcuuuuua

SEQ ID NO: 205591 - RNA, 32 nt, Human
guacgcaaaguagcuaaugagcuaaacucaca

SEQ ID NO: 205592 - RNA, 32 nt, Human
guacgcacuguggaggcucuacaaacagccau

SEQ ID NO: 205593 - RNA, 32 nt, Human
guacgccgaggugggagccgguggaccggucc

SEQ ID NO: 205594 - RNA, 32 nt, Human
guacgccgcagcugcccagucucgccuaaucu

SEQ ID NO: 205595 - RNA, 32 nt, Human
guacgccuauagucccagcuacucgggaggcu

SEQ ID NO: 205596 - RNA, 32 nt, Human
guacgccuguaaucccagugacuugggaggcu

SEQ ID NO: 205597 - RNA, 32 nt, Human
guacgccuguagucccagcuacucaggaggcu

SEQ ID NO: 205598 - RNA, 21 nt, Human
guacgcgcucugcuccgagcc

SEQ ID NO: 205599 - RNA, 32 nt, Human
guacgcugaaacccucccuggugguggagcug

SEQ ID NO: 205600 - RNA, 32 nt, Human
guacgcugcugccuggacaucagucuggaagc

SEQ ID NO: 205601 - RNA, 29 nt, Human
guacgcuggcugcuaccucccucacucuu

SEQ ID NO: 205602 - RNA, 32 nt, Human
guacgcugggaggcuggucugggguggucacu

SEQ ID NO: 205603 - RNA, 32 nt, Human
guacggaagcccggaaggaggggcagggggcg

SEQ ID NO: 205604 - RNA, 32 nt, Human
guacggagcagguggaccaugaggucaggacu

SEQ ID NO: 205605 - RNA, 32 nt, Human
guacggaugcgccaccauggaugaaaacaucc

SEQ ID NO: 205606 - RNA, 32 nt, Human
guacggcggcacggcugcagccuggaugggaa

SEQ ID NO: 205607 - RNA, 32 nt, Human
guacggggccuucgucccuccugagcucuucg

SEQ ID NO: 205608 - RNA, 32 nt, Human
guacgggguggggaggggaauggggagggggu

SEQ ID NO: 205609 - RNA, 32 nt, Human
guacggugcucacaccuguaaucccagcacuu

SEQ ID NO: 205610 - RNA, 24 nt, Human
guacgguggcucacacuuauaauc

SEQ ID NO: 205611 - RNA, 24 nt, Human
guacgguggcucacgccuauaauc

SEQ ID NO: 205612 - RNA, 24 nt, Human
guacgguggcucacgccuguaauc

SEQ ID NO: 205613 - RNA, 24 nt, Human
guacgguggcucaugccuauaauc

SEQ ID NO: 205614 - RNA, 24 nt, Human
guacgguggcucaugccuguaauc

SEQ ID NO: 205615 - RNA, 32 nt, Human
guacgguguggggaaguggaagggaagcuggc

SEQ ID NO: 205616 - RNA, 32 nt, Human
guacguagugugaucaaacaugaucauccaga

SEQ ID NO: 205617 - RNA, 32 nt, Human
guacgucggcagccccagccccagaaaaggaa

SEQ ID NO: 205618 - RNA, 32 nt, Human
guacgugcagcacuacggccugggcagugccu

SEQ ID NO: 205619 - RNA, 32 nt, Human
guacgugccaucaucucuccagcccaggcccc

SEQ ID NO: 205620 - RNA, 22 nt, Human
guacgugccuguagucccagcu

SEQ ID NO: 205621 - RNA, 32 nt, Human
guacgugccuguagucccagcuacuucgggga

SEQ ID NO: 205622 - RNA, 32 nt, Human
guacgugccuguagucucagcuacuugggagg

SEQ ID NO: 205623 - RNA, 32 nt, Human
guacguggaggaacuccuacauuuuaggcuuu

SEQ ID NO: 205624 - RNA, 32 nt, Human
guacguggcugcaguucauagcagugaggaag

SEQ ID NO: 205625 - RNA, 32 nt, Human
guacgugguaggugcucacuccccuauuguuu

SEQ ID NO: 205626 - RNA, 32 nt, Human
guacguguaagccuuuucuuuucaagaugccu

SEQ ID NO: 205627 - RNA, 32 nt, Human
guacguucucaccucuuaugcuuaguuggaac

SEQ ID NO: 205628 - RNA, 22 nt, Human
guacguuggaccuaaaacugcu

SEQ ID NO: 205629 - RNA, 32 nt, Human
guacuaaaaauacaaaaauuagccagacgugg

SEQ ID NO: 205630 - RNA, 32 nt, Human
guacuaaaaauacaaaaauuagccagauauga

SEQ ID NO: 205631 - RNA, 32 nt, Human
guacuaaaaauacaaaaauuagccaggcaugg

SEQ ID NO: 205632 - RNA, 32 nt, Human
guacuaaaaauacaaaaauuagccaggcgugg

SEQ ID NO: 205633 - RNA, 32 nt, Human
guacuaaaaauacaaaaauuagcccagugugg

SEQ ID NO: 205634 - RNA, 32 nt, Human
guacuaaaaauacaaaaauuagccggacgugg

SEQ ID NO: 205635 - RNA, 32 nt, Human
guacuaaaaauacaaaaauuagccgggcauag

SEQ ID NO: 205636 - RNA, 32 nt, Human
guacuaaaaauacaaaaauuagccgggcgugg

SEQ ID NO: 205637 - RNA, 32 nt, Human
guacuaaaaauacaaaaauuagccgggugugg

SEQ ID NO: 205638 - RNA, 32 nt, Human
guacuaaaaauacaaaaauuugccuggugugg

SEQ ID NO: 205639 - RNA, 32 nt, Human
guacuaaaaauacaaaacagccagguguggug

SEQ ID NO: 205640 - RNA, 32 nt, Human
guacuaaaaauacaaaauuagccgggcguggu

SEQ ID NO: 205641 - RNA, 32 nt, Human
guacuaaaaauacaaaauuagcuggguuuggu

SEQ ID NO: 205642 - RNA, 32 nt, Human
guacuaaaaauacaaaauuuagccaggcaugg

SEQ ID NO: 205643 - RNA, 32 nt, Human
guacuaaaaauacaaaauuuagcuuggccugg

SEQ ID NO: 205644 - RNA, 32 nt, Human
guacuaaaaauacaagaaaaacuuagccgggc

SEQ ID NO: 205645 - RNA, 32 nt, Human
guacuaaaaaugcaaaaauuagcugggcgugg

SEQ ID NO: 205646 - RNA, 19 nt, Human
guacuaaauuuuguuucuu

SEQ ID NO: 205647 - RNA, 32 nt, Human
guacuaacaaaggagaccuggugaucugccga

SEQ ID NO: 205648 - RNA, 32 nt, Human
guacuaacagaagucuguacuauuuggucagu

SEQ ID NO: 205649 - RNA, 32 nt, Human
guacuaaggagggucuggccagaggaacagac

SEQ ID NO: 205650 - RNA, 32 nt, Human
guacuaauaauacaaaaauuagcugggcaugu

SEQ ID NO: 205651 - RNA, 32 nt, Human
guacuaauuaacuuaaacacagagcuauaaaa

SEQ ID NO: 205652 - RNA, 32 nt, Human
guacuaauuacugcccagccuggggagaucag

SEQ ID NO: 205653 - RNA, 32 nt, Human
guacuacaauguaaucuguuucccagggaaau

SEQ ID NO: 205654 - RNA, 32 nt, Human
guacuacagauuuucaaaacugaaugagagaa

SEQ ID NO: 205655 - RNA, 32 nt, Human
guacuacaggaaugcaccaccaugcccggcaa

SEQ ID NO: 205656 - RNA, 32 nt, Human
guacuacaggcgcgugccaccacaccuggcua

SEQ ID NO: 205657 - RNA, 32 nt, Human
guacuacaggugcgugccaccaugcuuggcua

SEQ ID NO: 205658 - RNA, 32 nt, Human
guacuaccauuuugaggaucuggacuccguuu

SEQ ID NO: 205659 - RNA, 32 nt, Human
guacuacgcagcaacacucacaacuguccagg

SEQ ID NO: 205660 - RNA, 32 nt, Human
guacuacuaauugagcaaccuacgcacucagu

SEQ ID NO: 205661 - RNA, 32 nt, Human
guacuacugcacuccagcauggaagacagcga

SEQ ID NO: 205662 - RNA, 32 nt, Human
guacuacuguacuccagccugggggaaagagu

SEQ ID NO: 205663 - RNA, 32 nt, Human
guacuagaaagccacaggagaggucggcuugu

SEQ ID NO: 205664 - RNA, 31 nt, Human
guacuagaguaccuguuuacauuccucuaua

SEQ ID NO: 205665 - RNA, 32 nt, Human
guacuaggagcauugguugcaguggaggaguu

SEQ ID NO: 205666 - RNA, 32 nt, Human
guacuaggcugucuccagcccagcgaagcuca

SEQ ID NO: 205667 - RNA, 32 nt, Human
guacuaguccaggaguaggcugugggagccgg

SEQ ID NO: 205668 - RNA, 32 nt, Human
guacuauacaucucccaaagaaacccauggug

SEQ ID NO: 205669 - RNA, 32 nt, Human
guacuauaggugugcaccaccacgcccagcaa

SEQ ID NO: 205670 - RNA, 32 nt, Human
guacuaucagaguagggcaggcucuggauuaa

SEQ ID NO: 205671 - RNA, 32 nt, Human
guacuaugauacuguucuuggagcucaauucc

SEQ ID NO: 205672 - RNA, 32 nt, Human
guacuaugccaguccuagcagaaaaauguguu

SEQ ID NO: 205673 - RNA, 32 nt, Human
guacuauggaacuuuucuuaggggacacgucc

SEQ ID NO: 205674 - RNA, 32 nt, Human
guacuauuauuccauacuacuauauucuucca

SEQ ID NO: 205675 - RNA, 32 nt, Human
guacuauucagaaugauauacacacauaugug

SEQ ID NO: 205676 - RNA, 32 nt, Human
guacuauuuggaauugguuuuccagucuuuca

SEQ ID NO: 205677 - RNA, 32 nt, Human
guacucaaaaugcaaaaauuagccaggcgugg

SEQ ID NO: 205678 - RNA, 32 nt, Human
guacucaaagcuauccuuccagaguuacaaaa

SEQ ID NO: 205679 - RNA, 32 nt, Human
guacucaacuguguuuaauacucugaauuuua

SEQ ID NO: 205680 - RNA, 32 nt, Human
guacucaccaggcuggagugugguagcacgau

SEQ ID NO: 205681 - RNA, 32 nt, Human
guacucacgcagcugccgcgccauguccugcu

SEQ ID NO: 205682 - RNA, 32 nt, Human
guacucacucucuccacccucccuucaccucc

SEQ ID NO: 205683 - RNA, 32 nt, Human
guacucacuuccucuuagaucauaauuccauc

SEQ ID NO: 205684 - RNA, 32 nt, Human
guacucaggaggcugaggcaggagaaucacuu

SEQ ID NO: 205685 - RNA, 32 nt, Human
guacucaggaggcugaggcaggagaauugcuu

SEQ ID NO: 205686 - RNA, 32 nt, Human
guacucaggaggcugaggggaggaucacugga

SEQ ID NO: 205687 - RNA, 32 nt, Human
guacucaggcuggagugcgguggugugaucuu

SEQ ID NO: 205688 - RNA, 31 nt, Human
guacucaguggacagugcuguugaagauuug

SEQ ID NO: 205689 - RNA, 32 nt, Human
guacucaguuuagcucucaaagaaggggugaa

SEQ ID NO: 205690 - RNA, 18 nt, Human
guacucauaccauccaca

SEQ ID NO: 205691 - RNA, 32 nt, Human
guacucaucacccauauacugaacacuguacu

SEQ ID NO: 205692 - RNA, 32 nt, Human
guacucaucacucaugcuugugagaaucuaca

SEQ ID NO: 205693 - RNA, 32 nt, Human
guacucaugccuguaaucccagcacuuugaga

SEQ ID NO: 205694 - RNA, 32 nt, Human
guacuccagaugacaguaacugacuugaagau

SEQ ID NO: 205695 - RNA, 32 nt, Human
guacuccagcccggcacuccagccuggcgaca

SEQ ID NO: 205696 - RNA, 32 nt, Human
guacuccagccuaggugacagagcaagacucu

SEQ ID NO: 205697 - RNA, 32 nt, Human
guacuccagccugagcaacagagcaagacagg

SEQ ID NO: 205698 - RNA, 32 nt, Human
guacuccagccuggcaacagagcgagacuccg

SEQ ID NO: 205699 - RNA, 32 nt, Human
guacuccagccugggagauagagcaagacucc

SEQ ID NO: 205700 - RNA, 32 nt, Human
guacuccagccugggcaacagagcaagaccca

SEQ ID NO: 205701 - RNA, 32 nt, Human
guacuccagccugggcaacagagcaagacccu

SEQ ID NO: 205702 - RNA, 32 nt, Human
guacuccagccugggcaacagagcgaggcucc

SEQ ID NO: 205703 - RNA, 32 nt, Human
guacuccagccuggugacagagccagacuguu

SEQ ID NO: 205704 - RNA, 32 nt, Human
guacuccagccuggugacagagcgagacuccc

SEQ ID NO: 205705 - RNA, 32 nt, Human
guacuccagcuuggcgacagagcaagaccccc

SEQ ID NO: 205706 - RNA, 32 nt, Human
guacuccaggauuccaggaguaagccuguaga

SEQ ID NO: 205707 - RNA, 32 nt, Human
guacuccaugaucugcuuagccauugaugaug

SEQ ID NO: 205708 - RNA, 32 nt, Human
guacuccauuguuuuugcuauuuaaauauaau

SEQ ID NO: 205709 - RNA, 32 nt, Human
guacucccagcacuuugggaggcugagguggg

SEQ ID NO: 205710 - RNA, 19 nt, Human
guacucccagcuacuuggg

SEQ ID NO: 205711 - RNA, 32 nt, Human
guacuccccucagggauacgacacaugcccau

SEQ ID NO: 205712 - RNA, 32 nt, Human
guacuccccucggggauacgacacaugcccau

SEQ ID NO: 205713 - RNA, 32 nt, Human
guacuccccucggggauacgacauaugcccau

SEQ ID NO: 205714 - RNA, 32 nt, Human
guacuccccucggggauaugacacaugcccau

SEQ ID NO: 205715 - RNA, 32 nt, Human
guacuccccugagaggccuucugccuagaaag

SEQ ID NO: 205716 - RNA, 32 nt, Human
guacucccuccagccucagcuggcugaaccuc

SEQ ID NO: 205717 - RNA, 32 nt, Human
guacuccgagugaagaauucagcagcuaagug

SEQ ID NO: 205718 - RNA, 32 nt, Human
guacuccgggcugugggggucggugcggauau

SEQ ID NO: 205719 - RNA, 32 nt, Human
guacuccggucugagcgacagagcaagaaucu

SEQ ID NO: 205720 - RNA, 32 nt, Human
guacuccugccggccucccacccggccugcag

SEQ ID NO: 205721 - RNA, 32 nt, Human
guacuccugccuaggugacagagcaagacucc

SEQ ID NO: 205722 - RNA, 32 nt, Human
guacuccuucucccagcccuguccucauccua

SEQ ID NO: 205723 - RNA, 32 nt, Human
guacucgcuugugcagaaaacauuguuccaga

SEQ ID NO: 205724 - RNA, 32 nt, Human
guacucggcuuccugugggguguagguucucg

SEQ ID NO: 205725 - RNA, 32 nt, Human
guacucgggaacaggaaucaggaaaccugagu

SEQ ID NO: 205726 - RNA, 32 nt, Human
guacucgggaggcugaagcaggagaaucgcuu

SEQ ID NO: 205727 - RNA, 32 nt, Human
guacucgggaggcugaggcagagaauugcuug

SEQ ID NO: 205728 - RNA, 32 nt, Human
guacucgggaggcugaggcaggagaauggcgu

SEQ ID NO: 205729 - RNA, 32 nt, Human
guacucguucucucacggcccugagugagccc

SEQ ID NO: 205730 - RNA, 32 nt, Human
guacucuauuuaaggaucugugguaguauaac

SEQ ID NO: 205731 - RNA, 32 nt, Human
guacucucaaagaagguggggagcugcccagg

SEQ ID NO: 205732 - RNA, 32 nt, Human
guacucuccccagacagccagaaggcccuuug

SEQ ID NO: 205733 - RNA, 31 nt, Human
guacucuccuccucaaugccugugucucucc

SEQ ID NO: 205734 - RNA, 32 nt, Human
guacucugacaucacggaaaguguugaaccug

SEQ ID NO: 205735 - RNA, 32 nt, Human
guacucugagucucaccuuaucugauuuagau

SEQ ID NO: 205736 - RNA, 32 nt, Human
guacucugcaccacugccauacgagcuuccca

SEQ ID NO: 205737 - RNA, 32 nt, Human
guacucugcuuuucuccuccucagcauugaug

SEQ ID NO: 205738 - RNA, 22 nt, Human
guacucuggaucccuuccccug

SEQ ID NO: 205739 - RNA, 28 nt, Human
guacucuggggugcugccugaauccauu

SEQ ID NO: 205740 - RNA, 32 nt, Human
guacucugguggccacuggaucuuugggauua

SEQ ID NO: 205741 - RNA, 32 nt, Human
guacucuucaaguaucuuuguaaugaagguuu

SEQ ID NO: 205742 - RNA, 32 nt, Human
guacucuucuuaugcuaauaugcucugggcug

SEQ ID NO: 205743 - RNA, 32 nt, Human
guacucuugagagugucacaacacaaaauacg

SEQ ID NO: 205744 - RNA, 32 nt, Human
guacugaaaauacaaaaauuaggcaugguggu

SEQ ID NO: 205745 - RNA, 32 nt, Human
guacugaaaucaacaauuagacuugcacauca

SEQ ID NO: 205746 - RNA, 32 nt, Human
guacugaaauuagggauucaucagggcaggaa

SEQ ID NO: 205747 - RNA, 22 nt, Human
guacugaaccugcauucuucuc

SEQ ID NO: 205748 - RNA, 32 nt, Human
guacugaagcuggccucagaugggaaggcccg

SEQ ID NO: 205749 - RNA, 26 nt, Human
guacugaaguuagcauggcugugcuu

SEQ ID NO: 205750 - RNA, 23 nt, Human
guacugaaucaggaccucacuca

SEQ ID NO: 205751 - RNA, 22 nt, Human
guacugacagaccccauccugc

SEQ ID NO: 205752 - RNA, 19 nt, Human
guacugacccuggaucccu

SEQ ID NO: 205753 - RNA, 32 nt, Human
guacugagacaaugguuaggguuguuuucuua

SEQ ID NO: 205754 - RNA, 32 nt, Human
guacugaguccccagauguuguauacuguaaa

SEQ ID NO: 205755 - RNA, 23 nt, Human
guacugaguccuaucucucucug

SEQ ID NO: 205756 - RNA, 22 nt, Human
guacugagugcuuauucuuuug

SEQ ID NO: 205757 - RNA, 23 nt, Human
guacugaguggauuccgucuucu

SEQ ID NO: 205758 - RNA, 32 nt, Human
guacugauugcucacugaaagacucagcaccc

SEQ ID NO: 205759 - RNA, 32 nt, Human
guacugcaaggcaggugauaauaucaucuccu

SEQ ID NO: 205760 - RNA, 32 nt, Human
guacugcagaacagagccugcagugagacacc

SEQ ID NO: 205761 - RNA, 32 nt, Human
guacugcaggcucugggucagguucugcuccu

SEQ ID NO: 205762 - RNA, 32 nt, Human
guacugcagggcagugcuaugccaccaccuga

SEQ ID NO: 205763 - RNA, 32 nt, Human
guacugccauggccaacucaucacuccugauu

SEQ ID NO: 205764 - RNA, 32 nt, Human
guacugcccagaacaguggcccauagcaggga

SEQ ID NO: 205765 - RNA, 32 nt, Human
guacugcccuggaugugguggagcugggcugg

SEQ ID NO: 205766 - RNA, 32 nt, Human
guacugccugaacaagaagucccccauuucgc

SEQ ID NO: 205767 - RNA, 32 nt, Human
guacugcgcugccacagucucaucccauuucc

SEQ ID NO: 205768 - RNA, 32 nt, Human
guacugcuacuugaauaacucaguuaacgcug

SEQ ID NO: 205769 - RNA, 32 nt, Human
guacugcuaguaccuguaagcauuuuaggucc

SEQ ID NO: 205770 - RNA, 32 nt, Human
guacugcugccuggggccgggggugggggugg

SEQ ID NO: 205771 - RNA, 32 nt, Human
guacugcugcugcugcugcucagggcuucgug

SEQ ID NO: 205772 - RNA, 32 nt, Human
guacuggaccaggucuacgucagcauucaggu

SEQ ID NO: 205773 - RNA, 32 nt, Human
guacuggagacaacaccucagaccaucugaac

SEQ ID NO: 205774 - RNA, 32 nt, Human
guacuggaggaagagagaagaggcaugacagc

SEQ ID NO: 205775 - RNA, 32 nt, Human
guacuggaggggaauuggagcuuuggaacagg

SEQ ID NO: 205776 - RNA, 32 nt, Human
guacuggaucuucccagagaaaagguucccag

SEQ ID NO: 205777 - RNA, 32 nt, Human
guacuggcauagaaaaaccaaauaaaaggccu

SEQ ID NO: 205778 - RNA, 32 nt, Human
guacuggcccuaggaggauuuccucaaccacu

SEQ ID NO: 205779 - RNA, 26 nt, Human
guacuggccugggugacagagcagga

SEQ ID NO: 205780 - RNA, 21 nt, Human
guacuggcuaccuggagccuu

SEQ ID NO: 205781 - RNA, 32 nt, Human
guacuggcuccaccccuuggugcuggcagugu

SEQ ID NO: 205782 - RNA, 32 nt, Human
guacuggcuccucuguggugucugccuguugc

SEQ ID NO: 205783 - RNA, 32 nt, Human
guacugggaggcaggagguggcccggggaggc

SEQ ID NO: 205784 - RNA, 32 nt, Human
guacugggaggcaugguucauugaggaccauc

SEQ ID NO: 205785 - RNA, 32 nt, Human
guacugggaggguggcagggagggacggggaa

SEQ ID NO: 205786 - RNA, 32 nt, Human
guacugggcccagggugcugagcuuuccagaa

SEQ ID NO: 205787 - RNA, 32 nt, Human
guacuggggccacccuuccuaagacagagagu

SEQ ID NO: 205788 - RNA, 32 nt, Human
guacuggggccugcuggacagcgaggacagca

SEQ ID NO: 205789 - RNA, 32 nt, Human
guacugggguacaggcauguucaccacagucc

SEQ ID NO: 205790 - RNA, 32 nt, Human
guacugggucccccucagcacccuccacagca

SEQ ID NO: 205791 - RNA, 32 nt, Human
guacugggugugaggccuggccugggcccaga

SEQ ID NO: 205792 - RNA, 32 nt, Human
guacugguuacaucaagauauguuuugguugu

SEQ ID NO: 205793 - RNA, 32 nt, Human
guacugguuuacaucacagcugccccaggcug

SEQ ID NO: 205794 - RNA, 32 nt, Human
guacuguauuaauuguccuuguuuacuucaga

SEQ ID NO: 205795 - RNA, 32 nt, Human
guacuguauuugcucagugcaucaggaauggg

SEQ ID NO: 205796 - RNA, 31 nt, Human
guacugugacuuccaaagccagagccacaug

SEQ ID NO: 205797 - RNA, 32 nt, Human
guacugugagccaggagcaagucugggguucc

SEQ ID NO: 205798 - RNA, 32 nt, Human
guacugugagcugucuucuguauaauguauuu

SEQ ID NO: 205799 - RNA, 32 nt, Human
guacugugcagugcuggagaguagaauggcaa

SEQ ID NO: 205800 - RNA, 32 nt, Human
guacugugcccaggaaggcugggugaaguccc

SEQ ID NO: 205801 - RNA, 32 nt, Human
guacugugcuuccucagcagcugggcugucag

SEQ ID NO: 205802 - RNA, 32 nt, Human
guacuguggcauacaaguuauuuucuacagua

SEQ ID NO: 205803 - RNA, 32 nt, Human
guacugugguuucugugcucucuccuuccuga

SEQ ID NO: 205804 - RNA, 32 nt, Human
guacuguuaacuuaaaaacacaauuuauaaau

SEQ ID NO: 205805 - RNA, 32 nt, Human
guacuguuccagcaucuucccuggauggcugg

SEQ ID NO: 205806 - RNA, 32 nt, Human
guacuguuguccaggcuggagcgcaguugauu

SEQ ID NO: 205807 - RNA, 32 nt, Human
guacuguuugcugccacacugucucaucuagu

SEQ ID NO: 205808 - RNA, 32 nt, Human
guacuuaaaagcuucauucagaagcuccagga

SEQ ID NO: 205809 - RNA, 32 nt, Human
guacuuaaaccagacagcaggguucagaggug

SEQ ID NO: 205810 - RNA, 32 nt, Human
guacuuaaagcaccuguggagugcggucgcuc

SEQ ID NO: 205811 - RNA, 32 nt, Human
guacuuaagacauguuguugccgggcauggua

SEQ ID NO: 205812 - RNA, 32 nt, Human
guacuuacagccccaauggcccccaaaaagcc

SEQ ID NO: 205813 - RNA, 32 nt, Human
guacuuacagccuucucuugggaacagccggg

SEQ ID NO: 205814 - RNA, 18 nt, Human
guacuuagccaccugugu

SEQ ID NO: 205815 - RNA, 30 nt, Human
guacuuagccucuucugacuucucaaagga

SEQ ID NO: 205816 - RNA, 32 nt, Human
guacuuagccuucuguuauuccuuauucuuua

SEQ ID NO: 205817 - RNA, 32 nt, Human
guacuuauaaaaccagcuugaaaacaucgucu

SEQ ID NO: 205818 - RNA, 32 nt, Human
guacuuaugaucaguuggcaucaaugaagcau

SEQ ID NO: 205819 - RNA, 32 nt, Human
guacuucaacagcaauccccugucaaaccuca

SEQ ID NO: 205820 - RNA, 32 nt, Human
guacuucaacagcaauccccuguuaaaccuca

SEQ ID NO: 205821 - RNA, 32 nt, Human
guacuucaaguuugccuucuaggaagcugugu

SEQ ID NO: 205822 - RNA, 32 nt, Human
guacuucacccaggcggaaugggauggccugu

SEQ ID NO: 205823 - RNA, 32 nt, Human
guacuuccaggucaggggaaauuucagucccc

SEQ ID NO: 205824 - RNA, 31 nt, Human
guacuuccagugcuggagcaugguaugacca

SEQ ID NO: 205825 - RNA, 32 nt, Human
guacuucccaggcuggaugugaagcuacauua

SEQ ID NO: 205826 - RNA, 21 nt, Human
guacuuccuacaucuccuucu

SEQ ID NO: 205827 - RNA, 32 nt, Human
guacuuccuagagaugccagacuugccucaca

SEQ ID NO: 205828 - RNA, 32 nt, Human
guacuuccuuucucccugcgggccaggcacug

SEQ ID NO: 205829 - RNA, 32 nt, Human
guacuucuacagccauguccuauuccuugauc

SEQ ID NO: 205830 - RNA, 32 nt, Human
guacuucucauagcuuuggagucuggcugucc

SEQ ID NO: 205831 - RNA, 32 nt, Human
guacuucugaugcuauuaauugguuccucaac

SEQ ID NO: 205832 - RNA, 32 nt, Human
guacuucuggcuuaaguauaaccauguaagaa

SEQ ID NO: 205833 - RNA, 32 nt, Human
guacuugacaguguuaucugucacuuauuuaa

SEQ ID NO: 205834 - RNA, 32 nt, Human
guacuugaugccuucucugugagcaguggcuc

SEQ ID NO: 205835 - RNA, 27 nt, Human
guacuugaugcuggaagcucuuggaga

SEQ ID NO: 205836 - RNA, 32 nt, Human
guacuugaugggccucuggucuugccgugucu

SEQ ID NO: 205837 - RNA, 18 nt, Human
guacuugauguauugggg

SEQ ID NO: 205838 - RNA, 28 nt, Human
guacuugcacacagguccccacagaugc

SEQ ID NO: 205839 - RNA, 32 nt, Human
guacuugcacacauccagcaacaccgcacuca

SEQ ID NO: 205840 - RNA, 32 nt, Human
guacuuggagaaacugaggccucuuaugugua

SEQ ID NO: 205841 - RNA, 32 nt, Human
guacuuggcuacagauuucugccuuguuuugc

SEQ ID NO: 205842 - RNA, 32 nt, Human
guacuuggcucucagccuggaguggcagcucu

SEQ ID NO: 205843 - RNA, 32 nt, Human
guacuugggaggcugaggcaggagaaucacuu

SEQ ID NO: 205844 - RNA, 32 nt, Human
guacuugggaggcugaggcaggaggaucgcuu

SEQ ID NO: 205845 - RNA, 32 nt, Human
guacuugggaggcugaggugggaggauuaaug

SEQ ID NO: 205846 - RNA, 32 nt, Human
guacuugggccggugaguccagccucaggaac

SEQ ID NO: 205847 - RNA, 32 nt, Human
guacuugggggacugaggcgggaggaucacuu

SEQ ID NO: 205848 - RNA, 32 nt, Human
guacuugggugagggauguuggacagagccug

SEQ ID NO: 205849 - RNA, 32 nt, Human
guacuugguaggcuguggcaggagaauggcgu

SEQ ID NO: 205850 - RNA, 32 nt, Human
guacuuggugaggaagaguccuggaauggggc

SEQ ID NO: 205851 - RNA, 22 nt, Human
guacuugguuuuacuugggaga

SEQ ID NO: 205852 - RNA, 23 nt, Human
guacuuguauugucauuuggaga

SEQ ID NO: 205853 - RNA, 32 nt, Human
guacuuguccacccugccuccucuguucugaa

SEQ ID NO: 205854 - RNA, 32 nt, Human
guacuugucccuuuguugucguuguuguaguu

SEQ ID NO: 205855 - RNA, 32 nt, Human
guacuuguuucuaugcagaugccugggccgua

SEQ ID NO: 205856 - RNA, 23 nt, Human
guacuuuaacacauccuugaaag

SEQ ID NO: 205857 - RNA, 32 nt, Human
guacuuuacgugcucaccaaaguggugccacc

SEQ ID NO: 205858 - RNA, 32 nt, Human
guacuuugaugaucccuugugaucucacaaug

SEQ ID NO: 205859 - RNA, 32 nt, Human
guacuuugccaagggagagacaugaagacaga

SEQ ID NO: 205860 - RNA, 32 nt, Human
guacuuugccaaguaagcaucuuuacaccuaa

SEQ ID NO: 205861 - RNA, 32 nt, Human
guacuuugcucuggcaacccuagcaaagaaua

SEQ ID NO: 205862 - RNA, 32 nt, Human
guacuuuggaaccacuaacaccucugcacagg

SEQ ID NO: 205863 - RNA, 32 nt, Human
guacuuuggagacagaagguacuggcagcgag

SEQ ID NO: 205864 - RNA, 32 nt, Human
guacuuugggaggccgaaguggguggaucgcu

SEQ ID NO: 205865 - RNA, 32 nt, Human
guacuuuguggauauuuugcccagcaggaagu

SEQ ID NO: 205866 - RNA, 32 nt, Human
guacuuuuuagagugcacugagugcacuuuac

SEQ ID NO: 205867 - RNA, 18 nt, Human
guagaaaaaagacuggaa

SEQ ID NO: 205868 - RNA, 32 nt, Human
guagaaaaacucauucauacuacuuuucuaaa

SEQ ID NO: 205869 - RNA, 32 nt, Human
guagaaaaauggauugggcuggcagcucgaag

SEQ ID NO: 205870 - RNA, 32 nt, Human
guagaaaaccacccuucaaccugggugaugcu

SEQ ID NO: 205871 - RNA, 32 nt, Human
guagaaaagaugucacuucuuccuuuaaggcu

SEQ ID NO: 205872 - RNA, 32 nt, Human
guagaaacgguuuugccauguugcccaggcug

SEQ ID NO: 205873 - RNA, 32 nt, Human
guagaaacguaggaacaauuucgugaacgcaa

SEQ ID NO: 205874 - RNA, 32 nt, Human
guagaaagaaaaugucuguuuuccaaagauaa

SEQ ID NO: 205875 - RNA, 32 nt, Human
guagaaagagaagacccagagugaagaaguaa

SEQ ID NO: 205876 - RNA, 32 nt, Human
guagaaaggaagcacuucugagccagugacca

SEQ ID NO: 205877 - RNA, 32 nt, Human
guagaaaggaggaaggagggagagggaaguag

SEQ ID NO: 205878 - RNA, 32 nt, Human
guagaaaggggagggguggggcuaccagguag

SEQ ID NO: 205879 - RNA, 32 nt, Human
guagaaaucucucuuucacaugagcagggguu

SEQ ID NO: 205880 - RNA, 23 nt, Human
guagaaaugacaguugcuuaaug

SEQ ID NO: 205881 - RNA, 17 nt, Human
guagaaauggagaguga

SEQ ID NO: 205882 - RNA, 32 nt, Human
guagaaaugggcaaaaccccaucucuacuaaa

SEQ ID NO: 205883 - RNA, 32 nt, Human
guagaaauuacuugcaaaaugaaaugugaauu

SEQ ID NO: 205884 - RNA, 32 nt, Human
guagaaauuuuuauuuucauguaagcaaauuu

SEQ ID NO: 205885 - RNA, 32 nt, Human
guagaacauauauuaaucuacuggcgaauggg

SEQ ID NO: 205886 - RNA, 32 nt, Human
guagaacaucugcugucaaaggccagccuguc

SEQ ID NO: 205887 - RNA, 32 nt, Human
guagaacauucacuaacccauucauccaucca

SEQ ID NO: 205888 - RNA, 32 nt, Human
guagaaccaggaguuggauuuagcagucuggc

SEQ ID NO: 205889 - RNA, 32 nt, Human
guagaacuaaggcuucugcuuccuugcugcug

SEQ ID NO: 205890 - RNA, 32 nt, Human
guagaacugcaauuuccauucuuuuaaauggg

SEQ ID NO: 205891 - RNA, 32 nt, Human
guagaacuggaagcaaggcagcuaccuuuuug

SEQ ID NO: 205892 - RNA, 32 nt, Human
guagaacuguucauuuccaccaaggguaucug

SEQ ID NO: 205893 - RNA, 32 nt, Human
guagaacuugaaucuagaggaaccugacagcg

SEQ ID NO: 205894 - RNA, 23 nt, Human
guagaagaaaaagaaucauaaca

SEQ ID NO: 205895 - RNA, 32 nt, Human
guagaagaaagccaugguaaacugauacauaa

SEQ ID NO: 205896 - RNA, 32 nt, Human
guagaagaaggcaguuagagaaaacaaaguau

SEQ ID NO: 205897 - RNA, 32 nt, Human
guagaagaauuagaguagaaguugucgggguc

SEQ ID NO: 205898 - RNA, 32 nt, Human
guagaagacagaauucgaucugccugucccuu

SEQ ID NO: 205899 - RNA, 32 nt, Human
guagaagaggcugagggacacacagaggugac

SEQ ID NO: 205900 - RNA, 32 nt, Human
guagaagauggaccagccugaaaugaucuuga

SEQ ID NO: 205901 - RNA, 32 nt, Human
guagaagauguaugcaaagugaaaugccagcc

SEQ ID NO: 205902 - RNA, 32 nt, Human
guagaagcaagaacaagcuccucugcuuggua

SEQ ID NO: 205903 - RNA, 32 nt, Human
guagaagcaggucgggagagaccucccugggc

SEQ ID NO: 205904 - RNA, 32 nt, Human
guagaagccaucaccuggcccaugucccuaca

SEQ ID NO: 205905 - RNA, 32 nt, Human
guagaagcccaaucaccagcaguuuuuaaaaa

SEQ ID NO: 205906 - RNA, 32 nt, Human
guagaagcugcaagugagaaaccaacguggua

SEQ ID NO: 205907 - RNA, 32 nt, Human
guagaaggagagaaggggaguggaggaagcac

SEQ ID NO: 205908 - RNA, 32 nt, Human
guagaaggcaguggugacuggcauucagaagu

SEQ ID NO: 205909 - RNA, 32 nt, Human
guagaagggaagagaauuggugcugcagaagu

SEQ ID NO: 205910 - RNA, 32 nt, Human
guagaagguuaagaagagaaaaugcuaaauaa

SEQ ID NO: 205911 - RNA, 32 nt, Human
guagaaguccgaccgcggaagccagacugcug

SEQ ID NO: 205912 - RNA, 32 nt, Human
guagaagugaggaccuuccaggaggagcuuua

SEQ ID NO: 205913 - RNA, 22 nt, Human
guagaagugggugacccauuga

SEQ ID NO: 205914 - RNA, 24 nt, Human
guagaaguuauggcuuuucuuuca

SEQ ID NO: 205915 - RNA, 32 nt, Human
guagaauaguguuugucaacugucuuuucucu

SEQ ID NO: 205916 - RNA, 32 nt, Human
guagaauauuuuuauggcaagauauuuguggu

SEQ ID NO: 205917 - RNA, 32 nt, Human
guagaaucacaggauaauauauacaaauauau

SEQ ID NO: 205918 - RNA, 32 nt, Human
guagaaugaaguuuuacuugacagaaggaccu

SEQ ID NO: 205919 - RNA, 32 nt, Human
guagaaugcuccaugcuauuuuauggaaacuu

SEQ ID NO: 205920 - RNA, 32 nt, Human
guagaaugggcucaugggcaaugugauguucc

SEQ ID NO: 205921 - RNA, 29 nt, Human
guagaauguuacuugaguugugagaauuc

SEQ ID NO: 205922 - RNA, 32 nt, Human
guagaauuccagggcugccuugacuucuuccc

SEQ ID NO: 205923 - RNA, 32 nt, Human
guagaauugagcaggcuggcaauggcaguuuu

SEQ ID NO: 205924 - RNA, 32 nt, Human
guagaauuguuuccuaaagaaaaccacucuuu

SEQ ID NO: 205925 - RNA, 32 nt, Human
guagacaaaauggauauaaaugaaaauuacca

SEQ ID NO: 205926 - RNA, 22 nt, Human
guagacaaauaguccauccaca

SEQ ID NO: 205927 - RNA, 32 nt, Human
guagacaagucucucucauaccaacagaacuu

SEQ ID NO: 205928 - RNA, 32 nt, Human
guagacacaggcauguguucaggcuugagcug

SEQ ID NO: 205929 - RNA, 32 nt, Human
guagacacagugcccguccuggaguugcacca

SEQ ID NO: 205930 - RNA, 32 nt, Human
guagacagaagaggaagaaagaacagauguuc

SEQ ID NO: 205931 - RNA, 32 nt, Human
guagacagauccaggcucaccaguccugugcc

SEQ ID NO: 205932 - RNA, 32 nt, Human
guagacagcagcaaacagcagcagggaagcca

SEQ ID NO: 205933 - RNA, 32 nt, Human
guagacagcucugcagggaagucugugacaac

SEQ ID NO: 205934 - RNA, 32 nt, Human
guagacaggcugucucgcugacccuucuggcc

SEQ ID NO: 205935 - RNA, 32 nt, Human
guagacaggggagccaugcacagcaggaaaug

SEQ ID NO: 205936 - RNA, 32 nt, Human
guagacagggucucacuguguugcccaagcuu

SEQ ID NO: 205937 - RNA, 32 nt, Human
guagacagggucucccuauguugcccaggcug

SEQ ID NO: 205938 - RNA, 32 nt, Human
guagacaucaagcucuucuucugugaugaaac

SEQ ID NO: 205939 - RNA, 32 nt, Human
guagacaucuccccaccucuacccuaucagga

SEQ ID NO: 205940 - RNA, 32 nt, Human
guagacaucuuuccucacugccagccugccau

SEQ ID NO: 205941 - RNA, 32 nt, Human
guagacccauuuuacaggugagagaaccaagu

SEQ ID NO: 205942 - RNA, 32 nt, Human
guagaccccagccagggaggaguggaguuucu

SEQ ID NO: 205943 - RNA, 32 nt, Human
guagacccccuuccacagucccccuacagaag

SEQ ID NO: 205944 - RNA, 32 nt, Human
guagaccccugagaugaggccugagauagaug

SEQ ID NO: 205945 - RNA, 32 nt, Human
guagaccucucucaagcugccaccuccuugcu

SEQ ID NO: 205946 - RNA, 32 nt, Human
guagaccucuuuuucuuaccagucuccucccc

SEQ ID NO: 205947 - RNA, 32 nt, Human
guagaccugauuuucaaaaucugcccucagau

SEQ ID NO: 205948 - RNA, 32 nt, Human
guagacgccaugauggaugugucugguguggg

SEQ ID NO: 205949 - RNA, 32 nt, Human
guagacgggguuucaccaugugggccaggcug

SEQ ID NO: 205950 - RNA, 18 nt, Human
guagacgguuuccuccac

SEQ ID NO: 205951 - RNA, 32 nt, Human
guagacguggacuuagucauuacugggcagcu

SEQ ID NO: 205952 - RNA, 18 nt, Human
guagacuauguauuuccu

SEQ ID NO: 205953 - RNA, 32 nt, Human
guagacucaacagggucucccucuguugccca

SEQ ID NO: 205954 - RNA, 32 nt, Human
guagacuccaacaacagaaguggcaucugugu

SEQ ID NO: 205955 - RNA, 32 nt, Human
guagacucuguaaacaccuccuuacucacuau

SEQ ID NO: 205956 - RNA, 32 nt, Human
guagacuguaagcuccuugagggcaaggauug

SEQ ID NO: 205957 - RNA, 32 nt, Human
guagacuuaaggcuucauugugggguuaaaaa

SEQ ID NO: 205958 - RNA, 32 nt, Human
guagacuucaucccaauugucaaacauccuag

SEQ ID NO: 205959 - RNA, 32 nt, Human
guagacuuguaauccccaguguuggaggaggg

SEQ ID NO: 205960 - RNA, 32 nt, Human
guagagaaacuagaucuucccacagaacacug

SEQ ID NO: 205961 - RNA, 32 nt, Human
guagagaaagaaaauuuaggggccaguucuca

SEQ ID NO: 205962 - RNA, 32 nt, Human
guagagaaccuuguuucugcaggaagccuagc

SEQ ID NO: 205963 - RNA, 32 nt, Human
guagagacagggagacagggucucacuguguu

SEQ ID NO: 205964 - RNA, 32 nt, Human
guagagacagggguuucuuccauguugcccag

SEQ ID NO: 205965 - RNA, 32 nt, Human
guagagacaggguuucaccauguuaccaccgc

SEQ ID NO: 205966 - RNA, 32 nt, Human
guagagacccaacuuccaaagacugcaucaga

SEQ ID NO: 205967 - RNA, 32 nt, Human
guagagacgacaggguuucaccauguuggcca

SEQ ID NO: 205968 - RNA, 32 nt, Human
guagagacggggguuuucaccauguuggccag

SEQ ID NO: 205969 - RNA, 32 nt, Human
guagagacgggguuucaccacauugcucaggc

SEQ ID NO: 205970 - RNA, 32 nt, Human
guagagacgggguuucaccauguuaccaggau

SEQ ID NO: 205971 - RNA, 32 nt, Human
guagagacgggguuucaccguguuacggggau

SEQ ID NO: 205972 - RNA, 32 nt, Human
guagagacggguucaccauguugcccaggagg

SEQ ID NO: 205973 - RNA, 32 nt, Human
guagagacugucccuucugccuucgggcgugu

SEQ ID NO: 205974 - RNA, 32 nt, Human
guagagagacacacuaacagccacacccucug

SEQ ID NO: 205975 - RNA, 19 nt, Human
guagagagaggcaauuuaa

SEQ ID NO: 205976 - RNA, 21 nt, Human
guagagagaguauguauuuaa

SEQ ID NO: 205977 - RNA, 22 nt, Human
guagagagauaauaaaaaucaa

SEQ ID NO: 205978 - RNA, 32 nt, Human
guagagagaugggguuucgccauguugcccag

SEQ ID NO: 205979 - RNA, 32 nt, Human
guagagagccgggcuccugcggaugggggcug

SEQ ID NO: 205980 - RNA, 32 nt, Human
guagagaggagagagagugaacagggagcggg

SEQ ID NO: 205981 - RNA, 32 nt, Human
guagagaggaggucugggagaaagauggaaac

SEQ ID NO: 205982 - RNA, 32 nt, Human
guagagagggauggcuccccacccucagcguu

SEQ ID NO: 205983 - RNA, 32 nt, Human
guagagagggggcacuuaagagagggaagugg

SEQ ID NO: 205984 - RNA, 32 nt, Human
guagagagggggucucugaaggcccuuggggc

SEQ ID NO: 205985 - RNA, 21 nt, Human
guagagaguguugaaauucaa

SEQ ID NO: 205986 - RNA, 32 nt, Human
guagagauaaaugugugucacagugaagccag

SEQ ID NO: 205987 - RNA, 32 nt, Human
guagagauagggucucaccauguuggccaggc

SEQ ID NO: 205988 - RNA, 32 nt, Human
guagagauagggucucacuauguugaccaggc

SEQ ID NO: 205989 - RNA, 32 nt, Human
guagagaugaacugugugugaggccaaacugg

SEQ ID NO: 205990 - RNA, 32 nt, Human
guagagauggccucagagucuuuuccauucag

SEQ ID NO: 205991 - RNA, 32 nt, Human
guagagauggcugagugcaauggcucacacuu

SEQ ID NO: 205992 - RNA, 32 nt, Human
guagagauggggucucacccuguuggccaggc

SEQ ID NO: 205993 - RNA, 32 nt, Human
guagagauggggucucacuguguuagccagga

SEQ ID NO: 205994 - RNA, 32 nt, Human
guagagauggggucuugcuuuguugcccaggu

SEQ ID NO: 205995 - RNA, 32 nt, Human
guagagaugggguuucaccauggccaggcugg

SEQ ID NO: 205996 - RNA, 32 nt, Human
guagagaugggguuucaccauguuaccaggau

SEQ ID NO: 205997 - RNA, 32 nt, Human
guagagaugggguuucaccguguuaccaggau

SEQ ID NO: 205998 - RNA, 32 nt, Human
guagagaugguuucaccauguuggccaggcca

SEQ ID NO: 205999 - RNA, 32 nt, Human
guagagcagaaauuguauuuugcacgaacaug

SEQ ID NO: 206000 - RNA, 32 nt, Human
guagagcaguuagcaugauccaugguuauucc

SEQ ID NO: 206001 - RNA, 32 nt, Human
guagagcccugcuucccuucucugaccucaca

SEQ ID NO: 206002 - RNA, 20 nt, Human
guagagcccuggaauggaga

SEQ ID NO: 206003 - RNA, 32 nt, Human
guagagcccuggaauggagauguccuugacgc

SEQ ID NO: 206004 - RNA, 32 nt, Human
guagagccuagcaacagcgcaggcucccagcc

SEQ ID NO: 206005 - RNA, 32 nt, Human
guagagccuuuccuauuucccuuccugcugug

SEQ ID NO: 206006 - RNA, 18 nt, Human
guagagcgauaauuuuug

SEQ ID NO: 206007 - RNA, 32 nt, Human
guagagcuagccgcccugacugccuucagacc

SEQ ID NO: 206008 - RNA, 21 nt, Human
guagagcucagcaccacccua

SEQ ID NO: 206009 - RNA, 32 nt, Human
guagagcucaucugcauguugugugcagauac

SEQ ID NO: 206010 - RNA, 21 nt, Human
guagagcuguacuuuuucuuc

SEQ ID NO: 206011 - RNA, 32 nt, Human
guagagcugugcauuaaacuugcacaugacug

SEQ ID NO: 206012 - RNA, 32 nt, Human
guagagcuguucauuauggauauuucugcugc

SEQ ID NO: 206013 - RNA, 24 nt, Human
guagaggaaaaguauuuucucuca

SEQ ID NO: 206014 - RNA, 22 nt, Human
guagaggaaacugccuucuaca

SEQ ID NO: 206015 - RNA, 24 nt, Human
guagaggaaagagugaucuggugu

SEQ ID NO: 206016 - RNA, 23 nt, Human
guagaggaaucugggugcuucca

SEQ ID NO: 206017 - RNA, 32 nt, Human
guagaggagagaauugggggaguugcaggggg

SEQ ID NO: 206018 - RNA, 32 nt, Human
guagaggaggaaacuccucuccacaaauccac

SEQ ID NO: 206019 - RNA, 32 nt, Human
guagaggaugauggcgccuuuggccgaggggc

SEQ ID NO: 206020 - RNA, 32 nt, Human
guagaggaugcuuuucguuucacugggauccg

SEQ ID NO: 206021 - RNA, 32 nt, Human
guagaggcccugcaaggaccaggaugaaggga

SEQ ID NO: 206022 - RNA, 32 nt, Human
guagaggccuaccuugaauuaaggguuauacu

SEQ ID NO: 206023 - RNA, 21 nt, Human
guagaggcgcggggugcggag

SEQ ID NO: 206024 - RNA, 32 nt, Human
guagaggcugcagugagccaugaucaugccac

SEQ ID NO: 206025 - RNA, 32 nt, Human
guagaggcuucauaugagacccagaaagucua

SEQ ID NO: 206026 - RNA, 20 nt, Human
guagagggaaacagccacug

SEQ ID NO: 206027 - RNA, 32 nt, Human
guagagggacuacagcccugaggggcugcucc

SEQ ID NO: 206028 - RNA, 32 nt, Human
guagagggagagagaagagcaagggacgugga

SEQ ID NO: 206029 - RNA, 32 nt, Human
guagagggcagccucagaggcacugggcauuc

SEQ ID NO: 206030 - RNA, 32 nt, Human
guagaggggaccugcucagcaggugugaccag

SEQ ID NO: 206031 - RNA, 32 nt, Human
guagaggggccguggggguugaggcagggcaa

SEQ ID NO: 206032 - RNA, 32 nt, Human
guagagggggaaaaggagaaugaugaugauag

SEQ ID NO: 206033 - RNA, 32 nt, Human
guagagggggugggugcguaggaugugugagu

SEQ ID NO: 206034 - RNA, 32 nt, Human
guagaggggugaggaaggguaaggggcagggc

SEQ ID NO: 206035 - RNA, 32 nt, Human
guagaggucccucccaacuuccuuugaacugu

SEQ ID NO: 206036 - RNA, 32 nt, Human
guagaggucugccuagugagugagcaggagaa

SEQ ID NO: 206037 - RNA, 32 nt, Human
guagaggugggguuucaucguguuaccaggau

SEQ ID NO: 206038 - RNA, 32 nt, Human
guagaggugguguuuugccauguuucccaggc

SEQ ID NO: 206039 - RNA, 32 nt, Human
guagagguuagagaucaaagaagucagagaga

SEQ ID NO: 206040 - RNA, 32 nt, Human
guagagguucuaaaaagaaagugguauguugu

SEQ ID NO: 206041 - RNA, 32 nt, Human
guagaguaaaacugaacuccaaucccaccacc

SEQ ID NO: 206042 - RNA, 32 nt, Human
guagaguauuuuaauccuauuacuugacuaag

SEQ ID NO: 206043 - RNA, 32 nt, Human
guagagucacuggaacacuaaugaggaaacug

SEQ ID NO: 206044 - RNA, 32 nt, Human
guagagucggaggcggagagccuggacgccca

SEQ ID NO: 206045 - RNA, 24 nt, Human
guagagugacucgcaccuguaauc

SEQ ID NO: 206046 - RNA, 32 nt, Human
guagagugaggugagggucguggcuaaaaccc

SEQ ID NO: 206047 - RNA, 18 nt, Human
guagagugccgguucccu

SEQ ID NO: 206048 - RNA, 22 nt, Human
guagagugggggcagggggcag

SEQ ID NO: 206049 - RNA, 32 nt, Human
guagaguuauuuuucuugaagaggcagcucaa

SEQ ID NO: 206050 - RNA, 32 nt, Human
guagaguugcagcuguauacugcugaaaaugc

SEQ ID NO: 206051 - RNA, 32 nt, Human
guagauaaaauuacacuaguuuaaaauaugug

SEQ ID NO: 206052 - RNA, 32 nt, Human
guagauaccagaaccauuuuacauuugaggau

SEQ ID NO: 206053 - RNA, 32 nt, Human
guagauaccuuggccucagguggauauccagu

SEQ ID NO: 206054 - RNA, 32 nt, Human
guagauagagguggagacaggaaaaagacuaa

SEQ ID NO: 206055 - RNA, 32 nt, Human
guagauaggaaugaaaggaauuuugaaauaga

SEQ ID NO: 206056 - RNA, 32 nt, Human
guagauaguaaaaucacuggcuuuuuccagcu

SEQ ID NO: 206057 - RNA, 32 nt, Human
guagaucaauuugagcuuuaacuacuggagaa

SEQ ID NO: 206058 - RNA, 32 nt, Human
guagaucacaggcugagggacagagcaaagac

SEQ ID NO: 206059 - RNA, 32 nt, Human
guagaucacugcauccgguuccuccucuuucu

SEQ ID NO: 206060 - RNA, 32 nt, Human
guagaucagagacuuggaguggucaagggaga

SEQ ID NO: 206061 - RNA, 32 nt, Human
guagauccuguuuugggguuugcacauggauc

SEQ ID NO: 206062 - RNA, 32 nt, Human
guagaucucaaaggaucuugcuuuaacuuuca

SEQ ID NO: 206063 - RNA, 32 nt, Human
guagaucuucuucacauauucccccuggaagg

SEQ ID NO: 206064 - RNA, 32 nt, Human
guagaugacaucuugcuacagcuuuuauuugu

SEQ ID NO: 206065 - RNA, 32 nt, Human
guagaugagccuuuuaguagagcugauuuauu

SEQ ID NO: 206066 - RNA, 32 nt, Human
guagaugaguacugcguuuuucuuuuauggac

SEQ ID NO: 206067 - RNA, 32 nt, Human
guagaugcagcaaaccaccauggcacacauuu

SEQ ID NO: 206068 - RNA, 22 nt, Human
guagaugccuguaauuccagcu

SEQ ID NO: 206069 - RNA, 32 nt, Human
guagaugcggggagggcuggugaccuccgugg

SEQ ID NO: 206070 - RNA, 32 nt, Human
guagaugcggucucaguauguugcccaggcug

SEQ ID NO: 206071 - RNA, 32 nt, Human
guagaugcugggacagcauuagaagagggucu

SEQ ID NO: 206072 - RNA, 32 nt, Human
guagaugcuguggcuuuguguugcguuuugug

SEQ ID NO: 206073 - RNA, 32 nt, Human
guagaugcuucucagaacaugaaaucaaauug

SEQ ID NO: 206074 - RNA, 32 nt, Human
guagauggcagggggaggauuugaagccuggg

SEQ ID NO: 206075 - RNA, 32 nt, Human
guagaugggaggacauuucuggucagggaacu

SEQ ID NO: 206076 - RNA, 32 nt, Human
guagaugggagguggaaucuguaggaaagaga

SEQ ID NO: 206077 - RNA, 32 nt, Human
guagaugggauuauaggcaugugccacggugc

SEQ ID NO: 206078 - RNA, 32 nt, Human
guagauggggucucacuauguugcccaggcug

SEQ ID NO: 206079 - RNA, 32 nt, Human
guagaugguaaagagaaugaggagaaaaagga

SEQ ID NO: 206080 - RNA, 32 nt, Human
guagauguaccccuaucgauucuuuuaaagua

SEQ ID NO: 206081 - RNA, 23 nt, Human
guagauguaucuuugggcagcug

SEQ ID NO: 206082 - RNA, 32 nt, Human
guagauguguuuucagagcuagguacagagga

SEQ ID NO: 206083 - RNA, 32 nt, Human
guagauguugccuggugcaaagugccccaaac

SEQ ID NO: 206084 - RNA, 32 nt, Human
guagauguuuuccucucucuugcugaccccuc

SEQ ID NO: 206085 - RNA, 32 nt, Human
guagauuagagcuucuguuucuaaucuacaaa

SEQ ID NO: 206086 - RNA, 32 nt, Human
guagauucaaaaggugcuuccuucccggcugu

SEQ ID NO: 206087 - RNA, 32 nt, Human
guagauucugauuuccgaauggugcugcggaa

SEQ ID NO: 206088 - RNA, 32 nt, Human
guagauugcaccacugcacucuagccugggua

SEQ ID NO: 206089 - RNA, 20 nt, Human
guagauugcuugagcccagg

SEQ ID NO: 206090 - RNA, 32 nt, Human
guagauuuauagaccauuucuguuggccagga

SEQ ID NO: 206091 - RNA, 32 nt, Human
guagauuucccaggaaacucaggcuugggaca

SEQ ID NO: 206092 - RNA, 32 nt, Human
guagauuugcugaaauggagaaacaaagacaa

SEQ ID NO: 206093 - RNA, 32 nt, Human
guagauuuggagaggaaggauggagguggacu

SEQ ID NO: 206094 - RNA, 32 nt, Human
guagauuuuaauuugacucacaguuugaagca

SEQ ID NO: 206095 - RNA, 32 nt, Human
guagauuuuacuuucaacuuuuuaaucaguau

SEQ ID NO: 206096 - RNA, 32 nt, Human
guagcaaaaaggaagauuguucauggccuuua

SEQ ID NO: 206097 - RNA, 32 nt, Human
guagcaaaaggugucugcauucugagccucuu

SEQ ID NO: 206098 - RNA, 32 nt, Human
guagcaaagaacuaaaggaggggaagaaaagc

SEQ ID NO: 206099 - RNA, 32 nt, Human
guagcaaagauuugaaccgucugucuuuuuaa

SEQ ID NO: 206100 - RNA, 32 nt, Human
guagcaaagcgauucuuuucaucuucggcgag

SEQ ID NO: 206101 - RNA, 32 nt, Human
guagcaacauccagagaucauucuuccauacu

SEQ ID NO: 206102 - RNA, 32 nt, Human
guagcaaccaaaagguugguugaaggaaacaa

SEQ ID NO: 206103 - RNA, 32 nt, Human
guagcaacuguuugauuucuuucuggauacag

SEQ ID NO: 206104 - RNA, 32 nt, Human
guagcaagaaucuaaguaaaucugccaugggu

SEQ ID NO: 206105 - RNA, 21 nt, Human
guagcaagugcugcccuuuau

SEQ ID NO: 206106 - RNA, 32 nt, Human
guagcaauaaacauguauaucaaaagaauaga

SEQ ID NO: 206107 - RNA, 32 nt, Human
guagcaauagggagagugaaaauauguauucu

SEQ ID NO: 206108 - RNA, 32 nt, Human
guagcacaaauuugagcgaggcccugucaauu

SEQ ID NO: 206109 - RNA, 32 nt, Human
guagcacaacuuccuuuccuuucaguucugcc

SEQ ID NO: 206110 - RNA, 22 nt, Human
guagcacacaccuguaguccca

SEQ ID NO: 206111 - RNA, 22 nt, Human
guagcacacgccuguaauccca

SEQ ID NO: 206112 - RNA, 22 nt, Human
guagcacacgccuguaauucca

SEQ ID NO: 206113 - RNA, 32 nt, Human
guagcacaggcggagugcagcggaggccccug

SEQ ID NO: 206114 - RNA, 32 nt, Human
guagcacaguaaugacuguacaugucauugua

SEQ ID NO: 206115 - RNA, 32 nt, Human
guagcacagugaauguaugccaaaugcaaguc

SEQ ID NO: 206116 - RNA, 22 nt, Human
guagcacauaccuguaauccca

SEQ ID NO: 206117 - RNA, 32 nt, Human
guagcaccacugcacuucagccuggacaacag

SEQ ID NO: 206118 - RNA, 32 nt, Human
guagcaccuggcugagccuggcuggcacagaa

SEQ ID NO: 206119 - RNA, 32 nt, Human
guagcacgccugcuggcagagguaccuggugg

SEQ ID NO: 206120 - RNA, 32 nt, Human
guagcacguaugcauggauauguaugucuuug

SEQ ID NO: 206121 - RNA, 32 nt, Human
guagcacuaagccagcuggccuaaagaugcaa

SEQ ID NO: 206122 - RNA, 32 nt, Human
guagcacuaaugaucaauaucauucauucauu

SEQ ID NO: 206123 - RNA, 32 nt, Human
guagcacucccggaacuggaacuaggugccag

SEQ ID NO: 206124 - RNA, 32 nt, Human
guagcacugaucaguccucccacuuuaccauc

SEQ ID NO: 206125 - RNA, 32 nt, Human
guagcacugcaguccagccugggcgacagagu

SEQ ID NO: 206126 - RNA, 32 nt, Human
guagcacuuaaauauaucugauagcaacacuu

SEQ ID NO: 206127 - RNA, 32 nt, Human
guagcagaaauggaacaggaaaaguuugaucu

SEQ ID NO: 206128 - RNA, 32 nt, Human
guagcagaagcagagggaggccucuugccuga

SEQ ID NO: 206129 - RNA, 32 nt, Human
guagcagacaggcugcccaagguaugaagcag

SEQ ID NO: 206130 - RNA, 32 nt, Human
guagcagaucccugguucaggucuagggcaag

SEQ ID NO: 206131 - RNA, 22 nt, Human
guagcagaugcuuguaauccca

SEQ ID NO: 206132 - RNA, 32 nt, Human
guagcagauuuucacacaugugcauugcagag

SEQ ID NO: 206133 - RNA, 32 nt, Human
guagcagcaaaguguacagucugaaaccguau

SEQ ID NO: 206134 - RNA, 32 nt, Human
guagcagcacacacuucacaaagccaagccua

SEQ ID NO: 206135 - RNA, 20 nt, Human
guagcagcagcugcccccca

SEQ ID NO: 206136 - RNA, 32 nt, Human
guagcagcccugccuuucauagcagggauuac

SEQ ID NO: 206137 - RNA, 32 nt, Human
guagcagccgccgccuccaggugcagguucuc

SEQ ID NO: 206138 - RNA, 32 nt, Human
guagcagccuccugccugcuccaagaaaaggg

SEQ ID NO: 206139 - RNA, 32 nt, Human
guagcagcuccaaagcauuggaugcuggauaa

SEQ ID NO: 206140 - RNA, 32 nt, Human
guagcagcuccaacagggguccagccugcauc

SEQ ID NO: 206141 - RNA, 32 nt, Human
guagcaggaccugccaagaagauuccuucuaa

SEQ ID NO: 206142 - RNA, 22 nt, Human
guagcaggagccuguaauccca

SEQ ID NO: 206143 - RNA, 22 nt, Human
guagcaggcaccuguaacccca

SEQ ID NO: 206144 - RNA, 22 nt, Human
guagcaggcaccuguaauccca

SEQ ID NO: 206145 - RNA, 22 nt, Human
guagcaggcgcuuguaauccca

SEQ ID NO: 206146 - RNA, 32 nt, Human
guagcagggcagggguuggaggagcgaggagc

SEQ ID NO: 206147 - RNA, 22 nt, Human
guagcaggugccuguaauccca

SEQ ID NO: 206148 - RNA, 32 nt, Human
guagcagguggagggccaggauugguggguga

SEQ ID NO: 206149 - RNA, 32 nt, Human
guagcaguaucuguccugccagucccaaggcc

SEQ ID NO: 206150 - RNA, 32 nt, Human
guagcagucacacccuagccacugcugggacc

SEQ ID NO: 206151 - RNA, 18 nt, Human
guagcaguccucccagca

SEQ ID NO: 206152 - RNA, 32 nt, Human
guagcaguugcucccgcacuccaggccugugc

SEQ ID NO: 206153 - RNA, 32 nt, Human
guagcaguuucuuuggcugccugggccccuug

SEQ ID NO: 206154 - RNA, 32 nt, Human
guagcauaauagagucucucagccuuugcuua

SEQ ID NO: 206155 - RNA, 32 nt, Human
guagcaucucugaaaggggguaccaggaagca

SEQ ID NO: 206156 - RNA, 32 nt, Human
guagcaugaaauaucacugacacuccagacua

SEQ ID NO: 206157 - RNA, 22 nt, Human
guagcaugcgccuauaguccca

SEQ ID NO: 206158 - RNA, 22 nt, Human
guagcaugcgccuguaguccca

SEQ ID NO: 206159 - RNA, 32 nt, Human
guagcauggagcaggcuucauuccuuuuuaug

SEQ ID NO: 206160 - RNA, 22 nt, Human
guagcaugugccuguaauccca

SEQ ID NO: 206161 - RNA, 32 nt, Human
guagcaugugcuggauuauuagugcagcagcu

SEQ ID NO: 206162 - RNA, 32 nt, Human
guagcauucccccuucccucuguuaggaacca

SEQ ID NO: 206163 - RNA, 32 nt, Human
guagcauugggccaggccuggcauucaaggga

SEQ ID NO: 206164 - RNA, 32 nt, Human
guagcauuugugaauaaauguguaggugcugu

SEQ ID NO: 206165 - RNA, 32 nt, Human
guagcauuuuucaccuucauagcauacuccuu

SEQ ID NO: 206166 - RNA, 32 nt, Human
guagccaaaggcaguugccugugccuugggca

SEQ ID NO: 206167 - RNA, 22 nt, Human
guagccaacuaccaacgugccu

SEQ ID NO: 206168 - RNA, 21 nt, Human
guagccaauguuaucccagca

SEQ ID NO: 206169 - RNA, 32 nt, Human
guagccacaccaggauagagacuggaacacua

SEQ ID NO: 206170 - RNA, 32 nt, Human
guagccacagcggcagcuccagcccggcccgg

SEQ ID NO: 206171 - RNA, 32 nt, Human
guagccacaucucuccacuucuugccuuuugg

SEQ ID NO: 206172 - RNA, 32 nt, Human
guagccaccauccuguuguauacuaggagaga

SEQ ID NO: 206173 - RNA, 32 nt, Human
guagccacugcacuccagccugggcaacgugg

SEQ ID NO: 206174 - RNA, 32 nt, Human
guagccagaaugcccuguucaugcugagcaaa

SEQ ID NO: 206175 - RNA, 32 nt, Human
guagccagagucagguuggaaaguaagucacc

SEQ ID NO: 206176 - RNA, 18 nt, Human
guagccagcaucugccuc

SEQ ID NO: 206177 - RNA, 32 nt, Human
guagccagcugcagaagaaucuggaucauuag

SEQ ID NO: 206178 - RNA, 32 nt, Human
guagccagcuuggagacuucucagccaaugcu

SEQ ID NO: 206179 - RNA, 21 nt, Human
guagccaggaguugacuugcc

SEQ ID NO: 206180 - RNA, 32 nt, Human
guagccaggcuggagggcaauuguacaaucuc

SEQ ID NO: 206181 - RNA, 22 nt, Human
guagccagggcaggccgggccu

SEQ ID NO: 206182 - RNA, 22 nt, Human
guagccagggcccugccagccu

SEQ ID NO: 206183 - RNA, 21 nt, Human
guagccagggcuccggcugcu

SEQ ID NO: 206184 - RNA, 23 nt, Human
guagccagggguguacagugccu

SEQ ID NO: 206185 - RNA, 32 nt, Human
guagccaggguaagggguaaaaggauaguaag

SEQ ID NO: 206186 - RNA, 19 nt, Human
guagccaggucccccugca

SEQ ID NO: 206187 - RNA, 32 nt, Human
guagccaguuuggggagugggcugcaaggggc

SEQ ID NO: 206188 - RNA, 32 nt, Human
guagccauaguacacacacaacacgcuaucag

SEQ ID NO: 206189 - RNA, 32 nt, Human
guagccaucucucuguucugcauuaucuuaug

SEQ ID NO: 206190 - RNA, 32 nt, Human
guagccauuugcuguuaucugggaaacaagau

SEQ ID NO: 206191 - RNA, 22 nt, Human
guagcccacgccucuaauccca

SEQ ID NO: 206192 - RNA, 32 nt, Human
guagcccagaagccuccggcggcccaggauuc

SEQ ID NO: 206193 - RNA, 24 nt, Human
guagcccaggccagagugcagugg

SEQ ID NO: 206194 - RNA, 24 nt, Human
guagcccaggcuggagugcaaugg

SEQ ID NO: 206195 - RNA, 24 nt, Human
guagcccaggcugggaugcaaugg

SEQ ID NO: 206196 - RNA, 32 nt, Human
guagcccaggguggaggcagaacgaugcugcu

SEQ ID NO: 206197 - RNA, 32 nt, Human
guagcccauucuugauccagagcuguugccug

SEQ ID NO: 206198 - RNA, 32 nt, Human
guagccccaagaggaaggagccucagagagcc

SEQ ID NO: 206199 - RNA, 32 nt, Human
guagccccagcagcagcacccugcaagccagc

SEQ ID NO: 206200 - RNA, 32 nt, Human
guagcccccgaacuauuucucuacguuuucuc

SEQ ID NO: 206201 - RNA, 32 nt, Human
guagcccccgcccagcuggcccucucugaccu

SEQ ID NO: 206202 - RNA, 32 nt, Human
guagcccccuaaaugggcaagcaaggagcccc

SEQ ID NO: 206203 - RNA, 32 nt, Human
guagcccccucggugggcccagggccuagggg

SEQ ID NO: 206204 - RNA, 32 nt, Human
guagcccccugccuuacuguccuggcacaccc

SEQ ID NO: 206205 - RNA, 32 nt, Human
guagcccccuggccugugcaagcccugacucc

SEQ ID NO: 206206 - RNA, 32 nt, Human
guagccccuccccagccuucuuucucucccag

SEQ ID NO: 206207 - RNA, 32 nt, Human
guagccccugcaggaacaagcccuaaucugga

SEQ ID NO: 206208 - RNA, 32 nt, Human
guagcccgaccgccgagaugcccagcccgccg

SEQ ID NO: 206209 - RNA, 32 nt, Human
guagcccgagggaguccaggaggcucuccaag

SEQ ID NO: 206210 - RNA, 32 nt, Human
guagcccuaccuaacugguagcauuugccacu

SEQ ID NO: 206211 - RNA, 32 nt, Human
guagcccucaaugacugacagugcaaguggau

SEQ ID NO: 206212 - RNA, 32 nt, Human
guagcccuccuugcgccuccgauucccagaca

SEQ ID NO: 206213 - RNA, 32 nt, Human
guagcccucucaucgucuuuuaguuccaacaa

SEQ ID NO: 206214 - RNA, 32 nt, Human
guagcccuggcccagccgccuuccugggagag

SEQ ID NO: 206215 - RNA, 32 nt, Human
guagccgaggccaggccacuucugcugaggau

SEQ ID NO: 206216 - RNA, 32 nt, Human
guagccgaggggcaggcgggggaccucuacac

SEQ ID NO: 206217 - RNA, 32 nt, Human
guagccgcccacacaccaugagcccagauugu

SEQ ID NO: 206218 - RNA, 20 nt, Human
guagccgccuccucccagca

SEQ ID NO: 206219 - RNA, 32 nt, Human
guagccggcaguuacuggcaacuugugagcuu

SEQ ID NO: 206220 - RNA, 32 nt, Human
guagccgggcaguggaggucccggaugaggcg

SEQ ID NO: 206221 - RNA, 32 nt, Human
guagccgucauccucacagcugcagggccagg

SEQ ID NO: 206222 - RNA, 32 nt, Human
guagccuaccaaagcuguagaaaucuaggacu

SEQ ID NO: 206223 - RNA, 31 nt, Human
guagccuaggaacugccucagugucuuugcc

SEQ ID NO: 206224 - RNA, 24 nt, Human
guagccucaaacucccaggcucaa

SEQ ID NO: 206225 - RNA, 23 nt, Human
guagccucaucucccaggcucaa

SEQ ID NO: 206226 - RNA, 24 nt, Human
guagccuccaaccccugggcucaa

SEQ ID NO: 206227 - RNA, 32 nt, Human
guagccuccgccucagccucuggaguagcugg

SEQ ID NO: 206228 - RNA, 32 nt, Human
guagccuccgccuccagggcucaagggauccu

SEQ ID NO: 206229 - RNA, 19 nt, Human
guagccuccuccugggcuc

SEQ ID NO: 206230 - RNA, 32 nt, Human
guagccuccuuuccuccccuucugccuucccc

SEQ ID NO: 206231 - RNA, 24 nt, Human
guagccucgaauuccugggcucaa

SEQ ID NO: 206232 - RNA, 26 nt, Human
guagccucgaccuccccugggcucaa

SEQ ID NO: 206233 - RNA, 24 nt, Human
guagccucgaccuuccaggcucaa

SEQ ID NO: 206234 - RNA, 32 nt, Human
guagccucugcaggaacaagcccuaaucugga

SEQ ID NO: 206235 - RNA, 32 nt, Human
guagccugagucuuucaguagacuacacugcc

SEQ ID NO: 206236 - RNA, 32 nt, Human
guagccugcagaaaccaggaagauaaaacaac

SEQ ID NO: 206237 - RNA, 31 nt, Human
guagccuggcuuuucuggcuggggauggccg

SEQ ID NO: 206238 - RNA, 32 nt, Human
guagccugggcaacacagcaagaccccaucua

SEQ ID NO: 206239 - RNA, 19 nt, Human
guagccugggcuuccagca

SEQ ID NO: 206240 - RNA, 32 nt, Human
guagccugggggauguccagagacuaggccuc

SEQ ID NO: 206241 - RNA, 23 nt, Human
guagccugggugacaaagugaga

SEQ ID NO: 206242 - RNA, 32 nt, Human
guagccuguaauggguaaaagccacauuuagg

SEQ ID NO: 206243 - RNA, 32 nt, Human
guagccuucaugggcacgccucugcuggaaac

SEQ ID NO: 206244 - RNA, 24 nt, Human
guagccuugaacucccgggcucaa

SEQ ID NO: 206245 - RNA, 32 nt, Human
guagccuuucaauuuggugcucugucuggcug

SEQ ID NO: 206246 - RNA, 32 nt, Human
guagccuuuggggugaggggacuugggcggcc

SEQ ID NO: 206247 - RNA, 32 nt, Human
guagcgagagaagagagaaaaugaagucggcg

SEQ ID NO: 206248 - RNA, 21 nt, Human
guagcgagcgccccgaaggag

SEQ ID NO: 206249 - RNA, 22 nt, Human
guagcgcacaccuguaauucca

SEQ ID NO: 206250 - RNA, 22 nt, Human
guagcgcacgccuguaauccca

SEQ ID NO: 206251 - RNA, 22 nt, Human
guagcgcaucgcuguaauccca

SEQ ID NO: 206252 - RNA, 32 nt, Human
guagcgcgggagcagggcacugugcugcugcu

SEQ ID NO: 206253 - RNA, 32 nt, Human
guagcgcuggcccuagccucuggcagagccug

SEQ ID NO: 206254 - RNA, 32 nt, Human
guagcgcugggaaggacgggugaggcagggga

SEQ ID NO: 206255 - RNA, 32 nt, Human
guagcggacgccccucgacccacccacccgau

SEQ ID NO: 206256 - RNA, 32 nt, Human
guagcggauuacaggcgcccaccaccaaaaau

SEQ ID NO: 206257 - RNA, 22 nt, Human
guagcgggcgccuguaguccca

SEQ ID NO: 206258 - RNA, 32 nt, Human
guagcggggcugcccagaacccugccaaccaa

SEQ ID NO: 206259 - RNA, 22 nt, Human
guagcgggugccuguaauccca

SEQ ID NO: 206260 - RNA, 32 nt, Human
guagcgguuuuuaaaaaccauauacugacuga

SEQ ID NO: 206261 - RNA, 32 nt, Human
guagcguggccgugugcauguccuuugcgccu

SEQ ID NO: 206262 - RNA, 32 nt, Human
guagcuaaagaaugccauggccgggugcagug

SEQ ID NO: 206263 - RNA, 32 nt, Human
guagcuaagcugcuucagugaucuucacauuu

SEQ ID NO: 206264 - RNA, 32 nt, Human
guagcuaaggaaaugccuucuguugggaaaag

SEQ ID NO: 206265 - RNA, 32 nt, Human
guagcuacuggcaguggggugugaauaaagag

SEQ ID NO: 206266 - RNA, 32 nt, Human
guagcuagagcggcucagagacaggaggcggc

SEQ ID NO: 206267 - RNA, 32 nt, Human
guagcuagcugcagagaaucucacugcccacu

SEQ ID NO: 206268 - RNA, 32 nt, Human
guagcuaggacuacaaggcacaccaccaugcc

SEQ ID NO: 206269 - RNA, 32 nt, Human
guagcuaggacuacagcagcaugccacaaugu

SEQ ID NO: 206270 - RNA, 32 nt, Human
guagcuaggacuacaggcgcccaccaccacac

SEQ ID NO: 206271 - RNA, 32 nt, Human
guagcuaggacuacaggugcccgccaccacac

SEQ ID NO: 206272 - RNA, 32 nt, Human
guagcuaggacuacaggugugcaccaccacgc

SEQ ID NO: 206273 - RNA, 32 nt, Human
guagcuaggacuacaggugugcaccaccaugc

SEQ ID NO: 206274 - RNA, 32 nt, Human
guagcuaggacuauggguacauuccacagugc

SEQ ID NO: 206275 - RNA, 32 nt, Human
guagcuagguacaggcaccugccaccacaccc

SEQ ID NO: 206276 - RNA, 32 nt, Human
guagcuagguucuagguuugaaacagaugcag

SEQ ID NO: 206277 - RNA, 32 nt, Human
guagcuauuccacccucugccugccugccugc

SEQ ID NO: 206278 - RNA, 22 nt, Human
guagcucaaaccuauaauccca

SEQ ID NO: 206279 - RNA, 22 nt, Human
guagcucaagccuguaauccca

SEQ ID NO: 206280 - RNA, 23 nt, Human
guagcucacacccuguaauccca

SEQ ID NO: 206281 - RNA, 22 nt, Human
guagcucacaccuauaauccca

SEQ ID NO: 206282 - RNA, 22 nt, Human
guagcucacaccuauaauccua

SEQ ID NO: 206283 - RNA, 19 nt, Human
guagcucacaccuguaauc

SEQ ID NO: 206284 - RNA, 22 nt, Human
guagcucacaccuguaauccca

SEQ ID NO: 206285 - RNA, 22 nt, Human
guagcucacaccuguaauccua

SEQ ID NO: 206286 - RNA, 21 nt, Human
guagcucacaccuguaguccc

SEQ ID NO: 206287 - RNA, 22 nt, Human
guagcucaccccuguaauccca

SEQ ID NO: 206288 - RNA, 22 nt, Human
guagcucacccuuguaauccca

SEQ ID NO: 206289 - RNA, 22 nt, Human
guagcucacgccuguaauccca

SEQ ID NO: 206290 - RNA, 22 nt, Human
guagcucacgccuguaauucca

SEQ ID NO: 206291 - RNA, 22 nt, Human
guagcucacgccuguauuccca

SEQ ID NO: 206292 - RNA, 32 nt, Human
guagcucacugcagccuccaacuccauggcuc

SEQ ID NO: 206293 - RNA, 32 nt, Human
guagcucacugcagucuucagccuccccagua

SEQ ID NO: 206294 - RNA, 32 nt, Human
guagcucagaaauuaagaaagaaugguauaau

SEQ ID NO: 206295 - RNA, 32 nt, Human
guagcucauacagcuuugaagcagcagcagga

SEQ ID NO: 206296 - RNA, 32 nt, Human
guagcucauacuuguaacccagcacuuuggga

SEQ ID NO: 206297 - RNA, 22 nt, Human
guagcucaugccuauaauccca

SEQ ID NO: 206298 - RNA, 21 nt, Human
guagcucaugccuguaauccc

SEQ ID NO: 206299 - RNA, 22 nt, Human
guagcucaugccuguaauccca

SEQ ID NO: 206300 - RNA, 22 nt, Human
guagcucaugcuuguaauccca

SEQ ID NO: 206301 - RNA, 22 nt, Human
guagcucaugcuuguaaucuca

SEQ ID NO: 206302 - RNA, 22 nt, Human
guagcucaugucuguaauccca

SEQ ID NO: 206303 - RNA, 32 nt, Human
guagcuccagccgccgcgcucccagccccggc

SEQ ID NO: 206304 - RNA, 32 nt, Human
guagcucccacaauuccccugugucaugggag

SEQ ID NO: 206305 - RNA, 32 nt, Human
guagcuccuaacuguugugugauuuggacggc

SEQ ID NO: 206306 - RNA, 32 nt, Human
guagcuccugcaggcaggggcaguuuguugcg

SEQ ID NO: 206307 - RNA, 32 nt, Human
guagcuccuuuuggguucuggcugccauccuu

SEQ ID NO: 206308 - RNA, 32 nt, Human
guagcucgcagagaucacagaaaugcuugcag

SEQ ID NO: 206309 - RNA, 32 nt, Human
guagcucgggcuucuaugaagaucccagcucu

SEQ ID NO: 206310 - RNA, 22 nt, Human
guagcucguggcuguaauccca

SEQ ID NO: 206311 - RNA, 32 nt, Human
guagcucucuggagucaaagagaggccugcuu

SEQ ID NO: 206312 - RNA, 32 nt, Human
guagcucugccucccucuccauaucuccuucc

SEQ ID NO: 206313 - RNA, 32 nt, Human
guagcucuuaguccucccugcucagcuggccg

SEQ ID NO: 206314 - RNA, 32 nt, Human
guagcucuugcauccuccucccaacucuagcc

SEQ ID NO: 206315 - RNA, 32 nt, Human
guagcucuugugucuguggacucugcucagcu

SEQ ID NO: 206316 - RNA, 32 nt, Human
guagcugaaauaaucauaucuuucugaugucu

SEQ ID NO: 206317 - RNA, 32 nt, Human
guagcugaaauacugucuaucucuaauaaaaa

SEQ ID NO: 206318 - RNA, 32 nt, Human
guagcugaaaugcgaaaaaggcagcaguccca

SEQ ID NO: 206319 - RNA, 32 nt, Human
guagcugaacgucuggaugguggagaagagca

SEQ ID NO: 206320 - RNA, 32 nt, Human
guagcugagcaguggcagcagagaggcagacg

SEQ ID NO: 206321 - RNA, 32 nt, Human
guagcugaggaagaagggaggcuucacagcau

SEQ ID NO: 206322 - RNA, 32 nt, Human
guagcugaggccacaggagcuggagggauugc

SEQ ID NO: 206323 - RNA, 32 nt, Human
guagcugaggccacuacugaccugccagggau

SEQ ID NO: 206324 - RNA, 32 nt, Human
guagcugaugaaaaggagcaugaugaacaaca

SEQ ID NO: 206325 - RNA, 32 nt, Human
guagcugcauauauuugucaacauuccucaug

SEQ ID NO: 206326 - RNA, 32 nt, Human
guagcugccaaaaagaacacccaucguauaag

SEQ ID NO: 206327 - RNA, 32 nt, Human
guagcugccauggcuagguagaagugagcaaa

SEQ ID NO: 206328 - RNA, 32 nt, Human
guagcugccccaguguaugucuugccuucucc

SEQ ID NO: 206329 - RNA, 32 nt, Human
guagcugcgggagggggagggggagugggcgg

SEQ ID NO: 206330 - RNA, 32 nt, Human
guagcugcugucacugacucccggcuauacau

SEQ ID NO: 206331 - RNA, 25 nt, Human
guagcugcuguuauuugcuugguua

SEQ ID NO: 206332 - RNA, 21 nt, Human
guagcugcuuccuggacgugc

SEQ ID NO: 206333 - RNA, 32 nt, Human
guagcugcuuugcagguacaucaugugacagu

SEQ ID NO: 206334 - RNA, 32 nt, Human
guagcuggaauacgcaucucuccagcauuccg

SEQ ID NO: 206335 - RNA, 32 nt, Human
guagcuggagugaugcagggaggaaaggcaga

SEQ ID NO: 206336 - RNA, 32 nt, Human
guagcugggaauauaggugugagccaccacgc

SEQ ID NO: 206337 - RNA, 32 nt, Human
guagcugggacuacaagugugagccacugugc

SEQ ID NO: 206338 - RNA, 32 nt, Human
guagcugggacuacaggcaugagccaccaugc

SEQ ID NO: 206339 - RNA, 32 nt, Human
guagcugggacuacaggcaugagccaccgugc

SEQ ID NO: 206340 - RNA, 32 nt, Human
guagcugggacuacaggugcaccaccacaccu

SEQ ID NO: 206341 - RNA, 32 nt, Human
guagcugggacuacaggugugccaccacgccu

SEQ ID NO: 206342 - RNA, 32 nt, Human
guagcugggacuacaguugugccaccacgucc

SEQ ID NO: 206343 - RNA, 32 nt, Human
guagcugggacuauuuugcaugcugaaacuuc

SEQ ID NO: 206344 - RNA, 32 nt, Human
guagcugggacuucaggagacugaagccaagg

SEQ ID NO: 206345 - RNA, 32 nt, Human
guagcugggauuacaagcaccagccaccaugc

SEQ ID NO: 206346 - RNA, 32 nt, Human
guagcugggauuacaagcaugcgccaccaugc

SEQ ID NO: 206347 - RNA, 32 nt, Human
guagcugggauuacaagugcacacuaccacgc

SEQ ID NO: 206348 - RNA, 32 nt, Human
guagcugggauuacaagugcgcacuaccacac

SEQ ID NO: 206349 - RNA, 32 nt, Human
guagcugggauuacagacaugccaccaugcca

SEQ ID NO: 206350 - RNA, 32 nt, Human
guagcugggauuacagacaugugccaccacgc

SEQ ID NO: 206351 - RNA, 32 nt, Human
guagcugggauuacagaugggaccaccuaguu

SEQ ID NO: 206352 - RNA, 32 nt, Human
guagcugggauuacagaugugagccaccguac

SEQ ID NO: 206353 - RNA, 32 nt, Human
guagcugggauuacagaugugugccacaucug

SEQ ID NO: 206354 - RNA, 19 nt, Human
guagcugggauuacagcug

SEQ ID NO: 206355 - RNA, 32 nt, Human
guagcugggauuacaggagcaugccacaagac

SEQ ID NO: 206356 - RNA, 32 nt, Human
guagcugggauuacaggagugugccaccacac

SEQ ID NO: 206357 - RNA, 32 nt, Human
guagcugggauuacaggcaccagccaccaugc

SEQ ID NO: 206358 - RNA, 32 nt, Human
guagcugggauuacaggcagccaccacgccca

SEQ ID NO: 206359 - RNA, 32 nt, Human
guagcugggauuacaggcaucugcuaccacgc

SEQ ID NO: 206360 - RNA, 32 nt, Human
guagcugggauuacaggcaugagccacugagc

SEQ ID NO: 206361 - RNA, 32 nt, Human
guagcugggauuacaggcaugagccacugugc

SEQ ID NO: 206362 - RNA, 32 nt, Human
guagcugggauuacaggcaugcgccaccacac

SEQ ID NO: 206363 - RNA, 32 nt, Human
guagcugggauuacaggcaugcgccaccacgc

SEQ ID NO: 206364 - RNA, 32 nt, Human
guagcugggauuacaggcaugcgccaccaugc

SEQ ID NO: 206365 - RNA, 32 nt, Human
guagcugggauuacaggcaugcgccacuaugc

SEQ ID NO: 206366 - RNA, 32 nt, Human
guagcugggauuacaggcaugcgccaucaugc

SEQ ID NO: 206367 - RNA, 32 nt, Human
guagcugggauuacaggcaugggccaccaugc

SEQ ID NO: 206368 - RNA, 32 nt, Human
guagcugggauuacaggcaugugagaccacgc

SEQ ID NO: 206369 - RNA, 32 nt, Human
guagcugggauuacaggcaugugccacaacgc

SEQ ID NO: 206370 - RNA, 32 nt, Human
guagcugggauuacaggcaugugccacaccug

SEQ ID NO: 206371 - RNA, 32 nt, Human
guagcugggauuacaggcaugugccaccacac

SEQ ID NO: 206372 - RNA, 32 nt, Human
guagcugggauuacaggcaugugccaccacgc

SEQ ID NO: 206373 - RNA, 32 nt, Human
guagcugggauuacaggcaugugccaccaugc

SEQ ID NO: 206374 - RNA, 32 nt, Human
guagcugggauuacaggcaugugccacccacc

SEQ ID NO: 206375 - RNA, 32 nt, Human
guagcugggauuacaggcaugugccaucaccc

SEQ ID NO: 206376 - RNA, 32 nt, Human
guagcugggauuacaggcaugugucaccacgc

SEQ ID NO: 206377 - RNA, 20 nt, Human
guagcugggauuacaggcgu

SEQ ID NO: 206378 - RNA, 32 nt, Human
guagcugggauuacaggcgugcgccaccaaau

SEQ ID NO: 206379 - RNA, 32 nt, Human
guagcugggauuacaggcgugcgccaccacgc

SEQ ID NO: 206380 - RNA, 32 nt, Human
guagcugggauuacaggcgugcgccacuaugc

SEQ ID NO: 206381 - RNA, 32 nt, Human
guagcugggauuacaggcgugcgccaucgugc

SEQ ID NO: 206382 - RNA, 32 nt, Human
guagcugggauuacaggcgugugccaccacac

SEQ ID NO: 206383 - RNA, 32 nt, Human
guagcugggauuacaggcgugugccaccacgc

SEQ ID NO: 206384 - RNA, 32 nt, Human
guagcugggauuacaggcgugugccaccaugc

SEQ ID NO: 206385 - RNA, 32 nt, Human
guagcugggauuacaggcgugugccaccgccu

SEQ ID NO: 206386 - RNA, 32 nt, Human
guagcugggauuacaggcgugugccgccacac

SEQ ID NO: 206387 - RNA, 32 nt, Human
guagcugggauuacaggcgugugucaccacgc

SEQ ID NO: 206388 - RNA, 32 nt, Human
guagcugggauuacaggcucaugccaccaugc

SEQ ID NO: 206389 - RNA, 32 nt, Human
guagcugggauuacaggcucccgccaccacgc

SEQ ID NO: 206390 - RNA, 32 nt, Human
guagcugggauuacaggcuccugccaccacgc

SEQ ID NO: 206391 - RNA, 32 nt, Human
guagcugggauuacagggugaagagggaacag

SEQ ID NO: 206392 - RNA, 32 nt, Human
guagcugggauuacagguaccugccaccaugc

SEQ ID NO: 206393 - RNA, 32 nt, Human
guagcugggauuacagguaugaaccacuaugc

SEQ ID NO: 206394 - RNA, 32 nt, Human
guagcugggauuacagguauguaccaccacac

SEQ ID NO: 206395 - RNA, 32 nt, Human
guagcugggauuacagguaugugccaccacgc

SEQ ID NO: 206396 - RNA, 32 nt, Human
guagcugggauuacagguaugugccaccaugc

SEQ ID NO: 206397 - RNA, 32 nt, Human
guagcugggauuacaggugagcaccacuguac

SEQ ID NO: 206398 - RNA, 32 nt, Human
guagcugggauuacaggugcaggccaccaugc

SEQ ID NO: 206399 - RNA, 32 nt, Human
guagcugggauuacaggugcaugccaccacgc

SEQ ID NO: 206400 - RNA, 32 nt, Human
guagcugggauuacaggugcaugccaccaugc

SEQ ID NO: 206401 - RNA, 32 nt, Human
guagcugggauuacaggugcaugccaccaugg

SEQ ID NO: 206402 - RNA, 32 nt, Human
guagcugggauuacaggugcccgccaccacac

SEQ ID NO: 206403 - RNA, 32 nt, Human
guagcugggauuacaggugcccgccaccacau

SEQ ID NO: 206404 - RNA, 32 nt, Human
guagcugggauuacaggugcccgccaccacgc

SEQ ID NO: 206405 - RNA, 32 nt, Human
guagcugggauuacaggugcccgccaccaugc

SEQ ID NO: 206406 - RNA, 32 nt, Human
guagcugggauuacaggugccugccacaacac

SEQ ID NO: 206407 - RNA, 32 nt, Human
guagcugggauuacaggugccugccaccacac

SEQ ID NO: 206408 - RNA, 32 nt, Human
guagcugggauuacaggugccugccaccacgc

SEQ ID NO: 206409 - RNA, 32 nt, Human
guagcugggauuacaggugccugccaccauac

SEQ ID NO: 206410 - RNA, 32 nt, Human
guagcugggauuacaggugccugccaccaugc

SEQ ID NO: 206411 - RNA, 32 nt, Human
guagcugggauuacaggugccugccaccauuc

SEQ ID NO: 206412 - RNA, 32 nt, Human
guagcugggauuacaggugccugccacugcgu

SEQ ID NO: 206413 - RNA, 32 nt, Human
guagcugggauuacaggugcgcaccauuacau

SEQ ID NO: 206414 - RNA, 32 nt, Human
guagcugggauuacaggugcgcacuaccacgc

SEQ ID NO: 206415 - RNA, 32 nt, Human
guagcugggauuacaggugcgugccaccacgc

SEQ ID NO: 206416 - RNA, 32 nt, Human
guagcugggauuacaggugcucaccaccacgu

SEQ ID NO: 206417 - RNA, 32 nt, Human
guagcugggauuacagguguaugccaccacgc

SEQ ID NO: 206418 - RNA, 32 nt, Human
guagcugggauuacagguguccgccaccacgc

SEQ ID NO: 206419 - RNA, 32 nt, Human
guagcugggauuacaggugucggccaccacac

SEQ ID NO: 206420 - RNA, 32 nt, Human
guagcugggauuacaggugugagccacugcac

SEQ ID NO: 206421 - RNA, 32 nt, Human
guagcugggauuacaggugugcaccaccacac

SEQ ID NO: 206422 - RNA, 32 nt, Human
guagcugggauuacaggugugcaccaccacgc

SEQ ID NO: 206423 - RNA, 32 nt, Human
guagcugggauuacaggugugcaccaccauuc

SEQ ID NO: 206424 - RNA, 32 nt, Human
guagcugggauuacaggugugcaccacccgua

SEQ ID NO: 206425 - RNA, 32 nt, Human
guagcugggauuacaggugugcaccacuacca

SEQ ID NO: 206426 - RNA, 32 nt, Human
guagcugggauuacaggugugccccaccacgc

SEQ ID NO: 206427 - RNA, 32 nt, Human
guagcugggauuacaggugugcgccaccacgc

SEQ ID NO: 206428 - RNA, 32 nt, Human
guagcugggauuacaggugugcgccaccaugu

SEQ ID NO: 206429 - RNA, 32 nt, Human
guagcugggauuacaggugugcgccgccacac

SEQ ID NO: 206430 - RNA, 32 nt, Human
guagcugggauuacaggugugcgccgcuacgc

SEQ ID NO: 206431 - RNA, 32 nt, Human
guagcugggauuacaggugugggccaccacac

SEQ ID NO: 206432 - RNA, 32 nt, Human
guagcugggauuacaggugugugccaccacac

SEQ ID NO: 206433 - RNA, 32 nt, Human
guagcugggauuacaggugugugccaccaugc

SEQ ID NO: 206434 - RNA, 32 nt, Human
guagcugggauuacaggugugugccacuacgg

SEQ ID NO: 206435 - RNA, 32 nt, Human
guagcugggauuacaggugugugccaucaugc

SEQ ID NO: 206436 - RNA, 32 nt, Human
guagcugggauuacaggugugugccgcaaugc

SEQ ID NO: 206437 - RNA, 32 nt, Human
guagcugggauuacagguuccugcuaccacgc

SEQ ID NO: 206438 - RNA, 32 nt, Human
guagcugggauuacagguuugcaccaccaugc

SEQ ID NO: 206439 - RNA, 32 nt, Human
guagcugggauuacaugugugugccaccacag

SEQ ID NO: 206440 - RNA, 32 nt, Human
guagcugggauuaccagugcacgccaccacgc

SEQ ID NO: 206441 - RNA, 32 nt, Human
guagcugggauuacgggcaugcgccaccacac

SEQ ID NO: 206442 - RNA, 32 nt, Human
guagcugggauuacgggcaugugccaccacgc

SEQ ID NO: 206443 - RNA, 32 nt, Human
guagcugggauuacgggugcgugccaccaugc

SEQ ID NO: 206444 - RNA, 32 nt, Human
guagcugggauuagaggcaugugccaucauac

SEQ ID NO: 206445 - RNA, 32 nt, Human
guagcugggauuagaggcgugugccaccaugc

SEQ ID NO: 206446 - RNA, 32 nt, Human
guagcugggauuagaggcgugugccacuacac

SEQ ID NO: 206447 - RNA, 32 nt, Human
guagcugggauuauagacacgugccaccacgc

SEQ ID NO: 206448 - RNA, 32 nt, Human
guagcugggauuauagauuggagccaccaugc

SEQ ID NO: 206449 - RNA, 32 nt, Human
guagcugggauuauaggcacacaccaccacau

SEQ ID NO: 206450 - RNA, 32 nt, Human
guagcugggauuauaggcacacaccaccauac

SEQ ID NO: 206451 - RNA, 32 nt, Human
guagcugggauuauaggcacacaccaccaugu

SEQ ID NO: 206452 - RNA, 32 nt, Human
guagcugggauuauaggcacaugccaccgcgc

SEQ ID NO: 206453 - RNA, 32 nt, Human
guagcugggauuauaggcacccaccaccacac

SEQ ID NO: 206454 - RNA, 32 nt, Human
guagcugggauuauaggcacccgccaccaugu

SEQ ID NO: 206455 - RNA, 32 nt, Human
guagcugggauuauaggcaccugccaccacgg

SEQ ID NO: 206456 - RNA, 32 nt, Human
guagcugggauuauaggcaccugccaucaugc

SEQ ID NO: 206457 - RNA, 32 nt, Human
guagcugggauuauaggcacgugccaccacac

SEQ ID NO: 206458 - RNA, 32 nt, Human
guagcugggauuauaggcauccacuaccaugc

SEQ ID NO: 206459 - RNA, 32 nt, Human
guagcugggauuauaggcaugcaccaccacca

SEQ ID NO: 206460 - RNA, 32 nt, Human
guagcugggauuauaggcaugcaccaccaugc

SEQ ID NO: 206461 - RNA, 32 nt, Human
guagcugggauuauaggcgagagccacugcau

SEQ ID NO: 206462 - RNA, 32 nt, Human
guagcugggauuauaggcgagugccaucaugc

SEQ ID NO: 206463 - RNA, 32 nt, Human
guagcugggauuauaggcgcccgccaccacga

SEQ ID NO: 206464 - RNA, 32 nt, Human
guagcugggauuauaggcguccgccaccaugc

SEQ ID NO: 206465 - RNA, 32 nt, Human
guagcugggauuauaggcgucugccaccacgc

SEQ ID NO: 206466 - RNA, 32 nt, Human
guagcugggauuauaggcgugcaccaccaugc

SEQ ID NO: 206467 - RNA, 32 nt, Human
guagcugggauuauaggcguguaccaccacac

SEQ ID NO: 206468 - RNA, 32 nt, Human
guagcugggauuauaggcgugugccaccaugc

SEQ ID NO: 206469 - RNA, 32 nt, Human
guagcugggauuauagguacaugccaucacac

SEQ ID NO: 206470 - RNA, 32 nt, Human
guagcugggauuauaggugcaugccaccaugc

SEQ ID NO: 206471 - RNA, 32 nt, Human
guagcugggauuauaggugcccaccaccaagc

SEQ ID NO: 206472 - RNA, 32 nt, Human
guagcugggauuauaggugcgagccacugcgc

SEQ ID NO: 206473 - RNA, 32 nt, Human
guagcugggauuauaggugcgcaccaccacac

SEQ ID NO: 206474 - RNA, 32 nt, Human
guagcugggauuauaggugugugccacugugc

SEQ ID NO: 206475 - RNA, 32 nt, Human
guagcugggauuaugggcgcccgccaccacgc

SEQ ID NO: 206476 - RNA, 32 nt, Human
guagcugggauuaugggugccugccaccacac

SEQ ID NO: 206477 - RNA, 24 nt, Human
guagcugggccugugcacugggca

SEQ ID NO: 206478 - RNA, 32 nt, Human
guagcuggggccaggcuucucuccccaccacc

SEQ ID NO: 206479 - RNA, 31 nt, Human
guagcuggucccucugucccugugucugcua

SEQ ID NO: 206480 - RNA, 32 nt, Human
guagcuggugcgcugcucacggccauucacug

SEQ ID NO: 206481 - RNA, 32 nt, Human
guagcuguccugacagccgugaagagcuucuu

SEQ ID NO: 206482 - RNA, 32 nt, Human
guagcugucuaugaggaauuggccgugucugg

SEQ ID NO: 206483 - RNA, 32 nt, Human
guagcuguggcuucuagugcccgcguggcauc

SEQ ID NO: 206484 - RNA, 32 nt, Human
guagcuguucucucccaucuaaccucaggcaa

SEQ ID NO: 206485 - RNA, 20 nt, Human
guagcuuaaucauaaucuca

SEQ ID NO: 206486 - RNA, 32 nt, Human
guagcuuaaucucuauguuucucuccauuuuc

SEQ ID NO: 206487 - RNA, 31 nt, Human
guagcuuaauuaguauuuuguugaaaauacu

SEQ ID NO: 206488 - RNA, 22 nt, Human
guagcuuacaccuauaauccca

SEQ ID NO: 206489 - RNA, 20 nt, Human
guagcuuaccuguaauucca

SEQ ID NO: 206490 - RNA, 22 nt, Human
guagcuuacgccuguuauccca

SEQ ID NO: 206491 - RNA, 32 nt, Human
guagcuuagcccagcuaaguucuaucagagac

SEQ ID NO: 206492 - RNA, 22 nt, Human
guagcuuauaccuguaauccua

SEQ ID NO: 206493 - RNA, 32 nt, Human
guagcuucagguaacuccucuuuguugccaau

SEQ ID NO: 206494 - RNA, 32 nt, Human
guagcuucauccuauccggaggcacagcacau

SEQ ID NO: 206495 - RNA, 32 nt, Human
guagcuucucugggccuggcagagguaagggg

SEQ ID NO: 206496 - RNA, 32 nt, Human
guagcuugaaggaggcaccaugcaggagcugc

SEQ ID NO: 206497 - RNA, 32 nt, Human
guagcuugcgugcuuucuccuguucuuuuaau

SEQ ID NO: 206498 - RNA, 32 nt, Human
guagcuugugugaaaaugagccuuuggaccag

SEQ ID NO: 206499 - RNA, 32 nt, Human
guagcuuguuagaaauguaaacucucaggccc

SEQ ID NO: 206500 - RNA, 32 nt, Human
guagcuuuaaaagaaauuaacaaccuugguca

SEQ ID NO: 206501 - RNA, 24 nt, Human
guagcuuugaccucucaggcucaa

SEQ ID NO: 206502 - RNA, 17 nt, Human
guagcuuugaucgccac

SEQ ID NO: 206503 - RNA, 32 nt, Human
guagcuuugucccuugccaucaugcccaacaa

SEQ ID NO: 206504 - RNA, 22 nt, Human
guagcuuuuaaagaaaauaguc

SEQ ID NO: 206505 - RNA, 32 nt, Human
guagcuuuugacuaaaagacuuuguaguguaa

SEQ ID NO: 206506 - RNA, 32 nt, Human
guaggaaaauuagcugggugugguggcgcaug

SEQ ID NO: 206507 - RNA, 32 nt, Human
guaggaaagagagaggaggagggggaaagagc

SEQ ID NO: 206508 - RNA, 32 nt, Human
guaggaacccagccugaggggaagccacagga

SEQ ID NO: 206509 - RNA, 32 nt, Human
guaggaacccaggagggacccaggaaacuaag

SEQ ID NO: 206510 - RNA, 32 nt, Human
guaggaacuauacuaugccuaacuuucuaucc

SEQ ID NO: 206511 - RNA, 32 nt, Human
guaggaacugccauguugacuccugggcaguu

SEQ ID NO: 206512 - RNA, 24 nt, Human
guaggaagauugcuugaggccagg

SEQ ID NO: 206513 - RNA, 31 nt, Human
guaggaaggaaccaggcccucacuuagguuu

SEQ ID NO: 206514 - RNA, 32 nt, Human
guaggaagugagugcugugucccaggaagcug

SEQ ID NO: 206515 - RNA, 32 nt, Human
guaggaaugcaggauaugcuugcugaauguuu

SEQ ID NO: 206516 - RNA, 32 nt, Human
guaggaaugccagcagaggccugaugauggca

SEQ ID NO: 206517 - RNA, 32 nt, Human
guaggaaugggaagauuugcaguuaaagaugg

SEQ ID NO: 206518 - RNA, 32 nt, Human
guaggaauuauugaaagcuucugccucacuua

SEQ ID NO: 206519 - RNA, 32 nt, Human
guaggacagagagaugacuggggaaggucuug

SEQ ID NO: 206520 - RNA, 32 nt, Human
guaggacagccauauacagugaagaguucuag

SEQ ID NO: 206521 - RNA, 32 nt, Human
guaggaccagcagaccaucgggaugguggagg

SEQ ID NO: 206522 - RNA, 32 nt, Human
guaggacgucgugucagcugugcacugacggc

SEQ ID NO: 206523 - RNA, 32 nt, Human
guaggacucgaauuuacagaaagccacagagg

SEQ ID NO: 206524 - RNA, 32 nt, Human
guaggacugcaguucugaauuuuggguuaaag

SEQ ID NO: 206525 - RNA, 32 nt, Human
guaggacugcuggaggcugugcuuugacauug

SEQ ID NO: 206526 - RNA, 32 nt, Human
guaggacuucggguguucgguccuggucgcag

SEQ ID NO: 206527 - RNA, 32 nt, Human
guaggagaaagaguaucuguggcucucccacc

SEQ ID NO: 206528 - RNA, 31 nt, Human
guaggagaacaauguaauacagcuugguacc

SEQ ID NO: 206529 - RNA, 32 nt, Human
guaggagaagugacaugaaugcaacacguggc

SEQ ID NO: 206530 - RNA, 19 nt, Human
guaggagaaucgcuugaac

SEQ ID NO: 206531 - RNA, 32 nt, Human
guaggagaaucgcuugagcucaggaguuugaa

SEQ ID NO: 206532 - RNA, 19 nt, Human
guaggagaaucguuugaac

SEQ ID NO: 206533 - RNA, 19 nt, Human
guaggagaauugcuugaac

SEQ ID NO: 206534 - RNA, 32 nt, Human
guaggagacagguuugacaaguugcugaggug

SEQ ID NO: 206535 - RNA, 32 nt, Human
guaggagacccaaggcaucuugaaucccaucu

SEQ ID NO: 206536 - RNA, 32 nt, Human
guaggagaccucaguguuuugggucuagguga

SEQ ID NO: 206537 - RNA, 32 nt, Human
guaggagagagaggccuaagaggcucacugcc

SEQ ID NO: 206538 - RNA, 32 nt, Human
guaggagagagccuggaucucuggccccaacc

SEQ ID NO: 206539 - RNA, 32 nt, Human
guaggagagagggacaacaguaggagcaggca

SEQ ID NO: 206540 - RNA, 32 nt, Human
guaggagagagggagcgagagccaggcaggac

SEQ ID NO: 206541 - RNA, 32 nt, Human
guaggagagcacguuggagcugaacuagcccc

SEQ ID NO: 206542 - RNA, 31 nt, Human
guaggagaguugacaucuugccaagggccug

SEQ ID NO: 206543 - RNA, 32 nt, Human
guaggagcaaacaaggcuucauauucuuuuua

SEQ ID NO: 206544 - RNA, 32 nt, Human
guaggagcagagggaagagagagggaugagag

SEQ ID NO: 206545 - RNA, 32 nt, Human
guaggagcagcuuuucuucuaguuugauauca

SEQ ID NO: 206546 - RNA, 32 nt, Human
guaggagcagcuuuucuucuaguuugauguca

SEQ ID NO: 206547 - RNA, 32 nt, Human
guaggagcaggagagaaaggaggguggguggu

SEQ ID NO: 206548 - RNA, 22 nt, Human
guaggagcccaggcuuugggca

SEQ ID NO: 206549 - RNA, 22 nt, Human
guaggagccuagcauuccggca

SEQ ID NO: 206550 - RNA, 32 nt, Human
guaggagccugcaggcccggcgcggggucgcc

SEQ ID NO: 206551 - RNA, 32 nt, Human
guaggagcuggauuugggagcucugcuugccg

SEQ ID NO: 206552 - RNA, 32 nt, Human
guaggagcuggcagugcagggaagaggagaca

SEQ ID NO: 206553 - RNA, 32 nt, Human
guaggagcuguggcgcggggccuuccaggagu

SEQ ID NO: 206554 - RNA, 32 nt, Human
guaggagcuguucucccuccccaaguccuauc

SEQ ID NO: 206555 - RNA, 32 nt, Human
guaggaggaagaauaucaagguuguggaaaaa

SEQ ID NO: 206556 - RNA, 32 nt, Human
guaggaggacugcuugagcucaggagguugag

SEQ ID NO: 206557 - RNA, 32 nt, Human
guaggaggagagaaggcuggggagggcugggc

SEQ ID NO: 206558 - RNA, 24 nt, Human
guaggaggaucacuugagcccagg

SEQ ID NO: 206559 - RNA, 24 nt, Human
guaggaggaucacuugagcucagg

SEQ ID NO: 206560 - RNA, 24 nt, Human
guaggaggaucauuugagcccagg

SEQ ID NO: 206561 - RNA, 24 nt, Human
guaggaggaucgcuuaagcccagg

SEQ ID NO: 206562 - RNA, 19 nt, Human
guaggaggaucgcuugaac

SEQ ID NO: 206563 - RNA, 32 nt, Human
guaggaggaucgcuugaacccaggaaguagag

SEQ ID NO: 206564 - RNA, 24 nt, Human
guaggaggaucgcuugagcccagg

SEQ ID NO: 206565 - RNA, 22 nt, Human
guaggaggauugcuugagccca

SEQ ID NO: 206566 - RNA, 32 nt, Human
guaggaggcagggagaguaagacaugcucugc

SEQ ID NO: 206567 - RNA, 32 nt, Human
guaggaggcuccugacaggccgcggcugucug

SEQ ID NO: 206568 - RNA, 20 nt, Human
guaggagggacagagaguga

SEQ ID NO: 206569 - RNA, 32 nt, Human
guaggagggaggugggugggucaggugagugg

SEQ ID NO: 206570 - RNA, 32 nt, Human
guaggaggggugcugggcucuggccuucucau

SEQ ID NO: 206571 - RNA, 32 nt, Human
guaggagguggggaugggggaggggaggggua

SEQ ID NO: 206572 - RNA, 32 nt, Human
guaggagucgcaaucccagcagcaauagccca

SEQ ID NO: 206573 - RNA, 32 nt, Human
guaggagugccuguugccaguguggggugaga

SEQ ID NO: 206574 - RNA, 32 nt, Human
guaggagugcuaccauggaaauggacagaguu

SEQ ID NO: 206575 - RNA, 32 nt, Human
guaggagugguuggagagacuugcgaaggcgg

SEQ ID NO: 206576 - RNA, 32 nt, Human
guaggauaagccacucugucccuuccugggca

SEQ ID NO: 206577 - RNA, 32 nt, Human
guaggauaggauacuccagacuccagucaucc

SEQ ID NO: 206578 - RNA, 32 nt, Human
guaggauaucccugauuccugggcucccagcc

SEQ ID NO: 206579 - RNA, 32 nt, Human
guaggauaucuuggcuuugccacacacaguua

SEQ ID NO: 206580 - RNA, 18 nt, Human
guaggaucaagaacaagc

SEQ ID NO: 206581 - RNA, 32 nt, Human
guaggaugcaaaacauccaguuguaauguaua

SEQ ID NO: 206582 - RNA, 32 nt, Human
guaggaugcuucuguaguucacaaauguuaca

SEQ ID NO: 206583 - RNA, 32 nt, Human
guaggaugggggcucccagcugcuuguggagg

SEQ ID NO: 206584 - RNA, 32 nt, Human
guaggauugcccacaguuuuucuuuuuaaagg

SEQ ID NO: 206585 - RNA, 32 nt, Human
guaggauuuuucuauuucugcaaaauagaauu

SEQ ID NO: 206586 - RNA, 32 nt, Human
guaggcaacagagcaggcuuuucacuuaggau

SEQ ID NO: 206587 - RNA, 32 nt, Human
guaggcaccuuaccaauauaugacauuaagug

SEQ ID NO: 206588 - RNA, 32 nt, Human
guaggcagaagggacguggcagaagcgggaag

SEQ ID NO: 206589 - RNA, 32 nt, Human
guaggcaggagagaagggcgccagcaggcccg

SEQ ID NO: 206590 - RNA, 32 nt, Human
guaggcaguagggaaaugagugaggcugcccu

SEQ ID NO: 206591 - RNA, 32 nt, Human
guaggcaguuucucuucucacaaaagauguac

SEQ ID NO: 206592 - RNA, 32 nt, Human
guaggcauggaaaauuccacgaggcucauucu

SEQ ID NO: 206593 - RNA, 32 nt, Human
guaggcauuuccuaucaccuguuuccauucaa

SEQ ID NO: 206594 - RNA, 32 nt, Human
guaggccaaaccuacuaacaacacugcuggac

SEQ ID NO: 206595 - RNA, 32 nt, Human
guaggccaagcccgugccucagggcagacuuu

SEQ ID NO: 206596 - RNA, 32 nt, Human
guaggccagccuguucucugccauucccuagu

SEQ ID NO: 206597 - RNA, 32 nt, Human
guaggccauggcuaggcagacaguggggacug

SEQ ID NO: 206598 - RNA, 32 nt, Human
guaggcccaagugucaagaaccacaccagauu

SEQ ID NO: 206599 - RNA, 32 nt, Human
guaggcccgggucugcggagagaggccuuguc

SEQ ID NO: 206600 - RNA, 32 nt, Human
guaggcccuccccucccuaaaucugcuuccgc

SEQ ID NO: 206601 - RNA, 32 nt, Human
guaggcccuggacugcagagacccccgccccc

SEQ ID NO: 206602 - RNA, 32 nt, Human
guaggcccuggcaggcagcugggagccauccu

SEQ ID NO: 206603 - RNA, 32 nt, Human
guaggcccuggucgucacucugggcagggaug

SEQ ID NO: 206604 - RNA, 32 nt, Human
guaggcccuuaagauaucugcaaagaagagua

SEQ ID NO: 206605 - RNA, 32 nt, Human
guaggccgaagugggaggauuccuuggauccc

SEQ ID NO: 206606 - RNA, 32 nt, Human
guaggccgugaagaaagaaugugaguaacugu

SEQ ID NO: 206607 - RNA, 32 nt, Human
guaggccuaaucacagcacuuugggaggccaa

SEQ ID NO: 206608 - RNA, 32 nt, Human
guaggccuagccccugccuuugaaaacaagga

SEQ ID NO: 206609 - RNA, 32 nt, Human
guaggccucuggcugccaguccugcccagccu

SEQ ID NO: 206610 - RNA, 32 nt, Human
guaggccugcaagccuguggccccugggagag

SEQ ID NO: 206611 - RNA, 32 nt, Human
guaggccugcagcucgcucuccucugcgccug

SEQ ID NO: 206612 - RNA, 32 nt, Human
guaggccugcugauucagaggguccucuucau

SEQ ID NO: 206613 - RNA, 32 nt, Human
guaggccuggggacugggagggcagaggguga

SEQ ID NO: 206614 - RNA, 32 nt, Human
guaggccuguucaccgccuccuggugacagcg

SEQ ID NO: 206615 - RNA, 32 nt, Human
guaggccuuccuggucucuggccgccugcugc

SEQ ID NO: 206616 - RNA, 32 nt, Human
guaggccuuuguuuuccaauggugcuauauuc

SEQ ID NO: 206617 - RNA, 32 nt, Human
guaggcgaguaaaaggaggaggaagggcuggg

SEQ ID NO: 206618 - RNA, 32 nt, Human
guaggcgcagcgggacuggaccugggugccga

SEQ ID NO: 206619 - RNA, 32 nt, Human
guaggcgcccaggacaaguggguugcaagaca

SEQ ID NO: 206620 - RNA, 32 nt, Human
guaggcgccuguaaucucagcuacuugaaagg

SEQ ID NO: 206621 - RNA, 32 nt, Human
guaggcgcuggagcuccaguucccaggagcag

SEQ ID NO: 206622 - RNA, 32 nt, Human
guaggcggaggcucaaagacuguucgcgcagc

SEQ ID NO: 206623 - RNA, 32 nt, Human
guaggcggcagcgucugucccucccagccucu

SEQ ID NO: 206624 - RNA, 32 nt, Human
guaggcgguggcagaggguggugagggagggc

SEQ ID NO: 206625 - RNA, 32 nt, Human
guaggcucagcagaugauacugcccagccuuu

SEQ ID NO: 206626 - RNA, 32 nt, Human
guaggcucaggagaaaaugaaagagaaagaau

SEQ ID NO: 206627 - RNA, 32 nt, Human
guaggcucggacacuguaggaggcagauccaa

SEQ ID NO: 206628 - RNA, 32 nt, Human
guaggcucugaccuagucaggcuggaagcguc

SEQ ID NO: 206629 - RNA, 32 nt, Human
guaggcucuguaagcucguguuuucuucccuc

SEQ ID NO: 206630 - RNA, 32 nt, Human
guaggcugaggaagaggagggguuggucuugc

SEQ ID NO: 206631 - RNA, 32 nt, Human
guaggcugaggcagaaggauugcuggggccca

SEQ ID NO: 206632 - RNA, 32 nt, Human
guaggcugaggcaggagaaucgcuugaaccca

SEQ ID NO: 206633 - RNA, 32 nt, Human
guaggcugaggcaggagaauggcgggaaccca

SEQ ID NO: 206634 - RNA, 32 nt, Human
guaggcugaggugggagaauugcuugagccag

SEQ ID NO: 206635 - RNA, 32 nt, Human
guaggcugaggugggaggauugcuugagccug

SEQ ID NO: 206636 - RNA, 32 nt, Human
guaggcugggaauucuugcugaaggaauugga

SEQ ID NO: 206637 - RNA, 32 nt, Human
guaggcuggggcggggcccaggagaccacggg

SEQ ID NO: 206638 - RNA, 32 nt, Human
guaggcuuaaugauguuuuaagugcuggcauu

SEQ ID NO: 206639 - RNA, 32 nt, Human
guaggcuucuuuaacccaucagagagacuccc

SEQ ID NO: 206640 - RNA, 32 nt, Human
guaggcuuggcucccucuccagccucuuaagg

SEQ ID NO: 206641 - RNA, 22 nt, Human
guagggaaaaauaaaaauucaa

SEQ ID NO: 206642 - RNA, 32 nt, Human
guagggaaacguggagauaaucaacacucagg

SEQ ID NO: 206643 - RNA, 32 nt, Human
guagggaaagaaaggagggaaaaaccauaaaa

SEQ ID NO: 206644 - RNA, 32 nt, Human
guagggaagggaggggaagcacuuuaaagucu

SEQ ID NO: 206645 - RNA, 32 nt, Human
guagggacaaaaccacaucagguuuucagaag

SEQ ID NO: 206646 - RNA, 32 nt, Human
guagggacacguguccaugcaccacagacaca

SEQ ID NO: 206647 - RNA, 32 nt, Human
guagggaccagacagaacugccuucaagauga

SEQ ID NO: 206648 - RNA, 32 nt, Human
guagggacggggucucguuuuguugccaaagc

SEQ ID NO: 206649 - RNA, 32 nt, Human
guagggacucugcaguuucuuccugucaaaau

SEQ ID NO: 206650 - RNA, 32 nt, Human
guagggagacaaguuccaggagcacuuugggg

SEQ ID NO: 206651 - RNA, 32 nt, Human
guagggagccaguuccagaccuggguuugugc

SEQ ID NO: 206652 - RNA, 32 nt, Human
guagggagcgcuguggagacagcauccucccc

SEQ ID NO: 206653 - RNA, 32 nt, Human
guagggaggaggagguugcagugagcugagau

SEQ ID NO: 206654 - RNA, 32 nt, Human
guagggagggacggggaggggagccaggaccc

SEQ ID NO: 206655 - RNA, 32 nt, Human
guagggagguggagcugccaccagagauggug

SEQ ID NO: 206656 - RNA, 32 nt, Human
guagggaucuuuaaaaguugaagagggagcca

SEQ ID NO: 206657 - RNA, 32 nt, Human
guagggaugccguuugaaaacaggcacucuuc

SEQ ID NO: 206658 - RNA, 32 nt, Human
guagggauggcuggcccaggagggaggaggac

SEQ ID NO: 206659 - RNA, 32 nt, Human
guagggauggcugugggguggcuuccaggagg

SEQ ID NO: 206660 - RNA, 32 nt, Human
guagggauuggguuuugccuuguugcccaggc

SEQ ID NO: 206661 - RNA, 32 nt, Human
guagggcaacagcaaaacgagcucugccgucc

SEQ ID NO: 206662 - RNA, 32 nt, Human
guagggcaccuuggaccucucucuccugcggg

SEQ ID NO: 206663 - RNA, 32 nt, Human
guagggcaccuuggaccucucucuccuguggg

SEQ ID NO: 206664 - RNA, 32 nt, Human
guagggcagcugguagaggaguaccagcuggu

SEQ ID NO: 206665 - RNA, 32 nt, Human
guagggcagggccacuuccugaggucaggucu

SEQ ID NO: 206666 - RNA, 32 nt, Human
guagggcauggugacccacaccuguaauccca

SEQ ID NO: 206667 - RNA, 32 nt, Human
guagggccuccuuccuccccugccugcagcug

SEQ ID NO: 206668 - RNA, 20 nt, Human
guagggccugcucuccaucc

SEQ ID NO: 206669 - RNA, 24 nt, Human
guagggccuguucccaccacccua

SEQ ID NO: 206670 - RNA, 32 nt, Human
guagggcgcacacgcuuccccgcacucgcuua

SEQ ID NO: 206671 - RNA, 32 nt, Human
guagggcugagcugugugugacuauccuuuug

SEQ ID NO: 206672 - RNA, 32 nt, Human
guagggcugggcagcugggagacaggcucaug

SEQ ID NO: 206673 - RNA, 32 nt, Human
guaggggaagcaaggugaccgcaaggggguau

SEQ ID NO: 206674 - RNA, 32 nt, Human
guaggggaaggaggggagggagaagguggcug

SEQ ID NO: 206675 - RNA, 32 nt, Human
guaggggaagggaggguucagaaagaggaaug

SEQ ID NO: 206676 - RNA, 30 nt, Human
guaggggagacguguaugugagucucagug

SEQ ID NO: 206677 - RNA, 32 nt, Human
guaggggagccccagcauggacucaagggaca

SEQ ID NO: 206678 - RNA, 32 nt, Human
guaggggagggaggggcccuggaggccacauc

SEQ ID NO: 206679 - RNA, 32 nt, Human
guaggggauuauguagacuaaaagccuagaag

SEQ ID NO: 206680 - RNA, 32 nt, Human
guaggggcaaaaaucagugguugcuaggggcu

SEQ ID NO: 206681 - RNA, 32 nt, Human
guaggggcaugguauaaggaaauaucauaaug

SEQ ID NO: 206682 - RNA, 32 nt, Human
guaggggccagcugcugccccagaguccugcc

SEQ ID NO: 206683 - RNA, 32 nt, Human
guaggggcggggaaaugagggggaagaaacaa

SEQ ID NO: 206684 - RNA, 32 nt, Human
guaggggcugggaggccggcgcgcagaucugg

SEQ ID NO: 206685 - RNA, 32 nt, Human
guagggggagaaggaggagcuggaggagggca

SEQ ID NO: 206686 - RNA, 32 nt, Human
guagggggccugggaagaauauuaaaauuuua

SEQ ID NO: 206687 - RNA, 32 nt, Human
guagggggucuccccuggcaauucuugaucgg

SEQ ID NO: 206688 - RNA, 32 nt, Human
guaggggguuccaaggauggcucuucuaacca

SEQ ID NO: 206689 - RNA, 32 nt, Human
guaggggucauugggccugguuccaguucugu

SEQ ID NO: 206690 - RNA, 32 nt, Human
guagggguccucaagugccuuugugauuaaag

SEQ ID NO: 206691 - RNA, 32 nt, Human
guaggggugaaauaugauugauuugcauucug

SEQ ID NO: 206692 - RNA, 32 nt, Human
guaggguaaagaaagagagaucagacugucac

SEQ ID NO: 206693 - RNA, 32 nt, Human
guaggguagggaguguggggaaagauuggggc

SEQ ID NO: 206694 - RNA, 32 nt, Human
guaggguagggcgguggguggggaggaggggc

SEQ ID NO: 206695 - RNA, 32 nt, Human
guagggucaaacugucacaguaucugcuccau

SEQ ID NO: 206696 - RNA, 32 nt, Human
guagggucauuucucccugccugcuuugugcc

SEQ ID NO: 206697 - RNA, 32 nt, Human
guaggguccccaggggcaaccugccccacagc

SEQ ID NO: 206698 - RNA, 32 nt, Human
guaggguccuaacagugcuccuuguccauccc

SEQ ID NO: 206699 - RNA, 32 nt, Human
guaggguccuuggguuacagagccggggagaa

SEQ ID NO: 206700 - RNA, 32 nt, Human
guagggugauggcagugcuccgggaacugggc

SEQ ID NO: 206701 - RNA, 32 nt, Human
guagggugggauggggagggaggcugggcauc

SEQ ID NO: 206702 - RNA, 32 nt, Human
guagguaaagaggaaaaggauccuuuuccuaa

SEQ ID NO: 206703 - RNA, 32 nt, Human
guagguaagguaaguuauacuggagaaaacuu

SEQ ID NO: 206704 - RNA, 32 nt, Human
guagguaagguaauucauucuggagaaaacuu

SEQ ID NO: 206705 - RNA, 32 nt, Human
guagguacacaaaugcugguccgagggucuua

SEQ ID NO: 206706 - RNA, 24 nt, Human
guagguagauugcuugagcccagg

SEQ ID NO: 206707 - RNA, 32 nt, Human
guagguagggccacuucugacugugugucccc

SEQ ID NO: 206708 - RNA, 32 nt, Human
guaggucagaggauuucuuuauggcuaucugu

SEQ ID NO: 206709 - RNA, 32 nt, Human
guaggucccacggccucugccuccccagggag

SEQ ID NO: 206710 - RNA, 32 nt, Human
guagguccucgcaggagcucuucuucccacuc

SEQ ID NO: 206711 - RNA, 32 nt, Human
guagguccugucggcccugcugcuguccucca

SEQ ID NO: 206712 - RNA, 32 nt, Human
guaggucgggcuuccugucccuuccucagguu

SEQ ID NO: 206713 - RNA, 18 nt, Human
guaggucuggaccuggac

SEQ ID NO: 206714 - RNA, 18 nt, Human
guaggucugggauggaca

SEQ ID NO: 206715 - RNA, 32 nt, Human
guaggucuguuugguuucuugucuguccacgg

SEQ ID NO: 206716 - RNA, 32 nt, Human
guaggugaaguggcucacgccuguaauccccg

SEQ ID NO: 206717 - RNA, 32 nt, Human
guaggugaggauucauacaaagagugacucag

SEQ ID NO: 206718 - RNA, 32 nt, Human
guaggugcagagcuggagagccaugggugagg

SEQ ID NO: 206719 - RNA, 32 nt, Human
guaggugcagcaaaccaccauggcacacauuu

SEQ ID NO: 206720 - RNA, 32 nt, Human
guaggugcccuuaucccucccaaggcugcacu

SEQ ID NO: 206721 - RNA, 32 nt, Human
guaggugccucuuccaucuuuugccacugauc

SEQ ID NO: 206722 - RNA, 32 nt, Human
guaggugccuggcccaugguuacccuggauuc

SEQ ID NO: 206723 - RNA, 32 nt, Human
guaggugccuguaaucccagcuacuugggaga

SEQ ID NO: 206724 - RNA, 32 nt, Human
guaggugcucacugcccuauuguuugggugua

SEQ ID NO: 206725 - RNA, 19 nt, Human
guaggugcugcuggccccu

SEQ ID NO: 206726 - RNA, 32 nt, Human
guagguggagagguggaaagaaaagacaaaug

SEQ ID NO: 206727 - RNA, 32 nt, Human
guagguggagcaggcuucaagagcagaaccca

SEQ ID NO: 206728 - RNA, 24 nt, Human
guagguggauugcuucaacccagg

SEQ ID NO: 206729 - RNA, 32 nt, Human
guagguggcaguugggccuggugaggguuagg

SEQ ID NO: 206730 - RNA, 32 nt, Human
guaggugggauuacaagcaugcaccaccaugc

SEQ ID NO: 206731 - RNA, 32 nt, Human
guaggugggauuacaggcaugcgccaccacgc

SEQ ID NO: 206732 - RNA, 32 nt, Human
guaggugggauuauaggagcgugccaucaugc

SEQ ID NO: 206733 - RNA, 32 nt, Human
guaggugggcuccccuugcccuucccucccua

SEQ ID NO: 206734 - RNA, 32 nt, Human
guagguggggcggggguagggguggauaauaa

SEQ ID NO: 206735 - RNA, 32 nt, Human
guagguggugagucugagaaaggggccggaaa

SEQ ID NO: 206736 - RNA, 32 nt, Human
guagguggugcacaccuguagucccagcuacu

SEQ ID NO: 206737 - RNA, 32 nt, Human
guagguuaggagaccccugacacuuuguaauu

SEQ ID NO: 206738 - RNA, 30 nt, Human
guagguuguuucuccauguucuuguuggua

SEQ ID NO: 206739 - RNA, 32 nt, Human
guagguuucggucgcuggaagcugcuaaacca

SEQ ID NO: 206740 - RNA, 32 nt, Human
guagguuucucccacacccacagccccaggcu

SEQ ID NO: 206741 - RNA, 32 nt, Human
guagguuuuaauucuccugcuauuuaggugca

SEQ ID NO: 206742 - RNA, 31 nt, Human
guagguuuucaaaaauaccuggcaagaaauc

SEQ ID NO: 206743 - RNA, 32 nt, Human
guagguuuuucuggcauugucugcccagcugc

SEQ ID NO: 206744 - RNA, 32 nt, Human
guaguaaaaauacaaaaauuagcugggcacgg

SEQ ID NO: 206745 - RNA, 32 nt, Human
guaguaaaacaacauaacucagauuucuacag

SEQ ID NO: 206746 - RNA, 32 nt, Human
guaguaacagucagggccuggucugugcucag

SEQ ID NO: 206747 - RNA, 32 nt, Human
guaguaacccagaagauguagccuugaaggga

SEQ ID NO: 206748 - RNA, 32 nt, Human
guaguaagaagagauucaggaugcuagaggug

SEQ ID NO: 206749 - RNA, 32 nt, Human
guaguaagauaggaagugaggccagguaccuu

SEQ ID NO: 206750 - RNA, 32 nt, Human
guaguaagauccccaccacuccccugccaggg

SEQ ID NO: 206751 - RNA, 32 nt, Human
guaguaagcugccugccucccuucccucagac

SEQ ID NO: 206752 - RNA, 32 nt, Human
guaguaaggaggacagaaaacagaacagaaaa

SEQ ID NO: 206753 - RNA, 32 nt, Human
guaguaauauccacugucccaccagggccuga

SEQ ID NO: 206754 - RNA, 32 nt, Human
guaguaaucccagcuacucaggagguugagac

SEQ ID NO: 206755 - RNA, 32 nt, Human
guaguaaucucacacuucauccuauagaguca

SEQ ID NO: 206756 - RNA, 32 nt, Human
guaguaaugcaaucauagcucacugcagccug

SEQ ID NO: 206757 - RNA, 32 nt, Human
guaguaauuucuauuugcacugugccuuucaa

SEQ ID NO: 206758 - RNA, 32 nt, Human
guaguacaaaggcagagugagggggcuugugg

SEQ ID NO: 206759 - RNA, 32 nt, Human
guaguacagccaccuggcaugccuuguaauag

SEQ ID NO: 206760 - RNA, 32 nt, Human
guaguaccagcaaucagggaacuccuaucugu

SEQ ID NO: 206761 - RNA, 32 nt, Human
guaguacccagccugcuccccgaguccagcga

SEQ ID NO: 206762 - RNA, 32 nt, Human
guaguacuaccugucaaucaucuugcuuuccu

SEQ ID NO: 206763 - RNA, 32 nt, Human
guaguacucccgcuuugcaucuuacaguucag

SEQ ID NO: 206764 - RNA, 32 nt, Human
guaguacuucaaagaagauagcuguauaaaug

SEQ ID NO: 206765 - RNA, 18 nt, Human
guaguacuugggccggug

SEQ ID NO: 206766 - RNA, 32 nt, Human
guaguagaaaaccacaggaagaauggucauau

SEQ ID NO: 206767 - RNA, 32 nt, Human
guaguagaagacacggaaggcacagaaggcag

SEQ ID NO: 206768 - RNA, 32 nt, Human
guaguagaaucagccauugcucugcuccuggc

SEQ ID NO: 206769 - RNA, 32 nt, Human
guaguagauuguuggggguggggagggaggga

SEQ ID NO: 206770 - RNA, 32 nt, Human
guaguagccagucugcugugaccacaggcuca

SEQ ID NO: 206771 - RNA, 32 nt, Human
guaguagccugccucuuaacugguugcuucuc

SEQ ID NO: 206772 - RNA, 32 nt, Human
guaguagcgguggucagacguggaaauggugg

SEQ ID NO: 206773 - RNA, 32 nt, Human
guaguaggaaggugaauaugcauuuuaaugac

SEQ ID NO: 206774 - RNA, 32 nt, Human
guaguagggaggcaucaaaauauuucugauaa

SEQ ID NO: 206775 - RNA, 32 nt, Human
guaguagguuggcuuuaauuuaauauacuuga

SEQ ID NO: 206776 - RNA, 32 nt, Human
guaguaguuuuucuguaacacagaauauagga

SEQ ID NO: 206777 - RNA, 32 nt, Human
guaguauaaucaauuagaaguaaugaauggau

SEQ ID NO: 206778 - RNA, 21 nt, Human
guaguauguuauuccugguua

SEQ ID NO: 206779 - RNA, 32 nt, Human
guaguauucacuacuccagaccuuuuucaagu

SEQ ID NO: 206780 - RNA, 32 nt, Human
guagucacccugcuuguuucugcagcaaugac

SEQ ID NO: 206781 - RNA, 32 nt, Human
guagucaccuaugucugugccucccuucuuua

SEQ ID NO: 206782 - RNA, 32 nt, Human
guagucacuguuuuugacaaccaaugaaauag

SEQ ID NO: 206783 - RNA, 21 nt, Human
guagucagaccugccuuccau

SEQ ID NO: 206784 - RNA, 32 nt, Human
guagucagacuggauaguccgucucugcuuau

SEQ ID NO: 206785 - RNA, 32 nt, Human
guagucagagugagcuacauccugccccgccu

SEQ ID NO: 206786 - RNA, 32 nt, Human
guagucagaugguuacucucuuaacauuaggu

SEQ ID NO: 206787 - RNA, 32 nt, Human
guagucauagaauacagaaauaguuuagggac

SEQ ID NO: 206788 - RNA, 32 nt, Human
guagucaucaacaacaaaagaauaucugaaga

SEQ ID NO: 206789 - RNA, 32 nt, Human
guagucaugagaaaauccauacaauucacauu

SEQ ID NO: 206790 - RNA, 32 nt, Human
guagucauuucgguucugaucuugucaaaccc

SEQ ID NO: 206791 - RNA, 32 nt, Human
guaguccagccuuccaggugggcgugagaggc

SEQ ID NO: 206792 - RNA, 32 nt, Human
guaguccaucaccauuucuuggcauuggaauu

SEQ ID NO: 206793 - RNA, 32 nt, Human
guagucccagcacucgggaaggccgagguggg

SEQ ID NO: 206794 - RNA, 32 nt, Human
guagucccagcacuuugggagacugaggcagg

SEQ ID NO: 206795 - RNA, 32 nt, Human
guagucccagcacuuugggaggcugaggcagg

SEQ ID NO: 206796 - RNA, 32 nt, Human
guagucccagcacuuugggaggcugagguggg

SEQ ID NO: 206797 - RNA, 32 nt, Human
guagucccagcuacucaggaggcugggcagga

SEQ ID NO: 206798 - RNA, 32 nt, Human
guagucccagcuacucggaggcugaggcagua

SEQ ID NO: 206799 - RNA, 32 nt, Human
guagucccagcuacuuggaggcugaggcguga

SEQ ID NO: 206800 - RNA, 19 nt, Human
guagucccagcuacuuggg

SEQ ID NO: 206801 - RNA, 32 nt, Human
guagucccagcugcuugggaggcugaggcagg

SEQ ID NO: 206802 - RNA, 32 nt, Human
guagucccaggccaacacugggaccggaccgg

SEQ ID NO: 206803 - RNA, 32 nt, Human
guagucccaggcccacuggaaaaaugaaucua

SEQ ID NO: 206804 - RNA, 32 nt, Human
guagucccaguacucaggaggcugaggcagga

SEQ ID NO: 206805 - RNA, 32 nt, Human
guagucccaucuccacuauuuagaaauguucu

SEQ ID NO: 206806 - RNA, 32 nt, Human
guagucccccaucccuuccucccuuacccagc

SEQ ID NO: 206807 - RNA, 32 nt, Human
guagucccugcucuuggcuucaccaaaucucc

SEQ ID NO: 206808 - RNA, 32 nt, Human
guaguccuaagucuguuuuccugcugcauuuc

SEQ ID NO: 206809 - RNA, 32 nt, Human
guaguccuagccacucaggaggcugaggcagg

SEQ ID NO: 206810 - RNA, 32 nt, Human
guaguccuagcuaucaagaggcugagacagga

SEQ ID NO: 206811 - RNA, 32 nt, Human
guaguccuccugccucagcuuccugguugcga

SEQ ID NO: 206812 - RNA, 32 nt, Human
guaguccucgccccucuucucucccucccccu

SEQ ID NO: 206813 - RNA, 32 nt, Human
guaguccuguccccucaggcucccagaguuuu

SEQ ID NO: 206814 - RNA, 32 nt, Human
guaguccuucuaaaggaggacauggcagucaa

SEQ ID NO: 206815 - RNA, 32 nt, Human
guaguccuuuugcucaggaagucuuuggggaa

SEQ ID NO: 206816 - RNA, 32 nt, Human
guagucggcucaacacccuccaccuuccccuc

SEQ ID NO: 206817 - RNA, 32 nt, Human
guagucuagucugcaagggcuguccagggccu

SEQ ID NO: 206818 - RNA, 24 nt, Human
guagucucaaccuccugggcucaa

SEQ ID NO: 206819 - RNA, 32 nt, Human
guagucucacccugucgcccaggcuggagugc

SEQ ID NO: 206820 - RNA, 32 nt, Human
guagucucagcuauugggaggcugaggcaaga

SEQ ID NO: 206821 - RNA, 24 nt, Human
guagucucgaccucccaggcucaa

SEQ ID NO: 206822 - RNA, 32 nt, Human
guagucucuacucuuccccugccugcaucaac

SEQ ID NO: 206823 - RNA, 32 nt, Human
guagucucugagguuccuuuucacacacaaaa

SEQ ID NO: 206824 - RNA, 29 nt, Human
guagucuggcugcugaaucccuuucucag

SEQ ID NO: 206825 - RNA, 32 nt, Human
guagucugggcaccccacagugcacuuaagug

SEQ ID NO: 206826 - RNA, 32 nt, Human
guagucuguggaaaccaggaagauaaaacaac

SEQ ID NO: 206827 - RNA, 32 nt, Human
guagucuuuuugaauuggcuucuuucacuuag

SEQ ID NO: 206828 - RNA, 32 nt, Human
guagugaaaauugcacuuucugggcaagacuc

SEQ ID NO: 206829 - RNA, 32 nt, Human
guagugaaggaaaauggcuuggaaaagccaau

SEQ ID NO: 206830 - RNA, 32 nt, Human
guagugaauuacugugugaaguucucaccgac

SEQ ID NO: 206831 - RNA, 32 nt, Human
guagugaccggcccggcgugggcacacagaca

SEQ ID NO: 206832 - RNA, 32 nt, Human
guagugacuaagucucacaagagcugaugauu

SEQ ID NO: 206833 - RNA, 32 nt, Human
guagugagacuccaucucugucuuuuugaaaa

SEQ ID NO: 206834 - RNA, 32 nt, Human
guagugagccgaaaucacaccauugcacucca

SEQ ID NO: 206835 - RNA, 32 nt, Human
guagugagcuggaaagccuacaggaaaagagg

SEQ ID NO: 206836 - RNA, 32 nt, Human
guagugaucuuaggguuuugauuuaaaagaaa

SEQ ID NO: 206837 - RNA, 32 nt, Human
guagugaugaguagucugggcccugggugagg

SEQ ID NO: 206838 - RNA, 32 nt, Human
guagugauuguacaacuuaaagcuccuuucuc

SEQ ID NO: 206839 - RNA, 32 nt, Human
guagugcaaccaucugauaaacuagugugauu

SEQ ID NO: 206840 - RNA, 22 nt, Human
guagugcacaccuguaauccca

SEQ ID NO: 206841 - RNA, 22 nt, Human
guagugcacgccuguaauccca

SEQ ID NO: 206842 - RNA, 32 nt, Human
guagugcaugaaugaaugagucaugggcagug

SEQ ID NO: 206843 - RNA, 32 nt, Human
guagugccagcugcuugggaggcugaggugag

SEQ ID NO: 206844 - RNA, 32 nt, Human
guagugccauuuuggccggacaugguuggggu

SEQ ID NO: 206845 - RNA, 32 nt, Human
guagugcccagcuggcaggccugagguguaca

SEQ ID NO: 206846 - RNA, 32 nt, Human
guagugccugccuuugaaacaggguguagggg

SEQ ID NO: 206847 - RNA, 32 nt, Human
guagugccuggccccagccccaggcagccaca

SEQ ID NO: 206848 - RNA, 32 nt, Human
guagugccuugcgggcucacacauguacuagu

SEQ ID NO: 206849 - RNA, 32 nt, Human
guagugcgagccugagauggucuggaggauuc

SEQ ID NO: 206850 - RNA, 32 nt, Human
guagugcugccccugugacaggcaucagcucc

SEQ ID NO: 206851 - RNA, 32 nt, Human
guagugcuuaaaggaauagacuuaucuccuua

SEQ ID NO: 206852 - RNA, 32 nt, Human
guaguggacaacagguuuucaccauagccuac

SEQ ID NO: 206853 - RNA, 32 nt, Human
guaguggagaugccugaacacaauucuauauu

SEQ ID NO: 206854 - RNA, 32 nt, Human
guaguggcaggcaccuguaaucccagcuacuc

SEQ ID NO: 206855 - RNA, 32 nt, Human
guaguggcaugaucucagcucacugcaacuuc

SEQ ID NO: 206856 - RNA, 32 nt, Human
guaguggccacagccuuacaggcaggcagggg

SEQ ID NO: 206857 - RNA, 32 nt, Human
guaguggccacuuccaguucauccguuuaucc

SEQ ID NO: 206858 - RNA, 32 nt, Human
guaguggccugucaaccacuuucggagaauga

SEQ ID NO: 206859 - RNA, 32 nt, Human
guaguggcgggcgccuguagucucagccacuc

SEQ ID NO: 206860 - RNA, 22 nt, Human
guaguggcucacaccuauaauc

SEQ ID NO: 206861 - RNA, 22 nt, Human
guaguggcucacaccuguaauc

SEQ ID NO: 206862 - RNA, 22 nt, Human
guaguggcucacaccuguaauu

SEQ ID NO: 206863 - RNA, 32 nt, Human
guaguggcucacaccuguaauuccagcacuuu

SEQ ID NO: 206864 - RNA, 22 nt, Human
guaguggcucacgccaguaauc

SEQ ID NO: 206865 - RNA, 22 nt, Human
guaguggcucacgccuguaauc

SEQ ID NO: 206866 - RNA, 22 nt, Human
guaguggcucaugccuauaauu

SEQ ID NO: 206867 - RNA, 22 nt, Human
guaguggcucaugccuguaauc

SEQ ID NO: 206868 - RNA, 32 nt, Human
guaguggcugcugccacugacucucagagcca

SEQ ID NO: 206869 - RNA, 32 nt, Human
guaguggcuuacaccuguagucccaggcacuu

SEQ ID NO: 206870 - RNA, 22 nt, Human
guaguggcuuaugccuguaauc

SEQ ID NO: 206871 - RNA, 32 nt, Human
guagugggagagaggaaaggagggaaggcaag

SEQ ID NO: 206872 - RNA, 32 nt, Human
guagugggcuaugcaggagcuucugggagauu

SEQ ID NO: 206873 - RNA, 32 nt, Human
guagugggggaaagguggcuggaccucuguug

SEQ ID NO: 206874 - RNA, 32 nt, Human
guagugggggaggcggcggcagcguuaaguga

SEQ ID NO: 206875 - RNA, 32 nt, Human
guaguggucagcacuuccuguacgucaacuca

SEQ ID NO: 206876 - RNA, 23 nt, Human
guaguggugaacuguguaaaaua

SEQ ID NO: 206877 - RNA, 32 nt, Human
guaguggugcgaucucagcucacugcaaccuc

SEQ ID NO: 206878 - RNA, 32 nt, Human
guagugguucuaauuuuggugcaacaauuggu

SEQ ID NO: 206879 - RNA, 31 nt, Human
guagugucacucaaggcggugcuugauagaa

SEQ ID NO: 206880 - RNA, 32 nt, Human
guaguguccugggauucucugcccccucugag

SEQ ID NO: 206881 - RNA, 32 nt, Human
guagugucuguaacuaccgucagaucuacuuc

SEQ ID NO: 206882 - RNA, 32 nt, Human
guagugugaaguucacaguugacaaacaacaa

SEQ ID NO: 206883 - RNA, 32 nt, Human
guagugugagccaagcgcagccugccaggcca

SEQ ID NO: 206884 - RNA, 32 nt, Human
guagugugcaagacucugggacggcaugagaa

SEQ ID NO: 206885 - RNA, 32 nt, Human
guagugugcaguucuaguuugcauuccugaua

SEQ ID NO: 206886 - RNA, 32 nt, Human
guaguguggcuguggagggcucugccuauggg

SEQ ID NO: 206887 - RNA, 32 nt, Human
guaguguguucagacugugcacacagaaaaca

SEQ ID NO: 206888 - RNA, 32 nt, Human
guaguguuggguggaggauggacgagugagcu

SEQ ID NO: 206889 - RNA, 32 nt, Human
guaguguuuguccagguaccuuaacuguagcu

SEQ ID NO: 206890 - RNA, 32 nt, Human
guaguuaaaaaugauuaugcuguggagagcua

SEQ ID NO: 206891 - RNA, 32 nt, Human
guaguuaauccuugcauauucuccuuucaucc

SEQ ID NO: 206892 - RNA, 32 nt, Human
guaguuaauuggauaaacuggcagcaucccug

SEQ ID NO: 206893 - RNA, 32 nt, Human
guaguuaccuauaaauaaaaacaaauaugagu

SEQ ID NO: 206894 - RNA, 32 nt, Human
guaguuaccuauaaauaaaaacaaauaugcgu

SEQ ID NO: 206895 - RNA, 32 nt, Human
guaguuaugcugucucucugucaucuacuuga

SEQ ID NO: 206896 - RNA, 32 nt, Human
guaguuauguaggccgggcaugguggcacaug

SEQ ID NO: 206897 - RNA, 32 nt, Human
guaguuauuauuuuuggaggggagaaacccag

SEQ ID NO: 206898 - RNA, 32 nt, Human
guaguuauuuugcaccagcagugccuuucuca

SEQ ID NO: 206899 - RNA, 32 nt, Human
guaguuauuuuucauuaccacauucaaucaug

SEQ ID NO: 206900 - RNA, 22 nt, Human
guaguucacaccuguaguccca

SEQ ID NO: 206901 - RNA, 32 nt, Human
guaguucagaaggaacugggagaacauguuca

SEQ ID NO: 206902 - RNA, 32 nt, Human
guaguucagcuacucagggggcugagguggga

SEQ ID NO: 206903 - RNA, 32 nt, Human
guaguucaugcgggagauggcaggggccuggc

SEQ ID NO: 206904 - RNA, 32 nt, Human
guaguucaugcgggagauggcaggggcuggca

SEQ ID NO: 206905 - RNA, 32 nt, Human
guaguuccagcugcuugggaggcugaggcacg

SEQ ID NO: 206906 - RNA, 32 nt, Human
guaguuccaguuccccuuuccccaccacggag

SEQ ID NO: 206907 - RNA, 31 nt, Human
guaguucgcaguuucugacagugaaggcucg

SEQ ID NO: 206908 - RNA, 32 nt, Human
guaguucuauaauuccaucucaguuccuuuac

SEQ ID NO: 206909 - RNA, 32 nt, Human
guaguucugcauuuaucgagaucugggguucu

SEQ ID NO: 206910 - RNA, 32 nt, Human
guaguucugccugaccuaugaggccucaauga

SEQ ID NO: 206911 - RNA, 32 nt, Human
guaguugaaaguugaauucaagucuuuccuuc

SEQ ID NO: 206912 - RNA, 32 nt, Human
guaguugacuuugcuguauggaaaaauaaagu

SEQ ID NO: 206913 - RNA, 32 nt, Human
guaguugcaucuguacuaaacaugaacagaca

SEQ ID NO: 206914 - RNA, 32 nt, Human
guaguugcugggacagcgaaauggaggggugu

SEQ ID NO: 206915 - RNA, 32 nt, Human
guaguugcugugguuuccguucugagcucgca

SEQ ID NO: 206916 - RNA, 32 nt, Human
guaguugggaggugagaggcaggaauggauac

SEQ ID NO: 206917 - RNA, 32 nt, Human
guaguugggauuacaggugacugccaccgugc

SEQ ID NO: 206918 - RNA, 32 nt, Human
guaguuguagucuuaaggccugugcauuucac

SEQ ID NO: 206919 - RNA, 32 nt, Human
guaguuguucacaguaguugagaaguugaaga

SEQ ID NO: 206920 - RNA, 32 nt, Human
guaguuuagugugguuuucuguuucuaauuug

SEQ ID NO: 206921 - RNA, 32 nt, Human
guaguuuaucauuaguuuguaucuguaaguua

SEQ ID NO: 206922 - RNA, 32 nt, Human
guaguuuccaagagagacgcugagggauguuu

SEQ ID NO: 206923 - RNA, 32 nt, Human
guaguuucuaaccccuguucuauaguaguuac

SEQ ID NO: 206924 - RNA, 32 nt, Human
guaguuugaguaugccuuaccuuuguaaauau

SEQ ID NO: 206925 - RNA, 32 nt, Human
guaguuugcugucaccaacauggcugggccug

SEQ ID NO: 206926 - RNA, 32 nt, Human
guaguuuggaaaugagaauuuuguuaacuaaa

SEQ ID NO: 206927 - RNA, 31 nt, Human
guaguuugggcaaguacagccaacacccuga

SEQ ID NO: 206928 - RNA, 32 nt, Human
guaguuuguuaccuugguggccaucugcagcc

SEQ ID NO: 206929 - RNA, 32 nt, Human
guaguuuuacagccauuucuguucacacuuuu

SEQ ID NO: 206930 - RNA, 32 nt, Human
guauaaaacacuucgaacauuucaccauggag

SEQ ID NO: 206931 - RNA, 32 nt, Human
guauaaaagcuacuuugcuccuggugagagcu

SEQ ID NO: 206932 - RNA, 32 nt, Human
guauaaaauuggaaagucucuaagacacaggc

SEQ ID NO: 206933 - RNA, 32 nt, Human
guauaaacacuaacauuuuccccuucuguagu

SEQ ID NO: 206934 - RNA, 32 nt, Human
guauaaaccuugagaucaaagacugucagcuu

SEQ ID NO: 206935 - RNA, 32 nt, Human
guauaaacugaaaaagacaaaauaaguaaagc

SEQ ID NO: 206936 - RNA, 32 nt, Human
guauaaagaaaauucuugucaaauuucacuca

SEQ ID NO: 206937 - RNA, 32 nt, Human
guauaaagagagagacauaucacgcugcuguc

SEQ ID NO: 206938 - RNA, 32 nt, Human
guauaaagaguuggacucucuccccugguguc

SEQ ID NO: 206939 - RNA, 32 nt, Human
guauaaaggaucuggagguuggggauaugacu

SEQ ID NO: 206940 - RNA, 32 nt, Human
guauaaaggggugggagccccgaggugagcgg

SEQ ID NO: 206941 - RNA, 32 nt, Human
guauaaaguaggagaacuaagagacuuaagag

SEQ ID NO: 206942 - RNA, 32 nt, Human
guauaaauaggagaggaugagagcccagaggu

SEQ ID NO: 206943 - RNA, 32 nt, Human
guauaaaugcagcugucaugcaguucuuuucu

SEQ ID NO: 206944 - RNA, 32 nt, Human
guauaaaugccaccuccuccaugaagccuucc

SEQ ID NO: 206945 - RNA, 32 nt, Human
guauaaaugucagaagacagauuuccuaaaca

SEQ ID NO: 206946 - RNA, 32 nt, Human
guauaaauuuuuaugggacaaagccuagaaaa

SEQ ID NO: 206947 - RNA, 32 nt, Human
guauaacaugcauauguauauguauaugugga

SEQ ID NO: 206948 - RNA, 32 nt, Human
guauaacccuuuccacuuucaucgucuuauau

SEQ ID NO: 206949 - RNA, 32 nt, Human
guauaaccucaccuucccuggcucaucuuggc

SEQ ID NO: 206950 - RNA, 32 nt, Human
guauaacuauagggauaccgaaacaggaaaaa

SEQ ID NO: 206951 - RNA, 32 nt, Human
guauaacuuaaccuugauuuauaaggucuuaa

SEQ ID NO: 206952 - RNA, 32 nt, Human
guauaagaacuaagcuaucaguauagauauag

SEQ ID NO: 206953 - RNA, 32 nt, Human
guauaagaauacuuuucucuccacaacgagug

SEQ ID NO: 206954 - RNA, 32 nt, Human
guauaagccccgaggccuagaguggcagccaa

SEQ ID NO: 206955 - RNA, 32 nt, Human
guauaagccuccauaugucucaucugugcucu

SEQ ID NO: 206956 - RNA, 32 nt, Human
guauaagggaggcuuuguccucaguaucucuu

SEQ ID NO: 206957 - RNA, 31 nt, Human
guauaaggugauguacuacaugcagaucaua

SEQ ID NO: 206958 - RNA, 32 nt, Human
guauaagugaauauauacacacacauacagac

SEQ ID NO: 206959 - RNA, 32 nt, Human
guauaagugaaugggagaguucccuggucccc

SEQ ID NO: 206960 - RNA, 32 nt, Human
guauaauaagcagcagcaacuucaugugaaaa

SEQ ID NO: 206961 - RNA, 32 nt, Human
guauaauacagcaacaacuaucuggcccaaac

SEQ ID NO: 206962 - RNA, 32 nt, Human
guauaauacgguauuauaccugcaugugcucu

SEQ ID NO: 206963 - RNA, 22 nt, Human
guauaaucccagcuacuugaga

SEQ ID NO: 206964 - RNA, 32 nt, Human
guauaaugcaacaacauuggaacacaauaaag

SEQ ID NO: 206965 - RNA, 32 nt, Human
guauaaugugccagguaacucaccugccccuu

SEQ ID NO: 206966 - RNA, 32 nt, Human
guauaauucccaaguguacugucuaccagaaa

SEQ ID NO: 206967 - RNA, 32 nt, Human
guauaauuccucacccccaauccuuaucaauu

SEQ ID NO: 206968 - RNA, 32 nt, Human
guauaauucucaaauaaauauuuuggugaagc

SEQ ID NO: 206969 - RNA, 23 nt, Human
guauaauuguauccagaaaugua

SEQ ID NO: 206970 - RNA, 32 nt, Human
guauacacagaauauuccugugcccacacuua

SEQ ID NO: 206971 - RNA, 32 nt, Human
guauacacauauacacaucucuguccaaaauu

SEQ ID NO: 206972 - RNA, 32 nt, Human
guauacacaugcugccuucuuggggauucaaa

SEQ ID NO: 206973 - RNA, 32 nt, Human
guauacacuugauuugcuuucaaaauaaauaa

SEQ ID NO: 206974 - RNA, 18 nt, Human
guauacacuuuguaguca

SEQ ID NO: 206975 - RNA, 32 nt, Human
guauacagacuggcugggccccacccccugcg

SEQ ID NO: 206976 - RNA, 32 nt, Human
guauacagcacugggaaaugggagcacaguac

SEQ ID NO: 206977 - RNA, 32 nt, Human
guauacagcacugggaaaugggagcacggcac

SEQ ID NO: 206978 - RNA, 32 nt, Human
guauacagcaguaaucuccuauuuugguguca

SEQ ID NO: 206979 - RNA, 32 nt, Human
guauacagccuggagugaauguuaauaaacag

SEQ ID NO: 206980 - RNA, 32 nt, Human
guauacaugauccagucugugacuaccagcca

SEQ ID NO: 206981 - RNA, 32 nt, Human
guauacauucuagugagaaaucuaccuaccua

SEQ ID NO: 206982 - RNA, 32 nt, Human
guauaccaccugaccagccuuugugcauuuau

SEQ ID NO: 206983 - RNA, 32 nt, Human
guauaccaugugccaagcaauuuucauauacu

SEQ ID NO: 206984 - RNA, 32 nt, Human
guauacccugcucugccacccaugaaccagcc

SEQ ID NO: 206985 - RNA, 32 nt, Human
guauaccugagucucuguaugugugcauguau

SEQ ID NO: 206986 - RNA, 32 nt, Human
guauacuaauguucacagcagcgugaacucca

SEQ ID NO: 206987 - RNA, 32 nt, Human
guauacuaauucugaagugaccgucagugcuu

SEQ ID NO: 206988 - RNA, 32 nt, Human
guauacuaguaauuuuugaauaggguaaacuu

SEQ ID NO: 206989 - RNA, 32 nt, Human
guauacucagcuaacaaaccugcccauguguu

SEQ ID NO: 206990 - RNA, 32 nt, Human
guauacucaguuaaaaucggggcuggaggugc

SEQ ID NO: 206991 - RNA, 32 nt, Human
guauacucugaaacacagcccaaccaaaccau

SEQ ID NO: 206992 - RNA, 32 nt, Human
guauacucuguggaguagcaguccacaucaaa

SEQ ID NO: 206993 - RNA, 32 nt, Human
guauacugagggcaauggagcuacagagcauu

SEQ ID NO: 206994 - RNA, 32 nt, Human
guauacugaguauuuacaacuuauacauguaa

SEQ ID NO: 206995 - RNA, 32 nt, Human
guauacuguucuucagcuugucuucucugugu

SEQ ID NO: 206996 - RNA, 32 nt, Human
guauacuuugcuuagguugacuuagcauaucu

SEQ ID NO: 206997 - RNA, 32 nt, Human
guauagaaaguauggaaaagaaaacagacagu

SEQ ID NO: 206998 - RNA, 32 nt, Human
guauagaaaugagagaagacugugacaacuca

SEQ ID NO: 206999 - RNA, 32 nt, Human
guauagaagggagaacaggcaucagauuguuu

SEQ ID NO: 207000 - RNA, 32 nt, Human
guauagaauggcccuggccugggacagcuaag

SEQ ID NO: 207001 - RNA, 32 nt, Human
guauagaauguucuuggaagcuccauugauuu

SEQ ID NO: 207002 - RNA, 32 nt, Human
guauagacaagcuuuguagugaaguauaguag

SEQ ID NO: 207003 - RNA, 32 nt, Human
guauagaccaugcacaguacacauacgugcau

SEQ ID NO: 207004 - RNA, 32 nt, Human
guauagagaccuaggagguggucuuguggugg

SEQ ID NO: 207005 - RNA, 32 nt, Human
guauagagagugagagucagguggcagcugua

SEQ ID NO: 207006 - RNA, 32 nt, Human
guauagagaugaacagaaaacuuuuucuuuau

SEQ ID NO: 207007 - RNA, 32 nt, Human
guauagaggaagaggaagcugggcauuaaauu

SEQ ID NO: 207008 - RNA, 32 nt, Human
guauagagucucaaacacugaucacaaauaaa

SEQ ID NO: 207009 - RNA, 32 nt, Human
guauagaguuugaaaauuugacaagcacacug

SEQ ID NO: 207010 - RNA, 32 nt, Human
guauagauugcauuucuuagguguuuuaauuu

SEQ ID NO: 207011 - RNA, 32 nt, Human
guauagccagagaaggagaagcucccauccaa

SEQ ID NO: 207012 - RNA, 32 nt, Human
guauagcuccuuuugaccuucauuucauguau

SEQ ID NO: 207013 - RNA, 32 nt, Human
guauaggacaccaggaaaacaacucagggcag

SEQ ID NO: 207014 - RNA, 32 nt, Human
guauaggacagaaacugcaaauauaaaaaucc

SEQ ID NO: 207015 - RNA, 32 nt, Human
guauaggauccugggcugcagcagaaagcuuu

SEQ ID NO: 207016 - RNA, 32 nt, Human
guauaggcacuggguccagccuugaucaguga

SEQ ID NO: 207017 - RNA, 31 nt, Human
guauaggggaaaugaaggaaagacuguggcc

SEQ ID NO: 207018 - RNA, 32 nt, Human
  misc_feature (22)..(22): n is a, c, g, or u
guauaggggaagaagagguugnaaaggggaag

SEQ ID NO: 207019 - RNA, 32 nt, Human
guauaggggcuucauuuguucacucugaaaaa

SEQ ID NO: 207020 - RNA, 32 nt, Human
guauagguaugugccaccacacucagcuuuau

SEQ ID NO: 207021 - RNA, 32 nt, Human
guauaggugcagcccugucacaacaccaacag

SEQ ID NO: 207022 - RNA, 32 nt, Human
guauaggugggaguggaggagggaacuuacuu

SEQ ID NO: 207023 - RNA, 32 nt, Human
guauaguaaucauugacuaaagccauuugucu

SEQ ID NO: 207024 - RNA, 32 nt, Human
guauaguacccacuuucugcucuuuggagaga

SEQ ID NO: 207025 - RNA, 32 nt, Human
guauaguaggaaauguaagugggguggcuuau

SEQ ID NO: 207026 - RNA, 32 nt, Human
guauaguauuccauugcaugacuguccugugc

SEQ ID NO: 207027 - RNA, 32 nt, Human
guauagugaaaauaugauguaaaagagaaaac

SEQ ID NO: 207028 - RNA, 32 nt, Human
guauagugagagcaccucacuggcagaaaaac

SEQ ID NO: 207029 - RNA, 32 nt, Human
guauaguggaaagagcuuuugacugaguucuu

SEQ ID NO: 207030 - RNA, 24 nt, Human
guauaguggcaggaaccuguaauc

SEQ ID NO: 207031 - RNA, 32 nt, Human
guauaguggccaucuuugguuacuugauauug

SEQ ID NO: 207032 - RNA, 24 nt, Human
guauagugguaugugccuguaguc

SEQ ID NO: 207033 - RNA, 32 nt, Human
guauaguguacacugcuugggugacaggugca

SEQ ID NO: 207034 - RNA, 32 nt, Human
guauagugugccaggcacuucugcuguauuaa

SEQ ID NO: 207035 - RNA, 32 nt, Human
guauaguuaaguuaugccugugcaaagaagag

SEQ ID NO: 207036 - RNA, 32 nt, Human
guauaguucucuuccugcuuuaagcauuaccu

SEQ ID NO: 207037 - RNA, 32 nt, Human
guauaguuuucaaacaucugugguguaaugau

SEQ ID NO: 207038 - RNA, 32 nt, Human
guauauaaaauauaggcauauaccucauauau

SEQ ID NO: 207039 - RNA, 32 nt, Human
guauauaaaccaggauuagucccagggucgug

SEQ ID NO: 207040 - RNA, 32 nt, Human
guauauacacacgaagguugcuagggaaccac

SEQ ID NO: 207041 - RNA, 32 nt, Human
guauauacagcuuuuccuucuuuuguuuagga

SEQ ID NO: 207042 - RNA, 32 nt, Human
guauauacugugaaaacuuugagaagauaaua

SEQ ID NO: 207043 - RNA, 32 nt, Human
guauaucaacuggcccucaaugaagcauuuaa

SEQ ID NO: 207044 - RNA, 32 nt, Human
guauaucacugaggcugauagcaaagaggcau

SEQ ID NO: 207045 - RNA, 32 nt, Human
guauaucacugauuuuguagagcugcugggag

SEQ ID NO: 207046 - RNA, 32 nt, Human
guauaucauuugcagugcuuguauugguuuaa

SEQ ID NO: 207047 - RNA, 32 nt, Human
guauaucccaggcuggagcuggaugccuggga

SEQ ID NO: 207048 - RNA, 32 nt, Human
guauauccuauacacacaucuccuucaucauc

SEQ ID NO: 207049 - RNA, 32 nt, Human
guauauccuucccaucuauugccuuccagcuu

SEQ ID NO: 207050 - RNA, 32 nt, Human
guauaucugaaacaccuuuucaugucaauaaa

SEQ ID NO: 207051 - RNA, 32 nt, Human
guauaucuuuuaaugucagauaugauacacug

SEQ ID NO: 207052 - RNA, 32 nt, Human
guauaugaaaauuaaaguucugugauaaugac

SEQ ID NO: 207053 - RNA, 32 nt, Human
guauaugagccuuugaaaguucccugaaguuu

SEQ ID NO: 207054 - RNA, 32 nt, Human
guauaugcacacacauaaacggcuuugccuag

SEQ ID NO: 207055 - RNA, 32 nt, Human
guauaugcagguaguugucaccauggauugag

SEQ ID NO: 207056 - RNA, 32 nt, Human
guauaugcugggaacagggugcaggggccaag

SEQ ID NO: 207057 - RNA, 31 nt, Human
guauauggcgcgaucucagcucacugcaacc

SEQ ID NO: 207058 - RNA, 32 nt, Human
guauaugggaccuuaagcuaaccuucuuuacu

SEQ ID NO: 207059 - RNA, 32 nt, Human
guauaugggguaggccgggugcaguggcucac

SEQ ID NO: 207060 - RNA, 32 nt, Human
guauauggugugcguguguauguauguguaug

SEQ ID NO: 207061 - RNA, 32 nt, Human
guauauguaccacauuucuccagacauuuacu

SEQ ID NO: 207062 - RNA, 31 nt, Human
guauauguacuuuucuuaaaaugccaagaac

SEQ ID NO: 207063 - RNA, 32 nt, Human
guauaugugccacauuucuuaauccagucuau

SEQ ID NO: 207064 - RNA, 32 nt, Human
guauaugugcgucucucuuucucccucacccc

SEQ ID NO: 207065 - RNA, 32 nt, Human
guauauguggggacagggaguaugugagaaau

SEQ ID NO: 207066 - RNA, 32 nt, Human
guauauuaauugccuuuauccauuugugaagu

SEQ ID NO: 207067 - RNA, 32 nt, Human
guauauuacauacaugcuuugaaguuucugga

SEQ ID NO: 207068 - RNA, 32 nt, Human
guauauuauguaugucuuuaacuucuuucuuu

SEQ ID NO: 207069 - RNA, 32 nt, Human
guauauuauugauuuuuaauuguggugaaaua

SEQ ID NO: 207070 - RNA, 32 nt, Human
guauauucauacagccuacuccuggguagaca

SEQ ID NO: 207071 - RNA, 32 nt, Human
guauauucccauugccucucccccuuuccucg

SEQ ID NO: 207072 - RNA, 32 nt, Human
guauauucccuccugcugaaugacaugcgacu

SEQ ID NO: 207073 - RNA, 32 nt, Human
guauauucgccucauucaaauggcaguagccu

SEQ ID NO: 207074 - RNA, 32 nt, Human
guauauucuagucauuuugauuugaguuaacc

SEQ ID NO: 207075 - RNA, 32 nt, Human
guauauucuaugaaauggaagaaacaagaacu

SEQ ID NO: 207076 - RNA, 32 nt, Human
guauauucuuccagagaucucugucuauacaa

SEQ ID NO: 207077 - RNA, 20 nt, Human
guauauucuuccccagggaa

SEQ ID NO: 207078 - RNA, 32 nt, Human
guauauugggggaggaagagagggaggcacgu

SEQ ID NO: 207079 - RNA, 32 nt, Human
guauauuggguccucugggcaguagaggcaaa

SEQ ID NO: 207080 - RNA, 32 nt, Human
guauauuuagcaguagcacccaaaaccaagcc

SEQ ID NO: 207081 - RNA, 32 nt, Human
guauauuugacagauuaguacuguguccugug

SEQ ID NO: 207082 - RNA, 32 nt, Human
guauauuugaggacagcaucuugcuagagaaa

SEQ ID NO: 207083 - RNA, 32 nt, Human
guauauuugcagauucucugggauuuuaagga

SEQ ID NO: 207084 - RNA, 32 nt, Human
guauauuuguaagaaacauggccaggcaagau

SEQ ID NO: 207085 - RNA, 32 nt, Human
guauauuuuaugccaugacuaaaagugccauu

SEQ ID NO: 207086 - RNA, 32 nt, Human
guauauuuuccugaauuucucaucucaaaccc

SEQ ID NO: 207087 - RNA, 32 nt, Human
guauauuuuccugcucugccuucugggacuag

SEQ ID NO: 207088 - RNA, 32 nt, Human
guaucaagaauuuauauuuugccugcagaaaa

SEQ ID NO: 207089 - RNA, 20 nt, Human
guaucaaggagcaggaagca

SEQ ID NO: 207090 - RNA, 18 nt, Human
guaucaauaaauaugcac

SEQ ID NO: 207091 - RNA, 18 nt, Human
guaucaaucucacagcau

SEQ ID NO: 207092 - RNA, 32 nt, Human
guaucaauggcauuuuauguccagcuaacauc

SEQ ID NO: 207093 - RNA, 20 nt, Human
guaucacaaguucacagcac

SEQ ID NO: 207094 - RNA, 32 nt, Human
guaucacagcucacauuaccugcccagcgcug

SEQ ID NO: 207095 - RNA, 32 nt, Human
guaucacauaggguuuuuggucacucacaacc

SEQ ID NO: 207096 - RNA, 32 nt, Human
guaucaccaaacccuugcaggcucuuaugggc

SEQ ID NO: 207097 - RNA, 32 nt, Human
guaucacccaaagcauguaugugaucuuuccc

SEQ ID NO: 207098 - RNA, 32 nt, Human
guaucacccaggccagaguguaguggcacaau

SEQ ID NO: 207099 - RNA, 26 nt, Human
guaucacccaggcuggaguacagugg

SEQ ID NO: 207100 - RNA, 32 nt, Human
guaucacccuuccucccuccccaggcaccacu

SEQ ID NO: 207101 - RNA, 32 nt, Human
guaucaccucauucaucacuuggacacaucgc

SEQ ID NO: 207102 - RNA, 32 nt, Human
guaucacguaagugugugagugcagugcagau

SEQ ID NO: 207103 - RNA, 32 nt, Human
guaucacuccaaaugaaguguuuuccuugcuu

SEQ ID NO: 207104 - RNA, 32 nt, Human
guaucacugguucgggggaaauaguuccauuc

SEQ ID NO: 207105 - RNA, 32 nt, Human
guaucacuguguaugguaaggaauucuuuuca

SEQ ID NO: 207106 - RNA, 32 nt, Human
guaucagaaacuacaguuuugccuuguauuuu

SEQ ID NO: 207107 - RNA, 32 nt, Human
guaucagaacagcuucccucacuguguacaga

SEQ ID NO: 207108 - RNA, 32 nt, Human
guaucagaauacuugcacucuuuaacacauuc

SEQ ID NO: 207109 - RNA, 32 nt, Human
guaucagaccuacaggcugcuggcaggauuug

SEQ ID NO: 207110 - RNA, 32 nt, Human
guaucagacuccuauagacaaugagcugcgaa

SEQ ID NO: 207111 - RNA, 19 nt, Human
guaucagagcugcuuucca

SEQ ID NO: 207112 - RNA, 32 nt, Human
guaucagauguugauaaaagcaauuuuaacuu

SEQ ID NO: 207113 - RNA, 31 nt, Human
guaucagcaaugucugccuggaggccgagac

SEQ ID NO: 207114 - RNA, 31 nt, Human
guaucagcacuuuucuuucauuagggggaag

SEQ ID NO: 207115 - RNA, 32 nt, Human
guaucagcagcuuaucagggaccaugguuuuc

SEQ ID NO: 207116 - RNA, 32 nt, Human
guaucagcaguuuguuccuuuucauugcugag

SEQ ID NO: 207117 - RNA, 32 nt, Human
guaucagccaacaacgugaucugacaggacag

SEQ ID NO: 207118 - RNA, 32 nt, Human
guaucagccagccuuccccaccaagucuaaaa

SEQ ID NO: 207119 - RNA, 32 nt, Human
guaucaggacccagaggaaggggccagaggcu

SEQ ID NO: 207120 - RNA, 32 nt, Human
guaucaggauuucauuugcauguuaguccaca

SEQ ID NO: 207121 - RNA, 32 nt, Human
guaucaguaaauucccuuuuccauguugcuuc

SEQ ID NO: 207122 - RNA, 32 nt, Human
guaucaguacuguuuugcaaauacucagcaua

SEQ ID NO: 207123 - RNA, 32 nt, Human
guaucaguguaacugccaguucaguuaaucaa

SEQ ID NO: 207124 - RNA, 32 nt, Human
guaucaguucucuaacacuuguuccugagaac

SEQ ID NO: 207125 - RNA, 32 nt, Human
guaucaguuguaaagauacauugagauagaau

SEQ ID NO: 207126 - RNA, 32 nt, Human
guaucaguuucgguagaggugcagcaucguga

SEQ ID NO: 207127 - RNA, 32 nt, Human
guaucauagcaugcucuuaccuguucagugag

SEQ ID NO: 207128 - RNA, 32 nt, Human
guaucauaggaaagccuacaacgguguguuac

SEQ ID NO: 207129 - RNA, 32 nt, Human
guaucaucagaagaaagagaugaacaauuuag

SEQ ID NO: 207130 - RNA, 32 nt, Human
guaucaucauucuugugacuacuauccacacc

SEQ ID NO: 207131 - RNA, 32 nt, Human
guaucauccaaggucgacuucagacugcugug

SEQ ID NO: 207132 - RNA, 32 nt, Human
guaucauccuggcugagucucagugcuccuca

SEQ ID NO: 207133 - RNA, 32 nt, Human
guaucauccuucuccaguguguaagguguugu

SEQ ID NO: 207134 - RNA, 32 nt, Human
guaucaucuguguuaagugaugagaccauauu

SEQ ID NO: 207135 - RNA, 28 nt, Human
guaucaugcagugcugcccucauccucc

SEQ ID NO: 207136 - RNA, 32 nt, Human
guaucauggaccugccuucucaucuuuauagu

SEQ ID NO: 207137 - RNA, 32 nt, Human
guaucauguccauguuuccuucaccucagugg

SEQ ID NO: 207138 - RNA, 32 nt, Human
guaucauuaucaggccagcugcagccucuugc

SEQ ID NO: 207139 - RNA, 32 nt, Human
guaucauugcagcccccuacauggcagagaga

SEQ ID NO: 207140 - RNA, 32 nt, Human
guaucauugccucaauggugcgucugccugca

SEQ ID NO: 207141 - RNA, 32 nt, Human
guauccaagaagugaaguguucaaccacugag

SEQ ID NO: 207142 - RNA, 32 nt, Human
guauccacuccaggcugggcaauuuuguaccu

SEQ ID NO: 207143 - RNA, 32 nt, Human
guauccagaaaccugaguggacauugggugcu

SEQ ID NO: 207144 - RNA, 31 nt, Human
guauccagcaugcuggagaccaaagcugccg

SEQ ID NO: 207145 - RNA, 32 nt, Human
guauccagccaucaguuuccugagaaagagca

SEQ ID NO: 207146 - RNA, 32 nt, Human
guauccaggagguggaagugaauugcaagugg

SEQ ID NO: 207147 - RNA, 32 nt, Human
guaucccacaguuggauucaguuggcugugaa

SEQ ID NO: 207148 - RNA, 32 nt, Human
guaucccaccuaugguucaguguugcaagagu

SEQ ID NO: 207149 - RNA, 32 nt, Human
guaucccagcacuuuggaaggcugaggcgggu

SEQ ID NO: 207150 - RNA, 32 nt, Human
guaucccagcacuuugggaggccgaggcgggc

SEQ ID NO: 207151 - RNA, 32 nt, Human
guaucccagcacuuugggaggcugaggcgggu

SEQ ID NO: 207152 - RNA, 32 nt, Human
guaucccagcuacucgggaggcugaggcagga

SEQ ID NO: 207153 - RNA, 32 nt, Human
guaucccauaaauauaugcaaguauuauuugu

SEQ ID NO: 207154 - RNA, 32 nt, Human
guaucccaugaggcuaggagacaggaguccug

SEQ ID NO: 207155 - RNA, 32 nt, Human
guaucccccaucgcuuaucucugccuccuucc

SEQ ID NO: 207156 - RNA, 32 nt, Human
guaucccccuacuccuacccucaucucauccu

SEQ ID NO: 207157 - RNA, 32 nt, Human
guauccccuucugcuuaacacacccacugaga

SEQ ID NO: 207158 - RNA, 32 nt, Human
guauccccuuggccugccaccagcaccugcac

SEQ ID NO: 207159 - RNA, 24 nt, Human
guaucccggggagccaggaagcag

SEQ ID NO: 207160 - RNA, 32 nt, Human
guaucccgugcuguuucccuggcagacacaca

SEQ ID NO: 207161 - RNA, 32 nt, Human
guaucccuccccucaguuuuaaccugagcugc

SEQ ID NO: 207162 - RNA, 32 nt, Human
guaucccugcucccuuuuuccuccccuucccu

SEQ ID NO: 207163 - RNA, 32 nt, Human
guaucccuuugucaaaccuuguuucccaaauu

SEQ ID NO: 207164 - RNA, 32 nt, Human
guauccuagcuggucucgacuuccugucuggu

SEQ ID NO: 207165 - RNA, 32 nt, Human
guauccuaucucuuucuacaucagaucaaaac

SEQ ID NO: 207166 - RNA, 32 nt, Human
guauccuccagccaaucagggccuggggaauc

SEQ ID NO: 207167 - RNA, 32 nt, Human
guauccugccuaagcuuccugugucacuggga

SEQ ID NO: 207168 - RNA, 32 nt, Human
guauccugggacuuggaagcuggcaggauuug

SEQ ID NO: 207169 - RNA, 32 nt, Human
guauccugggggacccaauguaggagcugccu

SEQ ID NO: 207170 - RNA, 32 nt, Human
guauccugugugugugaagcacccgccgucag

SEQ ID NO: 207171 - RNA, 32 nt, Human
guauccuuccuggugcucacacaccugucacc

SEQ ID NO: 207172 - RNA, 32 nt, Human
guauccuugacuuuggcagucaccuuuuugua

SEQ ID NO: 207173 - RNA, 32 nt, Human
guauccuugagaaacuuuguuuuuguggaagu

SEQ ID NO: 207174 - RNA, 32 nt, Human
guauccuuggcugcuuuacugugguggccgaa

SEQ ID NO: 207175 - RNA, 32 nt, Human
guauccuuucuaggcuuggagauggcuuuggu

SEQ ID NO: 207176 - RNA, 32 nt, Human
guauccuuugagaugaagucguguucucaaaa

SEQ ID NO: 207177 - RNA, 32 nt, Human
guaucgaaaaccagaaaccacuuuuaauaaug

SEQ ID NO: 207178 - RNA, 32 nt, Human
guaucgcagggcccuguuacauaaaccagaga

SEQ ID NO: 207179 - RNA, 32 nt, Human
guaucggccgggcgcacuggcuuacgccugua

SEQ ID NO: 207180 - RNA, 32 nt, Human
guaucgggugaggccagcuggagaacugcaac

SEQ ID NO: 207181 - RNA, 32 nt, Human
guaucuaaaccagaauauuuuggucaaauaua

SEQ ID NO: 207182 - RNA, 32 nt, Human
guaucuaacucuguuccuucucagccaccuug

SEQ ID NO: 207183 - RNA, 32 nt, Human
guaucuaaucuugccaggucuuggccaguuga

SEQ ID NO: 207184 - RNA, 32 nt, Human
guaucuauuuguacaauuuuaaaguucuuauu

SEQ ID NO: 207185 - RNA, 32 nt, Human
guaucucaauuacuguucuucauuucaauuau

SEQ ID NO: 207186 - RNA, 32 nt, Human
guaucucacagaacccuggugggcaguaauca

SEQ ID NO: 207187 - RNA, 32 nt, Human
guaucucauccagaagcaagaaaagggcaugu

SEQ ID NO: 207188 - RNA, 32 nt, Human
guaucucauccuuugcuggagcagguuugcag

SEQ ID NO: 207189 - RNA, 19 nt, Human
guaucuccacagcaugcac

SEQ ID NO: 207190 - RNA, 20 nt, Human
guaucuccuaucacaugcac

SEQ ID NO: 207191 - RNA, 32 nt, Human
guaucuccuccaccucucccauuccaucccca

SEQ ID NO: 207192 - RNA, 32 nt, Human
guaucuccuggccucugcuuuugugucucaca

SEQ ID NO: 207193 - RNA, 32 nt, Human
guaucuccugucuucccuacugcuccaaaccc

SEQ ID NO: 207194 - RNA, 32 nt, Human
guaucucggggaaguucuuacagcauuccugg

SEQ ID NO: 207195 - RNA, 32 nt, Human
guaucucuacuguguaccuguggcauuccuuc

SEQ ID NO: 207196 - RNA, 32 nt, Human
guaucucucugcuacucaaaggcugacucucu

SEQ ID NO: 207197 - RNA, 32 nt, Human
guaucucugagccuggugggauccccggagcg

SEQ ID NO: 207198 - RNA, 32 nt, Human
guaucucugccuucucuccauuguuagccuug

SEQ ID NO: 207199 - RNA, 32 nt, Human
guaucugaacuaaggaccagaggcugccagau

SEQ ID NO: 207200 - RNA, 32 nt, Human
guaucugaaggcauuuucagcucuagcaauuu

SEQ ID NO: 207201 - RNA, 32 nt, Human
guaucugcaagccaaguuuggaaggcauucgg

SEQ ID NO: 207202 - RNA, 32 nt, Human
guaucugcccccaguccaggccaggcggaggg

SEQ ID NO: 207203 - RNA, 32 nt, Human
guaucugccuccauuuuccugagcucaaaaag

SEQ ID NO: 207204 - RNA, 32 nt, Human
guaucugccugagaaccugggcucugagacgc

SEQ ID NO: 207205 - RNA, 32 nt, Human
guaucugccugcccccugucacugcgucugcg

SEQ ID NO: 207206 - RNA, 32 nt, Human
guaucugccuuucucugucucuagacagggaa

SEQ ID NO: 207207 - RNA, 32 nt, Human
guaucuggaaaaucacuuugggguccauuuac

SEQ ID NO: 207208 - RNA, 32 nt, Human
guaucuggcuggguuuucaggggcuuuggaag

SEQ ID NO: 207209 - RNA, 32 nt, Human
guaucugggaggcagaguuugccgugagcuga

SEQ ID NO: 207210 - RNA, 32 nt, Human
guaucugggauuacaggcaugugccaccacac

SEQ ID NO: 207211 - RNA, 32 nt, Human
guaucugggauuacauaugucggcuaccgugu

SEQ ID NO: 207212 - RNA, 32 nt, Human
guaucugggauuauaagcaagagccacugcuc

SEQ ID NO: 207213 - RNA, 32 nt, Human
guaucugggcuuuuuccuccugucugacccag

SEQ ID NO: 207214 - RNA, 23 nt, Human
guaucugguaggggagaaagcag

SEQ ID NO: 207215 - RNA, 32 nt, Human
guaucugguaggggagaaagcagcaggacagu

SEQ ID NO: 207216 - RNA, 32 nt, Human
guaucuguagccugucuaccuccugcaguggg

SEQ ID NO: 207217 - RNA, 32 nt, Human
guaucuguauggcagcaagccagcaaguuccu

SEQ ID NO: 207218 - RNA, 22 nt, Human
guaucuguccggacggaagcag

SEQ ID NO: 207219 - RNA, 32 nt, Human
guaucugugguuucaugccccucucuauaccu

SEQ ID NO: 207220 - RNA, 32 nt, Human
guaucuguguauccacauaggauuucucuuaa

SEQ ID NO: 207221 - RNA, 32 nt, Human
guaucuguuaauaaccacagggguuaauauga

SEQ ID NO: 207222 - RNA, 32 nt, Human
guaucuguugggccuugggaacugagguaggc

SEQ ID NO: 207223 - RNA, 32 nt, Human
guaucuuaaaugcaaucucuucucucuuagcc

SEQ ID NO: 207224 - RNA, 32 nt, Human
guaucuuauaauaaaaaggaaggacaggagga

SEQ ID NO: 207225 - RNA, 32 nt, Human
guaucuuccuucaccuccuccucuuaggagcu

SEQ ID NO: 207226 - RNA, 32 nt, Human
guaucuuccuucagcuccuccucuuaggagcu

SEQ ID NO: 207227 - RNA, 32 nt, Human
guaucuucucacugagcccgggccagaugcuc

SEQ ID NO: 207228 - RNA, 32 nt, Human
guaucuucucccugggcagaccagcaggcaga

SEQ ID NO: 207229 - RNA, 32 nt, Human
guaucuucucuuuucuaauucuuuggauuuaa

SEQ ID NO: 207230 - RNA, 32 nt, Human
guaucuugacccuggucucagaaaugacauuu

SEQ ID NO: 207231 - RNA, 32 nt, Human
guaucuugaguuaaaagaaccugcucuccauu

SEQ ID NO: 207232 - RNA, 32 nt, Human
guaucuuggagacacguuucagaggaagugga

SEQ ID NO: 207233 - RNA, 32 nt, Human
guaucuugggccugaggauugaggccuagaga

SEQ ID NO: 207234 - RNA, 32 nt, Human
guaucuugguugugcucugggguggggguggg

SEQ ID NO: 207235 - RNA, 32 nt, Human
guaucuuuccaaagugcagacucuugugaagu

SEQ ID NO: 207236 - RNA, 32 nt, Human
guaucuuucccagaaaauaauguguuuuaaua

SEQ ID NO: 207237 - RNA, 32 nt, Human
guaucuuucucauuacaauaggcacagagaag

SEQ ID NO: 207238 - RNA, 32 nt, Human
guaucuuugugggacagugagaagacugagaa

SEQ ID NO: 207239 - RNA, 32 nt, Human
guaucuuuucuccuccucccuaguguuccucc

SEQ ID NO: 207240 - RNA, 32 nt, Human
guaucuuuucugagagagggggagucaccccc

SEQ ID NO: 207241 - RNA, 32 nt, Human
guaugaaaagguucucuacacagcugcugcag

SEQ ID NO: 207242 - RNA, 21 nt, Human
guaugaaaaucaaccauguuu

SEQ ID NO: 207243 - RNA, 32 nt, Human
guaugaaaaugauuuuuacaauguaaagagag

SEQ ID NO: 207244 - RNA, 32 nt, Human
guaugaaagauggcugugccucugccugucuc

SEQ ID NO: 207245 - RNA, 32 nt, Human
guaugaaccacugcaccuggcccuggauugca

SEQ ID NO: 207246 - RNA, 32 nt, Human
guaugaaccauaaccugcugugguaccuuugu

SEQ ID NO: 207247 - RNA, 32 nt, Human
guaugaacccauugguuagagugcaguggcuu

SEQ ID NO: 207248 - RNA, 32 nt, Human
guaugaacuucugccuucacgcugccaggaga

SEQ ID NO: 207249 - RNA, 32 nt, Human
guaugaagacaugcuaagcaucaugcuugcua

SEQ ID NO: 207250 - RNA, 32 nt, Human
guaugaagaguguuauuuucauucaaaguguu

SEQ ID NO: 207251 - RNA, 32 nt, Human
guaugaagcugcgcuccuccaucggguuuggg

SEQ ID NO: 207252 - RNA, 27 nt, Human
guaugaaucgugcacacagccaugcuu

SEQ ID NO: 207253 - RNA, 23 nt, Human
guaugaaugagccagccaugcuu

SEQ ID NO: 207254 - RNA, 32 nt, Human
guaugacagugaagcagcacugugagugguuc

SEQ ID NO: 207255 - RNA, 32 nt, Human
guaugacaugauacaguaggaguugucuauac

SEQ ID NO: 207256 - RNA, 28 nt, Human
guaugaccaaauccugccucauuaauuc

SEQ ID NO: 207257 - RNA, 21 nt, Human
guaugacccacauuacuuuuu

SEQ ID NO: 207258 - RNA, 21 nt, Human
guaugacccuguguacuuuuu

SEQ ID NO: 207259 - RNA, 32 nt, Human
guaugaccuggguggggucagggaaagucuua

SEQ ID NO: 207260 - RNA, 24 nt, Human
guaugacggcucacgccuguaauc

SEQ ID NO: 207261 - RNA, 32 nt, Human
guaugacgguccaucagcgcucugccuuccag

SEQ ID NO: 207262 - RNA, 32 nt, Human
guaugacugcacuccagccugggugacagacc

SEQ ID NO: 207263 - RNA, 32 nt, Human
guaugacugcacuccagccugggugacagagc

SEQ ID NO: 207264 - RNA, 32 nt, Human
guaugacugccaugaguuccaccagaaagcca

SEQ ID NO: 207265 - RNA, 32 nt, Human
guaugacugccucuccaacccugugggcugua

SEQ ID NO: 207266 - RNA, 32 nt, Human
guaugacuuauuuuuccuuauccacagauuuc

SEQ ID NO: 207267 - RNA, 32 nt, Human
guaugagaaucuaucuguucugugcuggacuu

SEQ ID NO: 207268 - RNA, 32 nt, Human
guaugagacuagccuggacaacauacuaaaac

SEQ ID NO: 207269 - RNA, 32 nt, Human
guaugagaggagggaggcaggcugcagcuuca

SEQ ID NO: 207270 - RNA, 32 nt, Human
guaugagagggacagaaaaaugaagaugaaag

SEQ ID NO: 207271 - RNA, 32 nt, Human
guaugagagggcccugccugcugcaucuuuuc

SEQ ID NO: 207272 - RNA, 32 nt, Human
guaugagaucuucaugauucuggaccauaagg

SEQ ID NO: 207273 - RNA, 32 nt, Human
guaugagcacagugccuggaccugaaugauca

SEQ ID NO: 207274 - RNA, 32 nt, Human
guaugaggaccagcuuagcugcacacccccag

SEQ ID NO: 207275 - RNA, 32 nt, Human
guaugaggaggaggaggaggaggaugugaaga

SEQ ID NO: 207276 - RNA, 32 nt, Human
guaugaguaauauaggguaugaaugguuuaau

SEQ ID NO: 207277 - RNA, 32 nt, Human
guaugaguaauguggaaucuggggaaggggug

SEQ ID NO: 207278 - RNA, 32 nt, Human
guaugauauaaggaaugugggaaaguguucga

SEQ ID NO: 207279 - RNA, 32 nt, Human
guaugauaugguguccucugugccaguuuugu

SEQ ID NO: 207280 - RNA, 32 nt, Human
guaugauauuauacauuaaccuuuauuuaugu

SEQ ID NO: 207281 - RNA, 32 nt, Human
guaugauccaauaacuuauuuugucacagggc

SEQ ID NO: 207282 - RNA, 25 nt, Human
guaugaucuauggccccuacuuucu

SEQ ID NO: 207283 - RNA, 32 nt, Human
guaugaugacaucucacaggucuugccuuuaa

SEQ ID NO: 207284 - RNA, 32 nt, Human
guaugaugagaaugaucaaggacucuacacac

SEQ ID NO: 207285 - RNA, 32 nt, Human
guaugauggguggaugaggcuguccauuguac

SEQ ID NO: 207286 - RNA, 32 nt, Human
guaugauuaccuaagccuuagcacagaaggua

SEQ ID NO: 207287 - RNA, 32 nt, Human
guaugcaaauauuauuuucuucauacauucau

SEQ ID NO: 207288 - RNA, 32 nt, Human
guaugcacacacacaugcaccgcacacauauc

SEQ ID NO: 207289 - RNA, 32 nt, Human
guaugcacagaauggacgagugcagcccagcc

SEQ ID NO: 207290 - RNA, 32 nt, Human
guaugcacgugugcacacaccacacacauaca

SEQ ID NO: 207291 - RNA, 32 nt, Human
guaugcacuggguggaagaaggguaggagggc

SEQ ID NO: 207292 - RNA, 32 nt, Human
guaugcagaggaguuuucaagaggcuaucugg

SEQ ID NO: 207293 - RNA, 32 nt, Human
guaugccagauggccacacccccagccacaga

SEQ ID NO: 207294 - RNA, 32 nt, Human
guaugccagggagaaagagagagcgcgaaaga

SEQ ID NO: 207295 - RNA, 32 nt, Human
guaugccagucacagcaguggaaaagaccugg

SEQ ID NO: 207296 - RNA, 32 nt, Human
guaugccauauguaaauauguacgagugugua

SEQ ID NO: 207297 - RNA, 32 nt, Human
guaugccccugcccuguucuauaaauagcuau

SEQ ID NO: 207298 - RNA, 32 nt, Human
guaugccccugcccuguucuauaaauaucuau

SEQ ID NO: 207299 - RNA, 32 nt, Human
guaugcccuaggaagaaaucaugcuggguuuu

SEQ ID NO: 207300 - RNA, 32 nt, Human
guaugcccugcucccuuugcugggucccuacc

SEQ ID NO: 207301 - RNA, 32 nt, Human
guaugcccuuucucagcauccuagguccaucc

SEQ ID NO: 207302 - RNA, 32 nt, Human
guaugccgcugcacuccagccugggggacaga

SEQ ID NO: 207303 - RNA, 32 nt, Human
guaugccuacgauccuagcuacucaggaggcu

SEQ ID NO: 207304 - RNA, 32 nt, Human
guaugccuggcuuuguuuacaaacauauaucu

SEQ ID NO: 207305 - RNA, 32 nt, Human
guaugccuggugcuuucucucagaacucauca

SEQ ID NO: 207306 - RNA, 32 nt, Human
guaugccuguaaucccagcuacucgggaggcu

SEQ ID NO: 207307 - RNA, 32 nt, Human
guaugccuguaaucccagcuacuuaggaggcu

SEQ ID NO: 207308 - RNA, 32 nt, Human
guaugcgagaggcuggagguuggcgcuagagg

SEQ ID NO: 207309 - RNA, 32 nt, Human
guaugcgcacaguuccugugggacugggccgu

SEQ ID NO: 207310 - RNA, 32 nt, Human
guaugcgugucuauguggccauggcccuggcc

SEQ ID NO: 207311 - RNA, 32 nt, Human
guaugcuauaaacuaugcuacucucauacagg

SEQ ID NO: 207312 - RNA, 32 nt, Human
guaugcuccaaucacguugcuggcaaggcauu

SEQ ID NO: 207313 - RNA, 32 nt, Human
guaugcucccaccuccaccugccccacucacc

SEQ ID NO: 207314 - RNA, 32 nt, Human
guaugcuccucacuugccccuacaaaauccac

SEQ ID NO: 207315 - RNA, 32 nt, Human
guaugcuccucucuuuucugagagagaaggca

SEQ ID NO: 207316 - RNA, 32 nt, Human
guaugcuggaaacauuaucccaaggcuuuacc

SEQ ID NO: 207317 - RNA, 32 nt, Human
guaugcuggaggcagagggcaagggaggggug

SEQ ID NO: 207318 - RNA, 32 nt, Human
guaugcuggccagcacccucuccugggggugg

SEQ ID NO: 207319 - RNA, 32 nt, Human
guaugcugucaugguccuuucuggaaguuucu

SEQ ID NO: 207320 - RNA, 32 nt, Human
guaugcuuauuucugugccuacuguauaaugg

SEQ ID NO: 207321 - RNA, 32 nt, Human
guaugcuucaucaccuauauuaggcaaauucc

SEQ ID NO: 207322 - RNA, 32 nt, Human
guaugcuuggauguauugggcagcagcuucua

SEQ ID NO: 207323 - RNA, 32 nt, Human
guaugcuuguuauccaugcaucugugucuuua

SEQ ID NO: 207324 - RNA, 31 nt, Human
guauggaaaacauaggguaccaaagugugga

SEQ ID NO: 207325 - RNA, 32 nt, Human
guauggaacacauuugucccagaucugagcau

SEQ ID NO: 207326 - RNA, 32 nt, Human
guauggaauacuugaggggaaguuaaauugua

SEQ ID NO: 207327 - RNA, 32 nt, Human
guauggaccagugcccuccgcagacagcucac

SEQ ID NO: 207328 - RNA, 32 nt, Human
guauggacuggagaugaugggagccaguugga

SEQ ID NO: 207329 - RNA, 32 nt, Human
guauggagcacauugcugccucuggcuaggac

SEQ ID NO: 207330 - RNA, 25 nt, Human
guauggagccuccaucaucaugcuc

SEQ ID NO: 207331 - RNA, 32 nt, Human
guauggagcucuuuuaaaaugugauuauuuau

SEQ ID NO: 207332 - RNA, 32 nt, Human
guauggagcugggcuccagggugcacggggau

SEQ ID NO: 207333 - RNA, 32 nt, Human
guauggaggaagggguuuucauugcauugcau

SEQ ID NO: 207334 - RNA, 32 nt, Human
guauggaucucucaucauagaggugugugcau

SEQ ID NO: 207335 - RNA, 32 nt, Human
guauggcaagcauaaaucaagcucagucuggg

SEQ ID NO: 207336 - RNA, 32 nt, Human
guauggcagcccauguucucuaaugccacugc

SEQ ID NO: 207337 - RNA, 32 nt, Human
guauggcaguacagugcucuguucauugcaag

SEQ ID NO: 207338 - RNA, 32 nt, Human
guauggccuggcccugcccucccgaaggccgc

SEQ ID NO: 207339 - RNA, 21 nt, Human
guauggcgcccaccuguaauc

SEQ ID NO: 207340 - RNA, 32 nt, Human
guauggcugacugcccuggaucccucucccag

SEQ ID NO: 207341 - RNA, 32 nt, Human
guauggcuuuguuuucagucuauuucuaggag

SEQ ID NO: 207342 - RNA, 32 nt, Human
guaugggacaugcacacacacucacaugcucu

SEQ ID NO: 207343 - RNA, 32 nt, Human
guaugggcaaagcuuuugugaucacacaccac

SEQ ID NO: 207344 - RNA, 32 nt, Human
guaugggcagauucagucuccagaggguauuc

SEQ ID NO: 207345 - RNA, 32 nt, Human
guaugggcagcccaagguugcaugggaaaaca

SEQ ID NO: 207346 - RNA, 32 nt, Human
guauggggaagaguuuuggaaggggaggaaaa

SEQ ID NO: 207347 - RNA, 22 nt, Human
guauggggcccuggcuguguuc

SEQ ID NO: 207348 - RNA, 32 nt, Human
guaugggguggggagagaggguggaggguuuu

SEQ ID NO: 207349 - RNA, 24 nt, Human
guauggguggccacagccaugcuu

SEQ ID NO: 207350 - RNA, 32 nt, Human
guauggguguccgguuggguccuguguuuggu

SEQ ID NO: 207351 - RNA, 32 nt, Human
guauggguguguuggggaagucacuguguuuc

SEQ ID NO: 207352 - RNA, 32 nt, Human
guaugguacuagcacaccacugcaugucucua

SEQ ID NO: 207353 - RNA, 32 nt, Human
guaugguaucuuuagauauuugccugucuguu

SEQ ID NO: 207354 - RNA, 24 nt, Human
guauggugacucaugccuguaauc

SEQ ID NO: 207355 - RNA, 23 nt, Human
guauggugcucacgccuguaauc

SEQ ID NO: 207356 - RNA, 24 nt, Human
guaugguggcacaugccuguaauu

SEQ ID NO: 207357 - RNA, 24 nt, Human
guaugguggcacaugccuguaguc

SEQ ID NO: 207358 - RNA, 24 nt, Human
guaugguggcauaugccuauauuc

SEQ ID NO: 207359 - RNA, 24 nt, Human
guaugguggcaugugccuguaguc

SEQ ID NO: 207360 - RNA, 24 nt, Human
guaugguggcgggcgccuguaguc

SEQ ID NO: 207361 - RNA, 24 nt, Human
guaugguggcucaagccuguaauc

SEQ ID NO: 207362 - RNA, 24 nt, Human
guaugguggcucacaacuguaauc

SEQ ID NO: 207363 - RNA, 24 nt, Human
guaugguggcucacgccuauaauc

SEQ ID NO: 207364 - RNA, 24 nt, Human
guaugguggcucacgccuauuauc

SEQ ID NO: 207365 - RNA, 24 nt, Human
guaugguggcucacgccuguaauc

SEQ ID NO: 207366 - RNA, 21 nt, Human
guaugguggcucaugccugua

SEQ ID NO: 207367 - RNA, 24 nt, Human
guaugguggcucaugccuguaauc

SEQ ID NO: 207368 - RNA, 24 nt, Human
guaugguggcucaugucuauaauc

SEQ ID NO: 207369 - RNA, 24 nt, Human
guaugguggcuuacgccuauaauc

SEQ ID NO: 207370 - RNA, 24 nt, Human
guaugguggcuuaugccuguaguc

SEQ ID NO: 207371 - RNA, 31 nt, Human
guauggugggugguggggaaucugggagaga

SEQ ID NO: 207372 - RNA, 24 nt, Human
guauggugguacaugccuguaauc

SEQ ID NO: 207373 - RNA, 24 nt, Human
guaugguggugaacaccuguaauc

SEQ ID NO: 207374 - RNA, 24 nt, Human
guaugguggugcacaccuguaguc

SEQ ID NO: 207375 - RNA, 24 nt, Human
guaugguggugcacgcuuguaauc

SEQ ID NO: 207376 - RNA, 24 nt, Human
guaugguggugcauaccuguaauc

SEQ ID NO: 207377 - RNA, 24 nt, Human
guauggugguucaugccuggaauc

SEQ ID NO: 207378 - RNA, 32 nt, Human
guauggugucaugagauccucuaccucauaac

SEQ ID NO: 207379 - RNA, 24 nt, Human
guauggugucucacaccuguaauc

SEQ ID NO: 207380 - RNA, 32 nt, Human
guaugguguuugcgaaaacuugcggaagcugg

SEQ ID NO: 207381 - RNA, 32 nt, Human
guaugguuaacucucaggccauuauguuuuuc

SEQ ID NO: 207382 - RNA, 32 nt, Human
guaugguuuaaagauuuguguagagguaguga

SEQ ID NO: 207383 - RNA, 32 nt, Human
guaugguuucuaugcuguuucuugucacuggc

SEQ ID NO: 207384 - RNA, 32 nt, Human
guaugguuuuucuucuaagccuaaaauaagcu

SEQ ID NO: 207385 - RNA, 32 nt, Human
guauguaaagcgccuugcacacugccuggcac

SEQ ID NO: 207386 - RNA, 32 nt, Human
guauguaacagcugaccaacaugugaagauac

SEQ ID NO: 207387 - RNA, 32 nt, Human
guauguaauagaagaaagaaguccacguuuuc

SEQ ID NO: 207388 - RNA, 32 nt, Human
guauguacaaguugaguaucccuuauccaaaa

SEQ ID NO: 207389 - RNA, 32 nt, Human
guauguacacagcuaacacagcucuuuagauu

SEQ ID NO: 207390 - RNA, 32 nt, Human
guauguacacucugaaguacagccuggguuag

SEQ ID NO: 207391 - RNA, 32 nt, Human
guauguacagacugaggcucuggggugagguc

SEQ ID NO: 207392 - RNA, 32 nt, Human
guauguaccucccucacuucucuccuaucacu

SEQ ID NO: 207393 - RNA, 32 nt, Human
guauguagagaaaagggaaggagcaggaggag

SEQ ID NO: 207394 - RNA, 32 nt, Human
guauguagucaccauuccagaaccucucuuuu

SEQ ID NO: 207395 - RNA, 32 nt, Human
guauguagucagcucuuguaauacucauauuu

SEQ ID NO: 207396 - RNA, 32 nt, Human
guauguauaguaauaguagcuugagugaauau

SEQ ID NO: 207397 - RNA, 32 nt, Human
guauguaugcaugugauggugccugagacccc

SEQ ID NO: 207398 - RNA, 32 nt, Human
guauguauggaaaggaacucauuuaucaaauu

SEQ ID NO: 207399 - RNA, 32 nt, Human
guauguauggaauguuaugauaugacauagua

SEQ ID NO: 207400 - RNA, 32 nt, Human
guccccacuucgccucccuccugcugccccca

SEQ ID NO: 207401 - RNA, 21 nt, Human
guccccagaagcauccaagaa

SEQ ID NO: 207402 - RNA, 32 nt, Human
guccccagaaugcugcgcuucuccuacaaggu

SEQ ID NO: 207403 - RNA, 32 nt, Human
guccccagacagggaucugggcccucagacuu

SEQ ID NO: 207404 - RNA, 32 nt, Human
guccccagaguuucuugagggcuggguuucac

SEQ ID NO: 207405 - RNA, 32 nt, Human
guccccagaugguagagagcagucauaucuua

SEQ ID NO: 207406 - RNA, 32 nt, Human
guccccagcagauggcaaguuccuugcaggcc

SEQ ID NO: 207407 - RNA, 32 nt, Human
guccccagcagcucaguccugcagugagaguc

SEQ ID NO: 207408 - RNA, 32 nt, Human
guccccagcaggagaaccgaccuggggacaaa

SEQ ID NO: 207409 - RNA, 22 nt, Human
guccccagccaaccccccagaa

SEQ ID NO: 207410 - RNA, 32 nt, Human
guccccagccaaggggccggcucucgucacug

SEQ ID NO: 207411 - RNA, 18 nt, Human
guccccagcccagccugu

SEQ ID NO: 207412 - RNA, 23 nt, Human
guccccagcccccucuccuccca

SEQ ID NO: 207413 - RNA, 32 nt, Human
guccccagccuccccguccucugucuaaccuc

SEQ ID NO: 207414 - RNA, 32 nt, Human
guccccagccuccugggggauucuuuccuaug

SEQ ID NO: 207415 - RNA, 32 nt, Human
guccccagccucuaucugugaggcaguuccaa

SEQ ID NO: 207416 - RNA, 21 nt, Human
guccccagcugcagaccuuca

SEQ ID NO: 207417 - RNA, 32 nt, Human
guccccaggaaggaggaggagucugcagcccu

SEQ ID NO: 207418 - RNA, 32 nt, Human
guccccaggcaugcccacaggccaggcccagu

SEQ ID NO: 207419 - RNA, 20 nt, Human
guccccaggccgugcugcug

SEQ ID NO: 207420 - RNA, 25 nt, Human
guccccaggcgagcccuccuucagg

SEQ ID NO: 207421 - RNA, 32 nt, Human
guccccaggcugcaucggccugccuguguuuc

SEQ ID NO: 207422 - RNA, 32 nt, Human
guccccagggaggacauggcucugaguccaca

SEQ ID NO: 207423 - RNA, 32 nt, Human
guccccagggaguggaaauggggaagggggcc

SEQ ID NO: 207424 - RNA, 32 nt, Human
guccccaguccccagcccugggcuuggcucuu

SEQ ID NO: 207425 - RNA, 32 nt, Human
guccccaguccuccuucucugagcagaccucu

SEQ ID NO: 207426 - RNA, 32 nt, Human
guccccagugcaacaagaaagccaggcacagu

SEQ ID NO: 207427 - RNA, 32 nt, Human
guccccagugcugcacucccacccugggcucc

SEQ ID NO: 207428 - RNA, 20 nt, Human
guccccauaaacauguacug

SEQ ID NO: 207429 - RNA, 32 nt, Human
guccccaucucagugucagaccagccuucucc

SEQ ID NO: 207430 - RNA, 32 nt, Human
guccccaugcccugcuguccuccucacaggac

SEQ ID NO: 207431 - RNA, 32 nt, Human
guccccaugggcuggucuccaaagcucuuucc

SEQ ID NO: 207432 - RNA, 32 nt, Human
guccccauggucagaggagacccagcuguccu

SEQ ID NO: 207433 - RNA, 32 nt, Human
guccccauugcccagcuuuugccugcacucuu

SEQ ID NO: 207434 - RNA, 32 nt, Human
guccccauugguuaggugaggagggugaggcu

SEQ ID NO: 207435 - RNA, 32 nt, Human
gucccccaaauacucugcucccucacugcuga

SEQ ID NO: 207436 - RNA, 32 nt, Human
gucccccaacacugagcaaguaugcuguggag

SEQ ID NO: 207437 - RNA, 22 nt, Human
gucccccaaccucuccugcuca

SEQ ID NO: 207438 - RNA, 23 nt, Human
gucccccaagcuggaguacaaug

SEQ ID NO: 207439 - RNA, 24 nt, Human
gucccccaagcuggaguacaauga

SEQ ID NO: 207440 - RNA, 32 nt, Human
gucccccaaggacaaagcucaggcuggauuca

SEQ ID NO: 207441 - RNA, 32 nt, Human
gucccccacagcaagagagagagccucccagu

SEQ ID NO: 207442 - RNA, 22 nt, Human
gucccccacaggcucugccuca

SEQ ID NO: 207443 - RNA, 18 nt, Human
gucccccacccacugcca

SEQ ID NO: 207444 - RNA, 32 nt, Human
gucccccacccucuccaaaaccaaccccaccc

SEQ ID NO: 207445 - RNA, 32 nt, Human
gucccccaccuguguccucccugggccccugg

SEQ ID NO: 207446 - RNA, 25 nt, Human
gucccccacgugugaaguguagugg

SEQ ID NO: 207447 - RNA, 32 nt, Human
gucccccacugcacaccuuccucaagucauag

SEQ ID NO: 207448 - RNA, 32 nt, Human
gucccccacugccucucugcaaucaaauggca

SEQ ID NO: 207449 - RNA, 32 nt, Human
gucccccagacuccuucccaucucuuuaguuc

SEQ ID NO: 207450 - RNA, 32 nt, Human
gucccccagagcaggccuggcccccagcugug

SEQ ID NO: 207451 - RNA, 32 nt, Human
gucccccagcaagaaagagggacaggagcacc

SEQ ID NO: 207452 - RNA, 32 nt, Human
gucccccagcacugaagagcugggcuuccagc

SEQ ID NO: 207453 - RNA, 21 nt, Human
gucccccaggcuccugcacgg

SEQ ID NO: 207454 - RNA, 24 nt, Human
gucccccaggcugaagugcagcgg

SEQ ID NO: 207455 - RNA, 22 nt, Human
gucccccaggcugaggcugggg

SEQ ID NO: 207456 - RNA, 32 nt, Human
gucccccaggcugaggcuggggaggagggcca

SEQ ID NO: 207457 - RNA, 18 nt, Human
gucccccaggcuggagug

SEQ ID NO: 207458 - RNA, 24 nt, Human
gucccccaggcuggagugcagugg

SEQ ID NO: 207459 - RNA, 22 nt, Human
gucccccaggcuggagugccgu

SEQ ID NO: 207460 - RNA, 23 nt, Human
gucccccaggcuggagugccgug

SEQ ID NO: 207461 - RNA, 24 nt, Human
gucccccaggcuggagugccgugg

SEQ ID NO: 207462 - RNA, 24 nt, Human
gucccccaggcuggagugcgaugg

SEQ ID NO: 207463 - RNA, 27 nt, Human
gucccccaggcuggaguggugcagugg

SEQ ID NO: 207464 - RNA, 21 nt, Human
gucccccaggcugggacgggg

SEQ ID NO: 207465 - RNA, 23 nt, Human
gucccccaggcuugagugcaaug

SEQ ID NO: 207466 - RNA, 32 nt, Human
gucccccagggcugcuuccugccugcaccugc

SEQ ID NO: 207467 - RNA, 32 nt, Human
gucccccauccccauccuccagcuucugguac

SEQ ID NO: 207468 - RNA, 32 nt, Human
gucccccaucuuggugcugaaccaacgcuaag

SEQ ID NO: 207469 - RNA, 32 nt, Human
gucccccaugacaggaguuugugugcaacaga

SEQ ID NO: 207470 - RNA, 24 nt, Human
gucccccaugcuggagugcagugg

SEQ ID NO: 207471 - RNA, 19 nt, Human
guccccccaccacccgccu

SEQ ID NO: 207472 - RNA, 17 nt, Human
guccccccaccugcaca

SEQ ID NO: 207473 - RNA, 17 nt, Human
guccccccuccuccuca

SEQ ID NO: 207474 - RNA, 20 nt, Human
guccccccuccugcccgcuc

SEQ ID NO: 207475 - RNA, 22 nt, Human
gucccccgacccuggccccagg

SEQ ID NO: 207476 - RNA, 21 nt, Human
gucccccgacucgccgcccgg

SEQ ID NO: 207477 - RNA, 32 nt, Human
gucccccgugaugggugcucaggcucaggacc

SEQ ID NO: 207478 - RNA, 32 nt, Human
gucccccuaggcuuuuccuuguggacaacggg

SEQ ID NO: 207479 - RNA, 20 nt, Human
gucccccucccuaccacucu

SEQ ID NO: 207480 - RNA, 32 nt, Human
gucccccugccccagggcucccggcuaugggg

SEQ ID NO: 207481 - RNA, 32 nt, Human
gucccccugccuggagcaguuuguguguauag

SEQ ID NO: 207482 - RNA, 32 nt, Human
gucccccugccuggcguuccugccgcagcucu

SEQ ID NO: 207483 - RNA, 32 nt, Human
gucccccugccugguccucuggggccacugug

SEQ ID NO: 207484 - RNA, 32 nt, Human
gucccccugcugucugaugacaucuugaaauu

SEQ ID NO: 207485 - RNA, 19 nt, Human
gucccccugggaagcuauc

SEQ ID NO: 207486 - RNA, 32 nt, Human
gucccccugucgccacugcucucccucccagc

SEQ ID NO: 207487 - RNA, 32 nt, Human
gucccccugugcaggggguucugugggggucu

SEQ ID NO: 207488 - RNA, 18 nt, Human
gucccccuucaccugcca

SEQ ID NO: 207489 - RNA, 32 nt, Human
gucccccuucugguaaggauucagagggguau

SEQ ID NO: 207490 - RNA, 32 nt, Human
gucccccuucuugcuucucucuccuucuuucc

SEQ ID NO: 207491 - RNA, 32 nt, Human
gucccccuugccugugaaucccuuccuuguac

SEQ ID NO: 207492 - RNA, 18 nt, Human
guccccgaaucucagcca

SEQ ID NO: 207493 - RNA, 32 nt, Human
guccccgacaucuucuggcccucuggccagca

SEQ ID NO: 207494 - RNA, 32 nt, Human
guccccgagcccaggguuacaaaauaaaugcc

SEQ ID NO: 207495 - RNA, 32 nt, Human
guccccgagcgggguucgcggaaaggcagcca

SEQ ID NO: 207496 - RNA, 32 nt, Human
guccccgaggggcauggccugcauucgaugcu

SEQ ID NO: 207497 - RNA, 32 nt, Human
guccccgcacacuucacaggcacuccacugcu

SEQ ID NO: 207498 - RNA, 32 nt, Human
guccccgcaguggaugcagcucacaugcugag

SEQ ID NO: 207499 - RNA, 32 nt, Human
guccccgcccaggaccugcgagugugcaugcu

SEQ ID NO: 207500 - RNA, 19 nt, Human
guccccgccccaccccgcc

SEQ ID NO: 207501 - RNA, 24 nt, Human
guccccgcccccaaacccagccca

SEQ ID NO: 207502 - RNA, 20 nt, Human
guccccgccccgccccgccc

SEQ ID NO: 207503 - RNA, 24 nt, Human
guccccgccccgccccuccgucca

SEQ ID NO: 207504 - RNA, 24 nt, Human
guccccgccccucccgccccgccc

SEQ ID NO: 207505 - RNA, 24 nt, Human
guccccgccccugcguccccgccc

SEQ ID NO: 207506 - RNA, 19 nt, Human
guccccgcccggcuccgcc

SEQ ID NO: 207507 - RNA, 20 nt, Human
guccccgccggcccccgccc

SEQ ID NO: 207508 - RNA, 24 nt, Human
guccccgccucucuccuccgccca

SEQ ID NO: 207509 - RNA, 22 nt, Human
guccccgccugagacgcgccca

SEQ ID NO: 207510 - RNA, 32 nt, Human
guccccgccugagacgcgcccacuccugcccg

SEQ ID NO: 207511 - RNA, 32 nt, Human
guccccgcgcggcgcaucccagccugggcggg

SEQ ID NO: 207512 - RNA, 31 nt, Human
guccccgcggcgucucccagucgggcuccuc

SEQ ID NO: 207513 - RNA, 24 nt, Human
guccccgcugcaucccaccaccca

SEQ ID NO: 207514 - RNA, 32 nt, Human
guccccgcugggcggccccaccccugucugca

SEQ ID NO: 207515 - RNA, 32 nt, Human
guccccggcagugucuggaggcauggcugggg

SEQ ID NO: 207516 - RNA, 32 nt, Human
guccccggcauugagccuugugucuuuccagu

SEQ ID NO: 207517 - RNA, 32 nt, Human
guccccggccacgucugugcucuguccuugug

SEQ ID NO: 207518 - RNA, 32 nt, Human
guccccggccguggcugagcucugccagaaca

SEQ ID NO: 207519 - RNA, 32 nt, Human
guccccgggaaggagcaugacaagaggcugag

SEQ ID NO: 207520 - RNA, 32 nt, Human
guccccgggagaagaagcggaggagggagaga

SEQ ID NO: 207521 - RNA, 32 nt, Human
guccccgggagcacacgaacccugccaggccc

SEQ ID NO: 207522 - RNA, 32 nt, Human
guccccgggaggcagcuggggcagcagcagug

SEQ ID NO: 207523 - RNA, 32 nt, Human
guccccgggccagcagggaugggguuggggag

SEQ ID NO: 207524 - RNA, 32 nt, Human
guccccgggccuggccaacccugcugugcagg

SEQ ID NO: 207525 - RNA, 32 nt, Human
guccccggggaguuaaugcaucuacaccacug

SEQ ID NO: 207526 - RNA, 32 nt, Human
guccccggguggcugcaggcagcuccagcccg

SEQ ID NO: 207527 - RNA, 32 nt, Human
guccccgucggaaaccggaaaaagcaguucca

SEQ ID NO: 207528 - RNA, 32 nt, Human
guccccgucugugucacuugccacacacugcc

SEQ ID NO: 207529 - RNA, 24 nt, Human
guccccgugcccacggggcucccu

SEQ ID NO: 207530 - RNA, 32 nt, Human
guccccgugccuggcucuucuugccucgccac

SEQ ID NO: 207531 - RNA, 32 nt, Human
guccccguggaaguccuggaaguggauaacaa

SEQ ID NO: 207532 - RNA, 32 nt, Human
guccccguguucugcugggcucugauucugcc

SEQ ID NO: 207533 - RNA, 23 nt, Human
guccccuaaacucccccgaccca

SEQ ID NO: 207534 - RNA, 32 nt, Human
guccccuaacccccaguccucacuguccuguu

SEQ ID NO: 207535 - RNA, 32 nt, Human
guccccuaagcucccuccaggcagggaaaaga

SEQ ID NO: 207536 - RNA, 32 nt, Human
guccccuacuacccugccccugcccauuccug

SEQ ID NO: 207537 - RNA, 32 nt, Human
guccccuacucccuggacuagugcaguccuug

SEQ ID NO: 207538 - RNA, 32 nt, Human
guccccuagaagcagaaggacaaggagcaacc

SEQ ID NO: 207539 - RNA, 32 nt, Human
guccccuagcacuagacucagcuguauuguuu

SEQ ID NO: 207540 - RNA, 24 nt, Human
guccccuaggcugcagugcagugg

SEQ ID NO: 207541 - RNA, 32 nt, Human
guccccuaucuuaugggaccaugccgucagga

SEQ ID NO: 207542 - RNA, 32 nt, Human
guccccucaaacgucaugucugcccagaaccu

SEQ ID NO: 207543 - RNA, 32 nt, Human
guccccucacagggaggggagcaggggaggga

SEQ ID NO: 207544 - RNA, 32 nt, Human
guccccucacugcccucugguguccugucacc

SEQ ID NO: 207545 - RNA, 32 nt, Human
guccccucagcaccuggauggacucccacugu

SEQ ID NO: 207546 - RNA, 32 nt, Human
guccccucccagagcugguggacccagggaac

SEQ ID NO: 207547 - RNA, 32 nt, Human
guccccuccccacucuugcccaugggugacuc

SEQ ID NO: 207548 - RNA, 21 nt, Human
guccccucccccaccccugcu

SEQ ID NO: 207549 - RNA, 32 nt, Human
guccccuccccgcugaacagccuggauccugc

SEQ ID NO: 207550 - RNA, 25 nt, Human
guccccuccccucaggcucugccuu

SEQ ID NO: 207551 - RNA, 32 nt, Human
guccccuccccucaggcucugccuuggccugg

SEQ ID NO: 207552 - RNA, 32 nt, Human
guccccuccccuccaucucucuuccccauaga

SEQ ID NO: 207553 - RNA, 25 nt, Human
guccccucccucccagccaccgccu

SEQ ID NO: 207554 - RNA, 32 nt, Human
guccccuccguaggagcucacagucuagauua

SEQ ID NO: 207555 - RNA, 23 nt, Human
guccccuccuccagccgcuggca

SEQ ID NO: 207556 - RNA, 32 nt, Human
guccccuccugccaccacccgcuacccggcca

SEQ ID NO: 207557 - RNA, 32 nt, Human
guccccuccuuuccucccuccuuccuuccacu

SEQ ID NO: 207558 - RNA, 32 nt, Human
guccccuccuuucuaacagaaaugggguuaug

SEQ ID NO: 207559 - RNA, 32 nt, Human
guccccucgcuccuggcuuuggggguugggac

SEQ ID NO: 207560 - RNA, 32 nt, Human
guccccucuagucuggagcuguuaacagaauc

SEQ ID NO: 207561 - RNA, 32 nt, Human
guccccucucccgggcuccccugcugcauggu

SEQ ID NO: 207562 - RNA, 32 nt, Human
guccccucuccuccccugugccagugccaccu

SEQ ID NO: 207563 - RNA, 22 nt, Human
guccccucucuccagggcuccu

SEQ ID NO: 207564 - RNA, 32 nt, Human
guccccucugcaggcucauuccuccuuggucu

SEQ ID NO: 207565 - RNA, 21 nt, Human
guccccucugccccugccuca

SEQ ID NO: 207566 - RNA, 18 nt, Human
guccccugacaccccaag

SEQ ID NO: 207567 - RNA, 32 nt, Human
guccccugacaucagcccucccaacuccuaag

SEQ ID NO: 207568 - RNA, 23 nt, Human
guccccugaccuucacaccugcu

SEQ ID NO: 207569 - RNA, 32 nt, Human
guccccugagcacucucucagcaugaacugca

SEQ ID NO: 207570 - RNA, 32 nt, Human
guccccugcaauggcccugcugugugaugcuc

SEQ ID NO: 207571 - RNA, 32 nt, Human
guccccugcagguuccuucuagcuggagcacu

SEQ ID NO: 207572 - RNA, 32 nt, Human
guccccugcaucaggcccccagccuggccagu

SEQ ID NO: 207573 - RNA, 23 nt, Human
guccccugcccacuaccuucagg

SEQ ID NO: 207574 - RNA, 17 nt, Human
guccccugcccccugcc

SEQ ID NO: 207575 - RNA, 32 nt, Human
guccccugccugcacuggcacuuuguccaguc

SEQ ID NO: 207576 - RNA, 18 nt, Human
guccccugccugcguccu

SEQ ID NO: 207577 - RNA, 32 nt, Human
guccccugccuggaacuggcugugaagaccca

SEQ ID NO: 207578 - RNA, 32 nt, Human
guccccugcuuucauguacagcuuuuucuuua

SEQ ID NO: 207579 - RNA, 32 nt, Human
guccccuggaaaccuguguggcuaaagucugc

SEQ ID NO: 207580 - RNA, 32 nt, Human
guccccuggcagcugggcugagucugcccuga

SEQ ID NO: 207581 - RNA, 29 nt, Human
guccccuggcugcugcccucccauucucc

SEQ ID NO: 207582 - RNA, 32 nt, Human
guccccugggccccaauucagaguuauguuuu

SEQ ID NO: 207583 - RNA, 32 nt, Human
guccccuggucucuuacccugccucacacacc

SEQ ID NO: 207584 - RNA, 32 nt, Human
guccccugugcuccgugacuugcccaccugcc

SEQ ID NO: 207585 - RNA, 23 nt, Human
guccccuuccccacccucuggcc

SEQ ID NO: 207586 - RNA, 32 nt, Human
guccccuucccccaccuuccuccucacucucu

SEQ ID NO: 207587 - RNA, 17 nt, Human
guccccuucccccuguu

SEQ ID NO: 207588 - RNA, 32 nt, Human
guccccuucccuggcccccaacugacuugccu

SEQ ID NO: 207589 - RNA, 32 nt, Human
guccccuuccucacugcucucuaccuggagaa

SEQ ID NO: 207590 - RNA, 32 nt, Human
guccccuucggaggagaugauguagaggaccu

SEQ ID NO: 207591 - RNA, 32 nt, Human
guccccuucuagaccagcagaagcccaggaca

SEQ ID NO: 207592 - RNA, 32 nt, Human
guccccuucuccacugcugccucccagcagag

SEQ ID NO: 207593 - RNA, 18 nt, Human
guccccuucuccaucgcc

SEQ ID NO: 207594 - RNA, 32 nt, Human
guccccuucucuucagccccugcccacccacu

SEQ ID NO: 207595 - RNA, 32 nt, Human
guccccuucugcccuuccccuggcucccaccg

SEQ ID NO: 207596 - RNA, 32 nt, Human
guccccuucugccgccagcccuagccaguaag

SEQ ID NO: 207597 - RNA, 32 nt, Human
guccccuugaaagaaugucucggucacaucag

SEQ ID NO: 207598 - RNA, 32 nt, Human
guccccuugacacacuggaggcucccuggcua

SEQ ID NO: 207599 - RNA, 32 nt, Human
guccccuuggagcgccccaccccacaucuccc

SEQ ID NO: 207600 - RNA, 32 nt, Human
guccccuuuccuucugggcugugaauuccugu

SEQ ID NO: 207601 - RNA, 32 nt, Human
guccccuuuguguuuagaaaugaguuaaccag

SEQ ID NO: 207602 - RNA, 32 nt, Human
guccccuuuuauucccuuuuccucuuaaagag

SEQ ID NO: 207603 - RNA, 32 nt, Human
gucccgaagaugcagucuucucuccaaugaua

SEQ ID NO: 207604 - RNA, 32 nt, Human
gucccgaagugcugggauuacaggugugagcc

SEQ ID NO: 207605 - RNA, 32 nt, Human
gucccgacacagauuccuggaucucagcccca

SEQ ID NO: 207606 - RNA, 32 nt, Human
gucccgaccguugccacguauagggcacuccc

SEQ ID NO: 207607 - RNA, 19 nt, Human
gucccgagaaguuuuguca

SEQ ID NO: 207608 - RNA, 32 nt, Human
gucccgagagcaucauugucgccaguaucacg

SEQ ID NO: 207609 - RNA, 20 nt, Human
gucccgagcccccuccccgc

SEQ ID NO: 207610 - RNA, 23 nt, Human
gucccgagccccgacggccgcgu

SEQ ID NO: 207611 - RNA, 20 nt, Human
gucccgagcccggagccucg

SEQ ID NO: 207612 - RNA, 23 nt, Human
gucccgagcccucacacccugga

SEQ ID NO: 207613 - RNA, 32 nt, Human
gucccgagccuacagagccgggagcagcugag

SEQ ID NO: 207614 - RNA, 23 nt, Human
gucccgagcgcgcucgagccagc

SEQ ID NO: 207615 - RNA, 32 nt, Human
gucccgagggccugagaggccgcagggacacg

SEQ ID NO: 207616 - RNA, 32 nt, Human
gucccgaugcaagcccccucuucgcugggcuc

SEQ ID NO: 207617 - RNA, 32 nt, Human
gucccgccacugcacuccagccugggcaacag

SEQ ID NO: 207618 - RNA, 32 nt, Human
gucccgccacugcacuccagccugggugacag

SEQ ID NO: 207619 - RNA, 32 nt, Human
gucccgcccaggagccuugcaggcuggagggc

SEQ ID NO: 207620 - RNA, 32 nt, Human
gucccgccccucucccgccuuuucgcugggaa

SEQ ID NO: 207621 - RNA, 32 nt, Human
gucccgcccgccgccuccccgcgcagcccggc

SEQ ID NO: 207622 - RNA, 32 nt, Human
gucccgccgccuccggggccuccugggacccu

SEQ ID NO: 207623 - RNA, 32 nt, Human
gucccgcgccgcggcagagccagcacagccag

SEQ ID NO: 207624 - RNA, 32 nt, Human
gucccgcgcgugguuuuugugaagacacgugg

SEQ ID NO: 207625 - RNA, 32 nt, Human
gucccgcgcucccgccccagcaugacagcccc

SEQ ID NO: 207626 - RNA, 32 nt, Human
gucccgcgcugccuccgccgcuccucggaugg

SEQ ID NO: 207627 - RNA, 32 nt, Human
gucccgcggcagcuucuguugcucugggaccu

SEQ ID NO: 207628 - RNA, 32 nt, Human
gucccgcggggccugggcugcgggcccacggg

SEQ ID NO: 207629 - RNA, 32 nt, Human
gucccgcguucccagcuguaucuacugaagca

SEQ ID NO: 207630 - RNA, 21 nt, Human
gucccgcuccugcuccuuccc

SEQ ID NO: 207631 - RNA, 32 nt, Human
gucccgcugccuggagagauggcccagcccug

SEQ ID NO: 207632 - RNA, 32 nt, Human
gucccgcuggccccagcacccagguauaguua

SEQ ID NO: 207633 - RNA, 32 nt, Human
gucccgcuggcuguccccuugucggccugacc

SEQ ID NO: 207634 - RNA, 19 nt, Human
gucccgcuguggagcuguc

SEQ ID NO: 207635 - RNA, 32 nt, Human
gucccggagccggcgucucagcacacgcuccg

SEQ ID NO: 207636 - RNA, 21 nt, Human
gucccggagccggugcccuca

SEQ ID NO: 207637 - RNA, 32 nt, Human
gucccggaggcugcagagcugcuacugcugug

SEQ ID NO: 207638 - RNA, 24 nt, Human
gucccggauuuuuguuaauauuca

SEQ ID NO: 207639 - RNA, 32 nt, Human
gucccggccaccgcugccucagccucugccuc

SEQ ID NO: 207640 - RNA, 19 nt, Human
gucccggcccuggcccagc

SEQ ID NO: 207641 - RNA, 20 nt, Human
gucccggcugaagugcagug

SEQ ID NO: 207642 - RNA, 21 nt, Human
gucccggcugaagugcagugg

SEQ ID NO: 207643 - RNA, 21 nt, Human
gucccggcugacaagccagca

SEQ ID NO: 207644 - RNA, 21 nt, Human
gucccgggaaagagaacuguc

SEQ ID NO: 207645 - RNA, 32 nt, Human
gucccgggagcacccccaggaggaggggaggg

SEQ ID NO: 207646 - RNA, 32 nt, Human
gucccgggagcagcgcggcggcaccucccuca

SEQ ID NO: 207647 - RNA, 32 nt, Human
gucccgggagccaaagggcagaggcaggauca

SEQ ID NO: 207648 - RNA, 32 nt, Human
gucccgggaggacccugagugccagauucccc

SEQ ID NO: 207649 - RNA, 32 nt, Human
gucccgggaggcagccuucaccagggaccugc

SEQ ID NO: 207650 - RNA, 32 nt, Human
gucccgggcugaauucucucuccacucuucga

SEQ ID NO: 207651 - RNA, 32 nt, Human
gucccgggcugugacccuccccgaggccccgc

SEQ ID NO: 207652 - RNA, 23 nt, Human
gucccggggcccccugggccacg

SEQ ID NO: 207653 - RNA, 23 nt, Human
gucccggggcggugccugucuca

SEQ ID NO: 207654 - RNA, 32 nt, Human
gucccggguggggagccucacccuggggacau

SEQ ID NO: 207655 - RNA, 32 nt, Human
gucccggguugguggggguggagcagcacuuc

SEQ ID NO: 207656 - RNA, 32 nt, Human
gucccggucccuggccccugcccugucgcccg

SEQ ID NO: 207657 - RNA, 32 nt, Human
gucccgguccucuuccccugagguccccugau

SEQ ID NO: 207658 - RNA, 32 nt, Human
gucccguaaauguuaacacucaugaagcauac

SEQ ID NO: 207659 - RNA, 32 nt, Human
gucccguacacacaccauccugccaugagagc

SEQ ID NO: 207660 - RNA, 32 nt, Human
gucccguagcacacaguuacaguguccuaaga

SEQ ID NO: 207661 - RNA, 32 nt, Human
gucccgucaggccauagccacgcgggaggagc

SEQ ID NO: 207662 - RNA, 32 nt, Human
gucccguccugcagcagucugccuccucuuuc

SEQ ID NO: 207663 - RNA, 32 nt, Human
gucccgucucaccauccugggcuuccaacgga

SEQ ID NO: 207664 - RNA, 32 nt, Human
gucccgucugcucuccucuuacccacccccau

SEQ ID NO: 207665 - RNA, 21 nt, Human
gucccgugaggcauugccuca

SEQ ID NO: 207666 - RNA, 32 nt, Human
gucccgugcuuuggguuucuugguuuggguuu

SEQ ID NO: 207667 - RNA, 32 nt, Human
gucccguugucccauuuugcucugugaaggug

SEQ ID NO: 207668 - RNA, 32 nt, Human
gucccuaaauuguaugcauuugucuguuguug

SEQ ID NO: 207669 - RNA, 23 nt, Human
gucccuacauccuccuccuuccc

SEQ ID NO: 207670 - RNA, 32 nt, Human
gucccuaccacccaucucaucacuuuccagcc

SEQ ID NO: 207671 - RNA, 32 nt, Human
gucccuacccagcacagcaaaugguuguagua

SEQ ID NO: 207672 - RNA, 32 nt, Human
gucccuaccuccagcuuccuccagccucaaac

SEQ ID NO: 207673 - RNA, 32 nt, Human
gucccuaccuggagccucaccuccaaggaaau

SEQ ID NO: 207674 - RNA, 22 nt, Human
gucccuacuaaaaauacaaaau

SEQ ID NO: 207675 - RNA, 20 nt, Human
gucccuacuaaaauacaaaa

SEQ ID NO: 207676 - RNA, 32 nt, Human
gucccuacugcaccugucacaaagugccuucu

SEQ ID NO: 207677 - RNA, 19 nt, Human
gucccuagcauaaaaagaa

SEQ ID NO: 207678 - RNA, 32 nt, Human
gucccuaggagggaaggagcuguuggggcagg

SEQ ID NO: 207679 - RNA, 32 nt, Human
gucccuaggcuacaaugcuacacuuggcucag

SEQ ID NO: 207680 - RNA, 32 nt, Human
gucccuagguguaggaaauggaagaaaaagau

SEQ ID NO: 207681 - RNA, 32 nt, Human
gucccuauacuaauugagauguuuucagcaga

SEQ ID NO: 207682 - RNA, 18 nt, Human
gucccucacauuugauca

SEQ ID NO: 207683 - RNA, 32 nt, Human
gucccucacccaggccacgcagcuggugcggc

SEQ ID NO: 207684 - RNA, 32 nt, Human
gucccucacuggcugcccucacaagccaccug

SEQ ID NO: 207685 - RNA, 32 nt, Human
gucccucagccaccaacauccauuucagcacu

SEQ ID NO: 207686 - RNA, 32 nt, Human
gucccucagcugcagugugaagugggacacac

SEQ ID NO: 207687 - RNA, 32 nt, Human
gucccucagggagacaaguuguagaggcaaca

SEQ ID NO: 207688 - RNA, 32 nt, Human
gucccuccacccacaucccccugguccuaccc

SEQ ID NO: 207689 - RNA, 32 nt, Human
gucccuccccauucuugucuuacccucugcaa

SEQ ID NO: 207690 - RNA, 32 nt, Human
gucccucccccuuguccuuucccuucaguacc

SEQ ID NO: 207691 - RNA, 21 nt, Human
gucccucccucccuccuuccc

SEQ ID NO: 207692 - RNA, 32 nt, Human
gucccucccugccuccgccuugcccaaggcca

SEQ ID NO: 207693 - RNA, 32 nt, Human
gucccucccuggaaugugacaugaggccgacu

SEQ ID NO: 207694 - RNA, 32 nt, Human
gucccucccuuagcccaagggagaggcaauaa

SEQ ID NO: 207695 - RNA, 19 nt, Human
gucccuccgccgccgccac

SEQ ID NO: 207696 - RNA, 17 nt, Human
gucccuccggggcuccu

SEQ ID NO: 207697 - RNA, 21 nt, Human
gucccuccucaccagcucucc

SEQ ID NO: 207698 - RNA, 32 nt, Human
gucccuccuccacagcccccuccccaaaggaa

SEQ ID NO: 207699 - RNA, 32 nt, Human
gucccuccuccacgaucagcccguucccgcag

SEQ ID NO: 207700 - RNA, 32 nt, Human
gucccuccuccccucucuccgccccuuccccc

SEQ ID NO: 207701 - RNA, 32 nt, Human
gucccuccuccuuugcugccucuuucccuccu

SEQ ID NO: 207702 - RNA, 32 nt, Human
gucccuccugccuuccuucucuucccaagccc

SEQ ID NO: 207703 - RNA, 32 nt, Human
gucccuccugggaggcaagcccggggagcacc

SEQ ID NO: 207704 - RNA, 32 nt, Human
gucccucggccgaacccagcccgcgcugcucc

SEQ ID NO: 207705 - RNA, 32 nt, Human
gucccucggccuggcccgcuaugcccugcaca

SEQ ID NO: 207706 - RNA, 32 nt, Human
gucccucgggugcugugggccagauccgggcg

SEQ ID NO: 207707 - RNA, 32 nt, Human
gucccucgguccauccugcccucuguucuucc

SEQ ID NO: 207708 - RNA, 32 nt, Human
gucccucucacucccucuaccucccucuuuua

SEQ ID NO: 207709 - RNA, 32 nt, Human
gucccucuccacccucuacuaacacucugcac

SEQ ID NO: 207710 - RNA, 32 nt, Human
gucccucucccagcauugcugugcauggcucc

SEQ ID NO: 207711 - RNA, 32 nt, Human
gucccucuccggcucuagcucucuccauauaa

SEQ ID NO: 207712 - RNA, 32 nt, Human
gucccucucuccccaaccucugccagggcaau

SEQ ID NO: 207713 - RNA, 32 nt, Human
gucccucucuccuccucuuccucucucuggac

SEQ ID NO: 207714 - RNA, 32 nt, Human
gucccucugaccgaaaugcucaccucccaaac

SEQ ID NO: 207715 - RNA, 32 nt, Human
gucccucugcccacaacaccagucccaccaga

SEQ ID NO: 207716 - RNA, 32 nt, Human
gucccucugccucugcugcagacauggcgucu

SEQ ID NO: 207717 - RNA, 32 nt, Human
gucccucuggaaggcaacagcuuccagcgacu

SEQ ID NO: 207718 - RNA, 21 nt, Human
gucccucuggaccccacuggc

SEQ ID NO: 207719 - RNA, 32 nt, Human
gucccucugggaauuucuggaaucucguauuu

SEQ ID NO: 207720 - RNA, 32 nt, Human
gucccucugggagagcucugccuagucugguu

SEQ ID NO: 207721 - RNA, 17 nt, Human
gucccucuggggcccuu

SEQ ID NO: 207722 - RNA, 32 nt, Human
gucccucugucccucugacccugcacuguccc

SEQ ID NO: 207723 - RNA, 32 nt, Human
gucccucugugcuucucucuuucuccucccac

SEQ ID NO: 207724 - RNA, 32 nt, Human
gucccucuguuuccuucucuucucuuuccucc

SEQ ID NO: 207725 - RNA, 32 nt, Human
gucccucuuagcacucuagcugcccacuccag

SEQ ID NO: 207726 - RNA, 32 nt, Human
gucccucuucccaccccucucuucuagcuugg

SEQ ID NO: 207727 - RNA, 32 nt, Human
gucccucuuccucugccgggaggguguuuuca

SEQ ID NO: 207728 - RNA, 32 nt, Human
gucccugaacaggagugaugccuccaggcagg

SEQ ID NO: 207729 - RNA, 20 nt, Human
gucccugaacugccacuggc

SEQ ID NO: 207730 - RNA, 32 nt, Human
gucccugaagugacagcggagagaaccaggca

SEQ ID NO: 207731 - RNA, 32 nt, Human
gucccugacucccagucugcagccauccuggg

SEQ ID NO: 207732 - RNA, 21 nt, Human
gucccugacugauuucagcca

SEQ ID NO: 207733 - RNA, 32 nt, Human
gucccugagaagccucaugggagucagggagc

SEQ ID NO: 207734 - RNA, 32 nt, Human
gucccugagacccugagaagagcuguacauag

SEQ ID NO: 207735 - RNA, 32 nt, Human
gucccugagcagagcagagaccagccugagcc

SEQ ID NO: 207736 - RNA, 32 nt, Human
gucccugagcccccuaguccuggcuccugcuu

SEQ ID NO: 207737 - RNA, 32 nt, Human
gucccugagccgcuauauaagcgcggcaggga

SEQ ID NO: 207738 - RNA, 22 nt, Human
gucccugaggguggagggaagc

SEQ ID NO: 207739 - RNA, 32 nt, Human
gucccugcaagugcacagggaggagaggugag

SEQ ID NO: 207740 - RNA, 32 nt, Human
gucccugcacugauacagaaggcuggucuuua

SEQ ID NO: 207741 - RNA, 23 nt, Human
gucccugcacugugacugucuca

SEQ ID NO: 207742 - RNA, 32 nt, Human
gucccugcagcucugggucugguucuucaagu

SEQ ID NO: 207743 - RNA, 32 nt, Human
gucccugcaguggaggcuggccuuucaucuca

SEQ ID NO: 207744 - RNA, 32 nt, Human
gucccugcauuauuugagcaacugacaagcuu

SEQ ID NO: 207745 - RNA, 32 nt, Human
gucccugcccccgagguugucacugcaaauca

SEQ ID NO: 207746 - RNA, 32 nt, Human
gucccugcccuccccugcucccagguugaggu

SEQ ID NO: 207747 - RNA, 32 nt, Human
gucccugccuaugcugacauuccauuguagaa

SEQ ID NO: 207748 - RNA, 32 nt, Human
gucccugccuggcccuccucuggucacuucaa

SEQ ID NO: 207749 - RNA, 32 nt, Human
gucccugcgagcccucaggagcugcguggugg

SEQ ID NO: 207750 - RNA, 22 nt, Human
gucccugcggcgcgucugccuu

SEQ ID NO: 207751 - RNA, 32 nt, Human
gucccugcuagucaagagggugaggcaggaga

SEQ ID NO: 207752 - RNA, 32 nt, Human
gucccugcuccuccucuucccuuuggggcugg

SEQ ID NO: 207753 - RNA, 21 nt, Human
gucccugcucugucugccccg

SEQ ID NO: 207754 - RNA, 32 nt, Human
gucccugcucuuccuucucucuggggugcucu

SEQ ID NO: 207755 - RNA, 19 nt, Human
gucccugcuucuguuuguu

SEQ ID NO: 207756 - RNA, 32 nt, Human
gucccuggaaacucaggaaggcugacaggugg

SEQ ID NO: 207757 - RNA, 32 nt, Human
gucccuggagcgggugacacaccugagauuug

SEQ ID NO: 207758 - RNA, 32 nt, Human
gucccuggagggggcggcuccuggagaucagg

SEQ ID NO: 207759 - RNA, 24 nt, Human
gucccuggcacaccccaccaccca

SEQ ID NO: 207760 - RNA, 32 nt, Human
gucccuggcacccccaugcacaccccugccgc

SEQ ID NO: 207761 - RNA, 32 nt, Human
gucccuggcaugugccuucauguaguaggugc

SEQ ID NO: 207762 - RNA, 32 nt, Human
gucccuggccacugccccugccgcggaggcag

SEQ ID NO: 207763 - RNA, 32 nt, Human
gucccuggccuuuggacccaggcaaaggcuuc

SEQ ID NO: 207764 - RNA, 32 nt, Human
gucccuggcgccugccuuuagccugggggccc

SEQ ID NO: 207765 - RNA, 17 nt, Human
gucccuggcugccucug

SEQ ID NO: 207766 - RNA, 32 nt, Human
gucccuggcugggagcagggcuuucugguagu

SEQ ID NO: 207767 - RNA, 32 nt, Human
gucccuggcuuccugcaugggaggacuuuaug

SEQ ID NO: 207768 - RNA, 32 nt, Human
gucccuggcuuuuagaggcacacacacaaaaa

SEQ ID NO: 207769 - RNA, 32 nt, Human
gucccugggaagcacaggaagcugcuaccagu

SEQ ID NO: 207770 - RNA, 32 nt, Human
gucccugggacacacccuauccaagaagaccc

SEQ ID NO: 207771 - RNA, 32 nt, Human
gucccugggaggugggugcuggagcaggggag

SEQ ID NO: 207772 - RNA, 32 nt, Human
gucccugggcaggagugcuggugaggaggugg

SEQ ID NO: 207773 - RNA, 32 nt, Human
gucccugggcagggccagaggggagaugagac

SEQ ID NO: 207774 - RNA, 32 nt, Human
gucccugggccagcugcaucacugccugugcc

SEQ ID NO: 207775 - RNA, 32 nt, Human
gucccugggcccauggggcccggcaguggcug

SEQ ID NO: 207776 - RNA, 20 nt, Human
gucccuggggauucugcuuu

SEQ ID NO: 207777 - RNA, 24 nt, Human
gucccugggguggggauagggagc

SEQ ID NO: 207778 - RNA, 32 nt, Human
gucccugggguggggauagggagcagaugcaa

SEQ ID NO: 207779 - RNA, 32 nt, Human
gucccugggugaggagacggcuggagccccac

SEQ ID NO: 207780 - RNA, 32 nt, Human
gucccuggguucccgauccugagggauugcau

SEQ ID NO: 207781 - RNA, 27 nt, Human
gucccugguaaggagugacaaggaagc

SEQ ID NO: 207782 - RNA, 32 nt, Human
gucccuggugauuucacaccuucauucacucc

SEQ ID NO: 207783 - RNA, 32 nt, Human
gucccuggugcacauccagggaagaggagugu

SEQ ID NO: 207784 - RNA, 32 nt, Human
gucccuguaagcaucacauugcuggaggaaaa

SEQ ID NO: 207785 - RNA, 21 nt, Human
gucccuguaagugcccccuca

SEQ ID NO: 207786 - RNA, 32 nt, Human
gucccugucaucccuucagauuccagagcugg

SEQ ID NO: 207787 - RNA, 20 nt, Human
gucccuguccaggcugccca

SEQ ID NO: 207788 - RNA, 32 nt, Human
gucccugugcagaggaaaaaugaagaauucuc

SEQ ID NO: 207789 - RNA, 32 nt, Human
gucccugugcagcugggcucagacgugucuca

SEQ ID NO: 207790 - RNA, 22 nt, Human
gucccugugcccgugugcccca

SEQ ID NO: 207791 - RNA, 32 nt, Human
gucccuguggcuuuggugcgccugugugcacu

SEQ ID NO: 207792 - RNA, 32 nt, Human
gucccugugggguggcucagagacaggacccu

SEQ ID NO: 207793 - RNA, 32 nt, Human
gucccugugguggcugccccuuguaggggugg

SEQ ID NO: 207794 - RNA, 32 nt, Human
gucccuguguacaucgcagcagguguggucac

SEQ ID NO: 207795 - RNA, 18 nt, Human
gucccuguuccucacuca

SEQ ID NO: 207796 - RNA, 21 nt, Human
gucccuguuccuuuuuugccu

SEQ ID NO: 207797 - RNA, 23 nt, Human
gucccuguucucgccuuugucuu

SEQ ID NO: 207798 - RNA, 32 nt, Human
gucccuguucucuguguuccuuaccuuucugu

SEQ ID NO: 207799 - RNA, 32 nt, Human
gucccuguugcucuccuugccaaacccagucu

SEQ ID NO: 207800 - RNA, 32 nt, Human
gucccuguuggcugaguacccugguuucaguc

SEQ ID NO: 207801 - RNA, 32 nt, Human
gucccuucaccaccaucuucaguuaggccuga

SEQ ID NO: 207802 - RNA, 32 nt, Human
gucccuucaccuggccccuggcagcuucuguc

SEQ ID NO: 207803 - RNA, 32 nt, Human
gucccuucacugcacuuucuuccugccuuagg

SEQ ID NO: 207804 - RNA, 32 nt, Human
gucccuucacuuccccuacccucugccuaucu

SEQ ID NO: 207805 - RNA, 18 nt, Human
gucccuucagagcuccuu

SEQ ID NO: 207806 - RNA, 32 nt, Human
gucccuucagccugggcugaccagugcccgcc

SEQ ID NO: 207807 - RNA, 23 nt, Human
gucccuuccagacagaagcuguc

SEQ ID NO: 207808 - RNA, 32 nt, Human
gucccuucccgccacaccacagccuaauucuu

SEQ ID NO: 207809 - RNA, 32 nt, Human
gucccuucucacuuauagagcucuccaggacu

SEQ ID NO: 207810 - RNA, 32 nt, Human
gucccuucugaccacucuccugccuccagaga

SEQ ID NO: 207811 - RNA, 32 nt, Human
gucccuucugcccugugccucggugccuguga

SEQ ID NO: 207812 - RNA, 32 nt, Human
gucccuucugugcccauggucaggagcuauuc

SEQ ID NO: 207813 - RNA, 21 nt, Human
gucccuucuuggucucuucca

SEQ ID NO: 207814 - RNA, 32 nt, Human
gucccuugaaugcucccuuuuaguguuacgag

SEQ ID NO: 207815 - RNA, 32 nt, Human
gucccuugagagaugggagcugaugggaagga

SEQ ID NO: 207816 - RNA, 32 nt, Human
gucccuugagccacagcauggggcuacagaaa

SEQ ID NO: 207817 - RNA, 32 nt, Human
gucccuugagggaggaaguccugggacccagg

SEQ ID NO: 207818 - RNA, 32 nt, Human
gucccuugaguucugugucacauuccagaggc

SEQ ID NO: 207819 - RNA, 32 nt, Human
gucccuugccaggcucuuccacuuagcuaagu

SEQ ID NO: 207820 - RNA, 32 nt, Human
gucccuugccuagggggcagagggugcagugg

SEQ ID NO: 207821 - RNA, 32 nt, Human
gucccuugcuuagccugugcuggaccagcugg

SEQ ID NO: 207822 - RNA, 32 nt, Human
gucccuuggcaugaacagccugggcaccauga

SEQ ID NO: 207823 - RNA, 32 nt, Human
gucccuuguagcacaggagacuggggcuaagg

SEQ ID NO: 207824 - RNA, 32 nt, Human
gucccuuguuuccuugcuaaguaguucuacaa

SEQ ID NO: 207825 - RNA, 32 nt, Human
gucccuuuccuuugcucagcccccucuguucu

SEQ ID NO: 207826 - RNA, 32 nt, Human
gucccuuucuccccacuucuucuggcuccuca

SEQ ID NO: 207827 - RNA, 32 nt, Human
gucccuuucucuggcccuguccaugugacuuu

SEQ ID NO: 207828 - RNA, 32 nt, Human
gucccuuugaagaacugacagggacuuggucu

SEQ ID NO: 207829 - RNA, 32 nt, Human
gucccuuugccggccccuacaggcuggggugg

SEQ ID NO: 207830 - RNA, 19 nt, Human
gucccuuuuaguuugauca

SEQ ID NO: 207831 - RNA, 32 nt, Human
gucccuuuuguuacugacaguugccuuggucc

SEQ ID NO: 207832 - RNA, 32 nt, Human
guccgaaacagaggaggaggagggaggggagu

SEQ ID NO: 207833 - RNA, 32 nt, Human
guccgaaagcuucguuccagagcccagcauga

SEQ ID NO: 207834 - RNA, 32 nt, Human
guccgaccagcuguccuggacucgcucccaca

SEQ ID NO: 207835 - RNA, 32 nt, Human
guccgaccugggcuccucagggccccggggca

SEQ ID NO: 207836 - RNA, 32 nt, Human
guccgagaccagccugggcaacauagugagac

SEQ ID NO: 207837 - RNA, 17 nt, Human
guccgagagggaagcug

SEQ ID NO: 207838 - RNA, 32 nt, Human
guccgagauggcuucuggaggaaggcgccccu

SEQ ID NO: 207839 - RNA, 32 nt, Human
guccgagcccugugggcucugcggaugcacgc

SEQ ID NO: 207840 - RNA, 32 nt, Human
guccgagcucuacucaccucccaaacccagcc

SEQ ID NO: 207841 - RNA, 32 nt, Human
guccgaggaggaggagaaggaggccugcagaa

SEQ ID NO: 207842 - RNA, 32 nt, Human
guccgaggcagacacccccaccccugccuccu

SEQ ID NO: 207843 - RNA, 32 nt, Human
guccgaggccuugccagucgucuugccagacg

SEQ ID NO: 207844 - RNA, 32 nt, Human
guccgaguaggggccucugccccaccaggaug

SEQ ID NO: 207845 - RNA, 32 nt, Human
guccgagugaagaucacagugaaggagcugcu

SEQ ID NO: 207846 - RNA, 23 nt, Human
guccgaguggaaugggaagggaa

SEQ ID NO: 207847 - RNA, 32 nt, Human
guccgaguucccagaguuucccucuguggugc

SEQ ID NO: 207848 - RNA, 32 nt, Human
guccgaugauucuucaguaaagauagauuccc

SEQ ID NO: 207849 - RNA, 20 nt, Human
guccgauggacaguuccaag

SEQ ID NO: 207850 - RNA, 32 nt, Human
guccgcacaguguccagcagcaauuuauucuu

SEQ ID NO: 207851 - RNA, 32 nt, Human
guccgcagacugggaugagucuacucgagcau

SEQ ID NO: 207852 - RNA, 32 nt, Human
guccgcagcagccccaugccuccuggacgccc

SEQ ID NO: 207853 - RNA, 32 nt, Human
guccgcaggccuggaugcccucugccucaucu

SEQ ID NO: 207854 - RNA, 32 nt, Human
guccgcaguaucuaaguaucucagccuucauc

SEQ ID NO: 207855 - RNA, 32 nt, Human
guccgccaggaugcaugugcucugccuuccua

SEQ ID NO: 207856 - RNA, 24 nt, Human
guccgccaggcuggagugcagugg

SEQ ID NO: 207857 - RNA, 23 nt, Human
guccgccauccugcccaccacca

SEQ ID NO: 207858 - RNA, 28 nt, Human
guccgcccaagugcccuccucucagcag

SEQ ID NO: 207859 - RNA, 32 nt, Human
guccgcccaagugcccuccucucagcaggcgg

SEQ ID NO: 207860 - RNA, 17 nt, Human
guccgcccaccacugcc

SEQ ID NO: 207861 - RNA, 32 nt, Human
guccgcccaccacugcccugucuguugcgaca

SEQ ID NO: 207862 - RNA, 32 nt, Human
guccgcccaucuguaagcccaucucuguccca

SEQ ID NO: 207863 - RNA, 32 nt, Human
guccgccccaaaacccggccuuggucccuggc

SEQ ID NO: 207864 - RNA, 17 nt, Human
guccgccccgccagcgc

SEQ ID NO: 207865 - RNA, 32 nt, Human
guccgcccgagagcaguguccucggcgaguau

SEQ ID NO: 207866 - RNA, 32 nt, Human
guccgcccucucucccugcucggcggccucgu

SEQ ID NO: 207867 - RNA, 32 nt, Human
guccgccgggccugagcacacccgaggcuccc

SEQ ID NO: 207868 - RNA, 32 nt, Human
guccgccggguuaggaagccacugccuggcag

SEQ ID NO: 207869 - RNA, 32 nt, Human
guccgccucccaguaccaccagugccacagcc

SEQ ID NO: 207870 - RNA, 32 nt, Human
guccgccucccggguugacaccauuuuccugc

SEQ ID NO: 207871 - RNA, 32 nt, Human
guccgccucuccauaucuccccauuucccaca

SEQ ID NO: 207872 - RNA, 32 nt, Human
guccgccugccugccugcgcuuccauccaucc

SEQ ID NO: 207873 - RNA, 32 nt, Human
guccgccugccugugcugugcuugcgacgugc

SEQ ID NO: 207874 - RNA, 24 nt, Human
guccgcgaaggcgcgggcucgggg

SEQ ID NO: 207875 - RNA, 32 nt, Human
guccgcgacuccgcccccaccagaggggcuag

SEQ ID NO: 207876 - RNA, 22 nt, Human
guccgcgagccaucguucgggg

SEQ ID NO: 207877 - RNA, 32 nt, Human
guccgcgaugaggacaucucugggacaccugg

SEQ ID NO: 207878 - RNA, 32 nt, Human
guccgcgccuccauugcgcucuccucuucacu

SEQ ID NO: 207879 - RNA, 32 nt, Human
guccgcgccuugcagcuccuccagagggacgc

SEQ ID NO: 207880 - RNA, 32 nt, Human
guccgcgggcgaggggacgggacugggcccug

SEQ ID NO: 207881 - RNA, 23 nt, Human
guccgcggggccgaccucggaga

SEQ ID NO: 207882 - RNA, 32 nt, Human
guccgcgucucccuggcuuuccaagggcuaau

SEQ ID NO: 207883 - RNA, 23 nt, Human
guccgcgugcccuugcuuuggug

SEQ ID NO: 207884 - RNA, 32 nt, Human
guccgcuaggcucggacgaccugcugagccuc

SEQ ID NO: 207885 - RNA, 21 nt, Human
guccgcuaggcugucugccuc

SEQ ID NO: 207886 - RNA, 32 nt, Human
guccgcucagggugggauggcagacauggcag

SEQ ID NO: 207887 - RNA, 21 nt, Human
guccgcucccgagcucgguga

SEQ ID NO: 207888 - RNA, 18 nt, Human
guccgcucucaguaauca

SEQ ID NO: 207889 - RNA, 32 nt, Human
guccgcucuccucagcaugagcggccgguagg

SEQ ID NO: 207890 - RNA, 32 nt, Human
guccgcucugcugccgccgcuguugcagccac

SEQ ID NO: 207891 - RNA, 32 nt, Human
guccgcugcuucuugguugccgagacagagag

SEQ ID NO: 207892 - RNA, 32 nt, Human
guccgcugguuaugagguguagggaggcaguu

SEQ ID NO: 207893 - RNA, 32 nt, Human
guccgcuguccucugcugccaguccccugccc

SEQ ID NO: 207894 - RNA, 32 nt, Human
guccggaaaugugguggcauucaaccacuugu

SEQ ID NO: 207895 - RNA, 32 nt, Human
guccggaacacugaaaccagucaucacugcau

SEQ ID NO: 207896 - RNA, 32 nt, Human
guccggaagaaaaacaguccgcgacagcuagg

SEQ ID NO: 207897 - RNA, 32 nt, Human
guccggagagcugccuuggacucuccaaugca

SEQ ID NO: 207898 - RNA, 32 nt, Human
guccggagcgagucugggucucagccccgcga

SEQ ID NO: 207899 - RNA, 32 nt, Human
guccggagcugcagcagaggccacacccaggg

SEQ ID NO: 207900 - RNA, 32 nt, Human
guccggaggaagagcgucugcaaaacuggguu

SEQ ID NO: 207901 - RNA, 32 nt, Human
guccggagggcagaaagaggguggggucccgg

SEQ ID NO: 207902 - RNA, 32 nt, Human
guccggauuucuaacagucccugcuuuggggg

SEQ ID NO: 207903 - RNA, 19 nt, Human
guccggcagcuuggcgucc

SEQ ID NO: 207904 - RNA, 32 nt, Human
guccggcauccccuccccagacugccugcugu

SEQ ID NO: 207905 - RNA, 32 nt, Human
guccggccgagcugcccggcgggcuggucccc

SEQ ID NO: 207906 - RNA, 32 nt, Human
guccggccugagcgccucccuccuggagcggc

SEQ ID NO: 207907 - RNA, 32 nt, Human
guccggccugggaaacccucuccaucucccaa

SEQ ID NO: 207908 - RNA, 32 nt, Human
guccggcuaagcuugguggagcauuuucccau

SEQ ID NO: 207909 - RNA, 32 nt, Human
guccggcucacugcaguuuugaccucccaggc

SEQ ID NO: 207910 - RNA, 32 nt, Human
guccggcuccccucugccccuggaggccagca

SEQ ID NO: 207911 - RNA, 32 nt, Human
guccggcucugaggugguggaggcggcggagg

SEQ ID NO: 207912 - RNA, 18 nt, Human
guccggcuucagugcccg

SEQ ID NO: 207913 - RNA, 32 nt, Human
guccgggagcggggcacccacugugggucucc

SEQ ID NO: 207914 - RNA, 32 nt, Human
guccgggaguuugagucugcagugagcuauga

SEQ ID NO: 207915 - RNA, 32 nt, Human
guccgggauccggggugucuguccgcagacug

SEQ ID NO: 207916 - RNA, 32 nt, Human
guccgggcaagaaccgcuuguaguuugguuua

SEQ ID NO: 207917 - RNA, 22 nt, Human
guccgggcccccggcacuuccu

SEQ ID NO: 207918 - RNA, 32 nt, Human
guccgggccccgaggcgcagcagggcaccagg

SEQ ID NO: 207919 - RNA, 32 nt, Human
guccgggccccgcccccgucauggcgcccgag

SEQ ID NO: 207920 - RNA, 32 nt, Human
guccgggccgcuggugaucuccgguagcacuc

SEQ ID NO: 207921 - RNA, 32 nt, Human
guccgggccgguugcugaaugaggggagccgg

SEQ ID NO: 207922 - RNA, 32 nt, Human
guccgggcgaugacacuccgguccccugcgag

SEQ ID NO: 207923 - RNA, 32 nt, Human
guccgggcuugaagauuuccgauucauguaca

SEQ ID NO: 207924 - RNA, 32 nt, Human
guccggggacaggccagccuggcgggguccac

SEQ ID NO: 207925 - RNA, 32 nt, Human
guccggggaguggcguuggcugcuagagcgau

SEQ ID NO: 207926 - RNA, 32 nt, Human
guccgggggccccagccaagggacacaucuca

SEQ ID NO: 207927 - RNA, 32 nt, Human
guccgggggugagugguacccaacgggccggg

SEQ ID NO: 207928 - RNA, 32 nt, Human
guccgguacagucagcagagugcagggugcgg

SEQ ID NO: 207929 - RNA, 22 nt, Human
guccgguaucccuuuuccuccc

SEQ ID NO: 207930 - RNA, 32 nt, Human
guccggucgccaggacugucucugaggcagaa

SEQ ID NO: 207931 - RNA, 32 nt, Human
guccggugccucccccaacccccacacccaug

SEQ ID NO: 207932 - RNA, 32 nt, Human
guccggugcuaccacaccgugcccucagugga

SEQ ID NO: 207933 - RNA, 32 nt, Human
guccggugggacagugucuccagguagugagg

SEQ ID NO: 207934 - RNA, 21 nt, Human
guccguacauccuuccuucuc

SEQ ID NO: 207935 - RNA, 32 nt, Human
guccgucacaggcagugaggaugagagggggu

SEQ ID NO: 207936 - RNA, 32 nt, Human
guccgucagacaucauacaagaacuaugugaa

SEQ ID NO: 207937 - RNA, 32 nt, Human
guccguccccggugcugccugcgcguucaccu

SEQ ID NO: 207938 - RNA, 32 nt, Human
guccgucggcccagacugaagugcaguggcac

SEQ ID NO: 207939 - RNA, 32 nt, Human
guccgucugcagcugcgugacugucugucucu

SEQ ID NO: 207940 - RNA, 32 nt, Human
guccgucugucugucugucuguggugguuucu

SEQ ID NO: 207941 - RNA, 32 nt, Human
guccgucuucacggauuagcugugcuguuaug

SEQ ID NO: 207942 - RNA, 32 nt, Human
guccgugacuccuggcccuucucuguggaucc

SEQ ID NO: 207943 - RNA, 32 nt, Human
guccgugagcuggaacugggcacacgccaucc

SEQ ID NO: 207944 - RNA, 21 nt, Human
guccgugagggcgcgcgggga

SEQ ID NO: 207945 - RNA, 32 nt, Human
guccgugcuugcuaucugucucauguuacaga

SEQ ID NO: 207946 - RNA, 22 nt, Human
guccguggaagccucugccuca

SEQ ID NO: 207947 - RNA, 32 nt, Human
guccguggcauacagaacacacugcagcuucu

SEQ ID NO: 207948 - RNA, 32 nt, Human
guccguggcuuaggcccugccucugcaugggg

SEQ ID NO: 207949 - RNA, 32 nt, Human
guccgugggaacuccacugggguggaugggcu

SEQ ID NO: 207950 - RNA, 32 nt, Human
guccgugggagguggaggccgaggacauuuuc

SEQ ID NO: 207951 - RNA, 32 nt, Human
guccgugucugugucuguccauacgugugagu

SEQ ID NO: 207952 - RNA, 32 nt, Human
guccguguuauuuauugcuacuuccugccugg

SEQ ID NO: 207953 - RNA, 32 nt, Human
guccguucucacccucuccguggcuguacauu

SEQ ID NO: 207954 - RNA, 32 nt, Human
guccguucuccccgcccggucgccgcccgcca

SEQ ID NO: 207955 - RNA, 32 nt, Human
guccguugucuucuccagcauccuugggccca

SEQ ID NO: 207956 - RNA, 32 nt, Human
guccguuuuacugugaauauagcaauauagua

SEQ ID NO: 207957 - RNA, 32 nt, Human
guccuaaaaauacaaaaauuaguugggugcgg

SEQ ID NO: 207958 - RNA, 24 nt, Human
guccuaaaaaucuccuaaaaccag

SEQ ID NO: 207959 - RNA, 32 nt, Human
guccuaaaccagccugggcaacauagugauac

SEQ ID NO: 207960 - RNA, 32 nt, Human
guccuaaagccuuugccauuccuaauacucgu

SEQ ID NO: 207961 - RNA, 32 nt, Human
guccuaaaucacucaucuggccuggauaaucu

SEQ ID NO: 207962 - RNA, 32 nt, Human
guccuaacccccaguaacugugaauguggcuu

SEQ ID NO: 207963 - RNA, 32 nt, Human
guccuaacuggucuuuaagguccuccuaguac

SEQ ID NO: 207964 - RNA, 32 nt, Human
guccuaagagcugggcaccaggaagcgaaggc

SEQ ID NO: 207965 - RNA, 32 nt, Human
guccuaagauacugcuaucauucuucgcuaau

SEQ ID NO: 207966 - RNA, 32 nt, Human
guccuaaggagaaaccuuuaaccacaaaguuu

SEQ ID NO: 207967 - RNA, 32 nt, Human
guccuaaugauggcauuagacuuucauaaugu

SEQ ID NO: 207968 - RNA, 18 nt, Human
guccuaauuaaaacuuua

SEQ ID NO: 207969 - RNA, 32 nt, Human
guccuaauuuuccuccugucuaacuggaggga

SEQ ID NO: 207970 - RNA, 32 nt, Human
guccuacacucacucuccucuggcaccaauau

SEQ ID NO: 207971 - RNA, 32 nt, Human
guccuacagagggagaggccagagaagcugca

SEQ ID NO: 207972 - RNA, 32 nt, Human
guccuacccagccuggaucugagcucugugcc

SEQ ID NO: 207973 - RNA, 32 nt, Human
guccuacccaggagggagagcgcagcugcugc

SEQ ID NO: 207974 - RNA, 32 nt, Human
guccuaccugguguccuccaugagaaucauac

SEQ ID NO: 207975 - RNA, 32 nt, Human
guccuacguccaagguggcagaugucuucccu

SEQ ID NO: 207976 - RNA, 32 nt, Human
guccuacuagaaaggguuagcauuuuaagggg

SEQ ID NO: 207977 - RNA, 32 nt, Human
guccuacugcugagccaagacucagucacucu

SEQ ID NO: 207978 - RNA, 23 nt, Human
guccuacuugaacaaacacaucc

SEQ ID NO: 207979 - RNA, 32 nt, Human
guccuacuuuccucauugccuaggcaaccauu

SEQ ID NO: 207980 - RNA, 21 nt, Human
guccuagaacaggaacucuga

SEQ ID NO: 207981 - RNA, 32 nt, Human
guccuagacacacauuagacucagggaguuuu

SEQ ID NO: 207982 - RNA, 32 nt, Human
guccuagagcagcuccagcaggauggcggcuc

SEQ ID NO: 207983 - RNA, 32 nt, Human
guccuagagcugggacaggucacgccugccuc

SEQ ID NO: 207984 - RNA, 32 nt, Human
guccuagaguccaauaaaaucgcugccuccca

SEQ ID NO: 207985 - RNA, 32 nt, Human
guccuagaguuuuccaggggguucugagggaa

SEQ ID NO: 207986 - RNA, 32 nt, Human
guccuagcagaaggcauugaggugagggauca

SEQ ID NO: 207987 - RNA, 32 nt, Human
guccuagcccauuucagcacccugccacuugg

SEQ ID NO: 207988 - RNA, 17 nt, Human
guccuagcccuagugag

SEQ ID NO: 207989 - RNA, 32 nt, Human
guccuagcuguguuuagaacagaacaucucua

SEQ ID NO: 207990 - RNA, 32 nt, Human
guccuagcuuggugacugggaacugccacaua

SEQ ID NO: 207991 - RNA, 32 nt, Human
guccuaggugggguucucuuuguugccuacca

SEQ ID NO: 207992 - RNA, 32 nt, Human
guccuagucccucccuucccucuccuugagug

SEQ ID NO: 207993 - RNA, 32 nt, Human
guccuagugccggagcccaugcuauuccaggc

SEQ ID NO: 207994 - RNA, 32 nt, Human
guccuaguuauuguccuugaaacccgagccau

SEQ ID NO: 207995 - RNA, 32 nt, Human
guccuaucuaaugcaugagauggcgguaagcc

SEQ ID NO: 207996 - RNA, 32 nt, Human
guccuaucucugagacauuuugaagucucaca

SEQ ID NO: 207997 - RNA, 18 nt, Human
guccucaaacaagccugu

SEQ ID NO: 207998 - RNA, 32 nt, Human
guccucaaacuaaaggccacagaaaugggcac

SEQ ID NO: 207999 - RNA, 32 nt, Human
guccucaaauccggcugaggcagcagcuggca

SEQ ID NO: 208000 - RNA, 32 nt, Human
guccucaacuagacaucugccaaaaauaucau

SEQ ID NO: 208001 - RNA, 32 nt, Human
guccucaagggggaacuggcacugugaccuua

SEQ ID NO: 208002 - RNA, 32 nt, Human
guccucaaucagccucuccaacugccaccaag

SEQ ID NO: 208003 - RNA, 22 nt, Human
guccucacaacuucucugcaca

SEQ ID NO: 208004 - RNA, 32 nt, Human
guccucacagcccucacucgcucgcucacucu

SEQ ID NO: 208005 - RNA, 32 nt, Human
guccucaccagggcccaaccaggcuggcaccc

SEQ ID NO: 208006 - RNA, 32 nt, Human
guccucaccucuccccuaguacacuucugaga

SEQ ID NO: 208007 - RNA, 32 nt, Human
guccucacuacagcaaauaagaugugucccag

SEQ ID NO: 208008 - RNA, 32 nt, Human
guccucacuacucugugucuucugcuuuuagg

SEQ ID NO: 208009 - RNA, 32 nt, Human
guccucacucacuggcuuugugcuucucuucc

SEQ ID NO: 208010 - RNA, 32 nt, Human
guccucacuccucuguggcuuggcuguacuug

SEQ ID NO: 208011 - RNA, 18 nt, Human
guccucacucuguguccu

SEQ ID NO: 208012 - RNA, 32 nt, Human
guccucacugaagcuucucucucuggagccug

SEQ ID NO: 208013 - RNA, 32 nt, Human
guccucagaccccugaggugcaggaugugggg

SEQ ID NO: 208014 - RNA, 32 nt, Human
guccucagagccucgcaggugcccucacuuac

SEQ ID NO: 208015 - RNA, 32 nt, Human
guccucagaggaccagcugggaggacugguug

SEQ ID NO: 208016 - RNA, 32 nt, Human
guccucagaggaggaggaggaggaggcagcuc

SEQ ID NO: 208017 - RNA, 32 nt, Human
guccucagaggauggcgaggcagccgggcagu

SEQ ID NO: 208018 - RNA, 32 nt, Human
guccucagcacacccacgcccuucaucauugg

SEQ ID NO: 208019 - RNA, 22 nt, Human
guccucagccaccagacuguua

SEQ ID NO: 208020 - RNA, 23 nt, Human
guccucagccccaagacccagca

SEQ ID NO: 208021 - RNA, 32 nt, Human
guccucagccuauccccuggagcuuggauacu

SEQ ID NO: 208022 - RNA, 23 nt, Human
guccucagcgggcugagcugcca

SEQ ID NO: 208023 - RNA, 32 nt, Human
guccucagcguuuaucucaggugcggaagguc

SEQ ID NO: 208024 - RNA, 32 nt, Human
guccucagcugcacugcggccugguggcagug

SEQ ID NO: 208025 - RNA, 32 nt, Human
guccucagcuuaccaucuccucacaccccaga

SEQ ID NO: 208026 - RNA, 32 nt, Human
guccucagggagucugugucccacacuggggg

SEQ ID NO: 208027 - RNA, 32 nt, Human
guccucagggaguuucuuuggagagagaagag

SEQ ID NO: 208028 - RNA, 32 nt, Human
guccucaggggcccugcacauucaaucugaag

SEQ ID NO: 208029 - RNA, 31 nt, Human
guccucagucacucugcuguuggagagugcu

SEQ ID NO: 208030 - RNA, 32 nt, Human
guccucagucccugccugcaacuagguugcca

SEQ ID NO: 208031 - RNA, 32 nt, Human
guccucaguguccucaggggccugcccagugc

SEQ ID NO: 208032 - RNA, 32 nt, Human
guccucaguucugcggagacagaguccccaca

SEQ ID NO: 208033 - RNA, 32 nt, Human
guccucaguuuuuccuagucauaaugucauac

SEQ ID NO: 208034 - RNA, 18 nt, Human
guccucauauuucuuucc

SEQ ID NO: 208035 - RNA, 32 nt, Human
guccucaucugcaaagcauggagaguggcauc

SEQ ID NO: 208036 - RNA, 32 nt, Human
guccucaugauaucugcuaucaguggggaaaa

SEQ ID NO: 208037 - RNA, 32 nt, Human
guccucaugccaccccacagcuccaggaaccu

SEQ ID NO: 208038 - RNA, 32 nt, Human
guccucaugccuguaucccagcacuuugggag

SEQ ID NO: 208039 - RNA, 32 nt, Human
guccucaugccuguauucuccaggaaacuugu

SEQ ID NO: 208040 - RNA, 32 nt, Human
guccucauggagaacccaggggacagcuggug

SEQ ID NO: 208041 - RNA, 31 nt, Human
guccucaugguuccuccagucuggacucugc

SEQ ID NO: 208042 - RNA, 32 nt, Human
guccucauguguacagugcaggcccuguggcc

SEQ ID NO: 208043 - RNA, 23 nt, Human
guccucauuagguguuggccuca

SEQ ID NO: 208044 - RNA, 32 nt, Human
guccucauugaauguucugguucaaggcucca

SEQ ID NO: 208045 - RNA, 32 nt, Human
guccuccaacaugaagguguuugcuaagauuc

SEQ ID NO: 208046 - RNA, 32 nt, Human
guccuccaagaagaaagcaccaagacaacauu

SEQ ID NO: 208047 - RNA, 22 nt, Human
guccuccacaccacacccagug

SEQ ID NO: 208048 - RNA, 32 nt, Human
guccuccaccacucaccucuugguuagcggga

SEQ ID NO: 208049 - RNA, 32 nt, Human
guccuccaccucaguacuguggacaucucggg

SEQ ID NO: 208050 - RNA, 32 nt, Human
guccuccacugccggggcugggcccggccgcg

SEQ ID NO: 208051 - RNA, 32 nt, Human
guccuccagaacucuuccuccaaggacagaag

SEQ ID NO: 208052 - RNA, 19 nt, Human
guccuccagaauaccaagu

SEQ ID NO: 208053 - RNA, 32 nt, Human
guccuccagagcucuguggccccgcucggauc

SEQ ID NO: 208054 - RNA, 32 nt, Human
guccuccagaggggucacguguaggagugaga

SEQ ID NO: 208055 - RNA, 32 nt, Human
guccuccagcagaaaggggcgggggaaaaggu

SEQ ID NO: 208056 - RNA, 32 nt, Human
guccuccagcugccaucgccuccugggugaag

SEQ ID NO: 208057 - RNA, 23 nt, Human
guccuccaggcuggagugcaaug

SEQ ID NO: 208058 - RNA, 24 nt, Human
guccuccaggcuggagugcaauga

SEQ ID NO: 208059 - RNA, 32 nt, Human
guccuccagggggagcugggguugcagggcaa

SEQ ID NO: 208060 - RNA, 32 nt, Human
guccuccagguaacugugaugcgggggucagc

SEQ ID NO: 208061 - RNA, 32 nt, Human
guccuccaggugacagaggguggcaaggugac

SEQ ID NO: 208062 - RNA, 32 nt, Human
guccucccaaaguacugggauuacaggcguga

SEQ ID NO: 208063 - RNA, 32 nt, Human
guccucccaaagugcugggauuaauggcguga

SEQ ID NO: 208064 - RNA, 32 nt, Human
guccucccaaagugcugggauuacaggccuga

SEQ ID NO: 208065 - RNA, 32 nt, Human
guccucccaaagugcugggauuacagguguga

SEQ ID NO: 208066 - RNA, 32 nt, Human
guccucccaaagugcugggauugaaggcguga

SEQ ID NO: 208067 - RNA, 32 nt, Human
guccucccaaggugcugggauuacaagcguga

SEQ ID NO: 208068 - RNA, 32 nt, Human
guccucccacagagacagaggggaacaaguag

SEQ ID NO: 208069 - RNA, 32 nt, Human
guccucccaucuucaacaguuaucuccaaagg

SEQ ID NO: 208070 - RNA, 32 nt, Human
guccucccauuucuaaagcugaaugucaaaca

SEQ ID NO: 208071 - RNA, 21 nt, Human
guccuccccacagcaccacgg

SEQ ID NO: 208072 - RNA, 32 nt, Human
guccuccccacccuccuuccucugucucccug

SEQ ID NO: 208073 - RNA, 32 nt, Human
guccuccccagccuccugagacuccggugggc

SEQ ID NO: 208074 - RNA, 32 nt, Human
guccuccccagcucuguuuccucuacuccugg

SEQ ID NO: 208075 - RNA, 32 nt, Human
guccuccccaguaggaggagacaggagucucu

SEQ ID NO: 208076 - RNA, 32 nt, Human
guccuccccaugugcugggauuacaggcguga

SEQ ID NO: 208077 - RNA, 32 nt, Human
guccuccccugccugccugauuccauggcugu

SEQ ID NO: 208078 - RNA, 32 nt, Human
guccuccccugggcaccccucacuuucccuga

SEQ ID NO: 208079 - RNA, 32 nt, Human
guccuccccugucuccuuuccuccuccugggu

SEQ ID NO: 208080 - RNA, 32 nt, Human
guccucccgccaucuuccuuucuuggauggau

SEQ ID NO: 208081 - RNA, 32 nt, Human
guccucccgccugugggagggagggagggcug

SEQ ID NO: 208082 - RNA, 32 nt, Human
guccucccggggcuggcucucuccccaggccc

SEQ ID NO: 208083 - RNA, 32 nt, Human
guccucccuccagcuucccucaugguggcagc

SEQ ID NO: 208084 - RNA, 32 nt, Human
guccucccuccccaaccuccuccauuucccca

SEQ ID NO: 208085 - RNA, 32 nt, Human
guccucccucccccuucuccuucacccccaag

SEQ ID NO: 208086 - RNA, 32 nt, Human
guccucccuccccucccucagccccuucccug

SEQ ID NO: 208087 - RNA, 32 nt, Human
guccucccuccccucccucaguccucccuccc

SEQ ID NO: 208088 - RNA, 32 nt, Human
guccucccuccuugcugccucuucccaccagc

SEQ ID NO: 208089 - RNA, 32 nt, Human
guccucccucugcaagcucuguccucauugca

SEQ ID NO: 208090 - RNA, 32 nt, Human
guccucccugcaggaggcugaguguaaagagu

SEQ ID NO: 208091 - RNA, 32 nt, Human
guccucccugccccucuccccuucacaccugc

SEQ ID NO: 208092 - RNA, 32 nt, Human
guccucccugccucuccgucuuguaaugaguu

SEQ ID NO: 208093 - RNA, 32 nt, Human
guccucccugcgucuggccucugggugggugg

SEQ ID NO: 208094 - RNA, 32 nt, Human
guccucccuucccagccucccuuugggccucc

SEQ ID NO: 208095 - RNA, 32 nt, Human
guccucccuucccugcagcuccagucagugug

SEQ ID NO: 208096 - RNA, 32 nt, Human
guccucccuuggacuagaaaucugcagcaguu

SEQ ID NO: 208097 - RNA, 32 nt, Human
guccucccuuguggcuuccucaguuccugccc

SEQ ID NO: 208098 - RNA, 19 nt, Human
guccuccgcccgguggccc

SEQ ID NO: 208099 - RNA, 32 nt, Human
guccuccggggcccagccucaggcaggaaaca

SEQ ID NO: 208100 - RNA, 32 nt, Human
guccuccgggggcggaggcagcugaggcgcuu

SEQ ID NO: 208101 - RNA, 32 nt, Human
guccuccguagcucuggaguccuggccugccg

SEQ ID NO: 208102 - RNA, 32 nt, Human
guccuccuacaaggaagauccucuuuguuugu

SEQ ID NO: 208103 - RNA, 32 nt, Human
guccuccuagcucugaagcuaaggcugcagag

SEQ ID NO: 208104 - RNA, 32 nt, Human
guccuccuagggugcccuugagccgcaaaacu

SEQ ID NO: 208105 - RNA, 32 nt, Human
guccuccuauccaccugcauccacacauggcc

SEQ ID NO: 208106 - RNA, 32 nt, Human
guccuccucacugcagcccccacagccucagg

SEQ ID NO: 208107 - RNA, 32 nt, Human
guccuccuccccucagcuuugcuaauaccagu

SEQ ID NO: 208108 - RNA, 32 nt, Human
guccuccugcagcuggagccuucaggccguau

SEQ ID NO: 208109 - RNA, 32 nt, Human
guccuccugccucagccuucugagucucugga

SEQ ID NO: 208110 - RNA, 32 nt, Human
guccuccugccuccucuucuccuuggcugguu

SEQ ID NO: 208111 - RNA, 32 nt, Human
guccuccugccugcccugagccacuguuccca

SEQ ID NO: 208112 - RNA, 32 nt, Human
guccuccuggacaggugcugugaccucgugca

SEQ ID NO: 208113 - RNA, 32 nt, Human
guccuccugggggaugggcugagacccucaga

SEQ ID NO: 208114 - RNA, 32 nt, Human
guccuccuguccccucuccucccagccaccau

SEQ ID NO: 208115 - RNA, 20 nt, Human
guccuccugucccugcugca

SEQ ID NO: 208116 - RNA, 32 nt, Human
guccuccugugcucaccucccugaccucugug

SEQ ID NO: 208117 - RNA, 32 nt, Human
guccuccuucugcuuuuacuucuccugcauga

SEQ ID NO: 208118 - RNA, 32 nt, Human
guccuccuucuuucacuaacuucuggacuuuc

SEQ ID NO: 208119 - RNA, 32 nt, Human
guccuccuuuucuccccgccccuucuccuccu

SEQ ID NO: 208120 - RNA, 32 nt, Human
guccuccuuuuguccaugaaucauguuuaccc

SEQ ID NO: 208121 - RNA, 32 nt, Human
guccucgcaggcaccacauacuuauucggagg

SEQ ID NO: 208122 - RNA, 32 nt, Human
guccucgccagccugcgucccagggcaggcgg

SEQ ID NO: 208123 - RNA, 32 nt, Human
guccucgccgugugccuugccucugcccucca

SEQ ID NO: 208124 - RNA, 32 nt, Human
guccucgcuagugccagagaagccccuggguc

SEQ ID NO: 208125 - RNA, 32 nt, Human
guccucggcuaaggguacaggagagggcaggg

SEQ ID NO: 208126 - RNA, 32 nt, Human
guccucgguccccagggcgcagcuguuggggc

SEQ ID NO: 208127 - RNA, 32 nt, Human
guccucgucaucucacuugggggccugcaugu

SEQ ID NO: 208128 - RNA, 31 nt, Human
guccucgucccuccugggccugugcaccggu

SEQ ID NO: 208129 - RNA, 32 nt, Human
guccucguggccagccaagaugguugcccccg

SEQ ID NO: 208130 - RNA, 32 nt, Human
guccucguggugagucgcugaccacggcuucc

SEQ ID NO: 208131 - RNA, 32 nt, Human
guccucuacaggcucaagcuuaucugggccuc

SEQ ID NO: 208132 - RNA, 32 nt, Human
guccucuacuugggaucucaggaggcugcaau

SEQ ID NO: 208133 - RNA, 32 nt, Human
guccucuaggaugcagcugccagauccacuca

SEQ ID NO: 208134 - RNA, 32 nt, Human
guccucuaggcaggcagggugcuccugguguc

SEQ ID NO: 208135 - RNA, 32 nt, Human
guccucuaggccugggcugggcuccaggccag

SEQ ID NO: 208136 - RNA, 32 nt, Human
guccucuagggcccugauccagccccugggcc

SEQ ID NO: 208137 - RNA, 32 nt, Human
guccucucagaaccccagccuugaaaauagug

SEQ ID NO: 208138 - RNA, 32 nt, Human
guccucuccacacaucuuuugggcccccagcu

SEQ ID NO: 208139 - RNA, 32 nt, Human
guccucucccugcuuuggcuucucuacuaugu

SEQ ID NO: 208140 - RNA, 32 nt, Human
guccucuccugagguucugccugcagccccca

SEQ ID NO: 208141 - RNA, 32 nt, Human
guccucuccuuucaaagacugacuucuucugg

SEQ ID NO: 208142 - RNA, 32 nt, Human
guccucucgucagccuuccucuuccagaagcu

SEQ ID NO: 208143 - RNA, 32 nt, Human
guccucucucaccucugacccagcuccaugcc

SEQ ID NO: 208144 - RNA, 32 nt, Human
guccucucugagcaccugcuccccaucacaca

SEQ ID NO: 208145 - RNA, 32 nt, Human
guccucucugcaguuuuauucccuuuagucuu

SEQ ID NO: 208146 - RNA, 32 nt, Human
guccucucugucccauaaccuaccuccacccu

SEQ ID NO: 208147 - RNA, 32 nt, Human
guccucucuuccucacuccucccuucaguguc

SEQ ID NO: 208148 - RNA, 32 nt, Human
guccucucuuuucacccaccuuccucaguuug

SEQ ID NO: 208149 - RNA, 31 nt, Human
guccucugacuucuguccucagaagggagcu

SEQ ID NO: 208150 - RNA, 32 nt, Human
guccucugcagauaucugccacagaauucagc

SEQ ID NO: 208151 - RNA, 32 nt, Human
guccucugcaucccuucugucccuccacccgu

SEQ ID NO: 208152 - RNA, 32 nt, Human
guccucugcccaagcccuuccuccccuccauc

SEQ ID NO: 208153 - RNA, 32 nt, Human
guccucugcccuuuugugcucuucugugauca

SEQ ID NO: 208154 - RNA, 32 nt, Human
guccucugccuuaucuugccccucuaccuggc

SEQ ID NO: 208155 - RNA, 31 nt, Human
guccucugcguuguagugcuaccucaaucuc

SEQ ID NO: 208156 - RNA, 32 nt, Human
guccucugcugccaucugccccggcuguguga

SEQ ID NO: 208157 - RNA, 32 nt, Human
guccucugggagggcugugcugcuagugggua

SEQ ID NO: 208158 - RNA, 32 nt, Human
guccucugguuagucucucaaauugaggcugu

SEQ ID NO: 208159 - RNA, 32 nt, Human
guccucuguccugccagcaccgagggcucauc

SEQ ID NO: 208160 - RNA, 32 nt, Human
guccucuguuccaccaggccuuccucaggggc

SEQ ID NO: 208161 - RNA, 32 nt, Human
guccucuguucccacccuccccugaacagaac

SEQ ID NO: 208162 - RNA, 32 nt, Human
guccucuuaccaacaucuggucuuccaggcac

SEQ ID NO: 208163 - RNA, 32 nt, Human
guccucuucacagauguuucugugccuucagg

SEQ ID NO: 208164 - RNA, 32 nt, Human
guccucuucagcguagcucuccaccucuaccc

SEQ ID NO: 208165 - RNA, 32 nt, Human
guccucuucccaaaacugugccuguccccagc

SEQ ID NO: 208166 - RNA, 32 nt, Human
guccucuucccgcuugcccugaguuuagaaga

SEQ ID NO: 208167 - RNA, 32 nt, Human
guccucuucucccuuuccauccuucagcauag

SEQ ID NO: 208168 - RNA, 32 nt, Human
guccucuucucccuuuccaucuuucagcauag

SEQ ID NO: 208169 - RNA, 32 nt, Human
guccucuucuuucuagcuucugacaagucugu

SEQ ID NO: 208170 - RNA, 32 nt, Human
guccucuuggaagcaagaucgcuccggguuga

SEQ ID NO: 208171 - RNA, 32 nt, Human
guccucuuggacuugagggcauugugaaaagc

SEQ ID NO: 208172 - RNA, 32 nt, Human
guccucuuguguuggcuuaauuucuggauggg

SEQ ID NO: 208173 - RNA, 32 nt, Human
guccucuuuggcgugcagcccaaauucaccaa

SEQ ID NO: 208174 - RNA, 32 nt, Human
guccucuuuuuccgcccauucucccucggguc

SEQ ID NO: 208175 - RNA, 32 nt, Human
guccugaaaccagacaagaccucugccagcca

SEQ ID NO: 208176 - RNA, 32 nt, Human
guccugaacuggggccggguggggaagaguga

SEQ ID NO: 208177 - RNA, 32 nt, Human
guccugaaguuugagccaggcaaguggcagug

SEQ ID NO: 208178 - RNA, 32 nt, Human
guccugaauauuagggaucacaauucacugaa

SEQ ID NO: 208179 - RNA, 18 nt, Human
guccugaaugaagcuguc

SEQ ID NO: 208180 - RNA, 32 nt, Human
guccugaaugucccccagccugacacccgcaa

SEQ ID NO: 208181 - RNA, 32 nt, Human
guccugacagccgugaagagcuucuucauuac

SEQ ID NO: 208182 - RNA, 32 nt, Human
guccugacaucuguguucuuccugucagcucc

SEQ ID NO: 208183 - RNA, 32 nt, Human
guccugaccauggucccugccuggcuguggcu

SEQ ID NO: 208184 - RNA, 32 nt, Human
guccugaccccuucuguccucacuguaccuug

SEQ ID NO: 208185 - RNA, 32 nt, Human
guccugacccucagcagccucuccuggccuug

SEQ ID NO: 208186 - RNA, 32 nt, Human
guccugacucuccugaauuacuagaaugucag

SEQ ID NO: 208187 - RNA, 32 nt, Human
guccugagauaaggaagaacugccugaaacag

SEQ ID NO: 208188 - RNA, 32 nt, Human
guccugagcauuggcccugucucccuuggcaa

SEQ ID NO: 208189 - RNA, 32 nt, Human
guccugagccagugccugguguuuccugggcu

SEQ ID NO: 208190 - RNA, 32 nt, Human
guccugagcucgggagauguucagagucacac

SEQ ID NO: 208191 - RNA, 32 nt, Human
guccugaggcaggaacucgacucuccaacccu

SEQ ID NO: 208192 - RNA, 32 nt, Human
guccugaggguuaggcuggagugacaguuucc

SEQ ID NO: 208193 - RNA, 32 nt, Human
guccugagguauaauacaacagagcacuuuuu

SEQ ID NO: 208194 - RNA, 32 nt, Human
guccugaguagcuggggauuacaggcgcccgc

SEQ ID NO: 208195 - RNA, 32 nt, Human
guccugagucaggagguugaggcugcagugag

SEQ ID NO: 208196 - RNA, 32 nt, Human
guccugagucucauagccacccugccagcugc

SEQ ID NO: 208197 - RNA, 32 nt, Human
guccugagugccccggcuucacaugccaauau

SEQ ID NO: 208198 - RNA, 32 nt, Human
guccugauccucucacagaaacacugggccaa

SEQ ID NO: 208199 - RNA, 32 nt, Human
guccugaugacauguuucguagaugggguuug

SEQ ID NO: 208200 - RNA, 32 nt, Human
guccugaugcccaaccucccaccccuucaaug

SEQ ID NO: 208201 - RNA, 32 nt, Human
guccugauuccuccgcccucccccucuccccc

SEQ ID NO: 208202 - RNA, 32 nt, Human
guccugcaacacagcuggauccucuauguggc

SEQ ID NO: 208203 - RNA, 20 nt, Human
guccugcaaugaagcucuga

SEQ ID NO: 208204 - RNA, 32 nt, Human
guccugcaccugcagccagcuggccucgggcu

SEQ ID NO: 208205 - RNA, 32 nt, Human
guccugcacugguacaugcaucuguaauacag

SEQ ID NO: 208206 - RNA, 32 nt, Human
guccugcacugucccggagcucaggcccuggu

SEQ ID NO: 208207 - RNA, 32 nt, Human
guccugcagacaccucuuucagaaacgcccaa

SEQ ID NO: 208208 - RNA, 32 nt, Human
guccugcagcaaacacuccacccuccaccuuc

SEQ ID NO: 208209 - RNA, 32 nt, Human
guccugcagcagagcugggcaggcuggggacu

SEQ ID NO: 208210 - RNA, 22 nt, Human
guccugcagcuucuucuucgag

SEQ ID NO: 208211 - RNA, 32 nt, Human
guccugcagguggagcuccggcagccgcccug

SEQ ID NO: 208212 - RNA, 32 nt, Human
guccugcagugccaccagaaguggcagccugg

SEQ ID NO: 208213 - RNA, 32 nt, Human
guccugccaauaccuugauuuuaagcccugug

SEQ ID NO: 208214 - RNA, 32 nt, Human
guccugccacauccuucucaaggugguagacu

SEQ ID NO: 208215 - RNA, 32 nt, Human
guccugccaggccgccagcccagagccuccuc

SEQ ID NO: 208216 - RNA, 32 nt, Human
guccugcccagaggguccugaggacucccgcu

SEQ ID NO: 208217 - RNA, 32 nt, Human
guccugccccacuggggaccaggcuggggucg

SEQ ID NO: 208218 - RNA, 32 nt, Human
guccugccccuccagaguaccccacgcacccc

SEQ ID NO: 208219 - RNA, 32 nt, Human
guccugccccugcaccugaccuggggagggac

SEQ ID NO: 208220 - RNA, 32 nt, Human
guccugcccugagacgccgcccucccgggguu

SEQ ID NO: 208221 - RNA, 32 nt, Human
guccugcccuucucccugcaugccuguggguc

SEQ ID NO: 208222 - RNA, 32 nt, Human
guccugcccuuugaaaucagacugggugugug

SEQ ID NO: 208223 - RNA, 20 nt, Human
guccugccggggaagccguc

SEQ ID NO: 208224 - RNA, 32 nt, Human
guccugccugggccuuggcaagcggcccuucg

SEQ ID NO: 208225 - RNA, 32 nt, Human
guccugccugugccagccuggccuucugcgag

SEQ ID NO: 208226 - RNA, 32 nt, Human
guccugccuguggcgccgucuccaggggcugc

SEQ ID NO: 208227 - RNA, 32 nt, Human
guccugccugugucucauccccggcugccuaa

SEQ ID NO: 208228 - RNA, 32 nt, Human
guccugccuuaggcuccugaguagcuggggau

SEQ ID NO: 208229 - RNA, 32 nt, Human
guccugcgauuuuucaggauguguucaauuca

SEQ ID NO: 208230 - RNA, 32 nt, Human
guccugcgcugcagugagaccugggugaaaau

SEQ ID NO: 208231 - RNA, 32 nt, Human
guccugcucaggguuuucauccuuccuccucu

SEQ ID NO: 208232 - RNA, 32 nt, Human
guccugcucaucuguggccacugccuucuagc

SEQ ID NO: 208233 - RNA, 32 nt, Human
guccugcuccaggaguccuacagccugcagcc

SEQ ID NO: 208234 - RNA, 18 nt, Human
guccugcucccccuggug

SEQ ID NO: 208235 - RNA, 32 nt, Human
guccugcuccccucaccuuccuugggcccguc

SEQ ID NO: 208236 - RNA, 32 nt, Human
guccugcuccguccccgcccuccaggggaacc

SEQ ID NO: 208237 - RNA, 32 nt, Human
guccugcuccucugcaaccugccccucuuuuu

SEQ ID NO: 208238 - RNA, 21 nt, Human
guccugcucgcccugugcccu

SEQ ID NO: 208239 - RNA, 32 nt, Human
guccugcucucuggccacaccugugcaggcag

SEQ ID NO: 208240 - RNA, 32 nt, Human
guccugcucugccgcauccagcccuguaccgc

SEQ ID NO: 208241 - RNA, 32 nt, Human
guccugcucuugaccauuccacugacuaacuu

SEQ ID NO: 208242 - RNA, 32 nt, Human
guccugcugaccugcacuguccaggccucacc

SEQ ID NO: 208243 - RNA, 32 nt, Human
guccugcugccucugggcgcccgccucuagcg

SEQ ID NO: 208244 - RNA, 32 nt, Human
guccugcugcugcugccguuccggugucagcg

SEQ ID NO: 208245 - RNA, 32 nt, Human
guccugcuggcuuaauuuaaacaguuauugca

SEQ ID NO: 208246 - RNA, 32 nt, Human
guccugcuguagugccuucugcgccaggcccg

SEQ ID NO: 208247 - RNA, 19 nt, Human
guccugcuguccacaccca

SEQ ID NO: 208248 - RNA, 32 nt, Human
guccugcuucccaguggguucagaccucaccu

SEQ ID NO: 208249 - RNA, 21 nt, Human
guccugcuugaggcucgggga

SEQ ID NO: 208250 - RNA, 23 nt, Human
guccugcuuugcccucuuugaua

SEQ ID NO: 208251 - RNA, 32 nt, Human
guccuggaaaaagaacucugaagaaaaccugg

SEQ ID NO: 208252 - RNA, 32 nt, Human
guccuggaaaucucacauggugggcacugcag

SEQ ID NO: 208253 - RNA, 20 nt, Human
guccuggaauauuagaugcc

SEQ ID NO: 208254 - RNA, 32 nt, Human
guccuggacagagaggguaacaggaggagucg

SEQ ID NO: 208255 - RNA, 32 nt, Human
guccuggaccaugaagaaggaugacuucugac

SEQ ID NO: 208256 - RNA, 32 nt, Human
guccuggaccggagcugcucccggaacuggca

SEQ ID NO: 208257 - RNA, 32 nt, Human
guccuggaccugacugccucauucuggaggcu

SEQ ID NO: 208258 - RNA, 32 nt, Human
guccuggacuccugccaccagcauccacacug

SEQ ID NO: 208259 - RNA, 32 nt, Human
guccuggacugagcuacugaaggagccucacc

SEQ ID NO: 208260 - RNA, 32 nt, Human
guccuggagaagcagaagcagucaguguuggg

SEQ ID NO: 208261 - RNA, 21 nt, Human
guccuggagcccugccuccca

SEQ ID NO: 208262 - RNA, 32 nt, Human
guccuggagcccugccucccacugccugacuu

SEQ ID NO: 208263 - RNA, 32 nt, Human
guccuggaggcagggggugaggggcaggucua

SEQ ID NO: 208264 - RNA, 32 nt, Human
guccuggaggcugaggcagaagaaucacuuga

SEQ ID NO: 208265 - RNA, 32 nt, Human
guccuggaggcuggaugauggaggacaucugg

SEQ ID NO: 208266 - RNA, 32 nt, Human
guccuggaggggccugcagugucuccauuccc

SEQ ID NO: 208267 - RNA, 32 nt, Human
guccuggaggugggguugauggguuuccuuau

SEQ ID NO: 208268 - RNA, 32 nt, Human
guccuggauaccuugauguuuagcacuuuaac

SEQ ID NO: 208269 - RNA, 21 nt, Human
guccuggaugugcaacugguu

SEQ ID NO: 208270 - RNA, 32 nt, Human
guccuggauuccaggaguagaggaccuagcuu

SEQ ID NO: 208271 - RNA, 32 nt, Human
guccuggcacagggaggagcagcucuguaaau

SEQ ID NO: 208272 - RNA, 32 nt, Human
guccuggcacugcccaaggccauaccugccua

SEQ ID NO: 208273 - RNA, 32 nt, Human
guccuggccacugaccagcuguguggcccugg

SEQ ID NO: 208274 - RNA, 32 nt, Human
guccuggccagagacguuauggucauugugag

SEQ ID NO: 208275 - RNA, 32 nt, Human
guccuggccaugccauguuaaagcugucucca

SEQ ID NO: 208276 - RNA, 32 nt, Human
guccuggccccucacgggcccccacacucucc

SEQ ID NO: 208277 - RNA, 32 nt, Human
guccuggcccuuuaaacgccgcgcgugccucg

SEQ ID NO: 208278 - RNA, 32 nt, Human
guccuggccucugcccgccccugcugccccac

SEQ ID NO: 208279 - RNA, 23 nt, Human
guccuggcguugcgggguugggg

SEQ ID NO: 208280 - RNA, 24 nt, Human
guccuggcguugcgggguuggggg

SEQ ID NO: 208281 - RNA, 32 nt, Human
guccuggcuccaccacuccuccagccagaggg

SEQ ID NO: 208282 - RNA, 32 nt, Human
guccuggcugagcucauggccugaggcugccu

SEQ ID NO: 208283 - RNA, 32 nt, Human
guccuggcugcacucuugaacugggcgaaugu

SEQ ID NO: 208284 - RNA, 32 nt, Human
guccuggcugggcugagucaggaccuugccgg

SEQ ID NO: 208285 - RNA, 32 nt, Human
guccuggcuguaacccaggcagugggaggucu

SEQ ID NO: 208286 - RNA, 32 nt, Human
guccugggaagugggcccuucccugggucucu

SEQ ID NO: 208287 - RNA, 32 nt, Human
guccugggagagaagaggaggaucucaucucu

SEQ ID NO: 208288 - RNA, 32 nt, Human
guccugggagagagcuaaagcuuaugcugguc

SEQ ID NO: 208289 - RNA, 32 nt, Human
guccugggagcagagagcagaaagcagcccuc

SEQ ID NO: 208290 - RNA, 18 nt, Human
guccugggaggaaguguc

SEQ ID NO: 208291 - RNA, 32 nt, Human
guccugggaggagagacacugguggggauagg

SEQ ID NO: 208292 - RNA, 32 nt, Human
guccugggcaccccaauuccagccucuaucau

SEQ ID NO: 208293 - RNA, 21 nt, Human
guccugggccaggaccagcag

SEQ ID NO: 208294 - RNA, 32 nt, Human
guccugggccaggccagccagggagaagacaa

SEQ ID NO: 208295 - RNA, 22 nt, Human
guccugggccagguaguggcag

SEQ ID NO: 208296 - RNA, 23 nt, Human
guccugggccccagggugugcag

SEQ ID NO: 208297 - RNA, 32 nt, Human
guccugggcuccugggccaggugcaggaacau

SEQ ID NO: 208298 - RNA, 32 nt, Human
guccuggggaagaacccaggcgccugagcccc

SEQ ID NO: 208299 - RNA, 32 nt, Human
guccuggggagaugcugccagcacacaggggc

SEQ ID NO: 208300 - RNA, 32 nt, Human
guccuggggaggcaggaggcacaugugagggu

SEQ ID NO: 208301 - RNA, 32 nt, Human
guccugggggcaggccagggcaguugacaggu

SEQ ID NO: 208302 - RNA, 32 nt, Human
guccugggucucaggauggguccugggggccu

SEQ ID NO: 208303 - RNA, 22 nt, Human
guccugggucugcaccgggcag

SEQ ID NO: 208304 - RNA, 32 nt, Human
guccuggguguggcugcucuggaagaauuagg

SEQ ID NO: 208305 - RNA, 32 nt, Human
guccuggguguguaccauaccugcugggccag

SEQ ID NO: 208306 - RNA, 32 nt, Human
guccugguacagauuccuuagcauggccaggg

SEQ ID NO: 208307 - RNA, 32 nt, Human
guccuggucagcugucucucuccuuugcaauu

SEQ ID NO: 208308 - RNA, 32 nt, Human
guccuggucgcuuccuggaggagaggcccaug

SEQ ID NO: 208309 - RNA, 32 nt, Human
guccuggugacaccccuccuuuuuccagugcc

SEQ ID NO: 208310 - RNA, 32 nt, Human
guccuggugagggacccgaggagcaggacaga

SEQ ID NO: 208311 - RNA, 23 nt, Human
guccugguggaugcacgcaggag

SEQ ID NO: 208312 - RNA, 32 nt, Human
guccugguggguggugggagucugggggaccc

SEQ ID NO: 208313 - RNA, 32 nt, Human
guccugguuauuccuguuuucucagcuuaaua

SEQ ID NO: 208314 - RNA, 32 nt, Human
guccugguucugaccugcacuugagugucggu

SEQ ID NO: 208315 - RNA, 32 nt, Human
guccugguuugggaccaugaaguggcucggca

SEQ ID NO: 208316 - RNA, 32 nt, Human
guccuguaccugacuccaccuccaggagaagg

SEQ ID NO: 208317 - RNA, 32 nt, Human
guccuguagcugcugcugcuggcuccacuccu

SEQ ID NO: 208318 - RNA, 32 nt, Human
guccuguaggggagacaaaaccagauuggggg

SEQ ID NO: 208319 - RNA, 32 nt, Human
guccuguagguccuagaggagccacagcccag

SEQ ID NO: 208320 - RNA, 32 nt, Human
guccugucacuuccagcgaggcacacaaaacu

SEQ ID NO: 208321 - RNA, 32 nt, Human
guccugucaucccucauggccaccccgccauu

SEQ ID NO: 208322 - RNA, 32 nt, Human
guccuguccacccucuagccucccucucccug

SEQ ID NO: 208323 - RNA, 32 nt, Human
guccuguccugccagcucugcugccaccucug

SEQ ID NO: 208324 - RNA, 32 nt, Human
guccuguccuggcucccaggguccugggggcu

SEQ ID NO: 208325 - RNA, 32 nt, Human
guccuguccuuccuaucuccccaaaguaccau

SEQ ID NO: 208326 - RNA, 32 nt, Human
guccuguccuuuuccuccuguccuuugccagc

SEQ ID NO: 208327 - RNA, 32 nt, Human
guccugucucaaacuccagaccucgggugauc

SEQ ID NO: 208328 - RNA, 32 nt, Human
guccugucucagggcccugcuguucccucugc

SEQ ID NO: 208329 - RNA, 32 nt, Human
guccugucugucuauagcuuggaacagggagc

SEQ ID NO: 208330 - RNA, 32 nt, Human
guccugucugucuauagcuuggaacagggagg

SEQ ID NO: 208331 - RNA, 32 nt, Human
guccugucuguggaguccucagucacucugcu

SEQ ID NO: 208332 - RNA, 32 nt, Human
guccugucuucaccucuucauccuggcaagcc

SEQ ID NO: 208333 - RNA, 31 nt, Human
guccugugacuucgucucuguucucaaggga

SEQ ID NO: 208334 - RNA, 32 nt, Human
guccugugaggccuuccuaucuccaagucuau

SEQ ID NO: 208335 - RNA, 32 nt, Human
guccugugaguccucaugcagagcagggccau

SEQ ID NO: 208336 - RNA, 32 nt, Human
guccugugccagccuucaugcccagcccgcuc

SEQ ID NO: 208337 - RNA, 32 nt, Human
guccugugccagggcccuguccucacuaucag

SEQ ID NO: 208338 - RNA, 32 nt, Human
guccugugcccuuugucuaccucucccaggcc

SEQ ID NO: 208339 - RNA, 32 nt, Human
guccugugcuaucacagggucaccucuuuuac

SEQ ID NO: 208340 - RNA, 32 nt, Human
guccugugcuguaaacacuaugcaaauggaag

SEQ ID NO: 208341 - RNA, 32 nt, Human
guccuguggaugaaguugaagaugcauuucag

SEQ ID NO: 208342 - RNA, 32 nt, Human
guccuguggucugccucaguuuccccuccuaa

SEQ ID NO: 208343 - RNA, 32 nt, Human
guccuguguaugugaaugcacacaugugcacu

SEQ ID NO: 208344 - RNA, 32 nt, Human
guccuguguccccacuuccuccagaagccaca

SEQ ID NO: 208345 - RNA, 32 nt, Human
guccuguguguggugggcuccacccacuagau

SEQ ID NO: 208346 - RNA, 32 nt, Human
guccugugugugugcccgaugccuguguugcg

SEQ ID NO: 208347 - RNA, 32 nt, Human
guccuguucaucucucaggcucugagacacug

SEQ ID NO: 208348 - RNA, 32 nt, Human
guccuguuccuuguaauucucccacuguucuc

SEQ ID NO: 208349 - RNA, 32 nt, Human
guccuguucuuuuuguuucuucaugacauaca

SEQ ID NO: 208350 - RNA, 32 nt, Human
guccuguugggugaaugaggcagaugggaaag

SEQ ID NO: 208351 - RNA, 32 nt, Human
guccuguuuuacaaauaaauuuuguuuuacua

SEQ ID NO: 208352 - RNA, 32 nt, Human
guccuuaaaauuaugugcagaaguuuacugaa

SEQ ID NO: 208353 - RNA, 32 nt, Human
guccuuaacaaauuaaacuuucucuugguuuc

SEQ ID NO: 208354 - RNA, 32 nt, Human
guccuuaaggaaagagucucuccuuugccacu

SEQ ID NO: 208355 - RNA, 32 nt, Human
guccuuacacauuguguccuuugcuaccauca

SEQ ID NO: 208356 - RNA, 32 nt, Human
guccuuacagccgcucgucagacuccagcagc

SEQ ID NO: 208357 - RNA, 32 nt, Human
guccuuacuuccaggcugggugccguaacuca

SEQ ID NO: 208358 - RNA, 18 nt, Human
guccuuagauuuugauca

SEQ ID NO: 208359 - RNA, 32 nt, Human
guccuuagcacugcagcucccaccuccuccuc

SEQ ID NO: 208360 - RNA, 32 nt, Human
guccuuagcgccugucugcucuccucuaacua

SEQ ID NO: 208361 - RNA, 32 nt, Human
guccuuauaguaggaaagugaagaauacacua

SEQ ID NO: 208362 - RNA, 32 nt, Human
guccuuauuccuguggaagcaguauauguuuu

SEQ ID NO: 208363 - RNA, 32 nt, Human
guccuuauuugaacaccugagacccuuuucuu

SEQ ID NO: 208364 - RNA, 32 nt, Human
guccuucaccuccccacuccagccccggcuca

SEQ ID NO: 208365 - RNA, 22 nt, Human
guccuucacucccacccuguaa

SEQ ID NO: 208366 - RNA, 32 nt, Human
guccuucagaacacuucucugugcucaguggg

SEQ ID NO: 208367 - RNA, 32 nt, Human
guccuucagacaccuccagacauccaaucaga

SEQ ID NO: 208368 - RNA, 32 nt, Human
guccuucagaccccuccagacauccaaucaga

SEQ ID NO: 208369 - RNA, 32 nt, Human
guccuucagagggagaaggggaaagcucuccc

SEQ ID NO: 208370 - RNA, 32 nt, Human
guccuucagccuccaucuguucucccaccuac

SEQ ID NO: 208371 - RNA, 32 nt, Human
guccuucaggagaccugggaugaguggugcuu

SEQ ID NO: 208372 - RNA, 32 nt, Human
guccuucagggagcagagcagagcagguggug

SEQ ID NO: 208373 - RNA, 32 nt, Human
guccuucaggugagcuguuguccacagcaccu

SEQ ID NO: 208374 - RNA, 32 nt, Human
guccuuccaaaaauguuguuguguacauacca

SEQ ID NO: 208375 - RNA, 32 nt, Human
guccuuccaccugccacccccuucccugggag

SEQ ID NO: 208376 - RNA, 32 nt, Human
guccuuccacuuugaccccauggaggauugcc

SEQ ID NO: 208377 - RNA, 32 nt, Human
guccuuccagaauaagcauacacuucacuccu

SEQ ID NO: 208378 - RNA, 32 nt, Human
guccuuccauucacccuucucauaaaguagua

SEQ ID NO: 208379 - RNA, 32 nt, Human
guccuucccaccuccagucaucagccccacuc

SEQ ID NO: 208380 - RNA, 32 nt, Human
guccuucccacugcacuccccaguggcuggcg

SEQ ID NO: 208381 - RNA, 32 nt, Human
guccuucccagcugugugagaaaaugaaagcc

SEQ ID NO: 208382 - RNA, 32 nt, Human
guccuucccaucuuguccucuucaguaccacu

SEQ ID NO: 208383 - RNA, 22 nt, Human
guccuucccgggccuccuugug

SEQ ID NO: 208384 - RNA, 32 nt, Human
guccuucccugcuggcagucucuucucguugg

SEQ ID NO: 208385 - RNA, 21 nt, Human
guccuucccuggcccugcugc

SEQ ID NO: 208386 - RNA, 32 nt, Human
guccuucccuggguguucugucucuccuuccc

SEQ ID NO: 208387 - RNA, 32 nt, Human
guccuucccuguggauguagaagcccugucag

SEQ ID NO: 208388 - RNA, 21 nt, Human
guccuuccgcccgcuccucgu

SEQ ID NO: 208389 - RNA, 32 nt, Human
guccuuccuaucuccccaaaguaccauagcca

SEQ ID NO: 208390 - RNA, 25 nt, Human
guccuuccucacaggccuucccgua

SEQ ID NO: 208391 - RNA, 22 nt, Human
guccuuccugggccccuccuug

SEQ ID NO: 208392 - RNA, 32 nt, Human
guccuuccuugcaaaguacuauacagcugaag

SEQ ID NO: 208393 - RNA, 19 nt, Human
guccuucgcccuguggccu

SEQ ID NO: 208394 - RNA, 32 nt, Human
guccuucggccgccaccauguccgccucggcu

SEQ ID NO: 208395 - RNA, 32 nt, Human
guccuucguauaucagagugugagugauacuu

SEQ ID NO: 208396 - RNA, 32 nt, Human
guccuucgucagacaccacaucugccagugcc

SEQ ID NO: 208397 - RNA, 21 nt, Human
guccuucuacaccucaucugc

SEQ ID NO: 208398 - RNA, 23 nt, Human
guccuucuacuuaccugcuggau

SEQ ID NO: 208399 - RNA, 22 nt, Human
guccuucuagguggcugcucau

SEQ ID NO: 208400 - RNA, 32 nt, Human
guccuucuccccucccagcuccuggcgccugc

SEQ ID NO: 208401 - RNA, 20 nt, Human
guccuucucugccuguugca

SEQ ID NO: 208402 - RNA, 21 nt, Human
guccuucucuggcgucugcuu

SEQ ID NO: 208403 - RNA, 32 nt, Human
guccuucucuuuccuuuuucuuccccauuuug

SEQ ID NO: 208404 - RNA, 32 nt, Human
guccuucugaaucccuucccuguuccuuaggu

SEQ ID NO: 208405 - RNA, 32 nt, Human
guccuucugagcggcuuccugggguccucccc

SEQ ID NO: 208406 - RNA, 32 nt, Human
guccuucugauggcuaggcuaaggggaggaag

SEQ ID NO: 208407 - RNA, 21 nt, Human
guccuucugccccuggccgca

SEQ ID NO: 208408 - RNA, 32 nt, Human
guccuucugccucuguccacauuuccccaugu

SEQ ID NO: 208409 - RNA, 22 nt, Human
guccuucugggugccugcuuca

SEQ ID NO: 208410 - RNA, 24 nt, Human
guccuucugugacaccugcugcau

SEQ ID NO: 208411 - RNA, 32 nt, Human
guccuucuuguccuggucguuguucccgucug

SEQ ID NO: 208412 - RNA, 32 nt, Human
guccuugaaaaguucugggugaauggcugccu

SEQ ID NO: 208413 - RNA, 32 nt, Human
guccuugacacugucuaccuguuccauaugcc

SEQ ID NO: 208414 - RNA, 32 nt, Human
guccuugacugaggcggggcggggagcagggg

SEQ ID NO: 208415 - RNA, 32 nt, Human
guccuugagggucaauggaggccucucuucug

SEQ ID NO: 208416 - RNA, 21 nt, Human
guccuugaguccccaccagcu

SEQ ID NO: 208417 - RNA, 32 nt, Human
guccuugauucagccuuggugccugcacucug

SEQ ID NO: 208418 - RNA, 32 nt, Human
guccuugcacauugggcuucaaacuccucuuc

SEQ ID NO: 208419 - RNA, 31 nt, Human
guccuugcacuuuucugagccagggucacug

SEQ ID NO: 208420 - RNA, 32 nt, Human
guccuugcaguugggaaauacccgguaccucg

SEQ ID NO: 208421 - RNA, 32 nt, Human
guccuugcauucaaaggguuggagauugcugc

SEQ ID NO: 208422 - RNA, 32 nt, Human
guccuugcccaggcuggagugcaguggcgcga

SEQ ID NO: 208423 - RNA, 32 nt, Human
guccuugcggcaccuggaaugaucaacucauu

SEQ ID NO: 208424 - RNA, 32 nt, Human
guccuugcugcugguggggaagggaagccaga

SEQ ID NO: 208425 - RNA, 21 nt, Human
guccuugcuucuguuugcuca

SEQ ID NO: 208426 - RNA, 32 nt, Human
guccuuggagaagccuuugccacuccauccag

SEQ ID NO: 208427 - RNA, 32 nt, Human
guccuuggagaaguggaggugugcauggugug

SEQ ID NO: 208428 - RNA, 30 nt, Human
guccuuggccgccuccugcuccugcucugc

SEQ ID NO: 208429 - RNA, 32 nt, Human
guccuuggcuuccuccuggcuuuaaugggaau

SEQ ID NO: 208430 - RNA, 32 nt, Human
guccuugggacugccuuggagacgccucugug

SEQ ID NO: 208431 - RNA, 32 nt, Human
guccuugggcagaccccagcuguugucugccc

SEQ ID NO: 208432 - RNA, 32 nt, Human
guccuugggcugggugguugguagaggagaug

SEQ ID NO: 208433 - RNA, 32 nt, Human
guccuuggucccaucuaccuccucuucaucca

SEQ ID NO: 208434 - RNA, 32 nt, Human
guccuuguauaaggagcuuugcucuuggaauu

SEQ ID NO: 208435 - RNA, 32 nt, Human
guccuugucaaaaggcaggugcuagacagucu

SEQ ID NO: 208436 - RNA, 32 nt, Human
guccuugucaucugggcacccucacacaucuc

SEQ ID NO: 208437 - RNA, 32 nt, Human
guccuugugcagucugcacccugcacucccuc

SEQ ID NO: 208438 - RNA, 32 nt, Human
guccuugugcaucuuaccuuucccuuaccuug

SEQ ID NO: 208439 - RNA, 32 nt, Human
guccuuguguuuugaggucacugagguaggaa

SEQ ID NO: 208440 - RNA, 32 nt, Human
guccuuguucuuagauuccuguagaaccggaa

SEQ ID NO: 208441 - RNA, 23 nt, Human
guccuuguuuacauaccugccuc

SEQ ID NO: 208442 - RNA, 24 nt, Human
guccuuguuucuggaucugcccca

SEQ ID NO: 208443 - RNA, 32 nt, Human
guccuuuauuaaaagcacacuguugguuucaa

SEQ ID NO: 208444 - RNA, 32 nt, Human
guccuuuauuccaccaaaccagcuccagguga

SEQ ID NO: 208445 - RNA, 25 nt, Human
guccuuucagugguagacucgggga

SEQ ID NO: 208446 - RNA, 32 nt, Human
guccuuuccaacaccccugaaauucauaguca

SEQ ID NO: 208447 - RNA, 32 nt, Human
guccuuuccagcugccuuuugucuagccugcu

SEQ ID NO: 208448 - RNA, 32 nt, Human
guccuuucccccaaggugugagcauugcagcg

SEQ ID NO: 208449 - RNA, 32 nt, Human
guccuuuccuaccaauuuccucccccuccuca

SEQ ID NO: 208450 - RNA, 32 nt, Human
guccuuuccuggagggauggagaauccccucc

SEQ ID NO: 208451 - RNA, 32 nt, Human
guccuuucucccacucuacugaaacccggaac

SEQ ID NO: 208452 - RNA, 32 nt, Human
guccuuucuucagcuaaugauuacugagcacc

SEQ ID NO: 208453 - RNA, 32 nt, Human
guccuuucuuccaggcacuguccagugauccu

SEQ ID NO: 208454 - RNA, 24 nt, Human
guccuuucuucugaaauaaaagga

SEQ ID NO: 208455 - RNA, 32 nt, Human
guccuuugaaacugaggaaaacugacggcacg

SEQ ID NO: 208456 - RNA, 32 nt, Human
guccuuugacaucacuggccgcuuucuggccu

SEQ ID NO: 208457 - RNA, 32 nt, Human
guccuuugaccucaccaggccucaugcuuccc

SEQ ID NO: 208458 - RNA, 32 nt, Human
guccuuugaggaagggagaggaggugaaugaa

SEQ ID NO: 208459 - RNA, 32 nt, Human
guccuuugcucucuuugcuucuaccucaaaua

SEQ ID NO: 208460 - RNA, 32 nt, Human
guccuuuggccaaaccuucccucucuucuggc

SEQ ID NO: 208461 - RNA, 32 nt, Human
guccuuuggggcauagaucagaagacuacaaa

SEQ ID NO: 208462 - RNA, 32 nt, Human
guccuuuggggcuugggcagggccgugacaca

SEQ ID NO: 208463 - RNA, 32 nt, Human
guccuuugugccagaccaagcggcccgugggg

SEQ ID NO: 208464 - RNA, 32 nt, Human
guccuuuucagcugcccacgaaggccugcuuc

SEQ ID NO: 208465 - RNA, 32 nt, Human
guccuuuucccaucccuccccaugaaggaggg

SEQ ID NO: 208466 - RNA, 32 nt, Human
guccuuuuccuccuuggagccugggccagcuc

SEQ ID NO: 208467 - RNA, 32 nt, Human
gucgaaaacugaggcuccggccgcagagaacu

SEQ ID NO: 208468 - RNA, 31 nt, Human
gucgaaaugcagaaauuucuuggaucauuuu

SEQ ID NO: 208469 - RNA, 32 nt, Human
gucgaaaugcugugccaguugcucugguauuc

SEQ ID NO: 208470 - RNA, 32 nt, Human
gucgaacaugccucaucauacccuccagcauu

SEQ ID NO: 208471 - RNA, 32 nt, Human
gucgaacaugguggaacugcaauuuaagcuca

SEQ ID NO: 208472 - RNA, 32 nt, Human
gucgaaccacugcugugugucuugucaggaug

SEQ ID NO: 208473 - RNA, 32 nt, Human
gucgaaccagaucuucucauguacuaggaagu

SEQ ID NO: 208474 - RNA, 32 nt, Human
gucgaagcccaggagccuuccuuuuuaacaag

SEQ ID NO: 208475 - RNA, 32 nt, Human
gucgaaggcuguaguggacacaggcuguuuug

SEQ ID NO: 208476 - RNA, 32 nt, Human
gucgaagggggcugcagagaggguagagaagg

SEQ ID NO: 208477 - RNA, 32 nt, Human
gucgaagguccaagggcauguggaaaugguca

SEQ ID NO: 208478 - RNA, 32 nt, Human
gucgaaucagcuuuguaauguuaugggacaaa

SEQ ID NO: 208479 - RNA, 32 nt, Human
gucgaauggaguuuugaucucgcugaguuugg

SEQ ID NO: 208480 - RNA, 32 nt, Human
gucgaauuccagcucgccuuguugacucgccu

SEQ ID NO: 208481 - RNA, 32 nt, Human
gucgacacgucucgucuccugucccaauucag

SEQ ID NO: 208482 - RNA, 32 nt, Human
gucgacagagucuugcucugucgcccaggcug

SEQ ID NO: 208483 - RNA, 32 nt, Human
gucgacaucauguuuggcugggcaucgaugcc

SEQ ID NO: 208484 - RNA, 32 nt, Human
gucgacauccauaguaaccaugugccauaaca

SEQ ID NO: 208485 - RNA, 32 nt, Human
gucgaccccaaagccccuugcucuccccugcc

SEQ ID NO: 208486 - RNA, 32 nt, Human
gucgaccucuacuccuccuugcgcucaccuug

SEQ ID NO: 208487 - RNA, 32 nt, Human
gucgaccugguggggcccggggccaagccugc

SEQ ID NO: 208488 - RNA, 32 nt, Human
gucgaccuguuguguuguggugccauccucuu

SEQ ID NO: 208489 - RNA, 32 nt, Human
gucgacugcacucucuccuuagcugcagacca

SEQ ID NO: 208490 - RNA, 32 nt, Human
gucgagaccauccuggccaacauggugaaacc

SEQ ID NO: 208491 - RNA, 32 nt, Human
gucgagaccggccuggccaacguggugaaaca

SEQ ID NO: 208492 - RNA, 32 nt, Human
gucgagaucagccugggaaacacagggaggcc

SEQ ID NO: 208493 - RNA, 32 nt, Human
gucgagaucauugcacuccagccugggcaaua

SEQ ID NO: 208494 - RNA, 31 nt, Human
gucgagauguccacagaaggaggauuuggug

SEQ ID NO: 208495 - RNA, 19 nt, Human
gucgagcaagcucaggaga

SEQ ID NO: 208496 - RNA, 32 nt, Human
gucgagcagcuuuccuggaggaaaagguuaau

SEQ ID NO: 208497 - RNA, 32 nt, Human
gucgagccccuggacggcggagggacuuugga

SEQ ID NO: 208498 - RNA, 32 nt, Human
gucgagcgggagcagaggaggcgagggaggag

SEQ ID NO: 208499 - RNA, 32 nt, Human
gucgagcucugacucccgugcugucgagaggg

SEQ ID NO: 208500 - RNA, 32 nt, Human
gucgagcugcacuaggccuggccugagccucu

SEQ ID NO: 208501 - RNA, 31 nt, Human
gucgaggaaagaucuuuacucacuuaaugag

SEQ ID NO: 208502 - RNA, 32 nt, Human
gucgaggaagggaagaaagaaacagaagucag

SEQ ID NO: 208503 - RNA, 32 nt, Human
gucgaggaggagguggauguggcagcugagau

SEQ ID NO: 208504 - RNA, 32 nt, Human
gucgaggagggaggacuuaagcccaagaguuc

SEQ ID NO: 208505 - RNA, 32 nt, Human
gucgaggcucaaguuugaauuucagcuucacu

SEQ ID NO: 208506 - RNA, 32 nt, Human
gucgaggcugcagugggcuaugauugcaccac

SEQ ID NO: 208507 - RNA, 20 nt, Human
gucgaggcuggaguguagug

SEQ ID NO: 208508 - RNA, 21 nt, Human
gucgaggcuggaguguagugg

SEQ ID NO: 208509 - RNA, 32 nt, Human
gucgagggaccgagcugcuggggaggaccuca

SEQ ID NO: 208510 - RNA, 32 nt, Human
gucgagggaggaaccagcucucugguuuacug

SEQ ID NO: 208511 - RNA, 32 nt, Human
gucgagggcugcagaacacagcgggguccugu

SEQ ID NO: 208512 - RNA, 32 nt, Human
gucgagguugcgcuacugcacuccagccugga

SEQ ID NO: 208513 - RNA, 32 nt, Human
gucgagugagagcugaccugcaccgaaguuug

SEQ ID NO: 208514 - RNA, 32 nt, Human
gucgagugccugcuuaggugcugaggucacag

SEQ ID NO: 208515 - RNA, 32 nt, Human
gucgauaucucacuuuuuauuuugccauggau

SEQ ID NO: 208516 - RNA, 32 nt, Human
gucgaucaggaaccuguuugcccuuugcuggg

SEQ ID NO: 208517 - RNA, 32 nt, Human
gucgauccugggagagcaaggagccagcaagu

SEQ ID NO: 208518 - RNA, 32 nt, Human
gucgaucucccaggggcuucaugugucuuuuu

SEQ ID NO: 208519 - RNA, 18 nt, Human
gucgaugcauccauuuca

SEQ ID NO: 208520 - RNA, 32 nt, Human
gucgaugcucacugcuucugcuuuuucuuucu

SEQ ID NO: 208521 - RNA, 32 nt, Human
gucgaugggaacugaagacuaguccauaggag

SEQ ID NO: 208522 - RNA, 32 nt, Human
gucgauucucauaaggagcggacaaccuugca

SEQ ID NO: 208523 - RNA, 32 nt, Human
gucgauuucucauugucuucaccaaucuucug

SEQ ID NO: 208524 - RNA, 32 nt, Human
gucgcaaagcagaaacugaaaacuguccagaa

SEQ ID NO: 208525 - RNA, 32 nt, Human
gucgcaaauagccaugcuuugccuuaugccaa

SEQ ID NO: 208526 - RNA, 32 nt, Human
gucgcaccacugcacuccagccugggugacag

SEQ ID NO: 208527 - RNA, 32 nt, Human
gucgcaccacugcacuccagucuggguaacag

SEQ ID NO: 208528 - RNA, 32 nt, Human
gucgcaccacugcacugcagccugggugacag

SEQ ID NO: 208529 - RNA, 32 nt, Human
gucgcaccgcuacacuccagccugggugacag

SEQ ID NO: 208530 - RNA, 32 nt, Human
gucgcaccguuguacuccagccuggugauaga

SEQ ID NO: 208531 - RNA, 32 nt, Human
gucgcacugccucccacccugugucugcuucc

SEQ ID NO: 208532 - RNA, 32 nt, Human
gucgcagacgcuagugugagcccccauggcag

SEQ ID NO: 208533 - RNA, 32 nt, Human
gucgcagacucccugaccccucccucaccccu

SEQ ID NO: 208534 - RNA, 32 nt, Human
gucgcagagagggaccccgggcgccugcugag

SEQ ID NO: 208535 - RNA, 32 nt, Human
gucgcagcaggaaagggaguucccuggucucc

SEQ ID NO: 208536 - RNA, 32 nt, Human
gucgcagcaguuuuacaucacaugcagccaag

SEQ ID NO: 208537 - RNA, 32 nt, Human
gucgcagcauucucugcaggcaucacagaccu

SEQ ID NO: 208538 - RNA, 32 nt, Human
gucgcagccagccugcucuuacuuauacaucu

SEQ ID NO: 208539 - RNA, 32 nt, Human
gucgcagccuucccccuccagacacggaagca

SEQ ID NO: 208540 - RNA, 32 nt, Human
gucgcagcugccgguguucgcgccucuagccg

SEQ ID NO: 208541 - RNA, 32 nt, Human
gucgcagcuucacuuacaccagcugcucugug

SEQ ID NO: 208542 - RNA, 32 nt, Human
gucgcagcuuugacaucuugguguacucaugu

SEQ ID NO: 208543 - RNA, 32 nt, Human
gucgcaggaaccucuugugagccacgagcaga

SEQ ID NO: 208544 - RNA, 32 nt, Human
gucgcaggacucugcccuuccccaagagagga

SEQ ID NO: 208545 - RNA, 32 nt, Human
gucgcaggagaguucugggguacacgggcaaa

SEQ ID NO: 208546 - RNA, 32 nt, Human
gucgcaggaucgagacccugaggcagacagcc

SEQ ID NO: 208547 - RNA, 32 nt, Human
gucgcaggcaggucucuuacccucucugggcc

SEQ ID NO: 208548 - RNA, 21 nt, Human
gucgcaggggugggaugugag

SEQ ID NO: 208549 - RNA, 32 nt, Human
gucgcagggucagcgggccugaagggggcugg

SEQ ID NO: 208550 - RNA, 32 nt, Human
gucgcaucaugccagucagucuggccgacucc

SEQ ID NO: 208551 - RNA, 23 nt, Human
gucgcaugcagugccuguacugg

SEQ ID NO: 208552 - RNA, 32 nt, Human
gucgcauuagagcgagucacauggagcauccu

SEQ ID NO: 208553 - RNA, 32 nt, Human
gucgcauuucaaaacaaaccaugauggagugg

SEQ ID NO: 208554 - RNA, 32 nt, Human
gucgccaaaucaccaguauuugcuuauauagc

SEQ ID NO: 208555 - RNA, 23 nt, Human
gucgccaagccagagugcagugg

SEQ ID NO: 208556 - RNA, 24 nt, Human
gucgccaaggcuggagugcagugg

SEQ ID NO: 208557 - RNA, 32 nt, Human
gucgccaaguuggagcuugcagugagccgaga

SEQ ID NO: 208558 - RNA, 23 nt, Human
gucgccaaguuggagugcaaugg

SEQ ID NO: 208559 - RNA, 32 nt, Human
gucgccaaguuggagugcaauggugcgaucuc

SEQ ID NO: 208560 - RNA, 32 nt, Human
gucgccacccagacuacauuucccgacaggcc

SEQ ID NO: 208561 - RNA, 32 nt, Human
gucgccacccuccuccuugccuguaucuugac

SEQ ID NO: 208562 - RNA, 32 nt, Human
gucgccacucucucccccuguuccgcgucugc

SEQ ID NO: 208563 - RNA, 32 nt, Human
gucgccacugcacccagccugugucuuccagc

SEQ ID NO: 208564 - RNA, 32 nt, Human
gucgccacuggcugccugaggugcucuuacag

SEQ ID NO: 208565 - RNA, 23 nt, Human
gucgccagacuggagugcagugg

SEQ ID NO: 208566 - RNA, 32 nt, Human
gucgccagacuggagugcaguggcgcaaucuc

SEQ ID NO: 208567 - RNA, 32 nt, Human
gucgccagaucguauuucagucugucaggggu

SEQ ID NO: 208568 - RNA, 32 nt, Human
gucgccagccccggcccgggcucgagaaucaa

SEQ ID NO: 208569 - RNA, 32 nt, Human
gucgccaggaaggaaaagcacuguugaagauu

SEQ ID NO: 208570 - RNA, 23 nt, Human
gucgccaggcuagagugcggugg

SEQ ID NO: 208571 - RNA, 23 nt, Human
gucgccaggcugaagugcagugg

SEQ ID NO: 208572 - RNA, 32 nt, Human
gucgccaggcugaagugcaguggcgcaaucuu

SEQ ID NO: 208573 - RNA, 21 nt, Human
gucgccaggcuggaaugcagu

SEQ ID NO: 208574 - RNA, 32 nt, Human
gucgccaggcuggaaugcaguagggcaaucuc

SEQ ID NO: 208575 - RNA, 22 nt, Human
gucgccaggcuggaaugcagug

SEQ ID NO: 208576 - RNA, 32 nt, Human
gucgccaggcuggaaugcagugcagugagcca

SEQ ID NO: 208577 - RNA, 32 nt, Human
gucgccaggcuggaguacaguggugugcaauc

SEQ ID NO: 208578 - RNA, 23 nt, Human
gucgccaggcuggagugcaaugg

SEQ ID NO: 208579 - RNA, 32 nt, Human
gucgccaggcuggagugcaauggcgcgaucuc

SEQ ID NO: 208580 - RNA, 32 nt, Human
gucgccaggcuggagugcaauggcgugaucuc

SEQ ID NO: 208581 - RNA, 23 nt, Human
gucgccaggcuggagugcagugg

SEQ ID NO: 208582 - RNA, 32 nt, Human
gucgccaggcuggagugcaguggcgcagucuc

SEQ ID NO: 208583 - RNA, 32 nt, Human
gucgccaggcuggagugcaguggcgcgaucua

SEQ ID NO: 208584 - RNA, 32 nt, Human
gucgccaggcuggagugcaguggcgcgaucuc

SEQ ID NO: 208585 - RNA, 32 nt, Human
gucgccaggcuggagugcaguggcgugaucuc

SEQ ID NO: 208586 - RNA, 32 nt, Human
gucgccaggcuggagugcaguggugccaucuc

SEQ ID NO: 208587 - RNA, 32 nt, Human
gucgccaggcuggagugcaguggugcgaccuc

SEQ ID NO: 208588 - RNA, 32 nt, Human
gucgccaggcuggagugcaguggugcgaucuc

SEQ ID NO: 208589 - RNA, 32 nt, Human
gucgccaggcuggagugcaguggugugaucuu

SEQ ID NO: 208590 - RNA, 23 nt, Human
gucgccaggcuggaguguagugg

SEQ ID NO: 208591 - RNA, 23 nt, Human
gucgccagguuggagugcagugg

SEQ ID NO: 208592 - RNA, 32 nt, Human
gucgccagguuggagugcaguggcgugaucuc

SEQ ID NO: 208593 - RNA, 32 nt, Human
gucgccaucuuggggccuucaccagaguccaa

SEQ ID NO: 208594 - RNA, 31 nt, Human
gucgccaugggcauguggccucaggccguca

SEQ ID NO: 208595 - RNA, 32 nt, Human
gucgccauugcuuuuucagccauucacaagca

SEQ ID NO: 208596 - RNA, 23 nt, Human
gucgcccaacuagaguguagugg

SEQ ID NO: 208597 - RNA, 23 nt, Human
gucgcccaagcuagagugcagug

SEQ ID NO: 208598 - RNA, 24 nt, Human
gucgcccaagcuagagugcagugg

SEQ ID NO: 208599 - RNA, 24 nt, Human
gucgcccaagcuggagcgcaaugg

SEQ ID NO: 208600 - RNA, 24 nt, Human
gucgcccaagcuggaguacagugg

SEQ ID NO: 208601 - RNA, 23 nt, Human
gucgcccaagcuggagugcagug

SEQ ID NO: 208602 - RNA, 24 nt, Human
gucgcccaagcuggagugcagugg

SEQ ID NO: 208603 - RNA, 32 nt, Human
gucgcccaauagcccaggcuggagugcagugg

SEQ ID NO: 208604 - RNA, 28 nt, Human
gucgcccacccaggcuggaguacagugg

SEQ ID NO: 208605 - RNA, 32 nt, Human
gucgcccacccaggcuggaguacaguggcacg

SEQ ID NO: 208606 - RNA, 20 nt, Human
gucgcccacgugccugcuca

SEQ ID NO: 208607 - RNA, 24 nt, Human
gucgcccagacuagaaugcagugg

SEQ ID NO: 208608 - RNA, 23 nt, Human
gucgcccagacuagagugcaaug

SEQ ID NO: 208609 - RNA, 24 nt, Human
gucgcccagacuagagugcaaugg

SEQ ID NO: 208610 - RNA, 24 nt, Human
gucgcccagacuggaguccagugg

SEQ ID NO: 208611 - RNA, 22 nt, Human
gucgcccagacuggagugcagu

SEQ ID NO: 208612 - RNA, 24 nt, Human
gucgcccagacuggagugcaguag

SEQ ID NO: 208613 - RNA, 23 nt, Human
gucgcccagacuggagugcagug

SEQ ID NO: 208614 - RNA, 24 nt, Human
gucgcccagacuggagugcagugg

SEQ ID NO: 208615 - RNA, 24 nt, Human
gucgcccagacuggagugcugugg

SEQ ID NO: 208616 - RNA, 24 nt, Human
gucgcccagacuguaguacagugg

SEQ ID NO: 208617 - RNA, 24 nt, Human
gucgcccagccuggagugcagugg

SEQ ID NO: 208618 - RNA, 32 nt, Human
gucgcccagcuccggcgcugacggguguggac

SEQ ID NO: 208619 - RNA, 24 nt, Human
gucgcccaggauggagugcagugg

SEQ ID NO: 208620 - RNA, 24 nt, Human
gucgcccaggcuagaguauagugg

SEQ ID NO: 208621 - RNA, 23 nt, Human
gucgcccaggcuagagugcagug

SEQ ID NO: 208622 - RNA, 24 nt, Human
gucgcccaggcuagagugcagugg

SEQ ID NO: 208623 - RNA, 24 nt, Human
gucgcccaggcuagaguggauugg

SEQ ID NO: 208624 - RNA, 32 nt, Human
gucgcccaggcugcaaccucgaccucccgggc

SEQ ID NO: 208625 - RNA, 24 nt, Human
gucgcccaggcugcagugcagugg

SEQ ID NO: 208626 - RNA, 22 nt, Human
gucgcccaggcuggaaugcagu

SEQ ID NO: 208627 - RNA, 24 nt, Human
gucgcccaggcuggaaugcaguag

SEQ ID NO: 208628 - RNA, 23 nt, Human
gucgcccaggcuggaaugcagug

SEQ ID NO: 208629 - RNA, 24 nt, Human
gucgcccaggcuggaaugcagugg

SEQ ID NO: 208630 - RNA, 22 nt, Human
gucgcccaggcuggaaugcugu

SEQ ID NO: 208631 - RNA, 20 nt, Human
gucgcccaggcuggacugca

SEQ ID NO: 208632 - RNA, 24 nt, Human
gucgcccaggcuggacugcagugg

SEQ ID NO: 208633 - RNA, 24 nt, Human
gucgcccaggcuggagagcagugg

SEQ ID NO: 208634 - RNA, 23 nt, Human
gucgcccaggcuggagcgcaaug

SEQ ID NO: 208635 - RNA, 24 nt, Human
gucgcccaggcuggagcgcaaugg

SEQ ID NO: 208636 - RNA, 22 nt, Human
gucgcccaggcuggagcgcagu

SEQ ID NO: 208637 - RNA, 24 nt, Human
gucgcccaggcuggagcgcagucc

SEQ ID NO: 208638 - RNA, 24 nt, Human
gucgcccaggcuggagcgcagugg

SEQ ID NO: 208639 - RNA, 24 nt, Human
gucgcccaggcuggagggcagugg

SEQ ID NO: 208640 - RNA, 22 nt, Human
gucgcccaggcuggagguuaau

SEQ ID NO: 208641 - RNA, 24 nt, Human
gucgcccaggcuggagguuaaugg

SEQ ID NO: 208642 - RNA, 23 nt, Human
gucgcccaggcuggaguacaaug

SEQ ID NO: 208643 - RNA, 24 nt, Human
gucgcccaggcuggaguacaaugg

SEQ ID NO: 208644 - RNA, 24 nt, Human
gucgcccaggcuggaguacagugg

SEQ ID NO: 208645 - RNA, 22 nt, Human
gucgcccaggcuggagugagug

SEQ ID NO: 208646 - RNA, 28 nt, Human
gucgcccaggcuggagugagugcagugg

SEQ ID NO: 208647 - RNA, 32 nt, Human
gucgcccaggcuggagugagugcaguggcgca

SEQ ID NO: 208648 - RNA, 20 nt, Human
gucgcccaggcuggagugca

SEQ ID NO: 208649 - RNA, 23 nt, Human
gucgcccaggcuggagugcaaug

SEQ ID NO: 208650 - RNA, 24 nt, Human
gucgcccaggcuggagugcaaugg

SEQ ID NO: 208651 - RNA, 24 nt, Human
gucgcccaggcuggagugcacugg

SEQ ID NO: 208652 - RNA, 21 nt, Human
gucgcccaggcuggagugcag

SEQ ID NO: 208653 - RNA, 24 nt, Human
gucgcccaggcuggagugcagagg

SEQ ID NO: 208654 - RNA, 23 nt, Human
gucgcccaggcuggagugcaggg

SEQ ID NO: 208655 - RNA, 22 nt, Human
gucgcccaggcuggagugcagu

SEQ ID NO: 208656 - RNA, 24 nt, Human
gucgcccaggcuggagugcaguag

SEQ ID NO: 208657 - RNA, 23 nt, Human
gucgcccaggcuggagugcagug

SEQ ID NO: 208658 - RNA, 24 nt, Human
gucgcccaggcuggagugcaguga

SEQ ID NO: 208659 - RNA, 32 nt, Human
gucgcccaggcuggagugcagugagcugagau

SEQ ID NO: 208660 - RNA, 24 nt, Human
gucgcccaggcuggagugcagugg

SEQ ID NO: 208661 - RNA, 23 nt, Human
gucgcccaggcuggagugcauug

SEQ ID NO: 208662 - RNA, 24 nt, Human
gucgcccaggcuggagugcauugg

SEQ ID NO: 208663 - RNA, 23 nt, Human
gucgcccaggcuggagugcgaug

SEQ ID NO: 208664 - RNA, 24 nt, Human
gucgcccaggcuggagugcgaugg

SEQ ID NO: 208665 - RNA, 23 nt, Human
gucgcccaggcuggagugcggug

SEQ ID NO: 208666 - RNA, 24 nt, Human
gucgcccaggcuggagugcggugg

SEQ ID NO: 208667 - RNA, 22 nt, Human
gucgcccaggcuggaguguagu

SEQ ID NO: 208668 - RNA, 24 nt, Human
gucgcccaggcuggaguguagugg

SEQ ID NO: 208669 - RNA, 23 nt, Human
gucgcccaggcuggaguguggug

SEQ ID NO: 208670 - RNA, 24 nt, Human
gucgcccaggcuggaguguggugg

SEQ ID NO: 208671 - RNA, 24 nt, Human
gucgcccaggcuggcgugaagugg

SEQ ID NO: 208672 - RNA, 24 nt, Human
gucgcccaggcuggcgugcagugg

SEQ ID NO: 208673 - RNA, 24 nt, Human
gucgcccaggcuggggugcagugg

SEQ ID NO: 208674 - RNA, 24 nt, Human
gucgcccaggcuggguugcagugg

SEQ ID NO: 208675 - RNA, 24 nt, Human
gucgcccaggcuguagugcaaugg

SEQ ID NO: 208676 - RNA, 24 nt, Human
gucgcccaggcuguagugcagugg

SEQ ID NO: 208677 - RNA, 25 nt, Human
gucgcccagggcuggagugcagugg

SEQ ID NO: 208678 - RNA, 24 nt, Human
gucgcccaggguggagugcagugg

SEQ ID NO: 208679 - RNA, 24 nt, Human
gucgcccaggguggagugcggugg

SEQ ID NO: 208680 - RNA, 24 nt, Human
gucgcccagguuggagugcagugg

SEQ ID NO: 208681 - RNA, 24 nt, Human
gucgcccagguuggagugccaugg

SEQ ID NO: 208682 - RNA, 24 nt, Human
gucgcccagguuguaaugcagugg

SEQ ID NO: 208683 - RNA, 23 nt, Human
gucgcccagucuguaaugcagug

SEQ ID NO: 208684 - RNA, 24 nt, Human
gucgcccaugcuggagugcagugg

SEQ ID NO: 208685 - RNA, 32 nt, Human
gucgccccagagugcccaggaggcaggcagug

SEQ ID NO: 208686 - RNA, 32 nt, Human
gucgcccccacucaccaccauuaaugcccaca

SEQ ID NO: 208687 - RNA, 32 nt, Human
gucgcccccaggaaagacgggccugggggagg

SEQ ID NO: 208688 - RNA, 32 nt, Human
gucgccccgccugugcagcccaggaccuaggc

SEQ ID NO: 208689 - RNA, 32 nt, Human
gucgccccgugcaggagacguagguaggacgu

SEQ ID NO: 208690 - RNA, 18 nt, Human
gucgccccuuucgcgcug

SEQ ID NO: 208691 - RNA, 24 nt, Human
gucgcccgacagcuuuuucuccgu

SEQ ID NO: 208692 - RNA, 17 nt, Human
gucgcccggagugcggu

SEQ ID NO: 208693 - RNA, 32 nt, Human
gucgcccugagcgagcggggccugggcggccg

SEQ ID NO: 208694 - RNA, 32 nt, Human
gucgcccugcagccucacacagauccugcaca

SEQ ID NO: 208695 - RNA, 24 nt, Human
gucgcccuggcuggagugcaaugg

SEQ ID NO: 208696 - RNA, 32 nt, Human
gucgcccugggagccucuggaaggccuugcua

SEQ ID NO: 208697 - RNA, 32 nt, Human
gucgcccugugcauggggugcccucgcaggcc

SEQ ID NO: 208698 - RNA, 32 nt, Human
gucgcccuuugcugcauggcagggggcugcug

SEQ ID NO: 208699 - RNA, 32 nt, Human
gucgccgcagaacugccacguggggaugagau

SEQ ID NO: 208700 - RNA, 32 nt, Human
gucgccgccugcucccugcacccaugacaauc

SEQ ID NO: 208701 - RNA, 25 nt, Human
gucgccgcucgcacgcccuugggcc

SEQ ID NO: 208702 - RNA, 32 nt, Human
gucgccgcugccgccuccgcccgcggccggga

SEQ ID NO: 208703 - RNA, 18 nt, Human
gucgccggagcugcaaug

SEQ ID NO: 208704 - RNA, 32 nt, Human
gucgccggauugcagagcugaagggagcccug

SEQ ID NO: 208705 - RNA, 21 nt, Human
gucgccggcgcgggauugggg

SEQ ID NO: 208706 - RNA, 17 nt, Human
gucgccggcuccgcgcu

SEQ ID NO: 208707 - RNA, 32 nt, Human
gucgccgucgaccucagaggcggggccggaag

SEQ ID NO: 208708 - RNA, 32 nt, Human
gucgccgugugcuggggaucugaaaugaggcc

SEQ ID NO: 208709 - RNA, 24 nt, Human
gucgccuacgcuggagugcagugg

SEQ ID NO: 208710 - RNA, 20 nt, Human
gucgccuaggcuggagugca

SEQ ID NO: 208711 - RNA, 21 nt, Human
gucgccuaggcuggagugcaa

SEQ ID NO: 208712 - RNA, 24 nt, Human
gucgccuaggcuggagugcagugg

SEQ ID NO: 208713 - RNA, 20 nt, Human
gucgccuagggucagcggug

SEQ ID NO: 208714 - RNA, 32 nt, Human
gucgccuccccuucauccaccucucucucacc

SEQ ID NO: 208715 - RNA, 32 nt, Human
gucgccuccugccaucugaucucccuccccac

SEQ ID NO: 208716 - RNA, 32 nt, Human
gucgccuccugccuggagugacccugggcggg

SEQ ID NO: 208717 - RNA, 32 nt, Human
gucgccugcaacuuaggcggauugggucucuc

SEQ ID NO: 208718 - RNA, 32 nt, Human
gucgccugcacccacucccuucauacaaucua

SEQ ID NO: 208719 - RNA, 20 nt, Human
gucgccugcccgcccuggcc

SEQ ID NO: 208720 - RNA, 23 nt, Human
gucgccuggcuggagugcagugg

SEQ ID NO: 208721 - RNA, 32 nt, Human
gucgccuggcuggagugcaguggugugaucuc

SEQ ID NO: 208722 - RNA, 23 nt, Human
gucgccuggcuggaguggagugg

SEQ ID NO: 208723 - RNA, 32 nt, Human
gucgccuggcuggaguggaguggcacaaucuu

SEQ ID NO: 208724 - RNA, 32 nt, Human
gucgccugggccgcccccggcccagcccugcc

SEQ ID NO: 208725 - RNA, 24 nt, Human
gucgccugggcuggaguacagugg

SEQ ID NO: 208726 - RNA, 32 nt, Human
gucgccuggggaccccagaagggacaggcugg

SEQ ID NO: 208727 - RNA, 32 nt, Human
gucgccuguagucccagcuacucgggaggcug

SEQ ID NO: 208728 - RNA, 32 nt, Human
gucgccugucaacggcuagagugcaguagcgu

SEQ ID NO: 208729 - RNA, 25 nt, Human
gucgccuguucgcggaggugcggag

SEQ ID NO: 208730 - RNA, 32 nt, Human
gucgccuuaccucacccacagcagugcccuug

SEQ ID NO: 208731 - RNA, 32 nt, Human
gucgcgaggccggagauaagcuuggaagguug

SEQ ID NO: 208732 - RNA, 32 nt, Human
gucgcgcaaggacgucgguccucccagguuug

SEQ ID NO: 208733 - RNA, 32 nt, Human
gucgcgcagcugguucgggccgagccccgacu

SEQ ID NO: 208734 - RNA, 32 nt, Human
gucgcgcaggguggagugcgguggcacgaucu

SEQ ID NO: 208735 - RNA, 32 nt, Human
gucgcgccacugcacuccagccugggagaaag

SEQ ID NO: 208736 - RNA, 32 nt, Human
gucgcgccacugcacuccagccugggcagcaa

SEQ ID NO: 208737 - RNA, 32 nt, Human
gucgcgccacugcacuccagccugggcgacag

SEQ ID NO: 208738 - RNA, 32 nt, Human
gucgcgccacugcacuucagccugggugacag

SEQ ID NO: 208739 - RNA, 32 nt, Human
gucgcgccacugcgcuccagccuggacaacac

SEQ ID NO: 208740 - RNA, 32 nt, Human
gucgcgccauugcacuccagccugggcaacaa

SEQ ID NO: 208741 - RNA, 32 nt, Human
gucgcgccauugcacuccagccugggcgacag

SEQ ID NO: 208742 - RNA, 32 nt, Human
gucgcgcccuccugccgcaggccaccgaggcc

SEQ ID NO: 208743 - RNA, 32 nt, Human
gucgcgccuguaaucccagcacuuugggaggc

SEQ ID NO: 208744 - RNA, 32 nt, Human
gucgcgccuguuaggagggaaaggacucagga

SEQ ID NO: 208745 - RNA, 32 nt, Human
gucgcgcggaggcggaggcuugggugcguuca

SEQ ID NO: 208746 - RNA, 32 nt, Human
gucgcgcggucucccugguagaguuuguaggc

SEQ ID NO: 208747 - RNA, 32 nt, Human
gucgcgcucgagggucagggaggagagugacc

SEQ ID NO: 208748 - RNA, 32 nt, Human
gucgcgcugcaacccccggcucgggauccugg

SEQ ID NO: 208749 - RNA, 32 nt, Human
gucgcgcugcugcugcggcgcuccaaguucau

SEQ ID NO: 208750 - RNA, 32 nt, Human
gucgcgcuuuccaaauuucuuaggcauuuauu

SEQ ID NO: 208751 - RNA, 32 nt, Human
gucgcggacgcaauggcuucaagguuacuucg

SEQ ID NO: 208752 - RNA, 32 nt, Human
gucgcggacggacccugccuccccagcuuauc

SEQ ID NO: 208753 - RNA, 32 nt, Human
gucgcggacucguccuugcugcagucgccgcc

SEQ ID NO: 208754 - RNA, 23 nt, Human
gucgcggccggcgcggggcgggg

SEQ ID NO: 208755 - RNA, 21 nt, Human
gucgcggcgccggggcuggag

SEQ ID NO: 208756 - RNA, 23 nt, Human
gucgcgggacaccggguguagag

SEQ ID NO: 208757 - RNA, 32 nt, Human
gucgcgggagcggaagaagcuggaccgccucu

SEQ ID NO: 208758 - RNA, 32 nt, Human
gucgcggggaccaugcugccuucucugggcuc

SEQ ID NO: 208759 - RNA, 24 nt, Human
gucgcgguacucgguggugcagag

SEQ ID NO: 208760 - RNA, 21 nt, Human
gucgcggugaggggaugagag

SEQ ID NO: 208761 - RNA, 22 nt, Human
gucgcggugcaggugaugggag

SEQ ID NO: 208762 - RNA, 32 nt, Human
gucgcgguggcagcccggaugggccggcaggg

SEQ ID NO: 208763 - RNA, 22 nt, Human
gucgcggugucucaugcagcag

SEQ ID NO: 208764 - RNA, 32 nt, Human
gucgcguaucgagucuccgcccccuucccgcc

SEQ ID NO: 208765 - RNA, 32 nt, Human
gucgcgucgcgagggcccggcgcggagcuaga

SEQ ID NO: 208766 - RNA, 32 nt, Human
gucgcguggaucuacccucuaguuuacuugcu

SEQ ID NO: 208767 - RNA, 32 nt, Human
gucgcuacagcccagaccaaggcagaauaauc

SEQ ID NO: 208768 - RNA, 32 nt, Human
gucgcuaggaaggaugcagaggcugugugguu

SEQ ID NO: 208769 - RNA, 32 nt, Human
gucgcucagcaacaccaaaaagagaaagucug

SEQ ID NO: 208770 - RNA, 23 nt, Human
gucgcucagccuggagugcagug

SEQ ID NO: 208771 - RNA, 24 nt, Human
gucgcucaggcuggagugcaaugg

SEQ ID NO: 208772 - RNA, 23 nt, Human
gucgcucaggcuggagugcagug

SEQ ID NO: 208773 - RNA, 24 nt, Human
gucgcucaggcuggagugcagugg

SEQ ID NO: 208774 - RNA, 31 nt, Human
gucgcucagggcgggacaugggugaacggaa

SEQ ID NO: 208775 - RNA, 32 nt, Human
gucgcucauggaggagauggccagggcggacc

SEQ ID NO: 208776 - RNA, 32 nt, Human
gucgcuccauugcacuccagccugggcaacaa

SEQ ID NO: 208777 - RNA, 32 nt, Human
gucgcucccagugcagcugccaccccagccca

SEQ ID NO: 208778 - RNA, 32 nt, Human
gucgcucccauccuagaccaaucuaauugcaa

SEQ ID NO: 208779 - RNA, 32 nt, Human
gucgcuccugcucuccgaaugcugcgcaccgc

SEQ ID NO: 208780 - RNA, 32 nt, Human
gucgcucuccaaucuuaaccagguuugcuccc

SEQ ID NO: 208781 - RNA, 32 nt, Human
gucgcucucuggcugcuccucugucccuugag

SEQ ID NO: 208782 - RNA, 32 nt, Human
gucgcucugucacccaggcuggaguuauagug

SEQ ID NO: 208783 - RNA, 32 nt, Human
gucgcugaaggagagagaaaagaugugugucu

SEQ ID NO: 208784 - RNA, 32 nt, Human
gucgcugcagccucaaccuccugggcucaagu

SEQ ID NO: 208785 - RNA, 32 nt, Human
gucgcugcagcugccgggaaagaaggaaacga

SEQ ID NO: 208786 - RNA, 32 nt, Human
gucgcugcgcggcccaccccggaugucagccc

SEQ ID NO: 208787 - RNA, 32 nt, Human
gucgcugcugccgccuccacccagccuccgcc

SEQ ID NO: 208788 - RNA, 19 nt, Human
gucgcugcugcucucaucc

SEQ ID NO: 208789 - RNA, 20 nt, Human
gucgcugcuugcccugcguc

SEQ ID NO: 208790 - RNA, 32 nt, Human
gucgcuggagugcaccagucuuggggaagagg

SEQ ID NO: 208791 - RNA, 18 nt, Human
gucgcuggagugcagugg

SEQ ID NO: 208792 - RNA, 30 nt, Human
gucgcuggccucucccugcccugacacuug

SEQ ID NO: 208793 - RNA, 32 nt, Human
gucgcuggccucucccugcccugacacuugau

SEQ ID NO: 208794 - RNA, 27 nt, Human
gucgcuggcgggguucggcccgagcua

SEQ ID NO: 208795 - RNA, 32 nt, Human
gucgcugggauuacugagauugugccacugca

SEQ ID NO: 208796 - RNA, 32 nt, Human
gucgcugggcagggcgaguugggaaagcggca

SEQ ID NO: 208797 - RNA, 32 nt, Human
gucgcugucauucugucauugcugcuacucua

SEQ ID NO: 208798 - RNA, 23 nt, Human
gucgcuuagcuggagugcggugg

SEQ ID NO: 208799 - RNA, 32 nt, Human
gucgcuugaccuucaguugugcacugaggccg

SEQ ID NO: 208800 - RNA, 32 nt, Human
gucgcuugcguggcuaggaagggguuggggcc

SEQ ID NO: 208801 - RNA, 32 nt, Human
gucgcuuuugaacagccccugcaccuggcagc

SEQ ID NO: 208802 - RNA, 20 nt, Human
gucgcuuuugccuuuucaaa

SEQ ID NO: 208803 - RNA, 32 nt, Human
gucggaaaugcacauuccuggauaggaaucac

SEQ ID NO: 208804 - RNA, 32 nt, Human
gucggaaccauggaaggccuccggggagacag

SEQ ID NO: 208805 - RNA, 32 nt, Human
gucggaagaaggagggugagcaccugggagag

SEQ ID NO: 208806 - RNA, 32 nt, Human
gucggaagucauauuuuauaugccaucauaga

SEQ ID NO: 208807 - RNA, 32 nt, Human
gucggacacacagcaguaauuucccagucaua

SEQ ID NO: 208808 - RNA, 17 nt, Human
gucggacagcagguagg

SEQ ID NO: 208809 - RNA, 32 nt, Human
gucggacauacaccuacacugcauuccucaaa

SEQ ID NO: 208810 - RNA, 32 nt, Human
gucggacgggaccugggcucucuccacgauuc

SEQ ID NO: 208811 - RNA, 32 nt, Human
gucggacucuacaggccagccucugccucaca

SEQ ID NO: 208812 - RNA, 32 nt, Human
gucggacugcgcucccagccugggcucuggga

SEQ ID NO: 208813 - RNA, 32 nt, Human
gucggagaagcgccccuacccacccacacccc

SEQ ID NO: 208814 - RNA, 32 nt, Human
gucggagacacaccuugauguauguuaauaaa

SEQ ID NO: 208815 - RNA, 32 nt, Human
gucggagacccugucuccaccucuagguuugg

SEQ ID NO: 208816 - RNA, 32 nt, Human
gucggagaugaaaucagagggagucgaagcug

SEQ ID NO: 208817 - RNA, 32 nt, Human
gucggagcacagcgugagcggaaugaaugcug

SEQ ID NO: 208818 - RNA, 32 nt, Human
gucggagccacugguccugcugcuggcugccu

SEQ ID NO: 208819 - RNA, 32 nt, Human
gucggagcucuuccuuccccucuguggaguca

SEQ ID NO: 208820 - RNA, 32 nt, Human
gucggaggaagaggagggaggagggaggccga

SEQ ID NO: 208821 - RNA, 32 nt, Human
gucggagggagguuuaaccacagaucgguucc

SEQ ID NO: 208822 - RNA, 32 nt, Human
gucggagggggccggcgcgcagagccagacgc

SEQ ID NO: 208823 - RNA, 32 nt, Human
gucggaggguggcauuaacaccagugugccau

SEQ ID NO: 208824 - RNA, 32 nt, Human
gucggaggucugggagaaaggagcagcugucu

SEQ ID NO: 208825 - RNA, 32 nt, Human
gucggagguguaaucauauuggugcuauuccu

SEQ ID NO: 208826 - RNA, 32 nt, Human
gucggaguuccccagcaaacagugaccaagcc

SEQ ID NO: 208827 - RNA, 32 nt, Human
gucggauacuguggcguaugaggaccugucug

SEQ ID NO: 208828 - RNA, 32 nt, Human
gucggauuacaagaucaaccaccaccaacaac

SEQ ID NO: 208829 - RNA, 32 nt, Human
gucggauuggccgcacgccucaguucuagacg

SEQ ID NO: 208830 - RNA, 32 nt, Human
gucggcaccugggacaucccugagggaagggc

SEQ ID NO: 208831 - RNA, 32 nt, Human
gucggcagacuggggcuuccuccugggccacc

SEQ ID NO: 208832 - RNA, 32 nt, Human
gucggcagagcaaccccaccuccaggcauuau

SEQ ID NO: 208833 - RNA, 18 nt, Human
gucggcagagucuggggu

SEQ ID NO: 208834 - RNA, 32 nt, Human
gucggcagagucugggguagggagacagcgac

SEQ ID NO: 208835 - RNA, 32 nt, Human
gucggcaggcagcauggggaagggagggaacc

SEQ ID NO: 208836 - RNA, 32 nt, Human
gucggcaggcucggcaagcgaagaggagcggc

SEQ ID NO: 208837 - RNA, 32 nt, Human
gucggccaagugcgugggcauugaucuacacg

SEQ ID NO: 208838 - RNA, 24 nt, Human
gucggccaggcuagagugcagugg

SEQ ID NO: 208839 - RNA, 24 nt, Human
gucggccaggcuggaaugcaaugg

SEQ ID NO: 208840 - RNA, 24 nt, Human
gucggccaggcuggagugcagugg

SEQ ID NO: 208841 - RNA, 32 nt, Human
gucggccagguguggugggaucacgccuguaa

SEQ ID NO: 208842 - RNA, 23 nt, Human
gucggcccagacugaagugcagu

SEQ ID NO: 208843 - RNA, 24 nt, Human
gucggcccagacugaagugcagug

SEQ ID NO: 208844 - RNA, 25 nt, Human
gucggcccagacugaagugcagugg

SEQ ID NO: 208845 - RNA, 32 nt, Human
gucggccccagcccugaggagccggaccgaug

SEQ ID NO: 208846 - RNA, 22 nt, Human
gucggccccuuccagggccagg

SEQ ID NO: 208847 - RNA, 26 nt, Human
gucggcccugcgucggcccuggggua

SEQ ID NO: 208848 - RNA, 32 nt, Human
gucggccggccugcuggcauggcugggcaucc

SEQ ID NO: 208849 - RNA, 31 nt, Human
gucggccgugcacaauuacaugcagaccugc

SEQ ID NO: 208850 - RNA, 32 nt, Human
gucggccucgucggcccugcugagguaucagg

SEQ ID NO: 208851 - RNA, 31 nt, Human
gucggccugcccaccgggccugugcggggcg

SEQ ID NO: 208852 - RNA, 32 nt, Human
gucggccugcgcuccucagccuggcgguucua

SEQ ID NO: 208853 - RNA, 32 nt, Human
gucggccuggagucugugccugguccuuugcc

SEQ ID NO: 208854 - RNA, 32 nt, Human
gucggccuggaguugggguugcagggacgcca

SEQ ID NO: 208855 - RNA, 32 nt, Human
gucggcgcccacugcccggcggcagcggcgga

SEQ ID NO: 208856 - RNA, 32 nt, Human
gucggcgcugccccaucuccccucagcucggc

SEQ ID NO: 208857 - RNA, 32 nt, Human
gucggcgcugcgggcgaggugggcagguaggu

SEQ ID NO: 208858 - RNA, 18 nt, Human
gucggcgggcuccaggga

SEQ ID NO: 208859 - RNA, 32 nt, Human
gucggcgggcugggggcggcacgacuggaggc

SEQ ID NO: 208860 - RNA, 32 nt, Human
gucggcggugcuggcggccgggucccuggugc

SEQ ID NO: 208861 - RNA, 17 nt, Human
gucggcgugaggugggg

SEQ ID NO: 208862 - RNA, 32 nt, Human
gucggcguuuucucccagccuccgccaugccg

SEQ ID NO: 208863 - RNA, 32 nt, Human
gucggcucacugcaacguccgccuccuggguu

SEQ ID NO: 208864 - RNA, 32 nt, Human
gucggcucacugcaagcuccgccuccuggguu

SEQ ID NO: 208865 - RNA, 32 nt, Human
gucggcucacugccaacaucugccacccaggu

SEQ ID NO: 208866 - RNA, 32 nt, Human
gucggcuccaugcucaccagcagccgcccagg

SEQ ID NO: 208867 - RNA, 32 nt, Human
gucggcuccccaggcuguggccucaggaauca

SEQ ID NO: 208868 - RNA, 32 nt, Human
gucggcucgcggauccagcugcagagcgacgu

SEQ ID NO: 208869 - RNA, 32 nt, Human
gucggcucuccugguuucccccuguuuccccu

SEQ ID NO: 208870 - RNA, 32 nt, Human
gucggcugcugccccgggucuggcagaacucg

SEQ ID NO: 208871 - RNA, 18 nt, Human
gucggcugggugcagugg

SEQ ID NO: 208872 - RNA, 32 nt, Human
gucggcuguggucagcagcccagaccccauca

SEQ ID NO: 208873 - RNA, 31 nt, Human
gucgggaccguacugaggacauguauuccuc

SEQ ID NO: 208874 - RNA, 32 nt, Human
gucgggaguaugaacuggaaagaccgaaauca

SEQ ID NO: 208875 - RNA, 32 nt, Human
gucgggaucucagaggaaauugcagugauucc

SEQ ID NO: 208876 - RNA, 32 nt, Human
gucgggaugucauguccuccaggcuggggcca

SEQ ID NO: 208877 - RNA, 19 nt, Human
gucgggcaagaaagucugg

SEQ ID NO: 208878 - RNA, 32 nt, Human
gucgggcaccaugugccugcaggaugggccgc

SEQ ID NO: 208879 - RNA, 32 nt, Human
gucgggcaggggcuggagggaggcgggggcug

SEQ ID NO: 208880 - RNA, 19 nt, Human
gucgggcaguaaagguaga

SEQ ID NO: 208881 - RNA, 32 nt, Human
gucgggcauucuuuguuguuugcacaucuuuu

SEQ ID NO: 208882 - RNA, 32 nt, Human
gucgggccagcucuccccgaaaggucuugacc

SEQ ID NO: 208883 - RNA, 32 nt, Human
gucgggccccugccugccuucuccccuccacg

SEQ ID NO: 208884 - RNA, 32 nt, Human
gucgggcccugccucccucccagcagggaaac

SEQ ID NO: 208885 - RNA, 32 nt, Human
gucgggccggcgcucccuucucugccaggugg

SEQ ID NO: 208886 - RNA, 32 nt, Human
gucgggccucugcaccuggguccauggggucu

SEQ ID NO: 208887 - RNA, 32 nt, Human
gucgggcggcggccucacagcugggggcccug

SEQ ID NO: 208888 - RNA, 32 nt, Human
gucgggcuuccaggcuggauggagugcccugg

SEQ ID NO: 208889 - RNA, 32 nt, Human
gucggggaaaggagggagugccuccaacaaau

SEQ ID NO: 208890 - RNA, 32 nt, Human
gucggggaagggggccgggugggagccgcucc

SEQ ID NO: 208891 - RNA, 32 nt, Human
gucggggacugaggcaguagagggaggcgaga

SEQ ID NO: 208892 - RNA, 32 nt, Human
gucggggagagggaccgggggucccccaguca

SEQ ID NO: 208893 - RNA, 32 nt, Human
gucggggagaggggcggacggcggcacccccu

SEQ ID NO: 208894 - RNA, 32 nt, Human
gucggggccauggacggccugaggcagcgcgu

SEQ ID NO: 208895 - RNA, 32 nt, Human
gucggggccauggcugcugccugcaccugccc

SEQ ID NO: 208896 - RNA, 32 nt, Human
gucggggccgcuggccacgcuggugguuugga

SEQ ID NO: 208897 - RNA, 32 nt, Human
gucgggggagcacaggccacagagcgcagcuc

SEQ ID NO: 208898 - RNA, 32 nt, Human
gucgggggcgggggcggcaggagcagaagcgg

SEQ ID NO: 208899 - RNA, 23 nt, Human
gucgggggguggggcggggaagu

SEQ ID NO: 208900 - RNA, 32 nt, Human
gucggggguggggugggaggagggccaccuuc

SEQ ID NO: 208901 - RNA, 32 nt, Human
gucggggucuaaggugaucagaugcagaagca

SEQ ID NO: 208902 - RNA, 32 nt, Human
gucgggguggcggccaggaggaaaggcagaaa

SEQ ID NO: 208903 - RNA, 32 nt, Human
gucggggugggggaguucucagcucuuugggu

SEQ ID NO: 208904 - RNA, 32 nt, Human
gucggguccugagaccagguccucagccagca

SEQ ID NO: 208905 - RNA, 32 nt, Human
gucgguauuuacucugaacugagggaagaaaa

SEQ ID NO: 208906 - RNA, 32 nt, Human
gucggucacccagacagcucuguggaggcagg

SEQ ID NO: 208907 - RNA, 32 nt, Human
gucggucuugagaaggcagagaucaggccacc

SEQ ID NO: 208908 - RNA, 32 nt, Human
gucggugcccgcgccccuccccgggccccgcc

SEQ ID NO: 208909 - RNA, 32 nt, Human
gucgguggaggaggggaggcggcgaggaggcg

SEQ ID NO: 208910 - RNA, 32 nt, Human
gucgguggcagguuugggggagaccggaagug

SEQ ID NO: 208911 - RNA, 32 nt, Human
gucgguggggagcagccggcugugcugucagc

SEQ ID NO: 208912 - RNA, 32 nt, Human
gucgguggggcuggccuugagaaggaacugga

SEQ ID NO: 208913 - RNA, 32 nt, Human
gucgguguaccuuacuugucaccagcuccaag

SEQ ID NO: 208914 - RNA, 32 nt, Human
gucggugucugaggguugagguugcaguccug

SEQ ID NO: 208915 - RNA, 32 nt, Human
gucgguuccgggcgguugggagcgcgcgagcu

SEQ ID NO: 208916 - RNA, 32 nt, Human
gucguacgcugcgagggcaucaacauuucugg

SEQ ID NO: 208917 - RNA, 32 nt, Human
gucguacuacccuguccagucuugagggccua

SEQ ID NO: 208918 - RNA, 32 nt, Human
gucguacuggggaggcagcuggagcagcaaga

SEQ ID NO: 208919 - RNA, 32 nt, Human
gucguaguaguggauggggaguagccguccca

SEQ ID NO: 208920 - RNA, 32 nt, Human
gucguaguuacucucaggcauggaugaauaaa

SEQ ID NO: 208921 - RNA, 32 nt, Human
gucguaugaacugugcauagucuccagagcuu

SEQ ID NO: 208922 - RNA, 32 nt, Human
gucguauucaaccacugucugccaucacugug

SEQ ID NO: 208923 - RNA, 23 nt, Human
gucgucaagaagagagugggguc

SEQ ID NO: 208924 - RNA, 32 nt, Human
gucgucaagccuguaaucccaacacuuuggga

SEQ ID NO: 208925 - RNA, 32 nt, Human
gucgucacgccuguaaucccagcacuuuagau

SEQ ID NO: 208926 - RNA, 32 nt, Human
gucgucacgccuguaaucccagcacuuuggca

SEQ ID NO: 208927 - RNA, 32 nt, Human
gucgucacgccuguaaucccagcacuuuggga

SEQ ID NO: 208928 - RNA, 32 nt, Human
gucgucacugcacagccagucaccgcggucuc

SEQ ID NO: 208929 - RNA, 32 nt, Human
gucgucacuuccugucacuaggacuacaguuu

SEQ ID NO: 208930 - RNA, 32 nt, Human
gucgucaggagguggagguugcagugagccaa

SEQ ID NO: 208931 - RNA, 32 nt, Human
gucgucaggccugugcugagagccgcagcccc

SEQ ID NO: 208932 - RNA, 32 nt, Human
gucgucauccucugcuggugugaauggcuucu

SEQ ID NO: 208933 - RNA, 25 nt, Human
gucgucaucuaugcauuagaguuga

SEQ ID NO: 208934 - RNA, 32 nt, Human
gucguccacaugcuugucagccccacgcugug

SEQ ID NO: 208935 - RNA, 22 nt, Human
gucguccaggcuggagugcagu

SEQ ID NO: 208936 - RNA, 32 nt, Human
gucguccaggcuggagugcaguacgcaaucuu

SEQ ID NO: 208937 - RNA, 23 nt, Human
gucguccaggcuggagugcagug

SEQ ID NO: 208938 - RNA, 24 nt, Human
gucguccaggcuggagugcagugg

SEQ ID NO: 208939 - RNA, 24 nt, Human
gucguccagguuagagugcaaugg

SEQ ID NO: 208940 - RNA, 32 nt, Human
gucguccccugcugagaggccaugugagacca

SEQ ID NO: 208941 - RNA, 32 nt, Human
gucguccuggacaccacaggggcaccugcagg

SEQ ID NO: 208942 - RNA, 32 nt, Human
gucguccuugcccaaggcagagcuguuccagc

SEQ ID NO: 208943 - RNA, 32 nt, Human
gucgucucucaguucuugagguauauuauuuu

SEQ ID NO: 208944 - RNA, 32 nt, Human
gucgucuucugcugcugacccccaucaaaucc

SEQ ID NO: 208945 - RNA, 32 nt, Human
gucgucuuggcuccaccucuguccucucucua

SEQ ID NO: 208946 - RNA, 32 nt, Human
gucgugaacaugaaaguacuucucaugugucc

SEQ ID NO: 208947 - RNA, 32 nt, Human
gucgugaacuccuggcuucaagcaguccuccu

SEQ ID NO: 208948 - RNA, 32 nt, Human
gucgugaccugcuaggccagagcccacuccau

SEQ ID NO: 208949 - RNA, 32 nt, Human
gucgugacugcugaugggcaugagggaucauc

SEQ ID NO: 208950 - RNA, 32 nt, Human
gucgugcaccuugcgugugucccauucagcac

SEQ ID NO: 208951 - RNA, 32 nt, Human
gucgugccacugcacuccagccugggcaacag

SEQ ID NO: 208952 - RNA, 32 nt, Human
gucgugccacugcacuccagccugggcagcag

SEQ ID NO: 208953 - RNA, 32 nt, Human
gucgugccacugcacuccagccugggcgacag

SEQ ID NO: 208954 - RNA, 32 nt, Human
gucgugccacugcacuucagccugggugacag

SEQ ID NO: 208955 - RNA, 32 nt, Human
gucgugccacugcaugccagccugggcaacaa

SEQ ID NO: 208956 - RNA, 32 nt, Human
gucgugccacugcgcuccagccugggugacag

SEQ ID NO: 208957 - RNA, 32 nt, Human
gucgugccauugcacuccagccugggugacag

SEQ ID NO: 208958 - RNA, 32 nt, Human
gucgugcccuagccaaggagaaguuucaguca

SEQ ID NO: 208959 - RNA, 32 nt, Human
gucgugcccuggaaggugagcgcggccgagcu

SEQ ID NO: 208960 - RNA, 32 nt, Human
gucgugcgcuggcugcugcuuuucugcuccug

SEQ ID NO: 208961 - RNA, 32 nt, Human
gucgugcgugaagcaucucucuucuaaaggau

SEQ ID NO: 208962 - RNA, 32 nt, Human
gucgugcuacugcacucccgccugggugacag

SEQ ID NO: 208963 - RNA, 32 nt, Human
gucgugcugcugcuggaagccaacagccuccg

SEQ ID NO: 208964 - RNA, 32 nt, Human
gucgugcuugcuugaagugcagccuuggauac

SEQ ID NO: 208965 - RNA, 32 nt, Human
gucguggauggggaggggugggcagaguaguu

SEQ ID NO: 208966 - RNA, 21 nt, Human
gucguggcgagaggggcgggg

SEQ ID NO: 208967 - RNA, 32 nt, Human
gucguggcgcccaucccuccccuguucugcug

SEQ ID NO: 208968 - RNA, 23 nt, Human
gucguggcgucgggcuuccggag

SEQ ID NO: 208969 - RNA, 32 nt, Human
gucguggcucacugcagccuccaccuccuggg

SEQ ID NO: 208970 - RNA, 32 nt, Human
gucguggcuccccucaucagcuccccacacca

SEQ ID NO: 208971 - RNA, 32 nt, Human
gucguggcuguguuggguggggccacaucagg

SEQ ID NO: 208972 - RNA, 24 nt, Human
gucguggugcugcuguccgcggag

SEQ ID NO: 208973 - RNA, 32 nt, Human
gucgugguugcagaaggagcaauuaggcugcc

SEQ ID NO: 208974 - RNA, 32 nt, Human
gucguguaccuucuccaccugcccccaggaaa

SEQ ID NO: 208975 - RNA, 32 nt, Human
gucguguaguccuuucugccuccaggagcggc

SEQ ID NO: 208976 - RNA, 32 nt, Human
gucguguccagccugacgccuacuggggcagg

SEQ ID NO: 208977 - RNA, 32 nt, Human
gucgugucuggaaugucagggaaggggagggc

SEQ ID NO: 208978 - RNA, 32 nt, Human
gucgugucugggaguuucucccagagaaacca

SEQ ID NO: 208979 - RNA, 32 nt, Human
gucgugucuuuuaaaaacuccuguuuucacac

SEQ ID NO: 208980 - RNA, 32 nt, Human
gucgugugcacucccaccccagccuuuuggua

SEQ ID NO: 208981 - RNA, 32 nt, Human
gucguguuccugcagugggcacccuaggcgua

SEQ ID NO: 208982 - RNA, 32 nt, Human
gucguguugaacugugucugugucagugcacu

SEQ ID NO: 208983 - RNA, 32 nt, Human
gucguguugacuccauaugaaaggacacagcu

SEQ ID NO: 208984 - RNA, 32 nt, Human
gucguguuguuacugucucaaguggaagcgcc

SEQ ID NO: 208985 - RNA, 32 nt, Human
gucguguuuucaggagcucaaggcuggagugu

SEQ ID NO: 208986 - RNA, 32 nt, Human
gucguuaaaaacaaccaaaaucccgaaacuau

SEQ ID NO: 208987 - RNA, 32 nt, Human
gucguucacgcuccugagcagagccuuccggu

SEQ ID NO: 208988 - RNA, 32 nt, Human
gucguucucugagccccaccucagcaggucuc

SEQ ID NO: 208989 - RNA, 32 nt, Human
gucguucuggggaggccuggccuagcagccac

SEQ ID NO: 208990 - RNA, 32 nt, Human
gucguugccaucucguccucaguggcuucccg

SEQ ID NO: 208991 - RNA, 32 nt, Human
gucguuggacugcacuugccucuccaugugau

SEQ ID NO: 208992 - RNA, 32 nt, Human
gucguuggguagugaagaagagaguggaaagg

SEQ ID NO: 208993 - RNA, 32 nt, Human
gucguuguugagauggaaucuagcucugucac

SEQ ID NO: 208994 - RNA, 32 nt, Human
gucguuguuguuguuuuucuggaaacugcuug

SEQ ID NO: 208995 - RNA, 32 nt, Human
gucguuuaugucaucccuucuucuccagacag

SEQ ID NO: 208996 - RNA, 32 nt, Human
gucguuucuacucaucccuuaacuucucccuu

SEQ ID NO: 208997 - RNA, 32 nt, Human
gucguuuugaaaccaaaaagauaaaaacugca

SEQ ID NO: 208998 - RNA, 32 nt, Human
gucguuuuuguuccaagaaugauaugaaaggu

SEQ ID NO: 208999 - RNA, 32 nt, Human
gucuaaaaauaacauacgcacucaacuuccuu

SEQ ID NO: 209000 - RNA, 32 nt, Human
gucuaaaacacugaaaacuguguccaauaucg

SEQ ID NO: 209001 - RNA, 32 nt, Human
gucuaaaacguacagucugaggcuggggcggg

SEQ ID NO: 209002 - RNA, 32 nt, Human
gucuaaaaguucuguguggcacacagagaugc

SEQ ID NO: 209003 - RNA, 32 nt, Human
gucuaaaccaagauuaugugacuugcaauaaa

SEQ ID NO: 209004 - RNA, 32 nt, Human
gucuaaacuguaucugccucugugccugugca

SEQ ID NO: 209005 - RNA, 32 nt, Human
gucuaaagaaaauuauuugcugaguccucaua

SEQ ID NO: 209006 - RNA, 32 nt, Human
gucuaaagaagaggugagagcaaaaggaauaa

SEQ ID NO: 209007 - RNA, 32 nt, Human
gucuaaagagcugaggaaucuaaacgagaaaa

SEQ ID NO: 209008 - RNA, 32 nt, Human
gucuaaagaguauuugaagcagugaugcaggc

SEQ ID NO: 209009 - RNA, 22 nt, Human
gucuaaagcuguguccugaaua

SEQ ID NO: 209010 - RNA, 32 nt, Human
gucuaaagucaguauaaagaccugugucucuc

SEQ ID NO: 209011 - RNA, 24 nt, Human
gucuaaagucuagggaaaagggaa

SEQ ID NO: 209012 - RNA, 32 nt, Human
gucuaaaguggaacugaauaguagcugugaga

SEQ ID NO: 209013 - RNA, 32 nt, Human
gucuaaagugugagccacugagaagagagacg

SEQ ID NO: 209014 - RNA, 32 nt, Human
gucuaaaugaggagcuugauuucuugaucaca

SEQ ID NO: 209015 - RNA, 32 nt, Human
gucuaacacggugaaaccccaucucuacuaaa

SEQ ID NO: 209016 - RNA, 32 nt, Human
gucuaacacuccugggagcucaggaggcuucu

SEQ ID NO: 209017 - RNA, 32 nt, Human
gucuaaccccuucacugauucccaacacucac

SEQ ID NO: 209018 - RNA, 32 nt, Human
gucuaaccuccuggagggacagucuauacgug

SEQ ID NO: 209019 - RNA, 32 nt, Human
gucuaaccugcucuuucucuuuggugccccuu

SEQ ID NO: 209020 - RNA, 32 nt, Human
gucuaaccuggcauuaugcacacacuuugagu

SEQ ID NO: 209021 - RNA, 32 nt, Human
gucuaacgcugacagaaaugaaugcagaagga

SEQ ID NO: 209022 - RNA, 32 nt, Human
gucuaacuccaguuuuucacaaggucaucuuc

SEQ ID NO: 209023 - RNA, 32 nt, Human
gucuaacuccugggcgugcuuuaagcucagcu

SEQ ID NO: 209024 - RNA, 32 nt, Human
gucuaagaaggugggggugagcaggggguuua

SEQ ID NO: 209025 - RNA, 32 nt, Human
gucuaagccuucccuccugggcuagggaguaa

SEQ ID NO: 209026 - RNA, 32 nt, Human
gucuaaggcuggggugaauggaagggcccacc

SEQ ID NO: 209027 - RNA, 32 nt, Human
gucuaagguggcugcuucuuccccagccauga

SEQ ID NO: 209028 - RNA, 32 nt, Human
gucuaagugugcugcauggagugagcaguaga

SEQ ID NO: 209029 - RNA, 32 nt, Human
gucuaauaaaaauacaaaaauuagccgggcgu

SEQ ID NO: 209030 - RNA, 32 nt, Human
gucuaauauuagacauacaaguugcugccugu

SEQ ID NO: 209031 - RNA, 18 nt, Human
gucuaaucccagcacuuu

SEQ ID NO: 209032 - RNA, 20 nt, Human
gucuaauccuauuccuuccc

SEQ ID NO: 209033 - RNA, 32 nt, Human
gucuaaugcaugugauuuaauguauguuuaau

SEQ ID NO: 209034 - RNA, 32 nt, Human
gucuaauggguauuuaaacaauaaaugugcag

SEQ ID NO: 209035 - RNA, 32 nt, Human
gucuaaugugagaugaccuugauuugaagugu

SEQ ID NO: 209036 - RNA, 32 nt, Human
gucuaauuaaacugagcaauacuuuugugaau

SEQ ID NO: 209037 - RNA, 32 nt, Human
gucuaauuuauucaaagggggcaagaaguagc

SEQ ID NO: 209038 - RNA, 32 nt, Human
gucuacaaggaaaugggagguggaggguugua

SEQ ID NO: 209039 - RNA, 19 nt, Human
gucuacaauaaaacuuuaa

SEQ ID NO: 209040 - RNA, 32 nt, Human
gucuacacucacaaucaucuucucccaagacu

SEQ ID NO: 209041 - RNA, 32 nt, Human
gucuacacugaacucauguucugaugagaaua

SEQ ID NO: 209042 - RNA, 19 nt, Human
gucuacagacugguuucua

SEQ ID NO: 209043 - RNA, 32 nt, Human
gucuacagagucagggacagaagggaagggac

SEQ ID NO: 209044 - RNA, 18 nt, Human
gucuacagcacggguucu

SEQ ID NO: 209045 - RNA, 20 nt, Human
gucuacagcaucagcuucug

SEQ ID NO: 209046 - RNA, 20 nt, Human
gucuacagccaacuauucua

SEQ ID NO: 209047 - RNA, 32 nt, Human
gucuacaggcuggaagaaggcccucaccagaa

SEQ ID NO: 209048 - RNA, 32 nt, Human
gucuacaguaaguggcugauugcaguggugga

SEQ ID NO: 209049 - RNA, 22 nt, Human
gucuacaguuaucauuauuuua

SEQ ID NO: 209050 - RNA, 32 nt, Human
gucuacaucagccugggcugcagcgcgcugcc

SEQ ID NO: 209051 - RNA, 32 nt, Human
gucuaccacagaggccagacgcaguguggggg

SEQ ID NO: 209052 - RNA, 32 nt, Human
gucuaccagaugaggaaauggcaguucugaga

SEQ ID NO: 209053 - RNA, 32 nt, Human
gucuaccagugaccucagggcacuuugggcuu

SEQ ID NO: 209054 - RNA, 32 nt, Human
gucuacccaagacccacccgccucagcccagc

SEQ ID NO: 209055 - RNA, 32 nt, Human
gucuaccccaacacaaaggugcuucuccauaa

SEQ ID NO: 209056 - RNA, 32 nt, Human
gucuaccccucuccuuucacuccuuuccuccc

SEQ ID NO: 209057 - RNA, 32 nt, Human
gucuacccuaauggaucccuguuuauuggauc

SEQ ID NO: 209058 - RNA, 32 nt, Human
gucuaccuagaaccuaugggaaagcugcaaga

SEQ ID NO: 209059 - RNA, 32 nt, Human
gucuaccucccaaagugcugggauuacagucg

SEQ ID NO: 209060 - RNA, 28 nt, Human
gucuaccucccuuccuccucugcucacc

SEQ ID NO: 209061 - RNA, 32 nt, Human
gucuaccugagaucuauauggagcuuaaagga

SEQ ID NO: 209062 - RNA, 32 nt, Human
gucuaccugcauucauaauuccaggaucugug

SEQ ID NO: 209063 - RNA, 32 nt, Human
gucuaccuuuagccaggcacaggacagcccua

SEQ ID NO: 209064 - RNA, 17 nt, Human
gucuacggcagcuauuc

SEQ ID NO: 209065 - RNA, 32 nt, Human
gucuacgugcuaaggcaagacaggaaguaguu

SEQ ID NO: 209066 - RNA, 32 nt, Human
gucuacuaaaaauacaaaaauuaacugggcuu

SEQ ID NO: 209067 - RNA, 32 nt, Human
gucuacuaaaaauacaaaaauuagccaggcau

SEQ ID NO: 209068 - RNA, 32 nt, Human
gucuacuaaaaauacaaaaauuagccgggcau

SEQ ID NO: 209069 - RNA, 32 nt, Human
gucuacuaaaaauacaaaaauuagcugggcau

SEQ ID NO: 209070 - RNA, 32 nt, Human
gucuacuaaaaauacaaaauuagcugggcgug

SEQ ID NO: 209071 - RNA, 32 nt, Human
gucuacuaugugaauacuugaccauggagguc

SEQ ID NO: 209072 - RNA, 32 nt, Human
gucuacucagugccuggugaagccacccucag

SEQ ID NO: 209073 - RNA, 32 nt, Human
gucuacucugauugauugucaugggcacccac

SEQ ID NO: 209074 - RNA, 32 nt, Human
gucuacugcucaggcucucccacuucguggca

SEQ ID NO: 209075 - RNA, 32 nt, Human
gucuacugugggaacaguuaucccuaaccaca

SEQ ID NO: 209076 - RNA, 19 nt, Human
gucuacuuagauuguucua

SEQ ID NO: 209077 - RNA, 32 nt, Human
gucuacuucaguuccuuaagacugucugguca

SEQ ID NO: 209078 - RNA, 32 nt, Human
gucuacuucauuucugucacggguaggacagu

SEQ ID NO: 209079 - RNA, 32 nt, Human
gucuacuuggggagacagaaaagggaagagau

SEQ ID NO: 209080 - RNA, 32 nt, Human
gucuagaaaguaaaauaaagaggaauguuacc

SEQ ID NO: 209081 - RNA, 32 nt, Human
gucuagaacuccuggguucaaguaauccuccc

SEQ ID NO: 209082 - RNA, 32 nt, Human
gucuagaacuucuggucucaagcaaucugccc

SEQ ID NO: 209083 - RNA, 32 nt, Human
gucuagaauagggagguggagaaugaugacuu

SEQ ID NO: 209084 - RNA, 32 nt, Human
gucuagagccauaucugaaauauugcuaagca

SEQ ID NO: 209085 - RNA, 32 nt, Human
gucuagaguagggauuggcuguccuuaaguca

SEQ ID NO: 209086 - RNA, 32 nt, Human
gucuagauguuuuucuucaccugggccaugga

SEQ ID NO: 209087 - RNA, 32 nt, Human
gucuagcaaaugucccuucuguauguaaaaag

SEQ ID NO: 209088 - RNA, 32 nt, Human
gucuagcacacagcacuugagccagcaaaucc

SEQ ID NO: 209089 - RNA, 32 nt, Human
gucuagcacacagcacuugggccagcaaaucc

SEQ ID NO: 209090 - RNA, 32 nt, Human
gucuagcacccccauccccuuggcccuuccuc

SEQ ID NO: 209091 - RNA, 32 nt, Human
gucuagccaagguccaagaaguagcaagcugg

SEQ ID NO: 209092 - RNA, 32 nt, Human
gucuagccauugcccccugccugcugcuccug

SEQ ID NO: 209093 - RNA, 32 nt, Human
gucuagcccuuggguguggaaguccugaacac

SEQ ID NO: 209094 - RNA, 32 nt, Human
gucuagccucuuccucccucccucaugaugaa

SEQ ID NO: 209095 - RNA, 32 nt, Human
gucuagccuuuuccuccacgacauuccuugac

SEQ ID NO: 209096 - RNA, 32 nt, Human
gucuagcgaggaugcugaaggaagggagguau

SEQ ID NO: 209097 - RNA, 32 nt, Human
gucuagcuagaccugcacuguccaguacagua

SEQ ID NO: 209098 - RNA, 20 nt, Human
gucuaggaaaagaaguuuca

SEQ ID NO: 209099 - RNA, 32 nt, Human
gucuaggaagagggucugcagagcagaaagca

SEQ ID NO: 209100 - RNA, 32 nt, Human
gucuaggaccagccuggacaacauggugagac

SEQ ID NO: 209101 - RNA, 32 nt, Human
gucuaggagagggacagagugggaaggagagg

SEQ ID NO: 209102 - RNA, 32 nt, Human
gucuaggagccagccccacccuuagaaaagau

SEQ ID NO: 209103 - RNA, 32 nt, Human
gucuaggaggagagaagggagcaggaauccuc

SEQ ID NO: 209104 - RNA, 32 nt, Human
gucuaggaggucgaggcuucagugagcgguga

SEQ ID NO: 209105 - RNA, 21 nt, Human
gucuaggccucaggggcuccc

SEQ ID NO: 209106 - RNA, 32 nt, Human
gucuaggcugagcaacaugaaggggcccccaa

SEQ ID NO: 209107 - RNA, 21 nt, Human
gucuaggcuggagugccgugg

SEQ ID NO: 209108 - RNA, 32 nt, Human
gucuaggcuggguucaugacaugauucaugag

SEQ ID NO: 209109 - RNA, 32 nt, Human
gucuagggcagaagaucgagagagggcaggcc

SEQ ID NO: 209110 - RNA, 32 nt, Human
gucuaggggagagagucccugagugugagacc

SEQ ID NO: 209111 - RNA, 32 nt, Human
gucuaggggccagcuggucuccuggcaacuga

SEQ ID NO: 209112 - RNA, 32 nt, Human
gucuaggguucuguauaugaagcugccagucu

SEQ ID NO: 209113 - RNA, 32 nt, Human
gucuaggucuucucccugccaugucccuugcc

SEQ ID NO: 209114 - RNA, 32 nt, Human
gucuagucacugagagacagaggcagcaucug

SEQ ID NO: 209115 - RNA, 32 nt, Human
gucuaguccuccccuccaagagcauuaacuau

SEQ ID NO: 209116 - RNA, 32 nt, Human
gucuagucucgaacuccugaccuugugauccg

SEQ ID NO: 209117 - RNA, 32 nt, Human
gucuagucuugaacuccugggcuacaguuacc

SEQ ID NO: 209118 - RNA, 31 nt, Human
gucuagugaaggagagaaaacuguaauaaca

SEQ ID NO: 209119 - RNA, 32 nt, Human
gucuaguuuucauuaaaagaacaaagaucuuu

SEQ ID NO: 209120 - RNA, 32 nt, Human
gucuauaagcagacucaaucuucuugcagagg

SEQ ID NO: 209121 - RNA, 32 nt, Human
gucuauaauaaacucaccauugugcaccaucc

SEQ ID NO: 209122 - RNA, 32 nt, Human
gucuauaauaaauauguaagauacaaagaaca

SEQ ID NO: 209123 - RNA, 32 nt, Human
gucuauacgcaaaccacacaccugccaaggag

SEQ ID NO: 209124 - RNA, 21 nt, Human
gucuauacuaaaaauacaaaa

SEQ ID NO: 209125 - RNA, 20 nt, Human
gucuauaguauauuauacua

SEQ ID NO: 209126 - RNA, 32 nt, Human
gucuauauaagggaaugucuuccuuccuaucu

SEQ ID NO: 209127 - RNA, 32 nt, Human
gucuauaugcugggugcugagacacugauccc

SEQ ID NO: 209128 - RNA, 32 nt, Human
gucuauauuuucaaaugucuuuucauuuucua

SEQ ID NO: 209129 - RNA, 32 nt, Human
gucuaucaaauaaaaagaauaguaccugccca

SEQ ID NO: 209130 - RNA, 32 nt, Human
gucuaucaaauuugcccccuggcuuuauuacu

SEQ ID NO: 209131 - RNA, 32 nt, Human
gucuaucaacugaacaugaaauggagcaggcc

SEQ ID NO: 209132 - RNA, 32 nt, Human
gucuaucccggucucuggucucuuguccagcg

SEQ ID NO: 209133 - RNA, 32 nt, Human
gucuauccgguugcauccucccucccuguucc

SEQ ID NO: 209134 - RNA, 32 nt, Human
gucuauccucaaguugcuacgguucagugaga

SEQ ID NO: 209135 - RNA, 32 nt, Human
gucuauccucauccuacgccucccugggggcu

SEQ ID NO: 209136 - RNA, 32 nt, Human
gucuaucuccucugucacuucucccccuucau

SEQ ID NO: 209137 - RNA, 32 nt, Human
gucuaucuggcuggcagggaaggaaagaacuu

SEQ ID NO: 209138 - RNA, 32 nt, Human
gucuaugagugagggaugcagagccagggaag

SEQ ID NO: 209139 - RNA, 32 nt, Human
gucuaugauucugcucuccacguccaggugua

SEQ ID NO: 209140 - RNA, 32 nt, Human
gucuaugccuagggaaacucaggcuucuaguu

SEQ ID NO: 209141 - RNA, 20 nt, Human
gucuauggcaccucccuccc

SEQ ID NO: 209142 - RNA, 32 nt, Human
gucuauggcccccagccccagccucuggaaaa

SEQ ID NO: 209143 - RNA, 32 nt, Human
gucuauguacaguguuugcugcggguguguuc

SEQ ID NO: 209144 - RNA, 32 nt, Human
gucuaugucaacagaguuguuaucucauagag

SEQ ID NO: 209145 - RNA, 32 nt, Human
gucuauguccagagaagcugagauauggcaua

SEQ ID NO: 209146 - RNA, 32 nt, Human
gucuaugucccagcugacauucagucaaaugu

SEQ ID NO: 209147 - RNA, 32 nt, Human
gucuaugugauccucagagauuggaggccagg

SEQ ID NO: 209148 - RNA, 32 nt, Human
gucuaugugggagaaaagccauauaaugugag

SEQ ID NO: 209149 - RNA, 32 nt, Human
gucuaugugugcugggggaugucaggugccac

SEQ ID NO: 209150 - RNA, 32 nt, Human
gucuauuaaaaauacaaaaauuagcuggcugu

SEQ ID NO: 209151 - RNA, 32 nt, Human
gucuauuauuauauacauaucucuacgcugca

SEQ ID NO: 209152 - RNA, 32 nt, Human
gucuauucccucuuuuccccagccucuggcaa

SEQ ID NO: 209153 - RNA, 32 nt, Human
gucuauugcccaggcuggagugcaguggugcg

SEQ ID NO: 209154 - RNA, 24 nt, Human
gucuauuggggugggaaggggagu

SEQ ID NO: 209155 - RNA, 20 nt, Human
gucuauuguuuguuguucua

SEQ ID NO: 209156 - RNA, 32 nt, Human
gucuauuuaaaauguacugaggcacaacaagu

SEQ ID NO: 209157 - RNA, 32 nt, Human
gucuauuucaauauagaacuguucagcaaaaa

SEQ ID NO: 209158 - RNA, 32 nt, Human
gucuauuugaaauaugcaaaagguaugaggaa

SEQ ID NO: 209159 - RNA, 32 nt, Human
gucuauuugagacuccucaguucuugccacuu

SEQ ID NO: 209160 - RNA, 32 nt, Human
gucuauuugucccuaacaacugucuuugacag

SEQ ID NO: 209161 - RNA, 32 nt, Human
gucuauuuucaaaucagguauccugaagagua

SEQ ID NO: 209162 - RNA, 25 nt, Human
gucucaaaaaaggcuggaguacagu

SEQ ID NO: 209163 - RNA, 32 nt, Human
gucucaaaaagaaagaaagaaagaaagaaaga

SEQ ID NO: 209164 - RNA, 19 nt, Human
gucucaaaaauacaaaaua

SEQ ID NO: 209165 - RNA, 32 nt, Human
gucucaaaaugacccacccagcuagagcacug

SEQ ID NO: 209166 - RNA, 25 nt, Human
gucucaaaccuguggggaaggaggu

SEQ ID NO: 209167 - RNA, 32 nt, Human
gucucaaacuccucgguucaagcaauucgccc

SEQ ID NO: 209168 - RNA, 23 nt, Human
gucucaaacuccugaccuaguga

SEQ ID NO: 209169 - RNA, 32 nt, Human
gucucaaacuccugaccucaagcaauuugccc

SEQ ID NO: 209170 - RNA, 23 nt, Human
gucucaaacuccugaccucguga

SEQ ID NO: 209171 - RNA, 32 nt, Human
gucucaaacuccuggacucaagcaauccuccc

SEQ ID NO: 209172 - RNA, 32 nt, Human
gucucaaacuccuggacucaagcaaucugccc

SEQ ID NO: 209173 - RNA, 32 nt, Human
gucucaaacuccuggccucaagcaauccucac

SEQ ID NO: 209174 - RNA, 32 nt, Human
gucucaaacuccuggccucaagcaauccuccc

SEQ ID NO: 209175 - RNA, 32 nt, Human
gucucaaacuccuggccucaagcaauucuccc

SEQ ID NO: 209176 - RNA, 32 nt, Human
gucucaaacuccuggcuucaagcaauccuucc

SEQ ID NO: 209177 - RNA, 32 nt, Human
gucucaaacuccugggcacaagcaauccaccu

SEQ ID NO: 209178 - RNA, 32 nt, Human
gucucaaacuccugggcucaagcaauccaccc

SEQ ID NO: 209179 - RNA, 32 nt, Human
gucucaaacuccugggcucaagcaauccuccc

SEQ ID NO: 209180 - RNA, 32 nt, Human
gucucaaacuccugggcucaagcaauccuccu

SEQ ID NO: 209181 - RNA, 32 nt, Human
gucucaaacuccugggcucaagcaauguauug

SEQ ID NO: 209182 - RNA, 32 nt, Human
gucucaaacuccuggguucaagcaauccuccc

SEQ ID NO: 209183 - RNA, 32 nt, Human
gucucaaacuccuggguucaagcaguccuccc

SEQ ID NO: 209184 - RNA, 32 nt, Human
gucucaaacuccuggguucaagugaucauucc

SEQ ID NO: 209185 - RNA, 20 nt, Human
gucucaaacuccugugcuca

SEQ ID NO: 209186 - RNA, 21 nt, Human
gucucaaacuucugggcucaa

SEQ ID NO: 209187 - RNA, 32 nt, Human
gucucaaacuucugggcucaagcaauucaucu

SEQ ID NO: 209188 - RNA, 23 nt, Human
gucucaaaggagaaagugaggug

SEQ ID NO: 209189 - RNA, 32 nt, Human
gucucaaaggagaaagugagguggccugacac

SEQ ID NO: 209190 - RNA, 32 nt, Human
gucucaaagugcugggauuacagguaugagcc

SEQ ID NO: 209191 - RNA, 21 nt, Human
gucucaaccuccugggcucaa

SEQ ID NO: 209192 - RNA, 32 nt, Human
gucucaaccuccugggcucaagcaauccuccu

SEQ ID NO: 209193 - RNA, 32 nt, Human
gucucaacuacucagcucuccugcugcagcau

SEQ ID NO: 209194 - RNA, 32 nt, Human
gucucaacuauugccauuuccucauguauuau

SEQ ID NO: 209195 - RNA, 32 nt, Human
gucucaacucacugcaaccccugcucucaggu

SEQ ID NO: 209196 - RNA, 20 nt, Human
gucucaacuccugggcucaa

SEQ ID NO: 209197 - RNA, 32 nt, Human
gucucaagaggaauccuggaggcuuggucccc

SEQ ID NO: 209198 - RNA, 32 nt, Human
gucucaagauuuucuuaauuuaguucgcuguu

SEQ ID NO: 209199 - RNA, 24 nt, Human
gucucaagcaguccucccaccuca

SEQ ID NO: 209200 - RNA, 32 nt, Human
gucucaagccuauaaucccagcacuuugggag

SEQ ID NO: 209201 - RNA, 32 nt, Human
gucucaagccuguaauccuagcacuuugggag

SEQ ID NO: 209202 - RNA, 32 nt, Human
gucucaagcuccugggcucaagcaaucugcuu

SEQ ID NO: 209203 - RNA, 32 nt, Human
gucucaaggagagcaggguaggugaaagucua

SEQ ID NO: 209204 - RNA, 32 nt, Human
gucucaaggaggcagguggcagaugaaaacca

SEQ ID NO: 209205 - RNA, 32 nt, Human
gucucaaggugccuccuccucuccuuagcugg

SEQ ID NO: 209206 - RNA, 32 nt, Human
gucucaaguacaacagugguggcuugcccagu

SEQ ID NO: 209207 - RNA, 32 nt, Human
gucucaagugcuucaagagucuggcuccugcu

SEQ ID NO: 209208 - RNA, 24 nt, Human
gucucaaucccaggcuccucuuga

SEQ ID NO: 209209 - RNA, 21 nt, Human
gucucaaucucaacgcuguga

SEQ ID NO: 209210 - RNA, 32 nt, Human
gucucaaucucaccuaaaugaaucaggucugc

SEQ ID NO: 209211 - RNA, 32 nt, Human
gucucaauggcuucgggaaacacacauauaca

SEQ ID NO: 209212 - RNA, 32 nt, Human
gucucaauucuuuguauaugcauucuuuucag

SEQ ID NO: 209213 - RNA, 32 nt, Human
gucucacaccuguaaucccagcacuuugagag

SEQ ID NO: 209214 - RNA, 32 nt, Human
gucucacaccuguaaucccagcacuuugggag

SEQ ID NO: 209215 - RNA, 32 nt, Human
gucucacaccuguaaucccagcacuuugggug

SEQ ID NO: 209216 - RNA, 32 nt, Human
gucucacacguuuaaucccagcacuuugggag

SEQ ID NO: 209217 - RNA, 32 nt, Human
gucucacagcagaggaaaggacagggaaaaag

SEQ ID NO: 209218 - RNA, 32 nt, Human
gucucacagcccaugcugaauuuucugcauuu

SEQ ID NO: 209219 - RNA, 31 nt, Human
gucucacauaacccuuuacauugugaaauaa

SEQ ID NO: 209220 - RNA, 32 nt, Human
gucucacaucucuaaaccucagugcugagacc

SEQ ID NO: 209221 - RNA, 32 nt, Human
gucucaccagcuugccuucugcucuggacuaa

SEQ ID NO: 209222 - RNA, 32 nt, Human
gucucaccaggacccauaccuuucaccuuguu

SEQ ID NO: 209223 - RNA, 32 nt, Human
gucucaccaugaggcaggagaaucacuugaac

SEQ ID NO: 209224 - RNA, 32 nt, Human
gucucacccacagaugucuguagucggucggu

SEQ ID NO: 209225 - RNA, 32 nt, Human
gucucacccaggcuggagugcaguggcacgau

SEQ ID NO: 209226 - RNA, 32 nt, Human
gucucacccauuaucuggaauauugugauucu

SEQ ID NO: 209227 - RNA, 32 nt, Human
gucucaccccgagcugaccccucugccugggc

SEQ ID NO: 209228 - RNA, 32 nt, Human
gucucacccucuucaaccuccucccuucuucu

SEQ ID NO: 209229 - RNA, 32 nt, Human
gucucaccuaucuccugguucgaucuaggaaa

SEQ ID NO: 209230 - RNA, 32 nt, Human
gucucaccucacugcaaccuccaccuccuagg

SEQ ID NO: 209231 - RNA, 32 nt, Human
gucucaccucauugcaaccuccgccucccggg

SEQ ID NO: 209232 - RNA, 32 nt, Human
gucucaccuccaccggcauccacacaaaacca

SEQ ID NO: 209233 - RNA, 32 nt, Human
gucucaccugucgcuggagugcagugguguga

SEQ ID NO: 209234 - RNA, 32 nt, Human
gucucacgccugugaucccagcacuuugggag

SEQ ID NO: 209235 - RNA, 32 nt, Human
gucucacuaagauugccuagggcugcuuuauu

SEQ ID NO: 209236 - RNA, 32 nt, Human
gucucacuauguugucuggagugcuguggugg

SEQ ID NO: 209237 - RNA, 32 nt, Human
gucucacucccagggaccuuuuuggucaugga

SEQ ID NO: 209238 - RNA, 32 nt, Human
gucucacuccuguaauaccagcacuuugggag

SEQ ID NO: 209239 - RNA, 32 nt, Human
gucucacucucucucuuucucucccucuccua

SEQ ID NO: 209240 - RNA, 32 nt, Human
gucucacucugucacccagacuggagugcagu

SEQ ID NO: 209241 - RNA, 32 nt, Human
gucucacucugucacccaggauggagagcacu

SEQ ID NO: 209242 - RNA, 32 nt, Human
gucucacucugucacccaggcugcagugcaau

SEQ ID NO: 209243 - RNA, 32 nt, Human
gucucacucugucacccaggcugcaguguagu

SEQ ID NO: 209244 - RNA, 32 nt, Human
gucucacucugucacccaggcugcaguucacu

SEQ ID NO: 209245 - RNA, 32 nt, Human
gucucacucugucacccaggcuggagagcaau

SEQ ID NO: 209246 - RNA, 32 nt, Human
gucucacucugucacucuguugcccaggcugg

SEQ ID NO: 209247 - RNA, 32 nt, Human
gucucacucuguugcccagucuggagugcagu

SEQ ID NO: 209248 - RNA, 32 nt, Human
gucucacugcaaccuccgccucccagauucaa

SEQ ID NO: 209249 - RNA, 32 nt, Human
gucucacugcaaccucuaccucccagguucaa

SEQ ID NO: 209250 - RNA, 32 nt, Human
gucucacugcaaccucugccucccggguucaa

SEQ ID NO: 209251 - RNA, 32 nt, Human
gucucacugcaaccucugccuccuggguucag

SEQ ID NO: 209252 - RNA, 32 nt, Human
gucucacugcagccucaaccuccuggguucaa

SEQ ID NO: 209253 - RNA, 32 nt, Human
gucucacugcgcccucuccuccaaccuccccu

SEQ ID NO: 209254 - RNA, 32 nt, Human
gucucacuggaaggcagugaggagagcugagg

SEQ ID NO: 209255 - RNA, 32 nt, Human
gucucacugggcgacagagccagauucugucu

SEQ ID NO: 209256 - RNA, 32 nt, Human
gucucacugggcugaaaucaagguguuaacag

SEQ ID NO: 209257 - RNA, 32 nt, Human
gucucacugucacccaggccggagugcagugg

SEQ ID NO: 209258 - RNA, 32 nt, Human
gucucacugucacccaggcugaacugcagugg

SEQ ID NO: 209259 - RNA, 32 nt, Human
gucucacugucacccaggcuggagugcagugg

SEQ ID NO: 209260 - RNA, 32 nt, Human
gucucacugucgcccaggcuggagugcagugg

SEQ ID NO: 209261 - RNA, 32 nt, Human
gucucacugucgcccaggcuggagugcggugg

SEQ ID NO: 209262 - RNA, 32 nt, Human
gucucacuguguugcccagccugggugucaau

SEQ ID NO: 209263 - RNA, 32 nt, Human
gucucacuguugcccaggcuggagugcagugg

SEQ ID NO: 209264 - RNA, 32 nt, Human
gucucacuguugcccaggcuggagugcauuga

SEQ ID NO: 209265 - RNA, 32 nt, Human
gucucacuguugcccaggcuggcgugcagugg

SEQ ID NO: 209266 - RNA, 21 nt, Human
gucucagaaccgagugaggug

SEQ ID NO: 209267 - RNA, 32 nt, Human
gucucagacagugucuucccagaaaaccacca

SEQ ID NO: 209268 - RNA, 32 nt, Human
gucucagagaaccgcaucacuucauuugcuca

SEQ ID NO: 209269 - RNA, 32 nt, Human
gucucagagcacagagguaggagaacuggggu

SEQ ID NO: 209270 - RNA, 32 nt, Human
gucucagagcagccuuugccccagggaaaugg

SEQ ID NO: 209271 - RNA, 32 nt, Human
gucucagagcauccucaucucuuucucaaaag

SEQ ID NO: 209272 - RNA, 32 nt, Human
gucucagagcggagcccacagagcagggcacc

SEQ ID NO: 209273 - RNA, 32 nt, Human
gucucagaggagcugggggagcgguggccagc

SEQ ID NO: 209274 - RNA, 32 nt, Human
gucucagagucccaggaccuugagugucauua

SEQ ID NO: 209275 - RNA, 32 nt, Human
gucucagaucacugcaaccuccgccuccuggg

SEQ ID NO: 209276 - RNA, 32 nt, Human
gucucagaugcaggagccagagggcagcccag

SEQ ID NO: 209277 - RNA, 32 nt, Human
gucucagauuccuuucuugucuguuagaaacg

SEQ ID NO: 209278 - RNA, 32 nt, Human
gucucagcaacaguggaauucaccuugguguu

SEQ ID NO: 209279 - RNA, 32 nt, Human
gucucagcaagcucugaggucuccccugagag

SEQ ID NO: 209280 - RNA, 32 nt, Human
gucucagcagccaggauucuggcugaaggaaa

SEQ ID NO: 209281 - RNA, 32 nt, Human
gucucagcagccgcccacacgcuccuaacucu

SEQ ID NO: 209282 - RNA, 32 nt, Human
gucucagcagugggauacuauuuaaggcuaag

SEQ ID NO: 209283 - RNA, 32 nt, Human
gucucagccaauggggacagagcggucacggg

SEQ ID NO: 209284 - RNA, 32 nt, Human
gucucagccaggcugguguccucuguccaggc

SEQ ID NO: 209285 - RNA, 32 nt, Human
gucucagcccuagaggaauagacucagggauu

SEQ ID NO: 209286 - RNA, 23 nt, Human
gucucagcccugaccuucuggga

SEQ ID NO: 209287 - RNA, 32 nt, Human
gucucagccgacagaaccagcaagccagaaag

SEQ ID NO: 209288 - RNA, 32 nt, Human
gucucagcucacugcaaccuccaccucccggg

SEQ ID NO: 209289 - RNA, 32 nt, Human
gucucagcucacugcaaccuccgccucccagg

SEQ ID NO: 209290 - RNA, 32 nt, Human
gucucagcucacugcaaccuccgccuucuggg

SEQ ID NO: 209291 - RNA, 32 nt, Human
gucucagcucacugcaaccucugccucccagu

SEQ ID NO: 209292 - RNA, 32 nt, Human
gucucagcucacugcaaccucugccucccggg

SEQ ID NO: 209293 - RNA, 32 nt, Human
gucucagcucacugcaaccuuggccucccgug

SEQ ID NO: 209294 - RNA, 32 nt, Human
gucucagcucacugcagcuuugaccuugccgg

SEQ ID NO: 209295 - RNA, 32 nt, Human
gucucagcucacuggagccucugccuuccagg

SEQ ID NO: 209296 - RNA, 32 nt, Human
gucucagcucacuguaaccuccaccucccgga

SEQ ID NO: 209297 - RNA, 32 nt, Human
gucucagcucuaggcuguggggaucaaugcca

SEQ ID NO: 209298 - RNA, 32 nt, Human
gucucagcucucugcaaccuccaccuccuggg

SEQ ID NO: 209299 - RNA, 32 nt, Human
gucucagcugagggcccagcugaccugguggg

SEQ ID NO: 209300 - RNA, 32 nt, Human
gucucagcugcuuacauccagguccaggauua

SEQ ID NO: 209301 - RNA, 32 nt, Human
gucucagcuguuccgccugaggcgagugacgc

SEQ ID NO: 209302 - RNA, 32 nt, Human
gucucagcuuauuauuugcugugugcaugggg

SEQ ID NO: 209303 - RNA, 25 nt, Human
gucucagcuuccaugcaacugucca

SEQ ID NO: 209304 - RNA, 32 nt, Human
gucucaggaagcccauaguacauaucagcugg

SEQ ID NO: 209305 - RNA, 32 nt, Human
gucucaggaaggaaaucuaguguuagaaaagu

SEQ ID NO: 209306 - RNA, 32 nt, Human
gucucaggaaguggggcccacccauucccaga

SEQ ID NO: 209307 - RNA, 32 nt, Human
gucucaggacagcagagugggcgugggucugg

SEQ ID NO: 209308 - RNA, 32 nt, Human
gucucaggacuuacagcucaagacauucccag

SEQ ID NO: 209309 - RNA, 32 nt, Human
gucucaggagcugaagccgggagaccugaggg

SEQ ID NO: 209310 - RNA, 32 nt, Human
gucucaggccucaccugaagcugcuguuccuc

SEQ ID NO: 209311 - RNA, 32 nt, Human
gucucaggcuccaggacagugaggagcaggcc

SEQ ID NO: 209312 - RNA, 22 nt, Human
gucucaggcuggaguacagugg

SEQ ID NO: 209313 - RNA, 32 nt, Human
gucucaggcugguaguuagcaguugugaccag

SEQ ID NO: 209314 - RNA, 31 nt, Human
gucucaggcuuagaaguuaccaaagugggcu

SEQ ID NO: 209315 - RNA, 32 nt, Human
gucucagggguuggggacagggccagguagcc

SEQ ID NO: 209316 - RNA, 32 nt, Human
gucucagggugggcaguggggguggggcuggg

SEQ ID NO: 209317 - RNA, 32 nt, Human
gucucaguaguuaaggaagcuaacagucuuag

SEQ ID NO: 209318 - RNA, 32 nt, Human
gucucaguauuuuuauaauaugauaagccugg

SEQ ID NO: 209319 - RNA, 26 nt, Human
gucucaguccugugcaaagugagaug

SEQ ID NO: 209320 - RNA, 32 nt, Human
gucucagucgcccaggcuggagugcagcagca

SEQ ID NO: 209321 - RNA, 32 nt, Human
gucucagugaagacuaugaaaaugcuggcuau

SEQ ID NO: 209322 - RNA, 32 nt, Human
gucucaguucacugcagccuccgcccuccagg

SEQ ID NO: 209323 - RNA, 24 nt, Human
gucucaguuuccccauccaugaaa

SEQ ID NO: 209324 - RNA, 32 nt, Human
gucucauaaccaggaaggaguuacuaacuuga

SEQ ID NO: 209325 - RNA, 22 nt, Human
gucucauccccacuuccuuccc

SEQ ID NO: 209326 - RNA, 32 nt, Human
gucucauccuccuuucaguucguugguagagc

SEQ ID NO: 209327 - RNA, 32 nt, Human
gucucauccuguccucacccucagcucugcua

SEQ ID NO: 209328 - RNA, 22 nt, Human
gucucaucggcggugaggaagc

SEQ ID NO: 209329 - RNA, 32 nt, Human
gucucaucuccucugcccaaaaaugaugcucu

SEQ ID NO: 209330 - RNA, 32 nt, Human
gucucaucuguaaaaaggagauaaaaauuauu

SEQ ID NO: 209331 - RNA, 18 nt, Human
gucucaucuguuuuuccu

SEQ ID NO: 209332 - RNA, 32 nt, Human
gucucaugaagugggagcccucugauuugggc

SEQ ID NO: 209333 - RNA, 32 nt, Human
gucucaugauuauuauucacugggugacauug

SEQ ID NO: 209334 - RNA, 32 nt, Human
gucucaugcaagacuucacugcagccuuucac

SEQ ID NO: 209335 - RNA, 32 nt, Human
gucucaugcccaggugggugcucugggcugga

SEQ ID NO: 209336 - RNA, 20 nt, Human
gucucaugccucuaauccca

SEQ ID NO: 209337 - RNA, 32 nt, Human
gucucaugccucuaaucccagcacuuuggaag

SEQ ID NO: 209338 - RNA, 20 nt, Human
gucucaugccuguaauccca

SEQ ID NO: 209339 - RNA, 32 nt, Human
gucucaugccuguaaucccagcacuuugggag

SEQ ID NO: 209340 - RNA, 32 nt, Human
gucucaugccuuuuuguccuguccucagcucu

SEQ ID NO: 209341 - RNA, 32 nt, Human
gucucauggguagauaguggugcagugcuuua

SEQ ID NO: 209342 - RNA, 32 nt, Human
gucucauguccucauucuccccuauaugacau

SEQ ID NO: 209343 - RNA, 32 nt, Human
gucucaugucucugugguucccaagcugcaug

SEQ ID NO: 209344 - RNA, 32 nt, Human
gucucauuagccugaaugugccauaagacuga

SEQ ID NO: 209345 - RNA, 32 nt, Human
gucucauucaacacuggacaguuuacaaugug

SEQ ID NO: 209346 - RNA, 32 nt, Human
gucucauuccagccugacucuuguccccuggg

SEQ ID NO: 209347 - RNA, 32 nt, Human
gucucauucgauacagcaaaguuuacgacacu

SEQ ID NO: 209348 - RNA, 32 nt, Human
gucucauucuaucacccaggcuggaguggagu

SEQ ID NO: 209349 - RNA, 32 nt, Human
gucucauucugucacccagacuggagugcagg

SEQ ID NO: 209350 - RNA, 32 nt, Human
gucucauucugucacccagacuggagugcagu

SEQ ID NO: 209351 - RNA, 32 nt, Human
gucucauucugucacccaggccggagugcagu

SEQ ID NO: 209352 - RNA, 32 nt, Human
gucucauucugucacccaggcuggaguccaau

SEQ ID NO: 209353 - RNA, 32 nt, Human
gucucauucugucacccaggcuggagugcagu

SEQ ID NO: 209354 - RNA, 32 nt, Human
gucucauucuuaccugcaguuuguuacuaugu

SEQ ID NO: 209355 - RNA, 32 nt, Human
gucucauuggcaguugugauucagagaccuag

SEQ ID NO: 209356 - RNA, 32 nt, Human
gucucauugugccaugagguaaauguaauguu

SEQ ID NO: 209357 - RNA, 32 nt, Human
gucucauuuucaucuucuuccaugguuccaca

SEQ ID NO: 209358 - RNA, 32 nt, Human
gucuccaaaugaaagagccacagugaaacccc

SEQ ID NO: 209359 - RNA, 32 nt, Human
gucuccaacuccucgccucaagcaauucgccc

SEQ ID NO: 209360 - RNA, 32 nt, Human
gucuccaacuccuggacucaagcaaucugccc

SEQ ID NO: 209361 - RNA, 21 nt, Human
gucuccaacuccugggcucaa

SEQ ID NO: 209362 - RNA, 32 nt, Human
gucuccaacuccugggcucaagcaauccuccu

SEQ ID NO: 209363 - RNA, 32 nt, Human
gucuccaagaaucagacuacagauauugcaga

SEQ ID NO: 209364 - RNA, 32 nt, Human
gucuccaagcccaacaccaguaaagggucugu

SEQ ID NO: 209365 - RNA, 32 nt, Human
gucuccaauagcucuggcugguaucugcagac

SEQ ID NO: 209366 - RNA, 18 nt, Human
gucuccaauauagccugu

SEQ ID NO: 209367 - RNA, 18 nt, Human
gucuccacacucuuugca

SEQ ID NO: 209368 - RNA, 32 nt, Human
gucuccacagucuucagaagacaaaugcucag

SEQ ID NO: 209369 - RNA, 32 nt, Human
gucuccaccacgacaucucaguaccaagaggg

SEQ ID NO: 209370 - RNA, 32 nt, Human
gucuccacccaccuugacguuucuucuuucua

SEQ ID NO: 209371 - RNA, 32 nt, Human
gucuccaccucaguuccucagggcuguuggcc

SEQ ID NO: 209372 - RNA, 32 nt, Human
gucuccaccucccggguucaagcgauucuccu

SEQ ID NO: 209373 - RNA, 32 nt, Human
gucuccaccuccugagcucaagcaauucucau

SEQ ID NO: 209374 - RNA, 32 nt, Human
gucuccaccugucacuguguuuuuaagagcuc

SEQ ID NO: 209375 - RNA, 32 nt, Human
gucuccacgaggacagaggcugcuuuggacuc

SEQ ID NO: 209376 - RNA, 32 nt, Human
gucuccacggaaggagcucacuuugucagcug

SEQ ID NO: 209377 - RNA, 32 nt, Human
gucuccacguuucagaccagcuucugggggaa

SEQ ID NO: 209378 - RNA, 22 nt, Human
gucuccacuaaaaaauacaaaa

SEQ ID NO: 209379 - RNA, 21 nt, Human
gucuccacuaaaaauacaaaa

SEQ ID NO: 209380 - RNA, 22 nt, Human
gucuccacuaaaaauacaaaau

SEQ ID NO: 209381 - RNA, 21 nt, Human
gucuccacuaaaauacaaaau

SEQ ID NO: 209382 - RNA, 32 nt, Human
gucuccacuaaaauacaaaauuagcugggugu

SEQ ID NO: 209383 - RNA, 32 nt, Human
gucuccacucacagccugaaauucuccugugu

SEQ ID NO: 209384 - RNA, 32 nt, Human
gucuccacucuccgucuggccuaaaggugaug

SEQ ID NO: 209385 - RNA, 32 nt, Human
gucuccacugggacucaagagaggaaccuggg

SEQ ID NO: 209386 - RNA, 32 nt, Human
gucuccacuucacuccagcaucaacaaguggg

SEQ ID NO: 209387 - RNA, 20 nt, Human
gucuccagaaaauaacugug

SEQ ID NO: 209388 - RNA, 24 nt, Human
gucuccagaacagaagcaucugua

SEQ ID NO: 209389 - RNA, 22 nt, Human
gucuccagaacuuguaacugug

SEQ ID NO: 209390 - RNA, 32 nt, Human
gucuccagacgcccaucugggccagguccaga

SEQ ID NO: 209391 - RNA, 19 nt, Human
gucuccagagacagcugug

SEQ ID NO: 209392 - RNA, 32 nt, Human
gucuccagcacccuagcccuccugggcuccca

SEQ ID NO: 209393 - RNA, 32 nt, Human
gucuccagcccaaaccugccuuccuagcccca

SEQ ID NO: 209394 - RNA, 32 nt, Human
gucuccagcccaaaccugccuuccuagcucca

SEQ ID NO: 209395 - RNA, 21 nt, Human
gucuccagcccacccuccgca

SEQ ID NO: 209396 - RNA, 32 nt, Human
gucuccagccccugguccccagcucuugccaa

SEQ ID NO: 209397 - RNA, 32 nt, Human
gucuccagccuggcucuaucuuccuccuugug

SEQ ID NO: 209398 - RNA, 18 nt, Human
gucuccagcuucaccauc

SEQ ID NO: 209399 - RNA, 30 nt, Human
gucuccagcuugcaaauggcaggcuaugga

SEQ ID NO: 209400 - RNA, 32 nt, Human
gucuccagcuuucugccaacauguaaaccuuu

SEQ ID NO: 209401 - RNA, 19 nt, Human
gucuccaggccccagcugu

SEQ ID NO: 209402 - RNA, 32 nt, Human
gucuccaggcuggaguacaguggugcgaucau

SEQ ID NO: 209403 - RNA, 23 nt, Human
gucuccaggcuggagugcagugg

SEQ ID NO: 209404 - RNA, 32 nt, Human
gucuccaggcuggagugcaguggcgucaucuc

SEQ ID NO: 209405 - RNA, 19 nt, Human
gucuccagggaccugagcu

SEQ ID NO: 209406 - RNA, 22 nt, Human
gucuccagguaacccgacugua

SEQ ID NO: 209407 - RNA, 32 nt, Human
gucuccaguaaacauacaaagccauuacaggg

SEQ ID NO: 209408 - RNA, 32 nt, Human
gucuccaguccugguuacugauuuccccuggc

SEQ ID NO: 209409 - RNA, 32 nt, Human
gucuccaguucugcucuggccuacuaacuguu

SEQ ID NO: 209410 - RNA, 32 nt, Human
gucuccaguuuuucuccaucuccugggacgua

SEQ ID NO: 209411 - RNA, 32 nt, Human
gucuccauacgcguucuaggcauacaaggggg

SEQ ID NO: 209412 - RNA, 32 nt, Human
gucuccauccccagaauuuccagcuuuugaaa

SEQ ID NO: 209413 - RNA, 32 nt, Human
gucuccauccuccaccucugagauggacacuu

SEQ ID NO: 209414 - RNA, 32 nt, Human
gucuccauccuggccagggaauggaagggaga

SEQ ID NO: 209415 - RNA, 23 nt, Human
gucuccaucucuugaccucguga

SEQ ID NO: 209416 - RNA, 32 nt, Human
gucuccaucugagccguguccuuccgcugccc

SEQ ID NO: 209417 - RNA, 32 nt, Human
gucuccaugaauggaaggaaugugggagaggc

SEQ ID NO: 209418 - RNA, 32 nt, Human
gucuccaugagcacagaggcugcucuggaguc

SEQ ID NO: 209419 - RNA, 32 nt, Human
gucuccauggugggggucucucaccuucuuga

SEQ ID NO: 209420 - RNA, 21 nt, Human
gucuccauugaguacauauca

SEQ ID NO: 209421 - RNA, 24 nt, Human
gucucccaaaccuucagagagugg

SEQ ID NO: 209422 - RNA, 32 nt, Human
gucucccaaggagcagagcagagcagagcucc

SEQ ID NO: 209423 - RNA, 24 nt, Human
gucucccacacggacaccuucugg

SEQ ID NO: 209424 - RNA, 32 nt, Human
gucucccacacgugagcucccacacguacaca

SEQ ID NO: 209425 - RNA, 32 nt, Human
gucucccacccagggagcagcucuguccaacc

SEQ ID NO: 209426 - RNA, 24 nt, Human
gucucccagacuggacugcagugg

SEQ ID NO: 209427 - RNA, 32 nt, Human
gucucccagaggaaaagaaagaaugguauuug

SEQ ID NO: 209428 - RNA, 21 nt, Human
gucucccagcaccccuucagg

SEQ ID NO: 209429 - RNA, 32 nt, Human
gucucccagcaugggcggaugccgggcaugag

SEQ ID NO: 209430 - RNA, 32 nt, Human
gucucccaggacagagaguuacagaaauggga

SEQ ID NO: 209431 - RNA, 32 nt, Human
gucucccaggaggcugaggcugcuguaucacu

SEQ ID NO: 209432 - RNA, 24 nt, Human
gucucccaggccggagugcagugg

SEQ ID NO: 209433 - RNA, 22 nt, Human
gucucccaggccuucccaguca

SEQ ID NO: 209434 - RNA, 24 nt, Human
gucucccaggcuagaguaccgugg

SEQ ID NO: 209435 - RNA, 23 nt, Human
gucucccaggcuagagugcaaug

SEQ ID NO: 209436 - RNA, 24 nt, Human
gucucccaggcuagagugcaaugg

SEQ ID NO: 209437 - RNA, 23 nt, Human
gucucccaggcugaagugcagug

SEQ ID NO: 209438 - RNA, 24 nt, Human
gucucccaggcugaagugcagugg

SEQ ID NO: 209439 - RNA, 32 nt, Human
gucucccaggcugcaacauccaccucccaggu

SEQ ID NO: 209440 - RNA, 27 nt, Human
gucucccaggcugcuggagugcagugg

SEQ ID NO: 209441 - RNA, 32 nt, Human
gucucccaggcugcuggagugcaguggcacaa

SEQ ID NO: 209442 - RNA, 21 nt, Human
gucucccaggcuggacugcag

SEQ ID NO: 209443 - RNA, 24 nt, Human
gucucccaggcuggacugcagcag

SEQ ID NO: 209444 - RNA, 24 nt, Human
gucucccaggcuggacugcagugg

SEQ ID NO: 209445 - RNA, 22 nt, Human
gucucccaggcuggagcguagu

SEQ ID NO: 209446 - RNA, 24 nt, Human
gucucccaggcuggaggucagugg

SEQ ID NO: 209447 - RNA, 24 nt, Human
gucucccaggcuggaguacagugg

SEQ ID NO: 209448 - RNA, 20 nt, Human
gucucccaggcuggagugca

SEQ ID NO: 209449 - RNA, 22 nt, Human
gucucccaggcuggagugcaau

SEQ ID NO: 209450 - RNA, 24 nt, Human
gucucccaggcuggagugcaauag

SEQ ID NO: 209451 - RNA, 23 nt, Human
gucucccaggcuggagugcaaug

SEQ ID NO: 209452 - RNA, 24 nt, Human
gucucccaggcuggagugcaaugg

SEQ ID NO: 209453 - RNA, 23 nt, Human
gucucccaggcuggagugcagug

SEQ ID NO: 209454 - RNA, 24 nt, Human
gucucccaggcuggagugcagugg

SEQ ID NO: 209455 - RNA, 24 nt, Human
gucucccaggcuggagugcggugg

SEQ ID NO: 209456 - RNA, 24 nt, Human
gucucccaggcuggagugcuaugg

SEQ ID NO: 209457 - RNA, 32 nt, Human
gucucccaggcuggaguugcaguggugcaaug

SEQ ID NO: 209458 - RNA, 24 nt, Human
gucucccagguuggagugcagugg

SEQ ID NO: 209459 - RNA, 32 nt, Human
gucucccagucaggacacaagccagaccugga

SEQ ID NO: 209460 - RNA, 23 nt, Human
gucucccaguuaugaaucagugg

SEQ ID NO: 209461 - RNA, 32 nt, Human
gucucccaugaucugauucugaguuccuacug

SEQ ID NO: 209462 - RNA, 32 nt, Human
gucuccccaaagugcugggauuacaggcguga

SEQ ID NO: 209463 - RNA, 32 nt, Human
gucuccccaccccaccugugcuggugugugug

SEQ ID NO: 209464 - RNA, 32 nt, Human
gucuccccaccucuaccagcaucugcugagcu

SEQ ID NO: 209465 - RNA, 32 nt, Human
gucuccccacuccagcauccccaaacugguac

SEQ ID NO: 209466 - RNA, 32 nt, Human
gucuccccagagaaagcagaguccuccaagac

SEQ ID NO: 209467 - RNA, 32 nt, Human
gucuccccagcccucuugaccuggccacagag

SEQ ID NO: 209468 - RNA, 32 nt, Human
gucucccccaaaacuggcuggcaccagcuuca

SEQ ID NO: 209469 - RNA, 32 nt, Human
gucucccccgagagccacagggagugcuggac

SEQ ID NO: 209470 - RNA, 32 nt, Human
gucucccccuuccugcaucaccaccuugguuu

SEQ ID NO: 209471 - RNA, 24 nt, Human
gucuccccggcuggagugcagugg

SEQ ID NO: 209472 - RNA, 32 nt, Human
gucuccccuccagcucuacucacaggcuccga

SEQ ID NO: 209473 - RNA, 32 nt, Human
gucuccccucucucccuguccugcauuccauc

SEQ ID NO: 209474 - RNA, 32 nt, Human
gucuccccuucugcuguucuccuguucuucau

SEQ ID NO: 209475 - RNA, 32 nt, Human
gucucccgccgccaaucucuggccccuagcag

SEQ ID NO: 209476 - RNA, 22 nt, Human
gucucccgcgcccgccgccagg

SEQ ID NO: 209477 - RNA, 24 nt, Human
gucucccgcggcugcucccccagg

SEQ ID NO: 209478 - RNA, 24 nt, Human
gucucccggccuggagugcagugg

SEQ ID NO: 209479 - RNA, 32 nt, Human
gucucccgggagcagagguucuaugaaucccu

SEQ ID NO: 209480 - RNA, 21 nt, Human
gucucccggggacugcagcgg

SEQ ID NO: 209481 - RNA, 24 nt, Human
gucucccguggccuacgcugccag

SEQ ID NO: 209482 - RNA, 20 nt, Human
gucucccguggggcucuuca

SEQ ID NO: 209483 - RNA, 22 nt, Human
gucucccuaagcaacaugauaa

SEQ ID NO: 209484 - RNA, 32 nt, Human
gucucccucaucaccgacuacaggguccgguu

SEQ ID NO: 209485 - RNA, 32 nt, Human
gucucccuccacccacgucccucacccgccgg

SEQ ID NO: 209486 - RNA, 32 nt, Human
gucucccuccacugcucagaccucuggaccug

SEQ ID NO: 209487 - RNA, 32 nt, Human
gucucccuccccucgccgacugccgccccagg

SEQ ID NO: 209488 - RNA, 16 nt, Human
gucucccucccuccca

SEQ ID NO: 209489 - RNA, 24 nt, Human
gucucccuccugugcacccucagg

SEQ ID NO: 209490 - RNA, 32 nt, Human
gucucccucugccucuccagccccugaaagag

SEQ ID NO: 209491 - RNA, 32 nt, Human
gucucccugcagcugcuaguuccugcccagga

SEQ ID NO: 209492 - RNA, 32 nt, Human
gucucccugcccacccuccauggucuucugug

SEQ ID NO: 209493 - RNA, 32 nt, Human
gucucccugcucccucugcccuuccucccucu

SEQ ID NO: 209494 - RNA, 32 nt, Human
gucucccugggaagagagucaagacuuggaga

SEQ ID NO: 209495 - RNA, 32 nt, Human
gucucccuguauugcccagucuggccuagaac

SEQ ID NO: 209496 - RNA, 19 nt, Human
gucucccugugccuggaga

SEQ ID NO: 209497 - RNA, 32 nt, Human
gucucccuucccucccucccucccucccuccc

SEQ ID NO: 209498 - RNA, 20 nt, Human
gucucccuuccugccuucag

SEQ ID NO: 209499 - RNA, 24 nt, Human
gucuccgaggcuggaauacggugg

SEQ ID NO: 209500 - RNA, 23 nt, Human
gucuccgccuucuguucuucuug

SEQ ID NO: 209501 - RNA, 21 nt, Human
gucuccgcuaaaaauacaaaa

SEQ ID NO: 209502 - RNA, 32 nt, Human
gucuccgcuccccuucugugaugcucacuucu

SEQ ID NO: 209503 - RNA, 24 nt, Human
gucuccggccccuucccccuuccc

SEQ ID NO: 209504 - RNA, 32 nt, Human
gucuccggccuguauucucuccccuucacuca

SEQ ID NO: 209505 - RNA, 32 nt, Human
gucuccggggaggcagggguccugcagguccu

SEQ ID NO: 209506 - RNA, 32 nt, Human
gucuccggguuggauuugcacccuggggucua

SEQ ID NO: 209507 - RNA, 32 nt, Human
gucuccgugauccccgagggcagccccacugc

SEQ ID NO: 209508 - RNA, 24 nt, Human
gucuccuaagcuggagugcagugg

SEQ ID NO: 209509 - RNA, 32 nt, Human
gucuccuacaugccagggaucccaccaggagg

SEQ ID NO: 209510 - RNA, 23 nt, Human
gucuccuacccuucucuuccucu

SEQ ID NO: 209511 - RNA, 32 nt, Human
gucuccuacuugcgacaagguggacuugggag

SEQ ID NO: 209512 - RNA, 32 nt, Human
gucuccuagccaaucagaacuggcuguggacc

SEQ ID NO: 209513 - RNA, 32 nt, Human
gucuccuaggccgacguccaggaagcugcagc

SEQ ID NO: 209514 - RNA, 24 nt, Human
gucuccuaggcuggagugcagugg

SEQ ID NO: 209515 - RNA, 32 nt, Human
gucuccuagggguuuucauuucccugaagaca

SEQ ID NO: 209516 - RNA, 32 nt, Human
gucuccucaccccagccacauguuuucuuuaa

SEQ ID NO: 209517 - RNA, 32 nt, Human
gucuccucaccucugcuccugucuucaucacc

SEQ ID NO: 209518 - RNA, 32 nt, Human
gucuccucaggcacuucccccuuggcuccuga

SEQ ID NO: 209519 - RNA, 32 nt, Human
gucuccucauccguccuucccaccucacaccc

SEQ ID NO: 209520 - RNA, 32 nt, Human
gucuccucauuugucagagaaaggacagagaa

SEQ ID NO: 209521 - RNA, 32 nt, Human
gucuccuccagccucacuucgcugccacuucg

SEQ ID NO: 209522 - RNA, 32 nt, Human
gucuccuccaucuugaacaaacaaaacauuag

SEQ ID NO: 209523 - RNA, 32 nt, Human
gucuccucccaaaaugcugggauuacaggugu

SEQ ID NO: 209524 - RNA, 20 nt, Human
gucuccucccucuccuuccc

SEQ ID NO: 209525 - RNA, 32 nt, Human
gucuccuccucucugcugcccaguccuggccc

SEQ ID NO: 209526 - RNA, 32 nt, Human
gucuccuccugaacuugggccugguggaaggg

SEQ ID NO: 209527 - RNA, 32 nt, Human
gucuccuccuggacuugggccugguggaaggg

SEQ ID NO: 209528 - RNA, 32 nt, Human
gucuccuccuggaugcugcuccuugaaucuuu

SEQ ID NO: 209529 - RNA, 32 nt, Human
gucuccucuccagggacaaggcugcugggcac

SEQ ID NO: 209530 - RNA, 32 nt, Human
gucuccucucccagccuuccuccucacucacc

SEQ ID NO: 209531 - RNA, 18 nt, Human
gucuccucuccuccucca

SEQ ID NO: 209532 - RNA, 32 nt, Human
gucuccucuccucugagcagccacauagaaca

SEQ ID NO: 209533 - RNA, 32 nt, Human
gucuccucuccugcuggucccugccggcgugc

SEQ ID NO: 209534 - RNA, 32 nt, Human
gucuccucucucuccuccuuugaccuucuccu

SEQ ID NO: 209535 - RNA, 32 nt, Human
gucuccucucuuccucacucccuucccccagu

SEQ ID NO: 209536 - RNA, 32 nt, Human
gucuccucuucuuccuccucuguguccuuguc

SEQ ID NO: 209537 - RNA, 32 nt, Human
gucuccucuuucucccuggccugugguugucc

SEQ ID NO: 209538 - RNA, 32 nt, Human
gucuccugagacaagaccuccuacuguacucu

SEQ ID NO: 209539 - RNA, 32 nt, Human
gucuccugagaguggggcugacccugccuugg

SEQ ID NO: 209540 - RNA, 32 nt, Human
gucuccugaguaucuaggacuacaggcccgca

SEQ ID NO: 209541 - RNA, 32 nt, Human
gucuccugauucuacaccaucucuccagaacu

SEQ ID NO: 209542 - RNA, 32 nt, Human
gucuccugcacccacucccuucauacaaucua

SEQ ID NO: 209543 - RNA, 32 nt, Human
gucuccugcaggaaccaugacuagaaaugugg

SEQ ID NO: 209544 - RNA, 32 nt, Human
gucuccugccacuuuaaaugucacucucaauu

SEQ ID NO: 209545 - RNA, 31 nt, Human
gucuccugccucuccuggugucgccgguggc

SEQ ID NO: 209546 - RNA, 32 nt, Human
gucuccugccuguaaucccaucacuuugggag

SEQ ID NO: 209547 - RNA, 22 nt, Human
gucuccugccuuguucccuccc

SEQ ID NO: 209548 - RNA, 17 nt, Human
gucuccuggcccccagg

SEQ ID NO: 209549 - RNA, 32 nt, Human
gucuccuggcccccaggcagggucugucacca

SEQ ID NO: 209550 - RNA, 32 nt, Human
gucuccuggcuggcuccugaagggcuggcugc

SEQ ID NO: 209551 - RNA, 32 nt, Human
gucuccugggagagaggggugagggauguccc

SEQ ID NO: 209552 - RNA, 32 nt, Human
gucuccugggagugcuuugaggguggggccug

SEQ ID NO: 209553 - RNA, 32 nt, Human
gucuccugggaucagaggguaguacagaagcc

SEQ ID NO: 209554 - RNA, 32 nt, Human
gucuccugguagcugggauuacaggcaugcac

SEQ ID NO: 209555 - RNA, 32 nt, Human
gucuccugguccuucugccaucaugccgaugu

SEQ ID NO: 209556 - RNA, 32 nt, Human
gucuccuguagggcuuaugacugugaauccuu

SEQ ID NO: 209557 - RNA, 32 nt, Human
gucuccugucacacuaugaaugcagugaccuc

SEQ ID NO: 209558 - RNA, 32 nt, Human
gucuccuguccaauuucuugcugguggucagc

SEQ ID NO: 209559 - RNA, 31 nt, Human
gucuccugucucucuggcugaugucaccuga

SEQ ID NO: 209560 - RNA, 32 nt, Human
gucuccugucuuaggcgucccacgccgcgugc

SEQ ID NO: 209561 - RNA, 32 nt, Human
gucuccuucagucucccuacccugcacaagca

SEQ ID NO: 209562 - RNA, 21 nt, Human
gucuccuuccaccuccuuccc

SEQ ID NO: 209563 - RNA, 32 nt, Human
gucuccuucccacacacacuccugggcggggu

SEQ ID NO: 209564 - RNA, 32 nt, Human
gucuccuucccacauccucagccccacaccag

SEQ ID NO: 209565 - RNA, 32 nt, Human
gucuccuucccaggaucccacaccaugccuca

SEQ ID NO: 209566 - RNA, 32 nt, Human
gucuccuucccaggaucccacaccaugucuca

SEQ ID NO: 209567 - RNA, 23 nt, Human
gucuccuuccuccgcugcuucca

SEQ ID NO: 209568 - RNA, 32 nt, Human
gucuccuuggccuccuagaggguggggauccg

SEQ ID NO: 209569 - RNA, 21 nt, Human
gucuccuugugaauacuuaga

SEQ ID NO: 209570 - RNA, 32 nt, Human
gucuccuuucuuucucacuucugucuugaggg

SEQ ID NO: 209571 - RNA, 32 nt, Human
gucuccuuuucaugugaauuuauuacucccgu

SEQ ID NO: 209572 - RNA, 32 nt, Human
gucuccuuuuugacucccucccccuuuaugcu

SEQ ID NO: 209573 - RNA, 32 nt, Human
gucucgaacauaacaacacagcuaccuuugaa

SEQ ID NO: 209574 - RNA, 23 nt, Human
gucucgaacuccugaccuuguga

SEQ ID NO: 209575 - RNA, 32 nt, Human
gucucgaacuccuggacucaagcaauccgccc

SEQ ID NO: 209576 - RNA, 32 nt, Human
gucucgaacuccuggccuuaagccacucaccu

SEQ ID NO: 209577 - RNA, 32 nt, Human
gucucgaacucuggaccucagaucuuguagaa

SEQ ID NO: 209578 - RNA, 32 nt, Human
gucucgaacuucugggcucaagcaauuguccc

SEQ ID NO: 209579 - RNA, 32 nt, Human
gucucgaccccgagccccacuggaugauagag

SEQ ID NO: 209580 - RNA, 21 nt, Human
gucucgacuaaaaauacaaaa

SEQ ID NO: 209581 - RNA, 32 nt, Human
gucucgacucacugcaaccuccgccucccgag

SEQ ID NO: 209582 - RNA, 32 nt, Human
gucucgacucacugcagccuugaccucccggg

SEQ ID NO: 209583 - RNA, 31 nt, Human
gucucgacucggcuuucuugccaaaggaggg

SEQ ID NO: 209584 - RNA, 32 nt, Human
gucucgagcucuggcagaggaggacccgggcg

SEQ ID NO: 209585 - RNA, 32 nt, Human
gucucgaggcgggagagccagccgcccugcag

SEQ ID NO: 209586 - RNA, 23 nt, Human
gucucgaucuccggaccucauga

SEQ ID NO: 209587 - RNA, 23 nt, Human
gucucgaucuccugaccucguga

SEQ ID NO: 209588 - RNA, 21 nt, Human
gucucgaucucuguccugugg

SEQ ID NO: 209589 - RNA, 23 nt, Human
gucucgauuuccugaccuuguga

SEQ ID NO: 209590 - RNA, 32 nt, Human
gucucgcacugaggcgcccagagcuggugguc

SEQ ID NO: 209591 - RNA, 32 nt, Human
gucucgcacuugucauuggucacugcagccgc

SEQ ID NO: 209592 - RNA, 24 nt, Human
gucucgcaggccagagugcagugg

SEQ ID NO: 209593 - RNA, 32 nt, Human
gucucgcaucccuaggcuggucccgaacgcuu

SEQ ID NO: 209594 - RNA, 32 nt, Human
gucucgccguugcccaggcuggagugcggugg

SEQ ID NO: 209595 - RNA, 32 nt, Human
gucucgccucuggccuucucuggccacuccug

SEQ ID NO: 209596 - RNA, 32 nt, Human
gucucgcgaaggcaggcguucaaggauauuug

SEQ ID NO: 209597 - RNA, 32 nt, Human
gucucgcucagagcugugucccugaacaucca

SEQ ID NO: 209598 - RNA, 32 nt, Human
gucucgcuccgucacccaggcuggagugcagu

SEQ ID NO: 209599 - RNA, 32 nt, Human
gucucgcucuauugcccagucuggagugcagu

SEQ ID NO: 209600 - RNA, 32 nt, Human
gucucgcucugcacuccagccuggcgacugag

SEQ ID NO: 209601 - RNA, 32 nt, Human
gucucgcucugucacccagacuggagugcagu

SEQ ID NO: 209602 - RNA, 32 nt, Human
gucucgcucugucacccaggcuggggugcagu

SEQ ID NO: 209603 - RNA, 32 nt, Human
gucucgcucugucacccagucuggagugcagu

SEQ ID NO: 209604 - RNA, 32 nt, Human
gucucgcucugucucccagguuggagugcagu

SEQ ID NO: 209605 - RNA, 32 nt, Human
gucucgcugggacccgcacugacagcgggagg

SEQ ID NO: 209606 - RNA, 32 nt, Human
gucucgcugggucuggcgagccaagccccucg

SEQ ID NO: 209607 - RNA, 32 nt, Human
gucucgcuguuacccaggcuggagugcaaugg

SEQ ID NO: 209608 - RNA, 32 nt, Human
gucucgcuguugcccaggcuagagcgcagggg

SEQ ID NO: 209609 - RNA, 32 nt, Human
gucucgcuguugcccaggcuguagugcagugg

SEQ ID NO: 209610 - RNA, 32 nt, Human
gucucggaacuccugacugcaggugauccguc

SEQ ID NO: 209611 - RNA, 32 nt, Human
gucucggaaugcucagggggacucauuaaagc

SEQ ID NO: 209612 - RNA, 32 nt, Human
gucucggacuccucucugcuugcauguguaaa

SEQ ID NO: 209613 - RNA, 32 nt, Human
gucucggacuccuggccucaagcaauccucuu

SEQ ID NO: 209614 - RNA, 32 nt, Human
gucucggacuccugggcucaagcaaucugccc

SEQ ID NO: 209615 - RNA, 24 nt, Human
gucucggagcuacaaccgcagcag

SEQ ID NO: 209616 - RNA, 32 nt, Human
gucucggcaguggcucaugccuauaaucccag

SEQ ID NO: 209617 - RNA, 22 nt, Human
gucucggccucacccgccggga

SEQ ID NO: 209618 - RNA, 32 nt, Human
gucucggccugccuccuuggccagcuccggcu

SEQ ID NO: 209619 - RNA, 32 nt, Human
gucucggcucaccacaaccucugccuacuggg

SEQ ID NO: 209620 - RNA, 32 nt, Human
gucucggcucacugcaaccuccaacucccagg

SEQ ID NO: 209621 - RNA, 32 nt, Human
gucucggcucacugcaaccuccaccucccagg

SEQ ID NO: 209622 - RNA, 32 nt, Human
gucucggcucacugcaaccuccaccucccggg

SEQ ID NO: 209623 - RNA, 32 nt, Human
gucucggcucacugcaaccuccaccuccuggg

SEQ ID NO: 209624 - RNA, 32 nt, Human
gucucggcucacugcaaccuccgccuccuggg

SEQ ID NO: 209625 - RNA, 32 nt, Human
gucucggcucacugcaaccucugccucccggg

SEQ ID NO: 209626 - RNA, 32 nt, Human
gucucggcucacugcaacuuccaccucccggg

SEQ ID NO: 209627 - RNA, 18 nt, Human
gucucggcucacugcaag

SEQ ID NO: 209628 - RNA, 32 nt, Human
gucucggcucacugcaagcuccgccucccagg

SEQ ID NO: 209629 - RNA, 32 nt, Human
gucucggcucacugcaagcuccgccucccgga

SEQ ID NO: 209630 - RNA, 32 nt, Human
gucucggcucacugcaagcuccgccuccuggg

SEQ ID NO: 209631 - RNA, 32 nt, Human
gucucggcucacugcaagcucugccucccagg

SEQ ID NO: 209632 - RNA, 32 nt, Human
gucucggcucacugcaagcucugccucccggg

SEQ ID NO: 209633 - RNA, 32 nt, Human
gucucggcucacugcagccuccgccucccgua

SEQ ID NO: 209634 - RNA, 32 nt, Human
gucucggcucacugcgaccucggccuccugga

SEQ ID NO: 209635 - RNA, 32 nt, Human
gucucggcucacuguagccuccaccuccccca

SEQ ID NO: 209636 - RNA, 32 nt, Human
gucucggcucccugcaaccuccaccuccuggg

SEQ ID NO: 209637 - RNA, 32 nt, Human
gucucggcucgcugcaaccucugacucccugg

SEQ ID NO: 209638 - RNA, 21 nt, Human
gucucggcuggagugcagugg

SEQ ID NO: 209639 - RNA, 32 nt, Human
gucucggggguggucacaaccccacaucccac

SEQ ID NO: 209640 - RNA, 32 nt, Human
gucucgggucacugcagccucugucccugggu

SEQ ID NO: 209641 - RNA, 32 nt, Human
gucucggugaacaugggcucagucucucccgg

SEQ ID NO: 209642 - RNA, 32 nt, Human
gucucggugaugagcacacgcgugcuggggug

SEQ ID NO: 209643 - RNA, 32 nt, Human
gucucggugcugcugcugcugcuccuggggcu

SEQ ID NO: 209644 - RNA, 32 nt, Human
gucucgguucacugcaaccucugccucucagg

SEQ ID NO: 209645 - RNA, 32 nt, Human
gucucguccggagacuggcagcggcggcggcg

SEQ ID NO: 209646 - RNA, 16 nt, Human
gucucgugcugugucg

SEQ ID NO: 209647 - RNA, 32 nt, Human
gucucguggucuuguaaugcacugguaaaaac

SEQ ID NO: 209648 - RNA, 32 nt, Human
gucucgugguugagcucgcaaaccugaaaacu

SEQ ID NO: 209649 - RNA, 32 nt, Human
gucucguguauugaauucgugccaaaggugag

SEQ ID NO: 209650 - RNA, 29 nt, Human
gucucguuucuguguguaucugugaguau

SEQ ID NO: 209651 - RNA, 22 nt, Human
gucucuaacagcuucugccuca

SEQ ID NO: 209652 - RNA, 21 nt, Human
gucucuaauaaaaauacaaaa

SEQ ID NO: 209653 - RNA, 32 nt, Human
gucucuaauaaaaauacgaaaaauuagccagg

SEQ ID NO: 209654 - RNA, 32 nt, Human
gucucuaauaaaaauacgaaaaauuagcuggg

SEQ ID NO: 209655 - RNA, 21 nt, Human
gucucuacaaaaaauacaaaa

SEQ ID NO: 209656 - RNA, 20 nt, Human
gucucuacaaaaauacaaaa

SEQ ID NO: 209657 - RNA, 21 nt, Human
gucucuaccaaaaauacaaaa

SEQ ID NO: 209658 - RNA, 22 nt, Human
gucucuaccgaaaaauacaaaa

SEQ ID NO: 209659 - RNA, 32 nt, Human
gucucuaccugcggcccggccuggugagccca

SEQ ID NO: 209660 - RNA, 21 nt, Human
gucucuacgaaaaauacaaaa

SEQ ID NO: 209661 - RNA, 22 nt, Human
gucucuacuaaaaaauaaaaua

SEQ ID NO: 209662 - RNA, 22 nt, Human
gucucuacuaaaaaauacaaaa

SEQ ID NO: 209663 - RNA, 22 nt, Human
gucucuacuaaaaaauacagaa

SEQ ID NO: 209664 - RNA, 21 nt, Human
gucucuacuaaaaacacaaaa

SEQ ID NO: 209665 - RNA, 32 nt, Human
gucucuacuaaaaacacaaaaguuagcugagc

SEQ ID NO: 209666 - RNA, 23 nt, Human
gucucuacuaaaaacacacaaaa

SEQ ID NO: 209667 - RNA, 23 nt, Human
gucucuacuaaaaacagacaaaa

SEQ ID NO: 209668 - RNA, 21 nt, Human
gucucuacuaaaaagacaaaa

SEQ ID NO: 209669 - RNA, 21 nt, Human
gucucuacuaaaaauaaaaaa

SEQ ID NO: 209670 - RNA, 22 nt, Human
gucucuacuaaaaauaacaaaa

SEQ ID NO: 209671 - RNA, 32 nt, Human
gucucuacuaaaaauaacaaaaauuagccagg

SEQ ID NO: 209672 - RNA, 32 nt, Human
gucucuacuaaaaauaacaaaaauuagcuggg

SEQ ID NO: 209673 - RNA, 21 nt, Human
gucucuacuaaaaauaagaaa

SEQ ID NO: 209674 - RNA, 32 nt, Human
gucucuacuaaaaauaagaaaaauuagcuggg

SEQ ID NO: 209675 - RNA, 19 nt, Human
gucucuacuaaaaauacaa

SEQ ID NO: 209676 - RNA, 20 nt, Human
gucucuacuaaaaauacaaa

SEQ ID NO: 209677 - RNA, 21 nt, Human
gucucuacuaaaaauacaaaa

SEQ ID NO: 209678 - RNA, 22 nt, Human
gucucuacuaaaaauacaaaau

SEQ ID NO: 209679 - RNA, 23 nt, Human
gucucuacuaaaaauacaaaaug

SEQ ID NO: 209680 - RNA, 20 nt, Human
gucucuacuaaaaauacaag

SEQ ID NO: 209681 - RNA, 21 nt, Human
gucucuacuaaaaauacagaa

SEQ ID NO: 209682 - RNA, 32 nt, Human
gucucuacuaaaaauacagaaaauuagcuggg

SEQ ID NO: 209683 - RNA, 22 nt, Human
gucucuacuaaaaauacagaau

SEQ ID NO: 209684 - RNA, 22 nt, Human
gucucuacuaaaaauaccaaaa

SEQ ID NO: 209685 - RNA, 32 nt, Human
gucucuacuaaaaauaccaaaaauuagccggg

SEQ ID NO: 209686 - RNA, 23 nt, Human
gucucuacuaaaaauaccaaaau

SEQ ID NO: 209687 - RNA, 21 nt, Human
gucucuacuaaaaauagaaaa

SEQ ID NO: 209688 - RNA, 32 nt, Human
gucucuacuaaaaauagagaaaauuagccagg

SEQ ID NO: 209689 - RNA, 21 nt, Human
gucucuacuaaaaauauaaaa

SEQ ID NO: 209690 - RNA, 21 nt, Human
gucucuacuaaaaauccaaaa

SEQ ID NO: 209691 - RNA, 21 nt, Human
gucucuacuaaaaaugcaaaa

SEQ ID NO: 209692 - RNA, 32 nt, Human
gucucuacuaaaacaaauacaaaacuucgcug

SEQ ID NO: 209693 - RNA, 21 nt, Human
gucucuacuaaaacuacaaaa

SEQ ID NO: 209694 - RNA, 20 nt, Human
gucucuacuaaaaguacaaa

SEQ ID NO: 209695 - RNA, 21 nt, Human
gucucuacuaaaaguacaaaa

SEQ ID NO: 209696 - RNA, 21 nt, Human
gucucuacuaaaagugcaaaa

SEQ ID NO: 209697 - RNA, 21 nt, Human
gucucuacuaaaagugcagaa

SEQ ID NO: 209698 - RNA, 20 nt, Human
gucucuacuaaaauacaaaa

SEQ ID NO: 209699 - RNA, 23 nt, Human
gucucuacuaaaauaguacaaaa

SEQ ID NO: 209700 - RNA, 22 nt, Human
gucucuacuaaaauauacaaaa

SEQ ID NO: 209701 - RNA, 32 nt, Human
gucucuacuaaaauauacaaaaauuagccugg

SEQ ID NO: 209702 - RNA, 21 nt, Human
gucucuacuaaaauuauaaaa

SEQ ID NO: 209703 - RNA, 21 nt, Human
gucucuacuaaacauacaaaa

SEQ ID NO: 209704 - RNA, 21 nt, Human
gucucuacuaaacaugcaaaa

SEQ ID NO: 209705 - RNA, 21 nt, Human
gucucuacuaaagauacaaaa

SEQ ID NO: 209706 - RNA, 21 nt, Human
gucucuacuaaagauauaaaa

SEQ ID NO: 209707 - RNA, 21 nt, Human
gucucuacuaaagguacaaaa

SEQ ID NO: 209708 - RNA, 21 nt, Human
gucucuacuaaauauacaaaa

SEQ ID NO: 209709 - RNA, 32 nt, Human
gucucuacuaacauacaaaauuagcugggcac

SEQ ID NO: 209710 - RNA, 18 nt, Human
gucucuacuaauacaaaa

SEQ ID NO: 209711 - RNA, 20 nt, Human
gucucuacuaauuuacaaaa

SEQ ID NO: 209712 - RNA, 21 nt, Human
gucucuacuacaaauacaaaa

SEQ ID NO: 209713 - RNA, 32 nt, Human
gucucuacuacaaauacgaaaauuagcugggc

SEQ ID NO: 209714 - RNA, 21 nt, Human
gucucuacuagaaauacaaaa

SEQ ID NO: 209715 - RNA, 22 nt, Human
gucucuacuauaaaauacaaaa

SEQ ID NO: 209716 - RNA, 32 nt, Human
gucucuacucaaaaauacaaaaauuagccugg

SEQ ID NO: 209717 - RNA, 32 nt, Human
gucucuacugaaaaauacaacaaaaauuagac

SEQ ID NO: 209718 - RNA, 21 nt, Human
gucucuacugaaaauacaaaa

SEQ ID NO: 209719 - RNA, 22 nt, Human
gucucuacugaaaauacaaaau

SEQ ID NO: 209720 - RNA, 21 nt, Human
gucucuacugaaaauacaaag

SEQ ID NO: 209721 - RNA, 32 nt, Human
gucucuacugaaaaugcaaagauuggcuggac

SEQ ID NO: 209722 - RNA, 32 nt, Human
gucucuacugggacauguuaggcccuuguuuu

SEQ ID NO: 209723 - RNA, 21 nt, Human
gucucuacuuaaaauacaaaa

SEQ ID NO: 209724 - RNA, 21 nt, Human
gucucuagcaaaaauacaaaa

SEQ ID NO: 209725 - RNA, 32 nt, Human
gucucuagccugcagagugcagugagugagag

SEQ ID NO: 209726 - RNA, 20 nt, Human
gucucuagggugggagcagc

SEQ ID NO: 209727 - RNA, 21 nt, Human
gucucuaguaaaaauacaaaa

SEQ ID NO: 209728 - RNA, 32 nt, Human
gucucuagucagagaaaaaugauaaaggcuua

SEQ ID NO: 209729 - RNA, 22 nt, Human
gucucuaucagaaauacaaaau

SEQ ID NO: 209730 - RNA, 32 nt, Human
gucucuaugugcuccagcacacugaaggaauu

SEQ ID NO: 209731 - RNA, 22 nt, Human
gucucuauuaaaaaauacaaaa

SEQ ID NO: 209732 - RNA, 21 nt, Human
gucucuauuaaaaauacaaaa

SEQ ID NO: 209733 - RNA, 32 nt, Human
gucucuauugaccaauguauuucaaacuuuuu

SEQ ID NO: 209734 - RNA, 32 nt, Human
gucucuauuguacaaccuccuuucucuuggcu

SEQ ID NO: 209735 - RNA, 32 nt, Human
gucucuauuugagaacaacuggggccacccgg

SEQ ID NO: 209736 - RNA, 19 nt, Human
gucucucacacucagggga

SEQ ID NO: 209737 - RNA, 22 nt, Human
gucucucaccacaccuucuggg

SEQ ID NO: 209738 - RNA, 31 nt, Human
gucucucacuucuuugagguuggggaaagcc

SEQ ID NO: 209739 - RNA, 31 nt, Human
gucucucagaacuuuguaaacaggcaaacuu

SEQ ID NO: 209740 - RNA, 18 nt, Human
gucucucagccugaggga

SEQ ID NO: 209741 - RNA, 32 nt, Human
gucucucagccuugccccuccugcuccucuac

SEQ ID NO: 209742 - RNA, 32 nt, Human
gucucucagggauggagggaagaccugaaaga

SEQ ID NO: 209743 - RNA, 32 nt, Human
gucucucagggugggacccauauagcuuguuu

SEQ ID NO: 209744 - RNA, 32 nt, Human
gucucucagugaaaggcugcuuaaacagaaag

SEQ ID NO: 209745 - RNA, 32 nt, Human
gucucucaugaaguuucagucacucagcaacu

SEQ ID NO: 209746 - RNA, 32 nt, Human
gucucucauggauuguuuagagucuaaagagu

SEQ ID NO: 209747 - RNA, 32 nt, Human
gucucucccaacauauuucucuuccuugugcc

SEQ ID NO: 209748 - RNA, 32 nt, Human
gucucucccacugcaacuccacuuucuuugca

SEQ ID NO: 209749 - RNA, 32 nt, Human
gucucucccaggagaccuggggcaugagcugg

SEQ ID NO: 209750 - RNA, 32 nt, Human
gucucuccccucccccaccuuggcccccucuu

SEQ ID NO: 209751 - RNA, 32 nt, Human
gucucucccuaccucuugcucauucuacgagu

SEQ ID NO: 209752 - RNA, 32 nt, Human
gucucucccucagaagccacagaaggaugcag

SEQ ID NO: 209753 - RNA, 32 nt, Human
gucucucccugcggcgcuuucucuuccggcug

SEQ ID NO: 209754 - RNA, 32 nt, Human
gucucucccuggaaagggagggaggcuucaac

SEQ ID NO: 209755 - RNA, 32 nt, Human
gucucucccuggaaagggagggaggcuucgac

SEQ ID NO: 209756 - RNA, 32 nt, Human
gucucuccggcuuucugugcuuuaacuaucuu

SEQ ID NO: 209757 - RNA, 32 nt, Human
gucucuccuaaaaauacagaaaauuagccugg

SEQ ID NO: 209758 - RNA, 32 nt, Human
gucucuccuaaaauauacaaaaauuagccggg

SEQ ID NO: 209759 - RNA, 32 nt, Human
gucucuccucaagucggcuagucgggcgcgcg

SEQ ID NO: 209760 - RNA, 32 nt, Human
gucucuccucccaaggacaguggcuggaagag

SEQ ID NO: 209761 - RNA, 32 nt, Human
gucucuccuccccuccucucucucuuccucuc

SEQ ID NO: 209762 - RNA, 32 nt, Human
gucucuccuccccuccucucucuuccucuccu

SEQ ID NO: 209763 - RNA, 32 nt, Human
gucucuccuccccucucucucuucucugucuc

SEQ ID NO: 209764 - RNA, 32 nt, Human
gucucuccuccccuuucccuccaggcccagug

SEQ ID NO: 209765 - RNA, 32 nt, Human
gucucuccuuccucccuuccuuuacaguuuaa

SEQ ID NO: 209766 - RNA, 32 nt, Human
gucucuccuucucuagcugucaaacagcccca

SEQ ID NO: 209767 - RNA, 32 nt, Human
gucucucggacccacucucugccuucacaguu

SEQ ID NO: 209768 - RNA, 32 nt, Human
gucucucggcggagcugcugugcaguggaacg

SEQ ID NO: 209769 - RNA, 28 nt, Human
gucucucgggugauggccucauccaggg

SEQ ID NO: 209770 - RNA, 32 nt, Human
gucucucgguuuccucaucugcugccucucca

SEQ ID NO: 209771 - RNA, 32 nt, Human
gucucucuagauuccuccucucugagcagggc

SEQ ID NO: 209772 - RNA, 32 nt, Human
gucucucuccaggacugccaggcugcuggagg

SEQ ID NO: 209773 - RNA, 17 nt, Human
gucucucuccugcugcc

SEQ ID NO: 209774 - RNA, 32 nt, Human
gucucucuccuggucauuuuuguuccagccuc

SEQ ID NO: 209775 - RNA, 32 nt, Human
gucucucucugccugccucucuacuguucccc

SEQ ID NO: 209776 - RNA, 32 nt, Human
gucucucucugucacccaggcuggagugcaau

SEQ ID NO: 209777 - RNA, 32 nt, Human
gucucucugagccucaguuuccuuacugguca

SEQ ID NO: 209778 - RNA, 32 nt, Human
gucucucugauugggcuucuaaaucaaaagcc

SEQ ID NO: 209779 - RNA, 32 nt, Human
gucucucugcacuccagccugggugacagagc

SEQ ID NO: 209780 - RNA, 32 nt, Human
gucucucugccucugccugccuccuggucccc

SEQ ID NO: 209781 - RNA, 32 nt, Human
gucucucuggaaagauucucgcuaauggauuu

SEQ ID NO: 209782 - RNA, 32 nt, Human
gucucucuggaaggcgaacgccacagcugccc

SEQ ID NO: 209783 - RNA, 32 nt, Human
gucucucuggagaacccugacuaauaaaauga

SEQ ID NO: 209784 - RNA, 31 nt, Human
gucucucugggcucugugucuaaggagcccu

SEQ ID NO: 209785 - RNA, 22 nt, Human
gucucucugucccccuccccuc

SEQ ID NO: 209786 - RNA, 32 nt, Human
gucucucugucucucuuucucuccuuuuaauu

SEQ ID NO: 209787 - RNA, 32 nt, Human
gucucucugugugugucuguguccucaucucu

SEQ ID NO: 209788 - RNA, 32 nt, Human
gucucucuuacaccagcuccugccucacaaug

SEQ ID NO: 209789 - RNA, 32 nt, Human
gucucucuuaugugaaugcacacaugcagaaa

SEQ ID NO: 209790 - RNA, 23 nt, Human
gucucucuuccgccuuccuuccc

SEQ ID NO: 209791 - RNA, 19 nt, Human
gucucucuucucugacccu

SEQ ID NO: 209792 - RNA, 32 nt, Human
gucucucuugacaucaccgcagcuccaccccc

SEQ ID NO: 209793 - RNA, 23 nt, Human
gucucugaaacuccucuuuguca

SEQ ID NO: 209794 - RNA, 32 nt, Human
gucucugaacauccuaaauauugguuuguuau

SEQ ID NO: 209795 - RNA, 32 nt, Human
gucucugacaucucucacuuccuuuuagauga

SEQ ID NO: 209796 - RNA, 32 nt, Human
gucucugaccucaucugcucccccagucuuuu

SEQ ID NO: 209797 - RNA, 32 nt, Human
gucucugacucugucgcuuuucucuaaguaaa

SEQ ID NO: 209798 - RNA, 32 nt, Human
gucucugacucuugccuuuccaccugcuuucu

SEQ ID NO: 209799 - RNA, 32 nt, Human
gucucugagaaccauucucccaccccaaguuc

SEQ ID NO: 209800 - RNA, 32 nt, Human
gucucugagccuugauuuccucagcugccaaa

SEQ ID NO: 209801 - RNA, 22 nt, Human
gucucugaggcagggugggagc

SEQ ID NO: 209802 - RNA, 32 nt, Human
gucucugaucauacucacugggucagcaacac

SEQ ID NO: 209803 - RNA, 32 nt, Human
gucucugaugauaaaagucauucuucccuggu

SEQ ID NO: 209804 - RNA, 32 nt, Human
gucucugauuccauggagagucaggaguagaa

SEQ ID NO: 209805 - RNA, 32 nt, Human
gucucugcaagacuaaugacuaugucagagug

SEQ ID NO: 209806 - RNA, 32 nt, Human
gucucugcacccagggucccagccuggccacc

SEQ ID NO: 209807 - RNA, 21 nt, Human
gucucugcaccugucugucca

SEQ ID NO: 209808 - RNA, 32 nt, Human
gucucugcaggccugcucaccugccuccagca

SEQ ID NO: 209809 - RNA, 32 nt, Human
gucucugcauauggcaaagcacaaagcugaau

SEQ ID NO: 209810 - RNA, 32 nt, Human
gucucugcauccaugccacccaccccagucgg

SEQ ID NO: 209811 - RNA, 21 nt, Human
gucucugccauucuuuucuca

SEQ ID NO: 209812 - RNA, 32 nt, Human
gucucugcccaggucacagcacaagugcacau

SEQ ID NO: 209813 - RNA, 20 nt, Human
gucucugcccccucuugcca

SEQ ID NO: 209814 - RNA, 23 nt, Human
gucucugccccucucugugccug

SEQ ID NO: 209815 - RNA, 32 nt, Human
gucucugcccuucacuucuucucuucuguccc

SEQ ID NO: 209816 - RNA, 23 nt, Human
gucucugccuggcagaggcugca

SEQ ID NO: 209817 - RNA, 22 nt, Human
gucucugccuggcuauuugcuc

SEQ ID NO: 209818 - RNA, 32 nt, Human
gucucugccuucuccccuuacccucccgccuc

SEQ ID NO: 209819 - RNA, 32 nt, Human
gucucugcuaaaaauaagaaaaauuagccagg

SEQ ID NO: 209820 - RNA, 21 nt, Human
gucucugcuaaaaauacaaaa

SEQ ID NO: 209821 - RNA, 22 nt, Human
gucucugcuaaaaauacaaaau

SEQ ID NO: 209822 - RNA, 32 nt, Human
gucucugcuauggucccuccccagucaggccc

SEQ ID NO: 209823 - RNA, 32 nt, Human
gucucugcucuccugaaucuugggcaugccuu

SEQ ID NO: 209824 - RNA, 32 nt, Human
gucucugcucugcuucuaguucuccaccucca

SEQ ID NO: 209825 - RNA, 32 nt, Human
gucucugcugucuccccuccccaccccauccu

SEQ ID NO: 209826 - RNA, 24 nt, Human
gucucugcuuaccugucuggcuca

SEQ ID NO: 209827 - RNA, 21 nt, Human
gucucugcuucuuccugggcu

SEQ ID NO: 209828 - RNA, 32 nt, Human
gucucugcuugcauccccaacuuagcuguccc

SEQ ID NO: 209829 - RNA, 20 nt, Human
gucucugcuugcugagcuca

SEQ ID NO: 209830 - RNA, 23 nt, Human
gucucugcuuuaagccuuagcca

SEQ ID NO: 209831 - RNA, 22 nt, Human
gucucugcuuuugccuugcuug

SEQ ID NO: 209832 - RNA, 32 nt, Human
gucucuggaggcagacagggugggcugggggc

SEQ ID NO: 209833 - RNA, 24 nt, Human
gucucuggaggcuuugauggaagc

SEQ ID NO: 209834 - RNA, 20 nt, Human
gucucuggaggggcccaagg

SEQ ID NO: 209835 - RNA, 32 nt, Human
gucucuggcaauguacagaaauauuguauaua

SEQ ID NO: 209836 - RNA, 32 nt, Human
gucucuggcagugggauccuggagaggagaaa

SEQ ID NO: 209837 - RNA, 32 nt, Human
gucucuggccagugccuggugcucuggccccu

SEQ ID NO: 209838 - RNA, 32 nt, Human
gucucuggcugucuucauguggggaagccggg

SEQ ID NO: 209839 - RNA, 32 nt, Human
gucucugggaaagacuagauuggaagaauaaa

SEQ ID NO: 209840 - RNA, 23 nt, Human
gucucugggaaagcaagggaggc

SEQ ID NO: 209841 - RNA, 24 nt, Human
gucucugggcggcccaaagggggu

SEQ ID NO: 209842 - RNA, 32 nt, Human
gucucugggcuggggacugaauuccugauguc

SEQ ID NO: 209843 - RNA, 22 nt, Human
gucucuggggcccuggagaggc

SEQ ID NO: 209844 - RNA, 23 nt, Human
gucucuggggcgagucuuggagc

SEQ ID NO: 209845 - RNA, 21 nt, Human
gucucuggggcuucuguuuca

SEQ ID NO: 209846 - RNA, 19 nt, Human
gucucugggggcgaggagg

SEQ ID NO: 209847 - RNA, 22 nt, Human
gucucuggggggcuggagaagc

SEQ ID NO: 209848 - RNA, 21 nt, Human
gucucuggggguggggugagg

SEQ ID NO: 209849 - RNA, 22 nt, Human
gucucuggggugagaagacagc

SEQ ID NO: 209850 - RNA, 24 nt, Human
gucucugggguggggaccauuggc

SEQ ID NO: 209851 - RNA, 24 nt, Human
gucucugggucacguuuugccuca

SEQ ID NO: 209852 - RNA, 32 nt, Human
gucucuggguuauacagacagaauaccagccu

SEQ ID NO: 209853 - RNA, 32 nt, Human
gucucuggguuggcuguuccagcuccaaagag

SEQ ID NO: 209854 - RNA, 32 nt, Human
gucucugguacucaggcuggagugcgguggug

SEQ ID NO: 209855 - RNA, 29 nt, Human
gucucuggucugugucugugugugccugu

SEQ ID NO: 209856 - RNA, 32 nt, Human
gucucuggugggucucacagaugcuggagcag

SEQ ID NO: 209857 - RNA, 32 nt, Human
gucucuguaaccaccauccaggccaguacgca

SEQ ID NO: 209858 - RNA, 23 nt, Human
gucucuguagucucugcacuugu

SEQ ID NO: 209859 - RNA, 32 nt, Human
gucucugucaacucucucauugcccaguggug

SEQ ID NO: 209860 - RNA, 32 nt, Human
gucucugucacacccccacuaccgcugccacg

SEQ ID NO: 209861 - RNA, 32 nt, Human
gucucugucacccaggcuggagugcaauggca

SEQ ID NO: 209862 - RNA, 32 nt, Human
gucucugucacccaggcuggagugcagugcac

SEQ ID NO: 209863 - RNA, 32 nt, Human
gucucugucacccaggcuggagugcaguggug

SEQ ID NO: 209864 - RNA, 32 nt, Human
gucucugucacccuuguccuugagugcucuug

SEQ ID NO: 209865 - RNA, 32 nt, Human
gucucugucagaggaagaucccuuggacaaga

SEQ ID NO: 209866 - RNA, 25 nt, Human
gucucugucagagggguggggaggu

SEQ ID NO: 209867 - RNA, 32 nt, Human
gucucugucgcccaggcuggagcccaguggcg

SEQ ID NO: 209868 - RNA, 32 nt, Human
gucucugucgcccaggcuggggugcaguggcg

SEQ ID NO: 209869 - RNA, 32 nt, Human
gucucugucgccuaggcuggagugcaguggug

SEQ ID NO: 209870 - RNA, 32 nt, Human
gucucugucuccugggcccugcucugggaccu

SEQ ID NO: 209871 - RNA, 32 nt, Human
gucucugucucuccuagccccucucucacaca

SEQ ID NO: 209872 - RNA, 32 nt, Human
gucucugucuguaguuacugggauuauccaga

SEQ ID NO: 209873 - RNA, 32 nt, Human
gucucuguguccgggccggccugcugcagcca

SEQ ID NO: 209874 - RNA, 21 nt, Human
gucucuguuccaugucuccuu

SEQ ID NO: 209875 - RNA, 22 nt, Human
gucucuguucucaggcugccuc

SEQ ID NO: 209876 - RNA, 32 nt, Human
gucucuguucucaggcugccuccugggucagg

SEQ ID NO: 209877 - RNA, 32 nt, Human
gucucuguugcccaggcugcagugcaguggug

SEQ ID NO: 209878 - RNA, 32 nt, Human
gucucuguugcccaggcuggagugcaguggcg

SEQ ID NO: 209879 - RNA, 32 nt, Human
gucucuguugccugggcuggagugcaguggcc

SEQ ID NO: 209880 - RNA, 32 nt, Human
gucucuguugcugcugcugaacucagcuguug

SEQ ID NO: 209881 - RNA, 32 nt, Human
gucucuguuggggaauguggaugguggugaca

SEQ ID NO: 209882 - RNA, 23 nt, Human
gucucuguugucucauuguguug

SEQ ID NO: 209883 - RNA, 22 nt, Human
gucucuuaacugcaccuuguga

SEQ ID NO: 209884 - RNA, 32 nt, Human
gucucuuaauccguuaaugcuuuuggaaacaa

SEQ ID NO: 209885 - RNA, 32 nt, Human
gucucuuacccaggcuagggugcaguggugug

SEQ ID NO: 209886 - RNA, 22 nt, Human
gucucuuacuaaaaauacaaaa

SEQ ID NO: 209887 - RNA, 32 nt, Human
gucucuuacucccauuucugcugccuuuggcc

SEQ ID NO: 209888 - RNA, 32 nt, Human
gucucuucacgcccaucuucugccucauagug

SEQ ID NO: 209889 - RNA, 32 nt, Human
gucucuucagcccuuuucgcuaguggucaccc

SEQ ID NO: 209890 - RNA, 32 nt, Human
gucucuucauuuccucucaaaucuucaacucu

SEQ ID NO: 209891 - RNA, 32 nt, Human
gucucuuccauggaguaagaaggaagggagca

SEQ ID NO: 209892 - RNA, 32 nt, Human
gucucuucccagccuuccucacaggcuucugc

SEQ ID NO: 209893 - RNA, 32 nt, Human
gucucuuccucgcucccucucuuucucuccuc

SEQ ID NO: 209894 - RNA, 32 nt, Human
gucucuucgguggucagggauggcgcggaagu

SEQ ID NO: 209895 - RNA, 21 nt, Human
gucucuucuaaaaauacaaaa

SEQ ID NO: 209896 - RNA, 32 nt, Human
gucucuucucucucccaccaucacccucggcc

SEQ ID NO: 209897 - RNA, 32 nt, Human
gucucuucucugcacuccagggcuuugauaau

SEQ ID NO: 209898 - RNA, 32 nt, Human
gucucuucugagcuauuucaucuauuuuuggc

SEQ ID NO: 209899 - RNA, 32 nt, Human
gucucuucuggaccaggaauuaguugcugugg

SEQ ID NO: 209900 - RNA, 32 nt, Human
gucucuucuucagaggaagccuucccagucac

SEQ ID NO: 209901 - RNA, 32 nt, Human
gucucuugaguuugucgcucaugugugcaaca

SEQ ID NO: 209902 - RNA, 32 nt, Human
gucucuugcuggcaccaagcugugcugugccu

SEQ ID NO: 209903 - RNA, 32 nt, Human
gucucuuggagugcucaggguggcgggcccuu

SEQ ID NO: 209904 - RNA, 32 nt, Human
gucucuuggauaggaagccuuaagccugggaa

SEQ ID NO: 209905 - RNA, 32 nt, Human
gucucuuggcgugcuggagggcauccuggaug

SEQ ID NO: 209906 - RNA, 32 nt, Human
gucucuuggcugccacccaugccuccuccuac

SEQ ID NO: 209907 - RNA, 32 nt, Human
gucucuugggcagaggagcaagccccucgaac

SEQ ID NO: 209908 - RNA, 32 nt, Human
gucucuuguuucuacugcuaagaaggucugaa

SEQ ID NO: 209909 - RNA, 32 nt, Human
gucucuuuaaagggaagagaagcauuggugaa

SEQ ID NO: 209910 - RNA, 32 nt, Human
gucucuuucauucugcuacuucacugucaucu

SEQ ID NO: 209911 - RNA, 32 nt, Human
gucucuuuccacccuuaucuccacaccugccc

SEQ ID NO: 209912 - RNA, 32 nt, Human
gucucuuuccagucaauuucuaaugcucuucu

SEQ ID NO: 209913 - RNA, 32 nt, Human
gucucuuuccccaccauuugaaucugggcugg

SEQ ID NO: 209914 - RNA, 32 nt, Human
gucucuuucugccuccccuccccugggggccg

SEQ ID NO: 209915 - RNA, 32 nt, Human
gucugaaaaugagagagaagacuucggaagca

SEQ ID NO: 209916 - RNA, 32 nt, Human
gucugaaacaaacagucacaagcacaggaaga

SEQ ID NO: 209917 - RNA, 32 nt, Human
gucugaaacccacccacccgcaagccuaccag

SEQ ID NO: 209918 - RNA, 32 nt, Human
gucugaaaguaggaggugggggaagaggcaag

SEQ ID NO: 209919 - RNA, 32 nt, Human
gucugaacaagaaaacuccuucuggaggaaag

SEQ ID NO: 209920 - RNA, 32 nt, Human
gucugaacacuggccugugauugguccauucc

SEQ ID NO: 209921 - RNA, 32 nt, Human
gucugaacaugccucucucuugcuuacaaaug

SEQ ID NO: 209922 - RNA, 32 nt, Human
gucugaacauuuagugaagaugagacuuaaaa

SEQ ID NO: 209923 - RNA, 32 nt, Human
gucugaaccagcugggacagaugguuuaaaga

SEQ ID NO: 209924 - RNA, 32 nt, Human
gucugaaccucugccaguccuggagacuggug

SEQ ID NO: 209925 - RNA, 19 nt, Human
gucugaacucucccuucca

SEQ ID NO: 209926 - RNA, 31 nt, Human
gucugaacuguggguggauggguggauugcc

SEQ ID NO: 209927 - RNA, 25 nt, Human
gucugaagaacagugagguggagug

SEQ ID NO: 209928 - RNA, 32 nt, Human
gucugaagcagccaucucuuucuuggaucuca

SEQ ID NO: 209929 - RNA, 32 nt, Human
gucugaagcugcagagguuagaaggggaagga

SEQ ID NO: 209930 - RNA, 32 nt, Human
gucugaaguuccagaaaggauccuguucccag

SEQ ID NO: 209931 - RNA, 32 nt, Human
gucugaaucuuaucuggguaucaggaaaaaga

SEQ ID NO: 209932 - RNA, 32 nt, Human
gucugaauuccagacuccuccccaccacccac

SEQ ID NO: 209933 - RNA, 32 nt, Human
gucugacacccugcuucuucucucacacugug

SEQ ID NO: 209934 - RNA, 32 nt, Human
gucugacaccugggcuggagugcaguggugca

SEQ ID NO: 209935 - RNA, 32 nt, Human
gucugacagccacuccagaggccaugcuucgu

SEQ ID NO: 209936 - RNA, 32 nt, Human
gucugacagcccaucacgaaagccugcauacu

SEQ ID NO: 209937 - RNA, 32 nt, Human
gucugacagcuuugaagagagcagugguucuc

SEQ ID NO: 209938 - RNA, 32 nt, Human
gucugaccacugcagaccagucucggaggugu

SEQ ID NO: 209939 - RNA, 32 nt, Human
gucugaccaucucaagcaacaccagaagacuc

SEQ ID NO: 209940 - RNA, 32 nt, Human
gugauagcaaucuucaugaugccuagagguuc

SEQ ID NO: 209941 - RNA, 32 nt, Human
gugauagcaccacugcgcuccagccuggguga

SEQ ID NO: 209942 - RNA, 32 nt, Human
gugauagcagcccagcucuggugaguguccuu

SEQ ID NO: 209943 - RNA, 32 nt, Human
gugauagccgccgaccgagccugcugcuuucu

SEQ ID NO: 209944 - RNA, 32 nt, Human
gugauaggagcaaagucucuccauucuccagg

SEQ ID NO: 209945 - RNA, 32 nt, Human
gugauaggccccauaagacacacacaugagca

SEQ ID NO: 209946 - RNA, 31 nt, Human
gugauaggggaacacauuucacuggacaaca

SEQ ID NO: 209947 - RNA, 32 nt, Human
gugauagggucugaacccaguuggggagacag

SEQ ID NO: 209948 - RNA, 32 nt, Human
gugauagucugaaaaguggccucaugggauga

SEQ ID NO: 209949 - RNA, 32 nt, Human
gugauagucugaaaaguggccucgugggagga

SEQ ID NO: 209950 - RNA, 32 nt, Human
gugauagucugcuucucucugguaacuugucu

SEQ ID NO: 209951 - RNA, 32 nt, Human
gugauagugagagaagaggcagaggaaucgag

SEQ ID NO: 209952 - RNA, 32 nt, Human
gugauagugccacugcaauucagccuggguga

SEQ ID NO: 209953 - RNA, 20 nt, Human
gugauagugguucugucauc

SEQ ID NO: 209954 - RNA, 32 nt, Human
gugauaguuaccuucacaauggugcuaccccu

SEQ ID NO: 209955 - RNA, 32 nt, Human
gugauauaaagaaugaaaguagcuguaugagc

SEQ ID NO: 209956 - RNA, 32 nt, Human
gugauauaacuuuguuuuguuuacagaguacc

SEQ ID NO: 209957 - RNA, 32 nt, Human
gugauauauuauuucuuuaaggugcuguguga

SEQ ID NO: 209958 - RNA, 32 nt, Human
gugauauccaaccugguuaaaugaaugaaaga

SEQ ID NO: 209959 - RNA, 32 nt, Human
gugauauccccugcccuccacaaauucuucuu

SEQ ID NO: 209960 - RNA, 32 nt, Human
gugauaugaagagcgagagaaaagagaggaca

SEQ ID NO: 209961 - RNA, 31 nt, Human
gugauauggcuaaucucaguacacauuucaa

SEQ ID NO: 209962 - RNA, 32 nt, Human
gugauauggugaagggaaguggggaguauuug

SEQ ID NO: 209963 - RNA, 31 nt, Human
gugauaugugagagagaaaucuggaaccuuc

SEQ ID NO: 209964 - RNA, 18 nt, Human
gugauauuagcugucauc

SEQ ID NO: 209965 - RNA, 32 nt, Human
gugaucaaggcugaggccaccugggaugagaa

SEQ ID NO: 209966 - RNA, 23 nt, Human
gugaucaagugaaaaagcugcau

SEQ ID NO: 209967 - RNA, 32 nt, Human
gugaucacacaacugcacuccagccugggcaa

SEQ ID NO: 209968 - RNA, 32 nt, Human
gugaucacaccacugcacuccagccuggacga

SEQ ID NO: 209969 - RNA, 32 nt, Human
gugaucacaccacugcacuccagccugggcaa

SEQ ID NO: 209970 - RNA, 32 nt, Human
gugaucacaccacugcacuccagccuggguga

SEQ ID NO: 209971 - RNA, 32 nt, Human
gugaucacaccacugcacuccagccuuggcga

SEQ ID NO: 209972 - RNA, 32 nt, Human
gugaucacaccacugcauucuggccuggguga

SEQ ID NO: 209973 - RNA, 32 nt, Human
gugaucacacugcugcacuccagccugugcaa

SEQ ID NO: 209974 - RNA, 32 nt, Human
gugaucacagcaguuugugguccugacacuac

SEQ ID NO: 209975 - RNA, 32 nt, Human
gugaucaccaacagagagaggcacccuggauc

SEQ ID NO: 209976 - RNA, 32 nt, Human
gugaucaccaugcuguucucaugguaagaacu

SEQ ID NO: 209977 - RNA, 32 nt, Human
gugaucaccgccucagcuuccugaagugcugg

SEQ ID NO: 209978 - RNA, 32 nt, Human
gugaucaccucacugcacgcuagccugggcaa

SEQ ID NO: 209979 - RNA, 32 nt, Human
gugaucacgccacugcaccccagccuggguga

SEQ ID NO: 209980 - RNA, 32 nt, Human
gugaucacgccauugcacuccagccuggguga

SEQ ID NO: 209981 - RNA, 32 nt, Human
gugaucagucugcagcacagcgcagaagucag

SEQ ID NO: 209982 - RNA, 32 nt, Human
gugaucagugauaucaaacaucaggaaucagc

SEQ ID NO: 209983 - RNA, 32 nt, Human
gugaucauaccacugcacuccagccugggcga

SEQ ID NO: 209984 - RNA, 32 nt, Human
gugaucaucgacgaggcgcacaaccugaucga

SEQ ID NO: 209985 - RNA, 32 nt, Human
gugaucaugccacugcacuccagccuggauga

SEQ ID NO: 209986 - RNA, 32 nt, Human
gugaucaugccacugcacuccagccuggguga

SEQ ID NO: 209987 - RNA, 32 nt, Human
gugaucaugccacugcacuuccagccugggug

SEQ ID NO: 209988 - RNA, 32 nt, Human
gugaucaugccacugcacuuuagccugggcaa

SEQ ID NO: 209989 - RNA, 32 nt, Human
gugaucaugccacugcauuccagccugggcga

SEQ ID NO: 209990 - RNA, 32 nt, Human
gugaucaugccacugcauuccagccuguguga

SEQ ID NO: 209991 - RNA, 32 nt, Human
gugaucaugccacuguacuccagccugggcga

SEQ ID NO: 209992 - RNA, 32 nt, Human
gugaucaugccucucuacuccagccugggcaa

SEQ ID NO: 209993 - RNA, 32 nt, Human
gugaucauggcacugcacuccagccugggcaa

SEQ ID NO: 209994 - RNA, 32 nt, Human
gugaucauucaggccagcaaggaagggacucu

SEQ ID NO: 209995 - RNA, 32 nt, Human
gugaucauucugccucuccucaggagaaagua

SEQ ID NO: 209996 - RNA, 17 nt, Human
gugauccaccccacuca

SEQ ID NO: 209997 - RNA, 32 nt, Human
gugauccacugcacuauaccacagugcucagu

SEQ ID NO: 209998 - RNA, 32 nt, Human
gugauccauccuccuagaggcagugagcaggu

SEQ ID NO: 209999 - RNA, 32 nt, Human
gugaucccaaaccaaacuaacagugcugguuu

SEQ ID NO: 210000 - RNA, 32 nt, Human
gugaucccaacauuuuggaggcugaggcagga

SEQ ID NO: 210001 - RNA, 32 nt, Human
gugaucccagcacuugggaaggucgaggaggg

SEQ ID NO: 210002 - RNA, 32 nt, Human
gugaucccagcacuuugggagacugaggcgga

SEQ ID NO: 210003 - RNA, 32 nt, Human
gugaucccagcacuuugggaggcugaggcagg

SEQ ID NO: 210004 - RNA, 32 nt, Human
gugaucccagcacuuugggaggcugagguagg

SEQ ID NO: 210005 - RNA, 32 nt, Human
gugaucccagcacuuugggaggcugagguggg

SEQ ID NO: 210006 - RNA, 32 nt, Human
gugaucccagcacuuugggaugcugagguggg

SEQ ID NO: 210007 - RNA, 32 nt, Human
gugaucccagcuacuuggaggcugaggcagaa

SEQ ID NO: 210008 - RNA, 19 nt, Human
gugaucccagcuacuuggg

SEQ ID NO: 210009 - RNA, 32 nt, Human
gugauccccaggagaagccacaggggaccaug

SEQ ID NO: 210010 - RNA, 32 nt, Human
gugaucccugcacuugccugucugggacaagg

SEQ ID NO: 210011 - RNA, 23 nt, Human
gugaucccugcgcgcgucuccug

SEQ ID NO: 210012 - RNA, 19 nt, Human
gugaucccuuugaccccug

SEQ ID NO: 210013 - RNA, 32 nt, Human
gugauccgccauuacacuccagccugggugac

SEQ ID NO: 210014 - RNA, 32 nt, Human
gugauccgcccgccuccaccucccagggugcu

SEQ ID NO: 210015 - RNA, 32 nt, Human
gugauccgcccgccucggccucccagaaugcu

SEQ ID NO: 210016 - RNA, 32 nt, Human
gugauccgcccgccucggccucccagagugcu

SEQ ID NO: 210017 - RNA, 32 nt, Human
gugauccgccugccucggccucccagagugcu

SEQ ID NO: 210018 - RNA, 32 nt, Human
gugauccgcuggccucggccucccagagugcu

SEQ ID NO: 210019 - RNA, 32 nt, Human
gugauccucacugaggccggggccugcugcgg

SEQ ID NO: 210020 - RNA, 32 nt, Human
gugauccuccaaccucggccuccugguacaua

SEQ ID NO: 210021 - RNA, 32 nt, Human
gugauccuccagccacaguccagcccaaccac

SEQ ID NO: 210022 - RNA, 32 nt, Human
gugauccucccaccccagccuccugaguagcu

SEQ ID NO: 210023 - RNA, 32 nt, Human
gugauccuccuaacguaucaccagcaaccugu

SEQ ID NO: 210024 - RNA, 32 nt, Human
gugauccucuauuuugugaugaugcugugaca

SEQ ID NO: 210025 - RNA, 32 nt, Human
gugauccugagccaaggaggugaggagcagag

SEQ ID NO: 210026 - RNA, 32 nt, Human
gugauccugcaagcccugccuuccuuccuggg

SEQ ID NO: 210027 - RNA, 32 nt, Human
gugauccugcaagcccugcguuccuuccuggg

SEQ ID NO: 210028 - RNA, 32 nt, Human
gugauccugccugcguccgugucucugauucc

SEQ ID NO: 210029 - RNA, 32 nt, Human
gugauccuggacaaguaacugaaucucuccgu

SEQ ID NO: 210030 - RNA, 32 nt, Human
gugauccuugagcugggcugggcacagcccug

SEQ ID NO: 210031 - RNA, 32 nt, Human
gugaucgcaccacugcacuccagcucggguga

SEQ ID NO: 210032 - RNA, 32 nt, Human
gugaucgcaccacugcacuccagcuugguuca

SEQ ID NO: 210033 - RNA, 32 nt, Human
gugaucgcaccacugcauucagccugagcaac

SEQ ID NO: 210034 - RNA, 32 nt, Human
gugaucgcaccacuguacuccagccuggguga

SEQ ID NO: 210035 - RNA, 32 nt, Human
gugaucgcaccacuguauuccagccuggauga

SEQ ID NO: 210036 - RNA, 21 nt, Human
gugaucgccagcgcugucguc

SEQ ID NO: 210037 - RNA, 21 nt, Human
gugaucgggucugcugucauu

SEQ ID NO: 210038 - RNA, 32 nt, Human
gugaucgugacauggccuccagccugggugac

SEQ ID NO: 210039 - RNA, 32 nt, Human
gugaucgugcagcugugagcgcguggccgccc

SEQ ID NO: 210040 - RNA, 32 nt, Human
gugaucgugccacugaccuccagccuggggga

SEQ ID NO: 210041 - RNA, 32 nt, Human
gugaucgugccacugcacuacaaccuggguga

SEQ ID NO: 210042 - RNA, 32 nt, Human
gugaucgugccacugcacuccaaccugaguga

SEQ ID NO: 210043 - RNA, 32 nt, Human
gugaucgugccacugcauuccagccugggaga

SEQ ID NO: 210044 - RNA, 32 nt, Human
gugaucgugcuacugcacuccagccugggcaa

SEQ ID NO: 210045 - RNA, 32 nt, Human
gugaucuaaggguaguccagccuccuuccaag

SEQ ID NO: 210046 - RNA, 32 nt, Human
gugaucuaggcacuuccuccagccucaggcag

SEQ ID NO: 210047 - RNA, 32 nt, Human
gugaucuauaaaugcacagaaaauacuuugua

SEQ ID NO: 210048 - RNA, 32 nt, Human
gugaucuaugucugcugccuggcuccuagaug

SEQ ID NO: 210049 - RNA, 32 nt, Human
gugaucucaccccugcacuccagccugggcaa

SEQ ID NO: 210050 - RNA, 32 nt, Human
gugaucuccaguuuggagcaggggaaggagcc

SEQ ID NO: 210051 - RNA, 32 nt, Human
gugaucucccaccacacuuacugucuuccuuu

SEQ ID NO: 210052 - RNA, 32 nt, Human
gugaucuccggucccuucccccaucauccuuc

SEQ ID NO: 210053 - RNA, 32 nt, Human
gugaucucuccaugcgguucucucacacaagg

SEQ ID NO: 210054 - RNA, 32 nt, Human
gugaucucugcuacacagauaaggaaaccagc

SEQ ID NO: 210055 - RNA, 23 nt, Human
gugaucucuuaauagugccuccu

SEQ ID NO: 210056 - RNA, 32 nt, Human
gugaucugcaaguccugggagacgcacagcua

SEQ ID NO: 210057 - RNA, 32 nt, Human
gugaucugcccaccucugccucccaaagugcu

SEQ ID NO: 210058 - RNA, 32 nt, Human
gugaucugcccuccucagccucccaggugcug

SEQ ID NO: 210059 - RNA, 32 nt, Human
gugaucugcccuccuuggccucccagagugcu

SEQ ID NO: 210060 - RNA, 32 nt, Human
gugaucugccucuucuauugggagaaauucua

SEQ ID NO: 210061 - RNA, 32 nt, Human
gugaucugccugccuuggccucccagauugcu

SEQ ID NO: 210062 - RNA, 32 nt, Human
gugaucuggaauggcccagaucccuuaaaugu

SEQ ID NO: 210063 - RNA, 32 nt, Human
gugaucuguccgccccggccucccagagugcu

SEQ ID NO: 210064 - RNA, 32 nt, Human
gugaucuguggcuggaauggagggagcgccug

SEQ ID NO: 210065 - RNA, 32 nt, Human
gugaucuguguuguagaacaugaggguguaag

SEQ ID NO: 210066 - RNA, 32 nt, Human
gugaucuucccacucagacuccugcguagcug

SEQ ID NO: 210067 - RNA, 32 nt, Human
gugaucuucuaugcuuuaucuuaggaugcugu

SEQ ID NO: 210068 - RNA, 32 nt, Human
gugaucuugccucacuacaaccccugccuccu

SEQ ID NO: 210069 - RNA, 32 nt, Human
gugaucuugugggguggagggaagagaauagc

SEQ ID NO: 210070 - RNA, 32 nt, Human
gugaucuuuccucuccuccuucccaagucauu

SEQ ID NO: 210071 - RNA, 32 nt, Human
gugaucuuuccuguccugacccucucugaauu

SEQ ID NO: 210072 - RNA, 32 nt, Human
gugaugaaaagaaaggaaugagagggaaaguu

SEQ ID NO: 210073 - RNA, 32 nt, Human
gugaugaaagccucuggccucgccacacugau

SEQ ID NO: 210074 - RNA, 32 nt, Human
gugaugaagaaagggcggaagcucccgcuuga

SEQ ID NO: 210075 - RNA, 32 nt, Human
gugaugaagacccagcaacuugcucaaagcau

SEQ ID NO: 210076 - RNA, 32 nt, Human
gugaugaagaugaccucccuccagaccuggcc

SEQ ID NO: 210077 - RNA, 32 nt, Human
gugaugaagcaggcaggagcuggagcgacacu

SEQ ID NO: 210078 - RNA, 28 nt, Human
gugaugaauucugccauguggcaccaga

SEQ ID NO: 210079 - RNA, 32 nt, Human
gugaugacaccacugcacuccaaccuagguaa

SEQ ID NO: 210080 - RNA, 32 nt, Human
gugaugaccagcugcaugaugccuuaauuuga

SEQ ID NO: 210081 - RNA, 32 nt, Human
gugaugacccacccucaccaucgccugggaag

SEQ ID NO: 210082 - RNA, 22 nt, Human
gugaugacucaugccugugauc

SEQ ID NO: 210083 - RNA, 32 nt, Human
gugaugacuggcagcuaaggaggaccucggag

SEQ ID NO: 210084 - RNA, 32 nt, Human
gugaugacuguauaaggaggccuguguguaug

SEQ ID NO: 210085 - RNA, 32 nt, Human
gugaugagaggcuuccucaguccagucgcucc

SEQ ID NO: 210086 - RNA, 32 nt, Human
gugaugagauuauugauagagaguauuagaug

SEQ ID NO: 210087 - RNA, 32 nt, Human
gugaugaggagaggaagagauacaacagaugu

SEQ ID NO: 210088 - RNA, 32 nt, Human
gugaugaggaggcugggugagguggcucaugc

SEQ ID NO: 210089 - RNA, 32 nt, Human
gugaugaggcuucaguugaguacuugcugaag

SEQ ID NO: 210090 - RNA, 32 nt, Human
gugaugagggcaauucuguccuacuguuuuua

SEQ ID NO: 210091 - RNA, 32 nt, Human
gugaugaguagcacugcacugucaccugauga

SEQ ID NO: 210092 - RNA, 23 nt, Human
gugaugagugggccuaguuggga

SEQ ID NO: 210093 - RNA, 32 nt, Human
gugaugaguguggacgggggcaccagucaguu

SEQ ID NO: 210094 - RNA, 32 nt, Human
gugaugauaccuuuugcuuugccuuguggaca

SEQ ID NO: 210095 - RNA, 32 nt, Human
gugaugauggcauuauugauaagccauacaug

SEQ ID NO: 210096 - RNA, 22 nt, Human
gugaugcacaccuguaauccca

SEQ ID NO: 210097 - RNA, 32 nt, Human
gugaugcaccugccuuggcuucccaaggugcu

SEQ ID NO: 210098 - RNA, 28 nt, Human
gugaugcaggacuucuggaggaggagcu

SEQ ID NO: 210099 - RNA, 32 nt, Human
gugaugcagggaggaaaggcagagugggccgg

SEQ ID NO: 210100 - RNA, 32 nt, Human
gugaugccacacagaguggucuuucuggagag

SEQ ID NO: 210101 - RNA, 32 nt, Human
gugaugccaccacugcucccaggagcccacag

SEQ ID NO: 210102 - RNA, 32 nt, Human
gugaugccagcugcuugggaggcugagguggg

SEQ ID NO: 210103 - RNA, 32 nt, Human
gugaugcccacuucuucgccucccucucuugg

SEQ ID NO: 210104 - RNA, 32 nt, Human
gugaugcccauauucauauucucuccucaugu

SEQ ID NO: 210105 - RNA, 32 nt, Human
gugaugcccgggccuucuuccaucuuuuggag

SEQ ID NO: 210106 - RNA, 32 nt, Human
gugaugccgaggguggagugcaguggcacaau

SEQ ID NO: 210107 - RNA, 32 nt, Human
gugaugccgcaccucagucucucccucugcuc

SEQ ID NO: 210108 - RNA, 32 nt, Human
gugaugccugcugaagccacgcagccagugcc

SEQ ID NO: 210109 - RNA, 32 nt, Human
gugaugccuuaugggcuccaucauguuagcca

SEQ ID NO: 210110 - RNA, 32 nt, Human
gugaugcggaacaccaggcucagauucaucag

SEQ ID NO: 210111 - RNA, 32 nt, Human
gugaugcuacugauggccccuuugccaauaag

SEQ ID NO: 210112 - RNA, 32 nt, Human
gugaugcuccugcuucggccuccugaguagcu

SEQ ID NO: 210113 - RNA, 32 nt, Human
gugaugcugagucuggagagaacaguuccgcu

SEQ ID NO: 210114 - RNA, 32 nt, Human
gugaugcuggaaggugggcgucgucacgguua

SEQ ID NO: 210115 - RNA, 32 nt, Human
gugaugcugggcaaggaguacgugggcaagac

SEQ ID NO: 210116 - RNA, 32 nt, Human
gugaugcuggggugaugcugaugcccuuccaa

SEQ ID NO: 210117 - RNA, 32 nt, Human
gugaugcugucugucugucugagucucguggc

SEQ ID NO: 210118 - RNA, 19 nt, Human
gugaugcuuagaaccugga

SEQ ID NO: 210119 - RNA, 32 nt, Human
gugauggaaaccucgccaccuccagaggcagc

SEQ ID NO: 210120 - RNA, 32 nt, Human
gugauggaaauccugcagcuuuaggcuccauu

SEQ ID NO: 210121 - RNA, 32 nt, Human
gugauggaaauuuccacccaaugaaaggaaga

SEQ ID NO: 210122 - RNA, 31 nt, Human
gugauggacagcuagaauguaaaagcuuaaa

SEQ ID NO: 210123 - RNA, 32 nt, Human
gugauggagagcagagggagagggccaggcuc

SEQ ID NO: 210124 - RNA, 32 nt, Human
gugauggagccacccaggcugaucugggccuc

SEQ ID NO: 210125 - RNA, 32 nt, Human
gugauggaggcuguggacagaaacaggucagu

SEQ ID NO: 210126 - RNA, 32 nt, Human
gugauggaggcuguggucagaaacaggucaau

SEQ ID NO: 210127 - RNA, 32 nt, Human
gugauggaggcuguggucagaaacaggucagu

SEQ ID NO: 210128 - RNA, 32 nt, Human
gugauggagggauccuacagaagcccugcuaa

SEQ ID NO: 210129 - RNA, 32 nt, Human
gugauggaguuucuccagaagcuccagugaua

SEQ ID NO: 210130 - RNA, 32 nt, Human
gugauggcaccgcugcacuccaaccugggcaa

SEQ ID NO: 210131 - RNA, 32 nt, Human
gugauggcaggcaucuguagucccagcuacuu

SEQ ID NO: 210132 - RNA, 32 nt, Human
gugauggccacuguaucauuccaggcuaccua

SEQ ID NO: 210133 - RNA, 32 nt, Human
gugauggccacuucuaauaauucagguaguua

SEQ ID NO: 210134 - RNA, 32 nt, Human
gugauggccucuuccuccucagggaccucuga

SEQ ID NO: 210135 - RNA, 32 nt, Human
gugauggcgccacugcacuccagucugggcaa

SEQ ID NO: 210136 - RNA, 32 nt, Human
gugauggcgccacugcacuucagccuuggaga

SEQ ID NO: 210137 - RNA, 32 nt, Human
gugauggcgucaguguucuccagccugggcaa

SEQ ID NO: 210138 - RNA, 23 nt, Human
gugauggcucacaccuguaaucc

SEQ ID NO: 210139 - RNA, 32 nt, Human
gugauggcucacaccuguaauuccagcacuuu

SEQ ID NO: 210140 - RNA, 22 nt, Human
gugauggcucacgccuguaauc

SEQ ID NO: 210141 - RNA, 23 nt, Human
gugauggcucacgccuguaaucc

SEQ ID NO: 210142 - RNA, 22 nt, Human
gugauggcucaugccuguaauc

SEQ ID NO: 210143 - RNA, 23 nt, Human
gugauggcucaugccuguaaucc

SEQ ID NO: 210144 - RNA, 32 nt, Human
gugauggcucaugccuguaauccaguacuuua

SEQ ID NO: 210145 - RNA, 32 nt, Human
gugauggcuccagagaacacaccagcuauuua

SEQ ID NO: 210146 - RNA, 32 nt, Human
gugauggcugugagggaggaaugaggauagac

SEQ ID NO: 210147 - RNA, 28 nt, Human
gugaugggaaaagauuauuacaagauuc

SEQ ID NO: 210148 - RNA, 32 nt, Human
gugaugggaagagauuaccuagccuuacuaac

SEQ ID NO: 210149 - RNA, 32 nt, Human
gugaugggaaugcagagacaggaggcagccca

SEQ ID NO: 210150 - RNA, 32 nt, Human
gugaugggagaggcacaugagguugggggccu

SEQ ID NO: 210151 - RNA, 32 nt, Human
gugaugggcauugagccacaccucuucuuaga

SEQ ID NO: 210152 - RNA, 19 nt, Human
gugaugggcccugucccug

SEQ ID NO: 210153 - RNA, 32 nt, Human
gugaugggccugaaguggaggcugcucagcac

SEQ ID NO: 210154 - RNA, 32 nt, Human
gugauggggaaccuggguuccucuauaagaua

SEQ ID NO: 210155 - RNA, 32 nt, Human
gugauggggacccccucgcugucuccacagga

SEQ ID NO: 210156 - RNA, 32 nt, Human
gugauggggacgauucugcccaguguccucag

SEQ ID NO: 210157 - RNA, 32 nt, Human
gugauggggcccugccuccuuugugaggaagc

SEQ ID NO: 210158 - RNA, 32 nt, Human
gugauggggcuauauugaaucucuguaugcac

SEQ ID NO: 210159 - RNA, 32 nt, Human
gugauggggucugaggcuuggugggagcuguc

SEQ ID NO: 210160 - RNA, 32 nt, Human
gugaugggguuucgcacuuguugcccaggcug

SEQ ID NO: 210161 - RNA, 32 nt, Human
gugaugggguuuugcucuuguugcccaggcug

SEQ ID NO: 210162 - RNA, 32 nt, Human
gugauggguuauaucauaaaugcagcuugggg

SEQ ID NO: 210163 - RNA, 32 nt, Human
gugaugguagaagucucgcauggccauuaucu

SEQ ID NO: 210164 - RNA, 32 nt, Human
gugaugguccagaauuaugagaaccuggucuc

SEQ ID NO: 210165 - RNA, 32 nt, Human
gugauggugaguggguacagacuaggaggacg

SEQ ID NO: 210166 - RNA, 32 nt, Human
gugauggugccacugcacuccagccugggugg

SEQ ID NO: 210167 - RNA, 32 nt, Human
gugauggugccgggaggaaggaagcgcaguga

SEQ ID NO: 210168 - RNA, 32 nt, Human
gugaugguggggugagggaauaugagugcgug

SEQ ID NO: 210169 - RNA, 32 nt, Human
gugauguagugugguucucauuuuaaaccuug

SEQ ID NO: 210170 - RNA, 32 nt, Human
gugauguauacaggaaaacuuagugggaucau

SEQ ID NO: 210171 - RNA, 28 nt, Human
gugaugucaaagaagccagcagaggaaa

SEQ ID NO: 210172 - RNA, 32 nt, Human
gugaugucacugaugacaucacggccacugug

SEQ ID NO: 210173 - RNA, 18 nt, Human
gugaugucagaagaaaug

SEQ ID NO: 210174 - RNA, 32 nt, Human
gugauguccccuuucccugccaccuccagccu

SEQ ID NO: 210175 - RNA, 32 nt, Human
gugauguccucuucauucuucucagcugaggc

SEQ ID NO: 210176 - RNA, 32 nt, Human
gugaugucggcugggugcaguggcucaugccu

SEQ ID NO: 210177 - RNA, 32 nt, Human
gugaugucucucucccagcccuuauaugugga

SEQ ID NO: 210178 - RNA, 32 nt, Human
gugaugucuuuuagcagaaucaugaagaccuu

SEQ ID NO: 210179 - RNA, 32 nt, Human
gugaugugacagccaccaaguccauggucuga

SEQ ID NO: 210180 - RNA, 31 nt, Human
gugaugugacuuuucuucuuacaugcugaau

SEQ ID NO: 210181 - RNA, 32 nt, Human
gugaugugagucugggcugggccacagguccg

SEQ ID NO: 210182 - RNA, 32 nt, Human
gugauguggaugagugaagggagccagguaca

SEQ ID NO: 210183 - RNA, 32 nt, Human
gugauguggauggggccccagauggaagguuu

SEQ ID NO: 210184 - RNA, 31 nt, Human
gugaugugggugggggaggaagaguaaacac

SEQ ID NO: 210185 - RNA, 32 nt, Human
gugauguguagcccccuccaccuuuccacuca

SEQ ID NO: 210186 - RNA, 23 nt, Human
gugauguuaccuagcuucccucu

SEQ ID NO: 210187 - RNA, 32 nt, Human
gugauguuacuguaguggucucagggaaagga

SEQ ID NO: 210188 - RNA, 32 nt, Human
gugauguuagguaauggugagguggaucuucc

SEQ ID NO: 210189 - RNA, 32 nt, Human
gugauguucacagagaaggaaauacuuaggca

SEQ ID NO: 210190 - RNA, 32 nt, Human
gugauguucugaacugcucccuucccuccguu

SEQ ID NO: 210191 - RNA, 32 nt, Human
gugauguucuucucccuguguccauguguucu

SEQ ID NO: 210192 - RNA, 32 nt, Human
gugauguugcaaccuuuccuucugcuagggug

SEQ ID NO: 210193 - RNA, 32 nt, Human
gugauguugcccaggcuagagugcaguggcac

SEQ ID NO: 210194 - RNA, 32 nt, Human
gugauguuuccaaugcugaaugccuguuagca

SEQ ID NO: 210195 - RNA, 32 nt, Human
gugauguuuucucuucucccugccuuuccucu

SEQ ID NO: 210196 - RNA, 32 nt, Human
gugauuaagaagaugguuuuguuauuaaauag

SEQ ID NO: 210197 - RNA, 32 nt, Human
gugauuaagccuucaguuauccuaauucccuu

SEQ ID NO: 210198 - RNA, 32 nt, Human
gugauuaaguugagcaugcuccgcucuacuga

SEQ ID NO: 210199 - RNA, 32 nt, Human
gugauuaauggcagagugugguggcucaggcc

SEQ ID NO: 210200 - RNA, 32 nt, Human
gugauuaauucuuucauggauuuccuauguaa

SEQ ID NO: 210201 - RNA, 32 nt, Human
gugauuacaagaaaaaugcuaagucccagcua

SEQ ID NO: 210202 - RNA, 32 nt, Human
gugauuaccucacugcauuccagccugggcaa

SEQ ID NO: 210203 - RNA, 32 nt, Human
gugauuagacaggcccagugagccgcggggca

SEQ ID NO: 210204 - RNA, 32 nt, Human
gugauuagugauguuggaagcauuuuagcaca

SEQ ID NO: 210205 - RNA, 32 nt, Human
gugauuaucaccugugaggggaaagggggugc

SEQ ID NO: 210206 - RNA, 32 nt, Human
gugauuaucguugccacugaagguucaucaag

SEQ ID NO: 210207 - RNA, 32 nt, Human
gugauuaugccauugcacuccagccuggguga

SEQ ID NO: 210208 - RNA, 32 nt, Human
gugauucaaugccucuggcucuacacauauaa

SEQ ID NO: 210209 - RNA, 32 nt, Human
gugauucaauguuauaaaacaagcagaauuuu

SEQ ID NO: 210210 - RNA, 32 nt, Human
gugauucacagugugaaucuuggugucuacgu

SEQ ID NO: 210211 - RNA, 22 nt, Human
gugauucacgccuguaauccca

SEQ ID NO: 210212 - RNA, 32 nt, Human
gugauucauaccaacagaggacuuucugugau

SEQ ID NO: 210213 - RNA, 32 nt, Human
gugauuccacuacaccuggcugagguuccucu

SEQ ID NO: 210214 - RNA, 32 nt, Human
gugauuccaguucugaagaggauuaugauuga

SEQ ID NO: 210215 - RNA, 32 nt, Human
gugauucccacacauccuuccugcaucccccg

SEQ ID NO: 210216 - RNA, 32 nt, Human
gugauucccccagaggaagcagaaggaaguua

SEQ ID NO: 210217 - RNA, 19 nt, Human
gugauucccccugcccuug

SEQ ID NO: 210218 - RNA, 32 nt, Human
gugauucccccuugcccaucagagaggagcau

SEQ ID NO: 210219 - RNA, 32 nt, Human
gugauucccgcgcuccggcuccggaccggcgc

SEQ ID NO: 210220 - RNA, 32 nt, Human
gugauuccucaaggaucuagaaccagaaauau

SEQ ID NO: 210221 - RNA, 32 nt, Human
gugauuccuuaauggccaacugaagauugaau

SEQ ID NO: 210222 - RNA, 32 nt, Human
gugauucgggcagccagggacaggagccaccc

SEQ ID NO: 210223 - RNA, 32 nt, Human
gugauucuagcacaaacuguaagaaugcuguu

SEQ ID NO: 210224 - RNA, 31 nt, Human
gugauucuaguugggagaguuggagagaagg

SEQ ID NO: 210225 - RNA, 32 nt, Human
gugauucuccagccucagccuccugaguagcu

SEQ ID NO: 210226 - RNA, 32 nt, Human
gugauucuccugccucagccucccagguagcu

SEQ ID NO: 210227 - RNA, 32 nt, Human
gugauucuccugccucagccuccugaggagcu

SEQ ID NO: 210228 - RNA, 32 nt, Human
gugauucuccugccucugccuccugaguagcu

SEQ ID NO: 210229 - RNA, 32 nt, Human
gugauucucgccugcuuucucaucucagggga

SEQ ID NO: 210230 - RNA, 32 nt, Human
gugauucucgugccucagccuccugaguagcc

SEQ ID NO: 210231 - RNA, 32 nt, Human
gugauucucgugccucagccuccugaguagcu

SEQ ID NO: 210232 - RNA, 32 nt, Human
gugauucucuagccuuagccuccuggcaucug

SEQ ID NO: 210233 - RNA, 32 nt, Human
gugauucugaagagguggcuugggaguuggga

SEQ ID NO: 210234 - RNA, 32 nt, Human
gugauucugacuagugggaaauuucagauuac

SEQ ID NO: 210235 - RNA, 32 nt, Human
gugauucugagagcugccugacucgcgaauca

SEQ ID NO: 210236 - RNA, 21 nt, Human
gugauucugccuguaauccca

SEQ ID NO: 210237 - RNA, 32 nt, Human
gugauucugccuguaaucccagaauuuuggga

SEQ ID NO: 210238 - RNA, 32 nt, Human
gugauucuggaaaaccuuggaugggccuucgu

SEQ ID NO: 210239 - RNA, 32 nt, Human
gugauucuucuccaaaauugagaaagacagca

SEQ ID NO: 210240 - RNA, 32 nt, Human
gugauucuugugccucagccuccugaguagcu

SEQ ID NO: 210241 - RNA, 22 nt, Human
gugauugaaugucgggcaaggc

SEQ ID NO: 210242 - RNA, 32 nt, Human
gugauugagccacugcacuccaaucuggguga

SEQ ID NO: 210243 - RNA, 32 nt, Human
gugauugaggcauacuaucaaucacaaaagua

SEQ ID NO: 210244 - RNA, 32 nt, Human
gugauugcaccaccacacuccagccuggguga

SEQ ID NO: 210245 - RNA, 32 nt, Human
gugauugcaccacugcacucaagccugggcaa

SEQ ID NO: 210246 - RNA, 32 nt, Human
gugauugcaccacugcacuccagccugaguga

SEQ ID NO: 210247 - RNA, 32 nt, Human
gugauugcaccacugcacuccagccugggcga

SEQ ID NO: 210248 - RNA, 32 nt, Human
gugauugcaccacugcacuccagccuggguga

SEQ ID NO: 210249 - RNA, 32 nt, Human
gugauugcaccacugcacuucagcuugggcaa

SEQ ID NO: 210250 - RNA, 32 nt, Human
gugauugcaccacugcacuuuagucuggguga

SEQ ID NO: 210251 - RNA, 32 nt, Human
gugauugcaccacuguacuccagacuggauaa

SEQ ID NO: 210252 - RNA, 32 nt, Human
gugauugcaccacuuguaacuccagccugggc

SEQ ID NO: 210253 - RNA, 32 nt, Human
gugauugcaccgugacacuccagccugggcaa

SEQ ID NO: 210254 - RNA, 32 nt, Human
gugauugcacgacugcacuccagccugggcaa

SEQ ID NO: 210255 - RNA, 32 nt, Human
gugauugcagugagcugagauagcaccacugc

SEQ ID NO: 210256 - RNA, 32 nt, Human
gugauugccaguuuauuugcagucucuuaaug

SEQ ID NO: 210257 - RNA, 32 nt, Human
gugauugccccauuuccucuggcaacaaaagc

SEQ ID NO: 210258 - RNA, 32 nt, Human
gugauugcccugaagccacacagcuaaccaga

SEQ ID NO: 210259 - RNA, 32 nt, Human
gugauugcgccacagcauuccagccugggcga

SEQ ID NO: 210260 - RNA, 32 nt, Human
gugauugcgccacugcauuccagcuugggcga

SEQ ID NO: 210261 - RNA, 32 nt, Human
gugauuggaauggauuuaaagcgucaauucca

SEQ ID NO: 210262 - RNA, 32 nt, Human
gugauuggcuagugauucuuguuuucagaagg

SEQ ID NO: 210263 - RNA, 32 nt, Human
gugauuggcuuccucucgccguguugugaggg

SEQ ID NO: 210264 - RNA, 19 nt, Human
gugauuggguccaggcugg

SEQ ID NO: 210265 - RNA, 32 nt, Human
gugauugggugaggcccagacagacagcugcg

SEQ ID NO: 210266 - RNA, 32 nt, Human
gugauugguccagggaugggcacaugacugag

SEQ ID NO: 210267 - RNA, 32 nt, Human
gugauugguuacugaucaugacaugcauuugu

SEQ ID NO: 210268 - RNA, 32 nt, Human
gugauuguaccacugcacuccagcucggggaa

SEQ ID NO: 210269 - RNA, 32 nt, Human
gugauuguccugccucagccuccugaguagcu

SEQ ID NO: 210270 - RNA, 32 nt, Human
gugauuguccuggaaaucgaggugaaaggcuc

SEQ ID NO: 210271 - RNA, 32 nt, Human
gugauugugacacugcccuccagccuggguga

SEQ ID NO: 210272 - RNA, 32 nt, Human
gugauugugccacugcacucauccuggaagac

SEQ ID NO: 210273 - RNA, 32 nt, Human
gugauugugccacugcacuccagccugggcaa

SEQ ID NO: 210274 - RNA, 32 nt, Human
gugauugugccacugcacuccagccugggcac

SEQ ID NO: 210275 - RNA, 32 nt, Human
gugauugugccacugcacuccagccugggcca

SEQ ID NO: 210276 - RNA, 32 nt, Human
gugauugugccacugcacuccagccugggcga

SEQ ID NO: 210277 - RNA, 32 nt, Human
gugauugugccacugcacuccagccuggguua

SEQ ID NO: 210278 - RNA, 32 nt, Human
gugauugugccacuguacuccagccuggguga

SEQ ID NO: 210279 - RNA, 32 nt, Human
gugauugugccacuguuuuccagccugggcaa

SEQ ID NO: 210280 - RNA, 32 nt, Human
gugauugugccauugcacuccagccuggacaa

SEQ ID NO: 210281 - RNA, 32 nt, Human
gugauugugccauugcacuccagccuggguga

SEQ ID NO: 210282 - RNA, 32 nt, Human
gugauugugccauuguacuccagccugggcga

SEQ ID NO: 210283 - RNA, 20 nt, Human
gugauuguggggccaggcug

SEQ ID NO: 210284 - RNA, 32 nt, Human
gugauuguuagagguaguuuucuugaauuaau

SEQ ID NO: 210285 - RNA, 32 nt, Human
gugauuguuuauggaaaguaucuuuaauaaag

SEQ ID NO: 210286 - RNA, 32 nt, Human
gugauuuacagugggaaugaaagaacagauua

SEQ ID NO: 210287 - RNA, 32 nt, Human
gugauuuaguacaucuuacaugauaucucauu

SEQ ID NO: 210288 - RNA, 32 nt, Human
gugauuuauguguuaaccucagucacgagguu

SEQ ID NO: 210289 - RNA, 32 nt, Human
gugauuucacacccgccuuucuugaauggcuu

SEQ ID NO: 210290 - RNA, 32 nt, Human
gugauuucaccaccacuccagccugggugaga

SEQ ID NO: 210291 - RNA, 32 nt, Human
gugauuucacccuugcauuccagccugugaaa

SEQ ID NO: 210292 - RNA, 32 nt, Human
gugauuucagagagggcagagggguaggcaga

SEQ ID NO: 210293 - RNA, 32 nt, Human
gugauuucauacaaucagcagcaaguaacugu

SEQ ID NO: 210294 - RNA, 32 nt, Human
gugauuucauucucuuuuauuaauuuaaaaau

SEQ ID NO: 210295 - RNA, 21 nt, Human
gugauuucccuuagcuuccuc

SEQ ID NO: 210296 - RNA, 32 nt, Human
gugauuuccuuaaaaugaccuacugagucagu

SEQ ID NO: 210297 - RNA, 32 nt, Human
gugauuucucaagcuccuugggggacuguugu

SEQ ID NO: 210298 - RNA, 32 nt, Human
gugauuugagucugaggaagagcugagaguuu

SEQ ID NO: 210299 - RNA, 32 nt, Human
gugauuuguuuuucagccuggccugcagacua

SEQ ID NO: 210300 - RNA, 18 nt, Human
gugauuuucagccucauc

SEQ ID NO: 210301 - RNA, 19 nt, Human
gugauuuucaguuguuauc

SEQ ID NO: 210302 - RNA, 18 nt, Human
gugauuuuccuugccauc

SEQ ID NO: 210303 - RNA, 18 nt, Human
gugauuuucuggcuguca

SEQ ID NO: 210304 - RNA, 20 nt, Human
gugauuuugacgugcgcauc

SEQ ID NO: 210305 - RNA, 20 nt, Human
gugauuuugauagcgucauu

SEQ ID NO: 210306 - RNA, 32 nt, Human
gugauuuugccacugcacuccugccuggguga

SEQ ID NO: 210307 - RNA, 20 nt, Human
gugauuuuggggaggucauu

SEQ ID NO: 210308 - RNA, 16 nt, Human
gugauuuugguucauc

SEQ ID NO: 210309 - RNA, 32 nt, Human
gugauuuuucugcuuuaccuuuuuccugucag

SEQ ID NO: 210310 - RNA, 32 nt, Human
gugcaaaaggaaaucuucaggaggggacuucu

SEQ ID NO: 210311 - RNA, 32 nt, Human
gugcaaaauacugaguaaccacugggaaaaua

SEQ ID NO: 210312 - RNA, 19 nt, Human
gugcaaaauuaaaccauua

SEQ ID NO: 210313 - RNA, 32 nt, Human
gugcaaacaaaaggugugccuggcagccauuu

SEQ ID NO: 210314 - RNA, 32 nt, Human
gugcaaacaauccacuucuucaagcuccaaca

SEQ ID NO: 210315 - RNA, 32 nt, Human
gugcaaaccaucugccccagcugccuccacag

SEQ ID NO: 210316 - RNA, 32 nt, Human
gugcaaacgcuaugccauugcccaucagggac

SEQ ID NO: 210317 - RNA, 32 nt, Human
gugcaaacugggacugccuuucccucuccuca

SEQ ID NO: 210318 - RNA, 32 nt, Human
gugcaaacuuuaagcaccuuaaaacauuuaaa

SEQ ID NO: 210319 - RNA, 32 nt, Human
gugcaaagaaaaucauuggcucagauugcaac

SEQ ID NO: 210320 - RNA, 32 nt, Human
gugcaaaggguuucugaaaaacagcaggauua

SEQ ID NO: 210321 - RNA, 32 nt, Human
gugcaaagugcuggguucuggguuucuggauu

SEQ ID NO: 210322 - RNA, 32 nt, Human
gugcaaauaaugaaggagcacgggggcaccuu

SEQ ID NO: 210323 - RNA, 32 nt, Human
gugcaaaucaugacacagaagggcaguaugaa

SEQ ID NO: 210324 - RNA, 32 nt, Human
gugcaacacccagcaaaaaugaagaggaaaac

SEQ ID NO: 210325 - RNA, 32 nt, Human
gugcaacacuacucaaacugugguucacaaag

SEQ ID NO: 210326 - RNA, 32 nt, Human
gugcaacagcuguucugaauugucuuccgcua

SEQ ID NO: 210327 - RNA, 32 nt, Human
gugcaacaucaugaaacaucaucucuacauaa

SEQ ID NO: 210328 - RNA, 32 nt, Human
gugcaacauugucuuguggccuagagacuaga

SEQ ID NO: 210329 - RNA, 32 nt, Human
gugcaacccccagcccaggaggagacuugacu

SEQ ID NO: 210330 - RNA, 32 nt, Human
gugcaaccucauugaaaaacagcuuggcaguu

SEQ ID NO: 210331 - RNA, 32 nt, Human
gugcaaccucugcuucccagguucaagcgauu

SEQ ID NO: 210332 - RNA, 32 nt, Human
gugcaaccuguaaaaggucucuccacaccagg

SEQ ID NO: 210333 - RNA, 32 nt, Human
gugcaacuagaaaauucaaagccauauuuagg

SEQ ID NO: 210334 - RNA, 32 nt, Human
gugcaacucaucgccucugccacuuaggacca

SEQ ID NO: 210335 - RNA, 32 nt, Human
gugcaacugcacuccaaccugggcaacagagu

SEQ ID NO: 210336 - RNA, 32 nt, Human
gugcaacugcacuccagccugggcaaaagagc

SEQ ID NO: 210337 - RNA, 32 nt, Human
gugcaacugugcuggcugccuccugaaggaag

SEQ ID NO: 210338 - RNA, 32 nt, Human
gugcaacuuaugaagacacugcagcuugagag

SEQ ID NO: 210339 - RNA, 32 nt, Human
gugcaagaaagugagcagucugccugugagug

SEQ ID NO: 210340 - RNA, 32 nt, Human
gugcaagaagacugaaggguccagaguccaug

SEQ ID NO: 210341 - RNA, 32 nt, Human
gugcaagagagggaugcauggagauagcccca

SEQ ID NO: 210342 - RNA, 32 nt, Human
gugcaagauccuguggauuagaaacaaguugc

SEQ ID NO: 210343 - RNA, 32 nt, Human
gugcaagaugaagaagccaacacagaugaccu

SEQ ID NO: 210344 - RNA, 32 nt, Human
gugcaagauugcaaaaagacugugcaaccuga

SEQ ID NO: 210345 - RNA, 32 nt, Human
gugcaagcaauuauccugccucagccucccga

SEQ ID NO: 210346 - RNA, 32 nt, Human
gugcaagcgauuccccugccucagcuucccga

SEQ ID NO: 210347 - RNA, 32 nt, Human
gugcaagcuuugaaccuccuuccacagccgca

SEQ ID NO: 210348 - RNA, 17 nt, Human
gugcaaggcccgggcgg

SEQ ID NO: 210349 - RNA, 32 nt, Human
gugcaagggcugggggucuccugccucuccug

SEQ ID NO: 210350 - RNA, 32 nt, Human
gugcaagucaccauucugccuuccuaaggcag

SEQ ID NO: 210351 - RNA, 32 nt, Human
gugcaagucuccccaacagccucgaguggccu

SEQ ID NO: 210352 - RNA, 32 nt, Human
gugcaagugaugccccugccucagccucccga

SEQ ID NO: 210353 - RNA, 32 nt, Human
gugcaaguggucacucucuugcugagcagaaa

SEQ ID NO: 210354 - RNA, 32 nt, Human
gugcaaguucucuccuguugcccugagugccc

SEQ ID NO: 210355 - RNA, 32 nt, Human
gugcaaguugaccuuaugcccaugccuccaua

SEQ ID NO: 210356 - RNA, 20 nt, Human
gugcaauacaguuucauuaa

SEQ ID NO: 210357 - RNA, 32 nt, Human
gugcaauacucccauugccaugggguccuuca

SEQ ID NO: 210358 - RNA, 32 nt, Human
gugcaauaggcagaggacaagggacacaucac

SEQ ID NO: 210359 - RNA, 32 nt, Human
gugcaauaggugagagaauguauuuucauaga

SEQ ID NO: 210360 - RNA, 32 nt, Human
gugcaaucucacugcaaccuccgccuuccagu

SEQ ID NO: 210361 - RNA, 32 nt, Human
gugcaaucucacugcaagcucugccucccagg

SEQ ID NO: 210362 - RNA, 32 nt, Human
gugcaaucucagcucacugcaaccuccgccuc

SEQ ID NO: 210363 - RNA, 32 nt, Human
gugcaaucucaguucacugcagucucugccuc

SEQ ID NO: 210364 - RNA, 32 nt, Human
gugcaaugacugcagcaccuccugggcuuaca

SEQ ID NO: 210365 - RNA, 32 nt, Human
gugcaaugcacacccagacacacgcacgcaca

SEQ ID NO: 210366 - RNA, 24 nt, Human
gugcaauggcaugcaucuguaauc

SEQ ID NO: 210367 - RNA, 24 nt, Human
gugcaauggcucacaccuguaauu

SEQ ID NO: 210368 - RNA, 24 nt, Human
gugcaauggcucacacuuguaauc

SEQ ID NO: 210369 - RNA, 24 nt, Human
gugcaauggcucaugccuauaauc

SEQ ID NO: 210370 - RNA, 24 nt, Human
gugcaauggcucaugccuguaauc

SEQ ID NO: 210371 - RNA, 24 nt, Human
gugcaauggcucaugucucuaauc

SEQ ID NO: 210372 - RNA, 24 nt, Human
gugcaauggcucgcaccuguaauc

SEQ ID NO: 210373 - RNA, 31 nt, Human
gugcaaugggugaucucagcucacugcaggc

SEQ ID NO: 210374 - RNA, 32 nt, Human
gugcaaugucugccugcaucccucuaucaggg

SEQ ID NO: 210375 - RNA, 32 nt, Human
gugcaaugugccagccacuuggaacugcuaac

SEQ ID NO: 210376 - RNA, 32 nt, Human
gugcaaugugguuaugauagaggcaugccagg

SEQ ID NO: 210377 - RNA, 32 nt, Human
gugcaauucuugcccaaaggcaaggagaugaa

SEQ ID NO: 210378 - RNA, 32 nt, Human
gugcaauugcuuuugcaccaaccuaauauuug

SEQ ID NO: 210379 - RNA, 32 nt, Human
gugcacaacagcuguguggcccggagugagau

SEQ ID NO: 210380 - RNA, 32 nt, Human
gugcacaagggcccagaacaacucugaugcca

SEQ ID NO: 210381 - RNA, 16 nt, Human
gugcacacaugggcgg

SEQ ID NO: 210382 - RNA, 19 nt, Human
gugcacaccuguaauccca

SEQ ID NO: 210383 - RNA, 32 nt, Human
gugcacaccuguaaucccagcuacucuggagg

SEQ ID NO: 210384 - RNA, 32 nt, Human
gugcacacuaaaauaucaaaucaaggugcuug

SEQ ID NO: 210385 - RNA, 32 nt, Human
gugcacacuaccuggaggacaagaggaaguaa

SEQ ID NO: 210386 - RNA, 32 nt, Human
gugcacacuucccaugcuucugagucuaggcg

SEQ ID NO: 210387 - RNA, 32 nt, Human
gugcacagacagguacugagcugacagacugg

SEQ ID NO: 210388 - RNA, 32 nt, Human
gugcacagaccaggucauugugcagcggucuc

SEQ ID NO: 210389 - RNA, 32 nt, Human
gugcacagaccagugccaaucugaacauuguu

SEQ ID NO: 210390 - RNA, 32 nt, Human
gugcacagagaguccucagagcacaagcgugg

SEQ ID NO: 210391 - RNA, 32 nt, Human
gugcacagaggacaaguacugccaggcacaga

SEQ ID NO: 210392 - RNA, 32 nt, Human
gugcacagcucaaaagacauucagagauggaa

SEQ ID NO: 210393 - RNA, 32 nt, Human
gugcacagcucccucuuuaauaaacgcuuagg

SEQ ID NO: 210394 - RNA, 32 nt, Human
gugcacaggaaggaugaggaagaccaggcucu

SEQ ID NO: 210395 - RNA, 32 nt, Human
gugcacaggagagaggcucagagagcugggaa

SEQ ID NO: 210396 - RNA, 32 nt, Human
gugcacagggagaagagaagcagacgggagca

SEQ ID NO: 210397 - RNA, 32 nt, Human
gugcacagggcuagaacgagagugccuccccu

SEQ ID NO: 210398 - RNA, 32 nt, Human
gugcacaggugagcaguugugugcccagcaua

SEQ ID NO: 210399 - RNA, 32 nt, Human
gugcacagugcuaggacgggaggcagagccgg

SEQ ID NO: 210400 - RNA, 21 nt, Human
gugcacauacagcauuuccua

SEQ ID NO: 210401 - RNA, 32 nt, Human
gugcacaucacugaaauaaugagauuuucuuc

SEQ ID NO: 210402 - RNA, 32 nt, Human
gugcacaucagcucacaugacuggcaacucua

SEQ ID NO: 210403 - RNA, 32 nt, Human
gugcacauccccaaggguaagagcuucgaucu

SEQ ID NO: 210404 - RNA, 32 nt, Human
gugcacaucuucccucuccccauucggugugg

SEQ ID NO: 210405 - RNA, 32 nt, Human
gugcacaugaggaagauacuguagaggcauuu

SEQ ID NO: 210406 - RNA, 32 nt, Human
gugcacauggccugaggcguccauggugaugg

SEQ ID NO: 210407 - RNA, 32 nt, Human
gugcacauguggguauguucucagccaugugu

SEQ ID NO: 210408 - RNA, 32 nt, Human
gugcacaugugugcacagacacaaaacagaga

SEQ ID NO: 210409 - RNA, 20 nt, Human
gugcaccaccuggcccggca

SEQ ID NO: 210410 - RNA, 32 nt, Human
gugcaccacugcacuccagccugggcaacaag

SEQ ID NO: 210411 - RNA, 32 nt, Human
gugcaccacugcacuccagccugggcaacaga

SEQ ID NO: 210412 - RNA, 31 nt, Human
gugcaccagagagugcacuugggcgagcgcu

SEQ ID NO: 210413 - RNA, 32 nt, Human
gugcaccagcucaaacaugcaggcuggaacgu

SEQ ID NO: 210414 - RNA, 32 nt, Human
gugcaccaugaagagacaguguccagaagaag

SEQ ID NO: 210415 - RNA, 32 nt, Human
gugcaccauguacagguguugugugcaacaac

SEQ ID NO: 210416 - RNA, 32 nt, Human
gugcaccauugcacuccagccugggcaaaaag

SEQ ID NO: 210417 - RNA, 32 nt, Human
gugcacccagcuugauguccacuggacacugg

SEQ ID NO: 210418 - RNA, 32 nt, Human
gugcacccauagucccagcuacucaggaggcu

SEQ ID NO: 210419 - RNA, 32 nt, Human
gugcacccccuucacagacacugaccucagag

SEQ ID NO: 210420 - RNA, 32 nt, Human
gugcaccccucgggccaggcaacagaacuugu

SEQ ID NO: 210421 - RNA, 32 nt, Human
gugcacccugaccccauucagcagaaauugca

SEQ ID NO: 210422 - RNA, 32 nt, Human
gugcacccugcucucucgugggucgccuuugc

SEQ ID NO: 210423 - RNA, 32 nt, Human
gugcacccugggaggggaagcugggagaaagg

SEQ ID NO: 210424 - RNA, 32 nt, Human
gugcacccuucccacacccuuuacauucccca

SEQ ID NO: 210425 - RNA, 32 nt, Human
gugcacccuuugaagggacccagcacaggguc

SEQ ID NO: 210426 - RNA, 32 nt, Human
gugcaccguagugccuugggccuguguguuaa

SEQ ID NO: 210427 - RNA, 32 nt, Human
gugcaccuaagcugcagaccaagccuuugccc

SEQ ID NO: 210428 - RNA, 32 nt, Human
gugcaccuauaauuccagcuacucaggaggcu

SEQ ID NO: 210429 - RNA, 32 nt, Human
gugcaccuauagucccagcuacucaggaagcu

SEQ ID NO: 210430 - RNA, 32 nt, Human
gugcaccuauagucccagcuacucaggaggcu

SEQ ID NO: 210431 - RNA, 32 nt, Human
gugcaccuauagucccagcuacuugggaggcu

SEQ ID NO: 210432 - RNA, 32 nt, Human
gugcaccuauagucccagcuauucaggaggcu

SEQ ID NO: 210433 - RNA, 32 nt, Human
gugcaccugauuuggccaauaggaucaacagu

SEQ ID NO: 210434 - RNA, 32 nt, Human
gugcaccugcaauccucgccgauaagaggcag

SEQ ID NO: 210435 - RNA, 17 nt, Human
gugcaccugcccagggg

SEQ ID NO: 210436 - RNA, 32 nt, Human
gugcaccuguaaucccagcuacuagggaggau

SEQ ID NO: 210437 - RNA, 32 nt, Human
gugcaccuguaaucccagcuacucaggaggcu

SEQ ID NO: 210438 - RNA, 32 nt, Human
gugcaccuguaaucccagcuacucgagaggcc

SEQ ID NO: 210439 - RNA, 32 nt, Human
gugcaccuguaaucccagcuacucgggaggcu

SEQ ID NO: 210440 - RNA, 32 nt, Human
gugcaccuguaaucccagcuacucuggaggcu

SEQ ID NO: 210441 - RNA, 32 nt, Human
gugcaccuguaaucccagcuacucuggagggu

SEQ ID NO: 210442 - RNA, 32 nt, Human
gugcaccuguaaucccagcuacuugggaggcu

SEQ ID NO: 210443 - RNA, 32 nt, Human
gugcaccuguaauccccgcuacucuggagucu

SEQ ID NO: 210444 - RNA, 32 nt, Human
gugcaccuguaauccuagcuaccgagaaggcu

SEQ ID NO: 210445 - RNA, 32 nt, Human
gugcaccuguaaucucagcuacucgggaggcu

SEQ ID NO: 210446 - RNA, 32 nt, Human
gugcaccuguaauuccagcuacucgggaggcu

SEQ ID NO: 210447 - RNA, 32 nt, Human
gugcaccuguagucacagcuacucgggaggcg

SEQ ID NO: 210448 - RNA, 32 nt, Human
gugcaccuguagucccagcuacuagggaggcu

SEQ ID NO: 210449 - RNA, 32 nt, Human
gugcaccuguagucccagcuacucaggaggcc

SEQ ID NO: 210450 - RNA, 32 nt, Human
gugcaccuguagucccagcuacucaggaggcu

SEQ ID NO: 210451 - RNA, 32 nt, Human
gugcaccuguagucccagcuacucgggaagcu

SEQ ID NO: 210452 - RNA, 32 nt, Human
gugcaccuguagucccagcuacucgggggcug

SEQ ID NO: 210453 - RNA, 32 nt, Human
gugcaccuguagucccagcuacuugggaggcu

SEQ ID NO: 210454 - RNA, 32 nt, Human
gugcaccuguagucccagcuauaugggaugcu

SEQ ID NO: 210455 - RNA, 32 nt, Human
gugcaccuguagucccagcuauucaggaagcu

SEQ ID NO: 210456 - RNA, 32 nt, Human
gugcaccuguagucccagcuauuugggaggcu

SEQ ID NO: 210457 - RNA, 32 nt, Human
gugcaccuguagucccagcucuucaggaggcu

SEQ ID NO: 210458 - RNA, 32 nt, Human
gugcaccuguagucccagcuguuugggaagcu

SEQ ID NO: 210459 - RNA, 32 nt, Human
gugcaccuguagucccagcuucuugggaggcu

SEQ ID NO: 210460 - RNA, 32 nt, Human
gugcaccugugacuuauucuuuacaggaacug

SEQ ID NO: 210461 - RNA, 32 nt, Human
gugcaccuguggucccagcuacuccagaggcu

SEQ ID NO: 210462 - RNA, 32 nt, Human
gugcaccuguggucccagcuacucuggaggcu

SEQ ID NO: 210463 - RNA, 32 nt, Human
gugcaccuguggucccagcuacuggggaggcu

SEQ ID NO: 210464 - RNA, 32 nt, Human
gugcacgaagggggcacaggagaggagagggg

SEQ ID NO: 210465 - RNA, 32 nt, Human
gugcacgagcugguccuggcugccuggaaggc

SEQ ID NO: 210466 - RNA, 32 nt, Human
gugcacgcaacucccucugccccagccggccc

SEQ ID NO: 210467 - RNA, 32 nt, Human
gugcacgcagccgccccgcgggucguccagga

SEQ ID NO: 210468 - RNA, 32 nt, Human
gugcacgccagccugggcgacagacucugugu

SEQ ID NO: 210469 - RNA, 32 nt, Human
gugcacgccuguaaucccagcuacucgggagg

SEQ ID NO: 210470 - RNA, 32 nt, Human
gugcacgccuguaaucccagcuccuugggagg

SEQ ID NO: 210471 - RNA, 32 nt, Human
gugcacgccuguaaucccagcuucuugggagg

SEQ ID NO: 210472 - RNA, 32 nt, Human
gugcacgccuguaauccccagauacucgggag

SEQ ID NO: 210473 - RNA, 32 nt, Human
gugcacgccuguaaucucagcuacuugggagg

SEQ ID NO: 210474 - RNA, 32 nt, Human
gugcacgccuuuaaucccagcuacucgggagg

SEQ ID NO: 210475 - RNA, 32 nt, Human
gugcacgcuuggacacccaccuccauggacac

SEQ ID NO: 210476 - RNA, 32 nt, Human
gugcacgcuuguaaucccagcuacucaggagu

SEQ ID NO: 210477 - RNA, 18 nt, Human
gugcacggcaaggaccca

SEQ ID NO: 210478 - RNA, 32 nt, Human
gugcacggccugugcugccuucugccugggcc

SEQ ID NO: 210479 - RNA, 17 nt, Human
gugcacggcuccgggcg

SEQ ID NO: 210480 - RNA, 32 nt, Human
gugcacggugugauuccaggaggagagccagg

SEQ ID NO: 210481 - RNA, 32 nt, Human
gugcacgucuguaaucccagcugcucgggagg

SEQ ID NO: 210482 - RNA, 19 nt, Human
gugcacuacagaucuccug

SEQ ID NO: 210483 - RNA, 16 nt, Human
gugcacuacugccuca

SEQ ID NO: 210484 - RNA, 32 nt, Human
gugcacuacuguacuccagccagggcaagaga

SEQ ID NO: 210485 - RNA, 32 nt, Human
gugcacuagggccaaaugaaccugaauacugg

SEQ ID NO: 210486 - RNA, 32 nt, Human
gugcacuccagccugggcaagaagagcgaaac

SEQ ID NO: 210487 - RNA, 32 nt, Human
gugcacuccagccuggguaacagagcgagacu

SEQ ID NO: 210488 - RNA, 32 nt, Human
gugcacuccagccugggugacagcgagacccu

SEQ ID NO: 210489 - RNA, 32 nt, Human
gugcacuccccguguucauaugucagggcaca

SEQ ID NO: 210490 - RNA, 32 nt, Human
gugcacuccucccagcccagcuccagaauggc

SEQ ID NO: 210491 - RNA, 32 nt, Human
gugcacucucugcuuagguuuugcuugggaaa

SEQ ID NO: 210492 - RNA, 17 nt, Human
gugcacugagccgucca

SEQ ID NO: 210493 - RNA, 32 nt, Human
gugcacugaugugcccuggcauccauuggugu

SEQ ID NO: 210494 - RNA, 32 nt, Human
gugcacugcacucuagccugggggaagaguga

SEQ ID NO: 210495 - RNA, 32 nt, Human
gugcacuggagaggcuggggaggcaggggccc

SEQ ID NO: 210496 - RNA, 32 nt, Human
gugcacuggauagcauucagccucaucacagg

SEQ ID NO: 210497 - RNA, 24 nt, Human
gugcacuggcucaagccuguaauc

SEQ ID NO: 210498 - RNA, 32 nt, Human
gugcacugggcaagggcagggcggcagguguc

SEQ ID NO: 210499 - RNA, 32 nt, Human
gugcacugguguggggcccaggagaggaccac

SEQ ID NO: 210500 - RNA, 32 nt, Human
gugcacuguggaacagagcugagaccccggcc

SEQ ID NO: 210501 - RNA, 32 nt, Human
gugcacuuacccccaucuuucucccucgggga

SEQ ID NO: 210502 - RNA, 32 nt, Human
gugcacuuacucuucuacaauguggccggauc

SEQ ID NO: 210503 - RNA, 32 nt, Human
gugcacuucccgcagcugcuuccacgguauag

SEQ ID NO: 210504 - RNA, 32 nt, Human
gugcacuucucccuuccaacugcaucaacuaa

SEQ ID NO: 210505 - RNA, 32 nt, Human
gugcacuucuccucucugggccuuggcuuggg

SEQ ID NO: 210506 - RNA, 32 nt, Human
gugcacuugcuguuuucccuguccacauccau

SEQ ID NO: 210507 - RNA, 32 nt, Human
gugcacuuguaaucccagcuacaugggaagcg

SEQ ID NO: 210508 - RNA, 32 nt, Human
gugcacuuugggaggcugaggcuggaggacug

SEQ ID NO: 210509 - RNA, 32 nt, Human
gugcagaaagcccagacuaaggaacaggcuga

SEQ ID NO: 210510 - RNA, 18 nt, Human
gugcagaaauccaucccu

SEQ ID NO: 210511 - RNA, 32 nt, Human
gugcagaaaugagaggagacagugcuagaguc

SEQ ID NO: 210512 - RNA, 32 nt, Human
gugcagaaauuggcugggcaugguggugcgcg

SEQ ID NO: 210513 - RNA, 18 nt, Human
gugcagaagcuuccaggc

SEQ ID NO: 210514 - RNA, 32 nt, Human
gugcagaaguggggagugaugggcagguucgg

SEQ ID NO: 210515 - RNA, 32 nt, Human
gugcagaaguuggaacagugguaaggcuguuu

SEQ ID NO: 210516 - RNA, 22 nt, Human
gugcagaaguuucuccaggugg

SEQ ID NO: 210517 - RNA, 32 nt, Human
gugcagacaacaucauggcucuuggcaguuua

SEQ ID NO: 210518 - RNA, 32 nt, Human
gugcagacacagggcaacacucaccagaauac

SEQ ID NO: 210519 - RNA, 32 nt, Human
gugcagacagcaucagcucugagguucaucau

SEQ ID NO: 210520 - RNA, 32 nt, Human
gugcagaccagcugccgcccugcccgaugcuu

SEQ ID NO: 210521 - RNA, 32 nt, Human
gugcagaccauccucugcccagaagaguugca

SEQ ID NO: 210522 - RNA, 19 nt, Human
gugcagaccccgggcccgg

SEQ ID NO: 210523 - RNA, 32 nt, Human
gugcagacccuggggucccuguuguacgcugc

SEQ ID NO: 210524 - RNA, 32 nt, Human
gugcagacucaggagugaaccugccugaagag

SEQ ID NO: 210525 - RNA, 24 nt, Human
gugcagacucaggauuggggcuug

SEQ ID NO: 210526 - RNA, 21 nt, Human
gugcagacucugggacugcgu

SEQ ID NO: 210527 - RNA, 24 nt, Human
gugcagacugcagcucagccucgu

SEQ ID NO: 210528 - RNA, 32 nt, Human
gugcagagaagaacauaagaagaaaaacccag

SEQ ID NO: 210529 - RNA, 32 nt, Human
gugcagagacccugcauguaggucacagguug

SEQ ID NO: 210530 - RNA, 18 nt, Human
gugcagagaccuagccug

SEQ ID NO: 210531 - RNA, 32 nt, Human
gugcagagagggagacaggcaggcaggcaggu

SEQ ID NO: 210532 - RNA, 32 nt, Human
gugcagagaugggcuuucucugccaguccccu

SEQ ID NO: 210533 - RNA, 32 nt, Human
gugcagagccgcacaggagcugccccggagcu

SEQ ID NO: 210534 - RNA, 32 nt, Human
gugcagagccggccccucaccuaacagcuggu

SEQ ID NO: 210535 - RNA, 32 nt, Human
gugcagagccugggacccagugagacggaguc

SEQ ID NO: 210536 - RNA, 32 nt, Human
gugcagagcuggagagccaugggugaggcagc

SEQ ID NO: 210537 - RNA, 21 nt, Human
gugcagaggacucuccaggug

SEQ ID NO: 210538 - RNA, 32 nt, Human
gugcagaggccugcggggucugaagggccucc

SEQ ID NO: 210539 - RNA, 32 nt, Human
gugcagaggccuggccucugucuguuugccau

SEQ ID NO: 210540 - RNA, 24 nt, Human
gugcagaggcucaugccuguaauc

SEQ ID NO: 210541 - RNA, 32 nt, Human
gugcagagggccuuagcaugggauguguccag

SEQ ID NO: 210542 - RNA, 32 nt, Human
gugcagagguccugagcccacccuaguugggc

SEQ ID NO: 210543 - RNA, 32 nt, Human
gugcagagucuaaaggauaacauaucaaggcu

SEQ ID NO: 210544 - RNA, 32 nt, Human
gugcagagugguucugcaaaugguuagaggaa

SEQ ID NO: 210545 - RNA, 32 nt, Human
gugcagaguguggaguguuugugcccccucuu

SEQ ID NO: 210546 - RNA, 32 nt, Human
gugcagauaacuuaagcuuucucagcugggaa

SEQ ID NO: 210547 - RNA, 32 nt, Human
gugcagauauugccuggacacacacaugugca

SEQ ID NO: 210548 - RNA, 32 nt, Human
gugcagaugaggaagugagcucagggaggcug

SEQ ID NO: 210549 - RNA, 17 nt, Human
gugcagaugcuaggugg

SEQ ID NO: 210550 - RNA, 31 nt, Human
gugcagaugcuggacgacagagccaggaugg

SEQ ID NO: 210551 - RNA, 31 nt, Human
gugcagauggaaaacugugccaacacuuccu

SEQ ID NO: 210552 - RNA, 20 nt, Human
gugcagauggccccgggcgg

SEQ ID NO: 210553 - RNA, 32 nt, Human
gugcagauucaccaauugccaccaccaggagc

SEQ ID NO: 210554 - RNA, 32 nt, Human
gugcagcaagucacugagaaugagcacuuucu

SEQ ID NO: 210555 - RNA, 32 nt, Human
gugcagcaccccaagccccagccugagggcug

SEQ ID NO: 210556 - RNA, 32 nt, Human
gugcagcagagccuagaggagcuguuccuucc

SEQ ID NO: 210557 - RNA, 32 nt, Human
gugcagcagcacagcagggaguguguccaacg

SEQ ID NO: 210558 - RNA, 19 nt, Human
gugcagcagccccaggcgg

SEQ ID NO: 210559 - RNA, 32 nt, Human
gugcagcaggagaaggaggauggucagccuug

SEQ ID NO: 210560 - RNA, 23 nt, Human
gugcagcagggagccccaugccc

SEQ ID NO: 210561 - RNA, 32 nt, Human
gugcagcauuuaggaaagcagugcaguacuca

SEQ ID NO: 210562 - RNA, 32 nt, Human
gugcagccaagcucugcagacuuuugcaggau

SEQ ID NO: 210563 - RNA, 32 nt, Human
gugcagccacagacuuguauuuugauccccaa

SEQ ID NO: 210564 - RNA, 32 nt, Human
gugcagccaccugccugacacccagggaugag

SEQ ID NO: 210565 - RNA, 32 nt, Human
gugcagccaccugccugucccauacgccccgc

SEQ ID NO: 210566 - RNA, 32 nt, Human
gugcagccacucccugcccugugucccaagug

SEQ ID NO: 210567 - RNA, 17 nt, Human
gugcagccaucaggugg

SEQ ID NO: 210568 - RNA, 32 nt, Human
gugcagcccaggcuucugagggaggcagaaga

SEQ ID NO: 210569 - RNA, 32 nt, Human
gugcagcccauguuccugcgugcagcucacgg

SEQ ID NO: 210570 - RNA, 32 nt, Human
gugcagccccagcagccggaccagccuugggc

SEQ ID NO: 210571 - RNA, 32 nt, Human
gugcagccccauugccuuuucccuucaggcuc

SEQ ID NO: 210572 - RNA, 32 nt, Human
gugcagcccucguccugggucugcaccgggca

SEQ ID NO: 210573 - RNA, 32 nt, Human
gugcagcccugagccugcccacuccucauuac

SEQ ID NO: 210574 - RNA, 32 nt, Human
gugcagccgucccgcuggaguggccauguccc

SEQ ID NO: 210575 - RNA, 32 nt, Human
gugcagccguuuuggaaaauagccuggcauuu

SEQ ID NO: 210576 - RNA, 32 nt, Human
gugcagccucaaacuccugggcucaagccauc

SEQ ID NO: 210577 - RNA, 32 nt, Human
gugcagccucaaacucuugggcucaagcagug

SEQ ID NO: 210578 - RNA, 32 nt, Human
gugcagccuccaacuccugggcucaauacucu

SEQ ID NO: 210579 - RNA, 32 nt, Human
gugcagccuccccucgaugucggcccucgaaa

SEQ ID NO: 210580 - RNA, 32 nt, Human
gugcagccuccuucagccagagcccagagcau

SEQ ID NO: 210581 - RNA, 32 nt, Human
gugcagccucgugcagcucuucuggucuccgg

SEQ ID NO: 210582 - RNA, 32 nt, Human
gugcagccucuaacuccugggcucaagcaauc

SEQ ID NO: 210583 - RNA, 22 nt, Human
gugcagccuggcagugcaguga

SEQ ID NO: 210584 - RNA, 32 nt, Human
gugcagccuucagguuugcggaaagggagugg

SEQ ID NO: 210585 - RNA, 32 nt, Human
gugcagcgacugcccggcccucccuccccugc

SEQ ID NO: 210586 - RNA, 17 nt, Human
gugcagcgcucaggugg

SEQ ID NO: 210587 - RNA, 32 nt, Human
gugcagcggacuugcuccagccugggugagga

SEQ ID NO: 210588 - RNA, 32 nt, Human
gugcagcggcgguucccucaucaguccagcca

SEQ ID NO: 210589 - RNA, 32 nt, Human
gugcagcggcgugaggcccgucccggagcgag

SEQ ID NO: 210590 - RNA, 22 nt, Human
gugcagcggcucaugccuguaa

SEQ ID NO: 210591 - RNA, 32 nt, Human
gugcagcgggcagcgagcagcccagggagcca

SEQ ID NO: 210592 - RNA, 32 nt, Human
gugcagcgguccagcacuuaacucuaauacau

SEQ ID NO: 210593 - RNA, 32 nt, Human
gugcagcggugugaucucagcucauugcaacc

SEQ ID NO: 210594 - RNA, 32 nt, Human
gugcagcuccgcagcccugccggcucgguucg

SEQ ID NO: 210595 - RNA, 32 nt, Human
gugcagcucgagagacauucagagauggaaca

SEQ ID NO: 210596 - RNA, 32 nt, Human
gugcagcucgagagacauucagagauggagca

SEQ ID NO: 210597 - RNA, 32 nt, Human
gugcagcucgcucuuuccuuccuuccuaagcu

SEQ ID NO: 210598 - RNA, 17 nt, Human
gugcagcucuccgggcg

SEQ ID NO: 210599 - RNA, 32 nt, Human
gugcagcucuuaaacacauugccuuaugacua

SEQ ID NO: 210600 - RNA, 32 nt, Human
gugcagcugaccaggguuugugcagugaucuu

SEQ ID NO: 210601 - RNA, 32 nt, Human
gugcagcugaccuguaucgacacccacagcuu

SEQ ID NO: 210602 - RNA, 32 nt, Human
gugcagcugagagcaaggagaauuauugucga

SEQ ID NO: 210603 - RNA, 32 nt, Human
gugcagcugcaaccaccauauccagggcccaa

SEQ ID NO: 210604 - RNA, 32 nt, Human
gugcagcugcagaagagaaaugggauuggcuc

SEQ ID NO: 210605 - RNA, 32 nt, Human
gugcagcugccaaggccagcuccgucaggcag

SEQ ID NO: 210606 - RNA, 32 nt, Human
gugcagcugccaccccagcccaaauggauucc

SEQ ID NO: 210607 - RNA, 32 nt, Human
gugcagcugcccacccugccgccaugucucug

SEQ ID NO: 210608 - RNA, 32 nt, Human
gugcagcugccggcaaccacagguuccaagau

SEQ ID NO: 210609 - RNA, 32 nt, Human
gugcagcugguguccccgauucuggcuguccu

SEQ ID NO: 210610 - RNA, 32 nt, Human
gugcagcuguaacugcucacgccaaaauggcu

SEQ ID NO: 210611 - RNA, 32 nt, Human
gugcagcugugagcgcguggccgccccgcggg

SEQ ID NO: 210612 - RNA, 32 nt, Human
gugcagcuguggguggaggcuggggugucugc

SEQ ID NO: 210613 - RNA, 32 nt, Human
gugcagcuguggucccagcuacucaggaggcu

SEQ ID NO: 210614 - RNA, 32 nt, Human
gugcaggaacccuuggucacaugugacauguc

SEQ ID NO: 210615 - RNA, 32 nt, Human
gugcaggacaaaacuccucucuauagucaacu

SEQ ID NO: 210616 - RNA, 32 nt, Human
gugcaggagacccucucacaccagguuaccca

SEQ ID NO: 210617 - RNA, 32 nt, Human
gugcaggaggagaaggaggaggagcaggaggu

SEQ ID NO: 210618 - RNA, 32 nt, Human
gugcaggaggcagagggugccccgcagggagc

SEQ ID NO: 210619 - RNA, 16 nt, Human
gugcaggaggcuguug

SEQ ID NO: 210620 - RNA, 32 nt, Human
gugcaggauagccacacagcaaacauguuugc

SEQ ID NO: 210621 - RNA, 32 nt, Human
gugcaggaucugcuucccuucucuccaggacc

SEQ ID NO: 210622 - RNA, 32 nt, Human
gugcaggcaauagauuuugccuucaaggguuc

SEQ ID NO: 210623 - RNA, 32 nt, Human
gugcaggcacagagaagagcaguugggaagac

SEQ ID NO: 210624 - RNA, 19 nt, Human
gugcaggcacauaggcugg

SEQ ID NO: 210625 - RNA, 19 nt, Human
gugcaggcacugaggcugg

SEQ ID NO: 210626 - RNA, 32 nt, Human
gugcaggcacuucccgugugacacaucacuua

SEQ ID NO: 210627 - RNA, 32 nt, Human
gugcaggcagagccaucugccaggcccaggag

SEQ ID NO: 210628 - RNA, 32 nt, Human
gugcaggcaggcagauggcuugagcccaggaa

SEQ ID NO: 210629 - RNA, 19 nt, Human
gugcaggcauugcacacgg

SEQ ID NO: 210630 - RNA, 17 nt, Human
gugcaggccaccgggug

SEQ ID NO: 210631 - RNA, 16 nt, Human
gugcaggccaggcagg

SEQ ID NO: 210632 - RNA, 22 nt, Human
gugcaggccaggguucgcgcgg

SEQ ID NO: 210633 - RNA, 32 nt, Human
gugcaggcccacucuucuggauccucuuggcc

SEQ ID NO: 210634 - RNA, 17 nt, Human
gugcaggcccagguugg

SEQ ID NO: 210635 - RNA, 17 nt, Human
gugcaggccguggggcg

SEQ ID NO: 210636 - RNA, 19 nt, Human
gugcaggccguuggggcgg

SEQ ID NO: 210637 - RNA, 18 nt, Human
gugcaggccuccagcagg

SEQ ID NO: 210638 - RNA, 32 nt, Human
gugcaggccuguaaucccagcuacucgggagg

SEQ ID NO: 210639 - RNA, 32 nt, Human
gugcaggccugucaacuuuacaggagagcacu

SEQ ID NO: 210640 - RNA, 19 nt, Human
gugcaggccuguucugagg

SEQ ID NO: 210641 - RNA, 17 nt, Human
gugcaggcgcucaggcg

SEQ ID NO: 210642 - RNA, 18 nt, Human
gugcaggcggacaggcgg

SEQ ID NO: 210643 - RNA, 19 nt, Human
gugcaggcucaagagcugg

SEQ ID NO: 210644 - RNA, 18 nt, Human
gugcaggcugaggucugg

SEQ ID NO: 210645 - RNA, 18 nt, Human
gugcaggcugccccaugg

SEQ ID NO: 210646 - RNA, 19 nt, Human
gugcaggcugccuguaugg

SEQ ID NO: 210647 - RNA, 17 nt, Human
gugcaggcugccuguga

SEQ ID NO: 210648 - RNA, 20 nt, Human
gugcaggcugccugugaggc

SEQ ID NO: 210649 - RNA, 32 nt, Human
gugcaggcugccugugaggcuccaggcggugg

SEQ ID NO: 210650 - RNA, 19 nt, Human
gugcaggcugcucccgggg

SEQ ID NO: 210651 - RNA, 18 nt, Human
gugcaggcuggacucagg

SEQ ID NO: 210652 - RNA, 17 nt, Human
gugcaggcuggcagggg

SEQ ID NO: 210653 - RNA, 18 nt, Human
gugcaggcuggccagccg

SEQ ID NO: 210654 - RNA, 19 nt, Human
gugcaggcugggaccagcg

SEQ ID NO: 210655 - RNA, 18 nt, Human
gugcaggcuggggucagg

SEQ ID NO: 210656 - RNA, 16 nt, Human
gugcaggcuguggugg

SEQ ID NO: 210657 - RNA, 19 nt, Human
gugcaggcuguugacugcg

SEQ ID NO: 210658 - RNA, 18 nt, Human
gugcaggcuucaggcagg

SEQ ID NO: 210659 - RNA, 19 nt, Human
gugcaggcuuccccggcgg

SEQ ID NO: 210660 - RNA, 17 nt, Human
gugcaggcuuuucugcg

SEQ ID NO: 210661 - RNA, 32 nt, Human
gugcagggaaagagaaccucaccagaaaguau

SEQ ID NO: 210662 - RNA, 32 nt, Human
gugcagggaaccuggccugagaacugcccagu

SEQ ID NO: 210663 - RNA, 24 nt, Human
gugcagggacucaugacuguaauc

SEQ ID NO: 210664 - RNA, 32 nt, Human
gugcagggaggcggaggcccugggagagccgu

SEQ ID NO: 210665 - RNA, 32 nt, Human
gugcagggaggcgggagaugauggcgaggcgg

SEQ ID NO: 210666 - RNA, 19 nt, Human
gugcagggauuacaggcgu

SEQ ID NO: 210667 - RNA, 20 nt, Human
gugcagggcaagccaguggc

SEQ ID NO: 210668 - RNA, 32 nt, Human
gugcagggcaggaaagcuccacacacacagcc

SEQ ID NO: 210669 - RNA, 32 nt, Human
gugcagggcccgcgggcucuggccggagccgc

SEQ ID NO: 210670 - RNA, 32 nt, Human
gugcagggccuccauuccuggagcccgaggca

SEQ ID NO: 210671 - RNA, 32 nt, Human
gugcagggccuguaaucccagcauuuugggag

SEQ ID NO: 210672 - RNA, 32 nt, Human
gugcagggcgucccccucaacccugcccugaa

SEQ ID NO: 210673 - RNA, 23 nt, Human
gugcagggcucacaccuguaauc

SEQ ID NO: 210674 - RNA, 32 nt, Human
gugcagggcuggucuuggggaggcagggcagc

SEQ ID NO: 210675 - RNA, 17 nt, Human
gugcaggggccaggugg

SEQ ID NO: 210676 - RNA, 32 nt, Human
gugcagggggugggggugcugggagccagcca

SEQ ID NO: 210677 - RNA, 32 nt, Human
gugcagggugcccagugcacacacuagagaga

SEQ ID NO: 210678 - RNA, 32 nt, Human
gugcaggguggcagaggugccucugcagagag

SEQ ID NO: 210679 - RNA, 32 nt, Human
gugcagggugggggucccugcccacccauacu

SEQ ID NO: 210680 - RNA, 32 nt, Human
gugcaggguugugggagccgagacgagauuag

SEQ ID NO: 210681 - RNA, 31 nt, Human
gugcagguacuuuucugccugcagaaggcac

SEQ ID NO: 210682 - RNA, 32 nt, Human
gugcagguagagaagagauggugccaugauau

SEQ ID NO: 210683 - RNA, 19 nt, Human
gugcagguauuucagaagg

SEQ ID NO: 210684 - RNA, 19 nt, Human
gugcaggucacaccagggg

SEQ ID NO: 210685 - RNA, 32 nt, Human
gugcaggucacaugcccacugcagcccuccag

SEQ ID NO: 210686 - RNA, 32 nt, Human
gugcagguccucuauuuuuaauugcuguuuuc

SEQ ID NO: 210687 - RNA, 16 nt, Human
gugcaggucucagggg

SEQ ID NO: 210688 - RNA, 16 nt, Human
gugcaggugcaggugg

SEQ ID NO: 210689 - RNA, 32 nt, Human
gugcaggugggagucaucugucagccuucuau

SEQ ID NO: 210690 - RNA, 32 nt, Human
gugcaggugggcauaggugcagugagugcagg

SEQ ID NO: 210691 - RNA, 32 nt, Human
gugcagguggggugauggccagaggaaugaug

SEQ ID NO: 210692 - RNA, 19 nt, Human
gugcagguguguacaggcg

SEQ ID NO: 210693 - RNA, 19 nt, Human
gugcaggugugugcagggg

SEQ ID NO: 210694 - RNA, 16 nt, Human
gugcagguugcagagg

SEQ ID NO: 210695 - RNA, 24 nt, Human
gugcaguaacucacgccuguaauc

SEQ ID NO: 210696 - RNA, 32 nt, Human
gugcaguaccugcugguuaagaaccggaagac

SEQ ID NO: 210697 - RNA, 32 nt, Human
gugcaguacucaguaaggcagugcaguacuca

SEQ ID NO: 210698 - RNA, 25 nt, Human
gugcaguagcucacacccuguaauc

SEQ ID NO: 210699 - RNA, 24 nt, Human
gugcaguagcucacaccuguaauc

SEQ ID NO: 210700 - RNA, 24 nt, Human
gugcaguagcucacaccuguaguc

SEQ ID NO: 210701 - RNA, 24 nt, Human
gugcaguagcucacgccuguaauc

SEQ ID NO: 210702 - RNA, 23 nt, Human
gugcaguagcucaugccuauaau

SEQ ID NO: 210703 - RNA, 24 nt, Human
gugcaguagcucaugccuguaauc

SEQ ID NO: 210704 - RNA, 32 nt, Human
gugcaguagcuguguguccgaggucagugugc

SEQ ID NO: 210705 - RNA, 32 nt, Human
gugcaguagugccaguccugcaguaguugaua

SEQ ID NO: 210706 - RNA, 25 nt, Human
gugcaguaguucaugcccuguaauc

SEQ ID NO: 210707 - RNA, 24 nt, Human
gugcaguaguuuacgccuguaauc

SEQ ID NO: 210708 - RNA, 32 nt, Human
gugcaguauucuaaacauuucagcuaggaaua

SEQ ID NO: 210709 - RNA, 32 nt, Human
gugcaguauugaaaagacaggagaaaagcaaa

SEQ ID NO: 210710 - RNA, 32 nt, Human
gugcagucacauuauuggggauuccacagcug

SEQ ID NO: 210711 - RNA, 32 nt, Human
gugcaguccagcggggaggaggcugcccguuc

SEQ ID NO: 210712 - RNA, 21 nt, Human
gugcagucgcggcccgggcgg

SEQ ID NO: 210713 - RNA, 32 nt, Human
gugcagucucagaaaacacgagggaugccacc

SEQ ID NO: 210714 - RNA, 32 nt, Human
gugcagucucaggggaacacaaagcagcccug

SEQ ID NO: 210715 - RNA, 32 nt, Human
gugcagugaacaaacuacacaagucaucuaca

SEQ ID NO: 210716 - RNA, 20 nt, Human
gugcagugaacuugcuguca

SEQ ID NO: 210717 - RNA, 32 nt, Human
gugcagugaagaucauaccucacuacauccgu

SEQ ID NO: 210718 - RNA, 32 nt, Human
gugcagugacaugcagaggcuggacugcugcc

SEQ ID NO: 210719 - RNA, 24 nt, Human
gugcagugacucacaucuguaauc

SEQ ID NO: 210720 - RNA, 24 nt, Human
gugcagugacucaugccuacaauc

SEQ ID NO: 210721 - RNA, 17 nt, Human
gugcagugacucauguc

SEQ ID NO: 210722 - RNA, 32 nt, Human
gugcagugagccaagaccaugccauuacacuc

SEQ ID NO: 210723 - RNA, 32 nt, Human
gugcagugagcuaugauugcaccauugcaccu

SEQ ID NO: 210724 - RNA, 32 nt, Human
gugcagugaugucgauuucauuucccuucccc

SEQ ID NO: 210725 - RNA, 32 nt, Human
gugcagugcaagcccccggccucuucccuggg

SEQ ID NO: 210726 - RNA, 31 nt, Human
gugcagugcacaaucucggcucacugcaauc

SEQ ID NO: 210727 - RNA, 17 nt, Human
gugcagugccaugauca

SEQ ID NO: 210728 - RNA, 32 nt, Human
gugcagugcggugcacaccggucuccagguug

SEQ ID NO: 210729 - RNA, 32 nt, Human
gugcagugcucaauaaggcagugcagugcuca

SEQ ID NO: 210730 - RNA, 24 nt, Human
gugcaguggaucacgccuguaauc

SEQ ID NO: 210731 - RNA, 24 nt, Human
gugcaguggaucaugucuguaauc

SEQ ID NO: 210732 - RNA, 24 nt, Human
gugcaguggcacacaccuguaguc

SEQ ID NO: 210733 - RNA, 24 nt, Human
gugcaguggcacacggcuguaauc

SEQ ID NO: 210734 - RNA, 32 nt, Human
gugcaguggcaccaucuccgcucacugcaagc

SEQ ID NO: 210735 - RNA, 32 nt, Human
gugcaguggcaccaucuuggcucacuguaacc

SEQ ID NO: 210736 - RNA, 32 nt, Human
gugcaguggcaccaucuuggcucacuucaacc

SEQ ID NO: 210737 - RNA, 24 nt, Human
gugcaguggcaugugcuuguaauc

SEQ ID NO: 210738 - RNA, 24 nt, Human
gugcaguggcccacgccuguaauc

SEQ ID NO: 210739 - RNA, 24 nt, Human
gugcaguggcccaugccuguaauc

SEQ ID NO: 210740 - RNA, 24 nt, Human
gugcaguggcuaaagccuguaauc

SEQ ID NO: 210741 - RNA, 24 nt, Human
gugcaguggcucacacauguaauc

SEQ ID NO: 210742 - RNA, 24 nt, Human
gugcaguggcucacaccgguaauc

SEQ ID NO: 210743 - RNA, 24 nt, Human
gugcaguggcucacaccuauaauc

SEQ ID NO: 210744 - RNA, 24 nt, Human
gugcaguggcucacaccuggaauc

SEQ ID NO: 210745 - RNA, 23 nt, Human
gugcaguggcucacaccuguaau

SEQ ID NO: 210746 - RNA, 24 nt, Human
gugcaguggcucacaccuguaauc

SEQ ID NO: 210747 - RNA, 24 nt, Human
gugcaguggcucacaccuguauuc

SEQ ID NO: 210748 - RNA, 32 nt, Human
gugcaguggcucacaccugucauuccagcacu

SEQ ID NO: 210749 - RNA, 24 nt, Human
gugcaguggcucacaccugugauc

SEQ ID NO: 210750 - RNA, 22 nt, Human
gugcaguggcucacaccugugg

SEQ ID NO: 210751 - RNA, 24 nt, Human
gugcaguggcucacaccuuuaauc

SEQ ID NO: 210752 - RNA, 22 nt, Human
gugcaguggcucacacuguaau

SEQ ID NO: 210753 - RNA, 22 nt, Human
gugcaguggcucacacuuguaa

SEQ ID NO: 210754 - RNA, 24 nt, Human
gugcaguggcucacacuuguaauc

SEQ ID NO: 210755 - RNA, 22 nt, Human
gugcaguggcucacaucuguaa

SEQ ID NO: 210756 - RNA, 24 nt, Human
gugcaguggcucacaucuguaauc

SEQ ID NO: 210757 - RNA, 24 nt, Human
gugcaguggcucacauucguaauc

SEQ ID NO: 210758 - RNA, 24 nt, Human
gugcaguggcucacgccuauaauc

SEQ ID NO: 210759 - RNA, 24 nt, Human
gugcaguggcucacgccuaugauc

SEQ ID NO: 210760 - RNA, 22 nt, Human
gugcaguggcucacgccuguaa

SEQ ID NO: 210761 - RNA, 24 nt, Human
gugcaguggcucacgccuguaauc

SEQ ID NO: 210762 - RNA, 24 nt, Human
gugcaguggcucacgccuguaguc

SEQ ID NO: 210763 - RNA, 24 nt, Human
gugcaguggcucacgcuuauaauc

SEQ ID NO: 210764 - RNA, 24 nt, Human
gugcaguggcucacgcuuguaauc

SEQ ID NO: 210765 - RNA, 24 nt, Human
gugcaguggcucacguauguaauc

SEQ ID NO: 210766 - RNA, 24 nt, Human
gugcaguggcucacgucuguaauc

SEQ ID NO: 210767 - RNA, 24 nt, Human
gugcaguggcucacuacucuaauu

SEQ ID NO: 210768 - RNA, 24 nt, Human
gugcaguggcucacuccuguaauc

SEQ ID NO: 210769 - RNA, 24 nt, Human
gugcaguggcucacuccuguaguc

SEQ ID NO: 210770 - RNA, 32 nt, Human
gugcaguggcucacugcaaccugggugacaga

SEQ ID NO: 210771 - RNA, 24 nt, Human
gugcaguggcucaggccuguaauc

SEQ ID NO: 210772 - RNA, 24 nt, Human
gugcaguggcucauaccuuuaauc

SEQ ID NO: 210773 - RNA, 24 nt, Human
gugcaguggcucaugccaguuauc

SEQ ID NO: 210774 - RNA, 24 nt, Human
gugcaguggcucaugccuauaauc

SEQ ID NO: 210775 - RNA, 24 nt, Human
gugcaguggcucaugccuauauuc

SEQ ID NO: 210776 - RNA, 21 nt, Human
gugcaguggcucaugccugua

SEQ ID NO: 210777 - RNA, 22 nt, Human
gugcaguggcucaugccuguaa

SEQ ID NO: 210778 - RNA, 24 nt, Human
gugcaguggcucaugccuguaauc

SEQ ID NO: 210779 - RNA, 24 nt, Human
gugcaguggcucaugccuguaauu

SEQ ID NO: 210780 - RNA, 24 nt, Human
gugcaguggcucaugccugugguc

SEQ ID NO: 210781 - RNA, 20 nt, Human
gugcaguggcuccuauaauc

SEQ ID NO: 210782 - RNA, 22 nt, Human
gugcaguggcucgccuguaauc

SEQ ID NO: 210783 - RNA, 24 nt, Human
gugcaguggcucgcgccuguaauc

SEQ ID NO: 210784 - RNA, 24 nt, Human
gugcaguggcucuugccuguaauc

SEQ ID NO: 210785 - RNA, 32 nt, Human
gugcaguggcugcgccgccaggccccaacaau

SEQ ID NO: 210786 - RNA, 24 nt, Human
gugcaguggcuuacaccuguaauc

SEQ ID NO: 210787 - RNA, 24 nt, Human
gugcaguggcuuaugcuuguaauc

SEQ ID NO: 210788 - RNA, 24 nt, Human
gugcaguggcuuguuccuguaguc

SEQ ID NO: 210789 - RNA, 24 nt, Human
gugcagugguauauaccuguaguc

SEQ ID NO: 210790 - RNA, 32 nt, Human
gugcaguggucagccaccugaagagagagcca

SEQ ID NO: 210791 - RNA, 19 nt, Human
gugcaguggugcaugauca

SEQ ID NO: 210792 - RNA, 24 nt, Human
gugcaguggugcaugccuguaguc

SEQ ID NO: 210793 - RNA, 26 nt, Human
gugcaguggugcgcaugccuguaguc

SEQ ID NO: 210794 - RNA, 24 nt, Human
gugcagugguucacaccuguaauu

SEQ ID NO: 210795 - RNA, 24 nt, Human
gugcagugguucaugccuguaauc

SEQ ID NO: 210796 - RNA, 19 nt, Human
gugcaguguauccuggaga

SEQ ID NO: 210797 - RNA, 20 nt, Human
gugcaguguccagaggccaa

SEQ ID NO: 210798 - RNA, 24 nt, Human
gugcagugucuuucaccuguaauc

SEQ ID NO: 210799 - RNA, 32 nt, Human
gugcaguguguggaagcugcaaacaaguaggc

SEQ ID NO: 210800 - RNA, 32 nt, Human
gugcaguguuggagagugacacugucggggca

SEQ ID NO: 210801 - RNA, 32 nt, Human
gugcaguuagaugcuguucuuccuuuagauuu

SEQ ID NO: 210802 - RNA, 24 nt, Human
gugcaguugccaacaccuguaauc

SEQ ID NO: 210803 - RNA, 32 nt, Human
gugcaguuuaggcugguuaagaauggucccug

SEQ ID NO: 210804 - RNA, 32 nt, Human
gugcauaaagaauguuuuaaauguaacuguuu

SEQ ID NO: 210805 - RNA, 32 nt, Human
gugcauagauacagguaaccaccaccacaauc

SEQ ID NO: 210806 - RNA, 32 nt, Human
gugcauagauuccugaaggccauccagugacc

SEQ ID NO: 210807 - RNA, 32 nt, Human
gugcauagcagaugguuuccacauuuagaucc

SEQ ID NO: 210808 - RNA, 32 nt, Human
gugcauagguacaguggcaccugagguaggag

SEQ ID NO: 210809 - RNA, 32 nt, Human
gugcauaugagacuugggggucccuccccaau

SEQ ID NO: 210810 - RNA, 32 nt, Human
gugcauaugcauauacauuguaaguuaguaag

SEQ ID NO: 210811 - RNA, 32 nt, Human
gugcauauguccagcaggacggcagugucagg

SEQ ID NO: 210812 - RNA, 32 nt, Human
gugcaucacagccccucacugggaccaggggg

SEQ ID NO: 210813 - RNA, 32 nt, Human
gugcaucacucaccacagcugccuccugagcu

SEQ ID NO: 210814 - RNA, 32 nt, Human
gugcaucacucucccuucugccuccuucaacu

SEQ ID NO: 210815 - RNA, 32 nt, Human
gugcaucagccuguagguucuuccucuacccu

SEQ ID NO: 210816 - RNA, 32 nt, Human
gugcaucaucccucaugagaggcaagcccaga

SEQ ID NO: 210817 - RNA, 32 nt, Human
gugcauccccucucugcugagagcuguuccgu

SEQ ID NO: 210818 - RNA, 32 nt, Human
gugcauccucaagcucugcuccuucagggcca

SEQ ID NO: 210819 - RNA, 32 nt, Human
gugcauccuguaaucauagcuacuugggaggu

SEQ ID NO: 210820 - RNA, 32 nt, Human
gugcaucgugagggccagagacaggaauguaa

SEQ ID NO: 210821 - RNA, 32 nt, Human
gugcaucuccaaggagcuugcuggcucugcag

SEQ ID NO: 210822 - RNA, 31 nt, Human
gugcaucucugggcauggccugugugugggu

SEQ ID NO: 210823 - RNA, 32 nt, Human
gugcaucugggaggugguaggccacaguccug

SEQ ID NO: 210824 - RNA, 32 nt, Human
gugcaucuguaaucccagcuacuugggaggcu

SEQ ID NO: 210825 - RNA, 32 nt, Human
gugcaucuguaaucccggcuacuugggagguu

SEQ ID NO: 210826 - RNA, 32 nt, Human
gugcaucuguagccucagcuacucaggggguu

SEQ ID NO: 210827 - RNA, 32 nt, Human
gugcaucuguagucccagcuacuugggaggcu

SEQ ID NO: 210828 - RNA, 32 nt, Human
gugcaucuguuaauucaguucacguacagcag

SEQ ID NO: 210829 - RNA, 32 nt, Human
gugcaucuguugggaaucagagacagcuagag

SEQ ID NO: 210830 - RNA, 32 nt, Human
gugcaucuuuuuccuuccccuggacuguccuc

SEQ ID NO: 210831 - RNA, 32 nt, Human
gugcaugaacacggugcugggcauggcccucu

SEQ ID NO: 210832 - RNA, 32 nt, Human
gugcaugacggcaagcccuccgagggcuccua

SEQ ID NO: 210833 - RNA, 32 nt, Human
gugcaugagaggagguagagugugaacaucau

SEQ ID NO: 210834 - RNA, 32 nt, Human
gugcaugcaaaucucugaugguggcuuccagg

SEQ ID NO: 210835 - RNA, 32 nt, Human
gugcaugcacacacacuuacgaugcugcuggc

SEQ ID NO: 210836 - RNA, 32 nt, Human
gugcaugccauggagacugguuuagacaccgc

SEQ ID NO: 210837 - RNA, 32 nt, Human
gugcaugccuauaaucccagcuacucaggagg

SEQ ID NO: 210838 - RNA, 32 nt, Human
gugcaugccuguaaccccagcuacucgggaag

SEQ ID NO: 210839 - RNA, 32 nt, Human
gugcaugccuguaauccagcuacuugggaggc

SEQ ID NO: 210840 - RNA, 32 nt, Human
gugcaugccuguaaucccagcuacccugaagg

SEQ ID NO: 210841 - RNA, 32 nt, Human
gugcaugccuguaaucccagcuacucggaagu

SEQ ID NO: 210842 - RNA, 32 nt, Human
gugcaugccuguaaucccagcuacucgggaga

SEQ ID NO: 210843 - RNA, 32 nt, Human
gugcaugccuguaaucccagcuacucgggagg

SEQ ID NO: 210844 - RNA, 32 nt, Human
gugcaugccuguaaucccagcuacucuggagg

SEQ ID NO: 210845 - RNA, 32 nt, Human
gugcaugccuguaaucccagcuacuuggaagg

SEQ ID NO: 210846 - RNA, 32 nt, Human
gugcaugccuguaaucccagcuacuugggagg

SEQ ID NO: 210847 - RNA, 32 nt, Human
gugcaugccuguaaucccagcugcuggggagg

SEQ ID NO: 210848 - RNA, 32 nt, Human
gugcaugccuguaaucccagcugcuugggagg

SEQ ID NO: 210849 - RNA, 32 nt, Human
gugcaugccuguaaucccagcuucuugggagg

SEQ ID NO: 210850 - RNA, 32 nt, Human
gugcaugccuguaauccuagcuacucgggagg

SEQ ID NO: 210851 - RNA, 32 nt, Human
gugcaugccuguaaucucagcuacucgggagg

SEQ ID NO: 210852 - RNA, 32 nt, Human
gugcaugccuguaaucucagcuacuugggagg

SEQ ID NO: 210853 - RNA, 32 nt, Human
gugcaugccuguaaucucagcugcuccggagg

SEQ ID NO: 210854 - RNA, 32 nt, Human
gugcaugccuguaauuccagcggcuuggaagg

SEQ ID NO: 210855 - RNA, 32 nt, Human
gugcaugccuguagucacagcuacuugggaga

SEQ ID NO: 210856 - RNA, 32 nt, Human
gugcaugccuguagucccagcuacucgggagg

SEQ ID NO: 210857 - RNA, 32 nt, Human
gugcaugccuguagucccagcuacucuggagg

SEQ ID NO: 210858 - RNA, 32 nt, Human
gugcaugccuguagucccagcuacuugagugg

SEQ ID NO: 210859 - RNA, 32 nt, Human
gugcaugccuguagucccagcuacuugggagg

SEQ ID NO: 210860 - RNA, 32 nt, Human
gugcaugccuguagucccagcuacuugggaug

SEQ ID NO: 210861 - RNA, 32 nt, Human
gugcaugccuguagucccgguuacucgggagg

SEQ ID NO: 210862 - RNA, 32 nt, Human
gugcaugccuguaguccuagcuauuugggagg

SEQ ID NO: 210863 - RNA, 32 nt, Human
gugcaugccuguagucucagcuacucaggagg

SEQ ID NO: 210864 - RNA, 32 nt, Human
gugcaugccuguagucucagcuaguuggggag

SEQ ID NO: 210865 - RNA, 32 nt, Human
gugcaugccuguagugcacagugucucuacag

SEQ ID NO: 210866 - RNA, 32 nt, Human
gugcaugccuguauucccagcuacucaggagg

SEQ ID NO: 210867 - RNA, 32 nt, Human
gugcaugccuguauucucagcuacucgggagg

SEQ ID NO: 210868 - RNA, 32 nt, Human
gugcaugccugucauccaagcuacucaagaga

SEQ ID NO: 210869 - RNA, 32 nt, Human
gugcaugcugggggugacagagugcugaucac

SEQ ID NO: 210870 - RNA, 32 nt, Human
gugcaugcuuguaaucccagcuacucagaagg

SEQ ID NO: 210871 - RNA, 32 nt, Human
gugcaugcuuguaauccuagcuacucaagagg

SEQ ID NO: 210872 - RNA, 32 nt, Human
gugcauggaaaauguugacuucuagcuuccau

SEQ ID NO: 210873 - RNA, 32 nt, Human
gugcauggagccagagugcagagccccagauc

SEQ ID NO: 210874 - RNA, 32 nt, Human
gugcauggcagaggaagguggggagagcccag

SEQ ID NO: 210875 - RNA, 32 nt, Human
gugcauggccugugcugccuucugccuggcuc

SEQ ID NO: 210876 - RNA, 32 nt, Human
gugcauggcucccaaaaugagaaggcugagug

SEQ ID NO: 210877 - RNA, 32 nt, Human
gugcaugggcaggcagugcuggaggaacuggg

SEQ ID NO: 210878 - RNA, 32 nt, Human
gugcauggggacuggcugaggagccagcaugg

SEQ ID NO: 210879 - RNA, 32 nt, Human
gugcauggggagcccgcccacuacccugcuua

SEQ ID NO: 210880 - RNA, 32 nt, Human
gugcauggggcuguggagugggugucaguaug

SEQ ID NO: 210881 - RNA, 22 nt, Human
gugcaugguccuggggcagcaa

SEQ ID NO: 210882 - RNA, 32 nt, Human
gugcauggucugugcugccuucugccuggguc

SEQ ID NO: 210883 - RNA, 32 nt, Human
gugcaugguuuugggagaguccuccuugacuc

SEQ ID NO: 210884 - RNA, 32 nt, Human
gugcauguaggauguugagcagcauguguggc

SEQ ID NO: 210885 - RNA, 32 nt, Human
gugcaugucccauguccuuuagggaaccuuuu

SEQ ID NO: 210886 - RNA, 32 nt, Human
gugcauguccccagccacaugggaagugaaag

SEQ ID NO: 210887 - RNA, 32 nt, Human
gugcaugucugcuucaauuagcagaugccgca

SEQ ID NO: 210888 - RNA, 32 nt, Human
gugcaugucugggucuguggguuucuguuggg

SEQ ID NO: 210889 - RNA, 32 nt, Human
gugcaugugaauagccacugcacuccagccug

SEQ ID NO: 210890 - RNA, 31 nt, Human
gugcaugugacuuacucagccaacccaaugc

SEQ ID NO: 210891 - RNA, 32 nt, Human
gugcaugugcaucaaugccccucuuuucuccc

SEQ ID NO: 210892 - RNA, 32 nt, Human
gugcaugugccuguaaucccagcuacucagga

SEQ ID NO: 210893 - RNA, 32 nt, Human
gugcauguguagccugugcauguaugucuugg

SEQ ID NO: 210894 - RNA, 32 nt, Human
gugcauguguguauaagugcacacagaaauau

SEQ ID NO: 210895 - RNA, 32 nt, Human
gugcauguguguuuccuguugccuggaucuau

SEQ ID NO: 210896 - RNA, 32 nt, Human
gugcauguucuagcuccacacacuaguccuug

SEQ ID NO: 210897 - RNA, 32 nt, Human
gugcauuaaaucaaauacaaaaauugguuuuu

SEQ ID NO: 210898 - RNA, 32 nt, Human
gugcauuaguugugauuucugccuccuuuucu

SEQ ID NO: 210899 - RNA, 32 nt, Human
gugcauucagucucucugccucugccugccuc

SEQ ID NO: 210900 - RNA, 32 nt, Human
gugcauucauuucaucuugcuguuuauuagca

SEQ ID NO: 210901 - RNA, 32 nt, Human
gugcauuccagccuggguacacagcgagaccc

SEQ ID NO: 210902 - RNA, 32 nt, Human
gugcauucccugcccaugaggaaggaagcagc

SEQ ID NO: 210903 - RNA, 32 nt, Human
gugcauucccuucacuccuuuuccuacccaag

SEQ ID NO: 210904 - RNA, 32 nt, Human
gugcauucuuugucaucucuucugaguuuucg

SEQ ID NO: 210905 - RNA, 32 nt, Human
gugcauugacaucacaggcugugccaacaugu

SEQ ID NO: 210906 - RNA, 19 nt, Human
gugcauugaugaagaugau

SEQ ID NO: 210907 - RNA, 32 nt, Human
gugcauugccaagggcaagaagcugagaacau

SEQ ID NO: 210908 - RNA, 32 nt, Human
gugcauugccuguagucccagcuacuugggag

SEQ ID NO: 210909 - RNA, 32 nt, Human
gugcauugcuucuguaaaugcaggcgcaguuu

SEQ ID NO: 210910 - RNA, 32 nt, Human
gugcauuggaaucaagccuggcuaccugcaug

SEQ ID NO: 210911 - RNA, 24 nt, Human
gugcauugguucacgccuguaauc

SEQ ID NO: 210912 - RNA, 24 nt, Human
gugcauugguucaugccuauaauc

SEQ ID NO: 210913 - RNA, 32 nt, Human
gugcauugugccuguuguacaccccuggagga

SEQ ID NO: 210914 - RNA, 32 nt, Human
gugcauuuaaaaugugugacacagaaacggca

SEQ ID NO: 210915 - RNA, 32 nt, Human
gugcauuuaacuguuucaugcgcuuguuggcg

SEQ ID NO: 210916 - RNA, 32 nt, Human
gugcauuuauguuuguuuuaagacacugcauu

SEQ ID NO: 210917 - RNA, 32 nt, Human
gugcauuuauguuuguuuuaaggcacugcauu

SEQ ID NO: 210918 - RNA, 32 nt, Human
gugcauuucuucaugcguccccugcacacagg

SEQ ID NO: 210919 - RNA, 32 nt, Human
gugcauuucuugcucaucagaaccucagcuaa

SEQ ID NO: 210920 - RNA, 32 nt, Human
gugcauuuguaaucccagcuacacaggaggcu

SEQ ID NO: 210921 - RNA, 32 nt, Human
gugcauuuguguugagggaagauaaauccuuu

SEQ ID NO: 210922 - RNA, 32 nt, Human
gugcauuuucucuccuuucccuucccaaccug

SEQ ID NO: 210923 - RNA, 32 nt, Human
gugcauuuuucuaguccuaagcuuuucuuugu

SEQ ID NO: 210924 - RNA, 32 nt, Human
gugcauuuuugucuuaguucagacucauauau

SEQ ID NO: 210925 - RNA, 32 nt, Human
gugccaaaccuacuaggccauuagcccuucac

SEQ ID NO: 210926 - RNA, 32 nt, Human
gugccaaagcuuccagaagccaaaaagcuucu

SEQ ID NO: 210927 - RNA, 32 nt, Human
gugccaaauuccaggaggacaagagccuuagc

SEQ ID NO: 210928 - RNA, 32 nt, Human
gugccaacaacguggaacugaccuaaggggcc

SEQ ID NO: 210929 - RNA, 32 nt, Human
gugccaacaucaccagccugggcuaagcuccu

SEQ ID NO: 210930 - RNA, 32 nt, Human
gugccaacccauacuugcacacacaagugagu

SEQ ID NO: 210931 - RNA, 32 nt, Human
gugccaaccugaugaccacagcagaaaccccc

SEQ ID NO: 210932 - RNA, 32 nt, Human
gugccaacuguggcugguccucauucaaaggg

SEQ ID NO: 210933 - RNA, 32 nt, Human
gugccaacuuccuguggguccugggccaggcc

SEQ ID NO: 210934 - RNA, 32 nt, Human
gugccaagagccaccaggaggcccagccaaua

SEQ ID NO: 210935 - RNA, 32 nt, Human
gugccaagaugugccauuuaggucucugcaga

SEQ ID NO: 210936 - RNA, 32 nt, Human
gugccaagcacagugccugcauguauuuaucc

SEQ ID NO: 210937 - RNA, 32 nt, Human
gugccaagcucacuccugcuucucucugcacg

SEQ ID NO: 210938 - RNA, 32 nt, Human
gugccaaggaguuuucugaguuuuagggugug

SEQ ID NO: 210939 - RNA, 32 nt, Human
gugccaaggcagcacaguguugcaugggggcc

SEQ ID NO: 210940 - RNA, 32 nt, Human
gugccaaggccccaccauggaggcugaauucu

SEQ ID NO: 210941 - RNA, 32 nt, Human
gugccaaggcuggccccacucuuguagcaugg

SEQ ID NO: 210942 - RNA, 32 nt, Human
gugccaaggucuucagucugaguucacuccuu

SEQ ID NO: 210943 - RNA, 32 nt, Human
gugccaaguuguuuguaaauauaauguaaucu

SEQ ID NO: 210944 - RNA, 32 nt, Human
gugccaaucccaugccaugcaguauuaugucc

SEQ ID NO: 210945 - RNA, 32 nt, Human
gugccaaucuucuucuggcaaggaaagagauu

SEQ ID NO: 210946 - RNA, 32 nt, Human
gugccaaugcacacaaagcacucaauaaauau

SEQ ID NO: 210947 - RNA, 32 nt, Human
gugccaaugcauuccagccuggaugauggagc

SEQ ID NO: 210948 - RNA, 32 nt, Human
gugccaauggugaaaccaggaggcagagaguu

SEQ ID NO: 210949 - RNA, 32 nt, Human
gugccaauguacuccagccuaggugacagagu

SEQ ID NO: 210950 - RNA, 32 nt, Human
gugccaauuuuuacuuucuucagccaauuugu

SEQ ID NO: 210951 - RNA, 32 nt, Human
gugccacacacuccagccuggguggcaaagug

SEQ ID NO: 210952 - RNA, 20 nt, Human
gugccacacccaggcagcug

SEQ ID NO: 210953 - RNA, 32 nt, Human
gugccacacgcaugggcauugcagccuugcgc

SEQ ID NO: 210954 - RNA, 32 nt, Human
gugccacagagcaggcccugccucacugucug

SEQ ID NO: 210955 - RNA, 32 nt, Human
gugccacagaucuuuuguucucuguaaugagg

SEQ ID NO: 210956 - RNA, 32 nt, Human
gugccacagcacacaaacuuguccuacagugc

SEQ ID NO: 210957 - RNA, 32 nt, Human
gugccacagccccuccaagacaccguagagaa

SEQ ID NO: 210958 - RNA, 32 nt, Human
gugccacagcucuccagccugggcgacagagu

SEQ ID NO: 210959 - RNA, 32 nt, Human
gugccacaggguggggcaaggagauccucucu

SEQ ID NO: 210960 - RNA, 32 nt, Human
gugccacagucaccaaaugacaaggauuugcc

SEQ ID NO: 210961 - RNA, 32 nt, Human
gugccacaucuucccuccacuccccugcuuaa

SEQ ID NO: 210962 - RNA, 32 nt, Human
gugccacaucuucucccccuuuaucccuacaa

SEQ ID NO: 210963 - RNA, 23 nt, Human
gugccacauggauaaugucaacu

SEQ ID NO: 210964 - RNA, 32 nt, Human
gugccacauggcuggacuccagccaggaggac

SEQ ID NO: 210965 - RNA, 32 nt, Human
gugccaccaagaaaccuaaagugaguaaaagg

SEQ ID NO: 210966 - RNA, 32 nt, Human
gugccaccaagcucacaccuguccuucucagg

SEQ ID NO: 210967 - RNA, 27 nt, Human
gugccaccacaccuggguaauuuuuug

SEQ ID NO: 210968 - RNA, 32 nt, Human
gugccaccacacuccagccugggcgacagaau

SEQ ID NO: 210969 - RNA, 32 nt, Human
gugccaccaccaaggucucagccugggcccag

SEQ ID NO: 210970 - RNA, 32 nt, Human
gugccaccacgccugggcaacauggugaaacc

SEQ ID NO: 210971 - RNA, 32 nt, Human
gugccaccacuugccauuccuagcgcgagacc

SEQ ID NO: 210972 - RNA, 22 nt, Human
gugccaccagggcugucggcca

SEQ ID NO: 210973 - RNA, 32 nt, Human
gugccacccacugcacuggggccagcugggaa

SEQ ID NO: 210974 - RNA, 24 nt, Human
gugccacccauuuagguaucacua

SEQ ID NO: 210975 - RNA, 32 nt, Human
gugccacccccuggcccggccgcggcgcgacg

SEQ ID NO: 210976 - RNA, 21 nt, Human
gugccacccuagcagagggcc

SEQ ID NO: 210977 - RNA, 32 nt, Human
gugccacccugggcucugugggcugcacuugu

SEQ ID NO: 210978 - RNA, 32 nt, Human
gugccaccgcacuccagcaugggugacagagu

SEQ ID NO: 210979 - RNA, 21 nt, Human
gugccaccggaagugcaagga

SEQ ID NO: 210980 - RNA, 22 nt, Human
gugccaccgucaauauuuauca

SEQ ID NO: 210981 - RNA, 18 nt, Human
gugccaccgugggagugu

SEQ ID NO: 210982 - RNA, 32 nt, Human
gugccaccuacacuccagccugggugacagag

SEQ ID NO: 210983 - RNA, 32 nt, Human
gugccaccuccucucuccucugugcucaguga

SEQ ID NO: 210984 - RNA, 22 nt, Human
gugccaccugcugcuaucacca

SEQ ID NO: 210985 - RNA, 32 nt, Human
gugccacgauugcaggagucccugccaucaug

SEQ ID NO: 210986 - RNA, 16 nt, Human
gugccacgccaucuca

SEQ ID NO: 210987 - RNA, 32 nt, Human
gugccacggcacuccagccugggcagcagagu

SEQ ID NO: 210988 - RNA, 32 nt, Human
gugccacguguaugugcugugguguguccccc

SEQ ID NO: 210989 - RNA, 32 nt, Human
gugccacuacacuccagccuggccacagagcg

SEQ ID NO: 210990 - RNA, 32 nt, Human
gugccacuacacuccagccuggccgacagagc

SEQ ID NO: 210991 - RNA, 32 nt, Human
gugccacuacacuccagccugggagacagagc

SEQ ID NO: 210992 - RNA, 32 nt, Human
gugccacuacacuccagccugggcaaaagagu

SEQ ID NO: 210993 - RNA, 32 nt, Human
gugccacuacacuccagccugggcaacacagc

SEQ ID NO: 210994 - RNA, 32 nt, Human
gugccacuacacuccagccugggcaacagagu

SEQ ID NO: 210995 - RNA, 32 nt, Human
gugccacuacacuccagccugggggacagaga

SEQ ID NO: 210996 - RNA, 32 nt, Human
gugccacuacacuccagccuggguaaaagagu

SEQ ID NO: 210997 - RNA, 32 nt, Human
gugccacuacacuccagccugggugacaaagc

SEQ ID NO: 210998 - RNA, 32 nt, Human
gugccacuacacuccagccugggugacagagu

SEQ ID NO: 210999 - RNA, 32 nt, Human
gugccacuaguacuccagccugggugacagag

SEQ ID NO: 211000 - RNA, 32 nt, Human
gugccacuccacuccagccugggcaacagugu

SEQ ID NO: 211001 - RNA, 32 nt, Human
gugccacuccccuccagccugggcgacagagu

SEQ ID NO: 211002 - RNA, 32 nt, Human
gugccacucuacuccagccugggcaacacagc

SEQ ID NO: 211003 - RNA, 32 nt, Human
gugccacugaccuccagccugggggacagagc

SEQ ID NO: 211004 - RNA, 32 nt, Human
gugccacugacuaggaggcuucccugcugcgg

SEQ ID NO: 211005 - RNA, 32 nt, Human
gugccacugcaauccagccugggcaacagagc

SEQ ID NO: 211006 - RNA, 32 nt, Human
gugccacugcacacuccaaucugggugaaaga

SEQ ID NO: 211007 - RNA, 32 nt, Human
gugccacugcaccacuccagccugggcaacaa

SEQ ID NO: 211008 - RNA, 32 nt, Human
gugccacugcaccucuagucugggugacagag

SEQ ID NO: 211009 - RNA, 32 nt, Human
gugccacugcacgcacuccagccugggcgaca

SEQ ID NO: 211010 - RNA, 32 nt, Human
gugccacugcacuacaaccugggugauagagc

SEQ ID NO: 211011 - RNA, 32 nt, Human
gugccacugcacuacagcccgggcgacagagu

SEQ ID NO: 211012 - RNA, 32 nt, Human
gugccacugcacucaagccugggugacagagc

SEQ ID NO: 211013 - RNA, 32 nt, Human
gugccacugcacucaagccugggugacgagug

SEQ ID NO: 211014 - RNA, 32 nt, Human
gugccacugcacucaagccuggugacagagcg

SEQ ID NO: 211015 - RNA, 32 nt, Human
gugccacugcacucauccuggaagacagagug

SEQ ID NO: 211016 - RNA, 32 nt, Human
gugccacugcacuccaaccugagugacagcaa

SEQ ID NO: 211017 - RNA, 32 nt, Human
gugccacugcacuccaaccugggggacagagg

SEQ ID NO: 211018 - RNA, 32 nt, Human
gugccacugcacuccaaccugggugacagagu

SEQ ID NO: 211019 - RNA, 32 nt, Human
gugccacugcacuccacccugggcaacagagc

SEQ ID NO: 211020 - RNA, 32 nt, Human
gugccacugcacuccagacugggggagagagc

SEQ ID NO: 211021 - RNA, 32 nt, Human
gugccacugcacuccagacugggugacacagc

SEQ ID NO: 211022 - RNA, 32 nt, Human
gugccacugcacuccagacuuggugacagagc

SEQ ID NO: 211023 - RNA, 32 nt, Human
gugccacugcacuccagagccugggcgacaga

SEQ ID NO: 211024 - RNA, 32 nt, Human
gugccacugcacuccagccagagugacagagc

SEQ ID NO: 211025 - RNA, 32 nt, Human
gugccacugcacuccagcccaggcaacagagu

SEQ ID NO: 211026 - RNA, 32 nt, Human
gugccacugcacuccagccggggugacagaag

SEQ ID NO: 211027 - RNA, 32 nt, Human
gugccacugcacuccagccuaggcaacagagu

SEQ ID NO: 211028 - RNA, 32 nt, Human
gugccacugcacuccagccuaggcgacagagu

SEQ ID NO: 211029 - RNA, 32 nt, Human
gugccacugcacuccagccuaggugacagagc

SEQ ID NO: 211030 - RNA, 32 nt, Human
gugccacugcacuccagccugaagacagagca

SEQ ID NO: 211031 - RNA, 32 nt, Human
gugccacugcacuccagccugagcaacaaaag

SEQ ID NO: 211032 - RNA, 32 nt, Human
gugccacugcacuccagccugagcaacagagc

SEQ ID NO: 211033 - RNA, 32 nt, Human
gugccacugcacuccagccugcgggacagagu

SEQ ID NO: 211034 - RNA, 32 nt, Human
gugccacugcacuccagccuggacaacggagu

SEQ ID NO: 211035 - RNA, 32 nt, Human
gugccacugcacuccagccuggacgacagagc

SEQ ID NO: 211036 - RNA, 32 nt, Human
gugccacugcacuccagccuggaggacagagc

SEQ ID NO: 211037 - RNA, 32 nt, Human
gugccacugcacuccagccuggauuacagagu

SEQ ID NO: 211038 - RNA, 32 nt, Human
gugccacugcacuccagccuggcaacagagca

SEQ ID NO: 211039 - RNA, 32 nt, Human
gugccacugcacuccagccuggcaacagagug

SEQ ID NO: 211040 - RNA, 32 nt, Human
gugccacugcacuccagccuggcgacacagug

SEQ ID NO: 211041 - RNA, 32 nt, Human
gugccacugcacuccagccuggcgacagagca

SEQ ID NO: 211042 - RNA, 32 nt, Human
gugccacugcacuccagccugggagacagagc

SEQ ID NO: 211043 - RNA, 32 nt, Human
gugccacugcacuccagccugggagacagagu

SEQ ID NO: 211044 - RNA, 32 nt, Human
gugccacugcacuccagccugggcaacaagag

SEQ ID NO: 211045 - RNA, 32 nt, Human
gugccacugcacuccagccugggcaacaagcg

SEQ ID NO: 211046 - RNA, 32 nt, Human
gugccacugcacuccagccugggcaacaaggg

SEQ ID NO: 211047 - RNA, 32 nt, Human
gugccacugcacuccagccugggcaacacagc

SEQ ID NO: 211048 - RNA, 32 nt, Human
gugccacugcacuccagccugggcaacacagu

SEQ ID NO: 211049 - RNA, 32 nt, Human
gugccacugcacuccagccugggcaacagagc

SEQ ID NO: 211050 - RNA, 32 nt, Human
gugccacugcacuccagccugggcaacagagu

SEQ ID NO: 211051 - RNA, 32 nt, Human
gugccacugcacuccagccugggcaacugagc

SEQ ID NO: 211052 - RNA, 32 nt, Human
gugccacugcacuccagccugggcaauagagc

SEQ ID NO: 211053 - RNA, 32 nt, Human
gugccacugcacuccagccugggcaauagagu

SEQ ID NO: 211054 - RNA, 32 nt, Human
gugccacugcacuccagccugggcaccaaugu

SEQ ID NO: 211055 - RNA, 32 nt, Human
gugccacugcacuccagccugggcaccacagc

SEQ ID NO: 211056 - RNA, 32 nt, Human
gugccacugcacuccagccugggcaccagagc

SEQ ID NO: 211057 - RNA, 32 nt, Human
gugccacugcacuccagccugggcagcagagc

SEQ ID NO: 211058 - RNA, 32 nt, Human
gugccacugcacuccagccugggccacagaac

SEQ ID NO: 211059 - RNA, 32 nt, Human
gugccacugcacuccagccugggccacagagc

SEQ ID NO: 211060 - RNA, 32 nt, Human
gugccacugcacuccagccugggccacagagu

SEQ ID NO: 211061 - RNA, 32 nt, Human
gugccacugcacuccagccugggcgaaagagc

SEQ ID NO: 211062 - RNA, 32 nt, Human
gugccacugcacuccagccugggcgacaagag

SEQ ID NO: 211063 - RNA, 32 nt, Human
gugccacugcacuccagccugggcgacagagc

SEQ ID NO: 211064 - RNA, 32 nt, Human
gugccacugcacuccagccugggcgacagagu

SEQ ID NO: 211065 - RNA, 32 nt, Human
gugccacugcacuccagccugggcgacaguga

SEQ ID NO: 211066 - RNA, 32 nt, Human
gugccacugcacuccagccugggcgacgagug

SEQ ID NO: 211067 - RNA, 32 nt, Human
gugccacugcacuccagccugggcgauagagc

SEQ ID NO: 211068 - RNA, 32 nt, Human
gugccacugcacuccagccugggcuacaagau

SEQ ID NO: 211069 - RNA, 32 nt, Human
gugccacugcacuccagccuggggaacagagc

SEQ ID NO: 211070 - RNA, 32 nt, Human
gugccacugcacuccagccugggggacagagc

SEQ ID NO: 211071 - RNA, 32 nt, Human
gugccacugcacuccagccugggggacagagu

SEQ ID NO: 211072 - RNA, 32 nt, Human
gugccacugcacuccagccuggguaacagagc

SEQ ID NO: 211073 - RNA, 32 nt, Human
gugccacugcacuccagccuggguaacaguga

SEQ ID NO: 211074 - RNA, 32 nt, Human
gugccacugcacuccagccuggguaagagagc

SEQ ID NO: 211075 - RNA, 32 nt, Human
gugccacugcacuccagccugggugaaagagc

SEQ ID NO: 211076 - RNA, 32 nt, Human
gugccacugcacuccagccugggugacaaaag

SEQ ID NO: 211077 - RNA, 32 nt, Human
gugccacugcacuccagccugggugacacagc

SEQ ID NO: 211078 - RNA, 32 nt, Human
gugccacugcacuccagccugggugacagaga

SEQ ID NO: 211079 - RNA, 32 nt, Human
gugccacugcacuccagccugggugacagagc

SEQ ID NO: 211080 - RNA, 32 nt, Human
gugccacugcacuccagccugggugacagagu

SEQ ID NO: 211081 - RNA, 32 nt, Human
gugccacugcacuccagccugggugacagcga

SEQ ID NO: 211082 - RNA, 32 nt, Human
gugccacugcacuccagccugggugacagggc

SEQ ID NO: 211083 - RNA, 32 nt, Human
gugccacugcacuccagccugggugacugagu

SEQ ID NO: 211084 - RNA, 32 nt, Human
gugccacugcacuccagccugggugauagagc

SEQ ID NO: 211085 - RNA, 32 nt, Human
gugccacugcacuccagccuggguggacagag

SEQ ID NO: 211086 - RNA, 32 nt, Human
gugccacugcacuccagccuggguggcagagc

SEQ ID NO: 211087 - RNA, 32 nt, Human
gugccacugcacuccagccuggguggcagagu

SEQ ID NO: 211088 - RNA, 32 nt, Human
gugccacugcacuccagccuggguuacagagu

SEQ ID NO: 211089 - RNA, 32 nt, Human
gugccacugcacuccagccuggucaacaaagc

SEQ ID NO: 211090 - RNA, 32 nt, Human
gugccacugcacuccagccuggucaacagagc

SEQ ID NO: 211091 - RNA, 32 nt, Human
gugccacugcacuccagccuggugacagagug

SEQ ID NO: 211092 - RNA, 32 nt, Human
gugccacugcacuccagccuggugagagcaag

SEQ ID NO: 211093 - RNA, 32 nt, Human
gugccacugcacuccagccugguugacagagc

SEQ ID NO: 211094 - RNA, 32 nt, Human
gugccacugcacuccagccuugagacagagcg

SEQ ID NO: 211095 - RNA, 32 nt, Human
gugccacugcacuccagccuuggcaacaagag

SEQ ID NO: 211096 - RNA, 32 nt, Human
gugccacugcacuccagccuuggcaacacagu

SEQ ID NO: 211097 - RNA, 32 nt, Human
gugccacugcacuccagccuuggugacagagc

SEQ ID NO: 211098 - RNA, 32 nt, Human
gugccacugcacuccagcgugggcaacggaga

SEQ ID NO: 211099 - RNA, 32 nt, Human
gugccacugcacuccagcuggguggcagagac

SEQ ID NO: 211100 - RNA, 32 nt, Human
gugccacugcacuccagcuuaggugacagagu

SEQ ID NO: 211101 - RNA, 32 nt, Human
gugccacugcacuccagcuugggcaacaaagu

SEQ ID NO: 211102 - RNA, 32 nt, Human
gugccacugcacuccagcuugggugacagagu

SEQ ID NO: 211103 - RNA, 32 nt, Human
gugccacugcacuccagcuuggugacagagug

SEQ ID NO: 211104 - RNA, 32 nt, Human
gugccacugcacuccaggcugggcgacagagu

SEQ ID NO: 211105 - RNA, 32 nt, Human
gugccacugcacuccaggcugggugacagagc

SEQ ID NO: 211106 - RNA, 32 nt, Human
gugccacugcacuccaguauggaugacauagu

SEQ ID NO: 211107 - RNA, 32 nt, Human
gugccacugcacuccagucuggacaacagagc

SEQ ID NO: 211108 - RNA, 32 nt, Human
gugccacugcacuccagucugggcaacagagc

SEQ ID NO: 211109 - RNA, 32 nt, Human
gugccacugcacuccagucugggugacagagu

SEQ ID NO: 211110 - RNA, 32 nt, Human
gugccacugcacuccauccuggacgacagagu

SEQ ID NO: 211111 - RNA, 32 nt, Human
gugccacugcacucccagccugggcaacggag

SEQ ID NO: 211112 - RNA, 32 nt, Human
gugccacugcacucccgccugggcgacagagc

SEQ ID NO: 211113 - RNA, 32 nt, Human
gugccacugcacuccggccugggugauggagc

SEQ ID NO: 211114 - RNA, 32 nt, Human
gugccacugcacucgagccugggugacagagu

SEQ ID NO: 211115 - RNA, 32 nt, Human
gugccacugcacucuaaccugggcgacagagu

SEQ ID NO: 211116 - RNA, 32 nt, Human
gugccacugcacucuagccggggcgacagagc

SEQ ID NO: 211117 - RNA, 32 nt, Human
gugccacugcacucuagccuagguggcugagc

SEQ ID NO: 211118 - RNA, 32 nt, Human
gugccacugcacucuagccucggugacagagu

SEQ ID NO: 211119 - RNA, 32 nt, Human
gugccacugcacucuagccuggacagcagagc

SEQ ID NO: 211120 - RNA, 32 nt, Human
gugccacugcacucuagccugggcaauaagca

SEQ ID NO: 211121 - RNA, 32 nt, Human
gugccacugcacucuagccugggcgacagagc

SEQ ID NO: 211122 - RNA, 32 nt, Human
gugccacugcacucuagccugggugacaaagc

SEQ ID NO: 211123 - RNA, 32 nt, Human
gugccacugcacucuagccugggugacagaga

SEQ ID NO: 211124 - RNA, 32 nt, Human
gugccacugcacucuagccugggugacagagc

SEQ ID NO: 211125 - RNA, 32 nt, Human
gugccacugcacucuauccuggguaacagcga

SEQ ID NO: 211126 - RNA, 32 nt, Human
gugccacugcacugcagccugggcgacaauuu

SEQ ID NO: 211127 - RNA, 32 nt, Human
gugccacugcacugcagccugggcuacagaga

SEQ ID NO: 211128 - RNA, 32 nt, Human
gugccacugcacugcaggcugggugacagagu

SEQ ID NO: 211129 - RNA, 32 nt, Human
gugccacugcacuucagccugggcaacagagu

SEQ ID NO: 211130 - RNA, 32 nt, Human
gugccacugcacuucagccugggcgacagagu

SEQ ID NO: 211131 - RNA, 32 nt, Human
gugccacugcacuucagccugggugacagaaa

SEQ ID NO: 211132 - RNA, 32 nt, Human
gugccacugcacuucagccugggugacagagu

SEQ ID NO: 211133 - RNA, 32 nt, Human
gugccacugcacuucagcuugggcaacagagu

SEQ ID NO: 211134 - RNA, 32 nt, Human
gugccacugcacuucagcuugggugacagagc

SEQ ID NO: 211135 - RNA, 32 nt, Human
gugccacugcacuuuucagccugggugccaca

SEQ ID NO: 211136 - RNA, 32 nt, Human
gugccacugcaguccagccuaggcaacagagu

SEQ ID NO: 211137 - RNA, 32 nt, Human
gugccacugcaguccagccugggugacagagc

SEQ ID NO: 211138 - RNA, 32 nt, Human
gugccacugcauaccagccuaggugacagaau

SEQ ID NO: 211139 - RNA, 21 nt, Human
gugccacugcaugcucaacca

SEQ ID NO: 211140 - RNA, 32 nt, Human
gugccacugcauuccagccugagcgacagagu

SEQ ID NO: 211141 - RNA, 32 nt, Human
gugccacugcauuccagccugggcaacagagc

SEQ ID NO: 211142 - RNA, 32 nt, Human
gugccacugcauuccagccugggcgacagagc

SEQ ID NO: 211143 - RNA, 32 nt, Human
gugccacugcauuccagccugggugacagaau

SEQ ID NO: 211144 - RNA, 32 nt, Human
gugccacugcauuccagccugguugacagagu

SEQ ID NO: 211145 - RNA, 32 nt, Human
gugccacugcccuccagccugggugacagagu

SEQ ID NO: 211146 - RNA, 32 nt, Human
gugccacugcgcccaaacauaacugaagguuu

SEQ ID NO: 211147 - RNA, 32 nt, Human
gugccacugcgcuccagccugggcgacagagu

SEQ ID NO: 211148 - RNA, 32 nt, Human
gugccacugcgcuccagccugggggaggggga

SEQ ID NO: 211149 - RNA, 32 nt, Human
gugccacugcgcuccagccugggugacagagu

SEQ ID NO: 211150 - RNA, 32 nt, Human
gugccacugcgcuccagccuggguggcagaga

SEQ ID NO: 211151 - RNA, 32 nt, Human
gugccacugcucuccagccugggaggcacagc

SEQ ID NO: 211152 - RNA, 32 nt, Human
gugccacugcucuccagccugggugacagagg

SEQ ID NO: 211153 - RNA, 32 nt, Human
gugccacuggacuccagccugggagacagaau

SEQ ID NO: 211154 - RNA, 32 nt, Human
gugccacuggacucccagccugggugacagag

SEQ ID NO: 211155 - RNA, 23 nt, Human
gugccacuggagaauaacaauca

SEQ ID NO: 211156 - RNA, 21 nt, Human
gugccacuguacauaucauca

SEQ ID NO: 211157 - RNA, 32 nt, Human
gugccacuguacaucaccagccugggcgacag

SEQ ID NO: 211158 - RNA, 32 nt, Human
gugccacuguacuccagccaggccacagagug

SEQ ID NO: 211159 - RNA, 32 nt, Human
gugccacuguacuccagccuggaagacaagag

SEQ ID NO: 211160 - RNA, 32 nt, Human
gugccacuguacuccagccuggcccacagagu

SEQ ID NO: 211161 - RNA, 32 nt, Human
gugccacuguacuccagccugggagauagagc

SEQ ID NO: 211162 - RNA, 32 nt, Human
gugccacuguacuccagccugggcagcagagc

SEQ ID NO: 211163 - RNA, 32 nt, Human
gugccacuguacuccagccugggcgacagagg

SEQ ID NO: 211164 - RNA, 32 nt, Human
gugccacuguacuccagccugggugacagagc

SEQ ID NO: 211165 - RNA, 32 nt, Human
gugccacuguacuccagccugggugacagagu

SEQ ID NO: 211166 - RNA, 32 nt, Human
gugccacuguacuccagccugggugauaggau

SEQ ID NO: 211167 - RNA, 32 nt, Human
gugccacuguacuccagccuggugacagagcg

SEQ ID NO: 211168 - RNA, 32 nt, Human
gugccacugucacccagggcucccgggccuca

SEQ ID NO: 211169 - RNA, 32 nt, Human
gugccacugucaggacagcuuaugaaaaacaa

SEQ ID NO: 211170 - RNA, 19 nt, Human
gugccacuguccccccagc

SEQ ID NO: 211171 - RNA, 32 nt, Human
gugccacugugcuccagccuggaugacggagc

SEQ ID NO: 211172 - RNA, 32 nt, Human
gugccacuguuuuccagccugggcaauacagu

SEQ ID NO: 211173 - RNA, 32 nt, Human
gugccacuucacuccagccugggcaaaagagc

SEQ ID NO: 211174 - RNA, 32 nt, Human
gugccacuucacuccagccugggugacaaagu

SEQ ID NO: 211175 - RNA, 32 nt, Human
gugccacuucauuccagccugggcgacagagc

SEQ ID NO: 211176 - RNA, 32 nt, Human
gugccacuucccuccagccugggcaauagagc

SEQ ID NO: 211177 - RNA, 32 nt, Human
gugccacuucuuucuucuccuuucuucugggc

SEQ ID NO: 211178 - RNA, 21 nt, Human
gugccacuugcccccagggca

SEQ ID NO: 211179 - RNA, 24 nt, Human
gugccacuugcccccagggcacuc

SEQ ID NO: 211180 - RNA, 24 nt, Human
gugccacuuguccccagggcacuc

SEQ ID NO: 211181 - RNA, 32 nt, Human
gugccagaacuguccagagcugugaguuuugu

SEQ ID NO: 211182 - RNA, 32 nt, Human
gugccagaagaaaacacacacagggaaaccgc

SEQ ID NO: 211183 - RNA, 32 nt, Human
gugccagaaggaagguuggcgggggcacgugu

SEQ ID NO: 211184 - RNA, 32 nt, Human
gugccagaaugauucucaucugugccauauuu

SEQ ID NO: 211185 - RNA, 32 nt, Human
gugccagagaagaguccuuucuucucuacauc

SEQ ID NO: 211186 - RNA, 22 nt, Human
gugccagagaauguacagauca

SEQ ID NO: 211187 - RNA, 32 nt, Human
gugccagagagggacgaaccaggguggaagcg

SEQ ID NO: 211188 - RNA, 32 nt, Human
gugccagagcccagccggcgcggagcgggagc

SEQ ID NO: 211189 - RNA, 32 nt, Human
gugccagagcuccaugcauggaaaaguggccu

SEQ ID NO: 211190 - RNA, 32 nt, Human
gugccagaguuucaaugaaaaucauuaaagua

SEQ ID NO: 211191 - RNA, 32 nt, Human
gugccagauauaacugucuuguuucagugaga

SEQ ID NO: 211192 - RNA, 21 nt, Human
gugccagaugugccccagccc

SEQ ID NO: 211193 - RNA, 32 nt, Human
gugccagcagggacucaguaccugagccucaa

SEQ ID NO: 211194 - RNA, 32 nt, Human
gugccagccaccgugugaacucuuuggagguu

SEQ ID NO: 211195 - RNA, 32 nt, Human
gugccagccagccucugccagaccucucuuuc

SEQ ID NO: 211196 - RNA, 32 nt, Human
gugccagccagcugcuguucuaggcucuuaga

SEQ ID NO: 211197 - RNA, 32 nt, Human
gugccagccccaggaagcuccagggcugagug

SEQ ID NO: 211198 - RNA, 26 nt, Human
gugccagcccucccagccccaggccc

SEQ ID NO: 211199 - RNA, 32 nt, Human
gugccagcccugcugcccuggcuuugagcugg

SEQ ID NO: 211200 - RNA, 32 nt, Human
gugccagccugagacgguuccugccugucuug

SEQ ID NO: 211201 - RNA, 32 nt, Human
gugccagccugagacucaacuaucaggaaaaa

SEQ ID NO: 211202 - RNA, 32 nt, Human
gugccagccugggaaguaguuucguuuccuuc

SEQ ID NO: 211203 - RNA, 22 nt, Human
gugccagcgaggcuguccucug

SEQ ID NO: 211204 - RNA, 32 nt, Human
gugccagcuagaaaauacugcuuucugccauc

SEQ ID NO: 211205 - RNA, 32 nt, Human
gugccagcugaucguggcuuuccuagaaguga

SEQ ID NO: 211206 - RNA, 32 nt, Human
gugccagcuguucaccaccgagcuaggccggg

SEQ ID NO: 211207 - RNA, 32 nt, Human
gugccaggaccacccuugccugcagccuuugc

SEQ ID NO: 211208 - RNA, 32 nt, Human
gugccaggagcugugggagcugcuagguggug

SEQ ID NO: 211209 - RNA, 32 nt, Human
gugccaggaggaagaaggaaggagucccuuag

SEQ ID NO: 211210 - RNA, 32 nt, Human
gugccaggagguugccuguccuuggggaagag

SEQ ID NO: 211211 - RNA, 32 nt, Human
gugccaggaguacaugugagacuaugggagga

SEQ ID NO: 211212 - RNA, 32 nt, Human
gugccaggaucugggagagggaagggaggugu

SEQ ID NO: 211213 - RNA, 32 nt, Human
gugccaggcaaggacuguggauuucaagaacu

SEQ ID NO: 211214 - RNA, 32 nt, Human
gugccaggcacuguacagggugauggagauca

SEQ ID NO: 211215 - RNA, 32 nt, Human
gugccaggcccagugcagcaguguccugcuca

SEQ ID NO: 211216 - RNA, 32 nt, Human
gugccaggcuagacuaggagguuccggugucu

SEQ ID NO: 211217 - RNA, 32 nt, Human
gugccaggcucuguucuaagcacuuugugaga

SEQ ID NO: 211218 - RNA, 32 nt, Human
gugccaggcugacugugcagagggugauuagu

SEQ ID NO: 211219 - RNA, 32 nt, Human
gugccaggcugcagggcaggcaguaaaaggcc

SEQ ID NO: 211220 - RNA, 32 nt, Human
gugccagggaagggaaggaaaagcucuucccu

SEQ ID NO: 211221 - RNA, 32 nt, Human
gugccagggaccaacgggccacccucaggaaa

SEQ ID NO: 211222 - RNA, 32 nt, Human
gugccagggagaggagggcggguggggaccac

SEQ ID NO: 211223 - RNA, 32 nt, Human
gugccagguccuggugccacgcuagcugagca

SEQ ID NO: 211224 - RNA, 32 nt, Human
gugccaggugaaggaggcuccaggcagcaccc

SEQ ID NO: 211225 - RNA, 32 nt, Human
gugccaggugacaccaaggaggggccuguuua

SEQ ID NO: 211226 - RNA, 32 nt, Human
gugccaggugucuuucauggggccuuccagac

SEQ ID NO: 211227 - RNA, 32 nt, Human
gugccaggugugguggcucaggccuguaaucc

SEQ ID NO: 211228 - RNA, 32 nt, Human
gugccagguugaagagagugugccagugacag

SEQ ID NO: 211229 - RNA, 32 nt, Human
gugccaguauauggcccuggcucugcauugga

SEQ ID NO: 211230 - RNA, 32 nt, Human
gugccagucagauguucuucuccuucagcuuc

SEQ ID NO: 211231 - RNA, 32 nt, Human
gugccagucaucugaccugauucuuuaaaccc

SEQ ID NO: 211232 - RNA, 32 nt, Human
gugccaguccccucacucucugggagcuguga

SEQ ID NO: 211233 - RNA, 32 nt, Human
gugccaguccccucagccugugguggccuugc

SEQ ID NO: 211234 - RNA, 32 nt, Human
gugccagucucgggggcgagguacaggccugg

SEQ ID NO: 211235 - RNA, 32 nt, Human
gugccagucuguguccguugugaucacaggcc

SEQ ID NO: 211236 - RNA, 24 nt, Human
gugccagugaaccgcauccugccc

SEQ ID NO: 211237 - RNA, 32 nt, Human
gugccagugacuacuucucccuggugagugua

SEQ ID NO: 211238 - RNA, 32 nt, Human
gugccagugcacuccagccugggugacagcga

SEQ ID NO: 211239 - RNA, 32 nt, Human
gugccagugcacuccaggcuggacgacagagc

SEQ ID NO: 211240 - RNA, 32 nt, Human
gugccagugcacuccggccugggugacagagu

SEQ ID NO: 211241 - RNA, 32 nt, Human
gugccagugcaggccaggcagggggcugaggc

SEQ ID NO: 211242 - RNA, 32 nt, Human
gugccaguugccagggcaagucacugcgcugg

SEQ ID NO: 211243 - RNA, 32 nt, Human
gugccaguuuaaaaagaugaaaaagaauaaaa

SEQ ID NO: 211244 - RNA, 32 nt, Human
gugccaguuuccugagcuguguguacuacuug

SEQ ID NO: 211245 - RNA, 32 nt, Human
gugccauacauacauuucauuuaauuauccaa

SEQ ID NO: 211246 - RNA, 32 nt, Human
gugccauccccacccauagggcuggcucacau

SEQ ID NO: 211247 - RNA, 32 nt, Human
gugccaucccucgaauccaccagcacgagcgu

SEQ ID NO: 211248 - RNA, 32 nt, Human
gugccauccgggauuguuuccccaaguuguua

SEQ ID NO: 211249 - RNA, 32 nt, Human
gugccauccuacagguggcuggagcagcugcu

SEQ ID NO: 211250 - RNA, 32 nt, Human
gugccauccugaagccuuccuccuggauguca

SEQ ID NO: 211251 - RNA, 32 nt, Human
gugccauccuuggcaaugugacccuggagcag

SEQ ID NO: 211252 - RNA, 32 nt, Human
gugccaucgcacuccagccuggacaacagagc

SEQ ID NO: 211253 - RNA, 19 nt, Human
gugccaucucacaaaagaa

SEQ ID NO: 211254 - RNA, 32 nt, Human
gugccaucucccaccauacucuggcauuuuua

SEQ ID NO: 211255 - RNA, 23 nt, Human
gugccaucucugcaaaucaauca

SEQ ID NO: 211256 - RNA, 32 nt, Human
gugccaucuguccuccugucugugccaggagg

SEQ ID NO: 211257 - RNA, 32 nt, Human
gugccaucuuccuccagcaccaggaagaaggg

SEQ ID NO: 211258 - RNA, 24 nt, Human
gugccaucuuggccaccucggcca

SEQ ID NO: 211259 - RNA, 32 nt, Human
gugccaugaaaccagguccuggaacagaaucc

SEQ ID NO: 211260 - RNA, 21 nt, Human
gugccaugaagggacccuuug

SEQ ID NO: 211261 - RNA, 32 nt, Human
gugccaugagccuggacacccaggagacgcag

SEQ ID NO: 211262 - RNA, 32 nt, Human
gugccauggcaaagaaacagcguccagagcag

SEQ ID NO: 211263 - RNA, 24 nt, Human
gugccauggcucacaccuguaauc

SEQ ID NO: 211264 - RNA, 24 nt, Human
gugccauggcucacaucuguaauc

SEQ ID NO: 211265 - RNA, 32 nt, Human
gugccaugggcugagugccacgacaggcccgu

SEQ ID NO: 211266 - RNA, 32 nt, Human
gugccaugggguccccacugugggcagccccg

SEQ ID NO: 211267 - RNA, 32 nt, Human
gugccaugggguccccacugugggcagcccug

SEQ ID NO: 211268 - RNA, 32 nt, Human
gugccaugguggguguccuggggccugugcgg

SEQ ID NO: 211269 - RNA, 32 nt, Human
gugccauguaaaaguaagucuggacuuaagag

SEQ ID NO: 211270 - RNA, 32 nt, Human
gugccauguccaccuguuguuccuggacucug

SEQ ID NO: 211271 - RNA, 17 nt, Human
gugccauguccaggugg

SEQ ID NO: 211272 - RNA, 32 nt, Human
gugccaugugccacagauggagaggaccagga

SEQ ID NO: 211273 - RNA, 22 nt, Human
gugccauuaagcaauuuagcua

SEQ ID NO: 211274 - RNA, 23 nt, Human
gugccauucagcucacagccgca

SEQ ID NO: 211275 - RNA, 32 nt, Human
gugccauucauuuagaauuagcagagcuaaua

SEQ ID NO: 211276 - RNA, 32 nt, Human
gugccauuccacuccagccugagcaacacagu

SEQ ID NO: 211277 - RNA, 32 nt, Human
gugccauuccacuccagccugggcaacgagag

SEQ ID NO: 211278 - RNA, 32 nt, Human
gugccauuccuucauguuuucucaguuuggag

SEQ ID NO: 211279 - RNA, 24 nt, Human
gugccauucugggcagucgcacca

SEQ ID NO: 211280 - RNA, 32 nt, Human
gugccauugcacuccaaccugggcaacaagag

SEQ ID NO: 211281 - RNA, 32 nt, Human
gugccauugcacuccaagccugggcaacagag

SEQ ID NO: 211282 - RNA, 32 nt, Human
gugccauugcacuccagcccaggcgacagaac

SEQ ID NO: 211283 - RNA, 32 nt, Human
gugccauugcacuccagcccggaugacagagc

SEQ ID NO: 211284 - RNA, 32 nt, Human
gugccauugcacuccagccuaggcaacaagag

SEQ ID NO: 211285 - RNA, 32 nt, Human
gugccauugcacuccagccuaggcaagaagag

SEQ ID NO: 211286 - RNA, 32 nt, Human
gugccauugcacuccagccuaggcaauaagag

SEQ ID NO: 211287 - RNA, 32 nt, Human
gugccauugcacuccagccugcacaacaagag

SEQ ID NO: 211288 - RNA, 32 nt, Human
gugccauugcacuccagccuggacaacaagag

SEQ ID NO: 211289 - RNA, 32 nt, Human
gugccauugcacuccagccuggaugacaagag

SEQ ID NO: 211290 - RNA, 32 nt, Human
gugccauugcacuccagccuggccacagagcg

SEQ ID NO: 211291 - RNA, 32 nt, Human
gugccauugcacuccagccuggcgacaagagc

SEQ ID NO: 211292 - RNA, 32 nt, Human
gugccauugcacuccagccuggcgacagagug

SEQ ID NO: 211293 - RNA, 32 nt, Human
gugccauugcacuccagccugggcaacaagaa

SEQ ID NO: 211294 - RNA, 32 nt, Human
gugccauugcacuccagccugggcaacaagag

SEQ ID NO: 211295 - RNA, 32 nt, Human
gugccauugcacuccagccugggcaacagagc

SEQ ID NO: 211296 - RNA, 32 nt, Human
gugccauugcacuccagccugggcaacagggc

SEQ ID NO: 211297 - RNA, 32 nt, Human
gugccauugcacuccagccugggcaacgagcg

SEQ ID NO: 211298 - RNA, 32 nt, Human
gugccauugcacuccagccugggcaauagagu

SEQ ID NO: 211299 - RNA, 32 nt, Human
gugccauugcacuccagccugggcgacaagag

SEQ ID NO: 211300 - RNA, 32 nt, Human
gugccauugcacuccagccugggcgacaagcg

SEQ ID NO: 211301 - RNA, 32 nt, Human
gugccauugcacuccagccugggcgacagagc

SEQ ID NO: 211302 - RNA, 32 nt, Human
gugccauugcacuccagccugggcgacagagg

SEQ ID NO: 211303 - RNA, 32 nt, Human
gugccauugcacuccagccugggcgacagugc

SEQ ID NO: 211304 - RNA, 32 nt, Human
gugccauugcacuccagccugggcuacaagag

SEQ ID NO: 211305 - RNA, 32 nt, Human
gugccauugcacuccagccugggugacagagc

SEQ ID NO: 211306 - RNA, 32 nt, Human
gugccauugcacuccagccugggugacaguga

SEQ ID NO: 211307 - RNA, 32 nt, Human
gugccauugcacuccagccugggugauaagag

SEQ ID NO: 211308 - RNA, 32 nt, Human
gugccauugcacuccagucggguuaacagagc

SEQ ID NO: 211309 - RNA, 32 nt, Human
gugccauugcacuccagucugggagacaagag

SEQ ID NO: 211310 - RNA, 32 nt, Human
gugccauugcacuccagucuggguaagaagag

SEQ ID NO: 211311 - RNA, 32 nt, Human
gugccauugcacuccggccugggcaacaacag

SEQ ID NO: 211312 - RNA, 32 nt, Human
gugccauugcacuccggccugggcaacagagg

SEQ ID NO: 211313 - RNA, 32 nt, Human
gugccauugcauuccagccugggagacggagc

SEQ ID NO: 211314 - RNA, 32 nt, Human
gugccauugcccuccagccugggcaagaacug

SEQ ID NO: 211315 - RNA, 32 nt, Human
gugccauugccguggugcuuggcauugagggg

SEQ ID NO: 211316 - RNA, 32 nt, Human
gugccauugcgcuccagccuaggugacagagc

SEQ ID NO: 211317 - RNA, 32 nt, Human
gugccauugcgcuccagccugggcaacaagag

SEQ ID NO: 211318 - RNA, 32 nt, Human
gugccauugcucuccagccugggcgacaagag

SEQ ID NO: 211319 - RNA, 32 nt, Human
gugccauuguacuccagccugggcgacaaaag

SEQ ID NO: 211320 - RNA, 32 nt, Human
gugccauuguacuccagcuugggcaacagagu

SEQ ID NO: 211321 - RNA, 32 nt, Human
gugccauuguauuccagccucggcaacacagc

SEQ ID NO: 211322 - RNA, 32 nt, Human
gugccauugugcuccagccugggcaacaagag

SEQ ID NO: 211323 - RNA, 32 nt, Human
gugccauugugcuccagccugggcaacagagu

SEQ ID NO: 211324 - RNA, 32 nt, Human
gugccauuucacuccagccuggacaacaagag

SEQ ID NO: 211325 - RNA, 32 nt, Human
gugccauuuugcauuuucaucuacucauuuaa

SEQ ID NO: 211326 - RNA, 22 nt, Human
gugcccaaaggaugaggaucuc

SEQ ID NO: 211327 - RNA, 28 nt, Human
gugcccaacuucuaagccucaucagcaa

SEQ ID NO: 211328 - RNA, 32 nt, Human
gugcccaaugggacaggaccuuagaagggagg

SEQ ID NO: 211329 - RNA, 32 nt, Human
gugcccacagccgucuggcucagggacuccac

SEQ ID NO: 211330 - RNA, 26 nt, Human
gugcccacaucuauuccaucugguca

SEQ ID NO: 211331 - RNA, 32 nt, Human
gugcccacauggaauguccucccgggcugacc

SEQ ID NO: 211332 - RNA, 32 nt, Human
gugcccacauguguccaucccagcggcuggug

SEQ ID NO: 211333 - RNA, 23 nt, Human
gugcccaccagucagauccugug

SEQ ID NO: 211334 - RNA, 23 nt, Human
gugcccaccaugccccuuccucu

SEQ ID NO: 211335 - RNA, 32 nt, Human
gugcccaccaugccccuuccucuuucuccucc

SEQ ID NO: 211336 - RNA, 21 nt, Human
gugcccacccccggaauucca

SEQ ID NO: 211337 - RNA, 32 nt, Human
gugcccaccccuccaccacauggggccccaaa

SEQ ID NO: 211338 - RNA, 24 nt, Human
gugcccacccgucuucaaucucug

SEQ ID NO: 211339 - RNA, 32 nt, Human
gugcccacccucucccugguguggccccguca

SEQ ID NO: 211340 - RNA, 32 nt, Human
gugcccaccugccucacuccucccuaucaugu

SEQ ID NO: 211341 - RNA, 24 nt, Human
gugcccaccuguccugcuucucug

SEQ ID NO: 211342 - RNA, 32 nt, Human
gugcccacgugcaagaggagagacaggagagg

SEQ ID NO: 211343 - RNA, 20 nt, Human
gugcccacguuucugaccug

SEQ ID NO: 211344 - RNA, 22 nt, Human
gugcccacucccaggcccucug

SEQ ID NO: 211345 - RNA, 23 nt, Human
gugcccacucccgccagccccug

SEQ ID NO: 211346 - RNA, 28 nt, Human
gugcccacucgugcugccucuucuuaac

SEQ ID NO: 211347 - RNA, 18 nt, Human
gugcccacugcccucccu

SEQ ID NO: 211348 - RNA, 24 nt, Human
gugcccacuggcugggacccuuug

SEQ ID NO: 211349 - RNA, 32 nt, Human
gugcccagaaguuugaggcugcagugagccgu

SEQ ID NO: 211350 - RNA, 32 nt, Human
gugcccagaauggaugaccaggaaccuuaaag

SEQ ID NO: 211351 - RNA, 32 nt, Human
gugcccagaauggaugaccaggaaccuucaag

SEQ ID NO: 211352 - RNA, 32 nt, Human
gugcccagagcacccugcucagugggagaggg

SEQ ID NO: 211353 - RNA, 32 nt, Human
gugcccagaucugagcgaggcuugggaagacg

SEQ ID NO: 211354 - RNA, 32 nt, Human
gugcccagcaucagcgccagcacacaguaggu

SEQ ID NO: 211355 - RNA, 32 nt, Human
gugcccagccacaugcucucucccucucuuca

SEQ ID NO: 211356 - RNA, 32 nt, Human
gugcccagcccaggcagggucagucagaacag

SEQ ID NO: 211357 - RNA, 32 nt, Human
gugcccagcccggcccuggcucagggaggacc

SEQ ID NO: 211358 - RNA, 32 nt, Human
gugcccagccuauaucuacuugagccugugug

SEQ ID NO: 211359 - RNA, 32 nt, Human
gugcccagcucuccagggagcuucuggcccaa

SEQ ID NO: 211360 - RNA, 32 nt, Human
gugcccagcuuugcuuagcuuucuuuauuucu

SEQ ID NO: 211361 - RNA, 32 nt, Human
gugcccaggaagaggaaguaguguacgauaca

SEQ ID NO: 211362 - RNA, 32 nt, Human
gugcccaggaagaggagaaccggcagcugcug

SEQ ID NO: 211363 - RNA, 32 nt, Human
gugcccaggaagggacuucauuucugccugug

SEQ ID NO: 211364 - RNA, 32 nt, Human
gugcccaggaaggggaguaacugugcaaaguu

SEQ ID NO: 211365 - RNA, 32 nt, Human
gugcccaggacugugcuggaugcuaaccagac

SEQ ID NO: 211366 - RNA, 32 nt, Human
gugcccaggagcugaaggugggggugacacug

SEQ ID NO: 211367 - RNA, 32 nt, Human
gugcccaggaguucaagaccagccugggcaac

SEQ ID NO: 211368 - RNA, 25 nt, Human
gugcccaggcccuggcccugcgcag

SEQ ID NO: 211369 - RNA, 32 nt, Human
gugcccaggccuguggguaguggggagggcug

SEQ ID NO: 211370 - RNA, 32 nt, Human
gugcccaggcuagagugcaauggcgcgaucuc

SEQ ID NO: 211371 - RNA, 22 nt, Human
gugcccaggcugcaacccucug

SEQ ID NO: 211372 - RNA, 32 nt, Human
gugcccaggcuggagugcaauagcucgaucuc

SEQ ID NO: 211373 - RNA, 32 nt, Human
gugcccaggcuggagugcaguggcgugaucuc

SEQ ID NO: 211374 - RNA, 32 nt, Human
gugcccagggguugcaggcugcagugagcugu

SEQ ID NO: 211375 - RNA, 32 nt, Human
gugcccaggucauuuuugccacugaguaaagg

SEQ ID NO: 211376 - RNA, 32 nt, Human
gugcccagguccgagucgccuuccgccugccc

SEQ ID NO: 211377 - RNA, 32 nt, Human
gugcccaggugcuggaagcucagucuucaugu

SEQ ID NO: 211378 - RNA, 32 nt, Human
gugcccagguggaggugcaguggggguaaggu

SEQ ID NO: 211379 - RNA, 19 nt, Human
gugcccagugcuucucuca

SEQ ID NO: 211380 - RNA, 32 nt, Human
gugcccaguggcugcuccuuccuucaccucug

SEQ ID NO: 211381 - RNA, 32 nt, Human
gugcccaguugucugcgacuacagcuggauca

SEQ ID NO: 211382 - RNA, 23 nt, Human
gugcccaucaucauucuccucug

SEQ ID NO: 211383 - RNA, 32 nt, Human
gugcccaucccccuccccgcccuggcauccac

SEQ ID NO: 211384 - RNA, 21 nt, Human
gugcccaucccucagccucug

SEQ ID NO: 211385 - RNA, 32 nt, Human
gugcccauccucccgaccccuacccacuucca

SEQ ID NO: 211386 - RNA, 32 nt, Human
gugcccauccuuagccaacuugcuggcgugac

SEQ ID NO: 211387 - RNA, 18 nt, Human
gugcccaucucugggcug

SEQ ID NO: 211388 - RNA, 32 nt, Human
gugcccaugccuggcaggacugugccuuuugc

SEQ ID NO: 211389 - RNA, 32 nt, Human
gugcccaugggagagaccccaucucuacaaaa

SEQ ID NO: 211390 - RNA, 21 nt, Human
gugcccauuaaccaacuucug

SEQ ID NO: 211391 - RNA, 24 nt, Human
gugcccauucuucaggcaacuuuc

SEQ ID NO: 211392 - RNA, 22 nt, Human
gugcccauuguuuuaacuugug

SEQ ID NO: 211393 - RNA, 24 nt, Human
gugcccauuuccaggcagccuucu

SEQ ID NO: 211394 - RNA, 32 nt, Human
gugcccauuugaaaggagugggaggaauacag

SEQ ID NO: 211395 - RNA, 32 nt, Human
gugccccaaaggacaaucucuaaagggguaag

SEQ ID NO: 211396 - RNA, 32 nt, Human
gugccccacagggaccccagccugggugguca

SEQ ID NO: 211397 - RNA, 32 nt, Human
gugccccacaguggucaguccccagcccugug

SEQ ID NO: 211398 - RNA, 32 nt, Human
gugccccacauccucuuauuccuacaucccuu

SEQ ID NO: 211399 - RNA, 32 nt, Human
gugccccacugcacuccagccugggugacaga

SEQ ID NO: 211400 - RNA, 32 nt, Human
gugccccacuucaugcaggacuuggcacgcua

SEQ ID NO: 211401 - RNA, 32 nt, Human
gugccccagcacucccagccacuagcaaggac

SEQ ID NO: 211402 - RNA, 18 nt, Human
gugccccagccccagcca

SEQ ID NO: 211403 - RNA, 32 nt, Human
gugccccaggaaaccuggagguuccacuccca

SEQ ID NO: 211404 - RNA, 32 nt, Human
gugccccaggagaucccucucugccuugccuu

SEQ ID NO: 211405 - RNA, 32 nt, Human
gugccccaggccuccccgaaaccaaaggggaa

SEQ ID NO: 211406 - RNA, 32 nt, Human
gugccccaggcuagcucuucuaccucuggggc

SEQ ID NO: 211407 - RNA, 32 nt, Human
gugccccaguccuucuggaggccugggcugcu

SEQ ID NO: 211408 - RNA, 32 nt, Human
gugccccaugccuguccagccugggcagccag

SEQ ID NO: 211409 - RNA, 32 nt, Human
gugccccauuuuuaaagagcagagggccuggg

SEQ ID NO: 211410 - RNA, 26 nt, Human
gugcccccaaccccagcugcagccuc

SEQ ID NO: 211411 - RNA, 20 nt, Human
gugcccccaacccugggcau

SEQ ID NO: 211412 - RNA, 18 nt, Human
gugcccccacccaucuca

SEQ ID NO: 211413 - RNA, 21 nt, Human
gugcccccagcaaggcugcac

SEQ ID NO: 211414 - RNA, 32 nt, Human
gugcccccagugcuacauacgcagguaugcgu

SEQ ID NO: 211415 - RNA, 32 nt, Human
gugcccccaguguccucugauccuguccggug

SEQ ID NO: 211416 - RNA, 32 nt, Human
gugcccccaucuuuccuccaaacuccugccug

SEQ ID NO: 211417 - RNA, 20 nt, Human
gugccccccaaccagggcac

SEQ ID NO: 211418 - RNA, 24 nt, Human
gugccccccgcuggugacccucug

SEQ ID NO: 211419 - RNA, 23 nt, Human
gugcccccgggagggcugccgca

SEQ ID NO: 211420 - RNA, 32 nt, Human
gugcccccucacagagagaugaaggggcagca

SEQ ID NO: 211421 - RNA, 32 nt, Human
gugcccccuccagggcucuggaggauggaugc

SEQ ID NO: 211422 - RNA, 32 nt, Human
gugcccccuccccacccucccuccccaccucc

SEQ ID NO: 211423 - RNA, 32 nt, Human
gugcccccucugccuccaccccggcuccuggc

SEQ ID NO: 211424 - RNA, 32 nt, Human
gugccccgaagcgcucgcuucccgcggugcga

SEQ ID NO: 211425 - RNA, 32 nt, Human
gugccccgcccacugcagcccgaguucucugg

SEQ ID NO: 211426 - RNA, 32 nt, Human
gugccccgcgggccaccauguccuucccccag

SEQ ID NO: 211427 - RNA, 32 nt, Human
gugccccuccacucuucucuuccucucuuuuu

SEQ ID NO: 211428 - RNA, 32 nt, Human
gugccccucuaagagugcacacacacgcacac

SEQ ID NO: 211429 - RNA, 32 nt, Human
gugccccucugccugccugccccacugugcug

SEQ ID NO: 211430 - RNA, 32 nt, Human
gugccccugcacuccagccugagcgacaguga

SEQ ID NO: 211431 - RNA, 32 nt, Human
gugccccugcaggccuguuccacccacugagg

SEQ ID NO: 211432 - RNA, 32 nt, Human
gugccccugcauucuagccugggugacaguga

SEQ ID NO: 211433 - RNA, 32 nt, Human
gugccccugccugccgugccaggcccugcagg

SEQ ID NO: 211434 - RNA, 32 nt, Human
gugccccugccuggugcucuggucaccugccu

SEQ ID NO: 211435 - RNA, 32 nt, Human
gugccccuggaucuugccucugcuccgacgcc

SEQ ID NO: 211436 - RNA, 21 nt, Human
gugccccuggcccgggccuca

SEQ ID NO: 211437 - RNA, 32 nt, Human
gugccccuggccuggccagcagugaauguagg

SEQ ID NO: 211438 - RNA, 32 nt, Human
gugccccuguaaucccagcuacucaggaggcu

SEQ ID NO: 211439 - RNA, 32 nt, Human
gugccccuuagagcuccugugcugcugggagg

SEQ ID NO: 211440 - RNA, 32 nt, Human
gugccccuuccgccacuggggcucagagccgg

SEQ ID NO: 211441 - RNA, 32 nt, Human
gugccccuucuuucugcccuuccucaccgaag

SEQ ID NO: 211442 - RNA, 32 nt, Human
gugccccuugcaguagugccucugucuccuca

SEQ ID NO: 211443 - RNA, 23 nt, Human
gugcccgacggggccaccuucug

SEQ ID NO: 211444 - RNA, 32 nt, Human
gugcccgaggcagcccuuccagagguucgacu

SEQ ID NO: 211445 - RNA, 21 nt, Human
gugcccgcaccccgacuccug

SEQ ID NO: 211446 - RNA, 32 nt, Human
gugcccgccacacgcacgcacacacucuuaca

SEQ ID NO: 211447 - RNA, 27 nt, Human
gugcccgccccacccgcaugcucuuug

SEQ ID NO: 211448 - RNA, 21 nt, Human
gugcccgccccaggcccgcug

SEQ ID NO: 211449 - RNA, 32 nt, Human
gugcccgccucuccacgcacucagcuauaccu

SEQ ID NO: 211450 - RNA, 32 nt, Human
gugcccgccuggugccuucuggccuguggccu

SEQ ID NO: 211451 - RNA, 18 nt, Human
gugcccgcgauggcccuc

SEQ ID NO: 211452 - RNA, 22 nt, Human
gugcccgcuagccugcccugug

SEQ ID NO: 211453 - RNA, 32 nt, Human
gugcccgcuggggcuggcaggaagggagccga

SEQ ID NO: 211454 - RNA, 22 nt, Human
gugcccggaccugcgccuucug

SEQ ID NO: 211455 - RNA, 32 nt, Human
gugcccggccaagaauggauuuuauaugaccc

SEQ ID NO: 211456 - RNA, 32 nt, Human
gugcccggccaggcacgugcuauagacccacu

SEQ ID NO: 211457 - RNA, 32 nt, Human
gugcccggcccaaacuacuuuuuaaaacagcu

SEQ ID NO: 211458 - RNA, 32 nt, Human
gugcccggcccagggugcccagcggggccaug

SEQ ID NO: 211459 - RNA, 32 nt, Human
gugcccggcgcagaagcacacagugguggccu

SEQ ID NO: 211460 - RNA, 25 nt, Human
gugcccggcguuugggagcccuuug

SEQ ID NO: 211461 - RNA, 32 nt, Human
gugcccgggaaagaugccauauauucacuggg

SEQ ID NO: 211462 - RNA, 32 nt, Human
gugcccgggugaggggcggagcugggggcaug

SEQ ID NO: 211463 - RNA, 32 nt, Human
gugcccgugccucugugcuguguaugugaacc

SEQ ID NO: 211464 - RNA, 32 nt, Human
gugcccguggaagacucuggccucccagcaca

SEQ ID NO: 211465 - RNA, 32 nt, Human
gugcccguggcugaggauaagcugcugagguu

SEQ ID NO: 211466 - RNA, 32 nt, Human
gugcccguggugaugccaugccccgccaccac

SEQ ID NO: 211467 - RNA, 22 nt, Human
gugcccuacgauggccuaacag

SEQ ID NO: 211468 - RNA, 32 nt, Human
gugcccucaaagauucaaauucaguuagucga

SEQ ID NO: 211469 - RNA, 32 nt, Human
gugcccucaaggacaucuccaggcccugaugg

SEQ ID NO: 211470 - RNA, 32 nt, Human
gugcccucaccccucacugguccacuggcuug

SEQ ID NO: 211471 - RNA, 32 nt, Human
gugcccucagagcuacuguguucaggguucuu

SEQ ID NO: 211472 - RNA, 25 nt, Human
gugcccucagauguguugacagcug

SEQ ID NO: 211473 - RNA, 32 nt, Human
gugcccucagcagugacagcagcuuagguguc

SEQ ID NO: 211474 - RNA, 22 nt, Human
gugcccucaggggccgacacua

SEQ ID NO: 211475 - RNA, 32 nt, Human
gugcccuccaccucucccuccugcugguuggc

SEQ ID NO: 211476 - RNA, 32 nt, Human
gugcccuccaucugaaacaggccaggugagca

SEQ ID NO: 211477 - RNA, 32 nt, Human
gugcccucccugccacccuccgucuagagcaa

SEQ ID NO: 211478 - RNA, 32 nt, Human
gugcccucccuugcuuccuccugggcucuguc

SEQ ID NO: 211479 - RNA, 24 nt, Human
gugcccuccgcaggccgggccucc

SEQ ID NO: 211480 - RNA, 32 nt, Human
gugcccuccguguucagcuuagccuuugaccc

SEQ ID NO: 211481 - RNA, 32 nt, Human
gugcccuccucuuccuuccucuuuauagggag

SEQ ID NO: 211482 - RNA, 32 nt, Human
gugcccuccuucugcuggcaucugagccaggu

SEQ ID NO: 211483 - RNA, 32 nt, Human
gugcccucgcaucucaucccagaagagucgcc

SEQ ID NO: 211484 - RNA, 32 nt, Human
gugcccucgccgccgccggcacugccucgaug

SEQ ID NO: 211485 - RNA, 32 nt, Human
gugcccucgccuggccccgccccgucgguugu

SEQ ID NO: 211486 - RNA, 32 nt, Human
gugcccucggcagcuucgguccagccugcauc

SEQ ID NO: 211487 - RNA, 32 nt, Human
gugcccucguuccacucucaucagcccaccgc

SEQ ID NO: 211488 - RNA, 32 nt, Human
gugcccucuccucgaauccugccaguugcauu

SEQ ID NO: 211489 - RNA, 22 nt, Human
gugcccucuccuggacgaucgc

SEQ ID NO: 211490 - RNA, 23 nt, Human
gugcccucuccuggcauccccgc

SEQ ID NO: 211491 - RNA, 19 nt, Human
gugcccucugcccaggugg

SEQ ID NO: 211492 - RNA, 32 nt, Human
gugcccucugcucucagucuuguugcccuagu

SEQ ID NO: 211493 - RNA, 32 nt, Human
gugcccucuggaacugcuuccaugcaggugag

SEQ ID NO: 211494 - RNA, 32 nt, Human
gugcccucuguaaucacuaggacuuggauggg

SEQ ID NO: 211495 - RNA, 32 nt, Human
gugcccugagccugagucgcagccagccuggg

SEQ ID NO: 211496 - RNA, 32 nt, Human
gugcccugaggaugggcuuccuuguccugugg

SEQ ID NO: 211497 - RNA, 21 nt, Human
gugcccugaggccccaggcag

SEQ ID NO: 211498 - RNA, 32 nt, Human
gugcccugcaccagacaggccguggucaggcc

SEQ ID NO: 211499 - RNA, 32 nt, Human
gugcccugcagcgcguggacaggcuagggguc

SEQ ID NO: 211500 - RNA, 32 nt, Human
gugcccugcugguacggguggaauggggguga

SEQ ID NO: 211501 - RNA, 32 nt, Human
gugcccugcuuugcaaacaucaaccuggcaaa

SEQ ID NO: 211502 - RNA, 32 nt, Human
gugcccuggaacacugguaguucuggggcugg

SEQ ID NO: 211503 - RNA, 32 nt, Human
gugcccuggcugccuuccugugcccagaaagg

SEQ ID NO: 211504 - RNA, 32 nt, Human
gugcccuggcugcugggcucuccaccucaggc

SEQ ID NO: 211505 - RNA, 32 nt, Human
gugcccugggacuccuaucaggaagcuugaca

SEQ ID NO: 211506 - RNA, 31 nt, Human
gugcccuggguggaaggaaggcacugagagc

SEQ ID NO: 211507 - RNA, 32 nt, Human
gugcccuguccucagauggggagggacagggu

SEQ ID NO: 211508 - RNA, 32 nt, Human
gugcccuguggcugccugcaccccaggaaagg

SEQ ID NO: 211509 - RNA, 32 nt, Human
gugcccuguggugaccaggagaacaaggagcu

SEQ ID NO: 211510 - RNA, 20 nt, Human
gugcccuguguuccuggaga

SEQ ID NO: 211511 - RNA, 32 nt, Human
gugcccuguuccauacauaaaaggagaggggu

SEQ ID NO: 211512 - RNA, 32 nt, Human
gugcccuuaaaugccagaucugguggagggaa

SEQ ID NO: 211513 - RNA, 32 nt, Human
gugcccuuccagccugaagaucugggggcaca

SEQ ID NO: 211514 - RNA, 32 nt, Human
gugcccuucccuggaggucucucccuccccca

SEQ ID NO: 211515 - RNA, 32 nt, Human
gugcccuucccuucccuccaccacaccacuca

SEQ ID NO: 211516 - RNA, 32 nt, Human
gugcccuugaggacgagggggagcagccggcc

SEQ ID NO: 211517 - RNA, 21 nt, Human
gugcccuugaggugaccucug

SEQ ID NO: 211518 - RNA, 32 nt, Human
gugcccuugccugccuuacccccaccaccacu

SEQ ID NO: 211519 - RNA, 32 nt, Human
gugcccuuggccugccacccagagccaagagg

SEQ ID NO: 211520 - RNA, 32 nt, Human
gugcccuugguuguuuuguggugguccugucg

SEQ ID NO: 211521 - RNA, 32 nt, Human
gugcccuuguagggacacaagguuguacauuu

SEQ ID NO: 211522 - RNA, 31 nt, Human
gugcccuuugggaauaaagcuguagcacugc

SEQ ID NO: 211523 - RNA, 32 nt, Human
gugccgacagcaccuccaccuugggccuccau

SEQ ID NO: 211524 - RNA, 32 nt, Human
gugccgaccucacccgcuccccucaguggcgc

SEQ ID NO: 211525 - RNA, 32 nt, Human
gugccgagaggcaggaggaccaugaaaugauc

SEQ ID NO: 211526 - RNA, 32 nt, Human
gugccgagcuguccauagcugcagugaaaggu

SEQ ID NO: 211527 - RNA, 32 nt, Human
gugccgaggaggaggaagaaaaacaggccgag

SEQ ID NO: 211528 - RNA, 32 nt, Human
gugccgaggccuugguaacuguucagagggcc

SEQ ID NO: 211529 - RNA, 32 nt, Human
gugccgagugccugcugcagaccgaggcuggg

SEQ ID NO: 211530 - RNA, 32 nt, Human
gugccgaugucaggagggcugugucggguaau

SEQ ID NO: 211531 - RNA, 32 nt, Human
gugccgcaaccaccucagccuggaugacggag

SEQ ID NO: 211532 - RNA, 32 nt, Human
gugccgcagggagggugcguggggaagaugcu

SEQ ID NO: 211533 - RNA, 21 nt, Human
gugccgccagugguccaagga

SEQ ID NO: 211534 - RNA, 32 nt, Human
gugccgcccaaggucacaggcacagaaccuuu

SEQ ID NO: 211535 - RNA, 32 nt, Human
gugccgccccucugcugcccugcccagguguc

SEQ ID NO: 211536 - RNA, 19 nt, Human
gugccgcccuagcccagcc

SEQ ID NO: 211537 - RNA, 22 nt, Human
gugccgcccucacagugaacca

SEQ ID NO: 211538 - RNA, 32 nt, Human
gugccgcccucuccugggcucuuccaggagca

SEQ ID NO: 211539 - RNA, 32 nt, Human
gugccgccuccuugugcacaaaucagaccugg

SEQ ID NO: 211540 - RNA, 32 nt, Human
gugccgccugcacuccucagggcagccucccc

SEQ ID NO: 211541 - RNA, 32 nt, Human
gugccgcgggacucugcaccuaccucacaggg

SEQ ID NO: 211542 - RNA, 32 nt, Human
gugccgcuacacuccagccugaugacagaccg

SEQ ID NO: 211543 - RNA, 32 nt, Human
gugccgcuccucccuugcccucaggccagguc

SEQ ID NO: 211544 - RNA, 32 nt, Human
gugccgcucugccuagaaaagccaggggcucu

SEQ ID NO: 211545 - RNA, 32 nt, Human
gugccgcugcacuccagccuggcgacaaagca

SEQ ID NO: 211546 - RNA, 32 nt, Human
gugccgcugcacuccauucugggcaagagcua

SEQ ID NO: 211547 - RNA, 32 nt, Human
gugccgcugcccagacacagacuggcaauaaa

SEQ ID NO: 211548 - RNA, 28 nt, Human
gugccggagccugcugccucgccgacgc

SEQ ID NO: 211549 - RNA, 32 nt, Human
gugccggaggcaggguucgggugcguagucgu

SEQ ID NO: 211550 - RNA, 32 nt, Human
gugccggagguggggccugguguguuuggguu

SEQ ID NO: 211551 - RNA, 32 nt, Human
gugccggccugcugccccggccgcacacucga

SEQ ID NO: 211552 - RNA, 32 nt, Human
gugccggcuuauccgaggucucaauccauugc

SEQ ID NO: 211553 - RNA, 32 nt, Human
gugccgggacggggagccaggcuuccgagugc

SEQ ID NO: 211554 - RNA, 32 nt, Human
gugccgggcagccuacaacauugugcacggcu

SEQ ID NO: 211555 - RNA, 18 nt, Human
gugccgggcgcccagggg

SEQ ID NO: 211556 - RNA, 32 nt, Human
gugccggggaggggcagagaggaaguggucug

SEQ ID NO: 211557 - RNA, 32 nt, Human
gugccggggauucuggacuggcucccuccccu

SEQ ID NO: 211558 - RNA, 32 nt, Human
gugccggggccuggggcucugagggaaauuga

SEQ ID NO: 211559 - RNA, 32 nt, Human
gugccggggcugggaggaagugacaagagggg

SEQ ID NO: 211560 - RNA, 32 nt, Human
gugccggggugaggaagauguggcugcaaggu

SEQ ID NO: 211561 - RNA, 32 nt, Human
gugccgguagaauaaggaaggaagggaggcag

SEQ ID NO: 211562 - RNA, 32 nt, Human
gugccgguagccccagcuacucgggaggcuga

SEQ ID NO: 211563 - RNA, 24 nt, Human
gugccguaacucacgccuguaauc

SEQ ID NO: 211564 - RNA, 32 nt, Human
gugccguagggaacaugcacuuuuccauuccc

SEQ ID NO: 211565 - RNA, 17 nt, Human
gugccgucccgcugcug

SEQ ID NO: 211566 - RNA, 32 nt, Human
gugccguccucgaacuuucugacucuaagcuc

SEQ ID NO: 211567 - RNA, 32 nt, Human
gugccgucucagcucacugcaaccuccgccuu

SEQ ID NO: 211568 - RNA, 32 nt, Human
gugccgucuggacuuccaccuccagugccaga

SEQ ID NO: 211569 - RNA, 24 nt, Human
gugccguggcucacaccuguaauc

SEQ ID NO: 211570 - RNA, 24 nt, Human
gugccguggcucacgccuguaauc

SEQ ID NO: 211571 - RNA, 24 nt, Human
gugccguggcucaugccuguaauc

SEQ ID NO: 211572 - RNA, 24 nt, Human
gugccgugggucacgccuguaauc

SEQ ID NO: 211573 - RNA, 32 nt, Human
gugccguuagauucucacagaagcaugaaccc

SEQ ID NO: 211574 - RNA, 32 nt, Human
gugccguuauucugcuggaacauggugccaau

SEQ ID NO: 211575 - RNA, 32 nt, Human
gugccguugcacuccagccgggcaacaagggc

SEQ ID NO: 211576 - RNA, 32 nt, Human
gugccguugcacuccagccugggcaacaagag

SEQ ID NO: 211577 - RNA, 32 nt, Human
gugccguugcacuccagccugggcgacaagag

SEQ ID NO: 211578 - RNA, 32 nt, Human
gugccuaaaaagagcguugagcucagagaaga

SEQ ID NO: 211579 - RNA, 22 nt, Human
gugccuaaaauaguguccuuug

SEQ ID NO: 211580 - RNA, 32 nt, Human
gugccuaaagaauuuuguggaauacacuuugu

SEQ ID NO: 211581 - RNA, 23 nt, Human
gugccuaacagagguguccucug

SEQ ID NO: 211582 - RNA, 23 nt, Human
gugccuacauauuuuaucuucug

SEQ ID NO: 211583 - RNA, 22 nt, Human
gugccuaccucuggucuagaga

SEQ ID NO: 211584 - RNA, 22 nt, Human
gugccuaccugugaccuuucug

SEQ ID NO: 211585 - RNA, 32 nt, Human
gugccuaccugugaccuuucugcuccacugcu

SEQ ID NO: 211586 - RNA, 26 nt, Human
gugccuacucagcugugaauccucug

SEQ ID NO: 211587 - RNA, 24 nt, Human
gugccuacuucgccagccuugcug

SEQ ID NO: 211588 - RNA, 32 nt, Human
gugccuagaccagcaacugggacaugaaucuu

SEQ ID NO: 211589 - RNA, 32 nt, Human
gugccuagacuguuacuuuggcaauuuccugg

SEQ ID NO: 211590 - RNA, 32 nt, Human
gugccuagaugccuuuguaucucuccauguca

SEQ ID NO: 211591 - RNA, 32 nt, Human
gugccuagcacagugccuggcacacaguagag

SEQ ID NO: 211592 - RNA, 32 nt, Human
gugccuagcccaauacauagcucacaggacug

SEQ ID NO: 211593 - RNA, 32 nt, Human
gugccuaggaguucgaggcugcagugggcugu

SEQ ID NO: 211594 - RNA, 32 nt, Human
gugccuaguuaagugggaauguguuuggagau

SEQ ID NO: 211595 - RNA, 32 nt, Human
gugccuauagaaaccucagcuagugugccgag

SEQ ID NO: 211596 - RNA, 32 nt, Human
gugccuauaggggacucacagacugcagaugc

SEQ ID NO: 211597 - RNA, 32 nt, Human
gugccuauaucugugauuugaaugagggagcc

SEQ ID NO: 211598 - RNA, 32 nt, Human
gugccuaucacugaguaacagaagagcugagu

SEQ ID NO: 211599 - RNA, 26 nt, Human
gugccuaucauaacaauuguuuucug

SEQ ID NO: 211600 - RNA, 19 nt, Human
gugccuaucugccuggagg

SEQ ID NO: 211601 - RNA, 32 nt, Human
gugccuaugaugcugguucuguugccaccugg

SEQ ID NO: 211602 - RNA, 32 nt, Human
gugccuaugcuuccacuuuccuuuucccucca

SEQ ID NO: 211603 - RNA, 32 nt, Human
gugccuauugcuagagcuccucccucucaaca

SEQ ID NO: 211604 - RNA, 32 nt, Human
gugccuauugcuucuuacccucccucccuucc

SEQ ID NO: 211605 - RNA, 32 nt, Human
gugccuauuuuuauaccagcaccaugcaguuu

SEQ ID NO: 211606 - RNA, 32 nt, Human
gugccucaagaggaagauagacaggaggagga

SEQ ID NO: 211607 - RNA, 21 nt, Human
gugccucaaguuacaccugug

SEQ ID NO: 211608 - RNA, 32 nt, Human
gugccucaaugccaccgcgugugaagcuuucc

SEQ ID NO: 211609 - RNA, 19 nt, Human
gugccucacaccuguaauc

SEQ ID NO: 211610 - RNA, 22 nt, Human
gugccucacaccuguaauccca

SEQ ID NO: 211611 - RNA, 32 nt, Human
gugccucacacuccagccuggguaacagagug

SEQ ID NO: 211612 - RNA, 32 nt, Human
gugccucaccauugcccacccugcugcccaac

SEQ ID NO: 211613 - RNA, 32 nt, Human
gugccucaccuguaauccaaguacuuugggag

SEQ ID NO: 211614 - RNA, 22 nt, Human
gugccucacgccuguaauccca

SEQ ID NO: 211615 - RNA, 32 nt, Human
gugccucagaaggcagaggaagccuugaggug

SEQ ID NO: 211616 - RNA, 32 nt, Human
gugccucagagcaggcucagacucuggguccc

SEQ ID NO: 211617 - RNA, 23 nt, Human
gugccucagaucauccaccugug

SEQ ID NO: 211618 - RNA, 23 nt, Human
gugccucagcugccugaacugua

SEQ ID NO: 211619 - RNA, 32 nt, Human
gugccucaggagcagugggaccaccugaugcu

SEQ ID NO: 211620 - RNA, 23 nt, Human
gugccucagguuccucaccugua

SEQ ID NO: 211621 - RNA, 32 nt, Human
gugccucagguuucuuuuaugaaaauuauaac

SEQ ID NO: 211622 - RNA, 32 nt, Human
gugccucagugccaccaacugcacaggcuuag

SEQ ID NO: 211623 - RNA, 32 nt, Human
gugccucaguguccuucucauuucaguaggga

SEQ ID NO: 211624 - RNA, 23 nt, Human
gugccucaguuucucugucugua

SEQ ID NO: 211625 - RNA, 19 nt, Human
gugccucaugccuguaauc

SEQ ID NO: 211626 - RNA, 32 nt, Human
gugccucauggagcugucguaaggaaucaguu

SEQ ID NO: 211627 - RNA, 32 nt, Human
gugccucauggcacugccaccugggccuuugg

SEQ ID NO: 211628 - RNA, 32 nt, Human
gugccucauuauagccacacuguggcuagauu

SEQ ID NO: 211629 - RNA, 23 nt, Human
gugccucauuuugcugacuugua

SEQ ID NO: 211630 - RNA, 32 nt, Human
gugccuccaaccucaucuccucccucuucucu

SEQ ID NO: 211631 - RNA, 32 nt, Human
gugccuccaggccaccauggugagaggagagg

SEQ ID NO: 211632 - RNA, 32 nt, Human
gugccuccaguauuugguauacagaaggugaa

SEQ ID NO: 211633 - RNA, 32 nt, Human
gugccuccccgccuuuucugcagagcuccgcc

SEQ ID NO: 211634 - RNA, 32 nt, Human
gugccucccguagccgccuccucccagcaguc

SEQ ID NO: 211635 - RNA, 32 nt, Human
gugccucccucccuccuuccucuacucccacc

SEQ ID NO: 211636 - RNA, 32 nt, Human
gugccucccuucccaggucaccagcuugggac

SEQ ID NO: 211637 - RNA, 31 nt, Human
gugccucccuucucugggcagaguuucccca

SEQ ID NO: 211638 - RNA, 32 nt, Human
gugccucccuuuccuuucccucccacaaagcc

SEQ ID NO: 211639 - RNA, 32 nt, Human
gugccuccggagugggagagaccuuccagcag

SEQ ID NO: 211640 - RNA, 32 nt, Human
gugccuccuccuccucgccccggcgccggcgg

SEQ ID NO: 211641 - RNA, 32 nt, Human
gugccuccuccuucucccgcucccucucccgu

SEQ ID NO: 211642 - RNA, 32 nt, Human
gugccuccugaggagagcaggaaaggcagugg

SEQ ID NO: 211643 - RNA, 32 nt, Human
gugccuccugugagccuccucucugcucugug

SEQ ID NO: 211644 - RNA, 32 nt, Human
gugccuccuugucugcacugcugguauggggu

SEQ ID NO: 211645 - RNA, 32 nt, Human
gugccuccuuucucccugccaggccugacucu

SEQ ID NO: 211646 - RNA, 23 nt, Human
gugccucgcuggucuaaucugua

SEQ ID NO: 211647 - RNA, 32 nt, Human
gugccucucagaaacgcggccagaagacaagc

SEQ ID NO: 211648 - RNA, 32 nt, Human
gugccucucccucugccuucucucacagugcc

SEQ ID NO: 211649 - RNA, 32 nt, Human
gugccucuccuggucguggaaggugcuacucc

SEQ ID NO: 211650 - RNA, 32 nt, Human
gugccucucuccugggucccaggaucggcccc

SEQ ID NO: 211651 - RNA, 32 nt, Human
gugccucugcacuccaaccugggugauggagc

SEQ ID NO: 211652 - RNA, 32 nt, Human
gugccucugcacuccagccugcgugacaaagu

SEQ ID NO: 211653 - RNA, 32 nt, Human
gugccucugcggccccagcccagcucccaggg

SEQ ID NO: 211654 - RNA, 32 nt, Human
gugccucugcucccaucucucucuuugccuca

SEQ ID NO: 211655 - RNA, 32 nt, Human
gugccucugcucccucuuccucuagcugagag

SEQ ID NO: 211656 - RNA, 32 nt, Human
gugccucuggucccacuacaccugcgcagacu

SEQ ID NO: 211657 - RNA, 32 nt, Human
gugccucuguuccugaauuacauaagaaugua

SEQ ID NO: 211658 - RNA, 32 nt, Human
gugccucuuccacucuggagugaaguuaauga

SEQ ID NO: 211659 - RNA, 32 nt, Human
gugccucuuugaguggcaguugcuugaucauu

SEQ ID NO: 211660 - RNA, 32 nt, Human
gugccugaaagugcccuugggcaccuccucag

SEQ ID NO: 211661 - RNA, 32 nt, Human
gugccugaagaagucucucuucucucugcuuc

SEQ ID NO: 211662 - RNA, 32 nt, Human
gugccugacacauauuaggcacuggauaagua

SEQ ID NO: 211663 - RNA, 32 nt, Human
gugccugacacuccugcccuguguuguuaccu

SEQ ID NO: 211664 - RNA, 32 nt, Human
gugccugacccaagccacguuuucacaugccu

SEQ ID NO: 211665 - RNA, 32 nt, Human
gugccugacccuacuucuuuugcucaucuagc

SEQ ID NO: 211666 - RNA, 32 nt, Human
gugccugaccucaagaagcucagagucuagua

SEQ ID NO: 211667 - RNA, 32 nt, Human
gugccugaccugagggcagagacaucugagug

SEQ ID NO: 211668 - RNA, 23 nt, Human
gugccugagcuggggccuggaga

SEQ ID NO: 211669 - RNA, 32 nt, Human
gugccugaggaccuuugcuguguccuugguac

SEQ ID NO: 211670 - RNA, 32 nt, Human
gugccugaggucugauggccucuaauaaacug

SEQ ID NO: 211671 - RNA, 32 nt, Human
gugccugagugguggcuggugauccugggcug

SEQ ID NO: 211672 - RNA, 32 nt, Human
gugccugaguucucccuguugucucaaagcgg

SEQ ID NO: 211673 - RNA, 32 nt, Human
gugccugauaccugcacuccggcuuccuagac

SEQ ID NO: 211674 - RNA, 32 nt, Human
gugccugaucacugggcccccuaccucagccc

SEQ ID NO: 211675 - RNA, 32 nt, Human
gugccugauggaccgggcugcugcucgaggag

SEQ ID NO: 211676 - RNA, 32 nt, Human
gugccugcacccuggggagcccagagccggca

SEQ ID NO: 211677 - RNA, 31 nt, Human
gugccugcacuuugcuguggcaggcagauug

SEQ ID NO: 211678 - RNA, 32 nt, Human
gugccugcaggagagacacccaggaggaguuu

SEQ ID NO: 211679 - RNA, 21 nt, Human
gugccugcaggccccaugccc

SEQ ID NO: 211680 - RNA, 32 nt, Human
gugccugcagguguccaucaccuucaaggacu

SEQ ID NO: 211681 - RNA, 32 nt, Human
gugccugcagguucccuggaccuuccuucuca

SEQ ID NO: 211682 - RNA, 32 nt, Human
gugccugcccaaggaugcagacauacccacca

SEQ ID NO: 211683 - RNA, 23 nt, Human
gugccugcccccggauacugcag

SEQ ID NO: 211684 - RNA, 23 nt, Human
gugccugccggcuaaacauucug

SEQ ID NO: 211685 - RNA, 27 nt, Human
gugccugccuacugggcagcucaucug

SEQ ID NO: 211686 - RNA, 32 nt, Human
gugccugccuagugcuggaguaggggacaaug

SEQ ID NO: 211687 - RNA, 32 nt, Human
gugccugccuugcagccuccccucggcgaucg

SEQ ID NO: 211688 - RNA, 32 nt, Human
gugccugcgggaccugcuauccagcugagccg

SEQ ID NO: 211689 - RNA, 32 nt, Human
gugccugcugagacugcugggccacccccgug

SEQ ID NO: 211690 - RNA, 32 nt, Human
gugccugcugccugccuaccuggguaaucuga

SEQ ID NO: 211691 - RNA, 32 nt, Human
gugccugcuuugcuccagcacagcagagacca

SEQ ID NO: 211692 - RNA, 32 nt, Human
gugccuggaagugggcccugcuccacccccuc

SEQ ID NO: 211693 - RNA, 32 nt, Human
gugccuggacccagaggcuuugcaggacagug

SEQ ID NO: 211694 - RNA, 32 nt, Human
gugccuggagccagaggucggggaguaagcac

SEQ ID NO: 211695 - RNA, 32 nt, Human
gugccuggagugagauggagcuggaaagaucc

SEQ ID NO: 211696 - RNA, 32 nt, Human
gugccuggcaaggccucugccccuggccuuug

SEQ ID NO: 211697 - RNA, 20 nt, Human
gugccuggcacuaugaucca

SEQ ID NO: 211698 - RNA, 19 nt, Human
gugccuggcacucuguggg

SEQ ID NO: 211699 - RNA, 22 nt, Human
gugccuggcagggggagaccac

SEQ ID NO: 211700 - RNA, 32 nt, Human
gugccuggcccccucuugccuuuuauggcuga

SEQ ID NO: 211701 - RNA, 32 nt, Human
gugccuggccucugccuccacccuccuccucu

SEQ ID NO: 211702 - RNA, 32 nt, Human
gugccuggcggacagaacuucagagaccacgc

SEQ ID NO: 211703 - RNA, 32 nt, Human
gugccuggcucagagccagucuuuuuggugag

SEQ ID NO: 211704 - RNA, 25 nt, Human
gugccuggcugcugggcggccucug

SEQ ID NO: 211705 - RNA, 32 nt, Human
gugccugggacccccagcacccagagccuagg

SEQ ID NO: 211706 - RNA, 32 nt, Human
gugccugggaggcugaggcaggagaauugcuu

SEQ ID NO: 211707 - RNA, 32 nt, Human
gugccugggagguggguguggggguggugggu

SEQ ID NO: 211708 - RNA, 31 nt, Human
gugccugggcacuucugggaaguccugcacu

SEQ ID NO: 211709 - RNA, 32 nt, Human
gugccugggcggggcugggagugggaccugag

SEQ ID NO: 211710 - RNA, 32 nt, Human
gugccugggcuggcuggcaucccugggcugau

SEQ ID NO: 211711 - RNA, 32 nt, Human
gugccuggggaguguguguggguccuuggcuc

SEQ ID NO: 211712 - RNA, 32 nt, Human
gugccuggggccuugccacccuucccugucca

SEQ ID NO: 211713 - RNA, 32 nt, Human
gugccuggggugccuuucccccagccaggguc

SEQ ID NO: 211714 - RNA, 32 nt, Human
gugccugguggaggggccuggaaaagacaccc

SEQ ID NO: 211715 - RNA, 32 nt, Human
gugccuggugggagauccccgggguuugggaa

SEQ ID NO: 211716 - RNA, 32 nt, Human
gugccugguuauauuacuggauccuuguguug

SEQ ID NO: 211717 - RNA, 26 nt, Human
gugccugguucaggguagacucucug

SEQ ID NO: 211718 - RNA, 32 nt, Human
gugccugguuccucccccuuggcucaggggua

SEQ ID NO: 211719 - RNA, 32 nt, Human
gugccuguaaauagcuauugcacuccagccuu

SEQ ID NO: 211720 - RNA, 32 nt, Human
gugccuguaacaccccucuucccccacccccu

SEQ ID NO: 211721 - RNA, 32 nt, Human
gugccuguagccccagcuacuugggaggcuga

SEQ ID NO: 211722 - RNA, 19 nt, Human
gugccuguagccuugggga

SEQ ID NO: 211723 - RNA, 32 nt, Human
gugccuguaucauuggcacaggccagugcuga

SEQ ID NO: 211724 - RNA, 32 nt, Human
gugccugucacggaggugaggagugagugagu

SEQ ID NO: 211725 - RNA, 32 nt, Human
gugccuguccccgugugauccgaaaagugcug

SEQ ID NO: 211726 - RNA, 32 nt, Human
gugccugucucauucgccucuggaucugcugc

SEQ ID NO: 211727 - RNA, 22 nt, Human
gugccugucugugccugggaga

SEQ ID NO: 211728 - RNA, 32 nt, Human
gugccugucuugucuguguggcuucucagaug

SEQ ID NO: 211729 - RNA, 32 nt, Human
gugccugugagcauggggccaggaaagucugg

SEQ ID NO: 211730 - RNA, 21 nt, Human
gugccuguggcugugccuggg

SEQ ID NO: 211731 - RNA, 21 nt, Human
gugccugugguggccccucug

SEQ ID NO: 211732 - RNA, 32 nt, Human
gugccugugugggaacagcucuucucccagau

SEQ ID NO: 211733 - RNA, 20 nt, Human
gugccugugugugaaccugg

SEQ ID NO: 211734 - RNA, 20 nt, Human
gugccugugugugccuggga

SEQ ID NO: 211735 - RNA, 32 nt, Human
gugccuguucacucaccucucccuuccccaac

SEQ ID NO: 211736 - RNA, 32 nt, Human
gugccuguuccagauggcagggcuccuuacug

SEQ ID NO: 211737 - RNA, 32 nt, Human
gugccuguucugauucucauuugugucucugg

SEQ ID NO: 211738 - RNA, 19 nt, Human
gugccuguuguccaagugg

SEQ ID NO: 211739 - RNA, 32 nt, Human
gugccuuaaaaauguuguggccaagccacaug

SEQ ID NO: 211740 - RNA, 23 nt, Human
gugccuuaacaagcaauccucug

SEQ ID NO: 211741 - RNA, 32 nt, Human
gugccuuaagcagagucaggagaccccaaggc

SEQ ID NO: 211742 - RNA, 32 nt, Human
gugccuuaaggagagagauuguguucuuccuc

SEQ ID NO: 211743 - RNA, 32 nt, Human
gugccuuacacacugcccccacccucagccgu

SEQ ID NO: 211744 - RNA, 32 nt, Human
gugccuuacacguguuaacacacuugaucagc

SEQ ID NO: 211745 - RNA, 32 nt, Human
gugccuucauuaguuuuaguucugucuguuuu

SEQ ID NO: 211746 - RNA, 32 nt, Human
gugccuucauucugcuuuguacuaggacacca

SEQ ID NO: 211747 - RNA, 32 nt, Human
gugccuuccauggagggaaaugggacaggggc

SEQ ID NO: 211748 - RNA, 32 nt, Human
gugccuuccucccauccucugccaucuuggua

SEQ ID NO: 211749 - RNA, 32 nt, Human
gugccuucgucugaguuuuccugcuuuccugc

SEQ ID NO: 211750 - RNA, 32 nt, Human
gugccuucguuuccucauuuagcaccuaccuc

SEQ ID NO: 211751 - RNA, 32 nt, Human
gugccuucucccacuauuuuucacauggugac

SEQ ID NO: 211752 - RNA, 32 nt, Human
gugccuucucuucaacaccaccccacccucca

SEQ ID NO: 211753 - RNA, 32 nt, Human
gugccuucugcccucugcccagauguguccag

SEQ ID NO: 211754 - RNA, 32 nt, Human
gugccuucugcgcgccugggaucccggagccu

SEQ ID NO: 211755 - RNA, 32 nt, Human
gugccuucuggcccaucgucauuugcucuggg

SEQ ID NO: 211756 - RNA, 21 nt, Human
gugccuucuuuagugcuccac

SEQ ID NO: 211757 - RNA, 32 nt, Human
gugccuugacaccuacauauggcugcauucca

SEQ ID NO: 211758 - RNA, 32 nt, Human
gugccuugcacuccaugcauucugauaacggc

SEQ ID NO: 211759 - RNA, 32 nt, Human
gugccuugcucuucugucggaggcugcugggg

SEQ ID NO: 211760 - RNA, 32 nt, Human
gugccuuggaaccugcugccuuggggacccug

SEQ ID NO: 211761 - RNA, 32 nt, Human
gugccuuggagaacucacagcagcacgccuua

SEQ ID NO: 211762 - RNA, 32 nt, Human
gugccuuguaugaagcccaccccacauggccc

SEQ ID NO: 211763 - RNA, 23 nt, Human
gugccuuguauuuuaaaucugug

SEQ ID NO: 211764 - RNA, 32 nt, Human
gugccuuguugccuccgcucaggaugaaagag

SEQ ID NO: 211765 - RNA, 32 nt, Human
gugccuuuaaucccaccucaggaggcugaggc

SEQ ID NO: 211766 - RNA, 32 nt, Human
gugccuuucccagggggauccccacacugguc

SEQ ID NO: 211767 - RNA, 32 nt, Human
gugccuuucccccagccaggguccaaagaagc

SEQ ID NO: 211768 - RNA, 32 nt, Human
gugccuuugaguuuccucaggcugcuggagga

SEQ ID NO: 211769 - RNA, 32 nt, Human
gugccuuugcacuccagcguggaagacaguga

SEQ ID NO: 211770 - RNA, 32 nt, Human
gugccuuugcggaugaccucauuuugacguug

SEQ ID NO: 211771 - RNA, 32 nt, Human
gugccuuuggagccucgggcuccuggggugca

SEQ ID NO: 211772 - RNA, 32 nt, Human
gugccuuuggggcagacuccagacaaggaugu

SEQ ID NO: 211773 - RNA, 32 nt, Human
gugccuuuuagggagagaacaauaccuaagau

SEQ ID NO: 211774 - RNA, 32 nt, Human
gugccuuuugcugcgcaccaaugcccagcagg

SEQ ID NO: 211775 - RNA, 32 nt, Human
gugcgaacuuucccuucuccuucgaaugcugu

SEQ ID NO: 211776 - RNA, 32 nt, Human
gugcgaagaaaaucauuggcucagauugcaac

SEQ ID NO: 211777 - RNA, 22 nt, Human
gugcgaagaagcugcagccgca

SEQ ID NO: 211778 - RNA, 32 nt, Human
gugcgacacggccgggaggaggagaacaacgc

SEQ ID NO: 211779 - RNA, 32 nt, Human
gugcgacccuggggcugcugccaggcugcggu

SEQ ID NO: 211780 - RNA, 32 nt, Human
gugcgaccucagacuaaugacauccuggcuga

SEQ ID NO: 211781 - RNA, 32 nt, Human
gugcgagagggugugagagugaguggcgugcu

SEQ ID NO: 211782 - RNA, 32 nt, Human
gugcgagauccugacccaagagcaccauaaca

SEQ ID NO: 211783 - RNA, 32 nt, Human
gugcgagcagaggcgcggccaccgcauccgug

SEQ ID NO: 211784 - RNA, 32 nt, Human
gugcgagccagccccgacugcuccuccucuuc

SEQ ID NO: 211785 - RNA, 32 nt, Human
gugcgagggcccugcuuguagcuggacccugg

SEQ ID NO: 211786 - RNA, 32 nt, Human
gugcgagguggcaaaugcaacaugcucuccag

SEQ ID NO: 211787 - RNA, 32 nt, Human
gugcgagugaggcagccccgaggcucugcucg

SEQ ID NO: 211788 - RNA, 32 nt, Human
gugcgaguggcuggugggccugggcagugggc

SEQ ID NO: 211789 - RNA, 32 nt, Human
gugcgagugggugguggaguaggggugggagu

SEQ ID NO: 211790 - RNA, 32 nt, Human
gugcgaucucagcucacagcaaccuccgccuc

SEQ ID NO: 211791 - RNA, 32 nt, Human
gugcgaucucagcucacugcaaccuccgccuc

SEQ ID NO: 211792 - RNA, 32 nt, Human
gugcgaucucagcucacugcaaccuccgccug

SEQ ID NO: 211793 - RNA, 32 nt, Human
gugcgauggaaauguguuccugccggagucug

SEQ ID NO: 211794 - RNA, 24 nt, Human
gugcgauggcucacgccuguaauc

SEQ ID NO: 211795 - RNA, 17 nt, Human
gugcgcaacaacaagga

SEQ ID NO: 211796 - RNA, 32 nt, Human
gugcgcacacacacaagaagccuuagcguuuu

SEQ ID NO: 211797 - RNA, 32 nt, Human
gugcgcacagcagcaggcuuucuguacccaga

SEQ ID NO: 211798 - RNA, 32 nt, Human
gugcgcaccagcugccugcuguuuacacccag

SEQ ID NO: 211799 - RNA, 32 nt, Human
gugcgcacccccuucgagaucucccucuggau

SEQ ID NO: 211800 - RNA, 32 nt, Human
gugcgcacgugucggcgcucacacacacaugc

SEQ ID NO: 211801 - RNA, 32 nt, Human
gugcgcacuuccccauccccugccuggagccu

SEQ ID NO: 211802 - RNA, 23 nt, Human
gugcgcagccagcagguggcgca

SEQ ID NO: 211803 - RNA, 32 nt, Human
gugcgcagggacuggcggcagcgcggucagag

SEQ ID NO: 211804 - RNA, 32 nt, Human
gugcgcaugccuguagucccagcuacuuggga

SEQ ID NO: 211805 - RNA, 32 nt, Human
gugcgcauuaaaaucaguuuguaagggagaca

SEQ ID NO: 211806 - RNA, 32 nt, Human
gugcgccaacgccagcaccaaugucgcgccug

SEQ ID NO: 211807 - RNA, 32 nt, Human
gugcgccaccuugcccggcuaauuuuucuauu

SEQ ID NO: 211808 - RNA, 32 nt, Human
gugcgccacuaugccugacuaauuuuguaguu

SEQ ID NO: 211809 - RNA, 32 nt, Human
gugcgccacugcacccggcccgugaaggucuu

SEQ ID NO: 211810 - RNA, 32 nt, Human
gugcgccacuucacuccagccugggcaacaga

SEQ ID NO: 211811 - RNA, 32 nt, Human
gugcgccccugccacugcugcugauuaggguu

SEQ ID NO: 211812 - RNA, 32 nt, Human
gugcgccgagccccggcccagcgcggcccccg

SEQ ID NO: 211813 - RNA, 32 nt, Human
gugcgccgcugugcugggagcugcagugguaa

SEQ ID NO: 211814 - RNA, 32 nt, Human
gugcgccuaaacugcugauuggccucaacuug

SEQ ID NO: 211815 - RNA, 32 nt, Human
gugcgccuauaaucccagcuacucaggaggca

SEQ ID NO: 211816 - RNA, 32 nt, Human
gugcgccugcagcccuugguucuuggaaacgc

SEQ ID NO: 211817 - RNA, 32 nt, Human
gugcgccugccugccggccuccgcaccguccg

SEQ ID NO: 211818 - RNA, 32 nt, Human
gugcgccuguaaccccagcuauucgggaggcu

SEQ ID NO: 211819 - RNA, 32 nt, Human
gugcgccuguaaucccagcuacccgggaggcu

SEQ ID NO: 211820 - RNA, 32 nt, Human
gugcgccuguaaucccagcuaccggagaggcu

SEQ ID NO: 211821 - RNA, 32 nt, Human
gugcgccuguaaucccagcuacucaagaggcu

SEQ ID NO: 211822 - RNA, 32 nt, Human
gugcgccuguaaucccagcuacucaggaggcu

SEQ ID NO: 211823 - RNA, 32 nt, Human
gugcgccuguaaucccagcuacuccgggaggc

SEQ ID NO: 211824 - RNA, 32 nt, Human
gugcgccuguaaucccagcuacucgggaggcu

SEQ ID NO: 211825 - RNA, 32 nt, Human
gugcgccuguaaucccagcuacucuggaggcu

SEQ ID NO: 211826 - RNA, 32 nt, Human
gugcgccuguaaucccagcuacuugggaggcu

SEQ ID NO: 211827 - RNA, 32 nt, Human
gugcgccuguaaucccagcuauauaggaggcu

SEQ ID NO: 211828 - RNA, 32 nt, Human
gugcgccuguaaucucagcuacucaagaggcu

SEQ ID NO: 211829 - RNA, 32 nt, Human
gugcgccuguaaucucagcuacuugggagccu

SEQ ID NO: 211830 - RNA, 32 nt, Human
gugcgccuguaauuccagcuacucgggaggcu

SEQ ID NO: 211831 - RNA, 32 nt, Human
gugcgccuguagucccagcuacucaggaggcu

SEQ ID NO: 211832 - RNA, 32 nt, Human
gugcgccuguagucccagcuacucgggagacu

SEQ ID NO: 211833 - RNA, 32 nt, Human
gugcgccuguagucccagcuacucgggaggcu

SEQ ID NO: 211834 - RNA, 32 nt, Human
gugcgccuguagucccagcuacuugggaggcu

SEQ ID NO: 211835 - RNA, 32 nt, Human
gugcgccuguagucccagcuacuugugaggcu

SEQ ID NO: 211836 - RNA, 32 nt, Human
gugcgccuguagucccagcugcucggggaggc

SEQ ID NO: 211837 - RNA, 32 nt, Human
gugcgccuguagucucagcuacuuaggagaau

SEQ ID NO: 211838 - RNA, 32 nt, Human
gugcgcgaugccuugaaccugggaaacuaugu

SEQ ID NO: 211839 - RNA, 32 nt, Human
gugcgcgcacacaccacacaugcacacacgua

SEQ ID NO: 211840 - RNA, 32 nt, Human
gugcgcggcuuggaaggauggcugguccuugc

SEQ ID NO: 211841 - RNA, 32 nt, Human
gugcgcggguggagcucaguaggaccacggcg

SEQ ID NO: 211842 - RNA, 32 nt, Human
gugcgcgugaccaccugagcucugccuucugu

SEQ ID NO: 211843 - RNA, 32 nt, Human
gugcgcuaggcuuggugggaaggccuguucuc

SEQ ID NO: 211844 - RNA, 31 nt, Human
gugcgcucaauaaaaaugcuggaauucaaaa

SEQ ID NO: 211845 - RNA, 32 nt, Human
gugcgcucaccuagacggccgggcaguuagga

SEQ ID NO: 211846 - RNA, 32 nt, Human
gugcgcuccaauucacggugguuuccaagcgc

SEQ ID NO: 211847 - RNA, 32 nt, Human
gugcgcuccagccugggcaacagagcgagacu

SEQ ID NO: 211848 - RNA, 32 nt, Human
gugcgcuccucaccccucuacagacaggggcg

SEQ ID NO: 211849 - RNA, 32 nt, Human
gugcgcucgcugccugccucucuggcugucug

SEQ ID NO: 211850 - RNA, 31 nt, Human
gugcgcucucccugagugccuguguagcugg

SEQ ID NO: 211851 - RNA, 32 nt, Human
gugcgcucugcagcaugucgcuacaugccugg

SEQ ID NO: 211852 - RNA, 32 nt, Human
gugcgcugaccuuucuagaaugcaaggcggug

SEQ ID NO: 211853 - RNA, 32 nt, Human
gugcgcugcuccugcccucuccuugcccugcc

SEQ ID NO: 211854 - RNA, 29 nt, Human
gugcgcuggcugcugcuuuucugcuccug

SEQ ID NO: 211855 - RNA, 32 nt, Human
gugcgcuguggacacagcaguccgcggaauuc

SEQ ID NO: 211856 - RNA, 32 nt, Human
gugcgcuuguaaucccagcuacucaggaggcu

SEQ ID NO: 211857 - RNA, 32 nt, Human
gugcgcuuguaaucccagcuacucgggaggcu

SEQ ID NO: 211858 - RNA, 32 nt, Human
gugcgcuuguaguaccagcuacuuggauggcu

SEQ ID NO: 211859 - RNA, 32 nt, Human
gugcgcuuguagucccagcuacucaggaggcu

SEQ ID NO: 211860 - RNA, 32 nt, Human
gugcgcuuuccguccuuucaaaggacaacugu

SEQ ID NO: 211861 - RNA, 32 nt, Human
gugcggaaagagaaaaaggaaaacggggcaca

SEQ ID NO: 211862 - RNA, 32 nt, Human
gugcggaacgccgcggugucucggcgccucug

SEQ ID NO: 211863 - RNA, 32 nt, Human
gugcggagaaagcugacugggccccgcgucuc

SEQ ID NO: 211864 - RNA, 32 nt, Human
gugcggagcgagugggagcgagacggcccuga

SEQ ID NO: 211865 - RNA, 32 nt, Human
gugcggagcuccccugcugguuggggcucagc

SEQ ID NO: 211866 - RNA, 32 nt, Human
gugcggaggagguacccccaccccuggcacag

SEQ ID NO: 211867 - RNA, 32 nt, Human
gugcggagggucaaggcccacacccggaaacc

SEQ ID NO: 211868 - RNA, 32 nt, Human
gugcggaguguggagcuggaccagcugccuga

SEQ ID NO: 211869 - RNA, 24 nt, Human
gugcggcacggcacggugggagug

SEQ ID NO: 211870 - RNA, 32 nt, Human
gugcggcagcggagagcccaggagaacgagcc

SEQ ID NO: 211871 - RNA, 24 nt, Human
gugcggcagcucacaccuguaauc

SEQ ID NO: 211872 - RNA, 24 nt, Human
gugcggcagcucaugccuguaauc

SEQ ID NO: 211873 - RNA, 23 nt, Human
gugcggcagcugcugcucaggug

SEQ ID NO: 211874 - RNA, 32 nt, Human
gugcggcagcugcugcucaggugccaugcccu

SEQ ID NO: 211875 - RNA, 32 nt, Human
gugcggcaggguggggaacgcgggagcggggc

SEQ ID NO: 211876 - RNA, 22 nt, Human
gugcggcaugggcuaagucacu

SEQ ID NO: 211877 - RNA, 32 nt, Human
gugcggccccugcaccugccggcgacacuccu

SEQ ID NO: 211878 - RNA, 32 nt, Human
gugcggccuccagggcgccuccugccggcccc

SEQ ID NO: 211879 - RNA, 32 nt, Human
gugcggccucugccugcagccucguccggcau

SEQ ID NO: 211880 - RNA, 32 nt, Human
gugcggccugaugacccacacaccucucaggg

SEQ ID NO: 211881 - RNA, 32 nt, Human
gugcggcgcggucucagggaagguggggcuau

SEQ ID NO: 211882 - RNA, 32 nt, Human
gugcggcgggugccguggaguggauguaccca

SEQ ID NO: 211883 - RNA, 32 nt, Human
gugcggcggugcuggagguugcggcggcggcu

SEQ ID NO: 211884 - RNA, 32 nt, Human
gugcggcucacugcgcggucccucucagcucc

SEQ ID NO: 211885 - RNA, 32 nt, Human
gugcggcucccagguggggcuguugcacuacc

SEQ ID NO: 211886 - RNA, 32 nt, Human
gugcggcugcaaugcugagcucccgggccgag

SEQ ID NO: 211887 - RNA, 32 nt, Human
gugcggcugccgagagguggucuuguaagcgc

SEQ ID NO: 211888 - RNA, 32 nt, Human
gugcggcuggccuccgccugggucaugggccu

SEQ ID NO: 211889 - RNA, 32 nt, Human
gugcggcuuccagagguacagcugcugaaagu

SEQ ID NO: 211890 - RNA, 32 nt, Human
gugcgggacgguuccacacagccccggccuuu

SEQ ID NO: 211891 - RNA, 22 nt, Human
gugcgggagagcaaggccagug

SEQ ID NO: 211892 - RNA, 32 nt, Human
gugcgggaguccugaggagauguggccugcag

SEQ ID NO: 211893 - RNA, 32 nt, Human
gugcgggcaggcgggggcgcugacgagaagca

SEQ ID NO: 211894 - RNA, 32 nt, Human
gugcgggcaucgugguaauggugcuguucucg

SEQ ID NO: 211895 - RNA, 32 nt, Human
gugcgggccaggcggaggcucaagcggggauc

SEQ ID NO: 211896 - RNA, 32 nt, Human
gugcgggccggcagaggcuggcggggagcagc

SEQ ID NO: 211897 - RNA, 32 nt, Human
gugcgggccugggcccugcuccaccuccagaa

SEQ ID NO: 211898 - RNA, 32 nt, Human
gugcgggcucacugcaagcuccggcucccggg

SEQ ID NO: 211899 - RNA, 32 nt, Human
gugcgggcucaggauggggcggccguggugag

SEQ ID NO: 211900 - RNA, 32 nt, Human
gugcgggcucaggauggggcggccguguugag

SEQ ID NO: 211901 - RNA, 32 nt, Human
gugcggggacuggccgaggccccugcacccug

SEQ ID NO: 211902 - RNA, 32 nt, Human
gugcggggaggggaaggacgccuccaagcccg

SEQ ID NO: 211903 - RNA, 32 nt, Human
gugcggggcagcccugggucucugccucaggg

SEQ ID NO: 211904 - RNA, 32 nt, Human
gugcggggcccaccaagcccacgcccacccug

SEQ ID NO: 211905 - RNA, 32 nt, Human
gugcggggcggccggcggaggagcagcaggau

SEQ ID NO: 211906 - RNA, 32 nt, Human
gugcgggggaagcacacucgcggugaaccugg

SEQ ID NO: 211907 - RNA, 30 nt, Human
gugcggggguggggcagggcacagugggug

SEQ ID NO: 211908 - RNA, 32 nt, Human
gugcggggucucugugcacuuggagcuggggg

SEQ ID NO: 211909 - RNA, 32 nt, Human
gugcgggguuccucgcugccuucuccucccua

SEQ ID NO: 211910 - RNA, 32 nt, Human
gugcgggucgcggggaccgagcgcggcugagg

SEQ ID NO: 211911 - RNA, 16 nt, Human
gugcgggugcaggcgg

SEQ ID NO: 211912 - RNA, 32 nt, Human
gugcggucacagcucacugccuccugggcuca

SEQ ID NO: 211913 - RNA, 32 nt, Human
gugcggucccucccccucacguucucucuucc

SEQ ID NO: 211914 - RNA, 32 nt, Human
gugcggucuccuagggaaggggcagugaugcc

SEQ ID NO: 211915 - RNA, 24 nt, Human
gugcggugacucacgccuauaauc

SEQ ID NO: 211916 - RNA, 24 nt, Human
gugcggugacucaugccuguaauc

SEQ ID NO: 211917 - RNA, 32 nt, Human
gugcggugacuugcccggggcuccagguagcc

SEQ ID NO: 211918 - RNA, 32 nt, Human
gugcggugacuugcccgggguuccagguagcc

SEQ ID NO: 211919 - RNA, 32 nt, Human
gugcggugcccgaggcuucggagcaggcugga

SEQ ID NO: 211920 - RNA, 32 nt, Human
gugcgguggaggcggccuugcgguggugcuuu

SEQ ID NO: 211921 - RNA, 32 nt, Human
gugcgguggcagcugaggauugccugcgugua

SEQ ID NO: 211922 - RNA, 32 nt, Human
gugcgguggcuauaauccuagcacuuugggag

SEQ ID NO: 211923 - RNA, 24 nt, Human
gugcgguggcucacaccuauaauc

SEQ ID NO: 211924 - RNA, 21 nt, Human
gugcgguggcucacaccugua

SEQ ID NO: 211925 - RNA, 24 nt, Human
gugcgguggcucacaccuguaauc

SEQ ID NO: 211926 - RNA, 32 nt, Human
gugcgguggcucacacuguaaucccagcacuu

SEQ ID NO: 211927 - RNA, 24 nt, Human
gugcgguggcucacgccuauaauc

SEQ ID NO: 211928 - RNA, 21 nt, Human
gugcgguggcucacgccugua

SEQ ID NO: 211929 - RNA, 24 nt, Human
gugcgguggcucacgccuguaauc

SEQ ID NO: 211930 - RNA, 24 nt, Human
gugcgguggcucacgucuguaauc

SEQ ID NO: 211931 - RNA, 24 nt, Human
gugcgguggcucaggccuguaauc

SEQ ID NO: 211932 - RNA, 24 nt, Human
gugcgguggcucauaccuauaauc

SEQ ID NO: 211933 - RNA, 24 nt, Human
gugcgguggcucauaccuguaauc

SEQ ID NO: 211934 - RNA, 24 nt, Human
gugcgguggcucaugccuauaauc

SEQ ID NO: 211935 - RNA, 24 nt, Human
gugcgguggcucaugccugcaauu

SEQ ID NO: 211936 - RNA, 24 nt, Human
gugcgguggcucaugccuggaauc

SEQ ID NO: 211937 - RNA, 21 nt, Human
gugcgguggcucaugccugua

SEQ ID NO: 211938 - RNA, 24 nt, Human
gugcgguggcucaugccuguaauc

SEQ ID NO: 211939 - RNA, 24 nt, Human
gugcgguggcucaugucuguaauc

SEQ ID NO: 211940 - RNA, 24 nt, Human
gugcgguggcuuacaccuguaauc

SEQ ID NO: 211941 - RNA, 24 nt, Human
gugcggugguucacaccuguaauc

SEQ ID NO: 211942 - RNA, 24 nt, Human
gugcggugguucaugccuauaauc

SEQ ID NO: 211943 - RNA, 32 nt, Human
gugcggugugcugugcuggagagcacagcccc

SEQ ID NO: 211944 - RNA, 32 nt, Human
gugcgguguggaccccaaagccccugcuccag

SEQ ID NO: 211945 - RNA, 32 nt, Human
gugcgguuguacauccuccccaccucauaacg

SEQ ID NO: 211946 - RNA, 32 nt, Human
gugcguagcagugucugugccucuccugccca

SEQ ID NO: 211947 - RNA, 32 nt, Human
gugcguaucugugaaccugggagacgguuacu

SEQ ID NO: 211948 - RNA, 32 nt, Human
gugcguauuuucucuuucuuccugucacccug

SEQ ID NO: 211949 - RNA, 32 nt, Human
gugcguccagccucacugacccucuuccuugg

SEQ ID NO: 211950 - RNA, 32 nt, Human
gugcguccagcuuacacaaucauaauucaaag

SEQ ID NO: 211951 - RNA, 32 nt, Human
gugcguccaguggagcucugaguuucgaaucg

SEQ ID NO: 211952 - RNA, 32 nt, Human
gugcgucccccaggcugguggccgagcugcag

SEQ ID NO: 211953 - RNA, 32 nt, Human
gugcguccggccgccugagcagguguggugcc

SEQ ID NO: 211954 - RNA, 32 nt, Human
gugcguccugguccaccauggccaaaccaaca

SEQ ID NO: 211955 - RNA, 32 nt, Human
gugcgucucuccuucucaugccguucuggaaa

SEQ ID NO: 211956 - RNA, 32 nt, Human
gugcgucugcgagcgcacacacaugcacaagu

SEQ ID NO: 211957 - RNA, 32 nt, Human
gugcgucuucuaguuuauuccuccuggggaca

SEQ ID NO: 211958 - RNA, 32 nt, Human
gugcgucuuuccaaucccauguuccuccauuc

SEQ ID NO: 211959 - RNA, 32 nt, Human
gugcgugacccgaccggcugugguguuccagu

SEQ ID NO: 211960 - RNA, 32 nt, Human
gugcgugcagagcagcaggaagugagacacgu

SEQ ID NO: 211961 - RNA, 32 nt, Human
gugcgugcagcgcaugaugaaugagugcgucc

SEQ ID NO: 211962 - RNA, 32 nt, Human
gugcgugcccuugagcuccuuaccaccccuuu

SEQ ID NO: 211963 - RNA, 32 nt, Human
gugcgugccuauaauccuagcuacucaggugg

SEQ ID NO: 211964 - RNA, 32 nt, Human
gugcgugccuguaaucccagcuacucgggagg

SEQ ID NO: 211965 - RNA, 32 nt, Human
gugcgugccuguagccucagcuacucgggugg

SEQ ID NO: 211966 - RNA, 32 nt, Human
gugcgugccuguagucccagcuacucgggagg

SEQ ID NO: 211967 - RNA, 32 nt, Human
gugcgugccuguagucccagcuacuuaggagg

SEQ ID NO: 211968 - RNA, 32 nt, Human
gugcgugccuguagucccagcuacuugggagg

SEQ ID NO: 211969 - RNA, 32 nt, Human
gugcgugccuguagucucagcuacucaggagg

SEQ ID NO: 211970 - RNA, 32 nt, Human
gugcgugccuguauucccggccacucgggagg

SEQ ID NO: 211971 - RNA, 32 nt, Human
gugcgugcgucugucugucucuggcccccagc

SEQ ID NO: 211972 - RNA, 32 nt, Human
gugcgugcugggugggguggggcacggaggcu

SEQ ID NO: 211973 - RNA, 32 nt, Human
gugcgugcugugugugcaugugugcgagaggg

SEQ ID NO: 211974 - RNA, 32 nt, Human
gugcguggagguggagccugcggcuggaguaa

SEQ ID NO: 211975 - RNA, 32 nt, Human
gugcguggccauacccugccucccucucuggc

SEQ ID NO: 211976 - RNA, 32 nt, Human
gugcgugggaggacggagccugggagcggggc

SEQ ID NO: 211977 - RNA, 32 nt, Human
gugcgugggcagguaggagguaggauguuucc

SEQ ID NO: 211978 - RNA, 32 nt, Human
gugcgugugaagccacggaaggcuugguccca

SEQ ID NO: 211979 - RNA, 32 nt, Human
gugcgugugguuuguuccuucuccuugccggg

SEQ ID NO: 211980 - RNA, 32 nt, Human
gugcguguguggggcaggcaggauguggugca

SEQ ID NO: 211981 - RNA, 32 nt, Human
gugcguucaagaggcagaugaggcucaguugg

SEQ ID NO: 211982 - RNA, 32 nt, Human
gugcuaacagcccagccuccagccuggccuuu

SEQ ID NO: 211983 - RNA, 32 nt, Human
gugcuaacucagagacuggagauuauaguuua

SEQ ID NO: 211984 - RNA, 32 nt, Human
gugcuaacuccucgcuagcucucccucucaca

SEQ ID NO: 211985 - RNA, 32 nt, Human
gugcuaagaccacccagcugucccuggguucu

SEQ ID NO: 211986 - RNA, 32 nt, Human
gugcuaagggcugggcugcauguggguagccc

SEQ ID NO: 211987 - RNA, 32 nt, Human
gugcuaaguuuaaaauaaucacuguuggaauu

SEQ ID NO: 211988 - RNA, 32 nt, Human
gugcuaaucaauggcugcagaaaccuaacacc

SEQ ID NO: 211989 - RNA, 24 nt, Human
gugcuaaugccgaaccccuguggg

SEQ ID NO: 211990 - RNA, 32 nt, Human
gugcuaauguggcagugacuguaaaacuggca

SEQ ID NO: 211991 - RNA, 26 nt, Human
gugcuaauuccugaggaccugaaggg

SEQ ID NO: 211992 - RNA, 20 nt, Human
gugcuacacccagauccugu

SEQ ID NO: 211993 - RNA, 32 nt, Human
gugcuacacgggcucgggaacagaacaccgug

SEQ ID NO: 211994 - RNA, 32 nt, Human
gugcuacagcaugcaagugagcagugaggugu

SEQ ID NO: 211995 - RNA, 32 nt, Human
gugcuacagcauggggagccucgaccaggcuc

SEQ ID NO: 211996 - RNA, 32 nt, Human
gugcuacaggagguaauagaccagcuucucag

SEQ ID NO: 211997 - RNA, 32 nt, Human
gugcuaccauuauuuugccacagacuuugaag

SEQ ID NO: 211998 - RNA, 32 nt, Human
gugcuacgauaugccaggcauugagcuuagcg

SEQ ID NO: 211999 - RNA, 32 nt, Human
gugcuacucuacuccagccugggcaacacagc

SEQ ID NO: 212000 - RNA, 32 nt, Human
gugcuacucuuggucucccacaggaaaaggcc

SEQ ID NO: 212001 - RNA, 32 nt, Human
gugcuacugcacuccaaucuggcaacagagcg

SEQ ID NO: 212002 - RNA, 32 nt, Human
gugcuacugcacuccagccccagcugggugac

SEQ ID NO: 212003 - RNA, 32 nt, Human
gugcuacugcacuccagccugggcaacacaga

SEQ ID NO: 212004 - RNA, 32 nt, Human
gugcuacugcacuccagccugggcaacagagc

SEQ ID NO: 212005 - RNA, 32 nt, Human
gugcuacugcacuccagccugggggacagaaa

SEQ ID NO: 212006 - RNA, 32 nt, Human
gugcuacugcacuccagucugggugacagagu

SEQ ID NO: 212007 - RNA, 32 nt, Human
gugcuacugcacucccgccugggugacagagu

SEQ ID NO: 212008 - RNA, 32 nt, Human
gugcuacugcacucuagauugggugacagagc

SEQ ID NO: 212009 - RNA, 32 nt, Human
gugcuacugcaguccagccugggcuacagagu

SEQ ID NO: 212010 - RNA, 32 nt, Human
gugcuacuuccucucaagaggcgguugagcgc

SEQ ID NO: 212011 - RNA, 21 nt, Human
gugcuacuuuagcaauaggcc

SEQ ID NO: 212012 - RNA, 32 nt, Human
gugcuagaaucuuccuuuucccucucucccuu

SEQ ID NO: 212013 - RNA, 32 nt, Human
gugcuagauguguguuuagagcuaaaccagcc

SEQ ID NO: 212014 - RNA, 32 nt, Human
gugcuagauucaccucaccccgggcaggagug

SEQ ID NO: 212015 - RNA, 32 nt, Human
gugcuagcacagacaccuuucuaacuggccaa

SEQ ID NO: 212016 - RNA, 32 nt, Human
gugcuagcgggagcgcgagccagcaagaggcg

SEQ ID NO: 212017 - RNA, 32 nt, Human
gugcuaggagccaaggagcaggacuggauuau

SEQ ID NO: 212018 - RNA, 32 nt, Human
gugcuaggcacugagucaggugcuuuacauac

SEQ ID NO: 212019 - RNA, 32 nt, Human
gugcuaggcugcagacugccuuguacucccug

SEQ ID NO: 212020 - RNA, 32 nt, Human
gugcuagggggacagggguggggugagcucug

SEQ ID NO: 212021 - RNA, 32 nt, Human
gugcuagguggagggaaggaaggagggagccg

SEQ ID NO: 212022 - RNA, 32 nt, Human
gugcuaguuuucauguucacacugacccuauu

SEQ ID NO: 212023 - RNA, 32 nt, Human
gugcuauaaaggaugccagcugugcuuuaggc

SEQ ID NO: 212024 - RNA, 32 nt, Human
gugcuauaacauguagucaucuguuuucugau

SEQ ID NO: 212025 - RNA, 32 nt, Human
gugcuauaaccaggguccugggugacagggcg

SEQ ID NO: 212026 - RNA, 32 nt, Human
gugcuauacugauucuguuugcauugcuguaa

SEQ ID NO: 212027 - RNA, 32 nt, Human
gugcuauacuuuucccccaacccuccaauaaa

SEQ ID NO: 212028 - RNA, 32 nt, Human
gugcuauagacacguggcagagcuguaaguaa

SEQ ID NO: 212029 - RNA, 32 nt, Human
gugcuauagagagggagguaacagaaagacuc

SEQ ID NO: 212030 - RNA, 32 nt, Human
gugcuauaggcaugcaccaccacguccaucua

SEQ ID NO: 212031 - RNA, 32 nt, Human
gugcuauauaaauaugucagauguacauagag

SEQ ID NO: 212032 - RNA, 32 nt, Human
gugcuaucauuguauucuuuaagaacuuuauu

SEQ ID NO: 212033 - RNA, 32 nt, Human
gugcuaugagguuucuuugacuucaauguauu

SEQ ID NO: 212034 - RNA, 32 nt, Human
gugcuauggaaaugccuuuuguggcaacucag

SEQ ID NO: 212035 - RNA, 30 nt, Human
gugcuauggaggcggcggcggcgguggugg

SEQ ID NO: 212036 - RNA, 32 nt, Human
gugcuauugaguuuguucuuuauucuuuuauc

SEQ ID NO: 212037 - RNA, 32 nt, Human
gugcuauugcacuccagccugggcgacagagc

SEQ ID NO: 212038 - RNA, 32 nt, Human
gugcuauugcacuccagccugggugacagacu

SEQ ID NO: 212039 - RNA, 32 nt, Human
gugcuauuguagucuuggcaagugagccaaga

SEQ ID NO: 212040 - RNA, 32 nt, Human
gugcuauuugcacucuagccugggugacagag

SEQ ID NO: 212041 - RNA, 32 nt, Human
gugcuauuuguguuaacauggaagaggauuca

SEQ ID NO: 212042 - RNA, 32 nt, Human
gugcucaaaugcaccucucugccuuugugcca

SEQ ID NO: 212043 - RNA, 32 nt, Human
gugcucaaccuacaguggagggagacugaccc

SEQ ID NO: 212044 - RNA, 32 nt, Human
gugcucaagaucuuugccuguaagcuugaaua

SEQ ID NO: 212045 - RNA, 22 nt, Human
gugcucaagcucugcaggacag

SEQ ID NO: 212046 - RNA, 32 nt, Human
gugcucaaguacaggcauaaccauuaacccag

SEQ ID NO: 212047 - RNA, 32 nt, Human
gugcucaaguagccuggcuggcacagggcugc

SEQ ID NO: 212048 - RNA, 32 nt, Human
gugcucacacaaaauacuggguggcuugguuu

SEQ ID NO: 212049 - RNA, 32 nt, Human
gugcucacaccuguaaucccagcacuuuggga

SEQ ID NO: 212050 - RNA, 32 nt, Human
gugcucacacuuccaagcaccccacaccaagg

SEQ ID NO: 212051 - RNA, 32 nt, Human
gugcucacagcuguaaucccagcacuuugagg

SEQ ID NO: 212052 - RNA, 21 nt, Human
gugcucaccacauaaccucug

SEQ ID NO: 212053 - RNA, 32 nt, Human
gugcucacccaggcugagggugccuuuguggc

SEQ ID NO: 212054 - RNA, 20 nt, Human
gugcucaccgaugcccucug

SEQ ID NO: 212055 - RNA, 21 nt, Human
gugcucaccguaugucuuuug

SEQ ID NO: 212056 - RNA, 21 nt, Human
gugcucaccuaaauccaucug

SEQ ID NO: 212057 - RNA, 22 nt, Human
gugcucaccugggacccuucug

SEQ ID NO: 212058 - RNA, 32 nt, Human
gugcucacgccuguaauaccagcacuuuggga

SEQ ID NO: 212059 - RNA, 32 nt, Human
gugcucacgccuguaaucccagcacuuuggga

SEQ ID NO: 212060 - RNA, 32 nt, Human
gugcucacgccuguaaucccagcacuuugggg

SEQ ID NO: 212061 - RNA, 32 nt, Human
gugcucacgccuguaauccuagcacuuuuggg

SEQ ID NO: 212062 - RNA, 32 nt, Human
gugcucacgccuguaauuccagcacuuuggga

SEQ ID NO: 212063 - RNA, 32 nt, Human
gugcucacgccugucaucccagcacuuuggga

SEQ ID NO: 212064 - RNA, 32 nt, Human
gugcucacucagcagaggaggcacuggccacu

SEQ ID NO: 212065 - RNA, 26 nt, Human
gugcucacugauguggcugcuuucug

SEQ ID NO: 212066 - RNA, 32 nt, Human
gugcucacuggguggagcuguggcagggggca

SEQ ID NO: 212067 - RNA, 32 nt, Human
gugcucagauacacaagugagggcuuuuuaac

SEQ ID NO: 212068 - RNA, 32 nt, Human
gugcucagcauccuccucuuccucgguggugg

SEQ ID NO: 212069 - RNA, 32 nt, Human
gugcucagccgcccaguccugccugcaagccc

SEQ ID NO: 212070 - RNA, 32 nt, Human
gugcucaggaaaccucacccaccucagcccuu

SEQ ID NO: 212071 - RNA, 32 nt, Human
gugcucaggaggcagcaucuggaguuggggca

SEQ ID NO: 212072 - RNA, 32 nt, Human
gugcucaggauuacaggcgugagccacugugc

SEQ ID NO: 212073 - RNA, 32 nt, Human
gugcucaggccgggcuuuccagaaggcacagg

SEQ ID NO: 212074 - RNA, 32 nt, Human
gugcucaggccuguguugguucuggggcccua

SEQ ID NO: 212075 - RNA, 32 nt, Human
gugcucaggcuggccaaggaccuucauugccu

SEQ ID NO: 212076 - RNA, 24 nt, Human
gugcucaggguggcgggcccuuug

SEQ ID NO: 212077 - RNA, 32 nt, Human
gugcucagguauaaagccaauuaagguacaau

SEQ ID NO: 212078 - RNA, 32 nt, Human
gugcucaguggggaugauggagggaaggcgcc

SEQ ID NO: 212079 - RNA, 32 nt, Human
gugcucaguuucccucccuucucccuccaucc

SEQ ID NO: 212080 - RNA, 24 nt, Human
gugcucauaccaggcacuucucug

SEQ ID NO: 212081 - RNA, 26 nt, Human
gugcucaucaucaugcccauuuucug

SEQ ID NO: 212082 - RNA, 32 nt, Human
gugcucauccucacccucauugacucaggccu

SEQ ID NO: 212083 - RNA, 21 nt, Human
gugcucaucucgugaccucug

SEQ ID NO: 212084 - RNA, 32 nt, Human
gugcucaucugucuguccuccuuuccucuccc

SEQ ID NO: 212085 - RNA, 32 nt, Human
gugcucaugccaggcugacggguccagugcgg

SEQ ID NO: 212086 - RNA, 32 nt, Human
gugcucaugccuguagucccagcuacuuggga

SEQ ID NO: 212087 - RNA, 21 nt, Human
gugcucauuaggcauuucuua

SEQ ID NO: 212088 - RNA, 32 nt, Human
gugcuccaacucccucagggccuguguugccg

SEQ ID NO: 212089 - RNA, 32 nt, Human
gugcuccaauuugccagccauucccaaccccc

SEQ ID NO: 212090 - RNA, 32 nt, Human
gugcuccacagcuguucuaggaacugacccug

SEQ ID NO: 212091 - RNA, 32 nt, Human
gugcuccaccucucuguaucuuucccuuguca

SEQ ID NO: 212092 - RNA, 32 nt, Human
gugcuccaccucuucaucucuccccuaaccac

SEQ ID NO: 212093 - RNA, 22 nt, Human
gugcuccagccacagaaaagaa

SEQ ID NO: 212094 - RNA, 32 nt, Human
gugcuccagcuuuccagugacaugugacggcg

SEQ ID NO: 212095 - RNA, 32 nt, Human
gugcucccaaagugcugagauuacaggcguga

SEQ ID NO: 212096 - RNA, 32 nt, Human
gugcucccaccacugcacuccagccugggaag

SEQ ID NO: 212097 - RNA, 32 nt, Human
gugcucccagcacuuugggaggcugagguagg

SEQ ID NO: 212098 - RNA, 32 nt, Human
gugcucccagccugcagucuuuggagcaaggc

SEQ ID NO: 212099 - RNA, 32 nt, Human
gugcucccaucuguaacucuccaucugugauu

SEQ ID NO: 212100 - RNA, 32 nt, Human
gugcuccccacauucuuccaguuaacauaaau

SEQ ID NO: 212101 - RNA, 23 nt, Human
gugcuccccaugggugaccucug

SEQ ID NO: 212102 - RNA, 32 nt, Human
gugcuccccuccugcuaaagaaccaguuaccc

SEQ ID NO: 212103 - RNA, 32 nt, Human
gugcucccgaguaagcagggauguacuagggg

SEQ ID NO: 212104 - RNA, 32 nt, Human
gugcucccgccuggaaucccagcacuuuggga

SEQ ID NO: 212105 - RNA, 32 nt, Human
gugcucccguaaugccagcuacuugggaggcu

SEQ ID NO: 212106 - RNA, 32 nt, Human
gugcucccuaccaccuccccagccuuugauca

SEQ ID NO: 212107 - RNA, 32 nt, Human
gugcucccuccagacucccuggcugcgggugg

SEQ ID NO: 212108 - RNA, 17 nt, Human
gugcucccucugcugcc

SEQ ID NO: 212109 - RNA, 32 nt, Human
gugcucccucuggaagcuugggugaccggggc

SEQ ID NO: 212110 - RNA, 32 nt, Human
gugcucccugcuccuucccgcguagccaggug

SEQ ID NO: 212111 - RNA, 32 nt, Human
gugcucccuggaagauggaucuugccuugugg

SEQ ID NO: 212112 - RNA, 32 nt, Human
gugcucccuuucucuccucucuccuuuucuag

SEQ ID NO: 212113 - RNA, 18 nt, Human
gugcuccggcccaggcgg

SEQ ID NO: 212114 - RNA, 32 nt, Human
gugcuccggcccaggcgggggagucagugccc

SEQ ID NO: 212115 - RNA, 18 nt, Human
gugcuccgggaccuggaa

SEQ ID NO: 212116 - RNA, 32 nt, Human
gugcuccuacagccacggcuccgggcggggaa

SEQ ID NO: 212117 - RNA, 32 nt, Human
gugcuccuacagccgcaucugcgguuaacaua

SEQ ID NO: 212118 - RNA, 32 nt, Human
gugcuccuauagcuccagcuacucaggaggcu

SEQ ID NO: 212119 - RNA, 32 nt, Human
gugcuccucacuucccagagggugcaggagcc

SEQ ID NO: 212120 - RNA, 32 nt, Human
gugcuccucacuucccaguaggggcggccggg

SEQ ID NO: 212121 - RNA, 32 nt, Human
gugcuccucccuccuccauccucucuccuccc

SEQ ID NO: 212122 - RNA, 32 nt, Human
gugcuccugaggaggcggcggcagcagcgccu

SEQ ID NO: 212123 - RNA, 32 nt, Human
gugcuccugcagcuaucauucauccaguuaag

SEQ ID NO: 212124 - RNA, 32 nt, Human
gugcuccugccagcugugcacacaucucugua

SEQ ID NO: 212125 - RNA, 32 nt, Human
gugcuccugcccaguugaucagucccauccug

SEQ ID NO: 212126 - RNA, 32 nt, Human
gugcuccugcucccagcagcccucucuuagaa

SEQ ID NO: 212127 - RNA, 32 nt, Human
gugcuccugcugucaagauuucugucauggaa

SEQ ID NO: 212128 - RNA, 32 nt, Human
gugcuccugcugucuuuuccuguuucuguuug

SEQ ID NO: 212129 - RNA, 32 nt, Human
gugcuccuggaggcaggugaugcugugggcac

SEQ ID NO: 212130 - RNA, 32 nt, Human
gugcuccugggagcugugcugacucuucccgg

SEQ ID NO: 212131 - RNA, 32 nt, Human
gugcuccuggugucuccaccugccuggguugu

SEQ ID NO: 212132 - RNA, 32 nt, Human
gugcuccuuccuggcccggucacauugccucc

SEQ ID NO: 212133 - RNA, 32 nt, Human
gugcuccuucucccugagacugaggccacaca

SEQ ID NO: 212134 - RNA, 32 nt, Human
gugcuccuugacugucucuccccaccgggguc

SEQ ID NO: 212135 - RNA, 32 nt, Human
gugcuccuuggagcuggugugcaguguccuga

SEQ ID NO: 212136 - RNA, 22 nt, Human
gugcucgagcucugcaggccag

SEQ ID NO: 212137 - RNA, 22 nt, Human
gugcucgcccugcccaacgcag

SEQ ID NO: 212138 - RNA, 32 nt, Human
gugcucgccuguaaucccagcuacuugggagg

SEQ ID NO: 212139 - RNA, 32 nt, Human
gugcucgucugcacuccacuccauccugcugc

SEQ ID NO: 212140 - RNA, 32 nt, Human
gugcucgugaacuaaggagaaaaagaacagac

SEQ ID NO: 212141 - RNA, 32 nt, Human
gugcucuaaaaaugcagguacucaaaggaaau

SEQ ID NO: 212142 - RNA, 19 nt, Human
gugcucuaacuuuucuuaa

SEQ ID NO: 212143 - RNA, 32 nt, Human
gugcucucacccucccuucucucccucaauaa

SEQ ID NO: 212144 - RNA, 32 nt, Human
gugcucucauuggccucucuagcuaggccguc

SEQ ID NO: 212145 - RNA, 32 nt, Human
gugcucuccagaacccaacugccucaucccgc

SEQ ID NO: 212146 - RNA, 32 nt, Human
gugcucuccagccuggcugccagggagggugg

SEQ ID NO: 212147 - RNA, 32 nt, Human
gugcucuccagcucuucaccuuccucaccuca

SEQ ID NO: 212148 - RNA, 32 nt, Human
gugcucuccaggaguccggagcaugguccugg

SEQ ID NO: 212149 - RNA, 32 nt, Human
gugcucucccugcugucaacacuugcguacaa

SEQ ID NO: 212150 - RNA, 32 nt, Human
gugcucuccucaaguauggcuuuaguuccuuc

SEQ ID NO: 212151 - RNA, 32 nt, Human
gugcucuccugccucuucgucuuucugauuag

SEQ ID NO: 212152 - RNA, 32 nt, Human
gugcucuccugcuguguggcuuggggcuuguu

SEQ ID NO: 212153 - RNA, 32 nt, Human
gugcucuccugguuucugugcaggcggguuga

SEQ ID NO: 212154 - RNA, 32 nt, Human
gugcucuccuucagcccucuccuucggaggga

SEQ ID NO: 212155 - RNA, 32 nt, Human
gugcucucgagaucaccgucccuucccgagaa

SEQ ID NO: 212156 - RNA, 32 nt, Human
gugcucucuccucaaauggaggcagccauggc

SEQ ID NO: 212157 - RNA, 32 nt, Human
gugcucucuccuuccugaagcgcaggcagggg

SEQ ID NO: 212158 - RNA, 32 nt, Human
gugcucugaaguggagugaagccucaagccca

SEQ ID NO: 212159 - RNA, 32 nt, Human
gugcucugacugcaauuuuucuucuuuugcaa

SEQ ID NO: 212160 - RNA, 32 nt, Human
gugcucugauucucccugauggucuuuauagc

SEQ ID NO: 212161 - RNA, 32 nt, Human
gugcucugcacaaaaacagaccuguuguccau

SEQ ID NO: 212162 - RNA, 32 nt, Human
gugcucugcacccccugcucccuugggcuggc

SEQ ID NO: 212163 - RNA, 32 nt, Human
gugcucugcgugggaccaugccugaacucccc

SEQ ID NO: 212164 - RNA, 32 nt, Human
gugcucugcuaccuguucaucagcucuaagcc

SEQ ID NO: 212165 - RNA, 32 nt, Human
gugcucugcucuugccauaauaccaaaccuuu

SEQ ID NO: 212166 - RNA, 32 nt, Human
gugcucuggaagcguaugauagaggcccgggg

SEQ ID NO: 212167 - RNA, 32 nt, Human
gugcucugggccggcgccuucaccauggccuc

SEQ ID NO: 212168 - RNA, 32 nt, Human
gugcucuggggcacuguugaggauguguccag

SEQ ID NO: 212169 - RNA, 32 nt, Human
gugcucugggugggaggagcagcguacacccg

SEQ ID NO: 212170 - RNA, 32 nt, Human
gugcucugucugucugucuuugucugucuguu

SEQ ID NO: 212171 - RNA, 32 nt, Human
gugcucuguguagucaugacaucagcucuucg

SEQ ID NO: 212172 - RNA, 32 nt, Human
gugcucugugugaccaaguccaagucgaugca

SEQ ID NO: 212173 - RNA, 32 nt, Human
gugcucuguuagcugcucccagugcugucccc

SEQ ID NO: 212174 - RNA, 32 nt, Human
gugcucuguugagccuuccuuucuguuugggu

SEQ ID NO: 212175 - RNA, 32 nt, Human
gugcucuuaaccuucugagugcugcuagccca

SEQ ID NO: 212176 - RNA, 32 nt, Human
gugcucuuauuaucuguguuugcucacagcaa

SEQ ID NO: 212177 - RNA, 32 nt, Human
gugcucuucugucugcagugugcacggccuug

SEQ ID NO: 212178 - RNA, 22 nt, Human
gugcucuugcccaccgacagcu

SEQ ID NO: 212179 - RNA, 32 nt, Human
gugcucuuggagcugugacuggacuccccugc

SEQ ID NO: 212180 - RNA, 32 nt, Human
gugcucuuuccagaugaaaacuacucuuuugg

SEQ ID NO: 212181 - RNA, 22 nt, Human
gugcucuuugaggccgacgcua

SEQ ID NO: 212182 - RNA, 32 nt, Human
gugcugaaaaugccaaacagggcccaaaggac

SEQ ID NO: 212183 - RNA, 32 nt, Human
gugcugaaaggagacgccggugcucugucucu

SEQ ID NO: 212184 - RNA, 32 nt, Human
gugcugaaaguguguaaguuccuggccauccu

SEQ ID NO: 212185 - RNA, 32 nt, Human
gugcugaacagagguuugaaucauuccagcug

SEQ ID NO: 212186 - RNA, 32 nt, Human
gugcugaacauuaacuuuuuggaguugugaaa

SEQ ID NO: 212187 - RNA, 32 nt, Human
gugcugaacgauggcgaacacagcagaauggg

SEQ ID NO: 212188 - RNA, 32 nt, Human
gugcugaagaaauauuuucaugugaguaaaau

SEQ ID NO: 212189 - RNA, 32 nt, Human
gugcugaagauaaggaaacccgggaccucguu

SEQ ID NO: 212190 - RNA, 32 nt, Human
gugcugacaagcaggauggccaguaaaccuuc

SEQ ID NO: 212191 - RNA, 32 nt, Human
gugcugacacuggguccagagugagcauucuc

SEQ ID NO: 212192 - RNA, 32 nt, Human
gugcugaccccagcaguuagggacuggcugca

SEQ ID NO: 212193 - RNA, 32 nt, Human
gugcugacucccaagagcaaccgcaagaugga

SEQ ID NO: 212194 - RNA, 22 nt, Human
gugcugagagugacucgccgug

SEQ ID NO: 212195 - RNA, 32 nt, Human
gugcugagauuucaaggcucagcacugaguag

SEQ ID NO: 212196 - RNA, 32 nt, Human
gugcugagcccugcccugggccccacggacag

SEQ ID NO: 212197 - RNA, 32 nt, Human
gugcugagccuucugcugagguccuugcgugg

SEQ ID NO: 212198 - RNA, 20 nt, Human
gugcugagcuagccaggacu

SEQ ID NO: 212199 - RNA, 32 nt, Human
gugcugagcucaugggauuacauaacuguguc

SEQ ID NO: 212200 - RNA, 32 nt, Human
gugcugaggaagagcagcagcagcaggauggu

SEQ ID NO: 212201 - RNA, 32 nt, Human
gugcugaggagaaaggaggggcaguggcuucc

SEQ ID NO: 212202 - RNA, 32 nt, Human
gugcugaggagacucagauguuggccucagcu

SEQ ID NO: 212203 - RNA, 32 nt, Human
gugcugaggcagcagggggcugguguauuagc

SEQ ID NO: 212204 - RNA, 32 nt, Human
gugcugaggccgggauggcaucaggaauuaag

SEQ ID NO: 212205 - RNA, 32 nt, Human
gugcugaguuccaugaaggagaacaaaguggc

SEQ ID NO: 212206 - RNA, 32 nt, Human
gugcugaguucuauaauauaagcugccauaua

SEQ ID NO: 212207 - RNA, 32 nt, Human
gugcugaguuuaaaaguugaccuguguuugua

SEQ ID NO: 212208 - RNA, 32 nt, Human
gugcugauccuaccaccuacugcuaccuuccu

SEQ ID NO: 212209 - RNA, 32 nt, Human
gugcugaucgugucucagcaucaggaaaggag

SEQ ID NO: 212210 - RNA, 21 nt, Human
gugcugaugccauccagggca

SEQ ID NO: 212211 - RNA, 32 nt, Human
gugcugcaaagauaugaagaaauaugauaacg

SEQ ID NO: 212212 - RNA, 32 nt, Human
gugcugcaacaaacauaugcaugcaugugucu

SEQ ID NO: 212213 - RNA, 32 nt, Human
gugcugcaccuugcuguuguacuucugaaauc

SEQ ID NO: 212214 - RNA, 32 nt, Human
gugcugcagaucuucccgcccugugaguucuc

SEQ ID NO: 212215 - RNA, 32 nt, Human
gugcugcaggggucugggguuggcaacuccug

SEQ ID NO: 212216 - RNA, 32 nt, Human
gugcugcagggugugaugaggugggagcccuc

SEQ ID NO: 212217 - RNA, 32 nt, Human
gugcugcagguguaagagagugggagcaggga

SEQ ID NO: 212218 - RNA, 32 nt, Human
gugcugcauaugccccugugcccagugguuga

SEQ ID NO: 212219 - RNA, 32 nt, Human
gugcugcaucccaccagccugagcaagacgcc

SEQ ID NO: 212220 - RNA, 32 nt, Human
gugcugccaagcggcgccgcacguaacccuca

SEQ ID NO: 212221 - RNA, 32 nt, Human
gugcugccacaugugcauggguccccaccaag

SEQ ID NO: 212222 - RNA, 32 nt, Human
gugcugccagauaaucuaagucuuccaaugcc

SEQ ID NO: 212223 - RNA, 32 nt, Human
gugcugccagcacagggcugggugauacguac

SEQ ID NO: 212224 - RNA, 32 nt, Human
gugcugccagccugcccaugugcacacguuag

SEQ ID NO: 212225 - RNA, 32 nt, Human
gugcugccagguccuggugaagcccaagguug

SEQ ID NO: 212226 - RNA, 32 nt, Human
gugcugccaucaguuucacuucugccuuggaa

SEQ ID NO: 212227 - RNA, 20 nt, Human
gugcugcccacgccuggagg

SEQ ID NO: 212228 - RNA, 32 nt, Human
gugcugcccgucugcaaccucaaggccucggc

SEQ ID NO: 212229 - RNA, 32 nt, Human
gugcugcccgucuucagccuagccgaccucag

SEQ ID NO: 212230 - RNA, 32 nt, Human
gugcugcccucuuaccaugcacacgggugcuc

SEQ ID NO: 212231 - RNA, 32 nt, Human
gugcugcccugccucucgugccggguguugcu

SEQ ID NO: 212232 - RNA, 20 nt, Human
gugcugcccuggcaucagcc

SEQ ID NO: 212233 - RNA, 32 nt, Human
gugcugcccuucccucccacagccuggcagcc

SEQ ID NO: 212234 - RNA, 32 nt, Human
gugcugcccuuuccaggcuucuuuccugcuca

SEQ ID NO: 212235 - RNA, 32 nt, Human
gugcugccgcggcuggcgcugccuguggggca

SEQ ID NO: 212236 - RNA, 32 nt, Human
gugcugccguggcuggcgcugccuguggggca

SEQ ID NO: 212237 - RNA, 32 nt, Human
gugcugccucuccugaguagggugggugcaag

SEQ ID NO: 212238 - RNA, 32 nt, Human
gugcugccucugguccugagggguuagggaca

SEQ ID NO: 212239 - RNA, 32 nt, Human
gugcugccuggcgcuggcuaggaggcaaacgc

SEQ ID NO: 212240 - RNA, 32 nt, Human
gugcugccuucuguuguggauuuccugccagc

SEQ ID NO: 212241 - RNA, 32 nt, Human
gugcugccuugccucuucaagaugcuauucac

SEQ ID NO: 212242 - RNA, 32 nt, Human
gugcugccuugcuucuguauuuccuuggauuu

SEQ ID NO: 212243 - RNA, 32 nt, Human
gugcugcgggccaagcuuucccuuccuuugag

SEQ ID NO: 212244 - RNA, 32 nt, Human
gugcugcgugcuuucuacaugacauuaauuuu

SEQ ID NO: 212245 - RNA, 32 nt, Human
gugcugcuagcccagaccuguggacgaggcag

SEQ ID NO: 212246 - RNA, 32 nt, Human
gugcugcuccacuggugccugcuguggcuccu

SEQ ID NO: 212247 - RNA, 32 nt, Human
gugcugcuccauccugccuguccacaccucuu

SEQ ID NO: 212248 - RNA, 32 nt, Human
gugcugcugaguggccaagaugaugccaggcu

SEQ ID NO: 212249 - RNA, 32 nt, Human
gugcugcugcaccccagccuagcgacagagca

SEQ ID NO: 212250 - RNA, 32 nt, Human
gugcugcugcacuccagccugggagacagagc

SEQ ID NO: 212251 - RNA, 32 nt, Human
gugcugcugcacuccagccugggcaauagagu

SEQ ID NO: 212252 - RNA, 32 nt, Human
gugcugcugcacuccagccugggugaaaaaga

SEQ ID NO: 212253 - RNA, 32 nt, Human
gugcugcugcagcugcugauaagccucaaacc

SEQ ID NO: 212254 - RNA, 32 nt, Human
gugcugcugcccaggcuggagugcaguggcac

SEQ ID NO: 212255 - RNA, 32 nt, Human
gugcugcugccuucucugccucccacccaggg

SEQ ID NO: 212256 - RNA, 32 nt, Human
gugcugcuggcguaguguaggccagacauuga

SEQ ID NO: 212257 - RNA, 32 nt, Human
gugcugcugggaaucaggagaauagaagcaaa

SEQ ID NO: 212258 - RNA, 32 nt, Human
gugcugcugggcccgcaccccaugucccuugu

SEQ ID NO: 212259 - RNA, 32 nt, Human
gugcugcuggggccucccagggccgguaaagg

SEQ ID NO: 212260 - RNA, 32 nt, Human
gugcugcugguuuugaagaugccuaaaggagu

SEQ ID NO: 212261 - RNA, 32 nt, Human
gugcugcuguaaccacccaccccucgggacuu

SEQ ID NO: 212262 - RNA, 32 nt, Human
gugcugcuuacacuccagguguggaccggccg

SEQ ID NO: 212263 - RNA, 32 nt, Human
gugcugcuucuuacccugccccugcaccucau

SEQ ID NO: 212264 - RNA, 32 nt, Human
gugcugcuucuuucucccccagacgcccuugc

SEQ ID NO: 212265 - RNA, 32 nt, Human
gugcuggaaaaacgugccugcugagagagugc

SEQ ID NO: 212266 - RNA, 32 nt, Human
gugcuggaagagcguccucagcagggcagggc

SEQ ID NO: 212267 - RNA, 32 nt, Human
gugcuggaaguguggggagaacccggacagcu

SEQ ID NO: 212268 - RNA, 32 nt, Human
gugcuggaauuuuccaaaacagccuguucucu

SEQ ID NO: 212269 - RNA, 32 nt, Human
gugcuggacacugaagcaaauaccauacugcu

SEQ ID NO: 212270 - RNA, 32 nt, Human
gugcuggaccuaaaauacugacuuuaguuagu

SEQ ID NO: 212271 - RNA, 32 nt, Human
gugcuggagaggaaagcagggagccacugcau

SEQ ID NO: 212272 - RNA, 32 nt, Human
gugcuggagauuacaggcaugagccaccacgc

SEQ ID NO: 212273 - RNA, 21 nt, Human
gugcuggagccugugccccug

SEQ ID NO: 212274 - RNA, 32 nt, Human
gugcuggaggacagaggagccaccucuucuca

SEQ ID NO: 212275 - RNA, 32 nt, Human
gugcuggaggauggggaaguggaggcugacau

SEQ ID NO: 212276 - RNA, 32 nt, Human
gugcuggaggcuguauaugugucugugugcgu

SEQ ID NO: 212277 - RNA, 32 nt, Human
gugcuggagguggcggccucugggggagugug

SEQ ID NO: 212278 - RNA, 17 nt, Human
gugcuggaguccaggug

SEQ ID NO: 212279 - RNA, 32 nt, Human
gugcuggaguuagcaccucccucugcccuuaa

SEQ ID NO: 212280 - RNA, 32 nt, Human
gugcuggaugcugugucgggccgcaucauccg

SEQ ID NO: 212281 - RNA, 32 nt, Human
gugcuggauuacaggcaugagccaccucgccu

SEQ ID NO: 212282 - RNA, 32 nt, Human
gugcuggcaccaagggcugagcgcggggaccc

SEQ ID NO: 212283 - RNA, 32 nt, Human
gugcuggcauuuucagcagauccucauguguu

SEQ ID NO: 212284 - RNA, 17 nt, Human
gugcuggccccaggugg

SEQ ID NO: 212285 - RNA, 32 nt, Human
gugcuggccccuggcuggaggggagggcagug

SEQ ID NO: 212286 - RNA, 32 nt, Human
gugcuggcccugccccagccuagcugagugug

SEQ ID NO: 212287 - RNA, 32 nt, Human
gugcuggcccugggugggagcggggaguccug

SEQ ID NO: 212288 - RNA, 32 nt, Human
gugcuggccugaggcagggcaggaaaucagaa

SEQ ID NO: 212289 - RNA, 32 nt, Human
gugcuggcgggauugggcaugggaaggagcag

SEQ ID NO: 212290 - RNA, 16 nt, Human
gugcuggcuccaggug

SEQ ID NO: 212291 - RNA, 32 nt, Human
gugcuggcucuuuccuggcuacuccauguugg

SEQ ID NO: 212292 - RNA, 32 nt, Human
gugcuggcugagucuccgccuugcuggggcuu

SEQ ID NO: 212293 - RNA, 32 nt, Human
gugcuggcugcaggcaggugugaccaucucuc

SEQ ID NO: 212294 - RNA, 32 nt, Human
gugcuggcuguagcccccacagaggcaaucau

SEQ ID NO: 212295 - RNA, 32 nt, Human
gugcugggaaaggcaggacugggagccggagg

SEQ ID NO: 212296 - RNA, 32 nt, Human
gugcugggaaccugcuagcugagcacuuccac

SEQ ID NO: 212297 - RNA, 32 nt, Human
gugcugggaacugaaagaguggggaaggugga

SEQ ID NO: 212298 - RNA, 32 nt, Human
gugcugggaaggcaguuguucauugggagggu

SEQ ID NO: 212299 - RNA, 32 nt, Human
gugcugggacgcgagccuggaggcagagcccc

SEQ ID NO: 212300 - RNA, 32 nt, Human
gugcugggagaaaggggugcaccugggaggac

SEQ ID NO: 212301 - RNA, 32 nt, Human
gugcugggagaaaggguggcagccgggagccu

SEQ ID NO: 212302 - RNA, 32 nt, Human
gugcugggagagaggggagaugugggcaggac

SEQ ID NO: 212303 - RNA, 24 nt, Human
gugcugggagagcaaucaaaggca

SEQ ID NO: 212304 - RNA, 32 nt, Human
gugcugggagccagggggccugggaggagccg

SEQ ID NO: 212305 - RNA, 32 nt, Human
gugcugggaggguggaggugaaggauggggcc

SEQ ID NO: 212306 - RNA, 22 nt, Human
gugcugggagugagcccaggca

SEQ ID NO: 212307 - RNA, 32 nt, Human
gugcugggauaucaggcacugagccacugcgc

SEQ ID NO: 212308 - RNA, 19 nt, Human
gugcugggaucacaggcgu

SEQ ID NO: 212309 - RNA, 32 nt, Human
gugcugggaucuggcgugugugcuccaggggc

SEQ ID NO: 212310 - RNA, 19 nt, Human
gugcugggauuaaaggcgu

SEQ ID NO: 212311 - RNA, 32 nt, Human
gugcugggauuaacgggugugagccacggcgc

SEQ ID NO: 212312 - RNA, 19 nt, Human
gugcugggauuacagacgu

SEQ ID NO: 212313 - RNA, 32 nt, Human
gugcugggauuacagagugugagccaccacac

SEQ ID NO: 212314 - RNA, 32 nt, Human
gugcugggauuacaggcauaagccacagcacc

SEQ ID NO: 212315 - RNA, 22 nt, Human
gugcugggauuacaggcaugag

SEQ ID NO: 212316 - RNA, 18 nt, Human
gugcugggauuacaggcg

SEQ ID NO: 212317 - RNA, 19 nt, Human
gugcugggauuacaggcgu

SEQ ID NO: 212318 - RNA, 22 nt, Human
gugcugggauuacaggcgugag

SEQ ID NO: 212319 - RNA, 19 nt, Human
gugcugggauuacaggggu

SEQ ID NO: 212320 - RNA, 18 nt, Human
gugcugggauuacaggug

SEQ ID NO: 212321 - RNA, 19 nt, Human
gugcugggauuacaggugu

SEQ ID NO: 212322 - RNA, 22 nt, Human
gugcugggauuacaggugugag

SEQ ID NO: 212323 - RNA, 19 nt, Human
gugcugggauuauaggcgu

SEQ ID NO: 212324 - RNA, 22 nt, Human
gugcugggauuauaggcgugag

SEQ ID NO: 212325 - RNA, 32 nt, Human
gugcugggauuuacaggcaugagccaccgcgc

SEQ ID NO: 212326 - RNA, 32 nt, Human
gugcugggcacugggggcacucccugcaggag

SEQ ID NO: 212327 - RNA, 22 nt, Human
gugcugggcauacaacccucug

SEQ ID NO: 212328 - RNA, 32 nt, Human
gugcugggcauacaacccucugcuuucacauc

SEQ ID NO: 212329 - RNA, 32 nt, Human
gugcugggcccgccaaugccgucaucaucagg

SEQ ID NO: 212330 - RNA, 21 nt, Human
gugcugggccgggcaccaggg

SEQ ID NO: 212331 - RNA, 32 nt, Human
gugcugggcuguucccagccucccacagcaga

SEQ ID NO: 212332 - RNA, 32 nt, Human
gugcugggcuguucccuuggcugcauacacag

SEQ ID NO: 212333 - RNA, 32 nt, Human
gugcugggcuuuagagaacaugggaaggcggc

SEQ ID NO: 212334 - RNA, 21 nt, Human
gugcuggggaacaaccagagg

SEQ ID NO: 212335 - RNA, 32 nt, Human
gugcuggggaaugaccacgguuggcugcuacg

SEQ ID NO: 212336 - RNA, 21 nt, Human
gugcuggggaccuccuggaca

SEQ ID NO: 212337 - RNA, 20 nt, Human
gugcuggggacucagagggc

SEQ ID NO: 212338 - RNA, 23 nt, Human
gugcuggggacugugccaggcca

SEQ ID NO: 212339 - RNA, 32 nt, Human
gugcuggggacuuauugggcacauuuauuugu

SEQ ID NO: 212340 - RNA, 32 nt, Human
gugcuggggccagacuggcacaaggcacucgu

SEQ ID NO: 212341 - RNA, 25 nt, Human
gugcugggggcccggucgccaggca

SEQ ID NO: 212342 - RNA, 20 nt, Human
gugcugggggcuacaggugu

SEQ ID NO: 212343 - RNA, 21 nt, Human
gugcuggguaacuggcugggg

SEQ ID NO: 212344 - RNA, 24 nt, Human
gugcuggguacuccagaggugcca

SEQ ID NO: 212345 - RNA, 32 nt, Human
gugcuggguaguguucucauuugggggcugaa

SEQ ID NO: 212346 - RNA, 32 nt, Human
gugcugggucuggggcaggugggcaggcgugu

SEQ ID NO: 212347 - RNA, 23 nt, Human
gugcuggguggggccgggccucc

SEQ ID NO: 212348 - RNA, 32 nt, Human
gugcugggugugagccaccaccagucaacaaa

SEQ ID NO: 212349 - RNA, 32 nt, Human
gugcugguaggguuucaaggugcuauuagugg

SEQ ID NO: 212350 - RNA, 32 nt, Human
gugcuggucccacuaaggaaaccaccucaccc

SEQ ID NO: 212351 - RNA, 32 nt, Human
gugcuggucucuaggccugaacuaggugcugg

SEQ ID NO: 212352 - RNA, 32 nt, Human
gugcuggugaugcugaggacuacuaaaugaag

SEQ ID NO: 212353 - RNA, 32 nt, Human
gugcuggugaugugagccuacaucaggguggg

SEQ ID NO: 212354 - RNA, 32 nt, Human
gugcuggugauuuuauguggcagcccucugcu

SEQ ID NO: 212355 - RNA, 32 nt, Human
gugcugguggaguuugggggccagggggacaa

SEQ ID NO: 212356 - RNA, 20 nt, Human
gugcugguggggccuggaga

SEQ ID NO: 212357 - RNA, 31 nt, Human
gugcuguaccuuuucugauucagaauuauag

SEQ ID NO: 212358 - RNA, 32 nt, Human
gugcuguacuggguacacaguaggcgcccagg

SEQ ID NO: 212359 - RNA, 20 nt, Human
gugcuguaggcaucuggaga

SEQ ID NO: 212360 - RNA, 21 nt, Human
gugcuguaucccggaaaucua

SEQ ID NO: 212361 - RNA, 32 nt, Human
gugcugucaacuuuggaaaaaguaucccgguu

SEQ ID NO: 212362 - RNA, 32 nt, Human
gugcugucaccugcaauucucccuuaucaggg

SEQ ID NO: 212363 - RNA, 32 nt, Human
gugcugucaguggaggggucucugcagccaac

SEQ ID NO: 212364 - RNA, 32 nt, Human
gugcugucauuugcaauuucuuccugugacug

SEQ ID NO: 212365 - RNA, 32 nt, Human
gugcuguccuagcagugcacuggcgggucucu

SEQ ID NO: 212366 - RNA, 32 nt, Human
gugcuguccugccucagaugcagagagagcac

SEQ ID NO: 212367 - RNA, 32 nt, Human
gugcugucuccucccugccuccugccuccugc

SEQ ID NO: 212368 - RNA, 32 nt, Human
gugcugucugcccucaugaaauuggcuccaaa

SEQ ID NO: 212369 - RNA, 20 nt, Human
gugcugucuugcuccagcca

SEQ ID NO: 212370 - RNA, 32 nt, Human
gugcugugaaacugucuaugcacuacauucug

SEQ ID NO: 212371 - RNA, 32 nt, Human
gugcugugaaggagguugugcagcugggcccg

SEQ ID NO: 212372 - RNA, 32 nt, Human
gugcugugacauauugcugggcccagcaccaa

SEQ ID NO: 212373 - RNA, 32 nt, Human
gugcugugaccuccgagcccuccuggugggaa

SEQ ID NO: 212374 - RNA, 32 nt, Human
gugcugugauuacagggugugagccacugcac

SEQ ID NO: 212375 - RNA, 32 nt, Human
gugcugugauuauccacauuuucacuugcucu

SEQ ID NO: 212376 - RNA, 32 nt, Human
gugcugugauucuuccugguucccaagucuug

SEQ ID NO: 212377 - RNA, 32 nt, Human
gugcugugcagccucuggcagagcauccgacc

SEQ ID NO: 212378 - RNA, 32 nt, Human
gugcugugccuccucuugcugcuaaucucugc

SEQ ID NO: 212379 - RNA, 32 nt, Human
gugcugugccuccucuugcugcuaugucuccu

SEQ ID NO: 212380 - RNA, 32 nt, Human
gugcugugcgggaaaggcugcugguaacauuc

SEQ ID NO: 212381 - RNA, 32 nt, Human
gugcugugcuucccgugaggacccaggacccc

SEQ ID NO: 212382 - RNA, 24 nt, Human
gugcuguggcucacaccuguaauc

SEQ ID NO: 212383 - RNA, 24 nt, Human
gugcuguggcucacgccugcaauc

SEQ ID NO: 212384 - RNA, 24 nt, Human
gugcuguggcucacgccuguaauc

SEQ ID NO: 212385 - RNA, 24 nt, Human
gugcuguggcucacgucuguaauc

SEQ ID NO: 212386 - RNA, 24 nt, Human
gugcuguggcucaugccuguaauc

SEQ ID NO: 212387 - RNA, 32 nt, Human
gugcugugggccuggaagaugggaggaggggc

SEQ ID NO: 212388 - RNA, 32 nt, Human
gugcugugggcuguguguagggcguggcugcu

SEQ ID NO: 212389 - RNA, 19 nt, Human
gugcugugggucccggugg

SEQ ID NO: 212390 - RNA, 32 nt, Human
gugcugugggugauauggacagcagaaggggg

SEQ ID NO: 212391 - RNA, 32 nt, Human
gugcugugguucugggugauuuaucugguccc

SEQ ID NO: 212392 - RNA, 32 nt, Human
gugcuguguagucuggaauuguuaacauuuua

SEQ ID NO: 212393 - RNA, 20 nt, Human
gugcugugugggcagaggag

SEQ ID NO: 212394 - RNA, 32 nt, Human
gugcuguguguaucuaguuccagcuacuugag

SEQ ID NO: 212395 - RNA, 32 nt, Human
gugcuguguguccuugcccugccugccugugg

SEQ ID NO: 212396 - RNA, 32 nt, Human
gugcugugugugugcaugugugcaugacggug

SEQ ID NO: 212397 - RNA, 32 nt, Human
gugcuguuacucgguagagucaagacuguuac

SEQ ID NO: 212398 - RNA, 32 nt, Human
gugcuguucccuguuccaucuuuacacuuucu

SEQ ID NO: 212399 - RNA, 32 nt, Human
gugcuguugcccaagggcgugguccacgguac

SEQ ID NO: 212400 - RNA, 32 nt, Human
gugcuguuucaaccuccguccccacaggaggg

SEQ ID NO: 212401 - RNA, 32 nt, Human
gugcuguuuccuggcuggagugcaguggcaug

SEQ ID NO: 212402 - RNA, 32 nt, Human
gugcuuaagaaugggauucccaccucaguuua

SEQ ID NO: 212403 - RNA, 32 nt, Human
gugcuuaauuaggggacuuuguuuucccaaaa

SEQ ID NO: 212404 - RNA, 22 nt, Human
gugcuuaccaguggaccuucug

SEQ ID NO: 212405 - RNA, 32 nt, Human
gugcuuacccuugauugucuugauuuuauaua

SEQ ID NO: 212406 - RNA, 32 nt, Human
gugcuuaccugagaccuggguaauacuggaag

SEQ ID NO: 212407 - RNA, 32 nt, Human
gugcuuacugcacagccugaacagacaguucu

SEQ ID NO: 212408 - RNA, 32 nt, Human
gugcuuagcaaaugcuuguaaaggaaugccug

SEQ ID NO: 212409 - RNA, 21 nt, Human
gugcuuagccccagggcacuc

SEQ ID NO: 212410 - RNA, 32 nt, Human
gugcuuaggaaagccagccucaguccucagca

SEQ ID NO: 212411 - RNA, 32 nt, Human
gugcuuagggccugaggugugaaagcccaggg

SEQ ID NO: 212412 - RNA, 32 nt, Human
gugcuuaugcuccuggugucuuuugcuccacu

SEQ ID NO: 212413 - RNA, 32 nt, Human
gugcuuauguguagcuuuuuacuuuuuauggu

SEQ ID NO: 212414 - RNA, 23 nt, Human
gugcuucaaagucauugaugcaa

SEQ ID NO: 212415 - RNA, 32 nt, Human
gugcuucaacuuacacauuuaugaugaugugg

SEQ ID NO: 212416 - RNA, 32 nt, Human
gugcuucacagaagacaccacauuucaauaau

SEQ ID NO: 212417 - RNA, 16 nt, Human
gugcuucacugguuca

SEQ ID NO: 212418 - RNA, 32 nt, Human
gugcuucauucaccucuccaucgucucuaaau

SEQ ID NO: 212419 - RNA, 25 nt, Human
gugcuuccaaauucuuuuggugcaa

SEQ ID NO: 212420 - RNA, 32 nt, Human
gugcuuccacacccgggcucugagcaaaugga

SEQ ID NO: 212421 - RNA, 32 nt, Human
gugcuuccagcccuggaaggcauaacauuuac

SEQ ID NO: 212422 - RNA, 32 nt, Human
gugcuucccaagccuccugaaaaacugaagac

SEQ ID NO: 212423 - RNA, 32 nt, Human
gugcuuccccauaggucucucccuucauuugu

SEQ ID NO: 212424 - RNA, 32 nt, Human
gugcuucccccaccccuccacguguccgucca

SEQ ID NO: 212425 - RNA, 19 nt, Human
gugcuucccggaccugcgg

SEQ ID NO: 212426 - RNA, 32 nt, Human
gugcuucccucuuuucuugguuguaguucuca

SEQ ID NO: 212427 - RNA, 32 nt, Human
gugcuuccuauauuguugcauuuccuugauaa

SEQ ID NO: 212428 - RNA, 32 nt, Human
gugcuuccucuccugucaauuccaggcucuuu

SEQ ID NO: 212429 - RNA, 32 nt, Human
gugcuuccugaagaggcuguuuugaguguuga

SEQ ID NO: 212430 - RNA, 32 nt, Human
gugcuuccugguguggguauuacaaucccuuc

SEQ ID NO: 212431 - RNA, 32 nt, Human
gugcuuccugguguguguauuagaaucccuuc

SEQ ID NO: 212432 - RNA, 32 nt, Human
gugcuuccuucucccuccucugucucaaacug

SEQ ID NO: 212433 - RNA, 32 nt, Human
gugcuucggaugaaccaagggaagagaaauaa

SEQ ID NO: 212434 - RNA, 32 nt, Human
gugcuucgggagggggagagacugacccugcc

SEQ ID NO: 212435 - RNA, 32 nt, Human
gugcuucucugugguuguucagcacuuuaggu

SEQ ID NO: 212436 - RNA, 32 nt, Human
gugcuucugagcugagguugcuucacgggacc

SEQ ID NO: 212437 - RNA, 32 nt, Human
gugcuucugcaccgggcgucccugcaucugac

SEQ ID NO: 212438 - RNA, 32 nt, Human
gugcuucugccuggcuggccagaaugcacguu

SEQ ID NO: 212439 - RNA, 32 nt, Human
gugcuucugggcagugcaggcggcugccaggc

SEQ ID NO: 212440 - RNA, 32 nt, Human
gugcuucugggguguucuguuucuugaucugg

SEQ ID NO: 212441 - RNA, 20 nt, Human
gugcuucuguggcccccagc

SEQ ID NO: 212442 - RNA, 32 nt, Human
gugcuucuguucagguugcacacugggccaca

SEQ ID NO: 212443 - RNA, 21 nt, Human
gugcuucuuauaccugaugca

SEQ ID NO: 212444 - RNA, 32 nt, Human
gugcuucuuuacuauaucacugccuucuuuua

SEQ ID NO: 212445 - RNA, 32 nt, Human
gugcuucuuuucuaacccaaaacaguucuacu

SEQ ID NO: 212446 - RNA, 32 nt, Human
gugcuugaacccaggaggcggagguuguggug

SEQ ID NO: 212447 - RNA, 32 nt, Human
gugcuugaagccccaggacccccgagagagcc

SEQ ID NO: 212448 - RNA, 32 nt, Human
gugcuugacagauuuucagccaugaccauguu

SEQ ID NO: 212449 - RNA, 32 nt, Human
gugcuugacuccuggaaccugccugcucccuc

SEQ ID NO: 212450 - RNA, 32 nt, Human
gugcuugagauguaggaaucugugcauucuau

SEQ ID NO: 212451 - RNA, 32 nt, Human
gugcuugagcuuuuaaccagguacugucuaac

SEQ ID NO: 212452 - RNA, 32 nt, Human
gugcuugagggaggaggaagagauagaggagg

SEQ ID NO: 212453 - RNA, 32 nt, Human
gugcuugaggguggcugggaaugugauauaca

SEQ ID NO: 212454 - RNA, 19 nt, Human
gugcuugagugccugguga

SEQ ID NO: 212455 - RNA, 19 nt, Human
guggguauaucuucuguga

SEQ ID NO: 212456 - RNA, 32 nt, Human
guggguaugcauauaacaggugucuggccagu

SEQ ID NO: 212457 - RNA, 32 nt, Human
guggguaugguggcucacaccuguaaucccaa

SEQ ID NO: 212458 - RNA, 32 nt, Human
guggguauguauguguguauguauguauccgc

SEQ ID NO: 212459 - RNA, 32 nt, Human
guggguaugucugaggucagccauggggauau

SEQ ID NO: 212460 - RNA, 32 nt, Human
gugggucaaaggacaauaugggugggcauucu

SEQ ID NO: 212461 - RNA, 22 nt, Human
gugggucacgccuguaauccca

SEQ ID NO: 212462 - RNA, 32 nt, Human
gugggucacuugaacccaggaguuugacauca

SEQ ID NO: 212463 - RNA, 31 nt, Human
gugggucagagaguuuuuaugggggucuguu

SEQ ID NO: 212464 - RNA, 32 nt, Human
gugggucagagcaguggaggggagacaucgcc

SEQ ID NO: 212465 - RNA, 32 nt, Human
gugggucagaggcagagauggaaguuggaaug

SEQ ID NO: 212466 - RNA, 21 nt, Human
gugggucaggccuggcccagg

SEQ ID NO: 212467 - RNA, 32 nt, Human
gugggucaggcuccugagggccccaggcucca

SEQ ID NO: 212468 - RNA, 32 nt, Human
gugggucagggaggggucuagaggcuauuccu

SEQ ID NO: 212469 - RNA, 32 nt, Human
gugggucaggguggagguccugggugggcuaa

SEQ ID NO: 212470 - RNA, 32 nt, Human
gugggucauaccguguaccucaguucccucuu

SEQ ID NO: 212471 - RNA, 32 nt, Human
gugggucauuccuggugcaauugugauuuuuc

SEQ ID NO: 212472 - RNA, 32 nt, Human
guggguccagagcaucugucagaucuguggcu

SEQ ID NO: 212473 - RNA, 32 nt, Human
guggguccaggccaggagaugggggcgggggc

SEQ ID NO: 212474 - RNA, 32 nt, Human
gugggucccaacaccgagcagcccacagucuc

SEQ ID NO: 212475 - RNA, 32 nt, Human
gugggucccagagaccucaucagccuugggau

SEQ ID NO: 212476 - RNA, 32 nt, Human
gugggucccagccugggagccugcugucagga

SEQ ID NO: 212477 - RNA, 32 nt, Human
gugggucccaggauggaggagccccaggccgg

SEQ ID NO: 212478 - RNA, 32 nt, Human
gugggucccuggaaagggggagaguugcccuu

SEQ ID NO: 212479 - RNA, 32 nt, Human
gugggucccugggcucuggacaagcacugggg

SEQ ID NO: 212480 - RNA, 32 nt, Human
guggguccugcaguggucucguggguauuacu

SEQ ID NO: 212481 - RNA, 32 nt, Human
gugggucgggcagagucggaagaacuggcuuu

SEQ ID NO: 212482 - RNA, 32 nt, Human
gugggucuaaagagagacggagucuagcucuc

SEQ ID NO: 212483 - RNA, 32 nt, Human
gugggucuauaauaauuguauuuucaagaggu

SEQ ID NO: 212484 - RNA, 32 nt, Human
gugggucucacagaugcuggagcagguguagg

SEQ ID NO: 212485 - RNA, 32 nt, Human
gugggucuccaccacagccacuuugagucugu

SEQ ID NO: 212486 - RNA, 32 nt, Human
gugggucuccaggggcuugggaaauguguucu

SEQ ID NO: 212487 - RNA, 32 nt, Human
gugggucuccauccuccaugggggcucagcca

SEQ ID NO: 212488 - RNA, 32 nt, Human
gugggucuccggccuuagcacacacaccuuga

SEQ ID NO: 212489 - RNA, 32 nt, Human
gugggucucugcggcacucuucugccugguga

SEQ ID NO: 212490 - RNA, 32 nt, Human
gugggucugcaccagguacuccaggccagccc

SEQ ID NO: 212491 - RNA, 32 nt, Human
gugggucuuggaccagggcaagugcaucuuug

SEQ ID NO: 212492 - RNA, 32 nt, Human
gugggucuuuucuuugcuucugaccacacguc

SEQ ID NO: 212493 - RNA, 32 nt, Human
gugggugaaagcuggcuggagacuccuggccu

SEQ ID NO: 212494 - RNA, 32 nt, Human
gugggugaaccugagcucucccaggagacaac

SEQ ID NO: 212495 - RNA, 32 nt, Human
gugggugaagccagggagggagacaggagggc

SEQ ID NO: 212496 - RNA, 24 nt, Human
gugggugaaucaccugaggucagg

SEQ ID NO: 212497 - RNA, 24 nt, Human
gugggugaauugcuugaggucagg

SEQ ID NO: 212498 - RNA, 32 nt, Human
gugggugagagggaagaaggggagguuggggg

SEQ ID NO: 212499 - RNA, 32 nt, Human
gugggugaggacaggcuucaggcugucucuuc

SEQ ID NO: 212500 - RNA, 32 nt, Human
gugggugaggaugugguuuaggaggauggggg

SEQ ID NO: 212501 - RNA, 32 nt, Human
gugggugaggcugccccucccuccaggucccg

SEQ ID NO: 212502 - RNA, 32 nt, Human
gugggugaucagaaggcuggggccaguguaag

SEQ ID NO: 212503 - RNA, 32 nt, Human
gugggugauggacacagacauggggcuguuag

SEQ ID NO: 212504 - RNA, 32 nt, Human
gugggugauuccucccaggaggugcuugaggc

SEQ ID NO: 212505 - RNA, 32 nt, Human
gugggugauucucugcccugagccaccacccu

SEQ ID NO: 212506 - RNA, 32 nt, Human
gugggugcaauggcgucuuaugacucucagaa

SEQ ID NO: 212507 - RNA, 32 nt, Human
gugggugcacacaaagcaagcaccaucuggga

SEQ ID NO: 212508 - RNA, 32 nt, Human
gugggugcaguggcucacgccuguaaucccag

SEQ ID NO: 212509 - RNA, 21 nt, Human
gugggugccaccaggcccagg

SEQ ID NO: 212510 - RNA, 32 nt, Human
gugggugccaucauggucuccgggaccugggc

SEQ ID NO: 212511 - RNA, 32 nt, Human
gugggugcccgaagguugcaugauggaauuug

SEQ ID NO: 212512 - RNA, 32 nt, Human
gugggugcccuugagcauguugcaacgccugc

SEQ ID NO: 212513 - RNA, 32 nt, Human
gugggugccuagugaggcuggagcuagaaagc

SEQ ID NO: 212514 - RNA, 32 nt, Human
gugggugccuguaaccucagcuacuugggagg

SEQ ID NO: 212515 - RNA, 19 nt, Human
gugggugccuguaauccca

SEQ ID NO: 212516 - RNA, 32 nt, Human
gugggugccuguaaucccagcuacucgggaga

SEQ ID NO: 212517 - RNA, 32 nt, Human
gugggugccuguaaucccagcuacucgggagg

SEQ ID NO: 212518 - RNA, 32 nt, Human
gugggugccuguaaucccagcuacuugggaag

SEQ ID NO: 212519 - RNA, 32 nt, Human
gugggugccuguaaucccagcuacuugggagg

SEQ ID NO: 212520 - RNA, 19 nt, Human
gugggugccuguaauccua

SEQ ID NO: 212521 - RNA, 19 nt, Human
gugggugccuguaaucuca

SEQ ID NO: 212522 - RNA, 32 nt, Human
gugggugccuguaaucucagcuacucgggagg

SEQ ID NO: 212523 - RNA, 19 nt, Human
gugggugccuguaauucca

SEQ ID NO: 212524 - RNA, 19 nt, Human
gugggugccuguaguccca

SEQ ID NO: 212525 - RNA, 32 nt, Human
gugggugccuguagucccagcuacucgggagg

SEQ ID NO: 212526 - RNA, 32 nt, Human
gugggugccuguagucccagcuacucuggagg

SEQ ID NO: 212527 - RNA, 32 nt, Human
gugggugccuguagucccagcuacuugggagg

SEQ ID NO: 212528 - RNA, 32 nt, Human
gugggugccuuugccucucccugcugcccccg

SEQ ID NO: 212529 - RNA, 32 nt, Human
gugggugcggccuuaaaagugacuaucuagac

SEQ ID NO: 212530 - RNA, 32 nt, Human
gugggugcggucuccccucuccaaaugccacc

SEQ ID NO: 212531 - RNA, 32 nt, Human
gugggugcgguggcuuacaccuguaaucccaa

SEQ ID NO: 212532 - RNA, 32 nt, Human
gugggugcuacuugcaaggccauagaaucuag

SEQ ID NO: 212533 - RNA, 32 nt, Human
gugggugcucacugaauauaguggacuaguga

SEQ ID NO: 212534 - RNA, 32 nt, Human
gugggugcucgggaguggaggugacgucagca

SEQ ID NO: 212535 - RNA, 18 nt, Human
gugggugcucuggccaca

SEQ ID NO: 212536 - RNA, 32 nt, Human
gugggugcuggcugagccccuggggcagaagg

SEQ ID NO: 212537 - RNA, 32 nt, Human
gugggugcuuguaguuccagcuacucaggagg

SEQ ID NO: 212538 - RNA, 24 nt, Human
guggguggaccaccugagaucagg

SEQ ID NO: 212539 - RNA, 24 nt, Human
guggguggaccaccugagguuagg

SEQ ID NO: 212540 - RNA, 24 nt, Human
guggguggaccacuugaggccagg

SEQ ID NO: 212541 - RNA, 32 nt, Human
guggguggacccucaggucugcagaggacuuc

SEQ ID NO: 212542 - RNA, 22 nt, Human
guggguggaccgcuugagucca

SEQ ID NO: 212543 - RNA, 23 nt, Human
guggguggaccuaacugcccagg

SEQ ID NO: 212544 - RNA, 32 nt, Human
guggguggacuagaagcauuugggaguagugg

SEQ ID NO: 212545 - RNA, 23 nt, Human
guggguggagaggugagcccagg

SEQ ID NO: 212546 - RNA, 32 nt, Human
guggguggagcaucagcguuugcucaguuaag

SEQ ID NO: 212547 - RNA, 32 nt, Human
guggguggagccugacccuggagggcacugag

SEQ ID NO: 212548 - RNA, 32 nt, Human
guggguggagggagggagaucaugagggacuu

SEQ ID NO: 212549 - RNA, 19 nt, Human
guggguggauaacuugaga

SEQ ID NO: 212550 - RNA, 22 nt, Human
guggguggaucacaaggucagg

SEQ ID NO: 212551 - RNA, 21 nt, Human
guggguggaucacaagucagg

SEQ ID NO: 212552 - RNA, 21 nt, Human
guggguggaucacaggucagg

SEQ ID NO: 212553 - RNA, 24 nt, Human
guggguggaucaccagaggucagg

SEQ ID NO: 212554 - RNA, 22 nt, Human
guggguggaucaccaggucagg

SEQ ID NO: 212555 - RNA, 24 nt, Human
guggguggaucaccugaagucagg

SEQ ID NO: 212556 - RNA, 24 nt, Human
guggguggaucaccugagaucagg

SEQ ID NO: 212557 - RNA, 24 nt, Human
guggguggaucaccugagggcagg

SEQ ID NO: 212558 - RNA, 23 nt, Human
guggguggaucaccugaggucag

SEQ ID NO: 212559 - RNA, 24 nt, Human
guggguggaucaccugaggucagg

SEQ ID NO: 212560 - RNA, 24 nt, Human
guggguggaucaccugagguccgg

SEQ ID NO: 212561 - RNA, 24 nt, Human
guggguggaucaccugaggucggg

SEQ ID NO: 212562 - RNA, 24 nt, Human
guggguggaucaccugagguuagg

SEQ ID NO: 212563 - RNA, 22 nt, Human
guggguggaucacgugagguca

SEQ ID NO: 212564 - RNA, 24 nt, Human
guggguggaucacucaaguccagg

SEQ ID NO: 212565 - RNA, 22 nt, Human
guggguggaucacugggucagg

SEQ ID NO: 212566 - RNA, 24 nt, Human
guggguggaucacuugaagccagg

SEQ ID NO: 212567 - RNA, 24 nt, Human
guggguggaucacuugacgucagg

SEQ ID NO: 212568 - RNA, 18 nt, Human
guggguggaucacuugag

SEQ ID NO: 212569 - RNA, 24 nt, Human
guggguggaucacuugagcccagg

SEQ ID NO: 212570 - RNA, 19 nt, Human
guggguggaucacuugagg

SEQ ID NO: 212571 - RNA, 24 nt, Human
guggguggaucacuugaggccagg

SEQ ID NO: 212572 - RNA, 24 nt, Human
guggguggaucacuugaggccggg

SEQ ID NO: 212573 - RNA, 24 nt, Human
guggguggaucacuugaggucagg

SEQ ID NO: 212574 - RNA, 24 nt, Human
guggguggaucacuugaggucggg

SEQ ID NO: 212575 - RNA, 24 nt, Human
guggguggaucacuugaguucagg

SEQ ID NO: 212576 - RNA, 24 nt, Human
guggguggaucacuuggggucagg

SEQ ID NO: 212577 - RNA, 24 nt, Human
guggguggaucauuugaggccagg

SEQ ID NO: 212578 - RNA, 24 nt, Human
guggguggaucgccugagaucagg

SEQ ID NO: 212579 - RNA, 24 nt, Human
guggguggaucgccugagaucggg

SEQ ID NO: 212580 - RNA, 24 nt, Human
guggguggaucgccugaggucggg

SEQ ID NO: 212581 - RNA, 32 nt, Human
guggguggaucgcuugagcucaggaguucaag

SEQ ID NO: 212582 - RNA, 24 nt, Human
guggguggaucgcuugagggcagg

SEQ ID NO: 212583 - RNA, 24 nt, Human
guggguggauuaccugacgucagg

SEQ ID NO: 212584 - RNA, 24 nt, Human
guggguggauuacuugaggucagg

SEQ ID NO: 212585 - RNA, 24 nt, Human
guggguggauugcccgcgcucagg

SEQ ID NO: 212586 - RNA, 24 nt, Human
guggguggauugcuugaaaccagg

SEQ ID NO: 212587 - RNA, 24 nt, Human
guggguggauugcuugagcccagg

SEQ ID NO: 212588 - RNA, 22 nt, Human
guggguggauugcuugagucua

SEQ ID NO: 212589 - RNA, 32 nt, Human
guggguggcagcuguacaccuccaggguggag

SEQ ID NO: 212590 - RNA, 32 nt, Human
guggguggcucauacguguaaucccaguacuu

SEQ ID NO: 212591 - RNA, 32 nt, Human
gugggugggaggauucgugagcugcacacaga

SEQ ID NO: 212592 - RNA, 32 nt, Human
gugggugggccuggcccugcuuucuacgccaa

SEQ ID NO: 212593 - RNA, 32 nt, Human
gugggugggcgguucuagcucuucccacccuc

SEQ ID NO: 212594 - RNA, 32 nt, Human
gugggugggcuucucaggcaggaggacaucuu

SEQ ID NO: 212595 - RNA, 32 nt, Human
guggguggggaccugugucagguguggauagc

SEQ ID NO: 212596 - RNA, 23 nt, Human
guggguggggaggugugcuuuag

SEQ ID NO: 212597 - RNA, 26 nt, Human
guggguggggcagugcuuggcccagg

SEQ ID NO: 212598 - RNA, 32 nt, Human
gugggugggggaagcagacaggagaacacucg

SEQ ID NO: 212599 - RNA, 24 nt, Human
gugggugggucacuugaacccagg

SEQ ID NO: 212600 - RNA, 21 nt, Human
gugggugggucggagcccagg

SEQ ID NO: 212601 - RNA, 32 nt, Human
gugggugggugugacagcaggagcauugccau

SEQ ID NO: 212602 - RNA, 32 nt, Human
guggguggguugcuugagcucaggaguuugag

SEQ ID NO: 212603 - RNA, 32 nt, Human
guggguggguuugggcaucugugccccuggug

SEQ ID NO: 212604 - RNA, 32 nt, Human
guggguggucaggagagaaggccugauaggag

SEQ ID NO: 212605 - RNA, 32 nt, Human
guggguggugcugaagucuggggagugaguuu

SEQ ID NO: 212606 - RNA, 32 nt, Human
gugggugguggaggcugcgagggugcacggcc

SEQ ID NO: 212607 - RNA, 32 nt, Human
gugggugguggaguaggggugggaguggagag

SEQ ID NO: 212608 - RNA, 32 nt, Human
gugggugguggaguggcagggagugcugagug

SEQ ID NO: 212609 - RNA, 32 nt, Human
guggguguaauugguaguguucugucccucca

SEQ ID NO: 212610 - RNA, 19 nt, Human
gugggugucuguaauccca

SEQ ID NO: 212611 - RNA, 32 nt, Human
gugggugugauacugauguguaggcacuuuua

SEQ ID NO: 212612 - RNA, 32 nt, Human
guggguguggccugggguggcucagggcugga

SEQ ID NO: 212613 - RNA, 32 nt, Human
guggguguggcggagcgcgcggugcauggaau

SEQ ID NO: 212614 - RNA, 32 nt, Human
gugggugugggauggggaggggagaguggaaa

SEQ ID NO: 212615 - RNA, 32 nt, Human
guggguguggguggaagggcugggugucgaaa

SEQ ID NO: 212616 - RNA, 32 nt, Human
guggguguguuucggacuggccugggcaggcg

SEQ ID NO: 212617 - RNA, 32 nt, Human
guggguguuccuucgagccccuuccacucaga

SEQ ID NO: 212618 - RNA, 31 nt, Human
guggguguugccuuccauccugugucucuuu

SEQ ID NO: 212619 - RNA, 32 nt, Human
guggguguuguugccuuccucugucugacagg

SEQ ID NO: 212620 - RNA, 32 nt, Human
guggguguuugagagacaugaagaggggagga

SEQ ID NO: 212621 - RNA, 32 nt, Human
guggguuaagagaacuugcagacuggauaugc

SEQ ID NO: 212622 - RNA, 32 nt, Human
guggguucagggugagggcaauuuguaagcuc

SEQ ID NO: 212623 - RNA, 32 nt, Human
guggguucauuucuggacucccuauucuauuc

SEQ ID NO: 212624 - RNA, 32 nt, Human
guggguucccugggccaagaccagccuuuuua

SEQ ID NO: 212625 - RNA, 32 nt, Human
guggguuccugcuggccagggugcagccuuga

SEQ ID NO: 212626 - RNA, 32 nt, Human
guggguuccuucagguuccuugccaacccucc

SEQ ID NO: 212627 - RNA, 32 nt, Human
guggguucgagguggaggcugcagcugaaggu

SEQ ID NO: 212628 - RNA, 32 nt, Human
guggguucuaacuuaaguuccagaccagcuag

SEQ ID NO: 212629 - RNA, 32 nt, Human
guggguugagggugucuuguccgggcugccuu

SEQ ID NO: 212630 - RNA, 32 nt, Human
guggguugggguccccuggagcaggcaggauu

SEQ ID NO: 212631 - RNA, 32 nt, Human
guggguuggggugcauucaguaguccaucuuu

SEQ ID NO: 212632 - RNA, 32 nt, Human
guggguugugacugcuuuugggggagccuggg

SEQ ID NO: 212633 - RNA, 32 nt, Human
guggguugugagugcugguaaugaggagccgu

SEQ ID NO: 212634 - RNA, 22 nt, Human
guggguugugccuguaauccca

SEQ ID NO: 212635 - RNA, 32 nt, Human
guggguuuagucagggcuucuggauccucggu

SEQ ID NO: 212636 - RNA, 22 nt, Human
guggguuucacuauguuggcca

SEQ ID NO: 212637 - RNA, 32 nt, Human
guggguuuccuggauggaugugaaguugggcc

SEQ ID NO: 212638 - RNA, 32 nt, Human
guggguuuccugggcauggggacuggcugccu

SEQ ID NO: 212639 - RNA, 32 nt, Human
guggguuuggcaagaaagaagcaacacagaug

SEQ ID NO: 212640 - RNA, 32 nt, Human
guggguuuguaccuuccuuaagccaggaaagg

SEQ ID NO: 212641 - RNA, 32 nt, Human
guggguuugucacauacgccacuguggaggag

SEQ ID NO: 212642 - RNA, 32 nt, Human
guggguuuucuguuugaaaaggagucauggca

SEQ ID NO: 212643 - RNA, 32 nt, Human
guggguuuucuuuccuuuuuguuuuugguggu

SEQ ID NO: 212644 - RNA, 32 nt, Human
guggguuuuggaauguguguucccggcugugu

SEQ ID NO: 212645 - RNA, 32 nt, Human
guggguuuugugaaagagagcuagcuggcggu

SEQ ID NO: 212646 - RNA, 32 nt, Human
gugguaaaaauuaggcuucuaagaaaggaugg

SEQ ID NO: 212647 - RNA, 32 nt, Human
gugguaaaacccagaaagcauccaucaugaau

SEQ ID NO: 212648 - RNA, 32 nt, Human
gugguaaacaaagacaugggauuuucuuacau

SEQ ID NO: 212649 - RNA, 32 nt, Human
gugguaaaguaguuuggccuguucacaacuua

SEQ ID NO: 212650 - RNA, 32 nt, Human
gugguaacugggaacaauuuuccccaauacag

SEQ ID NO: 212651 - RNA, 32 nt, Human
gugguaacuucuuugaaguuauuuagaaauau

SEQ ID NO: 212652 - RNA, 32 nt, Human
gugguaagaaagcagacuggccagggacuuug

SEQ ID NO: 212653 - RNA, 32 nt, Human
gugguaagccuggguaaagagaaggaacugcg

SEQ ID NO: 212654 - RNA, 32 nt, Human
gugguaaggaauagaaucaaagaggggaguga

SEQ ID NO: 212655 - RNA, 32 nt, Human
gugguaaggauucuugaaaaguggguaagauc

SEQ ID NO: 212656 - RNA, 32 nt, Human
gugguaagggcgaugagugugggccgggcggg

SEQ ID NO: 212657 - RNA, 32 nt, Human
gugguaagucuccaggaggagcccagggcccu

SEQ ID NO: 212658 - RNA, 32 nt, Human
gugguaauauggcaagccuuguuccuuucugc

SEQ ID NO: 212659 - RNA, 32 nt, Human
gugguaauuuuccuccucggccccuauucugg

SEQ ID NO: 212660 - RNA, 22 nt, Human
gugguacacaccuguaauccca

SEQ ID NO: 212661 - RNA, 32 nt, Human
gugguacaccuacaggcuggaguguaaaaugg

SEQ ID NO: 212662 - RNA, 22 nt, Human
gugguacacgccuauaauccca

SEQ ID NO: 212663 - RNA, 22 nt, Human
gugguacacgccuguaauccca

SEQ ID NO: 212664 - RNA, 32 nt, Human
gugguacaggggauuggaaacaugcuccgcgc

SEQ ID NO: 212665 - RNA, 32 nt, Human
gugguaccaauuauaucaucucagucuugaau

SEQ ID NO: 212666 - RNA, 32 nt, Human
gugguaccgauuauaccaucucagucuugaau

SEQ ID NO: 212667 - RNA, 32 nt, Human
gugguaccgauuauaucaucucagucuugaau

SEQ ID NO: 212668 - RNA, 32 nt, Human
gugguaccggggacaggauugcgagggggacc

SEQ ID NO: 212669 - RNA, 32 nt, Human
gugguaccugcucccgguggcccugaggacgu

SEQ ID NO: 212670 - RNA, 32 nt, Human
gugguacuucacccucuucugcccucauuuca

SEQ ID NO: 212671 - RNA, 32 nt, Human
gugguagaaacaaacuccauuacucugauuuu

SEQ ID NO: 212672 - RNA, 32 nt, Human
gugguagaaaggaugcugcugaggcagcugga

SEQ ID NO: 212673 - RNA, 32 nt, Human
gugguagaaaugcaggcuuuaugggcauaaag

SEQ ID NO: 212674 - RNA, 32 nt, Human
gugguagaagcaguagucacuuuuguaagcca

SEQ ID NO: 212675 - RNA, 32 nt, Human
gugguagagggaugaggagaggagaacagagg

SEQ ID NO: 212676 - RNA, 32 nt, Human
gugguagcccuuugccuuucaugcccaugcuu

SEQ ID NO: 212677 - RNA, 22 nt, Human
gugguagcucaugccuguaauc

SEQ ID NO: 212678 - RNA, 32 nt, Human
gugguaggaagugguacugaucaaugauggcc

SEQ ID NO: 212679 - RNA, 32 nt, Human
gugguaggaccggaugcugggccaugucaaga

SEQ ID NO: 212680 - RNA, 32 nt, Human
gugguaggacucuggaagaggccacacacccg

SEQ ID NO: 212681 - RNA, 32 nt, Human
gugguaggacuuugguguggguggugagaaau

SEQ ID NO: 212682 - RNA, 32 nt, Human
gugguaggccaguuccagauaguuucauuuca

SEQ ID NO: 212683 - RNA, 32 nt, Human
gugguaggccauuauuuucauuuucauuuuug

SEQ ID NO: 212684 - RNA, 32 nt, Human
gugguaggcgccugacagaugcuugucugaug

SEQ ID NO: 212685 - RNA, 32 nt, Human
gugguaggcuggugaaaacuugacagcuagac

SEQ ID NO: 212686 - RNA, 32 nt, Human
gugguagggacaagcagugaggugguggccau

SEQ ID NO: 212687 - RNA, 32 nt, Human
gugguagggcuggcacuuauuucuuccaucug

SEQ ID NO: 212688 - RNA, 32 nt, Human
gugguagggggagaaggaggagcuggaggagg

SEQ ID NO: 212689 - RNA, 32 nt, Human
gugguagucccagcuacucaggaggcugaggu

SEQ ID NO: 212690 - RNA, 32 nt, Human
gugguaguccuugccuguagauauuuuuaaug

SEQ ID NO: 212691 - RNA, 32 nt, Human
gugguagugaagccagaaucucagggccaggc

SEQ ID NO: 212692 - RNA, 32 nt, Human
gugguagugagcugaucauccacuuucuucua

SEQ ID NO: 212693 - RNA, 22 nt, Human
gugguauagacugaacagugug

SEQ ID NO: 212694 - RNA, 22 nt, Human
gugguauaggcuggcugguaug

SEQ ID NO: 212695 - RNA, 32 nt, Human
gugguauauguguacacacauacacagggugg

SEQ ID NO: 212696 - RNA, 32 nt, Human
gugguaucccagggucccugcucaaguuuucu

SEQ ID NO: 212697 - RNA, 32 nt, Human
gugguaucuaaccaggcucugccaaucagugc

SEQ ID NO: 212698 - RNA, 32 nt, Human
gugguaucucugcagccuuccccagcgugaau

SEQ ID NO: 212699 - RNA, 31 nt, Human
gugguaucuuuuuuccacagcaguguuccau

SEQ ID NO: 212700 - RNA, 22 nt, Human
gugguaugcuuagcauuuucua

SEQ ID NO: 212701 - RNA, 22 nt, Human
gugguauggaaaagccugcaug

SEQ ID NO: 212702 - RNA, 23 nt, Human
gugguaugggagagcaaaaggca

SEQ ID NO: 212703 - RNA, 32 nt, Human
gugguaugggcugugguccuggagucaucacu

SEQ ID NO: 212704 - RNA, 32 nt, Human
gugguauguacucacaaagauuaagaaagaaa

SEQ ID NO: 212705 - RNA, 22 nt, Human
gugguaugugccuguaauccca

SEQ ID NO: 212706 - RNA, 32 nt, Human
gugguauugauaauagcuacuuacucaaaacu

SEQ ID NO: 212707 - RNA, 32 nt, Human
guggucaacaugguguaaccccaucucuacua

SEQ ID NO: 212708 - RNA, 32 nt, Human
guggucaagcacucgggaaaccuggggcuaau

SEQ ID NO: 212709 - RNA, 32 nt, Human
guggucacaccacuguauuccagccuggguga

SEQ ID NO: 212710 - RNA, 32 nt, Human
guggucacagauggcaucuaggaaaagaccaa

SEQ ID NO: 212711 - RNA, 32 nt, Human
guggucacaggggacccucacucuccauugug

SEQ ID NO: 212712 - RNA, 32 nt, Human
guggucacaguguggcauuccgaguuggggcg

SEQ ID NO: 212713 - RNA, 17 nt, Human
guggucacccaucuucu

SEQ ID NO: 212714 - RNA, 22 nt, Human
guggucacgugggcagcuucug

SEQ ID NO: 212715 - RNA, 21 nt, Human
guggucacuaacaggucacuu

SEQ ID NO: 212716 - RNA, 32 nt, Human
guggucacuagugcccuucccaaggcaaguca

SEQ ID NO: 212717 - RNA, 19 nt, Human
guggucacucccauuuccu

SEQ ID NO: 212718 - RNA, 20 nt, Human
guggucacucccugcuccug

SEQ ID NO: 212719 - RNA, 22 nt, Human
guggucacugaccucauuuccu

SEQ ID NO: 212720 - RNA, 32 nt, Human
guggucacugcaaccuccaucucccuggcuca

SEQ ID NO: 212721 - RNA, 32 nt, Human
guggucacugcacuccagccuggcuacagagu

SEQ ID NO: 212722 - RNA, 21 nt, Human
guggucacugcguacgcucuu

SEQ ID NO: 212723 - RNA, 32 nt, Human
guggucacugugcugcucugcagaguuacuuc

SEQ ID NO: 212724 - RNA, 20 nt, Human
guggucacuguucucuucua

SEQ ID NO: 212725 - RNA, 21 nt, Human
guggucacuguugagaucucc

SEQ ID NO: 212726 - RNA, 32 nt, Human
guggucacuugcuucaccuccaccaccauccc

SEQ ID NO: 212727 - RNA, 22 nt, Human
guggucacuuggcgauuuugua

SEQ ID NO: 212728 - RNA, 19 nt, Human
guggucacuuuucuuccua

SEQ ID NO: 212729 - RNA, 22 nt, Human
guggucagcaggcaaucuccug

SEQ ID NO: 212730 - RNA, 32 nt, Human
guggucagccaagaauagaggucauauaguug

SEQ ID NO: 212731 - RNA, 32 nt, Human
guggucagcccaagccauccaccaccagcucc

SEQ ID NO: 212732 - RNA, 32 nt, Human
guggucagcccgccucggccucccagagugcu

SEQ ID NO: 212733 - RNA, 21 nt, Human
guggucagcugggaucuucug

SEQ ID NO: 212734 - RNA, 32 nt, Human
guggucaggaguuugagaccagccuggccaac

SEQ ID NO: 212735 - RNA, 32 nt, Human
guggucaggcagcuggagcagaaguggaaaug

SEQ ID NO: 212736 - RNA, 32 nt, Human
guggucaggccugggugugccaccugggucac

SEQ ID NO: 212737 - RNA, 32 nt, Human
guggucaggccuggguuggccaccugggucac

SEQ ID NO: 212738 - RNA, 32 nt, Human
guggucagguucagcaggcuccuggguaaaga

SEQ ID NO: 212739 - RNA, 32 nt, Human
guggucagguuucccccgaccuucccucaccc

SEQ ID NO: 212740 - RNA, 20 nt, Human
guggucauagaaucucucug

SEQ ID NO: 212741 - RNA, 32 nt, Human
guggucauagagcauuaaaccaaauaugaggc

SEQ ID NO: 212742 - RNA, 20 nt, Human
guggucaucauccucuccug

SEQ ID NO: 212743 - RNA, 21 nt, Human
guggucaucuacugccuucug

SEQ ID NO: 212744 - RNA, 32 nt, Human
guggucaugccuguaaucccagcauuuuggaa

SEQ ID NO: 212745 - RNA, 32 nt, Human
guggucauggcagaggaggaagaugagggcac

SEQ ID NO: 212746 - RNA, 32 nt, Human
guggucauuuuggaggaaguggaagccuaaga

SEQ ID NO: 212747 - RNA, 21 nt, Human
guggucauuuuuaucuuccua

SEQ ID NO: 212748 - RNA, 32 nt, Human
gugguccaaagccuucagccuagauggugcaa

SEQ ID NO: 212749 - RNA, 32 nt, Human
gugguccagacaguuuagcagaacagccuccg

SEQ ID NO: 212750 - RNA, 32 nt, Human
gugguccagcagaggcgcugggugggagggca

SEQ ID NO: 212751 - RNA, 32 nt, Human
gugguccagggaaguuaguccucuggccucaa

SEQ ID NO: 212752 - RNA, 32 nt, Human
gugguccagguuggccacagacagcuuagaag

SEQ ID NO: 212753 - RNA, 32 nt, Human
guggucccagcacuuugggaggcugagguggg

SEQ ID NO: 212754 - RNA, 32 nt, Human
guggucccagccuggagcugugccagccugac

SEQ ID NO: 212755 - RNA, 32 nt, Human
gugguccccaggaguccugaacaucuggggac

SEQ ID NO: 212756 - RNA, 32 nt, Human
guggucccccaucccuguggcuggugauccug

SEQ ID NO: 212757 - RNA, 32 nt, Human
gugguccccucaagcauccucaguuccucuug

SEQ ID NO: 212758 - RNA, 32 nt, Human
guggucccggcugcuuggaaggcugaggcggg

SEQ ID NO: 212759 - RNA, 32 nt, Human
guggucccggugagcugggcugugcuuacacc

SEQ ID NO: 212760 - RNA, 32 nt, Human
guggucccuccagcggaccagggaagggguca

SEQ ID NO: 212761 - RNA, 32 nt, Human
guggucccucccugggcuccaggggccucugg

SEQ ID NO: 212762 - RNA, 32 nt, Human
guggucccugaggagcauuacacugagaaguu

SEQ ID NO: 212763 - RNA, 32 nt, Human
guggucccugcagaggggcuccaggcugguga

SEQ ID NO: 212764 - RNA, 32 nt, Human
guggucccugcugaaacccccacgccuccgcu

SEQ ID NO: 212765 - RNA, 32 nt, Human
guggucccugcuuuucugaguaccauguuucc

SEQ ID NO: 212766 - RNA, 32 nt, Human
guggucccuggggauggggcggcgguagcagc

SEQ ID NO: 212767 - RNA, 32 nt, Human
guggucccugucucccuucuuguacaauccag

SEQ ID NO: 212768 - RNA, 32 nt, Human
gugguccgcccgccccggccucccagagugcu

SEQ ID NO: 212769 - RNA, 26 nt, Human
gugguccgggaguucaggauugcaug

SEQ ID NO: 212770 - RNA, 32 nt, Human
gugguccgggaguucaggauugcaugaaaaag

SEQ ID NO: 212771 - RNA, 32 nt, Human
gugguccuaaucaugguguugaugccagauuu

SEQ ID NO: 212772 - RNA, 32 nt, Human
gugguccucacaccuuacuauacacugagagu

SEQ ID NO: 212773 - RNA, 32 nt, Human
gugguccuccaaccuccaauacccaggccugg

SEQ ID NO: 212774 - RNA, 32 nt, Human
gugguccuccuccuccucacucuucuugcccc

SEQ ID NO: 212775 - RNA, 32 nt, Human
gugguccugagucaggagguugaggcugcagu

SEQ ID NO: 212776 - RNA, 32 nt, Human
gugguccugugcacguuggccucagauggacu

SEQ ID NO: 212777 - RNA, 27 nt, Human
gugguccuuccaacuuagugcaucccu

SEQ ID NO: 212778 - RNA, 32 nt, Human
gugguccuuccugccugagcccugcacugucc

SEQ ID NO: 212779 - RNA, 32 nt, Human
guggucgcccugcagugcaagcugcugcucca

SEQ ID NO: 212780 - RNA, 32 nt, Human
guggucgcccugcugguucuggcccugggacu

SEQ ID NO: 212781 - RNA, 32 nt, Human
guggucgccuaucuccuuccucugcucccugg

SEQ ID NO: 212782 - RNA, 20 nt, Human
guggucggauucgaccugga

SEQ ID NO: 212783 - RNA, 32 nt, Human
guggucgguuccaugaaaggcaaaggagugug

SEQ ID NO: 212784 - RNA, 32 nt, Human
guggucgucaucugggccauuugccuuacuuc

SEQ ID NO: 212785 - RNA, 32 nt, Human
guggucgugcugaggcaggagugggguugccc

SEQ ID NO: 212786 - RNA, 32 nt, Human
guggucuaaaaauaaucccagcacuuugggag

SEQ ID NO: 212787 - RNA, 32 nt, Human
guggucuaagcuccucccagggcuguguggau

SEQ ID NO: 212788 - RNA, 32 nt, Human
guggucuaaggcuugcaucaaucuagaugaac

SEQ ID NO: 212789 - RNA, 22 nt, Human
guggucuacacaguguucucua

SEQ ID NO: 212790 - RNA, 32 nt, Human
guggucuccgcaccucuccagcuccugcaccc

SEQ ID NO: 212791 - RNA, 32 nt, Human
guggucucgaauuccugaccucaguugagccg

SEQ ID NO: 212792 - RNA, 32 nt, Human
guggucucgccuucccuucuuccugcagguuc

SEQ ID NO: 212793 - RNA, 22 nt, Human
guggucucugaaugugccuucc

SEQ ID NO: 212794 - RNA, 32 nt, Human
guggucucuucaugcucuccccaucccaguuu

SEQ ID NO: 212795 - RNA, 32 nt, Human
guggucucuuugagaagaagcuguggggccua

SEQ ID NO: 212796 - RNA, 32 nt, Human
guggucugacccuucccucggugugggggaug

SEQ ID NO: 212797 - RNA, 32 nt, Human
guggucugccaggcccucgcuccugggguguc

SEQ ID NO: 212798 - RNA, 32 nt, Human
guggucugccccaggcauaaagaaggaaaauu

SEQ ID NO: 212799 - RNA, 32 nt, Human
guggucugcgucuucugccauuggcuugaacu

SEQ ID NO: 212800 - RNA, 32 nt, Human
guggucuguggaccagcagcggcagugacacc

SEQ ID NO: 212801 - RNA, 32 nt, Human
guggucuucaacuugaggacgagggugauuuu

SEQ ID NO: 212802 - RNA, 23 nt, Human
guggucuuccagagcgaccuccu

SEQ ID NO: 212803 - RNA, 32 nt, Human
guggucuucccccugcacuuuucugucuaauu

SEQ ID NO: 212804 - RNA, 21 nt, Human
guggucuuccuguggucuucc

SEQ ID NO: 212805 - RNA, 32 nt, Human
guggucuuccuugcuugacccucucuacucug

SEQ ID NO: 212806 - RNA, 32 nt, Human
guggucuugcagccuccaaaccccgagugcua

SEQ ID NO: 212807 - RNA, 32 nt, Human
guggucuugcccacuguccuuuugccuccaug

SEQ ID NO: 212808 - RNA, 32 nt, Human
guggucuuguguucugccugguggucuuucuu

SEQ ID NO: 212809 - RNA, 32 nt, Human
guggucuuuccuaucauggagugacgguccca

SEQ ID NO: 212810 - RNA, 32 nt, Human
guggugaacagcuccauuucugugcacauguu

SEQ ID NO: 212811 - RNA, 32 nt, Human
guggugaacucugaagauguuuccuggugaau

SEQ ID NO: 212812 - RNA, 32 nt, Human
guggugaagauggaacuguuaggugguuugau

SEQ ID NO: 212813 - RNA, 32 nt, Human
guggugaccucggccauuuuccaccucgccuu

SEQ ID NO: 212814 - RNA, 22 nt, Human
guggugacucaagccuauaauc

SEQ ID NO: 212815 - RNA, 22 nt, Human
guggugacucacaccuauaauc

SEQ ID NO: 212816 - RNA, 22 nt, Human
guggugacucacaccuguaauc

SEQ ID NO: 212817 - RNA, 22 nt, Human
guggugacucaugccuguaauc

SEQ ID NO: 212818 - RNA, 32 nt, Human
guggugacugggcugaggagaugcugggacug

SEQ ID NO: 212819 - RNA, 32 nt, Human
guggugagaacagaggaugaguugggucuguu

SEQ ID NO: 212820 - RNA, 32 nt, Human
guggugagaccaggggaaaggccagcucagag

SEQ ID NO: 212821 - RNA, 32 nt, Human
guggugagagcacacguccucgucucauuccu

SEQ ID NO: 212822 - RNA, 32 nt, Human
guggugagagcagccaccccugcuuuguuccc

SEQ ID NO: 212823 - RNA, 32 nt, Human
guggugagaguauaagcgaguuuauucuuuac

SEQ ID NO: 212824 - RNA, 32 nt, Human
guggugagaucaugccacuacacuccagccug

SEQ ID NO: 212825 - RNA, 32 nt, Human
guggugagcacaccauuugugcugcugcuguu

SEQ ID NO: 212826 - RNA, 19 nt, Human
guggugagcaccuguaauc

SEQ ID NO: 212827 - RNA, 32 nt, Human
guggugagccccggagaggagacgguggaggc

SEQ ID NO: 212828 - RNA, 32 nt, Human
guggugagcucuucccugccugggccuccccg

SEQ ID NO: 212829 - RNA, 32 nt, Human
guggugagcugguggcucucuggugagcuagu

SEQ ID NO: 212830 - RNA, 32 nt, Human
guggugaggccaguuucaugucuugugauuua

SEQ ID NO: 212831 - RNA, 32 nt, Human
guggugaggccgcggccccgggccggccagcc

SEQ ID NO: 212832 - RNA, 32 nt, Human
guggugaggccgugaagguggggacggugccu

SEQ ID NO: 212833 - RNA, 19 nt, Human
guggugaguggaagggagg

SEQ ID NO: 212834 - RNA, 32 nt, Human
guggugauacccagaccagcagucaccccagg

SEQ ID NO: 212835 - RNA, 32 nt, Human
guggugaucagucugcagcacagcgcagaagu

SEQ ID NO: 212836 - RNA, 32 nt, Human
guggugaucagucugcagcacagugcagaagu

SEQ ID NO: 212837 - RNA, 22 nt, Human
guggugaucguacugaugaagu

SEQ ID NO: 212838 - RNA, 32 nt, Human
guggugauuccaccccugcccaucacuggggg

SEQ ID NO: 212839 - RNA, 22 nt, Human
guggugcacaccuguaauccca

SEQ ID NO: 212840 - RNA, 22 nt, Human
guggugcacaccugugauccca

SEQ ID NO: 212841 - RNA, 22 nt, Human
guggugcacacguauaauccca

SEQ ID NO: 212842 - RNA, 32 nt, Human
guggugcacaggaguguuccaggccuuucacc

SEQ ID NO: 212843 - RNA, 22 nt, Human
guggugcaccccuguaauccca

SEQ ID NO: 212844 - RNA, 22 nt, Human
guggugcacgccuguaauccca

SEQ ID NO: 212845 - RNA, 32 nt, Human
guggugcacgugucuccaccuccaaggagagg

SEQ ID NO: 212846 - RNA, 22 nt, Human
guggugcacuccuguaauccca

SEQ ID NO: 212847 - RNA, 23 nt, Human
guggugcagacaggagcugugug

SEQ ID NO: 212848 - RNA, 32 nt, Human
guggugcagccccuggcaucucagacaugguu

SEQ ID NO: 212849 - RNA, 32 nt, Human
guggugcaggccuggcaccaggaggcuugcac

SEQ ID NO: 212850 - RNA, 32 nt, Human
guggugcaggcggggagccagagaaacuugcc

SEQ ID NO: 212851 - RNA, 32 nt, Human
guggugcaggggcacuucuaagugggcucuuu

SEQ ID NO: 212852 - RNA, 32 nt, Human
guggugcaguaagccaagaucacgccacugca

SEQ ID NO: 212853 - RNA, 32 nt, Human
guggugcagucuguuucuccccuagacucugg

SEQ ID NO: 212854 - RNA, 32 nt, Human
guggugcauccuguaaucauagcuacuuggga

SEQ ID NO: 212855 - RNA, 19 nt, Human
guggugcaugccuguaauc

SEQ ID NO: 212856 - RNA, 19 nt, Human
guggugcaugccuguaguc

SEQ ID NO: 212857 - RNA, 32 nt, Human
guggugccaacauacucauugcagccuugaac

SEQ ID NO: 212858 - RNA, 32 nt, Human
guggugccacacaccguugagguuggaguggg

SEQ ID NO: 212859 - RNA, 32 nt, Human
guggugccacagagccucaccgugccugagug

SEQ ID NO: 212860 - RNA, 32 nt, Human
guggugccacugcacuccaaccugggggacag

SEQ ID NO: 212861 - RNA, 32 nt, Human
guggugccacugcgcuccagccugggggaggg

SEQ ID NO: 212862 - RNA, 32 nt, Human
guggugccauaguuugucaucccugggucuag

SEQ ID NO: 212863 - RNA, 32 nt, Human
guggugccauuuccuuccccaucuucauguua

SEQ ID NO: 212864 - RNA, 32 nt, Human
guggugccauuuucucucucuuaagccccauu

SEQ ID NO: 212865 - RNA, 31 nt, Human
guggugcccguggaaagagggagaaagagaa

SEQ ID NO: 212866 - RNA, 32 nt, Human
guggugccuccaggaccgcugcgggugguaac

SEQ ID NO: 212867 - RNA, 32 nt, Human
guggugccuccccucugucucccuccugcucu

SEQ ID NO: 212868 - RNA, 32 nt, Human
guggugccucuccuggaaggaagcucuugcuu

SEQ ID NO: 212869 - RNA, 30 nt, Human
guggugccucuuguaucccuagugcuccau

SEQ ID NO: 212870 - RNA, 32 nt, Human
guggugccugauguuauaacaacaccucauuc

SEQ ID NO: 212871 - RNA, 32 nt, Human
guggugccuguaaucccagcaguuugggaggc

SEQ ID NO: 212872 - RNA, 32 nt, Human
guggugcgauccuugucuuccuccagugcugg

SEQ ID NO: 212873 - RNA, 22 nt, Human
guggugcgcaugccuguagucc

SEQ ID NO: 212874 - RNA, 32 nt, Human
guggugcgcucaauaaaaaugcuggaauucaa

SEQ ID NO: 212875 - RNA, 32 nt, Human
guggugcguccccaggccccugaggcccagcu

SEQ ID NO: 212876 - RNA, 32 nt, Human
guggugcgugccuguagccucagcuacucggg

SEQ ID NO: 212877 - RNA, 32 nt, Human
guggugcuagaagacagacaucuguggaauga

SEQ ID NO: 212878 - RNA, 21 nt, Human
guggugcucacgccuguaauc

SEQ ID NO: 212879 - RNA, 32 nt, Human
guggugcuccuguaacaguaagaacuaauucu

SEQ ID NO: 212880 - RNA, 32 nt, Human
guggugcugcaugucuguggcucaccuuuauu

SEQ ID NO: 212881 - RNA, 17 nt, Human
guggugcugccaggacu

SEQ ID NO: 212882 - RNA, 18 nt, Human
guggugcugccccgagug

SEQ ID NO: 212883 - RNA, 32 nt, Human
guggugcuugccaagggcugugcggagcuggu

SEQ ID NO: 212884 - RNA, 32 nt, Human
gugguggaaauggcaggagggugcagguacuc

SEQ ID NO: 212885 - RNA, 32 nt, Human
gugguggaacagcaaccggugccaccaggaga

SEQ ID NO: 212886 - RNA, 32 nt, Human
gugguggaaccagccccuccagccuggggucc

SEQ ID NO: 212887 - RNA, 32 nt, Human
gugguggaaggaugcugacauccaggcuggga

SEQ ID NO: 212888 - RNA, 32 nt, Human
gugguggacaaggagagcaccaugagcgccga

SEQ ID NO: 212889 - RNA, 32 nt, Human
gugguggacagagaguuccaaacaccucagcc

SEQ ID NO: 212890 - RNA, 32 nt, Human
gugguggaccugaccugcuccuggccccuugg

SEQ ID NO: 212891 - RNA, 32 nt, Human
gugguggacuauuuaacaaaacugaacaaugg

SEQ ID NO: 212892 - RNA, 32 nt, Human
gugguggagccagcaucucaccugccaggcuu

SEQ ID NO: 212893 - RNA, 32 nt, Human
gugguggagccccugagggcuuggugggguug

SEQ ID NO: 212894 - RNA, 32 nt, Human
gugguggaggaacuucaucccacugaauuccu

SEQ ID NO: 212895 - RNA, 32 nt, Human
gugguggaggaggaggaggaggaggaaggcaa

SEQ ID NO: 212896 - RNA, 32 nt, Human
gugguggaggcagccuucagugagcauggagg

SEQ ID NO: 212897 - RNA, 32 nt, Human
gugguggagguggauacagcagucggagacau

SEQ ID NO: 212898 - RNA, 32 nt, Human
gugguggaggugggguuggagcaggaagggaa

SEQ ID NO: 212899 - RNA, 32 nt, Human
gugguggagugaggacaggggagggccggccc

SEQ ID NO: 212900 - RNA, 32 nt, Human
gugguggauacucagcccugugagugcaauaa

SEQ ID NO: 212901 - RNA, 32 nt, Human
gugguggaucucagugccuaggggugccgagg

SEQ ID NO: 212902 - RNA, 22 nt, Human
gugguggauggaccugggcaga

SEQ ID NO: 212903 - RNA, 32 nt, Human
gugguggcacacaccaguaauccuggcuacuc

SEQ ID NO: 212904 - RNA, 32 nt, Human
gugguggcacacaccuguagucccagguacuu

SEQ ID NO: 212905 - RNA, 32 nt, Human
gugguggcagcaggaaggacacugccacaaau

SEQ ID NO: 212906 - RNA, 32 nt, Human
gugguggcagcagugauccucugaaccugcag

SEQ ID NO: 212907 - RNA, 32 nt, Human
gugguggcagcagugauccucuggccuggucc

SEQ ID NO: 212908 - RNA, 32 nt, Human
gugguggcagcgguaccgcuccccagcucacu

SEQ ID NO: 212909 - RNA, 32 nt, Human
gugguggcaggagcaaggagagagggaagaag

SEQ ID NO: 212910 - RNA, 32 nt, Human
gugguggcaggcaccuguaaucccagcuacuc

SEQ ID NO: 212911 - RNA, 32 nt, Human
gugguggcaggcaccuguaaucccagcuacuu

SEQ ID NO: 212912 - RNA, 32 nt, Human
gugguggcaggcaccuguagucccagcuaccc

SEQ ID NO: 212913 - RNA, 32 nt, Human
gugguggcaggcaccuguagucccagcuacuc

SEQ ID NO: 212914 - RNA, 32 nt, Human
gugguggcaggcaccuguagucccagcuacuu

SEQ ID NO: 212915 - RNA, 32 nt, Human
gugguggcaggcaccuguaguccuagcuacuu

SEQ ID NO: 212916 - RNA, 32 nt, Human
gugguggcaggcaucugcaaucucagcuacuc

SEQ ID NO: 212917 - RNA, 32 nt, Human
gugguggcaggugccuguagucucagcuacuc

SEQ ID NO: 212918 - RNA, 32 nt, Human
gugguggcaguggaggugggguguuugggagg

SEQ ID NO: 212919 - RNA, 32 nt, Human
gugguggcaguggcucccagcacuuugggagg

SEQ ID NO: 212920 - RNA, 32 nt, Human
gugguggcauaugccuguaaaucccagcuauu

SEQ ID NO: 212921 - RNA, 32 nt, Human
gugguggcaugcaccugucaucccagcuacuc

SEQ ID NO: 212922 - RNA, 22 nt, Human
gugguggcccacgccuguaauc

SEQ ID NO: 212923 - RNA, 32 nt, Human
gugguggccgucuggcugaccugggccaaugg

SEQ ID NO: 212924 - RNA, 21 nt, Human
gugguggccugcggcaucccu

SEQ ID NO: 212925 - RNA, 32 nt, Human
gugguggccuguaaucccagcuacuugggagg

SEQ ID NO: 212926 - RNA, 32 nt, Human
gugguggcgcauugccuguaaucccagcuacu

SEQ ID NO: 212927 - RNA, 32 nt, Human
gugguggcggcagaggaggagggcagcagcug

SEQ ID NO: 212928 - RNA, 32 nt, Human
gugguggcgggagucuguagucucagcuauuc

SEQ ID NO: 212929 - RNA, 22 nt, Human
gugguggcucaagccuguaauc

SEQ ID NO: 212930 - RNA, 22 nt, Human
gugguggcucacaacuguaauc

SEQ ID NO: 212931 - RNA, 22 nt, Human
gugguggcucacaccugcaauc

SEQ ID NO: 212932 - RNA, 32 nt, Human
gugguggcucacaccuguaaccccagcacuuu

SEQ ID NO: 212933 - RNA, 22 nt, Human
gugguggcucacaccuguaauc

SEQ ID NO: 212934 - RNA, 32 nt, Human
gugguggcucacaccuguaaucucggcacuuu

SEQ ID NO: 212935 - RNA, 32 nt, Human
gugguggcucacaccuguaauuucagcacucu

SEQ ID NO: 212936 - RNA, 32 nt, Human
gugguggcucacaccuguauucccagcacuuu

SEQ ID NO: 212937 - RNA, 32 nt, Human
gugguggcucacaccugucauuccggccucag

SEQ ID NO: 212938 - RNA, 22 nt, Human
gugguggcucacaucuguaauc

SEQ ID NO: 212939 - RNA, 22 nt, Human
gugguggcucacgccuauaauc

SEQ ID NO: 212940 - RNA, 20 nt, Human
gugguggcucacgccuguaa

SEQ ID NO: 212941 - RNA, 22 nt, Human
gugguggcucacgccuguaauc

SEQ ID NO: 212942 - RNA, 32 nt, Human
gugguggcucacgccuguaaucccugcauuuu

SEQ ID NO: 212943 - RNA, 22 nt, Human
gugguggcucacgccuguaauu

SEQ ID NO: 212944 - RNA, 22 nt, Human
gugguggcucacgccuguaguc

SEQ ID NO: 212945 - RNA, 22 nt, Human
gugguggcucacgucuguaauc

SEQ ID NO: 212946 - RNA, 22 nt, Human
gugguggcucaggccuguaauc

SEQ ID NO: 212947 - RNA, 18 nt, Human
gugguggcucauaccugu

SEQ ID NO: 212948 - RNA, 32 nt, Human
gugguggcucauaccuguaaaucccagcacuu

SEQ ID NO: 212949 - RNA, 22 nt, Human
gugguggcucauaccuguaauc

SEQ ID NO: 212950 - RNA, 22 nt, Human
gugguggcucaugccuauaauc

SEQ ID NO: 212951 - RNA, 19 nt, Human
gugguggcucaugccugua

SEQ ID NO: 212952 - RNA, 21 nt, Human
gugguggcucaugccuguaau

SEQ ID NO: 212953 - RNA, 22 nt, Human
gugguggcucaugccuguaauc

SEQ ID NO: 212954 - RNA, 23 nt, Human
gugguggcucaugccuguaaucc

SEQ ID NO: 212955 - RNA, 22 nt, Human
gugguggcucaugccuguaauu

SEQ ID NO: 212956 - RNA, 22 nt, Human
gugguggcucaugccuguaguc

SEQ ID NO: 212957 - RNA, 32 nt, Human
gugguggcucaugccuguauccagcacuuugg

SEQ ID NO: 212958 - RNA, 32 nt, Human
gugguggcuccugcuccgcauguggggaagau

SEQ ID NO: 212959 - RNA, 32 nt, Human
gugguggcucucacagggcucuccagacacuc

SEQ ID NO: 212960 - RNA, 32 nt, Human
gugguggcugaacucuaguggggccgagacua

SEQ ID NO: 212961 - RNA, 32 nt, Human
gugguggcugagccagcuccuugaggaugugg

SEQ ID NO: 212962 - RNA, 32 nt, Human
gugguggcuggcucucuucagcauguaauugg

SEQ ID NO: 212963 - RNA, 32 nt, Human
gugguggcuggcuguagccuagugcacgcugu

SEQ ID NO: 212964 - RNA, 32 nt, Human
gugguggcuuaaguuuugaagggagguagcau

SEQ ID NO: 212965 - RNA, 22 nt, Human
gugguggcuuacaccuguaauc

SEQ ID NO: 212966 - RNA, 22 nt, Human
gugguggcuuacgccuguaauc

SEQ ID NO: 212967 - RNA, 22 nt, Human
gugguggcuuaugccuguaauc

SEQ ID NO: 212968 - RNA, 32 nt, Human
gugguggcuucacgccuguaauucuagcacuu

SEQ ID NO: 212969 - RNA, 32 nt, Human
gugguggcuucaguccugccccugcaccugac

SEQ ID NO: 212970 - RNA, 32 nt, Human
gugguggcuuuaaucccagcacuuugggaacc

SEQ ID NO: 212971 - RNA, 32 nt, Human
gugguggcuuugucccuugaaggcuccuccug

SEQ ID NO: 212972 - RNA, 32 nt, Human
guggugggaaccugggcggcucuggaggccca

SEQ ID NO: 212973 - RNA, 32 nt, Human
guggugggaagagaugccagcgccacgagagg

SEQ ID NO: 212974 - RNA, 32 nt, Human
guggugggaagcuucccaggagaguccucagc

SEQ ID NO: 212975 - RNA, 32 nt, Human
guggugggaaggaaacagagagggguugauca

SEQ ID NO: 212976 - RNA, 32 nt, Human
guggugggagagcagagguggacgcggccgag

SEQ ID NO: 212977 - RNA, 32 nt, Human
guggugggagccuggagcaagguggagggugc

SEQ ID NO: 212978 - RNA, 32 nt, Human
guggugggaggcagcuguggugcaggagcuga

SEQ ID NO: 212979 - RNA, 32 nt, Human
guggugggaucacgccuguaaucccagcacuu

SEQ ID NO: 212980 - RNA, 32 nt, Human
guggugggcaggaaggagcuaucagaauaaag

SEQ ID NO: 212981 - RNA, 32 nt, Human
guggugggcagguggagggccugcccuggaca

SEQ ID NO: 212982 - RNA, 32 nt, Human
guggugggcugguggcccaggagaagucagga

SEQ ID NO: 212983 - RNA, 32 nt, Human
gugguggggaagagccuugucuucuuagcugu

SEQ ID NO: 212984 - RNA, 32 nt, Human
gugguggggagagugaagaaagagauagaaua

SEQ ID NO: 212985 - RNA, 32 nt, Human
gugguggggguuucucauuguucuccggcccu

SEQ ID NO: 212986 - RNA, 32 nt, Human
gugguggguagcagcaugacagcugcuugcca

SEQ ID NO: 212987 - RNA, 22 nt, Human
guggugggucacgccuguaauc

SEQ ID NO: 212988 - RNA, 32 nt, Human
gugguggguccagaacucggagaccagaaagu

SEQ ID NO: 212989 - RNA, 32 nt, Human
gugguggguccugcuccuaucucuccaaaccc

SEQ ID NO: 212990 - RNA, 32 nt, Human
gugguggguggacccucaggucugcagaggac

SEQ ID NO: 212991 - RNA, 19 nt, Human
gugguggucaccuguaguc

SEQ ID NO: 212992 - RNA, 32 nt, Human
gugguggucaucucuucugaucuucacagcca

SEQ ID NO: 212993 - RNA, 32 nt, Human
gugguggucuccgacuuuauagcaggaacuuu

SEQ ID NO: 212994 - RNA, 32 nt, Human
gugguggugagguuggaaccaguuggauuaug

SEQ ID NO: 212995 - RNA, 32 nt, Human
gugguggugagguuguggggcggggguauuuu

SEQ ID NO: 212996 - RNA, 32 nt, Human
gugguggugcacaccuguagucccagguacuc

SEQ ID NO: 212997 - RNA, 32 nt, Human
gugguggugcacuggugacuucauggccacgc

SEQ ID NO: 212998 - RNA, 32 nt, Human
gugguggugcugggggaggcaccccacagacu

SEQ ID NO: 212999 - RNA, 32 nt, Human
guggugguggaagguagucugagccacugccu

SEQ ID NO: 213000 - RNA, 32 nt, Human
guggugguggagggugggggugcacugcagca

SEQ ID NO: 213001 - RNA, 32 nt, Human
guggugguggcaggaguggcugugggagcagc

SEQ ID NO: 213002 - RNA, 32 nt, Human
guggugguggcugcgcacacagcuccacaggu

SEQ ID NO: 213003 - RNA, 32 nt, Human
gugguggugggaagccuguaaucccagcuacu

SEQ ID NO: 213004 - RNA, 32 nt, Human
gugguggugggcaccuguagucucagcuacuu

SEQ ID NO: 213005 - RNA, 32 nt, Human
guggugguggucuccuggcagagcggugggac

SEQ ID NO: 213006 - RNA, 22 nt, Human
guggugguucacaccuguaauc

SEQ ID NO: 213007 - RNA, 22 nt, Human
guggugguucacgccuguaauc

SEQ ID NO: 213008 - RNA, 22 nt, Human
guggugguucaugccuguaauc

SEQ ID NO: 213009 - RNA, 32 nt, Human
guggugguuuucuguucuuucuggcuaugcau

SEQ ID NO: 213010 - RNA, 22 nt, Human
gugguguaccccuguaauccca

SEQ ID NO: 213011 - RNA, 22 nt, Human
gugguguacgccuguaauccca

SEQ ID NO: 213012 - RNA, 32 nt, Human
gugguguagugcuguguguauggaguuagugu

SEQ ID NO: 213013 - RNA, 21 nt, Human
gugguguaugguggucugccg

SEQ ID NO: 213014 - RNA, 32 nt, Human
gugguguaugugccacgggauuugagugguug

SEQ ID NO: 213015 - RNA, 32 nt, Human
guggugucaucuggggagaacaggagggcaug

SEQ ID NO: 213016 - RNA, 31 nt, Human
guggugugacuucugccccgaaguuccuacu

SEQ ID NO: 213017 - RNA, 22 nt, Human
guggugugcaccuguaauccca

SEQ ID NO: 213018 - RNA, 23 nt, Human
guggugugcagagaugcugcaua

SEQ ID NO: 213019 - RNA, 18 nt, Human
guggugugcagcaucccu

SEQ ID NO: 213020 - RNA, 22 nt, Human
guggugugccccuguaauccca

SEQ ID NO: 213021 - RNA, 32 nt, Human
guggugugccuguagucccagcuacuugggag

SEQ ID NO: 213022 - RNA, 32 nt, Human
guggugugccuguaguccuaguuacuugggag

SEQ ID NO: 213023 - RNA, 22 nt, Human
guggugugcgccuguaauccca

SEQ ID NO: 213024 - RNA, 32 nt, Human
gugguguggaggcagcugcugggcaggacccg

SEQ ID NO: 213025 - RNA, 31 nt, Human
gugguguggcucucuggacuuaacgucacuc

SEQ ID NO: 213026 - RNA, 32 nt, Human
gugguguggcuuuguggggagggcguaguucc

SEQ ID NO: 213027 - RNA, 32 nt, Human
guggugugggaaaugagacuugcucucuggcc

SEQ ID NO: 213028 - RNA, 32 nt, Human
gugguguguaagcagguggaauacucacccac

SEQ ID NO: 213029 - RNA, 22 nt, Human
guggugugugccuguaauccca

SEQ ID NO: 213030 - RNA, 31 nt, Human
guggugugugggucuuggccuguguuucucu

SEQ ID NO: 213031 - RNA, 32 nt, Human
gugguguuaccuccccauuuucacaugcacgu

SEQ ID NO: 213032 - RNA, 23 nt, Human
gugguguucacauacauuuucua

SEQ ID NO: 213033 - RNA, 32 nt, Human
gugguguucucuucucaaggcuuugaaaucuc

SEQ ID NO: 213034 - RNA, 32 nt, Human
gugguguugggguuuggguaggggaggggagc

SEQ ID NO: 213035 - RNA, 23 nt, Human
gugguguuguguguguuugugcg

SEQ ID NO: 213036 - RNA, 32 nt, Human
gugguuaaagauuuacccucccucuuggugaa

SEQ ID NO: 213037 - RNA, 32 nt, Human
gugguuacaugaggcaggugugagggacccga

SEQ ID NO: 213038 - RNA, 19 nt, Human
gugguuacaugcauuuccu

SEQ ID NO: 213039 - RNA, 19 nt, Human
gugguuacuuguaucuccu

SEQ ID NO: 213040 - RNA, 32 nt, Human
gugguuagaggcugcccucuccccagcaaugc

SEQ ID NO: 213041 - RNA, 19 nt, Human
gugguuaugcauuuuucua

SEQ ID NO: 213042 - RNA, 18 nt, Human
gugguuauguucccagca

SEQ ID NO: 213043 - RNA, 22 nt, Human
gugguuauuagggcuuuuccug

SEQ ID NO: 213044 - RNA, 19 nt, Human
gugguucacaccuguaauc

SEQ ID NO: 213045 - RNA, 20 nt, Human
gugguucacaccuguaaucc

SEQ ID NO: 213046 - RNA, 22 nt, Human
gugguucacaccuguaauccca

SEQ ID NO: 213047 - RNA, 32 nt, Human
gugguucacagcuguaguauggagauuaauag

SEQ ID NO: 213048 - RNA, 31 nt, Human
gugguucacagcuuucauccaagcuugguga

SEQ ID NO: 213049 - RNA, 32 nt, Human
gugguucaccuguagacagagagcagaucaau

SEQ ID NO: 213050 - RNA, 22 nt, Human
gugguucacgccuguaauccca

SEQ ID NO: 213051 - RNA, 32 nt, Human
gugguucaggccggcucccccuuccuggucuc

SEQ ID NO: 213052 - RNA, 22 nt, Human
gugguucaugccuauaauccca

SEQ ID NO: 213053 - RNA, 32 nt, Human
gugguucaugccuguaauccagcacuuuggga

SEQ ID NO: 213054 - RNA, 32 nt, Human
gugguucaugccuuaaucccagcacuuuggga

SEQ ID NO: 213055 - RNA, 32 nt, Human
gugguuccagcuuuucuuucuccccuacucca

SEQ ID NO: 213056 - RNA, 32 nt, Human
gugguucccagccucugcugacagcaccucag

SEQ ID NO: 213057 - RNA, 32 nt, Human
gugguucccaugaugcggaaaaagccagagag

SEQ ID NO: 213058 - RNA, 32 nt, Human
gugguuccgucagaccaugaggagccaagacc

SEQ ID NO: 213059 - RNA, 32 nt, Human
gugguuccuucccuuuccucccccucccaugc

SEQ ID NO: 213060 - RNA, 32 nt, Human
gugguuccuuucucagccgcuucugacugcug

SEQ ID NO: 213061 - RNA, 31 nt, Human
gugguucgacuucucccucugucugggggca

SEQ ID NO: 213062 - RNA, 32 nt, Human
gugguucuaauucgcuaggcaggccugagcga

SEQ ID NO: 213063 - RNA, 32 nt, Human
gugguucucaaaguguaaucccugggccagca

SEQ ID NO: 213064 - RNA, 32 nt, Human
gugguucucaaagugugggcccuggaccagug

SEQ ID NO: 213065 - RNA, 32 nt, Human
gugguucuccaccccguuguggcuuacagcug

SEQ ID NO: 213066 - RNA, 32 nt, Human
gugguucucccagcacgcagauggagaucuga

SEQ ID NO: 213067 - RNA, 32 nt, Human
gugguucucugccucuggugccucccuaaagc

SEQ ID NO: 213068 - RNA, 32 nt, Human
gugguucugcaugucugugcucuuccucaacc

SEQ ID NO: 213069 - RNA, 32 nt, Human
gugguucuggugggaugcacagucacuccaca

SEQ ID NO: 213070 - RNA, 32 nt, Human
gugguucuuccuguucugugcuguguauagug

SEQ ID NO: 213071 - RNA, 18 nt, Human
gugguugaccucucagca

SEQ ID NO: 213072 - RNA, 32 nt, Human
gugguugaggagaugaaagggaaguauuauag

SEQ ID NO: 213073 - RNA, 19 nt, Human
gugguugaguugucuccua

SEQ ID NO: 213074 - RNA, 32 nt, Human
gugguugauagccagucacugccuuaagaaca

SEQ ID NO: 213075 - RNA, 32 nt, Human
gugguugcaacacuguacuccagccugggcaa

SEQ ID NO: 213076 - RNA, 32 nt, Human
gugguugcagugagccaagauugugccacugc

SEQ ID NO: 213077 - RNA, 32 nt, Human
gugguugcagugagccuagaucgugccacugc

SEQ ID NO: 213078 - RNA, 32 nt, Human
gugguugcagugagcgaagaucgagccacugc

SEQ ID NO: 213079 - RNA, 32 nt, Human
gugguugcagugagcuaugauuguaccacugc

SEQ ID NO: 213080 - RNA, 32 nt, Human
gugguugcagugagcugagauugugucauugc

SEQ ID NO: 213081 - RNA, 32 nt, Human
gugguugccaugauaaggggcagugacuucca

SEQ ID NO: 213082 - RNA, 32 nt, Human
gugguugccgggaggaccagcaccuccaguua

SEQ ID NO: 213083 - RNA, 32 nt, Human
gugguugccuccaugcuguucucaucauagug

SEQ ID NO: 213084 - RNA, 32 nt, Human
gugguugccugccccacucccugccgagacgc

SEQ ID NO: 213085 - RNA, 32 nt, Human
gugguugcuauggaaacagaaaaggcugccag

SEQ ID NO: 213086 - RNA, 32 nt, Human
gugguugcugaaggcuggaguggguguggcaa

SEQ ID NO: 213087 - RNA, 32 nt, Human
gugguugcugcacuugaccacugugaagacug

SEQ ID NO: 213088 - RNA, 32 nt, Human
gugguugcuucgggaugggaggaaugggaaga

SEQ ID NO: 213089 - RNA, 32 nt, Human
gugguuggacuucaccucucagcacugaaaac

SEQ ID NO: 213090 - RNA, 32 nt, Human
gugguuggaggcgguggcggcggcggcgagga

SEQ ID NO: 213091 - RNA, 22 nt, Human
gugguuggcaccuauaguccca

SEQ ID NO: 213092 - RNA, 22 nt, Human
gugguuggcaccuguaguccca

SEQ ID NO: 213093 - RNA, 22 nt, Human
gugguuggcgccuguaauccca

SEQ ID NO: 213094 - RNA, 32 nt, Human
gugguuggcucaugccuguaaucccaccacuu

SEQ ID NO: 213095 - RNA, 32 nt, Human
gugguuggcugagccaagaacucuccuaaauc

SEQ ID NO: 213096 - RNA, 24 nt, Human
gugguugucucacuucaucucuua

SEQ ID NO: 213097 - RNA, 23 nt, Human
gugguugugaaacagcaucuccu

SEQ ID NO: 213098 - RNA, 32 nt, Human
gugguugugcagccccacccccgggaggggcu

SEQ ID NO: 213099 - RNA, 22 nt, Human
gugguuguggccuguaauccca

SEQ ID NO: 213100 - RNA, 32 nt, Human
gugguuguguguguucuguccccaucuagguc

SEQ ID NO: 213101 - RNA, 32 nt, Human
gugguuguugcccaggcuggagugcaguggcg

SEQ ID NO: 213102 - RNA, 22 nt, Human
gugguuuacaccuauaauccca

SEQ ID NO: 213103 - RNA, 32 nt, Human
gugguuuagggugaaggcuuugggugauaccu

SEQ ID NO: 213104 - RNA, 32 nt, Human
gugguuuccaaggagcugagaauagaaggaaa

SEQ ID NO: 213105 - RNA, 32 nt, Human
gugguuuccaucucacagagaaucagacaggg

SEQ ID NO: 213106 - RNA, 32 nt, Human
gugguuucccccaguuguucucauaguaauga

SEQ ID NO: 213107 - RNA, 32 nt, Human
gugguuucuaagauuuggacaugucagaauuu

SEQ ID NO: 213108 - RNA, 32 nt, Human
gugguuucuccauguuggccaggcuggucuca

SEQ ID NO: 213109 - RNA, 32 nt, Human
gugguuucucucuccugacucaaccccgaaug

SEQ ID NO: 213110 - RNA, 32 nt, Human
gugguuucugcucaccagaccucucuuuagaa

SEQ ID NO: 213111 - RNA, 32 nt, Human
gugguuugacaaauccuucacucucauuuccu

SEQ ID NO: 213112 - RNA, 32 nt, Human
gugguuugacucugcuuuucuuccggauuggc

SEQ ID NO: 213113 - RNA, 22 nt, Human
gugguuugcgccuguaauccca

SEQ ID NO: 213114 - RNA, 32 nt, Human
gugguuugcguguuacccaucuguguccccau

SEQ ID NO: 213115 - RNA, 32 nt, Human
gugguuugggcugggccuuuugugcccuggua

SEQ ID NO: 213116 - RNA, 32 nt, Human
gugguuuguagaaucccagccccagcaucucc

SEQ ID NO: 213117 - RNA, 32 nt, Human
gugguuugucagaggcuaauucugcagaguuu

SEQ ID NO: 213118 - RNA, 32 nt, Human
gugguuuguccaggcuccaguacagauggcug

SEQ ID NO: 213119 - RNA, 32 nt, Human
gugguuuguggcagcuacucuucaccugcagc

SEQ ID NO: 213120 - RNA, 32 nt, Human
gugguuuguggggcuggaugccagaagguucu

SEQ ID NO: 213121 - RNA, 32 nt, Human
gugguuuucaggaguccgagguagccuucaau

SEQ ID NO: 213122 - RNA, 32 nt, Human
gugguuuuccccaauaccuggagcucagaaag

SEQ ID NO: 213123 - RNA, 32 nt, Human
gugguuuugcagacaacccuguccucaggccu

SEQ ID NO: 213124 - RNA, 32 nt, Human
gugguuuuguguccugagacaggggagcugac

SEQ ID NO: 213125 - RNA, 32 nt, Human
gugguuuuuacacauggucagaauguguucaa

SEQ ID NO: 213126 - RNA, 32 nt, Human
gugguuuuuauuugaccuguuggaaguucugg

SEQ ID NO: 213127 - RNA, 32 nt, Human
gugguuuuugcaguuacuuuugcaguggccua

SEQ ID NO: 213128 - RNA, 32 nt, Human
guguaaaaaccaagacugggaagccauucacu

SEQ ID NO: 213129 - RNA, 32 nt, Human
guguaaaaagcaaacaucugaagacccuugug

SEQ ID NO: 213130 - RNA, 32 nt, Human
guguaaaaagccuccuugugcaauugucuuuu

SEQ ID NO: 213131 - RNA, 32 nt, Human
guguaaaaauuugaauuugaggccagugggcu

SEQ ID NO: 213132 - RNA, 32 nt, Human
guguaaaagaugaugugauuguagcucugaag

SEQ ID NO: 213133 - RNA, 32 nt, Human
guguaaaagcagccauagacaguagauaaaug

SEQ ID NO: 213134 - RNA, 32 nt, Human
guguaaaauagggaagaaaguuaguauuggau

SEQ ID NO: 213135 - RNA, 32 nt, Human
guguaaaaucuuggguaccuuuagauucuugu

SEQ ID NO: 213136 - RNA, 32 nt, Human
guguaaaccuuuacacuaaggucuccauauac

SEQ ID NO: 213137 - RNA, 32 nt, Human
guguaaacuuggggauggcugagggaacauag

SEQ ID NO: 213138 - RNA, 32 nt, Human
guguaaagaaaaucugucuuuuuauuguuucu

SEQ ID NO: 213139 - RNA, 32 nt, Human
guguaaagaagacuuugccucucacaacuaca

SEQ ID NO: 213140 - RNA, 32 nt, Human
guguaaagaaugucucagucugccuuaaagga

SEQ ID NO: 213141 - RNA, 32 nt, Human
guguaaagacucacaggugaccugcuaucgag

SEQ ID NO: 213142 - RNA, 32 nt, Human
guguaaaguauguugguggugaaagcaagguu

SEQ ID NO: 213143 - RNA, 32 nt, Human
guguaaauauauuaguaaauguuaauauucau

SEQ ID NO: 213144 - RNA, 32 nt, Human
guguaaauguacacacgcacacacaguugugg

SEQ ID NO: 213145 - RNA, 32 nt, Human
guguaaaugugggggagguucaaugagaggug

SEQ ID NO: 213146 - RNA, 32 nt, Human
guguaacaaaccugcacauucagcacauguau

SEQ ID NO: 213147 - RNA, 32 nt, Human
guguaacaaaccugcauguucugcacauggau

SEQ ID NO: 213148 - RNA, 32 nt, Human
guguaacacugagccagccacuacccagagag

SEQ ID NO: 213149 - RNA, 32 nt, Human
guguaaccauugccucugucuaguuccaaaac

SEQ ID NO: 213150 - RNA, 24 nt, Human
guguaaccuugaauaagucacuua

SEQ ID NO: 213151 - RNA, 32 nt, Human
guguaacucccauccaccagggaaguugcuug

SEQ ID NO: 213152 - RNA, 32 nt, Human
guguaagaaggugaaucacgugggaaaaagug

SEQ ID NO: 213153 - RNA, 32 nt, Human
guguaagagaaaaguaccaacagggaaaucag

SEQ ID NO: 213154 - RNA, 32 nt, Human
guguaagaggucacugcugagcuucagugagc

SEQ ID NO: 213155 - RNA, 32 nt, Human
guguaagcaguggagguucuaagacaggcugg

SEQ ID NO: 213156 - RNA, 32 nt, Human
guguaagccaccgcaccccgcccagccuggca

SEQ ID NO: 213157 - RNA, 32 nt, Human
guguaaggcacuuuggaaaaauaccuggcaua

SEQ ID NO: 213158 - RNA, 32 nt, Human
guguaaguaagccaagacacaucgacaaugag

SEQ ID NO: 213159 - RNA, 32 nt, Human
guguaauagccuuuuguuaacuaauuuucuuu

SEQ ID NO: 213160 - RNA, 32 nt, Human
guguaauaggagagcaaaggaaggcaaucugg

SEQ ID NO: 213161 - RNA, 32 nt, Human
guguaaucauuucuugggcccuccugaaacuu

SEQ ID NO: 213162 - RNA, 32 nt, Human
guguaaucucagaauacacaggugacauagau

SEQ ID NO: 213163 - RNA, 32 nt, Human
guguaaucugcaugcaguaacaugcacaaguc

SEQ ID NO: 213164 - RNA, 32 nt, Human
guguaaucuugaacaugggcggugcugugagu

SEQ ID NO: 213165 - RNA, 32 nt, Human
guguaauggaccuuaugcaaauccagaaccca

SEQ ID NO: 213166 - RNA, 32 nt, Human
guguaauugagugaaggaauccuggguagaga

SEQ ID NO: 213167 - RNA, 32 nt, Human
guguaauugcuacauucucugauguaguuaag

SEQ ID NO: 213168 - RNA, 32 nt, Human
guguaauugguaguguucugucccuccaagga

SEQ ID NO: 213169 - RNA, 22 nt, Human
guguaauuuuuauaugcuuaaa

SEQ ID NO: 213170 - RNA, 32 nt, Human
guguacaaacuggccaagugcuucuguagaua

SEQ ID NO: 213171 - RNA, 19 nt, Human
guguacaauacaacaggga

SEQ ID NO: 213172 - RNA, 32 nt, Human
guguacacaaaggauuugaugcuuuucucuca

SEQ ID NO: 213173 - RNA, 32 nt, Human
guguacagacacacagcagaggcacacacaca

SEQ ID NO: 213174 - RNA, 32 nt, Human
guguacagccacagcaaggagcccgacacuga

SEQ ID NO: 213175 - RNA, 18 nt, Human
guguacagcugagaugaa

SEQ ID NO: 213176 - RNA, 32 nt, Human
guguacagggccgggugcaguggcucacacug

SEQ ID NO: 213177 - RNA, 32 nt, Human
guguacaguagcuuaaaauugcagugauugag

SEQ ID NO: 213178 - RNA, 24 nt, Human
guguacauauacggcuauuuccua

SEQ ID NO: 213179 - RNA, 32 nt, Human
guguacauccuauuccuuccucuuuaucucac

SEQ ID NO: 213180 - RNA, 32 nt, Human
guguacaucugaacuuugguccauccuuugau

SEQ ID NO: 213181 - RNA, 32 nt, Human
guguacaugaucaacaaaagcucacagcagca

SEQ ID NO: 213182 - RNA, 32 nt, Human
guguaccaaugccccucaucucccacuuucac

SEQ ID NO: 213183 - RNA, 32 nt, Human
guguaccaccaggcacaccucagucuucuuga

SEQ ID NO: 213184 - RNA, 32 nt, Human
guguaccaguuuccugagccacgcccagugug

SEQ ID NO: 213185 - RNA, 32 nt, Human
guguacccagagccauggcagccacgcuggga

SEQ ID NO: 213186 - RNA, 32 nt, Human
guguacccagguccucccaggugcggugugca

SEQ ID NO: 213187 - RNA, 32 nt, Human
guguacccccuucacucccucccaccagcucu

SEQ ID NO: 213188 - RNA, 32 nt, Human
guguacccgggucuggcccucacugcaggaca

SEQ ID NO: 213189 - RNA, 32 nt, Human
guguacccugcacuugcagacucuacagaggc

SEQ ID NO: 213190 - RNA, 32 nt, Human
guguacccugcucuuucuccuucauuccgcag

SEQ ID NO: 213191 - RNA, 32 nt, Human
guguaccuagguguccucccuaguuuccucuc

SEQ ID NO: 213192 - RNA, 32 nt, Human
guguaccugcagcauaacacagaccccugaau

SEQ ID NO: 213193 - RNA, 32 nt, Human
guguaccuguagucccagcuacuugggaggcu

SEQ ID NO: 213194 - RNA, 32 nt, Human
guguacgaggcagacggcggcagugcggcuug

SEQ ID NO: 213195 - RNA, 32 nt, Human
guguacgaggcagagggccgggacagcuuucc

SEQ ID NO: 213196 - RNA, 32 nt, Human
guguacgauccacgccuaagguugagggcggc

SEQ ID NO: 213197 - RNA, 32 nt, Human
guguacggaagagccagcaggagcagcguggu

SEQ ID NO: 213198 - RNA, 32 nt, Human
guguacgugccuguagucucagcuacuuggga

SEQ ID NO: 213199 - RNA, 32 nt, Human
guguacguggcugugcccucucuccuuaagcc

SEQ ID NO: 213200 - RNA, 32 nt, Human
guguacucagagcagaggggccaggacuucug

SEQ ID NO: 213201 - RNA, 32 nt, Human
guguacucauaauauucuauggcuccagagug

SEQ ID NO: 213202 - RNA, 32 nt, Human
guguacucaucacccauauacugaacacugua

SEQ ID NO: 213203 - RNA, 32 nt, Human
guguacuccuuuagggagugggggacuagaac

SEQ ID NO: 213204 - RNA, 32 nt, Human
guguacucuggccucuugguucauuauuuuca

SEQ ID NO: 213205 - RNA, 32 nt, Human
guguacucugugguucuaggcaguccgcuuuc

SEQ ID NO: 213206 - RNA, 32 nt, Human
guguacucuuugucacagcucaguugguaacc

SEQ ID NO: 213207 - RNA, 32 nt, Human
guguacugaaugccagucuggccggcacacuc

SEQ ID NO: 213208 - RNA, 32 nt, Human
guguacuggcacagcaagcccaccaauuauua

SEQ ID NO: 213209 - RNA, 32 nt, Human
guguacuucgauggguaacugcagucugaauu

SEQ ID NO: 213210 - RNA, 32 nt, Human
guguacuugagugugugucugugugcagccua

SEQ ID NO: 213211 - RNA, 32 nt, Human
guguacuugccugaaaacaaaggaaggugcug

SEQ ID NO: 213212 - RNA, 32 nt, Human
guguacuuguacuuugcuggugaguggaaagc

SEQ ID NO: 213213 - RNA, 32 nt, Human
guguacuuuccuaauagggaagggaagcacaa

SEQ ID NO: 213214 - RNA, 25 nt, Human
guguacuuugauuuuauaacuugua

SEQ ID NO: 213215 - RNA, 32 nt, Human
guguagaaaucugaauuuuuaaaagagcugua

SEQ ID NO: 213216 - RNA, 32 nt, Human
guguagaacagaauguacacauuauagcagcu

SEQ ID NO: 213217 - RNA, 32 nt, Human
guguagaauggugguuaccagauacugggggu

SEQ ID NO: 213218 - RNA, 23 nt, Human
guguagacaacucacauuugcuc

SEQ ID NO: 213219 - RNA, 32 nt, Human
guguagacacuggaauaacagcacagaaaaau

SEQ ID NO: 213220 - RNA, 32 nt, Human
guguagaccuucuuccugcuagggcugcacug

SEQ ID NO: 213221 - RNA, 32 nt, Human
guguagacugcagacauccauaccucaccaca

SEQ ID NO: 213222 - RNA, 25 nt, Human
guguagacuguuggguaggcugcgu

SEQ ID NO: 213223 - RNA, 32 nt, Human
guguagagaacaggaguccgcagcugcuggca

SEQ ID NO: 213224 - RNA, 32 nt, Human
guguagagacgcccuucucuccacuuuauugg

SEQ ID NO: 213225 - RNA, 32 nt, Human
guguagagauaggguuucaccauguugcuuag

SEQ ID NO: 213226 - RNA, 32 nt, Human
guguagagauauagcagcugaagcaggacuuc

SEQ ID NO: 213227 - RNA, 32 nt, Human
guguagagauggggucucacuguuguucaaac

SEQ ID NO: 213228 - RNA, 32 nt, Human
guguagaggagggauggccaaggguggguggu

SEQ ID NO: 213229 - RNA, 32 nt, Human
guguagaggcuccugcuccaccugccagucuc

SEQ ID NO: 213230 - RNA, 32 nt, Human
guguagauaaggcuucagccaugagucacccc

SEQ ID NO: 213231 - RNA, 32 nt, Human
guguagauauaccacauuuucuuuauccauuc

SEQ ID NO: 213232 - RNA, 32 nt, Human
guguagauuuuauucaucacaggacagaauaa

SEQ ID NO: 213233 - RNA, 32 nt, Human
guguagcaacuguuugauuucuuucuggauac

SEQ ID NO: 213234 - RNA, 32 nt, Human
guguagcagccucuccccaucuaccuagcaac

SEQ ID NO: 213235 - RNA, 32 nt, Human
guguagcaugugcugaggaagcacgugcuggg

SEQ ID NO: 213236 - RNA, 32 nt, Human
guguagccacagaacccaccugcacccugaca

SEQ ID NO: 213237 - RNA, 32 nt, Human
guguagccagccaggugcaugccgggaccaug

SEQ ID NO: 213238 - RNA, 32 nt, Human
guguagccccggagagguaacugaggacauga

SEQ ID NO: 213239 - RNA, 32 nt, Human
guguagcccugaggccuggaucuguuaagccc

SEQ ID NO: 213240 - RNA, 32 nt, Human
guguagccucuccuggucauagaccagucucu

SEQ ID NO: 213241 - RNA, 32 nt, Human
guguagccuuucugauuccucgguuguuucuu

SEQ ID NO: 213242 - RNA, 32 nt, Human
guguagcucuggcugccugucagcucccuugg

SEQ ID NO: 213243 - RNA, 32 nt, Human
guguagcugagguccugcuggaaaaauaccac

SEQ ID NO: 213244 - RNA, 32 nt, Human
guguagcugcaaagagcccacacccacgcuga

SEQ ID NO: 213245 - RNA, 32 nt, Human
guguagcugugaccugcugagcucugagaggc

SEQ ID NO: 213246 - RNA, 32 nt, Human
guguaggaaaacagccuguugcauuguaagag

SEQ ID NO: 213247 - RNA, 32 nt, Human
guguaggaccauugaaucuacaauccaugucg

SEQ ID NO: 213248 - RNA, 32 nt, Human
guguaggaggcugugugugugcccaugugaaa

SEQ ID NO: 213249 - RNA, 32 nt, Human
guguaggagggugggagggagagcugguccag

SEQ ID NO: 213250 - RNA, 32 nt, Human
guguaggagugagaagaaggaagaucuugaga

SEQ ID NO: 213251 - RNA, 19 nt, Human
guguaggauauuuugucac

SEQ ID NO: 213252 - RNA, 32 nt, Human
guguaggccccagcugcccacuggaacugccg

SEQ ID NO: 213253 - RNA, 20 nt, Human
guguaggcugggugcagugg

SEQ ID NO: 213254 - RNA, 32 nt, Human
guguagggaagcuucccggaggaucucagucu

SEQ ID NO: 213255 - RNA, 32 nt, Human
guguaggggcagcaggcugcacugaggaccgu

SEQ ID NO: 213256 - RNA, 32 nt, Human
guguagguaugacuguucuacuuuucaguuuu

SEQ ID NO: 213257 - RNA, 32 nt, Human
guguaggugagagaaagagggaggagugagag

SEQ ID NO: 213258 - RNA, 32 nt, Human
guguaguaaagguuuagacgaaaccccauaau

SEQ ID NO: 213259 - RNA, 32 nt, Human
guguaguacaucauauguauacaaucagauaa

SEQ ID NO: 213260 - RNA, 32 nt, Human
guguaguccugcaaaacauuuugagguacauu

SEQ ID NO: 213261 - RNA, 32 nt, Human
guguagucuccuccauuuuuccuccagcacuc

SEQ ID NO: 213262 - RNA, 32 nt, Human
guguagugagccuuugaaaaugguuaguaccg

SEQ ID NO: 213263 - RNA, 32 nt, Human
guguagugugcaaauguuagcaugugcauuau

SEQ ID NO: 213264 - RNA, 32 nt, Human
guguaguuaccugagaaacgcgggaaguuggg

SEQ ID NO: 213265 - RNA, 32 nt, Human
guguaguuggugacugccucuccagaugcuga

SEQ ID NO: 213266 - RNA, 32 nt, Human
guguauaauguuuucuuuagcaaguguggcaa

SEQ ID NO: 213267 - RNA, 23 nt, Human
guguauaauuuucuuaacuugua

SEQ ID NO: 213268 - RNA, 32 nt, Human
guguauacauguguagacacaaacauauacac

SEQ ID NO: 213269 - RNA, 32 nt, Human
guguauaccugugugugucugucuggggugau

SEQ ID NO: 213270 - RNA, 32 nt, Human
guguauacugaagaaaaagaagaagaaaagaa

SEQ ID NO: 213271 - RNA, 32 nt, Human
guguauagaaauagaucagagcacaguugaaa

SEQ ID NO: 213272 - RNA, 32 nt, Human
guguauagguguucccuuuucucugcauccuu

SEQ ID NO: 213273 - RNA, 32 nt, Human
guguauagugucuuugccauuuuagaagguuc

SEQ ID NO: 213274 - RNA, 32 nt, Human
guguauauaaaacuugcuuuauugcauggggc

SEQ ID NO: 213275 - RNA, 19 nt, Human
guguauauauauacacgua

SEQ ID NO: 213276 - RNA, 23 nt, Human
guguauauauauacacguauaua

SEQ ID NO: 213277 - RNA, 21 nt, Human
guguauauauauacauacaca

SEQ ID NO: 213278 - RNA, 21 nt, Human
guguauauauauguauacaua

SEQ ID NO: 213279 - RNA, 32 nt, Human
guguauaucugccuccccugucuguaaggagc

SEQ ID NO: 213280 - RNA, 23 nt, Human
guguauaugaauauguacacaua

SEQ ID NO: 213281 - RNA, 32 nt, Human
guguauaugcagauauuccaaaccugaaaucc

SEQ ID NO: 213282 - RNA, 32 nt, Human
guguauauguuauguauacacaugcacauaug

SEQ ID NO: 213283 - RNA, 32 nt, Human
guguaucaagugucgcucacagccccauucac

SEQ ID NO: 213284 - RNA, 31 nt, Human
guguaucacgguaaaaagugaucuguuuuaa

SEQ ID NO: 213285 - RNA, 32 nt, Human
guguaucagacuuacguuacugucaucaccau

SEQ ID NO: 213286 - RNA, 32 nt, Human
guguaucauuugaauucagauugccuagcuau

SEQ ID NO: 213287 - RNA, 23 nt, Human
guguauccaguuacagaaugcua

SEQ ID NO: 213288 - RNA, 32 nt, Human
guguauccuccugccacaaaagccugaacuuc

SEQ ID NO: 213289 - RNA, 32 nt, Human
guguaucguggcuaugcuacuacuuccugggu

SEQ ID NO: 213290 - RNA, 32 nt, Human
guguaucuauuucauagggcccugcuuugcuu

SEQ ID NO: 213291 - RNA, 32 nt, Human
guguaucuccuuugagcuucugggccuuagca

SEQ ID NO: 213292 - RNA, 32 nt, Human
guguaucugcaccuucucaacugagagaagaa

SEQ ID NO: 213293 - RNA, 32 nt, Human
guguaucugucugucuauuagggguggcucuc

SEQ ID NO: 213294 - RNA, 32 nt, Human
guguaucugugggcaccaugcagauggcggga

SEQ ID NO: 213295 - RNA, 32 nt, Human
guguaucuucaucuggcuguuuacuuauuugu

SEQ ID NO: 213296 - RNA, 32 nt, Human
guguaucuugcuugggcuaucuucccugcucu

SEQ ID NO: 213297 - RNA, 32 nt, Human
guguaucuuguauuuucccugcccucagguug

SEQ ID NO: 213298 - RNA, 32 nt, Human
guguaugacaaccacacacagugaagcucuuu

SEQ ID NO: 213299 - RNA, 32 nt, Human
guguaugacuugauaucacauaacguucuggu

SEQ ID NO: 213300 - RNA, 32 nt, Human
guguaugcaaggggcugcagccccucuucucu

SEQ ID NO: 213301 - RNA, 32 nt, Human
guguaugcauguguuugaauucacaaggaaga

SEQ ID NO: 213302 - RNA, 31 nt, Human
guguaugcauuucucccuuuuaagggagauu

SEQ ID NO: 213303 - RNA, 32 nt, Human
guguaugcccaugucuaucauaccucaccucu

SEQ ID NO: 213304 - RNA, 32 nt, Human
guguaugccuguaaucccagcuacucgggagg

SEQ ID NO: 213305 - RNA, 32 nt, Human
guguaugcgaauguuucagugccucagacaaa

SEQ ID NO: 213306 - RNA, 32 nt, Human
guguaugcugcuuuucuuuucuaaccaagagg

SEQ ID NO: 213307 - RNA, 32 nt, Human
guguauggagcaaaggaggagugaacgucuag

SEQ ID NO: 213308 - RNA, 32 nt, Human
guguauggaugaggcuggagugaucugggacc

SEQ ID NO: 213309 - RNA, 32 nt, Human
guguauggcgcccaccuguaauccuagcugcu

SEQ ID NO: 213310 - RNA, 32 nt, Human
guguauggguagcacuacuaaaaguuuagaac

SEQ ID NO: 213311 - RNA, 32 nt, Human
guguauggucucaacuuuggcagcaaagagga

SEQ ID NO: 213312 - RNA, 32 nt, Human
guguauguaagcaguaguaguugcuauguacu

SEQ ID NO: 213313 - RNA, 32 nt, Human
guguaugugucugaccucaggccuuuuagcca

SEQ ID NO: 213314 - RNA, 32 nt, Human
guguaugugugugcgugucucugucccagacc

SEQ ID NO: 213315 - RNA, 32 nt, Human
guguauguguguguuugugugucuauuuggca

SEQ ID NO: 213316 - RNA, 32 nt, Human
guguauguugggggaguagggacagcacgggg

SEQ ID NO: 213317 - RNA, 32 nt, Human
guguauuaaccugaaauccaccucaccuugau

SEQ ID NO: 213318 - RNA, 32 nt, Human
guguauuagaaucccuuccugccuuguuucau

SEQ ID NO: 213319 - RNA, 32 nt, Human
guguauucacaaauucuguuacuucaagucuu

SEQ ID NO: 213320 - RNA, 32 nt, Human
guguauucccucugcccccauggcugcuggug

SEQ ID NO: 213321 - RNA, 32 nt, Human
guguauucuaggccacagcccagcacuccucu

SEQ ID NO: 213322 - RNA, 32 nt, Human
guguauucuaugucugguuaaauguucauuga

SEQ ID NO: 213323 - RNA, 32 nt, Human
guguauuggggcgcguggaggcugcagucacg

SEQ ID NO: 213324 - RNA, 32 nt, Human
guguauugguguugcagccgcagagaaaugcc

SEQ ID NO: 213325 - RNA, 32 nt, Human
guguauuucagaacuccucccaucuuauccac

SEQ ID NO: 213326 - RNA, 21 nt, Human
guguauuucuguagaaugcug

SEQ ID NO: 213327 - RNA, 32 nt, Human
guguauuucuugugcuucuacuuuguaccaaa

SEQ ID NO: 213328 - RNA, 32 nt, Human
guguauuuguuagagauaauuucugaagucua

SEQ ID NO: 213329 - RNA, 32 nt, Human
guguauuuguucucaguccuaacccuggggcc

SEQ ID NO: 213330 - RNA, 32 nt, Human
guguauuuucuuucuuugcuuccugucacccc

SEQ ID NO: 213331 - RNA, 32 nt, Human
guguauuuugcagcuggucaugagauuguguu

SEQ ID NO: 213332 - RNA, 32 nt, Human
guguauuuuucuuccuccucaacugagaucuu

SEQ ID NO: 213333 - RNA, 32 nt, Human
gugucaaaacagagcuuuugcugagaguuuga

SEQ ID NO: 213334 - RNA, 32 nt, Human
gugucaaaauauugcauuuucuggggccaaaa

SEQ ID NO: 213335 - RNA, 32 nt, Human
gugucaaagaaagagaggaaugcaggaugauu

SEQ ID NO: 213336 - RNA, 32 nt, Human
gugucaagcuccugaaacaagcucauuucagu

SEQ ID NO: 213337 - RNA, 24 nt, Human
gugucaaggagucaaaacagauua

SEQ ID NO: 213338 - RNA, 32 nt, Human
gugucaagggagcaaugcuugguuuggggagu

SEQ ID NO: 213339 - RNA, 32 nt, Human
gugucaaguccugccuuuccuuucaucauccc

SEQ ID NO: 213340 - RNA, 32 nt, Human
gugucaaugucaggaggacaggcugagcuccu

SEQ ID NO: 213341 - RNA, 32 nt, Human
gugucaauuuccaaccuccccuguacuuaccu

SEQ ID NO: 213342 - RNA, 32 nt, Human
gugucacacaggcuggagugcaguggcgugag

SEQ ID NO: 213343 - RNA, 32 nt, Human
gugucacacccugccugcucaguccugggguc

SEQ ID NO: 213344 - RNA, 32 nt, Human
gugucacacggcaccuguacaaaaagacuggc

SEQ ID NO: 213345 - RNA, 32 nt, Human
gugucacacuccuggcuaucucagggggaaug

SEQ ID NO: 213346 - RNA, 32 nt, Human
gugucacaguucacugcagccugggugacacu

SEQ ID NO: 213347 - RNA, 32 nt, Human
gugucacaucugaaacucaucuguaccucacu

SEQ ID NO: 213348 - RNA, 32 nt, Human
gugucaccaaggcuggagggcaauagcaugau

SEQ ID NO: 213349 - RNA, 32 nt, Human
gugucaccaauuccaccaagacagugcugaga

SEQ ID NO: 213350 - RNA, 32 nt, Human
gugucaccaggagaauagugcucacagcccag

SEQ ID NO: 213351 - RNA, 32 nt, Human
gugucaccaugcugggcaguauaaaguuuuaa

SEQ ID NO: 213352 - RNA, 32 nt, Human
gugucacccacuguuccacggauccaaaacaa

SEQ ID NO: 213353 - RNA, 32 nt, Human
gugucacccaggcuggagugcaauggcgcaau

SEQ ID NO: 213354 - RNA, 32 nt, Human
gugucacccaggcuggagugcagugauccacu

SEQ ID NO: 213355 - RNA, 32 nt, Human
gugucacccaggcuggagugcaguggcacaau

SEQ ID NO: 213356 - RNA, 32 nt, Human
gugucacccaggcuggagugcaguggcgcaau

SEQ ID NO: 213357 - RNA, 32 nt, Human
gugucacccaggcuggagugcaguggugcaau

SEQ ID NO: 213358 - RNA, 32 nt, Human
gugucacccaggcuggagugcaguggugugau

SEQ ID NO: 213359 - RNA, 32 nt, Human
gugucacccaggcuggcgugcagggcccugau

SEQ ID NO: 213360 - RNA, 21 nt, Human
gugucacccuguuugucaauc

SEQ ID NO: 213361 - RNA, 32 nt, Human
gugucaccuaggcuggagugcaguggcacaau

SEQ ID NO: 213362 - RNA, 32 nt, Human
gugucaccucaaccucaaaugauauggcucau

SEQ ID NO: 213363 - RNA, 32 nt, Human
gugucaccuccagcccagaggugguuccuuag

SEQ ID NO: 213364 - RNA, 32 nt, Human
gugucacgcaggcugagugcacuggcaggauc

SEQ ID NO: 213365 - RNA, 32 nt, Human
gugucacuacacuccaggcugggugacagauu

SEQ ID NO: 213366 - RNA, 32 nt, Human
gugucacuaccucuaaccuuuuuaaucgcaau

SEQ ID NO: 213367 - RNA, 32 nt, Human
gugucacuauuucaagucagugcucaaaaagu

SEQ ID NO: 213368 - RNA, 20 nt, Human
gugucacuccauaaaaagaa

SEQ ID NO: 213369 - RNA, 32 nt, Human
gugucacugcacuccagccggggcaacagagc

SEQ ID NO: 213370 - RNA, 32 nt, Human
gugucacugcacuccagccuggcgacagagug

SEQ ID NO: 213371 - RNA, 32 nt, Human
gugucacugcacuccagccugggcaacaggua

SEQ ID NO: 213372 - RNA, 32 nt, Human
gugucacugcacuccagccugggcgacagagg

SEQ ID NO: 213373 - RNA, 32 nt, Human
gugucacugcacuccagccugggcgacagagu

SEQ ID NO: 213374 - RNA, 32 nt, Human
gugucacugcacuccagccugggugacaagag

SEQ ID NO: 213375 - RNA, 32 nt, Human
gugucacugcacuccagccugggugacaguga

SEQ ID NO: 213376 - RNA, 32 nt, Human
gugucacugcacuccagccuggugacagagug

SEQ ID NO: 213377 - RNA, 32 nt, Human
gugucacugcacuccagcuugggugacagaga

SEQ ID NO: 213378 - RNA, 32 nt, Human
gugucacugcuuguuaugcaucauuucaggag

SEQ ID NO: 213379 - RNA, 24 nt, Human
gugucacuguuggauguuacacca

SEQ ID NO: 213380 - RNA, 32 nt, Human
gugucacuugaauuccacccaaggagcgggcg

SEQ ID NO: 213381 - RNA, 32 nt, Human
gugucacuugcuggguuaggaacagacggauc

SEQ ID NO: 213382 - RNA, 32 nt, Human
gugucagaaacaaguguuucugccuggacauc

SEQ ID NO: 213383 - RNA, 32 nt, Human
gugucagaaaugcagaaccucaggcuccaccu

SEQ ID NO: 213384 - RNA, 32 nt, Human
gugucagaaggugcugcugaggauagacugac

SEQ ID NO: 213385 - RNA, 32 nt, Human
gugucagaagugcugguuaaugacgagaagag

SEQ ID NO: 213386 - RNA, 32 nt, Human
gugucagaauacuccuuucauccaucacucag

SEQ ID NO: 213387 - RNA, 22 nt, Human
gugucagaauccuuuacauuca

SEQ ID NO: 213388 - RNA, 24 nt, Human
gugucagaaugagaccccaucuca

SEQ ID NO: 213389 - RNA, 32 nt, Human
gugucagacacuggccuggccuguggacacgc

SEQ ID NO: 213390 - RNA, 22 nt, Human
gugucagacgagcagaagauca

SEQ ID NO: 213391 - RNA, 32 nt, Human
gugucagagauccugcagccgcccagucccgg

SEQ ID NO: 213392 - RNA, 32 nt, Human
gugucagagcaagagggcuacagggaaagggc

SEQ ID NO: 213393 - RNA, 32 nt, Human
gugucagagcccaggggagaaugcagcccacc

SEQ ID NO: 213394 - RNA, 23 nt, Human
gugucagagcgagaacccguguc

SEQ ID NO: 213395 - RNA, 32 nt, Human
gugucagaucugucugaggagccccagucaug

SEQ ID NO: 213396 - RNA, 32 nt, Human
gugucagcagccaugucuacaacacagauaag

SEQ ID NO: 213397 - RNA, 32 nt, Human
gugucagcauuuucuuucguucucaggcuaaa

SEQ ID NO: 213398 - RNA, 32 nt, Human
gugucagccaccgcacccagccuggaguggcc

SEQ ID NO: 213399 - RNA, 32 nt, Human
gugucagcggcaagggcuccugcucagcacag

SEQ ID NO: 213400 - RNA, 32 nt, Human
gugucagcucacugcaaccuccaccuccugga

SEQ ID NO: 213401 - RNA, 32 nt, Human
gugucagcucuccaucugucucugccuggcag

SEQ ID NO: 213402 - RNA, 32 nt, Human
gugucagcuuuugagcugcuucccucaucaca

SEQ ID NO: 213403 - RNA, 32 nt, Human
gugucaggaagguaggcgugccaagccgcggc

SEQ ID NO: 213404 - RNA, 32 nt, Human
gugucaggagaucauaaauaggcaucuuacau

SEQ ID NO: 213405 - RNA, 32 nt, Human
gugucaggcaguguucugagaagcagcagccu

SEQ ID NO: 213406 - RNA, 32 nt, Human
gugucaggccauccuauugaugggaaagauug

SEQ ID NO: 213407 - RNA, 32 nt, Human
gugucaggccccaacccagcagaccugggugg

SEQ ID NO: 213408 - RNA, 24 nt, Human
gugucaggccuacggagucagcca

SEQ ID NO: 213409 - RNA, 32 nt, Human
gugucaggccuccugggcgcucuggaaaagac

SEQ ID NO: 213410 - RNA, 32 nt, Human
gugucaggccugcugcccuugccuuguccucg

SEQ ID NO: 213411 - RNA, 32 nt, Human
gugucaggcucauucaugucucaggcacacaa

SEQ ID NO: 213412 - RNA, 31 nt, Human
gugucagggaaguugccucagugcucccaga

SEQ ID NO: 213413 - RNA, 32 nt, Human
gugucagggcugggagacuaggaugucggaca

SEQ ID NO: 213414 - RNA, 32 nt, Human
gugucagugauggcuugguugcccaugcccuc

SEQ ID NO: 213415 - RNA, 32 nt, Human
gugucagugcacggcuagccugggcaacagag

SEQ ID NO: 213416 - RNA, 32 nt, Human
gugucagugugguuuauaauccuugaauauug

SEQ ID NO: 213417 - RNA, 32 nt, Human
gugucaguucccagagguccugggacagggga

SEQ ID NO: 213418 - RNA, 32 nt, Human
gugucauagucaccaaaagcaucaacagagca

SEQ ID NO: 213419 - RNA, 32 nt, Human
gugucauaguuauuagaaucagcagccucuua

SEQ ID NO: 213420 - RNA, 32 nt, Human
gugucauccaggcuggagugcggugguggaau

SEQ ID NO: 213421 - RNA, 32 nt, Human
gugucauccaugauccugcaaaggacaugaac

SEQ ID NO: 213422 - RNA, 32 nt, Human
gugucauccucauguucugccuuccaggaauu

SEQ ID NO: 213423 - RNA, 32 nt, Human
gugucaucugccuggucaucucagacccauga

SEQ ID NO: 213424 - RNA, 32 nt, Human
gugucaucuguccucuugagguucaggagauu

SEQ ID NO: 213425 - RNA, 23 nt, Human
gugucaucuuaguaacagaacca

SEQ ID NO: 213426 - RNA, 32 nt, Human
gugucaucuucucccaggauccauggguccag

SEQ ID NO: 213427 - RNA, 30 nt, Human
gugucaugcaggcuggagugaagucgugug

SEQ ID NO: 213428 - RNA, 32 nt, Human
gugucaugcaggcuggagugcaguggcaugau

SEQ ID NO: 213429 - RNA, 32 nt, Human
gugucaugccugcaaucccagcacuuugggag

SEQ ID NO: 213430 - RNA, 32 nt, Human
gugucaugcugacaugucccuccuggauggcu

SEQ ID NO: 213431 - RNA, 32 nt, Human
gugucauggaagcugcuccaaagucugacccc

SEQ ID NO: 213432 - RNA, 19 nt, Human
gugucauucacacucacua

SEQ ID NO: 213433 - RNA, 32 nt, Human
gugucauuccauggguccugaggucccuuacu

SEQ ID NO: 213434 - RNA, 32 nt, Human
gugucauucucugcagcagcugccugggccca

SEQ ID NO: 213435 - RNA, 32 nt, Human
gugucauugcacuccagccugggcaacaagag

SEQ ID NO: 213436 - RNA, 32 nt, Human
gugucauugcacuccagccugggcgacaagag

SEQ ID NO: 213437 - RNA, 32 nt, Human
gugucauugcacuccagccuggggaacagagc

SEQ ID NO: 213438 - RNA, 32 nt, Human
gugucauuuaaccuuaaaugcaaucaggaaag

SEQ ID NO: 213439 - RNA, 32 nt, Human
gugucauuucuauguguaauuucugagccauu

SEQ ID NO: 213440 - RNA, 32 nt, Human
guguccaagccccagagucccucuggaccaac

SEQ ID NO: 213441 - RNA, 32 nt, Human
guguccaaggagaccagggggugauguggacc

SEQ ID NO: 213442 - RNA, 32 nt, Human
guguccaaggagcugaagguggugaaauuugu

SEQ ID NO: 213443 - RNA, 18 nt, Human
guguccaaucagauccug

SEQ ID NO: 213444 - RNA, 17 nt, Human
guguccacaagaagggg

SEQ ID NO: 213445 - RNA, 32 nt, Human
guguccacaagaagggguguuuauucuuccaa

SEQ ID NO: 213446 - RNA, 32 nt, Human
guguccacaagcuuccagguugggguuggagc

SEQ ID NO: 213447 - RNA, 22 nt, Human
guguccacaccaugacccugug

SEQ ID NO: 213448 - RNA, 23 nt, Human
guguccacaccgcagugccucug

SEQ ID NO: 213449 - RNA, 32 nt, Human
guguccacagcaccuucucaaacuacauacuu

SEQ ID NO: 213450 - RNA, 22 nt, Human
guguccacagcugacuccucug

SEQ ID NO: 213451 - RNA, 32 nt, Human
guguccacagugugggacgcugaccccgggca

SEQ ID NO: 213452 - RNA, 22 nt, Human
guguccacccuguggcccuuug

SEQ ID NO: 213453 - RNA, 32 nt, Human
guguccaccugugcccccaccugggugcccua

SEQ ID NO: 213454 - RNA, 32 nt, Human
guguccacucacugaagucccuucccucuccc

SEQ ID NO: 213455 - RNA, 32 nt, Human
guguccagaaacaggggcaggagugugggaac

SEQ ID NO: 213456 - RNA, 32 nt, Human
guguccagacaggagaggaagagauggugccu

SEQ ID NO: 213457 - RNA, 32 nt, Human
guguccagagccccaaaccaggauggaguugu

SEQ ID NO: 213458 - RNA, 32 nt, Human
guguccagcagcuaccucagugacacccagag

SEQ ID NO: 213459 - RNA, 32 nt, Human
guguccagcaugacgguguccaugccuuccau

SEQ ID NO: 213460 - RNA, 21 nt, Human
guguccagcugggccuggagg

SEQ ID NO: 213461 - RNA, 32 nt, Human
guguccagcuguuaccagcuucugagcuagag

SEQ ID NO: 213462 - RNA, 21 nt, Human
guguccaggagacagaaggag

SEQ ID NO: 213463 - RNA, 32 nt, Human
guguccaggcucuggggaggcccuggggaauu

SEQ ID NO: 213464 - RNA, 32 nt, Human
guguccaggcuggagugcaguggcgugaucuc

SEQ ID NO: 213465 - RNA, 32 nt, Human
guguccaggcuggucugaaacccuugagcuca

SEQ ID NO: 213466 - RNA, 32 nt, Human
guguccagggcagcacaggaggcaggugccca

SEQ ID NO: 213467 - RNA, 32 nt, Human
guguccagggccugauggggcguggccaggca

SEQ ID NO: 213468 - RNA, 32 nt, Human
guguccaggggcuuggagagaccugcgcccac

SEQ ID NO: 213469 - RNA, 24 nt, Human
guguccagucuuuuuaaacuugua

SEQ ID NO: 213470 - RNA, 32 nt, Human
guguccauaggaguccaucaaggcagagcggc

SEQ ID NO: 213471 - RNA, 24 nt, Human
guguccauaugugucuguaagaga

SEQ ID NO: 213472 - RNA, 32 nt, Human
guguccaucagccuggugcuaaucccccagug

SEQ ID NO: 213473 - RNA, 32 nt, Human
guguccauccacaaaggggcagaaggagggag

SEQ ID NO: 213474 - RNA, 32 nt, Human
guguccaucuguuauauguaaaggacaaggca

SEQ ID NO: 213475 - RNA, 32 nt, Human
guguccaugcauauacauacaugauacacaug

SEQ ID NO: 213476 - RNA, 32 nt, Human
guguccaugccucugcuuccucaggccccagg

SEQ ID NO: 213477 - RNA, 32 nt, Human
guguccauggaacuuccucucuguaucucagg

SEQ ID NO: 213478 - RNA, 27 nt, Human
guguccauggcuggagccgacccuuug

SEQ ID NO: 213479 - RNA, 22 nt, Human
guguccaugggacaaaaaagaa

SEQ ID NO: 213480 - RNA, 31 nt, Human
guguccaugucugcuuacucugugccuucaa

SEQ ID NO: 213481 - RNA, 21 nt, Human
guguccauuaaccaacuucug

SEQ ID NO: 213482 - RNA, 32 nt, Human
guguccauucuuugccuuccuggagcucccag

SEQ ID NO: 213483 - RNA, 32 nt, Human
gugucccaacccaagaagcugaaaguccugug

SEQ ID NO: 213484 - RNA, 32 nt, Human
gugucccacagaacuucccacuguggaucugu

SEQ ID NO: 213485 - RNA, 28 nt, Human
gugucccacagugcugcgcuagucccuu

SEQ ID NO: 213486 - RNA, 32 nt, Human
gugucccacccuccccuccugacccuccuacg

SEQ ID NO: 213487 - RNA, 32 nt, Human
gugucccacuagcgggcucuucgcaagaaucc

SEQ ID NO: 213488 - RNA, 32 nt, Human
gugucccagacccuaaggcagaggcugggaaa

SEQ ID NO: 213489 - RNA, 32 nt, Human
gugucccagcagaucaguggcauggaaccauc

SEQ ID NO: 213490 - RNA, 32 nt, Human
gugucccagccaaagaaaacccccaccacggu

SEQ ID NO: 213491 - RNA, 32 nt, Human
gugucccaggcagaaaggugcagagacccauc

SEQ ID NO: 213492 - RNA, 32 nt, Human
gugucccaggcagggagacgguuuccagggag

SEQ ID NO: 213493 - RNA, 32 nt, Human
gugucccagggggagccccgcucugcagcccu

SEQ ID NO: 213494 - RNA, 32 nt, Human
gugucccaggguggaagguggggagggggccg

SEQ ID NO: 213495 - RNA, 24 nt, Human
gugucccaucaugcuuuccacuga

SEQ ID NO: 213496 - RNA, 21 nt, Human
gugucccaugacuuugccauc

SEQ ID NO: 213497 - RNA, 32 nt, Human
guguccccaagugccaugacccaggagccauu

SEQ ID NO: 213498 - RNA, 32 nt, Human
guguccccacuguaccagccucugauaagcug

SEQ ID NO: 213499 - RNA, 32 nt, Human
guguccccagagccauggagagagccagucug

SEQ ID NO: 213500 - RNA, 32 nt, Human
guguccccaggaggccuuuggggcuggggugg

SEQ ID NO: 213501 - RNA, 32 nt, Human
guguccccagggcugagcaccaccccacgccc

SEQ ID NO: 213502 - RNA, 32 nt, Human
guguccccaguuccgucucagcuaccuggacu

SEQ ID NO: 213503 - RNA, 32 nt, Human
guguccccauggcucccacugcagccucgagu

SEQ ID NO: 213504 - RNA, 32 nt, Human
gugucccccaggcuggagugcaguggcacaau

SEQ ID NO: 213505 - RNA, 32 nt, Human
gugucccccugccgaacaaagcugggaguaaa

SEQ ID NO: 213506 - RNA, 32 nt, Human
gugucccccuggcugcccuguguccccuccgc

SEQ ID NO: 213507 - RNA, 32 nt, Human
gugucccccuucuccccugccccuacugccag

SEQ ID NO: 213508 - RNA, 32 nt, Human
guguccccgcagugccugguguccagguggaa

SEQ ID NO: 213509 - RNA, 32 nt, Human
guguccccggcagccacacacagccaugcacu

SEQ ID NO: 213510 - RNA, 32 nt, Human
guguccccgugcaguaggggcuacugugacca

SEQ ID NO: 213511 - RNA, 32 nt, Human
guguccccuauuaggcaggaguuacaaaguuu

SEQ ID NO: 213512 - RNA, 32 nt, Human
guguccccucacugcccucugguguccuguca

SEQ ID NO: 213513 - RNA, 32 nt, Human
guguccccuccccucaggcucugccuuggccu

SEQ ID NO: 213514 - RNA, 32 nt, Human
guguccccuccccuccaucucucuuccccaua

SEQ ID NO: 213515 - RNA, 32 nt, Human
guguccccugcagcuccagccccgggcugcac

SEQ ID NO: 213516 - RNA, 32 nt, Human
guguccccugcagggggcucagcuggacccuc

SEQ ID NO: 213517 - RNA, 32 nt, Human
guguccccugcauucuggaggggaggggagau

SEQ ID NO: 213518 - RNA, 32 nt, Human
guguccccugccugcacuggcacuuuguccag

SEQ ID NO: 213519 - RNA, 32 nt, Human
guguccccugcuccucaccccugggagcccac

SEQ ID NO: 213520 - RNA, 32 nt, Human
guguccccugcucucuggugucccaauacucu

SEQ ID NO: 213521 - RNA, 32 nt, Human
guguccccugucugcucauccucucucccucu

SEQ ID NO: 213522 - RNA, 32 nt, Human
guguccccuuggcccuggcacacacccaugug

SEQ ID NO: 213523 - RNA, 32 nt, Human
guguccccuuucucccaucuuaaggggcucuc

SEQ ID NO: 213524 - RNA, 32 nt, Human
gugucccgagacuaggacguggcuccaggagu

SEQ ID NO: 213525 - RNA, 32 nt, Human
gugucccgcuccaccagcuuccugggcggcau

SEQ ID NO: 213526 - RNA, 32 nt, Human
gugucccgucacacacugcagcagggaagggu

SEQ ID NO: 213527 - RNA, 32 nt, Human
gugucccuaaggccugguacagugccaagcac

SEQ ID NO: 213528 - RNA, 32 nt, Human
gugucccuacccucacugcucuccugugccca

SEQ ID NO: 213529 - RNA, 25 nt, Human
gugucccucacagucacuugcuaua

SEQ ID NO: 213530 - RNA, 32 nt, Human
gugucccuccacccauuuuccugcauucuguc

SEQ ID NO: 213531 - RNA, 32 nt, Human
gugucccuccacucaggucacguuacuccauc

SEQ ID NO: 213532 - RNA, 32 nt, Human
gugucccuccacugccugcaccacccaccucc

SEQ ID NO: 213533 - RNA, 32 nt, Human
gugucccucucagauucacuuguuaaguccug

SEQ ID NO: 213534 - RNA, 32 nt, Human
gugucccucuuacccaaagggugucaguggcu

SEQ ID NO: 213535 - RNA, 32 nt, Human
gugucccucuuccaccccaaccccugcuggcu

SEQ ID NO: 213536 - RNA, 22 nt, Human
gugucccugcaccaggggcaaa

SEQ ID NO: 213537 - RNA, 32 nt, Human
gugucccugcagaugggggcaguccugugcac

SEQ ID NO: 213538 - RNA, 32 nt, Human
gugucccugcaucugcaggccaugucaaagga

SEQ ID NO: 213539 - RNA, 32 nt, Human
gugucccugccuggcccuccucuggucacuuc

SEQ ID NO: 213540 - RNA, 32 nt, Human
gugucccuggaaccccagcucggagggucuca

SEQ ID NO: 213541 - RNA, 23 nt, Human
gugucccuggcagggccuggaga

SEQ ID NO: 213542 - RNA, 32 nt, Human
gugucccuggcuucugagcuugcccaaaguaa

SEQ ID NO: 213543 - RNA, 32 nt, Human
gugucccugggcagagccaggggugcaaacag

SEQ ID NO: 213544 - RNA, 32 nt, Human
gugucccuggguaguugagauuagggaguggu

SEQ ID NO: 213545 - RNA, 32 nt, Human
gugucccugguccucugggaauagaagaucca

SEQ ID NO: 213546 - RNA, 32 nt, Human
gugucccuguucugaagugccaguggcagcuc

SEQ ID NO: 213547 - RNA, 32 nt, Human
gugucccuucaucugcuccauguccucuacuc

SEQ ID NO: 213548 - RNA, 32 nt, Human
gugucccuuuaaugcuacugugcucucuggug

SEQ ID NO: 213549 - RNA, 32 nt, Human
gugucccuuuucuccacaaccuugccagcauc

SEQ ID NO: 213550 - RNA, 32 nt, Human
guguccgaaaaauguuucuucagcuugagaaa

SEQ ID NO: 213551 - RNA, 26 nt, Human
guguccgccaucagggacauccucug

SEQ ID NO: 213552 - RNA, 23 nt, Human
guguccgccaugguccuccccug

SEQ ID NO: 213553 - RNA, 32 nt, Human
guguccgcgcguggcuugugcgcugacuccug

SEQ ID NO: 213554 - RNA, 23 nt, Human
guguccgcuuuguaggacaccac

SEQ ID NO: 213555 - RNA, 32 nt, Human
guguccggaagaggucuucguggaggccucgc

SEQ ID NO: 213556 - RNA, 32 nt, Human
guguccggacuugcccacagccucaaggagga

SEQ ID NO: 213557 - RNA, 20 nt, Human
guguccgugggcagggggag

SEQ ID NO: 213558 - RNA, 32 nt, Human
guguccguggugaguucuggggugcgccuagg

SEQ ID NO: 213559 - RNA, 32 nt, Human
guguccguggugugcaguuccucuccaauugc

SEQ ID NO: 213560 - RNA, 32 nt, Human
guguccuacuaaaaagaauaaauguuggcagu

SEQ ID NO: 213561 - RNA, 19 nt, Human
guguccuagaauuuugcca

SEQ ID NO: 213562 - RNA, 32 nt, Human
guguccuaggagagugaacagguagauuuaga

SEQ ID NO: 213563 - RNA, 32 nt, Human
guguccuaugaagggguguggggugagguagu

SEQ ID NO: 213564 - RNA, 32 nt, Human
guguccuauugagggaggcuugcugaggcuuc

SEQ ID NO: 213565 - RNA, 32 nt, Human
guguccucaaauauauugcauuuuacccagca

SEQ ID NO: 213566 - RNA, 32 nt, Human
guguccucaccuuuaugcaugacugcaaagcc

SEQ ID NO: 213567 - RNA, 32 nt, Human
guguccucauacauacugccgccugaggugcc

SEQ ID NO: 213568 - RNA, 32 nt, Human
guguccucaugacuucucuuguggaccauguc

SEQ ID NO: 213569 - RNA, 32 nt, Human
guguccucaugugauaaacagagcacagucca

SEQ ID NO: 213570 - RNA, 21 nt, Human
guguccuccacauucuugcca

SEQ ID NO: 213571 - RNA, 32 nt, Human
guguccuccagcccagcccacccgggccuaug

SEQ ID NO: 213572 - RNA, 32 nt, Human
guguccucccagagaggacguggaaccuuccc

SEQ ID NO: 213573 - RNA, 32 nt, Human
guguccucccagaucuaugugucuuucccuuu

SEQ ID NO: 213574 - RNA, 32 nt, Human
guguccucccagggagcuucucuucucaacag

SEQ ID NO: 213575 - RNA, 19 nt, Human
guguccuccccugccccac

SEQ ID NO: 213576 - RNA, 32 nt, Human
guguccucccugugugggugcugguguccaaa

SEQ ID NO: 213577 - RNA, 32 nt, Human
guguccuccuccacuucccaugccucuauguu

SEQ ID NO: 213578 - RNA, 32 nt, Human
guguccuccuggggguuggagaugaucccuca

SEQ ID NO: 213579 - RNA, 32 nt, Human
guguccucuacuuuucugaucucccacaagua

SEQ ID NO: 213580 - RNA, 32 nt, Human
guguccucucaccaacaccacaccccaacaag

SEQ ID NO: 213581 - RNA, 32 nt, Human
guguccucuccucuccgcauccagggccacuu

SEQ ID NO: 213582 - RNA, 27 nt, Human
guguccucugaacuuuaaacucucauc

SEQ ID NO: 213583 - RNA, 32 nt, Human
guguccucugaggacauccucaucaggaaagc

SEQ ID NO: 213584 - RNA, 32 nt, Human
guguccucugcagcuuuugauauguuauucuc

SEQ ID NO: 213585 - RNA, 32 nt, Human
guguccugacacugcaauuggcaccgaagccc

SEQ ID NO: 213586 - RNA, 32 nt, Human
guguccugaccaggcccugcuuaccucuguuu

SEQ ID NO: 213587 - RNA, 31 nt, Human
guguccugacuucugucugccacaugaggag

SEQ ID NO: 213588 - RNA, 32 nt, Human
guguccugagucucauagccacccugccagcu

SEQ ID NO: 213589 - RNA, 32 nt, Human
guguccugccugucugccccagcccagauucc

SEQ ID NO: 213590 - RNA, 19 nt, Human
guguccugcuacaaaaaga

SEQ ID NO: 213591 - RNA, 32 nt, Human
guguccugcuguuccuguuggccccagcugca

SEQ ID NO: 213592 - RNA, 32 nt, Human
guguccuggagugggguagggugguggguggu

SEQ ID NO: 213593 - RNA, 32 nt, Human
guguccuggcagggggacaggagacuguaaca

SEQ ID NO: 213594 - RNA, 32 nt, Human
guguccuggcauuuccccucccucucccugau

SEQ ID NO: 213595 - RNA, 22 nt, Human
guguccuggccagcccuggaga

SEQ ID NO: 213596 - RNA, 32 nt, Human
guguccuggccuggcccugcaguaagaagcgu

SEQ ID NO: 213597 - RNA, 18 nt, Human
guguccugucucccagca

SEQ ID NO: 213598 - RNA, 32 nt, Human
guguccugugugucugguauguuuacaccuug

SEQ ID NO: 213599 - RNA, 32 nt, Human
guguccuuaccaccuaagggcauuucagagcc

SEQ ID NO: 213600 - RNA, 32 nt, Human
guguccuuccaagagacagaagaggagacaca

SEQ ID NO: 213601 - RNA, 19 nt, Human
guguccuucguccuggaga

SEQ ID NO: 213602 - RNA, 32 nt, Human
guguccuucugggaugaggaugacagagcaac

SEQ ID NO: 213603 - RNA, 32 nt, Human
guguccuugaacugaggcccugugauauggcg

SEQ ID NO: 213604 - RNA, 32 nt, Human
guguccuugcggugcugggcagcagaccgucc

SEQ ID NO: 213605 - RNA, 29 nt, Human
guguccuugcugccuucauccccuggggc

SEQ ID NO: 213606 - RNA, 32 nt, Human
guguccuuggcagugcugcuacuccucaggug

SEQ ID NO: 213607 - RNA, 17 nt, Human
guguccuuguccagggg

SEQ ID NO: 213608 - RNA, 32 nt, Human
guguccuugucccugcucaccucucuggucuc

SEQ ID NO: 213609 - RNA, 32 nt, Human
guguccuuguguccugcagguaucugcagauu

SEQ ID NO: 213610 - RNA, 32 nt, Human
guguccuuuaaaucugaacuugcucuugcuca

SEQ ID NO: 213611 - RNA, 32 nt, Human
guguccuuucagaauuuuuaccaggaacauaa

SEQ ID NO: 213612 - RNA, 32 nt, Human
gugucgacuucuacgacgucgccuucaagguc

SEQ ID NO: 213613 - RNA, 23 nt, Human
gugucgagggaccaugccagcaa

SEQ ID NO: 213614 - RNA, 32 nt, Human
gugucgagugggcucugggcuggggucggccc

SEQ ID NO: 213615 - RNA, 23 nt, Human
gugucgaucuccugaccucauga

SEQ ID NO: 213616 - RNA, 32 nt, Human
gugucgcacaagugccugguggugggccugga

SEQ ID NO: 213617 - RNA, 32 nt, Human
gugucgcacugccucccacccugugucugcuu

SEQ ID NO: 213618 - RNA, 32 nt, Human
gugucgcaucuucuccagcgcugggcccuccc

SEQ ID NO: 213619 - RNA, 32 nt, Human
gugucgccaaggcuggagugcaguggugcgau

SEQ ID NO: 213620 - RNA, 32 nt, Human
gugucgcccagacuggagugcaguggugggau

SEQ ID NO: 213621 - RNA, 32 nt, Human
gugucgcccaggcuggagugcaaguggcauga

SEQ ID NO: 213622 - RNA, 32 nt, Human
gugucgcccaggcuggagugcagugagcugag

SEQ ID NO: 213623 - RNA, 32 nt, Human
gugucgcccaggcuggagugcaguggcgugau

SEQ ID NO: 213624 - RNA, 32 nt, Human
gugucgccgccaccccagcguaguccaaguca

SEQ ID NO: 213625 - RNA, 32 nt, Human
gugucgccuacccacccucccccagacccccg

SEQ ID NO: 213626 - RNA, 32 nt, Human
gugucgccuaggcuggagugcaguggcgugau

SEQ ID NO: 213627 - RNA, 32 nt, Human
gugucgcgccuguaaucccagcacuuugggag

SEQ ID NO: 213628 - RNA, 32 nt, Human
gugucgcgcugggcugggccuggguggccucu

SEQ ID NO: 213629 - RNA, 32 nt, Human
gugucgcgucugcagugugugggguucgcggg

SEQ ID NO: 213630 - RNA, 32 nt, Human
gugucgcucccugguccacuguuucuccuaua

SEQ ID NO: 213631 - RNA, 32 nt, Human
gugucggagauggcggggcuucagcaccucgg

SEQ ID NO: 213632 - RNA, 32 nt, Human
gugucggagaugucacauagccucauuuauga

SEQ ID NO: 213633 - RNA, 32 nt, Human
gugucggcaguccugcacuccuucuggaggcu

SEQ ID NO: 213634 - RNA, 32 nt, Human
gugucgggagcagggagccaccuucaccugcg

SEQ ID NO: 213635 - RNA, 32 nt, Human
gugucgggcacgaagaaaugagugucacuuuc

SEQ ID NO: 213636 - RNA, 32 nt, Human
gugucgggcuguagcugcuggucccagagagu

SEQ ID NO: 213637 - RNA, 32 nt, Human
gugucggguagagggaagagggcagggggcua

SEQ ID NO: 213638 - RNA, 32 nt, Human
gugucggucauugugccacguccuuggaaccg

SEQ ID NO: 213639 - RNA, 21 nt, Human
gugucggugccgcggugggag

SEQ ID NO: 213640 - RNA, 20 nt, Human
gugucgguggggggugggag

SEQ ID NO: 213641 - RNA, 32 nt, Human
gugucguagagagcagauaugaaggaagaaau

SEQ ID NO: 213642 - RNA, 32 nt, Human
gugucguggcugcuccaaaugccccuucauga

SEQ ID NO: 213643 - RNA, 32 nt, Human
gugucgugugggccucacagcuggccuugagu

SEQ ID NO: 213644 - RNA, 32 nt, Human
gugucguucauucaaggagaguugagauacag

SEQ ID NO: 213645 - RNA, 32 nt, Human
gugucuaaaucuguaggcauuguguuguuguu

SEQ ID NO: 213646 - RNA, 32 nt, Human
gugucuaacauacaguaacaucuaacucagcu

SEQ ID NO: 213647 - RNA, 32 nt, Human
gugucuaagauucuagaucagaugcuccaaga

SEQ ID NO: 213648 - RNA, 32 nt, Human
gugucuaauguuuuucuuucuucuauuucuag

SEQ ID NO: 213649 - RNA, 32 nt, Human
gugucuacaggcccaacuccugccucacaaca

SEQ ID NO: 213650 - RNA, 32 nt, Human
gugucuacaggcccaacugcugccucacaaca

SEQ ID NO: 213651 - RNA, 21 nt, Human
gugucuaccuuccgcccucug

SEQ ID NO: 213652 - RNA, 32 nt, Human
gugucuacuccaggccaagccugggcugcagu

SEQ ID NO: 213653 - RNA, 32 nt, Human
gugucuagcacagaauggggcacacaguaggu

SEQ ID NO: 213654 - RNA, 32 nt, Human
gugucuagcaguucuugguaagcuacucugga

SEQ ID NO: 213655 - RNA, 24 nt, Human
gugucuagcccaguggaccuucug

SEQ ID NO: 213656 - RNA, 32 nt, Human
gugucuaugaagcugucuugugccagugagaa

SEQ ID NO: 213657 - RNA, 22 nt, Human
gugucuauggucgggcccucug

SEQ ID NO: 213658 - RNA, 32 nt, Human
gugucuauggucgggcccucugcguccagcug

SEQ ID NO: 213659 - RNA, 32 nt, Human
gugucuauggugcugcaccuugcuguuguacu

SEQ ID NO: 213660 - RNA, 32 nt, Human
gugucuauggugcugcaucuugcuguuguacu

SEQ ID NO: 213661 - RNA, 32 nt, Human
gugucuauguguguguuucagcacuuuguaaa

SEQ ID NO: 213662 - RNA, 32 nt, Human
gugucuauucaggccuugcggaggcgcccaga

SEQ ID NO: 213663 - RNA, 32 nt, Human
gugucuauuccugcuuccuccaccucaccuug

SEQ ID NO: 213664 - RNA, 32 nt, Human
gugucuauuuuuagguggaugaguugcuaugu

SEQ ID NO: 213665 - RNA, 21 nt, Human
gugucucacacacaaaaagaa

SEQ ID NO: 213666 - RNA, 19 nt, Human
gugucucacaccuguaauc

SEQ ID NO: 213667 - RNA, 22 nt, Human
gugucucacaccuguaauccca

SEQ ID NO: 213668 - RNA, 20 nt, Human
gugucucaccagccuggaga

SEQ ID NO: 213669 - RNA, 32 nt, Human
gugucucaccagccuggagaugucugcugugu

SEQ ID NO: 213670 - RNA, 32 nt, Human
gugucucacccuacuaagaauuggcagaaaug

SEQ ID NO: 213671 - RNA, 32 nt, Human
gugucucacugagaacaccaacccacacccug

SEQ ID NO: 213672 - RNA, 32 nt, Human
gugucucagaaaaucuguguguguacaugugc

SEQ ID NO: 213673 - RNA, 32 nt, Human
gugucucagcccggugcugggccuggccgagg

SEQ ID NO: 213674 - RNA, 32 nt, Human
gugucucagcucuuguucugugccugagaaug

SEQ ID NO: 213675 - RNA, 32 nt, Human
gugucucaggagagaggggugcacguuucaug

SEQ ID NO: 213676 - RNA, 32 nt, Human
gugucucagggugggcaguggggguggggcug

SEQ ID NO: 213677 - RNA, 19 nt, Human
gugucucaugccuguaauc

SEQ ID NO: 213678 - RNA, 32 nt, Human
gugucuccaagauggccgcuuggggaaggagg

SEQ ID NO: 213679 - RNA, 23 nt, Human
gugucuccaagcagccagccauc

SEQ ID NO: 213680 - RNA, 22 nt, Human
gugucuccaagcccccaccauc

SEQ ID NO: 213681 - RNA, 32 nt, Human
gugucuccacacgccagccacaggggagcccu

SEQ ID NO: 213682 - RNA, 32 nt, Human
gugucuccccugggaggcucccccucugugua

SEQ ID NO: 213683 - RNA, 32 nt, Human
gugucucccucuucuaucaccucucuccagga

SEQ ID NO: 213684 - RNA, 32 nt, Human
gugucucccugagucccgacugcacugacugg

SEQ ID NO: 213685 - RNA, 32 nt, Human
gugucucccugcagauuggggcucccugagga

SEQ ID NO: 213686 - RNA, 32 nt, Human
gugucucccugccucauuccccacaucccacu

SEQ ID NO: 213687 - RNA, 22 nt, Human
gugucucccuuuucuagcugug

SEQ ID NO: 213688 - RNA, 32 nt, Human
gugucuccucaagccuuaccuuucucaggugu

SEQ ID NO: 213689 - RNA, 32 nt, Human
gugucuccucaccucugcuccugucuucauca

SEQ ID NO: 213690 - RNA, 32 nt, Human
gugucuccuccuccucaucuuagcuuccaggu

SEQ ID NO: 213691 - RNA, 32 nt, Human
gugucuccucuccaucucugccuuuguuacca

SEQ ID NO: 213692 - RNA, 32 nt, Human
gugucuccugccgcugguggcacuuuguagau

SEQ ID NO: 213693 - RNA, 32 nt, Human
gugucuccugggaggcaugaagggggcaaggu

SEQ ID NO: 213694 - RNA, 32 nt, Human
gugucuccuguacuucccaaaauuucuccucc

SEQ ID NO: 213695 - RNA, 32 nt, Human
gugucuccuucggccccuccucccucuuuucc

SEQ ID NO: 213696 - RNA, 32 nt, Human
gugucuccuugcaucccagccucgucuaugca

SEQ ID NO: 213697 - RNA, 32 nt, Human
gugucuccuuucucucccacugcaacuccacu

SEQ ID NO: 213698 - RNA, 21 nt, Human
gugucucgaguggcuaccugu

SEQ ID NO: 213699 - RNA, 32 nt, Human
gugucucuaagaggaauuuuuagaugucaguu

SEQ ID NO: 213700 - RNA, 32 nt, Human
gugucucuacagcuaggcccagccuagcccag

SEQ ID NO: 213701 - RNA, 32 nt, Human
gugucucuacagucccuucuuccauggagcug

SEQ ID NO: 213702 - RNA, 32 nt, Human
gugucucuacuuccccuguuugccuugugggu

SEQ ID NO: 213703 - RNA, 32 nt, Human
gugucucuagccugcagagugcagugagugag

SEQ ID NO: 213704 - RNA, 32 nt, Human
gugucucucacggcugcuccauccuagccccc

SEQ ID NO: 213705 - RNA, 32 nt, Human
gugucucucauggauuguuuagagucuaaaga

SEQ ID NO: 213706 - RNA, 32 nt, Human
gugucucucccacggcugcaggucagaggauu

SEQ ID NO: 213707 - RNA, 32 nt, Human
gugucucuccccugcugcgggcgcccccaccc

SEQ ID NO: 213708 - RNA, 32 nt, Human
gugucucugcagcuggccuccggagccuuccu

SEQ ID NO: 213709 - RNA, 32 nt, Human
gugucucugccccucucugugccugcaaaccu

SEQ ID NO: 213710 - RNA, 32 nt, Human
gugucucugccuggguccccuggccgguuguc

SEQ ID NO: 213711 - RNA, 32 nt, Human
gugucucugugcauguguaugugcguaugcau

SEQ ID NO: 213712 - RNA, 32 nt, Human
gugucucuucucuccacaucuguaacuucuuu

SEQ ID NO: 213713 - RNA, 32 nt, Human
gugucucuugcccagggaguccucuccacucc

SEQ ID NO: 213714 - RNA, 32 nt, Human
gugucugaaagcugggacacacaauauuuccc

SEQ ID NO: 213715 - RNA, 32 nt, Human
gugucugaacaaggcagggcaggugcugagug

SEQ ID NO: 213716 - RNA, 32 nt, Human
gugucugaacagaaccgcuccgugacugguag

SEQ ID NO: 213717 - RNA, 32 nt, Human
gugucugaacuccaaggaauaugaacaagaug

SEQ ID NO: 213718 - RNA, 32 nt, Human
gugucugagaauuccuccuccugggacucuca

SEQ ID NO: 213719 - RNA, 32 nt, Human
gugucugagagggaguuggagagcugguuggu

SEQ ID NO: 213720 - RNA, 32 nt, Human
gugucugagaugggccccucuuuucagaggcc

SEQ ID NO: 213721 - RNA, 32 nt, Human
gugucugagcaccuccagcagaugucacucug

SEQ ID NO: 213722 - RNA, 32 nt, Human
gugucugaguaccauucacuggaguugcugcu

SEQ ID NO: 213723 - RNA, 22 nt, Human
gugucugcaccaccagccccug

SEQ ID NO: 213724 - RNA, 32 nt, Human
gugucugcaccugaggcccucugugguaccuc

SEQ ID NO: 213725 - RNA, 32 nt, Human
gugucugcaccugaggugcucugugauaccuu

SEQ ID NO: 213726 - RNA, 32 nt, Human
gugucugcagacaagucuugcugugcuuuauu

SEQ ID NO: 213727 - RNA, 32 nt, Human
gugucugcagcugcugcccuucucccaggccc

SEQ ID NO: 213728 - RNA, 32 nt, Human
gugucugcauaaacccuccuguccuggacgug

SEQ ID NO: 213729 - RNA, 32 nt, Human
gugucugcauuuucaaccuguugcaauaacuu

SEQ ID NO: 213730 - RNA, 32 nt, Human
gugucugcccuucacaaacaccucucucuccc

SEQ ID NO: 213731 - RNA, 32 nt, Human
gugucugccuccauaugcaucugggcauuuca

SEQ ID NO: 213732 - RNA, 23 nt, Human
gugucugccucgcuuccuggaga

SEQ ID NO: 213733 - RNA, 32 nt, Human
gugucugccucguucccuccccuggugccugu

SEQ ID NO: 213734 - RNA, 32 nt, Human
gugucugccugccucaugcucucuauagagga

SEQ ID NO: 213735 - RNA, 32 nt, Human
gugucugccugggauaaaauauuuuccccauc

SEQ ID NO: 213736 - RNA, 32 nt, Human
gugucugccuguccccaaacaggacagcacug

SEQ ID NO: 213737 - RNA, 18 nt, Human
gugucugccuucuggaga

SEQ ID NO: 213738 - RNA, 31 nt, Human
gugucugcggcgcugccucagcgugcuaauc

SEQ ID NO: 213739 - RNA, 32 nt, Human
gugucugcggucacaguggccccugggcaggg

SEQ ID NO: 213740 - RNA, 32 nt, Human
gugucugcgugugguuauauguauauuuucca

SEQ ID NO: 213741 - RNA, 32 nt, Human
gugucugcuaauguaaacuuugucaugguuuc

SEQ ID NO: 213742 - RNA, 32 nt, Human
gugucugcuacugcugggacucaggcccucgc

SEQ ID NO: 213743 - RNA, 32 nt, Human
gugucugcuagccucaaccuccuggggcaggg

SEQ ID NO: 213744 - RNA, 32 nt, Human
gugucugcucacugcugccaucuucgcugcua

SEQ ID NO: 213745 - RNA, 32 nt, Human
gugucugcugccgagaagcccgugcccccggg

SEQ ID NO: 213746 - RNA, 32 nt, Human
gugucugcugcucaccuggcucuggagggcug

SEQ ID NO: 213747 - RNA, 32 nt, Human
gugucugcuuucaagcaccacacccacccaga

SEQ ID NO: 213748 - RNA, 32 nt, Human
gugucuggaacacgcugcuccccugggcagcu

SEQ ID NO: 213749 - RNA, 32 nt, Human
gugucuggaagacccaaggaaggggcuucugg

SEQ ID NO: 213750 - RNA, 32 nt, Human
gugucuggaauagaacagugguuugaaaagua

SEQ ID NO: 213751 - RNA, 32 nt, Human
gugucuggaguguggagugaaaugccacgaaa

SEQ ID NO: 213752 - RNA, 32 nt, Human
gugucuggcggugccccagcagcccuggauuc

SEQ ID NO: 213753 - RNA, 32 nt, Human
gugucuggcucucaucugcacaaucgugcaua

SEQ ID NO: 213754 - RNA, 32 nt, Human
gugucugggagcacagugagaccaugggagca

SEQ ID NO: 213755 - RNA, 32 nt, Human
gugucugggaggaaagcauggcccagcauuca

SEQ ID NO: 213756 - RNA, 32 nt, Human
gugucuggguguuacagucugugcccacugca

SEQ ID NO: 213757 - RNA, 32 nt, Human
gugucugguaacagcagcaaugcuuagaaaau

SEQ ID NO: 213758 - RNA, 32 nt, Human
gugucuggucagugcaaaccugggcugugggg

SEQ ID NO: 213759 - RNA, 32 nt, Human
gugucuggucuguccucccuguugauuggucu

SEQ ID NO: 213760 - RNA, 22 nt, Human
gugucuguacauaaucuggaga

SEQ ID NO: 213761 - RNA, 18 nt, Human
gugucuguacguaggaga

SEQ ID NO: 213762 - RNA, 16 nt, Human
gugucuguaucggaga

SEQ ID NO: 213763 - RNA, 25 nt, Human
gugucugucaaggaucuuugucgug

SEQ ID NO: 213764 - RNA, 32 nt, Human
gugucugucccagggcuggagaugcuucccaa

SEQ ID NO: 213765 - RNA, 32 nt, Human
gugucuguccgcagacugggaugagucuacuc

SEQ ID NO: 213766 - RNA, 23 nt, Human
gugucugucuggugugugcugug

SEQ ID NO: 213767 - RNA, 32 nt, Human
gugucugucuuugguaacugagugaaccauaa

SEQ ID NO: 213768 - RNA, 18 nt, Human
gugucugugagcugugga

SEQ ID NO: 213769 - RNA, 20 nt, Human
gugucugugaugguccggag

SEQ ID NO: 213770 - RNA, 18 nt, Human
gugucugugauggugaga

SEQ ID NO: 213771 - RNA, 18 nt, Human
gugucugugauguuugga

SEQ ID NO: 213772 - RNA, 20 nt, Human
gugucugugcaaacuggagg

SEQ ID NO: 213773 - RNA, 21 nt, Human
gugucugugcagccagcggga

SEQ ID NO: 213774 - RNA, 22 nt, Human
gugucugugcagccagcgggag

SEQ ID NO: 213775 - RNA, 20 nt, Human
gugucugugcaugggccugg

SEQ ID NO: 213776 - RNA, 18 nt, Human
gugucugugccuugguga

SEQ ID NO: 213777 - RNA, 32 nt, Human
gugucugugcgugugggcgugugugcaagcga

SEQ ID NO: 213778 - RNA, 19 nt, Human
gugucugugcucgugggga

SEQ ID NO: 213779 - RNA, 20 nt, Human
gugucugugcugcaaggagg

SEQ ID NO: 213780 - RNA, 32 nt, Human
gugucugugcugcguuugugagcugcaacgcu

SEQ ID NO: 213781 - RNA, 32 nt, Human
gugucuguggacacucccacacccaacucugc

SEQ ID NO: 213782 - RNA, 18 nt, Human
gugucuguggacuagaga

SEQ ID NO: 213783 - RNA, 32 nt, Human
gugucuguggggucuccuccucccagaucccc

SEQ ID NO: 213784 - RNA, 32 nt, Human
gugucugugggucccccugagggcaacggcag

SEQ ID NO: 213785 - RNA, 19 nt, Human
gugucuguggugccagagg

SEQ ID NO: 213786 - RNA, 21 nt, Human
gugucugugguuaggauagca

SEQ ID NO: 213787 - RNA, 21 nt, Human
gugucuguguauguugucaug

SEQ ID NO: 213788 - RNA, 18 nt, Human
gugucugugucccucaga

SEQ ID NO: 213789 - RNA, 32 nt, Human
gugucugugucccugauuacuugagauuaggg

SEQ ID NO: 213790 - RNA, 17 nt, Human
gugucugugucuaggga

SEQ ID NO: 213791 - RNA, 15 nt, Human
gugucugugucugga

SEQ ID NO: 213792 - RNA, 32 nt, Human
gugucugugugaaucuuugugccuguaugagc

SEQ ID NO: 213793 - RNA, 17 nt, Human
gugucugugugagugag

SEQ ID NO: 213794 - RNA, 18 nt, Human
gugucugugugaugggga

SEQ ID NO: 213795 - RNA, 32 nt, Human
gugucugugugccagcccugcucucagcacuu

SEQ ID NO: 213796 - RNA, 19 nt, Human
gugucugugugcgagugga

SEQ ID NO: 213797 - RNA, 20 nt, Human
gugucuguguggcacagaga

SEQ ID NO: 213798 - RNA, 19 nt, Human
gugucugugugucuuugga

SEQ ID NO: 213799 - RNA, 21 nt, Human
gugucugugugugccugugag

SEQ ID NO: 213800 - RNA, 32 nt, Human
gugucuguguguggaaguuuuauccgguccuu

SEQ ID NO: 213801 - RNA, 32 nt, Human
gugucugugugugggaauugguaucuugcacc

SEQ ID NO: 213802 - RNA, 22 nt, Human
gugucugugugugugccuggag

SEQ ID NO: 213803 - RNA, 19 nt, Human
gugucugugugugugcuug

SEQ ID NO: 213804 - RNA, 19 nt, Human
gugucuguguguuugggag

SEQ ID NO: 213805 - RNA, 23 nt, Human
gugucuguuaaaugaaugucaua

SEQ ID NO: 213806 - RNA, 24 nt, Human
gugucuguuaaguggucuuuucau

SEQ ID NO: 213807 - RNA, 32 nt, Human
gugucuguuaccaagcaaagccaguuaaagaa

SEQ ID NO: 213808 - RNA, 32 nt, Human
gugucuguuccuggccaggccugaggucggcg

SEQ ID NO: 213809 - RNA, 18 nt, Human
gugucuguucucugggga

SEQ ID NO: 213810 - RNA, 32 nt, Human
gugucuguuuaugggggugguuuauuauuuuu

SEQ ID NO: 213811 - RNA, 32 nt, Human
gugucuuaaggagacugguaggaggaggcaug

SEQ ID NO: 213812 - RNA, 32 nt, Human
gugucuuaauuucucaauuccuuuuuggcaag

SEQ ID NO: 213813 - RNA, 32 nt, Human
gugucuuacacaagcuggacucuuucacccag

SEQ ID NO: 213814 - RNA, 32 nt, Human
gugucuuacaccauuugccuugcuuuuuaaau

SEQ ID NO: 213815 - RNA, 32 nt, Human
gugucuuacugugcuucaacuucccaaggaau

SEQ ID NO: 213816 - RNA, 32 nt, Human
gugucuuagagaaaggacacaugggcuuggga

SEQ ID NO: 213817 - RNA, 32 nt, Human
gugucuuaguccauuucaagcugcuauaacag

SEQ ID NO: 213818 - RNA, 32 nt, Human
gugucuucaaauccucaccaacauccaggauu

SEQ ID NO: 213819 - RNA, 32 nt, Human
gugucuucaacuuauuagaauggaagauaaug

SEQ ID NO: 213820 - RNA, 32 nt, Human
gugucuucacuagaacaccauugucaucucau

SEQ ID NO: 213821 - RNA, 32 nt, Human
gugucuucagacccacuuuuucauacacuugc

SEQ ID NO: 213822 - RNA, 32 nt, Human
gugucuucagcuuugcaaacuggaugaacuag

SEQ ID NO: 213823 - RNA, 22 nt, Human
gugucuucaguucauucuguca

SEQ ID NO: 213824 - RNA, 32 nt, Human
gugucuucaugaacccagaggauguccgggaa

SEQ ID NO: 213825 - RNA, 32 nt, Human
gugucuucauucucucgcacauuuccacagca

SEQ ID NO: 213826 - RNA, 32 nt, Human
gugucuucauucugugaguuaccaccucaagu

SEQ ID NO: 213827 - RNA, 32 nt, Human
gugucuuccaacaaagcuggaacugccaguau

SEQ ID NO: 213828 - RNA, 32 nt, Human
gugucuuccauggaagggggacaaugguuauc

SEQ ID NO: 213829 - RNA, 32 nt, Human
gugucuucccauuaacccccugccuuaguuaa

SEQ ID NO: 213830 - RNA, 22 nt, Human
gugucuuccuaggcagccccug

SEQ ID NO: 213831 - RNA, 32 nt, Human
gugucuuccugacuccagccucugagacagaa

SEQ ID NO: 213832 - RNA, 32 nt, Human
gugucuuccuggcaacugcugccuuuguugcu

SEQ ID NO: 213833 - RNA, 32 nt, Human
gugucuucguggagcccaccaggcuggugucg

SEQ ID NO: 213834 - RNA, 18 nt, Human
gugucuucugaauucacu

SEQ ID NO: 213835 - RNA, 32 nt, Human
gugucuucugagcgucuucuaagacaauugca

SEQ ID NO: 213836 - RNA, 32 nt, Human
gugucuucuguggagcucugagaacaggacuc

SEQ ID NO: 213837 - RNA, 32 nt, Human
gugucuugagacuuuaucaugugucuucugcc

SEQ ID NO: 213838 - RNA, 18 nt, Human
gugucuugagccuggagg

SEQ ID NO: 213839 - RNA, 32 nt, Human
gugucuuggcaucccuuccugccguccuugac

SEQ ID NO: 213840 - RNA, 32 nt, Human
gugucuugggcagagcuggcucugagcgccuc

SEQ ID NO: 213841 - RNA, 32 nt, Human
gugucuuuacaccauuuauuucuuuuaucucu

SEQ ID NO: 213842 - RNA, 32 nt, Human
gugucuuuacauauuuguuuaugauggccaca

SEQ ID NO: 213843 - RNA, 32 nt, Human
gugucuuucuuuccuuccuccuucuucucucu

SEQ ID NO: 213844 - RNA, 32 nt, Human
gugucuuugagcauuucucuucauuccuggaa

SEQ ID NO: 213845 - RNA, 32 nt, Human
gugucuuugccugucuguacucaugccugacc

SEQ ID NO: 213846 - RNA, 32 nt, Human
gugucuuuucaauaucuuuucauuuucuccca

SEQ ID NO: 213847 - RNA, 32 nt, Human
gugucuuuucuccugguuuuggagucuugcac

SEQ ID NO: 213848 - RNA, 32 nt, Human
gugucuuuugcagcccagacaaaugugguuac

SEQ ID NO: 213849 - RNA, 32 nt, Human
gugucuuuuugcugcauuuuacucacacacga

SEQ ID NO: 213850 - RNA, 32 nt, Human
gugugaaacaucuucagggcgggaaaggggcc

SEQ ID NO: 213851 - RNA, 32 nt, Human
gugugaaacaucuucagggugggaaaggggcc

SEQ ID NO: 213852 - RNA, 32 nt, Human
gugugaaaguuccagaccaggccacagcgagc

SEQ ID NO: 213853 - RNA, 32 nt, Human
gugugaacccaggaggcggagcuugcagugag

SEQ ID NO: 213854 - RNA, 32 nt, Human
gugugaacccaggaggcggugcuugcagggag

SEQ ID NO: 213855 - RNA, 32 nt, Human
gugugaacccgggagcggagguugcagugagc

SEQ ID NO: 213856 - RNA, 32 nt, Human
gugugaaccucaccuccuggggcuuccgagcu

SEQ ID NO: 213857 - RNA, 32 nt, Human
gugugaacucaggcuuuucauugggcccggcu

SEQ ID NO: 213858 - RNA, 32 nt, Human
gugugaagacaggcagaugcugcacagugaau

SEQ ID NO: 213859 - RNA, 32 nt, Human
gugugaagacgcugccucccacaucaccuuuc

SEQ ID NO: 213860 - RNA, 32 nt, Human
gugugaagcaguauaaugaagccagaccaaga

SEQ ID NO: 213861 - RNA, 32 nt, Human
gugugaagccaaaaucacccugcagcagagcc

SEQ ID NO: 213862 - RNA, 32 nt, Human
gugugaagcugcauuguuggguaaaagccccg

SEQ ID NO: 213863 - RNA, 32 nt, Human
gugugaagcuggacgugaugcaaaauaaccga

SEQ ID NO: 213864 - RNA, 32 nt, Human
gugugaagcuuagguguaagcccagggcucuu

SEQ ID NO: 213865 - RNA, 32 nt, Human
gugugaagcuuccuuggcuuuuacugaagccu

SEQ ID NO: 213866 - RNA, 32 nt, Human
gugugaaggagagaggacacaggggaugacug

SEQ ID NO: 213867 - RNA, 32 nt, Human
gugugaaggugaacaggauggccuggcagcag

SEQ ID NO: 213868 - RNA, 32 nt, Human
gugugaaguguaguggcauccauuucuaaugu

SEQ ID NO: 213869 - RNA, 32 nt, Human
gugugaauaccugaaaccugccuaccucauag

SEQ ID NO: 213870 - RNA, 32 nt, Human
gugugaauaguguucacaaacugugaaaauag

SEQ ID NO: 213871 - RNA, 32 nt, Human
gugugaauccagugguggagguugcagugagc

SEQ ID NO: 213872 - RNA, 32 nt, Human
gugugaaucgaggggcgggcuuuuggcaggca

SEQ ID NO: 213873 - RNA, 32 nt, Human
gugugacaccugcuugacagaggcagggcugu

SEQ ID NO: 213874 - RNA, 32 nt, Human
gugugacaggaaaaucuguagagaagaggcac

SEQ ID NO: 213875 - RNA, 32 nt, Human
gugugacagggcuggagggaagggcacagggg

SEQ ID NO: 213876 - RNA, 32 nt, Human
gugugacaucagaguauuugaccugcaguauu

SEQ ID NO: 213877 - RNA, 32 nt, Human
gugugacauucagcuaacauugaucuaggcac

SEQ ID NO: 213878 - RNA, 32 nt, Human
gugugaccacugaagcaccacagggagggguu

SEQ ID NO: 213879 - RNA, 32 nt, Human
gugugaccagcccuggccaugcuugcugggug

SEQ ID NO: 213880 - RNA, 24 nt, Human
gugugaccauaggcaaguuacuua

SEQ ID NO: 213881 - RNA, 32 nt, Human
gugugacccacugcgcacagccccagcuaauu

SEQ ID NO: 213882 - RNA, 32 nt, Human
gugugacccagcugccacccaccuccuccauc

SEQ ID NO: 213883 - RNA, 32 nt, Human
gugugacccugacucauccagacccuguagag

SEQ ID NO: 213884 - RNA, 24 nt, Human
gugugacccugggcaagucacuua

SEQ ID NO: 213885 - RNA, 32 nt, Human
gugugaccuagaucuccccucucuccacccuc

SEQ ID NO: 213886 - RNA, 32 nt, Human
gugugaccugacagugcuggagccuccuaguu

SEQ ID NO: 213887 - RNA, 32 nt, Human
gugugaccugcucucuucccuccaggcugacu

SEQ ID NO: 213888 - RNA, 32 nt, Human
gugugaccugcucuguucccucccugcugacc

SEQ ID NO: 213889 - RNA, 32 nt, Human
gugugaccugggaggacagcggagccaggagc

SEQ ID NO: 213890 - RNA, 24 nt, Human
gugugaccuuggcuaagucacuua

SEQ ID NO: 213891 - RNA, 24 nt, Human
gugugaccuugggcaagucacuua

SEQ ID NO: 213892 - RNA, 32 nt, Human
gugugacggggcuguccugagcuguuaggaga

SEQ ID NO: 213893 - RNA, 32 nt, Human
gugugacguuuuaguaucuggagcucagugau

SEQ ID NO: 213894 - RNA, 32 nt, Human
gugugacuaauuccuuaccucucccaaggagg

SEQ ID NO: 213895 - RNA, 32 nt, Human
gugugacuaggccacaccaacucuuaaucauc

SEQ ID NO: 213896 - RNA, 32 nt, Human
gugugacuauaaucccagcuacucgggaggcu

SEQ ID NO: 213897 - RNA, 22 nt, Human
gugugacucaguucuuuccauc

SEQ ID NO: 213898 - RNA, 32 nt, Human
gugugacuccauacuccucccaccacaacacu

SEQ ID NO: 213899 - RNA, 32 nt, Human
gugugacucugaggaagccuuuuuaauucuga

SEQ ID NO: 213900 - RNA, 32 nt, Human
gugugacucugugccagagcaauugacuaaaa

SEQ ID NO: 213901 - RNA, 32 nt, Human
gugugacugagcugaagagcagugcauccaga

SEQ ID NO: 213902 - RNA, 32 nt, Human
gugugacugaguaaagaauuuuuggaucaagc

SEQ ID NO: 213903 - RNA, 32 nt, Human
gugugacugcaaccucauaucaggauuccuga

SEQ ID NO: 213904 - RNA, 32 nt, Human
gugugacuggguguguuucuuuaggguucuga

SEQ ID NO: 213905 - RNA, 31 nt, Human
gugugacugguguccaucuaagaagaaauua

SEQ ID NO: 213906 - RNA, 32 nt, Human
gugugacuguaaucccagcuacucaggaggcu

SEQ ID NO: 213907 - RNA, 32 nt, Human
gugugacugucagcacugggccucuuguccau

SEQ ID NO: 213908 - RNA, 32 nt, Human
gugugacuugauaaugauuuccucugaauuau

SEQ ID NO: 213909 - RNA, 32 nt, Human
gugugacuuuggggcucccucugccagugacc

SEQ ID NO: 213910 - RNA, 32 nt, Human
gugugagaagcaagcuugugggccaguguccu

SEQ ID NO: 213911 - RNA, 32 nt, Human
gugugagagaagaagagaaagcagcagaauug

SEQ ID NO: 213912 - RNA, 32 nt, Human
gugugagagacacacacaaacacauuucaaac

SEQ ID NO: 213913 - RNA, 32 nt, Human
gugugagagacacaugcccacuucaugcaacu

SEQ ID NO: 213914 - RNA, 32 nt, Human
gugugagagagagcccucccacugccagcuca

SEQ ID NO: 213915 - RNA, 32 nt, Human
gugugagagcccagggggaggacagcuugucu

SEQ ID NO: 213916 - RNA, 32 nt, Human
gugugagaggcagagugccaaggaugaagcug

SEQ ID NO: 213917 - RNA, 32 nt, Human
gugugagagguuccuuucuguccacugaaaca

SEQ ID NO: 213918 - RNA, 32 nt, Human
gugugagccaaaggauccuuccuuauuccuaa

SEQ ID NO: 213919 - RNA, 32 nt, Human
gugugagccaccacacccagccugggucucuc

SEQ ID NO: 213920 - RNA, 32 nt, Human
gugugagccaccacagccagccaguaugaccu

SEQ ID NO: 213921 - RNA, 32 nt, Human
gugugagccaccaccagucaacaaaauacuuu

SEQ ID NO: 213922 - RNA, 32 nt, Human
gugugagccaccacgccagccugacgauguuu

SEQ ID NO: 213923 - RNA, 32 nt, Human
gugugagccaccacgcccugccuacucuuugu

SEQ ID NO: 213924 - RNA, 32 nt, Human
gugugagccaccaugcccaacacccacugauc

SEQ ID NO: 213925 - RNA, 32 nt, Human
gugugagccacugcacccagccugugauguuu

SEQ ID NO: 213926 - RNA, 32 nt, Human
gugugagccacugcacccggccugaaauuuuu

SEQ ID NO: 213927 - RNA, 32 nt, Human
gugugagccacugcaccuggccaugguuaguu

SEQ ID NO: 213928 - RNA, 32 nt, Human
gugugagccacugcaccuggccuggagcucag

SEQ ID NO: 213929 - RNA, 32 nt, Human
gugugagcccucaggggcagggcuuguggcuc

SEQ ID NO: 213930 - RNA, 32 nt, Human
gugugagcuacagaagaccccauaccaaauaa

SEQ ID NO: 213931 - RNA, 32 nt, Human
gugugagcuacugcgcccagccccagaaaucu

SEQ ID NO: 213932 - RNA, 32 nt, Human
gugugagcugcugccucuauccugggugccug

SEQ ID NO: 213933 - RNA, 32 nt, Human
gugugagcuucucuugccguaaguccacgggu

SEQ ID NO: 213934 - RNA, 32 nt, Human
gugugaggacucugugcacaccuuagaguucc

SEQ ID NO: 213935 - RNA, 32 nt, Human
gugugaggccagggcagagugagacccagccc

SEQ ID NO: 213936 - RNA, 32 nt, Human
gugugaggccaucaccaugugagaagacaucu

SEQ ID NO: 213937 - RNA, 32 nt, Human
gugugaggcuucacccaugcuaggcaagccca

SEQ ID NO: 213938 - RNA, 32 nt, Human
gugugagggaaagggggaugcagcaaggggau

SEQ ID NO: 213939 - RNA, 32 nt, Human
gugugagggaggacaggcgggaggagguguga

SEQ ID NO: 213940 - RNA, 32 nt, Human
gugugaggucuuucuuuugcuucuggcuucug

SEQ ID NO: 213941 - RNA, 32 nt, Human
gugugaggugcaguuguccaggagacgauuuu

SEQ ID NO: 213942 - RNA, 32 nt, Human
gugugagguggcggccuggugcccgguggagg

SEQ ID NO: 213943 - RNA, 32 nt, Human
gugugagguguucugagcucacugaccggaag

SEQ ID NO: 213944 - RNA, 32 nt, Human
gugugaguaauugaggaaaaacugacagaugc

SEQ ID NO: 213945 - RNA, 32 nt, Human
gugugagugagggagacaggaacggcucuggg

SEQ ID NO: 213946 - RNA, 32 nt, Human
gugugagugcugcucuuuccaccugccuugca

SEQ ID NO: 213947 - RNA, 32 nt, Human
gugugaguguguccugacauggcuccagggcg

SEQ ID NO: 213948 - RNA, 23 nt, Human
gugugaguucaaggcugcaguga

SEQ ID NO: 213949 - RNA, 32 nt, Human
gugugaguucacccagaggccugcucuccuca

SEQ ID NO: 213950 - RNA, 32 nt, Human
gugugaguuugaggcagggucauuugugugau

SEQ ID NO: 213951 - RNA, 32 nt, Human
gugugauaaccagccccagucggcgccauggc

SEQ ID NO: 213952 - RNA, 32 nt, Human
gugugauacagccaucuguaccuacuggagcc

SEQ ID NO: 213953 - RNA, 32 nt, Human
gugugauacaucucucauacaguuugggguga

SEQ ID NO: 213954 - RNA, 32 nt, Human
gugugaucauagcacacugcagccuggaacuc

SEQ ID NO: 213955 - RNA, 32 nt, Human
gugugaucauagcucacugcagccuggaauuc

SEQ ID NO: 213956 - RNA, 32 nt, Human
gugugaucucagcucacugcagccucugucuc

SEQ ID NO: 213957 - RNA, 32 nt, Human
gugugaucucuucagggugggguggucucuga

SEQ ID NO: 213958 - RNA, 32 nt, Human
gugugaucugugggacugucugggccuguuac

SEQ ID NO: 213959 - RNA, 24 nt, Human
gugugaucuugggcaagucacuua

SEQ ID NO: 213960 - RNA, 32 nt, Human
gugugaugaccagacggcggagaagcucauga

SEQ ID NO: 213961 - RNA, 32 nt, Human
gugugaugcaccugcagggugugugcuagccu

SEQ ID NO: 213962 - RNA, 32 nt, Human
gugugauggaacaggccaguuggccuaagaau

SEQ ID NO: 213963 - RNA, 32 nt, Human
gugugauggaggagggagaugccuggggaggg

SEQ ID NO: 213964 - RNA, 21 nt, Human
gugugauggcacauaccugua

SEQ ID NO: 213965 - RNA, 30 nt, Human
gugugauggccaggugcuucagccuggugu

SEQ ID NO: 213966 - RNA, 32 nt, Human
gugugaugggggaguggguauuacaugcauug

SEQ ID NO: 213967 - RNA, 32 nt, Human
gugugaugggguuucgcacuuguugcccaggc

SEQ ID NO: 213968 - RNA, 32 nt, Human
gugugaugggguuuugcucuuguugcccaggc

SEQ ID NO: 213969 - RNA, 32 nt, Human
gugugaugucaggccauugucccuugccuagc

SEQ ID NO: 213970 - RNA, 32 nt, Human
gugugaugucuacaucuuuuaacuucugguuc

SEQ ID NO: 213971 - RNA, 32 nt, Human
gugugaugugugugaugcaccagagcaccccc

SEQ ID NO: 213972 - RNA, 32 nt, Human
gugugauugcacuccagcccaggggacaaugu

SEQ ID NO: 213973 - RNA, 32 nt, Human
gugugauugggagggguggcagacaggaagaa

SEQ ID NO: 213974 - RNA, 32 nt, Human
gugugauuuggccugugaacuuggcugugcca

SEQ ID NO: 213975 - RNA, 32 nt, Human
gugugcaacgugagccaugcucaccccagggu

SEQ ID NO: 213976 - RNA, 32 nt, Human
gugugcaacugcuucauugcuauuaauaguua

SEQ ID NO: 213977 - RNA, 32 nt, Human
gugugcaaguacgacuucguggaggugcgcag

SEQ ID NO: 213978 - RNA, 32 nt, Human
gugugcaauagacucaauguuuauguuccccc

SEQ ID NO: 213979 - RNA, 32 nt, Human
gugugcaauggcugcacacagcagcuuccuug

SEQ ID NO: 213980 - RNA, 32 nt, Human
gugugcacacacacagaaaccacgagguaguu

SEQ ID NO: 213981 - RNA, 32 nt, Human
gugugcacacgcaugcacacacacauucagua

SEQ ID NO: 213982 - RNA, 32 nt, Human
gugugcacagggacugugucgggcuuggaccu

SEQ ID NO: 213983 - RNA, 32 nt, Human
gugugcacagugccaugugguaaaagaggcuu

SEQ ID NO: 213984 - RNA, 31 nt, Human
gugugcacauuccacccuugccagagccacu

SEQ ID NO: 213985 - RNA, 32 nt, Human
gugugcaccggcgcgguauuccugggcgccga

SEQ ID NO: 213986 - RNA, 32 nt, Human
gugugcaccuguaaucccagcuacucuggagg

SEQ ID NO: 213987 - RNA, 32 nt, Human
gugugcaccuguaaucucagcuacucgggagg

SEQ ID NO: 213988 - RNA, 32 nt, Human
gugugcacgucugucuguccgucugugcuugu

SEQ ID NO: 213989 - RNA, 32 nt, Human
gugugcacuuucucccuccaccuggagcaugg

SEQ ID NO: 213990 - RNA, 32 nt, Human
gugugcagacccucagcuaggcccagauggug

SEQ ID NO: 213991 - RNA, 32 nt, Human
gugugcagacgugccugcucccuggaugccag

SEQ ID NO: 213992 - RNA, 32 nt, Human
gugugcagagaaugugcucuucggaggaagaa

SEQ ID NO: 213993 - RNA, 32 nt, Human
gugugcagagcugaagagcuggggagaauggg

SEQ ID NO: 213994 - RNA, 32 nt, Human
gugugcagagcuugggacaggggaagucagau

SEQ ID NO: 213995 - RNA, 32 nt, Human
gugugcagaggugggggugcugagcgaggagg

SEQ ID NO: 213996 - RNA, 32 nt, Human
gugugcagccaucucauucugugaaugugcca

SEQ ID NO: 213997 - RNA, 32 nt, Human
gugugcagcccaggcccugccccuuuacaguc

SEQ ID NO: 213998 - RNA, 32 nt, Human
gugugcagccuuugugcugcucugcccaguau

SEQ ID NO: 213999 - RNA, 32 nt, Human
gugugcagcuguggucccagcuacucaggagg

SEQ ID NO: 214000 - RNA, 32 nt, Human
gugugcaggcagcagggcggcguggaagcuuc

SEQ ID NO: 214001 - RNA, 32 nt, Human
gugugcaggcugggaagagacaucucuuucag

SEQ ID NO: 214002 - RNA, 32 nt, Human
gugugcagggcugcauccgcagauggcuggaa

SEQ ID NO: 214003 - RNA, 32 nt, Human
gugugcaggguggcagaggugccucugcagag

SEQ ID NO: 214004 - RNA, 32 nt, Human
gugugcaguagccaauuucauuuacugcauua

SEQ ID NO: 214005 - RNA, 32 nt, Human
gugugcaguaggaccugcuccccugaaggacg

SEQ ID NO: 214006 - RNA, 32 nt, Human
gugugcagucccagagccuccuaaaauucuag

SEQ ID NO: 214007 - RNA, 32 nt, Human
gugugcagucucuggguugucauucacuuuga

SEQ ID NO: 214008 - RNA, 32 nt, Human
gugugcagugccugagucacgugauagauuaa

SEQ ID NO: 214009 - RNA, 32 nt, Human
gugugcaguuauuuuaaaaacuacagaucauu

SEQ ID NO: 214010 - RNA, 32 nt, Human
gugugcaugcagauguccucagacgggaaggu

SEQ ID NO: 214011 - RNA, 31 nt, Human
gugugcaugccaccccauccccucccgcugg

SEQ ID NO: 214012 - RNA, 32 nt, Human
gugugcauggcuggggacuucucacuuccccu

SEQ ID NO: 214013 - RNA, 32 nt, Human
gugugcauucacugcaaguaacuuauaucuuu

SEQ ID NO: 214014 - RNA, 32 nt, Human
gugugcauucucuccagcugcaaacuuucuuc

SEQ ID NO: 214015 - RNA, 16 nt, Human
gugugccaccauggcc

SEQ ID NO: 214016 - RNA, 32 nt, Human
gugugccaccugcugucugagaggcaggcagu

SEQ ID NO: 214017 - RNA, 32 nt, Human
gugugccaggagcugggcuguugagcagccaa

SEQ ID NO: 214018 - RNA, 25 nt, Human
gugugccaggcagauccucuggaca

SEQ ID NO: 214019 - RNA, 32 nt, Human
gugugccaggucccaggcagcccugcugaccc

SEQ ID NO: 214020 - RNA, 32 nt, Human
gugugccaucguagaugucacacuggggagaa

SEQ ID NO: 214021 - RNA, 32 nt, Human
gugugccauggacucagccgcccggugauauu

SEQ ID NO: 214022 - RNA, 32 nt, Human
gugugccauguaggccgagagcagggggaaca

SEQ ID NO: 214023 - RNA, 32 nt, Human
gugugccauugcagagagacuccaucccaaaa

SEQ ID NO: 214024 - RNA, 32 nt, Human
gugugccauuguucucuuugaccauuuuccua

SEQ ID NO: 214025 - RNA, 32 nt, Human
gugugcccaagaggggaagccuagugggccug

SEQ ID NO: 214026 - RNA, 32 nt, Human
gugugcccagaggcaagaggguugggugguuc

SEQ ID NO: 214027 - RNA, 32 nt, Human
gugugccccaggagggcucugcaggagcuaca

SEQ ID NO: 214028 - RNA, 32 nt, Human
gugugccccauguuguguuaacaccugcgugu

SEQ ID NO: 214029 - RNA, 32 nt, Human
gugugccccguugcagacagggccagggagaa

SEQ ID NO: 214030 - RNA, 32 nt, Human
gugugccccucggggcaggagggaagggcauc

SEQ ID NO: 214031 - RNA, 32 nt, Human
gugugccccucggucgcccaccugcacagcuc

SEQ ID NO: 214032 - RNA, 32 nt, Human
gugugccccuggcuuucugggucugugccucu

SEQ ID NO: 214033 - RNA, 32 nt, Human
gugugcccguggugagguugugcugccugugg

SEQ ID NO: 214034 - RNA, 32 nt, Human
gugugcccuaagcauguuggcagcaguacuuu

SEQ ID NO: 214035 - RNA, 32 nt, Human
gugugcccuaggguauguacccuuccccaucu

SEQ ID NO: 214036 - RNA, 32 nt, Human
gugugcccucccccuccuuuguguauuccuuc

SEQ ID NO: 214037 - RNA, 32 nt, Human
gugugcccucucugccuuccucugacuacaga

SEQ ID NO: 214038 - RNA, 32 nt, Human
gugugcccugaagaggagggugcggcccuccu

SEQ ID NO: 214039 - RNA, 32 nt, Human
gugugcccugcucaccccauuagugucauccu

SEQ ID NO: 214040 - RNA, 32 nt, Human
gugugccgccacacccagccugagcaacuuuu

SEQ ID NO: 214041 - RNA, 32 nt, Human
gugugccggaggccuucccacuccuacugcga

SEQ ID NO: 214042 - RNA, 32 nt, Human
gugugccuauaaucccagcuacucaggaggcu

SEQ ID NO: 214043 - RNA, 32 nt, Human
gugugccuauaaucccagcuacuugggaggcu

SEQ ID NO: 214044 - RNA, 32 nt, Human
gugugccuauagucgcagcuacuagggaaguu

SEQ ID NO: 214045 - RNA, 32 nt, Human
gugugccucuacuguggccucaacccuggcaa

SEQ ID NO: 214046 - RNA, 32 nt, Human
gugugccucuagucccagcuacuugggaggcu

SEQ ID NO: 214047 - RNA, 32 nt, Human
gugugccugagauucggauggggagcucucaa

SEQ ID NO: 214048 - RNA, 32 nt, Human
gugugccugcagcagccuccacagccacgaug

SEQ ID NO: 214049 - RNA, 32 nt, Human
gugugccugcagcagugccgacaccccugaga

SEQ ID NO: 214050 - RNA, 32 nt, Human
gugugccugcagcuguguagugcuggacagug

SEQ ID NO: 214051 - RNA, 32 nt, Human
gugugccuggcagaacacugcacuccaauuuc

SEQ ID NO: 214052 - RNA, 32 nt, Human
gugugccuguaaguguccaggcucagagcugg

SEQ ID NO: 214053 - RNA, 32 nt, Human
gugugccuguaaucccaccuacuugggaggcu

SEQ ID NO: 214054 - RNA, 32 nt, Human
gugugccuguaaucccagcuaaccaggaggcu

SEQ ID NO: 214055 - RNA, 32 nt, Human
gugugccuguaaucccagcuacucaggaggau

SEQ ID NO: 214056 - RNA, 32 nt, Human
gugugccuguaaucccagcuacucgggagguu

SEQ ID NO: 214057 - RNA, 32 nt, Human
gugugccuguaaucccagcuacuugggaggcu

SEQ ID NO: 214058 - RNA, 32 nt, Human
gugugccuguaaucccagcuauuugggaggcu

SEQ ID NO: 214059 - RNA, 32 nt, Human
gugugccuguaaucccggcuacuugggaggcu

SEQ ID NO: 214060 - RNA, 32 nt, Human
gugugccuguaauccuagcuacucgggaggcu

SEQ ID NO: 214061 - RNA, 32 nt, Human
gugugccuguaaucucagcacuuugagggguu

SEQ ID NO: 214062 - RNA, 32 nt, Human
gugugccuguaaucucagcuacucaggaggcu

SEQ ID NO: 214063 - RNA, 32 nt, Human
gugugccuguaaucucagcuacucaggagguu

SEQ ID NO: 214064 - RNA, 32 nt, Human
gugugccuguaaugccagcuacucaggaggcu

SEQ ID NO: 214065 - RNA, 32 nt, Human
gugugccuguaaugccagcuacucgggaggcu

SEQ ID NO: 214066 - RNA, 32 nt, Human
gugugccuguaauuccagcuacucgggaggcu

SEQ ID NO: 214067 - RNA, 32 nt, Human
gugugccuguagucccagcuacuauggagguu

SEQ ID NO: 214068 - RNA, 32 nt, Human
gugugccuguagucccagcuacucaggaggcu

SEQ ID NO: 214069 - RNA, 32 nt, Human
gugugccuguagucccagcuacucgggaggcu

SEQ ID NO: 214070 - RNA, 32 nt, Human
gugugccuguagucccagcuacuggcgaggcu

SEQ ID NO: 214071 - RNA, 32 nt, Human
gugugccuguagucccagcuacuuaggaggcu

SEQ ID NO: 214072 - RNA, 32 nt, Human
gugugccuguagucccagcuacuugagaggcu

SEQ ID NO: 214073 - RNA, 32 nt, Human
gugugccuguagucccagcuacuugggaggcu

SEQ ID NO: 214074 - RNA, 32 nt, Human
gugugccuguagucccagcuacuugggagggc

SEQ ID NO: 214075 - RNA, 32 nt, Human
gugugccuguagucccagcuacuugugaggcu

SEQ ID NO: 214076 - RNA, 32 nt, Human
gugugccuguagucccagcuauucuagaggcu

SEQ ID NO: 214077 - RNA, 32 nt, Human
gugugccuguagucccagcugcuugggaggcu

SEQ ID NO: 214078 - RNA, 32 nt, Human
gugugccuguagucucagcuacuugggaggcc

SEQ ID NO: 214079 - RNA, 32 nt, Human
gugugccuguagugccagcuacucaggaggcu

SEQ ID NO: 214080 - RNA, 32 nt, Human
gugugccuguaguuccagcuacucaggaggcu

SEQ ID NO: 214081 - RNA, 32 nt, Human
gugugccugucgucccagcuacucaggaggcc

SEQ ID NO: 214082 - RNA, 32 nt, Human
gugugccugugaucccagcuacacgggaggca

SEQ ID NO: 214083 - RNA, 32 nt, Human
gugugccugugcaaguguguuugugugugguu

SEQ ID NO: 214084 - RNA, 32 nt, Human
gugugccugugcgcuacugcugugccauuuuc

SEQ ID NO: 214085 - RNA, 32 nt, Human
gugugccuguggucccagcuacucaagagacg

SEQ ID NO: 214086 - RNA, 32 nt, Human
gugugccuguggucccagcuccucaggaggcu

SEQ ID NO: 214087 - RNA, 32 nt, Human
gugugccuguuuguugagugauugugaaagag

SEQ ID NO: 214088 - RNA, 32 nt, Human
gugugccuugggucucagcugcugacacgcag

SEQ ID NO: 214089 - RNA, 32 nt, Human
gugugccuugguguggagaccaaccugaggau

SEQ ID NO: 214090 - RNA, 32 nt, Human
gugugccuuuaaugcacuuagaacagcaggug

SEQ ID NO: 214091 - RNA, 32 nt, Human
gugugccuuucuaucuuagguaaagaagagaa

SEQ ID NO: 214092 - RNA, 32 nt, Human
gugugcgagccgcggcagagugaggcaggcaa

SEQ ID NO: 214093 - RNA, 32 nt, Human
gugugcgaucucagcucacugcagccuccacc

SEQ ID NO: 214094 - RNA, 32 nt, Human
gugugcgcacacacaauggugccugaagaaga

SEQ ID NO: 214095 - RNA, 32 nt, Human
gugugcgcacacacacaagaagccuuagcguu

SEQ ID NO: 214096 - RNA, 32 nt, Human
gugugcgcaugggaguggagggcaggauuggg

SEQ ID NO: 214097 - RNA, 32 nt, Human
gugugcgccuauaaucccagcuacucaggagg

SEQ ID NO: 214098 - RNA, 32 nt, Human
gugugcgccuguaaucccagcuacucgggagg

SEQ ID NO: 214099 - RNA, 32 nt, Human
gugugcgccuguaaucccagcuacucuggagg

SEQ ID NO: 214100 - RNA, 32 nt, Human
gugugcgccuguaaucccagcuacuugggagg

SEQ ID NO: 214101 - RNA, 32 nt, Human
gugugcgccuguaaucucagcuacucaagagg

SEQ ID NO: 214102 - RNA, 32 nt, Human
gugugcgccuguaauuccagcuacucgggagg

SEQ ID NO: 214103 - RNA, 32 nt, Human
gugugcgcgagcuaccgcuucacuuucucccu

SEQ ID NO: 214104 - RNA, 32 nt, Human
gugugcgcugcuucuugaucuaggcaaaccuu

SEQ ID NO: 214105 - RNA, 32 nt, Human
gugugcggugcccuccugccucaggccgcgaa

SEQ ID NO: 214106 - RNA, 32 nt, Human
gugugcgucccucagcccaugcaccccggaag

SEQ ID NO: 214107 - RNA, 32 nt, Human
gugugcgugcauaucagcccguguggcugacu

SEQ ID NO: 214108 - RNA, 32 nt, Human
gugugcuaaaagcaaggaaagcgaguuagucu

SEQ ID NO: 214109 - RNA, 32 nt, Human
gugugcuacacaguguaugucacuguguagug

SEQ ID NO: 214110 - RNA, 32 nt, Human
gugugcuaccuuacaccuccccauucccuaaa

SEQ ID NO: 214111 - RNA, 32 nt, Human
gugugcuagccucugugccccguccuugugcc

SEQ ID NO: 214112 - RNA, 32 nt, Human
gugugcuaugagagcuguaugugcccaggggu

SEQ ID NO: 214113 - RNA, 32 nt, Human
gugugcucaaauaaguguuauguaucagcuag

SEQ ID NO: 214114 - RNA, 32 nt, Human
gugugcucagccucagagccguaggcgagagc

SEQ ID NO: 214115 - RNA, 32 nt, Human
gugugcucagggcacaugcacacagacauuua

SEQ ID NO: 214116 - RNA, 23 nt, Human
gugugcuccagauguguuugggc

SEQ ID NO: 214117 - RNA, 22 nt, Human
gugugcuccggcuccugggaca

SEQ ID NO: 214118 - RNA, 32 nt, Human
gugugcuccuauagcuccagcuacucaggagg

SEQ ID NO: 214119 - RNA, 32 nt, Human
gugugcuccuuaugauaaucuaaugccugaug

SEQ ID NO: 214120 - RNA, 32 nt, Human
gugugcuccuugggcccugcuccugugccaca

SEQ ID NO: 214121 - RNA, 32 nt, Human
gugugcucuguagucaugcagaucccagcuuu

SEQ ID NO: 214122 - RNA, 32 nt, Human
gugugcucuucuucuuucuacaguauuaugua

SEQ ID NO: 214123 - RNA, 32 nt, Human
gugugcucuuucacagaacuugguuuucaaau

SEQ ID NO: 214124 - RNA, 22 nt, Human
gugugcucuuugugaaauucca

SEQ ID NO: 214125 - RNA, 32 nt, Human
gugugcugaagcucugacccuuccugacuccg

SEQ ID NO: 214126 - RNA, 32 nt, Human
gugugcugaagugccaucuuuagggugcucau

SEQ ID NO: 214127 - RNA, 31 nt, Human
gugugcugcacucaugggccuggucucacuc

SEQ ID NO: 214128 - RNA, 32 nt, Human
gugugcugcacugugggcuggugggacgggca

SEQ ID NO: 214129 - RNA, 32 nt, Human
gugugcugcgcgggaagccccaugcuccaauc

SEQ ID NO: 214130 - RNA, 32 nt, Human
gugugcugcuaccugugugcugcuaggauagu

SEQ ID NO: 214131 - RNA, 32 nt, Human
gugugcugcuucucaucacugcacacaagugc

SEQ ID NO: 214132 - RNA, 32 nt, Human
gugugcuggcuguccuagcucccugguaacag

SEQ ID NO: 214133 - RNA, 32 nt, Human
gugugcugggaguccagccgugcacugugcca

SEQ ID NO: 214134 - RNA, 32 nt, Human
gugugcugggauuacaggcaugagcuacuaug

SEQ ID NO: 214135 - RNA, 32 nt, Human
gugugcugggguccccagcaggcaaacacugg

SEQ ID NO: 214136 - RNA, 32 nt, Human
gugugcuguguguguccugccuguauaugugg

SEQ ID NO: 214137 - RNA, 32 nt, Human
gugugcuucaaacaaaugcuagacccuuucac

SEQ ID NO: 214138 - RNA, 32 nt, Human
gugugcuucaggaaguggguugcaccuccaac

SEQ ID NO: 214139 - RNA, 32 nt, Human
gugugcuucccaagagccugcccccuuggccc

SEQ ID NO: 214140 - RNA, 32 nt, Human
gugugcuugguuuaggggaaguaugugugggu

SEQ ID NO: 214141 - RNA, 32 nt, Human
gugugcuuguaaucccagcuacuugggaggcu

SEQ ID NO: 214142 - RNA, 32 nt, Human
gugugcuuguagucccagcuacuuaggaggcu

SEQ ID NO: 214143 - RNA, 32 nt, Human
gugugcuuguagucccagcuacuuuggaggcu

SEQ ID NO: 214144 - RNA, 32 nt, Human
gugugcuugugucugugcgggcgcgugcagcc

SEQ ID NO: 214145 - RNA, 24 nt, Human
gugugcuuuaggauuuauugcaua

SEQ ID NO: 214146 - RNA, 32 nt, Human
gugugcuuuugaguggaagauucaaagccagu

SEQ ID NO: 214147 - RNA, 32 nt, Human
guguggaaaaucaccauagaucauggcugaaa

SEQ ID NO: 214148 - RNA, 32 nt, Human
guguggaaacucagcgcaaacaacccuguuug

SEQ ID NO: 214149 - RNA, 32 nt, Human
guguggaaaguggccagcauucugccugcaga

SEQ ID NO: 214150 - RNA, 32 nt, Human
guguggaacaccuucccaaucuuaguucagaa

SEQ ID NO: 214151 - RNA, 32 nt, Human
guguggaacaugagugcugggcaccuggagga

SEQ ID NO: 214152 - RNA, 32 nt, Human
guguggaagaggagcucaagaggcuggaauaa

SEQ ID NO: 214153 - RNA, 32 nt, Human
guguggaagagugcugugguugauuagcaaug

SEQ ID NO: 214154 - RNA, 32 nt, Human
guguggacaacagugaguauauggggaaugga

SEQ ID NO: 214155 - RNA, 32 nt, Human
guguggacaaguguucuaugagcagagacugg

SEQ ID NO: 214156 - RNA, 22 nt, Human
guguggacacccugccaggacu

SEQ ID NO: 214157 - RNA, 32 nt, Human
guguggacagaaggaagagaggagagggugag

SEQ ID NO: 214158 - RNA, 32 nt, Human
guguggacccaggaggcagagcuugcagugag

SEQ ID NO: 214159 - RNA, 32 nt, Human
guguggaccccaggggagaaucagaggucaaa

SEQ ID NO: 214160 - RNA, 32 nt, Human
guguggacggccaggugcagggcaucgccacg

SEQ ID NO: 214161 - RNA, 32 nt, Human
guguggacuccgggagggugacucagguccuc

SEQ ID NO: 214162 - RNA, 22 nt, Human
guguggacuggagaccaggauu

SEQ ID NO: 214163 - RNA, 32 nt, Human
guguggacugggugugaugaggggaaugacca

SEQ ID NO: 214164 - RNA, 22 nt, Human
guguggacuuuuauauauagau

SEQ ID NO: 214165 - RNA, 32 nt, Human
guguggagacaggguuuugccauguugcccag

SEQ ID NO: 214166 - RNA, 32 nt, Human
guguggagagaagagagguagaauggugcuag

SEQ ID NO: 214167 - RNA, 32 nt, Human
guguggagaucaaggaggaaagaggcaaguga

SEQ ID NO: 214168 - RNA, 32 nt, Human
guguggagaugcagagguaaaagugugagcag

SEQ ID NO: 214169 - RNA, 32 nt, Human
guguggagcaucacaaacacaucagaagcccc

SEQ ID NO: 214170 - RNA, 32 nt, Human
guguggaggaaaaguacugagugaagggcaga

SEQ ID NO: 214171 - RNA, 32 nt, Human
guguggaggcagcagagggacauugggaaggg

SEQ ID NO: 214172 - RNA, 32 nt, Human
guguggaggcagcagccuggggcagggacugu

SEQ ID NO: 214173 - RNA, 32 nt, Human
guguggaggcagugggaugaacugggggacag

SEQ ID NO: 214174 - RNA, 32 nt, Human
guguggagggagaagcgagugugguccggaga

SEQ ID NO: 214175 - RNA, 32 nt, Human
guguggagggcagaggagaggggacaagacag

SEQ ID NO: 214176 - RNA, 32 nt, Human
guguggaguuagaucuggguuauggaagaguu

SEQ ID NO: 214177 - RNA, 32 nt, Human
guguggauaccucugucucacgcccagggauc

SEQ ID NO: 214178 - RNA, 21 nt, Human
guguggauauaacauuugggg

SEQ ID NO: 214179 - RNA, 32 nt, Human
guguggaucggcauuccuugagcucagugcua

SEQ ID NO: 214180 - RNA, 32 nt, Human
guguggaugcuuuuccuggagcacuuuccaag

SEQ ID NO: 214181 - RNA, 21 nt, Human
guguggauggagaacccuccc

SEQ ID NO: 214182 - RNA, 22 nt, Human
guguggaugggauagcccuggg

SEQ ID NO: 214183 - RNA, 32 nt, Human
guguggauguggggaagccagugagcauuacu

SEQ ID NO: 214184 - RNA, 32 nt, Human
guguggauguugugaccacagagcaggauugu

SEQ ID NO: 214185 - RNA, 32 nt, Human
guguggauuauccaccaugccaggaagaccca

SEQ ID NO: 214186 - RNA, 32 nt, Human
guguggauugucugucuguaaggagaugccau

SEQ ID NO: 214187 - RNA, 32 nt, Human
guguggcaaagcugauguugagugcagaacua

SEQ ID NO: 214188 - RNA, 21 nt, Human
guguggcaagcagaccacuua

SEQ ID NO: 214189 - RNA, 32 nt, Human
guguggcacacagauaacaggguaagaaauug

SEQ ID NO: 214190 - RNA, 32 nt, Human
guguggcacugaggcuggaugggcuggcagag

SEQ ID NO: 214191 - RNA, 21 nt, Human
guguggcagaacgugcaguga

SEQ ID NO: 214192 - RNA, 32 nt, Human
guguggcagacaccuguccccugcccugcaug

SEQ ID NO: 214193 - RNA, 32 nt, Human
guguggcagacagcccaggacaacgagaggga

SEQ ID NO: 214194 - RNA, 32 nt, Human
guguggcagagauggggcaugggcauuggggu

SEQ ID NO: 214195 - RNA, 32 nt, Human
guguggcagccugugcaguguugggggcuuac

SEQ ID NO: 214196 - RNA, 32 nt, Human
guguggcagcuccgauagcaggcacagggaau

SEQ ID NO: 214197 - RNA, 31 nt, Human
guguggcagcuuuucugguaagugguagauu

SEQ ID NO: 214198 - RNA, 32 nt, Human
guguggcagggaggaggaagaggaaggugaga

SEQ ID NO: 214199 - RNA, 32 nt, Human
guguggcaucucucccuucucucucuugcucu

SEQ ID NO: 214200 - RNA, 22 nt, Human
guguggcauuacuggucacuug

SEQ ID NO: 214201 - RNA, 19 nt, Human
guguggccaccuggggcuc

SEQ ID NO: 214202 - RNA, 32 nt, Human
guguggccagguucaggcagcccagggccaca

SEQ ID NO: 214203 - RNA, 32 nt, Human
guguggcccacaucccuccacuucuccaacuu

SEQ ID NO: 214204 - RNA, 32 nt, Human
guguggcccaggcuggagugcaguggcgcaau

SEQ ID NO: 214205 - RNA, 32 nt, Human
guguggcccuuuacagaaaaaguuuucuaacc

SEQ ID NO: 214206 - RNA, 32 nt, Human
guguggccuagaaguccucuguggucuccccu

SEQ ID NO: 214207 - RNA, 32 nt, Human
guguggccuagguuggagugcaauggcgcaau

SEQ ID NO: 214208 - RNA, 32 nt, Human
guguggccucacugccccaggcuuccuuucag

SEQ ID NO: 214209 - RNA, 24 nt, Human
guguggccucgaugauggcaguga

SEQ ID NO: 214210 - RNA, 22 nt, Human
guguggccucguagaggcagug

SEQ ID NO: 214211 - RNA, 32 nt, Human
guguggccugacagucucuaccaguccugcug

SEQ ID NO: 214212 - RNA, 32 nt, Human
guguggccugcacuggguuguccagggagacc

SEQ ID NO: 214213 - RNA, 32 nt, Human
guguggccugcaggacaggccugggccuggug

SEQ ID NO: 214214 - RNA, 32 nt, Human
guguggccugcgagauucugaccucagaugug

SEQ ID NO: 214215 - RNA, 32 nt, Human
guguggccuucaucccccucuggccguguucc

SEQ ID NO: 214216 - RNA, 32 nt, Human
guguggccuuggucauaucaucagccucuggg

SEQ ID NO: 214217 - RNA, 32 nt, Human
guguggccuuggugcuaggauucaaagaggaa

SEQ ID NO: 214218 - RNA, 32 nt, Human
guguggcgcuacauuaauuucaagaugucucc

SEQ ID NO: 214219 - RNA, 32 nt, Human
guguggcggagggagaggcgaugcugcaaagu

SEQ ID NO: 214220 - RNA, 30 nt, Human
guguggcgggacuggagggcacaguugagg

SEQ ID NO: 214221 - RNA, 32 nt, Human
guguggcuaagcugagucccaggcacagggug

SEQ ID NO: 214222 - RNA, 32 nt, Human
guguggcuauagucugagcuacucaggaggcu

SEQ ID NO: 214223 - RNA, 32 nt, Human
guguggcucccaccccuuccaguuaagaccug

SEQ ID NO: 214224 - RNA, 32 nt, Human
guguggcugagcuccgggguguguggacgccg

SEQ ID NO: 214225 - RNA, 32 nt, Human
guguggcugcaagagaaaaggggcuggaggaa

SEQ ID NO: 214226 - RNA, 32 nt, Human
guguggcugcuggcaggccagcuugaagauau

SEQ ID NO: 214227 - RNA, 32 nt, Human
guguggcuggaccaggugucuccccacgcuua

SEQ ID NO: 214228 - RNA, 32 nt, Human
guguggcuguucucuggagcagcauucguuua

SEQ ID NO: 214229 - RNA, 32 nt, Human
guguggcuuguauucaugggauacaggacagg

SEQ ID NO: 214230 - RNA, 32 nt, Human
guguggcuuuaaccuccacauccaggucuuuc

SEQ ID NO: 214231 - RNA, 32 nt, Human
guguggcuuuuugcacacuugcccugucuucc

SEQ ID NO: 214232 - RNA, 32 nt, Human
gugugggaaaagaggcagggaggaaugaagag

SEQ ID NO: 214233 - RNA, 32 nt, Human
gugugggaaaugagacuugcucucuggccuuu

SEQ ID NO: 214234 - RNA, 32 nt, Human
gugugggacaagcugcuccugacagaaggaug

SEQ ID NO: 214235 - RNA, 32 nt, Human
gugugggacaaggugcuccugacagaaggaug

SEQ ID NO: 214236 - RNA, 32 nt, Human
gugugggacauggguguguucucuggguugua

SEQ ID NO: 214237 - RNA, 32 nt, Human
gugugggagagggaggagaggggaucacaggg

SEQ ID NO: 214238 - RNA, 32 nt, Human
gugugggagccacuacccucucuuuugaucug

SEQ ID NO: 214239 - RNA, 32 nt, Human
gugugggaggaggaguguugaccuuggacgca

SEQ ID NO: 214240 - RNA, 32 nt, Human
gugugggaggaggccaccagauucagaauuca

SEQ ID NO: 214241 - RNA, 32 nt, Human
gugugggaggcacggccugggccugcucucug

SEQ ID NO: 214242 - RNA, 32 nt, Human
gugugggaggcagagagaggagcaggggccau

SEQ ID NO: 214243 - RNA, 32 nt, Human
gugugggaggcgauggggguugggugguggag

SEQ ID NO: 214244 - RNA, 32 nt, Human
gugugggaggcugcagccaggauugccucagc

SEQ ID NO: 214245 - RNA, 32 nt, Human
gugugggaggggcggggagguuuucuauaaac

SEQ ID NO: 214246 - RNA, 32 nt, Human
gugugggauacuuagugguaugucucuuuaag

SEQ ID NO: 214247 - RNA, 32 nt, Human
gugugggcacauaggugcauguaaccuguuug

SEQ ID NO: 214248 - RNA, 32 nt, Human
gugugggcaggcacuaguggacgucagcuucu

SEQ ID NO: 214249 - RNA, 32 nt, Human
gugugggccagaggcagggaugguuggcuaug

SEQ ID NO: 214250 - RNA, 32 nt, Human
gugugggccaggcugagugcauaggugacagg

SEQ ID NO: 214251 - RNA, 32 nt, Human
gugugggcggcugggccuugcagcuaacccuu

SEQ ID NO: 214252 - RNA, 32 nt, Human
gugugggcgugccuuuuucuucaggccaugcg

SEQ ID NO: 214253 - RNA, 21 nt, Human
gugugggcuacauauauagau

SEQ ID NO: 214254 - RNA, 31 nt, Human
gugugggcuauggaaagaggugaauugcggu

SEQ ID NO: 214255 - RNA, 32 nt, Human
gugugggcucuccagccccgagcaccccuccu

SEQ ID NO: 214256 - RNA, 32 nt, Human
guguggggaggagagagaugcagagagccuuu

SEQ ID NO: 214257 - RNA, 32 nt, Human
guguggggaguggggcuggcuggagaacaggc

SEQ ID NO: 214258 - RNA, 32 nt, Human
guguggggcagagagguuuccaggcagugaga

SEQ ID NO: 214259 - RNA, 32 nt, Human
guguggggcaggcagagagggaugguguccag

SEQ ID NO: 214260 - RNA, 32 nt, Human
guguggggccugauuggaacaggaucugccau

SEQ ID NO: 214261 - RNA, 32 nt, Human
guguggggcgagggggacaggguugcuuccug

SEQ ID NO: 214262 - RNA, 32 nt, Human
guguggggcggguggaggcggcuggcggaggu

SEQ ID NO: 214263 - RNA, 32 nt, Human
guguggggcuacuucucccaagaagaaggggu

SEQ ID NO: 214264 - RNA, 32 nt, Human
guguggggcucugggggugggguggaaaaugc

SEQ ID NO: 214265 - RNA, 32 nt, Human
guguggggcugggcuuugggcuugccugccag

SEQ ID NO: 214266 - RNA, 32 nt, Human
guguggggcugugcucuggugccugagaaugg

SEQ ID NO: 214267 - RNA, 32 nt, Human
gugugggggaaaugaacuugagcuuuaaacuu

SEQ ID NO: 214268 - RNA, 32 nt, Human
gugugggggagagguuuacacccacauauuuc

SEQ ID NO: 214269 - RNA, 31 nt, Human
gugugggggcagauggguggauuuggucuca

SEQ ID NO: 214270 - RNA, 32 nt, Human
gugugggggcagauggguggauuuggucucau

SEQ ID NO: 214271 - RNA, 32 nt, Human
gugugggggcccgggcccugcccagcuacgca

SEQ ID NO: 214272 - RNA, 32 nt, Human
gugugggggcugcuucucaggaggccaggccc

SEQ ID NO: 214273 - RNA, 32 nt, Human
gugugggggucugcuuggcggugagggggcuc

SEQ ID NO: 214274 - RNA, 32 nt, Human
guguggggucaguuccagcagaugaauguguc

SEQ ID NO: 214275 - RNA, 32 nt, Human
guguggggugcaugccuggaaucccagcuacu

SEQ ID NO: 214276 - RNA, 32 nt, Human
guguggggugcugcagucauaacugaaaaauu

SEQ ID NO: 214277 - RNA, 32 nt, Human
gugugggucccaaggcgugcugcagauggaga

SEQ ID NO: 214278 - RNA, 32 nt, Human
gugugggucccucugccccacccuccuuccca

SEQ ID NO: 214279 - RNA, 32 nt, Human
gugugggucucauuuccaugcuagccaugguc

SEQ ID NO: 214280 - RNA, 32 nt, Human
gugugggugacacggugauggccacagucaag

SEQ ID NO: 214281 - RNA, 32 nt, Human
gugugggugagcugauggaggcuucaucuuag

SEQ ID NO: 214282 - RNA, 32 nt, Human
gugugggugagugcgucuucugaguggguucu

SEQ ID NO: 214283 - RNA, 32 nt, Human
gugugggugggaggggcccacaggaagcucag

SEQ ID NO: 214284 - RNA, 32 nt, Human
gugugggugugugagagagcggcugguucauu

SEQ ID NO: 214285 - RNA, 32 nt, Human
gugugggugugugugggcacaggugugagugu

SEQ ID NO: 214286 - RNA, 32 nt, Human
guguggguucuccuguucucucugugcucuug

SEQ ID NO: 214287 - RNA, 32 nt, Human
gugugguaagcauaggcuugaagaggugggua

SEQ ID NO: 214288 - RNA, 32 nt, Human
gugugguagcaaaaggagggagaggaguccuu

SEQ ID NO: 214289 - RNA, 32 nt, Human
gugugguagcuugaagcacaccacuguccauu

SEQ ID NO: 214290 - RNA, 32 nt, Human
gugugguaggugguauuaucucugauuuacac

SEQ ID NO: 214291 - RNA, 32 nt, Human
guguggucacucuuucuuuugugccauuuugg

SEQ ID NO: 214292 - RNA, 32 nt, Human
guguggucaggagggaccucaccggaaggcau

SEQ ID NO: 214293 - RNA, 32 nt, Human
gugugguccauggcugggaggcagcuggcccc

SEQ ID NO: 214294 - RNA, 32 nt, Human
gugugguccucagaccaguagcaucagcguca

SEQ ID NO: 214295 - RNA, 32 nt, Human
gugugguccucagaccagugccugccaaccag

SEQ ID NO: 214296 - RNA, 32 nt, Human
guguggucgcugcguuuccucugccugcgccg

SEQ ID NO: 214297 - RNA, 22 nt, Human
guguggucuacuuacucugggg

SEQ ID NO: 214298 - RNA, 32 nt, Human
guguggucucaaacuccugaccucaugauuug

SEQ ID NO: 214299 - RNA, 32 nt, Human
guguggucucugcaugucuccauucuucucug

SEQ ID NO: 214300 - RNA, 32 nt, Human
guguggucuuccaugauuuauuuguguuuugu

SEQ ID NO: 214301 - RNA, 32 nt, Human
guguggugaugcaucuaacaccuuuugcugcu

SEQ ID NO: 214302 - RNA, 32 nt, Human
guguggugcaggcgccuauaaucccagcuacu

SEQ ID NO: 214303 - RNA, 32 nt, Human
guguggugccuccccucugucucccuccugcu

SEQ ID NO: 214304 - RNA, 32 nt, Human
guguggugcucacgccuguaaucccagcacuu

SEQ ID NO: 214305 - RNA, 32 nt, Human
gugugguggaggacaagguggggacagacuug

SEQ ID NO: 214306 - RNA, 32 nt, Human
gugugguggaggcagaggagugaggcccacgg

SEQ ID NO: 214307 - RNA, 32 nt, Human
gugugguggcacaaucacagcucauugcaucc

SEQ ID NO: 214308 - RNA, 21 nt, Human
gugugguggcacaugccugug

SEQ ID NO: 214309 - RNA, 21 nt, Human
gugugguggcacaugcuugua

SEQ ID NO: 214310 - RNA, 21 nt, Human
gugugguggcacgcaccugua

SEQ ID NO: 214311 - RNA, 32 nt, Human
gugugguggccccuggcacugcagagacuggu

SEQ ID NO: 214312 - RNA, 32 nt, Human
gugugguggcggaaccuguaaucccagcuacu

SEQ ID NO: 214313 - RNA, 32 nt, Human
gugugguggcggcgccuguaaucccagcuacu

SEQ ID NO: 214314 - RNA, 32 nt, Human
gugugguggcggguccagcuacucgggaggcu

SEQ ID NO: 214315 - RNA, 32 nt, Human
gugugguggcuaacagucagaaacccaacaau

SEQ ID NO: 214316 - RNA, 21 nt, Human
gugugguggcucacaccugua

SEQ ID NO: 214317 - RNA, 21 nt, Human
gugugguggcucacaccugug

SEQ ID NO: 214318 - RNA, 32 nt, Human
gugugguggcucaggccuguaaccucagcacu

SEQ ID NO: 214319 - RNA, 21 nt, Human
gugugguggcucaugccugua

SEQ ID NO: 214320 - RNA, 32 nt, Human
gugugguggcucaugccuuaaucccagcacuu

SEQ ID NO: 214321 - RNA, 32 nt, Human
gugugguggcugccuucucucucugcagcugu

SEQ ID NO: 214322 - RNA, 21 nt, Human
gugugguggcuuacaccugua

SEQ ID NO: 214323 - RNA, 21 nt, Human
gugugguggcuuaugccugua

SEQ ID NO: 214324 - RNA, 32 nt, Human
gugugguggcuuuaaucccagcacuuugggaa

SEQ ID NO: 214325 - RNA, 32 nt, Human
gugugguggggaggggaggcagguguggguag

SEQ ID NO: 214326 - RNA, 32 nt, Human
gugugguggucugcauugccgggcccccuggc

SEQ ID NO: 214327 - RNA, 21 nt, Human
gugugguggugcacaccugua

SEQ ID NO: 214328 - RNA, 21 nt, Human
gugugguggugcaugccugua

SEQ ID NO: 214329 - RNA, 32 nt, Human
guguggugguuaacuccaagaggcagaacucg

SEQ ID NO: 214330 - RNA, 32 nt, Human
gugugguuaaucauuagcuacacugcuuccca

SEQ ID NO: 214331 - RNA, 32 nt, Human
gugugguucauaggagaugauuuuugagguuu

SEQ ID NO: 214332 - RNA, 31 nt, Human
gugugguuggucaaggagggaugugagggaa

SEQ ID NO: 214333 - RNA, 32 nt, Human
gugugguuguggugcuguaugugaacucaugu

SEQ ID NO: 214334 - RNA, 32 nt, Human
gugugguuucaggagaaaauuuaaacucuuca

SEQ ID NO: 214335 - RNA, 32 nt, Human
gugugguuucaucauagauuuguaaaacaaaa

SEQ ID NO: 214336 - RNA, 32 nt, Human
guguguaagaaaaacuaggacuguguggggua

SEQ ID NO: 214337 - RNA, 31 nt, Human
guguguaagcucaagaaccuguugagaggag

SEQ ID NO: 214338 - RNA, 32 nt, Human
guguguaauuggggaacagaagggucucuaga

SEQ ID NO: 214339 - RNA, 32 nt, Human
guguguacaaacugauaucuuugccuaccagc

SEQ ID NO: 214340 - RNA, 32 nt, Human
guguguacacacacagaaacauguaagguggu

SEQ ID NO: 214341 - RNA, 32 nt, Human
guguguacacguguauagguguacaugugcau

SEQ ID NO: 214342 - RNA, 32 nt, Human
guguguacauacacaaacauacgauagugugu

SEQ ID NO: 214343 - RNA, 32 nt, Human
guguguaccaugcugcuauugucaucuuccuu

SEQ ID NO: 214344 - RNA, 32 nt, Human
guguguacccgugagagguugugugaauguga

SEQ ID NO: 214345 - RNA, 32 nt, Human
guguguacccuuuagcacuguuuggggugggg

SEQ ID NO: 214346 - RNA, 32 nt, Human
guguguagacccuccucuguucaucaaucaaa

SEQ ID NO: 214347 - RNA, 32 nt, Human
guguguagccuugcgugucugugagcacgccc

SEQ ID NO: 214348 - RNA, 32 nt, Human
guguguagcggguggagguucuaagacaggcu

SEQ ID NO: 214349 - RNA, 32 nt, Human
guguguaggacaaggagccagggaauuggcac

SEQ ID NO: 214350 - RNA, 32 nt, Human
guguguaggcugggaauucuugcugaaggaau

SEQ ID NO: 214351 - RNA, 32 nt, Human
guguguaggucccacggccucugccuccccag

SEQ ID NO: 214352 - RNA, 32 nt, Human
guguguagugagugcuucauguguggaauauu

SEQ ID NO: 214353 - RNA, 24 nt, Human
guguguauacauaaauauauaaua

SEQ ID NO: 214354 - RNA, 21 nt, Human
guguguauacauacauacaca

SEQ ID NO: 214355 - RNA, 24 nt, Human
guguguauauacaguauauacaua

SEQ ID NO: 214356 - RNA, 21 nt, Human
guguguauauauaaauacaua

SEQ ID NO: 214357 - RNA, 21 nt, Human
guguguauauauaaauauaua

SEQ ID NO: 214358 - RNA, 24 nt, Human
guguguauauauaaauauauaaua

SEQ ID NO: 214359 - RNA, 21 nt, Human
guguguauauauauaaauaua

SEQ ID NO: 214360 - RNA, 21 nt, Human
guguguauauauauacacaua

SEQ ID NO: 214361 - RNA, 19 nt, Human
guguguauauauaugcaca

SEQ ID NO: 214362 - RNA, 21 nt, Human
guguguauauauauuuauaua

SEQ ID NO: 214363 - RNA, 22 nt, Human
guguguauauauguaauauaua

SEQ ID NO: 214364 - RNA, 20 nt, Human
guguguauauauguagcaua

SEQ ID NO: 214365 - RNA, 21 nt, Human
guguguauauauguauacaua

SEQ ID NO: 214366 - RNA, 21 nt, Human
guguguauauauguauauaua

SEQ ID NO: 214367 - RNA, 21 nt, Human
guguguauauauguguauaua

SEQ ID NO: 214368 - RNA, 32 nt, Human
guguguauauuucauugcgauuuccuguuaag

SEQ ID NO: 214369 - RNA, 32 nt, Human
guguguaucuaguuccagcuacuugagaggcu

SEQ ID NO: 214370 - RNA, 32 nt, Human
guguguaucugugaguauauuuacacacagaa

SEQ ID NO: 214371 - RNA, 32 nt, Human
guguguaugcgacaugcccugccugaacaggu

SEQ ID NO: 214372 - RNA, 32 nt, Human
guguguaugugugcauuuuccacacuuuuuaa

SEQ ID NO: 214373 - RNA, 32 nt, Human
guguguaugugugugugaucugugucaugguu

SEQ ID NO: 214374 - RNA, 32 nt, Human
gugugucaaccugugagcaugcaccuguguau

SEQ ID NO: 214375 - RNA, 20 nt, Human
gugugucaagcccucacuca

SEQ ID NO: 214376 - RNA, 32 nt, Human
gugugucacaugcugccugagucacauguaca

SEQ ID NO: 214377 - RNA, 32 nt, Human
gugugucaccagccuccugaucugccaggguc

SEQ ID NO: 214378 - RNA, 32 nt, Human
gugugucagcuuugagaugguguguccuggau

SEQ ID NO: 214379 - RNA, 32 nt, Human
guguguccaccacuccacugugcucagggaag

SEQ ID NO: 214380 - RNA, 32 nt, Human
guguguccaucuguuauauguaaaggacaagg

SEQ ID NO: 214381 - RNA, 32 nt, Human
guguguccauggucguggucugugcuuuugua

SEQ ID NO: 214382 - RNA, 32 nt, Human
gugugucccaggaaauuccuccccuuauucuu

SEQ ID NO: 214383 - RNA, 32 nt, Human
gugugucccugggaagcacaggaagcugcuac

SEQ ID NO: 214384 - RNA, 32 nt, Human
gugugucccuuucuccuuccugaccuuccuca

SEQ ID NO: 214385 - RNA, 32 nt, Human
guguguccuaaauccaaugacauauccuuaua

SEQ ID NO: 214386 - RNA, 32 nt, Human
guguguccugugagagggcagggccagccagg

SEQ ID NO: 214387 - RNA, 32 nt, Human
gugugucgggggcagagggaaggagggaagga

SEQ ID NO: 214388 - RNA, 32 nt, Human
gugugucuauacauugcuuuccgcauuucaag

SEQ ID NO: 214389 - RNA, 32 nt, Human
gugugucucucccucaucaucuuccuaaggaa

SEQ ID NO: 214390 - RNA, 32 nt, Human
gugugucugcagcugugcucacaccuggagga

SEQ ID NO: 214391 - RNA, 32 nt, Human
gugugucugcuccuccucucucuccucaucac

SEQ ID NO: 214392 - RNA, 32 nt, Human
gugugucugcugucucgugcuguuuauucuug

SEQ ID NO: 214393 - RNA, 32 nt, Human
gugugucugggagcuugaccaccuggcuguca

SEQ ID NO: 214394 - RNA, 32 nt, Human
gugugucugguguugaggggacgaagggaccc

SEQ ID NO: 214395 - RNA, 32 nt, Human
gugugucuguaaucccagcuacucggccuccc

SEQ ID NO: 214396 - RNA, 32 nt, Human
gugugucuguaaucccagcuacucgggaggcu

SEQ ID NO: 214397 - RNA, 32 nt, Human
gugugucugugagagcuagcugccuuaccccu

SEQ ID NO: 214398 - RNA, 32 nt, Human
gugugucuucuaccugcauuuuggcaucagag

SEQ ID NO: 214399 - RNA, 32 nt, Human
gugugucuuucaugggacuguccccuuuagag

SEQ ID NO: 214400 - RNA, 32 nt, Human
gugugucuuugcacacacagugcagugggaac

SEQ ID NO: 214401 - RNA, 32 nt, Human
gugugugaaaacagacauuccagugccaccca

SEQ ID NO: 214402 - RNA, 32 nt, Human
gugugugaaccaagaauaaucuagucacguga

SEQ ID NO: 214403 - RNA, 32 nt, Human
gugugugacagagagagagcgagagagccugu

SEQ ID NO: 214404 - RNA, 31 nt, Human
gugugugacugccucccuuggccucagcucc

SEQ ID NO: 214405 - RNA, 32 nt, Human
gugugugagagcagugcuucugauccugcugu

SEQ ID NO: 214406 - RNA, 32 nt, Human
gugugugagagggagagacgacgugaggcgag

SEQ ID NO: 214407 - RNA, 32 nt, Human
gugugugagccaagcaauuucauuuaucaaag

SEQ ID NO: 214408 - RNA, 20 nt, Human
gugugugaggaggaccugau

SEQ ID NO: 214409 - RNA, 32 nt, Human
gugugugaggucuuggugggcucaggccagcu

SEQ ID NO: 214410 - RNA, 32 nt, Human
gugugugagugggaggagagggcagagguccc

SEQ ID NO: 214411 - RNA, 32 nt, Human
gugugugauguuccccuccauguccauguguu

SEQ ID NO: 214412 - RNA, 32 nt, Human
gugugugauugaguugaagaucugcagugaga

SEQ ID NO: 214413 - RNA, 32 nt, Human
gugugugauuucccucccucugagaaauauac

SEQ ID NO: 214414 - RNA, 32 nt, Human
gugugugcaaagcaggcucuagcaacaugauc

SEQ ID NO: 214415 - RNA, 32 nt, Human
gugugugcacacacacagaaaccacgagguag

SEQ ID NO: 214416 - RNA, 32 nt, Human
gugugugcacugacugugagucgaauaaacaa

SEQ ID NO: 214417 - RNA, 32 nt, Human
gugugugcaggugucggcacaggcuagcuccu

SEQ ID NO: 214418 - RNA, 32 nt, Human
gugugugcaugcuugggcggagucuacccgga

SEQ ID NO: 214419 - RNA, 32 nt, Human
gugugugcaugugugcgugugugcacacucac

SEQ ID NO: 214420 - RNA, 32 nt, Human
gugugugcccauggaagagacagugacagaaa

SEQ ID NO: 214421 - RNA, 32 nt, Human
gugugugccccaggcacguguaauaaagaacc

SEQ ID NO: 214422 - RNA, 32 nt, Human
gugugugccuauaaucccagcuacucaggagg

SEQ ID NO: 214423 - RNA, 32 nt, Human
gugugugccuggcagaacacugcacuccaauu

SEQ ID NO: 214424 - RNA, 32 nt, Human
gugugugccuguaaucccagcuacucgggagg

SEQ ID NO: 214425 - RNA, 32 nt, Human
gugugugccuguaaucccggcuacuugggagg

SEQ ID NO: 214426 - RNA, 32 nt, Human
gugugugccuguaauccuagcuacucgggagg

SEQ ID NO: 214427 - RNA, 32 nt, Human
gugugugccuguaauuccagcuacucgggagg

SEQ ID NO: 214428 - RNA, 32 nt, Human
gugugugccuguagucccagcuacuauggagg

SEQ ID NO: 214429 - RNA, 32 nt, Human
gugugugccuguagucccagcuacucgggagg

SEQ ID NO: 214430 - RNA, 32 nt, Human
gugugugccuguagucccagcuacuugugagg

SEQ ID NO: 214431 - RNA, 32 nt, Human
gugugugccuguagucucagcuacuugggagg

SEQ ID NO: 214432 - RNA, 32 nt, Human
gugugugccuguauuccuagcuacuuugaugg

SEQ ID NO: 214433 - RNA, 32 nt, Human
gugugugcggaggcacguguucccacuucucc

SEQ ID NO: 214434 - RNA, 32 nt, Human
gugugugcggccgcuccuccaggccuggccgu

SEQ ID NO: 214435 - RNA, 32 nt, Human
gugugugcggcgguucaugccuguaaucccag

SEQ ID NO: 214436 - RNA, 32 nt, Human
gugugugcgucugcgagcgcacacacaugcac

SEQ ID NO: 214437 - RNA, 32 nt, Human
gugugugcucugggcccugccucggccuccug

SEQ ID NO: 214438 - RNA, 32 nt, Human
gugugugcucugucugucugucuuugucuguc

SEQ ID NO: 214439 - RNA, 32 nt, Human
gugugugcugggcuccaaggaggaggagcuug

SEQ ID NO: 214440 - RNA, 32 nt, Human
gugugugcuggugcccguguacacgcugcucu

SEQ ID NO: 214441 - RNA, 30 nt, Human
guguguggaagccacgggcucaagcagcca

SEQ ID NO: 214442 - RNA, 32 nt, Human
guguguggagacuggagagaucaagagagagu

SEQ ID NO: 214443 - RNA, 32 nt, Human
guguguggagacuguggagcugggcagcuaug

SEQ ID NO: 214444 - RNA, 32 nt, Human
guguguggagcaucacaaacacaucagaagcc

SEQ ID NO: 214445 - RNA, 32 nt, Human
guguguggagggagggagggaggggagcaugg

SEQ ID NO: 214446 - RNA, 32 nt, Human
guguguggccagaccaguaccuccaaguguuc

SEQ ID NO: 214447 - RNA, 32 nt, Human
gugugugggccuagaggagagagcagagccca

SEQ ID NO: 214448 - RNA, 32 nt, Human
guguguggggagaaauagaauggugcucuuau

SEQ ID NO: 214449 - RNA, 32 nt, Human
guguguggggcacagaggacgugcaccucccu

SEQ ID NO: 214450 - RNA, 32 nt, Human
guguguggggcaggcaggauguggugcaggca

SEQ ID NO: 214451 - RNA, 32 nt, Human
guguguggggcucaugaaugcccacagcaugg

SEQ ID NO: 214452 - RNA, 32 nt, Human
guguguggucucagagccucugcuuccuuagg

SEQ ID NO: 214453 - RNA, 32 nt, Human
guguguggucucagaggcucugcuuccuuagg

SEQ ID NO: 214454 - RNA, 32 nt, Human
guguguggugaacacguucaguucaucagggc

SEQ ID NO: 214455 - RNA, 19 nt, Human
guguguguaugccuggaga

SEQ ID NO: 214456 - RNA, 32 nt, Human
guguguguauugagauuuacccagacugguuu

SEQ ID NO: 214457 - RNA, 32 nt, Human
guguguguauuuugauaaugauugaucuuaaa

SEQ ID NO: 214458 - RNA, 32 nt, Human
gugugugucccggugugaaaucgaggagggga

SEQ ID NO: 214459 - RNA, 32 nt, Human
gugugugucuguaaucccagcuacucgggagg

SEQ ID NO: 214460 - RNA, 32 nt, Human
gugugugucugucagugucucugugucagugu

SEQ ID NO: 214461 - RNA, 32 nt, Human
gugugugucuguguauacacacaaacacauau

SEQ ID NO: 214462 - RNA, 32 nt, Human
gugugugugaaagagagacagaagggaugguu

SEQ ID NO: 214463 - RNA, 32 nt, Human
gugugugugagugagagagcgagugagugagu

SEQ ID NO: 214464 - RNA, 32 nt, Human
gugugugugauaccagacaaauucccuuuuau

SEQ ID NO: 214465 - RNA, 32 nt, Human
gugugugugauggagggaaggggacagauuug

SEQ ID NO: 214466 - RNA, 32 nt, Human
gugugugugcgcacacacacaagaagccuuag

SEQ ID NO: 214467 - RNA, 32 nt, Human
guguguguggagggcagaggagaggggacaag

SEQ ID NO: 214468 - RNA, 20 nt, Human
guguguguggcagcaggcag

SEQ ID NO: 214469 - RNA, 32 nt, Human
guguguguggcgggagagugaaaccuuggggg

SEQ ID NO: 214470 - RNA, 32 nt, Human
guguguguggguggucacaggagagugugagu

SEQ ID NO: 214471 - RNA, 32 nt, Human
guguguguggugucugugugugugaugucagu

SEQ ID NO: 214472 - RNA, 32 nt, Human
guguguguggugugugcaucuggugucugugg

SEQ ID NO: 214473 - RNA, 32 nt, Human
guguguguucucucaaucucuguggauuuucu

SEQ ID NO: 214474 - RNA, 32 nt, Human
guguguguugcgggaggggaggacuggggcug

SEQ ID NO: 214475 - RNA, 32 nt, Human
guguguguuguuuuauaaugacugcuguacag

SEQ ID NO: 214476 - RNA, 32 nt, Human
guguguguuuuaugacuuaaauaucuuuacgu

SEQ ID NO: 214477 - RNA, 32 nt, Human
guguguguuuuguuuugauuugggggauauuu

SEQ ID NO: 214478 - RNA, 32 nt, Human
guguguguuuuuccucugcuguguucugugug

SEQ ID NO: 214479 - RNA, 32 nt, Human
guguguuacuauauuaaaauacacacacaacu

SEQ ID NO: 214480 - RNA, 32 nt, Human
guguguuagaagcaaguuagaggaagaagguc

SEQ ID NO: 214481 - RNA, 32 nt, Human
guguguuagagcaguugcaugcucuccugcug

SEQ ID NO: 214482 - RNA, 24 nt, Human
guguguuauacugauaaaauuuca

SEQ ID NO: 214483 - RNA, 32 nt, Human
guguguuaucuccacccacccacacacauaca

SEQ ID NO: 214484 - RNA, 32 nt, Human
guguguucaagaccagccuggucaacauagug

SEQ ID NO: 214485 - RNA, 32 nt, Human
guguguucagagcuugucuccaccucacggcu

SEQ ID NO: 214486 - RNA, 32 nt, Human
guguguucagccagacugggcaggugcagucu

SEQ ID NO: 214487 - RNA, 32 nt, Human
guguguucaguggcacccccagccuggguccc

SEQ ID NO: 214488 - RNA, 32 nt, Human
guguguucccuccuccgccauccucuguuccc

SEQ ID NO: 214489 - RNA, 32 nt, Human
guguguuccuuucuugauacuuagucauggga

SEQ ID NO: 214490 - RNA, 32 nt, Human
guguguucggaggggugaaagcauuaagaagc

SEQ ID NO: 214491 - RNA, 32 nt, Human
guguguucugugaaugcuagcucucuugaauu

SEQ ID NO: 214492 - RNA, 32 nt, Human
guguguucugugggagggugucuguggggaug

SEQ ID NO: 214493 - RNA, 32 nt, Human
guguguucugugugugcguuugcaaguauaua

SEQ ID NO: 214494 - RNA, 32 nt, Human
guguguucuucauaagcuucagugcaggauuu

SEQ ID NO: 214495 - RNA, 32 nt, Human
guguguugaauccauaguaugucccauucaga

SEQ ID NO: 214496 - RNA, 32 nt, Human
guguguugagggggauacucuguuuaugaaaa

SEQ ID NO: 214497 - RNA, 32 nt, Human
guguguugauuuucugacaugcuuguguaauu

SEQ ID NO: 214498 - RNA, 19 nt, Human
guguguugccaggggcaga

SEQ ID NO: 214499 - RNA, 32 nt, Human
guguguugcgggaggggaggacuggggcugga

SEQ ID NO: 214500 - RNA, 32 nt, Human
guguguugggaaaaccaaaaaccacaacuaca

SEQ ID NO: 214501 - RNA, 32 nt, Human
guguguuguguaacacaaauguuuuuaaaugg

SEQ ID NO: 214502 - RNA, 32 nt, Human
guguguuguguauggguuuauguguguguggu

SEQ ID NO: 214503 - RNA, 32 nt, Human
guguguuuagauuggaauaaaugugaugcauu

SEQ ID NO: 214504 - RNA, 24 nt, Human
guguguuuauaugccagaaauucu

SEQ ID NO: 214505 - RNA, 32 nt, Human
guguguuuauucuucucuacuugauuuccaaa

SEQ ID NO: 214506 - RNA, 32 nt, Human
guguguuugcuaggaauaauacaugaugacuu

SEQ ID NO: 214507 - RNA, 32 nt, Human
guguguuuucauuuuugucugcuuuaguucuc

SEQ ID NO: 214508 - RNA, 32 nt, Human
guguguuuucccuacgcaccucccauagcuau

SEQ ID NO: 214509 - RNA, 32 nt, Human
guguguuuuuccucugcuguguucuguguguc

SEQ ID NO: 214510 - RNA, 32 nt, Human
guguuaaaaaccugcauugccaacauugcagc

SEQ ID NO: 214511 - RNA, 32 nt, Human
guguuaaagcaggcagcgccucagcuugguua

SEQ ID NO: 214512 - RNA, 32 nt, Human
guguuaaauguugucuacagugcaaaauccau

SEQ ID NO: 214513 - RNA, 32 nt, Human
guguuaacacucccucccgaggagacuucccu

SEQ ID NO: 214514 - RNA, 32 nt, Human
guguuaacucaggaugccaaguggcccucaga

SEQ ID NO: 214515 - RNA, 32 nt, Human
guguuaagcccaaaguguguguuucugguugg

SEQ ID NO: 214516 - RNA, 32 nt, Human
guguuaagcuagaugaugacagugaugaugau

SEQ ID NO: 214517 - RNA, 32 nt, Human
guguuaagcuuuguggaccagguguuuuucuu

SEQ ID NO: 214518 - RNA, 32 nt, Human
guguuaagugcuccaaggagguuacuacugcc

SEQ ID NO: 214519 - RNA, 32 nt, Human
guguuaaucuacagagaacugcagcccuuauu

SEQ ID NO: 214520 - RNA, 32 nt, Human
guguuaaugugaauacuacaugcugaauuuca

SEQ ID NO: 214521 - RNA, 32 nt, Human
guguuacaaaggggugaaagagagggaauagu

SEQ ID NO: 214522 - RNA, 32 nt, Human
guguuacaaagucaguguuaauucuaaagaug

SEQ ID NO: 214523 - RNA, 32 nt, Human
guguuacaggagcugaaggauaaaguagcugg

SEQ ID NO: 214524 - RNA, 32 nt, Human
guguuacaggaggcuugugagcacagguagcc

SEQ ID NO: 214525 - RNA, 32 nt, Human
guguuacaggcagagucauuggacaauaaauu

SEQ ID NO: 214526 - RNA, 32 nt, Human
guguuacaguguccuacaguauucacuacaau

SEQ ID NO: 214527 - RNA, 32 nt, Human
guguuaccaucccagcucccgggagcccuuaa

SEQ ID NO: 214528 - RNA, 32 nt, Human
guguuacccaggcuggucuucaacucuuggcc

SEQ ID NO: 214529 - RNA, 32 nt, Human
guguuaccuccccuccuaacccuuccccuucu

SEQ ID NO: 214530 - RNA, 32 nt, Human
guguuacuaaguuuuuauggcuuuugugcauu

SEQ ID NO: 214531 - RNA, 32 nt, Human
guguuacuaguccugaaugcuuacagagaacu

SEQ ID NO: 214532 - RNA, 32 nt, Human
guguuacucaaauuauguggcuuucauuuugu

SEQ ID NO: 214533 - RNA, 24 nt, Human
guguuacuuaagcaaaaucaacua

SEQ ID NO: 214534 - RNA, 32 nt, Human
guguuacuuucuaauaacccuaggaggcguag

SEQ ID NO: 214535 - RNA, 32 nt, Human
guguuagaaaacaaacccuuagaacuuuccuu

SEQ ID NO: 214536 - RNA, 32 nt, Human
guguuagaaaugcaguugccauaggaguaacc

SEQ ID NO: 214537 - RNA, 32 nt, Human
guguuagaagcugauucuaggcugaggaaagc

SEQ ID NO: 214538 - RNA, 32 nt, Human
guguuagaaguggaugugcaagaccagccacu

SEQ ID NO: 214539 - RNA, 21 nt, Human
guguuagaauaggacaccccg

SEQ ID NO: 214540 - RNA, 32 nt, Human
guguuagauuugagucucucauguggaugcau

SEQ ID NO: 214541 - RNA, 32 nt, Human
guguuagccacuacaccuggccuggauugugu

SEQ ID NO: 214542 - RNA, 32 nt, Human
guguuagcgaaaccugucuaccugcuauagca

SEQ ID NO: 214543 - RNA, 32 nt, Human
guguuagcucuaacaucucccacaagcuaaag

SEQ ID NO: 214544 - RNA, 32 nt, Human
guguuagcucuuacacauguauaaacaacacu

SEQ ID NO: 214545 - RNA, 32 nt, Human
guguuagcuugccucugggcugggugagcuug

SEQ ID NO: 214546 - RNA, 32 nt, Human
guguuaggacuugagacauagcaaugggugag

SEQ ID NO: 214547 - RNA, 32 nt, Human
guguuaggaugcggcuuucucugccucugggc

SEQ ID NO: 214548 - RNA, 32 nt, Human
guguuaggcauggcacugagcagcuucuuuua

SEQ ID NO: 214549 - RNA, 32 nt, Human
guguuaggccgugaggcaucuuccugccagcc

SEQ ID NO: 214550 - RNA, 32 nt, Human
guguuaguauuuugaauaaacauguuauuacu

SEQ ID NO: 214551 - RNA, 32 nt, Human
guguuagucucaggcccuccuggaccacguug

SEQ ID NO: 214552 - RNA, 32 nt, Human
guguuaguuccauggguguggcuggucauggu

SEQ ID NO: 214553 - RNA, 32 nt, Human
guguuauacaaacuguaauggugugcuucaaa

SEQ ID NO: 214554 - RNA, 22 nt, Human
guguuauaggugaauugccaua

SEQ ID NO: 214555 - RNA, 32 nt, Human
guguuaucaaagcaaaaagaaaaugcugcaua

SEQ ID NO: 214556 - RNA, 32 nt, Human
guguuaucuguaaaucccagacauuguaugag

SEQ ID NO: 214557 - RNA, 32 nt, Human
guguuaucuguaaauuccagacauuguaugag

SEQ ID NO: 214558 - RNA, 32 nt, Human
guguuaugaugcaguuccacaacacacagcca

SEQ ID NO: 214559 - RNA, 20 nt, Human
guguuaugccacaaacagaa

SEQ ID NO: 214560 - RNA, 32 nt, Human
guguuauggagaugcuuccucucuccaaccuc

SEQ ID NO: 214561 - RNA, 32 nt, Human
guguuauguuuucauguaauagugucuuggag

SEQ ID NO: 214562 - RNA, 32 nt, Human
guguuauuaguggggaacagaaguauaugugc

SEQ ID NO: 214563 - RNA, 32 nt, Human
guguuauuccucaccccuucacucaacuccau

SEQ ID NO: 214564 - RNA, 32 nt, Human
guguuauuugggcuacuuggaaaaagaacaaa

SEQ ID NO: 214565 - RNA, 27 nt, Human
guguucaaaaccuguaggcacucucug

SEQ ID NO: 214566 - RNA, 23 nt, Human
guguucaaauucugauuauuaca

SEQ ID NO: 214567 - RNA, 32 nt, Human
guguucaagacuguuauggccaauauuguguu

SEQ ID NO: 214568 - RNA, 23 nt, Human
guguucaagcagcucccaugaca

SEQ ID NO: 214569 - RNA, 32 nt, Human
guguucaagcauggcuuccuggcggcccaggc

SEQ ID NO: 214570 - RNA, 21 nt, Human
guguucaagcuccugugggca

SEQ ID NO: 214571 - RNA, 32 nt, Human
guguucaaggcagacuuccugcccccugcacc

SEQ ID NO: 214572 - RNA, 32 nt, Human
guguucaauuggguugagauaaugauauugga

SEQ ID NO: 214573 - RNA, 32 nt, Human
guguucacaccacugcacuccagucugggcaa

SEQ ID NO: 214574 - RNA, 32 nt, Human
guguucaccaacccaaaagcacucugagccuu

SEQ ID NO: 214575 - RNA, 32 nt, Human
guguucaccaucacugaggcacugugaugugu

SEQ ID NO: 214576 - RNA, 22 nt, Human
guguucaccauggaacauuuug

SEQ ID NO: 214577 - RNA, 32 nt, Human
guguucacccaucccacccaaggcuuggcaca

SEQ ID NO: 214578 - RNA, 32 nt, Human
guguucacccuuauagagacauagucaaguuc

SEQ ID NO: 214579 - RNA, 24 nt, Human
guguucaccuguuucaucugagga

SEQ ID NO: 214580 - RNA, 32 nt, Human
guguucacuaauauuuuaacaguuuuucuuau

SEQ ID NO: 214581 - RNA, 32 nt, Human
guguucagacagccacaugaggggacagugca

SEQ ID NO: 214582 - RNA, 32 nt, Human
guguucagccugagcuaggagaguaucuagag

SEQ ID NO: 214583 - RNA, 32 nt, Human
guguucagccuucuggcacugcaggccuaggu

SEQ ID NO: 214584 - RNA, 32 nt, Human
guguucaggacacaucuauugcagagacucau

SEQ ID NO: 214585 - RNA, 32 nt, Human
guguucagggaaaguaccugaccaacagaacu

SEQ ID NO: 214586 - RNA, 32 nt, Human
guguucaggggucuccuucagggaaggagacc

SEQ ID NO: 214587 - RNA, 32 nt, Human
guguucaguaguuccaggacucagggacucag

SEQ ID NO: 214588 - RNA, 32 nt, Human
guguucaguucugggagacaagaguugggcca

SEQ ID NO: 214589 - RNA, 30 nt, Human
guguucauaaauaaaguuuguugaaacaca

SEQ ID NO: 214590 - RNA, 23 nt, Human
guguucaucaagacaccccucug

SEQ ID NO: 214591 - RNA, 24 nt, Human
guguucaucuuugggugcucucug

SEQ ID NO: 214592 - RNA, 32 nt, Human
guguucaugaaccugggcuggagcuuggggac

SEQ ID NO: 214593 - RNA, 32 nt, Human
guguucaugccacugcacuuccagccugggug

SEQ ID NO: 214594 - RNA, 32 nt, Human
guguuccaagcacaauauuacaacuucuuuug

SEQ ID NO: 214595 - RNA, 32 nt, Human
guguuccaaguugguugcugugacaaccucca

SEQ ID NO: 214596 - RNA, 32 nt, Human
guguuccacauccuuucacacgcuacacagaa

SEQ ID NO: 214597 - RNA, 32 nt, Human
guguuccagcaucuaaccuuuuacuuuugcau

SEQ ID NO: 214598 - RNA, 32 nt, Human
guguuccaggguaaugccagguggguuuugag

SEQ ID NO: 214599 - RNA, 32 nt, Human
guguucccaccaggaagucacgcgcagagagg

SEQ ID NO: 214600 - RNA, 32 nt, Human
guguucccacccaccugcuccagcacaggaac

SEQ ID NO: 214601 - RNA, 32 nt, Human
guguucccagaggcaggcggagguugaagaaa

SEQ ID NO: 214602 - RNA, 32 nt, Human
guguucccaggagcacugacugcaguugagag

SEQ ID NO: 214603 - RNA, 32 nt, Human
guguuccccaagaauucagagaacagcacugg

SEQ ID NO: 214604 - RNA, 32 nt, Human
guguuccccaggcugaagugcaguggcaugau

SEQ ID NO: 214605 - RNA, 32 nt, Human
guguucccuaacauucaaacugugcauuggcc

SEQ ID NO: 214606 - RNA, 32 nt, Human
guguucccucaucaucccccuaccugaacccc

SEQ ID NO: 214607 - RNA, 32 nt, Human
guguucccuggcccacucuccucucuccuucu

SEQ ID NO: 214608 - RNA, 32 nt, Human
guguuccgagccggagccugaccuguggaccg

SEQ ID NO: 214609 - RNA, 32 nt, Human
guguuccgccugggccggccccggcuggcugc

SEQ ID NO: 214610 - RNA, 32 nt, Human
guguuccggaucucccccuccauggcucccuu

SEQ ID NO: 214611 - RNA, 32 nt, Human
guguuccggcagggcaggaugggaaggcgugc

SEQ ID NO: 214612 - RNA, 32 nt, Human
guguuccggggcuucugggcagcugggccugc

SEQ ID NO: 214613 - RNA, 32 nt, Human
guguuccuaagggaggagacagaaggaggcug

SEQ ID NO: 214614 - RNA, 32 nt, Human
guguuccucagagaucccccaaacuggggucu

SEQ ID NO: 214615 - RNA, 32 nt, Human
guguuccucuauuugccugccaccucucuugu

SEQ ID NO: 214616 - RNA, 32 nt, Human
guguuccucucccccaucccuuaucucaacau

SEQ ID NO: 214617 - RNA, 32 nt, Human
guguuccugcagcuagagacaugaccuaacac

SEQ ID NO: 214618 - RNA, 32 nt, Human
guguuccugcagggacccuccgucuccuguaa

SEQ ID NO: 214619 - RNA, 32 nt, Human
guguuccuggagccugugccuaugucacugca

SEQ ID NO: 214620 - RNA, 31 nt, Human
guguuccuggcagcugggccugucuccuggg

SEQ ID NO: 214621 - RNA, 32 nt, Human
guguuccuguagucccagcuccccaggaggcu

SEQ ID NO: 214622 - RNA, 32 nt, Human
guguuccugugcaagggggagcuuugcuccag

SEQ ID NO: 214623 - RNA, 32 nt, Human
guguuccuucuggccagucccauacuuucugc

SEQ ID NO: 214624 - RNA, 32 nt, Human
guguuccuuucugcuuuauuucccugcugugu

SEQ ID NO: 214625 - RNA, 32 nt, Human
guguucgagguggagguuaggcgggugaaguu

SEQ ID NO: 214626 - RNA, 32 nt, Human
guguucgauucugcccuauuuauguuucuacu

SEQ ID NO: 214627 - RNA, 32 nt, Human
guguucgcaccacugcacuccagccuggguga

SEQ ID NO: 214628 - RNA, 32 nt, Human
guguucgcaucaacuuggaagugcaguaauug

SEQ ID NO: 214629 - RNA, 32 nt, Human
guguucuaagaacggaagcaucugggcuggau

SEQ ID NO: 214630 - RNA, 32 nt, Human
guguucuacauguauauuucucauuuuuaauu

SEQ ID NO: 214631 - RNA, 32 nt, Human
guguucuauuuauuuauugucuuccuguaaga

SEQ ID NO: 214632 - RNA, 22 nt, Human
guguucucaaagcaacuuucug

SEQ ID NO: 214633 - RNA, 32 nt, Human
guguucucagccaguacaccagagccaggcca

SEQ ID NO: 214634 - RNA, 32 nt, Human
guguucucagggacugggacacgggccaaaua

SEQ ID NO: 214635 - RNA, 32 nt, Human
guguucucauuuccuucacuguuuauuuuugu

SEQ ID NO: 214636 - RNA, 32 nt, Human
guguucuccagaaguacagggugcauuauuug

SEQ ID NO: 214637 - RNA, 32 nt, Human
guguucuccagccugggcaacagagugagucc

SEQ ID NO: 214638 - RNA, 32 nt, Human
guguucuccaucucuagugaagacagaaccag

SEQ ID NO: 214639 - RNA, 32 nt, Human
guguucucuuccuauuccuuuuugauaguuug

SEQ ID NO: 214640 - RNA, 32 nt, Human
guguucugaccacagcucuggugccguuucuc

SEQ ID NO: 214641 - RNA, 18 nt, Human
guguucugcaccugggga

SEQ ID NO: 214642 - RNA, 32 nt, Human
guguucugcuguguuucaggaucagggggacc

SEQ ID NO: 214643 - RNA, 32 nt, Human
guguucuggcagcuucucaggugcccgcacag

SEQ ID NO: 214644 - RNA, 32 nt, Human
guguucuggggagggaaggaaaagguguugga

SEQ ID NO: 214645 - RNA, 32 nt, Human
guguucugguggagugggaagggaggcuuggg

SEQ ID NO: 214646 - RNA, 32 nt, Human
guguucuguagucugugaggggagagcagaga

SEQ ID NO: 214647 - RNA, 32 nt, Human
guguucuguuguaugaauaauaccucaaguga

SEQ ID NO: 214648 - RNA, 32 nt, Human
guguucuuccauccuucaacugagcucaaagu

SEQ ID NO: 214649 - RNA, 32 nt, Human
guguucuuguaaccuuuauuucaugaaggacu

SEQ ID NO: 214650 - RNA, 32 nt, Human
guguucuuguccuuccucucugcuggcuggaa

SEQ ID NO: 214651 - RNA, 32 nt, Human
guguucuuucccaagagaaucaaaggaaagaa

SEQ ID NO: 214652 - RNA, 32 nt, Human
guguucuuugagccuagcaguuugguuuagac

SEQ ID NO: 214653 - RNA, 32 nt, Human
guguucuuuugaaauuauauaaaauagcugaa

SEQ ID NO: 214654 - RNA, 32 nt, Human
guguugaagcacuguugguuguuugguuagug

SEQ ID NO: 214655 - RNA, 21 nt, Human
guguugaagggaaucaaacua

SEQ ID NO: 214656 - RNA, 32 nt, Human
guguugaauuacgccagaagaccugaaaugcc

SEQ ID NO: 214657 - RNA, 32 nt, Human
guguugacagugugugcacacugcagacagca

SEQ ID NO: 214658 - RNA, 32 nt, Human
guguugacuggacugcuuggggugggggacga

SEQ ID NO: 214659 - RNA, 32 nt, Human
guguugagagaacguccuucuguccaucgugg

SEQ ID NO: 214660 - RNA, 32 nt, Human
guguugagauuuacaggugugagccaccacac

SEQ ID NO: 214661 - RNA, 32 nt, Human
guguugaggaaggcauuccaaccuuauuaaug

SEQ ID NO: 214662 - RNA, 32 nt, Human
guguugagugaggggugacccaggaagaacgu

SEQ ID NO: 214663 - RNA, 32 nt, Human
guguugaugccagaauguucagcuucaguaaa

SEQ ID NO: 214664 - RNA, 32 nt, Human
guguugauggggcagugaccagacaguccuga

SEQ ID NO: 214665 - RNA, 32 nt, Human
guguugauucauuuuaaugcuguuuaugauuu

SEQ ID NO: 214666 - RNA, 32 nt, Human
guguugcaagcuggaaacccagggaagccuga

SEQ ID NO: 214667 - RNA, 32 nt, Human
guguugcaauccaugagugaugucugccaugc

SEQ ID NO: 214668 - RNA, 32 nt, Human
guguugcaggcacuccagccuggcgacagagc

SEQ ID NO: 214669 - RNA, 32 nt, Human
guguugcaggguggagaaguggggagaagugu

SEQ ID NO: 214670 - RNA, 32 nt, Human
guguugcaguccggcucacugcaguuuugacc

SEQ ID NO: 214671 - RNA, 32 nt, Human
guguugcauuucuccccacucccugcccugcu

SEQ ID NO: 214672 - RNA, 32 nt, Human
guguugccaaggcuggagugcaggccgcgauc

SEQ ID NO: 214673 - RNA, 28 nt, Human
guguugccaagugcugcguccuccuggu

SEQ ID NO: 214674 - RNA, 32 nt, Human
guguugccacaaacacugcagagaccagguga

SEQ ID NO: 214675 - RNA, 32 nt, Human
guguugccaucuuugaaagcaucuucuacaag

SEQ ID NO: 214676 - RNA, 32 nt, Human
guguugcccagccuggucuugaauugggcuca

SEQ ID NO: 214677 - RNA, 32 nt, Human
guguugcccaggcuagagugcagcagugacau

SEQ ID NO: 214678 - RNA, 32 nt, Human
guguugcccaggcuagagugcaguggugccac

SEQ ID NO: 214679 - RNA, 32 nt, Human
guguugcccaggcuggagugcaaauggcuuga

SEQ ID NO: 214680 - RNA, 32 nt, Human
guguugcccaggcuggagugcaauggcgcaau

SEQ ID NO: 214681 - RNA, 32 nt, Human
guguugcccaggcuggagugcaguagcuauuc

SEQ ID NO: 214682 - RNA, 32 nt, Human
guguugcccaggcuggagugcaguagugcagu

SEQ ID NO: 214683 - RNA, 27 nt, Human
guguugcccaggcuggagugcaguggc

SEQ ID NO: 214684 - RNA, 32 nt, Human
guguugcccaggcuggagugcaguggccuggu

SEQ ID NO: 214685 - RNA, 32 nt, Human
guguugcccaggcuggagugcaguggugugau

SEQ ID NO: 214686 - RNA, 32 nt, Human
guguugcccaggcuggagugcgguggcuauuc

SEQ ID NO: 214687 - RNA, 32 nt, Human
guguugcccaggcugguauucaaacuccuggc

SEQ ID NO: 214688 - RNA, 21 nt, Human
guguugcccaggcuggucuca

SEQ ID NO: 214689 - RNA, 32 nt, Human
guguugccccggcuggagugcaguggcgcuau

SEQ ID NO: 214690 - RNA, 32 nt, Human
guguugcccucugucaaguuacugaauguugu

SEQ ID NO: 214691 - RNA, 32 nt, Human
guguugcccuggggcuaacagcuuaugacuug

SEQ ID NO: 214692 - RNA, 32 nt, Human
guguugccuaggcuggucucaaacuccugcuc

SEQ ID NO: 214693 - RNA, 32 nt, Human
guguugccuaggcuggucuggagcucuugauc

SEQ ID NO: 214694 - RNA, 32 nt, Human
guguugccucauucagcucaaacagauuucau

SEQ ID NO: 214695 - RNA, 32 nt, Human
guguugccugagacuaaagugcuuagcacaga

SEQ ID NO: 214696 - RNA, 32 nt, Human
guguugcgcagucuucauggguucccgacgag

SEQ ID NO: 214697 - RNA, 32 nt, Human
guguugcuaagcuguaaccgauaugcacuuga

SEQ ID NO: 214698 - RNA, 32 nt, Human
guguugcucaagggagucaggaagagacggca

SEQ ID NO: 214699 - RNA, 32 nt, Human
guguugcucacauguuaaaaucuugcucaccu

SEQ ID NO: 214700 - RNA, 32 nt, Human
guguugcucaggcuggagugcaguggugugau

SEQ ID NO: 214701 - RNA, 32 nt, Human
guguugcucuccauucuuuuaaaucucgcacu

SEQ ID NO: 214702 - RNA, 32 nt, Human
guguugcugaagauggagucucgcucugucac

SEQ ID NO: 214703 - RNA, 32 nt, Human
guguugcuucccucccccuauagggcuggaau

SEQ ID NO: 214704 - RNA, 32 nt, Human
guguuggagcuguuacuugcuccuucauuucc

SEQ ID NO: 214705 - RNA, 32 nt, Human
guguuggaggaggcaggggcugaaggugucaa

SEQ ID NO: 214706 - RNA, 32 nt, Human
guguuggaggccacuggguaacaacagaagaa

SEQ ID NO: 214707 - RNA, 22 nt, Human
guguuggcacacaccuguaauc

SEQ ID NO: 214708 - RNA, 32 nt, Human
guguuggcagucagcucccugccugcagggcc

SEQ ID NO: 214709 - RNA, 32 nt, Human
guguuggcccaggccuucuacaggaggucuug

SEQ ID NO: 214710 - RNA, 32 nt, Human
guguuggcuucccaacuccugaacacgacaca

SEQ ID NO: 214711 - RNA, 32 nt, Human
guguugggaagugggagcgggagggccgggca

SEQ ID NO: 214712 - RNA, 32 nt, Human
guguugggauuacaggcaaugagccaccacgc

SEQ ID NO: 214713 - RNA, 32 nt, Human
guguugggauuacguguguaagccacagugcc

SEQ ID NO: 214714 - RNA, 32 nt, Human
guguugggcacugucugaccauguugcauuug

SEQ ID NO: 214715 - RNA, 32 nt, Human
guguugggcagggugguuucaaacuucuggcc

SEQ ID NO: 214716 - RNA, 32 nt, Human
guguugggcaggucucugucccucucugggcc

SEQ ID NO: 214717 - RNA, 21 nt, Human
guguugggcagugacaccaug

SEQ ID NO: 214718 - RNA, 23 nt, Human
guguugggccacauucaaagcca

SEQ ID NO: 214719 - RNA, 32 nt, Human
guguuggggccuccaggauuugccugcagcuu

SEQ ID NO: 214720 - RNA, 32 nt, Human
guguugggggaagcugggcaucaguggccaca

SEQ ID NO: 214721 - RNA, 32 nt, Human
guguugggggaugcagugccgugccacauuuc

SEQ ID NO: 214722 - RNA, 32 nt, Human
guguugggucaugcugggaagggagcggcagc

SEQ ID NO: 214723 - RNA, 32 nt, Human
guguuggguccugggaaucuaagcuuuguucc

SEQ ID NO: 214724 - RNA, 32 nt, Human
guguugguaaugugcaucaugacaauuuccag

SEQ ID NO: 214725 - RNA, 32 nt, Human
guguugguaccacugccccuggccugagagcc

SEQ ID NO: 214726 - RNA, 32 nt, Human
guguugguauuagcuugauugguugguccgcu

SEQ ID NO: 214727 - RNA, 32 nt, Human
guguuggucaaagacaucacuggcuuugaagg

SEQ ID NO: 214728 - RNA, 32 nt, Human
guguuggucuugaacuccuggccucaagcaau

SEQ ID NO: 214729 - RNA, 32 nt, Human
guguuggugccauccuguggcuauagugauaa

SEQ ID NO: 214730 - RNA, 32 nt, Human
guguugguggaaugcagagcagcuggagauca

SEQ ID NO: 214731 - RNA, 19 nt, Human
guguugguggugcuguggg

SEQ ID NO: 214732 - RNA, 32 nt, Human
guguugguggugcugugggcuuggguguuaaa

SEQ ID NO: 214733 - RNA, 32 nt, Human
guguuggugucauguugagaaaaagguagaau

SEQ ID NO: 214734 - RNA, 32 nt, Human
guguugguuuccacucucgccaaagagagaag

SEQ ID NO: 214735 - RNA, 32 nt, Human
guguuguacagagggaaaaagacugguggaaa

SEQ ID NO: 214736 - RNA, 31 nt, Human
guguuguacagcuagaaaaggccuucuuccc

SEQ ID NO: 214737 - RNA, 32 nt, Human
guguuguaccacugcacuccagccugggugac

SEQ ID NO: 214738 - RNA, 32 nt, Human
guguuguagaagggccuuaaaaagaauuauuu

SEQ ID NO: 214739 - RNA, 21 nt, Human
guguuguaggaaguguccugu

SEQ ID NO: 214740 - RNA, 32 nt, Human
guguuguauuagaucucauaauuugacaaguu

SEQ ID NO: 214741 - RNA, 32 nt, Human
guguugucacuggguugaaguauauuugugug

SEQ ID NO: 214742 - RNA, 32 nt, Human
guguugucagcuucugaccucuugaucuguug

SEQ ID NO: 214743 - RNA, 32 nt, Human
guguugucaugaaaguaugacauccuagagug

SEQ ID NO: 214744 - RNA, 32 nt, Human
guguugucauuugcaaguucuuccugugacug

SEQ ID NO: 214745 - RNA, 32 nt, Human
guguuguccaggcuggagugcaauggugugau

SEQ ID NO: 214746 - RNA, 32 nt, Human
guguuguccaggcuggagugcaguggugugau

SEQ ID NO: 214747 - RNA, 32 nt, Human
guguuguccaguuuuccagaccaggacugaaa

SEQ ID NO: 214748 - RNA, 32 nt, Human
guguuguccucauuaggacaucaugucuuugu

SEQ ID NO: 214749 - RNA, 32 nt, Human
guguugucucacugcauccaaugcuuuuccuu

SEQ ID NO: 214750 - RNA, 32 nt, Human
guguugucucauagaacugccuggauuccauu

SEQ ID NO: 214751 - RNA, 32 nt, Human
guguugucuguggagaccgguggccugcagac

SEQ ID NO: 214752 - RNA, 32 nt, Human
guguugucuucgucugugccguuugucuucgu

SEQ ID NO: 214753 - RNA, 32 nt, Human
guguugugagagcugggauggggccagagauu

SEQ ID NO: 214754 - RNA, 32 nt, Human
guguugugagccaucaggacuccaucacucgu

SEQ ID NO: 214755 - RNA, 32 nt, Human
guguugugcucaggacucacucugcugcuggu

SEQ ID NO: 214756 - RNA, 32 nt, Human
guguugugggguccagaggggcugauacaugu

SEQ ID NO: 214757 - RNA, 32 nt, Human
guguugugucugccaggcucaggcagaggcgc

SEQ ID NO: 214758 - RNA, 32 nt, Human
guguuguuccuggcuggacuugauguccaggg

SEQ ID NO: 214759 - RNA, 32 nt, Human
guguuguuguguguaguauauaguugacucgc

SEQ ID NO: 214760 - RNA, 32 nt, Human
guguuuaaagcuuacuaugucuucauuuuggc

SEQ ID NO: 214761 - RNA, 32 nt, Human
guguuuaaaggacaaauagcugcuagaauuca

SEQ ID NO: 214762 - RNA, 32 nt, Human
guguuuaaccaccucccagcuuucuucuucuu

SEQ ID NO: 214763 - RNA, 32 nt, Human
guguuuaaccauuuuuaaguucgcuuucugca

SEQ ID NO: 214764 - RNA, 32 nt, Human
guguuuaagaauugguuuugggagggcgagga

SEQ ID NO: 214765 - RNA, 31 nt, Human
guguuuaagagaccacauucuuggguuccaa

SEQ ID NO: 214766 - RNA, 24 nt, Human
guguuuacaaaaggcagcccuuug

SEQ ID NO: 214767 - RNA, 32 nt, Human
guguuuacaggcucugguggcagagcaguugg

SEQ ID NO: 214768 - RNA, 32 nt, Human
guguuuacuggcacuccaugcaugcuugcuga

SEQ ID NO: 214769 - RNA, 32 nt, Human
guguuuacuucuagguccuuuggccaaaugcg

SEQ ID NO: 214770 - RNA, 32 nt, Human
guguuuacuuggugaggaggaggcagaaccag

SEQ ID NO: 214771 - RNA, 21 nt, Human
guguuuacuuguaacuuucug

SEQ ID NO: 214772 - RNA, 32 nt, Human
guguuuagaaguaggaagucacugugagcaau

SEQ ID NO: 214773 - RNA, 19 nt, Human
guguuuagggcagugggag

SEQ ID NO: 214774 - RNA, 32 nt, Human
guguuuauaugccagaaauucuguaccauuuu

SEQ ID NO: 214775 - RNA, 32 nt, Human
guguuuauggacuuuucacacacuaauuuuga

SEQ ID NO: 214776 - RNA, 32 nt, Human
guguuucacagcaaagaggguacagaaccauc

SEQ ID NO: 214777 - RNA, 32 nt, Human
guguuucaccaugccagcacagcgccaugagu

SEQ ID NO: 214778 - RNA, 32 nt, Human
guguuucagcucccauuguguugcucauaguc

SEQ ID NO: 214779 - RNA, 32 nt, Human
guguuucaggaagaagagagcagguagaaagg

SEQ ID NO: 214780 - RNA, 32 nt, Human
guguuucaggcagagcucuggccaggcugugc

SEQ ID NO: 214781 - RNA, 32 nt, Human
guguuucauacuuuagcaucaacgcugaguug

SEQ ID NO: 214782 - RNA, 32 nt, Human
guguuuccaacacagauuauguggcuguuggu

SEQ ID NO: 214783 - RNA, 32 nt, Human
guguuuccaaccccuuucaugggggagaggaa

SEQ ID NO: 214784 - RNA, 32 nt, Human
guguuuccaccugguccuaccugcuuagccau

SEQ ID NO: 214785 - RNA, 32 nt, Human
guguuuccagagugucaaguacauuuaaacac

SEQ ID NO: 214786 - RNA, 32 nt, Human
guguuuccauuuuaaagugaguugaguucuca

SEQ ID NO: 214787 - RNA, 32 nt, Human
guguuucccgggcuggguauuugccucgcacc

SEQ ID NO: 214788 - RNA, 32 nt, Human
guguuucccugccucucaauucgcugaaaaag

SEQ ID NO: 214789 - RNA, 32 nt, Human
guguuuccucugacucuagugcacugaugauc

SEQ ID NO: 214790 - RNA, 32 nt, Human
guguuuccuuggaaguuguagguggguuuuua

SEQ ID NO: 214791 - RNA, 32 nt, Human
guguuucgccacugcacaccagccugggugac

SEQ ID NO: 214792 - RNA, 21 nt, Human
guguuucgugaacugcaguga

SEQ ID NO: 214793 - RNA, 32 nt, Human
guguuucgugugggggcggggagcagcugcgc

SEQ ID NO: 214794 - RNA, 32 nt, Human
guguuucuccaccgcucagcacgccuucuaau

SEQ ID NO: 214795 - RNA, 21 nt, Human
guguuucugcaguggcugcag

SEQ ID NO: 214796 - RNA, 32 nt, Human
guguuucugccugucccugccugaugucccug

SEQ ID NO: 214797 - RNA, 32 nt, Human
guguuucuggacugcacuguuguccuugcccu

SEQ ID NO: 214798 - RNA, 32 nt, Human
guguuucuguagucccagcuacucgggaggcu

SEQ ID NO: 214799 - RNA, 32 nt, Human
guguuucuuaaugaacuugcaaaggaauauug

SEQ ID NO: 214800 - RNA, 23 nt, Human
guguuucuuagcucugaccugua

SEQ ID NO: 214801 - RNA, 32 nt, Human
guguuucuugacuguuuauucagaaucacagu

SEQ ID NO: 214802 - RNA, 32 nt, Human
guguuucuuucucccagcuggguggaaggaga

SEQ ID NO: 214803 - RNA, 32 nt, Human
guguuugaagcacagugaucaaguuauuuuua

SEQ ID NO: 214804 - RNA, 32 nt, Human
guguuugaaggagacuucgugguucugaggug

SEQ ID NO: 214805 - RNA, 32 nt, Human
guguuugagucuagauuuuauggcacaaggaa

SEQ ID NO: 214806 - RNA, 32 nt, Human
guguuugauaaauguuguccagguuccauugc

SEQ ID NO: 214807 - RNA, 32 nt, Human
guguuugauaaauguuguccagguuccauugu

SEQ ID NO: 214808 - RNA, 32 nt, Human
guguuugauaaauguuguccagguucuauugc

SEQ ID NO: 214809 - RNA, 32 nt, Human
guguuugauaaauguugucuagguuccauugc

SEQ ID NO: 214810 - RNA, 32 nt, Human
guguuugauuccauuccauggaaauaaaaagu

SEQ ID NO: 214811 - RNA, 32 nt, Human
guguuugcacacacaagugcacagcggcauga

SEQ ID NO: 214812 - RNA, 32 nt, Human
guguuugcagacuggcugggcccgugacccag

SEQ ID NO: 214813 - RNA, 32 nt, Human
guguuugcagugagagugacuugcugucaguc

SEQ ID NO: 214814 - RNA, 32 nt, Human
guguuugcaucacugcacuccagccugggcag

SEQ ID NO: 214815 - RNA, 32 nt, Human
guguuugccaagugccuggcccagagcaagug

SEQ ID NO: 214816 - RNA, 32 nt, Human
guguuugccagagcucccaucugccccacucg

SEQ ID NO: 214817 - RNA, 32 nt, Human
guguuugccagucccugcaugggugaauguug

SEQ ID NO: 214818 - RNA, 32 nt, Human
guguuugcuaacuguggucuuuguggcuacuu

SEQ ID NO: 214819 - RNA, 32 nt, Human
guguuugcuacaaauugaaugcucacguuacc

SEQ ID NO: 214820 - RNA, 32 nt, Human
guguuugcucaggccucuuucuuaguguugcu

SEQ ID NO: 214821 - RNA, 32 nt, Human
guguuugcugaauccaggucugagaucacaau

SEQ ID NO: 214822 - RNA, 32 nt, Human
guguuugcugggcacuaugcuaagcacuuugg

SEQ ID NO: 214823 - RNA, 32 nt, Human
guguuugcuguugcacacugauugcugagggu

SEQ ID NO: 214824 - RNA, 32 nt, Human
guguuugcuguugcuuuacugcugucuguaug

SEQ ID NO: 214825 - RNA, 21 nt, Human
guguuugcuucucugccauca

SEQ ID NO: 214826 - RNA, 32 nt, Human
guguuugcuuggaaauuccuugccccacaguu

SEQ ID NO: 214827 - RNA, 32 nt, Human
guguuuggagaaaaggacuccggugaggacug

SEQ ID NO: 214828 - RNA, 32 nt, Human
guguuuggagaggccccagggagccagggagc

SEQ ID NO: 214829 - RNA, 32 nt, Human
guguuuggaggaaccuccucccggcucucaga

SEQ ID NO: 214830 - RNA, 32 nt, Human
guguuuggcccuuagagagagauucuguguga

SEQ ID NO: 214831 - RNA, 32 nt, Human
guguuuggccuccauaaacugcagagaaauug

SEQ ID NO: 214832 - RNA, 32 nt, Human
guguuuggcucagagccacuauugucuguaaa

SEQ ID NO: 214833 - RNA, 32 nt, Human
guguuugggaaagggcagaagucaggcaagac

SEQ ID NO: 214834 - RNA, 32 nt, Human
guguuugggaccugggcucgggcuucuugcgu

SEQ ID NO: 214835 - RNA, 32 nt, Human
guguuugggcaggccgacuugauuuacagcca

SEQ ID NO: 214836 - RNA, 32 nt, Human
guguuuggggagugaauaaggggaagagugcu

SEQ ID NO: 214837 - RNA, 32 nt, Human
guguuuggggcugaggccugcuggacagaugg

SEQ ID NO: 214838 - RNA, 32 nt, Human
guguuugggggaaaauacgagggauugauuuu

SEQ ID NO: 214839 - RNA, 19 nt, Human
guguuugggucccuggaga

SEQ ID NO: 214840 - RNA, 32 nt, Human
guguuugggugcagacacaggcagcugcugcc

SEQ ID NO: 214841 - RNA, 32 nt, Human
guguuuggugguaaaggauuuucuccauggcc

SEQ ID NO: 214842 - RNA, 20 nt, Human
guguuugguuugccuggaga

SEQ ID NO: 214843 - RNA, 23 nt, Human
guguuugucuguauuugcacaug

SEQ ID NO: 214844 - RNA, 32 nt, Human
guguuugucuucauuccucuagcaccacuggg

SEQ ID NO: 214845 - RNA, 32 nt, Human
guguuugugcaaccuucaucugcacugggccc

SEQ ID NO: 214846 - RNA, 32 nt, Human
guguuugugggaaagccaggaggaaaagcucc

SEQ ID NO: 214847 - RNA, 32 nt, Human
guguuugugugugagagagagugagaaaugua

SEQ ID NO: 214848 - RNA, 32 nt, Human
guguuuguuagggagagaagagggagaggcag

SEQ ID NO: 214849 - RNA, 32 nt, Human
guguuuguuugaagacuucacuguggaagaaa

SEQ ID NO: 214850 - RNA, 32 nt, Human
guguuuguuugcuugaauacaaauguuugaua

SEQ ID NO: 214851 - RNA, 32 nt, Human
guguuuguuuguuugcagucucucucugccau

SEQ ID NO: 214852 - RNA, 32 nt, Human
guguuuguuuuuaaucaaauauuaccuaaaaa

SEQ ID NO: 214853 - RNA, 32 nt, Human
guguuuuaaagaaagaaugagggagacgggaa

SEQ ID NO: 214854 - RNA, 32 nt, Human
guguuuuacacaaaaccauuuuugaauuaagg

SEQ ID NO: 214855 - RNA, 32 nt, Human
guguuuuacacaaaugcauaucuugaacguca

SEQ ID NO: 214856 - RNA, 32 nt, Human
guguuuuacuuauucaucccucccucuccuuu

SEQ ID NO: 214857 - RNA, 24 nt, Human
guguuuuagcgaaggaacccucug

SEQ ID NO: 214858 - RNA, 32 nt, Human
guguuuuaugauacauuacagccaaauuauuu

SEQ ID NO: 214859 - RNA, 32 nt, Human
guguuuuaugguugcuucuguccuucuuuuua

SEQ ID NO: 214860 - RNA, 32 nt, Human
guguuuucaacuccaaaccccagagagggguu

SEQ ID NO: 214861 - RNA, 32 nt, Human
guguuuucaagcacaacccaccacaacaagca

SEQ ID NO: 214862 - RNA, 32 nt, Human
guguuuucacagcccccugagggaagggacgc

SEQ ID NO: 214863 - RNA, 32 nt, Human
guguuuucacugcaguuuagacugacuucuug

SEQ ID NO: 214864 - RNA, 32 nt, Human
guguuuucauuccccgcccucugacagaacaa

SEQ ID NO: 214865 - RNA, 32 nt, Human
guguuuucauucucuucccauuuuuguacauu

SEQ ID NO: 214866 - RNA, 32 nt, Human
guguuuucauuggaguccagggacccugguac

SEQ ID NO: 214867 - RNA, 32 nt, Human
guguuuuccaacaauggacuuggaucggcuuc

SEQ ID NO: 214868 - RNA, 32 nt, Human
guguuuuccuaccuggugaucagaagugucug

SEQ ID NO: 214869 - RNA, 32 nt, Human
guguuuuccuccguaccaucugacguuucugg

SEQ ID NO: 214870 - RNA, 32 nt, Human
guguuuucuaacccccuccugggagcucucua

SEQ ID NO: 214871 - RNA, 32 nt, Human
guguuuucucagagagaaagcagcacgcuucu

SEQ ID NO: 214872 - RNA, 32 nt, Human
guguuuucuccauugccucuugccagggaggg

SEQ ID NO: 214873 - RNA, 32 nt, Human
guguuuucugcgugagaggaaaagaugcuaga

SEQ ID NO: 214874 - RNA, 32 nt, Human
guguuuucuguaccuuagauucacaaacuuug

SEQ ID NO: 214875 - RNA, 32 nt, Human
guguuuucuucacuaaccucagaauacugggc

SEQ ID NO: 214876 - RNA, 32 nt, Human
guguuuucuuuuccucaacucccacagccagg

SEQ ID NO: 214877 - RNA, 32 nt, Human
guguuuucuuuucuaaaacaucaaaaugccaa

SEQ ID NO: 214878 - RNA, 32 nt, Human
guguuuugagcagcaauguguaaccagguguu

SEQ ID NO: 214879 - RNA, 32 nt, Human
guguuuugauuugugcugacugggugguggcu

SEQ ID NO: 214880 - RNA, 32 nt, Human
guguuuugccuuaaccucuuuucucuucccac

SEQ ID NO: 214881 - RNA, 32 nt, Human
guguuuugcuucaugcuagaagcauaugcaac

SEQ ID NO: 214882 - RNA, 32 nt, Human
guguuuugggagaacgaagacagccaggcuga

SEQ ID NO: 214883 - RNA, 32 nt, Human
guguuuuggggcacagaagcugugggaggagc

SEQ ID NO: 214884 - RNA, 32 nt, Human
guguuuuggggccccagaauuuggcauucacc

SEQ ID NO: 214885 - RNA, 32 nt, Human
guguuuugugaccucagcagggugggggucuu

SEQ ID NO: 214886 - RNA, 32 nt, Human
guguuuugugggcugccagggugggagaggag

SEQ ID NO: 214887 - RNA, 32 nt, Human
guguuuuguggggcuugggguuugguaacuua

SEQ ID NO: 214888 - RNA, 32 nt, Human
guguuuugugugugugcccacacguagacaaa

SEQ ID NO: 214889 - RNA, 32 nt, Human
guguuuuuaaaaauuaaagaagaagaaaagua

SEQ ID NO: 214890 - RNA, 32 nt, Human
guguuuuuaucacaccugcuccccagauuccc

SEQ ID NO: 214891 - RNA, 23 nt, Human
guguuuuuauugcugacuuuaaa

SEQ ID NO: 214892 - RNA, 32 nt, Human
guguuuuucauucacuuuaauagaagggcaaa

SEQ ID NO: 214893 - RNA, 32 nt, Human
guguuuuuccagcuaccugccacuugcccacc

SEQ ID NO: 214894 - RNA, 32 nt, Human
guguuuuucucauauuugaggaguguuaagau

SEQ ID NO: 214895 - RNA, 32 nt, Human
guguuuuucucuuccccaggagggacuuugau

SEQ ID NO: 214896 - RNA, 32 nt, Human
guguuuuucuucuuguguccuggauucugaua

SEQ ID NO: 214897 - RNA, 32 nt, Human
guguuuuucuuugguuucuucuguuuuccaac

SEQ ID NO: 214898 - RNA, 32 nt, Human
guguuuuugaaauguugggcauggccucguau

SEQ ID NO: 214899 - RNA, 32 nt, Human
guguuuuuggccagguugcacacucugagccu

SEQ ID NO: 214900 - RNA, 32 nt, Human
guguuuuuggcuaacaagcaguagacgccucc

SEQ ID NO: 214901 - RNA, 32 nt, Human
guuaaaaacaugugaaagauagguauggaaaa

SEQ ID NO: 214902 - RNA, 32 nt, Human
guuaaaaagacuguuauuucaccauuuaauug

SEQ ID NO: 214903 - RNA, 32 nt, Human
guuaaaaaugcaggccaggugcgguggcucac

SEQ ID NO: 214904 - RNA, 32 nt, Human
guuaaaacaacaacaacacuauccuauaaacu

SEQ ID NO: 214905 - RNA, 32 nt, Human
guuaaaacucagggauucugugacuacaagau

SEQ ID NO: 214906 - RNA, 32 nt, Human
guuaaaacugcaacagcucuuccaggaaagaa

SEQ ID NO: 214907 - RNA, 32 nt, Human
guuaaaagacuccaaguugcuuucugccuuuu

SEQ ID NO: 214908 - RNA, 32 nt, Human
guuaaaagauuuggcuaaaaucacacagucgg

SEQ ID NO: 214909 - RNA, 32 nt, Human
guuaaaagcuguucuuguguguuacauguaac

SEQ ID NO: 214910 - RNA, 32 nt, Human
guuaaaaggaacacugguugccugaacaguca

SEQ ID NO: 214911 - RNA, 32 nt, Human
guuaaacaaaagcauccagacacacaacaaug

SEQ ID NO: 214912 - RNA, 32 nt, Human
guuaaacaagugcuugaaggcaguaugcuugg

SEQ ID NO: 214913 - RNA, 32 nt, Human
guuaaacaaugcccaacaaccaaccagcuggc

SEQ ID NO: 214914 - RNA, 32 nt, Human
guuaaacagaaaacaagaaauucccuauaccu

SEQ ID NO: 214915 - RNA, 32 nt, Human
guuaaacagugcuccauucucucuccacaggc

SEQ ID NO: 214916 - RNA, 32 nt, Human
guuaaacaugguaagacugagguucugcagga

SEQ ID NO: 214917 - RNA, 32 nt, Human
guuaaacccagaccaacuccccaaaucuaauu

SEQ ID NO: 214918 - RNA, 32 nt, Human
guuaaacgaacugaacuagccugguggaagga

SEQ ID NO: 214919 - RNA, 32 nt, Human
guuaaacuucaauuccuguaaccugguuagua

SEQ ID NO: 214920 - RNA, 32 nt, Human
guuaaacuucacucuugaauucuuuacaaucu

SEQ ID NO: 214921 - RNA, 21 nt, Human
guuaaagaacaaagcuuccac

SEQ ID NO: 214922 - RNA, 32 nt, Human
guuaaagccauucucucgccucagccucccga

SEQ ID NO: 214923 - RNA, 24 nt, Human
guuaaagccccgcgguugccucuu

SEQ ID NO: 214924 - RNA, 32 nt, Human
guuaaagcugccuccagccucaggagcagugu

SEQ ID NO: 214925 - RNA, 32 nt, Human
guuaaagcugcucgauucccaggaucucggcu

SEQ ID NO: 214926 - RNA, 32 nt, Human
guuaaagcugcucucaccaguggaaccuaaga

SEQ ID NO: 214927 - RNA, 32 nt, Human
guuaaagcuuuguuuucauggccugugugaag

SEQ ID NO: 214928 - RNA, 32 nt, Human
guuaaaggaaagacuuaugucagucccagccc

SEQ ID NO: 214929 - RNA, 32 nt, Human
guuaaaggagaagcaagagcaagaaccuuuaa

SEQ ID NO: 214930 - RNA, 32 nt, Human
guuaaagggcugaggguugaggugagaggcac

SEQ ID NO: 214931 - RNA, 32 nt, Human
guuaaagucaugcaucagacccugccagacgu

SEQ ID NO: 214932 - RNA, 32 nt, Human
guuaaaguuaguuucagaacaauuacucaugc

SEQ ID NO: 214933 - RNA, 32 nt, Human
guuaaauaaccagcccaaaauugcagagcuaa

SEQ ID NO: 214934 - RNA, 32 nt, Human
guuaaauaaucugccuaaaauauuuuagaaau

SEQ ID NO: 214935 - RNA, 32 nt, Human
guuaaauacagauggcaguugagcacuucugu

SEQ ID NO: 214936 - RNA, 32 nt, Human
guuaaauacagcugcaaguagguuaccguaag

SEQ ID NO: 214937 - RNA, 32 nt, Human
guuaaauaucuuaccagccuauguaaggccga

SEQ ID NO: 214938 - RNA, 32 nt, Human
guuaaaucaaccuaauguucuuacacuguguu

SEQ ID NO: 214939 - RNA, 22 nt, Human
guuaaaucagugguccugagca

SEQ ID NO: 214940 - RNA, 32 nt, Human
guuaaaucccauaugcuagguaguguaggcau

SEQ ID NO: 214941 - RNA, 32 nt, Human
guuaaaucuuuguucucccugaggcuccuuag

SEQ ID NO: 214942 - RNA, 32 nt, Human
guuaaaugaaaguacagacagcuucauuguug

SEQ ID NO: 214943 - RNA, 32 nt, Human
guuaaaugacaucacuggaugaacuugaagau

SEQ ID NO: 214944 - RNA, 31 nt, Human
guuaaaugacuucuugcuagagaagacccca

SEQ ID NO: 214945 - RNA, 32 nt, Human
guuaaaugccucugauccacagaguuucauau

SEQ ID NO: 214946 - RNA, 24 nt, Human
guuaaauguguuauuugcuuuuaa

SEQ ID NO: 214947 - RNA, 30 nt, Human
guuaaauguuuaccuauauaaaaauuauua

SEQ ID NO: 214948 - RNA, 32 nt, Human
guuaaauuuuaugaguagugcugugucuggag

SEQ ID NO: 214949 - RNA, 20 nt, Human
guuaacaaaagaaaacuuua

SEQ ID NO: 214950 - RNA, 32 nt, Human
guuaacaaggugaguccaggaguguugcccug

SEQ ID NO: 214951 - RNA, 32 nt, Human
guuaacaauguucucagccucagcuuccuuac

SEQ ID NO: 214952 - RNA, 20 nt, Human
guuaacaauuaugacaucug

SEQ ID NO: 214953 - RNA, 32 nt, Human
guuaacacugcaacuaccaccguguacaggug

SEQ ID NO: 214954 - RNA, 32 nt, Human
guuaacagcuuuucaccuuacuucuccuguga

SEQ ID NO: 214955 - RNA, 20 nt, Human
guuaacaguauuaauucuaa

SEQ ID NO: 214956 - RNA, 32 nt, Human
guuaacaguugaguguucagcuccugacuuac

SEQ ID NO: 214957 - RNA, 21 nt, Human
guuaacauuccaagacucuag

SEQ ID NO: 214958 - RNA, 32 nt, Human
guugcacugcagcuuguguauagcaugcuaaa

SEQ ID NO: 214959 - RNA, 32 nt, Human
guugcacuggccagcaugggccugucccaagc

SEQ ID NO: 214960 - RNA, 32 nt, Human
guugcacuuggcuggcuuaugccucugagauc

SEQ ID NO: 214961 - RNA, 32 nt, Human
guugcagaaagcccuagauguaaugauagugu

SEQ ID NO: 214962 - RNA, 32 nt, Human
guugcagaacacuuccugucucuggcuucauc

SEQ ID NO: 214963 - RNA, 32 nt, Human
guugcagaccagccuggguaacauagugagac

SEQ ID NO: 214964 - RNA, 32 nt, Human
guugcagaggaagaguagaugagccggguccg

SEQ ID NO: 214965 - RNA, 32 nt, Human
guugcagaguuggaaguauuggccaagaagag

SEQ ID NO: 214966 - RNA, 32 nt, Human
guugcagaucgguccuuccucagcuccuugau

SEQ ID NO: 214967 - RNA, 32 nt, Human
guugcagccucacucucuacaggaugagggag

SEQ ID NO: 214968 - RNA, 32 nt, Human
guugcagcucuguucaaacacaauucuaucag

SEQ ID NO: 214969 - RNA, 32 nt, Human
guugcagcuguggccacugccucccggcacug

SEQ ID NO: 214970 - RNA, 32 nt, Human
guugcaggaacagcacccaggacucugaggag

SEQ ID NO: 214971 - RNA, 30 nt, Human
guugcaggaagccagaggaggcaauacagu

SEQ ID NO: 214972 - RNA, 32 nt, Human
guugcaggacaaaugcuucaguccgccgagag

SEQ ID NO: 214973 - RNA, 32 nt, Human
guugcaggccuccagugagcagggccccacca

SEQ ID NO: 214974 - RNA, 32 nt, Human
guugcaggcugaagugggggaugucauucuua

SEQ ID NO: 214975 - RNA, 32 nt, Human
guugcagggacuguggucucuccuggggcccg

SEQ ID NO: 214976 - RNA, 32 nt, Human
guugcagggaggcggagguugcagugagccga

SEQ ID NO: 214977 - RNA, 24 nt, Human
guugcaggggcuggugugcagugg

SEQ ID NO: 214978 - RNA, 32 nt, Human
guugcagguauucucaauuuccuuuuaagaaa

SEQ ID NO: 214979 - RNA, 32 nt, Human
guugcagguugggcacuagaaaaggccccacu

SEQ ID NO: 214980 - RNA, 32 nt, Human
guugcaguccacagcauucacauucucaggau

SEQ ID NO: 214981 - RNA, 32 nt, Human
guugcagugagcaggguggggucugggagggg

SEQ ID NO: 214982 - RNA, 32 nt, Human
guugcagugagccaagauugcagugagccaag

SEQ ID NO: 214983 - RNA, 32 nt, Human
guugcagugagccgggauugcagugagccacg

SEQ ID NO: 214984 - RNA, 32 nt, Human
guugcagugagcugagaucacaccaaaauggg

SEQ ID NO: 214985 - RNA, 32 nt, Human
guugcagugagcugagaucguggccacugcaa

SEQ ID NO: 214986 - RNA, 32 nt, Human
guugcagugagcugagaucgugucacuacacu

SEQ ID NO: 214987 - RNA, 32 nt, Human
guugcagugagcugagauggcaccacugcacu

SEQ ID NO: 214988 - RNA, 32 nt, Human
guugcagugagcugagauggcaccacuuauug

SEQ ID NO: 214989 - RNA, 32 nt, Human
guugcagugagcugagauugcaccacggcacu

SEQ ID NO: 214990 - RNA, 32 nt, Human
guugcagugagcugagauugcaccacuacacu

SEQ ID NO: 214991 - RNA, 32 nt, Human
guugcagugagcugagauugcaccacugcacu

SEQ ID NO: 214992 - RNA, 32 nt, Human
guugcagugagcugagauugcaccacugcauu

SEQ ID NO: 214993 - RNA, 32 nt, Human
guugcagugagcugagauugcaccacuguacu

SEQ ID NO: 214994 - RNA, 32 nt, Human
guugcagugagcugagauugcaccauugcacu

SEQ ID NO: 214995 - RNA, 32 nt, Human
guugcagugagcugagauugcaccauugcauu

SEQ ID NO: 214996 - RNA, 32 nt, Human
guugcagugagcugagauugcaucauugcacu

SEQ ID NO: 214997 - RNA, 32 nt, Human
guugcagugagcugagauugcgccacugcacu

SEQ ID NO: 214998 - RNA, 32 nt, Human
guugcagugagcugagauugcgccacuguacu

SEQ ID NO: 214999 - RNA, 32 nt, Human
guugcagugagcugagauugcgccauugcacu

SEQ ID NO: 215000 - RNA, 32 nt, Human
guugcagugagcugagauugcgccauugcagc

SEQ ID NO: 215001 - RNA, 32 nt, Human
guugcagugagcugagauugcgccauuguacu

SEQ ID NO: 215002 - RNA, 32 nt, Human
guugcagugagcugagauugcgcugcugcacu

SEQ ID NO: 215003 - RNA, 32 nt, Human
guugcagugagcugagauugggccacugcacu

SEQ ID NO: 215004 - RNA, 32 nt, Human
guugcagugagcugagauuguaccacugcgcu

SEQ ID NO: 215005 - RNA, 32 nt, Human
guugcagugagcugagauuguaccaugcacuc

SEQ ID NO: 215006 - RNA, 32 nt, Human
guugcagugagcugagauuguaccauugcacu

SEQ ID NO: 215007 - RNA, 32 nt, Human
guugcagugagcugagauugugccacuacacu

SEQ ID NO: 215008 - RNA, 32 nt, Human
guugcagugagcugagauugugccacuucauu

SEQ ID NO: 215009 - RNA, 32 nt, Human
guugcagugagcugagauugugcugcugcacu

SEQ ID NO: 215010 - RNA, 32 nt, Human
guugcagugagcugaggucgugcuacugcacu

SEQ ID NO: 215011 - RNA, 32 nt, Human
guugcagugagcugagguugcggugagcugag

SEQ ID NO: 215012 - RNA, 32 nt, Human
guugcagugagcugaguuugcaucacugcacu

SEQ ID NO: 215013 - RNA, 32 nt, Human
guugcagugagcuggaaucgugccacuccacu

SEQ ID NO: 215014 - RNA, 32 nt, Human
guugcagugucaggaugaccugccuuggaggc

SEQ ID NO: 215015 - RNA, 32 nt, Human
guugcaguuuacaaccugcccuccagggacac

SEQ ID NO: 215016 - RNA, 32 nt, Human
guugcauacagaugaguuggcagccggucuga

SEQ ID NO: 215017 - RNA, 32 nt, Human
guugcaucacuuaucuacguaaacaauugaag

SEQ ID NO: 215018 - RNA, 32 nt, Human
guugcauccccaggaagcaggcccgcagcgcc

SEQ ID NO: 215019 - RNA, 32 nt, Human
guugcaugauuuggcauguuggggcacauuug

SEQ ID NO: 215020 - RNA, 32 nt, Human
guugcaugccuguaaucccagcauuuugggag

SEQ ID NO: 215021 - RNA, 32 nt, Human
guugcauggagagguccaggagggaccggagg

SEQ ID NO: 215022 - RNA, 32 nt, Human
guugcauggcaucaccuccaccauacuccauc

SEQ ID NO: 215023 - RNA, 32 nt, Human
guugcauggcggcagugcucgcagggacaaca

SEQ ID NO: 215024 - RNA, 32 nt, Human
guugcauuacuggguaaucggggcccuggcuu

SEQ ID NO: 215025 - RNA, 32 nt, Human
guugcauugcacgcaggccugccugugguggg

SEQ ID NO: 215026 - RNA, 32 nt, Human
guugcauugggcuucuuggccucccaacucuu

SEQ ID NO: 215027 - RNA, 32 nt, Human
guugcauuuaugaagggagaagguuccuaucu

SEQ ID NO: 215028 - RNA, 32 nt, Human
guugcauuuccccauuucuuguuuuuaaaaga

SEQ ID NO: 215029 - RNA, 32 nt, Human
guugccaaacccauugagcuuggggcugcccu

SEQ ID NO: 215030 - RNA, 24 nt, Human
guugccaaggcuggaaugcagugg

SEQ ID NO: 215031 - RNA, 23 nt, Human
guugccaaggcuggagugcagug

SEQ ID NO: 215032 - RNA, 24 nt, Human
guugccaaggcuggagugcagugg

SEQ ID NO: 215033 - RNA, 32 nt, Human
guugccacaucuccugccuaguggagaagccu

SEQ ID NO: 215034 - RNA, 32 nt, Human
guugccacccacugcccaggccucacccagcg

SEQ ID NO: 215035 - RNA, 32 nt, Human
guugccacgugggaacaggaagauggugaaag

SEQ ID NO: 215036 - RNA, 21 nt, Human
guugccacuagaauguaguag

SEQ ID NO: 215037 - RNA, 32 nt, Human
guugccacucucagcaccccacauuugcaucu

SEQ ID NO: 215038 - RNA, 32 nt, Human
guugccacugcacucuggccugggcaacagag

SEQ ID NO: 215039 - RNA, 32 nt, Human
guugccacugugguuugccacacugacaccua

SEQ ID NO: 215040 - RNA, 32 nt, Human
guugccacuuucaaagugguccccuggggagc

SEQ ID NO: 215041 - RNA, 22 nt, Human
guugccagacuggagugcagug

SEQ ID NO: 215042 - RNA, 23 nt, Human
guugccagacuggagugcagugg

SEQ ID NO: 215043 - RNA, 32 nt, Human
guugccagacuuaacccagcagacacucugac

SEQ ID NO: 215044 - RNA, 32 nt, Human
guugccagagugaggaguuagcaggcaggacu

SEQ ID NO: 215045 - RNA, 32 nt, Human
guugccagcacacuggcucuuuccucgaaauu

SEQ ID NO: 215046 - RNA, 32 nt, Human
guugccaggaguuuucucugaaugguuguaau

SEQ ID NO: 215047 - RNA, 23 nt, Human
guugccaggccagagugcagugg

SEQ ID NO: 215048 - RNA, 23 nt, Human
guugccaggcuagagugcagugg

SEQ ID NO: 215049 - RNA, 23 nt, Human
guugccaggcuggaaugcagugg

SEQ ID NO: 215050 - RNA, 32 nt, Human
guugccaggcuggaaugcaguggcgcgaucuu

SEQ ID NO: 215051 - RNA, 32 nt, Human
guugccaggcuggaaugcaguggcgucaucuc

SEQ ID NO: 215052 - RNA, 32 nt, Human
guugccaggcuggaaugcaguggcgugaucuu

SEQ ID NO: 215053 - RNA, 23 nt, Human
guugccaggcuggaaugccgugg

SEQ ID NO: 215054 - RNA, 32 nt, Human
guugccaggcuggaaugccguggcgcaaucuc

SEQ ID NO: 215055 - RNA, 23 nt, Human
guugccaggcuggagggcagugg

SEQ ID NO: 215056 - RNA, 32 nt, Human
guugccaggcuggagugcacuggggcuuggcu

SEQ ID NO: 215057 - RNA, 23 nt, Human
guugccaggcuggagugcagugg

SEQ ID NO: 215058 - RNA, 32 nt, Human
guugccaggcuggagugcaguggcacaaucuu

SEQ ID NO: 215059 - RNA, 32 nt, Human
guugccaggcuggagugcaguggcgcaaucuu

SEQ ID NO: 215060 - RNA, 32 nt, Human
guugccaggcuggagugcaguggcgcgaucuc

SEQ ID NO: 215061 - RNA, 32 nt, Human
guugccaggcuggagugcaguggugcgaugua

SEQ ID NO: 215062 - RNA, 21 nt, Human
guugccaggcuggagugcugu

SEQ ID NO: 215063 - RNA, 22 nt, Human
guugccaggcuggagugcugug

SEQ ID NO: 215064 - RNA, 23 nt, Human
guugccaggcuggagugcugugg

SEQ ID NO: 215065 - RNA, 32 nt, Human
guugccaggcuggagugcuguggcgcuaucuc

SEQ ID NO: 215066 - RNA, 23 nt, Human
guugccaggcuggggugcagugg

SEQ ID NO: 215067 - RNA, 32 nt, Human
guugccaggcuggucucaaacuucuggacuca

SEQ ID NO: 215068 - RNA, 32 nt, Human
guugccagguuaucaucggagccuucuugugu

SEQ ID NO: 215069 - RNA, 31 nt, Human
guugccaucagggugcacacagcaggugcag

SEQ ID NO: 215070 - RNA, 32 nt, Human
guugccaucagugcuaacugacugccucucca

SEQ ID NO: 215071 - RNA, 32 nt, Human
guugccaucuccagggugacacggugugccug

SEQ ID NO: 215072 - RNA, 32 nt, Human
guugccaucucucaagaugguaaauuguuucc

SEQ ID NO: 215073 - RNA, 32 nt, Human
guugccauguacaaugagauuuauaaucauga

SEQ ID NO: 215074 - RNA, 32 nt, Human
guugccauguuugcucugccccugggguggag

SEQ ID NO: 215075 - RNA, 23 nt, Human
guugcccaaauucagugucagug

SEQ ID NO: 215076 - RNA, 20 nt, Human
guugcccaaccuggagugca

SEQ ID NO: 215077 - RNA, 23 nt, Human
guugcccaaccuggagugcaaug

SEQ ID NO: 215078 - RNA, 24 nt, Human
guugcccaaccuggagugcaaugg

SEQ ID NO: 215079 - RNA, 23 nt, Human
guugcccaaccuggagugcagug

SEQ ID NO: 215080 - RNA, 24 nt, Human
guugcccaaccuggagugcagugg

SEQ ID NO: 215081 - RNA, 32 nt, Human
guugcccaagcuaguuucaaacuccugggcuc

SEQ ID NO: 215082 - RNA, 23 nt, Human
guugcccaagcuggaaugcagug

SEQ ID NO: 215083 - RNA, 24 nt, Human
guugcccaagcuggaaugcagugg

SEQ ID NO: 215084 - RNA, 22 nt, Human
guugcccaagcuggaguacagu

SEQ ID NO: 215085 - RNA, 24 nt, Human
guugcccaagcuggaguacaguag

SEQ ID NO: 215086 - RNA, 24 nt, Human
guugcccaagcuggagugaagugg

SEQ ID NO: 215087 - RNA, 23 nt, Human
guugcccaagcuggagugcaaug

SEQ ID NO: 215088 - RNA, 24 nt, Human
guugcccaagcuggagugcaaugg

SEQ ID NO: 215089 - RNA, 23 nt, Human
guugcccaagcuggagugcagug

SEQ ID NO: 215090 - RNA, 24 nt, Human
guugcccaagcuggagugcagugg

SEQ ID NO: 215091 - RNA, 24 nt, Human
guugcccaagcuugagggcagugg

SEQ ID NO: 215092 - RNA, 21 nt, Human
guugcccaaggcuguaaguag

SEQ ID NO: 215093 - RNA, 23 nt, Human
guugcccaagguagagugcagug

SEQ ID NO: 215094 - RNA, 24 nt, Human
guugcccaagguagagugcagugg

SEQ ID NO: 215095 - RNA, 32 nt, Human
guugcccaagugaagcuggaaguggaucuuuc

SEQ ID NO: 215096 - RNA, 22 nt, Human
guugcccaaguuggagugcaau

SEQ ID NO: 215097 - RNA, 23 nt, Human
guugcccaaguuggagugcagug

SEQ ID NO: 215098 - RNA, 24 nt, Human
guugcccaaguuggagugcagugg

SEQ ID NO: 215099 - RNA, 23 nt, Human
guugcccacacuagagugcaaug

SEQ ID NO: 215100 - RNA, 24 nt, Human
guugcccacacuagagugcaaugg

SEQ ID NO: 215101 - RNA, 23 nt, Human
guugcccacauuggagugcagug

SEQ ID NO: 215102 - RNA, 24 nt, Human
guugcccacauuggagugcagugg

SEQ ID NO: 215103 - RNA, 23 nt, Human
guugcccacgcaggagugcagug

SEQ ID NO: 215104 - RNA, 24 nt, Human
guugcccacgcaggagugcagugg

SEQ ID NO: 215105 - RNA, 23 nt, Human
guugcccacgcuggagugcaaug

SEQ ID NO: 215106 - RNA, 24 nt, Human
guugcccacgcuggagugcaaugg

SEQ ID NO: 215107 - RNA, 32 nt, Human
guugcccacugcacugccccagcccagcccca

SEQ ID NO: 215108 - RNA, 32 nt, Human
guugcccagaccaaaugugucaauaaaccaga

SEQ ID NO: 215109 - RNA, 22 nt, Human
guugcccagacuagaguacaau

SEQ ID NO: 215110 - RNA, 23 nt, Human
guugcccagacuagagugcagug

SEQ ID NO: 215111 - RNA, 24 nt, Human
guugcccagacuagagugcagugg

SEQ ID NO: 215112 - RNA, 24 nt, Human
guugcccagacuggagagcagugg

SEQ ID NO: 215113 - RNA, 24 nt, Human
guugcccagacuggagggcagugg

SEQ ID NO: 215114 - RNA, 23 nt, Human
guugcccagacuggagugcaaug

SEQ ID NO: 215115 - RNA, 24 nt, Human
guugcccagacuggagugcaaugg

SEQ ID NO: 215116 - RNA, 23 nt, Human
guugcccagacuggagugcagug

SEQ ID NO: 215117 - RNA, 24 nt, Human
guugcccagacuggagugcagugg

SEQ ID NO: 215118 - RNA, 18 nt, Human
guugcccagacuggucuc

SEQ ID NO: 215119 - RNA, 19 nt, Human
guugcccagacuggucuca

SEQ ID NO: 215120 - RNA, 32 nt, Human
guugcccagacuguucggaaacuccugggcuc

SEQ ID NO: 215121 - RNA, 21 nt, Human
guugcccagaggaugugcagu

SEQ ID NO: 215122 - RNA, 19 nt, Human
guugcccagauuggucuca

SEQ ID NO: 215123 - RNA, 20 nt, Human
guugcccagccuggagugca

SEQ ID NO: 215124 - RNA, 22 nt, Human
guugcccagccuggagugcaau

SEQ ID NO: 215125 - RNA, 24 nt, Human
guugcccagccuggagugcaauag

SEQ ID NO: 215126 - RNA, 23 nt, Human
guugcccagcuggagugcagugg

SEQ ID NO: 215127 - RNA, 21 nt, Human
guugcccaggaggagcugcag

SEQ ID NO: 215128 - RNA, 23 nt, Human
guugcccaggagggagugcagug

SEQ ID NO: 215129 - RNA, 24 nt, Human
guugcccaggagggagugcagugg

SEQ ID NO: 215130 - RNA, 32 nt, Human
guugcccaggagggagugcaguggugcaaccu

SEQ ID NO: 215131 - RNA, 23 nt, Human
guugcccaggauggagugcagug

SEQ ID NO: 215132 - RNA, 24 nt, Human
guugcccaggauggagugcagugg

SEQ ID NO: 215133 - RNA, 23 nt, Human
guugcccaggcaagagugcagug

SEQ ID NO: 215134 - RNA, 24 nt, Human
guugcccaggcaagagugcagugg

SEQ ID NO: 215135 - RNA, 23 nt, Human
guugcccaggcaggaguacagug

SEQ ID NO: 215136 - RNA, 24 nt, Human
guugcccaggcaggaguacagugg

SEQ ID NO: 215137 - RNA, 32 nt, Human
guugcccaggcaggaguacaguggcauuaucu

SEQ ID NO: 215138 - RNA, 23 nt, Human
guugcccaggcaguagugcagug

SEQ ID NO: 215139 - RNA, 24 nt, Human
guugcccaggcaguagugcagugg

SEQ ID NO: 215140 - RNA, 32 nt, Human
guugcccaggccagucucaaacuccuggacuc

SEQ ID NO: 215141 - RNA, 23 nt, Human
guugcccaggccuaguuucagug

SEQ ID NO: 215142 - RNA, 24 nt, Human
guugcccaggccuaguuucagugg

SEQ ID NO: 215143 - RNA, 22 nt, Human
guugcccaggcggaguacaaug

SEQ ID NO: 215144 - RNA, 23 nt, Human
guugcccaggcggaguacaaugg

SEQ ID NO: 215145 - RNA, 32 nt, Human
guugcccaggcggaguacaauggugggaucuc

SEQ ID NO: 215146 - RNA, 21 nt, Human
guugcccaggcuagagcgcag

SEQ ID NO: 215147 - RNA, 23 nt, Human
guugcccaggcuagagcgcaggg

SEQ ID NO: 215148 - RNA, 20 nt, Human
guugcccaggcuagagugca

SEQ ID NO: 215149 - RNA, 23 nt, Human
guugcccaggcuagagugcaaug

SEQ ID NO: 215150 - RNA, 24 nt, Human
guugcccaggcuagagugcaaugg

SEQ ID NO: 215151 - RNA, 23 nt, Human
guugcccaggcuagagugcacug

SEQ ID NO: 215152 - RNA, 24 nt, Human
guugcccaggcuagagugcacugg

SEQ ID NO: 215153 - RNA, 21 nt, Human
guugcccaggcuagagugcag

SEQ ID NO: 215154 - RNA, 24 nt, Human
guugcccaggcuagagugcagcag

SEQ ID NO: 215155 - RNA, 23 nt, Human
guugcccaggcuagagugcagug

SEQ ID NO: 215156 - RNA, 24 nt, Human
guugcccaggcuagagugcagugg

SEQ ID NO: 215157 - RNA, 23 nt, Human
guugcccaggcuagcaugcaaug

SEQ ID NO: 215158 - RNA, 24 nt, Human
guugcccaggcuagcaugcaaugg

SEQ ID NO: 215159 - RNA, 32 nt, Human
guugcccaggcuagccucaaacuccugggcuc

SEQ ID NO: 215160 - RNA, 32 nt, Human
guugcccaggcuagucucaaacuccugggcuc

SEQ ID NO: 215161 - RNA, 20 nt, Human
guugcccaggcugaagugca

SEQ ID NO: 215162 - RNA, 23 nt, Human
guugcccaggcugaagugcaaug

SEQ ID NO: 215163 - RNA, 23 nt, Human
guugcccaggcugaagugcagug

SEQ ID NO: 215164 - RNA, 24 nt, Human
guugcccaggcugaagugcagugg

SEQ ID NO: 215165 - RNA, 23 nt, Human
guugcccaggcugaagugccaug

SEQ ID NO: 215166 - RNA, 24 nt, Human
guugcccaggcugaagugccaugg

SEQ ID NO: 215167 - RNA, 24 nt, Human
guugcccaggcugaaguguagugg

SEQ ID NO: 215168 - RNA, 20 nt, Human
guugcccaggcugaauucag

SEQ ID NO: 215169 - RNA, 23 nt, Human
guugcccaggcugcagugcagug

SEQ ID NO: 215170 - RNA, 24 nt, Human
guugcccaggcugcagugcagugg

SEQ ID NO: 215171 - RNA, 21 nt, Human
guugcccaggcugcuggagug

SEQ ID NO: 215172 - RNA, 27 nt, Human
guugcccaggcugcuggagugccgugg

SEQ ID NO: 215173 - RNA, 23 nt, Human
guugcccaggcuggaaauggcgc

SEQ ID NO: 215174 - RNA, 20 nt, Human
guugcccaggcuggaagugu

SEQ ID NO: 215175 - RNA, 23 nt, Human
guugcccaggcuggaauacagug

SEQ ID NO: 215176 - RNA, 24 nt, Human
guugcccaggcuggaauacagugg

SEQ ID NO: 215177 - RNA, 23 nt, Human
guugcccaggcuggaaugcaaug

SEQ ID NO: 215178 - RNA, 24 nt, Human
guugcccaggcuggaaugcaaugg

SEQ ID NO: 215179 - RNA, 23 nt, Human
guugcccaggcuggaaugcagug

SEQ ID NO: 215180 - RNA, 24 nt, Human
guugcccaggcuggaaugcagugg

SEQ ID NO: 215181 - RNA, 24 nt, Human
guugcccaggcuggacugcagugg

SEQ ID NO: 215182 - RNA, 24 nt, Human
guugcccaggcuggagagcagugg

SEQ ID NO: 215183 - RNA, 23 nt, Human
guugcccaggcuggagcgcagug

SEQ ID NO: 215184 - RNA, 24 nt, Human
guugcccaggcuggagcgcagugg

SEQ ID NO: 215185 - RNA, 23 nt, Human
guugcccaggcuggagggcaaug

SEQ ID NO: 215186 - RNA, 24 nt, Human
guugcccaggcuggagggcaaugg

SEQ ID NO: 215187 - RNA, 22 nt, Human
guugcccaggcuggagggcagu

SEQ ID NO: 215188 - RNA, 23 nt, Human
guugcccaggcuggagggcagug

SEQ ID NO: 215189 - RNA, 24 nt, Human
guugcccaggcuggagggcagugg

SEQ ID NO: 215190 - RNA, 20 nt, Human
guugcccaggcuggaguaca

SEQ ID NO: 215191 - RNA, 23 nt, Human
guugcccaggcuggaguacaaug

SEQ ID NO: 215192 - RNA, 24 nt, Human
guugcccaggcuggaguacaaugg

SEQ ID NO: 215193 - RNA, 23 nt, Human
guugcccaggcuggaguacagug

SEQ ID NO: 215194 - RNA, 24 nt, Human
guugcccaggcuggaguacagugg

SEQ ID NO: 215195 - RNA, 23 nt, Human
guugcccaggcuggaguacauug

SEQ ID NO: 215196 - RNA, 24 nt, Human
guugcccaggcuggaguacauugg

SEQ ID NO: 215197 - RNA, 22 nt, Human
guugcccaggcuggaguauagu

SEQ ID NO: 215198 - RNA, 24 nt, Human
guugcccaggcuggaguauaguag

SEQ ID NO: 215199 - RNA, 26 nt, Human
guugcccaggcuggaguauaguagug

SEQ ID NO: 215200 - RNA, 24 nt, Human
guugcccaggcuggagugaagugg

SEQ ID NO: 215201 - RNA, 19 nt, Human
guugcccaggcuggagugc

SEQ ID NO: 215202 - RNA, 20 nt, Human
guugcccaggcuggagugca

SEQ ID NO: 215203 - RNA, 21 nt, Human
guugcccaggcuggagugcaa

SEQ ID NO: 215204 - RNA, 24 nt, Human
guugcccaggcuggagugcaacgg

SEQ ID NO: 215205 - RNA, 22 nt, Human
guugcccaggcuggagugcaau

SEQ ID NO: 215206 - RNA, 24 nt, Human
guugcccaggcuggagugcaauag

SEQ ID NO: 215207 - RNA, 23 nt, Human
guugcccaggcuggagugcaaug

SEQ ID NO: 215208 - RNA, 24 nt, Human
guugcccaggcuggagugcaauga

SEQ ID NO: 215209 - RNA, 24 nt, Human
guugcccaggcuggagugcaaugg

SEQ ID NO: 215210 - RNA, 21 nt, Human
guugcccaggcuggagugcag

SEQ ID NO: 215211 - RNA, 24 nt, Human
guugcccaggcuggagugcagagg

SEQ ID NO: 215212 - RNA, 23 nt, Human
guugcccaggcuggagugcaggg

SEQ ID NO: 215213 - RNA, 22 nt, Human
guugcccaggcuggagugcagu

SEQ ID NO: 215214 - RNA, 24 nt, Human
guugcccaggcuggagugcaguag

SEQ ID NO: 215215 - RNA, 23 nt, Human
guugcccaggcuggagugcagug

SEQ ID NO: 215216 - RNA, 24 nt, Human
guugcccaggcuggagugcagugg

SEQ ID NO: 215217 - RNA, 23 nt, Human
guugcccaggcuggagugcauug

SEQ ID NO: 215218 - RNA, 24 nt, Human
guugcccaggcuggagugcauugg

SEQ ID NO: 215219 - RNA, 24 nt, Human
guugcccaggcuggagugccuugg

SEQ ID NO: 215220 - RNA, 23 nt, Human
guugcccaggcuggagugcgaug

SEQ ID NO: 215221 - RNA, 24 nt, Human
guugcccaggcuggagugcgaugg

SEQ ID NO: 215222 - RNA, 22 nt, Human
guugcccaggcuggagugcggu

SEQ ID NO: 215223 - RNA, 23 nt, Human
guugcccaggcuggagugcggug

SEQ ID NO: 215224 - RNA, 24 nt, Human
guugcccaggcuggagugcggugg

SEQ ID NO: 215225 - RNA, 24 nt, Human
guugcccaggcuggaguggagugg

SEQ ID NO: 215226 - RNA, 21 nt, Human
guugcccaggcuggaguguag

SEQ ID NO: 215227 - RNA, 24 nt, Human
guugcccaggcuggaguguagugg

SEQ ID NO: 215228 - RNA, 24 nt, Human
guugcccaggcuggagugugaugg

SEQ ID NO: 215229 - RNA, 24 nt, Human
guugcccaggcuggaguguggugg

SEQ ID NO: 215230 - RNA, 24 nt, Human
guugcccaggcuggauugcggugg

SEQ ID NO: 215231 - RNA, 23 nt, Human
guugcccaggcuggcgugcagug

SEQ ID NO: 215232 - RNA, 24 nt, Human
guugcccaggcuggcgugcagugg

SEQ ID NO: 215233 - RNA, 21 nt, Human
guugcccaggcugggagggca

SEQ ID NO: 215234 - RNA, 24 nt, Human
guugcccaggcugggagggcaaug

SEQ ID NO: 215235 - RNA, 23 nt, Human
guugcccaggcuggggugcagug

SEQ ID NO: 215236 - RNA, 24 nt, Human
guugcccaggcuggggugcagugg

SEQ ID NO: 215237 - RNA, 19 nt, Human
guugcccaggcuggucuca

SEQ ID NO: 215238 - RNA, 20 nt, Human
guugcccaggcuggucucag

SEQ ID NO: 215239 - RNA, 22 nt, Human
guugcccaggcuggucucggag

SEQ ID NO: 215240 - RNA, 21 nt, Human
guugcccaggcuggucugaag

SEQ ID NO: 215241 - RNA, 17 nt, Human
guugcccaggcuggugu

SEQ ID NO: 215242 - RNA, 19 nt, Human
guugcccaggcugguguca

SEQ ID NO: 215243 - RNA, 23 nt, Human
guugcccaggcuggugugcaaug

SEQ ID NO: 215244 - RNA, 24 nt, Human
guugcccaggcuggugugcaaugg

SEQ ID NO: 215245 - RNA, 23 nt, Human
guugcccaggcuguaguacaaug

SEQ ID NO: 215246 - RNA, 24 nt, Human
guugcccaggcuguaguacaaugg

SEQ ID NO: 215247 - RNA, 23 nt, Human
guugcccaggcuguagugcagug

SEQ ID NO: 215248 - RNA, 24 nt, Human
guugcccaggcuguagugcagugg

SEQ ID NO: 215249 - RNA, 23 nt, Human
guugcccaggcuugagugcagug

SEQ ID NO: 215250 - RNA, 32 nt, Human
guugcccaggcuugccuggaacuccuagccuc

SEQ ID NO: 215251 - RNA, 24 nt, Human
guugcccagggcuggagugcagug

SEQ ID NO: 215252 - RNA, 25 nt, Human
guugcccagggcuggagugcagugg

SEQ ID NO: 215253 - RNA, 32 nt, Human
guugcccaggguggagugcagcggugcgaucu

SEQ ID NO: 215254 - RNA, 23 nt, Human
guugcccaggguggagugcagug

SEQ ID NO: 215255 - RNA, 24 nt, Human
guugcccaggguggagugcagugg

SEQ ID NO: 215256 - RNA, 32 nt, Human
guugcccaggguggagugcaguggcaggauca

SEQ ID NO: 215257 - RNA, 20 nt, Human
guugcccaggguggucugua

SEQ ID NO: 215258 - RNA, 21 nt, Human
guugcccagguccugcaaagg

SEQ ID NO: 215259 - RNA, 23 nt, Human
guugcccagguuagagugcagug

SEQ ID NO: 215260 - RNA, 24 nt, Human
guugcccagguuagagugcagugg

SEQ ID NO: 215261 - RNA, 25 nt, Human
guugcccagguucuagagugcagug

SEQ ID NO: 215262 - RNA, 26 nt, Human
guugcccagguucuagagugcagugg

SEQ ID NO: 215263 - RNA, 22 nt, Human
guugcccagguuggagugcagu

SEQ ID NO: 215264 - RNA, 23 nt, Human
guugcccagguuggagugcagug

SEQ ID NO: 215265 - RNA, 24 nt, Human
guugcccagguuggagugcagugg

SEQ ID NO: 215266 - RNA, 20 nt, Human
guugcccagguuggagugua

SEQ ID NO: 215267 - RNA, 22 nt, Human
guugcccagguuggaguguaau

SEQ ID NO: 215268 - RNA, 24 nt, Human
guugcccagucuggaguucagugg

SEQ ID NO: 215269 - RNA, 24 nt, Human
guugcccaugcuggagggcagugg

SEQ ID NO: 215270 - RNA, 23 nt, Human
guugcccaugcuggagugcaaug

SEQ ID NO: 215271 - RNA, 24 nt, Human
guugcccaugcuggagugcaaugg

SEQ ID NO: 215272 - RNA, 23 nt, Human
guugcccaugcuggagugcauug

SEQ ID NO: 215273 - RNA, 24 nt, Human
guugcccaugcuggagugcauugg

SEQ ID NO: 215274 - RNA, 32 nt, Human
guugcccauguaugcagaugggagaagugauu

SEQ ID NO: 215275 - RNA, 23 nt, Human
guugcccauucuggagugcagug

SEQ ID NO: 215276 - RNA, 24 nt, Human
guugcccauucuggagugcagugg

SEQ ID NO: 215277 - RNA, 32 nt, Human
guugccccaccugagcccccacccgggagcag

SEQ ID NO: 215278 - RNA, 24 nt, Human
guugccccagcuugagugcagugg

SEQ ID NO: 215279 - RNA, 24 nt, Human
guugccccaggcuggagugcagug

SEQ ID NO: 215280 - RNA, 25 nt, Human
guugccccaggcuggagugcagugg

SEQ ID NO: 215281 - RNA, 32 nt, Human
guugcccccacccuggcugccugcuaagggcc

SEQ ID NO: 215282 - RNA, 19 nt, Human
guugccccccaggguccua

SEQ ID NO: 215283 - RNA, 32 nt, Human
guugccccgccuggcccggcgacgcccgcuca

SEQ ID NO: 215284 - RNA, 32 nt, Human
guugccccuuucucuuuuccccuuuccugucc

SEQ ID NO: 215285 - RNA, 32 nt, Human
guugcccgcgccagagccucaggccggcuccu

SEQ ID NO: 215286 - RNA, 23 nt, Human
guugcccgggcuggaaugcaaug

SEQ ID NO: 215287 - RNA, 24 nt, Human
guugcccgggcuggaaugcaaugg

SEQ ID NO: 215288 - RNA, 23 nt, Human
guugcccgggcuggagugcaaug

SEQ ID NO: 215289 - RNA, 24 nt, Human
guugcccgggcuggagugcaaugg

SEQ ID NO: 215290 - RNA, 21 nt, Human
guugcccgggcuggagugcag

SEQ ID NO: 215291 - RNA, 24 nt, Human
guugcccgggcuggagugcagcgg

SEQ ID NO: 215292 - RNA, 32 nt, Human
guugcccgggcuggcgccgcugggcagagccg

SEQ ID NO: 215293 - RNA, 32 nt, Human
guugcccguggaucugggcacaaucauuggaa

SEQ ID NO: 215294 - RNA, 21 nt, Human
guugcccuauuugucuucucc

SEQ ID NO: 215295 - RNA, 22 nt, Human
guugcccucacuagagugcagu

SEQ ID NO: 215296 - RNA, 24 nt, Human
guugcccucacuagagugcaguag

SEQ ID NO: 215297 - RNA, 32 nt, Human
guugcccugccugguuucugccaagggcugcu

SEQ ID NO: 215298 - RNA, 32 nt, Human
guugcccuggccucuuugcccugggccagccu

SEQ ID NO: 215299 - RNA, 23 nt, Human
guugcccuggcuggaguucagug

SEQ ID NO: 215300 - RNA, 32 nt, Human
guugcccuguucuuggugaacugcuuguuagg

SEQ ID NO: 215301 - RNA, 23 nt, Human
guugccgaggcuggagugcaaug

SEQ ID NO: 215302 - RNA, 24 nt, Human
guugccgaggcuggagugcaaugg

SEQ ID NO: 215303 - RNA, 32 nt, Human
guugccgcaaccucgccuucagccuggcccug

SEQ ID NO: 215304 - RNA, 32 nt, Human
guugccgcacagauuccugaccauccucagaa

SEQ ID NO: 215305 - RNA, 32 nt, Human
guugccgcagcggugggaaggaaaggcagaug

SEQ ID NO: 215306 - RNA, 32 nt, Human
guugccgcauuuauuccaccuccagcuggacc

SEQ ID NO: 215307 - RNA, 32 nt, Human
guugccgccucucccgguaccugcugcugcuc

SEQ ID NO: 215308 - RNA, 32 nt, Human
guugccgcggggucggggaccagcacgagugc

SEQ ID NO: 215309 - RNA, 32 nt, Human
guugccgcugcgcaccuggcucaggugagcug

SEQ ID NO: 215310 - RNA, 23 nt, Human
guugccgcugcggagcgcggcgg

SEQ ID NO: 215311 - RNA, 32 nt, Human
guugccgcugggagccggaggcgcggggaccu

SEQ ID NO: 215312 - RNA, 32 nt, Human
guugccggaagucggcgugagguggggcuuau

SEQ ID NO: 215313 - RNA, 32 nt, Human
guugccggcugaagaaggaugaugauuauucc

SEQ ID NO: 215314 - RNA, 32 nt, Human
guugccuagcuggagugcaauggcgcaaucuc

SEQ ID NO: 215315 - RNA, 23 nt, Human
guugccuaggccagagugcagug

SEQ ID NO: 215316 - RNA, 24 nt, Human
guugccuaggccagagugcagugg

SEQ ID NO: 215317 - RNA, 23 nt, Human
guugccuaggcggaguacagugg

SEQ ID NO: 215318 - RNA, 23 nt, Human
guugccuaggcuggaguacagug

SEQ ID NO: 215319 - RNA, 24 nt, Human
guugccuaggcuggaguacagugg

SEQ ID NO: 215320 - RNA, 24 nt, Human
guugccuaggcuggagugaagugg

SEQ ID NO: 215321 - RNA, 23 nt, Human
guugccuaggcuggagugcaaug

SEQ ID NO: 215322 - RNA, 24 nt, Human
guugccuaggcuggagugcaaugg

SEQ ID NO: 215323 - RNA, 23 nt, Human
guugccuaggcuggagugcagug

SEQ ID NO: 215324 - RNA, 24 nt, Human
guugccuaggcuggagugcagugg

SEQ ID NO: 215325 - RNA, 32 nt, Human
guugccucuaucuaguccuacaaguaggguuu

SEQ ID NO: 215326 - RNA, 32 nt, Human
guugccucuucccuggcgggggugauacucuc

SEQ ID NO: 215327 - RNA, 32 nt, Human
guugccugaagaaaaaguuuguaaguacugug

SEQ ID NO: 215328 - RNA, 32 nt, Human
guugccugaggucacagagcagggacuuggac

SEQ ID NO: 215329 - RNA, 32 nt, Human
guugccugagucugggcaucugugaagaaggg

SEQ ID NO: 215330 - RNA, 32 nt, Human
guugccugcaggagggaaggcggugaacacag

SEQ ID NO: 215331 - RNA, 32 nt, Human
guugccugcauuucucccaggacuugggggug

SEQ ID NO: 215332 - RNA, 23 nt, Human
guugccugccccacucccugccg

SEQ ID NO: 215333 - RNA, 21 nt, Human
guugccugcuaaaaggcaaug

SEQ ID NO: 215334 - RNA, 23 nt, Human
guugccugggcuggaaugcagug

SEQ ID NO: 215335 - RNA, 24 nt, Human
guugccugggcuggaaugcagugg

SEQ ID NO: 215336 - RNA, 23 nt, Human
guugccugggcuggagugcagug

SEQ ID NO: 215337 - RNA, 24 nt, Human
guugccugggcuggagugcagugg

SEQ ID NO: 215338 - RNA, 32 nt, Human
guugccuggugaggaagagccaggacuucuga

SEQ ID NO: 215339 - RNA, 32 nt, Human
guugccuggugcaaagugccccaaacagcaau

SEQ ID NO: 215340 - RNA, 32 nt, Human
guugccugucaaaggcuggagggcaggaggag

SEQ ID NO: 215341 - RNA, 32 nt, Human
guugccuuagcacuucuuuccucuccaauugu

SEQ ID NO: 215342 - RNA, 32 nt, Human
guugccuucacaggccucuccgcagcagccau

SEQ ID NO: 215343 - RNA, 32 nt, Human
guugccuugaaccacuucccucaucucuccuc

SEQ ID NO: 215344 - RNA, 32 nt, Human
guugccuugcagcuggccuuuucucccagaau

SEQ ID NO: 215345 - RNA, 32 nt, Human
guugccuuggaggcagaagcugugaguuucag

SEQ ID NO: 215346 - RNA, 32 nt, Human
guugccuugggaccucggaucuccucuggggg

SEQ ID NO: 215347 - RNA, 32 nt, Human
guugccuuuguaugucuucccaccucauggau

SEQ ID NO: 215348 - RNA, 32 nt, Human
guugcgacgguccggcgagagagagcuggggu

SEQ ID NO: 215349 - RNA, 32 nt, Human
guugcgagacgggguuucaccauguuggucgg

SEQ ID NO: 215350 - RNA, 32 nt, Human
guugcgccacuacacuccagccugggugacag

SEQ ID NO: 215351 - RNA, 32 nt, Human
guugcgccacugcacuccagccugggcaacaa

SEQ ID NO: 215352 - RNA, 32 nt, Human
guugcgccacugcacucuagccugggcuacag

SEQ ID NO: 215353 - RNA, 32 nt, Human
guugcgccacuguacuccagccugggugagga

SEQ ID NO: 215354 - RNA, 21 nt, Human
guugcgcccaugcucuuguca

SEQ ID NO: 215355 - RNA, 32 nt, Human
guugcgccgcaguuuggagucacuguaguuaa

SEQ ID NO: 215356 - RNA, 32 nt, Human
guugcgcuacugcacuccagccuggacaacag

SEQ ID NO: 215357 - RNA, 32 nt, Human
guugcgcugccucuugagcagccucgugccug

SEQ ID NO: 215358 - RNA, 32 nt, Human
guugcgcugucacccaggcuggagugcagugc

SEQ ID NO: 215359 - RNA, 32 nt, Human
guugcggaauauggaagcaccucccaauggua

SEQ ID NO: 215360 - RNA, 32 nt, Human
guugcggagacacauuccucuguccaccuaag

SEQ ID NO: 215361 - RNA, 32 nt, Human
guugcggcagaacaucgcgaugggaaccgaug

SEQ ID NO: 215362 - RNA, 32 nt, Human
guugcggcagagccauggacuuccggucccug

SEQ ID NO: 215363 - RNA, 25 nt, Human
guugcggcgcuggcgacagucgggg

SEQ ID NO: 215364 - RNA, 32 nt, Human
guugcgggggcaacaugagagccccucacccc

SEQ ID NO: 215365 - RNA, 32 nt, Human
guugcggugagcugagauugcaccauuucauu

SEQ ID NO: 215366 - RNA, 32 nt, Human
guugcggugagcugagauugcacuauugcacu

SEQ ID NO: 215367 - RNA, 32 nt, Human
guugcggugagcugaggucgcgccauugcacu

SEQ ID NO: 215368 - RNA, 32 nt, Human
guugcgguuccccuguaaagcaaauguacuua

SEQ ID NO: 215369 - RNA, 32 nt, Human
guugcgucagccagagcagugcccaggggcag

SEQ ID NO: 215370 - RNA, 32 nt, Human
guugcgugccuguagucccagcuacuugggag

SEQ ID NO: 215371 - RNA, 32 nt, Human
guugcguggagacagcuuuccucccaguacuc

SEQ ID NO: 215372 - RNA, 21 nt, Human
guugcuaagucaggugcagag

SEQ ID NO: 215373 - RNA, 32 nt, Human
guugcuaaugccuuucaucuugaaguuacaca

SEQ ID NO: 215374 - RNA, 32 nt, Human
guugcuacaggcuguaccuauaagauguacag

SEQ ID NO: 215375 - RNA, 32 nt, Human
guugcuaccaauauuuagcaacuacaaugaau

SEQ ID NO: 215376 - RNA, 32 nt, Human
guugcuaccuaagcccuccacucccgacacca

SEQ ID NO: 215377 - RNA, 32 nt, Human
guugcuaccuauccugaaucaagccuugagcc

SEQ ID NO: 215378 - RNA, 32 nt, Human
guugcuaccuucacuucuccccagcucugccc

SEQ ID NO: 215379 - RNA, 32 nt, Human
guugcuacgugcggggaugacauggauccaga

SEQ ID NO: 215380 - RNA, 32 nt, Human
guugcuagaggggcacauggagugggacagga

SEQ ID NO: 215381 - RNA, 23 nt, Human
guugcuaggcuggagugcagugg

SEQ ID NO: 215382 - RNA, 32 nt, Human
guugcuaggcuggagugcaguggcacaaucau

SEQ ID NO: 215383 - RNA, 32 nt, Human
guugcuaggcuggagugcaguggugcgaucuc

SEQ ID NO: 215384 - RNA, 24 nt, Human
guugcucaagcuggaguggagugg

SEQ ID NO: 215385 - RNA, 31 nt, Human
guugcucaagugccagagguugggagaagga

SEQ ID NO: 215386 - RNA, 22 nt, Human
guugcucacaccgguaauccca

SEQ ID NO: 215387 - RNA, 32 nt, Human
guugcucacaccuguaucccagcacuuuggga

SEQ ID NO: 215388 - RNA, 32 nt, Human
guugcucacugcaaauauaaaucucagcaaug

SEQ ID NO: 215389 - RNA, 24 nt, Human
guugcucaggcuggaguacagugg

SEQ ID NO: 215390 - RNA, 24 nt, Human
guugcucaggcuggauugcagugg

SEQ ID NO: 215391 - RNA, 32 nt, Human
guugcucaugccugccagccagccugucccac

SEQ ID NO: 215392 - RNA, 32 nt, Human
guugcucaugcuguuuaagugcaggcugagac

SEQ ID NO: 215393 - RNA, 32 nt, Human
guugcucccagagucacucagugucccucguu

SEQ ID NO: 215394 - RNA, 32 nt, Human
guugcucccugggaacauuguccuuuccccac

SEQ ID NO: 215395 - RNA, 32 nt, Human
guugcuccgccuggccuggccauacugugucc

SEQ ID NO: 215396 - RNA, 32 nt, Human
guugcuccugcucuccuaggaggccccgugug

SEQ ID NO: 215397 - RNA, 32 nt, Human
guugcuccuggccucaucagccuccaaacuca

SEQ ID NO: 215398 - RNA, 32 nt, Human
guugcucuauagucaaacagcucuuuugaaga

SEQ ID NO: 215399 - RNA, 32 nt, Human
guugcucucacaccugugccauaacaucaucu

SEQ ID NO: 215400 - RNA, 21 nt, Human
guugcucugauucugcagguu

SEQ ID NO: 215401 - RNA, 32 nt, Human
guugcucugucacccaggcuggagugcaauga

SEQ ID NO: 215402 - RNA, 32 nt, Human
guugcucuugcuuuggucuucuuccaaugaug

SEQ ID NO: 215403 - RNA, 32 nt, Human
guugcugaaaacaaaaccuaacaaaccuugau

SEQ ID NO: 215404 - RNA, 32 nt, Human
guugcugaaauugaaaaagaaaaagaagaaaa

SEQ ID NO: 215405 - RNA, 32 nt, Human
guugcugaagccagaucguuuccccagggcac

SEQ ID NO: 215406 - RNA, 32 nt, Human
guugcugaagcuucauccuuugcucucauucu

SEQ ID NO: 215407 - RNA, 18 nt, Human
guugcugaaggagaaagg

SEQ ID NO: 215408 - RNA, 21 nt, Human
guugcugaaggagcccaaggc

SEQ ID NO: 215409 - RNA, 22 nt, Human
guugcugaagggacuccgagca

SEQ ID NO: 215410 - RNA, 26 nt, Human
guugcugacagguggaaccugaggca

SEQ ID NO: 215411 - RNA, 32 nt, Human
guugcugacuccaugcugugguugcuggagaa

SEQ ID NO: 215412 - RNA, 32 nt, Human
guugcugacugacccuccaccucagagguagu

SEQ ID NO: 215413 - RNA, 32 nt, Human
guugcugagauaagacauccauuuuucucaaa

SEQ ID NO: 215414 - RNA, 22 nt, Human
guugcugagcugggcuuggcuc

SEQ ID NO: 215415 - RNA, 23 nt, Human
guugcugaggcuggagugcagug

SEQ ID NO: 215416 - RNA, 24 nt, Human
guugcugaggcuggagugcagugg

SEQ ID NO: 215417 - RNA, 32 nt, Human
guugcugaucugcuccuugagcaggcagauga

SEQ ID NO: 215418 - RNA, 22 nt, Human
guugcugauggugggccagggc

SEQ ID NO: 215419 - RNA, 32 nt, Human
guugcugauuaaaauacacucccccuauaaag

SEQ ID NO: 215420 - RNA, 32 nt, Human
guugcugauuuguccauuucuuucccugcacu

SEQ ID NO: 215421 - RNA, 32 nt, Human
guugcugcaaacaaccacccaaaacuuagugg

SEQ ID NO: 215422 - RNA, 32 nt, Human
guugcugcaaaugacaugauuucauucuuuuu

SEQ ID NO: 215423 - RNA, 32 nt, Human
guugcugcagaacaguccauacuguggggcug

SEQ ID NO: 215424 - RNA, 19 nt, Human
guugcugcaggccaaggua

SEQ ID NO: 215425 - RNA, 32 nt, Human
guugcugcauuuucuucacuugcaggcaaacu

SEQ ID NO: 215426 - RNA, 32 nt, Human
guugcugcccagccgcuccaucauguccuuca

SEQ ID NO: 215427 - RNA, 32 nt, Human
guugcugcccgacuugaaggugggggugcugc

SEQ ID NO: 215428 - RNA, 32 nt, Human
guugcugccgcugaggagcccgcccagccagc

SEQ ID NO: 215429 - RNA, 32 nt, Human
guugcugccgucaccgccuccugggucguccg

SEQ ID NO: 215430 - RNA, 20 nt, Human
guugcugcgcgccccgagcc

SEQ ID NO: 215431 - RNA, 32 nt, Human
guugcugcuauugaugcauaacauacugcuau

SEQ ID NO: 215432 - RNA, 32 nt, Human
guugcugcucccuguuccauaugcucgcaauc

SEQ ID NO: 215433 - RNA, 20 nt, Human
guugcugcucgcccugcucc

SEQ ID NO: 215434 - RNA, 32 nt, Human
guugcugcugaaggaggaggcagcagcgaggu

SEQ ID NO: 215435 - RNA, 32 nt, Human
guugcugcugcucggccuggcccgcggcgccg

SEQ ID NO: 215436 - RNA, 32 nt, Human
guugcugcuuucuccucuaaaucuuggucucu

SEQ ID NO: 215437 - RNA, 32 nt, Human
guugcuggaaugcgacagagacagggagucag

SEQ ID NO: 215438 - RNA, 32 nt, Human
guugcuggagccaagcgcgcaucugucaagaa

SEQ ID NO: 215439 - RNA, 32 nt, Human
guugcuggagcugcuggcagggccaggcaagg

SEQ ID NO: 215440 - RNA, 19 nt, Human
guugcuggaggugacaagg

SEQ ID NO: 215441 - RNA, 32 nt, Human
guugcuggcagugggagcagcggcagcagcuu

SEQ ID NO: 215442 - RNA, 32 nt, Human
guugcuggccauggggcagaugcugaauguga

SEQ ID NO: 215443 - RNA, 19 nt, Human
guugcuggccuccaaggca

SEQ ID NO: 215444 - RNA, 32 nt, Human
guugcugggaaguucuggaaggaagcaugugc

SEQ ID NO: 215445 - RNA, 32 nt, Human
guugcugggauuacaggugugagccacagugc

SEQ ID NO: 215446 - RNA, 32 nt, Human
guugcugggcccagcugaaccugccucuucac

SEQ ID NO: 215447 - RNA, 32 nt, Human
guugcugggcgagccuguacucugccugacga

SEQ ID NO: 215448 - RNA, 32 nt, Human
guugcugguggagcggcggcgggggcggguau

SEQ ID NO: 215449 - RNA, 32 nt, Human
guugcuguaagggugcaacaucagggcgcuug

SEQ ID NO: 215450 - RNA, 32 nt, Human
guugcuguacgaacaccacagaauguacuuug

SEQ ID NO: 215451 - RNA, 32 nt, Human
guugcugucaucauguucacuguggcuuuuac

SEQ ID NO: 215452 - RNA, 32 nt, Human
guugcugucccaaagauaacaggggaggaagu

SEQ ID NO: 215453 - RNA, 32 nt, Human
guugcugucuucugcucucauccugcaggugg

SEQ ID NO: 215454 - RNA, 32 nt, Human
guugcugugagcugagauuguggcacugcacu

SEQ ID NO: 215455 - RNA, 32 nt, Human
guugcugugguuuucagaauuuucucuuuuaa

SEQ ID NO: 215456 - RNA, 22 nt, Human
guugcugugucgugaggugcag

SEQ ID NO: 215457 - RNA, 32 nt, Human
guugcuguugcagacccaggagucucugaagg

SEQ ID NO: 215458 - RNA, 32 nt, Human
guugcuguuuauaguuuguggaaaguggggga

SEQ ID NO: 215459 - RNA, 32 nt, Human
guugcuuagacugucuccugccacuuuaaaug

SEQ ID NO: 215460 - RNA, 32 nt, Human
guugcuuaggaugcccggccacccugggaggc

SEQ ID NO: 215461 - RNA, 32 nt, Human
guugcuucagccagugcagugagaacagcagc

SEQ ID NO: 215462 - RNA, 32 nt, Human
guugcuucaggcguuuucuccccaccaagccc

SEQ ID NO: 215463 - RNA, 31 nt, Human
guugcuucauacaaggagggugguugaacuu

SEQ ID NO: 215464 - RNA, 32 nt, Human
guugcuucauucucucaagcaugcaugaaauu

SEQ ID NO: 215465 - RNA, 32 nt, Human
guugcuuccucuuccucccaaaucccuuaguu

SEQ ID NO: 215466 - RNA, 23 nt, Human
guugcuucucacagaagcugcga

SEQ ID NO: 215467 - RNA, 32 nt, Human
guugcuucuccccucgccacgcccuucuccug

SEQ ID NO: 215468 - RNA, 32 nt, Human
guugcuucuccucccucccauucucucugcaa

SEQ ID NO: 215469 - RNA, 32 nt, Human
guugcuucuccucucugcuggcugagucugug

SEQ ID NO: 215470 - RNA, 32 nt, Human
guugcuucucuugccauuccucccacagaucu

SEQ ID NO: 215471 - RNA, 32 nt, Human
guugcuugaacccaggaggcggagauugcagu

SEQ ID NO: 215472 - RNA, 32 nt, Human
guugcuugcacuccagccugggugacagagug

SEQ ID NO: 215473 - RNA, 32 nt, Human
guugcuugcucaccuuugcugucuccccuuca

SEQ ID NO: 215474 - RNA, 32 nt, Human
guugcuuggaauuguggaaagcguuggcgagg

SEQ ID NO: 215475 - RNA, 32 nt, Human
guugcuuggcgggaacaacuugcugaagucaa

SEQ ID NO: 215476 - RNA, 23 nt, Human
guugcuugggcugcaaugcagug

SEQ ID NO: 215477 - RNA, 32 nt, Human
guugcuuguguucaacuacugugaagaguugg

SEQ ID NO: 215478 - RNA, 32 nt, Human
guugcuuguguuugagaauuggaggaaugagu

SEQ ID NO: 215479 - RNA, 32 nt, Human
guugcuuguugacuguacuauucagauggcuu

SEQ ID NO: 215480 - RNA, 32 nt, Human
guugcuuuaaagaagaaagaaaaagaaguuuc

SEQ ID NO: 215481 - RNA, 32 nt, Human
guugcuuucauuuuaaaccagagcaaguaaca

SEQ ID NO: 215482 - RNA, 32 nt, Human
guugcuuuccucacucccugucaugagacuuc

SEQ ID NO: 215483 - RNA, 32 nt, Human
guugcuuuccugagucagcuacuucacacuug

SEQ ID NO: 215484 - RNA, 32 nt, Human
guugcuuucuccaacuuuugggcugacucugu

SEQ ID NO: 215485 - RNA, 32 nt, Human
guugcuuucugauuuuuaucagagugagaaaa

SEQ ID NO: 215486 - RNA, 32 nt, Human
guugcuuuggccugcugcccucuuucaggggu

SEQ ID NO: 215487 - RNA, 32 nt, Human
guugcuuuucagaaaaaggaacgugguaggga

SEQ ID NO: 215488 - RNA, 32 nt, Human
guugcuuuuccagacugggcagaggggcugac

SEQ ID NO: 215489 - RNA, 32 nt, Human
guugcuuuucuuccucucucauuuggguuuga

SEQ ID NO: 215490 - RNA, 32 nt, Human
guugcuuuucuuguuuuccuuuuuagaaguuu

SEQ ID NO: 215491 - RNA, 32 nt, Human
guugcuuuuucuggugggggcaaggggagcug

SEQ ID NO: 215492 - RNA, 32 nt, Human
guugcuuuuucuuccuccugggcaacuauuug

SEQ ID NO: 215493 - RNA, 32 nt, Human
guuggaaaaguggaacagauagacuugcugga

SEQ ID NO: 215494 - RNA, 22 nt, Human
guuggaaaccuugcagagcaag

SEQ ID NO: 215495 - RNA, 32 nt, Human
guuggaaaccuugguuaaaaauguaggugccu

SEQ ID NO: 215496 - RNA, 19 nt, Human
guuggaaagaaagguucug

SEQ ID NO: 215497 - RNA, 32 nt, Human
guuggaaaucaguugugaauacauucuuugcu

SEQ ID NO: 215498 - RNA, 32 nt, Human
guuggaacaagaaauccggacuuuugcucucc

SEQ ID NO: 215499 - RNA, 32 nt, Human
guuggaacaguuuggagggcucagaaggagac

SEQ ID NO: 215500 - RNA, 32 nt, Human
guuggaaccaagaauugcaggcauaugggaug

SEQ ID NO: 215501 - RNA, 32 nt, Human
guuggaaccugcuuagaaccaggugugaacug

SEQ ID NO: 215502 - RNA, 32 nt, Human
guuggaagacaaagagccagcccaggauggca

SEQ ID NO: 215503 - RNA, 32 nt, Human
guuggaagaccacagacauggaaggggcccau

SEQ ID NO: 215504 - RNA, 32 nt, Human
guuggaagagaucuuccucuuccagggggcga

SEQ ID NO: 215505 - RNA, 32 nt, Human
guuggaagaucaccauauccaccagaagaccc

SEQ ID NO: 215506 - RNA, 32 nt, Human
guuggaagcagcugcccugggagccugggaca

SEQ ID NO: 215507 - RNA, 32 nt, Human
guuggaagcauacugagugucuuggugaaccu

SEQ ID NO: 215508 - RNA, 32 nt, Human
guuggaagcauacugagugucuuggugggccu

SEQ ID NO: 215509 - RNA, 32 nt, Human
guuggaagccaaagccagcuuagugggacuuc

SEQ ID NO: 215510 - RNA, 32 nt, Human
guuggaagccauggauaugguggaggucauuu

SEQ ID NO: 215511 - RNA, 32 nt, Human
guuggaaggagaagggagggaagagagcagaa

SEQ ID NO: 215512 - RNA, 32 nt, Human
guuggaagggaaauggcucugggcuggaacug

SEQ ID NO: 215513 - RNA, 32 nt, Human
guuggaaggggagggugaccagagaagaggga

SEQ ID NO: 215514 - RNA, 32 nt, Human
guuggaagucauggguccucagagugggggcu

SEQ ID NO: 215515 - RNA, 32 nt, Human
guuggaaguggucugagaaagcuguauggaca

SEQ ID NO: 215516 - RNA, 32 nt, Human
guuggaagugucauguacaacaugcggcgauu

SEQ ID NO: 215517 - RNA, 32 nt, Human
guuggaauauaugcaacaguguuuuuccacug

SEQ ID NO: 215518 - RNA, 32 nt, Human
guuggaauauccaguuauuucaugucacacau

SEQ ID NO: 215519 - RNA, 32 nt, Human
guuggaaucccugggcaaagauuuccucacug

SEQ ID NO: 215520 - RNA, 23 nt, Human
guuggaaugaugacaacaugcug

SEQ ID NO: 215521 - RNA, 32 nt, Human
guuggaaugugguucccaggagggaagagguu

SEQ ID NO: 215522 - RNA, 32 nt, Human
guuggaauucagggcauugcuauucaguccuc

SEQ ID NO: 215523 - RNA, 32 nt, Human
guuggaauuuccuggacgaggguggguacugg

SEQ ID NO: 215524 - RNA, 32 nt, Human
guuggacacacugcucuaccaguccuucguga

SEQ ID NO: 215525 - RNA, 32 nt, Human
guuggacaccugcgcguuaggagauucuggag

SEQ ID NO: 215526 - RNA, 32 nt, Human
guuggacagaaggagguguuggggugaggugg

SEQ ID NO: 215527 - RNA, 32 nt, Human
guuggacaggcaggauugaugauagcaugacc

SEQ ID NO: 215528 - RNA, 32 nt, Human
guuggacaucaaacggaucgugcagugcacua

SEQ ID NO: 215529 - RNA, 32 nt, Human
guuggaccacacccgucacaguucacaguucc

SEQ ID NO: 215530 - RNA, 32 nt, Human
guuggaccagcugauucacaaagugcugagcc

SEQ ID NO: 215531 - RNA, 32 nt, Human
guuggaccaggcugaagaccugggaucuuggu

SEQ ID NO: 215532 - RNA, 32 nt, Human
guuggaccuccagacccaucacugaccauuug

SEQ ID NO: 215533 - RNA, 32 nt, Human
guuggacucuacaggccagccucugccucaca

SEQ ID NO: 215534 - RNA, 32 nt, Human
guuggacucuucuguucaccagacacccugcc

SEQ ID NO: 215535 - RNA, 32 nt, Human
guuggacugaaaacccuccuccccaauuuggg

SEQ ID NO: 215536 - RNA, 31 nt, Human
guuggacugagaccuaacucacuggacucag

SEQ ID NO: 215537 - RNA, 32 nt, Human
guuggacugcucauggauuuuguagcuguuua

SEQ ID NO: 215538 - RNA, 32 nt, Human
guuggacuucagucuugccuaggcgauuuugu

SEQ ID NO: 215539 - RNA, 32 nt, Human
guuggacuuugccccucacacuggcccagccc

SEQ ID NO: 215540 - RNA, 32 nt, Human
guuggagaagaaccauuagaaagggaaauuag

SEQ ID NO: 215541 - RNA, 32 nt, Human
guuggagaccagccugagcaacauagugagac

SEQ ID NO: 215542 - RNA, 32 nt, Human
guuggagaccagccuggccaacauagugaaac

SEQ ID NO: 215543 - RNA, 32 nt, Human
guuggagaccagccuggccaacauggugaaac

SEQ ID NO: 215544 - RNA, 32 nt, Human
guuggagaccagccugggcaacauagugagac

SEQ ID NO: 215545 - RNA, 32 nt, Human
guuggagaccagccugggcaacauggugagac

SEQ ID NO: 215546 - RNA, 32 nt, Human
guuggagacucaagauauuuuuguugcaucag

SEQ ID NO: 215547 - RNA, 32 nt, Human
guuggagacucgauuguugaugacagcggaag

SEQ ID NO: 215548 - RNA, 31 nt, Human
guuggagagagaccugugcuuauuggaugga

SEQ ID NO: 215549 - RNA, 32 nt, Human
guuggagagcuucucauguucuuccuuuguau

SEQ ID NO: 215550 - RNA, 32 nt, Human
guuggagaggggaaaaguugugcauaaagaac

SEQ ID NO: 215551 - RNA, 32 nt, Human
guuggagaggugcucccuagaagaaccugcca

SEQ ID NO: 215552 - RNA, 32 nt, Human
guuggagcacacugcaaaagcaaaagcacagu

SEQ ID NO: 215553 - RNA, 32 nt, Human
guuggagcagaacuacugagaaaaaccaggca

SEQ ID NO: 215554 - RNA, 21 nt, Human
guuggagccacaccagccugg

SEQ ID NO: 215555 - RNA, 32 nt, Human
guuggagcccagguauuaucaugcaggagacc

SEQ ID NO: 215556 - RNA, 32 nt, Human
guuggagccuacucggggcgacugcgauggac

SEQ ID NO: 215557 - RNA, 32 nt, Human
guuggagcuacugcauguugauuguuuuguuu

SEQ ID NO: 215558 - RNA, 32 nt, Human
guuggagcugccggcccugcagucggugaccg

SEQ ID NO: 215559 - RNA, 32 nt, Human
guuggagcuggcauuccuggggaccaaauaac

SEQ ID NO: 215560 - RNA, 23 nt, Human
guuggagcuuuuaaagaaccugg

SEQ ID NO: 215561 - RNA, 32 nt, Human
guuggaggaagcuuccuccaaaguucuacaau

SEQ ID NO: 215562 - RNA, 32 nt, Human
guuggaggacuggcccacugcaccugcagcca

SEQ ID NO: 215563 - RNA, 32 nt, Human
guuggaggaugagagcuccugaggggcagagg

SEQ ID NO: 215564 - RNA, 32 nt, Human
guuggaggcugaagagagcuaugacugcauca

SEQ ID NO: 215565 - RNA, 20 nt, Human
guuggagggaagagagacca

SEQ ID NO: 215566 - RNA, 32 nt, Human
guuggagggaggcagggaaucuggcuugauug

SEQ ID NO: 215567 - RNA, 32 nt, Human
guuggagggcugggaucuuguagggccugugc

SEQ ID NO: 215568 - RNA, 32 nt, Human
guuggaggggcuaaggaggagugcagagggga

SEQ ID NO: 215569 - RNA, 32 nt, Human
guuggaggguagaccaaggcugugcaugauuc

SEQ ID NO: 215570 - RNA, 32 nt, Human
guuggaggugcuggacggccacgaccccgagc

SEQ ID NO: 215571 - RNA, 32 nt, Human
guuggagguuagagaaggccucagggaccaac

SEQ ID NO: 215572 - RNA, 32 nt, Human
guuggaguacuacaauugcagcauuaauauaa

SEQ ID NO: 215573 - RNA, 32 nt, Human
guuggaguagaugaggaaugggcucgugauua

SEQ ID NO: 215574 - RNA, 32 nt, Human
guuggagucguuacccucagaaccucagguaa

SEQ ID NO: 215575 - RNA, 32 nt, Human
guuggaguugcuggugccuccuccuucaccca

SEQ ID NO: 215576 - RNA, 32 nt, Human
guuggauaacuaccuucccaaaagagaacauc

SEQ ID NO: 215577 - RNA, 32 nt, Human
guuggauaagcuccaaucaggcaugaguuaca

SEQ ID NO: 215578 - RNA, 32 nt, Human
guuggauacauauuacagaaauaugugccacu

SEQ ID NO: 215579 - RNA, 32 nt, Human
guuggauagagcuaguuucaggaacagugagg

SEQ ID NO: 215580 - RNA, 32 nt, Human
guuggauauagagaggagagugcugaaggcaa

SEQ ID NO: 215581 - RNA, 17 nt, Human
guuggauauuuaggaua

SEQ ID NO: 215582 - RNA, 32 nt, Human
guuggaucacuugaggccaggaguucaagacu

SEQ ID NO: 215583 - RNA, 27 nt, Human
guuggaucauguauauuuuacuucuaa

SEQ ID NO: 215584 - RNA, 32 nt, Human
guuggaucuuucucccuuucuccucuccuuuu

SEQ ID NO: 215585 - RNA, 30 nt, Human
guuggaugaauaggcaccucuggaagagcc

SEQ ID NO: 215586 - RNA, 32 nt, Human
guuggaugaugaggaauauuaccgcauggagu

SEQ ID NO: 215587 - RNA, 32 nt, Human
guuggauggggucgugugugauucagauggac

SEQ ID NO: 215588 - RNA, 32 nt, Human
guuggauggugcacucacugugcucagcaccu

SEQ ID NO: 215589 - RNA, 32 nt, Human
guuggaugguuugaugaaggggagugacagga

SEQ ID NO: 215590 - RNA, 32 nt, Human
guuggauguaugcaucuuuaauuucuaaacua

SEQ ID NO: 215591 - RNA, 29 nt, Human
guuggaugucugugaguaccuggucauac

SEQ ID NO: 215592 - RNA, 32 nt, Human
guuggauuacuugaggccaggaguucaugacc

SEQ ID NO: 215593 - RNA, 21 nt, Human
guuggauuugaagacuuuuaa

SEQ ID NO: 215594 - RNA, 32 nt, Human
guuggauuugcucuucccaaaaaucuaaaaug

SEQ ID NO: 215595 - RNA, 32 nt, Human
guuggcaaacuacagcccacaggccaaaucag

SEQ ID NO: 215596 - RNA, 32 nt, Human
guuggcaaacuaugaaccacaggccaauucca

SEQ ID NO: 215597 - RNA, 32 nt, Human
guuggcaacuccauaaaaacauuucagauuuu

SEQ ID NO: 215598 - RNA, 32 nt, Human
guuggcaagagggagggaaggaaggagagcaa

SEQ ID NO: 215599 - RNA, 32 nt, Human
guuggcaaggagucaguacucagucccugagu

SEQ ID NO: 215600 - RNA, 32 nt, Human
guuggcaauaaauacaacaaauuauuuguugg

SEQ ID NO: 215601 - RNA, 32 nt, Human
guuggcaauugauuuaguugggcucuagcaaa

SEQ ID NO: 215602 - RNA, 32 nt, Human
guuggcacagaaguccugucugagguccuauc

SEQ ID NO: 215603 - RNA, 32 nt, Human
guuggcacaggcauuaucucugcaauuuuaga

SEQ ID NO: 215604 - RNA, 32 nt, Human
guuggcaccaugguaucauauauuaaaacaau

SEQ ID NO: 215605 - RNA, 32 nt, Human
guuggcaccccguuuuuccugcucugagaggg

SEQ ID NO: 215606 - RNA, 32 nt, Human
guuggcaccuguguuuacauggguugaaaacu

SEQ ID NO: 215607 - RNA, 32 nt, Human
guuggcacuggcagagcuggaggaggaggagg

SEQ ID NO: 215608 - RNA, 32 nt, Human
guuggcagagggcaggcaagcuggcccuuggu

SEQ ID NO: 215609 - RNA, 32 nt, Human
guuggcagagugcucagauggccgccuuugag

SEQ ID NO: 215610 - RNA, 24 nt, Human
guuggcagaucaccugaggucagg

SEQ ID NO: 215611 - RNA, 32 nt, Human
guuggcagccaaggagaacucgccaaccucgc

SEQ ID NO: 215612 - RNA, 32 nt, Human
guuggcagccgcuugagccacugcgaggaaag

SEQ ID NO: 215613 - RNA, 32 nt, Human
guuggcagccuggcgggcggcgcggaggagag

SEQ ID NO: 215614 - RNA, 32 nt, Human
guuggcagcugguuauauuuaauucagccccu

SEQ ID NO: 215615 - RNA, 30 nt, Human
guuggcagcuugccaagaaggacugucuuu

SEQ ID NO: 215616 - RNA, 32 nt, Human
guuggcagcuuuggggcuguuuuugagcuucu

SEQ ID NO: 215617 - RNA, 32 nt, Human
guuggcaggaaagagacauauaguagaaagug

SEQ ID NO: 215618 - RNA, 32 nt, Human
guuggcaggcagcacucugugguggucagccc

SEQ ID NO: 215619 - RNA, 32 nt, Human
guuggcagggaaguugcugguaagaguuuuua

SEQ ID NO: 215620 - RNA, 32 nt, Human
guuggcauuugguucccaaaaaguaggaugua

SEQ ID NO: 215621 - RNA, 32 nt, Human
guuggccaaauaccauccacagugaggguuau

SEQ ID NO: 215622 - RNA, 23 nt, Human
guuggccaacccuguuuagagca

SEQ ID NO: 215623 - RNA, 22 nt, Human
guuggccaaccucccgcagcca

SEQ ID NO: 215624 - RNA, 20 nt, Human
guuggccaacuuuggucacc

SEQ ID NO: 215625 - RNA, 32 nt, Human
guuggccacacccagcuccauggaugcuggga

SEQ ID NO: 215626 - RNA, 22 nt, Human
guuggccacagucaccacucca

SEQ ID NO: 215627 - RNA, 32 nt, Human
guuggccacaguuacagggagagaacaauauc

SEQ ID NO: 215628 - RNA, 32 nt, Human
guuggccaccuuccuggcaggcuguagaccug

SEQ ID NO: 215629 - RNA, 19 nt, Human
guuggccagacuggucuca

SEQ ID NO: 215630 - RNA, 32 nt, Human
guuggccaggaguucaaaaccagccugaccaa

SEQ ID NO: 215631 - RNA, 32 nt, Human
guuggccaggcagaucucaaacuccugaccuc

SEQ ID NO: 215632 - RNA, 32 nt, Human
guuggccaggccagucucaaacuccugaccuc

SEQ ID NO: 215633 - RNA, 32 nt, Human
guuggccaggcccagucacaggggcaguguca

SEQ ID NO: 215634 - RNA, 32 nt, Human
guuggccaggccggucucaaacuccugaccuc

SEQ ID NO: 215635 - RNA, 24 nt, Human
guuggccaggcuggaaugcagugg

SEQ ID NO: 215636 - RNA, 22 nt, Human
guuggccaggcuggagugcagu

SEQ ID NO: 215637 - RNA, 32 nt, Human
guuggccaggcuggucuggaacuccuaaccuc

SEQ ID NO: 215638 - RNA, 32 nt, Human
guuggccaggcuguucugcccaccucacccuc

SEQ ID NO: 215639 - RNA, 32 nt, Human
guuggccagguaauugcugcagagggagaaau

SEQ ID NO: 215640 - RNA, 32 nt, Human
guuggccauacucacccccauccugggaauuu

SEQ ID NO: 215641 - RNA, 32 nt, Human
guuggccauucucaugcccaccagcuucuggc

SEQ ID NO: 215642 - RNA, 32 nt, Human
guuggcccaagaaacauaaacauauaaccacc

SEQ ID NO: 215643 - RNA, 32 nt, Human
guuggccccuggcagaggaacaaggacacaga

SEQ ID NO: 215644 - RNA, 32 nt, Human
guuggcccucacugcagggcacugugccugag

SEQ ID NO: 215645 - RNA, 32 nt, Human
guuggcccugcucuuguggccucccgcagaau

SEQ ID NO: 215646 - RNA, 19 nt, Human
guuggcccuggcuggccgg

SEQ ID NO: 215647 - RNA, 32 nt, Human
guuggccgggccagucucaaacuccugacguc

SEQ ID NO: 215648 - RNA, 32 nt, Human
guuggccuccacuguggguaauuggcuucuca

SEQ ID NO: 215649 - RNA, 32 nt, Human
guuggccuccugggaguguaguuuucuguuuu

SEQ ID NO: 215650 - RNA, 32 nt, Human
guuggccucuugucuuucuucccugcuuugcu

SEQ ID NO: 215651 - RNA, 32 nt, Human
guuggccugcugucagugcuucucucacuccu

SEQ ID NO: 215652 - RNA, 32 nt, Human
guuggccuggacaacauggcgagaccccaccu

SEQ ID NO: 215653 - RNA, 32 nt, Human
guuggccuucuucccacaucugccucagacug

SEQ ID NO: 215654 - RNA, 21 nt, Human
guuggccuuggaauauggcca

SEQ ID NO: 215655 - RNA, 32 nt, Human
guuggccuuggcuaggacccagagccacacug

SEQ ID NO: 215656 - RNA, 32 nt, Human
guuggcgagcucuggcaccugcaaaccacccc

SEQ ID NO: 215657 - RNA, 32 nt, Human
guuggcgccuguaaucccagcuacucgggagg

SEQ ID NO: 215658 - RNA, 32 nt, Human
guuggcgcuagaggcaagaggaagggggucug

SEQ ID NO: 215659 - RNA, 32 nt, Human
guuggcgcugaaucccacaacugugugauuug

SEQ ID NO: 215660 - RNA, 32 nt, Human
guuggcgggaauggcugcucgcggaggggcag

SEQ ID NO: 215661 - RNA, 32 nt, Human
guuggcgggcaggcggguggggcaggcugggg

SEQ ID NO: 215662 - RNA, 32 nt, Human
guuggcgucccuggugggcaggaaaggaaggc

SEQ ID NO: 215663 - RNA, 32 nt, Human
guuggcuacuaucacuuuccuuccaaaugaga

SEQ ID NO: 215664 - RNA, 32 nt, Human
guuggcuagaaaacaaguguuaacuugcuucu

SEQ ID NO: 215665 - RNA, 24 nt, Human
guuggcucuaacuuaaacaugcug

SEQ ID NO: 215666 - RNA, 32 nt, Human
guuggcucucccucuccucucucccucucccu

SEQ ID NO: 215667 - RNA, 23 nt, Human
guuggcucuggccuuuugcugua

SEQ ID NO: 215668 - RNA, 32 nt, Human
guuggcucugugggcuguauggucucugccau

SEQ ID NO: 215669 - RNA, 32 nt, Human
guuggcugaaguuccuagucucaggccguagg

SEQ ID NO: 215670 - RNA, 32 nt, Human
guuggcugagcucuccugggcuacucauuuca

SEQ ID NO: 215671 - RNA, 32 nt, Human
guuggcugaggcugggggaucgauacacagcc

SEQ ID NO: 215672 - RNA, 32 nt, Human
guuggcugcacuucagugccucuuaaagcuuu

SEQ ID NO: 215673 - RNA, 32 nt, Human
guuggcugcacuugauguuuguuugcaugaug

SEQ ID NO: 215674 - RNA, 32 nt, Human
guuggcugcaguuccggcuaccuguguagucc

SEQ ID NO: 215675 - RNA, 31 nt, Human
guuggcugggaagaaagaugagugaaauaac

SEQ ID NO: 215676 - RNA, 32 nt, Human
guuggcugggaguucaagaccagccuggccaa

SEQ ID NO: 215677 - RNA, 32 nt, Human
guuggcuguggcaggccagcugugguuuucuu

SEQ ID NO: 215678 - RNA, 32 nt, Human
guuggcuuacagucuuauauucuacaagcaag

SEQ ID NO: 215679 - RNA, 32 nt, Human
guuggcuucacaaaggagaguugauguggcca

SEQ ID NO: 215680 - RNA, 32 nt, Human
guuggcuuccaucagggguggucauuuccaau

SEQ ID NO: 215681 - RNA, 32 nt, Human
guuggcuucuuuggaccugcacuggaggauuu

SEQ ID NO: 215682 - RNA, 32 nt, Human
guuggcuugaaucucaucagcaggcagccuca

SEQ ID NO: 215683 - RNA, 32 nt, Human
guuggcuugcuuuggggaugacugucuggugu

SEQ ID NO: 215684 - RNA, 32 nt, Human
guuggcuuggggcaacagauugaaaagaccua

SEQ ID NO: 215685 - RNA, 32 nt, Human
guuggcuuugagauggcugucuccuccuugug

SEQ ID NO: 215686 - RNA, 32 nt, Human
guuggcuuugcgcggucucugccugcugagca

SEQ ID NO: 215687 - RNA, 32 nt, Human
guuggcuuuguauugaucucuccagucauuuu

SEQ ID NO: 215688 - RNA, 21 nt, Human
guugggaaaaagggagcaggg

SEQ ID NO: 215689 - RNA, 25 nt, Human
guugggaaaaaucaguaagcauagg

SEQ ID NO: 215690 - RNA, 24 nt, Human
guugggaaaauagagaagagcaag

SEQ ID NO: 215691 - RNA, 32 nt, Human
guugggaaacgcuggccacugggaaaucauua

SEQ ID NO: 215692 - RNA, 32 nt, Human
guugggaaacguuuuaacaucuggagccuuug

SEQ ID NO: 215693 - RNA, 32 nt, Human
guugggaacaggcccccaaaucuggccauaaa

SEQ ID NO: 215694 - RNA, 32 nt, Human
guugggaacuccugcccuaucuguucugcccu

SEQ ID NO: 215695 - RNA, 32 nt, Human
guugggaacugcugcccccagagaaccuagca

SEQ ID NO: 215696 - RNA, 15 nt, Human
guugggaacugugau

SEQ ID NO: 215697 - RNA, 32 nt, Human
guugggaagagggagugggaggggucugucuc

SEQ ID NO: 215698 - RNA, 32 nt, Human
guugggaagccgguguuggcagaugcuguggc

SEQ ID NO: 215699 - RNA, 32 nt, Human
guugggaaggacuggggaaacagcuguaacau

SEQ ID NO: 215700 - RNA, 32 nt, Human
guugggaaggcaugauugguuuugaaauguga

SEQ ID NO: 215701 - RNA, 32 nt, Human
guugggaaggcaugguugguuuugaaauguga

SEQ ID NO: 215702 - RNA, 32 nt, Human
guugggaccaaaaccuggguguccucacugcu

SEQ ID NO: 215703 - RNA, 20 nt, Human
guugggacuacaggcgugag

SEQ ID NO: 215704 - RNA, 32 nt, Human
guugggagacacacccuuguucauucuccuug

SEQ ID NO: 215705 - RNA, 32 nt, Human
guugggagagcauuccuggcagaggagaugga

SEQ ID NO: 215706 - RNA, 32 nt, Human
guugggagaggaagcuagaaggguuaugguug

SEQ ID NO: 215707 - RNA, 32 nt, Human
guugggagaggugggaaauagcagugaauuuu

SEQ ID NO: 215708 - RNA, 32 nt, Human
guugggagagugcguuccuggagcucaguccu

SEQ ID NO: 215709 - RNA, 32 nt, Human
guugggagcaaggagaaaaaugggaagaacca

SEQ ID NO: 215710 - RNA, 32 nt, Human
guugggagcauuugggugggggccaguggggu

SEQ ID NO: 215711 - RNA, 32 nt, Human
guugggagcggguucuggagcucacgccuggc

SEQ ID NO: 215712 - RNA, 20 nt, Human
guugggagcugcccuuucua

SEQ ID NO: 215713 - RNA, 32 nt, Human
guugggagcuugggcaggccagcuucacccuu

SEQ ID NO: 215714 - RNA, 32 nt, Human
guugggaggaagcagaggcagaugggaaagca

SEQ ID NO: 215715 - RNA, 32 nt, Human
guugggaggaagcauguaagagagggaacauu

SEQ ID NO: 215716 - RNA, 32 nt, Human
guugggaggaggaggaaagggaaggcuggcag

SEQ ID NO: 215717 - RNA, 32 nt, Human
guugggaggcagcagagcaugggugacagugg

SEQ ID NO: 215718 - RNA, 32 nt, Human
guugggaggccuggguccuuuuccccacgacu

SEQ ID NO: 215719 - RNA, 32 nt, Human
guugggagggagggaaaguguuuucugaaugg

SEQ ID NO: 215720 - RNA, 32 nt, Human
guugggagugagagagcaaguccucuguggag

SEQ ID NO: 215721 - RNA, 32 nt, Human
guugggaguguaguguagcaucuggggagaca

SEQ ID NO: 215722 - RNA, 32 nt, Human
guugggagugucaagggcuggggaagaggccc

SEQ ID NO: 215723 - RNA, 32 nt, Human
guugggaucaaaugugagccuauggaucaaga

SEQ ID NO: 215724 - RNA, 32 nt, Human
guugggaucaaaugugagccuauggaucaagc

SEQ ID NO: 215725 - RNA, 32 nt, Human
guugggaucagaggaacuuugaggugucugcc

SEQ ID NO: 215726 - RNA, 32 nt, Human
guugggaucccuccuccagccaagaugauccu

SEQ ID NO: 215727 - RNA, 32 nt, Human
guugggcaauggagaaggcaggaaggcagggg

SEQ ID NO: 215728 - RNA, 32 nt, Human
guugggcaguuuuucugcccaguggcucugau

SEQ ID NO: 215729 - RNA, 32 nt, Human
guugggcauauaauccuuccacacagccccug

SEQ ID NO: 215730 - RNA, 32 nt, Human
guugggcaugcugugguugcugagggaugagg

SEQ ID NO: 215731 - RNA, 32 nt, Human
guugggccaccugaaacacacacaaacacaca

SEQ ID NO: 215732 - RNA, 32 nt, Human
guugggccccacauucccccacugccucacag

SEQ ID NO: 215733 - RNA, 28 nt, Human
guugggccuaauccugccucaucauucu

SEQ ID NO: 215734 - RNA, 32 nt, Human
guugggccugggaggcauagguugcagugagc

SEQ ID NO: 215735 - RNA, 32 nt, Human
guugggccuggggcagaugaggcuggcuggcg

SEQ ID NO: 215736 - RNA, 32 nt, Human
guugggcgccuguaaucccagcuacuggggag

SEQ ID NO: 215737 - RNA, 32 nt, Human
guugggcgcugaggcgcgagaggaggggaugg

SEQ ID NO: 215738 - RNA, 32 nt, Human
guugggcggcuuugagacuggggugucugucc

SEQ ID NO: 215739 - RNA, 32 nt, Human
guugggcucaggcugggugcucugccaugggc

SEQ ID NO: 215740 - RNA, 32 nt, Human
guugggcugcauuccuccgaggaccagucuga

SEQ ID NO: 215741 - RNA, 32 nt, Human
guugggcugucagccaaggugccugaaacgau

SEQ ID NO: 215742 - RNA, 32 nt, Human
guuggggaaaccccucccuacuguuggaugua

SEQ ID NO: 215743 - RNA, 32 nt, Human
guuggggaaagauggcccauucccagaacucc

SEQ ID NO: 215744 - RNA, 32 nt, Human
guuggggaaauacuuuauuucuuuccauuuau

SEQ ID NO: 215745 - RNA, 32 nt, Human
guuggggaacacacccccaacccgucacagcg

SEQ ID NO: 215746 - RNA, 32 nt, Human
guuggggaagaugggagguugugggugaggcc

SEQ ID NO: 215747 - RNA, 32 nt, Human
guuggggaaguugcaggaggagagguggaugg

SEQ ID NO: 215748 - RNA, 32 nt, Human
guuggggagacaucaaaaccacccuaaccucg

SEQ ID NO: 215749 - RNA, 32 nt, Human
guuggggagagagaacccucacuguggggaau

SEQ ID NO: 215750 - RNA, 32 nt, Human
guuggggaggcaugauugguuuugaaauguga

SEQ ID NO: 215751 - RNA, 32 nt, Human
guuggggaggcugagacggaaggaucgcuuca

SEQ ID NO: 215752 - RNA, 32 nt, Human
guuggggagggugggcccagcucagcagggac

SEQ ID NO: 215753 - RNA, 32 nt, Human
guuggggaucagccgcuaguguaaacgagcau

SEQ ID NO: 215754 - RNA, 32 nt, Human
guuggggauccagcaggagacccucugcacau

SEQ ID NO: 215755 - RNA, 32 nt, Human
guuggggcagaaauauguucgaugcugauuau

SEQ ID NO: 215756 - RNA, 32 nt, Human
guuggggcagaaccauggaggaaaagccuucg

SEQ ID NO: 215757 - RNA, 32 nt, Human
guuggggcagaggcaugcuccuggcaucgagu

SEQ ID NO: 215758 - RNA, 32 nt, Human
guuggggccaggacacccagugagcccauacu

SEQ ID NO: 215759 - RNA, 32 nt, Human
guuggggccugggacucagcucucucugcggu

SEQ ID NO: 215760 - RNA, 32 nt, Human
guuggggcucugaccccaggagugggguggag

SEQ ID NO: 215761 - RNA, 32 nt, Human
guuggggcugcauggccaggguggcaggaaga

SEQ ID NO: 215762 - RNA, 32 nt, Human
guugggggacuuuggaggcgggcaggggacag

SEQ ID NO: 215763 - RNA, 32 nt, Human
guugggggagagaagggcagcagcuuauuggu

SEQ ID NO: 215764 - RNA, 32 nt, Human
guugggggagagauggagggguguugacaguc

SEQ ID NO: 215765 - RNA, 32 nt, Human
guugggggagcagcaaggacccacaugaaauc

SEQ ID NO: 215766 - RNA, 32 nt, Human
guugggggaggcagagccagcagguggacagg

SEQ ID NO: 215767 - RNA, 32 nt, Human
guugggggaggcagagguggcacuggaggccu

SEQ ID NO: 215768 - RNA, 32 nt, Human
guugggggaggcgggugcaggaccgaggccug

SEQ ID NO: 215769 - RNA, 32 nt, Human
guugggggcugccugagagggccagguguggg

SEQ ID NO: 215770 - RNA, 32 nt, Human
guuggggguauuggggaaggcaggaaagggaa

SEQ ID NO: 215771 - RNA, 32 nt, Human
guugggggugacaagaggagacagggacaggu

SEQ ID NO: 215772 - RNA, 32 nt, Human
guuggggguuaagucaggaugggguagguccc

SEQ ID NO: 215773 - RNA, 19 nt, Human
guugggguaagcacuuccu

SEQ ID NO: 215774 - RNA, 32 nt, Human
guugggguaugugcugcacuucccagggagaa

SEQ ID NO: 215775 - RNA, 20 nt, Human
guuggggucuuuggugcuuc

SEQ ID NO: 215776 - RNA, 32 nt, Human
guuggggugcugcuuguucaggcuccccugac

SEQ ID NO: 215777 - RNA, 32 nt, Human
guugggguggaagggaauuggugcccagaaaa

SEQ ID NO: 215778 - RNA, 32 nt, Human
guuggggugggugggaggauucgugagcugca

SEQ ID NO: 215779 - RNA, 22 nt, Human
guugggguguauggggucccca

SEQ ID NO: 215780 - RNA, 32 nt, Human
guugggguucacccuucaucccucacauuuaa

SEQ ID NO: 215781 - RNA, 32 nt, Human
guugggguuuguggcaucaucauccccuggaa

SEQ ID NO: 215782 - RNA, 32 nt, Human
guuggguaagggaauggucaagacugagaaag

SEQ ID NO: 215783 - RNA, 32 nt, Human
guuggguacuguguuacugccugggugguagg

SEQ ID NO: 215784 - RNA, 32 nt, Human
guuggguagcggaagagagaucaaagggaaga

SEQ ID NO: 215785 - RNA, 32 nt, Human
guuggguagcucagagggaaauaaguaaaaug

SEQ ID NO: 215786 - RNA, 32 nt, Human
guugggucaaggacagggcugagcguggaagg

SEQ ID NO: 215787 - RNA, 32 nt, Human
guugggucaggaugaggggcagaggaaacacu

SEQ ID NO: 215788 - RNA, 32 nt, Human
guugggucaugcugggaagggagcggcagccc

SEQ ID NO: 215789 - RNA, 32 nt, Human
guugggucucauaaucuugcauauaccucugu

SEQ ID NO: 215790 - RNA, 32 nt, Human
guugggucucccgugacugcugccucaucgau

SEQ ID NO: 215791 - RNA, 32 nt, Human
guugggugcccaggcugcccuagcucagcacc

SEQ ID NO: 215792 - RNA, 32 nt, Human
guugggugggaggaggaagaaagggaagaauu

SEQ ID NO: 215793 - RNA, 32 nt, Human
guugggugggguggcacaugggugggguccau

SEQ ID NO: 215794 - RNA, 32 nt, Human
guugggugucuccuuaagcugcagagauuucu

SEQ ID NO: 215795 - RNA, 32 nt, Human
guuggguguggguggucuccaaggccacgcug

SEQ ID NO: 215796 - RNA, 32 nt, Human
guuggguuagagagcugggagaacaggguagg

SEQ ID NO: 215797 - RNA, 32 nt, Human
guuggguuccagaggcuggagucaugcugccc

SEQ ID NO: 215798 - RNA, 32 nt, Human
guuggguuccuccugguuuucuuuuguuacaa

SEQ ID NO: 215799 - RNA, 21 nt, Human
guuggguucuguuacuucuga

SEQ ID NO: 215800 - RNA, 32 nt, Human
guuggguuuauuuccaggucacagaauugcug

SEQ ID NO: 215801 - RNA, 32 nt, Human
guuggguuugccauucauccccuaggcauggu

SEQ ID NO: 215802 - RNA, 32 nt, Human
guuggguuuucuggugggaguggggugguggg

SEQ ID NO: 215803 - RNA, 32 nt, Human
guugguaacaacuuuuucuauagucauugaug

SEQ ID NO: 215804 - RNA, 32 nt, Human
guugguaccucccucccuggaucucugagcca

SEQ ID NO: 215805 - RNA, 32 nt, Human
guugguagaaacaagaauuccacccacgcacc

SEQ ID NO: 215806 - RNA, 32 nt, Human
guugguaggaggugugauuuguuuacaugcac

SEQ ID NO: 215807 - RNA, 32 nt, Human
guuggucagaugcaccugugugcacuggggga

SEQ ID NO: 215808 - RNA, 32 nt, Human
guugguccacagcacuccauucuggguggcag

SEQ ID NO: 215809 - RNA, 32 nt, Human
guugguccacugcaccuggcagaaaagaaguu

SEQ ID NO: 215810 - RNA, 32 nt, Human
guugguccagcagggccauacagccaugggac

SEQ ID NO: 215811 - RNA, 32 nt, Human
guugguccuugucccagccucugccccagccc

SEQ ID NO: 215812 - RNA, 32 nt, Human
guuggucggcaacguggugcacucaaggauca

SEQ ID NO: 215813 - RNA, 32 nt, Human
guuggucgggagaagggugagaggcagugcug

SEQ ID NO: 215814 - RNA, 32 nt, Human
guuggucucuccccuucuacugccuccaacac

SEQ ID NO: 215815 - RNA, 32 nt, Human
guuggucugggcacugcagcaggcucggcucu

SEQ ID NO: 215816 - RNA, 32 nt, Human
guuggucugucugucuguccuuguccuugugg

SEQ ID NO: 215817 - RNA, 32 nt, Human
guuggucuucauuucauuugugcugcgcugcc

SEQ ID NO: 215818 - RNA, 32 nt, Human
guuggucuucuugcaucgaugauccaacagca

SEQ ID NO: 215819 - RNA, 32 nt, Human
guuggugacagcaacagaaagagcaccacgcc

SEQ ID NO: 215820 - RNA, 32 nt, Human
guuggugacuugucugccuccugcuuugggaa

SEQ ID NO: 215821 - RNA, 32 nt, Human
guuggugaggcugaggaaacaggcucaaacuc

SEQ ID NO: 215822 - RNA, 32 nt, Human
guuggugccugagacaccaaauggaagaagca

SEQ ID NO: 215823 - RNA, 32 nt, Human
guuggugccuugggaaacagucugacuugaac

SEQ ID NO: 215824 - RNA, 32 nt, Human
guuggugcggugccaugaucauaguucacuau

SEQ ID NO: 215825 - RNA, 32 nt, Human
guugguggaacagugcuccuuauguaaacuga

SEQ ID NO: 215826 - RNA, 32 nt, Human
guugguggcaaaauugccaacauaaguuaaua

SEQ ID NO: 215827 - RNA, 32 nt, Human
guugguggcaggcaccuguagucccagcuaca

SEQ ID NO: 215828 - RNA, 32 nt, Human
guugguggcgcaugccuguaaucccagcuacu

SEQ ID NO: 215829 - RNA, 32 nt, Human
guugguggcgggcgccuguaaucccagcuacu

SEQ ID NO: 215830 - RNA, 32 nt, Human
guuggugggaccccuguccacacccacccuau

SEQ ID NO: 215831 - RNA, 32 nt, Human
guuggugggaggacagagcaagugggaagggg

SEQ ID NO: 215832 - RNA, 32 nt, Human
guuggugggggugcgggggugcguguccccau

SEQ ID NO: 215833 - RNA, 32 nt, Human
guugguggugugcaccuguaaucccggcuacu

SEQ ID NO: 215834 - RNA, 32 nt, Human
guugguguauagcacugcuacugauuugugua

SEQ ID NO: 215835 - RNA, 32 nt, Human
guugguguauuuuucuggugucacuucugugc

SEQ ID NO: 215836 - RNA, 32 nt, Human
guuggugucagaggcaggagugggggaucagg

SEQ ID NO: 215837 - RNA, 32 nt, Human
guuggugucaucccaggagcaauauuaacagc

SEQ ID NO: 215838 - RNA, 32 nt, Human
guugguguccuuucaugcuucugcccugucaa

SEQ ID NO: 215839 - RNA, 32 nt, Human
guuggugucuguggucgggggcgagggccguc

SEQ ID NO: 215840 - RNA, 32 nt, Human
guuggugucuuauaaaacaaacagugauaauc

SEQ ID NO: 215841 - RNA, 32 nt, Human
guuggugugaaauaagaggugcgugaugaguu

SEQ ID NO: 215842 - RNA, 32 nt, Human
guuggugugcagaucucugcucagcuucccuu

SEQ ID NO: 215843 - RNA, 32 nt, Human
guuggugugcaggaaccaggaaaugggucagg

SEQ ID NO: 215844 - RNA, 32 nt, Human
guugguguggguugggagagagcugugugcag

SEQ ID NO: 215845 - RNA, 32 nt, Human
guugguguugggggcuuagccgagggacguua

SEQ ID NO: 215846 - RNA, 32 nt, Human
guugguguuuuuaaauuugcuuucuauucccc

SEQ ID NO: 215847 - RNA, 32 nt, Human
guugguuaccuugcuucugucaauuccaguaa

SEQ ID NO: 215848 - RNA, 32 nt, Human
guugguuauugcuuaagaagugcagugugucu

SEQ ID NO: 215849 - RNA, 32 nt, Human
guugguuauuuucagggcaaaagccuauauuc

SEQ ID NO: 215850 - RNA, 32 nt, Human
guugguucagcuggcgauagcggcgggagcgg

SEQ ID NO: 215851 - RNA, 32 nt, Human
guugguucuuucuccugacuccugugguuuug

SEQ ID NO: 215852 - RNA, 32 nt, Human
guugguugccucuccccugcucacuccaguca

SEQ ID NO: 215853 - RNA, 32 nt, Human
guugguugggcagaguggcaggagcaugggca

SEQ ID NO: 215854 - RNA, 32 nt, Human
guugguugggggaggaaguggggaggaguguu

SEQ ID NO: 215855 - RNA, 32 nt, Human
guugguugugaucugugggcaccagcucauuc

SEQ ID NO: 215856 - RNA, 32 nt, Human
guugguuuaccugaguuuucucuggggucugc

SEQ ID NO: 215857 - RNA, 32 nt, Human
guugguuuagccuuccuguauacaugugauaa

SEQ ID NO: 215858 - RNA, 32 nt, Human
guugguuuccuuccuuccuuccuuccuuccuu

SEQ ID NO: 215859 - RNA, 32 nt, Human
guugguuucucauuguuuuuaagccuacugga

SEQ ID NO: 215860 - RNA, 32 nt, Human
guugguuuggauuuguaacuccagaaacauuc

SEQ ID NO: 215861 - RNA, 32 nt, Human
guugguuugggaauauuaggugauccuguuga

SEQ ID NO: 215862 - RNA, 32 nt, Human
guugguuuugagaccgggucuggcucuguagc

SEQ ID NO: 215863 - RNA, 32 nt, Human
guugguuuuguuguuguuguuuuucaaacuaa

SEQ ID NO: 215864 - RNA, 19 nt, Human
guugguuuuuugggucuuu

SEQ ID NO: 215865 - RNA, 32 nt, Human
guuguaaaagagaccucuggggccgagugugg

SEQ ID NO: 215866 - RNA, 32 nt, Human
guuguaaaccaagcuaguaaaugaguaauuug

SEQ ID NO: 215867 - RNA, 32 nt, Human
guuguaaagaugucuuggccucccagacaguc

SEQ ID NO: 215868 - RNA, 32 nt, Human
guuguaaauacugagaaacauuuugaauguuc

SEQ ID NO: 215869 - RNA, 32 nt, Human
guuguaacaauguuguaaauguucaauuuguu

SEQ ID NO: 215870 - RNA, 32 nt, Human
guuguaacacuaaccaaaggcucuuuuuagaa

SEQ ID NO: 215871 - RNA, 32 nt, Human
guuguaacagccaggggccaggauggaggagg

SEQ ID NO: 215872 - RNA, 32 nt, Human
guuguaaccuucagaaguuacagcagcgccca

SEQ ID NO: 215873 - RNA, 32 nt, Human
guuguaacuguaaacucaccucccuaguagau

SEQ ID NO: 215874 - RNA, 32 nt, Human
guuguaagaguuuuuguuuuuaaucacgcauu

SEQ ID NO: 215875 - RNA, 32 nt, Human
guuguaagcuucccuguguccucucucccucu

SEQ ID NO: 215876 - RNA, 32 nt, Human
guuguaaggcuggauugaaauaugcaugugac

SEQ ID NO: 215877 - RNA, 32 nt, Human
guuguaaguuugaauaguuagacauggaaauu

SEQ ID NO: 215878 - RNA, 32 nt, Human
guuguaauacaguuuauaccaguguaugcucu

SEQ ID NO: 215879 - RNA, 32 nt, Human
guuguaaucauagagaaaagcaaagaagaaau

SEQ ID NO: 215880 - RNA, 32 nt, Human
guuguaauggaguaaagaagagggccagcuua

SEQ ID NO: 215881 - RNA, 32 nt, Human
guuguaauuguucccuuucuguuuucauauag

SEQ ID NO: 215882 - RNA, 32 nt, Human
guuguaauuuccucuuggaaaaagcgccaaau

SEQ ID NO: 215883 - RNA, 32 nt, Human
guuguacaacucauaaauacuaacugcugauu

SEQ ID NO: 215884 - RNA, 32 nt, Human
guuguaccacugcacuccagccuggcugacag

SEQ ID NO: 215885 - RNA, 32 nt, Human
guuguaccacugcacuccagccugggugacag

SEQ ID NO: 215886 - RNA, 32 nt, Human
guuguaccaucuuuggguaggcagacuucccu

SEQ ID NO: 215887 - RNA, 32 nt, Human
guuguacccacugccuaaccagucccaguugg

SEQ ID NO: 215888 - RNA, 32 nt, Human
guuguacguacuacggagaaacucaucauuuu

SEQ ID NO: 215889 - RNA, 32 nt, Human
guuguacguggaggacuaaugagacuuguaca

SEQ ID NO: 215890 - RNA, 32 nt, Human
guuguacucuuuaauuuuugcaaagaaaaguu

SEQ ID NO: 215891 - RNA, 32 nt, Human
guuguacugccuggauggucaccucuggugcg

SEQ ID NO: 215892 - RNA, 32 nt, Human
guuguacuucugaaaacagaccugugugaaug

SEQ ID NO: 215893 - RNA, 32 nt, Human
guuguacuucugaaaucagaccugugugaacg

SEQ ID NO: 215894 - RNA, 32 nt, Human
guuguacuucugaaaucagaccugugugaaug

SEQ ID NO: 215895 - RNA, 32 nt, Human
guuguacuuucucagagacuauggcagaauau

SEQ ID NO: 215896 - RNA, 32 nt, Human
guuguagaagggccuuaaaaagaauuauuuua

SEQ ID NO: 215897 - RNA, 32 nt, Human
guuguagaugaaacuguauaagauuuuuacau

SEQ ID NO: 215898 - RNA, 32 nt, Human
guuguagccacuuugaggucuguguuuccuuu

SEQ ID NO: 215899 - RNA, 32 nt, Human
guuguagccccagcuacucaagaggcugaggc

SEQ ID NO: 215900 - RNA, 32 nt, Human
guuguagcuagagagccgcuguggaaaauaug

SEQ ID NO: 215901 - RNA, 32 nt, Human
guuguagcugugcucaggcuucagcuugguuu

SEQ ID NO: 215902 - RNA, 32 nt, Human
guuguaggaagagagcgaggcaucccugaauu

SEQ ID NO: 215903 - RNA, 32 nt, Human
guuguaggaagcugugauugcaccaccacacu

SEQ ID NO: 215904 - RNA, 32 nt, Human
guuguaggcauggaagagagccaggcagcccc

SEQ ID NO: 215905 - RNA, 32 nt, Human
guuguaggggauguuuuacuacugaucaaaau

SEQ ID NO: 215906 - RNA, 32 nt, Human
guuguaggugugagccauggugcccggccgcc

SEQ ID NO: 215907 - RNA, 32 nt, Human
guuguaguagucuggugcuggccacauuuaag

SEQ ID NO: 215908 - RNA, 32 nt, Human
guuguagucauauuguaaauauuuuuguaccu

SEQ ID NO: 215909 - RNA, 32 nt, Human
guuguagucccagcucuuaucugccaucuugg

SEQ ID NO: 215910 - RNA, 32 nt, Human
guuguagugagcugagauugcaccacugcacu

SEQ ID NO: 215911 - RNA, 32 nt, Human
guuguaguggugagcugacacguccaggugug

SEQ ID NO: 215912 - RNA, 32 nt, Human
guuguaguggugagcugacacguccagguuug

SEQ ID NO: 215913 - RNA, 32 nt, Human
guuguauagcaguuccaccucuugaagguuuu

SEQ ID NO: 215914 - RNA, 32 nt, Human
guuguaucaguaccauuugaucugccauggac

SEQ ID NO: 215915 - RNA, 19 nt, Human
guuguaucuauauuucaca

SEQ ID NO: 215916 - RNA, 32 nt, Human
guuguaucugagucccuccagaacuaagauaa

SEQ ID NO: 215917 - RNA, 32 nt, Human
guuguaucuuuaguauucagguugugaaaaau

SEQ ID NO: 215918 - RNA, 32 nt, Human
guuguaugcucuucuguuuuaaagguuugaau

SEQ ID NO: 215919 - RNA, 32 nt, Human
guuguauggaaaggauggcagggaacaugcug

SEQ ID NO: 215920 - RNA, 32 nt, Human
guuguaugugcuguuccaugguguugacugca

SEQ ID NO: 215921 - RNA, 32 nt, Human
guuguauguucgugcuggaguuuuguuggugu

SEQ ID NO: 215922 - RNA, 32 nt, Human
guuguauucucauucucacucucccucccuuc

SEQ ID NO: 215923 - RNA, 32 nt, Human
guuguauuggcaagagggaggggugagagcug

SEQ ID NO: 215924 - RNA, 32 nt, Human
guuguauuguucuucccuugguggccaaacaa

SEQ ID NO: 215925 - RNA, 32 nt, Human
guugucaaggaaugagggaaaguaaauccuca

SEQ ID NO: 215926 - RNA, 31 nt, Human
guugucaaggaugaugaaaaagaggcugagg

SEQ ID NO: 215927 - RNA, 32 nt, Human
guugucaaggggaauauauucaggucuagucu

SEQ ID NO: 215928 - RNA, 32 nt, Human
guugucaauuuguuggagaugcagccuucacc

SEQ ID NO: 215929 - RNA, 32 nt, Human
guugucacagaggcaagugcuaccgcacaggc

SEQ ID NO: 215930 - RNA, 32 nt, Human
guugucacagggcagcuagaaaagccaucuuc

SEQ ID NO: 215931 - RNA, 32 nt, Human
guugucacauggacgauacaaaagccagcaau

SEQ ID NO: 215932 - RNA, 32 nt, Human
guugucacccacccuccugcccuucucagccc

SEQ ID NO: 215933 - RNA, 32 nt, Human
guugucacccaggcuggagugcagugguguga

SEQ ID NO: 215934 - RNA, 32 nt, Human
guugucacccugcccagaaaggccagcagcuu

SEQ ID NO: 215935 - RNA, 20 nt, Human
guugucacuggaaguacugu

SEQ ID NO: 215936 - RNA, 32 nt, Human
guugucacuuaaguuuggagugcaguggcaug

SEQ ID NO: 215937 - RNA, 32 nt, Human
guugucagaugauucugcccagcugcaggcua

SEQ ID NO: 215938 - RNA, 32 nt, Human
guugucagcacugggaaggcuuggggguagca

SEQ ID NO: 215939 - RNA, 32 nt, Human
guugucagcaggcaggcuggggaggccagugu

SEQ ID NO: 215940 - RNA, 32 nt, Human
guugucagcaucuucucacucccuucuccuug

SEQ ID NO: 215941 - RNA, 32 nt, Human
guugucagcugaugccgucaccuggccugcaa

SEQ ID NO: 215942 - RNA, 32 nt, Human
guugucagcuucaugagcuaugcagcugagua

SEQ ID NO: 215943 - RNA, 32 nt, Human
guugucaggcggagcugguaggggagcugccc

SEQ ID NO: 215944 - RNA, 23 nt, Human
guugucauaaccucagaguggag

SEQ ID NO: 215945 - RNA, 32 nt, Human
guugucauccagaagucagagcagagugcgca

SEQ ID NO: 215946 - RNA, 32 nt, Human
guugucaugaacaacaagaccucggcuggugg

SEQ ID NO: 215947 - RNA, 32 nt, Human
guugucaugcaccaugagacaaagcccaagcu

SEQ ID NO: 215948 - RNA, 32 nt, Human
guugucauugcuaccgugguagucaccuucau

SEQ ID NO: 215949 - RNA, 21 nt, Human
guuguccaaauaaacuuaccc

SEQ ID NO: 215950 - RNA, 32 nt, Human
guuguccagaccguagucgucugugaucugug

SEQ ID NO: 215951 - RNA, 19 nt, Human
guuguccagacuggucuca

SEQ ID NO: 215952 - RNA, 32 nt, Human
guuguccaggagacgauuuuguauaguauuuu

SEQ ID NO: 215953 - RNA, 24 nt, Human
guuguccaggauggagugcagugg

SEQ ID NO: 215954 - RNA, 24 nt, Human
guuguccaggcuagagugcagugg

SEQ ID NO: 215955 - RNA, 32 nt, Human
guuguccaggcuagauucaaacuccugggcuc

SEQ ID NO: 215956 - RNA, 23 nt, Human
guuguccaggcuggagggcagug

SEQ ID NO: 215957 - RNA, 24 nt, Human
guuguccaggcuggagugcaaugg

SEQ ID NO: 215958 - RNA, 21 nt, Human
guuguccaggcuggagugcag

SEQ ID NO: 215959 - RNA, 22 nt, Human
guuguccaggcuggagugcagu

SEQ ID NO: 215960 - RNA, 23 nt, Human
guuguccaggcuggagugcagug

SEQ ID NO: 215961 - RNA, 24 nt, Human
guuguccaggcuggagugcagugg

SEQ ID NO: 215962 - RNA, 31 nt, Human
guuguccaucuguccaucccaacagcaagac

SEQ ID NO: 215963 - RNA, 32 nt, Human
guugucccaaacuguugauuuggaaaagaaau

SEQ ID NO: 215964 - RNA, 19 nt, Human
guugucccaagagccugcc

SEQ ID NO: 215965 - RNA, 32 nt, Human
guugucccaaguggacauaauuauaaauagcu

SEQ ID NO: 215966 - RNA, 20 nt, Human
guugucccagcgugcccugc

SEQ ID NO: 215967 - RNA, 32 nt, Human
guugucccagcugcuugggaggcugaggcagg

SEQ ID NO: 215968 - RNA, 32 nt, Human
guugucccgaacuguugauuuggaaaagaaau

SEQ ID NO: 215969 - RNA, 32 nt, Human
guugucccuccaguucccuccugagggcugug

SEQ ID NO: 215970 - RNA, 22 nt, Human
guugucccuggaaggagggcgg

SEQ ID NO: 215971 - RNA, 32 nt, Human
guuguccggagugcaccugcugccuguucugu

SEQ ID NO: 215972 - RNA, 32 nt, Human
guuguccgggccacuccucccuuccuuuccac

SEQ ID NO: 215973 - RNA, 32 nt, Human
guuguccgguuucuauggccuugcuguguacu

SEQ ID NO: 215974 - RNA, 32 nt, Human
guuguccuaccaccccuugcucuuugagggcu

SEQ ID NO: 215975 - RNA, 32 nt, Human
guuguccucacccuuguuaaucucaagaaacu

SEQ ID NO: 215976 - RNA, 16 nt, Human
guuguccuccagaaau

SEQ ID NO: 215977 - RNA, 32 nt, Human
guuguccucccauccauccauuaagcugcuau

SEQ ID NO: 215978 - RNA, 32 nt, Human
guuguccugagcccuucugcguuguuaugcca

SEQ ID NO: 215979 - RNA, 32 nt, Human
guuguccuggacaccacaggggcaccugcagg

SEQ ID NO: 215980 - RNA, 22 nt, Human
guuguccuguuucaucuucucc

SEQ ID NO: 215981 - RNA, 32 nt, Human
guuguccuuagguggcugagaacugggggauu

SEQ ID NO: 215982 - RNA, 32 nt, Human
guuguccuucccaguuucuccccaaccucccc

SEQ ID NO: 215983 - RNA, 32 nt, Human
guuguccuucucaguuucuccccaaccucccc

SEQ ID NO: 215984 - RNA, 32 nt, Human
guuguccuucuuccuccaccaccugcggggug

SEQ ID NO: 215985 - RNA, 32 nt, Human
guugucgacucugccagcagggauuggcuaac

SEQ ID NO: 215986 - RNA, 32 nt, Human
guugucgcgcacgccucugcccgccagcccgc

SEQ ID NO: 215987 - RNA, 32 nt, Human
guugucggcugaugccuugucuugugucugaa

SEQ ID NO: 215988 - RNA, 32 nt, Human
guugucuaaggguuugucugagccgccucgga

SEQ ID NO: 215989 - RNA, 32 nt, Human
guugucuaggagacagagccaagcacugcuca

SEQ ID NO: 215990 - RNA, 32 nt, Human
guugucucacugcauccaaugcuuuuccuucu

SEQ ID NO: 215991 - RNA, 32 nt, Human
guugucucccaggcuggagugcaguggcguga

SEQ ID NO: 215992 - RNA, 32 nt, Human
guugucucccucucccuccacagucuccuugg

SEQ ID NO: 215993 - RNA, 32 nt, Human
guugucuccguguccccuccucccucugcccc

SEQ ID NO: 215994 - RNA, 32 nt, Human
guugucucucaccucuacauuggaucacaugg

SEQ ID NO: 215995 - RNA, 32 nt, Human
guugucucugcucuucccucuccuggcugugg

SEQ ID NO: 215996 - RNA, 32 nt, Human
guugucucuuuguuucuugcugccacugccag

SEQ ID NO: 215997 - RNA, 32 nt, Human
guugucugaacccaggcagcuggcaggagugg

SEQ ID NO: 215998 - RNA, 21 nt, Human
guugucugagacagaguugga

SEQ ID NO: 215999 - RNA, 32 nt, Human
guugucugagauugcugcagccauucuuguua

SEQ ID NO: 216000 - RNA, 32 nt, Human
guugucugauucaacuccaaaaggacagaguc

SEQ ID NO: 216001 - RNA, 32 nt, Human
guugucuggagugcugugguggaguggagugg

SEQ ID NO: 216002 - RNA, 32 nt, Human
guugucugggacccucccucuccugagagggg

SEQ ID NO: 216003 - RNA, 32 nt, Human
guugucugggaccuuuuuccagggucaaagca

SEQ ID NO: 216004 - RNA, 32 nt, Human
guugucugggaggacgggacggugucucuggc

SEQ ID NO: 216005 - RNA, 32 nt, Human
guugucugggcccuuguuuacaagcacgcguu

SEQ ID NO: 216006 - RNA, 32 nt, Human
guugucugggguggguggaguggcgacaggau

SEQ ID NO: 216007 - RNA, 32 nt, Human
guugucugucuuacuaucuacuucuugaguag

SEQ ID NO: 216008 - RNA, 32 nt, Human
guugucuguuagcuuuggguugcagugcuaga

SEQ ID NO: 216009 - RNA, 32 nt, Human
guugucuuagaucugaugaugcugcuauuuac

SEQ ID NO: 216010 - RNA, 32 nt, Human
guugucuucaucucagaacuuuccuauccugg

SEQ ID NO: 216011 - RNA, 32 nt, Human
guugucuucuucuucuucuucuucuucuucuu

SEQ ID NO: 216012 - RNA, 32 nt, Human
guugucuuugauuaaaggaaacucaccgccau

SEQ ID NO: 216013 - RNA, 32 nt, Human
guugucuuuguggacucugccugcauggcuua

SEQ ID NO: 216014 - RNA, 31 nt, Human
guugugaacagacccuguucacuggagaggc

SEQ ID NO: 216015 - RNA, 32 nt, Human
guugugaagcuuugugugacuugcucaggauc

SEQ ID NO: 216016 - RNA, 32 nt, Human
guugugaagucagcagcauuuuuaagcccauu

SEQ ID NO: 216017 - RNA, 32 nt, Human
guugugaauacccagagguugggcagaucagu

SEQ ID NO: 216018 - RNA, 32 nt, Human
guugugacagucuuccugaaagcaagggccgu

SEQ ID NO: 216019 - RNA, 32 nt, Human
guugugacuaucuccagguacauggcuugcga

SEQ ID NO: 216020 - RNA, 32 nt, Human
guugugacucacuccaccucugugcccugcag

SEQ ID NO: 216021 - RNA, 32 nt, Human
guugugacuguacuauuucuaguauagugaac

SEQ ID NO: 216022 - RNA, 32 nt, Human
guugugagaacugauuucugcaucagaauauc

SEQ ID NO: 216023 - RNA, 32 nt, Human
guugugagacugaguucuguauucuggugagu

SEQ ID NO: 216024 - RNA, 32 nt, Human
guugugagagcauuagaagcagcagucgauag

SEQ ID NO: 216025 - RNA, 32 nt, Human
guugugagauaacauucugguagcucaguuaa

SEQ ID NO: 216026 - RNA, 32 nt, Human
guugugagccaagauuguaaccagagagcagc

SEQ ID NO: 216027 - RNA, 32 nt, Human
guugugaggagaaagaagaaaauggcugccca

SEQ ID NO: 216028 - RNA, 32 nt, Human
guugugaggauugaguuagaaaaugcuagcaa

SEQ ID NO: 216029 - RNA, 32 nt, Human
guugugaguuuuguuucucuuccagcuuuuca

SEQ ID NO: 216030 - RNA, 32 nt, Human
guugugaucucaggacucugacaggcacgugg

SEQ ID NO: 216031 - RNA, 32 nt, Human
guugugauggagggcuggaggagcagcgagac

SEQ ID NO: 216032 - RNA, 32 nt, Human
guugugauuaccugcugcaugaaaaguggcau

SEQ ID NO: 216033 - RNA, 32 nt, Human
guugugcaaccauugcuucauuucuuugcaaa

SEQ ID NO: 216034 - RNA, 32 nt, Human
guugugcacugaggccggcugguccuugagaa

SEQ ID NO: 216035 - RNA, 32 nt, Human
guugugcagccugagcugggcgcugccuuccu

SEQ ID NO: 216036 - RNA, 32 nt, Human
guugugcagcugguugggcagagcuggcauua

SEQ ID NO: 216037 - RNA, 32 nt, Human
guugugcagcuucuccaccuccugguagagga

SEQ ID NO: 216038 - RNA, 23 nt, Human
guugugcaggcuggagugcagug

SEQ ID NO: 216039 - RNA, 24 nt, Human
guugugcaggcuggagugcagugg

SEQ ID NO: 216040 - RNA, 24 nt, Human
guugugcaggcuguagugcagugg

SEQ ID NO: 216041 - RNA, 32 nt, Human
guugugcagggagggagcacgagaugggcaga

SEQ ID NO: 216042 - RNA, 32 nt, Human
guugugccaacugccuagucagucccaaugag

SEQ ID NO: 216043 - RNA, 32 nt, Human
guugugccaagugcaauaaaccagucacaaaa

SEQ ID NO: 216044 - RNA, 32 nt, Human
guugugccacagaauuggaacagggaaaccca

SEQ ID NO: 216045 - RNA, 32 nt, Human
guugugccacugcacuccagccugggcaaaaa

SEQ ID NO: 216046 - RNA, 32 nt, Human
guugugccacugcacuccagccuggguaagag

SEQ ID NO: 216047 - RNA, 32 nt, Human
guugugccacugcacuccagccugggugacag

SEQ ID NO: 216048 - RNA, 32 nt, Human
guugugccacugcacugcagccugggcuacag

SEQ ID NO: 216049 - RNA, 29 nt, Human
guugugccacuguuaucauccuccuagca

SEQ ID NO: 216050 - RNA, 32 nt, Human
guugugccagcagaaaugucucuccucuaggu

SEQ ID NO: 216051 - RNA, 32 nt, Human
guugugccauuccccagccacugccuucaugc

SEQ ID NO: 216052 - RNA, 32 nt, Human
guugugcccuggaaucagccugguugagcuca

SEQ ID NO: 216053 - RNA, 32 nt, Human
guugugccuguaaucccagcuacuugggaggc

SEQ ID NO: 216054 - RNA, 32 nt, Human
guugugccuuuaucaugagaaaggucuuuauu

SEQ ID NO: 216055 - RNA, 32 nt, Human
guugugcgcagaaggcuggggcaagcgaguag

SEQ ID NO: 216056 - RNA, 32 nt, Human
guugugcucacuucagggcccagcacaaaaau

SEQ ID NO: 216057 - RNA, 32 nt, Human
guugugcucgaguuggucugagugcaggcaca

SEQ ID NO: 216058 - RNA, 32 nt, Human
guugugcucuuucaaagacccuuguuucugcc

SEQ ID NO: 216059 - RNA, 32 nt, Human
guugugcuggaaagcuggggacagguugaugg

SEQ ID NO: 216060 - RNA, 32 nt, Human
guugugcugguuuuuaaaugugcaucaagaaa

SEQ ID NO: 216061 - RNA, 32 nt, Human
guugugcuuuucuguguuguguguuuugauuu

SEQ ID NO: 216062 - RNA, 32 nt, Human
guuguggagguuuccuuggaucgccccggugu

SEQ ID NO: 216063 - RNA, 32 nt, Human
guuguggaugagcugcaggugcagugacucca

SEQ ID NO: 216064 - RNA, 32 nt, Human
guuguggcaaacauaagagaaaccugaaaaac

SEQ ID NO: 216065 - RNA, 32 nt, Human
guuguggcaugguucuccuccgagcugggacu

SEQ ID NO: 216066 - RNA, 32 nt, Human
guuguggccagggggagugucccauggguaag

SEQ ID NO: 216067 - RNA, 32 nt, Human
guuguggccucuaccauugccuuggcuucugg

SEQ ID NO: 216068 - RNA, 32 nt, Human
guuguggccuguaaucccagcuacucgggagg

SEQ ID NO: 216069 - RNA, 32 nt, Human
guuguggcggguguucugaggcugagaggaca

SEQ ID NO: 216070 - RNA, 32 nt, Human
guuguggcucuuuuugucugugccaguuggca

SEQ ID NO: 216071 - RNA, 22 nt, Human
guuguggcugagaagaugagag

SEQ ID NO: 216072 - RNA, 32 nt, Human
guugugggagagaggcagcugggagacaggcc

SEQ ID NO: 216073 - RNA, 32 nt, Human
guugugggagguagggaggaaauauguaaaga

SEQ ID NO: 216074 - RNA, 32 nt, Human
guugugggauucaggccagggcuaggacgaag

SEQ ID NO: 216075 - RNA, 32 nt, Human
guuguggggcuggggccucacuuccccuccuc

SEQ ID NO: 216076 - RNA, 32 nt, Human
guuguggggucugaggcacaugggagugggac

SEQ ID NO: 216077 - RNA, 32 nt, Human
guuguggguggggagcaagggaagagagaaac

SEQ ID NO: 216078 - RNA, 32 nt, Human
guuguggguuccuggagucuggcuccaucucc

SEQ ID NO: 216079 - RNA, 32 nt, Human
guuguggguugcagguugggugcugcuguugu

SEQ ID NO: 216080 - RNA, 32 nt, Human
guuguggucucagccaaaaugagugauacccc

SEQ ID NO: 216081 - RNA, 32 nt, Human
guuguggugagcugagauugcaccauugcacu

SEQ ID NO: 216082 - RNA, 32 nt, Human
guuguggugagcugagauugcgccauugcacu

SEQ ID NO: 216083 - RNA, 24 nt, Human
guugugguguccagugugcagcag

SEQ ID NO: 216084 - RNA, 32 nt, Human
guuguggugugugguaggguuuuuguuuucuu

SEQ ID NO: 216085 - RNA, 32 nt, Human
guugugguucucugucucuagcagcaugaucu

SEQ ID NO: 216086 - RNA, 32 nt, Human
guuguguaacaaaccaccccaaaacuuacugg

SEQ ID NO: 216087 - RNA, 32 nt, Human
guuguguagggagauggagaaaaugcuuaauc

SEQ ID NO: 216088 - RNA, 32 nt, Human
guugugucacaguucacugcagccugggugac

SEQ ID NO: 216089 - RNA, 32 nt, Human
guugugucacccagguuagaguguaguggcgc

SEQ ID NO: 216090 - RNA, 32 nt, Human
guugugucauugcacuccagccuggggaacag

SEQ ID NO: 216091 - RNA, 32 nt, Human
guugugugagccucuucagggguucauccagc

SEQ ID NO: 216092 - RNA, 32 nt, Human
guugugugagucaggaagaggggccagauauc

SEQ ID NO: 216093 - RNA, 32 nt, Human
guugugugaucaagcaugucucuguguaguuc

SEQ ID NO: 216094 - RNA, 32 nt, Human
guugugugcacgcacgcacacacucaugcaca

SEQ ID NO: 216095 - RNA, 32 nt, Human
guugugugcauucgucuuuuccagagcaaacc

SEQ ID NO: 216096 - RNA, 32 nt, Human
guugugugccuguagucccagcuacuuaggag

SEQ ID NO: 216097 - RNA, 32 nt, Human
guugugugcuccuuaugauaaucuaaugccug

SEQ ID NO: 216098 - RNA, 32 nt, Human
guuguguggcugcaaaacaucacaaagugacc

SEQ ID NO: 216099 - RNA, 32 nt, Human
guugugugggcagguucacgucuuccaccagg

SEQ ID NO: 216100 - RNA, 31 nt, Human
guugugugggugggagugagacuggguagaa

SEQ ID NO: 216101 - RNA, 31 nt, Human
guugugugggugggcuguugggagugaggau

SEQ ID NO: 216102 - RNA, 32 nt, Human
guuguguuacgaaggcugacccugccaauggc

SEQ ID NO: 216103 - RNA, 32 nt, Human
guuguguuauaaaaaguggcucccagcuugga

SEQ ID NO: 216104 - RNA, 32 nt, Human
guuguguugaguggagggaguuuaagagaaag

SEQ ID NO: 216105 - RNA, 32 nt, Human
guuguguuuugugcugagccuccugggaaacu

SEQ ID NO: 216106 - RNA, 32 nt, Human
guuguuaaaauggaaauaaaagugaaguggua

SEQ ID NO: 216107 - RNA, 32 nt, Human
guuguuaaauaaaugcaguucuuuuugucauu

SEQ ID NO: 216108 - RNA, 32 nt, Human
guuguuaacuucuacauucaagggcuuaucuc

SEQ ID NO: 216109 - RNA, 32 nt, Human
guuguuacucuuccucucucaaggagaaagua

SEQ ID NO: 216110 - RNA, 32 nt, Human
guuguuacugccccauccgccauguccuucag

SEQ ID NO: 216111 - RNA, 32 nt, Human
guuguuacuuggaacagccacuugagaggcuc

SEQ ID NO: 216112 - RNA, 32 nt, Human
guuguuagaacucagaggaagaggcaggggca

SEQ ID NO: 216113 - RNA, 32 nt, Human
guuguuagggcugaggaaccaaucaagguaga

SEQ ID NO: 216114 - RNA, 32 nt, Human
guuguucaccaacagaccagaccuccuuuaac

SEQ ID NO: 216115 - RNA, 32 nt, Human
guuguucacuuaaggggaaccagcacaacagg

SEQ ID NO: 216116 - RNA, 32 nt, Human
guuguucaggcagccaggguccugugcccacc

SEQ ID NO: 216117 - RNA, 31 nt, Human
guuguucauuuucagcacuuacuucaaaaga

SEQ ID NO: 216118 - RNA, 32 nt, Human
guuguucccuuucccuggggcuuuuccauuua

SEQ ID NO: 216119 - RNA, 32 nt, Human
guuguuccuaacuuggggacuggaccuacccu

SEQ ID NO: 216120 - RNA, 32 nt, Human
guuguucucuaaaagaagcuggagggaggaag

SEQ ID NO: 216121 - RNA, 32 nt, Human
guuguucucugcagagaaccagccuggcuccu

SEQ ID NO: 216122 - RNA, 32 nt, Human
guuguucugugggacucaacaggggacagcgu

SEQ ID NO: 216123 - RNA, 32 nt, Human
guuguucuguuugggaccuggaaaagaaccca

SEQ ID NO: 216124 - RNA, 32 nt, Human
guuguucuugcaggaauuagccuccccgucuc

SEQ ID NO: 216125 - RNA, 32 nt, Human
guuguucuuggguuaggauuuggggcucugau

SEQ ID NO: 216126 - RNA, 21 nt, Human
guuguugaauagaccuaggca

SEQ ID NO: 216127 - RNA, 32 nt, Human
guuguugagauggagucucaccuugucgccca

SEQ ID NO: 216128 - RNA, 32 nt, Human
guuguugagauggagucugccacccaggcugg

SEQ ID NO: 216129 - RNA, 32 nt, Human
guuguugauaccuugcaaaaguauugcuucug

SEQ ID NO: 216130 - RNA, 32 nt, Human
guuguugcaaaugacaggaucccauucuuuuu

SEQ ID NO: 216131 - RNA, 32 nt, Human
guuguugcagugagcugugaucaugccaucac

SEQ ID NO: 216132 - RNA, 32 nt, Human
guuguugcagugauugguugucuuuuucuaga

SEQ ID NO: 216133 - RNA, 32 nt, Human
guuguugccacaucugaccaccgaagcuuaaa

SEQ ID NO: 216134 - RNA, 32 nt, Human
guuguugccacuccgccaccauguucgaggcg

SEQ ID NO: 216135 - RNA, 32 nt, Human
guuguugcccaggcuggagugcaguggcgcca

SEQ ID NO: 216136 - RNA, 32 nt, Human
guuguugcccaggcuggagugcaguggcguga

SEQ ID NO: 216137 - RNA, 32 nt, Human
guuguugccuggauuuccagaucaugugacag

SEQ ID NO: 216138 - RNA, 32 nt, Human
guuguugccuguaaucacacaugguuugacau

SEQ ID NO: 216139 - RNA, 32 nt, Human
guuguugccuuccucugucugacaggaaucuc

SEQ ID NO: 216140 - RNA, 32 nt, Human
guuguugcucuaggaagacauuuuuccguuug

SEQ ID NO: 216141 - RNA, 32 nt, Human
guuguugcuguuggacuaaauagcuauuccug

SEQ ID NO: 216142 - RNA, 32 nt, Human
guuguuggaggcugcaaaauguuaguagauau

SEQ ID NO: 216143 - RNA, 32 nt, Human
guuguugggaggaucuggugguuugaggugug

SEQ ID NO: 216144 - RNA, 32 nt, Human
guuguuggggagagaggcagaggcagcuggag

SEQ ID NO: 216145 - RNA, 32 nt, Human
guuguuggggcuuuagcaucugacugauuuug

SEQ ID NO: 216146 - RNA, 32 nt, Human
guuguugggggcuggaggcgggaggucccaug

SEQ ID NO: 216147 - RNA, 32 nt, Human
guuguuguccaaaggaagucugaucuguguuu

SEQ ID NO: 216148 - RNA, 22 nt, Human
guuguugugagcaucaaaugag

SEQ ID NO: 216149 - RNA, 32 nt, Human
guuguuguguaguugcauuggaagagagaaag

SEQ ID NO: 216150 - RNA, 32 nt, Human
guuguuguugagacagagucucgcucugucac

SEQ ID NO: 216151 - RNA, 32 nt, Human
guuguuguugagacagagucucgcucugucgc

SEQ ID NO: 216152 - RNA, 32 nt, Human
guuguuguugagacggagucucgcucugucgc

SEQ ID NO: 216153 - RNA, 32 nt, Human
guuguuguugagauggagucuugcgcuguugc

SEQ ID NO: 216154 - RNA, 32 nt, Human
guuguuguuguuguucuggguaacuccaaccc

SEQ ID NO: 216155 - RNA, 32 nt, Human
guuguuguuguuguuguuuuuggugaggaacu

SEQ ID NO: 216156 - RNA, 32 nt, Human
guuguuguuguuguuuucugagauggagucuu

SEQ ID NO: 216157 - RNA, 32 nt, Human
guuguuguuguuguuuugagauggagucucgc

SEQ ID NO: 216158 - RNA, 32 nt, Human
guuguuguuguuguuuuuggugaggaacucuu

SEQ ID NO: 216159 - RNA, 32 nt, Human
guuguuguuguuuaaauacuuaucucauugcu

SEQ ID NO: 216160 - RNA, 32 nt, Human
guuguuguuuuuccucuccuuuugagaauuuu

SEQ ID NO: 216161 - RNA, 32 nt, Human
guuguuuacaugccaguacaauuuauaauaaa

SEQ ID NO: 216162 - RNA, 32 nt, Human
guuguuuaccagcaggacagagcccgggcgca

SEQ ID NO: 216163 - RNA, 32 nt, Human
guuguuuagccaucuagucugugguuuucugu

SEQ ID NO: 216164 - RNA, 32 nt, Human
guuguuuagggcacccuguccauggcaccuug

SEQ ID NO: 216165 - RNA, 32 nt, Human
guuguuuauccagcaaugccucaaggauguug

SEQ ID NO: 216166 - RNA, 32 nt, Human
guuguuucaaagaugauauuucugugaacaga

SEQ ID NO: 216167 - RNA, 32 nt, Human
guuguuucaccguaaccucugccuccugacuu

SEQ ID NO: 216168 - RNA, 32 nt, Human
guuguuuccaagguacgcuuguuuuccaagga

SEQ ID NO: 216169 - RNA, 32 nt, Human
guuguuuccagccucaggccacgggcuggacg

SEQ ID NO: 216170 - RNA, 32 nt, Human
guuguuuccauggugauggggccagauguaua

SEQ ID NO: 216171 - RNA, 22 nt, Human
guuguuuccucuguaauccuca

SEQ ID NO: 216172 - RNA, 32 nt, Human
guuguuuccuuuuucuccucccgaaggaacag

SEQ ID NO: 216173 - RNA, 20 nt, Human
guuguuucuacaaaucucuc

SEQ ID NO: 216174 - RNA, 21 nt, Human
guuguuucucccugugccuca

SEQ ID NO: 216175 - RNA, 32 nt, Human
guuguuucuccuccuccuugcauauuuccuac

SEQ ID NO: 216176 - RNA, 31 nt, Human
guuguuucucucccugggccucaguuucccc

SEQ ID NO: 216177 - RNA, 32 nt, Human
guuguuucugaugcagcugagaaaaaugcaga

SEQ ID NO: 216178 - RNA, 32 nt, Human
guuguuugaaaccuuuguaacuuguuuguaug

SEQ ID NO: 216179 - RNA, 32 nt, Human
guuguuugccuuucaaccuuguuuuacaguuc

SEQ ID NO: 216180 - RNA, 32 nt, Human
guuguuugggauucccuuuugggucacgcacu

SEQ ID NO: 216181 - RNA, 32 nt, Human
guuguuugucucauuuuugcucugugcauuuu

SEQ ID NO: 216182 - RNA, 32 nt, Human
guuguuuuaaggcuuaauuaaugaaaugccuu

SEQ ID NO: 216183 - RNA, 32 nt, Human
guuguuuucaugccgccugugaucucagauuc

SEQ ID NO: 216184 - RNA, 32 nt, Human
guuguuuucucauauuaagaaauuuaaaucua

SEQ ID NO: 216185 - RNA, 32 nt, Human
guuguuuucugcuuccagaaccacccaggagc

SEQ ID NO: 216186 - RNA, 32 nt, Human
guuguuuucuguucccuugccaucacacuguu

SEQ ID NO: 216187 - RNA, 21 nt, Human
guuguuuuggugccugccucu

SEQ ID NO: 216188 - RNA, 32 nt, Human
guuguuuuguuuuguggaccugcccugggggc

SEQ ID NO: 216189 - RNA, 32 nt, Human
guuguuuuucuuuuccaccugccccaugccuu

SEQ ID NO: 216190 - RNA, 32 nt, Human
guuguuuuugagacagggucuugcucugucac

SEQ ID NO: 216191 - RNA, 32 nt, Human
guuguuuuugagacugaguuucacucuuguug

SEQ ID NO: 216192 - RNA, 32 nt, Human
guuguuuuugagauggagucuugcgcuguugc

SEQ ID NO: 216193 - RNA, 32 nt, Human
guuguuuuugagauggaguuucacucuugucu

SEQ ID NO: 216194 - RNA, 19 nt, Human
guuguuuuuucuuaaugua

SEQ ID NO: 216195 - RNA, 32 nt, Human
guuuaaaaagucagguuguccaucccauuggg

SEQ ID NO: 216196 - RNA, 32 nt, Human
guuuaaaacuucugaagugcugucuuuuuaca

SEQ ID NO: 216197 - RNA, 32 nt, Human
guuuaaaagacuauccuuuugcuccaaugaau

SEQ ID NO: 216198 - RNA, 32 nt, Human
guuuaaaagauccaaggaguacaaaaggagaa

SEQ ID NO: 216199 - RNA, 32 nt, Human
guuuaaacaagaagagagagugugacagagag

SEQ ID NO: 216200 - RNA, 31 nt, Human
guuuaaacaagaucuuccacagcagacuuca

SEQ ID NO: 216201 - RNA, 32 nt, Human
guuuaaacacagauagcacgggccuuucucuu

SEQ ID NO: 216202 - RNA, 32 nt, Human
guuuaaaccagccugggcaccauggugagacc

SEQ ID NO: 216203 - RNA, 32 nt, Human
guuuaaacuaagcugugaaaaauauguaggcu

SEQ ID NO: 216204 - RNA, 32 nt, Human
guuuaaacugcuuccuuugagaacaaguuuga

SEQ ID NO: 216205 - RNA, 22 nt, Human
guuuaaacuguauuuuauacca

SEQ ID NO: 216206 - RNA, 24 nt, Human
guuuaaacuguguuuuauaccagu

SEQ ID NO: 216207 - RNA, 32 nt, Human
guuuaaagaagcuggccauaagaaaaauauau

SEQ ID NO: 216208 - RNA, 32 nt, Human
guuuaaagcugcuguuccucuaccucaguggu

SEQ ID NO: 216209 - RNA, 32 nt, Human
guuuaaaggaagcauccacaccccaacucccg

SEQ ID NO: 216210 - RNA, 32 nt, Human
guuuaaaggaaguauuccucuaaagguucaaa

SEQ ID NO: 216211 - RNA, 32 nt, Human
guuuaaauaugcggagaauguauauugccucu

SEQ ID NO: 216212 - RNA, 32 nt, Human
guuuaaauaugggaguaaauucagccuuucuu

SEQ ID NO: 216213 - RNA, 20 nt, Human
guuuaaauauuugagcuuua

SEQ ID NO: 216214 - RNA, 32 nt, Human
guuuaaaucaccauuaaaaaucaacgcuuucu

SEQ ID NO: 216215 - RNA, 32 nt, Human
guuuaaaugauggugaauacuuucuuaacacu

SEQ ID NO: 216216 - RNA, 32 nt, Human
guuuaaaugggaaucagauccccugguugaga

SEQ ID NO: 216217 - RNA, 32 nt, Human
guuuaaaugggcuuauucuguacauugcuaaa

SEQ ID NO: 216218 - RNA, 32 nt, Human
guuuaaauuuagauguucaaaaguaguuguga

SEQ ID NO: 216219 - RNA, 32 nt, Human
guuuaacacggggaaaccccgucucuacuaaa

SEQ ID NO: 216220 - RNA, 32 nt, Human
guuuaacagccgaagacacacgccuagggaug

SEQ ID NO: 216221 - RNA, 32 nt, Human
guuuaacccacugugcuauaguugcgggugga

SEQ ID NO: 216222 - RNA, 32 nt, Human
guuuaaccugcucuuggucauuggaaauuuac

SEQ ID NO: 216223 - RNA, 32 nt, Human
guuuaaccuuugguucugcccaugaagcaugu

SEQ ID NO: 216224 - RNA, 32 nt, Human
guuuaagaaagccagugacaaguaggaugcaa

SEQ ID NO: 216225 - RNA, 32 nt, Human
guuuaagaaggccaugacucuuuaggugugua

SEQ ID NO: 216226 - RNA, 32 nt, Human
guuuaagaccagccugggcaacauacagaaag

SEQ ID NO: 216227 - RNA, 32 nt, Human
guuuaagaccagccugggcaacauggugaagc

SEQ ID NO: 216228 - RNA, 32 nt, Human
guuuaagaccuccagacucuaacuuuauagau

SEQ ID NO: 216229 - RNA, 32 nt, Human
guuuaagacucugacauuccuggcugucaugc

SEQ ID NO: 216230 - RNA, 32 nt, Human
guuuaagagaauccaguugagaaaacaaacuu

SEQ ID NO: 216231 - RNA, 32 nt, Human
guuuaagagcguagacuugagcuagacuaccc

SEQ ID NO: 216232 - RNA, 32 nt, Human
guuuaagaggauugaggaaggcugggaaguuu

SEQ ID NO: 216233 - RNA, 32 nt, Human
guuuaagcaaugcuucugccucagcuucccaa

SEQ ID NO: 216234 - RNA, 32 nt, Human
guuuaagcaauucuccugcuucaaccucuaga

SEQ ID NO: 216235 - RNA, 32 nt, Human
guuuaagcagagggcuacagaaaacagggaag

SEQ ID NO: 216236 - RNA, 32 nt, Human
guuuaagcgauucuccugccucagcuucccga

SEQ ID NO: 216237 - RNA, 32 nt, Human
guuuaagcuccaccaacuucaagccaugugac

SEQ ID NO: 216238 - RNA, 32 nt, Human
guuuaaggccagagcuuuucucaguauuugau

SEQ ID NO: 216239 - RNA, 32 nt, Human
guuuaagggaaauaagcucugugauaagcaga

SEQ ID NO: 216240 - RNA, 32 nt, Human
guuuaaggucaccugcacucccagccaagugg

SEQ ID NO: 216241 - RNA, 32 nt, Human
guuuaagucaguucuaacugugcaucagaaaa

SEQ ID NO: 216242 - RNA, 32 nt, Human
guuuaagucugucaguuucuuaauuguggaca

SEQ ID NO: 216243 - RNA, 32 nt, Human
guuuaaguuaaguuucucuggugcaaucugug

SEQ ID NO: 216244 - RNA, 32 nt, Human
guuuaaguuauuaagagguaagacuuaguacu

SEQ ID NO: 216245 - RNA, 32 nt, Human
guuuaauaaccccugggccaugccuagaugau

SEQ ID NO: 216246 - RNA, 32 nt, Human
guuuaauagagaaugauugucuuccgaguuuu

SEQ ID NO: 216247 - RNA, 32 nt, Human
guuuaauauugucuuccuaauugggauaauuu

SEQ ID NO: 216248 - RNA, 32 nt, Human
guuuaaugaacuguuuucuacauuucacaggc

SEQ ID NO: 216249 - RNA, 32 nt, Human
guuuaaugagaaauaggagauuagcugcaaua

SEQ ID NO: 216250 - RNA, 32 nt, Human
guuuaauggacucaguuccgcauugcugguga

SEQ ID NO: 216251 - RNA, 32 nt, Human
guuuaauggaggugugggauguuugcauuacg

SEQ ID NO: 216252 - RNA, 32 nt, Human
guuuaauuacaguguuuuacugccugguagaa

SEQ ID NO: 216253 - RNA, 32 nt, Human
guuuaauuccauccaaguuguggauggcaggc

SEQ ID NO: 216254 - RNA, 32 nt, Human
guuuaauuccgcaugauguuucccucuccuuc

SEQ ID NO: 216255 - RNA, 32 nt, Human
guuuaauuguugugcaguuucauagauggguc

SEQ ID NO: 216256 - RNA, 32 nt, Human
guuuaauuucccuucauuucccccuccuuugc

SEQ ID NO: 216257 - RNA, 32 nt, Human
guuuacaaaggacugugcuuuuuauucugucu

SEQ ID NO: 216258 - RNA, 32 nt, Human
guuuacaacaucaccagugccacgucaugagc

SEQ ID NO: 216259 - RNA, 32 nt, Human
guuuacaacauggggaaaggcguauuucuuac

SEQ ID NO: 216260 - RNA, 32 nt, Human
guuuacaagcagagacucacuccaacccaaac

SEQ ID NO: 216261 - RNA, 22 nt, Human
guuuacacacgugcaauuuguu

SEQ ID NO: 216262 - RNA, 32 nt, Human
guuuacacaggcaaacugucagaaaagaguag

SEQ ID NO: 216263 - RNA, 32 nt, Human
guuuacacaguucucaggaggcugugguuuau

SEQ ID NO: 216264 - RNA, 32 nt, Human
guuuacaccacugcacuccagucuggaugaca

SEQ ID NO: 216265 - RNA, 32 nt, Human
guuuacaccuguaaucccagcacuuugggagg

SEQ ID NO: 216266 - RNA, 32 nt, Human
guuuacagaagcugguggcuguggagacaaau

SEQ ID NO: 216267 - RNA, 32 nt, Human
guuuacagacaagauuugcauuugaacugggg

SEQ ID NO: 216268 - RNA, 32 nt, Human
guuuacagaccucagugaugucagcacuguug

SEQ ID NO: 216269 - RNA, 32 nt, Human
guuuacagagaaggaugcugaggaccuagaug

SEQ ID NO: 216270 - RNA, 32 nt, Human
guuuacagccacugggccugggcacacacauu

SEQ ID NO: 216271 - RNA, 32 nt, Human
guuuacaguggaauugugaauaaguuuucagu

SEQ ID NO: 216272 - RNA, 32 nt, Human
guuuacauauaucucugugucucuccaucauu

SEQ ID NO: 216273 - RNA, 32 nt, Human
guuuacaucacagcugccccaggcugaggcgu

SEQ ID NO: 216274 - RNA, 32 nt, Human
guuuacauccugcugcugauagguucaaggaa

SEQ ID NO: 216275 - RNA, 32 nt, Human
guuuacaucgguugccccaggggaagugccug

SEQ ID NO: 216276 - RNA, 32 nt, Human
guuuacaugguuuuaucuagcuuucuuauuua

SEQ ID NO: 216277 - RNA, 32 nt, Human
guuuacauuuucugguacucugugaaagaaga

SEQ ID NO: 216278 - RNA, 32 nt, Human
guuuacauuuuucuguguuacacucaaggaua

SEQ ID NO: 216279 - RNA, 32 nt, Human
guuuaccaaaauaaaggaaaccaccuuuguag

SEQ ID NO: 216280 - RNA, 32 nt, Human
guuuaccaaucugggggcuuguuuuucuuuuc

SEQ ID NO: 216281 - RNA, 32 nt, Human
guuuacccagcagaaauucaagcauauguccu

SEQ ID NO: 216282 - RNA, 32 nt, Human
guuuacccaggagaggaugggacgaaguugga

SEQ ID NO: 216283 - RNA, 32 nt, Human
guuuacccaguauucaucugcaaagccagauu

SEQ ID NO: 216284 - RNA, 32 nt, Human
guuuacccauuuucccuuuuauggcucaugcc

SEQ ID NO: 216285 - RNA, 32 nt, Human
guuuaccccaggcagaaaccacccucauaagg

SEQ ID NO: 216286 - RNA, 32 nt, Human
guuuacccugcucccucucucugucccuaggc

SEQ ID NO: 216287 - RNA, 32 nt, Human
guuuaccuaaaauggugauuuccagccuuuac

SEQ ID NO: 216288 - RNA, 32 nt, Human
guuuaccuaauggugccagccuccuuuugcuu

SEQ ID NO: 216289 - RNA, 32 nt, Human
guuuaccucccaagcuggaguccaguggugag

SEQ ID NO: 216290 - RNA, 32 nt, Human
guuuaccuggaagugguaggggugggagagau

SEQ ID NO: 216291 - RNA, 32 nt, Human
guuuaccuggcuuaccaggggaaguugacaac

SEQ ID NO: 216292 - RNA, 32 nt, Human
guuuaccuuccagaggcuggcaaugcuguuuc

SEQ ID NO: 216293 - RNA, 32 nt, Human
guuuaccuuucacagaaggcaggguaacuugc

SEQ ID NO: 216294 - RNA, 32 nt, Human
guuuacgccagaaaacagagauuucuguuuuc

SEQ ID NO: 216295 - RNA, 19 nt, Human
guuuacgccuguaauccca

SEQ ID NO: 216296 - RNA, 32 nt, Human
guuuacgccuguaaucccagcacugugggagg

SEQ ID NO: 216297 - RNA, 32 nt, Human
guuuacgggaggcgcuugguuacgggauccag

SEQ ID NO: 216298 - RNA, 32 nt, Human
guuuacgucccucccacugcuaaccuuauaua

SEQ ID NO: 216299 - RNA, 32 nt, Human
guuuacuaacaggcaccccugugucaucugaa

SEQ ID NO: 216300 - RNA, 32 nt, Human
guuuacucaccuuuugcacugaacagaauacu

SEQ ID NO: 216301 - RNA, 32 nt, Human
guuuacucagcuuuaauuagauaguugaguca

SEQ ID NO: 216302 - RNA, 32 nt, Human
guuuacucaucccggcgaggugaucccaugcg

SEQ ID NO: 216303 - RNA, 32 nt, Human
guuuacucugcagccuguguuuucuguuuccc

SEQ ID NO: 216304 - RNA, 32 nt, Human
guuuacucuuuuaauuuucauccuuugcaggu

SEQ ID NO: 216305 - RNA, 17 nt, Human
guuuacugaaauuuguu

SEQ ID NO: 216306 - RNA, 32 nt, Human
guuuacugagccuuaauccaccaaguuuauau

SEQ ID NO: 216307 - RNA, 32 nt, Human
guuuacugagggugauaucuucagguaaucag

SEQ ID NO: 216308 - RNA, 32 nt, Human
guuuacugcaaccuccaccuccuaggcucaag

SEQ ID NO: 216309 - RNA, 32 nt, Human
guuuacugcccaccuccgccugccagcccacc

SEQ ID NO: 216310 - RNA, 23 nt, Human
guuuacuguaaugugaaauuuuc

SEQ ID NO: 216311 - RNA, 32 nt, Human
guuuacugugugaacucugacaaguggcugga

SEQ ID NO: 216312 - RNA, 32 nt, Human
guuuacuuaaauaggccaggcgcaguggcuca

SEQ ID NO: 216313 - RNA, 32 nt, Human
guuuacuuaaccucucugugcuuugugugccu

SEQ ID NO: 216314 - RNA, 32 nt, Human
guuuacuucuagaccuggucaggcuccauccc

SEQ ID NO: 216315 - RNA, 32 nt, Human
guuuacuucucccuugccuuugacucauugga

SEQ ID NO: 216316 - RNA, 32 nt, Human
guuuacuucucuucugggcuuccccugguuuc

SEQ ID NO: 216317 - RNA, 32 nt, Human
guuuacuuuauccaauccucaggauuucauug

SEQ ID NO: 216318 - RNA, 32 nt, Human
guuuacuuuucagaucaaauuguuuaugguuu

SEQ ID NO: 216319 - RNA, 32 nt, Human
guuuagaaaccagcuuauugccaaagggaaaa

SEQ ID NO: 216320 - RNA, 32 nt, Human
guuuagaacaguguccagcacaaacaggcacu

SEQ ID NO: 216321 - RNA, 32 nt, Human
guuuagaagcaugcagcaccuccugcuucacu

SEQ ID NO: 216322 - RNA, 32 nt, Human
guuuagaaguagcaaagagcacccacauucaa

SEQ ID NO: 216323 - RNA, 32 nt, Human
guuuagaccuuuaauucuagcacuuugaauuc

SEQ ID NO: 216324 - RNA, 32 nt, Human
guuuagacuaaagagcugggaacagcuucaga

SEQ ID NO: 216325 - RNA, 32 nt, Human
guuuagacugcuaugguaauacauauuuuaaa

SEQ ID NO: 216326 - RNA, 32 nt, Human
guuuagagaaaaauugaagggaaaguacagag

SEQ ID NO: 216327 - RNA, 32 nt, Human
guuuagagcaguuucaaagaugagagcaguag

SEQ ID NO: 216328 - RNA, 32 nt, Human
guuuagaggaaggcccccuaccucuuccacac

SEQ ID NO: 216329 - RNA, 32 nt, Human
guuuagaggcuagagggagcugaggggaggau

SEQ ID NO: 216330 - RNA, 32 nt, Human
guuuagagugaggcuuccacuucacucuccgg

SEQ ID NO: 216331 - RNA, 32 nt, Human
guuuagaucuuaggcaugugcugguauccaca

SEQ ID NO: 216332 - RNA, 32 nt, Human
guuuagaugcacuuuuucuuuugagaguaagg

SEQ ID NO: 216333 - RNA, 32 nt, Human
guuuagauguguuugcuggauaccaaacaaac

SEQ ID NO: 216334 - RNA, 32 nt, Human
guuuagcauccuugcagaauuacuugagaagg

SEQ ID NO: 216335 - RNA, 32 nt, Human
guuuagcaucuuuacagauggagaggacagag

SEQ ID NO: 216336 - RNA, 32 nt, Human
guuuagcauuccucaggcuacugugaaaacac

SEQ ID NO: 216337 - RNA, 32 nt, Human
guuuagcccaggagacaucugccucaagccug

SEQ ID NO: 216338 - RNA, 32 nt, Human
guuuagccugggagcaguggcucacgccuaua

SEQ ID NO: 216339 - RNA, 32 nt, Human
guuuagcuccacuuugcacagaacaguuacuu

SEQ ID NO: 216340 - RNA, 32 nt, Human
guuuagcucuuacacucuauccuuccuagaaa

SEQ ID NO: 216341 - RNA, 32 nt, Human
guuuagcugccucugcugcccuuuacugugac

SEQ ID NO: 216342 - RNA, 32 nt, Human
guuuagcuuccuaucagugggcuuuaaauugu

SEQ ID NO: 216343 - RNA, 32 nt, Human
guuuagcuuccucuugcuucccaaagauuuua

SEQ ID NO: 216344 - RNA, 32 nt, Human
guuuaggaauuggaggcggcagugagucauga

SEQ ID NO: 216345 - RNA, 32 nt, Human
guuuaggaggaaaaggaaauaaggagaaaaga

SEQ ID NO: 216346 - RNA, 32 nt, Human
guuuaggcaccccuuuccccagccucuccucc

SEQ ID NO: 216347 - RNA, 32 nt, Human
guuuaggccaugucacuagaagcgcaguuuaa

SEQ ID NO: 216348 - RNA, 20 nt, Human
guuuaggcugggcgcagugg

SEQ ID NO: 216349 - RNA, 32 nt, Human
guuuagggccaccacauuuucucacugcuuuc

SEQ ID NO: 216350 - RNA, 32 nt, Human
guuuaggggcugggacacucacagccccaguc

SEQ ID NO: 216351 - RNA, 32 nt, Human
guuuaggguggagaaagagguacuggaaaaca

SEQ ID NO: 216352 - RNA, 32 nt, Human
guuuaguagcacaaauccaugcaacccaacag

SEQ ID NO: 216353 - RNA, 32 nt, Human
guuuaguauaaauauaucuagacauucagacu

SEQ ID NO: 216354 - RNA, 32 nt, Human
guuuagucacauauuuguuuaguucugggaaa

SEQ ID NO: 216355 - RNA, 32 nt, Human
guuuagucuuucuaagaaauagaucauggagc

SEQ ID NO: 216356 - RNA, 32 nt, Human
guuuagugaacaaacaauauguggucaauuaa

SEQ ID NO: 216357 - RNA, 32 nt, Human
guuuagugacaugcucaacgggugcgggaagg

SEQ ID NO: 216358 - RNA, 32 nt, Human
guuuagugagacaagcaauuucucccuucuga

SEQ ID NO: 216359 - RNA, 32 nt, Human
guuuagugggcaacauacaguugggccuuccu

SEQ ID NO: 216360 - RNA, 32 nt, Human
guuuagugucaauacuaaugcucuaauaaugu

SEQ ID NO: 216361 - RNA, 32 nt, Human
guuuagugugcaaauaaauguaaaugcuuuua

SEQ ID NO: 216362 - RNA, 21 nt, Human
guuuaguuaggcaggaagcag

SEQ ID NO: 216363 - RNA, 32 nt, Human
guuuaguuucacccagugugcuuuuggauaag

SEQ ID NO: 216364 - RNA, 32 nt, Human
guuuaguuuuauacuauauuugugcuauuuaa

SEQ ID NO: 216365 - RNA, 32 nt, Human
guuuauaacuugaaaaauccucuccgucuccc

SEQ ID NO: 216366 - RNA, 32 nt, Human
guuuauaagacaggagaaaagggagaaagcaa

SEQ ID NO: 216367 - RNA, 32 nt, Human
guuuauaagaccucuuucagcagaucacauca

SEQ ID NO: 216368 - RNA, 32 nt, Human
guuuauaauaaaaaucaucuauacaaaagaag

SEQ ID NO: 216369 - RNA, 32 nt, Human
guuuauacaguuuguguuguucagagauguuu

SEQ ID NO: 216370 - RNA, 32 nt, Human
guuuauaccaagagauucuucuagaucucauu

SEQ ID NO: 216371 - RNA, 32 nt, Human
guuuauagucacaaccucuccucagcccuaac

SEQ ID NO: 216372 - RNA, 23 nt, Human
guuuauauauaaaagaaaagcuc

SEQ ID NO: 216373 - RNA, 32 nt, Human
guuuauauuucaauaaaccucuaccucuucac

SEQ ID NO: 216374 - RNA, 32 nt, Human
guuuaucagaaagggcagaaguaggggaagaa

SEQ ID NO: 216375 - RNA, 22 nt, Human
guuuaucauauaauaauuuguu

SEQ ID NO: 216376 - RNA, 32 nt, Human
guuuaucauccauuuaaacaugagugggaggg

SEQ ID NO: 216377 - RNA, 32 nt, Human
guuuaucaugccacuuccuucuuaccugugcc

SEQ ID NO: 216378 - RNA, 32 nt, Human
guuuauccaaucucaaaacaucuacauaaagg

SEQ ID NO: 216379 - RNA, 32 nt, Human
guuuauccacagacguuaagugcucuuugcuu

SEQ ID NO: 216380 - RNA, 32 nt, Human
guuuauccauuuccucaacugugugcacuccu

SEQ ID NO: 216381 - RNA, 32 nt, Human
guuuauccggguacuaaaugcauuucaacuug

SEQ ID NO: 216382 - RNA, 32 nt, Human
guuuauccucauuccuuuugaccaacuuagca

SEQ ID NO: 216383 - RNA, 32 nt, Human
guuuauccugacaguaaccucuccccaggucg

SEQ ID NO: 216384 - RNA, 32 nt, Human
guuuaucggccguggaauucacucagaaagga

SEQ ID NO: 216385 - RNA, 32 nt, Human
guuuaucugcccccagcauuccggggcagaaa

SEQ ID NO: 216386 - RNA, 32 nt, Human
guuuaucugggcagaaccagauuguuaugucc

SEQ ID NO: 216387 - RNA, 32 nt, Human
guuuaucugugccccagcuuccucacuuaguc

SEQ ID NO: 216388 - RNA, 20 nt, Human
guuuaucuuccacccugcug

SEQ ID NO: 216389 - RNA, 32 nt, Human
guuuaucuugcuggauauuuuauaugaacagu

SEQ ID NO: 216390 - RNA, 32 nt, Human
guuuaugaaauguuacauguagaaaaauacug

SEQ ID NO: 216391 - RNA, 32 nt, Human
guuuaugaauccauuccccuguuuucagggac

SEQ ID NO: 216392 - RNA, 31 nt, Human
guuuaugagcauauauugcauuuaaagaaag

SEQ ID NO: 216393 - RNA, 32 nt, Human
guuuaugauaaacgcuuaaauauuucuaaaau

SEQ ID NO: 216394 - RNA, 32 nt, Human
guuuaugcaaauacaaucagcccagugcaaac

SEQ ID NO: 216395 - RNA, 32 nt, Human
guuuaugcagagccugaggccagaaaaccuag

SEQ ID NO: 216396 - RNA, 32 nt, Human
guuuaugcauuuucauggcucuuaauaaacau

SEQ ID NO: 216397 - RNA, 32 nt, Human
guuuaugccaacgugacuucauucauacagau

SEQ ID NO: 216398 - RNA, 32 nt, Human
guuuaugccacaucggucauuuugaaguaggu

SEQ ID NO: 216399 - RNA, 32 nt, Human
guuuaugccauucuccugucucagccucccga

SEQ ID NO: 216400 - RNA, 32 nt, Human
guuuaugccccagaggauguguacagguuccu

SEQ ID NO: 216401 - RNA, 32 nt, Human
guuuaugccuccauugccccaguucuuaucug

SEQ ID NO: 216402 - RNA, 32 nt, Human
guuuaugccuguaaucccagcacugugggagg

SEQ ID NO: 216403 - RNA, 32 nt, Human
guuuaugcucaauccauguucuauuucagugc

SEQ ID NO: 216404 - RNA, 32 nt, Human
guuuauggaaacagcaguauuugaaaauaaau

SEQ ID NO: 216405 - RNA, 32 nt, Human
guuuauggaagauuugugugcuuuuguguuuu

SEQ ID NO: 216406 - RNA, 32 nt, Human
guuuauggacagugcucuagaugugaaaacag

SEQ ID NO: 216407 - RNA, 32 nt, Human
guuuauggcuguaaucugcaaacucugggagg

SEQ ID NO: 216408 - RNA, 32 nt, Human
guuuaugggaagccgcucugcaacuguccuga

SEQ ID NO: 216409 - RNA, 32 nt, Human
guuuaugggaauggagagaggucugggcagga

SEQ ID NO: 216410 - RNA, 32 nt, Human
guuuaugguaauggguacaugggucaggccau

SEQ ID NO: 216411 - RNA, 29 nt, Human
guuuauggucugauuaugccuggaguauu

SEQ ID NO: 216412 - RNA, 32 nt, Human
guuuaugucaucucuucauuauuuagggcugg

SEQ ID NO: 216413 - RNA, 32 nt, Human
guuuaugucauugucuuaacuucagauacaaa

SEQ ID NO: 216414 - RNA, 32 nt, Human
guuuaugucuguucuuugggcugauuugcugu

SEQ ID NO: 216415 - RNA, 32 nt, Human
guuuaugugaacauuccuaucaauccaaauuc

SEQ ID NO: 216416 - RNA, 32 nt, Human
guuuauguuacagugaaggcucuccuuauuaa

SEQ ID NO: 216417 - RNA, 32 nt, Human
guuuauuaucuucuccacgaccucaccuauac

SEQ ID NO: 216418 - RNA, 32 nt, Human
guuuauuauuuugucaaaauguaaacaaagac

SEQ ID NO: 216419 - RNA, 32 nt, Human
guuuauucccaccccucauccccacccccaua

SEQ ID NO: 216420 - RNA, 32 nt, Human
guuuauucuaacucuuuugcccuucucuucug

SEQ ID NO: 216421 - RNA, 32 nt, Human
guuuauucucacuggagcuuaguuccaaugca

SEQ ID NO: 216422 - RNA, 32 nt, Human
guuuauucucagaagaaaaagauauguaaggu

SEQ ID NO: 216423 - RNA, 32 nt, Human
guuuauuguacagaugucggugcagaucucuu

SEQ ID NO: 216424 - RNA, 32 nt, Human
guuuauuuaaacgcuuaacaucuuccaccgca

SEQ ID NO: 216425 - RNA, 32 nt, Human
guuuauuucaguucacauguaagguauugcaa

SEQ ID NO: 216426 - RNA, 32 nt, Human
guuuauuuccauaccugacucuggguguggug

SEQ ID NO: 216427 - RNA, 32 nt, Human
guuuauuucuaagguauaacgucuuugaugcu

SEQ ID NO: 216428 - RNA, 32 nt, Human
guuuauuucuaaguucacgauacuuguucccc

SEQ ID NO: 216429 - RNA, 32 nt, Human
guuuauuucucuauucccuccuucucauaacu

SEQ ID NO: 216430 - RNA, 20 nt, Human
guuuauuucuguuuauggug

SEQ ID NO: 216431 - RNA, 32 nt, Human
guuuauuuggagaaggaauuguggagaguuug

SEQ ID NO: 216432 - RNA, 32 nt, Human
guuuauuuguccauaggucugccuguagaucu

SEQ ID NO: 216433 - RNA, 32 nt, Human
guuuauuuuccucugccauccuugcuaaguag

SEQ ID NO: 216434 - RNA, 32 nt, Human
guuuauuuucugggaggucucuccuuugugug

SEQ ID NO: 216435 - RNA, 32 nt, Human
guuuauuuuucaaagaagacagcaggucccug

SEQ ID NO: 216436 - RNA, 32 nt, Human
guuuauuuuucccauucccuuccuuuaucugc

SEQ ID NO: 216437 - RNA, 32 nt, Human
guuuauuuuuguuccuuugucuucuggcuuuu

SEQ ID NO: 216438 - RNA, 32 nt, Human
guuucaaacuccuggccucaagcaauccuccu

SEQ ID NO: 216439 - RNA, 32 nt, Human
guuucaaagaagcagcgaucggagauggaugu

SEQ ID NO: 216440 - RNA, 32 nt, Human
guuucaacacacacagacaaacacagccacac

SEQ ID NO: 216441 - RNA, 32 nt, Human
guuucaaccucccagauuccagucauccuccu

SEQ ID NO: 216442 - RNA, 32 nt, Human
guuucaacucuugcuugaaucaagaacagaag

SEQ ID NO: 216443 - RNA, 32 nt, Human
guuucaacuuaagggaucuccaugcggucccu

SEQ ID NO: 216444 - RNA, 32 nt, Human
guuucaagaauggcucucccuaucauuguaaa

SEQ ID NO: 216445 - RNA, 32 nt, Human
guuucaagagguggaguuggguuaacaggaag

SEQ ID NO: 216446 - RNA, 32 nt, Human
guuucaagcaagaaggaugagaauuuuagauc

SEQ ID NO: 216447 - RNA, 32 nt, Human
guuucaagcccagcccccagccuuucuuacca

SEQ ID NO: 216448 - RNA, 22 nt, Human
guuucaagcgauucuccugccu

SEQ ID NO: 216449 - RNA, 32 nt, Human
guuucaaggccuaaaaggaaagagugagaucu

SEQ ID NO: 216450 - RNA, 32 nt, Human
guuucaaggccugggaguaaucuucagcucac

SEQ ID NO: 216451 - RNA, 32 nt, Human
guuucaagucagccuggaauucuuacuuucac

SEQ ID NO: 216452 - RNA, 28 nt, Human
guuucaaguguaccaucuucuuuggcaa

SEQ ID NO: 216453 - RNA, 32 nt, Human
guuucaaguucacaccugcagauucuaggacc

SEQ ID NO: 216454 - RNA, 32 nt, Human
guuucaaguugaguuuuugaugugaucccacc

SEQ ID NO: 216455 - RNA, 32 nt, Human
guuucaaucugcaaaauggggauggggaaggu

SEQ ID NO: 216456 - RNA, 32 nt, Human
guuucaaucugccaggaacuccugggccucau

SEQ ID NO: 216457 - RNA, 32 nt, Human
guuucacacauacauaguaccaugauuuucuu

SEQ ID NO: 216458 - RNA, 32 nt, Human
guuucacacuauuccuauaccuccagguccgg

SEQ ID NO: 216459 - RNA, 31 nt, Human
guuucacaggccuuccuacauuuagaaaucg

SEQ ID NO: 216460 - RNA, 32 nt, Human
guuucaccaguguuggccaggcuggucucgaa

SEQ ID NO: 216461 - RNA, 32 nt, Human
guuucaccauauuggccagucuggucucgaac

SEQ ID NO: 216462 - RNA, 32 nt, Human
guuucaccauguaacacacaauacaugcaugc

SEQ ID NO: 216463 - RNA, 32 nt, Human
guuucaccauguuggccagggcuggucucgaa

SEQ ID NO: 216464 - RNA, 32 nt, Human
guuucaccauuuucucugguuugacuugcuga

SEQ ID NO: 216465 - RNA, 32 nt, Human
guuucacccacacugccagccuggguuggggc

SEQ ID NO: 216466 - RNA, 32 nt, Human
guuucacccuguuucccagguuggaguauagu

SEQ ID NO: 216467 - RNA, 32 nt, Human
guuucacccuuuuuaaucucucagccacaaac

SEQ ID NO: 216468 - RNA, 32 nt, Human
guuucaccguaaccucugccuccugacuucaa

SEQ ID NO: 216469 - RNA, 32 nt, Human
guuucaccuccaccaugguccccaagaugauu

SEQ ID NO: 216470 - RNA, 32 nt, Human
guuucaccuccaccauuguccccaagaugauu

SEQ ID NO: 216471 - RNA, 32 nt, Human
guuucaccugcagcuuucagucugcuuugucu

SEQ ID NO: 216472 - RNA, 32 nt, Human
guuucaccuugauuuuggcccgguucuuucag

SEQ ID NO: 216473 - RNA, 32 nt, Human
guuucacuagaugagcuggaauuuguauuuug

SEQ ID NO: 216474 - RNA, 31 nt, Human
guuucacuaguaggaaauaccaaaagcuucg

SEQ ID NO: 216475 - RNA, 32 nt, Human
guuucacucugucacccaggcugggaauugca

SEQ ID NO: 216476 - RNA, 32 nt, Human
guuucacucuugucucccagacuggagugcaa

SEQ ID NO: 216477 - RNA, 32 nt, Human
guuucacuuauuuaucccaaaauauuuauuau

SEQ ID NO: 216478 - RNA, 32 nt, Human
guuucacuucagucuuccccaucccagguuuu

SEQ ID NO: 216479 - RNA, 24 nt, Human
guuucacuugcucuuugacuguca

SEQ ID NO: 216480 - RNA, 32 nt, Human
guuucacuuuccucuuugguaagaugaauaug

SEQ ID NO: 216481 - RNA, 32 nt, Human
guuucagaacagcugucugcagggaacgccac

SEQ ID NO: 216482 - RNA, 25 nt, Human
guuucagaagugucaggguggagug

SEQ ID NO: 216483 - RNA, 32 nt, Human
guuucagaccaauauggugaaaccccaucucu

SEQ ID NO: 216484 - RNA, 32 nt, Human
guuucagaccagccugggcaacaugacaaaac

SEQ ID NO: 216485 - RNA, 32 nt, Human
guuucagagaggaggaagggaaagagauguga

SEQ ID NO: 216486 - RNA, 32 nt, Human
guuucagagauggacagagaacuuuauuuugg

SEQ ID NO: 216487 - RNA, 32 nt, Human
guuucagaucaucuugcucacagggaaccaaa

SEQ ID NO: 216488 - RNA, 32 nt, Human
guuucagaugggcaguguuauggcuacgugau

SEQ ID NO: 216489 - RNA, 32 nt, Human
guuucagauucagguggacaaaggacaaguga

SEQ ID NO: 216490 - RNA, 32 nt, Human
guuucagcaggaagcuaugccucccagucugu

SEQ ID NO: 216491 - RNA, 32 nt, Human
guuucagcaugaacaugggcuucuugcugucu

SEQ ID NO: 216492 - RNA, 32 nt, Human
guuucagccugggaggucaaggcugcagugag

SEQ ID NO: 216493 - RNA, 32 nt, Human
guuucagcgagcggggauuuccugcgaggccg

SEQ ID NO: 216494 - RNA, 32 nt, Human
guuucagcucacugcaaccuccgccucccagg

SEQ ID NO: 216495 - RNA, 32 nt, Human
guuucagcuccagggaaauggagguauugaug

SEQ ID NO: 216496 - RNA, 32 nt, Human
guuucagcuggacuucguuuuuacuuaaucuu

SEQ ID NO: 216497 - RNA, 32 nt, Human
guuucaggaggacagugggggugguguagaac

SEQ ID NO: 216498 - RNA, 32 nt, Human
guuucaggauguuccccacugagcuggaggaa

SEQ ID NO: 216499 - RNA, 32 nt, Human
guuucaggauuguaggaguggaagaggggaaa

SEQ ID NO: 216500 - RNA, 31 nt, Human
guuucaggcuuaaacaucacagcagauaaug

SEQ ID NO: 216501 - RNA, 32 nt, Human
guuucagguggagcagaucggagagaauaaau

SEQ ID NO: 216502 - RNA, 21 nt, Human
guuucagguugaagggaaaug

SEQ ID NO: 216503 - RNA, 32 nt, Human
guuucagguuucaauccucccaauaccacaag

SEQ ID NO: 216504 - RNA, 32 nt, Human
guuucaguccuccccagacagcagcccuucuu

SEQ ID NO: 216505 - RNA, 32 nt, Human
guuucagucugaguucucugcacuuugaggau

SEQ ID NO: 216506 - RNA, 32 nt, Human
guuucagugcuuugggacagauuuuauauuau

SEQ ID NO: 216507 - RNA, 32 nt, Human
guuucaguguacuggaaacuuuccauuuuauu

SEQ ID NO: 216508 - RNA, 32 nt, Human
guuucaguugucuugaauuucuuucaguggcc

SEQ ID NO: 216509 - RNA, 32 nt, Human
guuucauacagcuagcauuagaugggugaugu

SEQ ID NO: 216510 - RNA, 32 nt, Human
guuucaucagcucuuguuagcaaccagaacuc

SEQ ID NO: 216511 - RNA, 32 nt, Human
guuucaucccaccuuucucaguauaauccaug

SEQ ID NO: 216512 - RNA, 32 nt, Human
guuucaucgcucuugcauuuuaauggucuuga

SEQ ID NO: 216513 - RNA, 32 nt, Human
guuucaucuccaggaaauuccuagacuuauuu

SEQ ID NO: 216514 - RNA, 32 nt, Human
guuucaucuuuuuccccucugagagcaagaag

SEQ ID NO: 216515 - RNA, 32 nt, Human
guuucaugcucagugaggaugauggucaccgu

SEQ ID NO: 216516 - RNA, 32 nt, Human
guuucaugcugugucauucacacucacuacuu

SEQ ID NO: 216517 - RNA, 32 nt, Human
guuucaugucaccugcuacagcucucccccag

SEQ ID NO: 216518 - RNA, 32 nt, Human
guuucauugucacccaggcuggaguacagugg

SEQ ID NO: 216519 - RNA, 32 nt, Human
guuucauuucaucagaugaucugcacagaacu

SEQ ID NO: 216520 - RNA, 24 nt, Human
guuucauuugcagucgacuguaca

SEQ ID NO: 216521 - RNA, 25 nt, Human
guuucauuuuccuuccugguuugug

SEQ ID NO: 216522 - RNA, 32 nt, Human
guuucauuuuguuuaauuuucugggguguuuu

SEQ ID NO: 216523 - RNA, 32 nt, Human
guuucauuuuguuuuugagauagggucuuugu

SEQ ID NO: 216524 - RNA, 32 nt, Human
guuuccaaaaccagaagacaucguaugcuugg

SEQ ID NO: 216525 - RNA, 32 nt, Human
guuuccaaauuuggcugcacauucauaccaau

SEQ ID NO: 216526 - RNA, 32 nt, Human
guuuccaacaccccugugcuccaggcuggguu

SEQ ID NO: 216527 - RNA, 32 nt, Human
guuuccaaguccucuucuaggaccaggcuccu

SEQ ID NO: 216528 - RNA, 32 nt, Human
guuuccaagugaaagguagggaaagugggaga

SEQ ID NO: 216529 - RNA, 32 nt, Human
guuuccacagaagacauguggagcaguugugg

SEQ ID NO: 216530 - RNA, 32 nt, Human
guuuccacagcccggccccaggcccaggucau

SEQ ID NO: 216531 - RNA, 32 nt, Human
guuuccaccccagcugccucucuuguccugag

SEQ ID NO: 216532 - RNA, 32 nt, Human
guuuccaccuccucccccuccuucagccagcc

SEQ ID NO: 216533 - RNA, 32 nt, Human
guuuccaccuuauuuuccugcccccguuuuaa

SEQ ID NO: 216534 - RNA, 32 nt, Human
guuuccacugaggacauucagccugggaagga

SEQ ID NO: 216535 - RNA, 32 nt, Human
guuuccacuuaucuuggauguuuuagauugaa

SEQ ID NO: 216536 - RNA, 32 nt, Human
guuuccagaaaggguuugacuggaggaaccuc

SEQ ID NO: 216537 - RNA, 32 nt, Human
guuuccagaaaucccuguuguaacaucaagug

SEQ ID NO: 216538 - RNA, 32 nt, Human
guuuccagagacaaccucacagucuugaaacg

SEQ ID NO: 216539 - RNA, 32 nt, Human
guuuccagagagagucaugcuggaggagaagg

SEQ ID NO: 216540 - RNA, 32 nt, Human
guuuccagagaguggagagagcagggcuaaau

SEQ ID NO: 216541 - RNA, 32 nt, Human
guuuccagaugcuaucacagacucugcuagug

SEQ ID NO: 216542 - RNA, 32 nt, Human
guuuccagaugguaacaugggagagggcauau

SEQ ID NO: 216543 - RNA, 32 nt, Human
guuuccagccaagaauugccacugcaccugag

SEQ ID NO: 216544 - RNA, 32 nt, Human
guuuccagcccggcugccccaggaugggugag

SEQ ID NO: 216545 - RNA, 32 nt, Human
guuuccagccuacagacuuucggggguuccug

SEQ ID NO: 216546 - RNA, 32 nt, Human
guuuccagccuccagugggcucucccuggggc

SEQ ID NO: 216547 - RNA, 32 nt, Human
guuuccagcgugaggaggaggcugagggcgga

SEQ ID NO: 216548 - RNA, 32 nt, Human
guuuccagcuacuugggaggcggaagcaggag

SEQ ID NO: 216549 - RNA, 32 nt, Human
guuuccagcuuugagcaauacucugcuuucac

SEQ ID NO: 216550 - RNA, 32 nt, Human
guuuccaggaggggcuaccuguugacugucuu

SEQ ID NO: 216551 - RNA, 32 nt, Human
guuuccaggcagagagaagcagcucugggcug

SEQ ID NO: 216552 - RNA, 32 nt, Human
guuuccaggcuccccuccugcaccacagcgga

SEQ ID NO: 216553 - RNA, 32 nt, Human
guuuccagucgggggaacugaggcagagcaag

SEQ ID NO: 216554 - RNA, 32 nt, Human
guuuccagucuguggugaugcugucugucugu

SEQ ID NO: 216555 - RNA, 32 nt, Human
guuuccagugcccaaagguacaugcuuuccga

SEQ ID NO: 216556 - RNA, 32 nt, Human
guuuccauaagaagcuugcaaugacaauaaag

SEQ ID NO: 216557 - RNA, 32 nt, Human
guuuccauacccuuucuuugucuuucuugcuu

SEQ ID NO: 216558 - RNA, 32 nt, Human
guuuccauacccuuucuuuuucuugcuuuuug

SEQ ID NO: 216559 - RNA, 32 nt, Human
guuuccauauuaaaauccucacucuuuaauug

SEQ ID NO: 216560 - RNA, 32 nt, Human
guuuccaucaguaucacuaauggaccaguauu

SEQ ID NO: 216561 - RNA, 32 nt, Human
guuuccauccuuugcauuucucugcgaguagu

SEQ ID NO: 216562 - RNA, 32 nt, Human
guuuccaucuuuugggcuguucuuguguauuu

SEQ ID NO: 216563 - RNA, 32 nt, Human
guuuccaugcacaggccagcaccucaguuaug

SEQ ID NO: 216564 - RNA, 31 nt, Human
guuuccaugccuuuaguagaagagaggcauc

SEQ ID NO: 216565 - RNA, 32 nt, Human
guuuccauggaaaugauccuuguuaaauucag

SEQ ID NO: 216566 - RNA, 32 nt, Human
guuuccauguccaucucaacagucuggccuuc

SEQ ID NO: 216567 - RNA, 32 nt, Human
guuuccauuaugcaacuugucuauguaaauaa

SEQ ID NO: 216568 - RNA, 32 nt, Human
guuuccauucucugcccagcagucucuuaccu

SEQ ID NO: 216569 - RNA, 32 nt, Human
guuucccaaaggacaagcuaauuggaauuauc

SEQ ID NO: 216570 - RNA, 32 nt, Human
guuucccacaauauaaaacuguacuucacugu

SEQ ID NO: 216571 - RNA, 32 nt, Human
guuucccacagcaacacagagacugauucaaa

SEQ ID NO: 216572 - RNA, 32 nt, Human
guuucccaccugcugcuacacucaugucugag

SEQ ID NO: 216573 - RNA, 32 nt, Human
guuucccagaagugccugguucuggguacuug

SEQ ID NO: 216574 - RNA, 32 nt, Human
guuucccagacuccggagcugcccgggacagg

SEQ ID NO: 216575 - RNA, 24 nt, Human
guuucccaggcugaagugcagugg

SEQ ID NO: 216576 - RNA, 23 nt, Human
guuucccaggcuggagugcaaug

SEQ ID NO: 216577 - RNA, 24 nt, Human
guuucccaggcuggagugcaaugg

SEQ ID NO: 216578 - RNA, 24 nt, Human
guuucccaggcuggagugcagugg

SEQ ID NO: 216579 - RNA, 23 nt, Human
guuucccaggcuggaguguagug

SEQ ID NO: 216580 - RNA, 32 nt, Human
guuucccagguggguggggguggccuucagug

SEQ ID NO: 216581 - RNA, 32 nt, Human
guuucccauucuauguugaucccauucuugaa

SEQ ID NO: 216582 - RNA, 32 nt, Human
guuucccauuuuaaaaucuaaacuagacaucu

SEQ ID NO: 216583 - RNA, 22 nt, Human
guuuccccaaagccccagggca

SEQ ID NO: 216584 - RNA, 32 nt, Human
guuuccccaagaaaccuggaagugaagugacc

SEQ ID NO: 216585 - RNA, 32 nt, Human
guuuccccacagaacauugucuuucugguguc

SEQ ID NO: 216586 - RNA, 32 nt, Human
guuuccccaccaggaaaugagauaggaggacu

SEQ ID NO: 216587 - RNA, 32 nt, Human
guuuccccauuucugucagagccaagggcuug

SEQ ID NO: 216588 - RNA, 32 nt, Human
guuucccccauaccacugugguaguggguaag

SEQ ID NO: 216589 - RNA, 32 nt, Human
guuucccccuugugugguuuccgccugcgaca

SEQ ID NO: 216590 - RNA, 32 nt, Human
guuuccccucaugaucuggccucugcccccuu

SEQ ID NO: 216591 - RNA, 32 nt, Human
guuuccccucauugcucccugggcuaagacag

SEQ ID NO: 216592 - RNA, 32 nt, Human
guuuccccuccucuccccugugacuucacaag

SEQ ID NO: 216593 - RNA, 32 nt, Human
guuuccccucucagcaucgcuuuugcugggcc

SEQ ID NO: 216594 - RNA, 32 nt, Human
guuuccccugccacuccagcccccuugagcug

SEQ ID NO: 216595 - RNA, 32 nt, Human
guuuccccugcucuucucucuugccugccacc

SEQ ID NO: 216596 - RNA, 32 nt, Human
guuucccgccuccuagggaagggaagggagac

SEQ ID NO: 216597 - RNA, 32 nt, Human
guuucccuacagaaaagaaauuggacagaaca

SEQ ID NO: 216598 - RNA, 32 nt, Human
guuucccucugguucuuccuggcuuugcaccu

SEQ ID NO: 216599 - RNA, 32 nt, Human
guuucccugagcgacucuguucuguguggggc

SEQ ID NO: 216600 - RNA, 32 nt, Human
guuucccugcagucucccacacggacaccuuc

SEQ ID NO: 216601 - RNA, 32 nt, Human
guuucccugccugucacugcucgggcagaggc

SEQ ID NO: 216602 - RNA, 32 nt, Human
guuucccugcuguuggcuuucuguuuugguua

SEQ ID NO: 216603 - RNA, 32 nt, Human
guuucccuguaacccagagcugaugggugaua

SEQ ID NO: 216604 - RNA, 32 nt, Human
guuucccuuccccuugaaccagucccaguguc

SEQ ID NO: 216605 - RNA, 32 nt, Human
guuuccgagugagacaaagcaauuacuggaag

SEQ ID NO: 216606 - RNA, 28 nt, Human
guuuccgccauggaugccucaucaccaa

SEQ ID NO: 216607 - RNA, 32 nt, Human
guuuccgcccagagcuggagucucccagcugc

SEQ ID NO: 216608 - RNA, 32 nt, Human
guuuccgggcggcucccuucccuugcaugcug

SEQ ID NO: 216609 - RNA, 32 nt, Human
guuuccgggcguuuggugagucucuagauuuu

SEQ ID NO: 216610 - RNA, 32 nt, Human
guuuccgggugaggaagcagcuaggggcgggu

SEQ ID NO: 216611 - RNA, 23 nt, Human
guuuccgguggggugggcggggc

SEQ ID NO: 216612 - RNA, 32 nt, Human
guuuccgugggcaagucguguguacuccucgc

SEQ ID NO: 216613 - RNA, 32 nt, Human
guuuccguuccucugcccgccaugccguuccu

SEQ ID NO: 216614 - RNA, 32 nt, Human
guuuccuaagugagagagagccuggcugaagc

SEQ ID NO: 216615 - RNA, 32 nt, Human
guuuccuacagcuguaagauagcugcuacuca

SEQ ID NO: 216616 - RNA, 32 nt, Human
guuuccuaggagacagacuuugauagugauuu

SEQ ID NO: 216617 - RNA, 32 nt, Human
guuuccuaucuaguuuguaaauaaucauggug

SEQ ID NO: 216618 - RNA, 32 nt, Human
guuuccuauuaaaauacagacauuucuacccu

SEQ ID NO: 216619 - RNA, 32 nt, Human
guuuccucaccacuuuucccuuaauucuaagu

SEQ ID NO: 216620 - RNA, 19 nt, Human
guuuccucacuucagggug

SEQ ID NO: 216621 - RNA, 32 nt, Human
guuuccucagcuugaaaugggcuuggcauaca

SEQ ID NO: 216622 - RNA, 32 nt, Human
guuuccucaggagcugucugggguguugaugg

SEQ ID NO: 216623 - RNA, 28 nt, Human
guuuccucaucugcugccucuccagacu

SEQ ID NO: 216624 - RNA, 32 nt, Human
guuuccucauuucaucagaccuaguguucuca

SEQ ID NO: 216625 - RNA, 32 nt, Human
guuuccuccaaggcccucugaagugcagccca

SEQ ID NO: 216626 - RNA, 32 nt, Human
guuuccuccacuucucagguuugguauuuagu

SEQ ID NO: 216627 - RNA, 32 nt, Human
guuuccucuagggugauauucgucauuacucu

SEQ ID NO: 216628 - RNA, 32 nt, Human
guuuccucucaacuaucgggggagaaacuccc

SEQ ID NO: 216629 - RNA, 32 nt, Human
guuuccucucacucugaauuauucuuccucuc

SEQ ID NO: 216630 - RNA, 32 nt, Human
guuuccucuccggugcaauccccuguccuuuc

SEQ ID NO: 216631 - RNA, 32 nt, Human
guuuccucuccuccaccaugguugacagcacu

SEQ ID NO: 216632 - RNA, 32 nt, Human
guuuccucugcccccuccuuuucccacugguu

SEQ ID NO: 216633 - RNA, 32 nt, Human
guuuccucugggcuccaaucuccagucccugg

SEQ ID NO: 216634 - RNA, 32 nt, Human
guuuccucuuuccuuucccucuugucagguca

SEQ ID NO: 216635 - RNA, 32 nt, Human
guuuccugacaguggggagauggcauguuacu

SEQ ID NO: 216636 - RNA, 32 nt, Human
guuuccugagcagguacuuagcuuauagagcu

SEQ ID NO: 216637 - RNA, 32 nt, Human
guuuccugagccacgcccagugugugaacuug

SEQ ID NO: 216638 - RNA, 32 nt, Human
guuuccugcccuggcccuggcccugcgaucuc

SEQ ID NO: 216639 - RNA, 32 nt, Human
guuuccugcgagccagccugagcgcaacacuu

SEQ ID NO: 216640 - RNA, 32 nt, Human
guuuccugcgcuuucuccuuuuccugugaaau

SEQ ID NO: 216641 - RNA, 32 nt, Human
guuuccuggcaaggcaggcucucacaugccug

SEQ ID NO: 216642 - RNA, 32 nt, Human
guuuccuggccacuuuuguugauagcagaugg

SEQ ID NO: 216643 - RNA, 32 nt, Human
guuuccugggcugucacguacacuccugcugc

SEQ ID NO: 216644 - RNA, 32 nt, Human
guuuccuggggacccaggcuugcaaagugacg

SEQ ID NO: 216645 - RNA, 32 nt, Human
guuuccugggucaggaacagagccaacaggau

SEQ ID NO: 216646 - RNA, 32 nt, Human
guuuccuggugucucuuuagcaagugaaguuu

SEQ ID NO: 216647 - RNA, 32 nt, Human
guuuccugguuuguaaggcagccccagcguuc

SEQ ID NO: 216648 - RNA, 32 nt, Human
guuuccuguaguucucccucuucccacaaagc

SEQ ID NO: 216649 - RNA, 32 nt, Human
guuuccuguggaaccuggaggcuccugaugcc

SEQ ID NO: 216650 - RNA, 32 nt, Human
guuuccuguggccaggcacagagccaggugcu

SEQ ID NO: 216651 - RNA, 32 nt, Human
guuuccuguggcuggugaugcugugguuaagu

SEQ ID NO: 216652 - RNA, 32 nt, Human
guuuccuguucauccgugucccugcaaaggac

SEQ ID NO: 216653 - RNA, 32 nt, Human
guuuccuuauaccagauccucagucucacuaa

SEQ ID NO: 216654 - RNA, 32 nt, Human
guuuccuucacaggaauccuuuguccagguag

SEQ ID NO: 216655 - RNA, 32 nt, Human
guuuccuucccgcagugucugcguccgcacag

SEQ ID NO: 216656 - RNA, 32 nt, Human
guuuccuucccucuuuccuuccuuccuccugg

SEQ ID NO: 216657 - RNA, 32 nt, Human
guuuccuuccuuccuuccuuccuuccuuccuu

SEQ ID NO: 216658 - RNA, 32 nt, Human
guuuccuucucccuuucuuggcccuccucugc

SEQ ID NO: 216659 - RNA, 32 nt, Human
guuuccuucuuugcuuucaucccuguugcacu

SEQ ID NO: 216660 - RNA, 32 nt, Human
guuuccuugaaggaaacuacagaaaaggaaag

SEQ ID NO: 216661 - RNA, 32 nt, Human
guuuccuugcugaaaaugaaacccuaucuuuc

SEQ ID NO: 216662 - RNA, 32 nt, Human
guuuccuuggggaccccugaacaaggagguug

SEQ ID NO: 216663 - RNA, 32 nt, Human
guuuccuuguccugaagguuugaauggaguug

SEQ ID NO: 216664 - RNA, 32 nt, Human
guuuccuuuacuucccugcuuccugggaauca

SEQ ID NO: 216665 - RNA, 32 nt, Human
guuuccuuucagggauguggacaggguaaggg

SEQ ID NO: 216666 - RNA, 32 nt, Human
guuuccuuugcuguggugggagauaguuugac

SEQ ID NO: 216667 - RNA, 32 nt, Human
guuuccuuuuccucucccaacccucugguugg

SEQ ID NO: 216668 - RNA, 32 nt, Human
guuucgaacucugggguucaagcaaucugccc

SEQ ID NO: 216669 - RNA, 32 nt, Human
guuucgagagagaagggagcaagacaagagca

SEQ ID NO: 216670 - RNA, 32 nt, Human
guuucgccacugcacaccagccugggugacag

SEQ ID NO: 216671 - RNA, 18 nt, Human
guuucgccauguugguca

SEQ ID NO: 216672 - RNA, 32 nt, Human
guuucgccccagccacccccacugccugggcc

SEQ ID NO: 216673 - RNA, 32 nt, Human
guuucgcgcuggccggggcucugggugcugcc

SEQ ID NO: 216674 - RNA, 32 nt, Human
guuucggaaagagggaaaagaguccccgagcc

SEQ ID NO: 216675 - RNA, 32 nt, Human
guuucggaccagccuggccaacguggugaaac

SEQ ID NO: 216676 - RNA, 32 nt, Human
guuucggcaggcgggugaggucgcugagggcc

SEQ ID NO: 216677 - RNA, 32 nt, Human
guuucggguggcgggauggggagcagcuuggu

SEQ ID NO: 216678 - RNA, 32 nt, Human
guuucgucucccacauacagaagcagggugga

SEQ ID NO: 216679 - RNA, 32 nt, Human
guuucgugcugucauuuauuaggcugggccac

SEQ ID NO: 216680 - RNA, 32 nt, Human
guuucguugucuagagccccuucuccaauugu

SEQ ID NO: 216681 - RNA, 32 nt, Human
guuucguuuccucugcugucuucuccagagcu

SEQ ID NO: 216682 - RNA, 32 nt, Human
guuucguuugguaguucaucugccuuuuaacc

SEQ ID NO: 216683 - RNA, 22 nt, Human
guuucuacuaaaaauacaaaau

SEQ ID NO: 216684 - RNA, 32 nt, Human
guuucuacuaaaauauacaaaaauuagccagg

SEQ ID NO: 216685 - RNA, 32 nt, Human
guuucuacuuuugcauucuuccucguuuucuc

SEQ ID NO: 216686 - RNA, 32 nt, Human
guuucuagaagccacuccagccacuccuuccu

SEQ ID NO: 216687 - RNA, 32 nt, Human
guuucuagccccagguuccugguuguguccgg

SEQ ID NO: 216688 - RNA, 32 nt, Human
guuucuaggguaagggaccugcagguguaagc

SEQ ID NO: 216689 - RNA, 32 nt, Human
guuucuaugagcagcugcuguaacauacucau

SEQ ID NO: 216690 - RNA, 32 nt, Human
guuucucaacagaugguuucaguggcucagga

SEQ ID NO: 216691 - RNA, 22 nt, Human
guuucucaaccucauuugcuca

SEQ ID NO: 216692 - RNA, 32 nt, Human
guuucucaagaaccuguaaucuugccuuaauc

SEQ ID NO: 216693 - RNA, 32 nt, Human
guuucucacaggagaauagcuaugagucaaau

SEQ ID NO: 216694 - RNA, 32 nt, Human
guuucucagccccuuaggacgcgggucuccuu

SEQ ID NO: 216695 - RNA, 32 nt, Human
guuucucagcggccuagaugccucuuggucug

SEQ ID NO: 216696 - RNA, 32 nt, Human
guuucucagggcccugggcgcccgcccaagac

SEQ ID NO: 216697 - RNA, 32 nt, Human
guuucucagggugggaaaugugggggcuuugc

SEQ ID NO: 216698 - RNA, 32 nt, Human
guuucucagggugguccuaugggaaugaguau

SEQ ID NO: 216699 - RNA, 32 nt, Human
guuucucagucuuugcacuaugacauuuuuag

SEQ ID NO: 216700 - RNA, 32 nt, Human
guuucucaguuuccucauccauccaacaauca

SEQ ID NO: 216701 - RNA, 32 nt, Human
guuucucauccaggaagguaaccuugggcauu

SEQ ID NO: 216702 - RNA, 32 nt, Human
guuucucaucuucucucuacggccucugaguu

SEQ ID NO: 216703 - RNA, 32 nt, Human
guuucucaucuucucucuacugccucugaguu

SEQ ID NO: 216704 - RNA, 32 nt, Human
guuucucauuuuucuuuucuuuuuacauaugu

SEQ ID NO: 216705 - RNA, 32 nt, Human
guuucuccacagccuucuccagccugugugau

SEQ ID NO: 216706 - RNA, 32 nt, Human
guuucuccacaguccucuucugggcaaauucu

SEQ ID NO: 216707 - RNA, 32 nt, Human
guuucuccagaacacaggaggaaaagugaacc

SEQ ID NO: 216708 - RNA, 32 nt, Human
guuucuccaguucugccugcccuggcagaauc

SEQ ID NO: 216709 - RNA, 32 nt, Human
guuucucccacauauucacauacgugucugug

SEQ ID NO: 216710 - RNA, 32 nt, Human
guuucucccauagaaagagccgggacacgcag

SEQ ID NO: 216711 - RNA, 32 nt, Human
guuucuccccuccgacuggggcucccugagga

SEQ ID NO: 216712 - RNA, 21 nt, Human
guuucucccucccaggcuagg

SEQ ID NO: 216713 - RNA, 19 nt, Human
guuucucccugauggcuag

SEQ ID NO: 216714 - RNA, 32 nt, Human
guuucucccuugccagguccuugggaugguug

SEQ ID NO: 216715 - RNA, 32 nt, Human
guuucuccgggaacuggugggagacacaggau

SEQ ID NO: 216716 - RNA, 32 nt, Human
guuucuccuccaccucucaaugcaaacacuau

SEQ ID NO: 216717 - RNA, 32 nt, Human
guuucuccucuuggcccuccccuacagaccau

SEQ ID NO: 216718 - RNA, 32 nt, Human
guuucuccuggcugaggaagggaagggaacau

SEQ ID NO: 216719 - RNA, 32 nt, Human
guuucuccuguugcacaaaaaugaugucuaac

SEQ ID NO: 216720 - RNA, 22 nt, Human
guuucuccuuuauaaaggcagg

SEQ ID NO: 216721 - RNA, 32 nt, Human
guuucucgagggcgggagcugcgcagcgcucc

SEQ ID NO: 216722 - RNA, 32 nt, Human
guuucucgcacagcagaguucuuggaagagcc

SEQ ID NO: 216723 - RNA, 32 nt, Human
guuucucggcaccagugccucagugcugcaau

SEQ ID NO: 216724 - RNA, 32 nt, Human
guuucucuacauccucuccagcaccuguuguu

SEQ ID NO: 216725 - RNA, 32 nt, Human
guuucucuccacccaaaauaucacagcugcuu

SEQ ID NO: 216726 - RNA, 28 nt, Human
guuucucuccacucugccucaucucugu

SEQ ID NO: 216727 - RNA, 32 nt, Human
guuucucuccauauuugcccagaagaggcagu

SEQ ID NO: 216728 - RNA, 32 nt, Human
guuucucucccggccccacugccuucagguau

SEQ ID NO: 216729 - RNA, 32 nt, Human
guuucucuccuccacuucauauuucauaccca

SEQ ID NO: 216730 - RNA, 32 nt, Human
guuucucuccuuggaccuuggguuuccaacuc

SEQ ID NO: 216731 - RNA, 32 nt, Human
guuucucucucccccuuucucucuucucuugg

SEQ ID NO: 216732 - RNA, 20 nt, Human
guuucucucugcuguaggug

SEQ ID NO: 216733 - RNA, 32 nt, Human
guuucucucuuucagcaccagcucuugccccu

SEQ ID NO: 216734 - RNA, 32 nt, Human
guuucucugaaaaauuuuagagcuagguauag

SEQ ID NO: 216735 - RNA, 32 nt, Human
guuucucugcccaaggaagacagaacauggag

SEQ ID NO: 216736 - RNA, 32 nt, Human
guuucucugcugucaagcacucugugucaccc

SEQ ID NO: 216737 - RNA, 32 nt, Human
guuucucugggcuucaaauggcuggcaaggcu

SEQ ID NO: 216738 - RNA, 32 nt, Human
guuucucuuccggggucucugcucuuaugcau

SEQ ID NO: 216739 - RNA, 32 nt, Human
guuucucuucuggugagauaggguuccugguu

SEQ ID NO: 216740 - RNA, 32 nt, Human
guuucucuugaugaagaagaagaugguggugg

SEQ ID NO: 216741 - RNA, 32 nt, Human
guuucucuuucuuccuccuugauuuuccaucu

SEQ ID NO: 216742 - RNA, 32 nt, Human
guuucugaaauguaagcauuacaugacuauug

SEQ ID NO: 216743 - RNA, 32 nt, Human
guuucugaacauucuccuucauagcacagugg

SEQ ID NO: 216744 - RNA, 32 nt, Human
guuucugaaccauguacauacauguucugaaa

SEQ ID NO: 216745 - RNA, 24 nt, Human
guuucugaacugugggugagaggc

SEQ ID NO: 216746 - RNA, 32 nt, Human
guuucugaacugugggugagaggcagaaaggg

SEQ ID NO: 216747 - RNA, 32 nt, Human
guuucugacuccaaauucugcuaggaaccaga

SEQ ID NO: 216748 - RNA, 32 nt, Human
guuucugaucauauaacugugcuagaagucaa

SEQ ID NO: 216749 - RNA, 32 nt, Human
guuucugaucaucugaaucuuaaucaugucca

SEQ ID NO: 216750 - RNA, 32 nt, Human
guuucugauuauuuucuauguaaaggaacccu

SEQ ID NO: 216751 - RNA, 32 nt, Human
guuucugcaagcuguaucccaagugcacuguc

SEQ ID NO: 216752 - RNA, 32 nt, Human
guuucugcaaugcucacuugcggucacauagu

SEQ ID NO: 216753 - RNA, 32 nt, Human
guuucugcacaguuguaacugcucuuggggau

SEQ ID NO: 216754 - RNA, 32 nt, Human
guuucugccacccuguaacaggccauuaaagc

SEQ ID NO: 216755 - RNA, 32 nt, Human
guuucugccauucugggugacccuguauuucu

SEQ ID NO: 216756 - RNA, 23 nt, Human
guuucugcccacuuggcuauagg

SEQ ID NO: 216757 - RNA, 32 nt, Human
guuucugccgcauuugauguggaggcagugaa

SEQ ID NO: 216758 - RNA, 32 nt, Human
guuucugccggaucagaugagcagauugguua

SEQ ID NO: 216759 - RNA, 32 nt, Human
guuucugccucaggcccugcccugcucuacuc

SEQ ID NO: 216760 - RNA, 32 nt, Human
guuucugcgcuccuagccugggugacagagca

SEQ ID NO: 216761 - RNA, 32 nt, Human
guuucugcgcuuccuucucccucucuccagac

SEQ ID NO: 216762 - RNA, 32 nt, Human
guuucugcuauucccuagcucuucuccagaac

SEQ ID NO: 216763 - RNA, 32 nt, Human
guuucugcucagucugucccccuucccccucg

SEQ ID NO: 216764 - RNA, 32 nt, Human
guuucugcuuaggagguggggacuugggcugg

SEQ ID NO: 216765 - RNA, 32 nt, Human
guuucuggaagagucugugcgcccauggaugg

SEQ ID NO: 216766 - RNA, 32 nt, Human
guuucuggagagaaugggaggauuccagaggg

SEQ ID NO: 216767 - RNA, 32 nt, Human
guuucuggagcaguggacugccacaagccacc

SEQ ID NO: 216768 - RNA, 20 nt, Human
guuucuggagcuacuugcca

SEQ ID NO: 216769 - RNA, 32 nt, Human
guuucuggagugauucuagagggagacuuguu

SEQ ID NO: 216770 - RNA, 32 nt, Human
guuucuggaucugccccacaaaguagguccug

SEQ ID NO: 216771 - RNA, 32 nt, Human
guuucuggccagaggaauuggggucuugccau

SEQ ID NO: 216772 - RNA, 22 nt, Human
guuucugggaggagugaggggc

SEQ ID NO: 216773 - RNA, 22 nt, Human
guuucugggcagugcaggaagu

SEQ ID NO: 216774 - RNA, 21 nt, Human
guuucuggggcugguggaagc

SEQ ID NO: 216775 - RNA, 26 nt, Human
guuucugggguggaaggcagggaggu

SEQ ID NO: 216776 - RNA, 23 nt, Human
guuucuggguccuggagggaggc

SEQ ID NO: 216777 - RNA, 32 nt, Human
guuucugggucuuccucuuccccucuuuacca

SEQ ID NO: 216778 - RNA, 22 nt, Human
guuucugggugccucugccuua

SEQ ID NO: 216779 - RNA, 23 nt, Human
guuucugggugucucuggggagc

SEQ ID NO: 216780 - RNA, 32 nt, Human
guuucugguccccuguuuacauggcccaugag

SEQ ID NO: 216781 - RNA, 32 nt, Human
guuucuggugaaaacauggagaggaggcugga

SEQ ID NO: 216782 - RNA, 32 nt, Human
guuucugucauaaagcaaaggaaauguuacca

SEQ ID NO: 216783 - RNA, 32 nt, Human
guuucuguccccgggagccucagggcucugag

SEQ ID NO: 216784 - RNA, 32 nt, Human
guuucugucccugcaucuccccuagccccguu

SEQ ID NO: 216785 - RNA, 32 nt, Human
guuucugucuuucuccccugggcuccugucuc

SEQ ID NO: 216786 - RNA, 32 nt, Human
guuucugugacccagcagcaucaagccccucg

SEQ ID NO: 216787 - RNA, 32 nt, Human
guuucugugagagugacagagcugugcccguu

SEQ ID NO: 216788 - RNA, 32 nt, Human
guuucugugagcagagcagacagaaaggagau

SEQ ID NO: 216789 - RNA, 32 nt, Human
guuucugugggguuuggcauggguguuuuggu

SEQ ID NO: 216790 - RNA, 32 nt, Human
guuucuguggguacuccucuuaccccagcaaa

SEQ ID NO: 216791 - RNA, 32 nt, Human
guuucuguguggguccccacucccagggaggg

SEQ ID NO: 216792 - RNA, 32 nt, Human
guuucuguuacucugugcaaaauaacuuugag

SEQ ID NO: 216793 - RNA, 21 nt, Human
guuucuguucagcucuuuuca

SEQ ID NO: 216794 - RNA, 21 nt, Human
guuucuguucaguuucccuca

SEQ ID NO: 216795 - RNA, 32 nt, Human
guuucuguuccuugugggaugcugcucuaggg

SEQ ID NO: 216796 - RNA, 32 nt, Human
guuucuguuucaaagcacaauaacuaguaaua

SEQ ID NO: 216797 - RNA, 32 nt, Human
guuucuguuuuauuuaaaguaacugacauuuu

SEQ ID NO: 216798 - RNA, 32 nt, Human
guuucuuaaugaagaugaaaaauauguaauuc

SEQ ID NO: 216799 - RNA, 32 nt, Human
guuucuuagaacaacaacaaauacauggucug

SEQ ID NO: 216800 - RNA, 32 nt, Human
guuucuuauccagggcuucucccagaaagcag

SEQ ID NO: 216801 - RNA, 32 nt, Human
guuucuucaccaucacuccaucaaagucccug

SEQ ID NO: 216802 - RNA, 32 nt, Human
guuucuucaguggcaaauguagcccugcaucc

SEQ ID NO: 216803 - RNA, 32 nt, Human
guuucuucaugucuagauucagaguauggauu

SEQ ID NO: 216804 - RNA, 32 nt, Human
guuucuucauucuuuacugcacucagauuuaa

SEQ ID NO: 216805 - RNA, 32 nt, Human
guuucuucauuuuaaaaaggaaaagguaauuu

SEQ ID NO: 216806 - RNA, 21 nt, Human
guuucuuccacaacagaagua

SEQ ID NO: 216807 - RNA, 32 nt, Human
guuucuuccauguugcccaggcuggucucgaa

SEQ ID NO: 216808 - RNA, 32 nt, Human
guuucuucccacccugucuucuccccuaggug

SEQ ID NO: 216809 - RNA, 32 nt, Human
guuucuucccccauaggguccugucuuuuggg

SEQ ID NO: 216810 - RNA, 32 nt, Human
guuucuuccccuccuccaguucuuuggaaauu

SEQ ID NO: 216811 - RNA, 32 nt, Human
guuucuucccuccuguucucugguuauagcug

SEQ ID NO: 216812 - RNA, 32 nt, Human
guuucuucgcccucccuuuccuucccuucguc

SEQ ID NO: 216813 - RNA, 32 nt, Human
guuucuucuccuccuuucucucccucuuuccc

SEQ ID NO: 216814 - RNA, 32 nt, Human
guuucuucuccucuacagguccucccggcccg

SEQ ID NO: 216815 - RNA, 32 nt, Human
guuucuucuccucuaucucauaaugcauuaug

SEQ ID NO: 216816 - RNA, 32 nt, Human
guuucuucucuccccuccuucccacccuuuuu

SEQ ID NO: 216817 - RNA, 32 nt, Human
guuucuucucucuuugaaaccaaauagcacgc

SEQ ID NO: 216818 - RNA, 32 nt, Human
guuucuucugaaauucucaggcagucagacug

SEQ ID NO: 216819 - RNA, 32 nt, Human
guuucuucugucuucuugucagucccaagugc

SEQ ID NO: 216820 - RNA, 32 nt, Human
guuucuucuuauuuugcauuuaccccaauuuc

SEQ ID NO: 216821 - RNA, 32 nt, Human
guuucuucuuuacacacauauacacacagaca

SEQ ID NO: 216822 - RNA, 32 nt, Human
guuucuugagccaggucuucuguccaugcaug

SEQ ID NO: 216823 - RNA, 24 nt, Human
guuucuugaugugggaggggaggu

SEQ ID NO: 216824 - RNA, 32 nt, Human
guuucuugcauuggacaggcccagucuucucc

SEQ ID NO: 216825 - RNA, 32 nt, Human
guuucuuggauaggggccagugcagugccauc

SEQ ID NO: 216826 - RNA, 32 nt, Human
guuucuuggccucuucagcuaacuuuuaagug

SEQ ID NO: 216827 - RNA, 32 nt, Human
guuucuuggcucugcucagccaugccaggcag

SEQ ID NO: 216828 - RNA, 32 nt, Human
guuucuuguccaccgcuucacuggcaagaguc

SEQ ID NO: 216829 - RNA, 32 nt, Human
guuucuugugcauuccuccucucccuccuucg

SEQ ID NO: 216830 - RNA, 32 nt, Human
guuucuugugguucccugcaggccaguccugu

SEQ ID NO: 216831 - RNA, 32 nt, Human
guuucuuguguggcauuguugcucuuggguau

SEQ ID NO: 216832 - RNA, 32 nt, Human
guuucuuguucagccaaugaggaaagggcauu

SEQ ID NO: 216833 - RNA, 32 nt, Human
guuucuuuaggaugagaggugcaccuggcuag

SEQ ID NO: 216834 - RNA, 32 nt, Human
guuucuuucccuuugaauuucuuuuuacuguc

SEQ ID NO: 216835 - RNA, 32 nt, Human
guuucuuuccuuccuuccuuccuuccuuccuu

SEQ ID NO: 216836 - RNA, 32 nt, Human
guuucuuucuacuuucuccaucaucuucuuuc

SEQ ID NO: 216837 - RNA, 32 nt, Human
guuucuuugcagugagcagugcaguggaaguc

SEQ ID NO: 216838 - RNA, 31 nt, Human
guuucuuuggagagagaagagaaugaggcug

SEQ ID NO: 216839 - RNA, 32 nt, Human
guuucuuuuaucugacugacucugucaaacaa

SEQ ID NO: 216840 - RNA, 32 nt, Human
guuucuuuuucagguugugauguggccauucc

SEQ ID NO: 216841 - RNA, 32 nt, Human
guuugaaaauaacuuuaccugacucaaggagu

SEQ ID NO: 216842 - RNA, 32 nt, Human
guuugaaaauaugccagacuucagcccccaag

SEQ ID NO: 216843 - RNA, 32 nt, Human
guuugaaacagcuguuuuucccacauuugcug

SEQ ID NO: 216844 - RNA, 32 nt, Human
guuugaaacauucagugaaacuuuuuaaaacu

SEQ ID NO: 216845 - RNA, 32 nt, Human
guuugaaaccagccuagguaacauagugagac

SEQ ID NO: 216846 - RNA, 32 nt, Human
guuugaaaccagccuggacuacauggugaaac

SEQ ID NO: 216847 - RNA, 32 nt, Human
guuugaaaccagccuggccaacauggugaaaa

SEQ ID NO: 216848 - RNA, 32 nt, Human
guuugaaaccagccuggccaacauggugaaac

SEQ ID NO: 216849 - RNA, 32 nt, Human
guuugaaaccagccuggccaacauggugaaau

SEQ ID NO: 216850 - RNA, 32 nt, Human
guuugaaaccagccugggcaacauggugaaac

SEQ ID NO: 216851 - RNA, 32 nt, Human
guuugaaaccagccuggguaacauggcaaaau

SEQ ID NO: 216852 - RNA, 32 nt, Human
guuugaaacuagucuggucaacauggugaaac

SEQ ID NO: 216853 - RNA, 32 nt, Human
guuugaaaguggaggauggaaaaagacauugu

SEQ ID NO: 216854 - RNA, 32 nt, Human
guuugaaauaagcuauuugauguaauacuucu

SEQ ID NO: 216855 - RNA, 32 nt, Human
guuugaaauggaugaagacagcugcuaccauu

SEQ ID NO: 216856 - RNA, 32 nt, Human
guuugaaauguucaagcucacaauaagcuuaa

SEQ ID NO: 216857 - RNA, 32 nt, Human
guuugaaauucauauaucuuauuucaaaggau

SEQ ID NO: 216858 - RNA, 32 nt, Human
guuugaacagagcaggcuucugaggucuccaa

SEQ ID NO: 216859 - RNA, 32 nt, Human
guuugaaccacaucugcaccugugagaggcca

SEQ ID NO: 216860 - RNA, 32 nt, Human
guuugaacccaggaggcacagguugcagugag

SEQ ID NO: 216861 - RNA, 32 nt, Human
guuugaacccaggaggcggagguugcagugac

SEQ ID NO: 216862 - RNA, 32 nt, Human
guuugaacccaggaggcugagguugcagugag

SEQ ID NO: 216863 - RNA, 32 nt, Human
guuugaacccaggagguggaggcugcagugag

SEQ ID NO: 216864 - RNA, 32 nt, Human
guuugaacccgggaggcggaggcugcagugag

SEQ ID NO: 216865 - RNA, 32 nt, Human
guuugaaccugggaggcggaggcugcagugag

SEQ ID NO: 216866 - RNA, 32 nt, Human
guuugaagaagcugggauacagcauuuaaugg

SEQ ID NO: 216867 - RNA, 32 nt, Human
guuugaagcugcagugagcuaugaucacacca

SEQ ID NO: 216868 - RNA, 32 nt, Human
guuugaagggcuuguucuuccauucuggcagg

SEQ ID NO: 216869 - RNA, 21 nt, Human
guuugaaggugcucucugcca

SEQ ID NO: 216870 - RNA, 32 nt, Human
guuugaaguuugcagaugagaagguuugacaa

SEQ ID NO: 216871 - RNA, 32 nt, Human
guuugaaguuuucagggauaacauaccugaug

SEQ ID NO: 216872 - RNA, 32 nt, Human
guuugaauaaaacuaaguaggccaggcgcagu

SEQ ID NO: 216873 - RNA, 32 nt, Human
guuugaauacucugcuugaaaggcaaaagaca

SEQ ID NO: 216874 - RNA, 32 nt, Human
guuugaauuagaagcauguauuuggaguagua

SEQ ID NO: 216875 - RNA, 32 nt, Human
guuugaauuccuccucuauuuaagauauauac

SEQ ID NO: 216876 - RNA, 32 nt, Human
guuugacaagggcagugguccguacuucggcu

SEQ ID NO: 216877 - RNA, 32 nt, Human
guuugacaccagccugggcaacauagugagac

SEQ ID NO: 216878 - RNA, 32 nt, Human
guuugacagugauauucugaagcaaaaacugu

SEQ ID NO: 216879 - RNA, 32 nt, Human
guuugacaguggucaguuacauguccccacag

SEQ ID NO: 216880 - RNA, 32 nt, Human
guuugacauuggagauacgcuaguaacuguga

SEQ ID NO: 216881 - RNA, 32 nt, Human
guuugacauugugucugggaaggaagggccag

SEQ ID NO: 216882 - RNA, 32 nt, Human
guuugacauuucccuuucuucuuuccuuuuug

SEQ ID NO: 216883 - RNA, 32 nt, Human
guuugaccuggcaggcggagguugcagugagc

SEQ ID NO: 216884 - RNA, 32 nt, Human
guuugagaaacuccgcguucaaaguuaaaaac

SEQ ID NO: 216885 - RNA, 32 nt, Human
guuugagaacagcuggccaagauggugaaacc

SEQ ID NO: 216886 - RNA, 32 nt, Human
guuugagaaccauuuacuuagcagaaccacau

SEQ ID NO: 216887 - RNA, 24 nt, Human
guuugagaacugcuggcuugaggu

SEQ ID NO: 216888 - RNA, 23 nt, Human
guuugagacaccugguagaugua

SEQ ID NO: 216889 - RNA, 32 nt, Human
guuugagaccaccuggccaacauggugaaacc

SEQ ID NO: 216890 - RNA, 32 nt, Human
guuugagaccagccuagacaacauggugaaac

SEQ ID NO: 216891 - RNA, 32 nt, Human
guuugagaccagccuagccaacaugcugaaac

SEQ ID NO: 216892 - RNA, 32 nt, Human
guuugagaccagccugaccaacauggugaaac

SEQ ID NO: 216893 - RNA, 32 nt, Human
guuugagaccagccugaccaacauggugaaau

SEQ ID NO: 216894 - RNA, 32 nt, Human
guuugagaccagccugagugacauagugagac

SEQ ID NO: 216895 - RNA, 32 nt, Human
guuugagaccagccugaucaacauggugaaac

SEQ ID NO: 216896 - RNA, 32 nt, Human
guuugagaccagccugcccaacauggugaaac

SEQ ID NO: 216897 - RNA, 32 nt, Human
guuugagaccagccuggacaacaaacaugcug

SEQ ID NO: 216898 - RNA, 32 nt, Human
guuugagaccagccuggacaacauggugaaac

SEQ ID NO: 216899 - RNA, 32 nt, Human
guuugagaccagccuggcaaacauggugaaac

SEQ ID NO: 216900 - RNA, 32 nt, Human
guuugagaccagccuggccaaaaucuauacua

SEQ ID NO: 216901 - RNA, 32 nt, Human
guuugagaccagccuggccaacauagugaaac

SEQ ID NO: 216902 - RNA, 32 nt, Human
guuugagaccagccuggccaacaugcugaaac

SEQ ID NO: 216903 - RNA, 32 nt, Human
guuugagaccagccuggccaacaugguaaaac

SEQ ID NO: 216904 - RNA, 32 nt, Human
guuugagaccagccuggccaacauggugaaac

SEQ ID NO: 216905 - RNA, 32 nt, Human
guuugagaccagccuggccaacauggugaaau

SEQ ID NO: 216906 - RNA, 32 nt, Human
guuugagaccagccuggccaacauggugaagc

SEQ ID NO: 216907 - RNA, 32 nt, Human
guuugagaccagccuggccaacauggugagac

SEQ ID NO: 216908 - RNA, 32 nt, Human
guuugagaccagccuggccaacauggugauau

SEQ ID NO: 216909 - RNA, 32 nt, Human
guuugagaccagccuggccaacaugguggaac

SEQ ID NO: 216910 - RNA, 32 nt, Human
guuugagaccagccuggccaacguagugaaac

SEQ ID NO: 216911 - RNA, 32 nt, Human
guuugagaccagccuggccaacguggugaaac

SEQ ID NO: 216912 - RNA, 32 nt, Human
guuugagaccagccuggccagcauggugaaac

SEQ ID NO: 216913 - RNA, 32 nt, Human
guuugagaccagccuggcccacauggugaaac

SEQ ID NO: 216914 - RNA, 32 nt, Human
guuugagaccagccuggccgacauggugaaac

SEQ ID NO: 216915 - RNA, 32 nt, Human
guuugagaccagccuggcuaacauggugaaau

SEQ ID NO: 216916 - RNA, 32 nt, Human
guuugagaccagccugggcaacauaguaagac

SEQ ID NO: 216917 - RNA, 32 nt, Human
guuugagaccagccugggcaacauagugagac

SEQ ID NO: 216918 - RNA, 32 nt, Human
guuugagaccagccugggcaacauagugagau

SEQ ID NO: 216919 - RNA, 32 nt, Human
guuugagaccagccugggcaacauagugaggc

SEQ ID NO: 216920 - RNA, 32 nt, Human
guuugagaccagccugggcaacauagugauac

SEQ ID NO: 216921 - RNA, 32 nt, Human
guuugagaccagccugggcaacauggcuaaac

SEQ ID NO: 216922 - RNA, 32 nt, Human
guuugagaccagccugggcaacauggugaaac

SEQ ID NO: 216923 - RNA, 32 nt, Human
guuugagaccagccugggcaauauagugagac

SEQ ID NO: 216924 - RNA, 32 nt, Human
guuugagaccagccugggcaauauggugagac

SEQ ID NO: 216925 - RNA, 32 nt, Human
guuugagaccagccugggcgauauagugaggc

SEQ ID NO: 216926 - RNA, 32 nt, Human
guuugagaccagccuggucaacaugguaaaac

SEQ ID NO: 216927 - RNA, 32 nt, Human
guuugagaccagccuugacaacauggugaaac

SEQ ID NO: 216928 - RNA, 32 nt, Human
guuugagaccagcugggcaacauggugaaacc

SEQ ID NO: 216929 - RNA, 32 nt, Human
guuugagaccuccugggcaacauagugagauc

SEQ ID NO: 216930 - RNA, 32 nt, Human
guuugagagaaggaauuggcucaacuucaguu

SEQ ID NO: 216931 - RNA, 32 nt, Human
guuugagagagggagagugggcccuggcuuuc

SEQ ID NO: 216932 - RNA, 24 nt, Human
guuugagagccacuacccuagaug

SEQ ID NO: 216933 - RNA, 22 nt, Human
guuugagaguaccguacaggug

SEQ ID NO: 216934 - RNA, 32 nt, Human
guuugagauauaauuaaugcuugucugcauaa

SEQ ID NO: 216935 - RNA, 32 nt, Human
guuugagauaugucuucuucgugaugcuugug

SEQ ID NO: 216936 - RNA, 32 nt, Human
guuugagaucagccuggccaacauagugaaac

SEQ ID NO: 216937 - RNA, 32 nt, Human
guuugagaucagccuggccaacauggugaaac

SEQ ID NO: 216938 - RNA, 32 nt, Human
guuugagaucagccugggcaacaugguggaac

SEQ ID NO: 216939 - RNA, 32 nt, Human
guuugagcaaggagacucaaagaggcaaggug

SEQ ID NO: 216940 - RNA, 32 nt, Human
guuugagccagccuggccaacauggugaaacc

SEQ ID NO: 216941 - RNA, 32 nt, Human
guuugagcccaggaggcagaauuugcagugag

SEQ ID NO: 216942 - RNA, 32 nt, Human
guuugagcccaggaggucaaggcugcagugag

SEQ ID NO: 216943 - RNA, 32 nt, Human
guuugagcccaggagguugaggcugcagugag

SEQ ID NO: 216944 - RNA, 32 nt, Human
guuugagcccaggaguucaaggcagcaaugag

SEQ ID NO: 216945 - RNA, 32 nt, Human
guuugagcccaggaguucaaggccagccuggg

SEQ ID NO: 216946 - RNA, 32 nt, Human
guuugagcccaggaguucagggcugcagugag

SEQ ID NO: 216947 - RNA, 32 nt, Human
guuugagcccuggagguugaggcugcagugag

SEQ ID NO: 216948 - RNA, 32 nt, Human
guuugagccugaccaacaugcuaaaauccccu

SEQ ID NO: 216949 - RNA, 32 nt, Human
guuugagccugagacacucuuugagguaaaaa

SEQ ID NO: 216950 - RNA, 32 nt, Human
guuugagcgagggaaguugaggcugcagugaa

SEQ ID NO: 216951 - RNA, 32 nt, Human
guuugagcuggucagcaaggagaggggguggg

SEQ ID NO: 216952 - RNA, 32 nt, Human
guuugagcuguggcugaaagcuuucccacacu

SEQ ID NO: 216953 - RNA, 32 nt, Human
guuugaggaaggcacaugaaucagggccauug

SEQ ID NO: 216954 - RNA, 32 nt, Human
guuugaggaggaagaggaagaggaggaaggcg

SEQ ID NO: 216955 - RNA, 32 nt, Human
guuugaggcaaaacuggauucccacucuggua

SEQ ID NO: 216956 - RNA, 32 nt, Human
guuugaggccagaguugguaccugcuuuaaga

SEQ ID NO: 216957 - RNA, 32 nt, Human
guuugaggccagccugggaaauauagugagac

SEQ ID NO: 216958 - RNA, 32 nt, Human
guuugaggcggcacgcagccuagacgacagac

SEQ ID NO: 216959 - RNA, 32 nt, Human
guuugaggcugcagagagccaagauugcacca

SEQ ID NO: 216960 - RNA, 32 nt, Human
guuugaggcuuagaagcuggaucuccugccgg

SEQ ID NO: 216961 - RNA, 32 nt, Human
guuugagggaggaggaaggaggaucagaguuu

SEQ ID NO: 216962 - RNA, 32 nt, Human
guuugagggcagccugggaaacauggcuaaau

SEQ ID NO: 216963 - RNA, 32 nt, Human
guuugaggggaguagauaugagagggagccgc

SEQ ID NO: 216964 - RNA, 27 nt, Human
guuugaguaaagccucucccaggagca

SEQ ID NO: 216965 - RNA, 32 nt, Human
guuugaguccaggaguuggaggcuacagugag

SEQ ID NO: 216966 - RNA, 32 nt, Human
guuugagugcagaaugacggcgguucacaucg

SEQ ID NO: 216967 - RNA, 32 nt, Human
guuugagugugaaguuaauaucacacaaagca

SEQ ID NO: 216968 - RNA, 32 nt, Human
guuugaguucauacccuguuaccauuuugggg

SEQ ID NO: 216969 - RNA, 32 nt, Human
guuugauaagcuucgcgaguucuugagagugg

SEQ ID NO: 216970 - RNA, 32 nt, Human
guuugauauaaauaucuuuguauucuaguuug

SEQ ID NO: 216971 - RNA, 32 nt, Human
guuugauauuuagcuugagaauggguauggaa

SEQ ID NO: 216972 - RNA, 32 nt, Human
guuugauccuaccucucggacuauuagguccu

SEQ ID NO: 216973 - RNA, 32 nt, Human
guuugaucucagacugccgugcuagcaaucag

SEQ ID NO: 216974 - RNA, 32 nt, Human
guuugaucucagacugcugugcuagcaaucag

SEQ ID NO: 216975 - RNA, 32 nt, Human
guuugaugagagcacuaccuuccuucaggagg

SEQ ID NO: 216976 - RNA, 32 nt, Human
guuugaugccugugaagaacccugcagggccc

SEQ ID NO: 216977 - RNA, 32 nt, Human
guuugauggagagagaggcagagacagauccc

SEQ ID NO: 216978 - RNA, 32 nt, Human
guuugauuagguuggugcaaaaguaauugugg

SEQ ID NO: 216979 - RNA, 32 nt, Human
guuugauuaucaaugcuggagaaaaauaucug

SEQ ID NO: 216980 - RNA, 32 nt, Human
guuugauuccagggauauuucuugucuuacau

SEQ ID NO: 216981 - RNA, 32 nt, Human
guuugauucuaugccauuuggacccaauucug

SEQ ID NO: 216982 - RNA, 32 nt, Human
guuugauugcuaugcagguuugggagaggagg

SEQ ID NO: 216983 - RNA, 32 nt, Human
guuugauuuucuuucucugacucucaucccua

SEQ ID NO: 216984 - RNA, 32 nt, Human
guuugcaaacaaaaugaugggaaaguggaaca

SEQ ID NO: 216985 - RNA, 32 nt, Human
guuugcaaccagccugagcaaaauauugagac

SEQ ID NO: 216986 - RNA, 32 nt, Human
guuugcaagacagagcgcgcagcccggcaagg

SEQ ID NO: 216987 - RNA, 32 nt, Human
guuugcaauacucccuucgcacuugaggaaga

SEQ ID NO: 216988 - RNA, 32 nt, Human
guuugcaauauuuguuuuaagcacuuugaaac

SEQ ID NO: 216989 - RNA, 32 nt, Human
guuugcacacaucaaaaguauugugauauuuu

SEQ ID NO: 216990 - RNA, 32 nt, Human
guuugcacagagcggguagggcuguagggaaa

SEQ ID NO: 216991 - RNA, 19 nt, Human
guuugcaccaugucuucca

SEQ ID NO: 216992 - RNA, 32 nt, Human
guuugcaccucgcugcuccagccucuggggcg

SEQ ID NO: 216993 - RNA, 32 nt, Human
guuugcagagaggagccagccacuccaggguc

SEQ ID NO: 216994 - RNA, 32 nt, Human
guuugcagagcugggcaguugaggaaaggaca

SEQ ID NO: 216995 - RNA, 32 nt, Human
guuugcagcaaaaaucauaaguagaaggaaac

SEQ ID NO: 216996 - RNA, 32 nt, Human
guuugcagcauugcacuccagccugggugaca

SEQ ID NO: 216997 - RNA, 15 nt, Human
guuugcagccuucga

SEQ ID NO: 216998 - RNA, 18 nt, Human
guuugcagcuccuugcca

SEQ ID NO: 216999 - RNA, 32 nt, Human
guuugcagcucucacauuuuguuaaauucaug

SEQ ID NO: 217000 - RNA, 32 nt, Human
guuugcaguugagaggggagggcaggaggggu

SEQ ID NO: 217001 - RNA, 32 nt, Human
guuugcauacacuagaaaaugccuucaauuug

SEQ ID NO: 217002 - RNA, 28 nt, Human
guuugcaucaaugcugccuuguuauucu

SEQ ID NO: 217003 - RNA, 32 nt, Human
guuugcaucacugcacuccagccugggcaaca

SEQ ID NO: 217004 - RNA, 32 nt, Human
guuugcaucacugcacuccagccugggcagca

SEQ ID NO: 217005 - RNA, 32 nt, Human
guuugcaucguggauccagcugugcuccaguc

SEQ ID NO: 217006 - RNA, 32 nt, Human
guuugcaucuuccuugggcuuaucucagaguu

SEQ ID NO: 217007 - RNA, 32 nt, Human
guuugcauucucacauugccaggaugauaagu

SEQ ID NO: 217008 - RNA, 32 nt, Human
guuugccaaaucucugauccucccuuuccauu

SEQ ID NO: 217009 - RNA, 32 nt, Human
guuugccaaggauauggggcaggaggcucccu

SEQ ID NO: 217010 - RNA, 32 nt, Human
guuugccaaguaugccaguguaaugaaacugc

SEQ ID NO: 217011 - RNA, 32 nt, Human
guuugccaaguaugccagugugaugaaacugc

SEQ ID NO: 217012 - RNA, 32 nt, Human
guuugccagcacagaccuuugaugggugcagg

SEQ ID NO: 217013 - RNA, 32 nt, Human
guuugccagucccaggaaagcacuucucaacu

SEQ ID NO: 217014 - RNA, 32 nt, Human
guuugcccacagaccugucgggugcuccugug

SEQ ID NO: 217015 - RNA, 32 nt, Human
guuugcccacagaucagcucugcucauucccc

SEQ ID NO: 217016 - RNA, 32 nt, Human
guuugcccaucaguugucuuuguuaaaugaga

SEQ ID NO: 217017 - RNA, 32 nt, Human
guuugccccuaaaaauggaaggaacuuauaua

SEQ ID NO: 217018 - RNA, 32 nt, Human
guuugcccucauucuccuguuucagguuugcu

SEQ ID NO: 217019 - RNA, 32 nt, Human
guuugcccuccugauuccugcuuucuuuaccu

SEQ ID NO: 217020 - RNA, 32 nt, Human
guuugcccucucuugacuccagccuagggaau

SEQ ID NO: 217021 - RNA, 32 nt, Human
guuugcccugcagagagcugggucugcccuug

SEQ ID NO: 217022 - RNA, 32 nt, Human
guuugcccugcucugccugggacugagcgagu

SEQ ID NO: 217023 - RNA, 32 nt, Human
guuugcccuuugguacagaaggugaguuaaag

SEQ ID NO: 217024 - RNA, 32 nt, Human
guuugccguccccuggccaggaugguggaguc

SEQ ID NO: 217025 - RNA, 32 nt, Human
guuugccuauagguggagguauccuguguguc

SEQ ID NO: 217026 - RNA, 32 nt, Human
guuugccucaccauguaguauuacaaauuuuu

SEQ ID NO: 217027 - RNA, 32 nt, Human
guuugccucauugugcuauuugcccacuuucc

SEQ ID NO: 217028 - RNA, 32 nt, Human
guuugccucccaauguugucccuuuccuucgu

SEQ ID NO: 217029 - RNA, 32 nt, Human
guuugccucugccucugacacacagcucuguc

SEQ ID NO: 217030 - RNA, 32 nt, Human
guuugccucuuucagaauacuaccuccuuuug

SEQ ID NO: 217031 - RNA, 32 nt, Human
guuugccucuuuuucucccuggaggaaaaugc

SEQ ID NO: 217032 - RNA, 32 nt, Human
guuugccugcggucccagcuacuugggaagcu

SEQ ID NO: 217033 - RNA, 32 nt, Human
guuugccugcucagaguggccccucagaacaa

SEQ ID NO: 217034 - RNA, 32 nt, Human
guuugccuggaauuguucuguaccucuuugua

SEQ ID NO: 217035 - RNA, 32 nt, Human
guuugccugucuggcugccuugggucuuuggu

SEQ ID NO: 217036 - RNA, 32 nt, Human
guuugccuuacucauuucuaagugcaauaagg

SEQ ID NO: 217037 - RNA, 32 nt, Human
guuugcgaccagccuggucaacauaguggacc

SEQ ID NO: 217038 - RNA, 32 nt, Human
guuugcgacuccgccucccugggaccuggauu

SEQ ID NO: 217039 - RNA, 32 nt, Human
guuugcgccgacuccgucucccagaaaucaac

SEQ ID NO: 217040 - RNA, 19 nt, Human
guuugcgccuguaauccca

SEQ ID NO: 217041 - RNA, 22 nt, Human
guuugcggcccggucucggaga

SEQ ID NO: 217042 - RNA, 32 nt, Human
guuugcgggagguggugaccgcgcuggggacg

SEQ ID NO: 217043 - RNA, 32 nt, Human
guuugcggggagagaggucagagccagaugaa

SEQ ID NO: 217044 - RNA, 32 nt, Human
guuugcgugcaggagccagagugggacccacg

SEQ ID NO: 217045 - RNA, 32 nt, Human
guuugcgugggugguuucaauuugccagggaa

SEQ ID NO: 217046 - RNA, 32 nt, Human
guuugcucacggcagaaaaccugaacagcccc

SEQ ID NO: 217047 - RNA, 32 nt, Human
guuugcucacuacccuccuucucccuguccac

SEQ ID NO: 217048 - RNA, 32 nt, Human
guuugcucccugauuaaagugccuucagccaa

SEQ ID NO: 217049 - RNA, 32 nt, Human
guuugcucugcauuuuugaugaugguuuggaa

SEQ ID NO: 217050 - RNA, 32 nt, Human
guuugcugagucuuguuuuaaguggccuugau

SEQ ID NO: 217051 - RNA, 32 nt, Human
guuugcugccaccacaccauacaacugccuga

SEQ ID NO: 217052 - RNA, 32 nt, Human
guuugcugcgauaccauggaaggaggcggggg

SEQ ID NO: 217053 - RNA, 32 nt, Human
guuugcugcggccucgaccuccugggcuuaag

SEQ ID NO: 217054 - RNA, 32 nt, Human
guuugcugggaggcgggagaugcagccaggag

SEQ ID NO: 217055 - RNA, 20 nt, Human
guuugcuggggugggggagc

SEQ ID NO: 217056 - RNA, 32 nt, Human
guuugcuguccuagaacaaggcagcaggaggg

SEQ ID NO: 217057 - RNA, 32 nt, Human
guuugcuguugcuguuuccuaccuucugaggc

SEQ ID NO: 217058 - RNA, 32 nt, Human
guuugcuuaaaggagcuuggcugguuugggcc

SEQ ID NO: 217059 - RNA, 32 nt, Human
guuugcuucaaaauauguagaauugugguuga

SEQ ID NO: 217060 - RNA, 32 nt, Human
guuugcuucccccuuucagcagcauucuuuuu

SEQ ID NO: 217061 - RNA, 32 nt, Human
guuugcuucuaggauauacacuuuaaaagaac

SEQ ID NO: 217062 - RNA, 32 nt, Human
guuugcuuucuccguuucuuccuuccuuugca

SEQ ID NO: 217063 - RNA, 32 nt, Human
guuugcuuugggcccuacugggccuggggagg

SEQ ID NO: 217064 - RNA, 32 nt, Human
guuugcuuuuucccuuuuccuacagacguaua

SEQ ID NO: 217065 - RNA, 32 nt, Human
guuuggaaaaggaaucuuccacugaaacauuu

SEQ ID NO: 217066 - RNA, 32 nt, Human
guuuggaaauggggagcuggccuaggugggag

SEQ ID NO: 217067 - RNA, 20 nt, Human
guuuggaacaggcugccaug

SEQ ID NO: 217068 - RNA, 32 nt, Human
guuuggaaccuaugaacacuuugaggcugcca

SEQ ID NO: 217069 - RNA, 32 nt, Human
guuuggaagacugauucuuuguuugcaauaau

SEQ ID NO: 217070 - RNA, 20 nt, Human
guuuggaauaggcugccaug

SEQ ID NO: 217071 - RNA, 32 nt, Human
guuuggaauccacguuucagcacuuuggacag

SEQ ID NO: 217072 - RNA, 32 nt, Human
guuuggacaaccuaacucagcuuuauuugaca

SEQ ID NO: 217073 - RNA, 32 nt, Human
guuuggacaguauuuaaauauugcaaauaugu

SEQ ID NO: 217074 - RNA, 32 nt, Human
guuuggaccaaagcaucggggugggggagggg

SEQ ID NO: 217075 - RNA, 32 nt, Human
guuuggaccagccugggcaacauaagaaggcc

SEQ ID NO: 217076 - RNA, 32 nt, Human
guuuggaccagccugggcaacauggugaaacc

SEQ ID NO: 217077 - RNA, 32 nt, Human
guuuggacccaagcuuaacuuuuccaaugugg

SEQ ID NO: 217078 - RNA, 32 nt, Human
guuuggacugcuuuuaaaaccugagcaauguc

SEQ ID NO: 217079 - RNA, 32 nt, Human
guuuggacuuagugccugucuggcagccugug

SEQ ID NO: 217080 - RNA, 32 nt, Human
guuuggacuuuauuacaucugcuuuagcaaac

SEQ ID NO: 217081 - RNA, 32 nt, Human
guuuggagaacugguuucugucuaauccuucu

SEQ ID NO: 217082 - RNA, 32 nt, Human
guuuggagaauagaaaugaaaagccacgucau

SEQ ID NO: 217083 - RNA, 32 nt, Human
guuuggagaccaugugcguugugugcaugcga

SEQ ID NO: 217084 - RNA, 20 nt, Human
guuuggagagagaaacaauc

SEQ ID NO: 217085 - RNA, 32 nt, Human
guuuggagagagccuucuagaaugacagacug

SEQ ID NO: 217086 - RNA, 32 nt, Human
guuuggagaggaggcaggggcugggcuggggg

SEQ ID NO: 217087 - RNA, 32 nt, Human
guuuggagcuucccccaagcacccaacccacu

SEQ ID NO: 217088 - RNA, 32 nt, Human
guuuggaggaaucacuggcauuugauggggaa

SEQ ID NO: 217089 - RNA, 20 nt, Human
guuuggaggagccccgagug

SEQ ID NO: 217090 - RNA, 32 nt, Human
guuuggaggaggaggagugggccaagcaggga

SEQ ID NO: 217091 - RNA, 32 nt, Human
guuuggaggagguggcagcccagcucccaguu

SEQ ID NO: 217092 - RNA, 32 nt, Human
guuuggaggauuucagaguuaaccucauggaa

SEQ ID NO: 217093 - RNA, 32 nt, Human
guuuggaggggcucacugccacuggguacuca

SEQ ID NO: 217094 - RNA, 32 nt, Human
guuuggagucacuguaguuaaguguggaugca

SEQ ID NO: 217095 - RNA, 32 nt, Human
guuuggauaugacugaggcucuccaaugggcc

SEQ ID NO: 217096 - RNA, 32 nt, Human
guuuggauauuugacaaggcacucugauguga

SEQ ID NO: 217097 - RNA, 32 nt, Human
guuuggaugggagccccacagaggcagguccu

SEQ ID NO: 217098 - RNA, 32 nt, Human
guuuggaugucacacagagcugaagggguugg

SEQ ID NO: 217099 - RNA, 32 nt, Human
guuuggaugugaggagaaugaaacuacaaaaa

SEQ ID NO: 217100 - RNA, 32 nt, Human
guuuggauugacugaugaagacauaaagcucu

SEQ ID NO: 217101 - RNA, 32 nt, Human
guuuggauuuccugcaucuuguggauuacucc

SEQ ID NO: 217102 - RNA, 32 nt, Human
guuuggcauuggugcucucugccuggcaggua

SEQ ID NO: 217103 - RNA, 32 nt, Human
guuuggccagggcuacuuacaggggcuguugg

SEQ ID NO: 217104 - RNA, 32 nt, Human
guuuggccaugaagagagagaaucaugauaac

SEQ ID NO: 217105 - RNA, 32 nt, Human
guuuggcccagccucaguccuugcucuucucu

SEQ ID NO: 217106 - RNA, 32 nt, Human
guuuggccccaagaagugaauuuggguuugag

SEQ ID NO: 217107 - RNA, 32 nt, Human
guuuggccggcagaggaaguggcacaagaggc

SEQ ID NO: 217108 - RNA, 32 nt, Human
guuuggccucaagugauccuccugccucagcc

SEQ ID NO: 217109 - RNA, 32 nt, Human
guuuggccucugcuuccucccaguucacagcc

SEQ ID NO: 217110 - RNA, 32 nt, Human
guuuggccugcaggcuguagcuugccaaucag

SEQ ID NO: 217111 - RNA, 32 nt, Human
guuuggccugggcuucucagcuuguccaguau

SEQ ID NO: 217112 - RNA, 32 nt, Human
guuuggccuugagaguccccaggguccucccc

SEQ ID NO: 217113 - RNA, 32 nt, Human
guuuggcuauaucccccguccccagccccucu

SEQ ID NO: 217114 - RNA, 32 nt, Human
guuuggcugcagcugcccgggcggcgucgaug

SEQ ID NO: 217115 - RNA, 32 nt, Human
guuuggcuguguuguuugcucacugcucugag

SEQ ID NO: 217116 - RNA, 32 nt, Human
guuugggaacugcugccuagauuucagaaggu

SEQ ID NO: 217117 - RNA, 32 nt, Human
guuugggaaugagaggaugagugagugaggcu

SEQ ID NO: 217118 - RNA, 32 nt, Human
guuugggaauucaagcaucauauggcugaggu

SEQ ID NO: 217119 - RNA, 32 nt, Human
guuugggacagaggggacaguugaggucauuc

SEQ ID NO: 217120 - RNA, 32 nt, Human
guuugggaccagccugaccaacauggugaaau

SEQ ID NO: 217121 - RNA, 32 nt, Human
guuugggaccagccuggccaacauggugaaac

SEQ ID NO: 217122 - RNA, 32 nt, Human
guuugggacugaauauuacaguagguggcaaa

SEQ ID NO: 217123 - RNA, 32 nt, Human
guuugggacugccccggcaacuccaggguguc

SEQ ID NO: 217124 - RNA, 24 nt, Human
guuugggagcuacugauggacaug

SEQ ID NO: 217125 - RNA, 32 nt, Human
guuugggagcugccagucuccugggaggaucg

SEQ ID NO: 217126 - RNA, 32 nt, Human
guuugggaggccaaggcaggcagaucaccuga

SEQ ID NO: 217127 - RNA, 32 nt, Human
guuugggaggccaaggcgggcagaucaccuga

SEQ ID NO: 217128 - RNA, 32 nt, Human
guuugggaggccgaggcaggcagaucacuuga

SEQ ID NO: 217129 - RNA, 32 nt, Human
guuugggaggccgaggcgagcagaucaggagu

SEQ ID NO: 217130 - RNA, 21 nt, Human
guuugggaggcgcgggagaug

SEQ ID NO: 217131 - RNA, 32 nt, Human
guuugggaggcugagccggguggaucgccuga

SEQ ID NO: 217132 - RNA, 32 nt, Human
guuugggaggcugaggcaggaggaucgcuuga

SEQ ID NO: 217133 - RNA, 32 nt, Human
guuugggaggcugaggcagguggaucaccuga

SEQ ID NO: 217134 - RNA, 32 nt, Human
guuugggaggcugaggcggauggaucacuuga

SEQ ID NO: 217135 - RNA, 32 nt, Human
guuugggaggcugaggcgggcggaucaccagg

SEQ ID NO: 217136 - RNA, 32 nt, Human
guuugggaggcugaggcuaguggaucaugugg

SEQ ID NO: 217137 - RNA, 32 nt, Human
guuugggaggcugaguugggcagaucaccuga

SEQ ID NO: 217138 - RNA, 32 nt, Human
guuugggaggcuggggcagguagaucacuuga

SEQ ID NO: 217139 - RNA, 32 nt, Human
guuugggauccucugaaaaggcccagaaaaau

SEQ ID NO: 217140 - RNA, 32 nt, Human
guuugggauuaugaacaaaccucacagacuuu

SEQ ID NO: 217141 - RNA, 32 nt, Human
guuugggauuugaaaaguggaauuauugcagu

SEQ ID NO: 217142 - RNA, 32 nt, Human
guuugggcaaaccugcugaugucuauuuaauu

SEQ ID NO: 217143 - RNA, 31 nt, Human
guuugggcaaugucucagcagagacuggcau

SEQ ID NO: 217144 - RNA, 32 nt, Human
guuugggcagucugcauucucccagcuacggu

SEQ ID NO: 217145 - RNA, 32 nt, Human
guuugggccacugcacucuagccuggcaacag

SEQ ID NO: 217146 - RNA, 32 nt, Human
guuugggcugccuccccuccucccguccaccc

SEQ ID NO: 217147 - RNA, 32 nt, Human
guuugggcuggccuggccacguguggucacau

SEQ ID NO: 217148 - RNA, 32 nt, Human
guuugggcuguaaucuaaacaauuggacagau

SEQ ID NO: 217149 - RNA, 32 nt, Human
guuuggggaagccucucagaggaggaggagcu

SEQ ID NO: 217150 - RNA, 32 nt, Human
guuuggggacuuaccucugcagcacugugaaa

SEQ ID NO: 217151 - RNA, 32 nt, Human
guuuggggagcacacucuuggcacauagaucu

SEQ ID NO: 217152 - RNA, 32 nt, Human
guuuggggagugaauaaggggaagagugcuca

SEQ ID NO: 217153 - RNA, 32 nt, Human
guuuggggcauucugcuccgaggucccucuag

SEQ ID NO: 217154 - RNA, 32 nt, Human
guuuggggcuggggguuggagaauaaaagcag

SEQ ID NO: 217155 - RNA, 32 nt, Human
guuuggggcugguucccccaucuugaauuguu

SEQ ID NO: 217156 - RNA, 32 nt, Human
guuugggggaagagaaacuugcagugaaaagg

SEQ ID NO: 217157 - RNA, 32 nt, Human
guuugggggauggugagccgacacuuuccuuu

SEQ ID NO: 217158 - RNA, 32 nt, Human
guuugggggcuacuuuguuacacagaaauaga

SEQ ID NO: 217159 - RNA, 32 nt, Human
guuuggggucaugaucacaaaggggccauucc

SEQ ID NO: 217160 - RNA, 32 nt, Human
guuuggggucugccaccauccugcugcugugu

SEQ ID NO: 217161 - RNA, 32 nt, Human
guuuggggugagaucuggaaaucaagaaaugg

SEQ ID NO: 217162 - RNA, 31 nt, Human
guuugggguuacuucuuuguuucuaaguaua

SEQ ID NO: 217163 - RNA, 32 nt, Human
guuuggguagcgcugcccucuggcagucaugc

SEQ ID NO: 217164 - RNA, 32 nt, Human
guuugggucaucucuguuuccagaguuguucu

SEQ ID NO: 217165 - RNA, 32 nt, Human
guuugggucuccuaggcccacccuuucuagga

SEQ ID NO: 217166 - RNA, 32 nt, Human
guuugggugauaccccucacagccccugucau

SEQ ID NO: 217167 - RNA, 32 nt, Human
guuugggugauggcugaugcuggcugugcuag

SEQ ID NO: 217168 - RNA, 32 nt, Human
guuugggugcagacacaggcagcugcugcccu

SEQ ID NO: 217169 - RNA, 32 nt, Human
guuuggguggggacucagcccagaucuacgug

SEQ ID NO: 217170 - RNA, 32 nt, Human
guuuggguucugguccuggcugugccacugac

SEQ ID NO: 217171 - RNA, 32 nt, Human
guuuggguugcaugccuguaaucccagcauuu

SEQ ID NO: 217172 - RNA, 32 nt, Human
guuuggguuguguuugguauuguuuuuagugg

SEQ ID NO: 217173 - RNA, 32 nt, Human
guuugguaaagauggcauuucaccauguugua

SEQ ID NO: 217174 - RNA, 32 nt, Human
guuugguaacaaguguuuaauguauguuaaaa

SEQ ID NO: 217175 - RNA, 32 nt, Human
guuugguaacacagcuuuaacuaugucaugca

SEQ ID NO: 217176 - RNA, 32 nt, Human
guuugguagauggggcauggaaggaacgaaca

SEQ ID NO: 217177 - RNA, 32 nt, Human
guuugguagcagggaugaaagcuagggccucu

SEQ ID NO: 217178 - RNA, 32 nt, Human
guuuggucauuuugaagcuugacauuuuaguu

SEQ ID NO: 217179 - RNA, 32 nt, Human
guuugguccagaggagggaggaggaagggaag

SEQ ID NO: 217180 - RNA, 32 nt, Human
guuugguccuguaggaguucuauuuugggguc

SEQ ID NO: 217181 - RNA, 32 nt, Human
guuuggucgcuuugguugucaugagaaagaga

SEQ ID NO: 217182 - RNA, 32 nt, Human
guuuggucuggcccaguuccccaucauuaaac

SEQ ID NO: 217183 - RNA, 32 nt, Human
guuuggugaugaagacuuccaacucaaauuug

SEQ ID NO: 217184 - RNA, 32 nt, Human
guuuggugcggccacuccaaggccaaagccgc

SEQ ID NO: 217185 - RNA, 32 nt, Human
guuuggugcggccacuccaaggccaaagcgag

SEQ ID NO: 217186 - RNA, 32 nt, Human
guuugguggggaucuggguucaucucacccac

SEQ ID NO: 217187 - RNA, 32 nt, Human
guuuggugggguggcaccuguuucccgggcaa

SEQ ID NO: 217188 - RNA, 32 nt, Human
guuuggugguugccacuggggcagugagccuu

SEQ ID NO: 217189 - RNA, 32 nt, Human
guuugguuccaagcacuucccaccucaaacuc

SEQ ID NO: 217190 - RNA, 32 nt, Human
guuugguuccggugcugaccccuaggccccag

SEQ ID NO: 217191 - RNA, 21 nt, Human
guuugguuucugcuuauggug

SEQ ID NO: 217192 - RNA, 32 nt, Human
guuugguuugcagagaacacagccugauacuu

SEQ ID NO: 217193 - RNA, 32 nt, Human
guuugguuugguuuguuauggcuuccuuuuua

SEQ ID NO: 217194 - RNA, 32 nt, Human
guuugguuuugagaaaagauggugaaguuucu

SEQ ID NO: 217195 - RNA, 32 nt, Human
guuugguuuuugagaaggaaugaagugggaac

SEQ ID NO: 217196 - RNA, 32 nt, Human
guuuguaaacugugguugccugccuucccagc

SEQ ID NO: 217197 - RNA, 17 nt, Human
guuuguacacuuucaaa

SEQ ID NO: 217198 - RNA, 32 nt, Human
guuuguaccuguguuaguuugcugagaauuau

SEQ ID NO: 217199 - RNA, 32 nt, Human
guuuguacugacaaccuccuuggcuuauuugg

SEQ ID NO: 217200 - RNA, 32 nt, Human
guuuguagcaagacucugaugauaauucuguu

SEQ ID NO: 217201 - RNA, 32 nt, Human
guuuguagcuuucugucacucauuccaucuuc

SEQ ID NO: 217202 - RNA, 32 nt, Human
guuuguaggauguaugggcaaagcuuuuguga

SEQ ID NO: 217203 - RNA, 32 nt, Human
guuuguagggcugccaggcugcagccugcugc

SEQ ID NO: 217204 - RNA, 32 nt, Human
guuuguaguaaauuuuacuauaacuccaaguu

SEQ ID NO: 217205 - RNA, 32 nt, Human
guuuguagucauguagaaaaggccaguauaaa

SEQ ID NO: 217206 - RNA, 30 nt, Human
guuuguagucuugaugugcuccugugguau

SEQ ID NO: 217207 - RNA, 32 nt, Human
guuuguaugaacuucuggaucuccagucagau

SEQ ID NO: 217208 - RNA, 32 nt, Human
guuuguaugcuuugguuuagugcaaugugugg

SEQ ID NO: 217209 - RNA, 32 nt, Human
guuuguauuggcagagguagugaggugauuca

SEQ ID NO: 217210 - RNA, 32 nt, Human
guuuguauuuggaauauuugaauaaugacaga

SEQ ID NO: 217211 - RNA, 32 nt, Human
guuugucaagugagucaagacuugcuuuuguc

SEQ ID NO: 217212 - RNA, 32 nt, Human
guuugucacccaggcuggagugcaguggcaug

SEQ ID NO: 217213 - RNA, 32 nt, Human
guuugucacccaggcuggagugcuguggugug

SEQ ID NO: 217214 - RNA, 32 nt, Human
guuugucacccugcauccuucucccauucccc

SEQ ID NO: 217215 - RNA, 23 nt, Human
guuugucagaagacccugaagua

SEQ ID NO: 217216 - RNA, 32 nt, Human
guuugucagcagccaagguguuuccaggaagu

SEQ ID NO: 217217 - RNA, 32 nt, Human
guuugucaguucucaauuuccuguguuugcaa

SEQ ID NO: 217218 - RNA, 32 nt, Human
guuugucaucccugggucuaggaaauagucaa

SEQ ID NO: 217219 - RNA, 32 nt, Human
guuugucaugcugacacugaugacagagguga

SEQ ID NO: 217220 - RNA, 32 nt, Human
guuugucauucuuaucuccagccugggaaaag

SEQ ID NO: 217221 - RNA, 32 nt, Human
guuuguccaagcaauuggaugugugcaguagc

SEQ ID NO: 217222 - RNA, 32 nt, Human
guuuguccacgacccaggcuggacgaaugccu

SEQ ID NO: 217223 - RNA, 32 nt, Human
guuuguccagccucuaacauuguccagcacuu

SEQ ID NO: 217224 - RNA, 32 nt, Human
guuuguccaguucuuuguucaacacgccaaga

SEQ ID NO: 217225 - RNA, 32 nt, Human
guuugucccaggaggacauagucaggagccca

SEQ ID NO: 217226 - RNA, 32 nt, Human
guuugucccaggcucgggggcucagugggagu

SEQ ID NO: 217227 - RNA, 32 nt, Human
guuuguccuugcaggacagggugcaggcagau

SEQ ID NO: 217228 - RNA, 32 nt, Human
guuugucgccaggcuggagugcaguggugcca

SEQ ID NO: 217229 - RNA, 32 nt, Human
guuugucgugggcucccaagugccuaggccau

SEQ ID NO: 217230 - RNA, 32 nt, Human
guuugucuaaagaccugugucuaaagaccugg

SEQ ID NO: 217231 - RNA, 32 nt, Human
guuugucuacuuccuccugcuuccccgccgcc

SEQ ID NO: 217232 - RNA, 32 nt, Human
guuugucuagaagaguagauugcuugauuaaa

SEQ ID NO: 217233 - RNA, 32 nt, Human
guuugucucaaucugacccagcggcuggaccc

SEQ ID NO: 217234 - RNA, 32 nt, Human
guuugucucauggauauauugccugugccgag

SEQ ID NO: 217235 - RNA, 18 nt, Human
guuugucugaugugcaca

SEQ ID NO: 217236 - RNA, 32 nt, Human
guuugucuggaaagccucuugagaugggguua

SEQ ID NO: 217237 - RNA, 32 nt, Human
guuugucuuuaaauaguuacagaagggauacg

SEQ ID NO: 217238 - RNA, 31 nt, Human
guuugugaacagagagaagaaguugcaagug

SEQ ID NO: 217239 - RNA, 32 nt, Human
guuugugaagauagagugaaauucaguaccac

SEQ ID NO: 217240 - RNA, 32 nt, Human
guuugugaccagaccagauuacagagggguau

SEQ ID NO: 217241 - RNA, 32 nt, Human
guuugugaccagccuggccaacauagugaaau

SEQ ID NO: 217242 - RNA, 32 nt, Human
guuugugacugauggagaauuucaggaaugaa

SEQ ID NO: 217243 - RNA, 32 nt, Human
guuugugagagcccagucauuguacuguuuuu

SEQ ID NO: 217244 - RNA, 32 nt, Human
guuugugagugugagagggucauauaggugca

SEQ ID NO: 217245 - RNA, 24 nt, Human
guuugugaguguguauuugagaga

SEQ ID NO: 217246 - RNA, 32 nt, Human
guuugugauauggcagaaucugucuccauugg

SEQ ID NO: 217247 - RNA, 32 nt, Human
guuugugaucacugugagucucagaugauuau

SEQ ID NO: 217248 - RNA, 31 nt, Human
guuugugaugaaggaacugcucaucuaagca

SEQ ID NO: 217249 - RNA, 32 nt, Human
guuugugauguuuucugacaguagccuccaag

SEQ ID NO: 217250 - RNA, 32 nt, Human
guuugugcacagaacuguggauguuugucaca

SEQ ID NO: 217251 - RNA, 32 nt, Human
guuugugccaagcgggcuuuccauugaccuuc

SEQ ID NO: 217252 - RNA, 32 nt, Human
guuugugccucacacuccagccuggguaacag

SEQ ID NO: 217253 - RNA, 32 nt, Human
guuugugcuaggaguuggcaaugaacacuguu

SEQ ID NO: 217254 - RNA, 32 nt, Human
guuugugcuguaagccuccaucuuguuuuaca

SEQ ID NO: 217255 - RNA, 32 nt, Human
guuugugcuucaaagucauugaugcaacuuga

SEQ ID NO: 217256 - RNA, 32 nt, Human
guuugugcuucauuaaggugaacucaucucuc

SEQ ID NO: 217257 - RNA, 32 nt, Human
guuugugcuuuuucccccuccuuaccugaccc

SEQ ID NO: 217258 - RNA, 32 nt, Human
guuuguggauuucauugugauuuauaauaagg

SEQ ID NO: 217259 - RNA, 32 nt, Human
guuuguggauuugagagaagauugggaugguc

SEQ ID NO: 217260 - RNA, 32 nt, Human
guuuguggcauacaaccugagccuuuucuuau

SEQ ID NO: 217261 - RNA, 32 nt, Human
guuuguggcggaagacggggcccagcggcucc

SEQ ID NO: 217262 - RNA, 32 nt, Human
guuuguggcucucagcucucaaggcuguuuuc

SEQ ID NO: 217263 - RNA, 32 nt, Human
guuugugggagccuggcuggaaacuuuuaagu

SEQ ID NO: 217264 - RNA, 32 nt, Human
guuugugggcaguuuucauaugcucugugaaa

SEQ ID NO: 217265 - RNA, 32 nt, Human
guuuguggggaaaaggaaagaugggggacacu

SEQ ID NO: 217266 - RNA, 32 nt, Human
guuuguggggcugaaaccccaucccuaaaaua

SEQ ID NO: 217267 - RNA, 32 nt, Human
guuuguggucagcacaacaaggaacaaaacaa

SEQ ID NO: 217268 - RNA, 32 nt, Human
guuuguggucuagcucccagggccaggccagg

SEQ ID NO: 217269 - RNA, 32 nt, Human
guuugugguuuuucccccucuuuggcuggugg

SEQ ID NO: 217270 - RNA, 32 nt, Human
guuuguguagccaagaggacagaauuacauga

SEQ ID NO: 217271 - RNA, 32 nt, Human
guuugugucaaauuauaguuacagugaguugu

SEQ ID NO: 217272 - RNA, 32 nt, Human
guuugugucucucugcugucauguuuucuacc

SEQ ID NO: 217273 - RNA, 32 nt, Human
guuuguguguuuuguacacuuagggauauaua

SEQ ID NO: 217274 - RNA, 32 nt, Human
guuuguguuagacaauuugcccaacuguagga

SEQ ID NO: 217275 - RNA, 32 nt, Human
guuuguuaccagccugggcaacauagugagac

SEQ ID NO: 217276 - RNA, 32 nt, Human
guuuguucacaguuuugucuuccaauacuuug

SEQ ID NO: 217277 - RNA, 32 nt, Human
guuuguucaguguggaguauauucagcaguau

SEQ ID NO: 217278 - RNA, 32 nt, Human
guuuguucauucucugcuuuauucucuccaug

SEQ ID NO: 217279 - RNA, 32 nt, Human
guuuguuccccuucaccgcucucccucucauu

SEQ ID NO: 217280 - RNA, 32 nt, Human
guuuguucuaauuccccaaccuugccacgacu

SEQ ID NO: 217281 - RNA, 32 nt, Human
guuuguucuagaugagugucucaggccaccgg

SEQ ID NO: 217282 - RNA, 32 nt, Human
guuuguucugcuucucuucauauaacugagcu

SEQ ID NO: 217283 - RNA, 20 nt, Human
guuuguucuuguauacagug

SEQ ID NO: 217284 - RNA, 32 nt, Human
guuuguugaggguguggggugugccccaccug

SEQ ID NO: 217285 - RNA, 32 nt, Human
guuuguugagguggaggaacagaagugaaaug

SEQ ID NO: 217286 - RNA, 32 nt, Human
guuuguugcccaggcuggagugaguggcacag

SEQ ID NO: 217287 - RNA, 32 nt, Human
guuuguuggaaaugccucguugccagagaaac

SEQ ID NO: 217288 - RNA, 32 nt, Human
guuuguuugaagcacuucgucuuacccauuua

SEQ ID NO: 217289 - RNA, 32 nt, Human
guuuguuuuagacaagagucucgcuuuguugc

SEQ ID NO: 217290 - RNA, 32 nt, Human
guuuguuuuccuuuuauuucuucaccagauuu

SEQ ID NO: 217291 - RNA, 32 nt, Human
guuuguuuucuaaagggcaugccaaguccugc

SEQ ID NO: 217292 - RNA, 32 nt, Human
guuuguuuucuuauuuucuuuuuaauuaaaaa

SEQ ID NO: 217293 - RNA, 32 nt, Human
guuuguuuugagaaggcguuucgcucuuguug

SEQ ID NO: 217294 - RNA, 32 nt, Human
guuuguuuugagacagaaucuugaucuguuac

SEQ ID NO: 217295 - RNA, 32 nt, Human
guuuguuuugagacagagucuugcucugucac

SEQ ID NO: 217296 - RNA, 32 nt, Human
guuuguuuugagacagagucuugcucugucgc

SEQ ID NO: 217297 - RNA, 32 nt, Human
guuuguuuugagacagucuggcccugucgccc

SEQ ID NO: 217298 - RNA, 32 nt, Human
guuuguuuugagacggagucuugcucagucgc

SEQ ID NO: 217299 - RNA, 32 nt, Human
guuuguuuugagacgggaguuucucucuuguc

SEQ ID NO: 217300 - RNA, 32 nt, Human
guuuguuuugagacggggucucgcucugucac

SEQ ID NO: 217301 - RNA, 32 nt, Human
guuuguuuugagacuccagucugggugucaga

SEQ ID NO: 217302 - RNA, 32 nt, Human
guuuguuuugagagagagucuugcucugucuc

SEQ ID NO: 217303 - RNA, 32 nt, Human
guuuguuuugagauggagucucacucugucac

SEQ ID NO: 217304 - RNA, 32 nt, Human
guuuguuuugagauggagucuugcccugucac

SEQ ID NO: 217305 - RNA, 32 nt, Human
guuuguuuugaggcacaaugaaacuuuagcca

SEQ ID NO: 217306 - RNA, 32 nt, Human
guuuguuuuguuuuaggcuuuuugccaaauac

SEQ ID NO: 217307 - RNA, 32 nt, Human
guuuguuuuuauuuuuggcuuuaugucuauac

SEQ ID NO: 217308 - RNA, 32 nt, Human
  misc_feature (5)..(5): n is a, c, g, or u
guuunuguaacuuccuguggagugcaaauaga

SEQ ID NO: 217309 - RNA, 32 nt, Human
guuuuaaaccaccaaaccaauauuuuuccuuu

SEQ ID NO: 217310 - RNA, 32 nt, Human
guuuuaaacucauuuuugccauacaucaguua

SEQ ID NO: 217311 - RNA, 32 nt, Human
guuuuaaacuuuacaggcugggcaaaggauuu

SEQ ID NO: 217312 - RNA, 32 nt, Human
guuuuaaagauaagcacauggguaaaaaugag

SEQ ID NO: 217313 - RNA, 32 nt, Human
guuuuaaagaugaauccgaauuuggaagacuu

SEQ ID NO: 217314 - RNA, 32 nt, Human
guuuuaaaucuucugucucccugcuuuucuaa

SEQ ID NO: 217315 - RNA, 19 nt, Human
guuuuaaaugcuaugcagu

SEQ ID NO: 217316 - RNA, 18 nt, Human
guuuuaaauuuuuucccc

SEQ ID NO: 217317 - RNA, 32 nt, Human
guuuuaacauaguaaauccucuuuuugaugag

SEQ ID NO: 217318 - RNA, 32 nt, Human
guuuuaacccagaagacaggcugcagugagcc

SEQ ID NO: 217319 - RNA, 32 nt, Human
guuuuaaccugggaaguguucuuccugccuuu

SEQ ID NO: 217320 - RNA, 32 nt, Human
guuuuaaccuuaauaaaaaugggucuaucaga

SEQ ID NO: 217321 - RNA, 32 nt, Human
guuuuaacugaagugugagaaggagguuuaag

SEQ ID NO: 217322 - RNA, 32 nt, Human
guuuuaacugcaacugcuuuggcuaccaguuu

SEQ ID NO: 217323 - RNA, 21 nt, Human
guuuuaacugggaggcccaga

SEQ ID NO: 217324 - RNA, 32 nt, Human
guuuuaagagaucccuuccuuccucuucggug

SEQ ID NO: 217325 - RNA, 32 nt, Human
guuuuaagauagagccucgcucuguugcccag

SEQ ID NO: 217326 - RNA, 32 nt, Human
guuuuaagcuggaccauaaagcagaggggaau

SEQ ID NO: 217327 - RNA, 32 nt, Human
guuuuaaggagaagacuugaaugaaguuggag

SEQ ID NO: 217328 - RNA, 32 nt, Human
guuuuaagggagcggugugggagugggaaagu

SEQ ID NO: 217329 - RNA, 32 nt, Human
guuuuaagguggagagggaggagaagccugaa

SEQ ID NO: 217330 - RNA, 32 nt, Human
guuuuaaguuguuucuggguaagggagauguu

SEQ ID NO: 217331 - RNA, 32 nt, Human
guuuuaaguuuaccuagugacugacuacucuc

SEQ ID NO: 217332 - RNA, 32 nt, Human
guuuuaauaaggauuuuugagaaacaaauaac

SEQ ID NO: 217333 - RNA, 32 nt, Human
guuuuaaucaguccgccauaaaaagcuccucc

SEQ ID NO: 217334 - RNA, 32 nt, Human
guuuuaauguauacugaauuauaggaauccaa

SEQ ID NO: 217335 - RNA, 32 nt, Human
guuuuaauucuaggauucuggaaacagagaca

SEQ ID NO: 217336 - RNA, 32 nt, Human
guuuuacaaagucauuuuaagaaagcaagaua

SEQ ID NO: 217337 - RNA, 32 nt, Human
guuuuacacaacacugugaauguaaugaaugc

SEQ ID NO: 217338 - RNA, 32 nt, Human
guuuuacacagcaaaggaaaccaugacaaaau

SEQ ID NO: 217339 - RNA, 32 nt, Human
guuuuacacaugcucuucauauaaaugcuaca

SEQ ID NO: 217340 - RNA, 32 nt, Human
guuuuacagauggggcaaaaggaggcccagag

SEQ ID NO: 217341 - RNA, 32 nt, Human
guuuuacaguguuucucaucaucuguuuccca

SEQ ID NO: 217342 - RNA, 32 nt, Human
guuuuacauacucauuaguaagugggaggucc

SEQ ID NO: 217343 - RNA, 32 nt, Human
guuuuacaugaucugauacaaccauuaaugaa

SEQ ID NO: 217344 - RNA, 32 nt, Human
guuuuaccaagugcugucuugaugacugcuga

SEQ ID NO: 217345 - RNA, 32 nt, Human
guuuuaccagggauccagagacauagaggaag

SEQ ID NO: 217346 - RNA, 32 nt, Human
guuuuaccucuaaauaaaugaauucagagaaa

SEQ ID NO: 217347 - RNA, 32 nt, Human
guuuuacuauuuuaaagugggcguuaggagca

SEQ ID NO: 217348 - RNA, 32 nt, Human
guuuuacucaucucccccuccauugauuagcc

SEQ ID NO: 217349 - RNA, 32 nt, Human
guuuuagaaacaugaguccggacuguguaagu

SEQ ID NO: 217350 - RNA, 32 nt, Human
guuuuagaacacaucagagguauuucugcugu

SEQ ID NO: 217351 - RNA, 32 nt, Human
guuuuagaagguucucuccuccccaaggagac

SEQ ID NO: 217352 - RNA, 32 nt, Human
guuuuagacuuagguggguagcaaugccagua

SEQ ID NO: 217353 - RNA, 32 nt, Human
guuuuagagacagggucuugcucugucgcccg

SEQ ID NO: 217354 - RNA, 32 nt, Human
guuuuagagagugacaguuacaguuguaacaa

SEQ ID NO: 217355 - RNA, 32 nt, Human
guuuuagaguccaguucuagagacuccucagc

SEQ ID NO: 217356 - RNA, 32 nt, Human
guuuuagaguguguuuauucuucucuacuuga

SEQ ID NO: 217357 - RNA, 32 nt, Human
guuuuagauuucuaugaaggcuuucauuugua

SEQ ID NO: 217358 - RNA, 32 nt, Human
guuuuagccaaagaaaaagaagagaggcuuuu

SEQ ID NO: 217359 - RNA, 32 nt, Human
guuuuagcuaccaacggccaggaaaagcccuc

SEQ ID NO: 217360 - RNA, 32 nt, Human
guuuuagcugcagccuuggaaggaggcaccga

SEQ ID NO: 217361 - RNA, 32 nt, Human
guuuuaggacaucaacccuccgagaaaaggca

SEQ ID NO: 217362 - RNA, 32 nt, Human
guuuuaggagggaaugagccucagggaggagu

SEQ ID NO: 217363 - RNA, 32 nt, Human
guuuuagggaaagaggccuauggaaucccuua

SEQ ID NO: 217364 - RNA, 32 nt, Human
guuuuagggaacagaagaggagcacauauuua

SEQ ID NO: 217365 - RNA, 32 nt, Human
guuuuaggggcagauaguuaggucaggaaaaa

SEQ ID NO: 217366 - RNA, 32 nt, Human
guuuuaggucucaaaauauaacucggcuguuu

SEQ ID NO: 217367 - RNA, 32 nt, Human
guuuuagguuccaacuguguuagacaugaguu

SEQ ID NO: 217368 - RNA, 32 nt, Human
guuuuaguagcuugaggcaagguggaggggca

SEQ ID NO: 217369 - RNA, 32 nt, Human
guuuuaguugagaauauaauguuccagcuuag

SEQ ID NO: 217370 - RNA, 30 nt, Human
guuuuaguuuaaaaaucagaaagacauucu

SEQ ID NO: 217371 - RNA, 32 nt, Human
guuuuaguuuagauacgagguguugguagcau

SEQ ID NO: 217372 - RNA, 32 nt, Human
guuuuaguuucagggcacacaggacagcagaa

SEQ ID NO: 217373 - RNA, 32 nt, Human
guuuuaguuuuuaaaauaucuuuugaccugug

SEQ ID NO: 217374 - RNA, 32 nt, Human
guuuuauaaaguguggucagaggccccuauag

SEQ ID NO: 217375 - RNA, 32 nt, Human
guuuuauacucagaaaaggaaaaagaagcaaa

SEQ ID NO: 217376 - RNA, 32 nt, Human
guuuuauauuugcuuauuuaagguacauuucu

SEQ ID NO: 217377 - RNA, 32 nt, Human
guuuuaucaagucacuguuaaguagaagaaag

SEQ ID NO: 217378 - RNA, 32 nt, Human
guuuuaucagcagcaggaaggaugugggacuc

SEQ ID NO: 217379 - RNA, 32 nt, Human
guuuuauccacuuuucuuggauaaucaggagg

SEQ ID NO: 217380 - RNA, 22 nt, Human
guuuuauccauguuauauauug

SEQ ID NO: 217381 - RNA, 32 nt, Human
guuuuaucccuccggccggcaggcugggcgca

SEQ ID NO: 217382 - RNA, 32 nt, Human
guuuuauccuuaucaauagugccaucauccac

SEQ ID NO: 217383 - RNA, 32 nt, Human
guuuuaucuaucuccuuaucuccugcccuguc

SEQ ID NO: 217384 - RNA, 32 nt, Human
guuuuaucuaucugucuuugcaagcagucuuc

SEQ ID NO: 217385 - RNA, 32 nt, Human
guuuuaucucccuugcuccccuuuaaacaccu

SEQ ID NO: 217386 - RNA, 32 nt, Human
guuuuaucuccuccccuugaauauggguggcu

SEQ ID NO: 217387 - RNA, 32 nt, Human
guuuuaucugauguaaguuuagcuacuccuga

SEQ ID NO: 217388 - RNA, 32 nt, Human
guuuuaucuucugcucuuucuucuuccacaca

SEQ ID NO: 217389 - RNA, 32 nt, Human
guuuuaugaauuuucaggcaaagcuuuaauuu

SEQ ID NO: 217390 - RNA, 32 nt, Human
guuuuaugacucugcugcaguuuguggaaaug

SEQ ID NO: 217391 - RNA, 32 nt, Human
guuuuaugauugcagcccucagccugggcugc

SEQ ID NO: 217392 - RNA, 32 nt, Human
guuuuaugcagggcauucuguauuccaaaugg

SEQ ID NO: 217393 - RNA, 32 nt, Human
guuuuauguacuuugauuuacagugccuguau

SEQ ID NO: 217394 - RNA, 32 nt, Human
guuuuauguauuacuuucaagaucccaacuag

SEQ ID NO: 217395 - RNA, 32 nt, Human
guuuuaugucaucuuugcugagcuccaccggg

SEQ ID NO: 217396 - RNA, 32 nt, Human
guuuuaugucugcuugcuuggagcucagugau

SEQ ID NO: 217397 - RNA, 32 nt, Human
guuuuauuauugcuugugccucaacuguuuaa

SEQ ID NO: 217398 - RNA, 32 nt, Human
guuuuauuauuuuugaauucauggagccauca

SEQ ID NO: 217399 - RNA, 32 nt, Human
guuuuauuguccauuuucugugaggauaugca

SEQ ID NO: 217400 - RNA, 32 nt, Human
guuuuauuuaauucuccuuuacauugccaccu

SEQ ID NO: 217401 - RNA, 32 nt, Human
guuuuauuucuuucucuugccugauugcucug

SEQ ID NO: 217402 - RNA, 32 nt, Human
guuuuauuuguagacauggacugugaaauaaa

SEQ ID NO: 217403 - RNA, 32 nt, Human
guuuuauuuugcagaagaauuggguauuuggu

SEQ ID NO: 217404 - RNA, 32 nt, Human
guuuucaaaacaaaagcaucuucccuagaaau

SEQ ID NO: 217405 - RNA, 32 nt, Human
guuuucaaaauuacuguaaugguuugugucug

SEQ ID NO: 217406 - RNA, 32 nt, Human
guuuucaaacacaaaguggauggugguaugag

SEQ ID NO: 217407 - RNA, 32 nt, Human
guuuucaaagaguucaaacuaaauaucuguca

SEQ ID NO: 217408 - RNA, 32 nt, Human
guuuucaaccaaagaagucacguaccacuggu

SEQ ID NO: 217409 - RNA, 24 nt, Human
guuuucaagagacugcuguaggug

SEQ ID NO: 217410 - RNA, 32 nt, Human
guuuucaaggaggugcuuaggauuguggguuu

SEQ ID NO: 217411 - RNA, 32 nt, Human
guuuucaaggggaaggucauuuguaaagcacg

SEQ ID NO: 217412 - RNA, 32 nt, Human
guuuucaaguacaagucuuuugcuuccuuaag

SEQ ID NO: 217413 - RNA, 20 nt, Human
guuuucaaugugaauuuguu

SEQ ID NO: 217414 - RNA, 32 nt, Human
guuuucacagcccccugagggaagggacgcag

SEQ ID NO: 217415 - RNA, 32 nt, Human
guuuucacaguuucagcacucaaccucaucau

SEQ ID NO: 217416 - RNA, 32 nt, Human
guuuucaccauguuagccaggcuggucucaaa

SEQ ID NO: 217417 - RNA, 32 nt, Human
guuuucaccauguugaccaggcuggucucgaa

SEQ ID NO: 217418 - RNA, 32 nt, Human
guuuucaccauguuggccaggcuggucucgaa

SEQ ID NO: 217419 - RNA, 32 nt, Human
guuuucaccauguuggccaggcuggucuugaa

SEQ ID NO: 217420 - RNA, 32 nt, Human
guuuucaccauguuggcuaggcuggucuugaa

SEQ ID NO: 217421 - RNA, 32 nt, Human
guuuucacugaauucugagggugccucugcau

SEQ ID NO: 217422 - RNA, 32 nt, Human
guuuucacuuuaguuucuaaacuuuuuauccc

SEQ ID NO: 217423 - RNA, 32 nt, Human
guuuucacuuuuggucuccucuuccagaguca

SEQ ID NO: 217424 - RNA, 32 nt, Human
guuuucagaaaugccacuuuuguaagcaucag

SEQ ID NO: 217425 - RNA, 32 nt, Human
guuuucagagacaccauuuucuuucuaaacuu

SEQ ID NO: 217426 - RNA, 32 nt, Human
guuuucagagugugaggaagggagggaccauu

SEQ ID NO: 217427 - RNA, 32 nt, Human
guuuucagaguuuacagcgucaauuguacuga

SEQ ID NO: 217428 - RNA, 32 nt, Human
guuuucagaugaagccauaaggcuuuggaguu

SEQ ID NO: 217429 - RNA, 32 nt, Human
guuuucagcagucugugcugugccuggaugua

SEQ ID NO: 217430 - RNA, 32 nt, Human
guuuucagcccuccucaggguggcucucagca

SEQ ID NO: 217431 - RNA, 32 nt, Human
guuuucagccuauggaaugauuuccuuuuguc

SEQ ID NO: 217432 - RNA, 32 nt, Human
guuuucagccuccucaugccuccgucuccuuu

SEQ ID NO: 217433 - RNA, 18 nt, Human
guuuucagccuggcagug

SEQ ID NO: 217434 - RNA, 32 nt, Human
guuuucaggacugggcccugauugauaacacc

SEQ ID NO: 217435 - RNA, 32 nt, Human
guuuucaguaguacaggcuucuugccgauaug

SEQ ID NO: 217436 - RNA, 32 nt, Human
guuuucaguauuaugacaguaucugcagauac

SEQ ID NO: 217437 - RNA, 32 nt, Human
guuuucagucagggagcaugugcauuguuugu

SEQ ID NO: 217438 - RNA, 32 nt, Human
guuuucagucauugauuccugggugucuugcu

SEQ ID NO: 217439 - RNA, 32 nt, Human
guuuucagugagugaguuaacaauaaaagcuu

SEQ ID NO: 217440 - RNA, 32 nt, Human
guuuucaguguuugguaaacagccaggguccg

SEQ ID NO: 217441 - RNA, 32 nt, Human
guuuucaguuaaagcccuaucugcacuuuuua

SEQ ID NO: 217442 - RNA, 20 nt, Human
guuuucaguuguaugcagug

SEQ ID NO: 217443 - RNA, 32 nt, Human
guuuucauaagaaauugucccuggagguguug

SEQ ID NO: 217444 - RNA, 32 nt, Human
guuuucauaauggguguuuauaugaaacuacu

SEQ ID NO: 217445 - RNA, 32 nt, Human
guuuucaucagugccuguaucuguggucagca

SEQ ID NO: 217446 - RNA, 32 nt, Human
guuuucaucucuagggaccagaaccaaaccca

SEQ ID NO: 217447 - RNA, 25 nt, Human
guuuucaucuggugucuuuuauuua

SEQ ID NO: 217448 - RNA, 32 nt, Human
guuuucaugaaacugaguguuucuguggacca

SEQ ID NO: 217449 - RNA, 31 nt, Human
guuuucaugaagaggagugaaaagccagaag

SEQ ID NO: 217450 - RNA, 32 nt, Human
guuuucaugaguuuuccccacucugaagcugu

SEQ ID NO: 217451 - RNA, 32 nt, Human
guuuucauucuuccucugccacaugaggccac

SEQ ID NO: 217452 - RNA, 32 nt, Human
guuuucauuugaaaaagaauaucuuucuuccu

SEQ ID NO: 217453 - RNA, 32 nt, Human
guuuucauuuggaacgucuuuuaaaaggaaaa

SEQ ID NO: 217454 - RNA, 32 nt, Human
guuuucauuuuauucuggucucagggccauac

SEQ ID NO: 217455 - RNA, 32 nt, Human
guuuucauuuuccuccaaaguugaauuuugcu

SEQ ID NO: 217456 - RNA, 32 nt, Human
guuuucauuuuuaaaaauuuaggaugaaggaa

SEQ ID NO: 217457 - RNA, 32 nt, Human
uaacuagaccuagacuuucuacuccaaucagg

SEQ ID NO: 217458 - RNA, 32 nt, Human
uaacuagacugcagcuaaccaccaccaacagc

SEQ ID NO: 217459 - RNA, 24 nt, Human
uaacuagccagacccaucccuuua

SEQ ID NO: 217460 - RNA, 31 nt, Human
uaacuagcuaguaggcuuucacuggaaaguu

SEQ ID NO: 217461 - RNA, 21 nt, Human
uaacuagguuuuacauggaag

SEQ ID NO: 217462 - RNA, 32 nt, Human
uaacuaguccgccccaccacacuccccgccug

SEQ ID NO: 217463 - RNA, 32 nt, Human
uaacuagucuaccagugaccucagggcacuuu

SEQ ID NO: 217464 - RNA, 32 nt, Human
uaacuaguguuucugcagaggcagcaggagcc

SEQ ID NO: 217465 - RNA, 32 nt, Human
uaacuaguuaccuggguaaaagcgcuaacgac

SEQ ID NO: 217466 - RNA, 32 nt, Human
uaacuaguuuuguaauuucuguauuuaauugu

SEQ ID NO: 217467 - RNA, 32 nt, Human
uaacuauacaucuuugcucuuaacuccaaguc

SEQ ID NO: 217468 - RNA, 32 nt, Human
uaacuauagccuagagaaaagaggguugaaga

SEQ ID NO: 217469 - RNA, 32 nt, Human
uaacuauauaaauauuaaagauaaucaauacg

SEQ ID NO: 217470 - RNA, 32 nt, Human
uaacuauauuguuaauaucuucccucugacag

SEQ ID NO: 217471 - RNA, 32 nt, Human
uaacuaucccaggguuauguagcaaacaggug

SEQ ID NO: 217472 - RNA, 32 nt, Human
uaacuaucuuauguuucuagucuuucaagcuu

SEQ ID NO: 217473 - RNA, 32 nt, Human
uaacuaugaaaaucauuaugucauuccauaau

SEQ ID NO: 217474 - RNA, 32 nt, Human
uaacuaugacaucaaugguaggaaccugaagc

SEQ ID NO: 217475 - RNA, 21 nt, Human
uaacuaugacuagacauguua

SEQ ID NO: 217476 - RNA, 32 nt, Human
uaacuaugacuuuggucuuaagcaauuuucuu

SEQ ID NO: 217477 - RNA, 32 nt, Human
uaacuaugagacacaucuuguuuuacugaauu

SEQ ID NO: 217478 - RNA, 32 nt, Human
uaacuauuagguuagugcaaaaguaauugcgg

SEQ ID NO: 217479 - RNA, 32 nt, Human
uaacuauuuccuuuucuuguugaauaccuuag

SEQ ID NO: 217480 - RNA, 32 nt, Human
uaacucaacauggcaugccuuucucuccguaa

SEQ ID NO: 217481 - RNA, 32 nt, Human
uaacucaacccgcuucccagcacagcggcuuu

SEQ ID NO: 217482 - RNA, 32 nt, Human
uaacucaagaggacagaggcuggugaggaggu

SEQ ID NO: 217483 - RNA, 32 nt, Human
uaacucaagaggacagaggcuggugggaggua

SEQ ID NO: 217484 - RNA, 32 nt, Human
uaacucaauccucauucucugccuccuggacc

SEQ ID NO: 217485 - RNA, 32 nt, Human
uaacucaaugaaaaaguugaugcccaagggag

SEQ ID NO: 217486 - RNA, 32 nt, Human
uaacucaauuaugucagccacaggugaauuac

SEQ ID NO: 217487 - RNA, 32 nt, Human
uaacucacgccuguaaucccagcacuuaggaa

SEQ ID NO: 217488 - RNA, 32 nt, Human
uaacucacugagccucuuaauauugccaugau

SEQ ID NO: 217489 - RNA, 32 nt, Human
uaacucacugcaaccuccgcuucccagguaau

SEQ ID NO: 217490 - RNA, 32 nt, Human
uaacucacuguuucuaagccuccuggaccaug

SEQ ID NO: 217491 - RNA, 32 nt, Human
uaacucagaucucacagguugaagacucaguc

SEQ ID NO: 217492 - RNA, 32 nt, Human
uaacucagcuucuaguauuucaagaugacauc

SEQ ID NO: 217493 - RNA, 32 nt, Human
uaacucagcuuugguacuggaggggaauugga

SEQ ID NO: 217494 - RNA, 32 nt, Human
uaacucaggcuggagugcaguggcgcgaucug

SEQ ID NO: 217495 - RNA, 32 nt, Human
uaacucaguaauuucaaaauacagauuugaau

SEQ ID NO: 217496 - RNA, 32 nt, Human
uaacucaugccugacaucucagcacuucagga

SEQ ID NO: 217497 - RNA, 32 nt, Human
uaacucaugcucccuccacuuccccagaggag

SEQ ID NO: 217498 - RNA, 32 nt, Human
uaacucauuuaaggagcuaccccagccaucau

SEQ ID NO: 217499 - RNA, 32 nt, Human
uaacucauuuccaggauucuggcauuguagac

SEQ ID NO: 217500 - RNA, 32 nt, Human
uaacuccaacucuaaagcuaacuccuaacccu

SEQ ID NO: 217501 - RNA, 32 nt, Human
uaacuccaagaguccaaaggccaaagaaccug

SEQ ID NO: 217502 - RNA, 32 nt, Human
uaacuccaagccuuaaaauucccaaauggagu

SEQ ID NO: 217503 - RNA, 32 nt, Human
uaacuccacuggcuccaugauucucugagugg

SEQ ID NO: 217504 - RNA, 32 nt, Human
uaacuccagaaaaggguggcugcagauggagc

SEQ ID NO: 217505 - RNA, 32 nt, Human
uaacuccagcaaggaaauggccaguuaaguag

SEQ ID NO: 217506 - RNA, 32 nt, Human
uaacuccagcacuuugggaggccgaggugggu

SEQ ID NO: 217507 - RNA, 32 nt, Human
uaacuccagcuacuugggaggcugaggcagga

SEQ ID NO: 217508 - RNA, 32 nt, Human
uaacuccauagagaggaaugacaggcugggcc

SEQ ID NO: 217509 - RNA, 32 nt, Human
uaacuccauuacacucucucuccuggagccuc

SEQ ID NO: 217510 - RNA, 32 nt, Human
uaacucccaguucugagaagagccauaggagu

SEQ ID NO: 217511 - RNA, 32 nt, Human
uaacucccauuuugauuccaggaaaaguguaa

SEQ ID NO: 217512 - RNA, 32 nt, Human
uaacuccccacuuccuccugcaccaccacggg

SEQ ID NO: 217513 - RNA, 32 nt, Human
uaacuccccuaaaaacucccuaggaaguaaca

SEQ ID NO: 217514 - RNA, 32 nt, Human
uaacuccccucagggauacgacacaugcccau

SEQ ID NO: 217515 - RNA, 32 nt, Human
uaacuccccucggggauacgacacaugcccau

SEQ ID NO: 217516 - RNA, 32 nt, Human
uaacucccugcucucagcccugaugacuacac

SEQ ID NO: 217517 - RNA, 32 nt, Human
uaacucccuuucucccuucccuucucccgguc

SEQ ID NO: 217518 - RNA, 32 nt, Human
uaacuccgcccugacccacccuucccgaugca

SEQ ID NO: 217519 - RNA, 32 nt, Human
uaacuccucaauuccaacacugauuuccccuu

SEQ ID NO: 217520 - RNA, 32 nt, Human
uaacuccuccuccuccucucuucuccucuggu

SEQ ID NO: 217521 - RNA, 32 nt, Human
uaacuccuccuccuuacuccccaacacccucc

SEQ ID NO: 217522 - RNA, 32 nt, Human
uaacuccugauggugauccacccaccucggcc

SEQ ID NO: 217523 - RNA, 32 nt, Human
uaacuccugccuccacacauguucuugacuga

SEQ ID NO: 217524 - RNA, 32 nt, Human
uaacuccuguaaccccagcucuuugggaggcc

SEQ ID NO: 217525 - RNA, 32 nt, Human
uaacuccuuuaaucccaggcaucuguugggac

SEQ ID NO: 217526 - RNA, 32 nt, Human
uaacucgaaaaguugugauuuagaagacagga

SEQ ID NO: 217527 - RNA, 32 nt, Human
uaacucuaaagcuccauguccugggccuaaaa

SEQ ID NO: 217528 - RNA, 32 nt, Human
uaacucucagauuaaucucugucauccaucgc

SEQ ID NO: 217529 - RNA, 32 nt, Human
uaacucuccauauucucuauucauacauauau

SEQ ID NO: 217530 - RNA, 32 nt, Human
uaacucucccucauuugcuuugcccacagccu

SEQ ID NO: 217531 - RNA, 32 nt, Human
uaacucucucccgcucugccuucccuccuucc

SEQ ID NO: 217532 - RNA, 32 nt, Human
uaacucuguaauggaauaguuugcugccaacu

SEQ ID NO: 217533 - RNA, 32 nt, Human
uaacucugugaccuugaaugcaucauuucccc

SEQ ID NO: 217534 - RNA, 32 nt, Human
uaacucugugagguuacugagauuugagcugu

SEQ ID NO: 217535 - RNA, 32 nt, Human
uaacucugugaguaugcucuucugcccaaaaa

SEQ ID NO: 217536 - RNA, 32 nt, Human
uaacucuuccuuguagggcccuuuccuuauuc

SEQ ID NO: 217537 - RNA, 32 nt, Human
uaacucuucuuccucguccucuuccauaaggc

SEQ ID NO: 217538 - RNA, 32 nt, Human
uaacucuugcugcugcucacuguuugggucca

SEQ ID NO: 217539 - RNA, 32 nt, Human
uaacucuuguccaggcuggaggagugcagucg

SEQ ID NO: 217540 - RNA, 32 nt, Human
uaacucuuuacaugaucugugagcaccugcuu

SEQ ID NO: 217541 - RNA, 32 nt, Human
uaacucuuugugaauggaaccaaugugcaaga

SEQ ID NO: 217542 - RNA, 32 nt, Human
uaacucuuuugcccuucucuucugccagugaa

SEQ ID NO: 217543 - RNA, 32 nt, Human
uaacugaaagagaaucggugcuaagagcuuuu

SEQ ID NO: 217544 - RNA, 21 nt, Human
uaacugaaggaccccagggga

SEQ ID NO: 217545 - RNA, 32 nt, Human
uaacugaauggcaccaaaaggcauauuggggu

SEQ ID NO: 217546 - RNA, 19 nt, Human
uaacugacaaaccauugaa

SEQ ID NO: 217547 - RNA, 32 nt, Human
uaacugacccuugacaaucuugucagcaauau

SEQ ID NO: 217548 - RNA, 32 nt, Human
uaacugagacaagauuucgccauguugcccag

SEQ ID NO: 217549 - RNA, 32 nt, Human
uaacugagcauuuucucaacucgacucucauu

SEQ ID NO: 217550 - RNA, 32 nt, Human
uaacugagcuaacauaaaauaacucuagguuu

SEQ ID NO: 217551 - RNA, 32 nt, Human
uaacugaguuuuaaagccaaacugacugagga

SEQ ID NO: 217552 - RNA, 32 nt, Human
uaacugaugcagauguacuucuucagugugau

SEQ ID NO: 217553 - RNA, 32 nt, Human
uaacugaugcuacugagccgauggagcguggu

SEQ ID NO: 217554 - RNA, 19 nt, Human
uaacugauguaaccauuga

SEQ ID NO: 217555 - RNA, 32 nt, Human
uaacugauuccaaugacauucauuuuguuuuc

SEQ ID NO: 217556 - RNA, 32 nt, Human
uaacugauuccucuccugacccuuuacuaaua

SEQ ID NO: 217557 - RNA, 32 nt, Human
uaacugcaacgagucaucucccugccacccau

SEQ ID NO: 217558 - RNA, 32 nt, Human
uaacugcaccccuucuugguccuuccuccaca

SEQ ID NO: 217559 - RNA, 32 nt, Human
uaacugcacgaugcugacaagacaaugccucc

SEQ ID NO: 217560 - RNA, 32 nt, Human
uaacugcagaauguacgcugucuucaguuaag

SEQ ID NO: 217561 - RNA, 19 nt, Human
uaacugcagacauucugaa

SEQ ID NO: 217562 - RNA, 17 nt, Human
uaacugcagaccaugaa

SEQ ID NO: 217563 - RNA, 19 nt, Human
uaacugcagauaaauuuga

SEQ ID NO: 217564 - RNA, 32 nt, Human
uaacugcagaugucucuacuuuguucuaaaau

SEQ ID NO: 217565 - RNA, 17 nt, Human
uaacugcagauugugaa

SEQ ID NO: 217566 - RNA, 32 nt, Human
uaacugcaggggaaugaagauuucuaguccuc

SEQ ID NO: 217567 - RNA, 19 nt, Human
uaacugcagugaagucuga

SEQ ID NO: 217568 - RNA, 17 nt, Human
uaacugcagugacuuga

SEQ ID NO: 217569 - RNA, 19 nt, Human
uaacugcaguuucaaugag

SEQ ID NO: 217570 - RNA, 32 nt, Human
uaacugcaucuuccacucagucacuacaaaaa

SEQ ID NO: 217571 - RNA, 32 nt, Human
uaacugcaucuucuccccuugccaccccaugg

SEQ ID NO: 217572 - RNA, 32 nt, Human
uaacugcaucuucucugaccccugguaccaga

SEQ ID NO: 217573 - RNA, 17 nt, Human
uaacugcaucuuuugga

SEQ ID NO: 217574 - RNA, 32 nt, Human
uaacugccagucccagcaccuccugaaagccc

SEQ ID NO: 217575 - RNA, 18 nt, Human
uaacugcgagccauugga

SEQ ID NO: 217576 - RNA, 31 nt, Human
uaacugcgguuucagccaacacucuucaugg

SEQ ID NO: 217577 - RNA, 32 nt, Human
uaacugcuacaaauacucuuaggaagagaaac

SEQ ID NO: 217578 - RNA, 32 nt, Human
uaacugcucugagcagagaugaguggugguug

SEQ ID NO: 217579 - RNA, 32 nt, Human
uaacuggaaucagcucaggacugccauuggac

SEQ ID NO: 217580 - RNA, 32 nt, Human
uaacuggaaugaacuccugaucccaaagccua

SEQ ID NO: 217581 - RNA, 32 nt, Human
uaacuggacaaggagaaaaacauagggaaaaa

SEQ ID NO: 217582 - RNA, 32 nt, Human
uaacuggacauggcagacacugcuuugaacaa

SEQ ID NO: 217583 - RNA, 32 nt, Human
uaacuggaguagcugggauuuacuaguagugu

SEQ ID NO: 217584 - RNA, 32 nt, Human
uaacuggaucugccacuuguuuggaaaauauc

SEQ ID NO: 217585 - RNA, 32 nt, Human
uaacuggcaaauagagcuguacucaguggccu

SEQ ID NO: 217586 - RNA, 32 nt, Human
uaacuggccauccugguuuugcagagaucagg

SEQ ID NO: 217587 - RNA, 32 nt, Human
uaacuggcccaggcacuggaguggaauagaau

SEQ ID NO: 217588 - RNA, 32 nt, Human
uaacuggccuccaucuugggucaucucaucuu

SEQ ID NO: 217589 - RNA, 32 nt, Human
uaacuggcugagaggaaguagagaugggguuu

SEQ ID NO: 217590 - RNA, 32 nt, Human
uaacuggcugcgcacagggagcugucaccaug

SEQ ID NO: 217591 - RNA, 32 nt, Human
uaacuggcugcucccugcucccagggacugac

SEQ ID NO: 217592 - RNA, 32 nt, Human
uaacugggaagagcugaagugggggccuggcu

SEQ ID NO: 217593 - RNA, 32 nt, Human
uaacugggagagggcaguaaggaggacuuccu

SEQ ID NO: 217594 - RNA, 32 nt, Human
uaacugggaggcacuucccaguaggggccaac

SEQ ID NO: 217595 - RNA, 32 nt, Human
uaacugggccagacuaccuuuuuauacuaggu

SEQ ID NO: 217596 - RNA, 32 nt, Human
uaacuggguaacuuauuggggcugggcaagca

SEQ ID NO: 217597 - RNA, 32 nt, Human
uaacuggguaacuuauuggggcugggcaugca

SEQ ID NO: 217598 - RNA, 32 nt, Human
uaacugguauguugaaguagugucuaaaagua

SEQ ID NO: 217599 - RNA, 32 nt, Human
uaacuggucauuaauuaugaacauuuacuucu

SEQ ID NO: 217600 - RNA, 32 nt, Human
uaacuggugccuucccuguacccgcagcagcc

SEQ ID NO: 217601 - RNA, 32 nt, Human
uaacugguucauccuuaccaguggccaagcac

SEQ ID NO: 217602 - RNA, 32 nt, Human
uaacugguuccugcaacccacuuuuaggucuc

SEQ ID NO: 217603 - RNA, 32 nt, Human
uaacugguugugacaaagcuuguuguugauca

SEQ ID NO: 217604 - RNA, 18 nt, Human
uaacuguauacacaugaa

SEQ ID NO: 217605 - RNA, 32 nt, Human
uaacuguccgcagcugucugcuagugguuguc

SEQ ID NO: 217606 - RNA, 32 nt, Human
uaacugugccagugcccauguuuacagaaguc

SEQ ID NO: 217607 - RNA, 32 nt, Human
uaacugugcuuccacugagcaagccagacaca

SEQ ID NO: 217608 - RNA, 32 nt, Human
uaacuguggauuuccaaaguucuggcuacaau

SEQ ID NO: 217609 - RNA, 32 nt, Human
uaacugugggcaaccugacugaugccgucuug

SEQ ID NO: 217610 - RNA, 32 nt, Human
uaacuguggugaggaccaacugcaacacugug

SEQ ID NO: 217611 - RNA, 32 nt, Human
uaacugugucaugauucacccccaaacaguga

SEQ ID NO: 217612 - RNA, 32 nt, Human
uaacugugugaccagcggaaacaggugugugu

SEQ ID NO: 217613 - RNA, 19 nt, Human
uaacugugugccuacugaa

SEQ ID NO: 217614 - RNA, 32 nt, Human
uaacuguugauugccaaacauuucacucugcu

SEQ ID NO: 217615 - RNA, 32 nt, Human
uaacuguuuaaccuuucuaaaucuuuucaaga

SEQ ID NO: 217616 - RNA, 32 nt, Human
uaacuuaaaagcuucuccucugagaaacauuu

SEQ ID NO: 217617 - RNA, 32 nt, Human
uaacuuaaagccauucaacaaggagucaagua

SEQ ID NO: 217618 - RNA, 32 nt, Human
uaacuuaaaggaugagaaaaugugguguagcu

SEQ ID NO: 217619 - RNA, 32 nt, Human
uaacuuaaguuccagaccagcuaguccaaauu

SEQ ID NO: 217620 - RNA, 23 nt, Human
uaacuuaauaaaaagaguugaga

SEQ ID NO: 217621 - RNA, 32 nt, Human
uaacuuaaugucuugucaaauacuuuuauuga

SEQ ID NO: 217622 - RNA, 32 nt, Human
uaacuuagaugauucccaaggacucuaauaaa

SEQ ID NO: 217623 - RNA, 32 nt, Human
uaacuuaucuuuuggagaacagcuuuaagugc

SEQ ID NO: 217624 - RNA, 32 nt, Human
uaacuuauugcuucccuuccuguuucugcaug

SEQ ID NO: 217625 - RNA, 23 nt, Human
uaacuucaacuccaucgccaaga

SEQ ID NO: 217626 - RNA, 32 nt, Human
uaacuucacaauuaccuuuucuagugcaguua

SEQ ID NO: 217627 - RNA, 32 nt, Human
uaacuucacugcaauucuguuucccucauuug

SEQ ID NO: 217628 - RNA, 32 nt, Human
uaacuucagagaagucaguuggagaaaaauga

SEQ ID NO: 217629 - RNA, 32 nt, Human
uaacuucagagaagucaguuggagaaaaugaa

SEQ ID NO: 217630 - RNA, 32 nt, Human
uaacuucaucuaaguccccagauggguacaau

SEQ ID NO: 217631 - RNA, 32 nt, Human
uaacuucaugcugucugugugaggcucccucc

SEQ ID NO: 217632 - RNA, 32 nt, Human
uaacuuccaagaggagaagggcucgggguugc

SEQ ID NO: 217633 - RNA, 32 nt, Human
uaacuuccagggucucagcaaacugcuguuuu

SEQ ID NO: 217634 - RNA, 32 nt, Human
uaacuucccaacaagauaguucugucuugcaa

SEQ ID NO: 217635 - RNA, 32 nt, Human
uaacuucccaacauuuaagaaaccccaauaga

SEQ ID NO: 217636 - RNA, 32 nt, Human
uaacuucgggaugcggaagugagggaaagucc

SEQ ID NO: 217637 - RNA, 32 nt, Human
uaacuucuaagaugauuucaucuucucauagu

SEQ ID NO: 217638 - RNA, 32 nt, Human
uaacuucucagagcuguucuccacuccugacu

SEQ ID NO: 217639 - RNA, 32 nt, Human
uaacuucucaguuauuuguaugucaggagaca

SEQ ID NO: 217640 - RNA, 32 nt, Human
uaacuucuuccuuaacaagaacauggagguga

SEQ ID NO: 217641 - RNA, 32 nt, Human
uaacuucuuuuaaauuagcuaacucuaaauga

SEQ ID NO: 217642 - RNA, 32 nt, Human
uaacuugagaugucugugguuguggggguguu

SEQ ID NO: 217643 - RNA, 32 nt, Human
uaacuugagccccagucucagaaauuaacaug

SEQ ID NO: 217644 - RNA, 32 nt, Human
uaacuugaucagauauaggacaugacacugaa

SEQ ID NO: 217645 - RNA, 32 nt, Human
uaacuugcacggcuuuaucacagcauuuuuaa

SEQ ID NO: 217646 - RNA, 32 nt, Human
uaacuugcaucuaggcugggcguggcggcuca

SEQ ID NO: 217647 - RNA, 32 nt, Human
uaacuugcgguggcaugacugucaggaggugc

SEQ ID NO: 217648 - RNA, 32 nt, Human
uaacuugcucugcuuguuuuggaaaaggcacu

SEQ ID NO: 217649 - RNA, 32 nt, Human
uaacuugcuuugacaaccuacugauguaacuu

SEQ ID NO: 217650 - RNA, 32 nt, Human
uaacuugggaaacugaaaguguucccauauag

SEQ ID NO: 217651 - RNA, 32 nt, Human
uaacuugggccauccuaucaucuggagcccua

SEQ ID NO: 217652 - RNA, 32 nt, Human
uaacuuguaaugaagacagaaauauguaugag

SEQ ID NO: 217653 - RNA, 32 nt, Human
uaacuugucaugcacugacacagcauucauga

SEQ ID NO: 217654 - RNA, 32 nt, Human
uaacuugucuuuuuacugcauaacucuccaga

SEQ ID NO: 217655 - RNA, 32 nt, Human
uaacuugugauccuuggccagaauuucuuucu

SEQ ID NO: 217656 - RNA, 32 nt, Human
uaacuugugcaagaucaaaugacaaauaacug

SEQ ID NO: 217657 - RNA, 32 nt, Human
uaacuugugccuguaauuccagcugcucugga

SEQ ID NO: 217658 - RNA, 32 nt, Human
uaacuuguguauugcauuccagcagaccacug

SEQ ID NO: 217659 - RNA, 32 nt, Human
uaacuuguucagaggcagagggugcaaaggag

SEQ ID NO: 217660 - RNA, 32 nt, Human
uaacuuuacaaaugucagcuaguuuugacuac

SEQ ID NO: 217661 - RNA, 32 nt, Human
uaacuuuaccaacauuggaaaacagccaacua

SEQ ID NO: 217662 - RNA, 32 nt, Human
uaacuuuacuauaugaaagcagcauaagagua

SEQ ID NO: 217663 - RNA, 32 nt, Human
uaacuuuaucuuaguaauguaaagauucagua

SEQ ID NO: 217664 - RNA, 32 nt, Human
uaacuuuaugacuacaaagaaaacauguuuuc

SEQ ID NO: 217665 - RNA, 32 nt, Human
uaacuuucaaugcuuguuaugggaaccaguuc

SEQ ID NO: 217666 - RNA, 32 nt, Human
uaacuuucaguuuuuggcuauuacaaauaaac

SEQ ID NO: 217667 - RNA, 32 nt, Human
uaacuuuccugaaggacuucccccucugccau

SEQ ID NO: 217668 - RNA, 32 nt, Human
uaacuuucucaccucugugccuuugugcaagc

SEQ ID NO: 217669 - RNA, 32 nt, Human
uaacuuucucacuaagugagaaugagaacugc

SEQ ID NO: 217670 - RNA, 32 nt, Human
uaacuuucugcagcuuuuccauagaagcccug

SEQ ID NO: 217671 - RNA, 32 nt, Human
uaacuuucuuuggucacauaauauuaaauuuu

SEQ ID NO: 217672 - RNA, 32 nt, Human
uaacuuuguccuguccuccaccuuucuauccc

SEQ ID NO: 217673 - RNA, 32 nt, Human
uaacuuuguucagguugcccuucaccauggau

SEQ ID NO: 217674 - RNA, 32 nt, Human
uaacuuuucacacauccagaugguuccacacu

SEQ ID NO: 217675 - RNA, 32 nt, Human
uaacuuuuccagaucuaacacuagcuuauucu

SEQ ID NO: 217676 - RNA, 32 nt, Human
uaacuuuugagugucaggauguuuggaaggac

SEQ ID NO: 217677 - RNA, 32 nt, Human
uaacuuuuuauuagcucuuccuaagggaaaug

SEQ ID NO: 217678 - RNA, 32 nt, Human
uaacuuuuuccagaucucaugucuggcuuaau

SEQ ID NO: 217679 - RNA, 32 nt, Human
uaacuuuuuccauccagcaacauccagacgau

SEQ ID NO: 217680 - RNA, 32 nt, Human
uaacuuuuuggacacccgugauuugcauacug

SEQ ID NO: 217681 - RNA, 32 nt, Human
uaagaaaaaccugaaauuaacuugugccacaa

SEQ ID NO: 217682 - RNA, 32 nt, Human
uaagaaaaagagaaggcucucuuuucucccuu

SEQ ID NO: 217683 - RNA, 32 nt, Human
uaagaaaaaggauugaaagggaccaaguagcu

SEQ ID NO: 217684 - RNA, 32 nt, Human
uaagaaaaagugagcauuuuuggaaggauagu

SEQ ID NO: 217685 - RNA, 24 nt, Human
uaagaaaaauaaaguugaaguuca

SEQ ID NO: 217686 - RNA, 24 nt, Human
uaagaaaaauaaaguugucauuca

SEQ ID NO: 217687 - RNA, 23 nt, Human
uaagaaaaauacaguuuauuuca

SEQ ID NO: 217688 - RNA, 32 nt, Human
uaagaaaaauuagcugggcgugguggcgggca

SEQ ID NO: 217689 - RNA, 23 nt, Human
uaagaaaaauuuaaguuuauuca

SEQ ID NO: 217690 - RNA, 32 nt, Human
uaagaaaacccgacaacauuucugccagguuu

SEQ ID NO: 217691 - RNA, 32 nt, Human
uaagaaaacuauuucauuacuuuuguaaucca

SEQ ID NO: 217692 - RNA, 32 nt, Human
uaagaaaagguuuucuucauucauggcuagag

SEQ ID NO: 217693 - RNA, 30 nt, Human
uaagaaaauaaauauuuccauuuaaauguc

SEQ ID NO: 217694 - RNA, 31 nt, Human
uaagaaaauaaauauuuccauuuaaauguca

SEQ ID NO: 217695 - RNA, 32 nt, Human
uaagaaaaucagauaacuuguacuggagagaa

SEQ ID NO: 217696 - RNA, 32 nt, Human
uaagaaaauccugaauagcacagggaagcaga

SEQ ID NO: 217697 - RNA, 32 nt, Human
uaagaaacacacugaggcagggaaguccccag

SEQ ID NO: 217698 - RNA, 32 nt, Human
uaagaaacauggcaaaccaggcugucucauuc

SEQ ID NO: 217699 - RNA, 32 nt, Human
uaagaaacccauccagcugucaugguauguua

SEQ ID NO: 217700 - RNA, 32 nt, Human
uaagaaacccgggguguuuccucugccuacgu

SEQ ID NO: 217701 - RNA, 32 nt, Human
uaagaaacccguaaggagcugcagugaaaagu

SEQ ID NO: 217702 - RNA, 32 nt, Human
uaagaaacucuaaauccaaggugacaucgugg

SEQ ID NO: 217703 - RNA, 32 nt, Human
uaagaaagacaacuacuuuugaaggaaguuaa

SEQ ID NO: 217704 - RNA, 32 nt, Human
uaagaaagacacuuccaaaacuacccauuguu

SEQ ID NO: 217705 - RNA, 23 nt, Human
uaagaaagcacaguugucaguca

SEQ ID NO: 217706 - RNA, 32 nt, Human
uaagaaagccacagcacguacacccacuccag

SEQ ID NO: 217707 - RNA, 32 nt, Human
uaagaaagcucugagaaugggcauuuuuguau

SEQ ID NO: 217708 - RNA, 32 nt, Human
uaagaaaggaagcacagaagucgcaggcagcc

SEQ ID NO: 217709 - RNA, 32 nt, Human
uaagaaaggaagcuaacgcaguaucugcaaag

SEQ ID NO: 217710 - RNA, 32 nt, Human
uaagaaaggggaggggacagugcaauccgggu

SEQ ID NO: 217711 - RNA, 32 nt, Human
uaagaaagucaccaagugucuuaagcuguuuu

SEQ ID NO: 217712 - RNA, 32 nt, Human
uaagaaaucucaaugaacuauuuguagagaau

SEQ ID NO: 217713 - RNA, 32 nt, Human
uaagaaauguguuugcccuguuuuguuugguu

SEQ ID NO: 217714 - RNA, 32 nt, Human
uaagaacaacagcaacaaaaggcuccaaaaca

SEQ ID NO: 217715 - RNA, 32 nt, Human
uaagaacagcauagagcuucaaaaugcaaagu

SEQ ID NO: 217716 - RNA, 32 nt, Human
uaagaaccugcuucuuucugcaguagaagcgu

SEQ ID NO: 217717 - RNA, 32 nt, Human
uaagaaccugggagcuggaggcugguccaccu

SEQ ID NO: 217718 - RNA, 32 nt, Human
uaagaaccuguggcccuggaacacuuuucaag

SEQ ID NO: 217719 - RNA, 32 nt, Human
uaagaaccuugccugaacauccuuccuuccca

SEQ ID NO: 217720 - RNA, 32 nt, Human
uaagaacuaggccacacgcagaggagaaaugg

SEQ ID NO: 217721 - RNA, 32 nt, Human
uaagaacucgacaacagagugggaacuuucug

SEQ ID NO: 217722 - RNA, 32 nt, Human
uaagaacugcggauucugccugggcacacacc

SEQ ID NO: 217723 - RNA, 32 nt, Human
uaagaacuggcagcaaggcuugaggccuuaug

SEQ ID NO: 217724 - RNA, 32 nt, Human
uaagaacuguaacccucacugcaaggggccgu

SEQ ID NO: 217725 - RNA, 32 nt, Human
uaagaagaaauacccacuaacaaagaacaagc

SEQ ID NO: 217726 - RNA, 32 nt, Human
uaagaagaaauauauguggugaaauguuggaa

SEQ ID NO: 217727 - RNA, 32 nt, Human
uaagaagaaaugcaaaagaaguggcauaggag

SEQ ID NO: 217728 - RNA, 32 nt, Human
uaagaagaacugcuuucuuauagcacaaaacu

SEQ ID NO: 217729 - RNA, 32 nt, Human
uaagaagacagagagaacugaguauccuccca

SEQ ID NO: 217730 - RNA, 32 nt, Human
uaagaagacccaguagcccuccugccucccug

SEQ ID NO: 217731 - RNA, 32 nt, Human
uaagaagacucauguuuaugucuggaauaagu

SEQ ID NO: 217732 - RNA, 32 nt, Human
uaagaagagaagacagccagaggcucacacug

SEQ ID NO: 217733 - RNA, 32 nt, Human
uaagaagagauccuggaaguuccaguagggag

SEQ ID NO: 217734 - RNA, 32 nt, Human
uaagaagagaucuggcugggaucaagaaaccu

SEQ ID NO: 217735 - RNA, 32 nt, Human
uaagaagaggcugggugcaguggcucacaccu

SEQ ID NO: 217736 - RNA, 32 nt, Human
uaagaagauagaaucauaugucugcuaaauaa

SEQ ID NO: 217737 - RNA, 32 nt, Human
uaagaagaugccauugcacuccagccugggca

SEQ ID NO: 217738 - RNA, 32 nt, Human
uaagaagcaacaaccucuccucuucgucuccg

SEQ ID NO: 217739 - RNA, 32 nt, Human
uaagaagcaauggagaaaaugauaauacagca

SEQ ID NO: 217740 - RNA, 32 nt, Human
uaagaagcagcaacuggcccaaaucagagagg

SEQ ID NO: 217741 - RNA, 32 nt, Human
uaagaagcucuggguugcuccuugggcuucuc

SEQ ID NO: 217742 - RNA, 32 nt, Human
uaagaagcucuguugucgauguggaaaaauau

SEQ ID NO: 217743 - RNA, 32 nt, Human
uaagaagcuuugcucugccuuuguagagcucu

SEQ ID NO: 217744 - RNA, 32 nt, Human
uaagaaggagaaagggauugaauggacuuaca

SEQ ID NO: 217745 - RNA, 32 nt, Human
uaagaaggagguggacgaugccuuaguggaga

SEQ ID NO: 217746 - RNA, 32 nt, Human
uaagaaggccucuugcuccuugccaggugcuu

SEQ ID NO: 217747 - RNA, 32 nt, Human
uaagaagggaacauuucuguugauacauguuu

SEQ ID NO: 217748 - RNA, 32 nt, Human
uaagaagggaagagaaagccgggaggcaagua

SEQ ID NO: 217749 - RNA, 32 nt, Human
uaagaagucguggugguuauagcaggaggaga

SEQ ID NO: 217750 - RNA, 32 nt, Human
uaagaagugaaauagaauuuugcugcagacca

SEQ ID NO: 217751 - RNA, 32 nt, Human
uaagaagugguguuuuguguuucaucuccagc

SEQ ID NO: 217752 - RNA, 32 nt, Human
uaagaaguguaucugccuuuccaucuuuuggu

SEQ ID NO: 217753 - RNA, 32 nt, Human
uaagaaguugguguucagcuuaguugauucag

SEQ ID NO: 217754 - RNA, 32 nt, Human
uaagaauagaacaacauauacaacaccaaaaa

SEQ ID NO: 217755 - RNA, 32 nt, Human
uaagaauagcacugaucucacaggguugugau

SEQ ID NO: 217756 - RNA, 32 nt, Human
uaagaauaguaugccagcaaucccugauucuc

SEQ ID NO: 217757 - RNA, 32 nt, Human
uaagaauauaccaaaaguugucugauuuaaag

SEQ ID NO: 217758 - RNA, 32 nt, Human
uaagaauauguagauauagcaaaaagaaugag

SEQ ID NO: 217759 - RNA, 32 nt, Human
uaagaaucaccaccauggcccuugugccaggg

SEQ ID NO: 217760 - RNA, 32 nt, Human
uaagaaucauuuacaaaagcaagcagagaaaa

SEQ ID NO: 217761 - RNA, 32 nt, Human
uaagaauccuuuccuaccaguuuuuccuauau

SEQ ID NO: 217762 - RNA, 32 nt, Human
uaagaaucucucuugcaggaguaacacaggca

SEQ ID NO: 217763 - RNA, 32 nt, Human
uaagaaucugcuugaagucucguauuuguacu

SEQ ID NO: 217764 - RNA, 32 nt, Human
uaagaaucuguacugacuuuucacuuggccau

SEQ ID NO: 217765 - RNA, 32 nt, Human
uaagaaugaggaaaaagagguaauaucagggc

SEQ ID NO: 217766 - RNA, 32 nt, Human
uaagaaugcugggggcugggcgcaguggcuca

SEQ ID NO: 217767 - RNA, 32 nt, Human
uaagaaugcuucuguuccuggaagacccagag

SEQ ID NO: 217768 - RNA, 32 nt, Human
uaagaauggggauggcaaagggcagaguaaga

SEQ ID NO: 217769 - RNA, 30 nt, Human
uaagaaugguuaugauaauuagcaccaugg

SEQ ID NO: 217770 - RNA, 32 nt, Human
uaagaauuaccuuucauuuucucuuuauguua

SEQ ID NO: 217771 - RNA, 32 nt, Human
uaagaauugcuuguugggaagagugcuuuagg

SEQ ID NO: 217772 - RNA, 32 nt, Human
uaagaauuuauuaagcaaaauagccuuagaaa

SEQ ID NO: 217773 - RNA, 32 nt, Human
uaagacaaagccaagaugcaaaauuaggcuuu

SEQ ID NO: 217774 - RNA, 32 nt, Human
uaagacaaaguuuugcucugucaccaaggcug

SEQ ID NO: 217775 - RNA, 32 nt, Human
uaagacaagccuugcucugccgaagcuuacaa

SEQ ID NO: 217776 - RNA, 32 nt, Human
uaagacaauggugaaaucuggcuugaacuugc

SEQ ID NO: 217777 - RNA, 32 nt, Human
uaagacacucccucaaugccacccugacccca

SEQ ID NO: 217778 - RNA, 32 nt, Human
uaagacagaaguucuuuucuuccucacuuugu

SEQ ID NO: 217779 - RNA, 32 nt, Human
uaagacagagacauuugaacagggccuugaag

SEQ ID NO: 217780 - RNA, 32 nt, Human
uaagacagagucuugcucugucacccaggcug

SEQ ID NO: 217781 - RNA, 32 nt, Human
uaagacagaguuucucucugucacccaagcug

SEQ ID NO: 217782 - RNA, 32 nt, Human
uaagacagaguuucucucuguugcccaggcug

SEQ ID NO: 217783 - RNA, 32 nt, Human
uaagacagcaaagaagugugcaaggagggccc

SEQ ID NO: 217784 - RNA, 32 nt, Human
uaagacaggagaaucacuugagccugggagga

SEQ ID NO: 217785 - RNA, 32 nt, Human
uaagacaggaggaucacaagagcccaggaggu

SEQ ID NO: 217786 - RNA, 32 nt, Human
uaagacaggauuuugcuguguugcccagacug

SEQ ID NO: 217787 - RNA, 32 nt, Human
uaagacaggcagaucaccugagcucaggaguc

SEQ ID NO: 217788 - RNA, 32 nt, Human
uaagacaggcuggaggaacagugcagacacac

SEQ ID NO: 217789 - RNA, 32 nt, Human
uaagacagggucucgcucugucacccaggcug

SEQ ID NO: 217790 - RNA, 32 nt, Human
uaagacagggucuugcucuguugcccaggcuc

SEQ ID NO: 217791 - RNA, 32 nt, Human
uaagacagggucuugcucuguugcccaggcug

SEQ ID NO: 217792 - RNA, 32 nt, Human
uaagacaggucuagagacaggagaagcagaaa

SEQ ID NO: 217793 - RNA, 32 nt, Human
uaagacaguuuauacuuugagagaaacccugc

SEQ ID NO: 217794 - RNA, 32 nt, Human
uaagacaugggaauaccuucaguuauuuacau

SEQ ID NO: 217795 - RNA, 32 nt, Human
uaagacauguguuugcuccuccuucaccuucu

SEQ ID NO: 217796 - RNA, 32 nt, Human
uaagaccacaaacuguauugcuaaggacauuu

SEQ ID NO: 217797 - RNA, 32 nt, Human
uaagaccacaagucugcaggaaacucuggaau

SEQ ID NO: 217798 - RNA, 32 nt, Human
uaagaccaccuucccuuccucagcaggccaaa

SEQ ID NO: 217799 - RNA, 32 nt, Human
uaagaccacucuaaggacugggguuggaggcc

SEQ ID NO: 217800 - RNA, 32 nt, Human
uaagacccaaaauccuggcauauugccagguc

SEQ ID NO: 217801 - RNA, 28 nt, Human
uaagacccaagugccuccugcuguuucc

SEQ ID NO: 217802 - RNA, 32 nt, Human
uaagaccccuggcagaacccagccucugcuca

SEQ ID NO: 217803 - RNA, 32 nt, Human
uaagaccccuuuggccacaccuuccaggcacu

SEQ ID NO: 217804 - RNA, 32 nt, Human
uaagacccucauagagcuugauucuuguauau

SEQ ID NO: 217805 - RNA, 32 nt, Human
uaagacccucccccaacagucugaccuuggca

SEQ ID NO: 217806 - RNA, 32 nt, Human
uaagaccgccaccacacucacccucccucaag

SEQ ID NO: 217807 - RNA, 32 nt, Human
uaagaccggaagcaggaaggagggcgcaggaa

SEQ ID NO: 217808 - RNA, 23 nt, Human
uaagaccgguaggcguggggcca

SEQ ID NO: 217809 - RNA, 32 nt, Human
uaagaccuccaccucuagacuagcucuucagu

SEQ ID NO: 217810 - RNA, 32 nt, Human
uaagaccuugggcugccucuucugucuuaacu

SEQ ID NO: 217811 - RNA, 32 nt, Human
uaagacgccagggcaucccggaagcugggaaa

SEQ ID NO: 217812 - RNA, 32 nt, Human
uaagacgggaggauugcuugaauccaggaguu

SEQ ID NO: 217813 - RNA, 32 nt, Human
uaagacgucgagugccaagaccagccuuccag

SEQ ID NO: 217814 - RNA, 32 nt, Human
uaagacguuuuaauuucuuugcagacaagguc

SEQ ID NO: 217815 - RNA, 32 nt, Human
uaagacuacaggguagagaaucagaggcuugu

SEQ ID NO: 217816 - RNA, 32 nt, Human
uaagacuauaaucccuuaaauauuuuagaaga

SEQ ID NO: 217817 - RNA, 32 nt, Human
uaagacuauuagaaucccccaaagugggauac

SEQ ID NO: 217818 - RNA, 32 nt, Human
uaagacuauuccaacugggcauuucaauccau

SEQ ID NO: 217819 - RNA, 32 nt, Human
uaagacucaccaggagaggucugagggccauu

SEQ ID NO: 217820 - RNA, 32 nt, Human
uaagacucacccagggcaaacacugggaccac

SEQ ID NO: 217821 - RNA, 32 nt, Human
uaagacuccagccaccccucuugggcucucua

SEQ ID NO: 217822 - RNA, 32 nt, Human
uaagacuccaucucuucucugccucuggcccu

SEQ ID NO: 217823 - RNA, 32 nt, Human
uaagacucugaaaucuggugacuuugacacug

SEQ ID NO: 217824 - RNA, 32 nt, Human
uaagacugacccacugcauuccagccuggcga

SEQ ID NO: 217825 - RNA, 32 nt, Human
uaagacugagcaccugcuucaugcucagcccu

SEQ ID NO: 217826 - RNA, 32 nt, Human
uaagacugcgcuucuaacaagucucccaguug

SEQ ID NO: 217827 - RNA, 32 nt, Human
uaagacuggucuucggaacuugcccacuccau

SEQ ID NO: 217828 - RNA, 32 nt, Human
uaagacugucauguaagaggugcucuccuggc

SEQ ID NO: 217829 - RNA, 32 nt, Human
uaagacugugccacugcacuccagccugggca

SEQ ID NO: 217830 - RNA, 32 nt, Human
uaagacuuccaagccagaagacagaggguucg

SEQ ID NO: 217831 - RNA, 32 nt, Human
uaagacuuggauuuacuauucuaccucagccc

SEQ ID NO: 217832 - RNA, 32 nt, Human
uaagacuugguaugguuggaguguaggaauga

SEQ ID NO: 217833 - RNA, 32 nt, Human
uaagacuuuaugggagagauuagacacuggag

SEQ ID NO: 217834 - RNA, 32 nt, Human
uaagacuuuuaaaaucagaguaaguauguucu

SEQ ID NO: 217835 - RNA, 32 nt, Human
uaagacuuuuacacugccaguauuccacauuu

SEQ ID NO: 217836 - RNA, 24 nt, Human
uaagagaaaugagcuugacauuua

SEQ ID NO: 217837 - RNA, 32 nt, Human
uaagagaaauggcauuugcauguuccagaguc

SEQ ID NO: 217838 - RNA, 32 nt, Human
uaagagaacaauuuggggcugaagggaguguc

SEQ ID NO: 217839 - RNA, 32 nt, Human
uaagagaacagagcuacguucuuugugagagc

SEQ ID NO: 217840 - RNA, 32 nt, Human
uaagagaacaucuuccagcugccuuuuucaca

SEQ ID NO: 217841 - RNA, 32 nt, Human
uaagagaacuccaggacacaauucagcccggg

SEQ ID NO: 217842 - RNA, 32 nt, Human
uaagagaagagagggagugaaggguggcacca

SEQ ID NO: 217843 - RNA, 32 nt, Human
uaagagaaguuucuagguuugcacugaauugu

SEQ ID NO: 217844 - RNA, 32 nt, Human
uaagagaauuuuggcccuucugugucugagaa

SEQ ID NO: 217845 - RNA, 32 nt, Human
uaagagacaacugaaaucuugccuccuccagc

SEQ ID NO: 217846 - RNA, 32 nt, Human
uaagagacuggggcgcagccucuccccaacac

SEQ ID NO: 217847 - RNA, 32 nt, Human
uaagagacuggguuucggggaaggaggggcua

SEQ ID NO: 217848 - RNA, 32 nt, Human
uaagagagaacaguaaaagugagcaauacuuc

SEQ ID NO: 217849 - RNA, 32 nt, Human
uaagagagaaguucucauugugggaaucugac

SEQ ID NO: 217850 - RNA, 32 nt, Human
uaagagagagaagaggagaaacuucaacgccu

SEQ ID NO: 217851 - RNA, 32 nt, Human
uaagagagaguccucagcagagucuucuugug

SEQ ID NO: 217852 - RNA, 32 nt, Human
uaagagagggaagugggcuggggagaguagaa

SEQ ID NO: 217853 - RNA, 32 nt, Human
uaagagagggccuggggcagacuuaggaucag

SEQ ID NO: 217854 - RNA, 32 nt, Human
uaagagaguggaccagggccccugaggaagac

SEQ ID NO: 217855 - RNA, 32 nt, Human
uaagagaguuuauacugaaaggaaaucauaua

SEQ ID NO: 217856 - RNA, 32 nt, Human
uaagagaugagggagagagagccagagacagu

SEQ ID NO: 217857 - RNA, 32 nt, Human
uaagagcaaaagaaaaauaaagugauugauga

SEQ ID NO: 217858 - RNA, 32 nt, Human
uaagagcaaggagacaccacugggacaaagcc

SEQ ID NO: 217859 - RNA, 32 nt, Human
uaagagcacugcacugacgguuuggagaccug

SEQ ID NO: 217860 - RNA, 32 nt, Human
uaagagcagccagagggagcuggugaggcccu

SEQ ID NO: 217861 - RNA, 32 nt, Human
uaagagcaguguccucccaucuucaacaguua

SEQ ID NO: 217862 - RNA, 32 nt, Human
uaagagcauagagcaaauuaauuuggaagaaa

SEQ ID NO: 217863 - RNA, 32 nt, Human
uaagagcaucugauugcucuuuuaauuugcau

SEQ ID NO: 217864 - RNA, 32 nt, Human
uaagagcaucuggaagugaggguaggagcugg

SEQ ID NO: 217865 - RNA, 32 nt, Human
uaagagccauuuccugucucuccucugcaguc

SEQ ID NO: 217866 - RNA, 32 nt, Human
uaagagccucuuccuucccucagaggaugugg

SEQ ID NO: 217867 - RNA, 32 nt, Human
uaagagcuccuggauggguccgggaacucgcc

SEQ ID NO: 217868 - RNA, 32 nt, Human
uaagagcugaaagggcugugcugagagcacug

SEQ ID NO: 217869 - RNA, 32 nt, Human
uaagagcugcaacugaacgugugagacauggu

SEQ ID NO: 217870 - RNA, 32 nt, Human
uaagagcugcagcauugacugugcuuccguuc

SEQ ID NO: 217871 - RNA, 32 nt, Human
uaagagcugccucugcuguagguauuuguagu

SEQ ID NO: 217872 - RNA, 32 nt, Human
uaagagcuggcuuuucugccauaguguccucu

SEQ ID NO: 217873 - RNA, 19 nt, Human
uaagagcuuccacugcacc

SEQ ID NO: 217874 - RNA, 32 nt, Human
uaagagcuuccuacuguuuguuaaauuaacuc

SEQ ID NO: 217875 - RNA, 32 nt, Human
uaagagcuuuaaauaugaggguuguguuucug

SEQ ID NO: 217876 - RNA, 32 nt, Human
uaagaggaaaaugaaaguguuccuggggugcu

SEQ ID NO: 217877 - RNA, 32 nt, Human
uaagaggagacugaggcauagagcagauaaga

SEQ ID NO: 217878 - RNA, 32 nt, Human
uaagaggaggcaggaggagcaacucaaauccc

SEQ ID NO: 217879 - RNA, 32 nt, Human
uaagaggaggugggcguaggaagucucacuga

SEQ ID NO: 217880 - RNA, 32 nt, Human
uaagaggaguugcccauuccagccagguggaa

SEQ ID NO: 217881 - RNA, 32 nt, Human
uaagaggaugaaucucacaggguucuugcagg

SEQ ID NO: 217882 - RNA, 32 nt, Human
uaagaggcaaaagagaaaagacucaagaaacu

SEQ ID NO: 217883 - RNA, 32 nt, Human
uaagaggcagugagauguagccuggcccugga

SEQ ID NO: 217884 - RNA, 32 nt, Human
uaagaggccaggagagugggaacuggacacag

SEQ ID NO: 217885 - RNA, 32 nt, Human
uaagaggcccugggccgaggugcagugacccu

SEQ ID NO: 217886 - RNA, 32 nt, Human
uaagaggccucagauugauaccugccauggcu

SEQ ID NO: 217887 - RNA, 32 nt, Human
uaagaggcucacugcccuaucuccuucuuucc

SEQ ID NO: 217888 - RNA, 32 nt, Human
uaagagggaaggcaaggaggcgggacgccgca

SEQ ID NO: 217889 - RNA, 32 nt, Human
uaagagggagagagaagaagaggaagaagagg

SEQ ID NO: 217890 - RNA, 32 nt, Human
uaagagggaggcaggaggguuagagugaguag

SEQ ID NO: 217891 - RNA, 32 nt, Human
uaagagggaugaaagagagcuaugauguccua

SEQ ID NO: 217892 - RNA, 32 nt, Human
uaagaggguaagauuucuacuugagugagcuc

SEQ ID NO: 217893 - RNA, 32 nt, Human
uaagaggucugggggcugggacauaggagggg

SEQ ID NO: 217894 - RNA, 32 nt, Human
uaagaggugaucucugggaguuauaggucaug

SEQ ID NO: 217895 - RNA, 32 nt, Human
uaagagguuuauuuggguacauggcccgcagu

SEQ ID NO: 217896 - RNA, 32 nt, Human
uaagaguagaauaccuucaggccaggcgcggu

SEQ ID NO: 217897 - RNA, 32 nt, Human
uaagaguagcaauacugcaccuggugaucaca

SEQ ID NO: 217898 - RNA, 32 nt, Human
uaagagucacaucuuagcacuuccgcucucag

SEQ ID NO: 217899 - RNA, 32 nt, Human
uaagagucagaacaccccacaggccugacucc

SEQ ID NO: 217900 - RNA, 32 nt, Human
uaagagucauaucacaaaaagccauuaagcau

SEQ ID NO: 217901 - RNA, 32 nt, Human
uaagagugauaagggcccuacuacacuggcuu

SEQ ID NO: 217902 - RNA, 32 nt, Human
uaagagugauuuccgauuucucuccuuucagu

SEQ ID NO: 217903 - RNA, 31 nt, Human
uaagagugccucucugagucucaguuucccc

SEQ ID NO: 217904 - RNA, 32 nt, Human
uaagagugccugagaggccuggaggagacuug

SEQ ID NO: 217905 - RNA, 22 nt, Human
uaagaguggaaaugaaagcaga

SEQ ID NO: 217906 - RNA, 32 nt, Human
uaagaguggauuacaggcaugagccacuguac

SEQ ID NO: 217907 - RNA, 32 nt, Human
uaagaguggggaacagggccagcaagacagac

SEQ ID NO: 217908 - RNA, 32 nt, Human
uaagagugguggccuauuucagcugcuuugac

SEQ ID NO: 217909 - RNA, 31 nt, Human
uaagagugugagagagacugauggggucgcu

SEQ ID NO: 217910 - RNA, 32 nt, Human
uaagaguguuuguuuaaggugaucucauugau

SEQ ID NO: 217911 - RNA, 32 nt, Human
uaagaguuacucugcaaucuaagcaaagcacc

SEQ ID NO: 217912 - RNA, 32 nt, Human
uaagaguugggaugagggauggagagggacug

SEQ ID NO: 217913 - RNA, 32 nt, Human
uaagaguuuguguguaaacaggcucaucucug

SEQ ID NO: 217914 - RNA, 32 nt, Human
uaagauaagagccuggaaagaggacucuguug

SEQ ID NO: 217915 - RNA, 32 nt, Human
uaagauacacacacaaccacacacgcgcacac

SEQ ID NO: 217916 - RNA, 32 nt, Human
uaagauaccgcgcuucaucuucaucuaaucuu

SEQ ID NO: 217917 - RNA, 32 nt, Human
uaagauacucucaucuaagaaauaacaucacc

SEQ ID NO: 217918 - RNA, 32 nt, Human
uaagauacugacaccaaaugccuuuaaauggc

SEQ ID NO: 217919 - RNA, 32 nt, Human
uaagauagagugcacagcaaaggggaucugcc

SEQ ID NO: 217920 - RNA, 32 nt, Human
uaagauaggaaguacuagccugggcaacgugg

SEQ ID NO: 217921 - RNA, 32 nt, Human
uaagauaggaggaucacuugagcccaggaggc

SEQ ID NO: 217922 - RNA, 32 nt, Human
uaagauaggguuucacuauguuggcuaggcug

SEQ ID NO: 217923 - RNA, 32 nt, Human
uaagauaguuccuaaagccuuacccuggcuag

SEQ ID NO: 217924 - RNA, 32 nt, Human
uaagauauauuugucauuuucucuugaauaug

SEQ ID NO: 217925 - RNA, 32 nt, Human
uaagauaugccuccuucuccuucaccuuccac

SEQ ID NO: 217926 - RNA, 32 nt, Human
uaagaucaaccugaagguccuaccuaaaccaa

SEQ ID NO: 217927 - RNA, 32 nt, Human
uaagaucacacacaucaucucuauccaugagu

SEQ ID NO: 217928 - RNA, 32 nt, Human
uaagaucacaccacuacacuccagccugggcg

SEQ ID NO: 217929 - RNA, 32 nt, Human
uaagaucacaccacugcacuccagccagggca

SEQ ID NO: 217930 - RNA, 32 nt, Human
uaagaucacaccauugcgcuagagcccgggcg

SEQ ID NO: 217931 - RNA, 32 nt, Human
uaagaucacaggcuuagugugaggacgagcuu

SEQ ID NO: 217932 - RNA, 32 nt, Human
uaagaucacaucacugcacuccagccugggua

SEQ ID NO: 217933 - RNA, 32 nt, Human
uaagaucacgccacugcacuccagccugcgga

SEQ ID NO: 217934 - RNA, 32 nt, Human
uaagaucacgccauugcacuccagccugggca

SEQ ID NO: 217935 - RNA, 32 nt, Human
uaagaucacuauagguccauuucuugaaccca

SEQ ID NO: 217936 - RNA, 32 nt, Human
uaagaucaggaguucaagaccagccuggccaa

SEQ ID NO: 217937 - RNA, 32 nt, Human
uaagaucaugccacugcacuccagccugggca

SEQ ID NO: 217938 - RNA, 32 nt, Human
uaagaucgagcaauggcuucaggacauggguu

SEQ ID NO: 217939 - RNA, 32 nt, Human
uaagaucgcaccacugcacuccagccugggug

SEQ ID NO: 217940 - RNA, 32 nt, Human
uaagaucgcgccauugcacuccagccugggcg

SEQ ID NO: 217941 - RNA, 32 nt, Human
uaagaucgugccacugcacuccagccuggaca

SEQ ID NO: 217942 - RNA, 32 nt, Human
uaagaucgugccacugcacuccggccugggug

SEQ ID NO: 217943 - RNA, 32 nt, Human
uaagaucgugccacugcauuccagccugguug

SEQ ID NO: 217944 - RNA, 32 nt, Human
uaagaucgugccguugcacuccagccugggca

SEQ ID NO: 217945 - RNA, 32 nt, Human
uaagaucuagccccauugacucuucuagaaau

SEQ ID NO: 217946 - RNA, 32 nt, Human
uaagaucuccuugagucaggaaccugcaaggg

SEQ ID NO: 217947 - RNA, 32 nt, Human
uaagaugaacauccucuuacauaucuccugau

SEQ ID NO: 217948 - RNA, 32 nt, Human
uaagaugagcaguugaggggacugagagagug

SEQ ID NO: 217949 - RNA, 32 nt, Human
uaagaugagcaucuggauccccuuccuuuaca

SEQ ID NO: 217950 - RNA, 32 nt, Human
uaagaugaggucacgcuggaguaggaugggcc

SEQ ID NO: 217951 - RNA, 32 nt, Human
uaagaugcacaaugucuccuucaggugaucac

SEQ ID NO: 217952 - RNA, 32 nt, Human
uaagaugcagauuacaggugugagccaccaca

SEQ ID NO: 217953 - RNA, 32 nt, Human
uaagaugcaggcauucucauggaacacagacg

SEQ ID NO: 217954 - RNA, 32 nt, Human
uaagaugcccaccgugacagugccccagcuug

SEQ ID NO: 217955 - RNA, 32 nt, Human
uaagaugccuuaaaaaucuuaaagucacaaaa

SEQ ID NO: 217956 - RNA, 32 nt, Human
uaagaugcuccugguggcugggaggcaucagu

SEQ ID NO: 217957 - RNA, 32 nt, Human
uaagaugcugcacuuggcugggcacaguggca

SEQ ID NO: 217958 - RNA, 32 nt, Human
uaagauggagucuugcucugucacccagguug

SEQ ID NO: 217959 - RNA, 32 nt, Human
uaagauggagucuugcucuguugcccgggcug

SEQ ID NO: 217960 - RNA, 32 nt, Human
uaagauggauaaucacuuucucauuuggguuc

SEQ ID NO: 217961 - RNA, 32 nt, Human
uaagauggauuucacccccaggccaaugcagc

SEQ ID NO: 217962 - RNA, 32 nt, Human
uaagauggcaccacugcacuccagccugggug

SEQ ID NO: 217963 - RNA, 32 nt, Human
uaagauggccucagucuccacugugggcuuga

SEQ ID NO: 217964 - RNA, 32 nt, Human
uaagauggcucaauguauugggaggcuucuuu

SEQ ID NO: 217965 - RNA, 32 nt, Human
uaagaugggaucucauuuuguugcccaggcug

SEQ ID NO: 217966 - RNA, 32 nt, Human
uaagaugggggaaaauuaagguuugagguuuu

SEQ ID NO: 217967 - RNA, 32 nt, Human
uaagauggguggaucacuugaggucaggaguu

SEQ ID NO: 217968 - RNA, 32 nt, Human
uaagauguguggcauuuacuuaaaccaucaca

SEQ ID NO: 217969 - RNA, 32 nt, Human
uaagauuauagaaucccagaggccuccucauu

SEQ ID NO: 217970 - RNA, 32 nt, Human
uaagauuauauguuucuguuucugguaaauac

SEQ ID NO: 217971 - RNA, 32 nt, Human
uaagauucacagucugcuccccaacccagugc

SEQ ID NO: 217972 - RNA, 32 nt, Human
uaagauucauucuaguucacuaaugaccagaa

SEQ ID NO: 217973 - RNA, 32 nt, Human
uaagauucuuaccucuaugcuaaguuuguguu

SEQ ID NO: 217974 - RNA, 32 nt, Human
uaagauucuugaucugccucccccuagagcag

SEQ ID NO: 217975 - RNA, 32 nt, Human
uaagauugaacucuguggugcagcuuuaagcu

SEQ ID NO: 217976 - RNA, 32 nt, Human
uaagauugagcccucuccuacucucccccaac

SEQ ID NO: 217977 - RNA, 32 nt, Human
uaagauugcaccacugcacuccaaccugggug

SEQ ID NO: 217978 - RNA, 32 nt, Human
uaagauugccaaaaucagagaaucuugcaaag

SEQ ID NO: 217979 - RNA, 32 nt, Human
uaagauuggagcugcagaagacuugccagccc

SEQ ID NO: 217980 - RNA, 32 nt, Human
uaagauugugccacugcacuccagccugggua

SEQ ID NO: 217981 - RNA, 32 nt, Human
uaagauuuauugguaucucacauuaaauugua

SEQ ID NO: 217982 - RNA, 32 nt, Human
uaagauuucaugaagaaagcauguauugugug

SEQ ID NO: 217983 - RNA, 32 nt, Human
uaagauuugggugggaacacagagccaaacca

SEQ ID NO: 217984 - RNA, 32 nt, Human
uaagauuuugcaccuguaaagugccuuacagg

SEQ ID NO: 217985 - RNA, 21 nt, Human
uaagcaaaaaauaccugguaa

SEQ ID NO: 217986 - RNA, 32 nt, Human
uaagcaaaagaauguauuggaaguugauggaa

SEQ ID NO: 217987 - RNA, 32 nt, Human
uaagcaaaaguuugauuuccagacacuacaga

SEQ ID NO: 217988 - RNA, 32 nt, Human
uaagcaaagacaaagaagcaagaaauaguaug

SEQ ID NO: 217989 - RNA, 22 nt, Human
uaagcaaagucuccucuugcuu

SEQ ID NO: 217990 - RNA, 32 nt, Human
uaagcaaauagaagaugaccgucaaagaaaaa

SEQ ID NO: 217991 - RNA, 32 nt, Human
uaagcaaauguuucagcccaaugucaacccag

SEQ ID NO: 217992 - RNA, 32 nt, Human
uaagcaacauagugaaaccccaucuccaaaaa

SEQ ID NO: 217993 - RNA, 32 nt, Human
uaagcaaccccagaucaggguacuugcugugg

SEQ ID NO: 217994 - RNA, 32 nt, Human
uaagcaacgggaacaccugcugagggggcucu

SEQ ID NO: 217995 - RNA, 32 nt, Human
uaagcaagagaaagacaacuguucugcggguu

SEQ ID NO: 217996 - RNA, 32 nt, Human
uaagcaagaguuguuucuguuauuuuguccac

SEQ ID NO: 217997 - RNA, 23 nt, Human
uaagcaaggcaugcugcagggaa

SEQ ID NO: 217998 - RNA, 32 nt, Human
uaagcaagguaauuucuagcacucuggaaagg

SEQ ID NO: 217999 - RNA, 32 nt, Human
uaagcacaauaucuucacacugugcuguauug

SEQ ID NO: 218000 - RNA, 32 nt, Human
uaagcacacaccuaaagauaucuuuuuagaug

SEQ ID NO: 218001 - RNA, 32 nt, Human
uaagcacacaugcgcacacacacuugcauuca

SEQ ID NO: 218002 - RNA, 32 nt, Human
uaagcacagacaacucccucccugccuugcac

SEQ ID NO: 218003 - RNA, 32 nt, Human
uaagcacaguugacaguugugcauugggaugg

SEQ ID NO: 218004 - RNA, 32 nt, Human
uaagcacaucaguacuuuucucuggcuggaau

SEQ ID NO: 218005 - RNA, 32 nt, Human
uaagcacaugaaucuuuaccugugcugaaguu

SEQ ID NO: 218006 - RNA, 25 nt, Human
uaagcacaugucugugacaaggucu

SEQ ID NO: 218007 - RNA, 19 nt, Human
uaagcacauucacuucuau

SEQ ID NO: 218008 - RNA, 32 nt, Human
uaagcaccaaaaagaagauggggaagaaaaga

SEQ ID NO: 218009 - RNA, 32 nt, Human
uaagcaccagcggaaggagcugugccccggga

SEQ ID NO: 218010 - RNA, 32 nt, Human
uaagcaccaggaguccaugaagaagauggcuc

SEQ ID NO: 218011 - RNA, 32 nt, Human
uaagcaccccuucauuuggcauuccccacuug

SEQ ID NO: 218012 - RNA, 32 nt, Human
uaagcaccuugaucuuggacuucccagccucc

SEQ ID NO: 218013 - RNA, 32 nt, Human
uaagcacuaugcugcaggaauccugagaaaaa

SEQ ID NO: 218014 - RNA, 31 nt, Human
uaagcacucaauaaaucuuugaugaaugaaa

SEQ ID NO: 218015 - RNA, 32 nt, Human
uaagcacuccuagucucuggccuguggaucca

SEQ ID NO: 218016 - RNA, 32 nt, Human
uaagcacugcaacagacucuaccagagaugca

SEQ ID NO: 218017 - RNA, 32 nt, Human
uaagcacuggggauauggcaggaaucaaaaua

SEQ ID NO: 218018 - RNA, 32 nt, Human
uaagcacuuggaauuguacuggguuuucugua

SEQ ID NO: 218019 - RNA, 32 nt, Human
uaagcacuuuaucuauaucucauuucauucuc

SEQ ID NO: 218020 - RNA, 29 nt, Human
uaagcagaaaaaucucauuuugcgcuccc

SEQ ID NO: 218021 - RNA, 32 nt, Human
uaagcagagcaucugcucugggcccuggccuc

SEQ ID NO: 218022 - RNA, 32 nt, Human
uaagcagagcccagggccucuagggcaguggg

SEQ ID NO: 218023 - RNA, 32 nt, Human
uaagcagagcugagucucugucucuguccaca

SEQ ID NO: 218024 - RNA, 32 nt, Human
uaagcagaucacaccucuuucugccucuacau

SEQ ID NO: 218025 - RNA, 19 nt, Human
uaagcagaugggcuuccgu

SEQ ID NO: 218026 - RNA, 32 nt, Human
uaagcagccagacccacaaggccagguccugu

SEQ ID NO: 218027 - RNA, 32 nt, Human
uaagcagccauguuggaaaagucuucauggca

SEQ ID NO: 218028 - RNA, 32 nt, Human
uaagcagcuaccauuccauggacuugccuccc

SEQ ID NO: 218029 - RNA, 32 nt, Human
uaagcagcugccugugcagagugcaggcugca

SEQ ID NO: 218030 - RNA, 32 nt, Human
uaagcagcuucccaaggucaaacacagcaaau

SEQ ID NO: 218031 - RNA, 32 nt, Human
uaagcaggaggcggaggcggaggcggagggcg

SEQ ID NO: 218032 - RNA, 32 nt, Human
uaagcaggcaagaaauccuacuaauccaguuu

SEQ ID NO: 218033 - RNA, 32 nt, Human
uaagcagggggaacaggggugggcaggaugua

SEQ ID NO: 218034 - RNA, 32 nt, Human
uaagcaggguccaagccuggggcugccucugc

SEQ ID NO: 218035 - RNA, 28 nt, Human
uaagcagucaaugcugccucauuuauug

SEQ ID NO: 218036 - RNA, 32 nt, Human
uaagcagucauccucagaucauuaucagccug

SEQ ID NO: 218037 - RNA, 26 nt, Human
uaagcagucuauaaaguugucauuua

SEQ ID NO: 218038 - RNA, 32 nt, Human
uaagcagucuuuaugggcuuucucugaggccc

SEQ ID NO: 218039 - RNA, 32 nt, Human
uaagcagugagucaguucaucauacaaaggca

SEQ ID NO: 218040 - RNA, 32 nt, Human
uaagcagugugacaugcaucccagggacaacu

SEQ ID NO: 218041 - RNA, 32 nt, Human
uaagcagugugggaaaguguuaucucauagcu

SEQ ID NO: 218042 - RNA, 32 nt, Human
uaagcaguuaccugaugccugcugcugaagag

SEQ ID NO: 218043 - RNA, 32 nt, Human
uaagcaguuagaaacucugcauaugagcagga

SEQ ID NO: 218044 - RNA, 32 nt, Human
uaagcaguucccaacuugacuuuucccuuuag

SEQ ID NO: 218045 - RNA, 32 nt, Human
uaagcauauaggauuuguuuaucaucccacua

SEQ ID NO: 218046 - RNA, 32 nt, Human
uaagcaucagcccuguagagugaggagccauc

SEQ ID NO: 218047 - RNA, 32 nt, Human
uaagcaucccccaaauuauucugaagguuuuu

SEQ ID NO: 218048 - RNA, 32 nt, Human
uaagcauccugaaaaaucagcuggggcauauu

SEQ ID NO: 218049 - RNA, 32 nt, Human
uaagcaucucuagcagagcaauuugaucagua

SEQ ID NO: 218050 - RNA, 32 nt, Human
uaagcaugccacuauacuccagccugggcaac

SEQ ID NO: 218051 - RNA, 32 nt, Human
uaagcauggggcccaagaguaugcauucuuac

SEQ ID NO: 218052 - RNA, 32 nt, Human
uaagcauucauccuucguaucacugcagaagc

SEQ ID NO: 218053 - RNA, 32 nt, Human
uaagcauuccuggagccacccuaccucagggc

SEQ ID NO: 218054 - RNA, 32 nt, Human
uaagcauuccuucuuucacaggcaucaggaau

SEQ ID NO: 218055 - RNA, 20 nt, Human
uaagcauugccugguuacug

SEQ ID NO: 218056 - RNA, 32 nt, Human
uaagcauugugggaaagcauucauaucugcca

SEQ ID NO: 218057 - RNA, 32 nt, Human
uaagcauuuaaugucaguccaggaaggggcaa

SEQ ID NO: 218058 - RNA, 32 nt, Human
uaagcauuucaucugcugaaaguccuuauaua

SEQ ID NO: 218059 - RNA, 32 nt, Human
uaagcauuuugaaacaaaguacucuuuaacau

SEQ ID NO: 218060 - RNA, 32 nt, Human
uaagccaaacaaggagcuuucugcagaaugaa

SEQ ID NO: 218061 - RNA, 32 nt, Human
uaagccaaagccauguggaauuuuuguuuaga

SEQ ID NO: 218062 - RNA, 31 nt, Human
uaagccaacaacaacagaacaggguggagug

SEQ ID NO: 218063 - RNA, 32 nt, Human
uaagccaagauccuggaucuucuaucauuaau

SEQ ID NO: 218064 - RNA, 32 nt, Human
uaagccaagcuccugagaaugauuggucacau

SEQ ID NO: 218065 - RNA, 32 nt, Human
uaagccaagcuuucccugucaggauaccuucc

SEQ ID NO: 218066 - RNA, 32 nt, Human
uaagccaauccucacuccccagccuccucugg

SEQ ID NO: 218067 - RNA, 32 nt, Human
uaagccaaugguagcuugccacaugccccauc

SEQ ID NO: 218068 - RNA, 32 nt, Human
uaagccacaagaccccaacccagauccccaca

SEQ ID NO: 218069 - RNA, 32 nt, Human
uaagccacaaggaucacaugcuucgaagggca

SEQ ID NO: 218070 - RNA, 32 nt, Human
uaagccacacuauaucuucaugaguugcaaau

SEQ ID NO: 218071 - RNA, 32 nt, Human
uaagccaccgcaccccgcccagccuggcagau

SEQ ID NO: 218072 - RNA, 32 nt, Human
uaagccaccgcacuccagccugggcgacagag

SEQ ID NO: 218073 - RNA, 32 nt, Human
uaagccaccucucuaccuuaauauugacagga

SEQ ID NO: 218074 - RNA, 22 nt, Human
uaagccaccuuggaauaggaag

SEQ ID NO: 218075 - RNA, 32 nt, Human
uaagccacugcaccuggcggggucuugcuuau

SEQ ID NO: 218076 - RNA, 32 nt, Human
uaagccacuggguggaugaaaggccgagggau

SEQ ID NO: 218077 - RNA, 32 nt, Human
uaagccagaagagccaaagagggaccucgcca

SEQ ID NO: 218078 - RNA, 32 nt, Human
uaagccagagcugagggggaaagagcucugaa

SEQ ID NO: 218079 - RNA, 32 nt, Human
uaagccaggagggugccucuccccucagugga

SEQ ID NO: 218080 - RNA, 32 nt, Human
uaagccaggcauaaccacagccaagcagauua

SEQ ID NO: 218081 - RNA, 32 nt, Human
uaagccaggccugggugucuggaguuugugaa

SEQ ID NO: 218082 - RNA, 32 nt, Human
uaagccagugaccagauuucccccagaugucu

SEQ ID NO: 218083 - RNA, 32 nt, Human
uaagccauaaacugucucaccuaaacaagaua

SEQ ID NO: 218084 - RNA, 32 nt, Human
uaagccauauuggaguagcgaggaaucugauu

SEQ ID NO: 218085 - RNA, 32 nt, Human
uaagccaugccuacagauacuaugagauaaua

SEQ ID NO: 218086 - RNA, 32 nt, Human
uaagccauugcaacuucuuuuucuucagagau

SEQ ID NO: 218087 - RNA, 32 nt, Human
uaagccauuuagaacauaaaugcauucauuua

SEQ ID NO: 218088 - RNA, 32 nt, Human
uaagccauuugaaaaacagaaaagcaaaacaa

SEQ ID NO: 218089 - RNA, 32 nt, Human
uaagcccaacacuuugggaggcugaggcaggu

SEQ ID NO: 218090 - RNA, 32 nt, Human
uaagcccaagaguucaggacuagccugggcaa

SEQ ID NO: 218091 - RNA, 32 nt, Human
uaagcccaauaugccaguuggcaccagaugcu

SEQ ID NO: 218092 - RNA, 32 nt, Human
uaagcccacggugcucccuccugggaccccac

SEQ ID NO: 218093 - RNA, 32 nt, Human
uaagcccagaaggcagagguuguagugagcug

SEQ ID NO: 218094 - RNA, 32 nt, Human
uaagcccagcuauucgggaggcugagguagga

SEQ ID NO: 218095 - RNA, 32 nt, Human
uaagcccaggagacagagguugcagugagcca

SEQ ID NO: 218096 - RNA, 32 nt, Human
uaagcccaggaggccaagucugcagugagcua

SEQ ID NO: 218097 - RNA, 32 nt, Human
uaagcccaggagguucaggcugcaguaagguc

SEQ ID NO: 218098 - RNA, 32 nt, Human
uaagcccaggaguucaagaccaaccuggacaa

SEQ ID NO: 218099 - RNA, 32 nt, Human
uaagcccaggaguucaagaccagccugggcaa

SEQ ID NO: 218100 - RNA, 32 nt, Human
uaagcccaguuuuaggauuagugagaaucccu

SEQ ID NO: 218101 - RNA, 32 nt, Human
uaagcccauggauccauaauguuaaacuaaau

SEQ ID NO: 218102 - RNA, 20 nt, Human
uaagccccaacauguucaga

SEQ ID NO: 218103 - RNA, 32 nt, Human
uaagccccaggaggucgaggcugcagugagcc

SEQ ID NO: 218104 - RNA, 32 nt, Human
uaagcccccacuguucaaguuggguggccauc

SEQ ID NO: 218105 - RNA, 32 nt, Human
uaagccccuccccacacuccucuaauuuaaac

SEQ ID NO: 218106 - RNA, 31 nt, Human
uaagcccgcagcuuugggccuggucucugcu

SEQ ID NO: 218107 - RNA, 32 nt, Human
uaagcccggcuucacuaggccugggugucugg

SEQ ID NO: 218108 - RNA, 32 nt, Human
uaagcccgggaggcagaaccugcagugagcca

SEQ ID NO: 218109 - RNA, 32 nt, Human
uaagcccgggagguggagguugcagugagccc

SEQ ID NO: 218110 - RNA, 32 nt, Human
uaagcccgggaguucaagaccagccuagccca

SEQ ID NO: 218111 - RNA, 32 nt, Human
uaagcccgguaggaaagagagaggaggagggg

SEQ ID NO: 218112 - RNA, 32 nt, Human
uaagcccuacgaugggaucauuauuucaugac

SEQ ID NO: 218113 - RNA, 32 nt, Human
uaagcccugcauaauguuaagcuuuauuguga

SEQ ID NO: 218114 - RNA, 32 nt, Human
uaagcccugcauucauuagauauuuguccuaa

SEQ ID NO: 218115 - RNA, 32 nt, Human
uaagcccuuaauaaauauaaaauaucauuauu

SEQ ID NO: 218116 - RNA, 32 nt, Human
uaagcccuucuuuaggaagccuucccacacag

SEQ ID NO: 218117 - RNA, 32 nt, Human
uaagcccuuucccauucucuuucucaggaaug

SEQ ID NO: 218118 - RNA, 32 nt, Human
uaagccuacuccucuaggaacuauguugaaaa

SEQ ID NO: 218119 - RNA, 32 nt, Human
uaagccuacuccugacuaacuuggcauuugca

SEQ ID NO: 218120 - RNA, 32 nt, Human
uaagccuauggugaacaaauauuuuuaaugaa

SEQ ID NO: 218121 - RNA, 32 nt, Human
uaagccucauuucuauuucuucuucauuaauu

SEQ ID NO: 218122 - RNA, 32 nt, Human
uaagccucauuucucauguucagaccucacau

SEQ ID NO: 218123 - RNA, 32 nt, Human
uaagccuccauuucugacaauuccuguggccc

SEQ ID NO: 218124 - RNA, 32 nt, Human
uaagccucccaaagugcugggauuacaggcgu

SEQ ID NO: 218125 - RNA, 32 nt, Human
uaagccucccaaguaacugggauuacaggcau

SEQ ID NO: 218126 - RNA, 32 nt, Human
uaagccucccgaagugcugggauuacaggcgu

SEQ ID NO: 218127 - RNA, 32 nt, Human
uaagccucgggugggagcucagggccaccugu

SEQ ID NO: 218128 - RNA, 32 nt, Human
uaagccucucauaaugcauaaucaugaguagu

SEQ ID NO: 218129 - RNA, 32 nt, Human
uaagccugacauuggaacagauuucucccgug

SEQ ID NO: 218130 - RNA, 32 nt, Human
uaagccugaguguggggagugaguuaugcaag

SEQ ID NO: 218131 - RNA, 32 nt, Human
uaagccugcagauacguaaugugaccacuguu

SEQ ID NO: 218132 - RNA, 32 nt, Human
uaagccugcagucccagcuacuugggaggccg

SEQ ID NO: 218133 - RNA, 32 nt, Human
uaagccugcauucuauaaauggcguaugacca

SEQ ID NO: 218134 - RNA, 32 nt, Human
uaagccugcccaguaggcaguguuuugcagac

SEQ ID NO: 218135 - RNA, 32 nt, Human
uaagccuggaagguggaaguugcagugagucg

SEQ ID NO: 218136 - RNA, 32 nt, Human
uaagccugggaggcaauggcugcaguaaacca

SEQ ID NO: 218137 - RNA, 32 nt, Human
uaagccugggaggcagagguugcagugagccg

SEQ ID NO: 218138 - RNA, 32 nt, Human
uaagccuguguucaccaccaccaucagacuca

SEQ ID NO: 218139 - RNA, 18 nt, Human
uaagccuguuacuuucau

SEQ ID NO: 218140 - RNA, 26 nt, Human
uaagccuuaacauguaucuucauuca

SEQ ID NO: 218141 - RNA, 32 nt, Human
uaagccuuagggaaggugaguguggguccuuc

SEQ ID NO: 218142 - RNA, 32 nt, Human
uaagccuuccaaagugcugggauuacuggcag

SEQ ID NO: 218143 - RNA, 32 nt, Human
uaagccuucggucaaauuuucucccccucauc

SEQ ID NO: 218144 - RNA, 32 nt, Human
uaagccuuuauuucauacaguccuaggauuaa

SEQ ID NO: 218145 - RNA, 32 nt, Human
uaagcgacauaaggaugaaauacugaugaauc

SEQ ID NO: 218146 - RNA, 32 nt, Human
uaagcgacuguacgugcuacuaaaaaugucug

SEQ ID NO: 218147 - RNA, 32 nt, Human
uaagcgagguauaaaaguacgcaguuuucaug

SEQ ID NO: 218148 - RNA, 32 nt, Human
uaagcgcagaagaucaagaccagccugggaaa

SEQ ID NO: 218149 - RNA, 32 nt, Human
uaagcgcugacgcaugcgcauagcuaaccgca

SEQ ID NO: 218150 - RNA, 32 nt, Human
uaagcggauucccagacccaugaacagacauc

SEQ ID NO: 218151 - RNA, 32 nt, Human
uaagcggcagaggcagggccagccauccuguc

SEQ ID NO: 218152 - RNA, 32 nt, Human
uaagcggcaggcaggauugggcuuuucuggcu

SEQ ID NO: 218153 - RNA, 32 nt, Human
uaagcgggggugaaagaggacguguuacccac

SEQ ID NO: 218154 - RNA, 32 nt, Human
uaagcgucaguaccuggugucaggugcucuca

SEQ ID NO: 218155 - RNA, 32 nt, Human
uaagcgucucuuacagcagagagaccagacca

SEQ ID NO: 218156 - RNA, 32 nt, Human
uaagcgugagccaccaugccuggccccaauuu

SEQ ID NO: 218157 - RNA, 31 nt, Human
uaagcgugcccacuggggccuguggucagga

SEQ ID NO: 218158 - RNA, 32 nt, Human
uaagcuaacaacacagaucccauguaguugga

SEQ ID NO: 218159 - RNA, 32 nt, Human
uaagcuaaguugaggguucagagggagacaaa

SEQ ID NO: 218160 - RNA, 32 nt, Human
uaagcuacaguuccuucucuccauccuucgac

SEQ ID NO: 218161 - RNA, 32 nt, Human
uaagcuagcaucugccccaguugguguucaaa

SEQ ID NO: 218162 - RNA, 32 nt, Human
uaagcucacaugccuuuucccugccacagcca

SEQ ID NO: 218163 - RNA, 32 nt, Human
uaagcucaggaguucaaggccagccugggcaa

SEQ ID NO: 218164 - RNA, 32 nt, Human
uaagcucaucccucccguccgaggcuaguuuc

SEQ ID NO: 218165 - RNA, 32 nt, Human
uaagcuccaauacuucagaaugugacgcugau

SEQ ID NO: 218166 - RNA, 32 nt, Human
uaagcuccacaaagccuaggugagugggacac

SEQ ID NO: 218167 - RNA, 32 nt, Human
uaagcuccaccaacuucaagccaugugacuuu

SEQ ID NO: 218168 - RNA, 32 nt, Human
uaagcuccaguaaauaaacagaacagcuuuca

SEQ ID NO: 218169 - RNA, 32 nt, Human
uaagcuccaguuccauggcaaggcucagacuu

SEQ ID NO: 218170 - RNA, 32 nt, Human
uaagcucccacuacaugcccagccuggggccc

SEQ ID NO: 218171 - RNA, 21 nt, Human
uaagcucgggaucauuuccau

SEQ ID NO: 218172 - RNA, 32 nt, Human
uaagcucuacuaugggcaacugaagauggaua

SEQ ID NO: 218173 - RNA, 32 nt, Human
uaagcucucccucucuuugccugcugccaucc

SEQ ID NO: 218174 - RNA, 32 nt, Human
uaagcucucucaguuccuucccuuccacaaaa

SEQ ID NO: 218175 - RNA, 32 nt, Human
uaagcucucugccuccuccucccuuucucccu

SEQ ID NO: 218176 - RNA, 32 nt, Human
uaagcucugaaaacacuuccaaugccaguuug

SEQ ID NO: 218177 - RNA, 32 nt, Human
uaagcucuguaacgcgggccgaggcagaccga

SEQ ID NO: 218178 - RNA, 32 nt, Human
uaagcucuucauuugguauuuaggcaauauau

SEQ ID NO: 218179 - RNA, 32 nt, Human
uaagcucuugaggccauucaccugccaaccug

SEQ ID NO: 218180 - RNA, 32 nt, Human
uaagcucuugcagagugagaugacuugaaaua

SEQ ID NO: 218181 - RNA, 32 nt, Human
uaagcucuuggcuuggagucccgugucgucuc

SEQ ID NO: 218182 - RNA, 32 nt, Human
uaagcugaagauucccuugagaacaaguacug

SEQ ID NO: 218183 - RNA, 32 nt, Human
uaagcugaaguaacuggcuccuuacuuuaaau

SEQ ID NO: 218184 - RNA, 32 nt, Human
uaagcugacuguucucucuugagaaccugugg

SEQ ID NO: 218185 - RNA, 32 nt, Human
uaagcugagaucgcugcacuccagccugggcg

SEQ ID NO: 218186 - RNA, 32 nt, Human
uaagcugcagccgccggagccgcagaaacaag

SEQ ID NO: 218187 - RNA, 32 nt, Human
uaagcugccaucaauucccaccuggacaacug

SEQ ID NO: 218188 - RNA, 32 nt, Human
uaagcugccaucucagaccagaggaacaggga

SEQ ID NO: 218189 - RNA, 32 nt, Human
uaagcugccugggagcccucauugccuuccug

SEQ ID NO: 218190 - RNA, 32 nt, Human
uaagcugcgauacagcccuggagcucagucag

SEQ ID NO: 218191 - RNA, 32 nt, Human
uaagcugcuaaguuuugaggaaauuuguuaca

SEQ ID NO: 218192 - RNA, 32 nt, Human
uaagcugcuaucucagccugucccuucugccc

SEQ ID NO: 218193 - RNA, 32 nt, Human
uaagcugcugacaucauccacugccuucugcu

SEQ ID NO: 218194 - RNA, 32 nt, Human
uaagcugcugcucuggccaagugccuaauuuu

SEQ ID NO: 218195 - RNA, 32 nt, Human
uaagcugcugggaacccaucugugcugaaaug

SEQ ID NO: 218196 - RNA, 32 nt, Human
uaagcugggggaggagggaggggugggaauug

SEQ ID NO: 218197 - RNA, 32 nt, Human
uaagcugggucucaggcugggcucagcaaagg

SEQ ID NO: 218198 - RNA, 32 nt, Human
uaagcugggugagcuacugaagccaaggcggg

SEQ ID NO: 218199 - RNA, 32 nt, Human
uaagcugggugagcuacugaagccaagguggg

SEQ ID NO: 218200 - RNA, 32 nt, Human
uaagcuggucucaaacuccugggcucaagcga

SEQ ID NO: 218201 - RNA, 32 nt, Human
uaagcugguggaagcuaucaggaccaauuaca

SEQ ID NO: 218202 - RNA, 32 nt, Human
uaagcuguauuuuuagugagcuaccccuuuua

SEQ ID NO: 218203 - RNA, 32 nt, Human
uaagcugucauggagauaaauccaaaauaguu

SEQ ID NO: 218204 - RNA, 32 nt, Human
uaagcuguccucagauccuccuucuacccagg

SEQ ID NO: 218205 - RNA, 32 nt, Human
uaagcugugccccaccacccuaggcaaugagg

SEQ ID NO: 218206 - RNA, 32 nt, Human
uaagcugugugagcucuuccacccaggagggc

SEQ ID NO: 218207 - RNA, 32 nt, Human
uaagcuguucucucccaccccaccuuucugug

SEQ ID NO: 218208 - RNA, 32 nt, Human
uaagcuguuggcuucucugagcuccaguggaa

SEQ ID NO: 218209 - RNA, 32 nt, Human
uaagcuguuuuaagaggaacagaagggaaauc

SEQ ID NO: 218210 - RNA, 32 nt, Human
uaagcuuauuauccucccaggucauaggaaga

SEQ ID NO: 218211 - RNA, 32 nt, Human
uaagcuucaaaccagacucugugcugcuucug

SEQ ID NO: 218212 - RNA, 32 nt, Human
uaagcuuccaggcugcauagaaggaggagagg

SEQ ID NO: 218213 - RNA, 32 nt, Human
uaagcuucccuguguccucucucccucucucc

SEQ ID NO: 218214 - RNA, 32 nt, Human
uaagcuuccugaggcccucaccagaagcugag

SEQ ID NO: 218215 - RNA, 32 nt, Human
uaagcuucuaagggaggaaggcagcauugggg

SEQ ID NO: 218216 - RNA, 32 nt, Human
uaagcuugguggagcauuuucccauugagagc

SEQ ID NO: 218217 - RNA, 32 nt, Human
uaagcuuugaaaagcugagaauauccaucugg

SEQ ID NO: 218218 - RNA, 32 nt, Human
uaagcuuuugccacaggcucugucuuuugggg

SEQ ID NO: 218219 - RNA, 32 nt, Human
uaagcuuuugccugaugacuaaccuggugcug

SEQ ID NO: 218220 - RNA, 32 nt, Human
uaaggaaaaagaauauagacaagcauggaaag

SEQ ID NO: 218221 - RNA, 24 nt, Human
uaaggaaaauaaaguggugcauuu

SEQ ID NO: 218222 - RNA, 32 nt, Human
uaaggaaaccagcccagaucagucccaaggcc

SEQ ID NO: 218223 - RNA, 21 nt, Human
uaaggaaacugaacacucgaa

SEQ ID NO: 218224 - RNA, 32 nt, Human
uaaggaaagcacaucgacuccuuucccagaca

SEQ ID NO: 218225 - RNA, 32 nt, Human
uaaggaaaggaaauggaagucaggaggaaggg

SEQ ID NO: 218226 - RNA, 32 nt, Human
uaaggaaauacacagugaaguuuuuaggaaau

SEQ ID NO: 218227 - RNA, 32 nt, Human
uaaggaaaucuaacacaaacagcaacuguuuu

SEQ ID NO: 218228 - RNA, 32 nt, Human
uaaggaaaugggcuugagcagagcagggggua

SEQ ID NO: 218229 - RNA, 32 nt, Human
uaaggaacuaaaacuugaggcagagucuucuu

SEQ ID NO: 218230 - RNA, 32 nt, Human
uaaggaagaaaacagacuuuugcucaaaugga

SEQ ID NO: 218231 - RNA, 32 nt, Human
uaaggaagacuugucgggaacacaggcagggc

SEQ ID NO: 218232 - RNA, 32 nt, Human
uaaggaagagcaucucauacauaucauuaucg

SEQ ID NO: 218233 - RNA, 22 nt, Human
uaaggaagaugaagggucuuca

SEQ ID NO: 218234 - RNA, 32 nt, Human
uaaggaagccuucuuauuuaucuuccugcaaa

SEQ ID NO: 218235 - RNA, 32 nt, Human
uaaggaaggaaggaggaaugaggcuggauacg

SEQ ID NO: 218236 - RNA, 32 nt, Human
uaaggaaggaagucaaggcugcagugagcuau

SEQ ID NO: 218237 - RNA, 32 nt, Human
uaaggaaggaggugcuggagcaguugaugaag

SEQ ID NO: 218238 - RNA, 32 nt, Human
uaaggaagggcagauaaugugacucuuugcgg

SEQ ID NO: 218239 - RNA, 32 nt, Human
uaaggaaguugccgugcacugcagccugccgg

SEQ ID NO: 218240 - RNA, 22 nt, Human
uaaggaauagagguuaauuuua

SEQ ID NO: 218241 - RNA, 32 nt, Human
uaaggaaugagggagagaagggggcuguacag

SEQ ID NO: 218242 - RNA, 32 nt, Human
uaaggaauuuuucuucccuccucauucuuugu

SEQ ID NO: 218243 - RNA, 32 nt, Human
uaaggacaagacuacuguggauucaagugcuu

SEQ ID NO: 218244 - RNA, 32 nt, Human
uaaggacacugccuuuucagauuaaagauugu

SEQ ID NO: 218245 - RNA, 32 nt, Human
uaaggacaguggaaagcuauggaugauucaug

SEQ ID NO: 218246 - RNA, 20 nt, Human
uaaggacauagaaaauugac

SEQ ID NO: 218247 - RNA, 32 nt, Human
uaaggacccaggagguggggcagaagagagga

SEQ ID NO: 218248 - RNA, 32 nt, Human
uaaggacgacaccgucagcuguccgacucgca

SEQ ID NO: 218249 - RNA, 32 nt, Human
uaaggacgauggugaaaagaucacguuuucaa

SEQ ID NO: 218250 - RNA, 19 nt, Human
uaaggacuauggaauggau

SEQ ID NO: 218251 - RNA, 32 nt, Human
uaaggacucagccuuggucaaggugguaaagg

SEQ ID NO: 218252 - RNA, 32 nt, Human
uaaggacucaggcuuggucaaggugguaaagg

SEQ ID NO: 218253 - RNA, 32 nt, Human
uaaggacuccaaugucgaacucuucuuugcug

SEQ ID NO: 218254 - RNA, 32 nt, Human
uaaggacucuguccacccgggguccucccagg

SEQ ID NO: 218255 - RNA, 32 nt, Human
uaaggacuugacuuccuuucucccaugauucc

SEQ ID NO: 218256 - RNA, 24 nt, Human
uaaggacuuguuagaucuaguuca

SEQ ID NO: 218257 - RNA, 32 nt, Human
uaaggagaacuccgaggagagcagggggagug

SEQ ID NO: 218258 - RNA, 32 nt, Human
uaaggagaaggucaaggcugcagugagccauc

SEQ ID NO: 218259 - RNA, 23 nt, Human
uaaggagaaucaucuucaugccu

SEQ ID NO: 218260 - RNA, 31 nt, Human
uaaggagaggaaagagaaaacucugggguca

SEQ ID NO: 218261 - RNA, 32 nt, Human
uaaggagaggagaaacugagaaaugaaugcug

SEQ ID NO: 218262 - RNA, 32 nt, Human
uaaggagaggccccagaaccccaaagcagaca

SEQ ID NO: 218263 - RNA, 32 nt, Human
uaaggagaguccgguuuaaccgucaccgggaa

SEQ ID NO: 218264 - RNA, 32 nt, Human
uaaggagagucuuccaggugugacaaucagga

SEQ ID NO: 218265 - RNA, 32 nt, Human
uaaggagaguggaaccaggagcucagaguccu

SEQ ID NO: 218266 - RNA, 32 nt, Human
uaaggagaugguaucuccccagucaagggcaa

SEQ ID NO: 218267 - RNA, 32 nt, Human
uaaggagcagccagggcugagacucccggugc

SEQ ID NO: 218268 - RNA, 32 nt, Human
uaaggagcaggagcugcugggccaggucugcg

SEQ ID NO: 218269 - RNA, 32 nt, Human
uaaggagcagugcucucuucucucaaagcuca

SEQ ID NO: 218270 - RNA, 32 nt, Human
uaaggagccagaggaguuaccuguguccugca

SEQ ID NO: 218271 - RNA, 32 nt, Human
uaaggagccgcccagaccuagggcuggacuca

SEQ ID NO: 218272 - RNA, 32 nt, Human
uaaggagcgcuagugccuugcccacaggugcg

SEQ ID NO: 218273 - RNA, 32 nt, Human
uaaggagcugcugcccucugguggauacagag

SEQ ID NO: 218274 - RNA, 32 nt, Human
uaaggagcuuggggaggccucccaggcugguc

SEQ ID NO: 218275 - RNA, 32 nt, Human
uaaggaggaaaggggagggcagaggggaggca

SEQ ID NO: 218276 - RNA, 32 nt, Human
uaaggaggcaccacacaguggugcaggcacau

SEQ ID NO: 218277 - RNA, 32 nt, Human
uaaggaggcugaggcaggagaaucacuugaac

SEQ ID NO: 218278 - RNA, 32 nt, Human
uaaggagggagugggccagaccagagugccag

SEQ ID NO: 218279 - RNA, 32 nt, Human
uaaggagggugagauaagagacccuuuuccua

SEQ ID NO: 218280 - RNA, 32 nt, Human
uaaggagguggugagagcggcugaggaggcug

SEQ ID NO: 218281 - RNA, 32 nt, Human
uaaggaguauuggaagaagcagugagucagcu

SEQ ID NO: 218282 - RNA, 32 nt, Human
uaaggagucccacaccuccaccaccagcccag

SEQ ID NO: 218283 - RNA, 32 nt, Human
uaaggagugauggaagccaagugaacaagccu

SEQ ID NO: 218284 - RNA, 32 nt, Human
uaaggauaaaaaggagggagcgggaagggaga

SEQ ID NO: 218285 - RNA, 32 nt, Human
uaaggauaacauccauguacacauucuuuguu

SEQ ID NO: 218286 - RNA, 32 nt, Human
uaaggauaauggaguuccucuccucugcuuuc

SEQ ID NO: 218287 - RNA, 32 nt, Human
uaaggauagaucuucugcaacagucuugcuga

SEQ ID NO: 218288 - RNA, 23 nt, Human
uaaggauauaaauuugucauuua

SEQ ID NO: 218289 - RNA, 32 nt, Human
uaaggaucaauaaaggaguagugcaguuuaag

SEQ ID NO: 218290 - RNA, 32 nt, Human
uaaggaucagugcuuuguucugcagcagaguu

SEQ ID NO: 218291 - RNA, 32 nt, Human
uaaggaucucauuuggguaucuggaaggugau

SEQ ID NO: 218292 - RNA, 18 nt, Human
uaaggaugacacuaucca

SEQ ID NO: 218293 - RNA, 32 nt, Human
uaaggaugacagagaugugcauguggguauug

SEQ ID NO: 218294 - RNA, 32 nt, Human
uaaggaugauugugugggcugcacaggcugaa

SEQ ID NO: 218295 - RNA, 31 nt, Human
uaaggaugccacauuuuucaugcagaaaaga

SEQ ID NO: 218296 - RNA, 32 nt, Human
uaaggauggacauuuuaucgucucauagucau

SEQ ID NO: 218297 - RNA, 32 nt, Human
uaaggauuaaaauguauaggccagcacgugua

SEQ ID NO: 218298 - RNA, 32 nt, Human
uaaggauuaguuggugggauugaggagagaau

SEQ ID NO: 218299 - RNA, 32 nt, Human
uaaggauucaaaccauuugccaaaaaugaguc

SEQ ID NO: 218300 - RNA, 32 nt, Human
uaaggauugagugagcgcgagcuggggacucu

SEQ ID NO: 218301 - RNA, 32 nt, Human
uaaggauuuuucucuuauuucucccccuaguu

SEQ ID NO: 218302 - RNA, 32 nt, Human
uaaggcaaagaaugugcaguaugaguaugaga

SEQ ID NO: 218303 - RNA, 32 nt, Human
uaaggcaaaggccaagcuuucaaaagaguaaa

SEQ ID NO: 218304 - RNA, 32 nt, Human
uaaggcaaauaaucacuucaccucuggugccu

SEQ ID NO: 218305 - RNA, 32 nt, Human
uaaggcaagguuuaucagugcagaucaucaga

SEQ ID NO: 218306 - RNA, 32 nt, Human
uaaggcacaaguguccuuggcuuucagaauuu

SEQ ID NO: 218307 - RNA, 32 nt, Human
uaaggcagaucuuucuucauaaaaaggaaagu

SEQ ID NO: 218308 - RNA, 32 nt, Human
uaaggcagccgugucuguguuuuugucucgca

SEQ ID NO: 218309 - RNA, 20 nt, Human
uaaggcaggaaaggaaagac

SEQ ID NO: 218310 - RNA, 32 nt, Human
uaaggcaggaggaucacuugagcccaggaggu

SEQ ID NO: 218311 - RNA, 32 nt, Human
uaaggcaggaggaucacuugagccccggaggu

SEQ ID NO: 218312 - RNA, 32 nt, Human
uaaggcaggcggaucacuugaggucaggaguu

SEQ ID NO: 218313 - RNA, 32 nt, Human
uaaggcaggcugaucacuugaggucaggaauu

SEQ ID NO: 218314 - RNA, 24 nt, Human
uaaggcagguggaucacuugaggc

SEQ ID NO: 218315 - RNA, 32 nt, Human
uaaggcagguggaucacuugaggccaggaguu

SEQ ID NO: 218316 - RNA, 32 nt, Human
uaaggcaguagagaaaaacuguuggguuagaa

SEQ ID NO: 218317 - RNA, 32 nt, Human
uaaggcagucucccccuucacccugcuugcug

SEQ ID NO: 218318 - RNA, 32 nt, Human
uaaggcagucucucaaaagucauacugccaga

SEQ ID NO: 218319 - RNA, 20 nt, Human
uaaggcaugacccuuggaua

SEQ ID NO: 218320 - RNA, 32 nt, Human
uaaggcaugcucccagcauuuguccacccacu

SEQ ID NO: 218321 - RNA, 32 nt, Human
uaaggccaaaaacaaccagugaaagaagagag

SEQ ID NO: 218322 - RNA, 32 nt, Human
uaaggccaaucuggcccucccugugugacccg

SEQ ID NO: 218323 - RNA, 32 nt, Human
uaaggccaccuugcagccgcuuuccagggcca

SEQ ID NO: 218324 - RNA, 32 nt, Human
uaaggccacugaugcucaacucugccuggaau

SEQ ID NO: 218325 - RNA, 32 nt, Human
uaaggccagaacuuggucguagagguucaggg

SEQ ID NO: 218326 - RNA, 32 nt, Human
uaaggccagccgcggcaggaccaaggcggcgg

SEQ ID NO: 218327 - RNA, 32 nt, Human
uaaggccaggaggucaaggcugcggugagccg

SEQ ID NO: 218328 - RNA, 32 nt, Human
uaaggccaggaguucaaccagccuggacaaca

SEQ ID NO: 218329 - RNA, 32 nt, Human
uaaggccaggaguucaagaccaccuggccaac

SEQ ID NO: 218330 - RNA, 32 nt, Human
uaaggcccaaguuauugagcagcagcuuccua

SEQ ID NO: 218331 - RNA, 31 nt, Human
uaaggcccacacuucuuugaauuacucuuca

SEQ ID NO: 218332 - RNA, 32 nt, Human
uaaggccccacugucaggcuuagccucagcag

SEQ ID NO: 218333 - RNA, 32 nt, Human
uaaggccccugaccacacuucagaagccccau

SEQ ID NO: 218334 - RNA, 32 nt, Human
uaaggcccucuucucaagaggauuuccuaauu

SEQ ID NO: 218335 - RNA, 32 nt, Human
uaaggcccuggaguccaccuccaggcuggguc

SEQ ID NO: 218336 - RNA, 32 nt, Human
uaaggccgggaguucaagaccagccugaccaa

SEQ ID NO: 218337 - RNA, 26 nt, Human
uaaggccuaagauaggguuucauuua

SEQ ID NO: 218338 - RNA, 32 nt, Human
uaaggccucuacucuggcucaggacccagucc

SEQ ID NO: 218339 - RNA, 32 nt, Human
uaaggccucuuucuaaggaaguuuggcugaag

SEQ ID NO: 218340 - RNA, 32 nt, Human
uaaggccugaaaaggaacaaggcccaccggaa

SEQ ID NO: 218341 - RNA, 32 nt, Human
uaaggccugaacuucaugucauggcuuaugag

SEQ ID NO: 218342 - RNA, 32 nt, Human
uaaggccugaaggaugaugagguaucaggugg

SEQ ID NO: 218343 - RNA, 32 nt, Human
uaaggccugaucuccaggagggguaggggaga

SEQ ID NO: 218344 - RNA, 32 nt, Human
uaaggccugggagaucccaggguccuccaccc

SEQ ID NO: 218345 - RNA, 32 nt, Human
uaaggccugggguggagaagcgcggaggaaug

SEQ ID NO: 218346 - RNA, 32 nt, Human
uaaggccuuaucaccuccccugcccauaggcc

SEQ ID NO: 218347 - RNA, 32 nt, Human
uaaggcgccugccaccaugcccggcuaauuuu

SEQ ID NO: 218348 - RNA, 32 nt, Human
uaaggcgggagaaucacuugaaccugggaggc

SEQ ID NO: 218349 - RNA, 32 nt, Human
uaaggcgggaggaucccuugaggccaggaguu

SEQ ID NO: 218350 - RNA, 32 nt, Human
uaaggcgggaggaugacuugaggccaggaguu

SEQ ID NO: 218351 - RNA, 24 nt, Human
uaaggcggguggaucaccugaggc

SEQ ID NO: 218352 - RNA, 32 nt, Human
uaaggcgugggcuuccacagugucugccagag

SEQ ID NO: 218353 - RNA, 32 nt, Human
uaaggcuaaaucuugaauacauuguugaauuc

SEQ ID NO: 218354 - RNA, 32 nt, Human
uaaggcuaacaugcuuuuccuccaucaaucuu

SEQ ID NO: 218355 - RNA, 32 nt, Human
uaaggcuaaggagagcauggaauuugucaguu

SEQ ID NO: 218356 - RNA, 32 nt, Human
uaaggcuaugcaccccuccccacgucuuccag

SEQ ID NO: 218357 - RNA, 32 nt, Human
uaaggcucaacuauuggaauacaucuaccaug

SEQ ID NO: 218358 - RNA, 32 nt, Human
uaaggcuccaacggccaaacugccucacccuc

SEQ ID NO: 218359 - RNA, 32 nt, Human
uaaggcucccacugcuacuacuuuaaugaaga

SEQ ID NO: 218360 - RNA, 32 nt, Human
uaaggcugaaaccucggaggaacaaccacuuu

SEQ ID NO: 218361 - RNA, 32 nt, Human
uaaggcugaaagagcaggagaguuccaugcag

SEQ ID NO: 218362 - RNA, 32 nt, Human
uaaggcugaaguauuuuuagcaucucaggaca

SEQ ID NO: 218363 - RNA, 32 nt, Human
uaaggcugaccuuaccugaguuucuguaugug

SEQ ID NO: 218364 - RNA, 32 nt, Human
uaaggcugagagagaaaaauaugugcaguauc

SEQ ID NO: 218365 - RNA, 32 nt, Human
uaaggcugaggcacaagaauugcuugaacccg

SEQ ID NO: 218366 - RNA, 32 nt, Human
uaaggcuggaagcuguggcucacaccuguaau

SEQ ID NO: 218367 - RNA, 32 nt, Human
uaaggcuggaggaucacuucagcccaggaguu

SEQ ID NO: 218368 - RNA, 32 nt, Human
uaaggcugguggcccuuugggcucccugucca

SEQ ID NO: 218369 - RNA, 32 nt, Human
uaaggcugugccagaacccaucccaauaaaga

SEQ ID NO: 218370 - RNA, 32 nt, Human
uaaggcuguuuccuuuugcaucuggaacugac

SEQ ID NO: 218371 - RNA, 32 nt, Human
uaaggcuuacgcguguuccauccaccacauca

SEQ ID NO: 218372 - RNA, 32 nt, Human
uaaggcuucuccccaucuuuucuucuacauuu

SEQ ID NO: 218373 - RNA, 32 nt, Human
uaaggcuucugauaagacaggaaagggauauu

SEQ ID NO: 218374 - RNA, 32 nt, Human
uaaggcuuggccgaugucugauugggaccagg

SEQ ID NO: 218375 - RNA, 32 nt, Human
uaagggaacuugccucucccucuuguuuugcu

SEQ ID NO: 218376 - RNA, 32 nt, Human
uaagggaagaggagaggaaggggagccggacc

SEQ ID NO: 218377 - RNA, 32 nt, Human
uaagggaagagucagucuauguucuuuaggua

SEQ ID NO: 218378 - RNA, 32 nt, Human
uaagggaagcaagaguaggguuguggaaagac

SEQ ID NO: 218379 - RNA, 32 nt, Human
uaagggaaucacacagacucauggacauagau

SEQ ID NO: 218380 - RNA, 32 nt, Human
uaagggacccucucuuuuuggauggcagagau

SEQ ID NO: 218381 - RNA, 32 nt, Human
uaagggaccucagacugggcugauggaagguc

SEQ ID NO: 218382 - RNA, 32 nt, Human
uaagggagcauagcugcuccacacagcggaau

SEQ ID NO: 218383 - RNA, 32 nt, Human
uaagggaggagaggggacuggagagugugggg

SEQ ID NO: 218384 - RNA, 32 nt, Human
uaagggaggaggaggccaggagggaggcacag

SEQ ID NO: 218385 - RNA, 32 nt, Human
uaagggaggcuuucauuuccucccgacugauu

SEQ ID NO: 218386 - RNA, 32 nt, Human
uaagggagggaaggggaauggaagagaaaaga

SEQ ID NO: 218387 - RNA, 32 nt, Human
uaagggaggguacuguugacaccagcuauggc

SEQ ID NO: 218388 - RNA, 32 nt, Human
uaagggagguguccaagcugaccucagccuuc

SEQ ID NO: 218389 - RNA, 32 nt, Human
uaagggaguguaacagucucuggaggaccacu

SEQ ID NO: 218390 - RNA, 32 nt, Human
uaagggauauuucugguuucaaagucaugggu

SEQ ID NO: 218391 - RNA, 32 nt, Human
uaagggauucacugcaucauagcuaugccugu

SEQ ID NO: 218392 - RNA, 26 nt, Human
uaagggauuuuuguuauucuagcuca

SEQ ID NO: 218393 - RNA, 32 nt, Human
uaagggcacugagcccuucccaggcuggauac

SEQ ID NO: 218394 - RNA, 32 nt, Human
uaagggcagcagagguggaguagggaggaggc

SEQ ID NO: 218395 - RNA, 32 nt, Human
uaagggcagcuuuuauagguuccacauguaag

SEQ ID NO: 218396 - RNA, 32 nt, Human
uaagggccaaagugcagggugggugaacuuua

SEQ ID NO: 218397 - RNA, 28 nt, Human
uaagggccaagugcaguccugucuugau

SEQ ID NO: 218398 - RNA, 32 nt, Human
uaagggcccaaguauccugaauggcucagcag

SEQ ID NO: 218399 - RNA, 32 nt, Human
uaagggcuacaggccagcguggaugaccugaa

SEQ ID NO: 218400 - RNA, 31 nt, Human
uaagggcucaauaaauguuagcugaaugaaa

SEQ ID NO: 218401 - RNA, 32 nt, Human
uaagggcugccuccccgccacuccuuguccgg

SEQ ID NO: 218402 - RNA, 32 nt, Human
uaagggcuggagugcuguggugccaucauggu

SEQ ID NO: 218403 - RNA, 24 nt, Human
uaagggcuguguuauauuaaguuc

SEQ ID NO: 218404 - RNA, 32 nt, Human
uaagggcuuucucaucagauggcagaaauuau

SEQ ID NO: 218405 - RNA, 32 nt, Human
uaaggggaaccagcacaacaggccauauuccc

SEQ ID NO: 218406 - RNA, 23 nt, Human
uaaggggacagagcaagugcaga

SEQ ID NO: 218407 - RNA, 32 nt, Human
uaaggggacaggaguuccagaagaaccuuuca

SEQ ID NO: 218408 - RNA, 32 nt, Human
uaaggggaccguggcccccaccagggacgucc

SEQ ID NO: 218409 - RNA, 32 nt, Human
uaaggggagagggauugagaaagagacgcuga

SEQ ID NO: 218410 - RNA, 20 nt, Human
uaaggggaggaagaauuccu

SEQ ID NO: 218411 - RNA, 32 nt, Human
uaaggggcaaaugaaacgguauauuauuucuu

SEQ ID NO: 218412 - RNA, 32 nt, Human
uaaggggcagggcugguuucagcugggggcuc

SEQ ID NO: 218413 - RNA, 32 nt, Human
uaaggggcaguggugugaagggaccaaaaggg

SEQ ID NO: 218414 - RNA, 32 nt, Human
uaaggggccacuggggaagccugggucaguau

SEQ ID NO: 218415 - RNA, 32 nt, Human
uaaggggccaggcuccaaagaagauuaaagga

SEQ ID NO: 218416 - RNA, 32 nt, Human
uaaggggccuccaucccuuuuacucauuugua

SEQ ID NO: 218417 - RNA, 32 nt, Human
uaaggggccugccuaagauugcagugauaaag

SEQ ID NO: 218418 - RNA, 32 nt, Human
uaagggggaagaggagaggguauggggcggca

SEQ ID NO: 218419 - RNA, 32 nt, Human
uaaggggucagaacuucugaaaccagagaucu

SEQ ID NO: 218420 - RNA, 32 nt, Human
uaaggggugggaagaacaggaaaagaagcugg

SEQ ID NO: 218421 - RNA, 32 nt, Human
uaagggguuaugggguuuugggggagguaaua

SEQ ID NO: 218422 - RNA, 32 nt, Human
uaagggguucacugcuuugguggaaauuggug

SEQ ID NO: 218423 - RNA, 18 nt, Human
uaaggguaugcuugugua

SEQ ID NO: 218424 - RNA, 32 nt, Human
uaagggucggucgguuuaccacuggacgggug

SEQ ID NO: 218425 - RNA, 32 nt, Human
uaaggguggcagggacuggagucaguuggaga

SEQ ID NO: 218426 - RNA, 32 nt, Human
uaagggugggcuagguuggauggaaggugaaa

SEQ ID NO: 218427 - RNA, 32 nt, Human
uaaggguuauuugagcaaguaacauuaacuca

SEQ ID NO: 218428 - RNA, 32 nt, Human
uaaggguucuuggggaucuggaaaggaucagu

SEQ ID NO: 218429 - RNA, 32 nt, Human
uaaggguugccuaagugucugccuuacuuucu

SEQ ID NO: 218430 - RNA, 32 nt, Human
uaagguaacuaucagaggugggauuaucuugc

SEQ ID NO: 218431 - RNA, 32 nt, Human
uaagguaagagaugauuuccaucuacucucau

SEQ ID NO: 218432 - RNA, 22 nt, Human
uaagguacaugguaccaugaca

SEQ ID NO: 218433 - RNA, 32 nt, Human
uaagguacccuuuaauauguacuccuuaaucu

SEQ ID NO: 218434 - RNA, 32 nt, Human
uaagguaccucucaacauuaccaaaaucauuu

SEQ ID NO: 218435 - RNA, 32 nt, Human
uaagguacugacacuucagacauugcugagua

SEQ ID NO: 218436 - RNA, 32 nt, Human
uaagguacuguagccuugguccuggggaccac

SEQ ID NO: 218437 - RNA, 32 nt, Human
uaagguacuugguuauccagugcagugcaccg

SEQ ID NO: 218438 - RNA, 32 nt, Human
uaagguagagacaaaacuuuauugcacugaca

SEQ ID NO: 218439 - RNA, 32 nt, Human
uaagguaguacacauuugguucagaaauuaau

SEQ ID NO: 218440 - RNA, 32 nt, Human
uaagguauugaaucucucugagccucaguuuu

SEQ ID NO: 218441 - RNA, 32 nt, Human
uaagguauuuuuagcccuugauccccuuugcu

SEQ ID NO: 218442 - RNA, 32 nt, Human
uaaggucagauggucagagucagcaccaacac

SEQ ID NO: 218443 - RNA, 32 nt, Human
uaaggucagccaggcuggacaccacgcugugg

SEQ ID NO: 218444 - RNA, 32 nt, Human
uaaggucaggagaucaagaccauccuggcuaa

SEQ ID NO: 218445 - RNA, 32 nt, Human
uaaggucaggaguucaacaacaccagccugac

SEQ ID NO: 218446 - RNA, 32 nt, Human
uaaggucaggaguucaagaccagccuggccaa

SEQ ID NO: 218447 - RNA, 32 nt, Human
uaaggucaggaguucaagaccagccuggccac

SEQ ID NO: 218448 - RNA, 32 nt, Human
uaaggucaggaguucaagaccagccuggucaa

SEQ ID NO: 218449 - RNA, 32 nt, Human
uaaggucaggaguucaagaccagcguggccaa

SEQ ID NO: 218450 - RNA, 32 nt, Human
uaaggucaggaguucaagaccagcuuggccaa

SEQ ID NO: 218451 - RNA, 32 nt, Human
uaaggucaggaguucaagaccaggcuggucaa

SEQ ID NO: 218452 - RNA, 32 nt, Human
uaaggucaggaguucaagaucagccuggccua

SEQ ID NO: 218453 - RNA, 32 nt, Human
uaaggucauaacugcauuuaucaugaacacua

SEQ ID NO: 218454 - RNA, 32 nt, Human
uaaggucauccuuccccacagggguggcuuug

SEQ ID NO: 218455 - RNA, 32 nt, Human
uaaggucauuacucucaaccaccuaggcaaug

SEQ ID NO: 218456 - RNA, 32 nt, Human
uaaggucauuggcugcucuacucuguccccua

SEQ ID NO: 218457 - RNA, 32 nt, Human
uaagguccaguauaugguuaguuuuuauaaau

SEQ ID NO: 218458 - RNA, 32 nt, Human
uaagguccauccuuccgucucugacauuuuga

SEQ ID NO: 218459 - RNA, 32 nt, Human
uaagguccccacugccugcugcagagaaaaca

SEQ ID NO: 218460 - RNA, 32 nt, Human
uaagguccccuuuucacaacaucaucacaggg

SEQ ID NO: 218461 - RNA, 32 nt, Human
uaaggucccuacagcaagugggacagcagacc

SEQ ID NO: 218462 - RNA, 32 nt, Human
uaaggucccuuccagcccagccguucugggag

SEQ ID NO: 218463 - RNA, 32 nt, Human
uaagguccucaccuaauuccuccaucacaacc

SEQ ID NO: 218464 - RNA, 32 nt, Human
uaaggucgagaguccaagaccagccuggccaa

SEQ ID NO: 218465 - RNA, 32 nt, Human
uaaggucgccacugccugcugcagagaaaaca

SEQ ID NO: 218466 - RNA, 32 nt, Human
uaaggucguugugccagcagaaaugucucucc

SEQ ID NO: 218467 - RNA, 32 nt, Human
uaaggucuaauauccagcaucuguaaggaauu

SEQ ID NO: 218468 - RNA, 32 nt, Human
uaaggucuauguaaaacccuucccucucugac

SEQ ID NO: 218469 - RNA, 32 nt, Human
uaaggugaagcagcaacugcugauggagaagc

SEQ ID NO: 218470 - RNA, 23 nt, Human
uaaggugauccacccaccuucca

SEQ ID NO: 218471 - RNA, 32 nt, Human
uaaggugcugggagcaaagagagggugacuga

SEQ ID NO: 218472 - RNA, 32 nt, Human
uaagguggacgagcaugcccuuuuugucauau

SEQ ID NO: 218473 - RNA, 32 nt, Human
uaagguggcaggaucaccaaaggccaggaguu

SEQ ID NO: 218474 - RNA, 32 nt, Human
uaagguggcucacaccuauaauccuaggacuu

SEQ ID NO: 218475 - RNA, 32 nt, Human
uaagguggcucauaccuauaaucccagcccuu

SEQ ID NO: 218476 - RNA, 32 nt, Human
uaaggugggagaauugcuugagcuugggaagu

SEQ ID NO: 218477 - RNA, 32 nt, Human
uaaggugggaggaucaccugagcucaagaggc

SEQ ID NO: 218478 - RNA, 32 nt, Human
uaaggugggaggaucacuugagcccaggaggu

SEQ ID NO: 218479 - RNA, 32 nt, Human
uaaggugggaggaucacuugauccugggaggu

SEQ ID NO: 218480 - RNA, 32 nt, Human
uaaggugggaggaucguuucagccugggaggu

SEQ ID NO: 218481 - RNA, 32 nt, Human
uaaggugggaggauggcuugagcucaggaugu

SEQ ID NO: 218482 - RNA, 32 nt, Human
uaaggugggcagaucacuugagcccagggguu

SEQ ID NO: 218483 - RNA, 24 nt, Human
uaaggugggcggaucaccugaggu

SEQ ID NO: 218484 - RNA, 24 nt, Human
uaagguggguggaucaccugaggu

SEQ ID NO: 218485 - RNA, 32 nt, Human
uaaggugucagagagcucaguguuccaggauu

SEQ ID NO: 218486 - RNA, 32 nt, Human
uaagguguuaacauugggggaggcuggggcaa

SEQ ID NO: 218487 - RNA, 32 nt, Human
uaagguguucuaauuuucugugagcacacuaa

SEQ ID NO: 218488 - RNA, 32 nt, Human
uaagguuagaagggaaggaaggaaagaucaag

SEQ ID NO: 218489 - RNA, 32 nt, Human
uaagguugagcgcauugagaagagaugucugg

SEQ ID NO: 218490 - RNA, 32 nt, Human
uaagguuggcccuuggaggccauguuuggguc

SEQ ID NO: 218491 - RNA, 32 nt, Human
uaaguaaaacuaaaagcacagaauggugggaa

SEQ ID NO: 218492 - RNA, 32 nt, Human
uaaguaaaguguuaugguaggguucuucagau

SEQ ID NO: 218493 - RNA, 32 nt, Human
uaaguaaauaagaguaguugaacugagcaaua

SEQ ID NO: 218494 - RNA, 32 nt, Human
uaaguaaaugccagucccuaggaagagagaac

SEQ ID NO: 218495 - RNA, 32 nt, Human
uaaguaaccugaccauggcccaacagcaaaca

SEQ ID NO: 218496 - RNA, 32 nt, Human
uaaguaagauaggguuucacuauguuggcuag

SEQ ID NO: 218497 - RNA, 32 nt, Human
uaaguaagcauggagugugucacuggauaaau

SEQ ID NO: 218498 - RNA, 32 nt, Human
uaaguaagcuaaaucaauuuaagccauuaaua

SEQ ID NO: 218499 - RNA, 32 nt, Human
uaaguaaggagaggaggggcagaggagcugcc

SEQ ID NO: 218500 - RNA, 31 nt, Human
uaaguaaguuagagagaaaacauuguaugau

SEQ ID NO: 218501 - RNA, 32 nt, Human
uaaguaaguuugguuucaucaugagggaugaa

SEQ ID NO: 218502 - RNA, 32 nt, Human
uaaguaauauagcauuaagcaaauggucaguu

SEQ ID NO: 218503 - RNA, 23 nt, Human
uaaguaaucagacucagguucca

SEQ ID NO: 218504 - RNA, 32 nt, Human
uaaguaaucccacugaauuccagaaucaugaa

SEQ ID NO: 218505 - RNA, 32 nt, Human
uaaguaauucagugggaauugcagcauaucgu

SEQ ID NO: 218506 - RNA, 32 nt, Human
uaaguaauuucuuuuaucacuaccucaacuga

SEQ ID NO: 218507 - RNA, 32 nt, Human
uaaguacauauguagauauuguuuucuguaaa

SEQ ID NO: 218508 - RNA, 32 nt, Human
uaaguacauuuugcuuuuuaaaguugauuuuu

SEQ ID NO: 218509 - RNA, 32 nt, Human
uaaguacccaugucuuuuucaugucuaaccau

SEQ ID NO: 218510 - RNA, 32 nt, Human
uaaguaccuacaaaugcaaagaaaaauacuac

SEQ ID NO: 218511 - RNA, 32 nt, Human
uaaguaccugcucucccauuaccaccuauuuc

SEQ ID NO: 218512 - RNA, 32 nt, Human
uaaguacuacauaccucaucucuuggguuauu

SEQ ID NO: 218513 - RNA, 32 nt, Human
uaaguagacuugugugacagcuaauucuuaaa

SEQ ID NO: 218514 - RNA, 32 nt, Human
uaaguagagacauuggucucacuguguugccc

SEQ ID NO: 218515 - RNA, 32 nt, Human
uaaguagcagggccaggguagaccuggucagc

SEQ ID NO: 218516 - RNA, 32 nt, Human
uaaguagcucagaaauuaagaaagaaugguau

SEQ ID NO: 218517 - RNA, 32 nt, Human
uaaguagcuugacuaggcagggaccaagcuua

SEQ ID NO: 218518 - RNA, 32 nt, Human
uaaguaggaauuuauuacuugcagaauguuag

SEQ ID NO: 218519 - RNA, 32 nt, Human
uaaguagggcuaagccaguuggaucucugguu

SEQ ID NO: 218520 - RNA, 32 nt, Human
uaaguagggucgaacacagaagugggaaggag

SEQ ID NO: 218521 - RNA, 32 nt, Human
uaaguaggugccagaaccauugcuguuuuccc

SEQ ID NO: 218522 - RNA, 32 nt, Human
uaaguaguuuucugaacggccagaagaccauu

SEQ ID NO: 218523 - RNA, 32 nt, Human
uaaguauaugauugcgaguggaaaaauagggg

SEQ ID NO: 218524 - RNA, 31 nt, Human
uaaguauauuauuucugacaucguaagaaau

SEQ ID NO: 218525 - RNA, 32 nt, Human
uaaguaucaaguuuucuuugugauguuuucug

SEQ ID NO: 218526 - RNA, 22 nt, Human
uaaguaucaguaauucgucuua

SEQ ID NO: 218527 - RNA, 32 nt, Human
uaaguauccaguacuuuauaaccaaagcaauu

SEQ ID NO: 218528 - RNA, 32 nt, Human
uaaguaucccuaauccugaaaucugaaacacu

SEQ ID NO: 218529 - RNA, 32 nt, Human
uaaguauguauaugugcaugggaaaacaacau

SEQ ID NO: 218530 - RNA, 32 nt, Human
uaaguauuaaagauuauuuguaagucauugua

SEQ ID NO: 218531 - RNA, 32 nt, Human
uaaguauucaauuaaaaggaaacaugauuucu

SEQ ID NO: 218532 - RNA, 32 nt, Human
uaaguauucguauucucuucaucccagucuga

SEQ ID NO: 218533 - RNA, 21 nt, Human
uaaguauugagggugacuuua

SEQ ID NO: 218534 - RNA, 32 nt, Human
uaaguauugcuuuuugcugcuauguucugcau

SEQ ID NO: 218535 - RNA, 32 nt, Human
uaaguauuguuuccugagcauaacuccauaag

SEQ ID NO: 218536 - RNA, 32 nt, Human
uaagucaaagauuagagucaacagaaauaaag

SEQ ID NO: 218537 - RNA, 32 nt, Human
uaagucaaauuuuaguggcucuuuaauuccug

SEQ ID NO: 218538 - RNA, 32 nt, Human
uaagucaagcccuuuguguuaagcaagaacua

SEQ ID NO: 218539 - RNA, 32 nt, Human
uaagucaagucacgaagauagagcuuugcgaa

SEQ ID NO: 218540 - RNA, 32 nt, Human
uaagucaauagccauagaaaccuacugacaaa

SEQ ID NO: 218541 - RNA, 23 nt, Human
uaagucaaucuagauuuauuuug

SEQ ID NO: 218542 - RNA, 32 nt, Human
uaagucaccacucaaccaguggcuguuucaca

SEQ ID NO: 218543 - RNA, 32 nt, Human
uaagucacuagccugugaucccagcacuuugg

SEQ ID NO: 218544 - RNA, 32 nt, Human
uaagucacucccagacuagggaagugacucag

SEQ ID NO: 218545 - RNA, 32 nt, Human
uaagucacugaggcuggaguacaguggcauga

SEQ ID NO: 218546 - RNA, 32 nt, Human
uaagucagaacagcagacucagcucugacauu

SEQ ID NO: 218547 - RNA, 32 nt, Human
uaagucagagacaaaauuccacugucuguucc

SEQ ID NO: 218548 - RNA, 32 nt, Human
uaagucagcacacagcaccugcagccuccucu

SEQ ID NO: 218549 - RNA, 32 nt, Human
uaagucagucuagaagaaggagucuccuauuu

SEQ ID NO: 218550 - RNA, 20 nt, Human
uaagucauacauucauuuug

SEQ ID NO: 218551 - RNA, 32 nt, Human
uaagucaucaguacuugcuggaaaagaauaug

SEQ ID NO: 218552 - RNA, 32 nt, Human
uaagucaugauggcuggagcacuggcaaucuu

SEQ ID NO: 218553 - RNA, 24 nt, Human
uaagucauuaugagcuucaucuua

SEQ ID NO: 218554 - RNA, 32 nt, Human
uaagucauuccacuccucaagagaccauucca

SEQ ID NO: 218555 - RNA, 32 nt, Human
uaaguccaaaaacuauagagcagaagaauuga

SEQ ID NO: 218556 - RNA, 32 nt, Human
uaaguccaaaggacaggaccagacuguuggug

SEQ ID NO: 218557 - RNA, 32 nt, Human
uaaguccaccuucuaucccauucauguuagau

SEQ ID NO: 218558 - RNA, 21 nt, Human
uaaguccacugacuuauuuua

SEQ ID NO: 218559 - RNA, 32 nt, Human
uaaguccagcacuuugggaggcugaggcagga

SEQ ID NO: 218560 - RNA, 32 nt, Human
uaaguccaggaguucaagaccagccuggguaa

SEQ ID NO: 218561 - RNA, 32 nt, Human
uaagucccaaagaaagaggcagaggagcgaca

SEQ ID NO: 218562 - RNA, 32 nt, Human
uaagucccaacuugggguugcaaaaucauuuu

SEQ ID NO: 218563 - RNA, 32 nt, Human
uaagucccaugcugggguuugggcauuuagug

SEQ ID NO: 218564 - RNA, 32 nt, Human
uaaguccccagcccccucuccucccagccucu

SEQ ID NO: 218565 - RNA, 32 nt, Human
uaaguccccuuacucaugauucaucaauauuc

SEQ ID NO: 218566 - RNA, 32 nt, Human
uaaguccccuuccucagccucagaccuggagg

SEQ ID NO: 218567 - RNA, 32 nt, Human
uaagucccugcuccuccucuucccuuuggggc

SEQ ID NO: 218568 - RNA, 32 nt, Human
uaaguccucuuucuaaggaaguuuggcugaag

SEQ ID NO: 218569 - RNA, 32 nt, Human
uaaguccuguaagaauagggaagggcggaggg

SEQ ID NO: 218570 - RNA, 32 nt, Human
uaagucggucccugccuugucugucuaggccc

SEQ ID NO: 218571 - RNA, 32 nt, Human
uaagucuagcacacagcacuugagccagcaaa

SEQ ID NO: 218572 - RNA, 32 nt, Human
uaagucuaugugagcaagugagagaagguuag

SEQ ID NO: 218573 - RNA, 32 nt, Human
uaagucucauuucccuaucccucccuucaaga

SEQ ID NO: 218574 - RNA, 32 nt, Human
uaagucucauuucuuuucaugacacauuucuc

SEQ ID NO: 218575 - RNA, 32 nt, Human
uaagucuccugucuuaugguccagaaacuccu

SEQ ID NO: 218576 - RNA, 32 nt, Human
uaagucucgaagggaaaggcaguguggaagca

SEQ ID NO: 218577 - RNA, 21 nt, Human
uaagucucuagcucuccaucu

SEQ ID NO: 218578 - RNA, 18 nt, Human
uaagucucugacaucuug

SEQ ID NO: 218579 - RNA, 32 nt, Human
uaagucugcuggccuccgccaucuuaguaaag

SEQ ID NO: 218580 - RNA, 32 nt, Human
uaagucugggagguugaggcugcagugagcug

SEQ ID NO: 218581 - RNA, 32 nt, Human
uaagucugggcuuauuggacauaauacauauu

SEQ ID NO: 218582 - RNA, 32 nt, Human
uaagucuguggcccaauccccuuccucuccuu

SEQ ID NO: 218583 - RNA, 22 nt, Human
uaagucuuaagucacuuuuuua

SEQ ID NO: 218584 - RNA, 32 nt, Human
uaagucuuacugagaucagccaccccagggga

SEQ ID NO: 218585 - RNA, 32 nt, Human
uaagucuucaaaaugcacaugggaugggaugu

SEQ ID NO: 218586 - RNA, 32 nt, Human
uaagucuuccaaugccaaucugggaccuucag

SEQ ID NO: 218587 - RNA, 32 nt, Human
uaagucuucuaaaaauauaaagauuaguuaaa

SEQ ID NO: 218588 - RNA, 32 nt, Human
uaagucuugcugcugcucacucuuugggucca

SEQ ID NO: 218589 - RNA, 32 nt, Human
uaagucuuuaucagucacccugccucaguuau

SEQ ID NO: 218590 - RNA, 21 nt, Human
uaagucuuucaccuuaacuua

SEQ ID NO: 218591 - RNA, 32 nt, Human
uaagucuuuuggaagcuacaacaacaacgucg

SEQ ID NO: 218592 - RNA, 32 nt, Human
uaagugaaaggagccaaucacaaaagaccaca

SEQ ID NO: 218593 - RNA, 32 nt, Human
uaagugaaauaaacugguucacuaguagagaa

SEQ ID NO: 218594 - RNA, 32 nt, Human
uaagugaagaugcucuuccagagaccaccuuc

SEQ ID NO: 218595 - RNA, 27 nt, Human
uaagugaagugaccccucuucuugccu

SEQ ID NO: 218596 - RNA, 23 nt, Human
uaagugaauccugauuauuucca

SEQ ID NO: 218597 - RNA, 24 nt, Human
uaagugaauggcagucccuugucu

SEQ ID NO: 218598 - RNA, 32 nt, Human
uaagugacaccuaggacccaggaaauaaaugc

SEQ ID NO: 218599 - RNA, 32 nt, Human
uaagugacccccgucaacccacugccucccac

SEQ ID NO: 218600 - RNA, 32 nt, Human
uaagugacuuugguguguucaugggaaacuga

SEQ ID NO: 218601 - RNA, 32 nt, Human
uaagugagaaugagaacugcugugauagggag

SEQ ID NO: 218602 - RNA, 32 nt, Human
uaagugagccgggccuucugagccuucccccg

SEQ ID NO: 218603 - RNA, 32 nt, Human
uaagugagcugggcugggaggcuuccuacagg

SEQ ID NO: 218604 - RNA, 32 nt, Human
uaagugaggaagaagaggccuucaaaugcuua

SEQ ID NO: 218605 - RNA, 32 nt, Human
uaagugaggaagagccuggcauagacucauaa

SEQ ID NO: 218606 - RNA, 32 nt, Human
uaagugaugcagaagccagagagaagguugcu

SEQ ID NO: 218607 - RNA, 31 nt, Human
uaagugauucuucucccuggcaaggcucuuc

SEQ ID NO: 218608 - RNA, 32 nt, Human
uaagugauuuccaaaagcagagguguguggaa

SEQ ID NO: 218609 - RNA, 32 nt, Human
uaagugcacagcccgugacuuggcucagugug

SEQ ID NO: 218610 - RNA, 32 nt, Human
uaagugcaggagacauugguauucugggcagc

SEQ ID NO: 218611 - RNA, 32 nt, Human
uaagugcagguguggggagggauuucacaagu

SEQ ID NO: 218612 - RNA, 32 nt, Human
uaagugcagucuaguuucuguguuccaauucu

SEQ ID NO: 218613 - RNA, 32 nt, Human
uaagugcaugggggaaaauaccuagggcucaa

SEQ ID NO: 218614 - RNA, 32 nt, Human
uaagugcccacuaaaugguggcuguugaggua

SEQ ID NO: 218615 - RNA, 32 nt, Human
uaagugcccucagacagcagugacgggacacu

SEQ ID NO: 218616 - RNA, 32 nt, Human
uaagugccgccuggccugcaugcauuggcuaa

SEQ ID NO: 218617 - RNA, 32 nt, Human
uaagugccuagacuuuaaauagaucuagcaau

SEQ ID NO: 218618 - RNA, 32 nt, Human
uaagugcuagggcuggucacacacaaccaacc

SEQ ID NO: 218619 - RNA, 31 nt, Human
uaagugcucaauaaauacugagugaaauccu

SEQ ID NO: 218620 - RNA, 32 nt, Human
uaagugcugccuggaggccucuacagagacau

SEQ ID NO: 218621 - RNA, 32 nt, Human
uaagugcuggacugcaggcugcagugaucccu

SEQ ID NO: 218622 - RNA, 30 nt, Human
uaagugcugggauuacuuuacaggcgugag

SEQ ID NO: 218623 - RNA, 31 nt, Human
uaagugcuuaauaaauauuugcugaauguua

SEQ ID NO: 218624 - RNA, 32 nt, Human
uaagugcuucuuuggaucucaggcucuaggug

SEQ ID NO: 218625 - RNA, 32 nt, Human
uaagugcuuugagaucuuugaccaacaggugc

SEQ ID NO: 218626 - RNA, 32 nt, Human
uaagugcuuuucuccucugagucuuagcaaug

SEQ ID NO: 218627 - RNA, 32 nt, Human
uaaguggaaauggauugauaauggcacaucuc

SEQ ID NO: 218628 - RNA, 32 nt, Human
uaaguggaacaugcugccacuuuucaauucug

SEQ ID NO: 218629 - RNA, 32 nt, Human
uaaguggaagaggccugcaucacaauugaggu

SEQ ID NO: 218630 - RNA, 32 nt, Human
uaaguggaaugagccgaggauuugaauaucag

SEQ ID NO: 218631 - RNA, 32 nt, Human
uaaguggacacaugcccuuaagaggcuugcuu

SEQ ID NO: 218632 - RNA, 32 nt, Human
uaaguggcacuuccaggacacccauccugagc

SEQ ID NO: 218633 - RNA, 32 nt, Human
uaaguggcaggcacugucucaggugcuagcau

SEQ ID NO: 218634 - RNA, 32 nt, Human
uaaguggccuaggcagucaucccaggcuccaa

SEQ ID NO: 218635 - RNA, 32 nt, Human
uaaguggcugcuccagggaugacagggguuca

SEQ ID NO: 218636 - RNA, 21 nt, Human
uaaguggcuggacuuaucuug

SEQ ID NO: 218637 - RNA, 32 nt, Human
uaaguggcuugucugcagucacccagggcguc

SEQ ID NO: 218638 - RNA, 32 nt, Human
uaagugggaagaggaagggagaggcaagcaac

SEQ ID NO: 218639 - RNA, 32 nt, Human
uaagugggauggcucuccuucucccaagcugc

SEQ ID NO: 218640 - RNA, 32 nt, Human
uaagugggugcucagccuuuuucauaaucaga

SEQ ID NO: 218641 - RNA, 21 nt, Human
uaagugguaagauaauuguaa

SEQ ID NO: 218642 - RNA, 32 nt, Human
uaagugguagggcucacagacugugugaaguc

SEQ ID NO: 218643 - RNA, 32 nt, Human
uaaguggugagggagauggaagcugcacccca

SEQ ID NO: 218644 - RNA, 32 nt, Human
uaagugguuacuaggcagcuugcagugauuuc

SEQ ID NO: 218645 - RNA, 32 nt, Human
uaagugguuauaacaguggauucugacgggga

SEQ ID NO: 218646 - RNA, 32 nt, Human
uaaguguaugaugucacacaagcuccuuaacc

SEQ ID NO: 218647 - RNA, 32 nt, Human
uaagugucagagagcuacguguacccguuucu

SEQ ID NO: 218648 - RNA, 32 nt, Human
uaagugucaguguagcuacuguaggagcacuu

SEQ ID NO: 218649 - RNA, 32 nt, Human
uaagugucauggacaguaaaugaauuugaacu

SEQ ID NO: 218650 - RNA, 32 nt, Human
uaaguguccagcucuguuucugguucuuuccc

SEQ ID NO: 218651 - RNA, 32 nt, Human
uaagugucugagacugacaucggaaccagagg

SEQ ID NO: 218652 - RNA, 32 nt, Human
uaagugugaguacuauacaagcauuaaacugg

SEQ ID NO: 218653 - RNA, 32 nt, Human
uaaguguggugcugcuaacauugcccaggcaa

SEQ ID NO: 218654 - RNA, 32 nt, Human
uaagugugguugaagagcaaaaugcuaauuga

SEQ ID NO: 218655 - RNA, 20 nt, Human
uaagugugugccgccaccca

SEQ ID NO: 218656 - RNA, 21 nt, Human
uaaguguuugcacuuauuuua

SEQ ID NO: 218657 - RNA, 32 nt, Human
uaaguguuuuccaagcaaaaugccucucccau

SEQ ID NO: 218658 - RNA, 32 nt, Human
uaaguguuuuuguucucuaugugucuucuauu

SEQ ID NO: 218659 - RNA, 32 nt, Human
uaaguuaaaagcuuccaugggagccuuccuuc

SEQ ID NO: 218660 - RNA, 32 nt, Human
uaaguuaaaggcaguccagagcuuuucagcca

SEQ ID NO: 218661 - RNA, 32 nt, Human
uaaguuaacaccuuuaaaguguguaguaaagu

SEQ ID NO: 218662 - RNA, 32 nt, Human
uaaguuacaauguuuuauggccuaaauuuauu

SEQ ID NO: 218663 - RNA, 32 nt, Human
uaaguuaguuacccauguccccaaucaaggga

SEQ ID NO: 218664 - RNA, 32 nt, Human
uaaguuauagugaauacugcuacagcaauuuc

SEQ ID NO: 218665 - RNA, 32 nt, Human
uaaguuaucauucuagacaaguuucuuuacaa

SEQ ID NO: 218666 - RNA, 32 nt, Human
uaaguucaaauuuugacuuauuuuacaagugu

SEQ ID NO: 218667 - RNA, 32 nt, Human
uaaguucagcaacuguuuaaccuguuuucagu

SEQ ID NO: 218668 - RNA, 32 nt, Human
uaaguucauccagaaagccaugaaagagggac

SEQ ID NO: 218669 - RNA, 32 nt, Human
uaaguucauccagcagcuccaugagccacaca

SEQ ID NO: 218670 - RNA, 32 nt, Human
uaaguuccacaaaauccaaauuuaccauauua

SEQ ID NO: 218671 - RNA, 32 nt, Human
uaaguuccuccuauuugccacugggcuguugg

SEQ ID NO: 218672 - RNA, 32 nt, Human
uaaguucuaggguacaugugcacaacgugcag

SEQ ID NO: 218673 - RNA, 32 nt, Human
uaaguucucccaguagagauugaguuugagcc

SEQ ID NO: 218674 - RNA, 32 nt, Human
uaaguucugccugaccuaugaggccucaauga

SEQ ID NO: 218675 - RNA, 32 nt, Human
uaaguucugcuuucagcauuuuccuuaaaguu

SEQ ID NO: 218676 - RNA, 32 nt, Human
uaaguucuuaaugucaaccaucuuuaagguau

SEQ ID NO: 218677 - RNA, 32 nt, Human
uaaguucuuccagauuuuaacuguguuaauag

SEQ ID NO: 218678 - RNA, 32 nt, Human
uaaguugccccgucauacucagucccaugcca

SEQ ID NO: 218679 - RNA, 32 nt, Human
uaaguugccugguauuguucagucucuccugc

SEQ ID NO: 218680 - RNA, 32 nt, Human
uaaguugcuaugaucuccaccucaggaucuug

SEQ ID NO: 218681 - RNA, 23 nt, Human
uaaguugcuuuggugccaagaaa

SEQ ID NO: 218682 - RNA, 32 nt, Human
uaaguuggaauucucccacugcccuaaaacuu

SEQ ID NO: 218683 - RNA, 31 nt, Human
uaaguuggauauuucucuacauuccugaaac

SEQ ID NO: 218684 - RNA, 32 nt, Human
uaaguuggauucaaauggccauuuuucuccaa

SEQ ID NO: 218685 - RNA, 32 nt, Human
uaaguuggggaguucaagaccagccugaccaa

SEQ ID NO: 218686 - RNA, 32 nt, Human
uaaguugguguuuggagguggggaggaugcua

SEQ ID NO: 218687 - RNA, 31 nt, Human
uaaguuguacuuuucuguggaggaaauugug

SEQ ID NO: 218688 - RNA, 32 nt, Human
uaaguugucccccaucccaaaguauuccaucu

SEQ ID NO: 218689 - RNA, 32 nt, Human
uaaguugugauugugucugaugaagaggaaug

SEQ ID NO: 218690 - RNA, 32 nt, Human
uaaguuguguauguuuggcaggucacauugaa

SEQ ID NO: 218691 - RNA, 32 nt, Human
uaaguuguuccuuuccccauccuuccuuccuu

SEQ ID NO: 218692 - RNA, 32 nt, Human
uaaguuuagauggaguccaaacgcaguacagc

SEQ ID NO: 218693 - RNA, 32 nt, Human
uaaguuucccagagaaaaugagaugcugaugu

SEQ ID NO: 218694 - RNA, 32 nt, Human
uaaguuuccucaagccuccccugccaugugga

SEQ ID NO: 218695 - RNA, 22 nt, Human
uaaguuucuuaacugcauuuug

SEQ ID NO: 218696 - RNA, 32 nt, Human
uaaguuugagccugaaauuuuaaugaagugca

SEQ ID NO: 218697 - RNA, 32 nt, Human
uaaguuuggacuaaugacuaaaacacuuuaug

SEQ ID NO: 218698 - RNA, 32 nt, Human
uaaguuuggagugcaguggcaugaucaucagu

SEQ ID NO: 218699 - RNA, 32 nt, Human
uaaguuuggcauuauugucagacuggauggag

SEQ ID NO: 218700 - RNA, 31 nt, Human
uaaguuugugagguguggugggugaaacuaa

SEQ ID NO: 218701 - RNA, 32 nt, Human
uaaguuuguuugcuuuuucagguuuaucuuug

SEQ ID NO: 218702 - RNA, 32 nt, Human
uaaguuuuaucuucugucagaaugugaaaagu

SEQ ID NO: 218703 - RNA, 32 nt, Human
uaaguuuucccuucgagacauucuuucagguc

SEQ ID NO: 218704 - RNA, 32 nt, Human
uaaguuuuccugucaagaaagcagaaaccauc

SEQ ID NO: 218705 - RNA, 32 nt, Human
uaauaaaaagaaaagugaagaguaagagaaaa

SEQ ID NO: 218706 - RNA, 32 nt, Human
uaauaaaaauacgaaaaauuagccaggcgugg

SEQ ID NO: 218707 - RNA, 32 nt, Human
uaauaaaaauacgaaaaauuagcugggcaugg

SEQ ID NO: 218708 - RNA, 32 nt, Human
uaauaaaacauuugucuuuuccuugcuaaugu

SEQ ID NO: 218709 - RNA, 32 nt, Human
uaauaaaacccaacagauacuggaaguuuugc

SEQ ID NO: 218710 - RNA, 31 nt, Human
uaauaaaaggauaaagaaaaagcugaagaca

SEQ ID NO: 218711 - RNA, 32 nt, Human
uaauaaaaucccuacauuucugaggccugaau

SEQ ID NO: 218712 - RNA, 32 nt, Human
uaauaaaaugcugcucauugagccaaagagaa

SEQ ID NO: 218713 - RNA, 32 nt, Human
uaauaaacaaguacuaucguagccagggggug

SEQ ID NO: 218714 - RNA, 23 nt, Human
uaauaaacacagauuauuggggg

SEQ ID NO: 218715 - RNA, 32 nt, Human
uaauaaaccuauugauuucucugcuuauaaau

SEQ ID NO: 218716 - RNA, 32 nt, Human
uaauaaaccuuugaccagugucuuccaaguag

SEQ ID NO: 218717 - RNA, 32 nt, Human
uaauaaagacaggguuucaccauguuggccag

SEQ ID NO: 218718 - RNA, 32 nt, Human
uaauaaagacgggguuucaucauguuggccag

SEQ ID NO: 218719 - RNA, 32 nt, Human
uaauaaagagcaauuuguaacugaguggcacu

SEQ ID NO: 218720 - RNA, 32 nt, Human
uaauaaagaugggguuucaccauguuggucag

SEQ ID NO: 218721 - RNA, 32 nt, Human
uaauaaagcucucaaaagauguugauucucaa

SEQ ID NO: 218722 - RNA, 28 nt, Human
uaauaaagcugcauacaguuuggcuugg

SEQ ID NO: 218723 - RNA, 32 nt, Human
uaauaaagcuguugccaagcuggacggcacga

SEQ ID NO: 218724 - RNA, 32 nt, Human
uaauaaaggcauuucaaagucucacuuuuauu

SEQ ID NO: 218725 - RNA, 26 nt, Human
uaauaaaguaguuauuuuauagggga

SEQ ID NO: 218726 - RNA, 22 nt, Human
uaauaaauacaauaugcuacuc

SEQ ID NO: 218727 - RNA, 21 nt, Human
uaauaaauaccauaguagcuc

SEQ ID NO: 218728 - RNA, 32 nt, Human
uaauaaauacccuuggucuuucuucuagucac

SEQ ID NO: 218729 - RNA, 32 nt, Human
uaauaaauacuaguuauuuacaacuuuugcuc

SEQ ID NO: 218730 - RNA, 32 nt, Human
uaauaaaugauggcugggugcggugucucaug

SEQ ID NO: 218731 - RNA, 32 nt, Human
uaauaaaugccaccacauucuaccagcacaag

SEQ ID NO: 218732 - RNA, 32 nt, Human
uaauaaauggcagagugagcauucaaguccag

SEQ ID NO: 218733 - RNA, 32 nt, Human
uaauaaauggcagggccuaaacaagcccuuag

SEQ ID NO: 218734 - RNA, 32 nt, Human
uaauaaauggugcuagauauugcuacuauuuu

SEQ ID NO: 218735 - RNA, 32 nt, Human
uaauaaauggugcugggaaaacuggcuagcca

SEQ ID NO: 218736 - RNA, 32 nt, Human
uaauaaauggugcugggagaacuggcuagcca

SEQ ID NO: 218737 - RNA, 32 nt, Human
uaauaacacuucaccuucuguaauacuaaguc

SEQ ID NO: 218738 - RNA, 32 nt, Human
uaauaacaggcugggugcaauggcucacaccu

SEQ ID NO: 218739 - RNA, 32 nt, Human
uaauaacagugcagugucuacacaggagguaa

SEQ ID NO: 218740 - RNA, 32 nt, Human
uaauaacauucuaguagacucucgaugguggu

SEQ ID NO: 218741 - RNA, 32 nt, Human
uaauaaccaaccaaccaaccaaccaaacuucc

SEQ ID NO: 218742 - RNA, 31 nt, Human
uaauaacugaaacugccucagagaguuguga

SEQ ID NO: 218743 - RNA, 32 nt, Human
uaauaagacuccaacccuaauggcccaacagg

SEQ ID NO: 218744 - RNA, 31 nt, Human
uaauaagagcacuucuguauuccuugggacu

SEQ ID NO: 218745 - RNA, 32 nt, Human
uaauaagauauuguauuuuacuucagcuaugg

SEQ ID NO: 218746 - RNA, 32 nt, Human
uaauaagcaugcauacuuuaacuucuauaguu

SEQ ID NO: 218747 - RNA, 32 nt, Human
uaauaagcauuuucauugcagcagcaaauccu

SEQ ID NO: 218748 - RNA, 32 nt, Human
uaauaagcccucacuguacagaacagcccguu

SEQ ID NO: 218749 - RNA, 32 nt, Human
uaauaagccugucacucaacagguacgacaag

SEQ ID NO: 218750 - RNA, 32 nt, Human
uaauaaggagcuaugacuggagucaggagaag

SEQ ID NO: 218751 - RNA, 32 nt, Human
uaauaaggagucagaccuaaaagggggugggg

SEQ ID NO: 218752 - RNA, 32 nt, Human
uaauaaggauucauggcucagagggauuuucu

SEQ ID NO: 218753 - RNA, 32 nt, Human
uaauaagucaugucccagccugggcaacauag

SEQ ID NO: 218754 - RNA, 32 nt, Human
uaauaagugggaaagagagggacgggucugau

SEQ ID NO: 218755 - RNA, 29 nt, Human
uaauaauaaagcaguuuuaaccugccaaa

SEQ ID NO: 218756 - RNA, 32 nt, Human
uaauaauacauacaugauuuuucuucugaaug

SEQ ID NO: 218757 - RNA, 32 nt, Human
uaauaauagcaacccuugucucccucuucucu

SEQ ID NO: 218758 - RNA, 32 nt, Human
uaauaauagcucaguuuuuaaaggaggggaac

SEQ ID NO: 218759 - RNA, 32 nt, Human
uaauaauaggacaggacacagagcuggaauau

SEQ ID NO: 218760 - RNA, 32 nt, Human
uaauaauaggagaauagaagaacugguagcca

SEQ ID NO: 218761 - RNA, 32 nt, Human
uaauaauauaaggaaaaagggaaaguaaacua

SEQ ID NO: 218762 - RNA, 32 nt, Human
uaauaauauuagccugaugcagauaccaaaga

SEQ ID NO: 218763 - RNA, 32 nt, Human
uaauaauauuuucuucugccucaggcuccaaa

SEQ ID NO: 218764 - RNA, 32 nt, Human
uaauaaucauaugucagcauucugacuacuua

SEQ ID NO: 218765 - RNA, 32 nt, Human
uaauaaucauuuccuacuauuugcauuaagaa

SEQ ID NO: 218766 - RNA, 32 nt, Human
uaauaauccauucaguaauguuauaguuaucc

SEQ ID NO: 218767 - RNA, 32 nt, Human
uaauaaucccuuuaaauuuuaucuguugcugu

SEQ ID NO: 218768 - RNA, 32 nt, Human
uaauaauccuuaaaaaucagcacacaaaucca

SEQ ID NO: 218769 - RNA, 32 nt, Human
uaauaaugauggucaacaauaagccacgucaa

SEQ ID NO: 218770 - RNA, 32 nt, Human
uaauaaugaugucaauuucaugaaaagccuga

SEQ ID NO: 218771 - RNA, 32 nt, Human
uaauaauggaguuuaccagugcuugucaacua

SEQ ID NO: 218772 - RNA, 32 nt, Human
uaauaauucauuucugucaaacuguaagagua

SEQ ID NO: 218773 - RNA, 32 nt, Human
uaauaauuuuaugugagaauguuuucaaaaag

SEQ ID NO: 218774 - RNA, 32 nt, Human
uaauacaaguaauauuauuacuuuaugaacaa

SEQ ID NO: 218775 - RNA, 32 nt, Human
uaauacacacagaaaaacuggcauuuauuuug

SEQ ID NO: 218776 - RNA, 32 nt, Human
uaauacacagccccuggauggggaggggguag

SEQ ID NO: 218777 - RNA, 32 nt, Human
uaauacaccuagugaggaguggagcugaauuu

SEQ ID NO: 218778 - RNA, 32 nt, Human
uaauacaguaaauuuguagccaguuguagaaa

SEQ ID NO: 218779 - RNA, 32 nt, Human
uaauacauagcccuauguaccaaaaaguaagg

SEQ ID NO: 218780 - RNA, 32 nt, Human
uaauacauagguguguuccaggauuuguucag

SEQ ID NO: 218781 - RNA, 32 nt, Human
uaauacaucaugaacugcagguuguggaagaa

SEQ ID NO: 218782 - RNA, 32 nt, Human
uaauacaugccuguggucucagcuacucggga

SEQ ID NO: 218783 - RNA, 27 nt, Human
uaauaccaaacuugaaaaagcggccgc

SEQ ID NO: 218784 - RNA, 32 nt, Human
uaauaccaacagcuaucguuucugaccauuua

SEQ ID NO: 218785 - RNA, 32 nt, Human
uaauaccacaguucuaaaugugcacuguuggc

SEQ ID NO: 218786 - RNA, 32 nt, Human
uaauaccacugcagagaauccaucuaaaagua

SEQ ID NO: 218787 - RNA, 32 nt, Human
uaauaccagcacuuugggaggcugaggcaggc

SEQ ID NO: 218788 - RNA, 32 nt, Human
uaauaccagcgcuuugggaggcugaggcagga

SEQ ID NO: 218789 - RNA, 32 nt, Human
uaauaccagcguuuugggaggcugagauggga

SEQ ID NO: 218790 - RNA, 32 nt, Human
uaauaccagcuacucaggaggcugaggcagga

SEQ ID NO: 218791 - RNA, 32 nt, Human
uaauaccagcuacucagguggcugaggcauaa

SEQ ID NO: 218792 - RNA, 32 nt, Human
uaauaccagcuacuccggaggcugaggcagga

SEQ ID NO: 218793 - RNA, 32 nt, Human
uaauaccagcucucugggaggcugaggcgggu

SEQ ID NO: 218794 - RNA, 32 nt, Human
uaauaccgugcuauuucagauaugggugagga

SEQ ID NO: 218795 - RNA, 32 nt, Human
uaauaccuauucuucaaccaccucgguuacuc

SEQ ID NO: 218796 - RNA, 32 nt, Human
uaauaccuguuuaauauugucuuccuaauugg

SEQ ID NO: 218797 - RNA, 32 nt, Human
uaauaccuuacuaaauacuucgucucauuagu

SEQ ID NO: 218798 - RNA, 32 nt, Human
uaauacgagaaauuugaugagagaggcgggcc

SEQ ID NO: 218799 - RNA, 32 nt, Human
uaauacuaacuacuacauacucgguacaaagu

SEQ ID NO: 218800 - RNA, 18 nt, Human
uaauacuacuagcuucca

SEQ ID NO: 218801 - RNA, 32 nt, Human
uaauacuauaaauacuugauuguaaacuaaau

SEQ ID NO: 218802 - RNA, 32 nt, Human
uaauacucaaaccauuguaaaguugcugacua

SEQ ID NO: 218803 - RNA, 32 nt, Human
uaauacucuccucgacaagucaugcuguuuua

SEQ ID NO: 218804 - RNA, 32 nt, Human
uaauacugagcaugaaaaaucauagcaaggca

SEQ ID NO: 218805 - RNA, 32 nt, Human
uaauacugaugugauggaugcauuuguuuugc

SEQ ID NO: 218806 - RNA, 25 nt, Human
uaauacugccuucugccuuugggac

SEQ ID NO: 218807 - RNA, 32 nt, Human
uaauacuguggcuuauaccugagccacacauc

SEQ ID NO: 218808 - RNA, 32 nt, Human
uaauacuuaaggcacuauggcacuuagcuuug

SEQ ID NO: 218809 - RNA, 32 nt, Human
uaauacuucaaacuggaaagucaccuggucga

SEQ ID NO: 218810 - RNA, 25 nt, Human
uaauagaaaugcuuuuuauugagga

SEQ ID NO: 218811 - RNA, 32 nt, Human
uaauagaaccucuuuccaccacugccuucauc

SEQ ID NO: 218812 - RNA, 32 nt, Human
uaauagaauggcacuguaaguguuuauuauuu

SEQ ID NO: 218813 - RNA, 32 nt, Human
uaauagaccugguacaugguacacacaccccc

SEQ ID NO: 218814 - RNA, 32 nt, Human
uaauagagaagaaaggacagcuuccuaugggg

SEQ ID NO: 218815 - RNA, 32 nt, Human
uaauagagacaggguuucacaauguugaccag

SEQ ID NO: 218816 - RNA, 32 nt, Human
uaauagagacaggguuucaccauguuagccac

SEQ ID NO: 218817 - RNA, 32 nt, Human
uaauagagacaggguuucaccauguuagccag

SEQ ID NO: 218818 - RNA, 32 nt, Human
uaauagagacggaguuucaccauguugaccag

SEQ ID NO: 218819 - RNA, 32 nt, Human
uaauagagacgggguuucaccauguuagccag

SEQ ID NO: 218820 - RNA, 32 nt, Human
uaauagagacgggguuucaccauguuggccag

SEQ ID NO: 218821 - RNA, 32 nt, Human
uaauagagacgggguuucacuguguuagccag

SEQ ID NO: 218822 - RNA, 32 nt, Human
uaauagagacgggguuucacuuuguuagccag

SEQ ID NO: 218823 - RNA, 32 nt, Human
uaauagagacgggguuucaucauguuggccag

SEQ ID NO: 218824 - RNA, 32 nt, Human
uaauagagacgggguuucgccauuuggccagg

SEQ ID NO: 218825 - RNA, 32 nt, Human
uaauagagacgggguuuuaccauguuggccag

SEQ ID NO: 218826 - RNA, 32 nt, Human
uaauagagacuggguuucaccauguugaccgg

SEQ ID NO: 218827 - RNA, 32 nt, Human
uaauagagaggggguuuuuccauguuggccag

SEQ ID NO: 218828 - RNA, 32 nt, Human
uaauagagaugagguuucaccaugauggccag

SEQ ID NO: 218829 - RNA, 32 nt, Human
uaauagagaugggauuucaucauguuggcuag

SEQ ID NO: 218830 - RNA, 32 nt, Human
uaauagagaugggguuucaccauguuggccag

SEQ ID NO: 218831 - RNA, 32 nt, Human
uaauagagaugggguuucaccauguugguuag

SEQ ID NO: 218832 - RNA, 32 nt, Human
uaauagagaugggguuucgccauguuggccag

SEQ ID NO: 218833 - RNA, 32 nt, Human
uaauagagaugggguuuugccauguuggccag

SEQ ID NO: 218834 - RNA, 32 nt, Human
uaauagagccaggguuuugccauguuggccag

SEQ ID NO: 218835 - RNA, 32 nt, Human
uaauagaggcgggguuucaucauguugaacuc

SEQ ID NO: 218836 - RNA, 32 nt, Human
uaauagaggcugaggagauugcaggggaaaca

SEQ ID NO: 218837 - RNA, 32 nt, Human
uaauagagguaggaauccagagccagagaggu

SEQ ID NO: 218838 - RNA, 32 nt, Human
uaauagagugguacauuuguuacaacugauga

SEQ ID NO: 218839 - RNA, 32 nt, Human
uaauagauacaggguuucaccacguugcucag

SEQ ID NO: 218840 - RNA, 32 nt, Human
uaauagauaugggguuucgccauguuggccag

SEQ ID NO: 218841 - RNA, 32 nt, Human
uaauagauuuggaauuuuugaaaugaaaugaa

SEQ ID NO: 218842 - RNA, 32 nt, Human
uaauagcaagagacagagggggcugggagugu

SEQ ID NO: 218843 - RNA, 21 nt, Human
uaauagcaagugcaacuaacu

SEQ ID NO: 218844 - RNA, 32 nt, Human
uaauagcacugggauuuugccucccagccaaa

SEQ ID NO: 218845 - RNA, 32 nt, Human
uaauagcagacugcacaugagcagagugacau

SEQ ID NO: 218846 - RNA, 32 nt, Human
uaauagcagcuacucgggaggcugaggcagga

SEQ ID NO: 218847 - RNA, 32 nt, Human
uaauagcagcuacugagguggcugaggcacaa

SEQ ID NO: 218848 - RNA, 18 nt, Human
uaauagcagggucagacu

SEQ ID NO: 218849 - RNA, 18 nt, Human
uaauagcauagacuggac

SEQ ID NO: 218850 - RNA, 18 nt, Human
uaauagcaugauugagac

SEQ ID NO: 218851 - RNA, 21 nt, Human
uaauagcaugucaacuggacu

SEQ ID NO: 218852 - RNA, 31 nt, Human
uaauagcauucucucugacauuuaaaaauaa

SEQ ID NO: 218853 - RNA, 32 nt, Human
uaauagccacaaguucuuguuuagagaccaga

SEQ ID NO: 218854 - RNA, 32 nt, Human
uaauagccauggauugcugugccucucgaggc

SEQ ID NO: 218855 - RNA, 32 nt, Human
uaauagccauuugaagaaggaggaauuuuaga

SEQ ID NO: 218856 - RNA, 32 nt, Human
uaauagccucaccuucccuaguucuuugcauu

SEQ ID NO: 218857 - RNA, 32 nt, Human
uaauagccuuuccaaagaaaugagggcaugau

SEQ ID NO: 218858 - RNA, 32 nt, Human
uaauagccuuuccuuacuguuguuugguucug

SEQ ID NO: 218859 - RNA, 32 nt, Human
uaauagcuauagucucuucagcauuuuguuua

SEQ ID NO: 218860 - RNA, 32 nt, Human
uaauagcuguuuaacaaauuagucuuugcuga

SEQ ID NO: 218861 - RNA, 32 nt, Human
uaauaggaaaacaaaacccaaagcuuuucaaa

SEQ ID NO: 218862 - RNA, 32 nt, Human
uaauaggagcuuccagcucuaauaaaacagcu

SEQ ID NO: 218863 - RNA, 32 nt, Human
uaauaggagggguuaagguucaugagaaccau

SEQ ID NO: 218864 - RNA, 32 nt, Human
uaauaggcacuuaaguggcuuccaauuuuugg

SEQ ID NO: 218865 - RNA, 32 nt, Human
uaauaggcuagggagagaggggugcugucugc

SEQ ID NO: 218866 - RNA, 32 nt, Human
uaauaggcugggagacugaagacucagcccgg

SEQ ID NO: 218867 - RNA, 32 nt, Human
uaauagggaagccacacucaaugagcaucucu

SEQ ID NO: 218868 - RNA, 32 nt, Human
uaauaggggcagacacaacagcguggcuuaga

SEQ ID NO: 218869 - RNA, 32 nt, Human
uaauagguuucugacuuuuguggaucauuuug

SEQ ID NO: 218870 - RNA, 32 nt, Human
uaauaguauacaaaagcuauuuaauucuuuaa

SEQ ID NO: 218871 - RNA, 32 nt, Human
uaauaguauuagaacucauucccugaacugau

SEQ ID NO: 218872 - RNA, 32 nt, Human
uaauagugaucucaauaccacacccucaugga

SEQ ID NO: 218873 - RNA, 32 nt, Human
uaauagugaugaucguauguugcugucuccau

SEQ ID NO: 218874 - RNA, 32 nt, Human
uaauagugcaggaagggaugagcuuuugauuu

SEQ ID NO: 218875 - RNA, 32 nt, Human
uaauagugguuuugcaguguacuggcuugaau

SEQ ID NO: 218876 - RNA, 32 nt, Human
uaauagugucuucuccccggguuugguggccu

SEQ ID NO: 218877 - RNA, 32 nt, Human
uaauagugugaugaaccauucuucugaagguu

SEQ ID NO: 218878 - RNA, 32 nt, Human
uaauaguuucauauuuucuccaucucuuuuug

SEQ ID NO: 218879 - RNA, 32 nt, Human
uaauauaaacuguguucauuacacugcugaua

SEQ ID NO: 218880 - RNA, 32 nt, Human
uaauauaacugauaccuugagagauggcugga

SEQ ID NO: 218881 - RNA, 32 nt, Human
uaauauaccuucagaauaucaaagcgaaaacu

SEQ ID NO: 218882 - RNA, 32 nt, Human
uaauauaguagagaucuuccaugaagauaaca

SEQ ID NO: 218883 - RNA, 32 nt, Human
uaauauaguagggguugaagaaaacaaaauag

SEQ ID NO: 218884 - RNA, 32 nt, Human
uaauauaucagcagcauguaucugccaaucau

SEQ ID NO: 218885 - RNA, 32 nt, Human
uaauauauguagcacacacacauagauguaua

SEQ ID NO: 218886 - RNA, 32 nt, Human
uaauauauucggcccauauuuuguguguuugg

SEQ ID NO: 218887 - RNA, 32 nt, Human
uaauaucaaacaaucccuuuaagaacuuauua

SEQ ID NO: 218888 - RNA, 32 nt, Human
uaauaucagcuacucaggaggcugaggcagga

SEQ ID NO: 218889 - RNA, 32 nt, Human
uaauaucccauggcuaaaaggaagauccuaag

SEQ ID NO: 218890 - RNA, 32 nt, Human
uaauaucccuauccagugcuugcccuuggaau

SEQ ID NO: 218891 - RNA, 32 nt, Human
uaauaucccuccccauucuucucuuccccucu

SEQ ID NO: 218892 - RNA, 32 nt, Human
uaauauccucaccuuuccuucucaccuguccu

SEQ ID NO: 218893 - RNA, 32 nt, Human
uaauaucucuguccccuugauccuggcauucu

SEQ ID NO: 218894 - RNA, 32 nt, Human
uaauaucugaccuugccuccugacugaugguc

SEQ ID NO: 218895 - RNA, 32 nt, Human
uaauaugaaauguuaacggcucagagcuaacg

SEQ ID NO: 218896 - RNA, 32 nt, Human
uaauaugaagaccaaaugauagaacuguacug

SEQ ID NO: 218897 - RNA, 32 nt, Human
uaauaugagcacaucaagguugacuucucauc

SEQ ID NO: 218898 - RNA, 31 nt, Human
uaauaugagcucuucugacaacuguagacac

SEQ ID NO: 218899 - RNA, 32 nt, Human
uaauaugccaacacccuucucggaggcucagg

SEQ ID NO: 218900 - RNA, 32 nt, Human
uaauaugcuacuucuguguauguuguguaugg

SEQ ID NO: 218901 - RNA, 32 nt, Human
uaauaugcucugggcuggagaaaugaaauccu

SEQ ID NO: 218902 - RNA, 32 nt, Human
uaauaugcugccaaauuuuggccaaaguguua

SEQ ID NO: 218903 - RNA, 32 nt, Human
uaauaugcuugcaaacauuacugcugcguuau

SEQ ID NO: 218904 - RNA, 32 nt, Human
uaauauggagaauccuuugucuuccacucacu

SEQ ID NO: 218905 - RNA, 32 nt, Human
uaauauggagcuuucauaaaaaugggaugcau

SEQ ID NO: 218906 - RNA, 32 nt, Human
uaauauggauuucugcuccuuguugcuugcua

SEQ ID NO: 218907 - RNA, 32 nt, Human
uaauauggcauuugaauuccauuuuucugaag

SEQ ID NO: 218908 - RNA, 32 nt, Human
uaauauggguuagauaggucaugacgguaggg

SEQ ID NO: 218909 - RNA, 29 nt, Human
uaauauguggugcugggaaaacuggcuag

SEQ ID NO: 218910 - RNA, 32 nt, Human
uaauauguugacuguuguauguuuggacuaau

SEQ ID NO: 218911 - RNA, 32 nt, Human
uaauauguugucuuuuauauuuuuauuuaaau

SEQ ID NO: 218912 - RNA, 32 nt, Human
uaauauuacagaaccaguucugggaccaccuu

SEQ ID NO: 218913 - RNA, 32 nt, Human
uaauauuacaggaaauucuuaggauauaccau

SEQ ID NO: 218914 - RNA, 32 nt, Human
uaauauuagccugaugcagauaccaaagauaa

SEQ ID NO: 218915 - RNA, 32 nt, Human
uaauauucaaugcccagccaaagacccuaaau

SEQ ID NO: 218916 - RNA, 32 nt, Human
uaauauucagauacauuaucuuggcugcuaac

SEQ ID NO: 218917 - RNA, 32 nt, Human
uaauauucccuaauguguucaugccagaauuc

SEQ ID NO: 218918 - RNA, 32 nt, Human
uaauauucuauagccuauuuucuuuuauaaau

SEQ ID NO: 218919 - RNA, 32 nt, Human
uaauauucucagaacuuauggcauuuuacuau

SEQ ID NO: 218920 - RNA, 32 nt, Human
uaauauucuuuccccucuggccuucuuacagu

SEQ ID NO: 218921 - RNA, 32 nt, Human
uaauauugagugauccaugaaguagguuuuca

SEQ ID NO: 218922 - RNA, 32 nt, Human
uaauauugauuucugcccucagcuucaaauaa

SEQ ID NO: 218923 - RNA, 32 nt, Human
uaauauuggccuuggggcucuccagcccuuug

SEQ ID NO: 218924 - RNA, 32 nt, Human
uaauauuuaguaggaguauaugaaaggauugc

SEQ ID NO: 218925 - RNA, 32 nt, Human
uaauauuuagugggagaccauaaugugucagc

SEQ ID NO: 218926 - RNA, 17 nt, Human
uaauauuugauggcagu

SEQ ID NO: 218927 - RNA, 32 nt, Human
uaauauuuggcauggaauaaugccuagccuua

SEQ ID NO: 218928 - RNA, 32 nt, Human
uaauauuugugcugaaaauauguuucaguauu

SEQ ID NO: 218929 - RNA, 32 nt, Human
uaauauuuugaaaauuuucucaguuaaauuuc

SEQ ID NO: 218930 - RNA, 32 nt, Human
uaauauuuuugaaagaguucuuuuagguuaau

SEQ ID NO: 218931 - RNA, 32 nt, Human
uaaucaaaggcugaaaucucugccugaccugg

SEQ ID NO: 218932 - RNA, 32 nt, Human
uaaucaaaguacugcugaacugugagugcagu

SEQ ID NO: 218933 - RNA, 32 nt, Human
uaaucaaaucuauugacaguaucugcaguucu

SEQ ID NO: 218934 - RNA, 32 nt, Human
uaaucaaauugcuucugacuggaugguauuug

SEQ ID NO: 218935 - RNA, 32 nt, Human
uaaucaaccacccucccuucccaaaccaccca

SEQ ID NO: 218936 - RNA, 32 nt, Human
uaaucaaccuuuaugugacucucaccuucuga

SEQ ID NO: 218937 - RNA, 32 nt, Human
uaaucaagaagagcaaagcauggauucaaacu

SEQ ID NO: 218938 - RNA, 32 nt, Human
uaaucaagaccagacuguuucuugucacugga

SEQ ID NO: 218939 - RNA, 32 nt, Human
uaaucaagcaugaagaggaacagaggugaugu

SEQ ID NO: 218940 - RNA, 31 nt, Human
uaaucaaggaucucuuccacauuccuccuuc

SEQ ID NO: 218941 - RNA, 32 nt, Human
uaaucaaggccccagaguguguaugcuuccag

SEQ ID NO: 218942 - RNA, 32 nt, Human
uaaucaagggggcagauagcagaggaaaauaa

SEQ ID NO: 218943 - RNA, 31 nt, Human
uaaucaauaaaguaugucuguugaagcaagc

SEQ ID NO: 218944 - RNA, 32 nt, Human
uaaucaauuacccaaaggcugcaccugccgug

SEQ ID NO: 218945 - RNA, 32 nt, Human
uaaucacaacacuuugggaggcugaggcgggc

SEQ ID NO: 218946 - RNA, 32 nt, Human
uaaucacaacacuuugggaggcugagguggga

SEQ ID NO: 218947 - RNA, 32 nt, Human
uaaucacaagaaggaggcaggaagggagaguc

SEQ ID NO: 218948 - RNA, 32 nt, Human
uaaucacaccacugcacuccagccugggcaac

SEQ ID NO: 218949 - RNA, 32 nt, Human
uaaucacaccacugcacuccagcuugggggau

SEQ ID NO: 218950 - RNA, 32 nt, Human
uaaucacagcacuucgggaggcugaaguggga

SEQ ID NO: 218951 - RNA, 32 nt, Human
uaaucacagcacuuugggaggcugaggcgcgu

SEQ ID NO: 218952 - RNA, 32 nt, Human
uaaucacagcacuuugggaggcugaggugggc

SEQ ID NO: 218953 - RNA, 32 nt, Human
uaaucacagcauguaccgggacccggggugca

SEQ ID NO: 218954 - RNA, 32 nt, Human
uaaucacagcuacucgggaggcugaggcagag

SEQ ID NO: 218955 - RNA, 32 nt, Human
uaaucacagcuacuugggaggcugagauggga

SEQ ID NO: 218956 - RNA, 32 nt, Human
uaaucacagcuacuugggaggcugaggcagga

SEQ ID NO: 218957 - RNA, 32 nt, Human
uaaucacagcuacuugggaggcugaggcauga

SEQ ID NO: 218958 - RNA, 32 nt, Human
uaaucacagguccagagagcuuuauggaagcg

SEQ ID NO: 218959 - RNA, 32 nt, Human
uaaucacagugacucaggaggcugaggugaga

SEQ ID NO: 218960 - RNA, 32 nt, Human
uaaucacauaucuggggcaggccuagugccaa

SEQ ID NO: 218961 - RNA, 32 nt, Human
uaaucacaucaguuuggcaaucuaagaugucu

SEQ ID NO: 218962 - RNA, 32 nt, Human
uaaucaccaacccaucaacaucaagccucccc

SEQ ID NO: 218963 - RNA, 32 nt, Human
uaaucacccacugauuaguggcagagcguagg

SEQ ID NO: 218964 - RNA, 32 nt, Human
uaaucacccagagggagcuggucuccagccag

SEQ ID NO: 218965 - RNA, 32 nt, Human
uaaucacgccacugcacuccagccugggcugc

SEQ ID NO: 218966 - RNA, 32 nt, Human
uaaucacuaggggaagaaaaaguaggccuacc

SEQ ID NO: 218967 - RNA, 24 nt, Human
uaaucacuauaaaaagcaaaagua

SEQ ID NO: 218968 - RNA, 32 nt, Human
uaaucacucagugcccuuagcuagccugacua

SEQ ID NO: 218969 - RNA, 32 nt, Human
uaaucacugcacuccaaccuggcaacagagug

SEQ ID NO: 218970 - RNA, 32 nt, Human
uaaucagaaaugcagaagccaccugccccaca

SEQ ID NO: 218971 - RNA, 32 nt, Human
uaaucagaacuaccuggcaucuuccugaacaa

SEQ ID NO: 218972 - RNA, 32 nt, Human
uaaucagaagcuaagcugggugcaguggcuca

SEQ ID NO: 218973 - RNA, 32 nt, Human
uaaucagaaguuucacuuguuucucaguuauu

SEQ ID NO: 218974 - RNA, 32 nt, Human
uaaucagagacacaaucauagcacaccacagc

SEQ ID NO: 218975 - RNA, 23 nt, Human
uaaucagcaauauugccugugcu

SEQ ID NO: 218976 - RNA, 32 nt, Human
uaaucagcauggacuguguucaggacacaggg

SEQ ID NO: 218977 - RNA, 32 nt, Human
uaaucagcccaggauggagggucuguguugug

SEQ ID NO: 218978 - RNA, 32 nt, Human
uaaucagcucaauggacccucugccuuaucac

SEQ ID NO: 218979 - RNA, 32 nt, Human
uaaucaggaggaagaggaaggaaggacuuacc

SEQ ID NO: 218980 - RNA, 32 nt, Human
uaaucaggcaggugguguuugcucuuagguga

SEQ ID NO: 218981 - RNA, 32 nt, Human
uaaucagggccugagugcuuuaccuuuaaaau

SEQ ID NO: 218982 - RNA, 32 nt, Human
uaaucaguaaacagcagcuacugugugcacaa

SEQ ID NO: 218983 - RNA, 32 nt, Human
uaaucagucccuuuuugcuuucuuuuacgacc

SEQ ID NO: 218984 - RNA, 32 nt, Human
uaaucaguggugcuuuuguaccuagguuuuau

SEQ ID NO: 218985 - RNA, 32 nt, Human
uaaucauacaaacuagaauacugcuagucucc

SEQ ID NO: 218986 - RNA, 32 nt, Human
uaaucauagcauuaugggaggcugaggcgggc

SEQ ID NO: 218987 - RNA, 32 nt, Human
uaaucauauccaggaguuugcaagaaacaggu

SEQ ID NO: 218988 - RNA, 32 nt, Human
uaaucauaucuuuuaauuguguauuuaagaaa

SEQ ID NO: 218989 - RNA, 32 nt, Human
uaaucaucacagacuugaguuugcuuccuaaa

SEQ ID NO: 218990 - RNA, 32 nt, Human
uaaucaucacauaaauucaaaugcaaaaacca

SEQ ID NO: 218991 - RNA, 32 nt, Human
uaaucaucagguuuacucagugaaaucauauu

SEQ ID NO: 218992 - RNA, 32 nt, Human
uaaucaucuucucuuuuuccagaauuuggaag

SEQ ID NO: 218993 - RNA, 32 nt, Human
uaaucaugccacugcauucuagcuuugauggc

SEQ ID NO: 218994 - RNA, 32 nt, Human
uaaucaugccacuguacuccagccugggugac

SEQ ID NO: 218995 - RNA, 32 nt, Human
uaaucaugcccuucacugacagucuccuuaac

SEQ ID NO: 218996 - RNA, 31 nt, Human
uaaucauggcagccaggaugggugaaugaug

SEQ ID NO: 218997 - RNA, 30 nt, Human
uaaucaugucccugguggaggccaucagcc

SEQ ID NO: 218998 - RNA, 22 nt, Human
uaaucaugucggugucauguca

SEQ ID NO: 218999 - RNA, 32 nt, Human
uaaucaugugcuccucuccuucccaaggaacc

SEQ ID NO: 219000 - RNA, 20 nt, Human
uaaucauguucugguauguc

SEQ ID NO: 219001 - RNA, 32 nt, Human
uaaucauuaguuuuagaggcauuguuaguuua

SEQ ID NO: 219002 - RNA, 32 nt, Human
uaaucauucauccucacaguggcaauaaucac

SEQ ID NO: 219003 - RNA, 32 nt, Human
uaaucauugccaccucuucgcuacaugaacua

SEQ ID NO: 219004 - RNA, 19 nt, Human
uaaucauuggauuuaggga

SEQ ID NO: 219005 - RNA, 32 nt, Human
uaaucauuucaguccugugcugugagugauau

SEQ ID NO: 219006 - RNA, 32 nt, Human
uaaucauuugggaggcauggcuguaauucuuu

SEQ ID NO: 219007 - RNA, 32 nt, Human
uaauccaaaacaccuuccgccucccagagcuu

SEQ ID NO: 219008 - RNA, 32 nt, Human
uaauccaaaguagagauguuauuacucaauuc

SEQ ID NO: 219009 - RNA, 32 nt, Human
uaauccaaaucucuguggcuucaugcuuguau

SEQ ID NO: 219010 - RNA, 32 nt, Human
uaauccaacacacaccugcaaugauuacugug

SEQ ID NO: 219011 - RNA, 32 nt, Human
uaauccaagauacucaggaggcugaggcagga

SEQ ID NO: 219012 - RNA, 32 nt, Human
uaauccaagcacuuugagaggcugaggcgggu

SEQ ID NO: 219013 - RNA, 32 nt, Human
uaauccaagcuacuggggaggcugaggcagga

SEQ ID NO: 219014 - RNA, 28 nt, Human
uaauccacaagugcuucucauauugccc

SEQ ID NO: 219015 - RNA, 32 nt, Human
uaauccacccugggggcaauagccauauugcc

SEQ ID NO: 219016 - RNA, 32 nt, Human
uaauccaccucuucugcuucaguugggugaca

SEQ ID NO: 219017 - RNA, 32 nt, Human
uaauccacugcaugguuugauggccaccaucu

SEQ ID NO: 219018 - RNA, 32 nt, Human
uaauccacuugacuaagugucuggaagagcua

SEQ ID NO: 219019 - RNA, 32 nt, Human
uaauccagaggcauaagaguccugguccaaag

SEQ ID NO: 219020 - RNA, 32 nt, Human
uaauccagcuacucaggaggcugaggcaggau

SEQ ID NO: 219021 - RNA, 32 nt, Human
uaauccagcuacuccagcgccugaggcaggag

SEQ ID NO: 219022 - RNA, 32 nt, Human
uaauccagcuacucgggaggcugaggcaggag

SEQ ID NO: 219023 - RNA, 32 nt, Human
uaauccagcuacuugggaggcugaagcaggag

SEQ ID NO: 219024 - RNA, 32 nt, Human
uaauccagcuacuugggaggcugaggcaggaa

SEQ ID NO: 219025 - RNA, 25 nt, Human
uaauccagcucaucagucuacuagu

SEQ ID NO: 219026 - RNA, 32 nt, Human
uaauccaggcgugagaguguucucuugggaaa

SEQ ID NO: 219027 - RNA, 32 nt, Human
uaauccaguaacccuguuguucaucaauagca

SEQ ID NO: 219028 - RNA, 32 nt, Human
uaauccaguucugcaaaaaugaccuauaaauu

SEQ ID NO: 219029 - RNA, 32 nt, Human
uaauccauacagaaaaugaauguaauguggau

SEQ ID NO: 219030 - RNA, 32 nt, Human
uaauccauguacauaguaaaucauuuuaaaag

SEQ ID NO: 219031 - RNA, 32 nt, Human
uaauccauuuucacuaaaagugugugaaaccu

SEQ ID NO: 219032 - RNA, 32 nt, Human
uaaucccaaauacucgggaggcugaggcagga

SEQ ID NO: 219033 - RNA, 32 nt, Human
uaaucccaacaauuugggaggcugaggcaggc

SEQ ID NO: 219034 - RNA, 32 nt, Human
uaaucccaacacuuuaggaggcugaggcuggu

SEQ ID NO: 219035 - RNA, 32 nt, Human
uaaucccaacacuuugagaggcugaggcagga

SEQ ID NO: 219036 - RNA, 32 nt, Human
uaaucccaacacuuugagaggcugagguggga

SEQ ID NO: 219037 - RNA, 32 nt, Human
uaaucccaacacuuuggaaggcugaggcggga

SEQ ID NO: 219038 - RNA, 32 nt, Human
uaaucccaacacuuuggaaggcugaggcgggc

SEQ ID NO: 219039 - RNA, 32 nt, Human
uaaucccaacacuuugggaggcugaggaggaa

SEQ ID NO: 219040 - RNA, 32 nt, Human
uaaucccaacacuuugggaggcugaggcagga

SEQ ID NO: 219041 - RNA, 32 nt, Human
uaaucccaacacuuugggaggcugaggcaggc

SEQ ID NO: 219042 - RNA, 32 nt, Human
uaaucccaacacuuugggaggcugaggccgga

SEQ ID NO: 219043 - RNA, 32 nt, Human
uaaucccaacacuuugggaggcugaggugggc

SEQ ID NO: 219044 - RNA, 32 nt, Human
uaaucccaacuaccuggaaggcugaggcagaa

SEQ ID NO: 219045 - RNA, 32 nt, Human
uaaucccaacuacucaggaggcugaggcagga

SEQ ID NO: 219046 - RNA, 32 nt, Human
uaaucccaacuacucaggaggcugaggcuaga

SEQ ID NO: 219047 - RNA, 32 nt, Human
uaaucccaacuacucaggaggcugcgacagga

SEQ ID NO: 219048 - RNA, 32 nt, Human
uaaucccaacuacucuggaggcugaggcagga

SEQ ID NO: 219049 - RNA, 32 nt, Human
uaaucccaacuacuugggaggcugaggcagga

SEQ ID NO: 219050 - RNA, 32 nt, Human
uaaucccaagacaaacauucccgcugcucgaa

SEQ ID NO: 219051 - RNA, 32 nt, Human
uaaucccaauacuuugggaggcugaggcaagu

SEQ ID NO: 219052 - RNA, 32 nt, Human
uaaucccaauacuuuggguggcugaggugaga

SEQ ID NO: 219053 - RNA, 32 nt, Human
uaaucccaccauuuugggaggcugaggcggag

SEQ ID NO: 219054 - RNA, 32 nt, Human
uaaucccaccuacucaggaggcugaggcaaga

SEQ ID NO: 219055 - RNA, 32 nt, Human
uaaucccaccuacucaggaggcugaggcagga

SEQ ID NO: 219056 - RNA, 32 nt, Human
uaaucccaccuacucgagaggcugaggcagca

SEQ ID NO: 219057 - RNA, 32 nt, Human
uaaucccaccuacucgggaggcugaggcagga

SEQ ID NO: 219058 - RNA, 32 nt, Human
uaaucccaccuacuugguaggcugaggcagga

SEQ ID NO: 219059 - RNA, 21 nt, Human
uaaucccaccuuuuggcccua

SEQ ID NO: 219060 - RNA, 32 nt, Human
uaaucccacuacugcauuccagccugggugga

SEQ ID NO: 219061 - RNA, 32 nt, Human
uaaucccacugcauccagccaauaggagccca

SEQ ID NO: 219062 - RNA, 32 nt, Human
uaaucccacugcauuccagccugggcaacagc

SEQ ID NO: 219063 - RNA, 32 nt, Human
uaaucccagaacuaugugaggcugaggcaggu

SEQ ID NO: 219064 - RNA, 32 nt, Human
uaaucccagaacuuuaggaggcugagguggga

SEQ ID NO: 219065 - RNA, 32 nt, Human
uaaucccagaacuuuggaaggccgaggugggu

SEQ ID NO: 219066 - RNA, 32 nt, Human
uaaucccagaacuuugggaggcugaggugggu

SEQ ID NO: 219067 - RNA, 32 nt, Human
uaaucccagaauuuuaggaggcugagguggga

SEQ ID NO: 219068 - RNA, 32 nt, Human
uaaucccagauacucaggaggcugaggcagga

SEQ ID NO: 219069 - RNA, 32 nt, Human
uaaucccagauacucaggaggcugagguagga

SEQ ID NO: 219070 - RNA, 32 nt, Human
uaaucccagauacucgggaggcugaggcauga

SEQ ID NO: 219071 - RNA, 32 nt, Human
uaaucccagauacuugggaggcugaggcagga

SEQ ID NO: 219072 - RNA, 32 nt, Human
uaaucccagauagucaggaggcugaggcagga

SEQ ID NO: 219073 - RNA, 32 nt, Human
uaaucccagcaaguugggaggcugaggcgggc

SEQ ID NO: 219074 - RNA, 32 nt, Human
uaaucccagcaauuugggaggcugagaagggc

SEQ ID NO: 219075 - RNA, 32 nt, Human
uaaucccagcaauuugggaggcugagacagga

SEQ ID NO: 219076 - RNA, 32 nt, Human
uaaucccagcaauuugggaggcugaggcggau

SEQ ID NO: 219077 - RNA, 32 nt, Human
uaaucccagcaauuugggaggcugaggcggga

SEQ ID NO: 219078 - RNA, 32 nt, Human
uaaucccagcaauuugggaggcugaggcuggc

SEQ ID NO: 219079 - RNA, 32 nt, Human
uaaucccagcaauuugggaggcugaggugggc

SEQ ID NO: 219080 - RNA, 32 nt, Human
uaaucccagcaccuugggaggcugaggcgggc

SEQ ID NO: 219081 - RNA, 32 nt, Human
uaaucccagcaccuugggaggcugagguggga

SEQ ID NO: 219082 - RNA, 32 nt, Human
uaaucccagcacguugggaggcugaggcgggc

SEQ ID NO: 219083 - RNA, 32 nt, Human
uaaucccagcacguugggaggcugaggcggua

SEQ ID NO: 219084 - RNA, 32 nt, Human
uaaucccagcacuaugggaggcugaggcaagc

SEQ ID NO: 219085 - RNA, 32 nt, Human
uaaucccagcacuaugggaggcugaggugaga

SEQ ID NO: 219086 - RNA, 32 nt, Human
uaaucccagcacuaugggaggcugaggugggc

SEQ ID NO: 219087 - RNA, 32 nt, Human
uaaucccagcacucuggaaggcugaggugggu

SEQ ID NO: 219088 - RNA, 32 nt, Human
uaaucccagcacucugggaggccgaggcaggc

SEQ ID NO: 219089 - RNA, 32 nt, Human
uaaucccagcacucugggaggccgagguggau

SEQ ID NO: 219090 - RNA, 32 nt, Human
uaaucccagcacucugggaggccgaggugggc

SEQ ID NO: 219091 - RNA, 32 nt, Human
uaaucccagcacucugggaggccgaggugggu

SEQ ID NO: 219092 - RNA, 32 nt, Human
uaaucccagcacucugggaggcugagacaggu

SEQ ID NO: 219093 - RNA, 32 nt, Human
uaaucccagcacucugggaggcugaggcgggc

SEQ ID NO: 219094 - RNA, 32 nt, Human
uaaucccagcacucugggaggcugaggcgggu

SEQ ID NO: 219095 - RNA, 32 nt, Human
uaaucccagcacucugggaggcugaggugggc

SEQ ID NO: 219096 - RNA, 32 nt, Human
uaaucccagcacugugagaggcugaggcggga

SEQ ID NO: 219097 - RNA, 32 nt, Human
uaaucccagcacugugggaggccgaggcagac

SEQ ID NO: 219098 - RNA, 32 nt, Human
uaaucccagcacugugggaggccgaggcggau

SEQ ID NO: 219099 - RNA, 32 nt, Human
uaaucccagcacugugggaggccgaggcgggc

SEQ ID NO: 219100 - RNA, 32 nt, Human
uaaucccagcacugugggaggcugaggcgggu

SEQ ID NO: 219101 - RNA, 32 nt, Human
uaaucccagcacugugggaggcugaggugguu

SEQ ID NO: 219102 - RNA, 32 nt, Human
uaaucccagcacuuagggaggcuggggcgggc

SEQ ID NO: 219103 - RNA, 32 nt, Human
uaaucccagcacuucaggaggccgagguggac

SEQ ID NO: 219104 - RNA, 32 nt, Human
uaaucccagcacuucgggaggccgagaugggc

SEQ ID NO: 219105 - RNA, 32 nt, Human
uaaucccagcacuucgggaggccgaggcaggu

SEQ ID NO: 219106 - RNA, 32 nt, Human
uaaucccagcacuucgggaggccgaggcgggu

SEQ ID NO: 219107 - RNA, 32 nt, Human
uaaucccagcacuucgggaggccgagguaggc

SEQ ID NO: 219108 - RNA, 32 nt, Human
uaaucccagcacuuggagaggcugagguugcg

SEQ ID NO: 219109 - RNA, 32 nt, Human
uaaucccagcacuuggggaagccgagucaggu

SEQ ID NO: 219110 - RNA, 32 nt, Human
uaaucccagcacuuggggaggccgaagugggc

SEQ ID NO: 219111 - RNA, 32 nt, Human
uaaucccagcacuuggggaggccgaggcgggu

SEQ ID NO: 219112 - RNA, 32 nt, Human
uaaucccagcacuuggggaggccguggugaga

SEQ ID NO: 219113 - RNA, 32 nt, Human
uaaucccagcacuuggggaggcugagaugggc

SEQ ID NO: 219114 - RNA, 32 nt, Human
uaaucccagcacuuggggaggcugaggcagga

SEQ ID NO: 219115 - RNA, 32 nt, Human
uaaucccagcacuuuagaucacuugaggucag

SEQ ID NO: 219116 - RNA, 32 nt, Human
uaaucccagcacuuucaaaggcugaggcaggc

SEQ ID NO: 219117 - RNA, 32 nt, Human
uaaucccagcacuuugagaggcugaagagggu

SEQ ID NO: 219118 - RNA, 32 nt, Human
uaaucccagcacuuugagaggcugaggcaggg

SEQ ID NO: 219119 - RNA, 32 nt, Human
uaaucccagcacuuugagaggcugaggccggu

SEQ ID NO: 219120 - RNA, 32 nt, Human
uaaucccagcacuuugagaggcugaggcggga

SEQ ID NO: 219121 - RNA, 32 nt, Human
uaaucccagcacuuugagaggcugaggcgggc

SEQ ID NO: 219122 - RNA, 32 nt, Human
uaaucccagcacuuugagaggcugaggcgggu

SEQ ID NO: 219123 - RNA, 32 nt, Human
uaaucccagcacuuugagaggcugagguggua

SEQ ID NO: 219124 - RNA, 32 nt, Human
uaaucccagcacuuugauaggcugaggcaggu

SEQ ID NO: 219125 - RNA, 32 nt, Human
uaaucccagcacuuugcggggcugaggugguu

SEQ ID NO: 219126 - RNA, 32 nt, Human
uaaucccagcacuuuggaacgcuggguggauu

SEQ ID NO: 219127 - RNA, 32 nt, Human
uaaucccagcacuuuggaaggccgaggcaggc

SEQ ID NO: 219128 - RNA, 32 nt, Human
uaaucccagcacuuuggaaggccgaggcgggc

SEQ ID NO: 219129 - RNA, 32 nt, Human
uaaucccagcacuuuggaaggccgaggcgggu

SEQ ID NO: 219130 - RNA, 32 nt, Human
uaaucccagcacuuuggaaggccgaggcuacg

SEQ ID NO: 219131 - RNA, 32 nt, Human
uaaucccagcacuuuggaaggcugaggagggu

SEQ ID NO: 219132 - RNA, 32 nt, Human
uaaucccagcacuuuggaaggcugaggcaggc

SEQ ID NO: 219133 - RNA, 32 nt, Human
uaaucccagcacuuuggaaggcugaggcaggg

SEQ ID NO: 219134 - RNA, 32 nt, Human
uaaucccagcacuuuggaaggcugaggcgggc

SEQ ID NO: 219135 - RNA, 32 nt, Human
uaaucccagcacuuuggaaggcugaggugggu

SEQ ID NO: 219136 - RNA, 32 nt, Human
uaaucccagcacuuuggaggccgaggcgggua

SEQ ID NO: 219137 - RNA, 32 nt, Human
uaaucccagcacuuuggagggcugaagcagga

SEQ ID NO: 219138 - RNA, 32 nt, Human
uaaucccagcacuuuggcaggccgaggcaggu

SEQ ID NO: 219139 - RNA, 32 nt, Human
uaaucccagcacuuuggcaggccgaggcgggu

SEQ ID NO: 219140 - RNA, 32 nt, Human
uaaucccagcacuuuggcaggcugaggugggc

SEQ ID NO: 219141 - RNA, 32 nt, Human
uaaucccagcacuuugggaacccgaggcaggu

SEQ ID NO: 219142 - RNA, 32 nt, Human
uaaucccagcacuuugggaagccgagggggau

SEQ ID NO: 219143 - RNA, 32 nt, Human
uaaucccagcacuuugggaagccgaggugggc

SEQ ID NO: 219144 - RNA, 32 nt, Human
uaaucccagcacuuugggaagccgagucgggu

SEQ ID NO: 219145 - RNA, 32 nt, Human
uaaucccagcacuuugggaagccgggguagga

SEQ ID NO: 219146 - RNA, 32 nt, Human
uaaucccagcacuuugggaagcugaagcagga

SEQ ID NO: 219147 - RNA, 32 nt, Human
uaaucccagcacuuugggaagcugagaugggu

SEQ ID NO: 219148 - RNA, 32 nt, Human
uaaucccagcacuuugggaagcugaggcagga

SEQ ID NO: 219149 - RNA, 32 nt, Human
uaaucccagcacuuugggaagcugaggugggc

SEQ ID NO: 219150 - RNA, 32 nt, Human
uaaucccagcacuuugggaagcugaggugggu

SEQ ID NO: 219151 - RNA, 32 nt, Human
uaaucccagcacuuugggaagcuguggcaggc

SEQ ID NO: 219152 - RNA, 32 nt, Human
uaaucccagcacuuugggacgccgaagcaggu

SEQ ID NO: 219153 - RNA, 32 nt, Human
uaaucccagcacuuugggaggaggccgagcug

SEQ ID NO: 219154 - RNA, 32 nt, Human
uaaucccagcacuuugggaggccgaaacaggc

SEQ ID NO: 219155 - RNA, 32 nt, Human
uaaucccagcacuuugggaggccgaagcaggc

SEQ ID NO: 219156 - RNA, 32 nt, Human
uaaucccagcacuuugggaggccgaagcaggu

SEQ ID NO: 219157 - RNA, 32 nt, Human
uaaucccagcacuuugggaggccgaagcgggc

SEQ ID NO: 219158 - RNA, 32 nt, Human
uaaucccagcacuuugggaggccgaagggggc

SEQ ID NO: 219159 - RNA, 32 nt, Human
uaaucccagcacuuugggaggccgaaguaagc

SEQ ID NO: 219160 - RNA, 32 nt, Human
uaaucccagcacuuugggaggccgaagugggu

SEQ ID NO: 219161 - RNA, 32 nt, Human
uaaucccagcacuuugggaggccgagaaccac

SEQ ID NO: 219162 - RNA, 32 nt, Human
uaaucccagcacuuugggaggccgagacaggc

SEQ ID NO: 219163 - RNA, 32 nt, Human
uaaucccagcacuuugggaggccgagacaggu

SEQ ID NO: 219164 - RNA, 32 nt, Human
uaaucccagcacuuugggaggccgagacgggc

SEQ ID NO: 219165 - RNA, 32 nt, Human
uaaucccagcacuuugggaggccgagacgggu

SEQ ID NO: 219166 - RNA, 32 nt, Human
uaaucccagcacuuugggaggccgagaugggc

SEQ ID NO: 219167 - RNA, 32 nt, Human
uaaucccagcacuuugggaggccgagaugggu

SEQ ID NO: 219168 - RNA, 32 nt, Human
uaaucccagcacuuugggaggccgagccaagu

SEQ ID NO: 219169 - RNA, 32 nt, Human
uaaucccagcacuuugggaggccgagccgggc

SEQ ID NO: 219170 - RNA, 32 nt, Human
uaaucccagcacuuugggaggccgaggaagga

SEQ ID NO: 219171 - RNA, 32 nt, Human
uaaucccagcacuuugggaggccgaggagggc

SEQ ID NO: 219172 - RNA, 32 nt, Human
uaaucccagcacuuugggaggccgaggagggu

SEQ ID NO: 219173 - RNA, 32 nt, Human
uaaucccagcacuuugggaggccgaggcagga

SEQ ID NO: 219174 - RNA, 32 nt, Human
uaaucccagcacuuugggaggccgaggcaggc

SEQ ID NO: 219175 - RNA, 32 nt, Human
uaaucccagcacuuugggaggccgaggcaggg

SEQ ID NO: 219176 - RNA, 32 nt, Human
uaaucccagcacuuugggaggccgaggcaggu

SEQ ID NO: 219177 - RNA, 32 nt, Human
uaaucccagcacuuugggaggccgaggcaguu

SEQ ID NO: 219178 - RNA, 32 nt, Human
uaaucccagcacuuugggaggccgaggcaugu

SEQ ID NO: 219179 - RNA, 32 nt, Human
uaaucccagcacuuugggaggccgaggccagu

SEQ ID NO: 219180 - RNA, 32 nt, Human
uaaucccagcacuuugggaggccgaggccggc

SEQ ID NO: 219181 - RNA, 32 nt, Human
uaaucccagcacuuugggaggccgaggccggu

SEQ ID NO: 219182 - RNA, 32 nt, Human
uaaucccagcacuuugggaggccgaggcgagc

SEQ ID NO: 219183 - RNA, 32 nt, Human
uaaucccagcacuuugggaggccgaggcgagu

SEQ ID NO: 219184 - RNA, 32 nt, Human
uaaucccagcacuuugggaggccgaggcggac

SEQ ID NO: 219185 - RNA, 32 nt, Human
uaaucccagcacuuugggaggccgaggcggau

SEQ ID NO: 219186 - RNA, 32 nt, Human
uaaucccagcacuuugggaggccgaggcggga

SEQ ID NO: 219187 - RNA, 32 nt, Human
uaaucccagcacuuugggaggccgaggcgggc

SEQ ID NO: 219188 - RNA, 32 nt, Human
uaaucccagcacuuugggaggccgaggcgggg

SEQ ID NO: 219189 - RNA, 32 nt, Human
uaaucccagcacuuugggaggccgaggcgggu

SEQ ID NO: 219190 - RNA, 32 nt, Human
uaaucccagcacuuugggaggccgaggcgguc

SEQ ID NO: 219191 - RNA, 32 nt, Human
uaaucccagcacuuugggaggccgaggcgugu

SEQ ID NO: 219192 - RNA, 32 nt, Human
uaaucccagcacuuugggaggccgaggcuggc

SEQ ID NO: 219193 - RNA, 32 nt, Human
uaaucccagcacuuugggaggccgaggcuggg

SEQ ID NO: 219194 - RNA, 32 nt, Human
uaaucccagcacuuugggaggccgaggcuggu

SEQ ID NO: 219195 - RNA, 32 nt, Human
uaaucccagcacuuugggaggccgaggggagu

SEQ ID NO: 219196 - RNA, 32 nt, Human
uaaucccagcacuuugggaggccgagguaggc

SEQ ID NO: 219197 - RNA, 32 nt, Human
uaaucccagcacuuugggaggccgagguaggu

SEQ ID NO: 219198 - RNA, 32 nt, Human
uaaucccagcacuuugggaggccgaggugaaa

SEQ ID NO: 219199 - RNA, 32 nt, Human
uaaucccagcacuuugggaggccgaggugagc

SEQ ID NO: 219200 - RNA, 32 nt, Human
uaaucccagcacuuugggaggccgaggugagu

SEQ ID NO: 219201 - RNA, 32 nt, Human
uaaucccagcacuuugggaggccgaggugcau

SEQ ID NO: 219202 - RNA, 32 nt, Human
uaaucccagcacuuugggaggccgagguggau

SEQ ID NO: 219203 - RNA, 32 nt, Human
uaaucccagcacuuugggaggccgagguggcc

SEQ ID NO: 219204 - RNA, 32 nt, Human
uaaucccagcacuuugggaggccgagguggga

SEQ ID NO: 219205 - RNA, 32 nt, Human
uaaucccagcacuuugggaggccgaggugggc

SEQ ID NO: 219206 - RNA, 32 nt, Human
uaaucccagcacuuugggaggccgaggugggu

SEQ ID NO: 219207 - RNA, 32 nt, Human
uaaucccagcacuuugggaggccgaggugguu

SEQ ID NO: 219208 - RNA, 32 nt, Human
uaaucccagcacuuugggaggccgagguugga

SEQ ID NO: 219209 - RNA, 32 nt, Human
uaaucccagcacuuugggaggccgaugcgggc

SEQ ID NO: 219210 - RNA, 32 nt, Human
uaaucccagcacuuugggaggccgaugugggc

SEQ ID NO: 219211 - RNA, 32 nt, Human
uaaucccagcacuuugggaggccgaugugggu

SEQ ID NO: 219212 - RNA, 32 nt, Human
uaaucccagcacuuugggaggccgugaugggc

SEQ ID NO: 219213 - RNA, 32 nt, Human
uaaucccagcacuuugggaggccguggcgggc

SEQ ID NO: 219214 - RNA, 32 nt, Human
uaaucccagcacuuugggaggccguggugggc

SEQ ID NO: 219215 - RNA, 32 nt, Human
uaaucccagcacuuugggaggcugaagcagga

SEQ ID NO: 219216 - RNA, 32 nt, Human
uaaucccagcacuuugggaggcugaaguggga

SEQ ID NO: 219217 - RNA, 32 nt, Human
uaaucccagcacuuugggaggcugaagugggc

SEQ ID NO: 219218 - RNA, 32 nt, Human
uaaucccagcacuuugggaggcugaagugggu

SEQ ID NO: 219219 - RNA, 32 nt, Human
uaaucccagcacuuugggaggcugagaagggc

SEQ ID NO: 219220 - RNA, 32 nt, Human
uaaucccagcacuuugggaggcugagacaggc

SEQ ID NO: 219221 - RNA, 32 nt, Human
uaaucccagcacuuugggaggcugagacaggu

SEQ ID NO: 219222 - RNA, 32 nt, Human
uaaucccagcacuuugggaggcugagacccgu

SEQ ID NO: 219223 - RNA, 32 nt, Human
uaaucccagcacuuugggaggcugagacgggc

SEQ ID NO: 219224 - RNA, 32 nt, Human
uaaucccagcacuuugggaggcugagacgggu

SEQ ID NO: 219225 - RNA, 32 nt, Human
uaaucccagcacuuugggaggcugagauggga

SEQ ID NO: 219226 - RNA, 32 nt, Human
uaaucccagcacuuugggaggcugagauguga

SEQ ID NO: 219227 - RNA, 32 nt, Human
uaaucccagcacuuugggaggcugagcaaggu

SEQ ID NO: 219228 - RNA, 32 nt, Human
uaaucccagcacuuugggaggcugagcuggau

SEQ ID NO: 219229 - RNA, 32 nt, Human
uaaucccagcacuuugggaggcugaggaaggc

SEQ ID NO: 219230 - RNA, 32 nt, Human
uaaucccagcacuuugggaggcugaggacaga

SEQ ID NO: 219231 - RNA, 32 nt, Human
uaaucccagcacuuugggaggcugaggagagc

SEQ ID NO: 219232 - RNA, 32 nt, Human
uaaucccagcacuuugggaggcugaggagggu

SEQ ID NO: 219233 - RNA, 28 nt, Human
uaaucccagcacuuugggaggcugaggc

SEQ ID NO: 219234 - RNA, 32 nt, Human
uaaucccagcacuuugggaggcugaggcaagc

SEQ ID NO: 219235 - RNA, 32 nt, Human
uaaucccagcacuuugggaggcugaggcaagu

SEQ ID NO: 219236 - RNA, 32 nt, Human
uaaucccagcacuuugggaggcugaggcagga

SEQ ID NO: 219237 - RNA, 32 nt, Human
uaaucccagcacuuugggaggcugaggcaggc

SEQ ID NO: 219238 - RNA, 32 nt, Human
uaaucccagcacuuugggaggcugaggcaggu

SEQ ID NO: 219239 - RNA, 32 nt, Human
uaaucccagcacuuugggaggcugaggcaguu

SEQ ID NO: 219240 - RNA, 32 nt, Human
uaaucccagcacuuugggaggcugaggccggc

SEQ ID NO: 219241 - RNA, 32 nt, Human
uaaucccagcacuuugggaggcugaggccggu

SEQ ID NO: 219242 - RNA, 32 nt, Human
uaaucccagcacuuugggaggcugaggcgagu

SEQ ID NO: 219243 - RNA, 32 nt, Human
uaaucccagcacuuugggaggcugaggcggau

SEQ ID NO: 219244 - RNA, 32 nt, Human
uaaucccagcacuuugggaggcugaggcggcc

SEQ ID NO: 219245 - RNA, 32 nt, Human
uaaucccagcacuuugggaggcugaggcggga

SEQ ID NO: 219246 - RNA, 32 nt, Human
uaaucccagcacuuugggaggcugaggcgggc

SEQ ID NO: 219247 - RNA, 32 nt, Human
uaaucccagcacuuugggaggcugaggcgggg

SEQ ID NO: 219248 - RNA, 32 nt, Human
uaaucccagcacuuugggaggcugaggcgggu

SEQ ID NO: 219249 - RNA, 32 nt, Human
uaaucccagcacuuugggaggcugaggcgguc

SEQ ID NO: 219250 - RNA, 32 nt, Human
uaaucccagcacuuugggaggcugaggcuggc

SEQ ID NO: 219251 - RNA, 32 nt, Human
uaaucccagcacuuugggaggcugaggcuggg

SEQ ID NO: 219252 - RNA, 32 nt, Human
uaaucccagcacuuugggaggcugagggaggc

SEQ ID NO: 219253 - RNA, 32 nt, Human
uaaucccagcacuuugggaggcugagggggug

SEQ ID NO: 219254 - RNA, 32 nt, Human
uaaucccagcacuuugggaggcugagguaggc

SEQ ID NO: 219255 - RNA, 32 nt, Human
uaaucccagcacuuugggaggcugagguaggu

SEQ ID NO: 219256 - RNA, 32 nt, Human
uaaucccagcacuuugggaggcugaggugaga

SEQ ID NO: 219257 - RNA, 32 nt, Human
uaaucccagcacuuugggaggcugaggugagu

SEQ ID NO: 219258 - RNA, 32 nt, Human
uaaucccagcacuuugggaggcugagguggaa

SEQ ID NO: 219259 - RNA, 32 nt, Human
uaaucccagcacuuugggaggcugagguggac

SEQ ID NO: 219260 - RNA, 32 nt, Human
uaaucccagcacuuugggaggcugagguggga

SEQ ID NO: 219261 - RNA, 32 nt, Human
uaaucccagcacuuugggaggcugaggugggc

SEQ ID NO: 219262 - RNA, 32 nt, Human
uaaucccagcacuuugggaggcugaggugggu

SEQ ID NO: 219263 - RNA, 32 nt, Human
uaaucccagcacuuugggaggcugaggugguc

SEQ ID NO: 219264 - RNA, 32 nt, Human
uaaucccagcacuuugggaggcugaguugcuu

SEQ ID NO: 219265 - RNA, 32 nt, Human
uaaucccagcacuuugggaggcugaugcgggc

SEQ ID NO: 219266 - RNA, 32 nt, Human
uaaucccagcacuuugggaggcugcagcgggu

SEQ ID NO: 219267 - RNA, 32 nt, Human
uaaucccagcacuuugggaggcugcggcaggc

SEQ ID NO: 219268 - RNA, 32 nt, Human
uaaucccagcacuuugggaggcuggggcgagc

SEQ ID NO: 219269 - RNA, 32 nt, Human
uaaucccagcacuuugggaggcuggggcgggu

SEQ ID NO: 219270 - RNA, 32 nt, Human
uaaucccagcacuuugggaggcuguggcaggc

SEQ ID NO: 219271 - RNA, 32 nt, Human
uaaucccagcacuuugggaggcuguggcaggu

SEQ ID NO: 219272 - RNA, 32 nt, Human
uaaucccagcacuuugggaggucgagguaggu

SEQ ID NO: 219273 - RNA, 32 nt, Human
uaaucccagcacuuugggagguugaggcaggc

SEQ ID NO: 219274 - RNA, 32 nt, Human
uaaucccagcacuuugggagguugaggcgggc

SEQ ID NO: 219275 - RNA, 32 nt, Human
uaaucccagcacuuugggagguugagguaggu

SEQ ID NO: 219276 - RNA, 32 nt, Human
uaaucccagcacuuugggagguugagguggga

SEQ ID NO: 219277 - RNA, 32 nt, Human
uaaucccagcacuuugggagguugaggugggc

SEQ ID NO: 219278 - RNA, 32 nt, Human
uaaucccagcacuuugggagguugaggugggu

SEQ ID NO: 219279 - RNA, 32 nt, Human
uaaucccagcacuuugggaugcugaagugaga

SEQ ID NO: 219280 - RNA, 32 nt, Human
uaaucccagcacuuugggaugcugaggcgggc

SEQ ID NO: 219281 - RNA, 32 nt, Human
uaaucccagcacuuugggauuacucccgggcu

SEQ ID NO: 219282 - RNA, 32 nt, Human
uaaucccagcacuuugggauuccgaggcgggu

SEQ ID NO: 219283 - RNA, 20 nt, Human
uaaucccagcacuuugggga

SEQ ID NO: 219284 - RNA, 32 nt, Human
uaaucccagcacuuuggggagcugaggcgggc

SEQ ID NO: 219285 - RNA, 32 nt, Human
uaaucccagcacuuuggggaggccgaggcagg

SEQ ID NO: 219286 - RNA, 32 nt, Human
uaaucccagcacuuuggguggccgagacgggu

SEQ ID NO: 219287 - RNA, 32 nt, Human
uaaucccagcacuuugguaggcugagguaggu

SEQ ID NO: 219288 - RNA, 32 nt, Human
uaaucccagcacuuugguaggcugaggugggu

SEQ ID NO: 219289 - RNA, 32 nt, Human
uaaucccagcacuuugugaggcugaggugggc

SEQ ID NO: 219290 - RNA, 32 nt, Human
uaaucccagcacuuuguggggcugagggagaa

SEQ ID NO: 219291 - RNA, 32 nt, Human
uaaucccagcacuuuuggaggcugaggcgggc

SEQ ID NO: 219292 - RNA, 32 nt, Human
uaaucccagcacuuuuggaggcugaggcgggu

SEQ ID NO: 219293 - RNA, 32 nt, Human
uaaucccagcagugggagaccgaggugggcag

SEQ ID NO: 219294 - RNA, 32 nt, Human
uaaucccagcaguuugggaggcugaggcggau

SEQ ID NO: 219295 - RNA, 32 nt, Human
uaaucccagcaguuugggaggcugaggcgggc

SEQ ID NO: 219296 - RNA, 32 nt, Human
uaaucccagcaguuugggaggcugaggcuagu

SEQ ID NO: 219297 - RNA, 32 nt, Human
uaaucccagcaguuugggaggcugaguugggc

SEQ ID NO: 219298 - RNA, 32 nt, Human
uaaucccagcauguugagaggcugaggugggc

SEQ ID NO: 219299 - RNA, 32 nt, Human
uaaucccagcauuucgggaggcugaggcagga

SEQ ID NO: 219300 - RNA, 19 nt, Human
uaaucccagcauuugggga

SEQ ID NO: 219301 - RNA, 32 nt, Human
uaaucccagcauuuucagaggcugagacaggu

SEQ ID NO: 219302 - RNA, 32 nt, Human
uaaucccagcauuuugagaggcugaggcgggu

SEQ ID NO: 219303 - RNA, 32 nt, Human
uaaucccagcauuuugagaggcugaggugggu

SEQ ID NO: 219304 - RNA, 32 nt, Human
uaaucccagcauuuugggaggcugaagugaga

SEQ ID NO: 219305 - RNA, 32 nt, Human
uaaucccagcauuuugggaggcugaggcaagu

SEQ ID NO: 219306 - RNA, 32 nt, Human
uaaucccagcauuuugggaggcugaggcaggc

SEQ ID NO: 219307 - RNA, 32 nt, Human
uaaucccagcauuuugggaggcugaggcaggu

SEQ ID NO: 219308 - RNA, 32 nt, Human
uaaucccagcauuuugggaggcugaggugggc

SEQ ID NO: 219309 - RNA, 32 nt, Human
uaaucccagccaccugggaggcugaggcagga

SEQ ID NO: 219310 - RNA, 32 nt, Human
uaaucccagccacucagaaggcugaggcagga

SEQ ID NO: 219311 - RNA, 32 nt, Human
uaaucccagccacucaggaggcugaggcaggg

SEQ ID NO: 219312 - RNA, 32 nt, Human
uaaucccagccacucaggaggcugaggcgggg

SEQ ID NO: 219313 - RNA, 32 nt, Human
uaaucccagccacuccagaggcugaggcagga

SEQ ID NO: 219314 - RNA, 32 nt, Human
uaaucccagccacucgggaggcugaggcaaga

SEQ ID NO: 219315 - RNA, 32 nt, Human
uaaucccagccacuugggaggcugaggcagga

SEQ ID NO: 219316 - RNA, 32 nt, Human
uaaucccagccccacaaugucaccagcucgca

SEQ ID NO: 219317 - RNA, 32 nt, Human
uaaucccagcccuuugggaggcugaggcggga

SEQ ID NO: 219318 - RNA, 32 nt, Human
uaaucccagcccuuugggaggcugaggcgggc

SEQ ID NO: 219319 - RNA, 32 nt, Human
uaaucccagcccuuugggaggcugaggugggu

SEQ ID NO: 219320 - RNA, 32 nt, Human
uaaucccagcgcucugggaggcugaggcagga

SEQ ID NO: 219321 - RNA, 32 nt, Human
uaaucccagcgcuuugggaggcugaggcaggu

SEQ ID NO: 219322 - RNA, 32 nt, Human
uaaucccagcgcuuugggaggcugagguggac

SEQ ID NO: 219323 - RNA, 32 nt, Human
  misc_feature (11)..(11): n is a, c, g, or u
  misc_feature (19)..(19): n is a, c, g, or u
uaaucccagcnacucgccnggcugaggcagga

SEQ ID NO: 219324 - RNA, 32 nt, Human
uaaucccagcuaaccaggaggcugaggcagga

SEQ ID NO: 219325 - RNA, 32 nt, Human
uaaucccagcuaaucaggaggcugaggcagga

SEQ ID NO: 219326 - RNA, 32 nt, Human
uaaucccagcuacacaggaggcugaggcacga

SEQ ID NO: 219327 - RNA, 32 nt, Human
uaaucccagcuacacaggaggcugaggcagga

SEQ ID NO: 219328 - RNA, 32 nt, Human
uaaucccagcuacaccugaggcugaggcagga

SEQ ID NO: 219329 - RNA, 32 nt, Human
uaaucccagcuacacuggaggcugagucagga

SEQ ID NO: 219330 - RNA, 32 nt, Human
uaaucccagcuacaggggaggcugaggcagga

SEQ ID NO: 219331 - RNA, 32 nt, Human
uaaucccagcuacaugggaggcugaggcacga

SEQ ID NO: 219332 - RNA, 32 nt, Human
uaaucccagcuacaugggaggcugagguggga

SEQ ID NO: 219333 - RNA, 32 nt, Human
uaaucccagcuacccaggaggcugagacagga

SEQ ID NO: 219334 - RNA, 32 nt, Human
uaaucccagcuacccaggaggcugaggcaaga

SEQ ID NO: 219335 - RNA, 32 nt, Human
uaaucccagcuacccaggaggcugaggcagga

SEQ ID NO: 219336 - RNA, 32 nt, Human
uaaucccagcuacccgggaggcugaggcagga

SEQ ID NO: 219337 - RNA, 32 nt, Human
uaaucccagcuacccgggaggcugaggccuga

SEQ ID NO: 219338 - RNA, 32 nt, Human
uaaucccagcuacccugaaggcugaggcagga

SEQ ID NO: 219339 - RNA, 32 nt, Human
uaaucccagcuaccggagaggcugaggcagga

SEQ ID NO: 219340 - RNA, 32 nt, Human
uaaucccagcuaccggggaggcugaggcagga

SEQ ID NO: 219341 - RNA, 32 nt, Human
uaaucccagcuaccugagaggcugaggcagga

SEQ ID NO: 219342 - RNA, 32 nt, Human
uaaucccagcuaccugggaggcugaggcagga

SEQ ID NO: 219343 - RNA, 32 nt, Human
uaaucccagcuaccugggaggcugagguauga

SEQ ID NO: 219344 - RNA, 32 nt, Human
uaaucccagcuacgugggaggcugaggcagga

SEQ ID NO: 219345 - RNA, 32 nt, Human
uaaucccagcuacgugggaggcugagguggga

SEQ ID NO: 219346 - RNA, 32 nt, Human
uaaucccagcuacuaaggaggcugaggcagga

SEQ ID NO: 219347 - RNA, 32 nt, Human
uaaucccagcuacuagagaggcugaggcagga

SEQ ID NO: 219348 - RNA, 32 nt, Human
uaaucccagcuacuagggaggcugagacacac

SEQ ID NO: 219349 - RNA, 32 nt, Human
uaaucccagcuacuagggaggcugaggcaaga

SEQ ID NO: 219350 - RNA, 32 nt, Human
uaaucccagcuacuagggaggcugaggcagga

SEQ ID NO: 219351 - RNA, 32 nt, Human
uaaucccagcuacuagggaggcugcggcagga

SEQ ID NO: 219352 - RNA, 32 nt, Human
uaaucccagcuacucaagaggcugaggcaaga

SEQ ID NO: 219353 - RNA, 32 nt, Human
uaaucccagcuacucaagaggcugaggcacga

SEQ ID NO: 219354 - RNA, 32 nt, Human
uaaucccagcuacucaagaggcugaggcagga

SEQ ID NO: 219355 - RNA, 32 nt, Human
uaaucccagcuacucaagaggcugagguagga

SEQ ID NO: 219356 - RNA, 32 nt, Human
uaaucccagcuacucagaaggcugaggcagga

SEQ ID NO: 219357 - RNA, 32 nt, Human
uaaucccagcuacucagaaggcugaggcauga

SEQ ID NO: 219358 - RNA, 32 nt, Human
uaaucccagcuacucagaaggcugagguacaa

SEQ ID NO: 219359 - RNA, 32 nt, Human
uaaucccagcuacucagaaggcugagguggga

SEQ ID NO: 219360 - RNA, 32 nt, Human
uaaucccagcuacucagauggcugaggcagga

SEQ ID NO: 219361 - RNA, 32 nt, Human
uaaucccagcuacucagcagggugaggugaga

SEQ ID NO: 219362 - RNA, 32 nt, Human
uaaucccagcuacucaggaggcugagacagaa

SEQ ID NO: 219363 - RNA, 32 nt, Human
uaaucccagcuacucaggaggcugagacagga

SEQ ID NO: 219364 - RNA, 32 nt, Human
uaaucccagcuacucaggaggcugaggaagga

SEQ ID NO: 219365 - RNA, 32 nt, Human
uaaucccagcuacucaggaggcugaggcaaga

SEQ ID NO: 219366 - RNA, 32 nt, Human
uaaucccagcuacucaggaggcugaggcacaa

SEQ ID NO: 219367 - RNA, 32 nt, Human
uaaucccagcuacucaggaggcugaggcacga

SEQ ID NO: 219368 - RNA, 32 nt, Human
uaaucccagcuacucaggaggcugaggcagaa

SEQ ID NO: 219369 - RNA, 32 nt, Human
uaaucccagcuacucaggaggcugaggcagga

SEQ ID NO: 219370 - RNA, 32 nt, Human
uaaucccagcuacucaggaggcugaggcaggg

SEQ ID NO: 219371 - RNA, 32 nt, Human
uaaucccagcuacucaggaggcugaggcaggu

SEQ ID NO: 219372 - RNA, 32 nt, Human
uaaucccagcuacucaggaggcugaggcagua

SEQ ID NO: 219373 - RNA, 32 nt, Human
uaaucccagcuacucaggaggcugaggcauga

SEQ ID NO: 219374 - RNA, 32 nt, Human
uaaucccagcuacucaggaggcugaggccgga

SEQ ID NO: 219375 - RNA, 32 nt, Human
uaaucccagcuacucaggaggcugaggcggag

SEQ ID NO: 219376 - RNA, 32 nt, Human
uaaucccagcuacucaggaggcugaggcggau

SEQ ID NO: 219377 - RNA, 32 nt, Human
uaaucccagcuacucaggaggcugaggcggga

SEQ ID NO: 219378 - RNA, 32 nt, Human
uaaucccagcuacucaggaggcugaggcugga

SEQ ID NO: 219379 - RNA, 32 nt, Human
uaaucccagcuacucaggaggcugaggcuuga

SEQ ID NO: 219380 - RNA, 32 nt, Human
uaaucccagcuacucaggaggcugagggagga

SEQ ID NO: 219381 - RNA, 32 nt, Human
uaaucccagcuacucaggaggcugagguagga

SEQ ID NO: 219382 - RNA, 32 nt, Human
uaaucccagcuacucaggaggcugagguggga

SEQ ID NO: 219383 - RNA, 32 nt, Human
uaaucccagcuacucaggaggcugagucagga

SEQ ID NO: 219384 - RNA, 32 nt, Human
uaaucccagcuacucaggaggcugagugaggc

SEQ ID NO: 219385 - RNA, 32 nt, Human
uaaucccagcuacucaggaggcugggacagga

SEQ ID NO: 219386 - RNA, 32 nt, Human
uaaucccagcuacucaggaggcuggggcagca

SEQ ID NO: 219387 - RNA, 32 nt, Human
uaaucccagcuacucaggaggcuggggcagga

SEQ ID NO: 219388 - RNA, 32 nt, Human
uaaucccagcuacucaggaggcuguggcgaga

SEQ ID NO: 219389 - RNA, 32 nt, Human
uaaucccagcuacucaggagguugagacagga

SEQ ID NO: 219390 - RNA, 32 nt, Human
uaaucccagcuacucaggagguugaggcagca

SEQ ID NO: 219391 - RNA, 32 nt, Human
uaaucccagcuacucagggggcugaggcagga

SEQ ID NO: 219392 - RNA, 32 nt, Human
uaaucccagcuacucagggggcugaggcaggg

SEQ ID NO: 219393 - RNA, 32 nt, Human
uaaucccagcuacucagguggcugaggcagga

SEQ ID NO: 219394 - RNA, 32 nt, Human
uaaucccagcuacucaugaggcugaggcagaa

SEQ ID NO: 219395 - RNA, 32 nt, Human
uaaucccagcuacucaugaggcugaggcagua

SEQ ID NO: 219396 - RNA, 32 nt, Human
uaaucccagcuacuccagaggcugaggcagga

SEQ ID NO: 219397 - RNA, 32 nt, Human
uaaucccagcuacucccaaggcugaggcagga

SEQ ID NO: 219398 - RNA, 32 nt, Human
uaaucccagcuacucgagaggcugaggcagga

SEQ ID NO: 219399 - RNA, 32 nt, Human
uaaucccagcuacucgcaaggcugaggcagga

SEQ ID NO: 219400 - RNA, 32 nt, Human
uaaucccagcuacucgggaggcugacgcagga

SEQ ID NO: 219401 - RNA, 32 nt, Human
uaaucccagcuacucgggaggcugagacagga

SEQ ID NO: 219402 - RNA, 32 nt, Human
uaaucccagcuacucgggaggcugagaugaag

SEQ ID NO: 219403 - RNA, 32 nt, Human
uaaucccagcuacucgggaggcugaggaagga

SEQ ID NO: 219404 - RNA, 32 nt, Human
uaaucccagcuacucgggaggcugaggaggga

SEQ ID NO: 219405 - RNA, 32 nt, Human
uaaucccagcuacucgggaggcugaggcacga

SEQ ID NO: 219406 - RNA, 32 nt, Human
uaaucccagcuacucgggaggcugaggcagaa

SEQ ID NO: 219407 - RNA, 32 nt, Human
uaaucccagcuacucgggaggcugaggcagga

SEQ ID NO: 219408 - RNA, 32 nt, Human
uaaucccagcuacucgggaggcugaggcaggg

SEQ ID NO: 219409 - RNA, 32 nt, Human
uaaucccagcuacucgggaggcugaggcauaa

SEQ ID NO: 219410 - RNA, 32 nt, Human
uaaucccagcuacucgggaggcugaggcauga

SEQ ID NO: 219411 - RNA, 32 nt, Human
uaaucccagcuacucgggaggcugaggcggaa

SEQ ID NO: 219412 - RNA, 32 nt, Human
uaaucccagcuacucgggaggcugagggagga

SEQ ID NO: 219413 - RNA, 32 nt, Human
uaaucccagcuacucgggaggcugagguggga

SEQ ID NO: 219414 - RNA, 32 nt, Human
uaaucccagcuacucgggaggcugagucagga

SEQ ID NO: 219415 - RNA, 32 nt, Human
uaaucccagcuacucgggaggcugcggcggga

SEQ ID NO: 219416 - RNA, 32 nt, Human
uaaucccagcuacucgggaggcuguggcagga

SEQ ID NO: 219417 - RNA, 32 nt, Human
uaaucccagcuacucgguaggcugaggcagga

SEQ ID NO: 219418 - RNA, 32 nt, Human
uaaucccagcuacucuggaggcuaaggcagga

SEQ ID NO: 219419 - RNA, 32 nt, Human
uaaucccagcuacucuggaggcugagacagaa

SEQ ID NO: 219420 - RNA, 32 nt, Human
uaaucccagcuacucuggaggcugagauagga

SEQ ID NO: 219421 - RNA, 32 nt, Human
uaaucccagcuacucuggaggcugaggcacag

SEQ ID NO: 219422 - RNA, 32 nt, Human
uaaucccagcuacucuggaggcugaggcagga

SEQ ID NO: 219423 - RNA, 32 nt, Human
uaaucccagcuacucuggaggcugggcuggag

SEQ ID NO: 219424 - RNA, 32 nt, Human
uaaucccagcuacucuggaggcuggggcagga

SEQ ID NO: 219425 - RNA, 32 nt, Human
uaaucccagcuacucuggagggugaggcagga

SEQ ID NO: 219426 - RNA, 32 nt, Human
uaaucccagcuacugagggggcugaggcauga

SEQ ID NO: 219427 - RNA, 32 nt, Human
uaaucccagcuacugggaaggcugagguagga

SEQ ID NO: 219428 - RNA, 32 nt, Human
uaaucccagcuacuggggaggcugaggcacga

SEQ ID NO: 219429 - RNA, 32 nt, Human
uaaucccagcuacuggggaggcugaggcagga

SEQ ID NO: 219430 - RNA, 32 nt, Human
uaaucccagcuacuggggaggcugaggcggga

SEQ ID NO: 219431 - RNA, 32 nt, Human
uaaucccagcuacuuaggaggcugaggcagga

SEQ ID NO: 219432 - RNA, 32 nt, Human
uaaucccagcuacuuaggaggcugagguggga

SEQ ID NO: 219433 - RNA, 32 nt, Human
uaaucccagcuacuuaggaggcugaugcagga

SEQ ID NO: 219434 - RNA, 32 nt, Human
uaaucccagcuacuuggaaggcugaggcagga

SEQ ID NO: 219435 - RNA, 32 nt, Human
uaaucccagcuacuuggaaggcugaggcauag

SEQ ID NO: 219436 - RNA, 32 nt, Human
uaaucccagcuacuuggaaggcugagguauga

SEQ ID NO: 219437 - RNA, 32 nt, Human
uaaucccagcuacuuggcaggcugagguggga

SEQ ID NO: 219438 - RNA, 18 nt, Human
uaaucccagcuacuuggg

SEQ ID NO: 219439 - RNA, 32 nt, Human
uaaucccagcuacuugggaggcugacgcaggg

SEQ ID NO: 219440 - RNA, 32 nt, Human
uaaucccagcuacuugggaggcugagacagga

SEQ ID NO: 219441 - RNA, 32 nt, Human
uaaucccagcuacuugggaggcugagagagga

SEQ ID NO: 219442 - RNA, 32 nt, Human
uaaucccagcuacuugggaggcugagauguga

SEQ ID NO: 219443 - RNA, 32 nt, Human
uaaucccagcuacuugggaggcugagccagga

SEQ ID NO: 219444 - RNA, 32 nt, Human
uaaucccagcuacuugggaggcugaggcaaga

SEQ ID NO: 219445 - RNA, 32 nt, Human
uaaucccagcuacuugggaggcugaggcaagu

SEQ ID NO: 219446 - RNA, 32 nt, Human
uaaucccagcuacuugggaggcugaggcacga

SEQ ID NO: 219447 - RNA, 32 nt, Human
uaaucccagcuacuugggaggcugaggcagaa

SEQ ID NO: 219448 - RNA, 32 nt, Human
uaaucccagcuacuugggaggcugaggcagag

SEQ ID NO: 219449 - RNA, 32 nt, Human
uaaucccagcuacuugggaggcugaggcagca

SEQ ID NO: 219450 - RNA, 32 nt, Human
uaaucccagcuacuugggaggcugaggcagga

SEQ ID NO: 219451 - RNA, 32 nt, Human
uaaucccagcuacuugggaggcugaggcaggg

SEQ ID NO: 219452 - RNA, 32 nt, Human
uaaucccagcuacuugggaggcugaggcauaa

SEQ ID NO: 219453 - RNA, 32 nt, Human
uaaucccagcuacuugggaggcugaggcauga

SEQ ID NO: 219454 - RNA, 32 nt, Human
uaaucccagcuacuugggaggcugaggcgaga

SEQ ID NO: 219455 - RNA, 32 nt, Human
uaaucccagcuacuugggaggcugaggcggca

SEQ ID NO: 219456 - RNA, 32 nt, Human
uaaucccagcuacuugggaggcugaggcugga

SEQ ID NO: 219457 - RNA, 32 nt, Human
uaaucccagcuacuugggaggcugagggcagg

SEQ ID NO: 219458 - RNA, 32 nt, Human
uaaucccagcuacuugggaggcugagguagga

SEQ ID NO: 219459 - RNA, 32 nt, Human
uaaucccagcuacuugggaggcugagguaggg

SEQ ID NO: 219460 - RNA, 32 nt, Human
uaaucccagcuacuugggaggcugagguggga

SEQ ID NO: 219461 - RNA, 32 nt, Human
uaaucccagcuacuugggaggcugaguuggga

SEQ ID NO: 219462 - RNA, 32 nt, Human
uaaucccagcuacuugggaggcuguggcagga

SEQ ID NO: 219463 - RNA, 32 nt, Human
uaaucccagcuacuuggguggcugaggcaaga

SEQ ID NO: 219464 - RNA, 32 nt, Human
uaaucccagcuacuuggguggcugaggcaggc

SEQ ID NO: 219465 - RNA, 32 nt, Human
uaaucccagcuacuuugguggcugaggcauga

SEQ ID NO: 219466 - RNA, 32 nt, Human
uaaucccagcuagucaggaggcugaggcagga

SEQ ID NO: 219467 - RNA, 32 nt, Human
uaaucccagcuauauaggaggcugaggcagga

SEQ ID NO: 219468 - RNA, 32 nt, Human
uaaucccagcuauuagggaggcugaggcagga

SEQ ID NO: 219469 - RNA, 32 nt, Human
uaaucccagcuauucacgaggcugaggcagga

SEQ ID NO: 219470 - RNA, 32 nt, Human
uaaucccagcuauucaggaggcugaggcacca

SEQ ID NO: 219471 - RNA, 32 nt, Human
uaaucccagcuauucaggaggcugaggcacga

SEQ ID NO: 219472 - RNA, 32 nt, Human
uaaucccagcuauucaggaggcugaggcagga

SEQ ID NO: 219473 - RNA, 32 nt, Human
uaaucccagcuauucaggagguugaggcagaa

SEQ ID NO: 219474 - RNA, 32 nt, Human
uaaucccagcuauucggaaggcugaggcagga

SEQ ID NO: 219475 - RNA, 32 nt, Human
uaaucccagcuauucggcugaggcacgagaau

SEQ ID NO: 219476 - RNA, 32 nt, Human
uaaucccagcuauucgggagccugaggcaggg

SEQ ID NO: 219477 - RNA, 32 nt, Human
uaaucccagcuauucgggaggcugaggcagga

SEQ ID NO: 219478 - RNA, 32 nt, Human
uaaucccagcuauucgggaggcugaggcccga

SEQ ID NO: 219479 - RNA, 32 nt, Human
uaaucccagcuauucuggaggcugaggcagga

SEQ ID NO: 219480 - RNA, 32 nt, Human
uaaucccagcuauuuggcaggcugaggcauga

SEQ ID NO: 219481 - RNA, 18 nt, Human
uaaucccagcuauuuggg

SEQ ID NO: 219482 - RNA, 32 nt, Human
uaaucccagcuauuugggaggccaaggcagga

SEQ ID NO: 219483 - RNA, 32 nt, Human
uaaucccagcuauuugggaggcugaggcaaga

SEQ ID NO: 219484 - RNA, 32 nt, Human
uaaucccagcuauuugggaggcugaggcagaa

SEQ ID NO: 219485 - RNA, 32 nt, Human
uaaucccagcuauuugggaggcugaggcagga

SEQ ID NO: 219486 - RNA, 32 nt, Human
uaaucccagcuccuugggaggcugaggcagga

SEQ ID NO: 219487 - RNA, 32 nt, Human
uaaucccagcucuuugggaggcugaagcgggu

SEQ ID NO: 219488 - RNA, 32 nt, Human
uaaucccagcucuuugggaggcugaagugggu

SEQ ID NO: 219489 - RNA, 32 nt, Human
uaaucccagcucuuugggaggcugaggcaggu

SEQ ID NO: 219490 - RNA, 32 nt, Human
uaaucccagcugcccaggaggcugaggcauga

SEQ ID NO: 219491 - RNA, 32 nt, Human
uaaucccagcugcucaggaggcugaggcagga

SEQ ID NO: 219492 - RNA, 32 nt, Human
uaaucccagcugcucgggaggcugaggcagga

SEQ ID NO: 219493 - RNA, 32 nt, Human
uaaucccagcugcucuggaggcugaggcaugc

SEQ ID NO: 219494 - RNA, 32 nt, Human
uaaucccagcugcuggagaggcugaggcagga

SEQ ID NO: 219495 - RNA, 32 nt, Human
uaaucccagcugcuggggaggcugaggcagga

SEQ ID NO: 219496 - RNA, 32 nt, Human
uaaucccagcugcuugggaggcugaggcagga

SEQ ID NO: 219497 - RNA, 32 nt, Human
uaaucccagcugcuugggaggcugaggcagua

SEQ ID NO: 219498 - RNA, 32 nt, Human
uaaucccagcugcuugggaggcugagggcagg

SEQ ID NO: 219499 - RNA, 32 nt, Human
uaaucccagcugcuugggaggcugagguagga

SEQ ID NO: 219500 - RNA, 32 nt, Human
uaaucccagcuguucgggaggcugaggcagga

SEQ ID NO: 219501 - RNA, 32 nt, Human
uaaucccagcuguuugggaggcugaggcaggu

SEQ ID NO: 219502 - RNA, 32 nt, Human
uaaucccagcuucucgggaggcugaggcagga

SEQ ID NO: 219503 - RNA, 32 nt, Human
uaaucccagcuucuuaggaggcugagguagga

SEQ ID NO: 219504 - RNA, 32 nt, Human
uaaucccaggacuuugggaggcugaggaaagc

SEQ ID NO: 219505 - RNA, 32 nt, Human
uaaucccaggacuuugggaggcugaggcaggu

SEQ ID NO: 219506 - RNA, 32 nt, Human
uaaucccagguacucaagaggcugaggcagga

SEQ ID NO: 219507 - RNA, 32 nt, Human
uaaucccagguacucaggaggcugaggcagaa

SEQ ID NO: 219508 - RNA, 32 nt, Human
uaaucccagguacucaggaggcugaggcagga

SEQ ID NO: 219509 - RNA, 32 nt, Human
uaaucccagguacucgggaggcugaggcagag

SEQ ID NO: 219510 - RNA, 32 nt, Human
uaaucccagguacuuggaaggcugaggcagga

SEQ ID NO: 219511 - RNA, 32 nt, Human
uaaucccagguacuugggaggcugaggcagga

SEQ ID NO: 219512 - RNA, 32 nt, Human
uaaucccaguaaucccagcuacuugggaggcu

SEQ ID NO: 219513 - RNA, 32 nt, Human
uaaucccaguacuuuaggaggcugugguaggu

SEQ ID NO: 219514 - RNA, 32 nt, Human
uaaucccaguacuuugggaggcugaggugggc

SEQ ID NO: 219515 - RNA, 32 nt, Human
uaaucccaguacuuugggaggcugaggugggu

SEQ ID NO: 219516 - RNA, 32 nt, Human
uaaucccagugacuugggaggcugaggcagga

SEQ ID NO: 219517 - RNA, 32 nt, Human
uaaucccagugcuuugggaggcugagguggga

SEQ ID NO: 219518 - RNA, 32 nt, Human
uaaucccaguuacucaggaggcugaggcaaga

SEQ ID NO: 219519 - RNA, 32 nt, Human
uaaucccaguuacucaggaggcugaggcagga

SEQ ID NO: 219520 - RNA, 32 nt, Human
uaaucccaguuacucgagaggcugaggcagga

SEQ ID NO: 219521 - RNA, 32 nt, Human
uaaucccaguuacucgggaggcugaggcaaga

SEQ ID NO: 219522 - RNA, 32 nt, Human
uaaucccaguuacucgggaggcugaggcagga

SEQ ID NO: 219523 - RNA, 32 nt, Human
uaaucccaguuacuggggaggcugaggcagga

SEQ ID NO: 219524 - RNA, 32 nt, Human
uaaucccaguuacuuaggaggcugaggcagga

SEQ ID NO: 219525 - RNA, 32 nt, Human
uaaucccaguuacuugggaggcugaggcaaga

SEQ ID NO: 219526 - RNA, 32 nt, Human
uaaucccaguuacuugggaggcugaggcacaa

SEQ ID NO: 219527 - RNA, 32 nt, Human
uaaucccaguuacuugggaggcugaggcagga

SEQ ID NO: 219528 - RNA, 32 nt, Human
uaaucccaguuacuuuggaggcugaggcagga

SEQ ID NO: 219529 - RNA, 32 nt, Human
uaaucccaguuagucgggaggcugaggcagga

SEQ ID NO: 219530 - RNA, 32 nt, Human
uaaucccaguuccuugggaggcugaggcggga

SEQ ID NO: 219531 - RNA, 32 nt, Human
uaaucccaucacuuugggaggcugaggcagau

SEQ ID NO: 219532 - RNA, 32 nt, Human
uaaucccaucacuuugggaggcugagguggga

SEQ ID NO: 219533 - RNA, 32 nt, Human
uaaucccauguacucuggaggcugagguagga

SEQ ID NO: 219534 - RNA, 32 nt, Human
uaauccccaaugugauuguauuuagagugggg

SEQ ID NO: 219535 - RNA, 32 nt, Human
uaauccccacccugggcucugggagcagcccg

SEQ ID NO: 219536 - RNA, 32 nt, Human
uaauccccaggccccggacaaagagcccagag

SEQ ID NO: 219537 - RNA, 32 nt, Human
uaauccccaugugugccucucuccuuccuuag

SEQ ID NO: 219538 - RNA, 32 nt, Human
uaaucccccaaaggaccuauuugagcuguucc

SEQ ID NO: 219539 - RNA, 32 nt, Human
uaaucccgccacugcacucuagccugggugac

SEQ ID NO: 219540 - RNA, 32 nt, Human
uaaucccgcuacucgggaggcugaggcaggag

SEQ ID NO: 219541 - RNA, 32 nt, Human
uaaucccggcacugugggaggcugagguggga

SEQ ID NO: 219542 - RNA, 32 nt, Human
uaaucccggcacuuugggaggcugaggcgggc

SEQ ID NO: 219543 - RNA, 32 nt, Human
uaaucccggcacuuugggaggcugaggucagg

SEQ ID NO: 219544 - RNA, 32 nt, Human
uaaucccggcacuuugggaggcugaggugggc

SEQ ID NO: 219545 - RNA, 32 nt, Human
uaaucccggcaguuugggaggcuggggcaggu

SEQ ID NO: 219546 - RNA, 32 nt, Human
uaaucccggcuacucaggaggcugaggcagga

SEQ ID NO: 219547 - RNA, 32 nt, Human
uaaucccggcuacucgggaggcugaggcagca

SEQ ID NO: 219548 - RNA, 32 nt, Human
uaaucccggcuacucgggaggcugaggcagga

SEQ ID NO: 219549 - RNA, 32 nt, Human
uaaucccggcuacuugggaggcugagguagga

SEQ ID NO: 219550 - RNA, 32 nt, Human
uaaucccgggauuacaggugugugccaccaca

SEQ ID NO: 219551 - RNA, 32 nt, Human
uaaucccgguacuuugggaggcugagguggga

SEQ ID NO: 219552 - RNA, 32 nt, Human
uaaucccuauaauccccacaucaagggagaga

SEQ ID NO: 219553 - RNA, 32 nt, Human
uaaucccucuccccauccuguuucaauuuugg

SEQ ID NO: 219554 - RNA, 32 nt, Human
uaaucccugcacuuugggaugccugaggucag

SEQ ID NO: 219555 - RNA, 32 nt, Human
uaaucccugccuggcuucaagccucuggcuuc

SEQ ID NO: 219556 - RNA, 32 nt, Human
uaaucccugcuacucaggaggcugaggaagga

SEQ ID NO: 219557 - RNA, 32 nt, Human
uaaucccugcuacucgggaggcugaggcaaga

SEQ ID NO: 219558 - RNA, 32 nt, Human
uaaucccuguauaaaguagugccaaacugauu

SEQ ID NO: 219559 - RNA, 32 nt, Human
uaaucccuucaaggaagugauaacacuggagu

SEQ ID NO: 219560 - RNA, 32 nt, Human
uaaucccuuucuaagugaagggagaggcuggc

SEQ ID NO: 219561 - RNA, 32 nt, Human
uaauccgagcuacuagggaggcugaggcagaa

SEQ ID NO: 219562 - RNA, 32 nt, Human
uaauccgagcuacuggggaggcugaggcagga

SEQ ID NO: 219563 - RNA, 32 nt, Human
uaauccgaggcugaggugggaggaucacuuga

SEQ ID NO: 219564 - RNA, 32 nt, Human
uaauccgagugcuuugggaggcugaggcagga

SEQ ID NO: 219565 - RNA, 32 nt, Human
uaauccuaacacuuugggaggcugaggugggc

SEQ ID NO: 219566 - RNA, 32 nt, Human
uaauccuaaugcuuugagaggcugagguagga

SEQ ID NO: 219567 - RNA, 32 nt, Human
uaauccuacuaaaagguggaggugaccgcugu

SEQ ID NO: 219568 - RNA, 32 nt, Human
uaauccuacuccucaaaauagaaaguugaaga

SEQ ID NO: 219569 - RNA, 32 nt, Human
uaauccuagcaccuugggaggcugaggcaggu

SEQ ID NO: 219570 - RNA, 32 nt, Human
uaauccuagcacguggggaggcugaggcaggc

SEQ ID NO: 219571 - RNA, 32 nt, Human
uaauccuagcacuuuggaaggcugaggagggc

SEQ ID NO: 219572 - RNA, 32 nt, Human
uaauccuagcacuuugggaggcugaggcaaga

SEQ ID NO: 219573 - RNA, 32 nt, Human
uaauccuagcacuuugggaggcugaggcaggu

SEQ ID NO: 219574 - RNA, 32 nt, Human
uaauccuagcacuuugggaggcugaggcaguc

SEQ ID NO: 219575 - RNA, 32 nt, Human
uaauccuagcacuuugggaggcugaggcgggc

SEQ ID NO: 219576 - RNA, 32 nt, Human
uaauccuagcacuuugggaggcugaggcgggu

SEQ ID NO: 219577 - RNA, 32 nt, Human
uaauccuagcacuuugggaggcugagguaggc

SEQ ID NO: 219578 - RNA, 32 nt, Human
uaauccuagcacuuugggaggcugaggugggc

SEQ ID NO: 219579 - RNA, 32 nt, Human
uaauccuagcacuuugggaggcugaggugggu

SEQ ID NO: 219580 - RNA, 32 nt, Human
uaauccuagcacuuuggguggcugagguggga

SEQ ID NO: 219581 - RNA, 32 nt, Human
uaauccuagcacuuuguaaggcugaggcgagu

SEQ ID NO: 219582 - RNA, 32 nt, Human
uaauccuagcaguuuggaaggcugaggcacau

SEQ ID NO: 219583 - RNA, 32 nt, Human
uaauccuagcuacccggaaggcugaggcagga

SEQ ID NO: 219584 - RNA, 32 nt, Human
uaauccuagcuaccgagaaggcugaggcagga

SEQ ID NO: 219585 - RNA, 32 nt, Human
uaauccuagcuacucaagaggcugaggcagga

SEQ ID NO: 219586 - RNA, 32 nt, Human
uaauccuagcuacucaggaggcugaggcaaga

SEQ ID NO: 219587 - RNA, 32 nt, Human
uaauccuagcuacucaggaggcugaggcagga

SEQ ID NO: 219588 - RNA, 32 nt, Human
uaauccuagcuacucgggaggcugaggcagaa

SEQ ID NO: 219589 - RNA, 32 nt, Human
uaauccuagcuacucgggaggcugaggcagga

SEQ ID NO: 219590 - RNA, 32 nt, Human
uaauccuagcuacucgggaggcuguggcagga

SEQ ID NO: 219591 - RNA, 32 nt, Human
uaauccuagcuacuuggcaggcugaggugaga

SEQ ID NO: 219592 - RNA, 32 nt, Human
uaauccuagcuacuugggaggcugaggcacga

SEQ ID NO: 219593 - RNA, 32 nt, Human
uaauccuagcuacuugggaggcugaggcagga

SEQ ID NO: 219594 - RNA, 32 nt, Human
uaauccuagcuacuugggaggcugaggcaggu

SEQ ID NO: 219595 - RNA, 32 nt, Human
uaauccuagcuacuugggaggcugaggcauga

SEQ ID NO: 219596 - RNA, 32 nt, Human
uaauccuagcuaguugggaggcuggcacagga

SEQ ID NO: 219597 - RNA, 32 nt, Human
uaauccuagcuauucaaggggcugagguggga

SEQ ID NO: 219598 - RNA, 32 nt, Human
uaauccuagcuauucgggaggcugagacagga

SEQ ID NO: 219599 - RNA, 32 nt, Human
uaauccuagcuauucuggaggcugaggcagga

SEQ ID NO: 219600 - RNA, 32 nt, Human
uaauccuagcugcuugggaggcugaaguggga

SEQ ID NO: 219601 - RNA, 32 nt, Human
uaauccuagcugcuugggaggcugaggcagag

SEQ ID NO: 219602 - RNA, 32 nt, Human
uaauccuaggacuuugggaggcugaggcaggc

SEQ ID NO: 219603 - RNA, 32 nt, Human
uaauccuaguacuuugggaggcugaggcggga

SEQ ID NO: 219604 - RNA, 32 nt, Human
uaauccucaacuccaguggcagcuccaugugc

SEQ ID NO: 219605 - RNA, 32 nt, Human
uaauccucagaacaucccagggagcuccacag

SEQ ID NO: 219606 - RNA, 32 nt, Human
uaauccucccaacggcccccaaagguagaacu

SEQ ID NO: 219607 - RNA, 32 nt, Human
uaauccuccucuaucaccuuuuuagacuuugu

SEQ ID NO: 219608 - RNA, 32 nt, Human
uaauccuccugccucagacuccugaguaucug

SEQ ID NO: 219609 - RNA, 32 nt, Human
uaauccucuauuuugcucuuccuuguccauug

SEQ ID NO: 219610 - RNA, 32 nt, Human
uaauccucuuucucagggcuccacccuuuggg

SEQ ID NO: 219611 - RNA, 32 nt, Human
uaauccugaccccagaggggcauguggccacu

SEQ ID NO: 219612 - RNA, 32 nt, Human
uaauccugagucuuauuugaaaaaugguuucc

SEQ ID NO: 219613 - RNA, 32 nt, Human
uaauccugcauucagcaaaguggcauaaaaau

SEQ ID NO: 219614 - RNA, 32 nt, Human
uaauccugccugauuguguuuacagaagcuuc

SEQ ID NO: 219615 - RNA, 32 nt, Human
uaauccuggcacuuuaggaggcugagguggga

SEQ ID NO: 219616 - RNA, 32 nt, Human
uaauccuggcacuuugggaggcugaggcgggc

SEQ ID NO: 219617 - RNA, 32 nt, Human
uaauccuggcauuuuaggaggcugagguugga

SEQ ID NO: 219618 - RNA, 32 nt, Human
uaauccuggcuacucgggaggcugaggcagga

SEQ ID NO: 219619 - RNA, 32 nt, Human
uaauccuggcuacuugggaggcugaggcauga

SEQ ID NO: 219620 - RNA, 32 nt, Human
uaauccugugcaaaggaaaagaggugcuuugu

SEQ ID NO: 219621 - RNA, 32 nt, Human
uaauccuguggccaacaccaaugccccaaccu

SEQ ID NO: 219622 - RNA, 32 nt, Human
uaauccuuagcaggcucuuauucuuuaauuaa

SEQ ID NO: 219623 - RNA, 32 nt, Human
uaauccuugcauuuuggaaggcugaggcagga

SEQ ID NO: 219624 - RNA, 32 nt, Human
uaauccuugcccgccauguccgggggcuucga

SEQ ID NO: 219625 - RNA, 32 nt, Human
uaauccuugccugcugaacccagccugggccu

SEQ ID NO: 219626 - RNA, 32 nt, Human
uaauccuuuacauugucuaugaugcaaagacc

SEQ ID NO: 219627 - RNA, 32 nt, Human
uaauccuuuguauucauguuuacagugcuauu

SEQ ID NO: 219628 - RNA, 32 nt, Human
uaauccuuuguuuucugacuaauuaggcaagg

SEQ ID NO: 219629 - RNA, 32 nt, Human
uaaucgagaauguaagucuuucccaggaauuu

SEQ ID NO: 219630 - RNA, 32 nt, Human
uaaucgaggaagcaugaccaccaacuuggauc

SEQ ID NO: 219631 - RNA, 32 nt, Human
uaaucgaugggggagucugaagcagaugcaaa

SEQ ID NO: 219632 - RNA, 32 nt, Human
uaaucgcagcacuuugggaggcugaagggggc

SEQ ID NO: 219633 - RNA, 32 nt, Human
uaaucgcagcacuuugggaggcugaggcagga

SEQ ID NO: 219634 - RNA, 32 nt, Human
uaaucgcagcacuuugggaggcugagguaggg

SEQ ID NO: 219635 - RNA, 32 nt, Human
uaaucgcagcuacucaggaggcugaggcagga

SEQ ID NO: 219636 - RNA, 32 nt, Human
uaaucgcaguacuuugggaggcugaggcaaga

SEQ ID NO: 219637 - RNA, 32 nt, Human
uaaucgcugcugccccuccacucccaagaugc

SEQ ID NO: 219638 - RNA, 32 nt, Human
uaaucggauugagagcgcgccggcccgggccg

SEQ ID NO: 219639 - RNA, 32 nt, Human
uaaucggcaccccagugagcagacuggacauc

SEQ ID NO: 219640 - RNA, 32 nt, Human
uaaucguagcgcuuugagaggcugaggcagga

SEQ ID NO: 219641 - RNA, 32 nt, Human
uaaucgugccacugcaguccagccuaggcaac

SEQ ID NO: 219642 - RNA, 32 nt, Human
uaaucuaaccacugcaacugugucccugcuuc

SEQ ID NO: 219643 - RNA, 17 nt, Human
uaaucuacauuuuaggg

SEQ ID NO: 219644 - RNA, 32 nt, Human
uaaucuaccuugcaguguaggaauucuauuga

SEQ ID NO: 219645 - RNA, 20 nt, Human
uaaucuacugcauuuaggga

SEQ ID NO: 219646 - RNA, 20 nt, Human
uaaucuacuggcgaauggga

SEQ ID NO: 219647 - RNA, 32 nt, Human
uaaucuauaaugaagaucaacagugaagagga

SEQ ID NO: 219648 - RNA, 32 nt, Human
uaaucuauauucuacccuuauaauaaaagauc

SEQ ID NO: 219649 - RNA, 32 nt, Human
uaaucuaucccuucccuuucccagggccuucu

SEQ ID NO: 219650 - RNA, 32 nt, Human
uaaucuauuuugcuccauacaugcaacugcgu

SEQ ID NO: 219651 - RNA, 32 nt, Human
uaaucucaacuacuugggaggcugaggcagga

SEQ ID NO: 219652 - RNA, 32 nt, Human
uaaucucaagagugucauuacagugagaaucu

SEQ ID NO: 219653 - RNA, 32 nt, Human
uaaucucaaugcaagccccaacuuucuuaucc

SEQ ID NO: 219654 - RNA, 32 nt, Human
uaaucucaauuuaagauacaaauaaggacaca

SEQ ID NO: 219655 - RNA, 32 nt, Human
uaaucucacuugacuccagcuaggagcugaug

SEQ ID NO: 219656 - RNA, 32 nt, Human
uaaucucagaacuuugggaggcugaggcaggu

SEQ ID NO: 219657 - RNA, 32 nt, Human
uaaucucagcaacucaggaggcugaggcagga

SEQ ID NO: 219658 - RNA, 32 nt, Human
uaaucucagcacauugggaggcugaggugggc

SEQ ID NO: 219659 - RNA, 32 nt, Human
uaaucucagcacucugggaggccgaggcgggu

SEQ ID NO: 219660 - RNA, 32 nt, Human
uaaucucagcacuuugggagacugagaugaga

SEQ ID NO: 219661 - RNA, 32 nt, Human
uaaucucagcacuuugggaggcugaggcagaa

SEQ ID NO: 219662 - RNA, 32 nt, Human
uaaucucagcacuuugggaggcugaggcaggc

SEQ ID NO: 219663 - RNA, 32 nt, Human
uaaucucagcacuuugggaggcugaggcaggu

SEQ ID NO: 219664 - RNA, 32 nt, Human
uaaucucagcacuuugggaggcugaggcgggc

SEQ ID NO: 219665 - RNA, 32 nt, Human
uaaucucagcacuuugggaggcugagguggga

SEQ ID NO: 219666 - RNA, 32 nt, Human
uaaucucagcacuuugggaggcugaggugggc

SEQ ID NO: 219667 - RNA, 32 nt, Human
uaaucucagcacuuugggaggcugaggugggu

SEQ ID NO: 219668 - RNA, 32 nt, Human
uaaucucagcauuuugggaggcugaggcaggc

SEQ ID NO: 219669 - RNA, 32 nt, Human
uaaucucagcccuucccgaggcugagguggaa

SEQ ID NO: 219670 - RNA, 32 nt, Human
uaaucucagcgacuugggaggcugagguggag

SEQ ID NO: 219671 - RNA, 32 nt, Human
uaaucucagcuacuagagaggcugaggcagga

SEQ ID NO: 219672 - RNA, 32 nt, Human
uaaucucagcuacucaagaggcugagguagaa

SEQ ID NO: 219673 - RNA, 32 nt, Human
uaaucucagcuacucaggaggcugaggcaaga

SEQ ID NO: 219674 - RNA, 32 nt, Human
uaaucucagcuacucaggaggcugaggcacaa

SEQ ID NO: 219675 - RNA, 32 nt, Human
uaaucucagcuacucaggaggcugaggcacga

SEQ ID NO: 219676 - RNA, 32 nt, Human
uaaucucagcuacucaggaggcugaggcagga

SEQ ID NO: 219677 - RNA, 32 nt, Human
uaaucucagcuacucaggaggcugagguagua

SEQ ID NO: 219678 - RNA, 32 nt, Human
uaaucucagcuacucgggaggcugaggcaaga

SEQ ID NO: 219679 - RNA, 32 nt, Human
uaaucucagcuacucgggaggcugaggcagga

SEQ ID NO: 219680 - RNA, 32 nt, Human
uaaucucagcuacuggagaggcugaggcagga

SEQ ID NO: 219681 - RNA, 32 nt, Human
uaaucucagcuacuugaaaggcugaggcagga

SEQ ID NO: 219682 - RNA, 32 nt, Human
uaaucucagcuacuugagaggcugaggcagga

SEQ ID NO: 219683 - RNA, 32 nt, Human
uaaucucagcuacuugggaggcugacgcagga

SEQ ID NO: 219684 - RNA, 32 nt, Human
uaaucucagcuacuugggaggcugagacagga

SEQ ID NO: 219685 - RNA, 32 nt, Human
uaaucucagcuacuugggaggcugaggcacga

SEQ ID NO: 219686 - RNA, 32 nt, Human
uaaucucagcuacuugggaggcugaggcagga

SEQ ID NO: 219687 - RNA, 32 nt, Human
uaaucucagcuauucuggaggcuuaggcggga

SEQ ID NO: 219688 - RNA, 32 nt, Human
uaaucucagcuauugaggaggcugaggcagga

SEQ ID NO: 219689 - RNA, 32 nt, Human
uaaucucagcugcuccggaggcugaggcagga

SEQ ID NO: 219690 - RNA, 32 nt, Human
uaaucucagguaaaugccaaucaggagacaaa

SEQ ID NO: 219691 - RNA, 32 nt, Human
uaaucucagguacucaggaggcugaggcagga

SEQ ID NO: 219692 - RNA, 32 nt, Human
uaaucucauccaaaaccaugcucacagacaca

SEQ ID NO: 219693 - RNA, 32 nt, Human
uaaucucauccuguuuugaugcaaggguucuc

SEQ ID NO: 219694 - RNA, 32 nt, Human
uaaucucauuggaggagggaacuguuuccugc

SEQ ID NO: 219695 - RNA, 32 nt, Human
uaaucucauuuucaaagcuguuucucauuuua

SEQ ID NO: 219696 - RNA, 32 nt, Human
uaaucuccaacuuuauuuugaauguaccucua

SEQ ID NO: 219697 - RNA, 32 nt, Human
uaaucuccucaccucaugagucuuaacuuaau

SEQ ID NO: 219698 - RNA, 32 nt, Human
uaaucucggaagaugauaccaagagcagaggc

SEQ ID NO: 219699 - RNA, 32 nt, Human
uaaucucuagagccuuauuuuccacaccaccu

SEQ ID NO: 219700 - RNA, 32 nt, Human
uaaucucucagccacaaaccucaguuuccaaa

SEQ ID NO: 219701 - RNA, 32 nt, Human
uaaucucucauggugaaaucugcucuguacau

SEQ ID NO: 219702 - RNA, 32 nt, Human
uaaucucuccaccuuccaaagagugcuaagca

SEQ ID NO: 219703 - RNA, 32 nt, Human
uaaucucuccccuaguuuagaguccuuugcau

SEQ ID NO: 219704 - RNA, 32 nt, Human
uaaucucugaguuucuggaauauuuucuuaga

SEQ ID NO: 219705 - RNA, 32 nt, Human
uaaucucuuuccaucuuacuugcccuucuaua

SEQ ID NO: 219706 - RNA, 32 nt, Human
uaaucugaggcagagacacagcagaaccugag

SEQ ID NO: 219707 - RNA, 32 nt, Human
uaaucugaucagcaugguccagggacaguuga

SEQ ID NO: 219708 - RNA, 18 nt, Human
uaaucugcccaucuggga

SEQ ID NO: 219709 - RNA, 32 nt, Human
uaaucugccuuuuggugcauuacuuggucaau

SEQ ID NO: 219710 - RNA, 32 nt, Human
uaaucugcuaucuucauuccagucccuacccc

SEQ ID NO: 219711 - RNA, 19 nt, Human
uaaucugcucacuugagga

SEQ ID NO: 219712 - RNA, 32 nt, Human
uaaucuggaccaggcuguggguagaugugcaa

SEQ ID NO: 219713 - RNA, 32 nt, Human
uaaucuggagaaacugaacuaccuucuguuca

SEQ ID NO: 219714 - RNA, 32 nt, Human
uaaucuggaggcaagguucgacugcagccgcc

SEQ ID NO: 219715 - RNA, 32 nt, Human
uaaucugggaagggaagggcuacugcagcuuu

SEQ ID NO: 219716 - RNA, 32 nt, Human
uaaucugggaagugccugguuuugaaaauccg

SEQ ID NO: 219717 - RNA, 32 nt, Human
uaaucuguaagauucaugaaauucggggccag

SEQ ID NO: 219718 - RNA, 32 nt, Human
uaaucuguaggagcagaaccucugauugacca

SEQ ID NO: 219719 - RNA, 32 nt, Human
uaaucugucccauuuucgaggcuccuuauaag

SEQ ID NO: 219720 - RNA, 32 nt, Human
uaaucugugacugcuccuguggaaacuccaca

SEQ ID NO: 219721 - RNA, 32 nt, Human
uaaucugugguuuugaccagagcccagauggg

SEQ ID NO: 219722 - RNA, 32 nt, Human
uaaucuguugucugacaggcauuucccagacc

SEQ ID NO: 219723 - RNA, 32 nt, Human
uaaucuuaaguggacagcaauuuggaacagug

SEQ ID NO: 219724 - RNA, 32 nt, Human
uaaucuuacugaugcacugggccuaucuuuuu

SEQ ID NO: 219725 - RNA, 32 nt, Human
uaaucuuagcuacuugggaggcugaggcacaa

SEQ ID NO: 219726 - RNA, 32 nt, Human
uaaucuuauacagaagaaacuaacuuagaaac

SEQ ID NO: 219727 - RNA, 32 nt, Human
uaaucuuccuuuccucaaugcuuccuaauccu

SEQ ID NO: 219728 - RNA, 32 nt, Human
uaaucuucucaauuucccuuuuuaagccguug

SEQ ID NO: 219729 - RNA, 32 nt, Human
uaaucuucuuccuauguuuuggaauucugggg

SEQ ID NO: 219730 - RNA, 32 nt, Human
uaaucuugagauccugaacaugugcugauuuu

SEQ ID NO: 219731 - RNA, 32 nt, Human
uaaucuuguauaaagcaucacauuuuacuaug

SEQ ID NO: 219732 - RNA, 32 nt, Human
uaaucuuuaacacuaaacuacugugaaauucu

SEQ ID NO: 219733 - RNA, 32 nt, Human
uaaucuuuagagauguccacaucauaacagaa

SEQ ID NO: 219734 - RNA, 20 nt, Human
uaaucuuuagcauuuaggga

SEQ ID NO: 219735 - RNA, 32 nt, Human
uaaucuuucacugcagccucaaacuccuggag

SEQ ID NO: 219736 - RNA, 32 nt, Human
uaaucuuugcuuugcugaccucucaggccucu

SEQ ID NO: 219737 - RNA, 32 nt, Human
uaaucuuuuagcaaccccaguauuccuucacu

SEQ ID NO: 219738 - RNA, 32 nt, Human
uaaugaaaaacagcucaaauuuuaggguaacu

SEQ ID NO: 219739 - RNA, 32 nt, Human
uaaugaaaaggacuguucaagugggucuggcc

SEQ ID NO: 219740 - RNA, 32 nt, Human
uaaugaaacauacacuuuuagaucaagauaac

SEQ ID NO: 219741 - RNA, 32 nt, Human
uaaugaaacucaucauuuuagucaaguagagg

SEQ ID NO: 219742 - RNA, 32 nt, Human
uaaugaaagagccaugucugugucuaaucacu

SEQ ID NO: 219743 - RNA, 32 nt, Human
uaaugaaauccaccccugccugcuagauacuu

SEQ ID NO: 219744 - RNA, 32 nt, Human
uaaugaaauguucaaguauuacagcaauauuc

SEQ ID NO: 219745 - RNA, 32 nt, Human
uaaugaacaaauuuccuugguuacaugguuuu

SEQ ID NO: 219746 - RNA, 21 nt, Human
uaaugaacaacaaaaugggga

SEQ ID NO: 219747 - RNA, 32 nt, Human
uaaugaaccgaccucaugguccugggcaaagc

SEQ ID NO: 219748 - RNA, 32 nt, Human
uaaugaacuuaucuguggaguacauugaagaa

SEQ ID NO: 219749 - RNA, 32 nt, Human
uaaugaagaaaagaaugacagaugcaaggaag

SEQ ID NO: 219750 - RNA, 32 nt, Human
uaaugaagacuauuuuucagcagaagugaaga

SEQ ID NO: 219751 - RNA, 32 nt, Human
uaaugaagaggaugauacugugucuagcuuaa

SEQ ID NO: 219752 - RNA, 32 nt, Human
uaaugaagaguagaugacuuucccuucugucc

SEQ ID NO: 219753 - RNA, 32 nt, Human
uaaugaagcuguacaguucuccagaaauuaaa

SEQ ID NO: 219754 - RNA, 32 nt, Human
uaaugaagcuugccucacccaguagcugggaa

SEQ ID NO: 219755 - RNA, 32 nt, Human
uaaugaaggugccauuuggcugcuccuuaaua

SEQ ID NO: 219756 - RNA, 32 nt, Human
uaaugaaucugagcagucauuuaucagugcuu

SEQ ID NO: 219757 - RNA, 32 nt, Human
uaaugaaugaacacaguucaucagauuggaau

SEQ ID NO: 219758 - RNA, 32 nt, Human
uaaugaaugccuguagucccagcuacuccgga

SEQ ID NO: 219759 - RNA, 32 nt, Human
uaaugaauggcagaauuaacaaaauuacaaac

SEQ ID NO: 219760 - RNA, 21 nt, Human
uaaugacaaaaagcauaagua

SEQ ID NO: 219761 - RNA, 32 nt, Human
uaaugacaaagaacauucuucugauaaaggaa

SEQ ID NO: 219762 - RNA, 32 nt, Human
uaaugacaaucagaagagcuaccugcccucug

SEQ ID NO: 219763 - RNA, 32 nt, Human
uaaugacaguagagaaguacagcaaccuguuu

SEQ ID NO: 219764 - RNA, 27 nt, Human
uaaugaccaucaccgaccagagccugg

SEQ ID NO: 219765 - RNA, 32 nt, Human
uaaugacccauaucucuauauguauguguucc

SEQ ID NO: 219766 - RNA, 32 nt, Human
uaaugacggagugcuccuucuccaguuccggg

SEQ ID NO: 219767 - RNA, 32 nt, Human
uaaugacggugacuugugucgugggggaaaac

SEQ ID NO: 219768 - RNA, 22 nt, Human
uaaugacuguccccaucuccug

SEQ ID NO: 219769 - RNA, 32 nt, Human
uaaugacuuuuguaugugugcucucuuuauaa

SEQ ID NO: 219770 - RNA, 32 nt, Human
uaaugagaaaccaggacaggccaucugcagug

SEQ ID NO: 219771 - RNA, 32 nt, Human
uaaugagaagcuuugguucugccaucucuccc

SEQ ID NO: 219772 - RNA, 32 nt, Human
uaaugagaccaugccauauaagcacaaaauuu

SEQ ID NO: 219773 - RNA, 32 nt, Human
uaaugagacugauucuggugucuuuaguuauu

SEQ ID NO: 219774 - RNA, 32 nt, Human
uaaugagacuucagaaagaaucaaaagcaaua

SEQ ID NO: 219775 - RNA, 32 nt, Human
uaaugagaugcuucagcucacaguuugaagug

SEQ ID NO: 219776 - RNA, 32 nt, Human
uaaugagccguugugcuccagccugggcgaca

SEQ ID NO: 219777 - RNA, 32 nt, Human
uaaugagccuccucaauaagagagaaguucuc

SEQ ID NO: 219778 - RNA, 32 nt, Human
uaaugagcuauuaaaacucagccugggacagu

SEQ ID NO: 219779 - RNA, 32 nt, Human
uaaugagcucaagugauccucccaccucagcc

SEQ ID NO: 219780 - RNA, 32 nt, Human
uaaugagcugguuccugcugagcucccaccau

SEQ ID NO: 219781 - RNA, 32 nt, Human
uaaugagggagggaagaaagaagaacaaauaa

SEQ ID NO: 219782 - RNA, 32 nt, Human
uaaugaggugcagagguguggggaagaccugg

SEQ ID NO: 219783 - RNA, 32 nt, Human
uaaugagguuuucaaagauucugcaagucaga

SEQ ID NO: 219784 - RNA, 32 nt, Human
uaaugagucuguucuggcucccagaagaugcc

SEQ ID NO: 219785 - RNA, 32 nt, Human
uaaugaguggucggaccguggggaagggcccc

SEQ ID NO: 219786 - RNA, 32 nt, Human
uaaugagugguucagccaucaccaccaguggc

SEQ ID NO: 219787 - RNA, 32 nt, Human
uaaugaguuccgaagguucauggagaagaauc

SEQ ID NO: 219788 - RNA, 32 nt, Human
uaaugaguuuuuaaaggcuuucuauguagugc

SEQ ID NO: 219789 - RNA, 32 nt, Human
uaaugauacaauaugguugaguaugcauuuca

SEQ ID NO: 219790 - RNA, 32 nt, Human
uaaugauacagcacuucugccaucucagcauc

SEQ ID NO: 219791 - RNA, 32 nt, Human
uaaugauacuguuuuaaagaacaggugugaaa

SEQ ID NO: 219792 - RNA, 32 nt, Human
uaaugauauguaacuuuuuaacuuuuuaaaua

SEQ ID NO: 219793 - RNA, 32 nt, Human
uaaugaucagacauaggagaaacccugaauag

SEQ ID NO: 219794 - RNA, 32 nt, Human
uaaugaugaaggggaggaaggagaggaggaug

SEQ ID NO: 219795 - RNA, 32 nt, Human
uaaugaugacauuuagcaagugcucaaaauaa

SEQ ID NO: 219796 - RNA, 32 nt, Human
uaaugaugccucuuucuuuucucagauguugc

SEQ ID NO: 219797 - RNA, 32 nt, Human
uaaugauggaguuuugcucuuacgcccaggcu

SEQ ID NO: 219798 - RNA, 32 nt, Human
uaaugaugggagaaaggggguagggugcugac

SEQ ID NO: 219799 - RNA, 32 nt, Human
uaaugauguaguaaaaagauuucuccagaaaa

SEQ ID NO: 219800 - RNA, 32 nt, Human
uaaugauguauugugccguggaaguacugugu

SEQ ID NO: 219801 - RNA, 32 nt, Human
uaaugauuccagccucucacugugccuuaugc

SEQ ID NO: 219802 - RNA, 32 nt, Human
uaaugauuccuugccuccuuuuauccagauca

SEQ ID NO: 219803 - RNA, 31 nt, Human
uaaugauucuuggaggagguuguagggagag

SEQ ID NO: 219804 - RNA, 32 nt, Human
uaaugauucuugucuaaaauugccuuaacuau

SEQ ID NO: 219805 - RNA, 32 nt, Human
uaaugauuucucccaagcaaaucaggcauacg

SEQ ID NO: 219806 - RNA, 32 nt, Human
uaaugcaacguuguucaaauauaucaaaggau

SEQ ID NO: 219807 - RNA, 32 nt, Human
uaaugcaagagaaaggagaauccccagagaaa

SEQ ID NO: 219808 - RNA, 32 nt, Human
uaaugcaagcauacccucccuugagucucaau

SEQ ID NO: 219809 - RNA, 32 nt, Human
uaaugcaauaguggaugugcacugccuguaca

SEQ ID NO: 219810 - RNA, 32 nt, Human
uaaugcaaucauagcucacugcagccuggaac

SEQ ID NO: 219811 - RNA, 32 nt, Human
uaaugcacucauuuaccuuuacauggugaaag

SEQ ID NO: 219812 - RNA, 32 nt, Human
uaaugcacugguuguuguucuuguucuuuccu

SEQ ID NO: 219813 - RNA, 32 nt, Human
uaaugcagaaugcgugccuucaucucagauuu

SEQ ID NO: 219814 - RNA, 32 nt, Human
uaaugcagagcagcuuaacauccaccacagag

SEQ ID NO: 219815 - RNA, 32 nt, Human
uaaugcagauauagugaacacuggaaagauuu

SEQ ID NO: 219816 - RNA, 32 nt, Human
uaaugcaggcuauuaucagacacagcagcagg

SEQ ID NO: 219817 - RNA, 25 nt, Human
uaaugcauauuaaguuauaugcaga

SEQ ID NO: 219818 - RNA, 32 nt, Human
uaaugcaucacugugacaaaagccacacgcau

SEQ ID NO: 219819 - RNA, 32 nt, Human
uaaugcaucuaugggccaggugcaguggcuca

SEQ ID NO: 219820 - RNA, 32 nt, Human
uaaugcaugugcaaaguuaggucuucccaguu

SEQ ID NO: 219821 - RNA, 32 nt, Human
uaaugcauguuaggaaaauuucacauuaauau

SEQ ID NO: 219822 - RNA, 32 nt, Human
uaaugcauguucugaaaggauucacuuuugac

SEQ ID NO: 219823 - RNA, 32 nt, Human
uaaugccaaagcaacagaagcagcaccagaaa

SEQ ID NO: 219824 - RNA, 32 nt, Human
uaaugccaaguggagacaauaaauugcccuuu

SEQ ID NO: 219825 - RNA, 32 nt, Human
uaaugccacugaacuguacacuuuaaaaugga

SEQ ID NO: 219826 - RNA, 32 nt, Human
uaaugccacugcacuccagccugccuggauga

SEQ ID NO: 219827 - RNA, 32 nt, Human
uaaugccagcacuuugccaaggugggcagauc

SEQ ID NO: 219828 - RNA, 32 nt, Human
uaaugccagcacuuugggaggccgaggcgggu

SEQ ID NO: 219829 - RNA, 32 nt, Human
uaaugccagcacuuugggcagcugaggcgagu

SEQ ID NO: 219830 - RNA, 32 nt, Human
uaaugccagcuacucaggaggcugaggcauga

SEQ ID NO: 219831 - RNA, 32 nt, Human
uaaugccagcuacucgggaggcugaggcacga

SEQ ID NO: 219832 - RNA, 32 nt, Human
uaaugccagcuacucgggaggcugaggcagga

SEQ ID NO: 219833 - RNA, 32 nt, Human
uaaugccagcuacuugggaggcugaggcagga

SEQ ID NO: 219834 - RNA, 32 nt, Human
uaaugccccaaagccaaaguggacccagcucu

SEQ ID NO: 219835 - RNA, 32 nt, Human
uaaugccgggcaggccgggcacaguggcucac

SEQ ID NO: 219836 - RNA, 32 nt, Human
uaaugccgguucugcuccacuuguccacucug

SEQ ID NO: 219837 - RNA, 32 nt, Human
uaaugccuaucucuuggucuauuaaggaaaga

SEQ ID NO: 219838 - RNA, 32 nt, Human
uaaugccucacagcacacuuuugaggcugagc

SEQ ID NO: 219839 - RNA, 32 nt, Human
uaaugccucuacuuggccuauuugccagagaa

SEQ ID NO: 219840 - RNA, 32 nt, Human
uaaugccugggcagggaccaggccagcgcugc

SEQ ID NO: 219841 - RNA, 32 nt, Human
uaaugcgugcaguuccugcugccugcaggcag

SEQ ID NO: 219842 - RNA, 32 nt, Human
uaaugcguucaggaguccacaccaggcacaga

SEQ ID NO: 219843 - RNA, 32 nt, Human
uaaugcuaacauaagagcuaaaugcuugauua

SEQ ID NO: 219844 - RNA, 32 nt, Human
uaaugcuagggaauaugugaagauguuuuuau

SEQ ID NO: 219845 - RNA, 32 nt, Human
uaaugcuaggguagugacugagauguaaaaau

SEQ ID NO: 219846 - RNA, 32 nt, Human
uaaugcuaucccuccccucuccacccacccca

SEQ ID NO: 219847 - RNA, 32 nt, Human
uaaugcuaucucauggugacaaguuucauguu

SEQ ID NO: 219848 - RNA, 32 nt, Human
uaaugcugauaauaccuaaagaugcauugaau

SEQ ID NO: 219849 - RNA, 32 nt, Human
uaaugcugcaggaaguaguuaggagaaaacga

SEQ ID NO: 219850 - RNA, 32 nt, Human
uaaugcuggcuacacccccacaggugacuugg

SEQ ID NO: 219851 - RNA, 32 nt, Human
uaaugcuguucuaacuacagugcucaauaaaa

SEQ ID NO: 219852 - RNA, 32 nt, Human
uaaugcuuccagaugugcacugcuucugucua

SEQ ID NO: 219853 - RNA, 32 nt, Human
uaaugcuugaaguuuuaucuacauacacaggu

SEQ ID NO: 219854 - RNA, 32 nt, Human
uaaugcuugcugaccuuagagaaugaguugag

SEQ ID NO: 219855 - RNA, 32 nt, Human
uaaugcuuggagccaagggccccagcccaccc

SEQ ID NO: 219856 - RNA, 32 nt, Human
uaaugcuugguaucucuggucuuccuaauaug

SEQ ID NO: 219857 - RNA, 32 nt, Human
uaaugcuuuuagcugcucgcaugcuugucuuu

SEQ ID NO: 219858 - RNA, 32 nt, Human
uaauggaaaauuacauugcuaauauuuaaggu

SEQ ID NO: 219859 - RNA, 32 nt, Human
uaauggaacagaaaggagguguggagauccuu

SEQ ID NO: 219860 - RNA, 32 nt, Human
uaauggaaccacagauaacaccuucuaguacu

SEQ ID NO: 219861 - RNA, 32 nt, Human
uaauggaagaggaaagugaacaguaucuucau

SEQ ID NO: 219862 - RNA, 32 nt, Human
uaauggaagguaaagaaaaauuacagaaugga

SEQ ID NO: 219863 - RNA, 32 nt, Human
uaauggaaugauugguuaaaaugugauuuuuc

SEQ ID NO: 219864 - RNA, 32 nt, Human
uaauggaauuaccuugcuccuacuucuuuuga

SEQ ID NO: 219865 - RNA, 32 nt, Human
uaauggaauucacagagguguugcagcguauc

SEQ ID NO: 219866 - RNA, 20 nt, Human
uaauggacaaauuaccaugu

SEQ ID NO: 219867 - RNA, 32 nt, Human
uaauggaccgggcuugguggcucaugcuugua

SEQ ID NO: 219868 - RNA, 32 nt, Human
uaauggacuucacugcauccaggaaugguagg

SEQ ID NO: 219869 - RNA, 32 nt, Human
uaauggagaucauuccauuacacuccagccug

SEQ ID NO: 219870 - RNA, 32 nt, Human
uaauggagccaggguuuugccauguuggccag

SEQ ID NO: 219871 - RNA, 32 nt, Human
uaauggaggggaggcugagggaaaggcucgua

SEQ ID NO: 219872 - RNA, 32 nt, Human
uaauggaguuauuguuaaaacagaguauucuu

SEQ ID NO: 219873 - RNA, 32 nt, Human
uaauggaucuacugacauuagcacuuuguaca

SEQ ID NO: 219874 - RNA, 32 nt, Human
uaauggcaacacugcgcuccagccuggcagac

SEQ ID NO: 219875 - RNA, 32 nt, Human
uaauggcacaguaccuaaugaauauuguuggc

SEQ ID NO: 219876 - RNA, 32 nt, Human
uaauggcaccacuguacuccacuugggcgaca

SEQ ID NO: 219877 - RNA, 32 nt, Human
uaauggcagaagugccugugcuagaguuccaa

SEQ ID NO: 219878 - RNA, 32 nt, Human
uaauggcagcauaaaucaaagaauuucacagg

SEQ ID NO: 219879 - RNA, 32 nt, Human
uaauggcaggugcccuucccccaaugaagucg

SEQ ID NO: 219880 - RNA, 32 nt, Human
uaauggcauucaauaaacauauguugaaagaa

SEQ ID NO: 219881 - RNA, 32 nt, Human
uaauggcauuuaaagcaaacaaacaaacaaaa

SEQ ID NO: 219882 - RNA, 32 nt, Human
uaauggccacagucuguaauccauucacauuc

SEQ ID NO: 219883 - RNA, 32 nt, Human
uaauggccccagcaucugccucuggaaaacua

SEQ ID NO: 219884 - RNA, 32 nt, Human
uaauggcgugagccaccguaccuggccauauu

SEQ ID NO: 219885 - RNA, 32 nt, Human
uaauggcgugagccacuguaccuggccauauu

SEQ ID NO: 219886 - RNA, 32 nt, Human
uaauggcugaugcuaauaauaauagcaauuac

SEQ ID NO: 219887 - RNA, 32 nt, Human
uaauggcugccucccucuccugaucucuucaa

SEQ ID NO: 219888 - RNA, 32 nt, Human
uaauggcuggagauggcuucacaugcccagua

SEQ ID NO: 219889 - RNA, 32 nt, Human
uaauggcuuccauuuaauacaggcaaagcccu

SEQ ID NO: 219890 - RNA, 32 nt, Human
uaauggcuucucuuuucucucuuguggaauug

SEQ ID NO: 219891 - RNA, 32 nt, Human
uaaugggaagccagaacauaauucuuuuucga

SEQ ID NO: 219892 - RNA, 32 nt, Human
uaaugggaaggucauuuaauuuacagaugguu

SEQ ID NO: 219893 - RNA, 32 nt, Human
uaaugggaccauugaaucccuaagguggaccu

SEQ ID NO: 219894 - RNA, 32 nt, Human
uaaugggacucuugcuauguugcucacacuag

SEQ ID NO: 219895 - RNA, 32 nt, Human
uaaugggagccaauucacaauucacuaaguga

SEQ ID NO: 219896 - RNA, 32 nt, Human
uaaugggaggagcacucggaaggguugguuug

SEQ ID NO: 219897 - RNA, 32 nt, Human
uaaugggauagagagggaaacugaggccagca

SEQ ID NO: 219898 - RNA, 32 nt, Human
uaaugggaugaggaggaauugggggugggggu

SEQ ID NO: 219899 - RNA, 32 nt, Human
uaaugggcuacugggagaaucagaugagacaa

SEQ ID NO: 219900 - RNA, 32 nt, Human
uaaugggcucugcccucauccccagucucggg

SEQ ID NO: 219901 - RNA, 32 nt, Human
uaauggggagacaaaaaugggggccaggggag

SEQ ID NO: 219902 - RNA, 32 nt, Human
uaauggggagggcugagggcucccugucccca

SEQ ID NO: 219903 - RNA, 32 nt, Human
uaauggggcagagagaugggaccuggggcaaa

SEQ ID NO: 219904 - RNA, 32 nt, Human
uaauggggcggugagaggggaacagacuggaa

SEQ ID NO: 219905 - RNA, 32 nt, Human
uacaggugugagccaccgugcccggccucuuu

SEQ ID NO: 219906 - RNA, 32 nt, Human
uacaggugugagccaccgugccuggccaauuc

SEQ ID NO: 219907 - RNA, 32 nt, Human
uacaggugugagccaccgugccuggccagugu

SEQ ID NO: 219908 - RNA, 32 nt, Human
uacaggugugagccaccgugccuggccgaggc

SEQ ID NO: 219909 - RNA, 32 nt, Human
uacaggugugagccaccucgccugggcccccu

SEQ ID NO: 219910 - RNA, 32 nt, Human
uacaggugugagccacggcacccagccuagcu

SEQ ID NO: 219911 - RNA, 32 nt, Human
uacaggugugagccacggcacccugccgaauc

SEQ ID NO: 219912 - RNA, 32 nt, Human
uacaggugugagccacggcaccuggccagaac

SEQ ID NO: 219913 - RNA, 32 nt, Human
uacaggugugagccacggugcccggcccacaa

SEQ ID NO: 219914 - RNA, 32 nt, Human
uacaggugugagccacuacacccagcccugca

SEQ ID NO: 219915 - RNA, 32 nt, Human
uacaggugugagccacuacgccccggcccaac

SEQ ID NO: 219916 - RNA, 32 nt, Human
uacaggugugagccacuauacccgaccagauc

SEQ ID NO: 219917 - RNA, 32 nt, Human
uacaggugugagccacuaugccuggccuuccc

SEQ ID NO: 219918 - RNA, 32 nt, Human
uacaggugugagccacucugccuggccuacca

SEQ ID NO: 219919 - RNA, 32 nt, Human
uacaggugugagccacugagcccagccauuua

SEQ ID NO: 219920 - RNA, 32 nt, Human
uacaggugugagccacugagcccggccacagu

SEQ ID NO: 219921 - RNA, 32 nt, Human
uacaggugugagccacugcacccaacccaacg

SEQ ID NO: 219922 - RNA, 32 nt, Human
uacaggugugagccacugcacccacccaagac

SEQ ID NO: 219923 - RNA, 32 nt, Human
uacaggugugagccacugcacccagcccacuu

SEQ ID NO: 219924 - RNA, 32 nt, Human
uacaggugugagccacugcacccagccuaccu

SEQ ID NO: 219925 - RNA, 32 nt, Human
uacaggugugagccacugcacccagccuguga

SEQ ID NO: 219926 - RNA, 32 nt, Human
uacaggugugagccacugcacccagcugagag

SEQ ID NO: 219927 - RNA, 32 nt, Human
uacaggugugagccacugcaccccuccuaaau

SEQ ID NO: 219928 - RNA, 32 nt, Human
uacaggugugagccacugcacccgaccgauac

SEQ ID NO: 219929 - RNA, 26 nt, Human
uacaggugugagccacugcacccggc

SEQ ID NO: 219930 - RNA, 32 nt, Human
uacaggugugagccacugcacccggccaacua

SEQ ID NO: 219931 - RNA, 32 nt, Human
uacaggugugagccacugcacccggccacaag

SEQ ID NO: 219932 - RNA, 32 nt, Human
uacaggugugagccacugcacccggccugaaa

SEQ ID NO: 219933 - RNA, 32 nt, Human
uacaggugugagccacugcaccucgccagaug

SEQ ID NO: 219934 - RNA, 32 nt, Human
uacaggugugagccacugcaccuggccauggu

SEQ ID NO: 219935 - RNA, 32 nt, Human
uacaggugugagccacugcaccuggccuccuu

SEQ ID NO: 219936 - RNA, 32 nt, Human
uacaggugugagccacugcaccuggcucuaau

SEQ ID NO: 219937 - RNA, 32 nt, Human
uacaggugugagccacugcacguggccuaaaa

SEQ ID NO: 219938 - RNA, 32 nt, Human
uacaggugugagccacugccuggccuggccgu

SEQ ID NO: 219939 - RNA, 32 nt, Human
uacaggugugagccacugcgcccagcacacuc

SEQ ID NO: 219940 - RNA, 32 nt, Human
uacaggugugagccacugcgcccagccagcac

SEQ ID NO: 219941 - RNA, 32 nt, Human
uacaggugugagccacugcgcccagccuauac

SEQ ID NO: 219942 - RNA, 32 nt, Human
uacaggugugagccacugcgcccagucaugcc

SEQ ID NO: 219943 - RNA, 32 nt, Human
uacaggugugagccacugcgcccggccaugcc

SEQ ID NO: 219944 - RNA, 32 nt, Human
uacaggugugagccacugcgccgggccuaaua

SEQ ID NO: 219945 - RNA, 32 nt, Human
uacaggugugagccacugcgccuggacugagu

SEQ ID NO: 219946 - RNA, 32 nt, Human
uacaggugugagccacugcgccuggccuguug

SEQ ID NO: 219947 - RNA, 32 nt, Human
uacaggugugagccacugggcccggucuuuuu

SEQ ID NO: 219948 - RNA, 32 nt, Human
uacaggugugagccacugugcccagcaguuuc

SEQ ID NO: 219949 - RNA, 32 nt, Human
uacaggugugagccacugugcccagccuaauu

SEQ ID NO: 219950 - RNA, 32 nt, Human
uacaggugugagccacugugcccagccucuuc

SEQ ID NO: 219951 - RNA, 32 nt, Human
uacaggugugagccacugugcccagccucuuu

SEQ ID NO: 219952 - RNA, 32 nt, Human
uacaggugugagccacugugcccagcgugauu

SEQ ID NO: 219953 - RNA, 32 nt, Human
uacaggugugagccacugugcccagcucucau

SEQ ID NO: 219954 - RNA, 32 nt, Human
uacaggugugagccacugugcccggccaaaag

SEQ ID NO: 219955 - RNA, 32 nt, Human
uacaggugugagccacugugccuaccagcuuu

SEQ ID NO: 219956 - RNA, 32 nt, Human
uacaggugugagccacugugccuagccuauaa

SEQ ID NO: 219957 - RNA, 32 nt, Human
uacaggugugagccacugugccuggccuccgg

SEQ ID NO: 219958 - RNA, 32 nt, Human
uacaggugugagccacugugccuggccugauu

SEQ ID NO: 219959 - RNA, 32 nt, Human
uacaggugugagccacugugccuggccuucua

SEQ ID NO: 219960 - RNA, 32 nt, Human
uacaggugugagccacugugcguggccuccca

SEQ ID NO: 219961 - RNA, 32 nt, Human
uacaggugugagccacugugcucggccuaccu

SEQ ID NO: 219962 - RNA, 32 nt, Human
uacaggugugagccacuguggccgaccuacua

SEQ ID NO: 219963 - RNA, 32 nt, Human
uacaggugugagccacuguguccagccuguaa

SEQ ID NO: 219964 - RNA, 32 nt, Human
uacaggugugagccacugugucuagccaaguu

SEQ ID NO: 219965 - RNA, 32 nt, Human
uacaggugugagccacuucaccaggcccauuu

SEQ ID NO: 219966 - RNA, 32 nt, Human
uacaggugugagccaucacacucggccaaagc

SEQ ID NO: 219967 - RNA, 32 nt, Human
uacaggugugagccaucacgcucggccaagag

SEQ ID NO: 219968 - RNA, 32 nt, Human
uacaggugugagccaucgcgccuggccaggac

SEQ ID NO: 219969 - RNA, 32 nt, Human
uacaggugugagccauggcacccagcccuaga

SEQ ID NO: 219970 - RNA, 32 nt, Human
uacaggugugagccauugugccuggccaaguu

SEQ ID NO: 219971 - RNA, 32 nt, Human
uacaggugugagccgccaugcccggccgggcu

SEQ ID NO: 219972 - RNA, 32 nt, Human
uacaggugugagccgcugggcccagccugguu

SEQ ID NO: 219973 - RNA, 32 nt, Human
uacaggugugagccuccaugcccagccuaaau

SEQ ID NO: 219974 - RNA, 28 nt, Human
uacaggugugagcuaccaugcccagcca

SEQ ID NO: 219975 - RNA, 32 nt, Human
uacaggugugagcuacugcgcccagccccaga

SEQ ID NO: 219976 - RNA, 32 nt, Human
uacaggugugagcuacugugcccagccugcaa

SEQ ID NO: 219977 - RNA, 32 nt, Human
uacaggugugagcugccacgcccagccccagu

SEQ ID NO: 219978 - RNA, 32 nt, Human
uacaggugugaggcacggugcccagccaauau

SEQ ID NO: 219979 - RNA, 32 nt, Human
uacaggugugagucaccgugcccagccuggac

SEQ ID NO: 219980 - RNA, 19 nt, Human
uacaggugugcaccaccac

SEQ ID NO: 219981 - RNA, 20 nt, Human
uacaggugugcaccaccacg

SEQ ID NO: 219982 - RNA, 20 nt, Human
uacaggugugcaccaccaug

SEQ ID NO: 219983 - RNA, 23 nt, Human
uacaggugugcaccaccaugccc

SEQ ID NO: 219984 - RNA, 32 nt, Human
uacaggugugcaccaccaugcccagcuaguuu

SEQ ID NO: 219985 - RNA, 32 nt, Human
uacaggugugcaccaccaugccugguucauuu

SEQ ID NO: 219986 - RNA, 19 nt, Human
uacaggugugcaccacccg

SEQ ID NO: 219987 - RNA, 19 nt, Human
uacaggugugcacuaccac

SEQ ID NO: 219988 - RNA, 20 nt, Human
uacaggugugcacuaccacg

SEQ ID NO: 219989 - RNA, 32 nt, Human
uacaggugugcacuaccaugcccagcuaauuu

SEQ ID NO: 219990 - RNA, 32 nt, Human
uacaggugugcacuccucgccuggcuaauuuu

SEQ ID NO: 219991 - RNA, 18 nt, Human
uacaggugugccaccacg

SEQ ID NO: 219992 - RNA, 20 nt, Human
uacaggugugccccaccacg

SEQ ID NO: 219993 - RNA, 32 nt, Human
uacaggugugcgccaccaagcccagccaauug

SEQ ID NO: 219994 - RNA, 32 nt, Human
uacaggugugcgccaccaagcccagccaauuu

SEQ ID NO: 219995 - RNA, 20 nt, Human
uacaggugugcgccaccacg

SEQ ID NO: 219996 - RNA, 23 nt, Human
uacaggugugcgccaccaugccc

SEQ ID NO: 219997 - RNA, 32 nt, Human
uacaggugugcgccaccaugcccgacuaauuu

SEQ ID NO: 219998 - RNA, 32 nt, Human
uacaggugugcgccaccaugcccggccucagc

SEQ ID NO: 219999 - RNA, 32 nt, Human
uacaggugugcgccaccaugcccggcuaauuu

SEQ ID NO: 220000 - RNA, 32 nt, Human
uacaggugugcgccaccauguccggcuaauuu

SEQ ID NO: 220001 - RNA, 32 nt, Human
uacagguguggcugacucugagcccaggccug

SEQ ID NO: 220002 - RNA, 19 nt, Human
uacagguguguaccgccac

SEQ ID NO: 220003 - RNA, 23 nt, Human
uacaggugugugccaccacgccc

SEQ ID NO: 220004 - RNA, 31 nt, Human
uacaggugugugccaccauacuuggcuaauu

SEQ ID NO: 220005 - RNA, 32 nt, Human
uacaggugugugccaccaugcccagacgccca

SEQ ID NO: 220006 - RNA, 32 nt, Human
uacaggugugugccaccaugcccgucucauuu

SEQ ID NO: 220007 - RNA, 32 nt, Human
uacaggugugugccaccaugccuggcuaauuu

SEQ ID NO: 220008 - RNA, 32 nt, Human
uacaggugugugccaccaugcuuggcuaauuu

SEQ ID NO: 220009 - RNA, 32 nt, Human
uacaggugugugccacuacggcuggcuaauuu

SEQ ID NO: 220010 - RNA, 32 nt, Human
uacaggugugugccgcaaugcccagcuaauuu

SEQ ID NO: 220011 - RNA, 32 nt, Human
uacaggugugugccgccaugcccagucucuuu

SEQ ID NO: 220012 - RNA, 32 nt, Human
uacagguguguggcaccaugcccagcuaauuu

SEQ ID NO: 220013 - RNA, 23 nt, Human
uacaggugugugucaccacgccc

SEQ ID NO: 220014 - RNA, 32 nt, Human
uacagguuaccguugagaacaaucaucuaaau

SEQ ID NO: 220015 - RNA, 32 nt, Human
uacagguuagaaaauuccagagaguucauauu

SEQ ID NO: 220016 - RNA, 32 nt, Human
uacagguuagaaaauuccagaguucauauuaa

SEQ ID NO: 220017 - RNA, 22 nt, Human
uacagguucuuuucugguguca

SEQ ID NO: 220018 - RNA, 32 nt, Human
uacagguuuagaagagaaaagagcaacagauu

SEQ ID NO: 220019 - RNA, 32 nt, Human
uacagguuugagccaccgugccuggccuaagu

SEQ ID NO: 220020 - RNA, 32 nt, Human
uacagguuugagccacugcaccuagucuuuuu

SEQ ID NO: 220021 - RNA, 32 nt, Human
uacagguuugcaccaccaugcccggcuaauuu

SEQ ID NO: 220022 - RNA, 32 nt, Human
uacagguuugccaaaggaaaagccuggcucug

SEQ ID NO: 220023 - RNA, 32 nt, Human
uacaguaaagcaauuguugcaagaugaauggc

SEQ ID NO: 220024 - RNA, 32 nt, Human
uacaguaaucuacauaaauauaccucagaaau

SEQ ID NO: 220025 - RNA, 32 nt, Human
uacaguacaucauuccuccucacuaggagcac

SEQ ID NO: 220026 - RNA, 32 nt, Human
uacaguacuccuagggcuugacccugguaccc

SEQ ID NO: 220027 - RNA, 20 nt, Human
uacaguacugacaccaccac

SEQ ID NO: 220028 - RNA, 30 nt, Human
uacaguagccucuucaggcuuuguaauuuu

SEQ ID NO: 220029 - RNA, 32 nt, Human
uacaguagcucaugccuguaaucccagcacuu

SEQ ID NO: 220030 - RNA, 32 nt, Human
uacaguaggcccugagccgacugugaauucgg

SEQ ID NO: 220031 - RNA, 32 nt, Human
uacaguaguguagcgcccccucccucuuucgg

SEQ ID NO: 220032 - RNA, 21 nt, Human
uacaguauguucaguacacug

SEQ ID NO: 220033 - RNA, 32 nt, Human
uacaguauuguucugggaucugggcaaguugu

SEQ ID NO: 220034 - RNA, 32 nt, Human
uacagucaagaagaggaaagugugugaagacc

SEQ ID NO: 220035 - RNA, 32 nt, Human
uacagucaagauagaaagggugcugccacgga

SEQ ID NO: 220036 - RNA, 32 nt, Human
uacagucaauauguuggaggcaugcuaaggua

SEQ ID NO: 220037 - RNA, 32 nt, Human
uacagucaccucaguguucagaccauguuuau

SEQ ID NO: 220038 - RNA, 32 nt, Human
uacagucaccucauguugcagaccauguuuau

SEQ ID NO: 220039 - RNA, 32 nt, Human
uacagucaccuguggcagaggugugcagaggc

SEQ ID NO: 220040 - RNA, 32 nt, Human
uacagucagcccaggagguuacagugagcucu

SEQ ID NO: 220041 - RNA, 19 nt, Human
uacagucaggcaccaccac

SEQ ID NO: 220042 - RNA, 32 nt, Human
uacagucaggcaccaccacacccggcuaauuu

SEQ ID NO: 220043 - RNA, 32 nt, Human
uacagucaugagccaccacucccggccuuauu

SEQ ID NO: 220044 - RNA, 32 nt, Human
uacagucaugagccaccaugcccagccuacca

SEQ ID NO: 220045 - RNA, 32 nt, Human
uacagucaugagccaccaugcccagccuauuu

SEQ ID NO: 220046 - RNA, 32 nt, Human
uacagucaugagccaccgugcccagccuaauu

SEQ ID NO: 220047 - RNA, 32 nt, Human
uacagucaugagucaccaugccuggcccaagu

SEQ ID NO: 220048 - RNA, 32 nt, Human
uacaguccaucugcaagaggcaaguuuguguc

SEQ ID NO: 220049 - RNA, 20 nt, Human
uacagucgcccgccaccacg

SEQ ID NO: 220050 - RNA, 32 nt, Human
uacagucgcuagucaagugguuuuuaaaguaa

SEQ ID NO: 220051 - RNA, 32 nt, Human
uacagucgugagccacuguaccccgccuaaaa

SEQ ID NO: 220052 - RNA, 32 nt, Human
uacagucuccaccuccccgucuuccucugggu

SEQ ID NO: 220053 - RNA, 32 nt, Human
uacagucuggaaaauaaaguugagggaaucuc

SEQ ID NO: 220054 - RNA, 32 nt, Human
uacagucuguaugucugugucucccuagaauu

SEQ ID NO: 220055 - RNA, 32 nt, Human
uacagucuucauuuuagugcuuuacacauucg

SEQ ID NO: 220056 - RNA, 32 nt, Human
uacagucuuucuuucugaauuuugaguaucuu

SEQ ID NO: 220057 - RNA, 32 nt, Human
uacagugaaugagagaaaucugccuggaaauu

SEQ ID NO: 220058 - RNA, 32 nt, Human
uacagugacaucucucaguguuuccaacacag

SEQ ID NO: 220059 - RNA, 32 nt, Human
uacagugagaccaagaggaaaaauguguuucg

SEQ ID NO: 220060 - RNA, 21 nt, Human
uacagugagccaagaucacac

SEQ ID NO: 220061 - RNA, 21 nt, Human
uacagugagccaugaucacac

SEQ ID NO: 220062 - RNA, 21 nt, Human
uacagugagcuaugauuacac

SEQ ID NO: 220063 - RNA, 25 nt, Human
uacagugagcugagaucacacgcca

SEQ ID NO: 220064 - RNA, 21 nt, Human
uacagugagcuguggucacac

SEQ ID NO: 220065 - RNA, 32 nt, Human
uacagugaggacucggccacugugucucuguu

SEQ ID NO: 220066 - RNA, 32 nt, Human
uacagugaugacugcucacugcagccuccacc

SEQ ID NO: 220067 - RNA, 32 nt, Human
uacagugcaauggcaugaucacggcucacugc

SEQ ID NO: 220068 - RNA, 32 nt, Human
uacagugcaguggugugaucacagcucacugc

SEQ ID NO: 220069 - RNA, 32 nt, Human
uacagugcaguuucaguauguuucauguuagu

SEQ ID NO: 220070 - RNA, 32 nt, Human
uacagugccacugcaauccagccugggcaaca

SEQ ID NO: 220071 - RNA, 32 nt, Human
uacagugccccagggcagagacauguuccucu

SEQ ID NO: 220072 - RNA, 32 nt, Human
uacagugccugccaccaugcccagcuaauuuu

SEQ ID NO: 220073 - RNA, 32 nt, Human
uacagugcuuggauagcagcaucaaggagcau

SEQ ID NO: 220074 - RNA, 32 nt, Human
uacagugcuugguggguggugccugugccuga

SEQ ID NO: 220075 - RNA, 32 nt, Human
uacagugcuuuggauucuuccucccaggccua

SEQ ID NO: 220076 - RNA, 31 nt, Human
uacaguggcacaaucucagcucacugcggcc

SEQ ID NO: 220077 - RNA, 31 nt, Human
uacaguggcacaaucucggcucacugcaacc

SEQ ID NO: 220078 - RNA, 31 nt, Human
uacaguggcacgaucucagcucacugcaacc

SEQ ID NO: 220079 - RNA, 31 nt, Human
uacaguggcgcaaucucagcucgcugcaacc

SEQ ID NO: 220080 - RNA, 32 nt, Human
uacaguggcgcacaccuguaaucccagcuacu

SEQ ID NO: 220081 - RNA, 32 nt, Human
uacaguggcucacaccuguaaucccagcacuu

SEQ ID NO: 220082 - RNA, 32 nt, Human
uacaguggcucaccccuguaaucccagcacuu

SEQ ID NO: 220083 - RNA, 32 nt, Human
uacaguggcucaugccuguaaucccagcacuu

SEQ ID NO: 220084 - RNA, 32 nt, Human
uacaguggcugcaccaaauuggaggugugggu

SEQ ID NO: 220085 - RNA, 32 nt, Human
uacaguggggcugagcacccccaggccuucca

SEQ ID NO: 220086 - RNA, 32 nt, Human
uacaguggucacugcaaccuccaucucccugg

SEQ ID NO: 220087 - RNA, 31 nt, Human
uacaguggugcgaucucagcucacugcaacu

SEQ ID NO: 220088 - RNA, 32 nt, Human
uacagugguucaugccuguaaucccagaacuu

SEQ ID NO: 220089 - RNA, 32 nt, Human
uacagugguucaugccuguaaucccagcacuu

SEQ ID NO: 220090 - RNA, 32 nt, Human
uacaguguaaauuuuuccuccuuuaccuuugu

SEQ ID NO: 220091 - RNA, 32 nt, Human
uacaguguaugccuuuuccuucaugcagaauu

SEQ ID NO: 220092 - RNA, 32 nt, Human
uacagugucacaggugguggggaccaggggau

SEQ ID NO: 220093 - RNA, 32 nt, Human
uacagugucucacaccuguaaucccagcacuu

SEQ ID NO: 220094 - RNA, 32 nt, Human
uacaguguggaguguugagaccagacaccuuu

SEQ ID NO: 220095 - RNA, 32 nt, Human
uacagugugggugguggugcugggcuggacua

SEQ ID NO: 220096 - RNA, 32 nt, Human
uacaguguuaucugugaaugcacauauuaaau

SEQ ID NO: 220097 - RNA, 31 nt, Human
uacaguguuuuauuugguccugugucuuucg

SEQ ID NO: 220098 - RNA, 32 nt, Human
uacaguuaaagaaauugacuugguacuuaaaa

SEQ ID NO: 220099 - RNA, 31 nt, Human
uacaguuacagguagaauacuguaggaaguc

SEQ ID NO: 220100 - RNA, 21 nt, Human
uacaguuacaucuuaauucca

SEQ ID NO: 220101 - RNA, 32 nt, Human
uacaguuagcugucacucagcugacaccauga

SEQ ID NO: 220102 - RNA, 20 nt, Human
uacaguuaugcaccaccaug

SEQ ID NO: 220103 - RNA, 32 nt, Human
uacaguuauuucccccucccugccuuaaaacu

SEQ ID NO: 220104 - RNA, 32 nt, Human
uacaguucaaccugccuuaacacaacaguauc

SEQ ID NO: 220105 - RNA, 32 nt, Human
uacaguucagacuugaggggaggugacaagag

SEQ ID NO: 220106 - RNA, 32 nt, Human
uacaguucauccagauggagaagagaagccau

SEQ ID NO: 220107 - RNA, 32 nt, Human
uacaguucaugguauaaggucauuuagggugc

SEQ ID NO: 220108 - RNA, 32 nt, Human
uacaguuccucgcucagaacagcuucagcugu

SEQ ID NO: 220109 - RNA, 32 nt, Human
uacaguucucuucuaaaaagcauuucaccuuu

SEQ ID NO: 220110 - RNA, 32 nt, Human
uacaguucuggcagugggcggcugcaagccaa

SEQ ID NO: 220111 - RNA, 32 nt, Human
uacaguucuuagccucaggccuaggauuaagu

SEQ ID NO: 220112 - RNA, 32 nt, Human
uacaguugaauuccuagucuuccuucauccuu

SEQ ID NO: 220113 - RNA, 32 nt, Human
uacaguugccaaggaggaaaauacugaaugac

SEQ ID NO: 220114 - RNA, 20 nt, Human
uacaguugcccaccaccaug

SEQ ID NO: 220115 - RNA, 32 nt, Human
uacaguugcgagccaccgcgcccgaccuauuu

SEQ ID NO: 220116 - RNA, 32 nt, Human
uacaguugcucacgccuguaaucccagaacuu

SEQ ID NO: 220117 - RNA, 32 nt, Human
uacaguugcucacgccuguaaucccagaauuu

SEQ ID NO: 220118 - RNA, 32 nt, Human
uacaguugcuguugugugaucaagcaugucuc

SEQ ID NO: 220119 - RNA, 32 nt, Human
uacaguugcuuacaccuguaaucccagcacuu

SEQ ID NO: 220120 - RNA, 22 nt, Human
uacaguuguacuguuucuuuua

SEQ ID NO: 220121 - RNA, 25 nt, Human
uacaguugucuacagaucacaucca

SEQ ID NO: 220122 - RNA, 32 nt, Human
uacaguugugagccacugugccuggccuuuuu

SEQ ID NO: 220123 - RNA, 19 nt, Human
uacaguugugcaccaccac

SEQ ID NO: 220124 - RNA, 32 nt, Human
uacaguugugccaucuuccuccagcaccagga

SEQ ID NO: 220125 - RNA, 32 nt, Human
uacaguuucuagcauuaaacaaauaaacaagg

SEQ ID NO: 220126 - RNA, 32 nt, Human
uacaguuugcucugauguuggcauuuuaugaa

SEQ ID NO: 220127 - RNA, 32 nt, Human
uacaguuuucuccuucuucugauccagccaca

SEQ ID NO: 220128 - RNA, 32 nt, Human
uacauaaaaaggaaaagaaaguagacauuuua

SEQ ID NO: 220129 - RNA, 32 nt, Human
uacauaaaaugcaagaaaacagcauggccagu

SEQ ID NO: 220130 - RNA, 32 nt, Human
uacauaaaccucagacucucccccucucaaca

SEQ ID NO: 220131 - RNA, 31 nt, Human
uacauaaacuuuaaacuacauuuaaaacuag

SEQ ID NO: 220132 - RNA, 32 nt, Human
uacauaaaguaauuucacuaugauguuaccau

SEQ ID NO: 220133 - RNA, 32 nt, Human
uacauaacaaaccugcacauugugcacaugua

SEQ ID NO: 220134 - RNA, 32 nt, Human
uacauaacauuguguggaugaaaugcugcauc

SEQ ID NO: 220135 - RNA, 32 nt, Human
uacauaaccuggaagacugagaaggguauauu

SEQ ID NO: 220136 - RNA, 32 nt, Human
uacauaagcuaguuucuguucuguaaagugau

SEQ ID NO: 220137 - RNA, 32 nt, Human
uacauaaggaagagaagaaauugaguggcaua

SEQ ID NO: 220138 - RNA, 32 nt, Human
uacauaaggagagaagguacagugaugaagga

SEQ ID NO: 220139 - RNA, 24 nt, Human
uacauaagguacugaaguuagcca

SEQ ID NO: 220140 - RNA, 32 nt, Human
uacauaauugcagaagcacaagccauacaucg

SEQ ID NO: 220141 - RNA, 21 nt, Human
uacauacaaacaaugcaacca

SEQ ID NO: 220142 - RNA, 32 nt, Human
uacauacaaaccugugugccaagugacagcua

SEQ ID NO: 220143 - RNA, 32 nt, Human
uacauacaaauguacacagucauauaugacua

SEQ ID NO: 220144 - RNA, 32 nt, Human
uacauacaauuuaaaaaguacagguaguacug

SEQ ID NO: 220145 - RNA, 22 nt, Human
uacauacacagcaagggugaga

SEQ ID NO: 220146 - RNA, 32 nt, Human
uacauacacauacauacauacauacauauaua

SEQ ID NO: 220147 - RNA, 32 nt, Human
uacauacacaugcgugcacacuguuaugacac

SEQ ID NO: 220148 - RNA, 32 nt, Human
uacauacacguauuaacaaaacaaaugcaaag

SEQ ID NO: 220149 - RNA, 32 nt, Human
uacauacagcacaauguuauuaccuauaaucc

SEQ ID NO: 220150 - RNA, 32 nt, Human
uacauacauacacacauacauacauaugcaca

SEQ ID NO: 220151 - RNA, 32 nt, Human
uacauacauaugcacacacacguacacgcaga

SEQ ID NO: 220152 - RNA, 32 nt, Human
uacauaccuggggcaggggcuuggggaggugg

SEQ ID NO: 220153 - RNA, 32 nt, Human
uacauacgugcacacacacauacauauucaua

SEQ ID NO: 220154 - RNA, 32 nt, Human
uacauacugcugucuauguggcuguaucuugu

SEQ ID NO: 220155 - RNA, 32 nt, Human
uacauacuucauuucuuuccuccucucuugcu

SEQ ID NO: 220156 - RNA, 32 nt, Human
uacauagcacauccagggcugagcaagaaaua

SEQ ID NO: 220157 - RNA, 32 nt, Human
uacauagcaucagugaauaguaaugaguggua

SEQ ID NO: 220158 - RNA, 32 nt, Human
uacauagcauugaagaauauauuucacugugc

SEQ ID NO: 220159 - RNA, 32 nt, Human
uacauagcugcaagcaaaccauuuuuccccuu

SEQ ID NO: 220160 - RNA, 32 nt, Human
uacauaggcaaacuguugggagcugcucuagu

SEQ ID NO: 220161 - RNA, 32 nt, Human
uacauagggaagggaggaagggaaaacagaaa

SEQ ID NO: 220162 - RNA, 32 nt, Human
uacauagguauuucauugcggaucaggaaaga

SEQ ID NO: 220163 - RNA, 32 nt, Human
uacauagguuacgucagccuacuguggcuguu

SEQ ID NO: 220164 - RNA, 32 nt, Human
uacauaguagcauguaucaacacuucauuuuu

SEQ ID NO: 220165 - RNA, 32 nt, Human
uacauaguauguuacugauaaaggaaugacua

SEQ ID NO: 220166 - RNA, 32 nt, Human
uacauagucaucugagcuaaacguucuguauu

SEQ ID NO: 220167 - RNA, 23 nt, Human
uacauagugacauuccaguucca

SEQ ID NO: 220168 - RNA, 32 nt, Human
uacauaguuuguauaacaaaggauuuauuuau

SEQ ID NO: 220169 - RNA, 32 nt, Human
uacauauaauuguuuuugugguuguuuuguuu

SEQ ID NO: 220170 - RNA, 32 nt, Human
uacauauacauguacacauacacauaaauauu

SEQ ID NO: 220171 - RNA, 32 nt, Human
uacauauagcuuugcaaccuuguacuuuacaa

SEQ ID NO: 220172 - RNA, 32 nt, Human
uacauauauaaauauauaaauacaaacacaca

SEQ ID NO: 220173 - RNA, 32 nt, Human
uacauauaugaagcuuuuaaaaagcacaaguu

SEQ ID NO: 220174 - RNA, 21 nt, Human
uacauaugauaggcagcacug

SEQ ID NO: 220175 - RNA, 32 nt, Human
uacauaugcacgcacacacacaugcacacaua

SEQ ID NO: 220176 - RNA, 32 nt, Human
uacauaugcugcuuucuuuccuggugaaaauu

SEQ ID NO: 220177 - RNA, 32 nt, Human
uacauauguauacacacacauaauuugaaaac

SEQ ID NO: 220178 - RNA, 19 nt, Human
uacauauguaucuagacug

SEQ ID NO: 220179 - RNA, 32 nt, Human
uacauauguauguauauacguauguauacaua

SEQ ID NO: 220180 - RNA, 19 nt, Human
uacauauguauuauacacu

SEQ ID NO: 220181 - RNA, 32 nt, Human
uacauauguggacauaaacagggaucaaauaa

SEQ ID NO: 220182 - RNA, 22 nt, Human
uacauauguguaacuuacacug

SEQ ID NO: 220183 - RNA, 32 nt, Human
uacauauguguguguggguauguguuuauuuc

SEQ ID NO: 220184 - RNA, 32 nt, Human
uacauauguuuguguguauauguaaauauauu

SEQ ID NO: 220185 - RNA, 32 nt, Human
uacauauuagguuggugcaaaauaauuguggu

SEQ ID NO: 220186 - RNA, 32 nt, Human
uacauauucguuuucaauacuugcuguucaug

SEQ ID NO: 220187 - RNA, 32 nt, Human
uacauauuuuguuucaaaauguuugaaacaaa

SEQ ID NO: 220188 - RNA, 32 nt, Human
uacaucaacuauuuucagcccaaaaaggugcc

SEQ ID NO: 220189 - RNA, 32 nt, Human
uacaucaagacaccggugaggggcgaggaacc

SEQ ID NO: 220190 - RNA, 32 nt, Human
uacaucaaucuagagaaagagaaggacgaccc

SEQ ID NO: 220191 - RNA, 32 nt, Human
uacaucaccagccugggcgacagagugagacu

SEQ ID NO: 220192 - RNA, 32 nt, Human
uacaucacucaaccugaacacaggggaggcag

SEQ ID NO: 220193 - RNA, 32 nt, Human
uacaucacucuaaccugaacagcucacaaugu

SEQ ID NO: 220194 - RNA, 32 nt, Human
uacaucagagagagcgugaucccccuacagcu

SEQ ID NO: 220195 - RNA, 32 nt, Human
uacaucagcuguccuaagaagcaguugucaca

SEQ ID NO: 220196 - RNA, 32 nt, Human
uacaucauacagggaagagagaagggaggagg

SEQ ID NO: 220197 - RNA, 32 nt, Human
uacaucauauuccuuaccucuuuugggaaaua

SEQ ID NO: 220198 - RNA, 32 nt, Human
uacaucaugccgcgcuguuguaauacuguaua

SEQ ID NO: 220199 - RNA, 32 nt, Human
uacaucauggugcuggccuggggcuucuauua

SEQ ID NO: 220200 - RNA, 32 nt, Human
uacaucauucacagacuuugguguuuuaagug

SEQ ID NO: 220201 - RNA, 32 nt, Human
uacauccagccuguggcuuugcccaccaggac

SEQ ID NO: 220202 - RNA, 32 nt, Human
uacauccagcugacucagcugaagaugaaucg

SEQ ID NO: 220203 - RNA, 32 nt, Human
uacauccagcuucuggggucagccagggcaau

SEQ ID NO: 220204 - RNA, 32 nt, Human
uacauccauaucuguauuuauaucuuauuugu

SEQ ID NO: 220205 - RNA, 32 nt, Human
uacaucccacaccccacccucccuucccuuca

SEQ ID NO: 220206 - RNA, 32 nt, Human
uacaucccacagaacuggugacuaugaaacac

SEQ ID NO: 220207 - RNA, 32 nt, Human
uacaucccagccugugguuacagugcagacag

SEQ ID NO: 220208 - RNA, 32 nt, Human
uacaucccugaaacugagcacauuucugacca

SEQ ID NO: 220209 - RNA, 32 nt, Human
uacaucccugugcaaaugccauaaucccagcu

SEQ ID NO: 220210 - RNA, 32 nt, Human
uacaucccuuucucccuucccuccucuugcuc

SEQ ID NO: 220211 - RNA, 32 nt, Human
uacauccuacugcuuuggccucccucuccucu

SEQ ID NO: 220212 - RNA, 20 nt, Human
uacauccuauuguuucuuuc

SEQ ID NO: 220213 - RNA, 32 nt, Human
uacauccucugccaucagcacaggugcccaga

SEQ ID NO: 220214 - RNA, 32 nt, Human
uacauccugccucccauccacaugguccaauc

SEQ ID NO: 220215 - RNA, 32 nt, Human
uacauccuggguaaugagagguggcuuuugcg

SEQ ID NO: 220216 - RNA, 32 nt, Human
uacaucgucuucgucuuccuccugggcgccau

SEQ ID NO: 220217 - RNA, 32 nt, Human
uacaucuagcauucugccuacaguucagacag

SEQ ID NO: 220218 - RNA, 32 nt, Human
uacaucuaggguacccucccaugucaugaagu

SEQ ID NO: 220219 - RNA, 32 nt, Human
uacaucuccaggaagaugggcugccagcaacu

SEQ ID NO: 220220 - RNA, 32 nt, Human
uacaucuccauuagggcugaaaagaaugaccu

SEQ ID NO: 220221 - RNA, 32 nt, Human
uacaucuccuggaagggaugcuuuuuagcuga

SEQ ID NO: 220222 - RNA, 32 nt, Human
uacaucucggcacucuagcugcagccgggaga

SEQ ID NO: 220223 - RNA, 32 nt, Human
uacaucucuccaccucuugcacuguugucuug

SEQ ID NO: 220224 - RNA, 32 nt, Human
uacaucugaacuccuccugggcucagaagugg

SEQ ID NO: 220225 - RNA, 25 nt, Human
uacaucugaagucucuucucuuuua

SEQ ID NO: 220226 - RNA, 26 nt, Human
uacaucugacaauacugccucuuuua

SEQ ID NO: 220227 - RNA, 32 nt, Human
uacaucugaugaacuaugguaacugaagaaca

SEQ ID NO: 220228 - RNA, 32 nt, Human
uacaucuggcaaaagccaaagguuuggaagau

SEQ ID NO: 220229 - RNA, 32 nt, Human
uacaucugguuuccaccuuauuuuccugcccc

SEQ ID NO: 220230 - RNA, 32 nt, Human
uacaucugucagugagucagaggcagaaccua

SEQ ID NO: 220231 - RNA, 22 nt, Human
uacaucugucauuuucauuuca

SEQ ID NO: 220232 - RNA, 22 nt, Human
uacaucugugaaguuucuguca

SEQ ID NO: 220233 - RNA, 32 nt, Human
uacaucugugcuuuguaaguaccacuucaaaa

SEQ ID NO: 220234 - RNA, 32 nt, Human
uacaucuuacucaccugccaaggcuugguggc

SEQ ID NO: 220235 - RNA, 32 nt, Human
uacaucuucucccagauucucuggccuuuuua

SEQ ID NO: 220236 - RNA, 32 nt, Human
uacaucuuucagcaguagugcagaaccgacgu

SEQ ID NO: 220237 - RNA, 32 nt, Human
uacaugaaacacuuugggggucaugggagugc

SEQ ID NO: 220238 - RNA, 32 nt, Human
uacaugaaagaaaagaaggcagcagugaaaga

SEQ ID NO: 220239 - RNA, 32 nt, Human
uacaugaauacacacacauauucacuaaacug

SEQ ID NO: 220240 - RNA, 32 nt, Human
uacaugaauguugcaugugugcaugggagcaa

SEQ ID NO: 220241 - RNA, 28 nt, Human
uacaugaccaaagaguuugagagugaag

SEQ ID NO: 220242 - RNA, 32 nt, Human
uacaugacuuauaaauucauagauuauuaguu

SEQ ID NO: 220243 - RNA, 32 nt, Human
uacaugagaacagacuggccugaggagcagca

SEQ ID NO: 220244 - RNA, 32 nt, Human
uacaugagcagagagaaacauuauaauguagu

SEQ ID NO: 220245 - RNA, 32 nt, Human
uacaugaucuggagcaacagcuaggaaauauc

SEQ ID NO: 220246 - RNA, 32 nt, Human
uacaugauuucucacuuucauguaagguuauc

SEQ ID NO: 220247 - RNA, 32 nt, Human
uacaugcaaaaauagaaaauuauuuguuaaau

SEQ ID NO: 220248 - RNA, 32 nt, Human
uacaugcaaggcauggagcuguuugaggaagc

SEQ ID NO: 220249 - RNA, 32 nt, Human
uacaugcacacugauacauacauguacugaua

SEQ ID NO: 220250 - RNA, 32 nt, Human
uacaugcacgaagucccucugcccuacucccu

SEQ ID NO: 220251 - RNA, 32 nt, Human
uacaugcacgugcacacacauacacacacauc

SEQ ID NO: 220252 - RNA, 32 nt, Human
uacaugcagaacuugaugcguggcauuagagc

SEQ ID NO: 220253 - RNA, 32 nt, Human
uacaugcagacucaccucacacccuuacaacu

SEQ ID NO: 220254 - RNA, 32 nt, Human
uacaugcagcuacucgggaggcugaggcagga

SEQ ID NO: 220255 - RNA, 32 nt, Human
uacaugcagguugugagcuggaaaagaaaguu

SEQ ID NO: 220256 - RNA, 31 nt, Human
uacaugcaucuuuucugcagcaggcccagau

SEQ ID NO: 220257 - RNA, 32 nt, Human
uacaugcaugagccacgcgcccagccuagacu

SEQ ID NO: 220258 - RNA, 32 nt, Human
uacaugcaugagccacugugcugggcuucauu

SEQ ID NO: 220259 - RNA, 32 nt, Human
uacaugcaugcacaugaaaacaugcacaacca

SEQ ID NO: 220260 - RNA, 32 nt, Human
uacaugcaugcauuguauuaguguuagaaaac

SEQ ID NO: 220261 - RNA, 32 nt, Human
uacaugccagaggcugaugcugcacuguugau

SEQ ID NO: 220262 - RNA, 32 nt, Human
uacaugcccagccugcagugcuuccuuauggc

SEQ ID NO: 220263 - RNA, 32 nt, Human
uacaugcccagccuggggcccugagaucugac

SEQ ID NO: 220264 - RNA, 28 nt, Human
uacaugcccccagagccgagacagggau

SEQ ID NO: 220265 - RNA, 32 nt, Human
uacaugccuguaaucccagcuacuugggaggc

SEQ ID NO: 220266 - RNA, 32 nt, Human
uacaugccuguaauccuggcuacuugggaggc

SEQ ID NO: 220267 - RNA, 32 nt, Human
uacaugccuucuauauggaacauggcagaaag

SEQ ID NO: 220268 - RNA, 20 nt, Human
uacaugcgcacaccaccacg

SEQ ID NO: 220269 - RNA, 32 nt, Human
uacaugcgggugagcaagucugccuuuucccu

SEQ ID NO: 220270 - RNA, 32 nt, Human
uacaugcgugagccacugcgcccugccuguuu

SEQ ID NO: 220271 - RNA, 32 nt, Human
uacaugcugcaucuuucagccuggagacugug

SEQ ID NO: 220272 - RNA, 32 nt, Human
uacaugcugcauucugaaaguuuuaugucauc

SEQ ID NO: 220273 - RNA, 32 nt, Human
uacaugcugguaauuaugccagacaguaauaa

SEQ ID NO: 220274 - RNA, 32 nt, Human
uacauggaagcaagaaagacacugccuccucu

SEQ ID NO: 220275 - RNA, 32 nt, Human
uacauggacucagagaaaagagauugagaugu

SEQ ID NO: 220276 - RNA, 32 nt, Human
uacauggaguguguucauggucgcccauuuuu

SEQ ID NO: 220277 - RNA, 32 nt, Human
uacauggccuguaauucuuuggaccauuguaa

SEQ ID NO: 220278 - RNA, 32 nt, Human
uacaugggaagcggaggugggagaauuucuug

SEQ ID NO: 220279 - RNA, 32 nt, Human
uacaugggaggcugaggcaggagaagggcgug

SEQ ID NO: 220280 - RNA, 32 nt, Human
uacaugggaggcugaggcaggagaaucgcuug

SEQ ID NO: 220281 - RNA, 32 nt, Human
uacaugggcuuauacagggagagagucuucaa

SEQ ID NO: 220282 - RNA, 32 nt, Human
uacauggggaaagagcauguggggugggaagg

SEQ ID NO: 220283 - RNA, 32 nt, Human
uacauggggagcaucagucacacccuggguca

SEQ ID NO: 220284 - RNA, 31 nt, Human
uacaugggugagagagguuaagcugauggga

SEQ ID NO: 220285 - RNA, 32 nt, Human
uacaugguagaucaacaauucuuuuugggggu

SEQ ID NO: 220286 - RNA, 32 nt, Human
uacauggucacaguauauuuugcugcaagaaa

SEQ ID NO: 220287 - RNA, 32 nt, Human
uacauggugacuccaguacggggacauuuauc

SEQ ID NO: 220288 - RNA, 28 nt, Human
uacauggugcagccccaggggugcagcg

SEQ ID NO: 220289 - RNA, 32 nt, Human
uacauggugcagcugcuacaaggccuggacua

SEQ ID NO: 220290 - RNA, 32 nt, Human
uacauggugcuacugcucuuggaguggacaug

SEQ ID NO: 220291 - RNA, 32 nt, Human
uacauggugcuggaguacugcagccgccaguc

SEQ ID NO: 220292 - RNA, 32 nt, Human
uacaugguuuucuuuuucuuaguaugggagug

SEQ ID NO: 220293 - RNA, 32 nt, Human
uacauguaacccacagugguaccaugagaugu

SEQ ID NO: 220294 - RNA, 32 nt, Human
uacauguaccagaaucucacauggaccccaua

SEQ ID NO: 220295 - RNA, 32 nt, Human
uacauguagcaaaugugggaaagacuacagac

SEQ ID NO: 220296 - RNA, 32 nt, Human
uacauguagcaaaugugggaaagacuauaggc

SEQ ID NO: 220297 - RNA, 32 nt, Human
uacauguagcuggcuugaguuuguaccaaaac

SEQ ID NO: 220298 - RNA, 32 nt, Human
uacauguagcuucagacugcagagacaggacg

SEQ ID NO: 220299 - RNA, 32 nt, Human
uacauguauaugcacaugaaugcauauauaaa

SEQ ID NO: 220300 - RNA, 32 nt, Human
uacauguaucaaaacaucacacuguaccacau

SEQ ID NO: 220301 - RNA, 32 nt, Human
uacauguauuguguuuuccauggugcuacagu

SEQ ID NO: 220302 - RNA, 32 nt, Human
uacaugucauggagugcauugaguaggccggc

SEQ ID NO: 220303 - RNA, 32 nt, Human
uacaugucuagaaacaauaggaaauguucacu

SEQ ID NO: 220304 - RNA, 32 nt, Human
uacaugucuagggucuagacauguucagcuuu

SEQ ID NO: 220305 - RNA, 32 nt, Human
uacaugugaacaaacagaaggaaguucacucu

SEQ ID NO: 220306 - RNA, 32 nt, Human
uacaugugagccaccgugccuggccuugaguu

SEQ ID NO: 220307 - RNA, 32 nt, Human
uacaugugagccccugccagggccaaguccuu

SEQ ID NO: 220308 - RNA, 23 nt, Human
uacaugugcagaacaugcagguu

SEQ ID NO: 220309 - RNA, 23 nt, Human
uacaugugcaggaccugcagguu

SEQ ID NO: 220310 - RNA, 23 nt, Human
uacaugugcaggaugugcagguu

SEQ ID NO: 220311 - RNA, 32 nt, Human
uacaugugcucggggcugggcgcgguggcuca

SEQ ID NO: 220312 - RNA, 32 nt, Human
uacaugugggccagccugccucacuuuaccca

SEQ ID NO: 220313 - RNA, 32 nt, Human
uacauguggucacaguuuuggaagagaagauc

SEQ ID NO: 220314 - RNA, 32 nt, Human
uacauguguacagaugagaaacugcaacaaaa

SEQ ID NO: 220315 - RNA, 32 nt, Human
uacauguguagccuauguugugguccaucagc

SEQ ID NO: 220316 - RNA, 32 nt, Human
uacaugugugagccaccgccccuggccucugu

SEQ ID NO: 220317 - RNA, 32 nt, Human
uacaugugugcuuucagagcaguagugugagg

SEQ ID NO: 220318 - RNA, 32 nt, Human
uacaugugugugcacacaugguacguguccau

SEQ ID NO: 220319 - RNA, 32 nt, Human
uacaugugugugugagcacaugugugcaugug

SEQ ID NO: 220320 - RNA, 32 nt, Human
uacauguguuuauuuacauguccuaguuugau

SEQ ID NO: 220321 - RNA, 31 nt, Human
uacauguucaauaaaaguuguugaaagauua

SEQ ID NO: 220322 - RNA, 21 nt, Human
uacauguugaaaaaugugcuu

SEQ ID NO: 220323 - RNA, 32 nt, Human
uacauguugccucaccagcccugaggcuccgc

SEQ ID NO: 220324 - RNA, 32 nt, Human
uacauguugccucaccagcccugggcuccgcc

SEQ ID NO: 220325 - RNA, 32 nt, Human
uacauguuugucucccugccagcugcccuaug

SEQ ID NO: 220326 - RNA, 32 nt, Human
uacauguuuuccuaacuuuuuguauuuuucuu

SEQ ID NO: 220327 - RNA, 18 nt, Human
uacauuaaaaagauucaa

SEQ ID NO: 220328 - RNA, 32 nt, Human
uacauuaacuaaaucaauacaaguuuggggug

SEQ ID NO: 220329 - RNA, 32 nt, Human
uacauuaacucauguaaugucuuaaaucuuac

SEQ ID NO: 220330 - RNA, 32 nt, Human
uacauuaacucauguaaugucuucaaucuuac

SEQ ID NO: 220331 - RNA, 32 nt, Human
uacauuaauuaauuaaccacuagacaagcaga

SEQ ID NO: 220332 - RNA, 32 nt, Human
uacauuaauugcugucaaagaugaagaagaag

SEQ ID NO: 220333 - RNA, 32 nt, Human
uacauuacaaaucucugaggccauuaggggaa

SEQ ID NO: 220334 - RNA, 32 nt, Human
uacauuaccaugcugugccucaguuuacccau

SEQ ID NO: 220335 - RNA, 32 nt, Human
uacauuaccuuaacuggaguucaucaaguucc

SEQ ID NO: 220336 - RNA, 32 nt, Human
uacauuaggaggugaggccuugggaggugaua

SEQ ID NO: 220337 - RNA, 32 nt, Human
uacauuaguaucccacuagcccaggggagcag

SEQ ID NO: 220338 - RNA, 32 nt, Human
uacauuaguguugaugggccagaugguuuuga

SEQ ID NO: 220339 - RNA, 32 nt, Human
uacauuauaggguggguauagaugcauagaua

SEQ ID NO: 220340 - RNA, 24 nt, Human
uacauuaucagccagcccagccuu

SEQ ID NO: 220341 - RNA, 32 nt, Human
uacauuauuccacauccacagaacacuggccu

SEQ ID NO: 220342 - RNA, 32 nt, Human
uacauuauuuuagaaucauuuacuauuuaaau

SEQ ID NO: 220343 - RNA, 32 nt, Human
uacauuauuuuugucacuuugccaucauuguu

SEQ ID NO: 220344 - RNA, 32 nt, Human
uacauucacaaaccacagcuagaauuccucca

SEQ ID NO: 220345 - RNA, 32 nt, Human
uacauucacaugcuucucaccuaaguccccag

SEQ ID NO: 220346 - RNA, 32 nt, Human
uacauucaccuggucuggucucuguaagcuua

SEQ ID NO: 220347 - RNA, 32 nt, Human
uacauucagaacuuuuauuuuaaaacaaccac

SEQ ID NO: 220348 - RNA, 32 nt, Human
uacauucagcacagcugugguguccccaagug

SEQ ID NO: 220349 - RNA, 32 nt, Human
uacauucaguuucucacauuuuaugcuuucau

SEQ ID NO: 220350 - RNA, 18 nt, Human
uacauucauagugaacuc

SEQ ID NO: 220351 - RNA, 32 nt, Human
uacauucaucucucaggaggugggcugaccac

SEQ ID NO: 220352 - RNA, 32 nt, Human
uacauucaucucuguauucucucagcuguugu

SEQ ID NO: 220353 - RNA, 32 nt, Human
uacauucaugccauugugcaaccuucaccacc

SEQ ID NO: 220354 - RNA, 32 nt, Human
uacauuccacagucuuuaccguuuuauguuca

SEQ ID NO: 220355 - RNA, 32 nt, Human
uacauucccaagggaaaggagcuuuggccgca

SEQ ID NO: 220356 - RNA, 32 nt, Human
uacauucgugauuuuguuuucucccaagucag

SEQ ID NO: 220357 - RNA, 24 nt, Human
uacauucgugugugucugcuuuua

SEQ ID NO: 220358 - RNA, 32 nt, Human
uacauucguuauuuuaaaugaacaaguuuaca

SEQ ID NO: 220359 - RNA, 32 nt, Human
uacauucuagagaauugugagacuuugcccua

SEQ ID NO: 220360 - RNA, 32 nt, Human
uacauucuauguguaguuugcuuucuucauuu

SEQ ID NO: 220361 - RNA, 32 nt, Human
uacauucucaggcuggggaggaagcacauggc

SEQ ID NO: 220362 - RNA, 22 nt, Human
uacauucucuccugucuuuuca

SEQ ID NO: 220363 - RNA, 32 nt, Human
uacauucucuucuguggucucuccccuggcuu

SEQ ID NO: 220364 - RNA, 32 nt, Human
uacauucugaaaugcuggcaccaggagacggc

SEQ ID NO: 220365 - RNA, 32 nt, Human
uacauucuuacgauucuuuaacuuuucacugu

SEQ ID NO: 220366 - RNA, 32 nt, Human
uacauucuucauguggauguggccagugucag

SEQ ID NO: 220367 - RNA, 32 nt, Human
uacauucuuccagauggaaucaauaacuuuuu

SEQ ID NO: 220368 - RNA, 32 nt, Human
uacauucuuccagauucauauuacuuuucaaa

SEQ ID NO: 220369 - RNA, 32 nt, Human
uacauucuucuuaaaguccacaacagcagauu

SEQ ID NO: 220370 - RNA, 31 nt, Human
uacauucuugucauuuugccuguguuuagac

SEQ ID NO: 220371 - RNA, 32 nt, Human
uacauugauggccaucacaaugcagcuuuggu

SEQ ID NO: 220372 - RNA, 32 nt, Human
uacauugcauuuccucccuagcugcacggggc

SEQ ID NO: 220373 - RNA, 32 nt, Human
uacauugcccuuccucucccauaagauggaca

SEQ ID NO: 220374 - RNA, 32 nt, Human
uacauugcuagcgagauagggggaagacagau

SEQ ID NO: 220375 - RNA, 32 nt, Human
uacauuggaauugugccuuuucuaccacacug

SEQ ID NO: 220376 - RNA, 24 nt, Human
uacauuggagcaaggugugagaga

SEQ ID NO: 220377 - RNA, 32 nt, Human
uacauuggaugggggaacuggcucaccuucuu

SEQ ID NO: 220378 - RNA, 32 nt, Human
uacauuggggcacacaggaaaucccagugucu

SEQ ID NO: 220379 - RNA, 32 nt, Human
uacauuggguacaguguacacugcuccaguga

SEQ ID NO: 220380 - RNA, 32 nt, Human
uacauuggugucagaggaccuugacuggguuc

SEQ ID NO: 220381 - RNA, 32 nt, Human
uacauugguuugggggaagaaaaguaguucug

SEQ ID NO: 220382 - RNA, 32 nt, Human
uacauuguccauacccggacaugugaggcucu

SEQ ID NO: 220383 - RNA, 32 nt, Human
uacauugugggauguucagcacugucccuugc

SEQ ID NO: 220384 - RNA, 32 nt, Human
uacauuuaaagcuuggucggugaccuuugcau

SEQ ID NO: 220385 - RNA, 32 nt, Human
uacauuuaaauacuacuuuauuuuauaaggua

SEQ ID NO: 220386 - RNA, 32 nt, Human
uacauuuagcuucagguugucuuguuucugua

SEQ ID NO: 220387 - RNA, 32 nt, Human
uacauuuaguuaacacacauauaucugauggc

SEQ ID NO: 220388 - RNA, 32 nt, Human
uacauuuaucuaaaugugaauuggugugccac

SEQ ID NO: 220389 - RNA, 32 nt, Human
uacauuucacacauucuuuugcaaguuuuagg

SEQ ID NO: 220390 - RNA, 32 nt, Human
uacauuucagucauucgguauguggccuugua

SEQ ID NO: 220391 - RNA, 32 nt, Human
uacauuucagugcuuuuucccuaagcuguuug

SEQ ID NO: 220392 - RNA, 32 nt, Human
uacauuucauuucaucagcuuuaaucucuagu

SEQ ID NO: 220393 - RNA, 32 nt, Human
uacauuuccucuuuuugccuuuaucuccccaa

SEQ ID NO: 220394 - RNA, 32 nt, Human
uacauuuccugccuuuuucuuucaguguuuuu

SEQ ID NO: 220395 - RNA, 32 nt, Human
uacauuucucuagcucagccucacaggccaaa

SEQ ID NO: 220396 - RNA, 32 nt, Human
uacauuucuuuauagccucuucugaucucuaa

SEQ ID NO: 220397 - RNA, 32 nt, Human
uacauuugaaaccuuaaggcuaaacaaaaaua

SEQ ID NO: 220398 - RNA, 32 nt, Human
uacauuugagauuaaguugcagacauguugac

SEQ ID NO: 220399 - RNA, 32 nt, Human
uacauuugccuuggguggagcugggggugguc

SEQ ID NO: 220400 - RNA, 32 nt, Human
uacauuuggaaauguggucaucaaagaugacu

SEQ ID NO: 220401 - RNA, 32 nt, Human
uacauuuguaagaaauaacacugugaauguaa

SEQ ID NO: 220402 - RNA, 32 nt, Human
uacauuuguagugcaaaucacuuugucaaaca

SEQ ID NO: 220403 - RNA, 21 nt, Human
uacauuugucaccucucuuuc

SEQ ID NO: 220404 - RNA, 32 nt, Human
uacauuuucuacaguagcaaccacagugcaca

SEQ ID NO: 220405 - RNA, 19 nt, Human
uacauuuucugguacucug

SEQ ID NO: 220406 - RNA, 32 nt, Human
uacauuuuuaaugggagcaccuuuuaucccaa

SEQ ID NO: 220407 - RNA, 18 nt, Human
uacauuuuuaucaacaua

SEQ ID NO: 220408 - RNA, 32 nt, Human
uaccaaaaacuagacauuauuuuguauggaau

SEQ ID NO: 220409 - RNA, 32 nt, Human
uaccaaaacagcaauuugaaacuagaacuagu

SEQ ID NO: 220410 - RNA, 32 nt, Human
uaccaaaauaggagaaagugacagacagccaa

SEQ ID NO: 220411 - RNA, 32 nt, Human
uaccaaagaagcaggggaaucauuggccagug

SEQ ID NO: 220412 - RNA, 32 nt, Human
uaccaaagaaugcagaugugcuguuuuccuca

SEQ ID NO: 220413 - RNA, 32 nt, Human
uaccaaagcagcguucagggauccucucaguc

SEQ ID NO: 220414 - RNA, 32 nt, Human
uaccaaaggaaaaggcaaugggaguaaauaga

SEQ ID NO: 220415 - RNA, 32 nt, Human
uaccaaauagcugugggcuuucuggaacugcu

SEQ ID NO: 220416 - RNA, 32 nt, Human
uaccaaauguagcuuuacguugccaaaggaag

SEQ ID NO: 220417 - RNA, 32 nt, Human
uaccaacacauuuaugcugaagguuuccagag

SEQ ID NO: 220418 - RNA, 32 nt, Human
uaccaacacugaacauucaucagggaacuuuc

SEQ ID NO: 220419 - RNA, 32 nt, Human
uaccaacacuucagcagcuaggucagcaggug

SEQ ID NO: 220420 - RNA, 32 nt, Human
uaccaacauggagaaaccccaucucuacuaaa

SEQ ID NO: 220421 - RNA, 32 nt, Human
uaccaaccaaccagugcugaagagauuuuaga

SEQ ID NO: 220422 - RNA, 19 nt, Human
uaccaaccacagccuggca

SEQ ID NO: 220423 - RNA, 32 nt, Human
uaccaaccaucuuuauccuugucugcagggau

SEQ ID NO: 220424 - RNA, 19 nt, Human
uaccaaccccccacugcca

SEQ ID NO: 220425 - RNA, 32 nt, Human
uaccaacugucugaccccgaggagcucuguaa

SEQ ID NO: 220426 - RNA, 32 nt, Human
uaccaagaaagccaaggaagagcagccugacu

SEQ ID NO: 220427 - RNA, 32 nt, Human
uaccaagaacuagcaguggcccuggauucaag

SEQ ID NO: 220428 - RNA, 32 nt, Human
uaccaagacaauaccugcuacaguauuuuggg

SEQ ID NO: 220429 - RNA, 32 nt, Human
uaccaagacaccauggcucagacaugggauca

SEQ ID NO: 220430 - RNA, 32 nt, Human
uaccaagagacuguuuaccucccagaauguuu

SEQ ID NO: 220431 - RNA, 32 nt, Human
uaccaagagcauucaccuugccaucugucuug

SEQ ID NO: 220432 - RNA, 32 nt, Human
uaccaagagccuggccagugcugcugucucag

SEQ ID NO: 220433 - RNA, 32 nt, Human
uaccaagaucacaggugcacucuacacauaac

SEQ ID NO: 220434 - RNA, 32 nt, Human
uaccaagcacagaccccaguucaguugucucu

SEQ ID NO: 220435 - RNA, 32 nt, Human
uaccaagccacuuuucuugugaaaugucccau

SEQ ID NO: 220436 - RNA, 32 nt, Human
uaccaagccauggcagaggcccgcacaucccu

SEQ ID NO: 220437 - RNA, 32 nt, Human
uaccaagcucucugugcuuuggaaacugccag

SEQ ID NO: 220438 - RNA, 32 nt, Human
uaccaaggguccaaggagaggccuugcuuggc

SEQ ID NO: 220439 - RNA, 25 nt, Human
uaccaaggucugaccuaggguuccc

SEQ ID NO: 220440 - RNA, 32 nt, Human
uaccaagugcagcacuuucacaugcuugaugc

SEQ ID NO: 220441 - RNA, 32 nt, Human
uaccaagugggucagcacagggcugaggaugg

SEQ ID NO: 220442 - RNA, 32 nt, Human
uaccaaguggguuugcaccuccucauaaagaa

SEQ ID NO: 220443 - RNA, 32 nt, Human
uaccaauaacaugcaugcauuguaccaaguaa

SEQ ID NO: 220444 - RNA, 32 nt, Human
uaccaaucaugaaucuuuguuucagguucagu

SEQ ID NO: 220445 - RNA, 32 nt, Human
uaccaaugacucaccugaagugcaauacgaaa

SEQ ID NO: 220446 - RNA, 32 nt, Human
uaccaauggggaugauuuucaaagggaagugu

SEQ ID NO: 220447 - RNA, 32 nt, Human
uaccaaugucuaggaagcuguggugugaaaau

SEQ ID NO: 220448 - RNA, 32 nt, Human
uaccaauuauuugcuagguccugugcaaggaa

SEQ ID NO: 220449 - RNA, 32 nt, Human
uaccaauugugaacacaaaauaucugauaugg

SEQ ID NO: 220450 - RNA, 32 nt, Human
uaccaauuuccugagguaauuucugaacucga

SEQ ID NO: 220451 - RNA, 32 nt, Human
uaccaauuugccuccuccuuccucacuucguu

SEQ ID NO: 220452 - RNA, 32 nt, Human
uaccaauuuuagaauauuauuucuugguuucu

SEQ ID NO: 220453 - RNA, 32 nt, Human
uaccacaauccuccuccuccucuccaggggcc

SEQ ID NO: 220454 - RNA, 32 nt, Human
uaccacacccagcuaauuuuguauuucuagua

SEQ ID NO: 220455 - RNA, 32 nt, Human
uaccacacccagcugauuuuuguauuuuuagu

SEQ ID NO: 220456 - RNA, 32 nt, Human
uaccacacuaggucucugggcccuugugcuuc

SEQ ID NO: 220457 - RNA, 32 nt, Human
uaccacacucuccccagcaucuacucaaggua

SEQ ID NO: 220458 - RNA, 32 nt, Human
uaccacacucugcuuaguuaguaugcugauaa

SEQ ID NO: 220459 - RNA, 32 nt, Human
uaccacagaccacccuucaugcuggggcucug

SEQ ID NO: 220460 - RNA, 32 nt, Human
uaccacagauguagacaaaaaugaucucugaa

SEQ ID NO: 220461 - RNA, 32 nt, Human
uaccacaggaccugggcuucgucuccagggga

SEQ ID NO: 220462 - RNA, 32 nt, Human
uaccacaggugagagacagauugaaagacaac

SEQ ID NO: 220463 - RNA, 32 nt, Human
uaccacagguuccugaauaauuccugcagggc

SEQ ID NO: 220464 - RNA, 32 nt, Human
uaccacaguaaccagcagaccuccaggauccu

SEQ ID NO: 220465 - RNA, 32 nt, Human
uaccacaguguaugugucuuuugcaagcuucc

SEQ ID NO: 220466 - RNA, 32 nt, Human
uaccacauugaaugaacaaagacugaacuuug

SEQ ID NO: 220467 - RNA, 32 nt, Human
uaccacauuuagcaguuaaauggcuauaggug

SEQ ID NO: 220468 - RNA, 20 nt, Human
uaccacauuuugcacauuca

SEQ ID NO: 220469 - RNA, 32 nt, Human
uaccaccaacugccuuucuuuguuccuaguua

SEQ ID NO: 220470 - RNA, 32 nt, Human
uaccaccaccaccaccaccauuacagcgccuc

SEQ ID NO: 220471 - RNA, 26 nt, Human
uaccaccaccagugagcuccagccug

SEQ ID NO: 220472 - RNA, 32 nt, Human
uaccaccaccgauuuaaaugggcugaguuggg

SEQ ID NO: 220473 - RNA, 32 nt, Human
uaccaccagcaccacacuguuuuaauuauugu

SEQ ID NO: 220474 - RNA, 32 nt, Human
uaccaccaggaggugagcuugcucugggaggc

SEQ ID NO: 220475 - RNA, 32 nt, Human
uaccaccaguacucagaggccgccaucaaccg

SEQ ID NO: 220476 - RNA, 32 nt, Human
uaccaccaucauucuucacagaauuacaaaaa

SEQ ID NO: 220477 - RNA, 32 nt, Human
uaccacccucccccaccucucccccgaaacuc

SEQ ID NO: 220478 - RNA, 32 nt, Human
uaccacccuucacaugguuuuggggaacccaa

SEQ ID NO: 220479 - RNA, 32 nt, Human
uaccaccgaaugucuguguuucauugucuagu

SEQ ID NO: 220480 - RNA, 32 nt, Human
uaccaccgcacuccagccugagcaacagagug

SEQ ID NO: 220481 - RNA, 32 nt, Human
uaccaccgcaucguagaggcuuuccgguuugc

SEQ ID NO: 220482 - RNA, 32 nt, Human
uaccaccgccugcuggaagacagugaggacuu

SEQ ID NO: 220483 - RNA, 30 nt, Human
uaccaccgcggucacucaccgccgccgccg

SEQ ID NO: 220484 - RNA, 25 nt, Human
uaccaccgcugccaccaccaccgcc

SEQ ID NO: 220485 - RNA, 32 nt, Human
uaccaccucuuugcccuuccuaccccuuccuc

SEQ ID NO: 220486 - RNA, 32 nt, Human
uaccaccuggacaucauaguuuugacucccca

SEQ ID NO: 220487 - RNA, 32 nt, Human
uaccaccuggggacccaaaagagaaggccuag

SEQ ID NO: 220488 - RNA, 32 nt, Human
uaccaccuguccagcaggugcaucugugagga

SEQ ID NO: 220489 - RNA, 32 nt, Human
uaccacgcagaccuuggguggggagagcuucc

SEQ ID NO: 220490 - RNA, 32 nt, Human
uaccacgcccaacuaauuuuuguauuuuuagu

SEQ ID NO: 220491 - RNA, 32 nt, Human
uaccacgcccagcuaauuuuugcauuuuuacu

SEQ ID NO: 220492 - RNA, 32 nt, Human
uaccacgcccagcuaauuuuuguauuuuuagu

SEQ ID NO: 220493 - RNA, 32 nt, Human
uaccacgcccagguaguuuuuguauuuuuagu

SEQ ID NO: 220494 - RNA, 32 nt, Human
uaccacgcccggcuaauuuuucuauuuuuagu

SEQ ID NO: 220495 - RNA, 32 nt, Human
uaccacgcccggcuaauuuuuguauuuuuaau

SEQ ID NO: 220496 - RNA, 32 nt, Human
uaccacgccuggcuaauucuuuguauuuuuag

SEQ ID NO: 220497 - RNA, 32 nt, Human
uaccacgccuggcuaauuuuucuauuuuuagu

SEQ ID NO: 220498 - RNA, 32 nt, Human
uaccacgccuggcuaauuuuuguauuuuuauu

SEQ ID NO: 220499 - RNA, 32 nt, Human
uaccacgcugggaaggaagaggacagcaagac

SEQ ID NO: 220500 - RNA, 32 nt, Human
uaccacgcuuggcuaauuuuuguauuuuuagu

SEQ ID NO: 220501 - RNA, 32 nt, Human
uaccacggcacuccagccugggugacagugag

SEQ ID NO: 220502 - RNA, 32 nt, Human
uaccacgggaaagggaaggggaagcaguagca

SEQ ID NO: 220503 - RNA, 32 nt, Human
uaccacguaucuagcuaauauguaugugucag

SEQ ID NO: 220504 - RNA, 32 nt, Human
uaccacgucugcuggucuccagccuuguaugg

SEQ ID NO: 220505 - RNA, 32 nt, Human
uaccacgugagcugugugaggcugguggugaa

SEQ ID NO: 220506 - RNA, 32 nt, Human
uaccacuacacuccagccugggcaacggagca

SEQ ID NO: 220507 - RNA, 32 nt, Human
uaccacuacacuucagcuugggugaugaagug

SEQ ID NO: 220508 - RNA, 32 nt, Human
uaccacuagagggagcucugaugcagcuggag

SEQ ID NO: 220509 - RNA, 32 nt, Human
uaccacuauaaauacaaaagcaucugguaaac

SEQ ID NO: 220510 - RNA, 32 nt, Human
uaccacucaccuggggauucagcaacagguau

SEQ ID NO: 220511 - RNA, 32 nt, Human
uaccacucagcccuguguugggguccucaaag

SEQ ID NO: 220512 - RNA, 32 nt, Human
uaccacuccaaauucccugccuucugcaaguu

SEQ ID NO: 220513 - RNA, 32 nt, Human
uaccacucucaucugcucaguacaucugcggc

SEQ ID NO: 220514 - RNA, 32 nt, Human
uaccacucuguauuggacaaaggcuagcacag

SEQ ID NO: 220515 - RNA, 32 nt, Human
uaccacugagccugagauggggaugagggcag

SEQ ID NO: 220516 - RNA, 32 nt, Human
uaccacugauggugaaggacaagacuuccugg

SEQ ID NO: 220517 - RNA, 32 nt, Human
uaccacugcacuccaaccuggguuacagcauc

SEQ ID NO: 220518 - RNA, 32 nt, Human
uaccacugcacuccagccuaggugacagggca

SEQ ID NO: 220519 - RNA, 32 nt, Human
uaccacugcacuccagccuggaugacagagug

SEQ ID NO: 220520 - RNA, 32 nt, Human
uaccacugcacuccagccuggcugacagugag

SEQ ID NO: 220521 - RNA, 32 nt, Human
uaccacugcacuccagccugggcaacagagug

SEQ ID NO: 220522 - RNA, 32 nt, Human
uaccacugcacuccagccugggcgacagagaa

SEQ ID NO: 220523 - RNA, 32 nt, Human
uaccacugcacuccagccugggcgacagagca

SEQ ID NO: 220524 - RNA, 32 nt, Human
uaccacugcacuccagccugggugacagagcg

SEQ ID NO: 220525 - RNA, 32 nt, Human
uaccacugcacuccagccugggugacagagug

SEQ ID NO: 220526 - RNA, 32 nt, Human
uaccacugcacuccagccuggucaauggagug

SEQ ID NO: 220527 - RNA, 32 nt, Human
uaccacugcacuccagcuugggcgacggagug

SEQ ID NO: 220528 - RNA, 32 nt, Human
uaccacugcacuccagucugggcaacagacgg

SEQ ID NO: 220529 - RNA, 32 nt, Human
uaccacugcacuccagucugggcgacagagug

SEQ ID NO: 220530 - RNA, 32 nt, Human
uaccacugcacuccaguuuggcaacagaguga

SEQ ID NO: 220531 - RNA, 32 nt, Human
uaccacugcacucuggccugggcaacaagagc

SEQ ID NO: 220532 - RNA, 32 nt, Human
uaccacugcacugcagccugagugacacagua

SEQ ID NO: 220533 - RNA, 32 nt, Human
uaccacugcauuccagccugggugacagagcg

SEQ ID NO: 220534 - RNA, 32 nt, Human
uaccacugcgcuccaaacugggugacauggug

SEQ ID NO: 220535 - RNA, 32 nt, Human
uaccacugcuggugguucacacaucaucccau

SEQ ID NO: 220536 - RNA, 32 nt, Human
uaccacuguacuccagccugggcuggacagug

SEQ ID NO: 220537 - RNA, 32 nt, Human
uaccacuguugaguuuuccugcuuggaaaagg

SEQ ID NO: 220538 - RNA, 32 nt, Human
uaccacuuaccugagacauucugauuuggaug

SEQ ID NO: 220539 - RNA, 32 nt, Human
uaccacuuaucucauagcauugcagugagaau

SEQ ID NO: 220540 - RNA, 32 nt, Human
uaccacuucauuccagccugggugacagagca

SEQ ID NO: 220541 - RNA, 32 nt, Human
uaccacuucucagcuuucaucauucuuuauug

SEQ ID NO: 220542 - RNA, 32 nt, Human
uaccacuugaaggugaacauucccugucuggu

SEQ ID NO: 220543 - RNA, 32 nt, Human
uaccacuuuccacucccugcuuaggauucugu

SEQ ID NO: 220544 - RNA, 32 nt, Human
uaccacuuucuuccacuguuaccagguacuua

SEQ ID NO: 220545 - RNA, 32 nt, Human
uaccagaaaccagacuuguaucgaccaauggc

SEQ ID NO: 220546 - RNA, 32 nt, Human
uaccagaagaacuaguagaagaagcuuugccg

SEQ ID NO: 220547 - RNA, 32 nt, Human
uaccagaagccagaaucacagaacagucucug

SEQ ID NO: 220548 - RNA, 32 nt, Human
uaccagaaucauuucuuuuaccaaaaugauuu

SEQ ID NO: 220549 - RNA, 17 nt, Human
uaccagacacuacagca

SEQ ID NO: 220550 - RNA, 32 nt, Human
uaccagacccuguccuggaugcugggauacaa

SEQ ID NO: 220551 - RNA, 32 nt, Human
uaccagacuaaaucaaccacuccagcagagca

SEQ ID NO: 220552 - RNA, 32 nt, Human
uaccagagaggaaaauuccacaucccaccaga

SEQ ID NO: 220553 - RNA, 32 nt, Human
uaccagaggaagagaggaaaaucagcggauuc

SEQ ID NO: 220554 - RNA, 32 nt, Human
uaccagaggcuguguugcuggggagaaaaaug

SEQ ID NO: 220555 - RNA, 31 nt, Human
uaccagagugagagaguagaagagaagggag

SEQ ID NO: 220556 - RNA, 32 nt, Human
uaccagauaacaaacacugaacuccuauuuga

SEQ ID NO: 220557 - RNA, 32 nt, Human
uaccagauaagcuuuugauuuuuguauuguuu

SEQ ID NO: 220558 - RNA, 32 nt, Human
uaccagauacugggggugagggguggggaaug

SEQ ID NO: 220559 - RNA, 32 nt, Human
uaccagauucaugcuucuaugaaaauuccauc

SEQ ID NO: 220560 - RNA, 32 nt, Human
uaccagauuuuuacacauguaucuaugcauuu

SEQ ID NO: 220561 - RNA, 32 nt, Human
uaccagcaacagcucagcagagcuaugcggau

SEQ ID NO: 220562 - RNA, 32 nt, Human
uaccagcaagaucacucugagauacauaaacu

SEQ ID NO: 220563 - RNA, 32 nt, Human
uaccagcaaucagggaacuccuaucuguuuug

SEQ ID NO: 220564 - RNA, 32 nt, Human
uaccagcaccccacuccagccucgaggaagcu

SEQ ID NO: 220565 - RNA, 32 nt, Human
uaccagcaccuguaaucccagcuacucgggag

SEQ ID NO: 220566 - RNA, 31 nt, Human
uaccagcaggggaaaugccagaugcuuauaa

SEQ ID NO: 220567 - RNA, 32 nt, Human
uaccagcagugagggaguuaacacagcagcug

SEQ ID NO: 220568 - RNA, 32 nt, Human
uaccagcauacgcucaccuuacagggaaaugg

SEQ ID NO: 220569 - RNA, 32 nt, Human
uaccagcauccugcuccacugccuuccucuag

SEQ ID NO: 220570 - RNA, 32 nt, Human
uaccagcaucugcaaucuggguguuuucucug

SEQ ID NO: 220571 - RNA, 32 nt, Human
uaccagcaugguaaaggguuagaaagagggca

SEQ ID NO: 220572 - RNA, 32 nt, Human
uaccagccacagucucugcacguuuccaagag

SEQ ID NO: 220573 - RNA, 32 nt, Human
uaccagccaguucugcuugcugugucugagcc

SEQ ID NO: 220574 - RNA, 32 nt, Human
uaccagccccacggccgcugggcagagcgggc

SEQ ID NO: 220575 - RNA, 32 nt, Human
uaccagcccccaggaccacuaccccacggcca

SEQ ID NO: 220576 - RNA, 32 nt, Human
uaccagcccugagacagaccccaggauaaggg

SEQ ID NO: 220577 - RNA, 32 nt, Human
uaccagccucaaauucccacaggcucauacuc

SEQ ID NO: 220578 - RNA, 32 nt, Human
uaccagccugggaggcccagguguagcggucc

SEQ ID NO: 220579 - RNA, 32 nt, Human
uaccagccuuucugguccugcugcucccuaug

SEQ ID NO: 220580 - RNA, 32 nt, Human
uaccagcgugagccaccacgcugggcuuccug

SEQ ID NO: 220581 - RNA, 32 nt, Human
uaccagcuccucugucucccucugccucucca

SEQ ID NO: 220582 - RNA, 32 nt, Human
uaccagcuggcagggccagggggugggugggc

SEQ ID NO: 220583 - RNA, 32 nt, Human
uaccagcugggauguuggcagcagccgcuccc

SEQ ID NO: 220584 - RNA, 32 nt, Human
uaccagcuguaaucccagcuacuugggaggcu

SEQ ID NO: 220585 - RNA, 32 nt, Human
uaccagcuuccaagcugggccccaccaauucc

SEQ ID NO: 220586 - RNA, 32 nt, Human
uaccagcuucuucacauaugcugcuuccuccc

SEQ ID NO: 220587 - RNA, 32 nt, Human
uaccaggaccacugcauuuaccagccugauac

SEQ ID NO: 220588 - RNA, 32 nt, Human
uaccaggacgccugggcugcucugcgggggac

SEQ ID NO: 220589 - RNA, 32 nt, Human
uaccaggagacaccuggacccuguaaggcugu

SEQ ID NO: 220590 - RNA, 32 nt, Human
uaccaggagacaggguuugagagcagacaacc

SEQ ID NO: 220591 - RNA, 32 nt, Human
uaccaggagcaggggcauggagcacagugagg

SEQ ID NO: 220592 - RNA, 32 nt, Human
uaccaggaggagaccagguugcaguggcguaa

SEQ ID NO: 220593 - RNA, 32 nt, Human
uaccaggaggcagggaugcugggggucguggu

SEQ ID NO: 220594 - RNA, 32 nt, Human
uaccaggaugaggaagagaagaaaugaggagc

SEQ ID NO: 220595 - RNA, 32 nt, Human
uaccaggauugcugccgcauuccacuggguau

SEQ ID NO: 220596 - RNA, 32 nt, Human
uaccaggcaggugccuucuccacccacaggca

SEQ ID NO: 220597 - RNA, 32 nt, Human
uaccaggccaucuccccaguuucccaguucuu

SEQ ID NO: 220598 - RNA, 32 nt, Human
uaccaggcccaggagaucaguaauuacaaauu

SEQ ID NO: 220599 - RNA, 32 nt, Human
uaccaggccucauuuacuuauuaauuuauggu

SEQ ID NO: 220600 - RNA, 32 nt, Human
uaccaggccuccugccccagccuacuccaccu

SEQ ID NO: 220601 - RNA, 32 nt, Human
uaccagggacuaucuuugcugcagagaucaag

SEQ ID NO: 220602 - RNA, 32 nt, Human
uaccagggaugcagugguguuuaggcaggaua

SEQ ID NO: 220603 - RNA, 32 nt, Human
uaccagggccagagacagggaauggggcacgg

SEQ ID NO: 220604 - RNA, 32 nt, Human
uaccaggggaggcagugucuggaugaugcugu

SEQ ID NO: 220605 - RNA, 32 nt, Human
uaccaggggcucagcaaugaccagccugcaac

SEQ ID NO: 220606 - RNA, 32 nt, Human
uaccagguagccccaaggaggagcugccgacc

SEQ ID NO: 220607 - RNA, 32 nt, Human
uaccaggucaaagauuuuuguauucuugugaa

SEQ ID NO: 220608 - RNA, 32 nt, Human
uaccagguccccauccugcugccagcucucaa

SEQ ID NO: 220609 - RNA, 31 nt, Human
uaccaguacagagagaagaggaaugcugcau

SEQ ID NO: 220610 - RNA, 32 nt, Human
uaccaguaggagaccacugggauggugugugg

SEQ ID NO: 220611 - RNA, 32 nt, Human
uaccagucuggcuucuagucuauuuacuguuu

SEQ ID NO: 220612 - RNA, 32 nt, Human
uaccagugcacuccaggcgggugacagagcaa

SEQ ID NO: 220613 - RNA, 32 nt, Human
uaccagugcugugccagacacugaggcauucu

SEQ ID NO: 220614 - RNA, 32 nt, Human
uaccaguggguucucauuuuccuccuaaucua

SEQ ID NO: 220615 - RNA, 32 nt, Human
uaccaguuacacugggacuguaacagcauuuu

SEQ ID NO: 220616 - RNA, 32 nt, Human
uaccaguugcccuagcccagacucugagcugc

SEQ ID NO: 220617 - RNA, 32 nt, Human
uaccaguuuccuuaccaggaaggaaagaaaac

SEQ ID NO: 220618 - RNA, 32 nt, Human
uaccaguuuuggagacugccugagaugaaagg

SEQ ID NO: 220619 - RNA, 32 nt, Human
uaccauaacagcuugggggaaagaccaugaaa

SEQ ID NO: 220620 - RNA, 32 nt, Human
uaccauaaccgaugugcuggagcuacacgacu

SEQ ID NO: 220621 - RNA, 32 nt, Human
uaccauaagagguuggaaugagaggaugacug

SEQ ID NO: 220622 - RNA, 32 nt, Human
uaccauaagcagcagcacgauccagagaucca

SEQ ID NO: 220623 - RNA, 32 nt, Human
uaccauaaguagaauuuuaaguaaacugguga

SEQ ID NO: 220624 - RNA, 32 nt, Human
uaccauaaucccccucaauucagaccuucuga

SEQ ID NO: 220625 - RNA, 32 nt, Human
uaccauacaaggguauuacaacuguaaaacaa

SEQ ID NO: 220626 - RNA, 32 nt, Human
uaccauacugauuuucaaggcagggucuaacc

SEQ ID NO: 220627 - RNA, 32 nt, Human
uaccauagaagggaacacagguuaccauauug

SEQ ID NO: 220628 - RNA, 32 nt, Human
uaccauaggucaaaaggacuggaauuuuccuu

SEQ ID NO: 220629 - RNA, 32 nt, Human
uaccauaugagaaaguugccuucagaaggugg

SEQ ID NO: 220630 - RNA, 32 nt, Human
uaccauauugcccaggcuggucucaaacucuu

SEQ ID NO: 220631 - RNA, 32 nt, Human
uaccaucaagagccuguauuuugaguuauucc

SEQ ID NO: 220632 - RNA, 31 nt, Human
uaccaucacagcugaaugcaaugaaaggcua

SEQ ID NO: 220633 - RNA, 32 nt, Human
uaccaucacccaggccagggaugggggugggg

SEQ ID NO: 220634 - RNA, 32 nt, Human
uaccaucagagcagugcagugcucuuccgagg

SEQ ID NO: 220635 - RNA, 32 nt, Human
uaccaucagcagcucaucccugugcaugguga

SEQ ID NO: 220636 - RNA, 32 nt, Human
uaccaucaguguccaagaauuucuguucuauc

SEQ ID NO: 220637 - RNA, 32 nt, Human
uaccaucaucagugagagucuugaguucacua

SEQ ID NO: 220638 - RNA, 32 nt, Human
uaccauccuaggcugacaccuaacucuucuuu

SEQ ID NO: 220639 - RNA, 32 nt, Human
uaccauccucuccuacaauaaacucuagcucu

SEQ ID NO: 220640 - RNA, 32 nt, Human
uaccauccugcaggugggcugccacucugcuc

SEQ ID NO: 220641 - RNA, 32 nt, Human
uaccauccugggagcaaggcccugcagcucca

SEQ ID NO: 220642 - RNA, 32 nt, Human
uaccauccuuucuccuuuggguuuuaaaauaa

SEQ ID NO: 220643 - RNA, 32 nt, Human
uaccaucgucuauuuccacuacgggcugaaca

SEQ ID NO: 220644 - RNA, 32 nt, Human
uaccaucguggaagaauggaagggagggggag

SEQ ID NO: 220645 - RNA, 32 nt, Human
uaccaucucauuaauuuacaaaggauaaucuu

SEQ ID NO: 220646 - RNA, 32 nt, Human
uaccaucuuacaugcuuaaauaacuccacauu

SEQ ID NO: 220647 - RNA, 32 nt, Human
uaccaucuuggaugcagagaccagacccucac

SEQ ID NO: 220648 - RNA, 32 nt, Human
uaccaugaaaacuuccucugaaacaccuuaca

SEQ ID NO: 220649 - RNA, 32 nt, Human
uaccaugaaacccauggcuucucacgggacag

SEQ ID NO: 220650 - RNA, 29 nt, Human
uaccaugaagaaggucaagaagaaaaggu

SEQ ID NO: 220651 - RNA, 32 nt, Human
uaccaugaagugaaaaugccacauuuugcuuu

SEQ ID NO: 220652 - RNA, 32 nt, Human
uaccaugagacaacacuauuuuuauuuauaua

SEQ ID NO: 220653 - RNA, 32 nt, Human
uaccaugaucaaaggcgaaggaagggaucucu

SEQ ID NO: 220654 - RNA, 31 nt, Human
uaccaugcacuuuccuuugaugcugaggaga

SEQ ID NO: 220655 - RNA, 32 nt, Human
uaccaugcagucucgcauuugaugacaugcag

SEQ ID NO: 220656 - RNA, 32 nt, Human
uaccaugccauuuaacaagagaucccacucuc

SEQ ID NO: 220657 - RNA, 32 nt, Human
uaccaugcccagcuaauuuuuguauuuuuagu

SEQ ID NO: 220658 - RNA, 32 nt, Human
uaccaugcccagcuaauuuuuguguuuuuagu

SEQ ID NO: 220659 - RNA, 32 nt, Human
uaccaugcccagcucauuuuuguauuuuuagu

SEQ ID NO: 220660 - RNA, 32 nt, Human
uaccaugcccggcuaauuuuuguauuuuuagu

SEQ ID NO: 220661 - RNA, 32 nt, Human
uaccaugccuggcuaauuuucuuguaguuuua

SEQ ID NO: 220662 - RNA, 32 nt, Human
uaccaugccuggcuaauuuuuguauuuuuagu

SEQ ID NO: 220663 - RNA, 29 nt, Human
uaccauggcaggccaacgaacaugucaaa

SEQ ID NO: 220664 - RNA, 32 nt, Human
uaccauggccuccagccuucacuggcuaugga

SEQ ID NO: 220665 - RNA, 32 nt, Human
uaccauggcucaugcuuuccaucaagcaccag

SEQ ID NO: 220666 - RNA, 32 nt, Human
uaccauggugucagugcuggaggaucugauug

SEQ ID NO: 220667 - RNA, 32 nt, Human
uaccauguaauagaacaaacccugccaagugc

SEQ ID NO: 220668 - RNA, 32 nt, Human
uaccauguagaaaccauuuucuuucuagaaac

SEQ ID NO: 220669 - RNA, 32 nt, Human
uaccauguaugacauaccuugaccucaaagau

SEQ ID NO: 220670 - RNA, 32 nt, Human
uaccauguccuaagcugaggcaggcggcaggc

SEQ ID NO: 220671 - RNA, 32 nt, Human
uaccauguucauuccucuggcucaguuuggug

SEQ ID NO: 220672 - RNA, 32 nt, Human
uaccauguugcccaggcuggucucaaacucgu

SEQ ID NO: 220673 - RNA, 32 nt, Human
uaccauguugcccaggcuggucucgaacuucu

SEQ ID NO: 220674 - RNA, 32 nt, Human
uaccauguuggccaggcuggucacaaacuccu

SEQ ID NO: 220675 - RNA, 32 nt, Human
uaccauguuggccaggcuggucucaaacuccu

SEQ ID NO: 220676 - RNA, 32 nt, Human
uaccauguuggccaggcuggucucgaacuccu

SEQ ID NO: 220677 - RNA, 32 nt, Human
uaccauguuggccaggcugguuucaaacuccu

SEQ ID NO: 220678 - RNA, 32 nt, Human
uaccauuacauccugauaucuggggcuucuga

SEQ ID NO: 220679 - RNA, 32 nt, Human
uaccauucagccucugucucacaugcuuuaua

SEQ ID NO: 220680 - RNA, 32 nt, Human
uaccauucucaagcucucugggcacagagacc

SEQ ID NO: 220681 - RNA, 32 nt, Human
uaccauucuggggucuaccauucuggggucua

SEQ ID NO: 220682 - RNA, 32 nt, Human
uaccauucuuaacacugguagcuccuguccca

SEQ ID NO: 220683 - RNA, 32 nt, Human
uaccauugcacuccagccugggcaacaagaau

SEQ ID NO: 220684 - RNA, 32 nt, Human
uaccauugcacuccagccugggcaacaagagc

SEQ ID NO: 220685 - RNA, 32 nt, Human
uaccauugcacuccagccugggcaacaagagu

SEQ ID NO: 220686 - RNA, 32 nt, Human
uaccauuggaagcaagggaaagaggaggagau

SEQ ID NO: 220687 - RNA, 32 nt, Human
uaccauuggaauaacauaaugagaggccuggg

SEQ ID NO: 220688 - RNA, 32 nt, Human
uaccauuuaccccagcaugcuugugacgggca

SEQ ID NO: 220689 - RNA, 32 nt, Human
uaccauuugcauucucaucaacaguaugugaa

SEQ ID NO: 220690 - RNA, 32 nt, Human
uaccauuuuaaguucugaccucaggccuccau

SEQ ID NO: 220691 - RNA, 32 nt, Human
uaccauuuuguggagcuuucacuuacauuauu

SEQ ID NO: 220692 - RNA, 32 nt, Human
uaccauuuuugugguuguuuggagcagggaug

SEQ ID NO: 220693 - RNA, 32 nt, Human
uacccaaaggcuaagaaauucuaaagaacuga

SEQ ID NO: 220694 - RNA, 32 nt, Human
uacccaaauuuccaagacacaaacaugaccua

SEQ ID NO: 220695 - RNA, 32 nt, Human
uacccaacauggugaaaccccaucucuucuaa

SEQ ID NO: 220696 - RNA, 32 nt, Human
uacccaacccugcccucaccuccagggccugg

SEQ ID NO: 220697 - RNA, 32 nt, Human
uacccaaccuucccuucucccuugagugcuug

SEQ ID NO: 220698 - RNA, 32 nt, Human
uacccaagacacaccuccccaaccucagucuu

SEQ ID NO: 220699 - RNA, 18 nt, Human
uacccaagccacagggaa

SEQ ID NO: 220700 - RNA, 32 nt, Human
uacccaagcugcaucauuuagaaaaccuguac

SEQ ID NO: 220701 - RNA, 21 nt, Human
uacccaagcuggagugcagug

SEQ ID NO: 220702 - RNA, 32 nt, Human
uacccaaggaaauaggaggagucuagaguaga

SEQ ID NO: 220703 - RNA, 32 nt, Human
uacccaaggaauucccuuaaagaauuagaagu

SEQ ID NO: 220704 - RNA, 31 nt, Human
uacccaaggacauugccucaggguugcaaac

SEQ ID NO: 220705 - RNA, 32 nt, Human
uacccaaggacuuguuugcaaugcagaaucac

SEQ ID NO: 220706 - RNA, 32 nt, Human
uacccaaggcauuggucuagcuuuuccuacaa

SEQ ID NO: 220707 - RNA, 32 nt, Human
uacccaaguaagguucucaaauguagaaaauu

SEQ ID NO: 220708 - RNA, 32 nt, Human
uacccaaugccccaaagagcccuucaggccug

SEQ ID NO: 220709 - RNA, 32 nt, Human
uacccacaaaaacaccagcaagcaggagacca

SEQ ID NO: 220710 - RNA, 32 nt, Human
uacccacaacaacuguaguuacuuucuuggcc

SEQ ID NO: 220711 - RNA, 32 nt, Human
uacccacaacaacuguaguuucuuacuuggcc

SEQ ID NO: 220712 - RNA, 32 nt, Human
uacccacacagucacagucacacacacauaug

SEQ ID NO: 220713 - RNA, 32 nt, Human
uacccacacccaggccggaagccggcuguuug

SEQ ID NO: 220714 - RNA, 32 nt, Human
uacccacacuggcuuccugccucccaccccuc

SEQ ID NO: 220715 - RNA, 32 nt, Human
uacccacaggcagagggcaucggggccauuug

SEQ ID NO: 220716 - RNA, 32 nt, Human
uacccacaggugaggggcaggaccugaaggua

SEQ ID NO: 220717 - RNA, 32 nt, Human
uacccacagguguggaggggcuggcccccuuc

SEQ ID NO: 220718 - RNA, 32 nt, Human
uacccacauguacagacauacauuuaugcaca

SEQ ID NO: 220719 - RNA, 32 nt, Human
uacccacauugcuggcacuaccagccuugggc

SEQ ID NO: 220720 - RNA, 32 nt, Human
uacccaccaggaugugugcccagccaggccuc

SEQ ID NO: 220721 - RNA, 32 nt, Human
uacccaccccaaaggccugccucaagguuuaa

SEQ ID NO: 220722 - RNA, 32 nt, Human
uacccaccccuguguugaucacuugcaggccc

SEQ ID NO: 220723 - RNA, 32 nt, Human
uacccacccugagccuuccggucuccauggcg

SEQ ID NO: 220724 - RNA, 32 nt, Human
uacccaccgauggagcccccagauagagcugg

SEQ ID NO: 220725 - RNA, 32 nt, Human
uacccaccuccacccccuucuuccagaaucug

SEQ ID NO: 220726 - RNA, 32 nt, Human
uacccaccugcuuguucacaugcacaggugcu

SEQ ID NO: 220727 - RNA, 32 nt, Human
uacccacgcuggguauuaccauguaaauaauc

SEQ ID NO: 220728 - RNA, 32 nt, Human
uacccacuccagcacacagaagcaugagguuc

SEQ ID NO: 220729 - RNA, 32 nt, Human
uacccacucuggcugccguuguccuguccugc

SEQ ID NO: 220730 - RNA, 32 nt, Human
uacccacugcccacccuggcugccgcugggcg

SEQ ID NO: 220731 - RNA, 32 nt, Human
uacccacuguacaguccacuucacaggaucag

SEQ ID NO: 220732 - RNA, 32 nt, Human
uacccagacaacaggaucgucucguccaagua

SEQ ID NO: 220733 - RNA, 32 nt, Human
uacccagacugccagagcccaggcuggccuca

SEQ ID NO: 220734 - RNA, 32 nt, Human
uacccagagaccagagagagucagccuagucc

SEQ ID NO: 220735 - RNA, 32 nt, Human
uacccagagaccugcauguucucuccaacgac

SEQ ID NO: 220736 - RNA, 32 nt, Human
uacccagaggagccugagcacacuccacccua

SEQ ID NO: 220737 - RNA, 32 nt, Human
uacccagaugguggaggaugugaagggauugc

SEQ ID NO: 220738 - RNA, 31 nt, Human
uacccagcaauguccucaaugagggucuuuu

SEQ ID NO: 220739 - RNA, 32 nt, Human
uacccagcagugggccccagacuucucgcagg

SEQ ID NO: 220740 - RNA, 32 nt, Human
uacccagccagccuuugccucuacuguaucgc

SEQ ID NO: 220741 - RNA, 32 nt, Human
uacccagccaucggcugcgguaugacagcagg

SEQ ID NO: 220742 - RNA, 21 nt, Human
uacccagccuggagugcagug

SEQ ID NO: 220743 - RNA, 32 nt, Human
uacccagcuucucaacauccagggcccaauuu

SEQ ID NO: 220744 - RNA, 32 nt, Human
uacccaggaaauucucuugugucucuuuccag

SEQ ID NO: 220745 - RNA, 32 nt, Human
uacccaggacagcuggaaauagcgugccgcag

SEQ ID NO: 220746 - RNA, 32 nt, Human
uacccaggacgucagcaugacuaccuaguccc

SEQ ID NO: 220747 - RNA, 32 nt, Human
uacccaggagcagcaggcuuuacgucuucagc

SEQ ID NO: 220748 - RNA, 32 nt, Human
uacccaggaggcagagauugcagugagcugag

SEQ ID NO: 220749 - RNA, 32 nt, Human
uacccaggaggcggagguuguagugagcugag

SEQ ID NO: 220750 - RNA, 26 nt, Human
uacccaggagguggagguugcaguga

SEQ ID NO: 220751 - RNA, 32 nt, Human
uacccaggagguggagguugcagugagccgaa

SEQ ID NO: 220752 - RNA, 32 nt, Human
uacccaggagguggagguugcggugaacugag

SEQ ID NO: 220753 - RNA, 31 nt, Human
uacccaggcagaguggacggcauucagggcu

SEQ ID NO: 220754 - RNA, 32 nt, Human
uacccaggccuccucaaccuucaccuccuuuc

SEQ ID NO: 220755 - RNA, 32 nt, Human
uacccaggcucagaaagggcaagagccaugcu

SEQ ID NO: 220756 - RNA, 20 nt, Human
uacccaggcugagugcagug

SEQ ID NO: 220757 - RNA, 21 nt, Human
uacccaggcuggagugcaaug

SEQ ID NO: 220758 - RNA, 32 nt, Human
uacccaggcuggucucaacuccugggcucaag

SEQ ID NO: 220759 - RNA, 21 nt, Human
uacccaggguggagugcagug

SEQ ID NO: 220760 - RNA, 32 nt, Human
uacccaggugccgaggcaagagacugaaggca

SEQ ID NO: 220761 - RNA, 32 nt, Human
uacccagucccugcuacuaucuccaucccuaa

SEQ ID NO: 220762 - RNA, 32 nt, Human
uacccaguuagcacaguagguggggagucugc

SEQ ID NO: 220763 - RNA, 32 nt, Human
uacccauaaugucuuucugcauuaguuccuug

SEQ ID NO: 220764 - RNA, 32 nt, Human
uacccauaucaccucugcucugaggcugggcc

SEQ ID NO: 220765 - RNA, 32 nt, Human
uacccaucacacaccagcguuuugaccagaug

SEQ ID NO: 220766 - RNA, 32 nt, Human
uacccaucacuaucaaaaaguuuaauguguau

SEQ ID NO: 220767 - RNA, 32 nt, Human
uacccaucuccaugccacaccuuauccaguua

SEQ ID NO: 220768 - RNA, 32 nt, Human
uacccaucucccaguugcauaguacagugucu

SEQ ID NO: 220769 - RNA, 32 nt, Human
uacccaucucugauuuggcucuccuuaaguga

SEQ ID NO: 220770 - RNA, 32 nt, Human
uacccaucuggcagcugcugugccugaggugg

SEQ ID NO: 220771 - RNA, 32 nt, Human
uacccaucuguguccccaugcccaguucaggg

SEQ ID NO: 220772 - RNA, 32 nt, Human
uacccaugaucauccuaaccccaaagccaccc

SEQ ID NO: 220773 - RNA, 32 nt, Human
uacccaugcucacuuggugaauaaauucuggc

SEQ ID NO: 220774 - RNA, 32 nt, Human
uacccaugggcaacaugguucuacaucaggac

SEQ ID NO: 220775 - RNA, 32 nt, Human
uacccauggguggaagcuaaagaguccggggg

SEQ ID NO: 220776 - RNA, 32 nt, Human
uacccauuacacaaugagaaaccagaggagcc

SEQ ID NO: 220777 - RNA, 32 nt, Human
uacccauuagaugcaggcucuaccucaaguac

SEQ ID NO: 220778 - RNA, 19 nt, Human
uacccauuccccuuuucca

SEQ ID NO: 220779 - RNA, 32 nt, Human
uacccauuccugccagcucugccuccuuuuca

SEQ ID NO: 220780 - RNA, 32 nt, Human
uacccauuuauccuauuuuuagcaauaauucg

SEQ ID NO: 220781 - RNA, 32 nt, Human
uacccauuuccucauucuccauguuauugucu

SEQ ID NO: 220782 - RNA, 32 nt, Human
uacccauuuucagcuucucugccucucuucug

SEQ ID NO: 220783 - RNA, 32 nt, Human
uaccccaaaacaaugucaccaugguuaccacc

SEQ ID NO: 220784 - RNA, 32 nt, Human
uaccccaaacuuccucuccugucuucaugugg

SEQ ID NO: 220785 - RNA, 21 nt, Human
uaccccaacaaucucuccccu

SEQ ID NO: 220786 - RNA, 32 nt, Human
uaccccacagugcaccugcccaggggcuguuc

SEQ ID NO: 220787 - RNA, 32 nt, Human
uaccccacauaaggaaaguacuacacuaaauu

SEQ ID NO: 220788 - RNA, 32 nt, Human
uaccccaccaggugggcaaagcagaaaccugc

SEQ ID NO: 220789 - RNA, 32 nt, Human
uaccccaccauggacaguggugaaugggacgu

SEQ ID NO: 220790 - RNA, 32 nt, Human
uaccccacgcccaccuccaccccaggagccga

SEQ ID NO: 220791 - RNA, 32 nt, Human
uaccccagaaagcagaggaggcguguaaauaa

SEQ ID NO: 220792 - RNA, 32 nt, Human
uaccccagacacacccucucuccucggaugac

SEQ ID NO: 220793 - RNA, 32 nt, Human
uaccccagagaccuuaaacagaaacaguagcu

SEQ ID NO: 220794 - RNA, 32 nt, Human
uaccccagccaucauuuucucagauggugaaa

SEQ ID NO: 220795 - RNA, 27 nt, Human
uaccccagccccacagacuccaguggc

SEQ ID NO: 220796 - RNA, 32 nt, Human
uaccccagccuggagucagggccagggaggca

SEQ ID NO: 220797 - RNA, 32 nt, Human
uaccccaggcuggagugcaauggcgugaucuc

SEQ ID NO: 220798 - RNA, 32 nt, Human
uaccccagugagguugaaggcaccaauuccaa

SEQ ID NO: 220799 - RNA, 32 nt, Human
uaccccauagcaggcagggacaaggaccacuc

SEQ ID NO: 220800 - RNA, 32 nt, Human
uaccccaucccccauacucaccucuuuccauu

SEQ ID NO: 220801 - RNA, 32 nt, Human
uacccccacaaacuucaguucccaaaucugua

SEQ ID NO: 220802 - RNA, 32 nt, Human
uacccccaccccucuagagacccuccagcuaa

SEQ ID NO: 220803 - RNA, 32 nt, Human
uacccccagaucugaccuugcuguagauccau

SEQ ID NO: 220804 - RNA, 32 nt, Human
uacccccagcacugggucauuucuugccaaua

SEQ ID NO: 220805 - RNA, 32 nt, Human
uacccccagcacuuuagcccuguguggccagc

SEQ ID NO: 220806 - RNA, 32 nt, Human
uacccccagcugugaagccuuccucuugaggg

SEQ ID NO: 220807 - RNA, 32 nt, Human
uacccccaggagagggggucaguguuuccugg

SEQ ID NO: 220808 - RNA, 32 nt, Human
uacccccaggguggcugugagaacaaaaugag

SEQ ID NO: 220809 - RNA, 30 nt, Human
uaccccccaaacuacccucuuccugggaaa

SEQ ID NO: 220810 - RNA, 32 nt, Human
uacccccucaccgacuacuaaggcccgccagg

SEQ ID NO: 220811 - RNA, 32 nt, Human
uacccccuccagccccacaccugggccucccc

SEQ ID NO: 220812 - RNA, 32 nt, Human
uacccccuccccucccaucuguggcuuggcuc

SEQ ID NO: 220813 - RNA, 32 nt, Human
uacccccugugccauuugagcugcuugcgcuc

SEQ ID NO: 220814 - RNA, 32 nt, Human
uaccccgagaucaggccccaccugccagcucu

SEQ ID NO: 220815 - RNA, 32 nt, Human
uaccccgcagagccgccagccccgggcauguu

SEQ ID NO: 220816 - RNA, 32 nt, Human
uaccccgccacuggccuguacacccacccaag

SEQ ID NO: 220817 - RNA, 32 nt, Human
uaccccgccuccauuccguugcucucucaguc

SEQ ID NO: 220818 - RNA, 32 nt, Human
uaccccggaggcaccuggguccaucagagaag

SEQ ID NO: 220819 - RNA, 32 nt, Human
uaccccggcugcuuggcaguugcagugcugcu

SEQ ID NO: 220820 - RNA, 32 nt, Human
uaccccuacaaacccaugccucacugacagac

SEQ ID NO: 220821 - RNA, 32 nt, Human
uaccccucagcccuaccuggggcugguccugg

SEQ ID NO: 220822 - RNA, 32 nt, Human
uaccccucauacccucccagcauauacaaaag

SEQ ID NO: 220823 - RNA, 32 nt, Human
uaccccuccaccccgcaagcucucauuggcuc

SEQ ID NO: 220824 - RNA, 32 nt, Human
uaccccucccccauucccagcugcagcccccu

SEQ ID NO: 220825 - RNA, 32 nt, Human
uaccccuccuccuuacccuacuucuuucuagu

SEQ ID NO: 220826 - RNA, 32 nt, Human
uaccccucgcugcugucaucauccccuugccu

SEQ ID NO: 220827 - RNA, 32 nt, Human
uaccccucucauuccuuccgugccaugguuuu

SEQ ID NO: 220828 - RNA, 32 nt, Human
uaccccugacuuagagccugguggaggugugg

SEQ ID NO: 220829 - RNA, 32 nt, Human
uaccccugagugagcaagcugcuuccucugug

SEQ ID NO: 220830 - RNA, 32 nt, Human
uaccccugcacuccagcccagguuacagagca

SEQ ID NO: 220831 - RNA, 32 nt, Human
uaccccugggccacugcuaacaagcaccuaac

SEQ ID NO: 220832 - RNA, 32 nt, Human
uaccccuggggcaaaaauauaacucuagcugu

SEQ ID NO: 220833 - RNA, 32 nt, Human
uaccccuguaaucccagcuacucgggaggcug

SEQ ID NO: 220834 - RNA, 32 nt, Human
uaccccuuacccagaguggcccacaggaaaca

SEQ ID NO: 220835 - RNA, 32 nt, Human
uaccccuuaccuaaggaguguaguuauaauac

SEQ ID NO: 220836 - RNA, 32 nt, Human
uaccccuuccuguguccaugugaucucauugu

SEQ ID NO: 220837 - RNA, 32 nt, Human
uaccccuugucgccccucccucccagagcacc

SEQ ID NO: 220838 - RNA, 32 nt, Human
uaccccuuuccccaaaagucugaaaguguagg

SEQ ID NO: 220839 - RNA, 32 nt, Human
uaccccuuugaaaggcugaagaugucugcuga

SEQ ID NO: 220840 - RNA, 32 nt, Human
uacccgaaggcccucuguccacacaacaugaa

SEQ ID NO: 220841 - RNA, 32 nt, Human
uacccgaccuucccuucucccuugagugcuug

SEQ ID NO: 220842 - RNA, 23 nt, Human
uacccgcagauccugucccaugg

SEQ ID NO: 220843 - RNA, 21 nt, Human
uacccgcagcuccuggcgcuc

SEQ ID NO: 220844 - RNA, 32 nt, Human
uacccgcauccagcgacugcagcaccagaaaa

SEQ ID NO: 220845 - RNA, 32 nt, Human
uacccgcccugccuucucuucucauaugcaau

SEQ ID NO: 220846 - RNA, 32 nt, Human
uacccgccuccaccucccaaaguguugugauu

SEQ ID NO: 220847 - RNA, 32 nt, Human
uacccgcgcggugcgggccucagucugcggcc

SEQ ID NO: 220848 - RNA, 32 nt, Human
uacccgcggccccgggcagggagggagcagcu

SEQ ID NO: 220849 - RNA, 32 nt, Human
uacccgcgugagccaccgcgcccggcugcaaa

SEQ ID NO: 220850 - RNA, 32 nt, Human
uacccgcucccucugcucauccauccuugauu

SEQ ID NO: 220851 - RNA, 32 nt, Human
uacccgcucugccaggcccugccccuccuccc

SEQ ID NO: 220852 - RNA, 32 nt, Human
uacccggaugaagagguuggaggugggcagcc

SEQ ID NO: 220853 - RNA, 32 nt, Human
uacccgggaccccagcccggccgcucgcccgc

SEQ ID NO: 220854 - RNA, 32 nt, Human
uacccgggaggcaguggcugcagugagcugag

SEQ ID NO: 220855 - RNA, 32 nt, Human
uacccgggaggcugaggcaggagaaucgcuug

SEQ ID NO: 220856 - RNA, 32 nt, Human
uacccgggaggcugaggcaggagaauugcuug

SEQ ID NO: 220857 - RNA, 32 nt, Human
uacccggggaggacgcggggagccggaacccc

SEQ ID NO: 220858 - RNA, 32 nt, Human
uacccggggaggacguggggagccggaacccc

SEQ ID NO: 220859 - RNA, 32 nt, Human
uacccggggaggcugaggcaggagaauugcuu

SEQ ID NO: 220860 - RNA, 32 nt, Human
uacccggugggacuugugguuggggcuggugu

SEQ ID NO: 220861 - RNA, 32 nt, Human
uacccgucacccaagugguaguagucucuuau

SEQ ID NO: 220862 - RNA, 32 nt, Human
uacccgucuuucucccagcucacccuggcuuu

SEQ ID NO: 220863 - RNA, 32 nt, Human
uacccgugguuucaaacaucaacuuggaauuc

SEQ ID NO: 220864 - RNA, 28 nt, Human
uacccuaaaagugcugucucuucaaguc

SEQ ID NO: 220865 - RNA, 32 nt, Human
uacccuaaaucuuaacuuuauggaagggccuc

SEQ ID NO: 220866 - RNA, 23 nt, Human
uacccuaacuuagcuguguggga

SEQ ID NO: 220867 - RNA, 32 nt, Human
uacccuaagagagguuuucuucuuauuuuuag

SEQ ID NO: 220868 - RNA, 32 nt, Human
uacccuaccacacaccuggccuaggagacaca

SEQ ID NO: 220869 - RNA, 32 nt, Human
uacccuacuuucauuccucccaccccaagcaa

SEQ ID NO: 220870 - RNA, 32 nt, Human
uacccuagcugggugcaugugugugcacacac

SEQ ID NO: 220871 - RNA, 32 nt, Human
uacccuagcuuuuuaccagugacuuggucucu

SEQ ID NO: 220872 - RNA, 32 nt, Human
uacccuauacugaugcuccgacugccuacuca

SEQ ID NO: 220873 - RNA, 32 nt, Human
uacccucaccaccugggaacaucccccagaca

SEQ ID NO: 220874 - RNA, 32 nt, Human
uacccucaccuuggucaucuauccugaaauaa

SEQ ID NO: 220875 - RNA, 32 nt, Human
uacccucagagagcaguuaugaaggaaaacca

SEQ ID NO: 220876 - RNA, 32 nt, Human
uacccucaggcagggcccugcuuuucuaggaa

SEQ ID NO: 220877 - RNA, 32 nt, Human
uacccucaugcuguucuugugauggugaguuc

SEQ ID NO: 220878 - RNA, 32 nt, Human
uacccucauguucuuaauucuuagcucauucu

SEQ ID NO: 220879 - RNA, 32 nt, Human
uacccuccaccccacugcccauucauauguug

SEQ ID NO: 220880 - RNA, 31 nt, Human
uacccuccacucaaggagguagaacucaguc

SEQ ID NO: 220881 - RNA, 32 nt, Human
uacccucccucgcugccugccugcggccugcc

SEQ ID NO: 220882 - RNA, 32 nt, Human
uacccucccuuucucuuuccucauugccuucu

SEQ ID NO: 220883 - RNA, 32 nt, Human
uacccuccucacaacacccucuucacccucca

SEQ ID NO: 220884 - RNA, 32 nt, Human
uacccuccuccccucuccuacugucauucuua

SEQ ID NO: 220885 - RNA, 32 nt, Human
uacccucucacacccgcacccgcgccucacga

SEQ ID NO: 220886 - RNA, 32 nt, Human
uacccucucaccauccccuugucuacucugau

SEQ ID NO: 220887 - RNA, 32 nt, Human
uacccucucccacuuucuuuguucuggguccu

SEQ ID NO: 220888 - RNA, 32 nt, Human
uacccucugggcaccagaaggcuccuggacca

SEQ ID NO: 220889 - RNA, 32 nt, Human
uacccucugguugggagaugcagccaccacau

SEQ ID NO: 220890 - RNA, 32 nt, Human
uacccugagcugcaucaccuccuaaacugagc

SEQ ID NO: 220891 - RNA, 32 nt, Human
uacccugagggcccugcaggcaaccugggacu

SEQ ID NO: 220892 - RNA, 19 nt, Human
uacccugauuauuuuauua

SEQ ID NO: 220893 - RNA, 32 nt, Human
uacccugcacuuccuccacauucuuuugcccu

SEQ ID NO: 220894 - RNA, 32 nt, Human
uacccugcagaggcuguuucagcucacacaga

SEQ ID NO: 220895 - RNA, 32 nt, Human
uacccugcaggaagaaugggauggcaguggag

SEQ ID NO: 220896 - RNA, 32 nt, Human
uacccugccccucucguccuccuggguagccu

SEQ ID NO: 220897 - RNA, 32 nt, Human
uacccugccugagauuccucaggagaaaaggc

SEQ ID NO: 220898 - RNA, 32 nt, Human
uacccugccugugcacaguggguggguuggug

SEQ ID NO: 220899 - RNA, 32 nt, Human
uacccugcuccucuuuuccuuuucccagacuc

SEQ ID NO: 220900 - RNA, 32 nt, Human
uacccugcuggguucauggaugucaucagcau

SEQ ID NO: 220901 - RNA, 32 nt, Human
uacccuggaccaaaacauuuuugaggugcaua

SEQ ID NO: 220902 - RNA, 32 nt, Human
uacccuggagccaggagcaucaggguuggcuu

SEQ ID NO: 220903 - RNA, 32 nt, Human
uacccuggagccauagcugggaggagaggaag

SEQ ID NO: 220904 - RNA, 32 nt, Human
uacccuggagccuuuggaauuugguuuccaaa

SEQ ID NO: 220905 - RNA, 32 nt, Human
uacccuggcaugcacaggugugcacugaugug

SEQ ID NO: 220906 - RNA, 32 nt, Human
uacccuggccaacauggugaaaccccaucucu

SEQ ID NO: 220907 - RNA, 32 nt, Human
uacccuggccagaacaucucacugauacucga

SEQ ID NO: 220908 - RNA, 32 nt, Human
uacccugggcauccagccccuggaccaugacu

SEQ ID NO: 220909 - RNA, 32 nt, Human
uacccugggccucagccccaccuuccaaaggg

SEQ ID NO: 220910 - RNA, 32 nt, Human
uacccugggcugaucuuugccccugguaugca

SEQ ID NO: 220911 - RNA, 32 nt, Human
uacccugggugcgaggaacugggugaagggaa

SEQ ID NO: 220912 - RNA, 32 nt, Human
uacccuggucccgggggauuggaggaggaggu

SEQ ID NO: 220913 - RNA, 32 nt, Human
uacccugucauccaguucccugccucggagau

SEQ ID NO: 220914 - RNA, 32 nt, Human
uacccuguccccagaugcacuaacagaugggg

SEQ ID NO: 220915 - RNA, 21 nt, Human
uacccugucuucuagccccac

SEQ ID NO: 220916 - RNA, 32 nt, Human
uacccuguggaggaaugcuggaagaacauaaa

SEQ ID NO: 220917 - RNA, 32 nt, Human
uacccugugucacacccagcaagaaguuuuuc

SEQ ID NO: 220918 - RNA, 32 nt, Human
uacccuguguggucugcaggacuggacuguuu

SEQ ID NO: 220919 - RNA, 32 nt, Human
uacccuguuauccucagcaacaaaacccacau

SEQ ID NO: 220920 - RNA, 32 nt, Human
uacccuguuuuaugauuguuccuugaaaguca

SEQ ID NO: 220921 - RNA, 32 nt, Human
uacccuuaaacacauccuuucuccccugggcu

SEQ ID NO: 220922 - RNA, 25 nt, Human
uacccuuacacucugaaguuguguu

SEQ ID NO: 220923 - RNA, 20 nt, Human
uacccuuauuuugaauugcu

SEQ ID NO: 220924 - RNA, 32 nt, Human
uacccuucagcaauggcuacuagaaggacgaa

SEQ ID NO: 220925 - RNA, 32 nt, Human
uacccuucagcuuugaccccaacaccgcagcu

SEQ ID NO: 220926 - RNA, 32 nt, Human
uacccuucaggacccuccccaccagcucagcc

SEQ ID NO: 220927 - RNA, 32 nt, Human
uacccuucauccacuuuuaucucuuuccaauc

SEQ ID NO: 220928 - RNA, 32 nt, Human
uacccuucccugcgggcucucuccccgacaca

SEQ ID NO: 220929 - RNA, 32 nt, Human
uacccuuccucaccacuucccucagucccaac

SEQ ID NO: 220930 - RNA, 32 nt, Human
uacccuucuucugagauguccucugccuucca

SEQ ID NO: 220931 - RNA, 32 nt, Human
uacccuucuugcuauuggaaacucagcacauu

SEQ ID NO: 220932 - RNA, 32 nt, Human
uacccuucuugcuucagacuccagcaaauucc

SEQ ID NO: 220933 - RNA, 32 nt, Human
uacccuugcagggggccagggagucaagaaua

SEQ ID NO: 220934 - RNA, 32 nt, Human
uacccuugcugcucugcauuugccaguuuauu

SEQ ID NO: 220935 - RNA, 32 nt, Human
uacccuuucugauguguguggccauuggacua

SEQ ID NO: 220936 - RNA, 32 nt, Human
uacccuuucugcacuccgugggcccugggugc

SEQ ID NO: 220937 - RNA, 32 nt, Human
uacccuuugucucgcaugagugcaauauuuca

SEQ ID NO: 220938 - RNA, 32 nt, Human
uacccuuuugcaauguacgugccugaaggggu

SEQ ID NO: 220939 - RNA, 32 nt, Human
uaccgaaggccuucugauuuagcauuuuugca

SEQ ID NO: 220940 - RNA, 32 nt, Human
uaccgacaagcacagucagguugaagaccuaa

SEQ ID NO: 220941 - RNA, 32 nt, Human
uaccgaccaagaaagcuccucccccguccucc

SEQ ID NO: 220942 - RNA, 32 nt, Human
uaccgagaagguuggagguggggaaggcuuug

SEQ ID NO: 220943 - RNA, 32 nt, Human
uaccgagagacacggucuggacagcccaaggc

SEQ ID NO: 220944 - RNA, 32 nt, Human
uaccgagagccaaacagagcccagggagacuc

SEQ ID NO: 220945 - RNA, 22 nt, Human
uaccgagcagauaaaacucaga

SEQ ID NO: 220946 - RNA, 32 nt, Human
uaccgaggguuccuggcugugaggaaacagcc

SEQ ID NO: 220947 - RNA, 32 nt, Human
uaccgaguucaagugauuuuccugccuuggcc

SEQ ID NO: 220948 - RNA, 32 nt, Human
uaccgaugauacuguuucuugcacugaauaua

SEQ ID NO: 220949 - RNA, 32 nt, Human
uaccgaugccuaggacacugcaguguuuagaa

SEQ ID NO: 220950 - RNA, 32 nt, Human
uaccgcagagggcagaaaggugcccuguagcg

SEQ ID NO: 220951 - RNA, 32 nt, Human
uaccgcagaguuguauaaucgccacccuccac

SEQ ID NO: 220952 - RNA, 32 nt, Human
uaccgcauuuggaaccaugcgagugauaccua

SEQ ID NO: 220953 - RNA, 32 nt, Human
uaccgccaccuauucaagcucucagcuacucc

SEQ ID NO: 220954 - RNA, 32 nt, Human
uaccgccagacaccuccccagaggccuuggac

SEQ ID NO: 220955 - RNA, 32 nt, Human
uaccgccccugccaucuucauuucuggcugca

SEQ ID NO: 220956 - RNA, 32 nt, Human
uaccgccggcugcuguggagugccucgcuguc

SEQ ID NO: 220957 - RNA, 32 nt, Human
uaccgcugcacuccagccugggugauagagca

SEQ ID NO: 220958 - RNA, 32 nt, Human
uaccgcugugcuuggaauucagcagcugucaa

SEQ ID NO: 220959 - RNA, 32 nt, Human
uaccggaagaagugaaacguguggaaaaugcc

SEQ ID NO: 220960 - RNA, 32 nt, Human
uaccggauucccgaguuugggaggcucugcuu

SEQ ID NO: 220961 - RNA, 20 nt, Human
uaccggcaggcugugcagga

SEQ ID NO: 220962 - RNA, 32 nt, Human
uaccggcaugagccacugcaccagccccaggg

SEQ ID NO: 220963 - RNA, 32 nt, Human
uaccggcaugagccacugcgccuggccgacaa

SEQ ID NO: 220964 - RNA, 21 nt, Human
uaccggcccagccccucuucc

SEQ ID NO: 220965 - RNA, 32 nt, Human
uaccggcccauguuucuauuugcauuuccccc

SEQ ID NO: 220966 - RNA, 32 nt, Human
uaccggccuggugccaaacuggcuacugcugc

SEQ ID NO: 220967 - RNA, 20 nt, Human
uaccggcgcacgccaccacg

SEQ ID NO: 220968 - RNA, 20 nt, Human
uaccggcgcccaccaccacg

SEQ ID NO: 220969 - RNA, 32 nt, Human
uaccggcguaagccacuaugcccagcccaaga

SEQ ID NO: 220970 - RNA, 32 nt, Human
uaccggcgugagccaccaugcccagccuaucu

SEQ ID NO: 220971 - RNA, 32 nt, Human
uaccggcgugagccaccaugccuggcccggau

SEQ ID NO: 220972 - RNA, 32 nt, Human
uaccggcgugcaccaccaugccaggcuaauuu

SEQ ID NO: 220973 - RNA, 32 nt, Human
uaccggcuugagccaccacacccggcacaucu

SEQ ID NO: 220974 - RNA, 32 nt, Human
uaccgggacgaaggccagagaccccaccgcuc

SEQ ID NO: 220975 - RNA, 24 nt, Human
uaccgggccagagcuuagaaugag

SEQ ID NO: 220976 - RNA, 32 nt, Human
uaccggggaggcugaggcaggagaaucgcuag

SEQ ID NO: 220977 - RNA, 32 nt, Human
uaccggggcuggcuagucaugggggagcccag

SEQ ID NO: 220978 - RNA, 32 nt, Human
uaccgggguggaagggagggucagggaagaaa

SEQ ID NO: 220979 - RNA, 32 nt, Human
uaccggguucaagugauucuugugccucagcc

SEQ ID NO: 220980 - RNA, 32 nt, Human
uaccgguccuccauuuuggugccugcaaagcu

SEQ ID NO: 220981 - RNA, 32 nt, Human
uaccggugcuucuggaaacuaccaggugugcc

SEQ ID NO: 220982 - RNA, 32 nt, Human
uaccggugugagccaccgcgccggcccagcug

SEQ ID NO: 220983 - RNA, 32 nt, Human
uaccggugugagccacugcgcccggccuuuuu

SEQ ID NO: 220984 - RNA, 32 nt, Human
uaccgucagaucuacuucuucacuuucauuuu

SEQ ID NO: 220985 - RNA, 32 nt, Human
uaccguccacauuccucacuacuaaccaagcu

SEQ ID NO: 220986 - RNA, 23 nt, Human
uaccgucccgugaagacagcaua

SEQ ID NO: 220987 - RNA, 32 nt, Human
uaccguccucccggugaaggcuugugaagcaa

SEQ ID NO: 220988 - RNA, 32 nt, Human
uaccguccucuagacuauuuuucuugaauacc

SEQ ID NO: 220989 - RNA, 32 nt, Human
uaccguccugacccuugucauccacuacuugg

SEQ ID NO: 220990 - RNA, 32 nt, Human
uaccgucgcucagcaacaccaaaaagagaaag

SEQ ID NO: 220991 - RNA, 32 nt, Human
uaccgucugggaggauugcuggcugguuuccu

SEQ ID NO: 220992 - RNA, 32 nt, Human
uaccgucuucucccuauucccucucucuccca

SEQ ID NO: 220993 - RNA, 31 nt, Human
uaccguggcacaaucucggcucauugcaacc

SEQ ID NO: 220994 - RNA, 32 nt, Human
uaccguggguagagcaaggaggcccaggugug

SEQ ID NO: 220995 - RNA, 32 nt, Human
uaccguguccugcuuaggggaaggugauugga

SEQ ID NO: 220996 - RNA, 32 nt, Human
uaccgugucuucacucuccagccugagguggu

SEQ ID NO: 220997 - RNA, 32 nt, Human
uaccguguucugucugugucuucaggagucuc

SEQ ID NO: 220998 - RNA, 32 nt, Human
uaccguguuggccaggcuggucucgaacuccu

SEQ ID NO: 220999 - RNA, 32 nt, Human
uaccguguuuucuuuguauuguguucuaccuu

SEQ ID NO: 221000 - RNA, 32 nt, Human
uaccguucacggggauuccggaacccucagag

SEQ ID NO: 221001 - RNA, 32 nt, Human
uaccguucccugcugguugagaguugggggcu

SEQ ID NO: 221002 - RNA, 32 nt, Human
uaccguuuucauuuuccaacagucuacuagag

SEQ ID NO: 221003 - RNA, 32 nt, Human
uaccuaaaaggauauguuaucacuggaauuua

SEQ ID NO: 221004 - RNA, 32 nt, Human
uaccuaaccucucugugccucaguuuaccaag

SEQ ID NO: 221005 - RNA, 30 nt, Human
uaccuaagcuagcaaucagaagcuacaugg

SEQ ID NO: 221006 - RNA, 32 nt, Human
uaccuaaucucaccaucucuucacuucuagcu

SEQ ID NO: 221007 - RNA, 32 nt, Human
uaccuaaucugccucugccucuguuuaauaag

SEQ ID NO: 221008 - RNA, 32 nt, Human
uaccuacaaagaacacugaaaggugaugugug

SEQ ID NO: 221009 - RNA, 32 nt, Human
uaccuacaaauacuguaaaaugccuaggaauu

SEQ ID NO: 221010 - RNA, 32 nt, Human
uaccuacaaugccaaagccucacugucacccu

SEQ ID NO: 221011 - RNA, 21 nt, Human
uaccuaccagcuguaugagaa

SEQ ID NO: 221012 - RNA, 24 nt, Human
uaccuaccugcaagugguucagug

SEQ ID NO: 221013 - RNA, 32 nt, Human
uaccuacuagcccucgcccuccuagggccugg

SEQ ID NO: 221014 - RNA, 32 nt, Human
uaccuacuaugugcaagcauuguguuagguac

SEQ ID NO: 221015 - RNA, 32 nt, Human
uaccuacugaguaggcggcgauuuuuguaugu

SEQ ID NO: 221016 - RNA, 32 nt, Human
uaccuacuuauucuaaagaagaaaaggacuuu

SEQ ID NO: 221017 - RNA, 32 nt, Human
uaccuagaccacaggugcgcaccaccauaccc

SEQ ID NO: 221018 - RNA, 32 nt, Human
uaccuagagcaggggucgccaaauguuuucuu

SEQ ID NO: 221019 - RNA, 32 nt, Human
uaccuagauaaugccaaagucagcauuugucc

SEQ ID NO: 221020 - RNA, 32 nt, Human
uaccuagauuccauacagugacaauacaaaua

SEQ ID NO: 221021 - RNA, 32 nt, Human
uaccuagcgcugcaggcuccugggcgauugua

SEQ ID NO: 221022 - RNA, 32 nt, Human
uaccuaggaaugcagaacaagggcaagaaacu

SEQ ID NO: 221023 - RNA, 32 nt, Human
uaccuagggugccucccagccugguggaccca

SEQ ID NO: 221024 - RNA, 32 nt, Human
uaccuaggucucagggcacggaggcagaacug

SEQ ID NO: 221025 - RNA, 32 nt, Human
uaccuagguguggagucuuguacauugccauc

SEQ ID NO: 221026 - RNA, 32 nt, Human
uaccuauaaagugaguguucugccugugugug

SEQ ID NO: 221027 - RNA, 32 nt, Human
uaccuauacauacgugcacacacacauacaua

SEQ ID NO: 221028 - RNA, 32 nt, Human
uaccuauacccaaauguucccucccccgacau

SEQ ID NO: 221029 - RNA, 32 nt, Human
uaccuaucaaagcugaaccagagccagacucc

SEQ ID NO: 221030 - RNA, 32 nt, Human
uaccuaucuaacacagucuuugucuuacuauc

SEQ ID NO: 221031 - RNA, 32 nt, Human
uaccuaugacucggcucugccucccaguccgc

SEQ ID NO: 221032 - RNA, 32 nt, Human
uaccuaugugcccgguuuuacucucauuuggg

SEQ ID NO: 221033 - RNA, 32 nt, Human
uaccuauuccaagugaagaauuccaaggguag

SEQ ID NO: 221034 - RNA, 32 nt, Human
uaccucaacacaguugcuuuucugccuugucu

SEQ ID NO: 221035 - RNA, 32 nt, Human
uaccucaacacuucacuccauggcaguucccg

SEQ ID NO: 221036 - RNA, 30 nt, Human
uaccucaaccccucaucaucuccaggaaag

SEQ ID NO: 221037 - RNA, 32 nt, Human
uaccucaacugccucucacuucccaagacaaa

SEQ ID NO: 221038 - RNA, 24 nt, Human
uaccucaagugauccacccaccuc

SEQ ID NO: 221039 - RNA, 32 nt, Human
uaccucacaccuguaaucccagcacuuaggua

SEQ ID NO: 221040 - RNA, 32 nt, Human
uaccucacagcagcccugggggugggugcaau

SEQ ID NO: 221041 - RNA, 32 nt, Human
uaccucacagggcuguugugaggacccaggga

SEQ ID NO: 221042 - RNA, 32 nt, Human
uaccucacagggcuguugugaggaucaaauga

SEQ ID NO: 221043 - RNA, 32 nt, Human
uaccucacagggcuguugugaggaucagagag

SEQ ID NO: 221044 - RNA, 32 nt, Human
uaccucacagggcuguugugaggauuaaauga

SEQ ID NO: 221045 - RNA, 32 nt, Human
uaccucacagggguguugugaggacugagaag

SEQ ID NO: 221046 - RNA, 32 nt, Human
uaccucacaggguuguugugaggaucaaguaa

SEQ ID NO: 221047 - RNA, 32 nt, Human
uaccucacaggguuguugugaggauuacauau

SEQ ID NO: 221048 - RNA, 32 nt, Human
uaccucacaggguuguugugaggauuuaaauu

SEQ ID NO: 221049 - RNA, 32 nt, Human
uaccucaccaugguuuuucacauugcaaaggg

SEQ ID NO: 221050 - RNA, 18 nt, Human
uaccucaccccugccugg

SEQ ID NO: 221051 - RNA, 32 nt, Human
uaccucaccccuguaaucccagcacuuugggu

SEQ ID NO: 221052 - RNA, 32 nt, Human
uaccucacugcacagcuucuagguagccuucc

SEQ ID NO: 221053 - RNA, 32 nt, Human
uaccucacugcagcuucaacuuccugggcuca

SEQ ID NO: 221054 - RNA, 32 nt, Human
uaccucacugcauuccagccugggcaacagag

SEQ ID NO: 221055 - RNA, 32 nt, Human
uaccucacugcauuccggccugggcaacagag

SEQ ID NO: 221056 - RNA, 32 nt, Human
uaccucagacuguuuguuuucuuucugggaag

SEQ ID NO: 221057 - RNA, 32 nt, Human
uaccucagcaaacaaaaggaauggaggaggag

SEQ ID NO: 221058 - RNA, 32 nt, Human
uaccucagccuccugaguagcuggaacugcag

SEQ ID NO: 221059 - RNA, 32 nt, Human
uaccucagccuccugaguagcugggauuacag

SEQ ID NO: 221060 - RNA, 32 nt, Human
uaccucaggaacaccaccagacaaauauagac

SEQ ID NO: 221061 - RNA, 32 nt, Human
uaccucaggccugggggcucccccgacuuguu

SEQ ID NO: 221062 - RNA, 24 nt, Human
uaccucaggugauccacccaccuc

SEQ ID NO: 221063 - RNA, 32 nt, Human
uaccucaguauuucagcaccuuaagcacugau

SEQ ID NO: 221064 - RNA, 32 nt, Human
uaccucagucuccugaguagcugggaugacag

SEQ ID NO: 221065 - RNA, 21 nt, Human
uaccucauaagcugcagugag

SEQ ID NO: 221066 - RNA, 32 nt, Human
uaccucauagggcuguugugaggauuaggaug

SEQ ID NO: 221067 - RNA, 32 nt, Human
uaccucauccaccucuuccauaccuuuacagg

SEQ ID NO: 221068 - RNA, 32 nt, Human
uaccucauuagcaaaugauggugagacugaag

SEQ ID NO: 221069 - RNA, 32 nt, Human
uaccucauugggccugugauguuaacauuucg

SEQ ID NO: 221070 - RNA, 32 nt, Human
uaccucauuuucuauuucacaaggaguggcuc

SEQ ID NO: 221071 - RNA, 32 nt, Human
uaccuccaacacagccaagcucugauaccuca

SEQ ID NO: 221072 - RNA, 32 nt, Human
uaccuccaaguugcacuguuuacuuauucauc

SEQ ID NO: 221073 - RNA, 32 nt, Human
uaccuccacggccaccacgugcuccaccuaga

SEQ ID NO: 221074 - RNA, 32 nt, Human
uaccuccacuuccuuucccuugcucacucugg

SEQ ID NO: 221075 - RNA, 32 nt, Human
uaccuccacuucguacuucuguauaaacuaac

SEQ ID NO: 221076 - RNA, 32 nt, Human
uaccuccagauccagggaggccaacgugccau

SEQ ID NO: 221077 - RNA, 32 nt, Human
uaccuccagcagcuggacauggggaggcgaca

SEQ ID NO: 221078 - RNA, 32 nt, Human
uaccuccaggaccuggaguguacuggaagaaa

SEQ ID NO: 221079 - RNA, 32 nt, Human
uaccuccaguaaaacacugcauuuuucuguga

SEQ ID NO: 221080 - RNA, 32 nt, Human
uaccuccauacccagcccuauacgcagaccca

SEQ ID NO: 221081 - RNA, 32 nt, Human
uaccuccaugucuggucacauggcuggacuuu

SEQ ID NO: 221082 - RNA, 32 nt, Human
uaccuccaugugcccuuuuuagggaagcuguu

SEQ ID NO: 221083 - RNA, 32 nt, Human
uaccucccaaagugcugggauuacagacauga

SEQ ID NO: 221084 - RNA, 32 nt, Human
uaccucccaaagugcugggauuacaggcauga

SEQ ID NO: 221085 - RNA, 32 nt, Human
uaccucccaaagugcugggauuacagucguga

SEQ ID NO: 221086 - RNA, 32 nt, Human
uaccucccaaggcagccuccugccuuuggacu

SEQ ID NO: 221087 - RNA, 32 nt, Human
uaccucccaagugccugguacauagugggugc

SEQ ID NO: 221088 - RNA, 32 nt, Human
uaccucccacuuccugagcccugaguggaagc

SEQ ID NO: 221089 - RNA, 32 nt, Human
uaccucccagggcuauugguuuuuaucuuaga

SEQ ID NO: 221090 - RNA, 32 nt, Human
uaccuccccacuguggcugguaacaccccagg

SEQ ID NO: 221091 - RNA, 32 nt, Human
uaccuccccaugacaccuaggcugucagucuc

SEQ ID NO: 221092 - RNA, 32 nt, Human
uaccucccgaagugcugagauuaugggcguga

SEQ ID NO: 221093 - RNA, 32 nt, Human
uaccucccugcccuucuccuccuuccuggcug

SEQ ID NO: 221094 - RNA, 32 nt, Human
uaccucccugcucccuggcuggcccacugcac

SEQ ID NO: 221095 - RNA, 32 nt, Human
uaccuccuaacuggucacccugccucaaaucu

SEQ ID NO: 221096 - RNA, 32 nt, Human
uaccuccugagaccuccguccucugcuuuccg

SEQ ID NO: 221097 - RNA, 32 nt, Human
uaccuccugaguaacugggauuacagucgugu

SEQ ID NO: 221098 - RNA, 32 nt, Human
uaccuccuguaagaggacuggaggggaagcgg

SEQ ID NO: 221099 - RNA, 32 nt, Human
uaccuccuucacccuucacuccugcccuccuc

SEQ ID NO: 221100 - RNA, 32 nt, Human
uaccuccuuccccucacuccuccccuccuucg

SEQ ID NO: 221101 - RNA, 32 nt, Human
uaccuccuuccccucauuccuccccuccuucg

SEQ ID NO: 221102 - RNA, 32 nt, Human
uaccuccuuggagaugagauagggaaggagca

SEQ ID NO: 221103 - RNA, 32 nt, Human
uaccucgaagaauguaaaaagacuuuaagugc

SEQ ID NO: 221104 - RNA, 32 nt, Human
uaccucgagggaggggcguggggaaggcggcg

SEQ ID NO: 221105 - RNA, 32 nt, Human
uaccucgcaggguuguugugaggauuuaaugc

SEQ ID NO: 221106 - RNA, 32 nt, Human
uaccucgcugaauugugcauugcaguuauugu

SEQ ID NO: 221107 - RNA, 32 nt, Human
uaccucgcugggaacgcacuuccugggacgcu

SEQ ID NO: 221108 - RNA, 32 nt, Human
uaccucggcgggaccgccaugguucugcugca

SEQ ID NO: 221109 - RNA, 32 nt, Human
uaccucggguuggggugggagccccagccaaa

SEQ ID NO: 221110 - RNA, 22 nt, Human
uaccucuaaaugaggugaaauu

SEQ ID NO: 221111 - RNA, 32 nt, Human
uaccucuaaugaagcacagagagaggaagaga

SEQ ID NO: 221112 - RNA, 32 nt, Human
uaccucuagcagccccucugcuccugggagcu

SEQ ID NO: 221113 - RNA, 23 nt, Human
uaccucuauaaacuuggacgaua

SEQ ID NO: 221114 - RNA, 32 nt, Human
uaccucuaugguuuuccucgcuuucuugagcu

SEQ ID NO: 221115 - RNA, 32 nt, Human
uaccucucagcuuacucuucaggggauaugaa

SEQ ID NO: 221116 - RNA, 32 nt, Human
uaccucuccagccucagcucucaguugcagcc

SEQ ID NO: 221117 - RNA, 32 nt, Human
uaccucuccuacguauuauuuucuugacccaa

SEQ ID NO: 221118 - RNA, 32 nt, Human
uaccucucgaugguucucuccugggcucaggc

SEQ ID NO: 221119 - RNA, 32 nt, Human
uaccucucgccuggaggaucugugccaucuug

SEQ ID NO: 221120 - RNA, 32 nt, Human
uaccucucuaucuuucuauucucaccaauaau

SEQ ID NO: 221121 - RNA, 32 nt, Human
uaccucucuguucugcaagagcuggaagcucc

SEQ ID NO: 221122 - RNA, 21 nt, Human
uaccucucuguuugguuuaga

SEQ ID NO: 221123 - RNA, 32 nt, Human
uaccucugcacugcagccugggcaacagaaug

SEQ ID NO: 221124 - RNA, 32 nt, Human
uaccucugcauucaacaaggagagaacacgac

SEQ ID NO: 221125 - RNA, 32 nt, Human
uaccucugcccugcccuccagccugggacaau

SEQ ID NO: 221126 - RNA, 32 nt, Human
uaccucuggcagcuggcccaggaagagccagc

SEQ ID NO: 221127 - RNA, 32 nt, Human
uaccucuguaccaacagaggagggaucaugag

SEQ ID NO: 221128 - RNA, 32 nt, Human
uaccucuguagauaggucacugguuuuuguuu

SEQ ID NO: 221129 - RNA, 32 nt, Human
uaccucugugugcuccuccuuggugccuggcc

SEQ ID NO: 221130 - RNA, 32 nt, Human
uaccucuguuuaaaaugcucuguuaauuauua

SEQ ID NO: 221131 - RNA, 32 nt, Human
uaccucuuaccuguaaccuaccuuaucaugug

SEQ ID NO: 221132 - RNA, 32 nt, Human
uaccucuuacuucaaauucuucugccucccuc

SEQ ID NO: 221133 - RNA, 32 nt, Human
uaccucuuagcccucuacuguugaccaaucac

SEQ ID NO: 221134 - RNA, 32 nt, Human
uaccucuuauacucaucuccccaaauuauuug

SEQ ID NO: 221135 - RNA, 32 nt, Human
uaccucuuauuucucauugagccucaggcuau

SEQ ID NO: 221136 - RNA, 32 nt, Human
uaccucuucaggucuugagaacauggaaaaga

SEQ ID NO: 221137 - RNA, 32 nt, Human
uaccucuugcccagcugccucuucugaaaucc

SEQ ID NO: 221138 - RNA, 32 nt, Human
uaccucuugcuccucauuccuccccugcccuu

SEQ ID NO: 221139 - RNA, 32 nt, Human
uaccucuuucaggguuuucuaacccugacacg

SEQ ID NO: 221140 - RNA, 32 nt, Human
uaccugaaagcuccuggcaaugcuggaaaauu

SEQ ID NO: 221141 - RNA, 32 nt, Human
uaccugaaccccucuugccacugccuucuacc

SEQ ID NO: 221142 - RNA, 32 nt, Human
uaccugaagagaggugagaccaaggccacagg

SEQ ID NO: 221143 - RNA, 32 nt, Human
uaccugaagauccuccccauguucuucaucgu

SEQ ID NO: 221144 - RNA, 32 nt, Human
uaccugaagcgccggccccuggaauugccccg

SEQ ID NO: 221145 - RNA, 32 nt, Human
uaccugaaguugauguagucacucugguuuug

SEQ ID NO: 221146 - RNA, 32 nt, Human
uaccugacacugagcucaugcagagagaugau

SEQ ID NO: 221147 - RNA, 32 nt, Human
uaccugaccugucugcaccugugugacagccc

SEQ ID NO: 221148 - RNA, 32 nt, Human
uaccugacucaaggagugucuggagcaccucc

SEQ ID NO: 221149 - RNA, 32 nt, Human
uaccugacucacaaccuucuaaucccaugauc

SEQ ID NO: 221150 - RNA, 32 nt, Human
uaccugagagugagagauguguaggaagaaua

SEQ ID NO: 221151 - RNA, 32 nt, Human
uaccugagcccaggaagcagagauuccaguga

SEQ ID NO: 221152 - RNA, 32 nt, Human
uaccugagguuaggaguuugagaccagccuga

SEQ ID NO: 221153 - RNA, 32 nt, Human
uaccugaguccaagaauguggaaauguaucug

SEQ ID NO: 221154 - RNA, 32 nt, Human
uaccugaucagagagaaaagaaaaucugcaga

SEQ ID NO: 221155 - RNA, 18 nt, Human
uaccugcaaccucuucca

SEQ ID NO: 221156 - RNA, 32 nt, Human
uaccugcacacagaagcccauugucgccggcg

SEQ ID NO: 221157 - RNA, 22 nt, Human
uaccugcaccgccccuucucca

SEQ ID NO: 221158 - RNA, 32 nt, Human
uaccugcacgaugggagcaagacacugacggu

SEQ ID NO: 221159 - RNA, 22 nt, Human
uaccugcacuuccccucucaca

SEQ ID NO: 221160 - RNA, 32 nt, Human
uaccugcagcgacucaacccuaugcauggagg

SEQ ID NO: 221161 - RNA, 32 nt, Human
uaccugcagcuuuuccugcuugauauagcaca

SEQ ID NO: 221162 - RNA, 32 nt, Human
uaccugccaaaugcuauacugugucaugguga

SEQ ID NO: 221163 - RNA, 32 nt, Human
uaccugccaguggagcugagcacugccuagcc

SEQ ID NO: 221164 - RNA, 32 nt, Human
uaccugcccaacuuuauccagagcgugcuguc

SEQ ID NO: 221165 - RNA, 22 nt, Human
uaccugcccagccccuccccca

SEQ ID NO: 221166 - RNA, 32 nt, Human
uaccugcccucagaccugccacagcccuucaa

SEQ ID NO: 221167 - RNA, 32 nt, Human
uaccugcccugcugccugcacacugcaugccu

SEQ ID NO: 221168 - RNA, 32 nt, Human
uaccugccugcggggagaauggagccagggga

SEQ ID NO: 221169 - RNA, 32 nt, Human
uaccugccuuucucucugcaccuaagucccug

SEQ ID NO: 221170 - RNA, 32 nt, Human
uaccugcguucuguggccugcuccccgccugc

SEQ ID NO: 221171 - RNA, 19 nt, Human
uaccugcucaaggucagug

SEQ ID NO: 221172 - RNA, 32 nt, Human
uaccugcuccacccucaauccaccagaaccau

SEQ ID NO: 221173 - RNA, 32 nt, Human
uaccugcuccacccugacucauuccgauuacc

SEQ ID NO: 221174 - RNA, 32 nt, Human
uaccugcucuccccuggacuucuuuuucaaua

SEQ ID NO: 221175 - RNA, 32 nt, Human
uaccugcuucccaauuacucauuuccucagau

SEQ ID NO: 221176 - RNA, 32 nt, Human
uaccugcuuccucuuuuucuugcaaguuuuaa

SEQ ID NO: 221177 - RNA, 32 nt, Human
uaccugcuugcucaagcaaccugcugccucca

SEQ ID NO: 221178 - RNA, 32 nt, Human
uaccugcuuugcauauucacacauggucaacu

SEQ ID NO: 221179 - RNA, 32 nt, Human
uaccuggaagaaaaccagacgaaugaaggauu

SEQ ID NO: 221180 - RNA, 32 nt, Human
uaccuggaagaagccauugagcucuccggcug

SEQ ID NO: 221181 - RNA, 32 nt, Human
uaccuggaagguaguaggagcagaugguggga

SEQ ID NO: 221182 - RNA, 32 nt, Human
uaccuggacgggcccaggcuuggggacucuga

SEQ ID NO: 221183 - RNA, 32 nt, Human
uaccuggaggaagggaagaaaccacaagcauu

SEQ ID NO: 221184 - RNA, 32 nt, Human
uaccuggaggaugagggcaggagcaaggcgcg

SEQ ID NO: 221185 - RNA, 32 nt, Human
uaccuggauaccugagcugccaccuguguauc

SEQ ID NO: 221186 - RNA, 32 nt, Human
uaccuggauccaguuauggugccucaggggcu

SEQ ID NO: 221187 - RNA, 32 nt, Human
uaccuggaugcauguaugcacacacaugcgcg

SEQ ID NO: 221188 - RNA, 32 nt, Human
uaccuggauuguagggaggggugcacaguguu

SEQ ID NO: 221189 - RNA, 32 nt, Human
uaccuggccccucgccuguggagcucagcccu

SEQ ID NO: 221190 - RNA, 32 nt, Human
uaccuggcccuuccagccccagccuuuggagc

SEQ ID NO: 221191 - RNA, 32 nt, Human
uaccuggccugaucacugugugccacacccca

SEQ ID NO: 221192 - RNA, 32 nt, Human
uaccuggcucuaucucacuggcugcauucccu

SEQ ID NO: 221193 - RNA, 32 nt, Human
uaccugggaacugucuaaagucuacacacaua

SEQ ID NO: 221194 - RNA, 32 nt, Human
uaccugggaagcgcagguugcagugagcugag

SEQ ID NO: 221195 - RNA, 32 nt, Human
uaccugggaggaaggcuuuuccuucacaauug

SEQ ID NO: 221196 - RNA, 32 nt, Human
uaccugggaggaggagguugcagugagcugag

SEQ ID NO: 221197 - RNA, 32 nt, Human
uaccugggaggcagaggguguuaugggaggaa

SEQ ID NO: 221198 - RNA, 32 nt, Human
uaccugggaggcggagauugcagugagccgag

SEQ ID NO: 221199 - RNA, 32 nt, Human
uaccugggaggcugaggaaggagaaucgcuug

SEQ ID NO: 221200 - RNA, 32 nt, Human
uaccugggaggcugaggcaggagaaucgcuug

SEQ ID NO: 221201 - RNA, 32 nt, Human
uaccugggaggcugaggcaggagaauugcugg

SEQ ID NO: 221202 - RNA, 32 nt, Human
uaccugggagguggagggagacaggagagaaa

SEQ ID NO: 221203 - RNA, 32 nt, Human
uaccugggauacugugcccagagccucgagga

SEQ ID NO: 221204 - RNA, 32 nt, Human
uaccugggauucggggcguggcccagaaagac

SEQ ID NO: 221205 - RNA, 32 nt, Human
uaccugggccaggccaggaaagagacuauuua

SEQ ID NO: 221206 - RNA, 32 nt, Human
uaccugggcucuggggaggcugugggccugga

SEQ ID NO: 221207 - RNA, 32 nt, Human
uaccuggggaccccugucugcacaccagggau

SEQ ID NO: 221208 - RNA, 32 nt, Human
uaccuggggagaggugucauuuggaugugagg

SEQ ID NO: 221209 - RNA, 32 nt, Human
uaccugguaggugacuggagguguugaucagu

SEQ ID NO: 221210 - RNA, 32 nt, Human
uaccuggucccuucuagguguggucccauagg

SEQ ID NO: 221211 - RNA, 32 nt, Human
uaccuggugagucuggaauggucucugggcuc

SEQ ID NO: 221212 - RNA, 32 nt, Human
uaccugguggccccuccagauggucuccacca

SEQ ID NO: 221213 - RNA, 22 nt, Human
uaccugguuguacaacuuuagc

SEQ ID NO: 221214 - RNA, 32 nt, Human
uaccuguacaacgacucugccucuuagaugau

SEQ ID NO: 221215 - RNA, 32 nt, Human
uaccuguacacauuccugcauucauguauuuu

SEQ ID NO: 221216 - RNA, 32 nt, Human
uaccuguaggacucaaagggagccaggacccc

SEQ ID NO: 221217 - RNA, 23 nt, Human
uaccuguauccaauuuguauuau

SEQ ID NO: 221218 - RNA, 32 nt, Human
uaccugucacugcaaaugcuuugucucugggc

SEQ ID NO: 221219 - RNA, 16 nt, Human
uaccugucaggaugac

SEQ ID NO: 221220 - RNA, 32 nt, Human
uaccugucaucugggccaccagcuccacuggc

SEQ ID NO: 221221 - RNA, 32 nt, Human
uaccugucauuuccuacccuuagugccuugua

SEQ ID NO: 221222 - RNA, 32 nt, Human
uaccuguccaugucuuauacuuugaccgcgau

SEQ ID NO: 221223 - RNA, 31 nt, Human
uaccugucccucucuggcuugguccccuucc

SEQ ID NO: 221224 - RNA, 32 nt, Human
uaccugucccuuggcuaugagcaggcuuuggg

SEQ ID NO: 221225 - RNA, 32 nt, Human
uaccugucucuauccaugcugucaacuccugc

SEQ ID NO: 221226 - RNA, 32 nt, Human
uaccugugcuaggguuuucacacugggagugc

SEQ ID NO: 221227 - RNA, 32 nt, Human
uaccuguggagcugucuguagguugggaagug

SEQ ID NO: 221228 - RNA, 32 nt, Human
uaccuguggcuggcugugcugguugagcccga

SEQ ID NO: 221229 - RNA, 32 nt, Human
uaccugugguaugugggcauguuuacugccac

SEQ ID NO: 221230 - RNA, 32 nt, Human
uaccugugugugugcaugugcacguguuugag

SEQ ID NO: 221231 - RNA, 32 nt, Human
uaccuguguuuaaauuauggauaacucgaaag

SEQ ID NO: 221232 - RNA, 32 nt, Human
uaccuguuacaccaauggauuguaauacuggu

SEQ ID NO: 221233 - RNA, 32 nt, Human
uaccuguucugcaggcggguccuggccucccc

SEQ ID NO: 221234 - RNA, 32 nt, Human
uaccuguucuggaagggagaggggcuggaggc

SEQ ID NO: 221235 - RNA, 27 nt, Human
uaccuguucuggauauuucacauaaau

SEQ ID NO: 221236 - RNA, 32 nt, Human
uaccuguugccucacauuggcaaaagaggggg

SEQ ID NO: 221237 - RNA, 32 nt, Human
uaccuguuguggacugaauugcgucaaauuca

SEQ ID NO: 221238 - RNA, 32 nt, Human
uaccuguuucaaggaccugccagucugagaag

SEQ ID NO: 221239 - RNA, 32 nt, Human
uaccuguuucugcugcuagaagauccaggaaa

SEQ ID NO: 221240 - RNA, 23 nt, Human
uaccuuaaagagagaugugaaga

SEQ ID NO: 221241 - RNA, 24 nt, Human
uaccuuaaagagauaaaaugcaga

SEQ ID NO: 221242 - RNA, 32 nt, Human
uaccuuaaccucugaacucugaccucaggagg

SEQ ID NO: 221243 - RNA, 32 nt, Human
uaccuuacaaagccacaggagcagagcugccc

SEQ ID NO: 221244 - RNA, 32 nt, Human
uaccuuacagugagggcuauacaugguagcca

SEQ ID NO: 221245 - RNA, 32 nt, Human
uaccuuacauauaagucucaguaguaucccua

SEQ ID NO: 221246 - RNA, 32 nt, Human
uaccuuaccuccuaagaagaaaagccacuuuc

SEQ ID NO: 221247 - RNA, 32 nt, Human
uaccuuagaacauguugaucugugagugccca

SEQ ID NO: 221248 - RNA, 32 nt, Human
uaccuuagccacccuccucaugcccacccagc

SEQ ID NO: 221249 - RNA, 32 nt, Human
uaccuuagcuggaccucgucucccagggauua

SEQ ID NO: 221250 - RNA, 32 nt, Human
uaccuuagggaaaagaaagggaaguaaauuga

SEQ ID NO: 221251 - RNA, 32 nt, Human
uaccuuaguucuuucucucugacuccuggaag

SEQ ID NO: 221252 - RNA, 32 nt, Human
uaccuuauggucaccacuccugcaacaacaac

SEQ ID NO: 221253 - RNA, 32 nt, Human
uaccuuauuuuccuccuccuccuuggccuacu

SEQ ID NO: 221254 - RNA, 32 nt, Human
uaccuucaaccuggcccaguccccugcgucau

SEQ ID NO: 221255 - RNA, 32 nt, Human
uaccuucaaggcucuucuuccucaccgagcau

SEQ ID NO: 221256 - RNA, 32 nt, Human
uaccuucacacuccugagcuccgccuuccuuu

SEQ ID NO: 221257 - RNA, 32 nt, Human
uaccuucaggcagccagugugacacugcuuua

SEQ ID NO: 221258 - RNA, 32 nt, Human
uaccuuccaaagugcugggauuacaggcguca

SEQ ID NO: 221259 - RNA, 32 nt, Human
uaccuucccaugcaggcuaaagugauuccuuc

SEQ ID NO: 221260 - RNA, 32 nt, Human
uaccuucccgagagcagugucgggcagugggg

SEQ ID NO: 221261 - RNA, 32 nt, Human
uaccuuccucgccuccccucuuccucauucca

SEQ ID NO: 221262 - RNA, 32 nt, Human
uaccuuccuguuucucugaaucagcccauagg

SEQ ID NO: 221263 - RNA, 32 nt, Human
uaccuuccuucccaucgcccugccucgcagcc

SEQ ID NO: 221264 - RNA, 23 nt, Human
uaccuucgugggccuuugauuua

SEQ ID NO: 221265 - RNA, 32 nt, Human
uaccuucucuacccaucucccccaucccccac

SEQ ID NO: 221266 - RNA, 32 nt, Human
uaccuucugaauccauauguagagauuucagc

SEQ ID NO: 221267 - RNA, 32 nt, Human
uaccuucugccuccuccauucuuccugggugc

SEQ ID NO: 221268 - RNA, 32 nt, Human
uaccuucugcuguuuguuccaggcucaccuuu

SEQ ID NO: 221269 - RNA, 32 nt, Human
uaccuucuugaggaugugccagacaguggaaa

SEQ ID NO: 221270 - RNA, 32 nt, Human
uaccuucuuugucccaggcugcuucucuauaa

SEQ ID NO: 221271 - RNA, 32 nt, Human
uaccuugaaaagaagguuggagugcagcuuga

SEQ ID NO: 221272 - RNA, 32 nt, Human
uaccuugaccucaagcccuucaucccacuuug

SEQ ID NO: 221273 - RNA, 32 nt, Human
uaccuugcagaggaaaggugggagagaggaaa

SEQ ID NO: 221274 - RNA, 32 nt, Human
uaccuugccuguaguccagucucuccagcauc

SEQ ID NO: 221275 - RNA, 32 nt, Human
uaccuugggaggccaaggugggcagaucgcuu

SEQ ID NO: 221276 - RNA, 32 nt, Human
uaccuuggucagugaaaagaugcuacuauauu

SEQ ID NO: 221277 - RNA, 32 nt, Human
uaccuuggucucaccuauccugcccucacauc

SEQ ID NO: 221278 - RNA, 32 nt, Human
uaccuugucucucagaucacuaguucagggga

SEQ ID NO: 221279 - RNA, 21 nt, Human
uaccuugugcuuugaagauuu

SEQ ID NO: 221280 - RNA, 32 nt, Human
uaccuuguuauugucucuacuaggaaauuaca

SEQ ID NO: 221281 - RNA, 32 nt, Human
uaccuuguuauuuccauguaccaaaauaaacc

SEQ ID NO: 221282 - RNA, 32 nt, Human
uaccuuguucuaugugaccagaagugcugaug

SEQ ID NO: 221283 - RNA, 19 nt, Human
uaccuuguucuggucacug

SEQ ID NO: 221284 - RNA, 32 nt, Human
uaccuuguuuucacuugugcacugugaaugaa

SEQ ID NO: 221285 - RNA, 32 nt, Human
uaccuuuaaagucagaacaggccaggcccggu

SEQ ID NO: 221286 - RNA, 32 nt, Human
uaccuuuaaguuuguguagacuucugaauaag

SEQ ID NO: 221287 - RNA, 32 nt, Human
uaccuuuacagcuuuuuauuguggacuaaugc

SEQ ID NO: 221288 - RNA, 32 nt, Human
uaccuuuacauggugaaaguucucucuugauc

SEQ ID NO: 221289 - RNA, 32 nt, Human
uaccuuuaucugucuuuaauccaucuuuuuaa

SEQ ID NO: 221290 - RNA, 32 nt, Human
uaccuuuauugcuucuuaaggguccuugcugu

SEQ ID NO: 221291 - RNA, 32 nt, Human
uaccuuucauuucgcacuuucuccucugcugc

SEQ ID NO: 221292 - RNA, 32 nt, Human
uaccuuucauuuucucuuuauguuauucuuuc

SEQ ID NO: 221293 - RNA, 32 nt, Human
uaccuuucuccaccauccagagccacaaaagc

SEQ ID NO: 221294 - RNA, 32 nt, Human
uaccuuucuccccuagugcucaugccccagaa

SEQ ID NO: 221295 - RNA, 32 nt, Human
uaccuuucugacucugucguccaggcuggagu

SEQ ID NO: 221296 - RNA, 32 nt, Human
uaccuuugaacagcaaccaugugggcuacuca

SEQ ID NO: 221297 - RNA, 27 nt, Human
uaccuuugcucucuucauaguguguug

SEQ ID NO: 221298 - RNA, 22 nt, Human
uaccuuuguguaugugcuugaa

SEQ ID NO: 221299 - RNA, 32 nt, Human
uaccuuuuaaggacagugucuuugaauguagg

SEQ ID NO: 221300 - RNA, 32 nt, Human
uaccuuuuccauccuccuccucugccuucaaa

SEQ ID NO: 221301 - RNA, 32 nt, Human
uaccuuuuguccuaagaaaaaggcuugaauuu

SEQ ID NO: 221302 - RNA, 32 nt, Human
uacgaaaaacacagaaagauuagccaggcaua

SEQ ID NO: 221303 - RNA, 32 nt, Human
uacgaaaaauuagcugggcaugguggcgcaca

SEQ ID NO: 221304 - RNA, 24 nt, Human
uacgaaaagcagcugucccaccag

SEQ ID NO: 221305 - RNA, 32 nt, Human
uacgaaacacagaaagggaaaauaaacugacu

SEQ ID NO: 221306 - RNA, 32 nt, Human
uacgaaagucauguuacccaacaccgggaggc

SEQ ID NO: 221307 - RNA, 32 nt, Human
uacgaaggccauaccugccacauuuauaaaau

SEQ ID NO: 221308 - RNA, 32 nt, Human
uacgaagggaccaggccaggccacagggcucu

SEQ ID NO: 221309 - RNA, 32 nt, Human
uacgaaguauucccaaucacuggucaucugac

SEQ ID NO: 221310 - RNA, 32 nt, Human
uacgaagucauccucaagcuucaauuuauuua

SEQ ID NO: 221311 - RNA, 32 nt, Human
uacgaaguucaagaucaaaaaggcuuauaaaa

SEQ ID NO: 221312 - RNA, 32 nt, Human
uacgaaucguacuucuuuaauugaucuaauuu

SEQ ID NO: 221313 - RNA, 32 nt, Human
uacgacagacccaggcuggagucuuggcugug

SEQ ID NO: 221314 - RNA, 32 nt, Human
uacgaccccuucucccuguuacugcccuucuc

SEQ ID NO: 221315 - RNA, 32 nt, Human
uacgacccuggugcccugggcugccgcccugc

SEQ ID NO: 221316 - RNA, 32 nt, Human
uacgaccugggcaccuugcaagcacaagaaag

SEQ ID NO: 221317 - RNA, 32 nt, Human
uacgacgacugcuucagcacgugaguggcugu

SEQ ID NO: 221318 - RNA, 32 nt, Human
uacgacuccuguaaucccagcacuuugggagg

SEQ ID NO: 221319 - RNA, 32 nt, Human
uacgagaccacccugggcaacauggugaaauc

SEQ ID NO: 221320 - RNA, 32 nt, Human
uacgagaucagccuggccagcacggugaaacc

SEQ ID NO: 221321 - RNA, 32 nt, Human
uacgagaucuggagcaacagcuaggaaauauc

SEQ ID NO: 221322 - RNA, 32 nt, Human
uacgagaugugcacaugggggaggcugggcau

SEQ ID NO: 221323 - RNA, 32 nt, Human
uacgagccaagaugcucagcuuuauaggugug

SEQ ID NO: 221324 - RNA, 32 nt, Human
uacgagcugcucauccagaaguuccucagccu

SEQ ID NO: 221325 - RNA, 32 nt, Human
uacgagcuucccacccuuccuaacgcuuucac

SEQ ID NO: 221326 - RNA, 32 nt, Human
uacgaggggagaaagugggacuccuccacucc

SEQ ID NO: 221327 - RNA, 32 nt, Human
uacgagguguguguccuaacacacucccggca

SEQ ID NO: 221328 - RNA, 32 nt, Human
uacgaguccacauuccuguuuguaauccuugg

SEQ ID NO: 221329 - RNA, 32 nt, Human
uacgagugaaguuuauauccaaguucagacuc

SEQ ID NO: 221330 - RNA, 32 nt, Human
uacgaguguggggucuccaucccuggaaagug

SEQ ID NO: 221331 - RNA, 23 nt, Human
uacgaguuaccgauucuauguca

SEQ ID NO: 221332 - RNA, 32 nt, Human
uacgaguuggggaccagaaaucugggcucaga

SEQ ID NO: 221333 - RNA, 32 nt, Human
uacgauauacaaaaaucagugguauuuucaua

SEQ ID NO: 221334 - RNA, 32 nt, Human
uacgaucaagccacugcacuccagccugggcg

SEQ ID NO: 221335 - RNA, 32 nt, Human
uacgaucacaccacugcacucuggccugcaug

SEQ ID NO: 221336 - RNA, 32 nt, Human
uacgaucaugccacugcacuccacucugggca

SEQ ID NO: 221337 - RNA, 32 nt, Human
uacgaucgcaccacugcauucuagccuuagug

SEQ ID NO: 221338 - RNA, 32 nt, Human
uacgaugacucacaccuguacucccagcacuu

SEQ ID NO: 221339 - RNA, 29 nt, Human
uacgaugagcacaccggccgugccccagg

SEQ ID NO: 221340 - RNA, 31 nt, Human
uacgaugagguguccaucauggagguuaaga

SEQ ID NO: 221341 - RNA, 32 nt, Human
uacgauuccggagaaucgcgaggcagagcggg

SEQ ID NO: 221342 - RNA, 32 nt, Human
uacgauuccucauauccaaggcuacuuuugaa

SEQ ID NO: 221343 - RNA, 32 nt, Human
uacgcaaacugcgccugcuccugaaaagcucu

SEQ ID NO: 221344 - RNA, 32 nt, Human
uacgcacacacgugcacacauguacacacgga

SEQ ID NO: 221345 - RNA, 32 nt, Human
uacgcacagcacaccacugucccuucacugca

SEQ ID NO: 221346 - RNA, 32 nt, Human
uacgcacauacacacaugcacgcacgcacacg

SEQ ID NO: 221347 - RNA, 32 nt, Human
uacgcacauaugcacacaggcagacauaccuc

SEQ ID NO: 221348 - RNA, 32 nt, Human
uacgcaccugggaccugcaggcggcggcgcag

SEQ ID NO: 221349 - RNA, 32 nt, Human
uacgcacggcaucuggcugcucugucuacugu

SEQ ID NO: 221350 - RNA, 32 nt, Human
uacgcacggucugauuuucucuuuggauucuu

SEQ ID NO: 221351 - RNA, 32 nt, Human
uacgcacuuuugcaggaugaccucagggcuau

SEQ ID NO: 221352 - RNA, 32 nt, Human
uacgcagaccgaguggcagucuggcuaaaggc

SEQ ID NO: 221353 - RNA, 32 nt, Human
uacgcagccagccagcaucugggagcccggcg

SEQ ID NO: 221354 - RNA, 32 nt, Human
uacgcaggccggccuccaccuccagaggguuc

SEQ ID NO: 221355 - RNA, 32 nt, Human
uacgcagggcugggguuuugcuacuuguuccu

SEQ ID NO: 221356 - RNA, 20 nt, Human
uacgcaguuuucauguccuu

SEQ ID NO: 221357 - RNA, 32 nt, Human
uacgcaucucuccagcauuccguccugggauc

SEQ ID NO: 221358 - RNA, 32 nt, Human
uacgcauuauggaaauauaggaagagauauag

SEQ ID NO: 221359 - RNA, 32 nt, Human
uacgccacggacuaugcuguugggcccaggcc

SEQ ID NO: 221360 - RNA, 32 nt, Human
uacgccacugcaccccaaccugggcgacagag

SEQ ID NO: 221361 - RNA, 32 nt, Human
uacgccacugcacuaaugucuggugacagagu

SEQ ID NO: 221362 - RNA, 32 nt, Human
uacgccacugcacuccagccuggaggccagag

SEQ ID NO: 221363 - RNA, 32 nt, Human
uacgccacugcacuccagccugggcaacacag

SEQ ID NO: 221364 - RNA, 32 nt, Human
uacgccacugcacuccagccugggcaacagag

SEQ ID NO: 221365 - RNA, 32 nt, Human
uacgccacugcacuccagccugggugacggag

SEQ ID NO: 221366 - RNA, 32 nt, Human
uacgccacugcauuguagccugggcaacagag

SEQ ID NO: 221367 - RNA, 32 nt, Human
uacgccagaagaccugaaaugccuuguaccua

SEQ ID NO: 221368 - RNA, 32 nt, Human
uacgccaggagaaguugaggggagcaugcuuc

SEQ ID NO: 221369 - RNA, 32 nt, Human
uacgccaggccaugaaauacaaaagccucucu

SEQ ID NO: 221370 - RNA, 32 nt, Human
uacgccauccaggcugggaggggaagagugcu

SEQ ID NO: 221371 - RNA, 32 nt, Human
uacgccaugguuaugagcagguugaugagggu

SEQ ID NO: 221372 - RNA, 32 nt, Human
uacgcccaagagaaggagguggaggcagccaa

SEQ ID NO: 221373 - RNA, 32 nt, Human
uacgcccacugcaaggccucccucccaccgcg

SEQ ID NO: 221374 - RNA, 32 nt, Human
uacgccccaguucuuucaucuuggaauucuuu

SEQ ID NO: 221375 - RNA, 32 nt, Human
uacgccccgcugucugugcugugagagucgcc

SEQ ID NO: 221376 - RNA, 32 nt, Human
uacgccccuccuccuucucucuuggcgaggcc

SEQ ID NO: 221377 - RNA, 32 nt, Human
uacgcccgagcggaagaagcgggcucugagcc

SEQ ID NO: 221378 - RNA, 32 nt, Human
uacgcccuccucagcgccuccugggcugugcu

SEQ ID NO: 221379 - RNA, 32 nt, Human
uacgcccuuacauucugcacuucauaguugga

SEQ ID NO: 221380 - RNA, 32 nt, Human
uacgccggcagcccggugcaccacgcggccga

SEQ ID NO: 221381 - RNA, 32 nt, Human
uacgccucagauggugguauuugcuaacauca

SEQ ID NO: 221382 - RNA, 32 nt, Human
uacgccuguaaucccagcuacucgggaggcug

SEQ ID NO: 221383 - RNA, 32 nt, Human
uacgccuguagucccagcuacucaggaggcug

SEQ ID NO: 221384 - RNA, 32 nt, Human
uacgccugugcugcugucaugaguggcgagcu

SEQ ID NO: 221385 - RNA, 32 nt, Human
uacgccuugucauuggaaacacugccuuuguc

SEQ ID NO: 221386 - RNA, 32 nt, Human
uacgcgaggguagagcacaagauggaaaugga

SEQ ID NO: 221387 - RNA, 22 nt, Human
uacgcgccguggugcgcacgga

SEQ ID NO: 221388 - RNA, 32 nt, Human
uacgcgcuggugguccaccacccucaggauga

SEQ ID NO: 221389 - RNA, 32 nt, Human
uacgcggacaaccaccaccaccacccccacac

SEQ ID NO: 221390 - RNA, 32 nt, Human
uacgcggagcgggagagcggccacaccaugcg

SEQ ID NO: 221391 - RNA, 32 nt, Human
uacgcggagcugggcaccaccaucuccaaauc

SEQ ID NO: 221392 - RNA, 32 nt, Human
uacgcggccucucugugccgcuucauuuguag

SEQ ID NO: 221393 - RNA, 32 nt, Human
uacgcgggccguacagaggagcucuagagggc

SEQ ID NO: 221394 - RNA, 32 nt, Human
uacgcucacagcaacugcuuaccugcuccaag

SEQ ID NO: 221395 - RNA, 32 nt, Human
uacgcuccaacuugcauggccuagagaccgcu

SEQ ID NO: 221396 - RNA, 32 nt, Human
uacgcugagccugagacgggaggcaggaaagg

SEQ ID NO: 221397 - RNA, 32 nt, Human
uacgcugcccucgcagccuggcggccuccgcu

SEQ ID NO: 221398 - RNA, 32 nt, Human
uacgcugcucaguugguggagacuggggcugg

SEQ ID NO: 221399 - RNA, 32 nt, Human
uacgcuggaaauugacuccccuuucccuuccc

SEQ ID NO: 221400 - RNA, 32 nt, Human
uacgcugggaaagacauagaagaacuauuaag

SEQ ID NO: 221401 - RNA, 32 nt, Human
uacgcuguguguggauuucuccugaaaccaca

SEQ ID NO: 221402 - RNA, 32 nt, Human
uacgcuuguagucccagcacuuugggaggcug

SEQ ID NO: 221403 - RNA, 32 nt, Human
uacgcuuuauagguggaaaaguagcaaauaaa

SEQ ID NO: 221404 - RNA, 32 nt, Human
uacgcuuuguuggcugggcacggcgacucacg

SEQ ID NO: 221405 - RNA, 32 nt, Human
uacggaauccacccuuauuugcucucaggcuu

SEQ ID NO: 221406 - RNA, 32 nt, Human
uacggacgugagccaccacgccuggcccaggc

SEQ ID NO: 221407 - RNA, 32 nt, Human
uacggacucacacccguucccacucucugcaa

SEQ ID NO: 221408 - RNA, 32 nt, Human
uacggacugcaaccuucaaauucagcuguggu

SEQ ID NO: 221409 - RNA, 32 nt, Human
uacggacuuccuuuaggaucucaggcuucugc

SEQ ID NO: 221410 - RNA, 32 nt, Human
uacggacuugcagcccacgggaccccagccca

SEQ ID NO: 221411 - RNA, 32 nt, Human
uacggacuuggggucuaucuugccaaauauuu

SEQ ID NO: 221412 - RNA, 32 nt, Human
uacggagaaaguaucagcaacuuuaugcucaa

SEQ ID NO: 221413 - RNA, 32 nt, Human
uacggagaggagaaaguugugcagugauucca

SEQ ID NO: 221414 - RNA, 32 nt, Human
uacggagggggccuggcucucagucucuacuc

SEQ ID NO: 221415 - RNA, 18 nt, Human
uacggagugauuuggugu

SEQ ID NO: 221416 - RNA, 32 nt, Human
uacggauauaagccucaguuaaauggaauuau

SEQ ID NO: 221417 - RNA, 32 nt, Human
uacggaugagacugaaagaaaaccucaaagga

SEQ ID NO: 221418 - RNA, 31 nt, Human
uacggcacaguguccagggcagcugggugug

SEQ ID NO: 221419 - RNA, 32 nt, Human
uacggcaccaccacccucaaguacuuccagga

SEQ ID NO: 221420 - RNA, 32 nt, Human
uacggcagccaucuugguacccugagaagagu

SEQ ID NO: 221421 - RNA, 32 nt, Human
uacggcagcuacuacggaggccugggcuacag

SEQ ID NO: 221422 - RNA, 32 nt, Human
uacggcauuacauuccauccagccugggcgac

SEQ ID NO: 221423 - RNA, 21 nt, Human
uacggccgcggccugagugga

SEQ ID NO: 221424 - RNA, 32 nt, Human
uacggcggcuguaugggcucucuuccuccuuc

SEQ ID NO: 221425 - RNA, 32 nt, Human
uacggcucacuaggcagccccagaucugggga

SEQ ID NO: 221426 - RNA, 27 nt, Human
uacggcugcagcagcagcugccagggg

SEQ ID NO: 221427 - RNA, 32 nt, Human
uacggcugcauucuguaagugggcauggucuc

SEQ ID NO: 221428 - RNA, 32 nt, Human
uacggcugucccagacacugagccuggugccc

SEQ ID NO: 221429 - RNA, 32 nt, Human
uacggcuugagguuucagcauccaggcugcag

SEQ ID NO: 221430 - RNA, 32 nt, Human
uacgggaaguucugcaaguguucuccaggggc

SEQ ID NO: 221431 - RNA, 32 nt, Human
uacgggagccgccuugccaucccugcagccca

SEQ ID NO: 221432 - RNA, 32 nt, Human
uacgggaggcugagagacugagggucuuucuu

SEQ ID NO: 221433 - RNA, 20 nt, Human
uacgggcacacaccaccaug

SEQ ID NO: 221434 - RNA, 20 nt, Human
uacgggcacgcaccaccacg

SEQ ID NO: 221435 - RNA, 32 nt, Human
uacgggcaguggcugcucguguccucugccac

SEQ ID NO: 221436 - RNA, 32 nt, Human
uacgggcaugagccaccgcacccggcuuacug

SEQ ID NO: 221437 - RNA, 32 nt, Human
uacgggcaugagccacugcacccggcccugag

SEQ ID NO: 221438 - RNA, 32 nt, Human
uacgggcaugagccacugugcgcaaucugauu

SEQ ID NO: 221439 - RNA, 32 nt, Human
uacgggcaugagcugcugugcccagccucaau

SEQ ID NO: 221440 - RNA, 20 nt, Human
uacgggcaugcaccaccaug

SEQ ID NO: 221441 - RNA, 32 nt, Human
uacgggcgagcacccuucccaccccaucccag

SEQ ID NO: 221442 - RNA, 32 nt, Human
uacgggcgcccaccaccaugcccagcuaauuu

SEQ ID NO: 221443 - RNA, 32 nt, Human
uacgggcgcccgccaccaugcccagcuacuuu

SEQ ID NO: 221444 - RNA, 32 nt, Human
uacgggcgugagccaccgcgccuggccaggau

SEQ ID NO: 221445 - RNA, 32 nt, Human
uacgggcgugagccaccgugcucggcccaagg

SEQ ID NO: 221446 - RNA, 32 nt, Human
uacgggcgugagccacuucacccggcccggag

SEQ ID NO: 221447 - RNA, 32 nt, Human
uacgggcugcugcagaggcggcuggagaacuu

SEQ ID NO: 221448 - RNA, 32 nt, Human
uacgggggugagccacugcgcccggccccugc

SEQ ID NO: 221449 - RNA, 32 nt, Human
uacggggucgccacugcacccagccugugucu

SEQ ID NO: 221450 - RNA, 32 nt, Human
uacggggucuugcucugucucccaggcuggag

SEQ ID NO: 221451 - RNA, 32 nt, Human
uacggguccuuguggcuucugcucugagggcu

SEQ ID NO: 221452 - RNA, 32 nt, Human
uacgggugacagaucuuguuucugaagauggu

SEQ ID NO: 221453 - RNA, 32 nt, Human
uacgggugcgugccaccaugccuggcuaauuu

SEQ ID NO: 221454 - RNA, 32 nt, Human
uacgggugugagccaccacacccggcccaagg

SEQ ID NO: 221455 - RNA, 32 nt, Human
uacgggugugagccaccacgccuggcuaauuu

SEQ ID NO: 221456 - RNA, 32 nt, Human
uacgggugugagccaccgugcccagccuuuuu

SEQ ID NO: 221457 - RNA, 32 nt, Human
uacgguaggagcuuugcaggaaguuugcaaaa

SEQ ID NO: 221458 - RNA, 32 nt, Human
uacgguaugccauuaaauaaauauaccacaau

SEQ ID NO: 221459 - RNA, 32 nt, Human
uacggucccaucucuucacaggcauggauucu

SEQ ID NO: 221460 - RNA, 32 nt, Human
uacggucccucuucaccuucugaggcccacga

SEQ ID NO: 221461 - RNA, 32 nt, Human
uacgguccuccccugaccccuccuuccacccg

SEQ ID NO: 221462 - RNA, 32 nt, Human
uacgguccugcucucuuggagcugacauucug

SEQ ID NO: 221463 - RNA, 32 nt, Human
uacggucuccucugaccugagagggacaguga

SEQ ID NO: 221464 - RNA, 32 nt, Human
uacggucugagagaucugaaauaaccuuuccc

SEQ ID NO: 221465 - RNA, 32 nt, Human
uacggucugcagcuguucccauggagcccgga

SEQ ID NO: 221466 - RNA, 32 nt, Human
uacgguggcaaaaaugacaagccauagacccu

SEQ ID NO: 221467 - RNA, 32 nt, Human
uacgguggcucacaccuauaaucucagcacuu

SEQ ID NO: 221468 - RNA, 32 nt, Human
uacgguggcucacaccuguaaucccagcacuu

SEQ ID NO: 221469 - RNA, 32 nt, Human
uacgguggcucacaccugucaucccagcacuu

SEQ ID NO: 221470 - RNA, 32 nt, Human
uacgguggcucacgccuauaaucccagcacag

SEQ ID NO: 221471 - RNA, 32 nt, Human
uacgguggcucacgccuauaaucccagcacuu

SEQ ID NO: 221472 - RNA, 32 nt, Human
uacgguggcucacgccuguaaucccagcacuu

SEQ ID NO: 221473 - RNA, 32 nt, Human
uacgguggcucaugccuauaaucccagcacuu

SEQ ID NO: 221474 - RNA, 32 nt, Human
uacgguggcucaugccuguaaucccagcacuu

SEQ ID NO: 221475 - RNA, 32 nt, Human
uacgguggcucuguuauaugcuugccuaacac

SEQ ID NO: 221476 - RNA, 32 nt, Human
uacgguuuccucaguaauuuccaccaggauga

SEQ ID NO: 221477 - RNA, 32 nt, Human
uacguaacaaaccugcacauugugcacaugua

SEQ ID NO: 221478 - RNA, 32 nt, Human
uacguaacaguuaucgugucuccuuguaacuc

SEQ ID NO: 221479 - RNA, 32 nt, Human
uacguaacaguuaucgugucuccuuguaacuu

SEQ ID NO: 221480 - RNA, 32 nt, Human
uacguaaccugaccauggcccaacagcaaaca

SEQ ID NO: 221481 - RNA, 32 nt, Human
uacguaagucagaaagaggaaaagaaaauuau

SEQ ID NO: 221482 - RNA, 32 nt, Human
uacguaaugcagauucccugggugccgugaaa

SEQ ID NO: 221483 - RNA, 32 nt, Human
uacguacauaaccuaaaccuacuccaaugcua

SEQ ID NO: 221484 - RNA, 32 nt, Human
uacguacgugucaacacauacaugcauaggua

SEQ ID NO: 221485 - RNA, 32 nt, Human
uacguacuaagagcccaauuuaauuauauucc

SEQ ID NO: 221486 - RNA, 32 nt, Human
uacguacucuagacugaaagguucuacuauac

SEQ ID NO: 221487 - RNA, 32 nt, Human
uacguauauuucuguaucuauguauguauaua

SEQ ID NO: 221488 - RNA, 32 nt, Human
uacguaucuuuucuccuccucccuaguguucc

SEQ ID NO: 221489 - RNA, 32 nt, Human
uacguauuagguugcugcaaaaguaauugugg

SEQ ID NO: 221490 - RNA, 32 nt, Human
uacgucacugcauuccagccugggugacagag

SEQ ID NO: 221491 - RNA, 32 nt, Human
uacgucccccaccucuagcucccuagccucac

SEQ ID NO: 221492 - RNA, 32 nt, Human
uacguccccuucuugguccacagucugcccuc

SEQ ID NO: 221493 - RNA, 32 nt, Human
uacguccuuggcuacagacuccuggaacagca

SEQ ID NO: 221494 - RNA, 32 nt, Human
uacgucgccagcaaaagaagagauacacugca

SEQ ID NO: 221495 - RNA, 32 nt, Human
uacgucgggcuggggccuggcccccuccuguc

SEQ ID NO: 221496 - RNA, 32 nt, Human
uacgucuuccagccucuccaggucaagcuccu

SEQ ID NO: 221497 - RNA, 32 nt, Human
uacgucuugaaccuggauucgccuagggguug

SEQ ID NO: 221498 - RNA, 32 nt, Human
uacgucuugagucugggauuauccgcauugua

SEQ ID NO: 221499 - RNA, 32 nt, Human
uacgugacccaggcuggaguguaguagcuauu

SEQ ID NO: 221500 - RNA, 32 nt, Human
uacgugaccugugcugucacugggcauaggac

SEQ ID NO: 221501 - RNA, 32 nt, Human
uacgugaggaagaaaaaugucugaaaagcaga

SEQ ID NO: 221502 - RNA, 32 nt, Human
uacgugaggccugucucucggggccuggaagu

SEQ ID NO: 221503 - RNA, 21 nt, Human
uacgugaggcgccagcucugu

SEQ ID NO: 221504 - RNA, 32 nt, Human
uacgugauugacacuucucuccucagacuuca

SEQ ID NO: 221505 - RNA, 32 nt, Human
uacgugcacuucaggcaggagcugaacaagag

SEQ ID NO: 221506 - RNA, 32 nt, Human
uacgugcgccuccgccggcagcuccugacuca

SEQ ID NO: 221507 - RNA, 32 nt, Human
uacgugcggagggaggacacagcagaccuguu

SEQ ID NO: 221508 - RNA, 32 nt, Human
uacguggaguuuccuagugggcuucucaacuu

SEQ ID NO: 221509 - RNA, 32 nt, Human
uacgugggaggcagaggcaggagaaucauuug

SEQ ID NO: 221510 - RNA, 32 nt, Human
uacgugggauaggauuuauucucuccacacuu

SEQ ID NO: 221511 - RNA, 32 nt, Human
uacgugggggagagaauaaaacuccagcgaga

SEQ ID NO: 221512 - RNA, 20 nt, Human
uacgugguggccgucugcca

SEQ ID NO: 221513 - RNA, 32 nt, Human
uacgugguuggcacagacacaagacucccaga

SEQ ID NO: 221514 - RNA, 32 nt, Human
uacgugugccucuuucucacacaugccacauc

SEQ ID NO: 221515 - RNA, 32 nt, Human
uacguguguaagccacagugcccagcccgaau

SEQ ID NO: 221516 - RNA, 32 nt, Human
uacguuagccugcauuaaaauaaaaauaucug

SEQ ID NO: 221517 - RNA, 32 nt, Human
uacguuaucuuccugggccucauuuuauuauc

SEQ ID NO: 221518 - RNA, 32 nt, Human
uacguucaagaguucacacaccccugcaguca

SEQ ID NO: 221519 - RNA, 32 nt, Human
uacguugcagugauguggguacugcuuucaua

SEQ ID NO: 221520 - RNA, 32 nt, Human
uacguugguauauucauugaaauuagauuuau

SEQ ID NO: 221521 - RNA, 32 nt, Human
uacguugguguauugcaaggggagaggcuuuu

SEQ ID NO: 221522 - RNA, 32 nt, Human
uacguuuucaguaguacaggcuucuugccgau

SEQ ID NO: 221523 - RNA, 32 nt, Human
uacguuuuucucuguggcuguauguggguugc

SEQ ID NO: 221524 - RNA, 32 nt, Human
uacuaaaaacucaacugaagucaggcauggua

SEQ ID NO: 221525 - RNA, 32 nt, Human
uacuaaaaagaguuguuagugcuuuaugugag

SEQ ID NO: 221526 - RNA, 32 nt, Human
uacuaaaaaguacaaaaauuagcugggugugg

SEQ ID NO: 221527 - RNA, 32 nt, Human
uacuaaaaauaacaaaaauuagccaggcaugg

SEQ ID NO: 221528 - RNA, 32 nt, Human
uacuaaaaauaacaaaaauuagcugggcgugg

SEQ ID NO: 221529 - RNA, 32 nt, Human
uacuaaaaauacaaaaacaaaaauuagccagg

SEQ ID NO: 221530 - RNA, 32 nt, Human
uacuaaaaauacaaaaagauuagccaggcaug

SEQ ID NO: 221531 - RNA, 32 nt, Human
uacuaaaaauacaaaaauuuagccaggcaugg

SEQ ID NO: 221532 - RNA, 32 nt, Human
uacuaaaaauacaaaacaauuagccgggcgug

SEQ ID NO: 221533 - RNA, 32 nt, Human
uacuaaaaauacaaacaaaauuagcugggcau

SEQ ID NO: 221534 - RNA, 32 nt, Human
uacuaaaaauacaaacaaauuagccgggcgug

SEQ ID NO: 221535 - RNA, 32 nt, Human
uacuaaaaauacaagaaaaacuuagccgggca

SEQ ID NO: 221536 - RNA, 32 nt, Human
uacuaaaaauacaauaaauuagcugggcaugg

SEQ ID NO: 221537 - RNA, 32 nt, Human
uacuaaaaauacacaaaauuagcugggcgugg

SEQ ID NO: 221538 - RNA, 32 nt, Human
uacuaaaaauacagaaaaauuagccaggguug

SEQ ID NO: 221539 - RNA, 32 nt, Human
uacuaaaaauacagaaaauuagcugggcgcag

SEQ ID NO: 221540 - RNA, 32 nt, Human
uacuaaaaauacagcaaauuagcugggcgugg

SEQ ID NO: 221541 - RNA, 32 nt, Human
uacuaaaaauaccaaaaauuagccgggcgugg

SEQ ID NO: 221542 - RNA, 32 nt, Human
uacuaaaaauacgaaacauuagccaggugugg

SEQ ID NO: 221543 - RNA, 32 nt, Human
uacuaaaaauagagaaaauuagccaggcauag

SEQ ID NO: 221544 - RNA, 32 nt, Human
uacuaaaaaugcaaaaaguuagccaggcaugg

SEQ ID NO: 221545 - RNA, 32 nt, Human
uacuaaaaaugcggaagaguuagccaggcgug

SEQ ID NO: 221546 - RNA, 32 nt, Human
uacuaaaacauacaaaaauuagccgggcaugg

SEQ ID NO: 221547 - RNA, 25 nt, Human
uacuaaaaccucgguggaaaagcuu

SEQ ID NO: 221548 - RNA, 32 nt, Human
uacuaaaauauacaaaaauuagccaggugugg

SEQ ID NO: 221549 - RNA, 32 nt, Human
uacuaaaaugcucauuuacaugugccauuuuu

SEQ ID NO: 221550 - RNA, 32 nt, Human
uacuaaaauuuaaauucaauacaugguuuuua

SEQ ID NO: 221551 - RNA, 32 nt, Human
uacuaaacauaaaagaauucauacuggagaga

SEQ ID NO: 221552 - RNA, 32 nt, Human
uacuaaaccagcuucaucuagcacuaaaccac

SEQ ID NO: 221553 - RNA, 32 nt, Human
uacuaaacccacggguuuucagccucuuaagc

SEQ ID NO: 221554 - RNA, 32 nt, Human
uacuaaagauacaaacaauuagccgggcgugg

SEQ ID NO: 221555 - RNA, 32 nt, Human
uacuaaagcaguacuggacuggccauuggacc

SEQ ID NO: 221556 - RNA, 31 nt, Human
uacuaaaggcacuuccuuccuguuaaacccc

SEQ ID NO: 221557 - RNA, 32 nt, Human
uacuaaagggggaggaagggagggcaaaggga

SEQ ID NO: 221558 - RNA, 32 nt, Human
uacuaaaguuauuauuguuuuucccaaguucu

SEQ ID NO: 221559 - RNA, 32 nt, Human
uacuaaauacaaaaauuagcugggcguggugg

SEQ ID NO: 221560 - RNA, 32 nt, Human
uacuaaaucauuuauguccauuucucaauuuu

SEQ ID NO: 221561 - RNA, 32 nt, Human
uacuaaauuuacuuagaaauauuugaaaugca

SEQ ID NO: 221562 - RNA, 32 nt, Human
uacuaacacaccugcuacauuuuacacaugug

SEQ ID NO: 221563 - RNA, 32 nt, Human
uacuaacacaguggcaguguuagaugaagaug

SEQ ID NO: 221564 - RNA, 32 nt, Human
uacuaacacauacauuuuuacguucauaugua

SEQ ID NO: 221565 - RNA, 32 nt, Human
uacuaacagcacaagacgcacucacagggugg

SEQ ID NO: 221566 - RNA, 32 nt, Human
uacuaacauacaaaauuagcugggcacagugg

SEQ ID NO: 221567 - RNA, 32 nt, Human
uacuaacauggugaugggcucccuccccuaac

SEQ ID NO: 221568 - RNA, 32 nt, Human
uacuaacauuagauucacauaggaccagguuu

SEQ ID NO: 221569 - RNA, 32 nt, Human
uacuaaccuccaccagcaaccuggacugccuc

SEQ ID NO: 221570 - RNA, 32 nt, Human
uacuaaccuccaggaacagacauggaccuucu

SEQ ID NO: 221571 - RNA, 32 nt, Human
uacuaacgaauacccaccacaaguauagugac

SEQ ID NO: 221572 - RNA, 32 nt, Human
uacuaacucccucugaguuugcacaugggacc

SEQ ID NO: 221573 - RNA, 32 nt, Human
uacuaacuggacugccaggccagcccugggcu

SEQ ID NO: 221574 - RNA, 32 nt, Human
uacuaagagaagcaccagaagagaugccaaga

SEQ ID NO: 221575 - RNA, 32 nt, Human
uacuaagauagaaagaaaaaggugaaagagaa

SEQ ID NO: 221576 - RNA, 32 nt, Human
uacuaagauuccaaggcagaaauaaauguaua

SEQ ID NO: 221577 - RNA, 32 nt, Human
uacuaagccagccacacuuggagucugccccc

SEQ ID NO: 221578 - RNA, 32 nt, Human
uacuaagcuccucuuuuuaauuuuccaucagc

SEQ ID NO: 221579 - RNA, 32 nt, Human
uacuaagcuguacugcucuucauuuugcugau

SEQ ID NO: 221580 - RNA, 18 nt, Human
uacuaaggacccaaggca

SEQ ID NO: 221581 - RNA, 32 nt, Human
uacuaaggcacuaacaguuucagauguuacuu

SEQ ID NO: 221582 - RNA, 32 nt, Human
uacuaaggccgcagacuccuguccgcagccuc

SEQ ID NO: 221583 - RNA, 32 nt, Human
uacuaagggaaagaauugaggaauuaacugca

SEQ ID NO: 221584 - RNA, 32 nt, Human
uacuaagggcacaugucuuaaucaaaguuagu

SEQ ID NO: 221585 - RNA, 32 nt, Human
uacuaagugacaaaggggcaggugaaguauac

SEQ ID NO: 221586 - RNA, 32 nt, Human
uacuaagugacuaaggggcaggugaaguauac

SEQ ID NO: 221587 - RNA, 32 nt, Human
uacuaaguugaugaagcacgcagcucaaauga

SEQ ID NO: 221588 - RNA, 32 nt, Human
uacuaauacaucacuuuuuaacuucuguaaaa

SEQ ID NO: 221589 - RNA, 32 nt, Human
uacuaauccaucaucccucacagagauguaga

SEQ ID NO: 221590 - RNA, 32 nt, Human
uacuaauggaugucugagucaccagaaauucc

SEQ ID NO: 221591 - RNA, 32 nt, Human
uacuaauguuuuuauaugaagaacauaggugu

SEQ ID NO: 221592 - RNA, 32 nt, Human
uacuaauuacaugauguaacuacuucuugaua

SEQ ID NO: 221593 - RNA, 32 nt, Human
uacuaauuagaaaauauaguuugaggccgggc

SEQ ID NO: 221594 - RNA, 16 nt, Human
uacuaauuugcuucuu

SEQ ID NO: 221595 - RNA, 32 nt, Human
uacuaauuuucccuuguagcauguuauauuuu

SEQ ID NO: 221596 - RNA, 32 nt, Human
uacuacaauugcacuuccagcacuuugagaac

SEQ ID NO: 221597 - RNA, 32 nt, Human
uacuacacacuuagugcuuucucuguaaagua

SEQ ID NO: 221598 - RNA, 32 nt, Human
uacuacacagccugagugcggcauaguugacc

SEQ ID NO: 221599 - RNA, 32 nt, Human
uacuacacugucuuuaaaacaauguuucuuua

SEQ ID NO: 221600 - RNA, 32 nt, Human
uacuacagacggaguuuccccauguuggccgg

SEQ ID NO: 221601 - RNA, 32 nt, Human
uacuacagcauuacacauuuugcaagcacauc

SEQ ID NO: 221602 - RNA, 32 nt, Human
uacuacagcuccauuuacagaacuguugcuuu

SEQ ID NO: 221603 - RNA, 32 nt, Human
uacuacagggaagggaagagggugcugggucc

SEQ ID NO: 221604 - RNA, 32 nt, Human
uacuacaguacauggcuaaucuucccaaaaac

SEQ ID NO: 221605 - RNA, 32 nt, Human
uacuacaguacuuccugacuucucccauucaa

SEQ ID NO: 221606 - RNA, 32 nt, Human
uacuacauucgugugugucugcuuuuaaacuu

SEQ ID NO: 221607 - RNA, 32 nt, Human
uacuaccacuuccgccaggccugggugccgcu

SEQ ID NO: 221608 - RNA, 32 nt, Human
uacuaccagaaguggucaggagagggagcaag

SEQ ID NO: 221609 - RNA, 32 nt, Human
uacuaccauucaaauaaucauucccuauuuua

SEQ ID NO: 221610 - RNA, 32 nt, Human
uacuaccgcuccccucuccuccgccacccccg

SEQ ID NO: 221611 - RNA, 32 nt, Human
uacuaccuauuucuaaacuuugccauauugag

SEQ ID NO: 221612 - RNA, 23 nt, Human
uacuaccugaaggaguccagggg

SEQ ID NO: 221613 - RNA, 32 nt, Human
uacuaccugccagccuucuuccuugcucugcg

SEQ ID NO: 221614 - RNA, 32 nt, Human
uacuaccuguaaugacaggccuguccaacaca

SEQ ID NO: 221615 - RNA, 32 nt, Human
uacuacgaaaggccaaaacagcagacuugauu

SEQ ID NO: 221616 - RNA, 32 nt, Human
uacuacgcccuccccuccccagccuuuuccag

SEQ ID NO: 221617 - RNA, 21 nt, Human
uacuacguccagacgcaggga

SEQ ID NO: 221618 - RNA, 32 nt, Human
uacuacuagaugucuuuaggcagcagcuuuua

SEQ ID NO: 221619 - RNA, 32 nt, Human
uacuacucagcccucuccugcggccacaucaa

SEQ ID NO: 221620 - RNA, 32 nt, Human
uacuacucaguuauaaaaagaaaugaaauaau

SEQ ID NO: 221621 - RNA, 32 nt, Human
uacuacucuaauuuaacccuuacccucuccca

SEQ ID NO: 221622 - RNA, 32 nt, Human
uacuacugcacuccagcauggaagacagcgag

SEQ ID NO: 221623 - RNA, 32 nt, Human
uacuacugcacuccagccugggcgacaagagu

SEQ ID NO: 221624 - RNA, 32 nt, Human
uacuacugccuggguggcaagggugagacucc

SEQ ID NO: 221625 - RNA, 31 nt, Human
uacuacuggccucucccuuuccagagccagg

SEQ ID NO: 221626 - RNA, 32 nt, Human
uacuacuguacuccagccugggggaaagagug

SEQ ID NO: 221627 - RNA, 32 nt, Human
uacuacuguagaaauguuggcagcuuuuagua

SEQ ID NO: 221628 - RNA, 32 nt, Human
uacuacuguauuuuuaaaaaugaagguuguua

SEQ ID NO: 221629 - RNA, 32 nt, Human
uacuacuugccacacacuguucuaagugguau

SEQ ID NO: 221630 - RNA, 32 nt, Human
uacuacuugccugaaaugaaugaauauuuuuc

SEQ ID NO: 221631 - RNA, 32 nt, Human
uacuacuuucucaggugcuacauaucauauau

SEQ ID NO: 221632 - RNA, 32 nt, Human
uacuacuuugaccuuccgagugcagugaggca

SEQ ID NO: 221633 - RNA, 32 nt, Human
uacuagaaaggcagugccucagcccuucccug

SEQ ID NO: 221634 - RNA, 32 nt, Human
uacuagaaaguagaauagcaugaaaaacuuaa

SEQ ID NO: 221635 - RNA, 32 nt, Human
uacuagaccagaaaagaacuuauuccagauaa

SEQ ID NO: 221636 - RNA, 32 nt, Human
uacuagacucagcuugaucuuugccuguuacu

SEQ ID NO: 221637 - RNA, 32 nt, Human
uacuagagacaggguuucaccauguuggccac

SEQ ID NO: 221638 - RNA, 32 nt, Human
uacuagagacaggguuucaccauguuggccag

SEQ ID NO: 221639 - RNA, 32 nt, Human
uacuagagacgggguuucaccauguugaccag

SEQ ID NO: 221640 - RNA, 32 nt, Human
uacuagagacgggguuucagcauauugaccag

SEQ ID NO: 221641 - RNA, 32 nt, Human
uacuagagagacuucgaggcaauaauaaaaga

SEQ ID NO: 221642 - RNA, 32 nt, Human
uacuagagaggcugaggcaggagaaucacuug

SEQ ID NO: 221643 - RNA, 32 nt, Human
uacuagagaggcugaggcaggagaaucgcuug

SEQ ID NO: 221644 - RNA, 32 nt, Human
uacuagaggagagaguugaaggagcugagaca

SEQ ID NO: 221645 - RNA, 32 nt, Human
uacuagaggugggguuuugccauguuggccag

SEQ ID NO: 221646 - RNA, 32 nt, Human
uacuagaguuacaacucugauaccucaacaca

SEQ ID NO: 221647 - RNA, 32 nt, Human
uacuagcagaggaggaagucagagucggccac

SEQ ID NO: 221648 - RNA, 32 nt, Human
uacuagcaugagccaccaugccuggccuauaa

SEQ ID NO: 221649 - RNA, 32 nt, Human
uacuagccauuaacuuaaagguggugggaaaa

SEQ ID NO: 221650 - RNA, 32 nt, Human
uacuagcgaccggaggaaagugaacaggggga

SEQ ID NO: 221651 - RNA, 32 nt, Human
uacuagcgugugccuuuugccugcuucucuuu

SEQ ID NO: 221652 - RNA, 32 nt, Human
uacuagcuauauaaucuugagcuggacauuua

SEQ ID NO: 221653 - RNA, 32 nt, Human
uacuagcuauguuucuauaagauauggugccc

SEQ ID NO: 221654 - RNA, 32 nt, Human
uacuaggaacuugcacaguccgccucgggcag

SEQ ID NO: 221655 - RNA, 32 nt, Human
uacuaggaaggcugaggcaggagaaucgcuug

SEQ ID NO: 221656 - RNA, 32 nt, Human
uacuaggacucauaaugauuguccucaaccga

SEQ ID NO: 221657 - RNA, 32 nt, Human
uacuaggagagggagcugagguccuggugcca

SEQ ID NO: 221658 - RNA, 32 nt, Human
uacuaggaggggcuggcagggccuccauagca

SEQ ID NO: 221659 - RNA, 32 nt, Human
uacuaggcagagccguggaaccgccgccaggu

SEQ ID NO: 221660 - RNA, 32 nt, Human
uacuaggccaacuagggugggaagguggggag

SEQ ID NO: 221661 - RNA, 32 nt, Human
uacuaggccggcgcugcacccaacugaaauga

SEQ ID NO: 221662 - RNA, 32 nt, Human
uacuaggcucaagcaauucucgugccucagcc

SEQ ID NO: 221663 - RNA, 32 nt, Human
uacuaggcucagagcaaccuccagccuucucc

SEQ ID NO: 221664 - RNA, 32 nt, Human
uacuagggacgcugaggcaggagaaucgcuug

SEQ ID NO: 221665 - RNA, 32 nt, Human
uacuagggagacugaggcaggagaauugcuug

SEQ ID NO: 221666 - RNA, 32 nt, Human
uacuagggaggaugaggcaggagaauugcuug

SEQ ID NO: 221667 - RNA, 32 nt, Human
uacuagggaggcaggaggaucacuugagccca

SEQ ID NO: 221668 - RNA, 32 nt, Human
uacuagggaggcugaggcaggagaaucacuug

SEQ ID NO: 221669 - RNA, 32 nt, Human
uacuagggaggcugaggcaggagaaucgcuug

SEQ ID NO: 221670 - RNA, 32 nt, Human
uacuagggaggcugaggcaggagaauggccag

SEQ ID NO: 221671 - RNA, 32 nt, Human
uacuagggaggcugaggcaggagaauggcgug

SEQ ID NO: 221672 - RNA, 32 nt, Human
uacuagggaggcugaggcaggagaauugcuug

SEQ ID NO: 221673 - RNA, 32 nt, Human
uacuagggaggcugcggcaggagaauugcuug

SEQ ID NO: 221674 - RNA, 32 nt, Human
uacuaggggagggcaaggugggggagaucgcu

SEQ ID NO: 221675 - RNA, 32 nt, Human
uacuagggggaucccagcacugaagauuugcc

SEQ ID NO: 221676 - RNA, 32 nt, Human
uacuagguucaagugauuguccugccucagcc

SEQ ID NO: 221677 - RNA, 32 nt, Human
uacuagguuuaucucauuuaagccccacaaca

SEQ ID NO: 221678 - RNA, 25 nt, Human
uacuagguuuuuauggaauaggaug

SEQ ID NO: 221679 - RNA, 32 nt, Human
uacuaguaguaucuucuccuacccauaaguua

SEQ ID NO: 221680 - RNA, 32 nt, Human
uacuagucagccacaguccagguuccagcaac

SEQ ID NO: 221681 - RNA, 32 nt, Human
uacuagugagccacacgccacagucagcgucu

SEQ ID NO: 221682 - RNA, 32 nt, Human
uacuagugugggcuggaccccagcucauuuug

SEQ ID NO: 221683 - RNA, 32 nt, Human
uacuaguuaccucccucuuuucguaguuuuug

SEQ ID NO: 221684 - RNA, 32 nt, Human
uacuaguuaggagauccccacaggcuuuacac

SEQ ID NO: 221685 - RNA, 32 nt, Human
uacuaguucauaaccagcuauaugacaaagca

SEQ ID NO: 221686 - RNA, 16 nt, Human
uacuaguuugcuucuu

SEQ ID NO: 221687 - RNA, 32 nt, Human
uacuauaaagcauuuaauaaacuguuauuaau

SEQ ID NO: 221688 - RNA, 32 nt, Human
uacuauaaaggaaaaagaguguugcaauuuau

SEQ ID NO: 221689 - RNA, 32 nt, Human
uacuauaacagucauagccacaguggggaaga

SEQ ID NO: 221690 - RNA, 32 nt, Human
uacuauacaguggaugucaucuguagaagcaa

SEQ ID NO: 221691 - RNA, 32 nt, Human
uacuauacuaugaaaagcauuaccuugccuau

SEQ ID NO: 221692 - RNA, 32 nt, Human
uacuauagcgcuguuuuccugcacugauaaac

SEQ ID NO: 221693 - RNA, 32 nt, Human
uacuauauacauauauucaaauaucucauugu

SEQ ID NO: 221694 - RNA, 32 nt, Human
uacuauauguaaagcuaagauguggauuuaca

SEQ ID NO: 221695 - RNA, 32 nt, Human
uacuaucacccaggcucauagcagcugaugug

SEQ ID NO: 221696 - RNA, 32 nt, Human
uacuaucgccaguaguuauauuacaaacauua

SEQ ID NO: 221697 - RNA, 32 nt, Human
uacuaucuaacaacagucuugcaccuaaagac

SEQ ID NO: 221698 - RNA, 32 nt, Human
uacuaucuugggcuucuuagaaguaaaauaag

SEQ ID NO: 221699 - RNA, 32 nt, Human
uacuaugaacagcacccugcugagaucauaaa

SEQ ID NO: 221700 - RNA, 32 nt, Human
uacuaugacaguuauaauaaagauuauauggg

SEQ ID NO: 221701 - RNA, 32 nt, Human
uacuaugaggauuuuucucacugacauaauuu

SEQ ID NO: 221702 - RNA, 32 nt, Human
uacuaugauauucuggacauuuuaggaaaugg

SEQ ID NO: 221703 - RNA, 32 nt, Human
uacuaugaucagaagaacaugauuuuacaagu

SEQ ID NO: 221704 - RNA, 32 nt, Human
uacuaugaucauaccaaucaccucugagaagc

SEQ ID NO: 221705 - RNA, 32 nt, Human
uacuaugcccggcuaauuuuucuuuugguauu

SEQ ID NO: 221706 - RNA, 32 nt, Human
uacuauggaagccacaucacuauugggccccc

SEQ ID NO: 221707 - RNA, 32 nt, Human
uacuauggcuggaacauuggaaaaaggagagc

SEQ ID NO: 221708 - RNA, 32 nt, Human
uacuauguaaauucacagcaguaagauaauau

SEQ ID NO: 221709 - RNA, 32 nt, Human
uacuauguauuguaacauuuucucagauacag

SEQ ID NO: 221710 - RNA, 32 nt, Human
uacuaugucagugauguauauuacaaaauguc

SEQ ID NO: 221711 - RNA, 32 nt, Human
uacuaugugggcugguacgaguguggggucuc

SEQ ID NO: 221712 - RNA, 32 nt, Human
uacuauguuacccaggcuggacuccaacuccu

SEQ ID NO: 221713 - RNA, 32 nt, Human
uacuauguugcccaggcuggugucgaacuccu

SEQ ID NO: 221714 - RNA, 32 nt, Human
uacuauuacauccuggagcugucguuuuauug

SEQ ID NO: 221715 - RNA, 32 nt, Human
uacuauucaaauuccuacaguuucuggcuggc

SEQ ID NO: 221716 - RNA, 32 nt, Human
uacuauucaagaccaagguagcagaaaaguua

SEQ ID NO: 221717 - RNA, 32 nt, Human
uacuauuccaaguggcaccugggccagcagca

SEQ ID NO: 221718 - RNA, 32 nt, Human
uacuauucccucaauacugcauguuaucgaaa

SEQ ID NO: 221719 - RNA, 32 nt, Human
uacuauuccugacaagacuuggaaaagcagga

SEQ ID NO: 221720 - RNA, 32 nt, Human
uacuauuccuuugggaucucugaggccucaga

SEQ ID NO: 221721 - RNA, 32 nt, Human
uacuauucuugcuacauuaguccagcuucuac

SEQ ID NO: 221722 - RNA, 32 nt, Human
uacuauugaguauagaacuguugauuucaaca

SEQ ID NO: 221723 - RNA, 32 nt, Human
uacuauugcugaggccaaguacauuuaguaug

SEQ ID NO: 221724 - RNA, 32 nt, Human
uacuauuggcccuaaauagcagaaagaagaga

SEQ ID NO: 221725 - RNA, 32 nt, Human
uacuauuguaaaggaagagucaacuggaaaau

SEQ ID NO: 221726 - RNA, 32 nt, Human
uacuauugugcauucagugaaguguuauuaug

SEQ ID NO: 221727 - RNA, 32 nt, Human
uacuauuguggaauauauugcuguuguacucu

SEQ ID NO: 221728 - RNA, 32 nt, Human
uacuauuucacaacagccugacaacauuucua

SEQ ID NO: 221729 - RNA, 32 nt, Human
uacuauuucuuccucuugcccucuuaggccua

SEQ ID NO: 221730 - RNA, 32 nt, Human
uacuauuugaagcuuggccgaugccaacacag

SEQ ID NO: 221731 - RNA, 32 nt, Human
uacucaaaaauacaaaaauuagccuggugugg

SEQ ID NO: 221732 - RNA, 32 nt, Human
uacucaaaaauuacaugaggagaaauccuuuu

SEQ ID NO: 221733 - RNA, 32 nt, Human
uacucaaacacuguucuggcaugugaauaaag

SEQ ID NO: 221734 - RNA, 32 nt, Human
uacucaaacucucacuuuccccaaaucacauc

SEQ ID NO: 221735 - RNA, 32 nt, Human
uacucaaaucugugaagacuguauuugcuaua

SEQ ID NO: 221736 - RNA, 32 nt, Human
uacucaagagguggaggcaggaagaucacuug

SEQ ID NO: 221737 - RNA, 32 nt, Human
uacucaagauuuccuccuacuuccccagcauu

SEQ ID NO: 221738 - RNA, 32 nt, Human
uacucaagccagccuguaaacggugcuauuuc

SEQ ID NO: 221739 - RNA, 32 nt, Human
uacucaaggaggugggggcagggaggaucacu

SEQ ID NO: 221740 - RNA, 32 nt, Human
uacucaaugagcacuaaaggaaucauaggaau

SEQ ID NO: 221741 - RNA, 32 nt, Human
uacucaauguacuguaauaaucgcaaaggaaa

SEQ ID NO: 221742 - RNA, 32 nt, Human
uacucaauuaaaagcagaccaaaacuugagaa

SEQ ID NO: 221743 - RNA, 32 nt, Human
uacucacaaccaucacagcagaggugacgcac

SEQ ID NO: 221744 - RNA, 32 nt, Human
uacucacacaugccacaacauggaugagccuu

SEQ ID NO: 221745 - RNA, 32 nt, Human
uacucacaccuguaaucccagcacuuugggaa

SEQ ID NO: 221746 - RNA, 32 nt, Human
uacucacaccuguaaucccagcacuuugggag

SEQ ID NO: 221747 - RNA, 32 nt, Human
uacucacagagggagagaaagauguguacaaa

SEQ ID NO: 221748 - RNA, 32 nt, Human
uacucacaucuucauucucuaaccacucuauu

SEQ ID NO: 221749 - RNA, 32 nt, Human
uacucaccccaaaaggcagaaaagcaacacag

SEQ ID NO: 221750 - RNA, 32 nt, Human
uacucaccccuucaccugaggcuucuccccuc

SEQ ID NO: 221751 - RNA, 32 nt, Human
uacucacccucucugcugcuggcauguuggua

SEQ ID NO: 221752 - RNA, 32 nt, Human
uacucaccuccccuuucccaguccccucugga

SEQ ID NO: 221753 - RNA, 32 nt, Human
uacucacgcagcugccgcgccauguccugcuu

SEQ ID NO: 221754 - RNA, 32 nt, Human
uacucacguauaccccauuuccuuccagucag

SEQ ID NO: 221755 - RNA, 32 nt, Human
uacucacucacucuccaccagccugggaaaug

SEQ ID NO: 221756 - RNA, 21 nt, Human
uacucacucacuucauugucc

SEQ ID NO: 221757 - RNA, 32 nt, Human
uacucacucagccuggucagccugguggguac

SEQ ID NO: 221758 - RNA, 32 nt, Human
uacucacuccuucucccucuuucuggauuuua

SEQ ID NO: 221759 - RNA, 32 nt, Human
uacucacugagucgcauaauguggugcuugaa

SEQ ID NO: 221760 - RNA, 32 nt, Human
uacucacugcaaccuccaccucccggguucaa

SEQ ID NO: 221761 - RNA, 32 nt, Human
uacucacugcaagccugccaaguaggaccucc

SEQ ID NO: 221762 - RNA, 32 nt, Human
uacucacugcagccucaaucuccuggucucaa

SEQ ID NO: 221763 - RNA, 32 nt, Human
uacucacugugaacccagccuauugcaaaaau

SEQ ID NO: 221764 - RNA, 32 nt, Human
uacucagaaagaggagccgcagaguucuuggu

SEQ ID NO: 221765 - RNA, 32 nt, Human
uacucagaacgugucagcuucucagguugaug

SEQ ID NO: 221766 - RNA, 32 nt, Human
uacucagacuccaauguccaggggcuuuauga

SEQ ID NO: 221767 - RNA, 32 nt, Human
uacucagacuguuacucuggugacacaaccug

SEQ ID NO: 221768 - RNA, 32 nt, Human
uacucagagaacgaaaaggaaugcugacguaa

SEQ ID NO: 221769 - RNA, 32 nt, Human
uacucagaggcugaggcaggaaaaucgcuuga

SEQ ID NO: 221770 - RNA, 32 nt, Human
uacucagaggcugaggcaggaggaucgcuuga

SEQ ID NO: 221771 - RNA, 32 nt, Human
uacucagaugaccugaggaaaggagggaaagu

SEQ ID NO: 221772 - RNA, 32 nt, Human
uacucagaugagaauuagcaucaggaaagccu

SEQ ID NO: 221773 - RNA, 32 nt, Human
uacucagaugagcauuagcaucaggaaagccu

SEQ ID NO: 221774 - RNA, 20 nt, Human
uacucagcagggcucuggga

SEQ ID NO: 221775 - RNA, 32 nt, Human
uacucagcgaucuauucuucugaugcuaaaua

SEQ ID NO: 221776 - RNA, 32 nt, Human
uacucagcuugggcccccuccgggccagccgc

SEQ ID NO: 221777 - RNA, 32 nt, Human
uacucagcuuucccagcaccuacccaggcaga

SEQ ID NO: 221778 - RNA, 32 nt, Human
uacucagcuuuuccaaugaggcuugaauccau

SEQ ID NO: 221779 - RNA, 32 nt, Human
uacucaggaaggcugaggcaggagaaucgcuu

SEQ ID NO: 221780 - RNA, 32 nt, Human
uacucaggaaggugggagagagccaagcccug

SEQ ID NO: 221781 - RNA, 21 nt, Human
uacucaggaaugggaaaagga

SEQ ID NO: 221782 - RNA, 32 nt, Human
uacucaggaccccaagauacagaaggaaauca

SEQ ID NO: 221783 - RNA, 32 nt, Human
uacucaggagacugaagcaggagaaucgcucg

SEQ ID NO: 221784 - RNA, 24 nt, Human
uacucaggaggcugaagcaggaug

SEQ ID NO: 221785 - RNA, 32 nt, Human
uacucaggaggcugaggaaggagaaucacuug

SEQ ID NO: 221786 - RNA, 32 nt, Human
uacucaggaggcugaggaaggagagccuguga

SEQ ID NO: 221787 - RNA, 32 nt, Human
uacucaggaggcugaggcaggaagaucgcuua

SEQ ID NO: 221788 - RNA, 32 nt, Human
uacucaggaggcugaggcaggagaagggcgug

SEQ ID NO: 221789 - RNA, 32 nt, Human
uacucaggaggcugaggcaggagaaggguggg

SEQ ID NO: 221790 - RNA, 32 nt, Human
uacucaggaggcugaggcaggagcauugcuug

SEQ ID NO: 221791 - RNA, 32 nt, Human
uacucaggaggcugaggcaggggaaucgcuug

SEQ ID NO: 221792 - RNA, 32 nt, Human
uacucaggaggcugaggcaggggaaucucuug

SEQ ID NO: 221793 - RNA, 32 nt, Human
uacucaggaggcugaggcaggggaauugcuug

SEQ ID NO: 221794 - RNA, 32 nt, Human
uacucaggaggcugggacaggagaaucgcuug

SEQ ID NO: 221795 - RNA, 32 nt, Human
uacucaggaggcuugaggcgggaggaucacuu

SEQ ID NO: 221796 - RNA, 32 nt, Human
uacucaggcugaggcaggagaaucgcuugaac

SEQ ID NO: 221797 - RNA, 21 nt, Human
uacucaggcuggagugcggug

SEQ ID NO: 221798 - RNA, 32 nt, Human
uacucagggggcugaggcaggagaauugcuug

SEQ ID NO: 221799 - RNA, 32 nt, Human
uacucaggggguugaggcaggagaaucgcuuc

SEQ ID NO: 221800 - RNA, 32 nt, Human
uacucagggguccaggaagaauuuguaccauu

SEQ ID NO: 221801 - RNA, 32 nt, Human
uacucaguaaaggaagguaggaagagacaaac

SEQ ID NO: 221802 - RNA, 32 nt, Human
uacucagugguguuucaucauguuucccaggc

SEQ ID NO: 221803 - RNA, 32 nt, Human
uacucagugucagacaucuacaggaaagaaac

SEQ ID NO: 221804 - RNA, 32 nt, Human
uacucauacuagcucugugaccauaggcaagu

SEQ ID NO: 221805 - RNA, 32 nt, Human
uacucauaucuucucuaauuugguccugauac

SEQ ID NO: 221806 - RNA, 22 nt, Human
uacucaucaccuugcaguggcc

SEQ ID NO: 221807 - RNA, 32 nt, Human
uacucauccuuuccuuucuugucuuguauccu

SEQ ID NO: 221808 - RNA, 32 nt, Human
uacucaugaaaggccucucccaaaaagccaug

SEQ ID NO: 221809 - RNA, 32 nt, Human
uacucaugaggcuuaaauggaggaucacuuga

SEQ ID NO: 221810 - RNA, 32 nt, Human
uacucaugccuguaaucccagcacuuugagag

SEQ ID NO: 221811 - RNA, 32 nt, Human
uacucauucaaggauauccucaggaaacuggc

SEQ ID NO: 221812 - RNA, 32 nt, Human
uacucauuugcaauggcuaagaagugagaugg

SEQ ID NO: 221813 - RNA, 32 nt, Human
uacucauuuuucucccccaagugagcugcaag

SEQ ID NO: 221814 - RNA, 32 nt, Human
uacuccaaaccucccuuuuuauuucuugagcc

SEQ ID NO: 221815 - RNA, 32 nt, Human
uacuccaaccuggaugacagagugagacucca

SEQ ID NO: 221816 - RNA, 32 nt, Human
uacuccaaccugggcgacagagcaagacugug

SEQ ID NO: 221817 - RNA, 32 nt, Human
uacuccaccaucaccucucuccccuaucaccc

SEQ ID NO: 221818 - RNA, 32 nt, Human
uacuccaccauggggcgcuuccuuucuucucu

SEQ ID NO: 221819 - RNA, 32 nt, Human
uacuccaccuucggugccaucuggacucccac

SEQ ID NO: 221820 - RNA, 32 nt, Human
uacuccaccuuggauuuuucucuccaucacau

SEQ ID NO: 221821 - RNA, 32 nt, Human
uacuccacugcacuccagccugggcaacagag

SEQ ID NO: 221822 - RNA, 32 nt, Human
uacuccagaggucgaggcaggagcaucgcuua

SEQ ID NO: 221823 - RNA, 32 nt, Human
uacuccagaguccagacccagccaagaaaggg

SEQ ID NO: 221824 - RNA, 32 nt, Human
uacuccagcacucuagccugggcgacagagug

SEQ ID NO: 221825 - RNA, 32 nt, Human
uacuccagcagguaggggcacagugaaugugu

SEQ ID NO: 221826 - RNA, 32 nt, Human
uacuccagccagggcaagagagcgagacccug

SEQ ID NO: 221827 - RNA, 32 nt, Human
uacuccagcccggcacuccagccuggcgacaa

SEQ ID NO: 221828 - RNA, 32 nt, Human
uacuccagcccuucucccucccucccuuccuc

SEQ ID NO: 221829 - RNA, 32 nt, Human
uacuccagccuaggugacagagcaagacucug

SEQ ID NO: 221830 - RNA, 32 nt, Human
uacuccagccuaggugacagagcgagacuccg

SEQ ID NO: 221831 - RNA, 32 nt, Human
uacuccagccuaggugacagagugagacccug

SEQ ID NO: 221832 - RNA, 32 nt, Human
uacuccagccuggacaacagcgagagcuccau

SEQ ID NO: 221833 - RNA, 32 nt, Human
uacuccagccuggaugacacagcgagacuccg

SEQ ID NO: 221834 - RNA, 32 nt, Human
uacuccagccuggaugacagaguggagacucu

SEQ ID NO: 221835 - RNA, 32 nt, Human
uacuccagccuggcaacagagcaagacccugu

SEQ ID NO: 221836 - RNA, 32 nt, Human
uacuccagccuggcaacagagcgagacuccgu

SEQ ID NO: 221837 - RNA, 32 nt, Human
uacuccagccuggcaacagagugagacugugu

SEQ ID NO: 221838 - RNA, 32 nt, Human
uacuccagccuggcccacagagugagauccug

SEQ ID NO: 221839 - RNA, 32 nt, Human
uacuccagccugggaaacaaugcgagucccua

SEQ ID NO: 221840 - RNA, 32 nt, Human
uacuccagccugggagacacagugagacccug

SEQ ID NO: 221841 - RNA, 32 nt, Human
uacuccagccugggagauagagcaagacucca

SEQ ID NO: 221842 - RNA, 32 nt, Human
uacuccagccugggcaacaaagcgagacccug

SEQ ID NO: 221843 - RNA, 32 nt, Human
uacuccagccugggcaacacagcaagacccug

SEQ ID NO: 221844 - RNA, 32 nt, Human
uacuccagccugggcaacagaagaagaauccg

SEQ ID NO: 221845 - RNA, 32 nt, Human
uacuccagccugggcaacagagcaagacccau

SEQ ID NO: 221846 - RNA, 32 nt, Human
uacuccagccugggcaacagagcaagacccug

SEQ ID NO: 221847 - RNA, 32 nt, Human
uacuccagccugggcaacagagcgaggcuccg

SEQ ID NO: 221848 - RNA, 32 nt, Human
uacuccagccugggcaacagagggagacucca

SEQ ID NO: 221849 - RNA, 32 nt, Human
uacuccagccugggcaacagagggagacucug

SEQ ID NO: 221850 - RNA, 32 nt, Human
uacuccagccugggcaacagagggagacuuca

SEQ ID NO: 221851 - RNA, 32 nt, Human
uacuccagccugggcaacagagugagacccug

SEQ ID NO: 221852 - RNA, 32 nt, Human
uacuccagccugggcaacagagugagacuguc

SEQ ID NO: 221853 - RNA, 32 nt, Human
uacuccagccugggcaauaggguaagauccug

SEQ ID NO: 221854 - RNA, 32 nt, Human
uacuccagccugggcagcagagcaagacucug

SEQ ID NO: 221855 - RNA, 32 nt, Human
uacuccagccugggccacaaggcaagacucug

SEQ ID NO: 221856 - RNA, 32 nt, Human
uacuccagccugggcgacagagcaagacucca

SEQ ID NO: 221857 - RNA, 32 nt, Human
uacuccagccugggcgacagagggggacucug

SEQ ID NO: 221858 - RNA, 32 nt, Human
uacuccagccugggcgacggagugagacuccc

SEQ ID NO: 221859 - RNA, 32 nt, Human
uacuccagccugggcgauggagcaagacucag

SEQ ID NO: 221860 - RNA, 32 nt, Human
uacuccagccugggcuggacagugagacuuuu

SEQ ID NO: 221861 - RNA, 32 nt, Human
uacuccagccugggggacaggagcgagacucc

SEQ ID NO: 221862 - RNA, 32 nt, Human
uacuccagccugggugacaaaguaagacccug

SEQ ID NO: 221863 - RNA, 32 nt, Human
uacuccagccugggugacaaagucagacucca

SEQ ID NO: 221864 - RNA, 32 nt, Human
uacuccagccugggugacaaagugagacucua

SEQ ID NO: 221865 - RNA, 32 nt, Human
uacuccagccugggugacagaaugagacccug

SEQ ID NO: 221866 - RNA, 32 nt, Human
uacuccagccugggugacagagcaagacccug

SEQ ID NO: 221867 - RNA, 32 nt, Human
uacuccagccugggugacagagcaagacucca

SEQ ID NO: 221868 - RNA, 32 nt, Human
uacuccagccugggugacagagcaagacucug

SEQ ID NO: 221869 - RNA, 32 nt, Human
uacuccagccugggugacagagcgagacccag

SEQ ID NO: 221870 - RNA, 32 nt, Human
uacuccagccugggugacagagcgagacccua

SEQ ID NO: 221871 - RNA, 32 nt, Human
uacuccagccugggugacagagcgagacucag

SEQ ID NO: 221872 - RNA, 32 nt, Human
uacuccagccugggugacagagcgagacuccg

SEQ ID NO: 221873 - RNA, 32 nt, Human
uacuccagccugggugacagagcgagacucug

SEQ ID NO: 221874 - RNA, 32 nt, Human
uacuccagccugggugacagagcgagacuuau

SEQ ID NO: 221875 - RNA, 32 nt, Human
uacuccagccugggugacagagugagacccug

SEQ ID NO: 221876 - RNA, 32 nt, Human
uacuccagccugggugacagagugagacucca

SEQ ID NO: 221877 - RNA, 32 nt, Human
uacuccagccugggugacagagugaggcccug

SEQ ID NO: 221878 - RNA, 32 nt, Human
uacuccagccugggugacagagugauacucca

SEQ ID NO: 221879 - RNA, 32 nt, Human
uacuccagccugggugacagggcaagacccug

SEQ ID NO: 221880 - RNA, 32 nt, Human
uacuccagccugggugacauagggagacccug

SEQ ID NO: 221881 - RNA, 32 nt, Human
uacuccagccugggugacgagcgaaacuccau

SEQ ID NO: 221882 - RNA, 32 nt, Human
uacuccagccugggugacugagcgagacucca

SEQ ID NO: 221883 - RNA, 32 nt, Human
uacuccagccugggugaggagagcgagacucu

SEQ ID NO: 221884 - RNA, 32 nt, Human
uacuccagccugggugauaggaugagacucca

SEQ ID NO: 221885 - RNA, 32 nt, Human
uacuccagccuggugacagagccagacuguuu

SEQ ID NO: 221886 - RNA, 32 nt, Human
uacuccagccuggugacagagcgagacucccu

SEQ ID NO: 221887 - RNA, 32 nt, Human
uacuccagccuggugacagagugagacucugu

SEQ ID NO: 221888 - RNA, 32 nt, Human
uacuccagccuggugauagaacgagacuccac

SEQ ID NO: 221889 - RNA, 32 nt, Human
uacuccagcgugggugacagagugagacucug

SEQ ID NO: 221890 - RNA, 32 nt, Human
uacuccagcucccaacuuuuguggacugagcg

SEQ ID NO: 221891 - RNA, 32 nt, Human
uacuccauccugggugauggagcgaagaaccu

SEQ ID NO: 221892 - RNA, 32 nt, Human
uacucccaacuaguugaaaggcugaggcaaca

SEQ ID NO: 221893 - RNA, 32 nt, Human
uacucccaaggcugaggcaggagaauugcuug

SEQ ID NO: 221894 - RNA, 32 nt, Human
uacucccacccacaccugccucccucuuaccc

SEQ ID NO: 221895 - RNA, 32 nt, Human
uacucccagcacuuugggaggccgaggcaggu

SEQ ID NO: 221896 - RNA, 32 nt, Human
uacucccagcacuuugggaggcugagguggga

SEQ ID NO: 221897 - RNA, 32 nt, Human
uacucccagcuacucaggaggcugaggcagga

SEQ ID NO: 221898 - RNA, 32 nt, Human
uacucccagcuacuugggaggcugagacagga

SEQ ID NO: 221899 - RNA, 32 nt, Human
uacucccagcuauucaggaggcugaggcggca

SEQ ID NO: 221900 - RNA, 32 nt, Human
uacucccagcuguuggggaggcugagacggaa

SEQ ID NO: 221901 - RNA, 32 nt, Human
uacucccaggaggcugcgggucgaugcucgug

SEQ ID NO: 221902 - RNA, 32 nt, Human
uacucccagguccagccucaucaugcccucca

SEQ ID NO: 221903 - RNA, 32 nt, Human
uacucccauaccuccuccucuucugggcuccc

SEQ ID NO: 221904 - RNA, 32 nt, Human
uacuccccaacuuggaguguggcagggcugca

SEQ ID NO: 221905 - RNA, 32 nt, Human
uacuccccugccucccccuaccccagcccaug

SEQ ID NO: 221906 - RNA, 32 nt, Human
uacucccgccucccugccuccagcccuggcug

SEQ ID NO: 221907 - RNA, 32 nt, Human
uacucccgcugcuuguucuguccccucccucg

SEQ ID NO: 221908 - RNA, 32 nt, Human
uacucccucagccucaggcaguggugcuccca

SEQ ID NO: 221909 - RNA, 32 nt, Human
uacucccuccacccucccucccugaucccgug

SEQ ID NO: 221910 - RNA, 32 nt, Human
uacucccucccaagacuaaaccaggaagaagu

SEQ ID NO: 221911 - RNA, 32 nt, Human
uacucccugcagccccucgcacuacccagcug

SEQ ID NO: 221912 - RNA, 32 nt, Human
uacucccugcuauaauccuagcacuuugggag

SEQ ID NO: 221913 - RNA, 32 nt, Human
uacucccuguuugccuuuccuuugccacccuc

SEQ ID NO: 221914 - RNA, 32 nt, Human
uacucccuugcccuagauaguuuauuauuauu

SEQ ID NO: 221915 - RNA, 32 nt, Human
uacuccgagccaaggcacugauguuugaacug

SEQ ID NO: 221916 - RNA, 32 nt, Human
uacuccgagucuuggucuccgucccucuaucu

SEQ ID NO: 221917 - RNA, 32 nt, Human
uacuccgcaagagaggccagaaugacagcuga

SEQ ID NO: 221918 - RNA, 32 nt, Human
uacuccgcaucucagccaccuuccucaggcuc

SEQ ID NO: 221919 - RNA, 32 nt, Human
uacuccgcuccccucuuuucccucccucuccu

SEQ ID NO: 221920 - RNA, 32 nt, Human
uacuccggcugguccgggacauggaaauucgg

SEQ ID NO: 221921 - RNA, 32 nt, Human
uacuccgggaggcugaggcaggagagucacuu

SEQ ID NO: 221922 - RNA, 32 nt, Human
uacuccggucugagcgacagagcaagaaucug

SEQ ID NO: 221923 - RNA, 32 nt, Human
uacuccguaaagaacauacaaggacauucacu

SEQ ID NO: 221924 - RNA, 32 nt, Human
uacuccguagcccaggcuggagugcaguggca

SEQ ID NO: 221925 - RNA, 32 nt, Human
uacuccguucucuaucaguuaaagcuauugaa

SEQ ID NO: 221926 - RNA, 32 nt, Human
uacuccguugcccaggcuggaguacaauggug

SEQ ID NO: 221927 - RNA, 32 nt, Human
uacuccuacccuuaguugaauuuccuuauuaa

SEQ ID NO: 221928 - RNA, 32 nt, Human
uacuccuauaacuccuaaagaggggaggcagc

SEQ ID NO: 221929 - RNA, 32 nt, Human
uacuccuauauacugaccugccuguccacgaa

SEQ ID NO: 221930 - RNA, 32 nt, Human
uacuccucagcaccuuccgugcaguuaccagu

SEQ ID NO: 221931 - RNA, 32 nt, Human
uacuccucaguuccucaccaucaucaucuugu

SEQ ID NO: 221932 - RNA, 32 nt, Human
uacuccuccaggcccccagccugggacagccc

SEQ ID NO: 221933 - RNA, 32 nt, Human
uacuccuccucuuucucuccccaacccccauu

SEQ ID NO: 221934 - RNA, 21 nt, Human
uacuccucguugcuugugucc

SEQ ID NO: 221935 - RNA, 32 nt, Human
uacuccucuaacucauguuuuuccugggcaua

SEQ ID NO: 221936 - RNA, 32 nt, Human
uacuccucucagggguguguaacacucaacag

SEQ ID NO: 221937 - RNA, 31 nt, Human
uacuccugacuucuccuaggcuugagaauug

SEQ ID NO: 221938 - RNA, 32 nt, Human
uacuccugagucuacacccgugcuucaccaga

SEQ ID NO: 221939 - RNA, 19 nt, Human
uacuccugcaggccaggaa

SEQ ID NO: 221940 - RNA, 32 nt, Human
uacuccugccuaggugacagagcaagacuccg

SEQ ID NO: 221941 - RNA, 32 nt, Human
uacuccugcggggcaucugcugggcuugcccg

SEQ ID NO: 221942 - RNA, 32 nt, Human
uacuccugcugccuggccucuccucacuccug

SEQ ID NO: 221943 - RNA, 32 nt, Human
uacuccuggccucagagccccugcugacccug

SEQ ID NO: 221944 - RNA, 32 nt, Human
uacuccuggcucaagcccugaauuucuucuuu

SEQ ID NO: 221945 - RNA, 32 nt, Human
uacuccugggcaacagcgagacuccgucucaa

SEQ ID NO: 221946 - RNA, 32 nt, Human
uacuccugggggcugaacaccaucccucccac

SEQ ID NO: 221947 - RNA, 32 nt, Human
uacuccugucccagcccugccuccagggcucc

SEQ ID NO: 221948 - RNA, 32 nt, Human
uacuccuguggugcagaugagaagcuauaaca

SEQ ID NO: 221949 - RNA, 32 nt, Human
uacuccuguuuggaaguauuuagauccagauu

SEQ ID NO: 221950 - RNA, 32 nt, Human
uacuccuucucccagcccuguccucauccuag

SEQ ID NO: 221951 - RNA, 32 nt, Human
uacuccuucuuugguaguugaaaguugaauuc

SEQ ID NO: 221952 - RNA, 32 nt, Human
uacuccuugccuaggcuggaguuuacagagac

SEQ ID NO: 221953 - RNA, 32 nt, Human
uacucgagcuuggaaaaaucccaacacaaaac

SEQ ID NO: 221954 - RNA, 32 nt, Human
uacucgcaaggcugaggcaggagaaucgcuug

SEQ ID NO: 221955 - RNA, 32 nt, Human
uacucgcaauaggaauaagcuaaugcccauuu

SEQ ID NO: 221956 - RNA, 32 nt, Human
uacucgcaccucuuggcuuuguugaugcuccg

SEQ ID NO: 221957 - RNA, 32 nt, Human
uacucgcaggugguggggagccugggcuuuug

SEQ ID NO: 221958 - RNA, 32 nt, Human
uacucggcauccuccauuccccaaacucccuc

SEQ ID NO: 221959 - RNA, 32 nt, Human
uacucgggacgcugaggcgggaggaucacaug

SEQ ID NO: 221960 - RNA, 32 nt, Human
uacucgggaggaugaggcaggagaauugcuug

SEQ ID NO: 221961 - RNA, 32 nt, Human
uacucgggaggccaaggcaggagaauugcucg

SEQ ID NO: 221962 - RNA, 32 nt, Human
uacucgggaggccgaggcaggagaauugcgug

SEQ ID NO: 221963 - RNA, 32 nt, Human
uacucgggaggccgaggcaggagaauugcuug

SEQ ID NO: 221964 - RNA, 32 nt, Human
uacucgggaggccgaggcaggagcauugcuug

SEQ ID NO: 221965 - RNA, 32 nt, Human
uacucgggaggcggaggcaggagaaucacuug

SEQ ID NO: 221966 - RNA, 32 nt, Human
uacucgggaggcuaaggcaggagaaucgcuug

SEQ ID NO: 221967 - RNA, 32 nt, Human
uacucgggaggcugaagcaggagaaucgcuug

SEQ ID NO: 221968 - RNA, 32 nt, Human
uacucgggaggcugaagcaggagaauggcgug

SEQ ID NO: 221969 - RNA, 32 nt, Human
uacucgggaggcugaagcaggagaauugcuug

SEQ ID NO: 221970 - RNA, 32 nt, Human
uacucgggaggcugaagcaggaggacugcuug

SEQ ID NO: 221971 - RNA, 32 nt, Human
uacucgggaggcugagacaggagaaucacuug

SEQ ID NO: 221972 - RNA, 32 nt, Human
uacucgggaggcugagacaggagaaucgcuug

SEQ ID NO: 221973 - RNA, 32 nt, Human
uacucgggaggcugagacaggagaauugcuug

SEQ ID NO: 221974 - RNA, 32 nt, Human
uacucgggaggcugaggaaggagaaucgcuug

SEQ ID NO: 221975 - RNA, 32 nt, Human
uacucgggaggcugaggaaggagaauggugug

SEQ ID NO: 221976 - RNA, 32 nt, Human
uacucgggaggcugaggcaggaagaaucgcuu

SEQ ID NO: 221977 - RNA, 32 nt, Human
uacucgggaggcugaggcaggagaaccgcuug

SEQ ID NO: 221978 - RNA, 32 nt, Human
uacucgggaggcugaggcaggagaauagccug

SEQ ID NO: 221979 - RNA, 32 nt, Human
uacucgggaggcugaggcaggagaauagcgug

SEQ ID NO: 221980 - RNA, 32 nt, Human
uacucgggaggcugaggcaggagaaucgccug

SEQ ID NO: 221981 - RNA, 32 nt, Human
uacucgggaggcugaggcaggagaaucgcugg

SEQ ID NO: 221982 - RNA, 32 nt, Human
uacucgggaggcugaggcaggagaaucgcuua

SEQ ID NO: 221983 - RNA, 32 nt, Human
uacucgggaggcugaggcaggagaaucgcuug

SEQ ID NO: 221984 - RNA, 32 nt, Human
uacucgggaggcugaggcaggagaauugcuug

SEQ ID NO: 221985 - RNA, 32 nt, Human
uacucgggaggcugaggcaggagcaucgcuug

SEQ ID NO: 221986 - RNA, 32 nt, Human
uacucgggaggcugaggcagggggagcacuug

SEQ ID NO: 221987 - RNA, 32 nt, Human
uacucgggaggcugcagcaggagaauggcaug

SEQ ID NO: 221988 - RNA, 32 nt, Human
uacucgggaggcuggggcaggagaaucacuug

SEQ ID NO: 221989 - RNA, 32 nt, Human
uacucgggaggcuguggcaggagaaucgcuug

SEQ ID NO: 221990 - RNA, 32 nt, Human
uacucgggaggcuguggcaggagaauugcuug

SEQ ID NO: 221991 - RNA, 32 nt, Human
uacucgggagggugaggcaggagaaucacuuc

SEQ ID NO: 221992 - RNA, 32 nt, Human
uacucgggagguggagguugcagugagccaag

SEQ ID NO: 221993 - RNA, 32 nt, Human
uacucgggagguugaggcaggagaaucgcuua

SEQ ID NO: 221994 - RNA, 32 nt, Human
uacucgggagguugaggcaggagaaucgcuug

SEQ ID NO: 221995 - RNA, 32 nt, Human
uacucgggagguugaggcaggagaauugcaug

SEQ ID NO: 221996 - RNA, 32 nt, Human
uacucgggagguugaggcaggagaauugcuua

SEQ ID NO: 221997 - RNA, 32 nt, Human
uacucgggagguugaggcaggagaauugcuug

SEQ ID NO: 221998 - RNA, 32 nt, Human
uacucgggagguuuaggcaggagaaucgcuug

SEQ ID NO: 221999 - RNA, 32 nt, Human
uacucggggaggcaggguagcagugcuuccag

SEQ ID NO: 222000 - RNA, 32 nt, Human
uacucgguaggcugaggcaggagaaucacuug

SEQ ID NO: 222001 - RNA, 32 nt, Human
uacucgucucccccgacgcagaccauggagag

SEQ ID NO: 222002 - RNA, 32 nt, Human
uacucgugacacuucccaguucuggcuuuuug

SEQ ID NO: 222003 - RNA, 32 nt, Human
uacucguuggaugucugugaguaccuggucau

SEQ ID NO: 222004 - RNA, 32 nt, Human
uacucguuuucccugauccgugguguugcagu

SEQ ID NO: 222005 - RNA, 32 nt, Human
uacucuaagagugaggaaauuagaagaaaaca

SEQ ID NO: 222006 - RNA, 32 nt, Human
uacucuaagaucuuagauucucugugucuaag

SEQ ID NO: 222007 - RNA, 32 nt, Human
uacucuacagcagcuucacugccugaaaauga

SEQ ID NO: 222008 - RNA, 32 nt, Human
uacucuacauuucaucaauguuggaguggcaa

SEQ ID NO: 222009 - RNA, 32 nt, Human
uacucuaccauggggcaucccaaguggggucc

SEQ ID NO: 222010 - RNA, 32 nt, Human
uacucuacugacuggcagagacaggagaggua

SEQ ID NO: 222011 - RNA, 32 nt, Human
uacucuagaagaguagggaaaauaaugcuugu

SEQ ID NO: 222012 - RNA, 32 nt, Human
uacucuagccugggcagcagagugagacccug

SEQ ID NO: 222013 - RNA, 32 nt, Human
uacucuagccugggcgacagagcaagacucca

SEQ ID NO: 222014 - RNA, 32 nt, Human
uacucuaggaagaggaagguauggcgagccca

SEQ ID NO: 222015 - RNA, 32 nt, Human
uacucuaggaugaucacuugugcuuagcuuag

SEQ ID NO: 222016 - RNA, 32 nt, Human
uacucuagggaguaugcuggaggcagagggca

SEQ ID NO: 222017 - RNA, 32 nt, Human
uacucuagucacccucuucaagcuuuugggcu

SEQ ID NO: 222018 - RNA, 32 nt, Human
uacucuaguccccagcccccagcccugccauc

SEQ ID NO: 222019 - RNA, 32 nt, Human
uacucucaacuugcuguucucuuuacauuccu

SEQ ID NO: 222020 - RNA, 32 nt, Human
uacucucaucagucguucauggucacaaccug

SEQ ID NO: 222021 - RNA, 32 nt, Human
uacucucaucuucucccccgcucccuuccacu

SEQ ID NO: 222022 - RNA, 32 nt, Human
uacucucauucauuuugcuuacaaaagguaca

SEQ ID NO: 222023 - RNA, 32 nt, Human
uacucuccaagcuccugucuuucuuuccucuc

SEQ ID NO: 222024 - RNA, 17 nt, Human
uacucuccagcuggaaa

SEQ ID NO: 222025 - RNA, 32 nt, Human
uacucuccuuuugacuccuuuuggaaccccca

SEQ ID NO: 222026 - RNA, 32 nt, Human
uacucucgcccaggcuagagugcaguggcaug

SEQ ID NO: 222027 - RNA, 32 nt, Human
uacucucuagcaacugacuuggggaaguuuuu

SEQ ID NO: 222028 - RNA, 32 nt, Human
uacucucuccacuuuauagcucuaauaaguuu

SEQ ID NO: 222029 - RNA, 32 nt, Human
uacucucuccuccugaccuccugggacuuugg

SEQ ID NO: 222030 - RNA, 32 nt, Human
uacucucucgcccaggcuggagugcaguggug

SEQ ID NO: 222031 - RNA, 32 nt, Human
uacucucucuccuaaagacaccaccuuccugc

SEQ ID NO: 222032 - RNA, 32 nt, Human
uacucucugguaagacuugaaugugauuauuu

SEQ ID NO: 222033 - RNA, 32 nt, Human
uacucucugugaacauccuccuuugccucuga

SEQ ID NO: 222034 - RNA, 32 nt, Human
uacucucuuacucacacuucugggaugcaagc

SEQ ID NO: 222035 - RNA, 32 nt, Human
uacucucuugcacucuugcucucccccucccu

SEQ ID NO: 222036 - RNA, 32 nt, Human
uacucucuuugugggugcaggaagagggcgcu

SEQ ID NO: 222037 - RNA, 32 nt, Human
uacucugaauggaccacaguguuugcacauau

SEQ ID NO: 222038 - RNA, 32 nt, Human
uacucugacuccucaccgucuucaccaacaug

SEQ ID NO: 222039 - RNA, 32 nt, Human
uacucugagaaacaucucucucuucugaauua

SEQ ID NO: 222040 - RNA, 32 nt, Human
uacucugaguuacugguuaccuagccagucca

SEQ ID NO: 222041 - RNA, 32 nt, Human
uacucugaucaaauaaauaaugcuggaauacu

SEQ ID NO: 222042 - RNA, 32 nt, Human
uacucugcagccugccuuccuagaguuggguu

SEQ ID NO: 222043 - RNA, 32 nt, Human
uacucugcuaaguucuggggaugaggaaauua

SEQ ID NO: 222044 - RNA, 32 nt, Human
uacucugcuacucuuaggcugcauaguuuaug

SEQ ID NO: 222045 - RNA, 32 nt, Human
uacucugcuguaggaaagccuuugccaaugcu

SEQ ID NO: 222046 - RNA, 32 nt, Human
uacucugcuguaugaaucuccaggcaggaaau

SEQ ID NO: 222047 - RNA, 32 nt, Human
uacucuggaagguggcuugagguggaggagug

SEQ ID NO: 222048 - RNA, 32 nt, Human
uacucuggagcaguucauuuuacaguaucuac

SEQ ID NO: 222049 - RNA, 32 nt, Human
uacucuggagcaugcugagauuaaggugguug

SEQ ID NO: 222050 - RNA, 32 nt, Human
uacucuggaggcugaggcggaggcaggauugc

SEQ ID NO: 222051 - RNA, 32 nt, Human
uacucuggagguuuagcaggaggaucacuuga

SEQ ID NO: 222052 - RNA, 32 nt, Human
uacucuggcaccacucuccaggcugccauggg

SEQ ID NO: 222053 - RNA, 32 nt, Human
uacucuggcaucugcacauuuccguguuacag

SEQ ID NO: 222054 - RNA, 32 nt, Human
uacucuggccccuucagucggggaguggaagg

SEQ ID NO: 222055 - RNA, 32 nt, Human
uacucugggagguggaggaaauguuauuugaa

SEQ ID NO: 222056 - RNA, 32 nt, Human
uacucugucacccaggcuagagugcaauggca

SEQ ID NO: 222057 - RNA, 32 nt, Human
uacucugucacccaggcuagagugcaguggcg

SEQ ID NO: 222058 - RNA, 32 nt, Human
uacucugucacccaggcuggagugcaauggcg

SEQ ID NO: 222059 - RNA, 32 nt, Human
uacucugucacccaggcuggagugcaguggca

SEQ ID NO: 222060 - RNA, 32 nt, Human
uacucugucacccaggcuggagugcaguggcg

SEQ ID NO: 222061 - RNA, 32 nt, Human
uacucugucacccaggcuggagugcaguggcu

SEQ ID NO: 222062 - RNA, 32 nt, Human
uacucugucacccaggcuggagugcaguggug

SEQ ID NO: 222063 - RNA, 32 nt, Human
uacucugucacccaggcuguagugcaguggca

SEQ ID NO: 222064 - RNA, 32 nt, Human
uacucugucaccccggcuggagugcaguggug

SEQ ID NO: 222065 - RNA, 32 nt, Human
uacucugucaccuaggcuggagugcaguggca

SEQ ID NO: 222066 - RNA, 32 nt, Human
uacucugucgcccaggcuggacugcaguggug

SEQ ID NO: 222067 - RNA, 32 nt, Human
uacucugucgcccaggcuggaguacaauggug

SEQ ID NO: 222068 - RNA, 32 nt, Human
uacucugucgcccaggcuggagugcagugaug

SEQ ID NO: 222069 - RNA, 32 nt, Human
uacucugucgcccaggcuggagugcaguggua

SEQ ID NO: 222070 - RNA, 32 nt, Human
uacucugucgcccaggcuggagugcaguggug

SEQ ID NO: 222071 - RNA, 32 nt, Human
uacucugucgcccaggcuggaguguaguggca

SEQ ID NO: 222072 - RNA, 32 nt, Human
uacucugucucccaggcugcuggagugcagug

SEQ ID NO: 222073 - RNA, 32 nt, Human
uacucugucucccuuguuucugaggggccuag

SEQ ID NO: 222074 - RNA, 32 nt, Human
uacucugucucucaagccauuuugccacucgc

SEQ ID NO: 222075 - RNA, 32 nt, Human
uacucugugucagcccauccccuagacacccu

SEQ ID NO: 222076 - RNA, 32 nt, Human
uacucuguuccuggcccugccggcagccacug

SEQ ID NO: 222077 - RNA, 32 nt, Human
uacucuguugccaggcuggagugcaguggcgc

SEQ ID NO: 222078 - RNA, 32 nt, Human
uacucuguugcccaggcuggagugcaggggca

SEQ ID NO: 222079 - RNA, 32 nt, Human
uacucuguugcccaggcuggagugcaggggcg

SEQ ID NO: 222080 - RNA, 32 nt, Human
uacucuguugcccaggcuggagugcaguggca

SEQ ID NO: 222081 - RNA, 32 nt, Human
uacucuguugcccaggcuggagugcaguggug

SEQ ID NO: 222082 - RNA, 32 nt, Human
uacucuguugcccaggcuggaguguaguggug

SEQ ID NO: 222083 - RNA, 32 nt, Human
uacucuguugccuaggcuggagugaaaguggc

SEQ ID NO: 222084 - RNA, 32 nt, Human
uacucuguugcuaggcuggagugcaguggugc

SEQ ID NO: 222085 - RNA, 32 nt, Human
uacucuguugcucaagcuggaguggaguggca

SEQ ID NO: 222086 - RNA, 32 nt, Human
uacucuguuucccaggcuggagugcacaaaca

SEQ ID NO: 222087 - RNA, 32 nt, Human
uacucuuaaaagagaagaugaaguucucaugu

SEQ ID NO: 222088 - RNA, 19 nt, Human
uacucuuauuuugguaaua

SEQ ID NO: 222089 - RNA, 32 nt, Human
uacucuucaguauuuuucuaucagacuuguac

SEQ ID NO: 222090 - RNA, 32 nt, Human
uacucuucaugccucauccugcagccucgggu

SEQ ID NO: 222091 - RNA, 32 nt, Human
uacucuuccaccaaacagcugugugauaggag

SEQ ID NO: 222092 - RNA, 32 nt, Human
uacucuucuccaaggacugacaaaaacaaccc

SEQ ID NO: 222093 - RNA, 32 nt, Human
uacucuucucucuaucagauaccauuuaugag

SEQ ID NO: 222094 - RNA, 32 nt, Human
uacucuucuucugugggaggccaguccacauc

SEQ ID NO: 222095 - RNA, 32 nt, Human
uacucuucuuucucccugcccccuggagggca

SEQ ID NO: 222096 - RNA, 32 nt, Human
uacucuugccuagaacuggaggguuuuuaugg

SEQ ID NO: 222097 - RNA, 32 nt, Human
uacucuuguaccuccuguucagccaggugcau

SEQ ID NO: 222098 - RNA, 23 nt, Human
uacucuugucaccugggcugcag

SEQ ID NO: 222099 - RNA, 32 nt, Human
uacucuuuccucaacccuugucucuaucugua

SEQ ID NO: 222100 - RNA, 32 nt, Human
uacucuuuccucaucucuucccaaacucucug

SEQ ID NO: 222101 - RNA, 32 nt, Human
uacugaaaaggagucaggaaaacuacaggugu

SEQ ID NO: 222102 - RNA, 32 nt, Human
uacugaaaauacaaaauaauuagccggguguu

SEQ ID NO: 222103 - RNA, 32 nt, Human
uacugaaaauacaagaaauuagcugggacuac

SEQ ID NO: 222104 - RNA, 32 nt, Human
uacugaaaauacagaaaaguuagccaggcgug

SEQ ID NO: 222105 - RNA, 32 nt, Human
uacugaaaauagauucaacuaggcuguagaag

SEQ ID NO: 222106 - RNA, 32 nt, Human
uacugaaaggagguggggucacagugaauuuc

SEQ ID NO: 222107 - RNA, 32 nt, Human
uacugaaagggagggguggagauggguguggc

SEQ ID NO: 222108 - RNA, 32 nt, Human
uacugaaauacaaaagaaauuagccaggugug

SEQ ID NO: 222109 - RNA, 32 nt, Human
uacugaacuaugaauaguugcuccaccuacuu

SEQ ID NO: 222110 - RNA, 32 nt, Human
uacugaacugacugguuacgaaaugcucacag

SEQ ID NO: 222111 - RNA, 32 nt, Human
uacugaagagucacuggacacagaaauggaaa

SEQ ID NO: 222112 - RNA, 32 nt, Human
uacugaagaugauguuccagcagcagcgacuu

SEQ ID NO: 222113 - RNA, 32 nt, Human
uacugaaggagaagaaauuuuaaaugaggaaa

SEQ ID NO: 222114 - RNA, 32 nt, Human
uacugaaggccugccccagcugaucucgcucg

SEQ ID NO: 222115 - RNA, 32 nt, Human
uacugaaggcuucugcagcuuuggcugcacgu

SEQ ID NO: 222116 - RNA, 32 nt, Human
uacugaaucucuugcaaugaagaaagcuauuu

SEQ ID NO: 222117 - RNA, 32 nt, Human
uacugaaugcauuuaccagcaaacauguagca

SEQ ID NO: 222118 - RNA, 32 nt, Human
uacugaauguauuuaccagcaaacauguagca

SEQ ID NO: 222119 - RNA, 32 nt, Human
uacugaauuuaguucugugcucuuccuuauuu

SEQ ID NO: 222120 - RNA, 24 nt, Human
uacugaauuuucaucucacuccca

SEQ ID NO: 222121 - RNA, 32 nt, Human
uacugacacuucagauauacuaaaucagagug

SEQ ID NO: 222122 - RNA, 32 nt, Human
uacugacagcacaagacccagaauuagacaau

SEQ ID NO: 222123 - RNA, 32 nt, Human
uacugacaugacuuggcuuucucauccagaaa

SEQ ID NO: 222124 - RNA, 32 nt, Human
uacugacaugagccaccacacucagcccuuua

SEQ ID NO: 222125 - RNA, 32 nt, Human
uacugaccaaaccuaaauaaagauuuuuauug

SEQ ID NO: 222126 - RNA, 32 nt, Human
uacugacccuauauuauccagacugugccggg

SEQ ID NO: 222127 - RNA, 32 nt, Human
uacugacccucccaagccuccccacucugugc

SEQ ID NO: 222128 - RNA, 32 nt, Human
uacugacccucccagggcauuccagcucaagc

SEQ ID NO: 222129 - RNA, 32 nt, Human
uacugacccuggggauccgugcgacuugaucu

SEQ ID NO: 222130 - RNA, 32 nt, Human
uacugacccuggggcuggcuuuucuguuuccu

SEQ ID NO: 222131 - RNA, 32 nt, Human
uacugaccuggagugacuggaauagcaccugg

SEQ ID NO: 222132 - RNA, 32 nt, Human
uacugacuuguugccauuaagugaacuugacu

SEQ ID NO: 222133 - RNA, 32 nt, Human
uacugacuuuucucccugcucacccucuucca

SEQ ID NO: 222134 - RNA, 32 nt, Human
uacugagaacuccuuccagugagccggacgaa

SEQ ID NO: 222135 - RNA, 32 nt, Human
uacugagacacggcggacacacacaaacacag

SEQ ID NO: 222136 - RNA, 32 nt, Human
uacugagagacagcuacaauaaaaggagagca

SEQ ID NO: 222137 - RNA, 32 nt, Human
uacugagaggcagggcccuuaagaggugauug

SEQ ID NO: 222138 - RNA, 32 nt, Human
uacugagcaguagguaggcucacuucucuuuc

SEQ ID NO: 222139 - RNA, 32 nt, Human
uacugagcauuuuuauuccuguuuacacuugu

SEQ ID NO: 222140 - RNA, 32 nt, Human
uacugagcuggcugagccuauggccaaugagu

SEQ ID NO: 222141 - RNA, 32 nt, Human
uacugaggacaguacagauuaugugcacagag

SEQ ID NO: 222142 - RNA, 32 nt, Human
uacugaggacaucagggccaccucuggacccc

SEQ ID NO: 222143 - RNA, 32 nt, Human
uacugaggacuccauaaacagaacgggauaca

SEQ ID NO: 222144 - RNA, 32 nt, Human
uacugaggagaaagauggagccugggucucaa

SEQ ID NO: 222145 - RNA, 32 nt, Human
uacugaggcccaggcauggagcugccggaucc

SEQ ID NO: 222146 - RNA, 32 nt, Human
uacugagggagggagaggaggggagccaagac

SEQ ID NO: 222147 - RNA, 32 nt, Human
uacugaggguugggacuucaacacagcuuuuu

SEQ ID NO: 222148 - RNA, 32 nt, Human
uacugaggugaugggugcaggaaagguucaca

SEQ ID NO: 222149 - RNA, 32 nt, Human
uacugagguguuagaucaaauaucucuaauug

SEQ ID NO: 222150 - RNA, 32 nt, Human
uacugaguacuuucugcaggggccuguuaagg

SEQ ID NO: 222151 - RNA, 32 nt, Human
uacugaguaguagaaagaagcuaauuugaaau

SEQ ID NO: 222152 - RNA, 32 nt, Human
uacugaguuuggugauugagcuugcuuucccc

SEQ ID NO: 222153 - RNA, 32 nt, Human
uacugauaaaaucaauauuuugcugaaaugag

SEQ ID NO: 222154 - RNA, 32 nt, Human
uacugauaugaccaccagagcuacauggcuuu

SEQ ID NO: 222155 - RNA, 25 nt, Human
uacugaucagaggcacacaaagcgu

SEQ ID NO: 222156 - RNA, 32 nt, Human
uacugauccaagauacauggcacacaauuaaa

SEQ ID NO: 222157 - RNA, 32 nt, Human
uacugaucuauuucugugccaauaccaccuac

SEQ ID NO: 222158 - RNA, 32 nt, Human
uacugaugaguagcaugugacuuuccaagagu

SEQ ID NO: 222159 - RNA, 32 nt, Human
uacugaugcagaccuggcuguggagagcagcu

SEQ ID NO: 222160 - RNA, 32 nt, Human
uacugauggccucucauacaauggagcuauca

SEQ ID NO: 222161 - RNA, 32 nt, Human
uacugaugucggcugcgagagccugugcuuaa

SEQ ID NO: 222162 - RNA, 32 nt, Human
uacugauuccuccaacucuccaccccacaaaa

SEQ ID NO: 222163 - RNA, 32 nt, Human
uacugauucuacucugcuuuuauccuuuggag

SEQ ID NO: 222164 - RNA, 32 nt, Human
uacugauuuggggcaaagugaaaccucugcuu

SEQ ID NO: 222165 - RNA, 32 nt, Human
uacugauuugugggaugguggcaggggugugg

SEQ ID NO: 222166 - RNA, 32 nt, Human
uacugauuuugaaaaagagaauuauucuuauu

SEQ ID NO: 222167 - RNA, 32 nt, Human
uacugcaaaaacucaaaaauuagccaggcgug

SEQ ID NO: 222168 - RNA, 32 nt, Human
uacugcaaaauacaaaaauuagccgggcuugg

SEQ ID NO: 222169 - RNA, 32 nt, Human
uacugcaauaaagagagcaggagaggagcugc

SEQ ID NO: 222170 - RNA, 32 nt, Human
uacugcaauugcuucccuucuuaaacaguaua

SEQ ID NO: 222171 - RNA, 32 nt, Human
uacugcacacucagcacccaggacuggaauca

SEQ ID NO: 222172 - RNA, 32 nt, Human
uacugcacccucaaccuccugggcucaagcaa

SEQ ID NO: 222173 - RNA, 32 nt, Human
uacugcacuccagccccagcugggugacagag

SEQ ID NO: 222174 - RNA, 32 nt, Human
uacugcacuguaguuucaaauggauccuccag

SEQ ID NO: 222175 - RNA, 32 nt, Human
uacugcagauguguguucucugggcuuuaugu

SEQ ID NO: 222176 - RNA, 26 nt, Human
uacugcagcacaaguuugagcaggug

SEQ ID NO: 222177 - RNA, 20 nt, Human
uacugcagccucaaccuccu

SEQ ID NO: 222178 - RNA, 32 nt, Human
uacugcagccucaaccuccugggcucaaguga

SEQ ID NO: 222179 - RNA, 32 nt, Human
uacugcagccucaaccuccugggcucagguga

SEQ ID NO: 222180 - RNA, 32 nt, Human
uacugcagccuccagagaguaucugaggcaca

SEQ ID NO: 222181 - RNA, 32 nt, Human
uacugcagccugggugacagaaugagacugca

SEQ ID NO: 222182 - RNA, 32 nt, Human
uacugcagcuauuuggaaauguuuuccaaacc

SEQ ID NO: 222183 - RNA, 32 nt, Human
uacugcaggaacuucuggaggaaagcacucau

SEQ ID NO: 222184 - RNA, 32 nt, Human
uacugcaggaauaaaccaggagagcugagaga

SEQ ID NO: 222185 - RNA, 32 nt, Human
uacugcaguaagcauuaggaagugaauaugau

SEQ ID NO: 222186 - RNA, 32 nt, Human
uacugcagucuauuuaaagaugacauuuggug

SEQ ID NO: 222187 - RNA, 32 nt, Human
uacugcagugucuggagguugcgggaaggaga

SEQ ID NO: 222188 - RNA, 32 nt, Human
uacugcauccuuuggcugggccuuguugaccc

SEQ ID NO: 222189 - RNA, 32 nt, Human
uacugcaucuaucaacccgucaucuagguuuu

SEQ ID NO: 222190 - RNA, 32 nt, Human
uacugcaucucagcccacaucucagcccuucc

SEQ ID NO: 222191 - RNA, 32 nt, Human
uacugcaucugucagcaggcugcagggagugc

SEQ ID NO: 222192 - RNA, 32 nt, Human
uacugcauucucuuuaucacauagugguuguu

SEQ ID NO: 222193 - RNA, 32 nt, Human
uacugcauugugccuucccaaugaugucaaac

SEQ ID NO: 222194 - RNA, 32 nt, Human
uacugccaagccccugcccuggggagaaagua

SEQ ID NO: 222195 - RNA, 32 nt, Human
uacugccacagcugcucaccuugucuggcaaa

SEQ ID NO: 222196 - RNA, 32 nt, Human
uacugccaccucuuuguucaucuggcccagcu

SEQ ID NO: 222197 - RNA, 32 nt, Human
uacugccacugaggcaguagguuuuagguggu

SEQ ID NO: 222198 - RNA, 32 nt, Human
uacugccacugugugccuucugccaacgccuc

SEQ ID NO: 222199 - RNA, 32 nt, Human
uacugccaggagguggaggaaggagcaggugc

SEQ ID NO: 222200 - RNA, 32 nt, Human
uacugccaucaaccccacccccauaaagcugu

SEQ ID NO: 222201 - RNA, 32 nt, Human
uacugccauccauacuaacacaaauuuggaaa

SEQ ID NO: 222202 - RNA, 32 nt, Human
uacugcccagaacaguggcccauagcagggac

SEQ ID NO: 222203 - RNA, 32 nt, Human
uacugcccagcacccacccggccaugaggacc

SEQ ID NO: 222204 - RNA, 32 nt, Human
uacugccccucagcagggaugacucagcaggg

SEQ ID NO: 222205 - RNA, 32 nt, Human
uacugccccugccuaugcccacggggcuggug

SEQ ID NO: 222206 - RNA, 32 nt, Human
uacugcccucgaggcagcccucccaagucaga

SEQ ID NO: 222207 - RNA, 32 nt, Human
uacugcccugugagacugggaaugacaacugg

SEQ ID NO: 222208 - RNA, 32 nt, Human
uacugcccuucacccaaccucucccaccucca

SEQ ID NO: 222209 - RNA, 32 nt, Human
uacugcccuucucuugcugccuccugggcagg

SEQ ID NO: 222210 - RNA, 32 nt, Human
uacugccucaaccucucaggcccgagcaaucc

SEQ ID NO: 222211 - RNA, 32 nt, Human
uacugccucucgcuccucaaccccuccccucc

SEQ ID NO: 222212 - RNA, 32 nt, Human
uacugccugccugccugccugcuacggcucag

SEQ ID NO: 222213 - RNA, 32 nt, Human
uacugccugccugccugccugcuacggugagu

SEQ ID NO: 222214 - RNA, 32 nt, Human
uacugccuggguggcaagggugagacuccauc

SEQ ID NO: 222215 - RNA, 32 nt, Human
uacugccugucccggcaucucucccuccgccg

SEQ ID NO: 222216 - RNA, 32 nt, Human
uacugccugugggccaaauuugcccaccaccu

SEQ ID NO: 222217 - RNA, 32 nt, Human
uacugccuuuaauagaaaaccuaaaugcuggg

SEQ ID NO: 222218 - RNA, 32 nt, Human
uacugcgcaaauucugggagguuugggccugg

SEQ ID NO: 222219 - RNA, 29 nt, Human
uacugcgguuugccugugccuggacaaug

SEQ ID NO: 222220 - RNA, 32 nt, Human
uacugcguagaggccguagcuggcggaaggag

SEQ ID NO: 222221 - RNA, 32 nt, Human
uacugcgugcuuguauucgaugagguuuccau

SEQ ID NO: 222222 - RNA, 32 nt, Human
uacugcuaaaucugcauguccucugugugacu

SEQ ID NO: 222223 - RNA, 32 nt, Human
uacugcuaaugccaccacuaccccugccauca

SEQ ID NO: 222224 - RNA, 32 nt, Human
uacugcuaggugugugggguguuucgccugca

SEQ ID NO: 222225 - RNA, 32 nt, Human
uacugcuauauuaucccagucaaaaccaauac

SEQ ID NO: 222226 - RNA, 32 nt, Human
uacugcucauuucucaaccuuuuccaagccac

SEQ ID NO: 222227 - RNA, 32 nt, Human
uacugcuccagccggggcuccggggcggcagc

SEQ ID NO: 222228 - RNA, 32 nt, Human
uacugcuccuacuccaggacucucacaaagcu

SEQ ID NO: 222229 - RNA, 32 nt, Human
uacugcucgccaggaaccucgccugguccuga

SEQ ID NO: 222230 - RNA, 32 nt, Human
uacugcucuaauuugagugaaaguuauuagcg

SEQ ID NO: 222231 - RNA, 32 nt, Human
uacugcucuccuccaccucaacuccgugcuua

SEQ ID NO: 222232 - RNA, 32 nt, Human
uacugcucuuguaggagcuccucucacaagua

SEQ ID NO: 222233 - RNA, 32 nt, Human
uacugcucuuucagacaaacaguccauuuuua

SEQ ID NO: 222234 - RNA, 32 nt, Human
uacugcucuuuuccccucucccuccacaccag

SEQ ID NO: 222235 - RNA, 32 nt, Human
uacugcugacagcaaccauguucucacccaaa

SEQ ID NO: 222236 - RNA, 32 nt, Human
uacugcugaccuuucagugcuguuugcucaga

SEQ ID NO: 222237 - RNA, 32 nt, Human
uacugcugccaagaaguugcucugaagucagu

SEQ ID NO: 222238 - RNA, 32 nt, Human
uacugcugcccugaaaggaugcacugagaaca

SEQ ID NO: 222239 - RNA, 32 nt, Human
uacugcugguauagcugaacuacugaccugga

SEQ ID NO: 222240 - RNA, 32 nt, Human
uacugcuguggcuagagaguuugaggauugcu

SEQ ID NO: 222241 - RNA, 32 nt, Human
uacugcuuccugcagcuggccuagaugauguc

SEQ ID NO: 222242 - RNA, 32 nt, Human
uacugcuucuuucugucuguguguuuuaauuu

SEQ ID NO: 222243 - RNA, 32 nt, Human
uacugcuuugauggcuggggccagucucuugu

SEQ ID NO: 222244 - RNA, 32 nt, Human
uacuggaaaaccaggcguagucuggagucuca

SEQ ID NO: 222245 - RNA, 32 nt, Human
uacuggaacuaguacuuucuucucucauuccg

SEQ ID NO: 222246 - RNA, 32 nt, Human
uacuggacaaaaagacuggacugcaacugacc

SEQ ID NO: 222247 - RNA, 32 nt, Human
uacuggacuguacauaaacauuccacauugug

SEQ ID NO: 222248 - RNA, 32 nt, Human
uacuggagacaggguuucaccauguuggccag

SEQ ID NO: 222249 - RNA, 32 nt, Human
uacuggagccuggucagaggaggacuuugggg

SEQ ID NO: 222250 - RNA, 32 nt, Human
uacuggagcgugcccuugcuggggacguggcu

SEQ ID NO: 222251 - RNA, 19 nt, Human
uacuggaguucccuucuuc

SEQ ID NO: 222252 - RNA, 32 nt, Human
uacuggauguggugaugcuccuccuuuaucuu

SEQ ID NO: 222253 - RNA, 32 nt, Human
uacuggauguuacuuauuuuugaacugaauac

SEQ ID NO: 222254 - RNA, 32 nt, Human
uacuggauguuuagcuucuuacugcaaaaaca

SEQ ID NO: 222255 - RNA, 32 nt, Human
uacuggauuccagcauucagcaggugcagauc

SEQ ID NO: 222256 - RNA, 32 nt, Human
uacuggauucuugaucuuucugcaucaucaag

SEQ ID NO: 222257 - RNA, 32 nt, Human
uacuggcaagguuuuuaaaaaugagguaaaug

SEQ ID NO: 222258 - RNA, 32 nt, Human
uacuggcaauacuccagccuggugacagagug

SEQ ID NO: 222259 - RNA, 32 nt, Human
uacuggcacagcaagcccaccaauuauuagca

SEQ ID NO: 222260 - RNA, 32 nt, Human
uacuggcaccuugaucuuggacuucccagccu

SEQ ID NO: 222261 - RNA, 32 nt, Human
uacuggcagagcugcugcgaggacccuguggc

SEQ ID NO: 222262 - RNA, 32 nt, Human
uacuggcagccccugaauuggcucaacguuug

SEQ ID NO: 222263 - RNA, 32 nt, Human
uacuggcaggaaccaccaggcccagccaacca

SEQ ID NO: 222264 - RNA, 32 nt, Human
uacuggcagguccucacccccugggccggaac

SEQ ID NO: 222265 - RNA, 32 nt, Human
uacuggcauagucaugacaaccucugguaauc

SEQ ID NO: 222266 - RNA, 32 nt, Human
uacuggcaugagccacugugcccagcccggau

SEQ ID NO: 222267 - RNA, 32 nt, Human
uacuggcauuucuauuucuagaaauaauauuu

SEQ ID NO: 222268 - RNA, 32 nt, Human
uacuggccagucugcauccuugccuagaccau

SEQ ID NO: 222269 - RNA, 32 nt, Human
uacuggccaucugaccuacaaaugugguggca

SEQ ID NO: 222270 - RNA, 32 nt, Human
uacuggcccuuuagugcuuugccugaaagaga

SEQ ID NO: 222271 - RNA, 32 nt, Human
uacuggcgaaaauguuggaccacuugcuuuac

SEQ ID NO: 222272 - RNA, 32 nt, Human
uacuggcgaucaucaagcaaaagcugccaauu

SEQ ID NO: 222273 - RNA, 32 nt, Human
uacuggcgugagccaccgugccuggccagcau

SEQ ID NO: 222274 - RNA, 32 nt, Human
uacuggcuaagaaaggagagacagcuucauga

SEQ ID NO: 222275 - RNA, 32 nt, Human
uacuggcuauuuucucuucucgccguagugcc

SEQ ID NO: 222276 - RNA, 32 nt, Human
uacuggcucccaggauggcggugguggcagca

SEQ ID NO: 222277 - RNA, 32 nt, Human
uacuggcuccugcaaaccugggcugcucaucu

SEQ ID NO: 222278 - RNA, 32 nt, Human
uacuggcuccuggaugagggggccagagagga

SEQ ID NO: 222279 - RNA, 32 nt, Human
uacuggcuccuggcagcggcuuuuguggaaga

SEQ ID NO: 222280 - RNA, 32 nt, Human
uacuggcucugaggugcaugcagagaggagga

SEQ ID NO: 222281 - RNA, 32 nt, Human
uacuggcugaggacaggggagggagugaaguu

SEQ ID NO: 222282 - RNA, 32 nt, Human
uacuggcuggacccucugcccugggcaggagg

SEQ ID NO: 222283 - RNA, 18 nt, Human
uacuggcuggagugcagu

SEQ ID NO: 222284 - RNA, 19 nt, Human
uacuggcuggagugcagug

SEQ ID NO: 222285 - RNA, 32 nt, Human
uacuggcugggauggcucugauauacagccuu

SEQ ID NO: 222286 - RNA, 32 nt, Human
uacuggcugggguaggccucagugagucggcc

SEQ ID NO: 222287 - RNA, 32 nt, Human
uacuggcuuacugagagauuacuccaauuuaa

SEQ ID NO: 222288 - RNA, 32 nt, Human
uacuggcuucgcacacagcuggcuccaggaaa

SEQ ID NO: 222289 - RNA, 32 nt, Human
uacuggcuugagccacugcacccaccccucca

SEQ ID NO: 222290 - RNA, 32 nt, Human
uacuggcuuugugccuguagcucauuuuauua

SEQ ID NO: 222291 - RNA, 32 nt, Human
uacugggaaaaggucaagaaagaggcagaaag

SEQ ID NO: 222292 - RNA, 32 nt, Human
uacugggaaaggcagaggguggagggaagauu

SEQ ID NO: 222293 - RNA, 32 nt, Human
uacugggaaguuaaaaggaaggggcuuagaaa

SEQ ID NO: 222294 - RNA, 32 nt, Human
uacugggacaaugaccacgcugccuguuuguc

SEQ ID NO: 222295 - RNA, 32 nt, Human
uacugggacuacaggcaugagaaaccaagccc

SEQ ID NO: 222296 - RNA, 32 nt, Human
uacugggagagaagaagauaagcuggaagagg

SEQ ID NO: 222297 - RNA, 32 nt, Human
uacugggagagggagacaaaaccucauggcaa

SEQ ID NO: 222298 - RNA, 32 nt, Human
uacugggauuacaagagcccaccaccaugccu

SEQ ID NO: 222299 - RNA, 32 nt, Human
uacugggauuacaggcaugaaccaccguggcc

SEQ ID NO: 222300 - RNA, 32 nt, Human
uacugggauuacaggcaugagcaccuggcccc

SEQ ID NO: 222301 - RNA, 32 nt, Human
uacugggauuacaggcaugagccaccacaccu

SEQ ID NO: 222302 - RNA, 32 nt, Human
uacugggauuacaggcaugagccacugcaccc

SEQ ID NO: 222303 - RNA, 32 nt, Human
uacugggauuacaggcaugaggcaucacagcc

SEQ ID NO: 222304 - RNA, 32 nt, Human
uacugggauuacaggcgcccaccaccacgccc

SEQ ID NO: 222305 - RNA, 32 nt, Human
uacugggauuacaggcgugagccaccucgccc

SEQ ID NO: 222306 - RNA, 32 nt, Human
uacugggauuacaggugcccaccaccaccccu

SEQ ID NO: 222307 - RNA, 32 nt, Human
uacugggauuauauaggcaugagccacugagc

SEQ ID NO: 222308 - RNA, 32 nt, Human
uacugggcaggacuugaggugugcaaaggugu

SEQ ID NO: 222309 - RNA, 24 nt, Human
uacugggcaggcugcaaaugucug

SEQ ID NO: 222310 - RNA, 32 nt, Human
uacugggcaucuccugagccuaggcaauagcu

SEQ ID NO: 222311 - RNA, 32 nt, Human
uacugggcauuggccagcuacuggggauaugg

SEQ ID NO: 222312 - RNA, 32 nt, Human
uacugggcccaggaguucgaggugcaguuugg

SEQ ID NO: 222313 - RNA, 32 nt, Human
uacugggcccagggugcugagcuuuccagaac

SEQ ID NO: 222314 - RNA, 32 nt, Human
uacugggcucaagacauccuccugcuucagcc

SEQ ID NO: 222315 - RNA, 32 nt, Human
uacugggcucaagccuuccucccgccucagcc

SEQ ID NO: 222316 - RNA, 32 nt, Human
uacugggcuggucggaugagcugaggccauug

SEQ ID NO: 222317 - RNA, 22 nt, Human
uacugggcuuugguggaaacug

SEQ ID NO: 222318 - RNA, 32 nt, Human
uacuggggaaauuccuacacugucuuagaacc

SEQ ID NO: 222319 - RNA, 32 nt, Human
uacuggggaaauuccuucacugucuuagaacc

SEQ ID NO: 222320 - RNA, 32 nt, Human
uacuggggaaauugcuucacugucuuagaacc

SEQ ID NO: 222321 - RNA, 32 nt, Human
uacuggggaacagaaagauaugacagaguuuu

SEQ ID NO: 222322 - RNA, 32 nt, Human
uacuggggaagcugaggcaggagaauugcuug

SEQ ID NO: 222323 - RNA, 32 nt, Human
uacuggggagaaaccccacaaauguggagaau

SEQ ID NO: 222324 - RNA, 32 nt, Human
uacuggggaggcagcuggagcagcaagaugcu

SEQ ID NO: 222325 - RNA, 32 nt, Human
uacuggggaggcugaggcaggagaauagcuug

SEQ ID NO: 222326 - RNA, 27 nt, Human
uacuggggaggcugaggcaggagaauc

SEQ ID NO: 222327 - RNA, 32 nt, Human
uacuggggaggcugaggcaggagaaucacuug

SEQ ID NO: 222328 - RNA, 32 nt, Human
uacuggggaggcugaggcaggagaaucgcuug

SEQ ID NO: 222329 - RNA, 32 nt, Human
uacuggggaggcugaggcaggagaaucguuuu

SEQ ID NO: 222330 - RNA, 32 nt, Human
uacuggggaggcugaggcaggagaauggcaug

SEQ ID NO: 222331 - RNA, 32 nt, Human
uacuggggaggcugaggcaggagaauggcgug

SEQ ID NO: 222332 - RNA, 32 nt, Human
uacuggggaggcugaggcaggagaauggcuug

SEQ ID NO: 222333 - RNA, 32 nt, Human
uacuggggaggcugaggcaggagaauugcuua

SEQ ID NO: 222334 - RNA, 32 nt, Human
uacuggggaggcugaggcaggagaauugcuuu

SEQ ID NO: 222335 - RNA, 32 nt, Human
uacuggggaggcugagucaggagaaucgcuug

SEQ ID NO: 222336 - RNA, 32 nt, Human
uacuggggcuguagucugaucuacuggggcug

SEQ ID NO: 222337 - RNA, 32 nt, Human
uacugggggaugagagaaaggcauuuuauagc

SEQ ID NO: 222338 - RNA, 32 nt, Human
uacugggggugaggggacaagaaagccaugaa

SEQ ID NO: 222339 - RNA, 32 nt, Human
uacuggggucuggucuuccugcucugugguuu

SEQ ID NO: 222340 - RNA, 32 nt, Human
uacugggugcaguggggugcuuaaacaucaac

SEQ ID NO: 222341 - RNA, 32 nt, Human
uacuggguucaagugauucucuugccucaauc

SEQ ID NO: 222342 - RNA, 32 nt, Human
uacugguauacagcuacauccaggagagaaug

SEQ ID NO: 222343 - RNA, 32 nt, Human
uacuggucagagacuguguucaacaccucuga

SEQ ID NO: 222344 - RNA, 32 nt, Human
uacuggucagcaucaggguccccagccucugg

SEQ ID NO: 222345 - RNA, 31 nt, Human
uacuggucaucuuucugacaucacaguagaa

SEQ ID NO: 222346 - RNA, 32 nt, Human
uacuggucaugccaggcacacacugcugccca

SEQ ID NO: 222347 - RNA, 32 nt, Human
uacugguccagcugcccugggcuccuuuucua

SEQ ID NO: 222348 - RNA, 32 nt, Human
uacuggucuaacuucauucaguaugcuucauu

SEQ ID NO: 222349 - RNA, 22 nt, Human
uacuggucugggaaacaggaug

SEQ ID NO: 222350 - RNA, 32 nt, Human
uacuggugaggaagcugaagcagagaaguuaa

SEQ ID NO: 222351 - RNA, 32 nt, Human
uacuggugcaaucacugaucacugcagccucc

SEQ ID NO: 222352 - RNA, 32 nt, Human
uacuggugcagaugguugacauuuuucccuau

SEQ ID NO: 222353 - RNA, 32 nt, Human
uacuggugcauguuguaacauaucuaugauaa

SEQ ID NO: 222354 - RNA, 32 nt, Human
uacuggugcccaccaccaugcccagcuaauuu

SEQ ID NO: 222355 - RNA, 32 nt, Human
uacuggugugagccaccacggccagcugcuag

SEQ ID NO: 222356 - RNA, 32 nt, Human
uacuggugugagccacugugucuggccagaaa

SEQ ID NO: 222357 - RNA, 32 nt, Human
uacugguuuaggaguucaaaauucagugaaac

SEQ ID NO: 222358 - RNA, 26 nt, Human
uagcuguaggugugugcacaguuuac

SEQ ID NO: 222359 - RNA, 32 nt, Human
uagcuguauuaaaaauagcaaagcaucggacu

SEQ ID NO: 222360 - RNA, 32 nt, Human
uagcugucagaugucacauaauuacuuucgua

SEQ ID NO: 222361 - RNA, 32 nt, Human
uagcugucaggguuccacuuaauuuaaagcug

SEQ ID NO: 222362 - RNA, 32 nt, Human
uagcugucuccucaucucauccuagucuaggu

SEQ ID NO: 222363 - RNA, 32 nt, Human
uagcugucuccucugcagcaugagcagcugua

SEQ ID NO: 222364 - RNA, 23 nt, Human
uagcugucucuucucacccaaau

SEQ ID NO: 222365 - RNA, 18 nt, Human
uagcugucuuuuucauua

SEQ ID NO: 222366 - RNA, 31 nt, Human
uagcugugacuucugcccugccaggccgcac

SEQ ID NO: 222367 - RNA, 32 nt, Human
uagcugugagacauagauuacagccuaugcua

SEQ ID NO: 222368 - RNA, 32 nt, Human
uagcugugagccagcacucagcugugucagau

SEQ ID NO: 222369 - RNA, 32 nt, Human
uagcugugaggguggacacacauauguguauu

SEQ ID NO: 222370 - RNA, 32 nt, Human
uagcugugcaagauaaaagcagccugggucac

SEQ ID NO: 222371 - RNA, 32 nt, Human
uagcugugcagaaagugagagcaggggcaccu

SEQ ID NO: 222372 - RNA, 32 nt, Human
uagcugugcagauguggaucaacauuuguuua

SEQ ID NO: 222373 - RNA, 31 nt, Human
uagcugugccacucugggcaaaugcucuucc

SEQ ID NO: 222374 - RNA, 32 nt, Human
uagcuguggacuucugcugauugccuauagcu

SEQ ID NO: 222375 - RNA, 32 nt, Human
uagcuguggcugagccaagauugcacuuguga

SEQ ID NO: 222376 - RNA, 32 nt, Human
uagcugugguaggaaguggcccucagagucaa

SEQ ID NO: 222377 - RNA, 32 nt, Human
uagcuguguggcugcccuuccugggcccugcc

SEQ ID NO: 222378 - RNA, 32 nt, Human
uagcugugugggcugggaggucugguagggcu

SEQ ID NO: 222379 - RNA, 32 nt, Human
uagcuguuaagguggcguguugcagugcagag

SEQ ID NO: 222380 - RNA, 32 nt, Human
uagcuguuuccagccagggggcugaggcaccu

SEQ ID NO: 222381 - RNA, 32 nt, Human
uagcuguuuccaggguugcaacuugaauuaag

SEQ ID NO: 222382 - RNA, 32 nt, Human
uagcuguuuccucugccuaaacauccuuacac

SEQ ID NO: 222383 - RNA, 23 nt, Human
uagcuuaacagugaccuucagaa

SEQ ID NO: 222384 - RNA, 24 nt, Human
uagcuuaauaacugaccuucugaa

SEQ ID NO: 222385 - RNA, 32 nt, Human
uagcuuacgccuguaaucccagcacuuugaga

SEQ ID NO: 222386 - RNA, 32 nt, Human
uagcuuacgccuguuaucccagcacuuuggga

SEQ ID NO: 222387 - RNA, 32 nt, Human
uagcuuacugcacccucaaccuccugggcuca

SEQ ID NO: 222388 - RNA, 32 nt, Human
uagcuuacuucacaaugugcccaggucagcug

SEQ ID NO: 222389 - RNA, 32 nt, Human
uagcuuaugaaaauaaucgacucugaauauuu

SEQ ID NO: 222390 - RNA, 32 nt, Human
uagcuuauguacaaaacuuuuuaaauuuuaua

SEQ ID NO: 222391 - RNA, 32 nt, Human
uagcuucacagcaacagggagcuaggccauug

SEQ ID NO: 222392 - RNA, 32 nt, Human
uagcuucacaugcuucugcagcugagcuugca

SEQ ID NO: 222393 - RNA, 32 nt, Human
uagcuucacucagcuggacugcauugaaggcg

SEQ ID NO: 222394 - RNA, 32 nt, Human
uagcuucagcuugggcuggagcagucaauaua

SEQ ID NO: 222395 - RNA, 32 nt, Human
uagcuucaggaucagcuggggguauggaauug

SEQ ID NO: 222396 - RNA, 32 nt, Human
uagcuucaucuugagccugagccuuagaaucu

SEQ ID NO: 222397 - RNA, 32 nt, Human
uagcuuccacuggcagccuagcuuugagggua

SEQ ID NO: 222398 - RNA, 32 nt, Human
uagcuuccacuugguggguaaggccugaucau

SEQ ID NO: 222399 - RNA, 32 nt, Human
uagcuuccagcaguccacuaucugccagagga

SEQ ID NO: 222400 - RNA, 19 nt, Human
uagcuuccagggcagggag

SEQ ID NO: 222401 - RNA, 32 nt, Human
uagcuuccucaaauuccugggcucgaaugguc

SEQ ID NO: 222402 - RNA, 32 nt, Human
uagcuuccuccaggagcugcuccuguggguug

SEQ ID NO: 222403 - RNA, 32 nt, Human
uagcuuccugcccucugcuugaggaacacgga

SEQ ID NO: 222404 - RNA, 32 nt, Human
uagcuuccugggccccucacccccagcuggaa

SEQ ID NO: 222405 - RNA, 32 nt, Human
uagcuuccuguggcugucacuccugggcccag

SEQ ID NO: 222406 - RNA, 32 nt, Human
uagcuucggccaaacguucuccucccgcuaag

SEQ ID NO: 222407 - RNA, 32 nt, Human
uagcuucuaguuuuccucaucuguaaacuggg

SEQ ID NO: 222408 - RNA, 32 nt, Human
uagcuucucaaaggccuaaccaagccuuggca

SEQ ID NO: 222409 - RNA, 32 nt, Human
uagcuucucacugacacacccuucccaauugc

SEQ ID NO: 222410 - RNA, 32 nt, Human
uagcuucugaguagaaacaaggaagcuacccu

SEQ ID NO: 222411 - RNA, 20 nt, Human
uagcuucugcucacugggca

SEQ ID NO: 222412 - RNA, 32 nt, Human
uagcuucugcuggccugggguggacccaggac

SEQ ID NO: 222413 - RNA, 32 nt, Human
uagcuucuugggaggcugaggcaggauugcuu

SEQ ID NO: 222414 - RNA, 19 nt, Human
uagcuucuuguaguuuuaa

SEQ ID NO: 222415 - RNA, 32 nt, Human
uagcuugaacccaggagguggagguugcagug

SEQ ID NO: 222416 - RNA, 32 nt, Human
uagcuugaagcacaccacuguccauuuauuug

SEQ ID NO: 222417 - RNA, 32 nt, Human
uagcuugagcccaggaguuugaagcugcagug

SEQ ID NO: 222418 - RNA, 32 nt, Human
uagcuugagcucagagaguucgagacaaaccu

SEQ ID NO: 222419 - RNA, 22 nt, Human
uagcuugagggggcacaugaag

SEQ ID NO: 222420 - RNA, 32 nt, Human
uagcuugauucugccuaccauccaggaaaacu

SEQ ID NO: 222421 - RNA, 32 nt, Human
uagcuugauuucugucauuugagcccagggau

SEQ ID NO: 222422 - RNA, 32 nt, Human
uagcuugcagugagccgagauugcgccacugc

SEQ ID NO: 222423 - RNA, 32 nt, Human
uagcuugcagugagcugagaucacaccacugc

SEQ ID NO: 222424 - RNA, 32 nt, Human
uagcuugcauucuuguugucucugaugcaugc

SEQ ID NO: 222425 - RNA, 32 nt, Human
uagcuugcccugcugugaacuugcacuuggag

SEQ ID NO: 222426 - RNA, 32 nt, Human
uagcuugccugacaguguucuuaaaacugguu

SEQ ID NO: 222427 - RNA, 32 nt, Human
uagcuugcuugaaguugucucacagcucacuu

SEQ ID NO: 222428 - RNA, 32 nt, Human
uagcuuggaagggggagggacgucuaccauua

SEQ ID NO: 222429 - RNA, 32 nt, Human
uagcuuggaagguuuacugcugccucaagucc

SEQ ID NO: 222430 - RNA, 32 nt, Human
uagcuuggacuacaggcccugccaccacgccc

SEQ ID NO: 222431 - RNA, 32 nt, Human
uagcuuggauuacagagguuguuggcuuccau

SEQ ID NO: 222432 - RNA, 32 nt, Human
uagcuuggccaacauagugaaaccccaucucu

SEQ ID NO: 222433 - RNA, 32 nt, Human
uagcuuggccaacauggugaaaccucaucucu

SEQ ID NO: 222434 - RNA, 32 nt, Human
uagcuuguauccagcagaguggcacgugcugg

SEQ ID NO: 222435 - RNA, 32 nt, Human
uagcuugucccaagcuucccugccagccugaa

SEQ ID NO: 222436 - RNA, 31 nt, Human
uagcuuguccccucugggccugccugucuug

SEQ ID NO: 222437 - RNA, 32 nt, Human
uagcuugugagcaggcucaucaguaucuuguu

SEQ ID NO: 222438 - RNA, 32 nt, Human
uagcuuguguguggccugccuccaccauagca

SEQ ID NO: 222439 - RNA, 32 nt, Human
uagcuuuaaaccaucaaccugaugaguuuaaa

SEQ ID NO: 222440 - RNA, 32 nt, Human
uagcuuuaaggagccaagcugaaaaucaugug

SEQ ID NO: 222441 - RNA, 32 nt, Human
uagcuuuauugagauauucacauaucauauaa

SEQ ID NO: 222442 - RNA, 32 nt, Human
uagcuuucauuuggggaaugaaguucugaaau

SEQ ID NO: 222443 - RNA, 32 nt, Human
uagcuuucgguugguuugguguucuguuuauu

SEQ ID NO: 222444 - RNA, 32 nt, Human
uagcuuucucauaaauaugggcaccacuuuac

SEQ ID NO: 222445 - RNA, 32 nt, Human
uagcuuucuccuccuggugucauugcugcagc

SEQ ID NO: 222446 - RNA, 32 nt, Human
uagcuuucuguagagaaggaauuccuaccucu

SEQ ID NO: 222447 - RNA, 18 nt, Human
uagcuuugaauauucaca

SEQ ID NO: 222448 - RNA, 32 nt, Human
uagcuuugacaggaaaaggaaaaagaaugagg

SEQ ID NO: 222449 - RNA, 20 nt, Human
uagcuuugaguuucucugca

SEQ ID NO: 222450 - RNA, 32 nt, Human
uagcuuugaugucugggcaucgauuucccucg

SEQ ID NO: 222451 - RNA, 32 nt, Human
uagcuuugggugcagagccaggagggcguuug

SEQ ID NO: 222452 - RNA, 32 nt, Human
uagcuuuguaugaacugagugugccagaaaua

SEQ ID NO: 222453 - RNA, 32 nt, Human
uagcuuuuccuucuuucucuccagaagaaaca

SEQ ID NO: 222454 - RNA, 32 nt, Human
uagcuuuucuuucuuugagucuuuaaagggca

SEQ ID NO: 222455 - RNA, 32 nt, Human
uagcuuuuuaaaacccccuccuguuucagagc

SEQ ID NO: 222456 - RNA, 32 nt, Human
uaggaaaaauuagcuggccaugguggcgugca

SEQ ID NO: 222457 - RNA, 32 nt, Human
uaggaaaacaaaacccaaagcuuuucaaacuu

SEQ ID NO: 222458 - RNA, 32 nt, Human
uaggaaaacagaagcuuucuucuuccuucuac

SEQ ID NO: 222459 - RNA, 32 nt, Human
uaggaaaagagaggagagaaaagcaacugagu

SEQ ID NO: 222460 - RNA, 32 nt, Human
uaggaaaagcugcucagagaggucauaugggc

SEQ ID NO: 222461 - RNA, 32 nt, Human
uaggaaaagucucuuucuuucucuucuuuccu

SEQ ID NO: 222462 - RNA, 32 nt, Human
uaggaaacagcauaggauuguaugugggaggu

SEQ ID NO: 222463 - RNA, 22 nt, Human
uaggaaacagugaccauuuuca

SEQ ID NO: 222464 - RNA, 32 nt, Human
uaggaaaccauaguauuucauuguuuuaauuu

SEQ ID NO: 222465 - RNA, 32 nt, Human
uaggaaacgaaaggcaccaaagagcacaauga

SEQ ID NO: 222466 - RNA, 32 nt, Human
uaggaaacuggaaagauaaugaguggcccccu

SEQ ID NO: 222467 - RNA, 32 nt, Human
uaggaaacuggaaagauaaugaguggccccgu

SEQ ID NO: 222468 - RNA, 32 nt, Human
uaggaaacuuaaaagaaauauccuuuugacac

SEQ ID NO: 222469 - RNA, 32 nt, Human
uaggaaagaacaguagccuuuuguauuagaaa

SEQ ID NO: 222470 - RNA, 32 nt, Human
uaggaaagacuugcuauugccuaaggcuaugu

SEQ ID NO: 222471 - RNA, 32 nt, Human
uaggaaagagagauguuuuucccaccugucag

SEQ ID NO: 222472 - RNA, 32 nt, Human
uaggaaagaggugaaaaggaaaaagguugucc

SEQ ID NO: 222473 - RNA, 32 nt, Human
uaggaaagauccaaaacacagagcaggagucc

SEQ ID NO: 222474 - RNA, 32 nt, Human
uaggaaagccaggucccugggcccuuguccca

SEQ ID NO: 222475 - RNA, 32 nt, Human
uaggaaagccuggguuggguggagcagaacca

SEQ ID NO: 222476 - RNA, 32 nt, Human
uaggaaagccuguauucuuucaaugaauguca

SEQ ID NO: 222477 - RNA, 32 nt, Human
uaggaaaggaaaggcaccaaagagcacaauga

SEQ ID NO: 222478 - RNA, 32 nt, Human
uaggaaaggaagcagauaccuugcaaagcaac

SEQ ID NO: 222479 - RNA, 32 nt, Human
uaggaaaggguaaguggggcccaggggcaggg

SEQ ID NO: 222480 - RNA, 32 nt, Human
uaggaaauaucauuaauucagcucuucagaga

SEQ ID NO: 222481 - RNA, 32 nt, Human
uaggaaaucccuugagcuuagaccugagggag

SEQ ID NO: 222482 - RNA, 32 nt, Human
uaggaaauggggccgccuggcccagccacuca

SEQ ID NO: 222483 - RNA, 31 nt, Human
uaggaaauuauuuuagggguuggagguggga

SEQ ID NO: 222484 - RNA, 24 nt, Human
uaggaaauugauugcccauucuca

SEQ ID NO: 222485 - RNA, 32 nt, Human
uaggaacaacgcucaaaauccuaaggaaacug

SEQ ID NO: 222486 - RNA, 32 nt, Human
uaggaacaaugccaccauucccacaggagugg

SEQ ID NO: 222487 - RNA, 32 nt, Human
uaggaacacucgggaugacaccccuuaucaca

SEQ ID NO: 222488 - RNA, 32 nt, Human
uaggaacagcuccagucuacagcucccagcau

SEQ ID NO: 222489 - RNA, 32 nt, Human
uaggaacagcuccagucugcagcucccagcga

SEQ ID NO: 222490 - RNA, 32 nt, Human
uaggaacaggggagagugcaccugcuaccagu

SEQ ID NO: 222491 - RNA, 32 nt, Human
uaggaacauacaggaaacugccagcaggaucc

SEQ ID NO: 222492 - RNA, 20 nt, Human
uaggaacccagcucucaggg

SEQ ID NO: 222493 - RNA, 32 nt, Human
uaggaaccggggcagagucagcucugugcuga

SEQ ID NO: 222494 - RNA, 32 nt, Human
uaggaaccuccccucacuccccguuuuucuuc

SEQ ID NO: 222495 - RNA, 32 nt, Human
uaggaacgcagcgccgcggucucuccagccuc

SEQ ID NO: 222496 - RNA, 32 nt, Human
uaggaacucaaggagucagccuagaccccaca

SEQ ID NO: 222497 - RNA, 32 nt, Human
uaggaacucuaaugcuaagagugcuaaaaacu

SEQ ID NO: 222498 - RNA, 22 nt, Human
uaggaacugaacgugucaggga

SEQ ID NO: 222499 - RNA, 22 nt, Human
uaggaacuggugucuucagggg

SEQ ID NO: 222500 - RNA, 32 nt, Human
uaggaacuugacuugcguuagaguguacucug

SEQ ID NO: 222501 - RNA, 32 nt, Human
uaggaagaaagaggagacaaggacagacaaau

SEQ ID NO: 222502 - RNA, 32 nt, Human
uaggaagaaauggaaaucaguguucugaagaa

SEQ ID NO: 222503 - RNA, 32 nt, Human
uaggaagaacaaggaguugagcccuugaaaga

SEQ ID NO: 222504 - RNA, 32 nt, Human
uaggaagaacuggugcccccuccaguccuaau

SEQ ID NO: 222505 - RNA, 32 nt, Human
uaggaagaaguuagagucagggaacuuguaua

SEQ ID NO: 222506 - RNA, 32 nt, Human
uaggaagacuccgucucuacauagaaauuuua

SEQ ID NO: 222507 - RNA, 32 nt, Human
uaggaagaguacuccagagagcagggauaugu

SEQ ID NO: 222508 - RNA, 32 nt, Human
uaggaagauuguuauuauucuucacuugugau

SEQ ID NO: 222509 - RNA, 32 nt, Human
uaggaagcccagccagaggcuguaccaugagc

SEQ ID NO: 222510 - RNA, 32 nt, Human
uaggaagccugggaaccuggucuguuccuucc

SEQ ID NO: 222511 - RNA, 32 nt, Human
uaggaaggaccuuggagaucagcuggaccagc

SEQ ID NO: 222512 - RNA, 32 nt, Human
uaggaaggagaaauguggaaguuugggcagca

SEQ ID NO: 222513 - RNA, 32 nt, Human
uaggaaggccugugaaacaugacacugcaguu

SEQ ID NO: 222514 - RNA, 32 nt, Human
uaggaaggcugaggcaggagaaucgcuugaac

SEQ ID NO: 222515 - RNA, 32 nt, Human
uaggaaggggcagacguagacuuggaaggauu

SEQ ID NO: 222516 - RNA, 32 nt, Human
uaggaaggggcgacaccuuccucccaggaagc

SEQ ID NO: 222517 - RNA, 32 nt, Human
uaggaagggugggaagggagaagcagacauag

SEQ ID NO: 222518 - RNA, 32 nt, Human
uaggaagguggcggccagggaugaggaggccc

SEQ ID NO: 222519 - RNA, 32 nt, Human
uaggaaguacgagccccacagagcaggaagcc

SEQ ID NO: 222520 - RNA, 24 nt, Human
uaggaagugcauucuccauccuca

SEQ ID NO: 222521 - RNA, 22 nt, Human
uaggaagugcucucagccucuc

SEQ ID NO: 222522 - RNA, 32 nt, Human
uaggaaguuagauuugaauauagacaaggugg

SEQ ID NO: 222523 - RNA, 32 nt, Human
uaggaaguugugucagaggagugcagucaucu

SEQ ID NO: 222524 - RNA, 32 nt, Human
uaggaauacaucuugacccuuuuccacucaau

SEQ ID NO: 222525 - RNA, 32 nt, Human
uaggaaucauagugucagugaggucccgugag

SEQ ID NO: 222526 - RNA, 21 nt, Human
uaggaauccguacccuaggga

SEQ ID NO: 222527 - RNA, 21 nt, Human
uaggaauccguaccuuaggga

SEQ ID NO: 222528 - RNA, 32 nt, Human
uaggaaugaacugucugugaauguuuucaagc

SEQ ID NO: 222529 - RNA, 32 nt, Human
uaggaaugacacucagguucacuguggaaaac

SEQ ID NO: 222530 - RNA, 32 nt, Human
uaggaaugacauaccugggcucaggggaagca

SEQ ID NO: 222531 - RNA, 32 nt, Human
uaggaauggaggaggggagacuuucaaugguu

SEQ ID NO: 222532 - RNA, 32 nt, Human
uaggaauggucuggacuaggguucuccuuccc

SEQ ID NO: 222533 - RNA, 22 nt, Human
uaggaauguacguuuccagggg

SEQ ID NO: 222534 - RNA, 32 nt, Human
uaggaaugugaccgaaaacaaguugugcuaau

SEQ ID NO: 222535 - RNA, 32 nt, Human
uaggaaugugauacaugccuguuugcaaaguc

SEQ ID NO: 222536 - RNA, 32 nt, Human
uaggaauuacuugguuuugcacauuaagaggc

SEQ ID NO: 222537 - RNA, 32 nt, Human
uaggaauucauacugcgaaaagcaaugaauaa

SEQ ID NO: 222538 - RNA, 32 nt, Human
uaggaauucucuugauccugggauuaugcuuu

SEQ ID NO: 222539 - RNA, 32 nt, Human
uaggaauugcucacucagggagcucaguuuuu

SEQ ID NO: 222540 - RNA, 32 nt, Human
uaggaauuguuacuuguuacugcagcagcagc

SEQ ID NO: 222541 - RNA, 32 nt, Human
uaggacaaagcucaaaaguaccucugggacua

SEQ ID NO: 222542 - RNA, 32 nt, Human
uaggacaaguuguaccuugcccucucuccagc

SEQ ID NO: 222543 - RNA, 32 nt, Human
uaggacaccagcugccacuucuuuugccucau

SEQ ID NO: 222544 - RNA, 32 nt, Human
uaggacagacuucugaaaacuaaagacagaaa

SEQ ID NO: 222545 - RNA, 18 nt, Human
uaggacagauugcuucca

SEQ ID NO: 222546 - RNA, 22 nt, Human
uaggacagauuuuacguggaga

SEQ ID NO: 222547 - RNA, 32 nt, Human
uaggacagcaggcccaagucugcacaucccag

SEQ ID NO: 222548 - RNA, 32 nt, Human
uaggacagucucugucagacugagaugauggu

SEQ ID NO: 222549 - RNA, 32 nt, Human
uaggacagugccuggcacauaguagguguuca

SEQ ID NO: 222550 - RNA, 32 nt, Human
uaggacauaaaaaucacauauaucauguuuca

SEQ ID NO: 222551 - RNA, 32 nt, Human
uaggacauccuggguggguggagcuggggagg

SEQ ID NO: 222552 - RNA, 32 nt, Human
uaggacaucuguggggacugggagaagcagaa

SEQ ID NO: 222553 - RNA, 32 nt, Human
uaggacauugaguuuccaaguauugagauaag

SEQ ID NO: 222554 - RNA, 32 nt, Human
uaggaccaauuaccuugaaauauuuuaaaauc

SEQ ID NO: 222555 - RNA, 32 nt, Human
uaggaccacagcuugcuggauuuguguuagcu

SEQ ID NO: 222556 - RNA, 32 nt, Human
uaggaccagccaccccuccccauggccuccaa

SEQ ID NO: 222557 - RNA, 22 nt, Human
uaggaccagccuggacaacaug

SEQ ID NO: 222558 - RNA, 32 nt, Human
uaggaccagguccccuugagaggucagagggg

SEQ ID NO: 222559 - RNA, 32 nt, Human
uaggaccgggggaccccagagggaggccuagg

SEQ ID NO: 222560 - RNA, 30 nt, Human
uaggaccgucccacaccuuuuacuugcuca

SEQ ID NO: 222561 - RNA, 32 nt, Human
uaggaccucugauaugaaugugaucugagacu

SEQ ID NO: 222562 - RNA, 32 nt, Human
uaggaccugcaacuucagugcuucugggauaa

SEQ ID NO: 222563 - RNA, 32 nt, Human
uaggaccuucuugauagcucccugcacuuugg

SEQ ID NO: 222564 - RNA, 32 nt, Human
uaggaccuugccggauggggcaacuccgcccu

SEQ ID NO: 222565 - RNA, 32 nt, Human
uaggaccuugcuggacggugguggcugagacc

SEQ ID NO: 222566 - RNA, 32 nt, Human
uaggacgaaaguugccucugugucugagaaag

SEQ ID NO: 222567 - RNA, 32 nt, Human
uaggacgagguuucacccuguuggccaggcug

SEQ ID NO: 222568 - RNA, 32 nt, Human
uaggacgcagccgccucauggggguccagggg

SEQ ID NO: 222569 - RNA, 32 nt, Human
uaggacggucacuguccucucuccuggacugg

SEQ ID NO: 222570 - RNA, 32 nt, Human
uaggacgucugcacggccuccaccuucuguac

SEQ ID NO: 222571 - RNA, 32 nt, Human
uaggacuaaccagccacugcccucucuuaggc

SEQ ID NO: 222572 - RNA, 32 nt, Human
uaggacuacaggcacaugccaccaccaagccc

SEQ ID NO: 222573 - RNA, 32 nt, Human
uaggacuacuccugaagcacauucauugacuc

SEQ ID NO: 222574 - RNA, 32 nt, Human
uaggacuagaagcaggaguaggacaaggagua

SEQ ID NO: 222575 - RNA, 32 nt, Human
uaggacuauaaaccacagcugucccccaggau

SEQ ID NO: 222576 - RNA, 32 nt, Human
uaggacuccaaccucagggacucggguggccu

SEQ ID NO: 222577 - RNA, 32 nt, Human
uaggacucugcacuuccccagaaggaagaauu

SEQ ID NO: 222578 - RNA, 32 nt, Human
uaggacugagcuagaagcugaagaggauaaga

SEQ ID NO: 222579 - RNA, 32 nt, Human
uaggacugauaccauggaauauuucaucucac

SEQ ID NO: 222580 - RNA, 32 nt, Human
uaggacuggagagagauuggaugucagaguga

SEQ ID NO: 222581 - RNA, 32 nt, Human
uaggacugggcuggaugagagagcacagcugu

SEQ ID NO: 222582 - RNA, 32 nt, Human
uaggacuguccggcaguugccugcuuuuggcu

SEQ ID NO: 222583 - RNA, 32 nt, Human
uaggacugugggaggcuuaaguugcagaugcu

SEQ ID NO: 222584 - RNA, 32 nt, Human
uaggacugugggcuuuuagcagcccacaggug

SEQ ID NO: 222585 - RNA, 32 nt, Human
uaggacuuugggaggcugaggcaggcagauug

SEQ ID NO: 222586 - RNA, 32 nt, Human
uaggagaaaagucagcccugccccuggagcuu

SEQ ID NO: 222587 - RNA, 32 nt, Human
uaggagaaacaggguuucaccauguuggccag

SEQ ID NO: 222588 - RNA, 32 nt, Human
uaggagaacuguaggccagggcugagugcacc

SEQ ID NO: 222589 - RNA, 18 nt, Human
uaggagaagagagaguuu

SEQ ID NO: 222590 - RNA, 32 nt, Human
uaggagaagaggaggaggaggagcgggguccc

SEQ ID NO: 222591 - RNA, 19 nt, Human
uaggagaagccaggaauuu

SEQ ID NO: 222592 - RNA, 32 nt, Human
uaggagaaggaggaggaggaggucggaaagug

SEQ ID NO: 222593 - RNA, 32 nt, Human
uaggagaauaagagucuggagacugggagccu

SEQ ID NO: 222594 - RNA, 32 nt, Human
uaggagaauagaagaacugguagccacagugg

SEQ ID NO: 222595 - RNA, 32 nt, Human
uaggagaaugcauuccucugcagacugcuaga

SEQ ID NO: 222596 - RNA, 32 nt, Human
uaggagacaaaggagagugauugauuuucuuc

SEQ ID NO: 222597 - RNA, 32 nt, Human
uaggagacaaaggaggaauuuacuuucuucac

SEQ ID NO: 222598 - RNA, 32 nt, Human
uaggagacaaugaggaaggaggauggauucug

SEQ ID NO: 222599 - RNA, 32 nt, Human
uaggagacaguuacuaugauucccucuauugu

SEQ ID NO: 222600 - RNA, 32 nt, Human
uaggagacaucuuccgagaaacaggcgauaau

SEQ ID NO: 222601 - RNA, 19 nt, Human
uaggagacauuagugaauu

SEQ ID NO: 222602 - RNA, 20 nt, Human
uaggagaccaaguuagaauu

SEQ ID NO: 222603 - RNA, 19 nt, Human
uaggagaccauuugauuuu

SEQ ID NO: 222604 - RNA, 18 nt, Human
uaggagacgucugaauuu

SEQ ID NO: 222605 - RNA, 21 nt, Human
uaggagacugugaaggaauuu

SEQ ID NO: 222606 - RNA, 32 nt, Human
uaggagacuucuaagauuggagcugcagaaga

SEQ ID NO: 222607 - RNA, 32 nt, Human
uaggagacuucuacaaguuuguuuccuguuuc

SEQ ID NO: 222608 - RNA, 32 nt, Human
uaggagagaccgguuuucaccacguuggccag

SEQ ID NO: 222609 - RNA, 32 nt, Human
uaggagagacgggguuucaccguguuagccag

SEQ ID NO: 222610 - RNA, 32 nt, Human
uaggagagacgggguuucaccguguuagucag

SEQ ID NO: 222611 - RNA, 19 nt, Human
uaggagagacugagaauuu

SEQ ID NO: 222612 - RNA, 32 nt, Human
uaggagagaugggguuucgccauguuggccag

SEQ ID NO: 222613 - RNA, 32 nt, Human
uaggagagcaagcacaagacaccagggagcca

SEQ ID NO: 222614 - RNA, 17 nt, Human
uaggagaggaaggauuu

SEQ ID NO: 222615 - RNA, 32 nt, Human
uaggagaggguucugagaggaggcagcaaucc

SEQ ID NO: 222616 - RNA, 32 nt, Human
uaggagagugccauuuacagcuuccgccaggg

SEQ ID NO: 222617 - RNA, 32 nt, Human
uaggagagugugugugggcagcuguguguaag

SEQ ID NO: 222618 - RNA, 32 nt, Human
uaggagauauuugcuuugcaauuacauguuac

SEQ ID NO: 222619 - RNA, 23 nt, Human
uaggagaucauggugucacagug

SEQ ID NO: 222620 - RNA, 32 nt, Human
uaggagaucugucccuuuuagagacaccuuac

SEQ ID NO: 222621 - RNA, 32 nt, Human
uaggagauggucuugcucugucacucaggcug

SEQ ID NO: 222622 - RNA, 32 nt, Human
uaggagauguacuggaauugcucauucuguga

SEQ ID NO: 222623 - RNA, 32 nt, Human
uaggagauucacuaagcaagguuggugagacg

SEQ ID NO: 222624 - RNA, 32 nt, Human
uaggagcaaagcaaugcuccaagcgaggccuc

SEQ ID NO: 222625 - RNA, 32 nt, Human
uaggagcaaaggaaaggggaaaaagaaaaacg

SEQ ID NO: 222626 - RNA, 19 nt, Human
uaggagcagacaggaaucc

SEQ ID NO: 222627 - RNA, 32 nt, Human
uaggagcaguugaaccugggaacaaaccucac

SEQ ID NO: 222628 - RNA, 32 nt, Human
uaggagcaucaucauggggucuagugccacag

SEQ ID NO: 222629 - RNA, 32 nt, Human
uaggagcccagccuugcgccgcauucgcacug

SEQ ID NO: 222630 - RNA, 27 nt, Human
uaggagcccgccccacccucccagggg

SEQ ID NO: 222631 - RNA, 32 nt, Human
uaggagccuaaagaacccuccuggccuccagc

SEQ ID NO: 222632 - RNA, 32 nt, Human
uaggagccuccagggaguucucuuugaggcug

SEQ ID NO: 222633 - RNA, 32 nt, Human
uaggagccuccgcuucccaauacagccguguc

SEQ ID NO: 222634 - RNA, 32 nt, Human
uaggagccugggaaggaagagggaacgggucc

SEQ ID NO: 222635 - RNA, 32 nt, Human
uaggagcgaggugcacauugcaccuuacaucc

SEQ ID NO: 222636 - RNA, 32 nt, Human
uaggagcgcuuggccagcugggaaggcagcgc

SEQ ID NO: 222637 - RNA, 32 nt, Human
uaggagcuagggccuggaaugggagccucaag

SEQ ID NO: 222638 - RNA, 32 nt, Human
uaggagcuccaccauuccuguuacuuucauuu

SEQ ID NO: 222639 - RNA, 32 nt, Human
uaggagcucucauuaucucggucucugguucc

SEQ ID NO: 222640 - RNA, 32 nt, Human
uaggagcugaaauccaugcugagcuguaccag

SEQ ID NO: 222641 - RNA, 20 nt, Human
uaggagcugcguguguggca

SEQ ID NO: 222642 - RNA, 32 nt, Human
uaggagcuguauaaagaagcccaggggcucuu

SEQ ID NO: 222643 - RNA, 32 nt, Human
uaggagcuuagcucaaaguucagcuaaccuuu

SEQ ID NO: 222644 - RNA, 32 nt, Human
uaggagcuuuagaagucuuuauguucuuccug

SEQ ID NO: 222645 - RNA, 24 nt, Human
uaggaggaauacuguuggcguuca

SEQ ID NO: 222646 - RNA, 21 nt, Human
uaggaggaauagcucacaaua

SEQ ID NO: 222647 - RNA, 32 nt, Human
uaggaggacaggguccccucucucacgaagca

SEQ ID NO: 222648 - RNA, 32 nt, Human
uaggaggagagggaggaggguaggaagacagu

SEQ ID NO: 222649 - RNA, 32 nt, Human
uaggaggagauggaguuucacugugucagcca

SEQ ID NO: 222650 - RNA, 32 nt, Human
uaggaggaggcagaggggugccuggaguuucu

SEQ ID NO: 222651 - RNA, 32 nt, Human
uaggaggaguuagagggaaguugaaagccaac

SEQ ID NO: 222652 - RNA, 32 nt, Human
uaggaggaucgucuugagcccaggaguucaag

SEQ ID NO: 222653 - RNA, 32 nt, Human
uaggaggcagcgacugagaaggucagucccau

SEQ ID NO: 222654 - RNA, 32 nt, Human
uaggaggccaucuuuggacaaugguguauggu

SEQ ID NO: 222655 - RNA, 32 nt, Human
uaggaggccccugcuugugcucagggaaggcc

SEQ ID NO: 222656 - RNA, 32 nt, Human
uaggaggcgacagaagaaaaagacacaagacc

SEQ ID NO: 222657 - RNA, 32 nt, Human
uaggaggcggagguggggguggggguaguuua

SEQ ID NO: 222658 - RNA, 32 nt, Human
uaggaggcucacugccuccuguuccagcuccu

SEQ ID NO: 222659 - RNA, 32 nt, Human
uaggaggcucugggcggaggugcagugacccc

SEQ ID NO: 222660 - RNA, 32 nt, Human
uaggaggcugggccggagggaggcggaggaac

SEQ ID NO: 222661 - RNA, 32 nt, Human
uaggagggagagagggaaggggcugaggaaau

SEQ ID NO: 222662 - RNA, 32 nt, Human
uaggagggaggcaggagcuuucuggauagagg

SEQ ID NO: 222663 - RNA, 32 nt, Human
uaggagggcagagauggcacucagguagcuug

SEQ ID NO: 222664 - RNA, 32 nt, Human
uaggaggggagcacuggcagggagagacauuc

SEQ ID NO: 222665 - RNA, 32 nt, Human
uaggagggggaugaagauuacacaugcaguua

SEQ ID NO: 222666 - RNA, 32 nt, Human
uaggaggguauucugggccuucugcccaggca

SEQ ID NO: 222667 - RNA, 32 nt, Human
uaggagggucucaaacuccugaccucaggcga

SEQ ID NO: 222668 - RNA, 30 nt, Human
uaggaggguguguacagggcaaaaugccaa

SEQ ID NO: 222669 - RNA, 31 nt, Human
uaggagguacucaaggguuugggggcaaaac

SEQ ID NO: 222670 - RNA, 32 nt, Human
uaggaggugggacugagcucugaugaaugaga

SEQ ID NO: 222671 - RNA, 32 nt, Human
uaggagguucccggaagggacacuaggaggac

SEQ ID NO: 222672 - RNA, 32 nt, Human
uaggaguaaggucguguugucuuccucaacua

SEQ ID NO: 222673 - RNA, 32 nt, Human
uaggaguacaagugccugggguguaaugagcu

SEQ ID NO: 222674 - RNA, 32 nt, Human
uaggaguagagcugugaaugaggccaaccaga

SEQ ID NO: 222675 - RNA, 32 nt, Human
uaggaguauggagugggcugggccucccuuug

SEQ ID NO: 222676 - RNA, 32 nt, Human
uaggagucagaugaccugaacucagaucuccc

SEQ ID NO: 222677 - RNA, 32 nt, Human
uaggagucagggagucagggaggaggcaagga

SEQ ID NO: 222678 - RNA, 32 nt, Human
uaggagucagguguccguuugcugcuaucagu

SEQ ID NO: 222679 - RNA, 32 nt, Human
uaggaguccacucaacccuggaggucuuugcu

SEQ ID NO: 222680 - RNA, 32 nt, Human
uaggagucucagcugcuuacauccagguccag

SEQ ID NO: 222681 - RNA, 32 nt, Human
uaggagucuuggucccugcacacagcgagcuu

SEQ ID NO: 222682 - RNA, 32 nt, Human
uaggagugagccaccgcgccgggccagacucu

SEQ ID NO: 222683 - RNA, 32 nt, Human
uaggaguuagaggaagagagugacucaaauca

SEQ ID NO: 222684 - RNA, 32 nt, Human
uaggaguuguggguugguaagcucccagguac

SEQ ID NO: 222685 - RNA, 32 nt, Human
uaggaguuguuugagcuauucuggagauuauu

SEQ ID NO: 222686 - RNA, 32 nt, Human
uaggauaaaaauaucugcaggguccuuuccau

SEQ ID NO: 222687 - RNA, 32 nt, Human
uaggauaaauguugucuuacuccucugcuaug

SEQ ID NO: 222688 - RNA, 32 nt, Human
uaggauacgggggugguauggaagggagcguu

SEQ ID NO: 222689 - RNA, 32 nt, Human
uaggauacucaucaaacugggauuauucuuau

SEQ ID NO: 222690 - RNA, 32 nt, Human
uaggauaugaggguuaggccuuugccacauua

SEQ ID NO: 222691 - RNA, 32 nt, Human
uaggauauguagaugaguuuuugcuacagagc

SEQ ID NO: 222692 - RNA, 32 nt, Human
uaggaucaauaugaccacacuccagccaagga

SEQ ID NO: 222693 - RNA, 32 nt, Human
uaggaucacaccacugcacuccagccuggaca

SEQ ID NO: 222694 - RNA, 32 nt, Human
uaggaucacuugaucccaggaggcggagguug

SEQ ID NO: 222695 - RNA, 32 nt, Human
uaggaucaggaguuagcuuaagaaaaaggaaa

SEQ ID NO: 222696 - RNA, 32 nt, Human
uaggaucaggccacugcacuccagccugggua

SEQ ID NO: 222697 - RNA, 32 nt, Human
uaggauccagcugugucaaccuuuauuuagca

SEQ ID NO: 222698 - RNA, 32 nt, Human
uaggaucccaaaauucaucucuaaugugguuu

SEQ ID NO: 222699 - RNA, 32 nt, Human
uaggauccucaagcaucucuaccguaagucca

SEQ ID NO: 222700 - RNA, 32 nt, Human
uaggauccuccuuauggagaacuauuuauuau

SEQ ID NO: 222701 - RNA, 32 nt, Human
uaggaucgugccacugcacuccaaccugggug

SEQ ID NO: 222702 - RNA, 32 nt, Human
uaggaucugcauuuucagguuccgagccugac

SEQ ID NO: 222703 - RNA, 32 nt, Human
uaggaucuguaacucugugggcugggucaaug

SEQ ID NO: 222704 - RNA, 32 nt, Human
uaggaucugucugcuaauggugcuuaaauucu

SEQ ID NO: 222705 - RNA, 32 nt, Human
uaggaugacaacacuuugacuguggaggugcu

SEQ ID NO: 222706 - RNA, 32 nt, Human
uaggaugacugauuccagcccaguggccuggc

SEQ ID NO: 222707 - RNA, 32 nt, Human
uaggaugagcuacuaaaugacaaauggguggg

SEQ ID NO: 222708 - RNA, 32 nt, Human
uaggaugauggggcuugaugcaguagggaaga

SEQ ID NO: 222709 - RNA, 32 nt, Human
uaggaugauuuacaagacuggcuuuuuguucu

SEQ ID NO: 222710 - RNA, 32 nt, Human
uaggaugcacuuauaggaucugaaaagcucac

SEQ ID NO: 222711 - RNA, 32 nt, Human
uaggaugcauuauaaacugaagaggcuuuuaa

SEQ ID NO: 222712 - RNA, 32 nt, Human
uaggaugcggcuuucucugccucugggcagcc

SEQ ID NO: 222713 - RNA, 32 nt, Human
uaggauggaacucggugucucuuaauucauuu

SEQ ID NO: 222714 - RNA, 32 nt, Human
uaggauggaaggcacgcaguggcauggccugg

SEQ ID NO: 222715 - RNA, 32 nt, Human
uaggauggagugaaacccaagaggaagugcca

SEQ ID NO: 222716 - RNA, 32 nt, Human
uaggauggcaguguccuucauccugcccccag

SEQ ID NO: 222717 - RNA, 29 nt, Human
uaggauggcuguaguaccucugcuguugu

SEQ ID NO: 222718 - RNA, 32 nt, Human
uaggaugggcaggaacccggcuagcgagaaac

SEQ ID NO: 222719 - RNA, 29 nt, Human
uaggauggucaccagcccaagccaccacc

SEQ ID NO: 222720 - RNA, 32 nt, Human
uaggaugguggaauauugguguuaccagggaa

SEQ ID NO: 222721 - RNA, 32 nt, Human
uaggaugguucagaacccagagaggacccugg

SEQ ID NO: 222722 - RNA, 32 nt, Human
uaggaugucauuguccccaaaaugaaaauauu

SEQ ID NO: 222723 - RNA, 32 nt, Human
uaggaugugaggugagcaugagcuugagcuga

SEQ ID NO: 222724 - RNA, 32 nt, Human
uaggaugugcccaccugcauuggugaagguca

SEQ ID NO: 222725 - RNA, 24 nt, Human
uaggauguguauuuaaugcauuua

SEQ ID NO: 222726 - RNA, 32 nt, Human
uaggauuacaccauugacuuagggcuuccuca

SEQ ID NO: 222727 - RNA, 32 nt, Human
uaggauuacaugcuccuugauuacaguggggu

SEQ ID NO: 222728 - RNA, 32 nt, Human
uaggauuacgcugaggcccagccugggggaga

SEQ ID NO: 222729 - RNA, 32 nt, Human
uaggauuaucacacccuccaucuuuauucuuu

SEQ ID NO: 222730 - RNA, 32 nt, Human
uaggauucaaacuugagggcaaauuguggagc

SEQ ID NO: 222731 - RNA, 32 nt, Human
uaggauucaagaaauggaaggaugauucuugu

SEQ ID NO: 222732 - RNA, 32 nt, Human
uaggauucauauagcacccacagagcuccaag

SEQ ID NO: 222733 - RNA, 32 nt, Human
uaggauucuccucucucuaggugcugagcccu

SEQ ID NO: 222734 - RNA, 32 nt, Human
uaggauucugguuccagccaggguugaggaaa

SEQ ID NO: 222735 - RNA, 32 nt, Human
uaggauugaguguguugggcuuuggguauaaa

SEQ ID NO: 222736 - RNA, 32 nt, Human
uaggauugaucaggaaauaguguuuguaaucu

SEQ ID NO: 222737 - RNA, 32 nt, Human
uaggauugcagagaagaugcaagagcacuuug

SEQ ID NO: 222738 - RNA, 32 nt, Human
uaggauugcagcaacacguucggcugcccaaa

SEQ ID NO: 222739 - RNA, 32 nt, Human
uaggauugcuguggccuagacuucugaguaau

SEQ ID NO: 222740 - RNA, 32 nt, Human
uaggauuuaugcuaccaguugcagagaaaaug

SEQ ID NO: 222741 - RNA, 32 nt, Human
uaggauuugcuuguaacaguuauuucaggaua

SEQ ID NO: 222742 - RNA, 32 nt, Human
uaggauuugcuuguuuuucuuccacuucagaa

SEQ ID NO: 222743 - RNA, 32 nt, Human
uaggauuugguuucagcauuaguaccuacaua

SEQ ID NO: 222744 - RNA, 23 nt, Human
uaggauuuuuaguauuuauuuua

SEQ ID NO: 222745 - RNA, 32 nt, Human
uaggcaaaaacaggagguaaagaaauagccaa

SEQ ID NO: 222746 - RNA, 32 nt, Human
uaggcaaaaagaaccaggccagauuggugugc

SEQ ID NO: 222747 - RNA, 32 nt, Human
uaggcaaauccauagacacagaaugcagaucc

SEQ ID NO: 222748 - RNA, 32 nt, Human
uaggcaaauguauucaugaaugguagcucaaa

SEQ ID NO: 222749 - RNA, 32 nt, Human
uaggcaacacggugaaaccccaucucuacaaa

SEQ ID NO: 222750 - RNA, 32 nt, Human
uaggcaacauagcaaggucccaucucuaaaaa

SEQ ID NO: 222751 - RNA, 32 nt, Human
uaggcaacauggagaaaccccgucucuaucag

SEQ ID NO: 222752 - RNA, 32 nt, Human
uaggcaacauggcaaaaccccaucucgacaaa

SEQ ID NO: 222753 - RNA, 32 nt, Human
uaggcaacauggcaaaaccccgucucuacaaa

SEQ ID NO: 222754 - RNA, 25 nt, Human
uaggcaacauggcagaugugacuca

SEQ ID NO: 222755 - RNA, 29 nt, Human
uaggcaacauggcgaaacccugucucuac

SEQ ID NO: 222756 - RNA, 32 nt, Human
uaggcaacauugcaagacuccaucucuacaaa

SEQ ID NO: 222757 - RNA, 32 nt, Human
uaggcaacuccaaacaugccuccaggguuaau

SEQ ID NO: 222758 - RNA, 32 nt, Human
uaggcaacuccaaacaugccuccaggguuggu

SEQ ID NO: 222759 - RNA, 31 nt, Human
uaggcaagaugaccuguucaucaggaauguu

SEQ ID NO: 222760 - RNA, 32 nt, Human
uaggcaagauggcaacaucccgucucuacaaa

SEQ ID NO: 222761 - RNA, 32 nt, Human
uaggcaagccccagguugcagacauggugaag

SEQ ID NO: 222762 - RNA, 32 nt, Human
uaggcaaggacucaugauaccaagagugugau

SEQ ID NO: 222763 - RNA, 32 nt, Human
uaggcaaguuuucccugaaguuauguguaugu

SEQ ID NO: 222764 - RNA, 32 nt, Human
uaggcaaugggaaaacaguaagaggcagacca

SEQ ID NO: 222765 - RNA, 32 nt, Human
uaggcacacagauccccuggaaacccaccucu

SEQ ID NO: 222766 - RNA, 32 nt, Human
uaggcacaccuuuacugcauuagcagccuuug

SEQ ID NO: 222767 - RNA, 20 nt, Human
uaggcacaucauaagaaucc

SEQ ID NO: 222768 - RNA, 32 nt, Human
uaggcaccagagagacaagauacgagugacau

SEQ ID NO: 222769 - RNA, 32 nt, Human
uaggcaccaugucggacagugaucuaggugag

SEQ ID NO: 222770 - RNA, 31 nt, Human
uaggcacccaauaaauauuuguugaauuuag

SEQ ID NO: 222771 - RNA, 32 nt, Human
uaggcaccuguaaucccagcuacucgggaggc

SEQ ID NO: 222772 - RNA, 32 nt, Human
uaggcacgaggcagucugggcacuuuucugca

SEQ ID NO: 222773 - RNA, 18 nt, Human
uaggcacgaucucagcuc

SEQ ID NO: 222774 - RNA, 32 nt, Human
uaggcacguuuguccuggugcaguggggcagc

SEQ ID NO: 222775 - RNA, 31 nt, Human
uaggcacucaauaaauacuuguuuguugaaa

SEQ ID NO: 222776 - RNA, 31 nt, Human
uaggcacucaauaaauauugaaugaguaaau

SEQ ID NO: 222777 - RNA, 31 nt, Human
uaggcacuccauaaauaucuguugaaccuuc

SEQ ID NO: 222778 - RNA, 32 nt, Human
uaggcacucucucuaccccaccucucaguacu

SEQ ID NO: 222779 - RNA, 32 nt, Human
uaggcacuggggacccugcacagucuggccau

SEQ ID NO: 222780 - RNA, 32 nt, Human
uaggcacuguuuuaggcaauaggaaucauaau

SEQ ID NO: 222781 - RNA, 32 nt, Human
uaggcagaaagaggaggacaaagaggaggaaa

SEQ ID NO: 222782 - RNA, 32 nt, Human
uaggcagaaauggccagucaaacacauagcag

SEQ ID NO: 222783 - RNA, 31 nt, Human
uaggcagaacaaugacucauuugcaagccgg

SEQ ID NO: 222784 - RNA, 32 nt, Human
uaggcagaacacaggaaggaagagaggugcag

SEQ ID NO: 222785 - RNA, 32 nt, Human
uaggcagaagagacuugccuugucucagauga

SEQ ID NO: 222786 - RNA, 32 nt, Human
uaggcagagagcgcacccuacucuuuccguga

SEQ ID NO: 222787 - RNA, 32 nt, Human
uaggcagcagagagagaggacagagggguaag

SEQ ID NO: 222788 - RNA, 32 nt, Human
uaggcagcaguguaucugcuuccugucugggg

SEQ ID NO: 222789 - RNA, 32 nt, Human
uaggcagccagccugccgccauuggaccuccc

SEQ ID NO: 222790 - RNA, 32 nt, Human
uaggcagccugcagggaauaacauacuggccg

SEQ ID NO: 222791 - RNA, 32 nt, Human
uaggcagcugccgagagaaguacgccucucug

SEQ ID NO: 222792 - RNA, 32 nt, Human
uaggcagcuuggcaagaccccaucucuacaaa

SEQ ID NO: 222793 - RNA, 32 nt, Human
uaggcagcuuugacaggugcuguuuucaauuc

SEQ ID NO: 222794 - RNA, 32 nt, Human
uaggcaggaccccagagagggcaggcagccac

SEQ ID NO: 222795 - RNA, 32 nt, Human
uaggcaggacgugagagaagggagaugggaga

SEQ ID NO: 222796 - RNA, 32 nt, Human
uaggcaggacugugauaacagugcaagcucug

SEQ ID NO: 222797 - RNA, 32 nt, Human
uaggcaggaggaagaugcggaggaggguggca

SEQ ID NO: 222798 - RNA, 32 nt, Human
uaggcaggauaaaucauaucuuaccucaaaaa

SEQ ID NO: 222799 - RNA, 32 nt, Human
uaggcaggcuacugugcuggagcaucccccag

SEQ ID NO: 222800 - RNA, 32 nt, Human
uaggcagggcuggcacuauuuccuuggccagg

SEQ ID NO: 222801 - RNA, 32 nt, Human
uaggcaggguaaacaggaaagcauuaaaaguu

SEQ ID NO: 222802 - RNA, 32 nt, Human
uaggcaggugugagggacaguggcuaagaauu

SEQ ID NO: 222803 - RNA, 32 nt, Human
uaggcaguaaugaagacaguuggggaaaggag

SEQ ID NO: 222804 - RNA, 32 nt, Human
uaggcagucaucuuuguaaaccuccacuggug

SEQ ID NO: 222805 - RNA, 32 nt, Human
uaggcagucugcaucuucagauuucagagauu

SEQ ID NO: 222806 - RNA, 32 nt, Human
uaggcagucuugacagucaaccaguguaauca

SEQ ID NO: 222807 - RNA, 32 nt, Human
uaggcagugccauuugaccacaccgaucaugu

SEQ ID NO: 222808 - RNA, 32 nt, Human
uaggcagugcuugaaugagaaaaggcuccugg

SEQ ID NO: 222809 - RNA, 32 nt, Human
uaggcagugguggcugccaucccucggggccc

SEQ ID NO: 222810 - RNA, 32 nt, Human
uaggcaguguagagaaauggcguuaauggcuc

SEQ ID NO: 222811 - RNA, 32 nt, Human
uaggcaguucuuacagucaucuugcugguggu

SEQ ID NO: 222812 - RNA, 32 nt, Human
uaggcauaaaguuauccugaaaaggacaagag

SEQ ID NO: 222813 - RNA, 32 nt, Human
uaggcauagcuguuuuucucccaugaguaugc

SEQ ID NO: 222814 - RNA, 32 nt, Human
uaggcauagguuugcaauccagaucugauuuu

SEQ ID NO: 222815 - RNA, 32 nt, Human
uaggcauccccaggauagggcagucggggaag

SEQ ID NO: 222816 - RNA, 32 nt, Human
uaggcaucccuaaaugaucaccagcccucgcc

SEQ ID NO: 222817 - RNA, 32 nt, Human
uaggcaucccuggccacugccucccagucuug

SEQ ID NO: 222818 - RNA, 32 nt, Human
uaggcauccuguaaauaauuccaaggggaaaa

SEQ ID NO: 222819 - RNA, 32 nt, Human
uaggcaucuccucuccccaacccuuccacacg

SEQ ID NO: 222820 - RNA, 32 nt, Human
uaggcaucuggaagacuucuuccuagccugga

SEQ ID NO: 222821 - RNA, 32 nt, Human
uaggcaugaccugcuggagaaacugcccuagc

SEQ ID NO: 222822 - RNA, 32 nt, Human
uaggcaugagccaccacacccagccuccucuu

SEQ ID NO: 222823 - RNA, 32 nt, Human
uaggcaugagccaccacaccuggcuacuuuau

SEQ ID NO: 222824 - RNA, 32 nt, Human
uaggcaugagccaccacaucuggccaauaguu

SEQ ID NO: 222825 - RNA, 32 nt, Human
uaggcaugagccaccacgacuggccagaggac

SEQ ID NO: 222826 - RNA, 32 nt, Human
uaggcaugagccaccacgcccagccuguuauu

SEQ ID NO: 222827 - RNA, 32 nt, Human
uaggcaugagccaccacgccuggccagaugca

SEQ ID NO: 222828 - RNA, 32 nt, Human
uaggcaugagccaccaugcccagccaggaaaa

SEQ ID NO: 222829 - RNA, 32 nt, Human
uaggcaugagccaccgugcccagccuacuuuc

SEQ ID NO: 222830 - RNA, 32 nt, Human
uaggcaugagccaccgugcccggcuauuuuca

SEQ ID NO: 222831 - RNA, 32 nt, Human
uaggcaugagccaccgugccuggcugaugcug

SEQ ID NO: 222832 - RNA, 32 nt, Human
uaggcaugagccacugcacccggccgguggaa

SEQ ID NO: 222833 - RNA, 32 nt, Human
uaggcaugagccacugcaccuggccuguguau

SEQ ID NO: 222834 - RNA, 32 nt, Human
uaggcaugagccacugcgccuggccaacaauc

SEQ ID NO: 222835 - RNA, 32 nt, Human
uaggcaugagccacugggccccgccaggcuuu

SEQ ID NO: 222836 - RNA, 32 nt, Human
uaggcaugagccacugugccuggcccucucau

SEQ ID NO: 222837 - RNA, 32 nt, Human
uaggcaugaguguguaugugcuaacauguagg

SEQ ID NO: 222838 - RNA, 18 nt, Human
uaggcaugcaccaccacg

SEQ ID NO: 222839 - RNA, 18 nt, Human
uaggcaugcaccaccaug

SEQ ID NO: 222840 - RNA, 21 nt, Human
uaggcaugcauauaugccaga

SEQ ID NO: 222841 - RNA, 32 nt, Human
uaggcauggaagagagccaggcagccccgaaa

SEQ ID NO: 222842 - RNA, 31 nt, Human
uaggcauggguggaaagugcucagugaagua

SEQ ID NO: 222843 - RNA, 32 nt, Human
uaggcaugugagaaaaucagccuagcaguuua

SEQ ID NO: 222844 - RNA, 32 nt, Human
uaggcauuagcacaucccagcacucuaauuca

SEQ ID NO: 222845 - RNA, 31 nt, Human
uaggcauucaauaaauguugaaauaaugaca

SEQ ID NO: 222846 - RNA, 32 nt, Human
uaggcauucaauacuuguugaauaaauaaacu

SEQ ID NO: 222847 - RNA, 32 nt, Human
uaggcauuucuucccuuccuuccuuccuucau

SEQ ID NO: 222848 - RNA, 32 nt, Human
uaggccaacguggugaaaccccgucacuacua

SEQ ID NO: 222849 - RNA, 32 nt, Human
uaggccaagauggcuggaucaccugaggucag

SEQ ID NO: 222850 - RNA, 32 nt, Human
uaggccaagguguccuacagaaaaaccuuggg

SEQ ID NO: 222851 - RNA, 31 nt, Human
uaggccaaguaguccaucauaguaaucuuuc

SEQ ID NO: 222852 - RNA, 32 nt, Human
uaggccacagcaccacacacacugcaaaccag

SEQ ID NO: 222853 - RNA, 32 nt, Human
uaggccacgaauuugagaccagccugguaaaa

SEQ ID NO: 222854 - RNA, 32 nt, Human
uaggccacucuccccucuaaaucucuagugcu

SEQ ID NO: 222855 - RNA, 32 nt, Human
uaggccacugcacaccucuaugccuugcagug

SEQ ID NO: 222856 - RNA, 32 nt, Human
uaggccagaaggacuccuaccugggugaugag

SEQ ID NO: 222857 - RNA, 32 nt, Human
uaggccagacaggcccaaggauggaugaaugg

SEQ ID NO: 222858 - RNA, 32 nt, Human
uaggccagagcagcacagcaucacacuccacg

SEQ ID NO: 222859 - RNA, 32 nt, Human
uaggccagaggaagaagagcgcaggccugggc

SEQ ID NO: 222860 - RNA, 32 nt, Human
uaggccagauggugaaaccccaucucuacaaa

SEQ ID NO: 222861 - RNA, 32 nt, Human
uaggccagcuggaaagaggacauggacaggcc

SEQ ID NO: 222862 - RNA, 32 nt, Human
uaggccaggccuggggcuuggugucugacugu

SEQ ID NO: 222863 - RNA, 17 nt, Human
uaggccaggcgcagugg

SEQ ID NO: 222864 - RNA, 32 nt, Human
uaggccagggacugggcuuucuccccacuaag

SEQ ID NO: 222865 - RNA, 32 nt, Human
uaggccaucaucauccuuaucccacacccauu

SEQ ID NO: 222866 - RNA, 32 nt, Human
uaggccaucugcaagcugaggaagaaagaagc

SEQ ID NO: 222867 - RNA, 32 nt, Human
uaggccauugcacuccagccucagcaacaaga

SEQ ID NO: 222868 - RNA, 32 nt, Human
uaggccauuucuguaguuagugaacagagcag

SEQ ID NO: 222869 - RNA, 32 nt, Human
uaggccauuuucagaucagcagucacccaucg

SEQ ID NO: 222870 - RNA, 32 nt, Human
uaggcccacgcugccccuggccuguguuaggc

SEQ ID NO: 222871 - RNA, 32 nt, Human
uaggcccaugggcaccuggccuccaggagucg

SEQ ID NO: 222872 - RNA, 32 nt, Human
uaggcccaugguguuccugaaugugauugaca

SEQ ID NO: 222873 - RNA, 31 nt, Human
uaggccccaccucuggggguuggagggaccc

SEQ ID NO: 222874 - RNA, 32 nt, Human
uaggccccucaggagcuuugcagagaggagga

SEQ ID NO: 222875 - RNA, 32 nt, Human
uaggcccgacucagcauccugucccagcuuca

SEQ ID NO: 222876 - RNA, 32 nt, Human
uaggcccggggugggaccagaggucauaggug

SEQ ID NO: 222877 - RNA, 32 nt, Human
uaggcccugcacuccaccuggggacggccccu

SEQ ID NO: 222878 - RNA, 32 nt, Human
uaggcccugccugugccuguccgcuggccugg

SEQ ID NO: 222879 - RNA, 32 nt, Human
uaggcccuggcuggcgggcaugugggcaacuu

SEQ ID NO: 222880 - RNA, 23 nt, Human
uaggcccugggagaacuccggcu

SEQ ID NO: 222881 - RNA, 32 nt, Human
uaggcccuggggauucagacacaaagcaggua

SEQ ID NO: 222882 - RNA, 31 nt, Human
uaggcccuuaauaaacaccuguuggauaagc

SEQ ID NO: 222883 - RNA, 22 nt, Human
uaggcccuuguuaggaguggcu

SEQ ID NO: 222884 - RNA, 23 nt, Human
uaggcccuuuaaggggucuaguu

SEQ ID NO: 222885 - RNA, 32 nt, Human
uaggccgccugcccgccuccagcucucggggu

SEQ ID NO: 222886 - RNA, 32 nt, Human
uaggccgcuggaggaaagggaacucacccaac

SEQ ID NO: 222887 - RNA, 32 nt, Human
uaggccggccuucuggaacguucucucccggc

SEQ ID NO: 222888 - RNA, 31 nt, Human
uaggccggcugaggaacuguguguugaauaa

SEQ ID NO: 222889 - RNA, 30 nt, Human
uaggccgggcgcggcugggucccccggggg

SEQ ID NO: 222890 - RNA, 32 nt, Human
uaggccgugaccccgggugccaugaagcagga

SEQ ID NO: 222891 - RNA, 32 nt, Human
uaggccgugaggcaucuuccugccagccugca

SEQ ID NO: 222892 - RNA, 32 nt, Human
uaggccuaaugccacaaccacauccccauccu

SEQ ID NO: 222893 - RNA, 32 nt, Human
uaggccuagccucuuuuaacagccucugaaau

SEQ ID NO: 222894 - RNA, 32 nt, Human
uaggccuagcuacuuaggaggcugagguggga

SEQ ID NO: 222895 - RNA, 23 nt, Human
uaggccucagaaagaagucaguu

SEQ ID NO: 222896 - RNA, 32 nt, Human
uaggccucagcagggacagcacagacccucug

SEQ ID NO: 222897 - RNA, 32 nt, Human
uaggccuccaggagcccucagugagagggacc

SEQ ID NO: 222898 - RNA, 32 nt, Human
uaggccuccagggaaagagcugggaggcagga

SEQ ID NO: 222899 - RNA, 32 nt, Human
uaggccucccaaaaugcugggacuauaggugu

SEQ ID NO: 222900 - RNA, 32 nt, Human
uaggccucccaaaguacugggauuacaggcgu

SEQ ID NO: 222901 - RNA, 32 nt, Human
uaggccucccaaaguccugggauuacaggcgu

SEQ ID NO: 222902 - RNA, 32 nt, Human
uaggccucccaaagugcugggauuacaggcau

SEQ ID NO: 222903 - RNA, 32 nt, Human
uaggccucccaaagugcuggguuuaccagcgu

SEQ ID NO: 222904 - RNA, 32 nt, Human
uaggccucccaaaguguugggauuacaggcgu

SEQ ID NO: 222905 - RNA, 32 nt, Human
uaggccucccaaaguguugggauuauagguau

SEQ ID NO: 222906 - RNA, 32 nt, Human
uaggccucccuaauauccccucccagggucuc

SEQ ID NO: 222907 - RNA, 22 nt, Human
uaggccuccugagauuccagcu

SEQ ID NO: 222908 - RNA, 32 nt, Human
uaggccucucaaaguguugggauuacgugugu

SEQ ID NO: 222909 - RNA, 32 nt, Human
uaggccucucaccucugugccucugucuccuu

SEQ ID NO: 222910 - RNA, 32 nt, Human
uaggccucucccaccaugugcagucucauggg

SEQ ID NO: 222911 - RNA, 18 nt, Human
uaggccucuccucagcuc

SEQ ID NO: 222912 - RNA, 32 nt, Human
uaggccucuccuccaaccucccacuccuucuc

SEQ ID NO: 222913 - RNA, 23 nt, Human
uaggccucugccaggaucuaagc

SEQ ID NO: 222914 - RNA, 32 nt, Human
uaggccugaccuuuuaaauuccugggauaaau

SEQ ID NO: 222915 - RNA, 32 nt, Human
uaggccuggaguuguauccugccccucuggag

SEQ ID NO: 222916 - RNA, 32 nt, Human
uaggccugggcccuggaggaggacauggugau

SEQ ID NO: 222917 - RNA, 32 nt, Human
uaggccugguguguucaagaccagccugguca

SEQ ID NO: 222918 - RNA, 32 nt, Human
uaggccugugccaaaguggccagagauugggc

SEQ ID NO: 222919 - RNA, 32 nt, Human
uaggccuuccagagugcugggauuauaggcgu

SEQ ID NO: 222920 - RNA, 32 nt, Human
uaggccuucuacuagccagcaguucucucugg

SEQ ID NO: 222921 - RNA, 32 nt, Human
uaggccuucuuggcugagaugaccagggcgua

SEQ ID NO: 222922 - RNA, 32 nt, Human
uaggccuuucccucagguuuuccucuucccca

SEQ ID NO: 222923 - RNA, 32 nt, Human
uaggccuuuccucugcacgcucaaugcccagu

SEQ ID NO: 222924 - RNA, 32 nt, Human
uaggcgaguaaaaggaggaggaagggcugggg

SEQ ID NO: 222925 - RNA, 18 nt, Human
uaggcgcacaccaucacg

SEQ ID NO: 222926 - RNA, 32 nt, Human
uaggcgcagccugucccgcagggccuggcugg

SEQ ID NO: 222927 - RNA, 15 nt, Human
uaggcgcccaccacg

SEQ ID NO: 222928 - RNA, 32 nt, Human
uaggcgccccuccuaccccggcugcuuggcag

SEQ ID NO: 222929 - RNA, 32 nt, Human
uaggcgccuguaaucccagcuacucaggaggc

SEQ ID NO: 222930 - RNA, 18 nt, Human
uaggcgcgcgccaccacg

SEQ ID NO: 222931 - RNA, 32 nt, Human
uaggcgcggacgugcccggugccuggcgcgug

SEQ ID NO: 222932 - RNA, 32 nt, Human
uaggcgcggccagggccccacaacagcagguc

SEQ ID NO: 222933 - RNA, 28 nt, Human
uaggcgcucaauaaauacuuguuuguug

SEQ ID NO: 222934 - RNA, 31 nt, Human
uaggcgcucaauaaauacuuguuuguugaau

SEQ ID NO: 222935 - RNA, 31 nt, Human
uaggcgcucaauaaauguugaaugaaugaau

SEQ ID NO: 222936 - RNA, 32 nt, Human
uaggcgcuccuagucuggucagugccaagagg

SEQ ID NO: 222937 - RNA, 32 nt, Human
uaggcggaccccagacugcccucugccccuca

SEQ ID NO: 222938 - RNA, 32 nt, Human
uaggcgggcucuggcaccaccaggugcccaag

SEQ ID NO: 222939 - RNA, 32 nt, Human
uaggcggggcugggcaugcugggaccuccccu

SEQ ID NO: 222940 - RNA, 32 nt, Human
uaggcggguauccccuuccucccucaccacuc

SEQ ID NO: 222941 - RNA, 31 nt, Human
uaggcgggugaaucacuugauugaggucagg

SEQ ID NO: 222942 - RNA, 32 nt, Human
uaggcgguuagauuugaauacuucacugaggc

SEQ ID NO: 222943 - RNA, 32 nt, Human
uaggcguaagccaccacacccagccagaaagu

SEQ ID NO: 222944 - RNA, 32 nt, Human
uaggcguaagccaccacaccuggccaaaaaua

SEQ ID NO: 222945 - RNA, 32 nt, Human
uaggcguaagccaccaugccuggccaaaaauu

SEQ ID NO: 222946 - RNA, 32 nt, Human
uaggcguaagccacugugucuggccuagugua

SEQ ID NO: 222947 - RNA, 18 nt, Human
uaggcgugaaccaccacg

SEQ ID NO: 222948 - RNA, 32 nt, Human
uaggcgugagccaccacacccggccaagcaca

SEQ ID NO: 222949 - RNA, 32 nt, Human
uaggcgugagccaccaugcccagccuaauuuu

SEQ ID NO: 222950 - RNA, 32 nt, Human
uaggcgugagccaccaugcucagccauuaagg

SEQ ID NO: 222951 - RNA, 32 nt, Human
uaggcgugagccaccgcaccgugagccacugc

SEQ ID NO: 222952 - RNA, 32 nt, Human
uaggcgugagccaccgcaccuggccuaugagu

SEQ ID NO: 222953 - RNA, 32 nt, Human
uaggcgugagccaccgcgccuggccccgggcc

SEQ ID NO: 222954 - RNA, 32 nt, Human
uaggcgugagccaccgcuccuggccaggcauc

SEQ ID NO: 222955 - RNA, 32 nt, Human
uaggcgugagccaccgcuccuggccagggucu

SEQ ID NO: 222956 - RNA, 32 nt, Human
uaggcgugagccaccguacccggccuacccuu

SEQ ID NO: 222957 - RNA, 32 nt, Human
uaggcgugagccaccgugccuggccuaaagga

SEQ ID NO: 222958 - RNA, 32 nt, Human
uaggcgugagccacugcgccuggccaaaugcu

SEQ ID NO: 222959 - RNA, 32 nt, Human
uaggcgugagccacugugcccagccucacagc

SEQ ID NO: 222960 - RNA, 32 nt, Human
uaggcgugagccacuguguccagccuuuuccu

SEQ ID NO: 222961 - RNA, 32 nt, Human
uaggcgugcaccaccacaccuggcuaauuuuu

SEQ ID NO: 222962 - RNA, 18 nt, Human
uaggcgugcaccaccacg

SEQ ID NO: 222963 - RNA, 32 nt, Human
uaggcgugguggcucaggccaguaauuucagu

SEQ ID NO: 222964 - RNA, 32 nt, Human
uaggcuacaauuuucucccaggaagcuuugau

SEQ ID NO: 222965 - RNA, 32 nt, Human
uaggcuacaccacccugcccugacccugggau

SEQ ID NO: 222966 - RNA, 32 nt, Human
uaggcuaccaaaacauagaugacagaaggagg

SEQ ID NO: 222967 - RNA, 32 nt, Human
uaggcuacccuugccaaggccgcccaccugca

SEQ ID NO: 222968 - RNA, 32 nt, Human
uaggcuacugaguuuaguucucaguuuggcac

SEQ ID NO: 222969 - RNA, 32 nt, Human
uaggcuaggggugggagcaggaagagcuuaga

SEQ ID NO: 222970 - RNA, 32 nt, Human
uaggcuaucucccaucuucccacucaaguuaa

SEQ ID NO: 222971 - RNA, 32 nt, Human
uaggcuauggguuugagaccagccuggcaaca

SEQ ID NO: 222972 - RNA, 32 nt, Human
uaggcucaagccauccucccaccucagccucc

SEQ ID NO: 222973 - RNA, 32 nt, Human
uaggcucaagcgauccucccaccucaaccucu

SEQ ID NO: 222974 - RNA, 32 nt, Human
uaggcucaagugauccucccaccucagccucc

SEQ ID NO: 222975 - RNA, 32 nt, Human
uaggcucacaugcccaaacucuggguggggaa

SEQ ID NO: 222976 - RNA, 32 nt, Human
uaggcucacugcaaccuccaccucccagguuc

SEQ ID NO: 222977 - RNA, 32 nt, Human
uaggcucacugcaaccuccuucucccagguuc

SEQ ID NO: 222978 - RNA, 32 nt, Human
uaggcucacugcaaccucugucuccaggguug

SEQ ID NO: 222979 - RNA, 32 nt, Human
uaggcucacugcaacuuccgccucccggguuc

SEQ ID NO: 222980 - RNA, 32 nt, Human
uaggcucacugcaacuucugccucccaugcuu

SEQ ID NO: 222981 - RNA, 32 nt, Human
uaggcucagagcaaccuccagccuucuccagc

SEQ ID NO: 222982 - RNA, 32 nt, Human
uaggcucagcagauguuuuucugccauuagga

SEQ ID NO: 222983 - RNA, 32 nt, Human
uaggcucagucugacagguucuguacggggcu

SEQ ID NO: 222984 - RNA, 32 nt, Human
uaggcucaucaugcagucuucccucagccucc

SEQ ID NO: 222985 - RNA, 32 nt, Human
uaggcucauccagaaucucaucaggacuggac

SEQ ID NO: 222986 - RNA, 32 nt, Human
uaggcucaugaagagcauggccauuguggcag

SEQ ID NO: 222987 - RNA, 32 nt, Human
uaggcuccacugcccucacaccucuaggccuc

SEQ ID NO: 222988 - RNA, 32 nt, Human
uaggcucccagaggcgccuggccuccgcagag

SEQ ID NO: 222989 - RNA, 32 nt, Human
uaggcucccagucuuugacugccuucccaugg

SEQ ID NO: 222990 - RNA, 32 nt, Human
uaggcuccccagcuuucuccaggcuggggugg

SEQ ID NO: 222991 - RNA, 32 nt, Human
uaggcucggacacuguaggaggcagauccaag

SEQ ID NO: 222992 - RNA, 32 nt, Human
uaggcucuccaugaaacugcaaaggaacugau

SEQ ID NO: 222993 - RNA, 32 nt, Human
uaggcucucccaggugcaaugugggugcaggg

SEQ ID NO: 222994 - RNA, 32 nt, Human
uaggcucucugcaaccugggccucccggguuc

SEQ ID NO: 222995 - RNA, 32 nt, Human
uaggcugaagcacaguggugcgaucacagcuc

SEQ ID NO: 222996 - RNA, 32 nt, Human
uaggcugacagagcagggcuguuucucauaug

SEQ ID NO: 222997 - RNA, 32 nt, Human
uaggcugaccccugauccagacugucuucuga

SEQ ID NO: 222998 - RNA, 32 nt, Human
uaggcugagaggcggcgggagagaugcccaug

SEQ ID NO: 222999 - RNA, 32 nt, Human
uaggcugagguagguggaucaccugaggucag

SEQ ID NO: 223000 - RNA, 32 nt, Human
uaggcugaucucaaacuccugaucucaaguga

SEQ ID NO: 223001 - RNA, 32 nt, Human
uaggcugcaaaccaauuugggcucagagggaa

SEQ ID NO: 223002 - RNA, 32 nt, Human
uaggcugcacacacaccucgcucugggaguag

SEQ ID NO: 223003 - RNA, 32 nt, Human
uaggcugcacacagcacagagacccugggccc

SEQ ID NO: 223004 - RNA, 32 nt, Human
uaggcugcacacagcaggggguucugggccca

SEQ ID NO: 223005 - RNA, 32 nt, Human
uaggcugcagcuugccacuccugggcugggua

SEQ ID NO: 223006 - RNA, 32 nt, Human
uaggcugccacaggcccugcuucuggaaggug

SEQ ID NO: 223007 - RNA, 32 nt, Human
uaggcugccgucucccuccacucugucggcuc

SEQ ID NO: 223008 - RNA, 32 nt, Human
uaggcugccucugcuuucuuuccguccccuug

SEQ ID NO: 223009 - RNA, 32 nt, Human
uaggcugcgccugcugccuccagcccugagga

SEQ ID NO: 223010 - RNA, 32 nt, Human
uaggcugcugggauggugggcuucagggcagg

SEQ ID NO: 223011 - RNA, 32 nt, Human
uaggcugcuucugagcuucagccugggagcaa

SEQ ID NO: 223012 - RNA, 32 nt, Human
uaggcuggagcuggaagggugggugaauccgg

SEQ ID NO: 223013 - RNA, 32 nt, Human
uaggcuggagugcaguggcacaaucauggcuc

SEQ ID NO: 223014 - RNA, 32 nt, Human
uaggcuggccucaaacucccgaccucagguga

SEQ ID NO: 223015 - RNA, 32 nt, Human
uaggcugggacuagcacagcaucacuucuacc

SEQ ID NO: 223016 - RNA, 32 nt, Human
uaggcugggcuggggaaauucuccuccggaac

SEQ ID NO: 223017 - RNA, 31 nt, Human
uaggcuggggcauucuuuacaccuacaaaaa

SEQ ID NO: 223018 - RNA, 32 nt, Human
uaggcuggggcauucuuuacaccuacaaaaag

SEQ ID NO: 223019 - RNA, 32 nt, Human
uaggcugggggccguggccagcacuuugggaa

SEQ ID NO: 223020 - RNA, 32 nt, Human
uaggcugggguagagggcacuuuuggaaggca

SEQ ID NO: 223021 - RNA, 32 nt, Human
uaggcugggucauaugacaagcauuagccaau

SEQ ID NO: 223022 - RNA, 32 nt, Human
uaggcuggucucaaacuccagaccucaugauu

SEQ ID NO: 223023 - RNA, 32 nt, Human
uaggcuggucucaaacuccugaccucaaguga

SEQ ID NO: 223024 - RNA, 32 nt, Human
uaggcuggucucaaacuccugaccucagguga

SEQ ID NO: 223025 - RNA, 32 nt, Human
uaggcuggucucaaacuccugcucucaaguga

SEQ ID NO: 223026 - RNA, 32 nt, Human
uaggcuggucucaaacuccuggacucaaggga

SEQ ID NO: 223027 - RNA, 32 nt, Human
uaggcuggucucaaacuccuggccucaaguga

SEQ ID NO: 223028 - RNA, 32 nt, Human
uaggcuggucucaaacucuugaccucagguga

SEQ ID NO: 223029 - RNA, 32 nt, Human
uaggcuggucucaaacucuugaccucgugauu

SEQ ID NO: 223030 - RNA, 32 nt, Human
uaggcuggucucauacucggccucgagccauc

SEQ ID NO: 223031 - RNA, 32 nt, Human
uaggcuggugaggaaguccaggcuccagggga

SEQ ID NO: 223032 - RNA, 32 nt, Human
uaggcugucccagcugucugaguguuuguccg

SEQ ID NO: 223033 - RNA, 32 nt, Human
uaggcugugggcagagggucugaaaggugggc

SEQ ID NO: 223034 - RNA, 32 nt, Human
uaggcuuauacagcgggggauuugagcuuaca

SEQ ID NO: 223035 - RNA, 32 nt, Human
uaggcuuccuuaaccuccuuuacccuuaaccc

SEQ ID NO: 223036 - RNA, 32 nt, Human
uaggcuucucauguggcucauucuuuaaucua

SEQ ID NO: 223037 - RNA, 32 nt, Human
uaggcuucuccccucaggggcucuuucugaau

SEQ ID NO: 223038 - RNA, 32 nt, Human
uaggcuucuccucuguggcuuauagccaguug

SEQ ID NO: 223039 - RNA, 32 nt, Human
uaggcuugagccaccaugcaugugcacggcca

SEQ ID NO: 223040 - RNA, 32 nt, Human
uaggcuugaggguggagagccaggccuccuca

SEQ ID NO: 223041 - RNA, 32 nt, Human
uaggcuugaugguggccaggcuugccugcucc

SEQ ID NO: 223042 - RNA, 32 nt, Human
uaggcuugcagugcuuucugacccauccaccu

SEQ ID NO: 223043 - RNA, 32 nt, Human
uaggcuuugcucucuuaccuugcccuuucuac

SEQ ID NO: 223044 - RNA, 32 nt, Human
uaggcuuuucaucuuaggaacaauuaggaaga

SEQ ID NO: 223045 - RNA, 32 nt, Human
uaggcuuuuccuuguggacaacggggcccugu

SEQ ID NO: 223046 - RNA, 19 nt, Human
uagggaaaaacaagaauuu

SEQ ID NO: 223047 - RNA, 32 nt, Human
uagggaaaaaccaucaagcucauuauuauuuu

SEQ ID NO: 223048 - RNA, 32 nt, Human
uagggaaaaagauacacauggugccuucagcg

SEQ ID NO: 223049 - RNA, 32 nt, Human
uagggaaaacaacugugauccugggagcuaau

SEQ ID NO: 223050 - RNA, 32 nt, Human
uagggaaaauaauguuggacaagucuaggauu

SEQ ID NO: 223051 - RNA, 32 nt, Human
uagggaaagagaaagaaagaauaaaagcugga

SEQ ID NO: 223052 - RNA, 32 nt, Human
uagggaaaggaaagggggaggcggcuggggaa

SEQ ID NO: 223053 - RNA, 32 nt, Human
uagggaaaguuugucaauuuguuuucacuaua

SEQ ID NO: 223054 - RNA, 32 nt, Human
uagggaaauacacguaauggccaauguucugg

SEQ ID NO: 223055 - RNA, 32 nt, Human
uagggaaauuccaggaaggcgauuuacaaagg

SEQ ID NO: 223056 - RNA, 32 nt, Human
uagggaacaaauuacuaguggcaggguggugg

SEQ ID NO: 223057 - RNA, 32 nt, Human
uagggaacacagagugcuucucccgcagcccu

SEQ ID NO: 223058 - RNA, 32 nt, Human
uagggaacauggcaaaaccccagcucuacaaa

SEQ ID NO: 223059 - RNA, 32 nt, Human
uagggaaccaguuuccagaagaggucagcaca

SEQ ID NO: 223060 - RNA, 32 nt, Human
uagggaaccccuggaggacacuaaacauguca

SEQ ID NO: 223061 - RNA, 32 nt, Human
uagggaagaacuuuugcucucagucaccucuc

SEQ ID NO: 223062 - RNA, 22 nt, Human
uagggaagaagcaagaaacuuc

SEQ ID NO: 223063 - RNA, 32 nt, Human
uagggaagacaagaccacuuuagaugaagaaa

SEQ ID NO: 223064 - RNA, 32 nt, Human
uagggaagagaaaggaaaagagcccacacaau

SEQ ID NO: 223065 - RNA, 32 nt, Human
uagggaagagcagagaugcuggagguuuugaa

SEQ ID NO: 223066 - RNA, 32 nt, Human
uagggaagcagugaugcucucaaugggaagau

SEQ ID NO: 223067 - RNA, 32 nt, Human
uagggaaucugccggaaggagcuguuugaggc

SEQ ID NO: 223068 - RNA, 32 nt, Human
uagggaaugcuggucacaugcguggaagggua

SEQ ID NO: 223069 - RNA, 32 nt, Human
uagggaaugggguggagaaaggaugggaaugu

SEQ ID NO: 223070 - RNA, 32 nt, Human
uagggacaaagacauuuuggaaauugucaguu

SEQ ID NO: 223071 - RNA, 32 nt, Human
uagggacacagcaggucaggagagauucaaca

SEQ ID NO: 223072 - RNA, 32 nt, Human
uagggacaccacugcccugucuuuaggaaauc

SEQ ID NO: 223073 - RNA, 31 nt, Human
uagggacacguguccaugcaccacagacaca

SEQ ID NO: 223074 - RNA, 32 nt, Human
uagggacagaagccucacaggucaagacuggc

SEQ ID NO: 223075 - RNA, 32 nt, Human
uagggacagacugcaagaggcuccuguccccu

SEQ ID NO: 223076 - RNA, 32 nt, Human
uagggacagauguccggauacugucugucgug

SEQ ID NO: 223077 - RNA, 32 nt, Human
uagggacagcagcaccacuccagccucagaga

SEQ ID NO: 223078 - RNA, 32 nt, Human
uagggacagcuaccggaaggaggggaacaagg

SEQ ID NO: 223079 - RNA, 32 nt, Human
uagggacagcugcuggugcaggauggaagacu

SEQ ID NO: 223080 - RNA, 32 nt, Human
uagggacagcuggucacacaaggaacucuuga

SEQ ID NO: 223081 - RNA, 32 nt, Human
uagggacaggcagggcagggacagccaccuug

SEQ ID NO: 223082 - RNA, 32 nt, Human
uagggacagggcagggacagggacagcccagg

SEQ ID NO: 223083 - RNA, 32 nt, Human
uagggacaucacacccugucucacgucgcagu

SEQ ID NO: 223084 - RNA, 32 nt, Human
uagggacauguuggccaggcugguggugagcu

SEQ ID NO: 223085 - RNA, 32 nt, Human
uagggaccccugcucccagccugcugagagcc

SEQ ID NO: 223086 - RNA, 32 nt, Human
uagggacgaaguuucacucuuguugcccaggc

SEQ ID NO: 223087 - RNA, 32 nt, Human
uagggacgcugaggcaggagaaucgcuugaac

SEQ ID NO: 223088 - RNA, 32 nt, Human
uagggacucuaccccucucuccccuuccuugu

SEQ ID NO: 223089 - RNA, 20 nt, Human
uagggacucugcccagcgga

SEQ ID NO: 223090 - RNA, 32 nt, Human
uagggacucugccuuuuuguugguagggagaa

SEQ ID NO: 223091 - RNA, 32 nt, Human
uagggacugauguuauguucgacucagcacuu

SEQ ID NO: 223092 - RNA, 32 nt, Human
uagggacugguggaguucugucuucucaaauc

SEQ ID NO: 223093 - RNA, 32 nt, Human
uagggacuguaucuuaaaaucuuggcauuucu

SEQ ID NO: 223094 - RNA, 32 nt, Human
uagggacuuggggcuuggaaccuaagguuguu

SEQ ID NO: 223095 - RNA, 32 nt, Human
uagggagaauucaggguuuccaugacuugauu

SEQ ID NO: 223096 - RNA, 32 nt, Human
uagggagacugaggcaggagaauugcuugaac

SEQ ID NO: 223097 - RNA, 32 nt, Human
uagggagagaacgccagagggaggcggcuggc

SEQ ID NO: 223098 - RNA, 32 nt, Human
uagggagagacagauguguugccauguuacuu

SEQ ID NO: 223099 - RNA, 32 nt, Human
uagggagaguguccugggugucagccagaaca

SEQ ID NO: 223100 - RNA, 32 nt, Human
uagggagcagagaaucauugaauccugacaug

SEQ ID NO: 223101 - RNA, 32 nt, Human
uagggagcaguuucugccccuccugccccguc

SEQ ID NO: 223102 - RNA, 32 nt, Human
uagggagcccugccuuuuucuacugguucccc

SEQ ID NO: 223103 - RNA, 32 nt, Human
uagggagccuccauucugugggagagugugga

SEQ ID NO: 223104 - RNA, 32 nt, Human
uagggagcucugccagaggggcagcagcugca

SEQ ID NO: 223105 - RNA, 32 nt, Human
uagggagcugaaguucuucugcgcugagguuc

SEQ ID NO: 223106 - RNA, 32 nt, Human
uagggaggagaaagagaaagauccucagaagu

SEQ ID NO: 223107 - RNA, 32 nt, Human
uagggaggaugaggcagaagaaucacuugaac

SEQ ID NO: 223108 - RNA, 32 nt, Human
uagggaggaugaggcaggagaauugcuugaac

SEQ ID NO: 223109 - RNA, 32 nt, Human
uagggaggcagccuccagccugcccaagccca

SEQ ID NO: 223110 - RNA, 32 nt, Human
uagggaggccgaggcagguacaucaccugagg

SEQ ID NO: 223111 - RNA, 32 nt, Human
uagggaggccgaggcagguggaucacuugagg

SEQ ID NO: 223112 - RNA, 32 nt, Human
uagggaggccgaggcgggcggaucaccugaga

SEQ ID NO: 223113 - RNA, 32 nt, Human
uagggaggcucaacggaaacucaggccauugu

SEQ ID NO: 223114 - RNA, 32 nt, Human
uagggaggcugaggcaggagaaucacuugaac

SEQ ID NO: 223115 - RNA, 32 nt, Human
uagggaggcugaggcaggagaaucgcuugaac

SEQ ID NO: 223116 - RNA, 32 nt, Human
uagggaggcugaggcaggagaaucucuugaac

SEQ ID NO: 223117 - RNA, 32 nt, Human
uagggaggcugaggcaggagaauggccagaac

SEQ ID NO: 223118 - RNA, 32 nt, Human
uagggaggcugaggcaggagaauggcgugaac

SEQ ID NO: 223119 - RNA, 32 nt, Human
uagggaggcugaggcaggagaauugcuugaac

SEQ ID NO: 223120 - RNA, 32 nt, Human
uagggaggcugcggcaggagaauugcuugaac

SEQ ID NO: 223121 - RNA, 32 nt, Human
uagggaggcuugcggagcaggagcgcccucuu

SEQ ID NO: 223122 - RNA, 32 nt, Human
uagggaggcuuuagagaggaagacagaugcuu

SEQ ID NO: 223123 - RNA, 32 nt, Human
uagggagggcuguccugaaaccuggagccugg

SEQ ID NO: 223124 - RNA, 22 nt, Human
uagggaggggcauuccagcaaa

SEQ ID NO: 223125 - RNA, 32 nt, Human
uagggaggggugcacaguguucccuccuggca

SEQ ID NO: 223126 - RNA, 32 nt, Human
uagggaggguugaugggggaggcguggggaag

SEQ ID NO: 223127 - RNA, 32 nt, Human
uagggaguaauuuuguguuuucuugaguguca

SEQ ID NO: 223128 - RNA, 32 nt, Human
uagggagucucaauggcccugggugaagaaaa

SEQ ID NO: 223129 - RNA, 32 nt, Human
uagggaguggagcuggggaggggcccagaguc

SEQ ID NO: 223130 - RNA, 32 nt, Human
uagggaguuccccacacaaggguuugcaaagc

SEQ ID NO: 223131 - RNA, 32 nt, Human
uagggauacucagggggcuccugcucuccuuc

SEQ ID NO: 223132 - RNA, 32 nt, Human
uagggauagagggaggaguaagucagcugcuc

SEQ ID NO: 223133 - RNA, 32 nt, Human
uagggaucaagccuuuugccaccuugggcugg

SEQ ID NO: 223134 - RNA, 32 nt, Human
uagggaucagcaccugcccuguguuuuguacc

SEQ ID NO: 223135 - RNA, 32 nt, Human
uagggaucauugcagacucugccucucaggcu

SEQ ID NO: 223136 - RNA, 32 nt, Human
uagggaucccagagcguuguaagccuucuugu

SEQ ID NO: 223137 - RNA, 32 nt, Human
uagggaugagggagggaggggcauugugaugu

SEQ ID NO: 223138 - RNA, 32 nt, Human
uagggaugcaugggcuggaguaaaggaugcuu

SEQ ID NO: 223139 - RNA, 32 nt, Human
uagggaugggguuucccauguuggccaggcug

SEQ ID NO: 223140 - RNA, 32 nt, Human
uagggauggugaggaggggagaggagggagac

SEQ ID NO: 223141 - RNA, 32 nt, Human
uagggaugguggcucaacaaaucaaacaaacu

SEQ ID NO: 223142 - RNA, 32 nt, Human
uagggaugguggcucaacaaaucaagcaaacu

SEQ ID NO: 223143 - RNA, 19 nt, Human
uagggauucaaaagaauuu

SEQ ID NO: 223144 - RNA, 32 nt, Human
uagggauucaucagggcaggaagcaggcaggc

SEQ ID NO: 223145 - RNA, 32 nt, Human
uagggauugagaccagccuggccaacauggug

SEQ ID NO: 223146 - RNA, 32 nt, Human
uagggcaaccaccaccaccugucuuccaggac

SEQ ID NO: 223147 - RNA, 32 nt, Human
uagggcaagacaauguugacagugaugcauga

SEQ ID NO: 223148 - RNA, 32 nt, Human
uagggcaaggccagacugcaaaaagaauagac

SEQ ID NO: 223149 - RNA, 32 nt, Human
uagggcaauagggagugucaguaggguaguuu

SEQ ID NO: 223150 - RNA, 32 nt, Human
uagggcacagcccuguaacugcacgugccuuc

SEQ ID NO: 223151 - RNA, 32 nt, Human
uagggcacauugguuccagccuagccaguuuc

SEQ ID NO: 223152 - RNA, 32 nt, Human
uagggcagaaggaggugcuugcagggccucuc

SEQ ID NO: 223153 - RNA, 32 nt, Human
uagggcagaaggcagcggaggccaggucuguc

SEQ ID NO: 223154 - RNA, 32 nt, Human
uagggcagacacacaaccuccuccuccucuuc

SEQ ID NO: 223155 - RNA, 32 nt, Human
uagggcagagcugagucggcagaaaagggaag

SEQ ID NO: 223156 - RNA, 32 nt, Human
uagggcagaguuugcacguccucuggucacug

SEQ ID NO: 223157 - RNA, 31 nt, Human
uagggcagccucucugauguugucaaugaug

SEQ ID NO: 223158 - RNA, 32 nt, Human
uagggcaggagaaucacuugaaccugggaggu

SEQ ID NO: 223159 - RNA, 32 nt, Human
uagggcagggccaagagcaggaaccagccuca

SEQ ID NO: 223160 - RNA, 32 nt, Human
uagggcagguuaucucuguuccagucaccccc

SEQ ID NO: 223161 - RNA, 32 nt, Human
uagggcaguuaccacagaaacagaaauugacc

SEQ ID NO: 223162 - RNA, 32 nt, Human
uagggcaucauuuugauauuucauucugauuu

SEQ ID NO: 223163 - RNA, 32 nt, Human
uagggccaaucgggagaggcagcuguggcggg

SEQ ID NO: 223164 - RNA, 21 nt, Human
uagggccagaggccaacugcc

SEQ ID NO: 223165 - RNA, 32 nt, Human
uagggccagcucacaagcccaggcuggagauc

SEQ ID NO: 223166 - RNA, 22 nt, Human
uagggccagugcaacagggcca

SEQ ID NO: 223167 - RNA, 32 nt, Human
uagggccccaggaggcgagucugaguggaacc

SEQ ID NO: 223168 - RNA, 32 nt, Human
uagggccccaucccagugccaggcugguuucc

SEQ ID NO: 223169 - RNA, 32 nt, Human
uagggccugagugccaccugcuuccugauguu

SEQ ID NO: 223170 - RNA, 32 nt, Human
uagggccugcacagaucucugguucaaaugca

SEQ ID NO: 223171 - RNA, 32 nt, Human
uagggccugcucugacagggcccaugucccac

SEQ ID NO: 223172 - RNA, 32 nt, Human
uagggccuggaccugggcuggacaguguaucc

SEQ ID NO: 223173 - RNA, 32 nt, Human
uagggccuucaagggcuggcagucuuacagag

SEQ ID NO: 223174 - RNA, 32 nt, Human
uagggcgaggccucccccuuccuccucgccau

SEQ ID NO: 223175 - RNA, 32 nt, Human
uagggcggcucaacuccucccacagcaccaac

SEQ ID NO: 223176 - RNA, 32 nt, Human
uagggcggcugagacgcaagacuugcuugaac

SEQ ID NO: 223177 - RNA, 32 nt, Human
uagggcggggccugugcaugcucucccaugac

SEQ ID NO: 223178 - RNA, 32 nt, Human
uagggcgggguuucaccaugauggccagguug

SEQ ID NO: 223179 - RNA, 32 nt, Human
uagggcgugauggcucaugccuguaaucucag

SEQ ID NO: 223180 - RNA, 32 nt, Human
uagggcgugugcagggcuggggccaguggacc

SEQ ID NO: 223181 - RNA, 32 nt, Human
uagggcuaaugcugcauuuuucuacaacauca

SEQ ID NO: 223182 - RNA, 32 nt, Human
uagggcuacaucuuguuaauugcaauugucca

SEQ ID NO: 223183 - RNA, 32 nt, Human
uagggcucauacaccucuuccaggcgucaccu

SEQ ID NO: 223184 - RNA, 32 nt, Human
uagggcuccacgggucucucuccuggggccgg

SEQ ID NO: 223185 - RNA, 32 nt, Human
uagggcucccccaggugcuggaauuauggcac

SEQ ID NO: 223186 - RNA, 32 nt, Human
uagggcuccuuucuaacaaccuagacuggaau

SEQ ID NO: 223187 - RNA, 32 nt, Human
uagggcucggugccagcacuucccggguaauc

SEQ ID NO: 223188 - RNA, 32 nt, Human
uagggcucuugggagcucugcgguugcuaggg

SEQ ID NO: 223189 - RNA, 32 nt, Human
uagggcugaaccaggcgccaggcuccagagga

SEQ ID NO: 223190 - RNA, 32 nt, Human
uagggcugaguggggucgggugaggcagaggu

SEQ ID NO: 223191 - RNA, 32 nt, Human
uagggcugcacuguccuggguguugggcccuu

SEQ ID NO: 223192 - RNA, 32 nt, Human
uagggcugccaggcugcagccugcugcuccag

SEQ ID NO: 223193 - RNA, 32 nt, Human
uagggcuggggacuugcccuccauggagguca

SEQ ID NO: 223194 - RNA, 32 nt, Human
uagggcuggggugggaggcacauggugacagg

SEQ ID NO: 223195 - RNA, 32 nt, Human
uagggcuggucugcacuuagccucucccuucc

SEQ ID NO: 223196 - RNA, 32 nt, Human
uagggcuggugcuggcccugcccacgccuagg

SEQ ID NO: 223197 - RNA, 32 nt, Human
uagggcuucagccugugaauaugagacucaca

SEQ ID NO: 223198 - RNA, 32 nt, Human
uagggcuucugugguuguggaugggaggcucc

SEQ ID NO: 223199 - RNA, 32 nt, Human
uaggggaaaauguaaaauauuuaacaaucaac

SEQ ID NO: 223200 - RNA, 32 nt, Human
uaggggaaaugagccagcacuugcuggguuug

SEQ ID NO: 223201 - RNA, 32 nt, Human
uaggggaaccugaggcuuguucuugaaguggg

SEQ ID NO: 223202 - RNA, 32 nt, Human
uaggggaagaggagaagaggguaagggggcuu

SEQ ID NO: 223203 - RNA, 32 nt, Human
uaggggaagaggaggggcaggagggagaguuc

SEQ ID NO: 223204 - RNA, 32 nt, Human
uaggggaauauggagaaauuuaaacuauugua

SEQ ID NO: 223205 - RNA, 32 nt, Human
uaggggacaauguauauguaaugaguauauga

SEQ ID NO: 223206 - RNA, 32 nt, Human
uaggggaccagugaguugggaaaguugauuag

SEQ ID NO: 223207 - RNA, 32 nt, Human
uaggggacugugcgggaagcuggggguggaug

SEQ ID NO: 223208 - RNA, 32 nt, Human
uaggggagaacacacauacagcagagaccaug

SEQ ID NO: 223209 - RNA, 32 nt, Human
uaggggagucagcugggaccacagcuugggca

SEQ ID NO: 223210 - RNA, 32 nt, Human
uaggggagugcugugcugauucuccagccaug

SEQ ID NO: 223211 - RNA, 32 nt, Human
uaggggauaaucagcccugcacggccauccuc

SEQ ID NO: 223212 - RNA, 32 nt, Human
uaggggauauggggagggaacaaguagaaggg

SEQ ID NO: 223213 - RNA, 32 nt, Human
uaggggaugguacauuuauuucaucugcaaau

SEQ ID NO: 223214 - RNA, 32 nt, Human
uaggggauucuacugucuugacauguaaaugu

SEQ ID NO: 223215 - RNA, 32 nt, Human
uaggggcaaacaucacaaaauguaauuuaaug

SEQ ID NO: 223216 - RNA, 32 nt, Human
uaggggcaacacagucugcugcuauauagugg

SEQ ID NO: 223217 - RNA, 32 nt, Human
uaggggcaagggaagagagcugaggagaggga

SEQ ID NO: 223218 - RNA, 32 nt, Human
uaggggcagaagcaauggcuugugagugagca

SEQ ID NO: 223219 - RNA, 32 nt, Human
uaggggcaggggcaaugggauguaguuuuuac

SEQ ID NO: 223220 - RNA, 21 nt, Human
uaggggcauaugauuagcuca

SEQ ID NO: 223221 - RNA, 32 nt, Human
uaggggcaugagccaccgcacccagcuugcau

SEQ ID NO: 223222 - RNA, 32 nt, Human
uaggggccagaaucuccaugcacuuuguagac

SEQ ID NO: 223223 - RNA, 32 nt, Human
uaggggcccagccucuguggcccugugaccug

SEQ ID NO: 223224 - RNA, 32 nt, Human
uaggggcccgggaagguggaagcgccgggccu

SEQ ID NO: 223225 - RNA, 32 nt, Human
uaggggcccugccugcacugcgguuguccacg

SEQ ID NO: 223226 - RNA, 32 nt, Human
uaggggccgccucugucaucucacuagacauu

SEQ ID NO: 223227 - RNA, 32 nt, Human
uaggggccgucaauaaaugugaugaugaggau

SEQ ID NO: 223228 - RNA, 32 nt, Human
uaggggccuccuggcacugcuguuuccucuca

SEQ ID NO: 223229 - RNA, 32 nt, Human
uaggggccuguaacccagcuacucgugaggcc

SEQ ID NO: 223230 - RNA, 32 nt, Human
uaggggcgcgcagaugugugaggccuuuuauu

SEQ ID NO: 223231 - RNA, 32 nt, Human
uaggggcuagagcagauuguaagaacucugga

SEQ ID NO: 223232 - RNA, 32 nt, Human
uaggggcucugagcuucugcccccagaaucau

SEQ ID NO: 223233 - RNA, 32 nt, Human
uaggggcugcagcuggggaauaagccucaaau

SEQ ID NO: 223234 - RNA, 32 nt, Human
uaggggcugggaaaggggagagauuggagucc

SEQ ID NO: 223235 - RNA, 32 nt, Human
uagggggaagucucccucccaucccucagauc

SEQ ID NO: 223236 - RNA, 32 nt, Human
uagggggaccuugauagagaacuuuauaaacu

SEQ ID NO: 223237 - RNA, 32 nt, Human
uagggggagagggaccugccgcgaaaccauca

SEQ ID NO: 223238 - RNA, 32 nt, Human
uagggggagagugcgugucuucaugguugccg

SEQ ID NO: 223239 - RNA, 32 nt, Human
uagggggagggagggggaaguuaaggggguca

SEQ ID NO: 223240 - RNA, 32 nt, Human
uagggggauauaauacauauuacuccacaccu

SEQ ID NO: 223241 - RNA, 32 nt, Human
uagggggcagcuaaaugugauccugccuugcu

SEQ ID NO: 223242 - RNA, 32 nt, Human
uagggggcagugauugccaucuggggaccugu

SEQ ID NO: 223243 - RNA, 32 nt, Human
uagggggcauggugccuggagcugaggggcau

SEQ ID NO: 223244 - RNA, 32 nt, Human
uagggggcgcggggcucggcggggcucugacg

SEQ ID NO: 223245 - RNA, 32 nt, Human
uagggggcugcuggugggaaaugggagccagg

SEQ ID NO: 223246 - RNA, 32 nt, Human
uagggggugauggagacugugggcaagccugu

SEQ ID NO: 223247 - RNA, 32 nt, Human
uaggggguuccaaggauggcucuucuaaccag

SEQ ID NO: 223248 - RNA, 32 nt, Human
uaggggguuucuguaguaugagacaucaagag

SEQ ID NO: 223249 - RNA, 32 nt, Human
uagggguacaaggacaguuguguuacauggau

SEQ ID NO: 223250 - RNA, 32 nt, Human
uaggggucaggaucaagccucccccuaacugu

SEQ ID NO: 223251 - RNA, 32 nt, Human
uaggggucggauggguggguaagcccaggauu

SEQ ID NO: 223252 - RNA, 32 nt, Human
uaggggugcaggaaguggacagggcggagggu

SEQ ID NO: 223253 - RNA, 32 nt, Human
uagggguggggagaugcuucucuccuugcccc

SEQ ID NO: 223254 - RNA, 32 nt, Human
uaggggugggggugggauggcaggaggagccg

SEQ ID NO: 223255 - RNA, 29 nt, Human
uaggggugucugugugugaaucucuguuu

SEQ ID NO: 223256 - RNA, 32 nt, Human
uaggggugugccaggccacuuugguaucagaa

SEQ ID NO: 223257 - RNA, 32 nt, Human
uagggguguguauucacauaguccucagggcu

SEQ ID NO: 223258 - RNA, 23 nt, Human
uagggguuauguugucugugcuu

SEQ ID NO: 223259 - RNA, 32 nt, Human
uagggguucccgcuuccauguacggagacccu

SEQ ID NO: 223260 - RNA, 32 nt, Human
uagggguucucacucuagcuuggggagccagg

SEQ ID NO: 223261 - RNA, 32 nt, Human
uaggguaaccagccucaagcccaugcucuccu

SEQ ID NO: 223262 - RNA, 32 nt, Human
uaggguaagggacuguucugaagaaccuuucc

SEQ ID NO: 223263 - RNA, 32 nt, Human
uaggguaagucccagcccuguucacgugaaag

SEQ ID NO: 223264 - RNA, 18 nt, Human
uaggguacagaagaauuu

SEQ ID NO: 223265 - RNA, 32 nt, Human
uaggguacugaaguccccuacuauucuugugu

SEQ ID NO: 223266 - RNA, 32 nt, Human
uaggguagugcuaaaugagaaagcccauguag

SEQ ID NO: 223267 - RNA, 32 nt, Human
uaggguaugggcagugcuuaggcacuccauau

SEQ ID NO: 223268 - RNA, 32 nt, Human
uagggucacuucagaagcaagaggcacaagaa

SEQ ID NO: 223269 - RNA, 32 nt, Human
uagggucagcagagacucagaguccagggcaa

SEQ ID NO: 223270 - RNA, 32 nt, Human
uagggucauuucucccugccugcuuugugcca

SEQ ID NO: 223271 - RNA, 32 nt, Human
uaggguccaggcaggaaugaagccaauaauuu

SEQ ID NO: 223272 - RNA, 32 nt, Human
uaggguccucaggcaguggcccagggaaucag

SEQ ID NO: 223273 - RNA, 32 nt, Human
uaggguccuggguccccgaaccaggaaggguu

SEQ ID NO: 223274 - RNA, 18 nt, Human
uagggucucgcucuguca

SEQ ID NO: 223275 - RNA, 32 nt, Human
uagggucuggggacacagaaggagccggcauu

SEQ ID NO: 223276 - RNA, 32 nt, Human
uagggucugggggcuuagaggcugggauggcu

SEQ ID NO: 223277 - RNA, 18 nt, Human
uagggucuuacucuguca

SEQ ID NO: 223278 - RNA, 32 nt, Human
uagggucuugcacuccagcccaggcgagagag

SEQ ID NO: 223279 - RNA, 32 nt, Human
uagggugagagggaguggggagggagagggca

SEQ ID NO: 223280 - RNA, 32 nt, Human
uagggugagggugggaggacuguguguccgug

SEQ ID NO: 223281 - RNA, 32 nt, Human
uagggugauuggcugcugcagcccacccccua

SEQ ID NO: 223282 - RNA, 32 nt, Human
uagggugcagugacgugaucauggcucacugc

SEQ ID NO: 223283 - RNA, 32 nt, Human
uagggugcaguggugugaucauaguucacugu

SEQ ID NO: 223284 - RNA, 32 nt, Human
uagggugccuuggcaggagccaggacaaggcc

SEQ ID NO: 223285 - RNA, 32 nt, Human
uagggugcgccuucucaagggugaggugucug

SEQ ID NO: 223286 - RNA, 32 nt, Human
uagggugcugagugccugauacugccugacaa

SEQ ID NO: 223287 - RNA, 32 nt, Human
uaggguggaaacacucugaucugaagcccagc

SEQ ID NO: 223288 - RNA, 32 nt, Human
uaggguggaacagaaggacagacggacccagg

SEQ ID NO: 223289 - RNA, 32 nt, Human
uaggguggaggggagagaagaagaugcugaug

SEQ ID NO: 223290 - RNA, 32 nt, Human
uaggguggcacaucuguccugacagacgagga

SEQ ID NO: 223291 - RNA, 32 nt, Human
uaggguggcauggcuccccaucucggguccau

SEQ ID NO: 223292 - RNA, 32 nt, Human
uagggugggaagggggacagagagggcccucc

SEQ ID NO: 223293 - RNA, 32 nt, Human
uagggugggaggcagggcaaugcaggauccaa

SEQ ID NO: 223294 - RNA, 32 nt, Human
uagggugggaucuuugaaaagcugacauuugc

SEQ ID NO: 223295 - RNA, 32 nt, Human
uaggguggggucuggucacacacagguguuga

SEQ ID NO: 223296 - RNA, 32 nt, Human
uagggugugcaaggguggacagcaggcguugc

SEQ ID NO: 223297 - RNA, 32 nt, Human
uaggguucaauguugaagauggcagagccaau

SEQ ID NO: 223298 - RNA, 32 nt, Human
uaggguuccaacugggccuacaagcucaagcc

SEQ ID NO: 223299 - RNA, 32 nt, Human
uaggguugugacuggcuuuggugcaaaugugu

SEQ ID NO: 223300 - RNA, 32 nt, Human
uaggguuguuagugacccacaggacaguauag

SEQ ID NO: 223301 - RNA, 32 nt, Human
uaggguuucuaaaacgcucugacagaugcaag

SEQ ID NO: 223302 - RNA, 32 nt, Human
uaggguuugagacuuagcugugauacugacag

SEQ ID NO: 223303 - RNA, 32 nt, Human
uaggguuugaggauuccugagugugggcuucu

SEQ ID NO: 223304 - RNA, 32 nt, Human
uaggguuugggagcuuggcccuacgguuugua

SEQ ID NO: 223305 - RNA, 32 nt, Human
uaggguuuguaacccagggccugugcuggcgu

SEQ ID NO: 223306 - RNA, 32 nt, Human
uagguaaaagaauuccagaaggaggccagggc

SEQ ID NO: 223307 - RNA, 32 nt, Human
uagguaagcuuauuucagaacaagucuaauau

SEQ ID NO: 223308 - RNA, 32 nt, Human
uagguaaggcuacaugagaaauugagcuuuuc

SEQ ID NO: 223309 - RNA, 32 nt, Human
uagguaagguaagaggaaucaaguucugagug

SEQ ID NO: 223310 - RNA, 32 nt, Human
uagguaaugggggaauggacagaggaauccug

SEQ ID NO: 223311 - RNA, 32 nt, Human
uagguaauucaagcccucaucagguuuacaag

SEQ ID NO: 223312 - RNA, 31 nt, Human
uagguaauucauauuauacauuuaaguucuu

SEQ ID NO: 223313 - RNA, 32 nt, Human
uagguacacagcaaaauuaaacaaauccaaca

SEQ ID NO: 223314 - RNA, 32 nt, Human
uagguacacuggcugcugccuauccugucccu

SEQ ID NO: 223315 - RNA, 32 nt, Human
uagguaccuuguagcagugugcuuugcauuuu

SEQ ID NO: 223316 - RNA, 32 nt, Human
uagguacucaaacuccauucuccagggguuua

SEQ ID NO: 223317 - RNA, 32 nt, Human
uagguacuccaaugguguacaaugucuuuugc

SEQ ID NO: 223318 - RNA, 32 nt, Human
uagguacugaccccucccucuugggcagcacc

SEQ ID NO: 223319 - RNA, 31 nt, Human
uagguacuuaauaaauauuugcuguugauga

SEQ ID NO: 223320 - RNA, 32 nt, Human
uagguacuucaggccuucuuggacuguuguua

SEQ ID NO: 223321 - RNA, 32 nt, Human
uagguagauccagauccagacuguaagauguu

SEQ ID NO: 223322 - RNA, 32 nt, Human
uagguagcuacacguacauaauuaucucuuua

SEQ ID NO: 223323 - RNA, 32 nt, Human
uagguagggcugggcacuggucauuccacucu

SEQ ID NO: 223324 - RNA, 28 nt, Human
uagguagucaaggcagccucaucucccc

SEQ ID NO: 223325 - RNA, 32 nt, Human
uagguagucccagcuacucgagguugcuccag

SEQ ID NO: 223326 - RNA, 32 nt, Human
uagguaguguccucauuuuauauugugaccac

SEQ ID NO: 223327 - RNA, 32 nt, Human
uagguauaaaggcuuuuaugugucuaacuaga

SEQ ID NO: 223328 - RNA, 32 nt, Human
uagguaucacuuaccuuaccugcccagacccc

SEQ ID NO: 223329 - RNA, 32 nt, Human
uagguaucugacauuuccccugcuugcacucc

SEQ ID NO: 223330 - RNA, 32 nt, Human
uagguaugaauagggacuugcaguaugagggc

SEQ ID NO: 223331 - RNA, 32 nt, Human
uagguaugauucacauacaaaaagcugcacau

SEQ ID NO: 223332 - RNA, 32 nt, Human
uagguauggccaccuggugaauucaguuguua

SEQ ID NO: 223333 - RNA, 32 nt, Human
uagguaugggauuuaugagaccaguaccugaa

SEQ ID NO: 223334 - RNA, 32 nt, Human
uagguauuucuccuaaugcucucccuccccca

SEQ ID NO: 223335 - RNA, 32 nt, Human
uagguauuuucuccagcucugacauuguuuuc

SEQ ID NO: 223336 - RNA, 32 nt, Human
uaggucaaaugaugugcccaaccaaggucaca

SEQ ID NO: 223337 - RNA, 32 nt, Human
uaggucacagaaaccucugccugccagguagg

SEQ ID NO: 223338 - RNA, 32 nt, Human
uaggucacagaagcagugggucagaagccaga

SEQ ID NO: 223339 - RNA, 32 nt, Human
uaggucacuguagccuccgccuccagggcuca

SEQ ID NO: 223340 - RNA, 32 nt, Human
uaggucagagggcucuuuguccugguugaagu

SEQ ID NO: 223341 - RNA, 32 nt, Human
uaggucagagguggggacagagaacuccccua

SEQ ID NO: 223342 - RNA, 32 nt, Human
uaggucagcucuuuugaaaauguuuuauuuga

SEQ ID NO: 223343 - RNA, 32 nt, Human
uaggucaggagaucaagaccagcugggccaac

SEQ ID NO: 223344 - RNA, 32 nt, Human
uaggucaggaguuugagaccagccuggccaac

SEQ ID NO: 223345 - RNA, 32 nt, Human
uaggucaggaguuugagaccagccuggccaau

SEQ ID NO: 223346 - RNA, 32 nt, Human
uaggucaggaguuugagaucagccuggccaau

SEQ ID NO: 223347 - RNA, 32 nt, Human
uaggucagggccacccuccauucucagcggac

SEQ ID NO: 223348 - RNA, 32 nt, Human
uaggucaguguaagaauuaaagaaagaggaaa

SEQ ID NO: 223349 - RNA, 32 nt, Human
uaggucauaagaauucugagaaugaaauacaa

SEQ ID NO: 223350 - RNA, 32 nt, Human
uaggucauccuggguacucaggccucuagacu

SEQ ID NO: 223351 - RNA, 32 nt, Human
uaggucauuaacaccacuucuuuucaucugua

SEQ ID NO: 223352 - RNA, 32 nt, Human
uagguccagaagagugaaagagagggaggggu

SEQ ID NO: 223353 - RNA, 32 nt, Human
uagguccagcugguaugaugcuguucaaguuc

SEQ ID NO: 223354 - RNA, 25 nt, Human
uagguccaggaccagggguccugcu

SEQ ID NO: 223355 - RNA, 32 nt, Human
uagguccaucucaugccuuucucagacucucc

SEQ ID NO: 223356 - RNA, 32 nt, Human
uagguccccacuguccccgccgucccgccccu

SEQ ID NO: 223357 - RNA, 32 nt, Human
uagguccccagauggggagacugaggccgugg

SEQ ID NO: 223358 - RNA, 32 nt, Human
uaggucccuccaggcuggggcuugggacugcu

SEQ ID NO: 223359 - RNA, 32 nt, Human
uagguccgcuggucacagcacacacacgcucc

SEQ ID NO: 223360 - RNA, 32 nt, Human
uagguccgcuugguccagagcugaguucaagu

SEQ ID NO: 223361 - RNA, 32 nt, Human
uagguccuaugucaccaccacaccaugccagc

SEQ ID NO: 223362 - RNA, 32 nt, Human
uagguccuggguggaggaagaagugguggagc

SEQ ID NO: 223363 - RNA, 32 nt, Human
uaggucgggaggcaccucuagcaugagacagu

SEQ ID NO: 223364 - RNA, 32 nt, Human
uaggucgugccacugcacuccagccugggcaa

SEQ ID NO: 223365 - RNA, 32 nt, Human
uaggucguggaggagacaggcaccuucucucg

SEQ ID NO: 223366 - RNA, 31 nt, Human
uaggucucacucaaggggugaugacgggagg

SEQ ID NO: 223367 - RNA, 32 nt, Human
uaggucucagagaguuaauaggaguauuuuug

SEQ ID NO: 223368 - RNA, 32 nt, Human
uaggucucauuaaacagaguggagauuucauu

SEQ ID NO: 223369 - RNA, 32 nt, Human
uaggucuccaagcucauuugaccagcgcagcu

SEQ ID NO: 223370 - RNA, 32 nt, Human
uaggucuccagcaucacaucucuuuacagggu

SEQ ID NO: 223371 - RNA, 32 nt, Human
uaggucuccagcgcccugcagcuugacagaaa

SEQ ID NO: 223372 - RNA, 32 nt, Human
uaggucucuccuucuccuccuccuccuccucu

SEQ ID NO: 223373 - RNA, 25 nt, Human
uaggucugacagccccucccuccca

SEQ ID NO: 223374 - RNA, 32 nt, Human
uaggucugcacacauaacacacaucaguccac

SEQ ID NO: 223375 - RNA, 32 nt, Human
uaggucugcaggaaggaaggcugaaaaagcgg

SEQ ID NO: 223376 - RNA, 32 nt, Human
uaggucugcugauuccuguccuggugagcuca

SEQ ID NO: 223377 - RNA, 32 nt, Human
uaggucugugcgcaccucucugggcuugcugg

SEQ ID NO: 223378 - RNA, 32 nt, Human
uaggucuguguguaugaacauaauauacacga

SEQ ID NO: 223379 - RNA, 32 nt, Human
uaggucuguuuucaaagaacuuuuuccaagug

SEQ ID NO: 223380 - RNA, 32 nt, Human
uaggucuuaugugguucaacucccacccccgc

SEQ ID NO: 223381 - RNA, 31 nt, Human
uaggucuucaauaaauauuuaauggaagguu

SEQ ID NO: 223382 - RNA, 32 nt, Human
uaggucuugcagguuuccuuuugaauuuuaag

SEQ ID NO: 223383 - RNA, 22 nt, Human
uaggucuugcauaucaguuuua

SEQ ID NO: 223384 - RNA, 32 nt, Human
uaggucuuuacuggcccugacugcuguuaaua

SEQ ID NO: 223385 - RNA, 24 nt, Human
uaggucuuuggggaaguccuggcu

SEQ ID NO: 223386 - RNA, 22 nt, Human
uaggugaacacugagaaggcag

SEQ ID NO: 223387 - RNA, 32 nt, Human
uaggugacaaagugagaccccaucucuacaaa

SEQ ID NO: 223388 - RNA, 32 nt, Human
uaggugacacacuuccaacacugugaauugcu

SEQ ID NO: 223389 - RNA, 32 nt, Human
uaggugacagggugguccagucaaggugacag

SEQ ID NO: 223390 - RNA, 32 nt, Human
uaggugacauagugagaccccaucucuacaaa

SEQ ID NO: 223391 - RNA, 32 nt, Human
uaggugaccaaagcacuauggaagugaauauc

SEQ ID NO: 223392 - RNA, 32 nt, Human
uaggugacccagguucucagcauuguacaugg

SEQ ID NO: 223393 - RNA, 32 nt, Human
uaggugaccuuagagaccuaaggugagagacu

SEQ ID NO: 223394 - RNA, 32 nt, Human
uaggugacugcacugcagcccacauggagagc

SEQ ID NO: 223395 - RNA, 32 nt, Human
uaggugacugucuccuggaaauguuaugcagc

SEQ ID NO: 223396 - RNA, 32 nt, Human
uaggugagaacuggcuuccucauugucccagg

SEQ ID NO: 223397 - RNA, 32 nt, Human
uaggugaggaggcaggagagacacccucccuu

SEQ ID NO: 223398 - RNA, 32 nt, Human
uaggugagggcagaggaggagaucagaaaauc

SEQ ID NO: 223399 - RNA, 32 nt, Human
uaggugaguagggguggugcaagugaauucgu

SEQ ID NO: 223400 - RNA, 32 nt, Human
uaggugaucagcuugaaauucagcuaaccgag

SEQ ID NO: 223401 - RNA, 32 nt, Human
uaggugauggccagucaugugcugguaaaugu

SEQ ID NO: 223402 - RNA, 32 nt, Human
uaggugauggccuggugggguggcucaugccu

SEQ ID NO: 223403 - RNA, 32 nt, Human
uaggugcaacccaauggaccacuuaugcaaaa

SEQ ID NO: 223404 - RNA, 32 nt, Human
uaggugcacgaguuuucauuucaagagucucc

SEQ ID NO: 223405 - RNA, 32 nt, Human
uaggugcacuguccggcuccagccagguccgc

SEQ ID NO: 223406 - RNA, 32 nt, Human
uaggugcaggugagcacaggugcaguggguac

SEQ ID NO: 223407 - RNA, 32 nt, Human
uaggugcauauguauacauacacacacauaua

SEQ ID NO: 223408 - RNA, 32 nt, Human
uaggugcccaggcugaggugaagaggccuggg

SEQ ID NO: 223409 - RNA, 32 nt, Human
uaggugcccgccaccagacccggcuaauuuuu

SEQ ID NO: 223410 - RNA, 32 nt, Human
uaggugcccugagcuguuucugccaauagauu

SEQ ID NO: 223411 - RNA, 32 nt, Human
uaggugccuguaaucccagcuacuugggagac

SEQ ID NO: 223412 - RNA, 32 nt, Human
uaggugccuuucucuuccugcugaccacaagc

SEQ ID NO: 223413 - RNA, 32 nt, Human
uaggugcgagccacugcgcccagccucaguua

SEQ ID NO: 223414 - RNA, 32 nt, Human
uaggugcuaaccaccugcccagaagaguggau

SEQ ID NO: 223415 - RNA, 29 nt, Human
uaggugcucaauaaagacuuguugaauga

SEQ ID NO: 223416 - RNA, 31 nt, Human
uaggugcucaauaaauauuuauaugagugaa

SEQ ID NO: 223417 - RNA, 31 nt, Human
uaggugcucaauaaaugcauauugaauaacu

SEQ ID NO: 223418 - RNA, 31 nt, Human
uaggugcucaauaaauguugaaaccaacuga

SEQ ID NO: 223419 - RNA, 31 nt, Human
uaggugcucaauaaguauccaaugaguggac

SEQ ID NO: 223420 - RNA, 32 nt, Human
uaggugcucagguuugugcucuuggaugaaac

SEQ ID NO: 223421 - RNA, 32 nt, Human
uaggugcuggaagguauuggcucccuguuuug

SEQ ID NO: 223422 - RNA, 32 nt, Human
uaggugcuggaagguauuggcuccuuguuuug

SEQ ID NO: 223423 - RNA, 32 nt, Human
uaggugcugggaaaagggcuuguggggugccu

SEQ ID NO: 223424 - RNA, 32 nt, Human
uaggugcugggaauaccacugaugagacagac

SEQ ID NO: 223425 - RNA, 32 nt, Human
uagguggacccggucucccacaggugacauca

SEQ ID NO: 223426 - RNA, 32 nt, Human
uagguggagggaaggaaggagggagccgggga

SEQ ID NO: 223427 - RNA, 32 nt, Human
uaggugggcagcccucacaggggaggccgagg

SEQ ID NO: 223428 - RNA, 25 nt, Human
uaggugggcggaucacaaggucagg

SEQ ID NO: 223429 - RNA, 32 nt, Human
uagguggggucacugccccuccuggguuagca

SEQ ID NO: 223430 - RNA, 32 nt, Human
uaggugggucugaacccucuggcuucagagag

SEQ ID NO: 223431 - RNA, 32 nt, Human
uaggugggugauauucuggucugcaccguacc

SEQ ID NO: 223432 - RNA, 32 nt, Human
uagguggguucgugcgccuucuaccucgcugu

SEQ ID NO: 223433 - RNA, 32 nt, Human
uaggugguacaugcacaguugcucugggaguc

SEQ ID NO: 223434 - RNA, 32 nt, Human
uagguggucuugaacuccugaugucaggugau

SEQ ID NO: 223435 - RNA, 32 nt, Human
uagguggugccacugcacuccaaccuggggga

SEQ ID NO: 223436 - RNA, 32 nt, Human
uagguggugcugcugcuccauucccaaguaac

SEQ ID NO: 223437 - RNA, 32 nt, Human
uagguguaagaaacugcuuuuaucucauuuau

SEQ ID NO: 223438 - RNA, 32 nt, Human
uaggugucacuaccucuaaccuuuuuaaucgc

SEQ ID NO: 223439 - RNA, 32 nt, Human
uaggugucagccaccgcacccagccuggagug

SEQ ID NO: 223440 - RNA, 32 nt, Human
uaggugucuggccaggcccaccugcugcggau

SEQ ID NO: 223441 - RNA, 31 nt, Human
uaggugugacuucucuuccuuagaggggcau

SEQ ID NO: 223442 - RNA, 32 nt, Human
uaggugugagccaccacacccagccucuauau

SEQ ID NO: 223443 - RNA, 32 nt, Human
uaggugugagccaccacgccuggcuaauuuuu

SEQ ID NO: 223444 - RNA, 32 nt, Human
uaggugugagccaccaugcccagccccuucug

SEQ ID NO: 223445 - RNA, 32 nt, Human
uaggugugagccacccugcucaaccagguuuu

SEQ ID NO: 223446 - RNA, 32 nt, Human
uaggugugagccaccgcacccagccaaaccuu

SEQ ID NO: 223447 - RNA, 32 nt, Human
uaggugugagccaccgcaccuggccgauauuu

SEQ ID NO: 223448 - RNA, 32 nt, Human
uaggugugagccaccgcgccgggccgguugcu

SEQ ID NO: 223449 - RNA, 32 nt, Human
uaggugugagccaccgugccgggccuggacuu

SEQ ID NO: 223450 - RNA, 32 nt, Human
uaggugugagccacugcacccggccuccaagc

SEQ ID NO: 223451 - RNA, 32 nt, Human
uaggugugagccacugcaccuggccuggagcu

SEQ ID NO: 223452 - RNA, 32 nt, Human
uaggugugagccacugcgccuggcuaaguuau

SEQ ID NO: 223453 - RNA, 32 nt, Human
uaggugugagccacugucccuggccuauacgg

SEQ ID NO: 223454 - RNA, 32 nt, Human
uaggugugagccagcacgucugguuaauuuau

SEQ ID NO: 223455 - RNA, 32 nt, Human
uaggugugagccagcaugccuggccccuggaa

SEQ ID NO: 223456 - RNA, 32 nt, Human
uaggugugagccaucacgccaggucaagagcc

SEQ ID NO: 223457 - RNA, 18 nt, Human
uaggugugcaccaccacg

SEQ ID NO: 223458 - RNA, 18 nt, Human
uaggugugcaccaccaug

SEQ ID NO: 223459 - RNA, 32 nt, Human
uaggugugcaccaccaugccuggcuaauuuuu

SEQ ID NO: 223460 - RNA, 29 nt, Human
uaggugugguggcgugugccugugauccc

SEQ ID NO: 223461 - RNA, 31 nt, Human
uagguguucaauaaauauuuguugaaugaau

SEQ ID NO: 223462 - RNA, 32 nt, Human
uagguguugcccaaauucagugucagugaagu

SEQ ID NO: 223463 - RNA, 32 nt, Human
uagguguuuuauucuuuuuguggcaguuguga

SEQ ID NO: 223464 - RNA, 32 nt, Human
uagguguuuucaaaacacaguccggaguguaa

SEQ ID NO: 223465 - RNA, 32 nt, Human
uagguuaaaauggcugaaaaugugaucuuugg

SEQ ID NO: 223466 - RNA, 32 nt, Human
uagguuaccacucugggcauugccuuuccacc

SEQ ID NO: 223467 - RNA, 32 nt, Human
uagguuacuuuuucucuuuaagcaauuauucc

SEQ ID NO: 223468 - RNA, 32 nt, Human
uagguuaggcccugcacuccaccuggggacgg

SEQ ID NO: 223469 - RNA, 32 nt, Human
uagguuaugacaggagcagcacugcagccaca

SEQ ID NO: 223470 - RNA, 32 nt, Human
uagguuauggugccucacaccuguaaucccag

SEQ ID NO: 223471 - RNA, 32 nt, Human
uagguuauucaaaguuuucagcucuuuuaaaa

SEQ ID NO: 223472 - RNA, 32 nt, Human
uagguucacagaaaaauugagcagaguacaua

SEQ ID NO: 223473 - RNA, 32 nt, Human
uagguucacauguauuaccucuuggcuucacc

SEQ ID NO: 223474 - RNA, 32 nt, Human
uagguucagccaagguuuuauaaggcugaugu

SEQ ID NO: 223475 - RNA, 32 nt, Human
uagguucaguagguagagaccaagcaucuauc

SEQ ID NO: 223476 - RNA, 32 nt, Human
uagguucaugaucuacauuggggccugggauu

SEQ ID NO: 223477 - RNA, 32 nt, Human
uagguuccaguuacagcuuggaucuggcauaa

SEQ ID NO: 223478 - RNA, 32 nt, Human
uagguucccaucucuccuucugccucacucug

SEQ ID NO: 223479 - RNA, 32 nt, Human
uagguucuagguuugaaacagaugcagaaucc

SEQ ID NO: 223480 - RNA, 32 nt, Human
uagguucucaggguuagaaacagucuugcgag

SEQ ID NO: 223481 - RNA, 32 nt, Human
uagguucuuggaaauggcaacuuuaaacaaaa

SEQ ID NO: 223482 - RNA, 32 nt, Human
uagguugaauaagguguggaaaaugcuuuucu

SEQ ID NO: 223483 - RNA, 32 nt, Human
uagguugcaacaguggagugauuuugaagaag

SEQ ID NO: 223484 - RNA, 32 nt, Human
uagguugcagaacuucaugaaagcuuuacuaa

SEQ ID NO: 223485 - RNA, 32 nt, Human
uagguugcagugagcugagaucacaccaaaau

SEQ ID NO: 223486 - RNA, 32 nt, Human
uagguugccaugagccauggugucaacaugcu

SEQ ID NO: 223487 - RNA, 31 nt, Human
uagguuggagugggcaucacagccagggugg

SEQ ID NO: 223488 - RNA, 32 nt, Human
uagguuggggcggaggaagcuggaggauaggg

SEQ ID NO: 223489 - RNA, 32 nt, Human
uagguuguccagcauaaggagccccagaguuc

SEQ ID NO: 223490 - RNA, 32 nt, Human
uagguuguccuagaaaggguguggagggagga

SEQ ID NO: 223491 - RNA, 32 nt, Human
uagguuguggugagcugagaucgcgccauugc

SEQ ID NO: 223492 - RNA, 32 nt, Human
uagguuuaaagaaaagggaauguuuucugcug

SEQ ID NO: 223493 - RNA, 32 nt, Human
uagguuucauagaguccucuccucugcaaugu

SEQ ID NO: 223494 - RNA, 32 nt, Human
uagguuuccaggccucacagccaagcugaagc

SEQ ID NO: 223495 - RNA, 32 nt, Human
uagguuugacuuuuugaaacaaaagucauuca

SEQ ID NO: 223496 - RNA, 32 nt, Human
uagguuugaugaagccagcaauggcaacaagu

SEQ ID NO: 223497 - RNA, 32 nt, Human
uagguuugcaaacaaaguuaagaaauaggaaa

SEQ ID NO: 223498 - RNA, 32 nt, Human
uagguuuggaccagucugaauccagaggauca

SEQ ID NO: 223499 - RNA, 32 nt, Human
uagguuuggauucuuuaauaauaucuaaaaag

SEQ ID NO: 223500 - RNA, 32 nt, Human
uagguuuuauuuccucauugcaauuuccuggc

SEQ ID NO: 223501 - RNA, 31 nt, Human
uagguuuucaaaaauaccuggcaagaaaucu

SEQ ID NO: 223502 - RNA, 32 nt, Human
uagguuuugcuacaugacggguugugagacuu

SEQ ID NO: 223503 - RNA, 32 nt, Human
uagguuuuuggagcuucucugcuucaugucuu

SEQ ID NO: 223504 - RNA, 32 nt, Human
uaguaaaaaccugugaccagagcugaaggaag

SEQ ID NO: 223505 - RNA, 32 nt, Human
uaguaaaaauagauuacuugugaaauuauuuu

SEQ ID NO: 223506 - RNA, 32 nt, Human
uaguaaaagagaguguuugagagcagaagcua

SEQ ID NO: 223507 - RNA, 32 nt, Human
uaguaaacaagaaaauacucuugagugaaaug

SEQ ID NO: 223508 - RNA, 32 nt, Human
uaguaaacauaaggaaaauaacauuuauuuaa

SEQ ID NO: 223509 - RNA, 32 nt, Human
uaguaaaccugacauuccaggcccaugagggg

SEQ ID NO: 223510 - RNA, 32 nt, Human
uaguaaacucaaugacaccacacuucaggugc

SEQ ID NO: 223511 - RNA, 32 nt, Human
uaguaaagacaggguuucaccauauuggccag

SEQ ID NO: 223512 - RNA, 32 nt, Human
uaguaaagacaggguuucaccauguuggccag

SEQ ID NO: 223513 - RNA, 32 nt, Human
uaguaaagacaggguuucaccguguuagccag

SEQ ID NO: 223514 - RNA, 32 nt, Human
uaguaaagacaggguuucaucauguuggccug

SEQ ID NO: 223515 - RNA, 32 nt, Human
uaguaaagacaggguuucuccauguuggucag

SEQ ID NO: 223516 - RNA, 32 nt, Human
uaguaaagacgggguuucaccauguuggucag

SEQ ID NO: 223517 - RNA, 32 nt, Human
uaguaaagaugggguuucaccauguuggccag

SEQ ID NO: 223518 - RNA, 32 nt, Human
uaguaaaggagcagcuggaggaggagcaggga

SEQ ID NO: 223519 - RNA, 32 nt, Human
uaguaaaggucaggaguucaagacaagaccag

SEQ ID NO: 223520 - RNA, 32 nt, Human
uaguaaauaagagagaggaaggaggugacguu

SEQ ID NO: 223521 - RNA, 32 nt, Human
uaguaaaucaucaaaaugagauaauaagugcu

SEQ ID NO: 223522 - RNA, 32 nt, Human
uaguaaaucuaugagcaacuccuuacuucggu

SEQ ID NO: 223523 - RNA, 32 nt, Human
uaguaacagaagcaucugguucugugaauaaa

SEQ ID NO: 223524 - RNA, 32 nt, Human
uaguaacaggcgugaagucaggagaauuugag

SEQ ID NO: 223525 - RNA, 32 nt, Human
uaguaacauauguauacaugugccaugcuggu

SEQ ID NO: 223526 - RNA, 32 nt, Human
uaguaaccaaagagaaaauccaggaagccaaa

SEQ ID NO: 223527 - RNA, 32 nt, Human
uaguaacccaaagaagugaaggagaaagcagc

SEQ ID NO: 223528 - RNA, 32 nt, Human
uaguaaccugcucuguccuuagucauccuuag

SEQ ID NO: 223529 - RNA, 32 nt, Human
uaguaacuuuccaauaugauuucuccguggua

SEQ ID NO: 223530 - RNA, 32 nt, Human
uaguaagaaaacaucacugaaaugcuagcugc

SEQ ID NO: 223531 - RNA, 24 nt, Human
uaguaagacccccaucgcuacaaa

SEQ ID NO: 223532 - RNA, 32 nt, Human
uaguaagagagggagcagggagaccaguuacg

SEQ ID NO: 223533 - RNA, 32 nt, Human
uaguaagauaggaagugaggccagguaccuug

SEQ ID NO: 223534 - RNA, 32 nt, Human
uaguaagccccugugacccucucacuuacccc

SEQ ID NO: 223535 - RNA, 32 nt, Human
uaguaagcuagcaucuuacugccgucaauauu

SEQ ID NO: 223536 - RNA, 32 nt, Human
uaguaaggacaaaaggaagcacuguggcuaua

SEQ ID NO: 223537 - RNA, 32 nt, Human
uaguaaggaccacaagucucagaagaguagga

SEQ ID NO: 223538 - RNA, 32 nt, Human
uaguaaggagaaauuaagaccagcuggcuguu

SEQ ID NO: 223539 - RNA, 32 nt, Human
uaguaaggaggccaguuuggaggcaggcguug

SEQ ID NO: 223540 - RNA, 32 nt, Human
uaguaaguauuucaacucuggaaacaagaugg

SEQ ID NO: 223541 - RNA, 23 nt, Human
uaguaagucgugaguucaagauu

SEQ ID NO: 223542 - RNA, 32 nt, Human
uaguaaguggcagaacagggacuugaaccaag

SEQ ID NO: 223543 - RNA, 32 nt, Human
uaguaauaauucacaccuugcacagcaugaga

SEQ ID NO: 223544 - RNA, 32 nt, Human
uaguaauagaucugagcaacacauggaguauc

SEQ ID NO: 223545 - RNA, 32 nt, Human
uaguaaucaagauaguguggcuuugguguaag

SEQ ID NO: 223546 - RNA, 32 nt, Human
uaguaauccaggauuucucugagaacugggau

SEQ ID NO: 223547 - RNA, 32 nt, Human
uaguaauccauuaguuauggccagcaguguuc

SEQ ID NO: 223548 - RNA, 32 nt, Human
uaguaaugacaggguuucaccguguuggccag

SEQ ID NO: 223549 - RNA, 32 nt, Human
uaguaaugaugucccagcauuugauguucccu

SEQ ID NO: 223550 - RNA, 32 nt, Human
uaguaaugcugggaaggagcagcagagucugg

SEQ ID NO: 223551 - RNA, 32 nt, Human
uaguaauggaggugcugugccaugaccagcag

SEQ ID NO: 223552 - RNA, 32 nt, Human
uaguaauucacaguccucagaagccuauuuuu

SEQ ID NO: 223553 - RNA, 32 nt, Human
uaguaauucuugcccauggagggauuagugac

SEQ ID NO: 223554 - RNA, 32 nt, Human
uaguaauugcuccccuguuccuucaccucccc

SEQ ID NO: 223555 - RNA, 21 nt, Human
uaguacaagaaagagcaauga

SEQ ID NO: 223556 - RNA, 32 nt, Human
uaguacaccauggagcacgguuuaagcaccac

SEQ ID NO: 223557 - RNA, 32 nt, Human
uaguacagacgggguuucaccauguuggccag

SEQ ID NO: 223558 - RNA, 32 nt, Human
uaguacagacgggguuucaccauguuggucag

SEQ ID NO: 223559 - RNA, 32 nt, Human
uaguacagacgggguuucacuguguugcccag

SEQ ID NO: 223560 - RNA, 32 nt, Human
uaguacagacgggguuucuccguguuggucag

SEQ ID NO: 223561 - RNA, 32 nt, Human
uaguacagacgguguuucaccauguuagucag

SEQ ID NO: 223562 - RNA, 32 nt, Human
uaguacagagacaaagugagauuuucacuuag

SEQ ID NO: 223563 - RNA, 32 nt, Human
uaguacagaggggguuucaccauguuugucag

SEQ ID NO: 223564 - RNA, 32 nt, Human
uaguacagaugggguuucaccauguuggccag

SEQ ID NO: 223565 - RNA, 32 nt, Human
uaguacagaugggguuucaccauguuggucag

SEQ ID NO: 223566 - RNA, 32 nt, Human
uaguacagugccugguauauaguaggugcuca

SEQ ID NO: 223567 - RNA, 32 nt, Human
uaguacaguggugccaucucagcucacugcaa

SEQ ID NO: 223568 - RNA, 32 nt, Human
uaguacauuaacauccccuuuucauuacccca

SEQ ID NO: 223569 - RNA, 32 nt, Human
uaguaccacugcacuccagccugggcaacaga

SEQ ID NO: 223570 - RNA, 32 nt, Human
uaguaccacugcacuccagccugggcgacaga

SEQ ID NO: 223571 - RNA, 32 nt, Human
uaguaccagcuacucgagaggcugagucagga

SEQ ID NO: 223572 - RNA, 32 nt, Human
uaguaccagcuacucuggaggcugaggcagga

SEQ ID NO: 223573 - RNA, 32 nt, Human
uaguaccagcuauuuuaaaggcuaaggcagga

SEQ ID NO: 223574 - RNA, 32 nt, Human
uaguacccuguacucuaguccccagcccccag

SEQ ID NO: 223575 - RNA, 32 nt, Human
uaguaccucaggugguacaggagaaggugaga

SEQ ID NO: 223576 - RNA, 32 nt, Human
uaguaccugcagcugcuucuccacaccccugc

SEQ ID NO: 223577 - RNA, 32 nt, Human
uaguaccugcugcacagguuauuaaugaguaa

SEQ ID NO: 223578 - RNA, 32 nt, Human
uaguaccuggcagcuucucccuuagccuggaa

SEQ ID NO: 223579 - RNA, 32 nt, Human
uaguaccuuccagaugggcaaaaguguacacu

SEQ ID NO: 223580 - RNA, 32 nt, Human
uaguacuacuggguaaccagagccaagcguga

SEQ ID NO: 223581 - RNA, 32 nt, Human
uaguacuaggugaauaggaaaauaaaucaugc

SEQ ID NO: 223582 - RNA, 32 nt, Human
uaguacuauuauggaauuacucuacuguucuu

SEQ ID NO: 223583 - RNA, 32 nt, Human
uaguacuccacuuccggacuccuggacugcau

SEQ ID NO: 223584 - RNA, 32 nt, Human
uaguacugaagccaaaugaaacucaaaaccau

SEQ ID NO: 223585 - RNA, 31 nt, Human
uaguacugccucuguggacuuagguuccagu

SEQ ID NO: 223586 - RNA, 32 nt, Human
uaguacugcucauugacaaugcaccuggccau

SEQ ID NO: 223587 - RNA, 32 nt, Human
uaguacuguggugaggagcacuggggaaagcc

SEQ ID NO: 223588 - RNA, 32 nt, Human
uaguacuguguugucaggcucuucccaggccu

SEQ ID NO: 223589 - RNA, 32 nt, Human
uaguacuugggccggugaguccagccucagga

SEQ ID NO: 223590 - RNA, 32 nt, Human
uaguacuuugggaggccgagacaggcagauug

SEQ ID NO: 223591 - RNA, 32 nt, Human
uaguacuuuuaugacuguaaauacucuggcuu

SEQ ID NO: 223592 - RNA, 32 nt, Human
uaguagaaacaggcuuucaccauguuggccag

SEQ ID NO: 223593 - RNA, 32 nt, Human
uaguagaaacaggguuucaccaugcuggccau

SEQ ID NO: 223594 - RNA, 32 nt, Human
uaguagaaacaggguuucaccauguuagccag

SEQ ID NO: 223595 - RNA, 32 nt, Human
uaguagaaacaggguuucacuguguuggccca

SEQ ID NO: 223596 - RNA, 32 nt, Human
uaguagaaacccgugggacauacacaugggcc

SEQ ID NO: 223597 - RNA, 32 nt, Human
uaguagaaacgggacuucaccauguugcccag

SEQ ID NO: 223598 - RNA, 32 nt, Human
uaguagaaacgggguuucaccauauuggucag

SEQ ID NO: 223599 - RNA, 32 nt, Human
uaguagaaacgggguuucaccauguugcucag

SEQ ID NO: 223600 - RNA, 32 nt, Human
uaguagaaacgggguuucaccauguuggccag

SEQ ID NO: 223601 - RNA, 32 nt, Human
uaguagaaacgggguuucaccauguuggccgg

SEQ ID NO: 223602 - RNA, 32 nt, Human
uaguagaaacgggguuuugccauguuggccag

SEQ ID NO: 223603 - RNA, 32 nt, Human
uaguagaaaugaggucucgccauguugcucag

SEQ ID NO: 223604 - RNA, 32 nt, Human
uaguagaaauggggauucaccauguuggucag

SEQ ID NO: 223605 - RNA, 32 nt, Human
uaguagaaaugggguuucaccauguuagccag

SEQ ID NO: 223606 - RNA, 32 nt, Human
uaguagaaaugggguuucaccauguuggccag

SEQ ID NO: 223607 - RNA, 32 nt, Human
uaguagaaaugggguuucacuguguuagccag

SEQ ID NO: 223608 - RNA, 32 nt, Human
uaguagaaaugggguuucgccacguuggccag

SEQ ID NO: 223609 - RNA, 32 nt, Human
uaguagaaaugggguuucgucauguuggccag

SEQ ID NO: 223610 - RNA, 32 nt, Human
uaguagaaaugggguuuuaccauguuguccag

SEQ ID NO: 223611 - RNA, 32 nt, Human
uaguagaaaugggguuuuaccguguuggccag

SEQ ID NO: 223612 - RNA, 32 nt, Human
uaguagaaaugggguuuugccauguuggccag

SEQ ID NO: 223613 - RNA, 32 nt, Human
uaguagaaguuaaggaugagaaaacaagcagu

SEQ ID NO: 223614 - RNA, 32 nt, Human
uaguagacaaagauguuauuucccagugcaaa

SEQ ID NO: 223615 - RNA, 32 nt, Human
uaguagacacaggguuucaccauauuggccag

SEQ ID NO: 223616 - RNA, 32 nt, Human
uaguagacacaggguuucuccauguuggucag

SEQ ID NO: 223617 - RNA, 32 nt, Human
uaguagacacggguuuucaccauguuggucag

SEQ ID NO: 223618 - RNA, 32 nt, Human
uaguagacaugagguuuugccauguuguccgg

SEQ ID NO: 223619 - RNA, 32 nt, Human
uaguagacaugggguuucaccacauuggccag

SEQ ID NO: 223620 - RNA, 32 nt, Human
uaguagacaugggguuucaccauguugcccag

SEQ ID NO: 223621 - RNA, 32 nt, Human
uaguagacgugggguuucaccauguuggccag

SEQ ID NO: 223622 - RNA, 32 nt, Human
uaguagacuaauccuucucugcuuguucuuca

SEQ ID NO: 223623 - RNA, 32 nt, Human
uaguagagaaaggguuucaccauguugguuag

SEQ ID NO: 223624 - RNA, 32 nt, Human
uaguagagaagagguuucaccauguuggccag

SEQ ID NO: 223625 - RNA, 32 nt, Human
uaguagagaagggauuucaccauguuggccgg

SEQ ID NO: 223626 - RNA, 32 nt, Human
uaguagagaagggguuucaccacauuggccgg

SEQ ID NO: 223627 - RNA, 32 nt, Human
uaguagagacaagauuucaccauguuggccag

SEQ ID NO: 223628 - RNA, 32 nt, Human
uaguagagacaagguuucaccauauuggccag

SEQ ID NO: 223629 - RNA, 32 nt, Human
uaguagagacaagguuucaccauguugaccag

SEQ ID NO: 223630 - RNA, 32 nt, Human
uaguagagacaagguuucaccauguuggucag

SEQ ID NO: 223631 - RNA, 32 nt, Human
uaguagagacaagguuucaccauguuguccag

SEQ ID NO: 223632 - RNA, 32 nt, Human
uaguagagacaagguuucacccuguuggcaag

SEQ ID NO: 223633 - RNA, 32 nt, Human
uaguagagacaagguuucaccggguuggccag

SEQ ID NO: 223634 - RNA, 32 nt, Human
uaguagagacaagguuucgccauguuggccag

SEQ ID NO: 223635 - RNA, 32 nt, Human
uaguagagacaagguuuugccauguugaccag

SEQ ID NO: 223636 - RNA, 32 nt, Human
uaguagagacacaguuuugccauguuggccag

SEQ ID NO: 223637 - RNA, 32 nt, Human
uaguagagacacuguuucgccauguuggcuag

SEQ ID NO: 223638 - RNA, 32 nt, Human
uaguagagacagaguuucaccauguuggccag

SEQ ID NO: 223639 - RNA, 32 nt, Human
uaguagagacagaguuucgccauguuggccag

SEQ ID NO: 223640 - RNA, 32 nt, Human
uaguagagacagaguuuuaccauguuggccag

SEQ ID NO: 223641 - RNA, 32 nt, Human
uaguagagacagaguuuugccauguuggccag

SEQ ID NO: 223642 - RNA, 32 nt, Human
uaguagagacaggaucucccuauguuguccag

SEQ ID NO: 223643 - RNA, 32 nt, Human
uaguagagacaggauuucaccauguuggccag

SEQ ID NO: 223644 - RNA, 32 nt, Human
uaguagagacaggauuucuccauguuggucag

SEQ ID NO: 223645 - RNA, 32 nt, Human
uaguagagacaggauuuuaccauguuggccau

SEQ ID NO: 223646 - RNA, 32 nt, Human
uaguagagacagggcuucaccauguuggcaag

SEQ ID NO: 223647 - RNA, 32 nt, Human
uaguagagacagggcuucaccauguuggcuag

SEQ ID NO: 223648 - RNA, 32 nt, Human
uaguagagacagggucucaccauguuggccag

SEQ ID NO: 223649 - RNA, 32 nt, Human
uaguagagacaggguuucaccacauuggccag

SEQ ID NO: 223650 - RNA, 32 nt, Human
uaguagagacaggguuucaccacguuggccag

SEQ ID NO: 223651 - RNA, 32 nt, Human
uaguagagacaggguuucaccauauuggccag

SEQ ID NO: 223652 - RNA, 32 nt, Human
uaguagagacaggguuucaccauauuggucag

SEQ ID NO: 223653 - RNA, 32 nt, Human
uaguagagacaggguuucaccaugucaagcug

SEQ ID NO: 223654 - RNA, 32 nt, Human
uaguagagacaggguuucaccaugucagccag

SEQ ID NO: 223655 - RNA, 32 nt, Human
uaguagagacaggguuucaccaugugagccag

SEQ ID NO: 223656 - RNA, 32 nt, Human
uaguagagacaggguuucaccauguuagccag

SEQ ID NO: 223657 - RNA, 32 nt, Human
uaguagagacaggguuucaccauguuagccgg

SEQ ID NO: 223658 - RNA, 32 nt, Human
uaguagagacaggguuucaccauguuagucag

SEQ ID NO: 223659 - RNA, 32 nt, Human
uaguagagacaggguuucaccauguugaccug

SEQ ID NO: 223660 - RNA, 32 nt, Human
uaguagagacaggguuucaccauguugcccag

SEQ ID NO: 223661 - RNA, 32 nt, Human
uaguagagacaggguuucaccauguugccuag

SEQ ID NO: 223662 - RNA, 32 nt, Human
uaguagagacaggguuucaccauguuggacag

SEQ ID NO: 223663 - RNA, 32 nt, Human
uaguagagacaggguuucaccauguuggccag

SEQ ID NO: 223664 - RNA, 32 nt, Human
uaguagagacaggguuucaccauguuggccgg

SEQ ID NO: 223665 - RNA, 32 nt, Human
uaguagagacaggguuucaccauguuggucag

SEQ ID NO: 223666 - RNA, 32 nt, Human
uaguagagacaggguuucaccauguuggucau

SEQ ID NO: 223667 - RNA, 32 nt, Human
uaguagagacaggguuucaccauguuggucgg

SEQ ID NO: 223668 - RNA, 32 nt, Human
uaguagagacaggguuucaccauguugguuag

SEQ ID NO: 223669 - RNA, 32 nt, Human
uaguagagacaggguuucaccauguuguccag

SEQ ID NO: 223670 - RNA, 32 nt, Human
uaguagagacaggguuucaccauguuugccag

SEQ ID NO: 223671 - RNA, 32 nt, Human
uaguagagacaggguuucaccauuuuggccag

SEQ ID NO: 223672 - RNA, 32 nt, Human
uaguagagacaggguuucaccguguuaaccag

SEQ ID NO: 223673 - RNA, 32 nt, Human
uaguagagacaggguuucaccguguuagccag

SEQ ID NO: 223674 - RNA, 32 nt, Human
uaguagagacaggguuucaccguguuggcgag

SEQ ID NO: 223675 - RNA, 32 nt, Human
uaguagagacaggguuucaccguguuggucag

SEQ ID NO: 223676 - RNA, 32 nt, Human
uaguagagacaggguuucacuaugcuggucag

SEQ ID NO: 223677 - RNA, 32 nt, Human
uaguagagacaggguuucacuauguuggccag

SEQ ID NO: 223678 - RNA, 32 nt, Human
uaguagagacaggguuucacuguguuagccag

SEQ ID NO: 223679 - RNA, 32 nt, Human
uaguagagacaggguuucacuguguugcccag

SEQ ID NO: 223680 - RNA, 32 nt, Human
uaguagagacaggguuucaucauguuggccag

SEQ ID NO: 223681 - RNA, 32 nt, Human
uaguagagacaggguuucaucauuguuggcca

SEQ ID NO: 223682 - RNA, 32 nt, Human
uaguagagacaggguuucauuauguuggccag

SEQ ID NO: 223683 - RNA, 32 nt, Human
uaguagagacaggguuucgccauguuggccag

SEQ ID NO: 223684 - RNA, 32 nt, Human
uaguagagacaggguuucgccauguuggcuau

SEQ ID NO: 223685 - RNA, 32 nt, Human
uaguagagacaggguuucuccauguuggucag

SEQ ID NO: 223686 - RNA, 32 nt, Human
uaguagagacaggguuucuccauguuggucgg

SEQ ID NO: 223687 - RNA, 32 nt, Human
uaguagagacaggguuucuccauguugguuag

SEQ ID NO: 223688 - RNA, 32 nt, Human
uaguagagacaggguuuuaccauguuggccag

SEQ ID NO: 223689 - RNA, 32 nt, Human
uaguagagacaggguuuuaccauguuggucag

SEQ ID NO: 223690 - RNA, 32 nt, Human
uaguagagacaggguuuugccauguugcccag

SEQ ID NO: 223691 - RNA, 32 nt, Human
uaguagagacaggguuuugccauguuggccag

SEQ ID NO: 223692 - RNA, 32 nt, Human
uaguagagacagguuuucaccauguuggccag

SEQ ID NO: 223693 - RNA, 32 nt, Human
uaguagagacagguuuucaccauguuggcgag

SEQ ID NO: 223694 - RNA, 32 nt, Human
uaguagagacaguguuucaccauguugaccag

SEQ ID NO: 223695 - RNA, 32 nt, Human
uaguagagacaguguuucaccauguuggccag

SEQ ID NO: 223696 - RNA, 32 nt, Human
uaguagagacaguguuucgccauguuggccag

SEQ ID NO: 223697 - RNA, 32 nt, Human
uaguagagacaguguuuugccauguuggccag

SEQ ID NO: 223698 - RNA, 32 nt, Human
uaguagagacaugguuuugccauguuggccag

SEQ ID NO: 223699 - RNA, 32 nt, Human
uaguagagaccacguuucgccauguuguccag

SEQ ID NO: 223700 - RNA, 32 nt, Human
uaguagagaccaggcuucgccauguuggccag

SEQ ID NO: 223701 - RNA, 32 nt, Human
uaguagagaccagguuuauccauguuggucag

SEQ ID NO: 223702 - RNA, 32 nt, Human
uaguagagaccagguuucaccauguuggccag

SEQ ID NO: 223703 - RNA, 32 nt, Human
uaguagagaccgaguuucgccauguuggccag

SEQ ID NO: 223704 - RNA, 32 nt, Human
uaguagagaccgggcuucaccauguuggccag

SEQ ID NO: 223705 - RNA, 32 nt, Human
uaguagagaccggguuucaccauguuggccag

SEQ ID NO: 223706 - RNA, 32 nt, Human
uaguagagacgaggcuucaccauguuggccag

SEQ ID NO: 223707 - RNA, 32 nt, Human
uaguagagacgagguuucaccaucuuggccag

SEQ ID NO: 223708 - RNA, 32 nt, Human
uaguagagacgagguuucaccaugcuggccaa

SEQ ID NO: 223709 - RNA, 32 nt, Human
uaguagagacgagguuucaccauguugaccag

SEQ ID NO: 223710 - RNA, 32 nt, Human
uaguagagacgagguuucaccauguuggccag

SEQ ID NO: 223711 - RNA, 32 nt, Human
uaguagagacgagguuucacuguguuggccag

SEQ ID NO: 223712 - RNA, 32 nt, Human
uaguagagacgaguuuucaccauguugaccag

SEQ ID NO: 223713 - RNA, 32 nt, Human
uaguagagacgcaguuucaccguguugaccag

SEQ ID NO: 223714 - RNA, 32 nt, Human
uaguagagacggaguugcaccauguuggccag

SEQ ID NO: 223715 - RNA, 32 nt, Human
uaguagagacggaguuucaccauauuggcugg

SEQ ID NO: 223716 - RNA, 32 nt, Human
uaguagagacggaguuucaccauguuagccag

SEQ ID NO: 223717 - RNA, 32 nt, Human
uaguagagacggaguuucaccauguuggccac

SEQ ID NO: 223718 - RNA, 32 nt, Human
uaguagagacggaguuucaccauguuggccag

SEQ ID NO: 223719 - RNA, 32 nt, Human
uaguagagacggaguuucaccauguugguuag

SEQ ID NO: 223720 - RNA, 32 nt, Human
uaguagagacggaguuucaccguguuagccag

SEQ ID NO: 223721 - RNA, 32 nt, Human
uaguagagacggaguuucuccauguuggccag

SEQ ID NO: 223722 - RNA, 32 nt, Human
uaguagagacggaguuuugccauguuggccaa

SEQ ID NO: 223723 - RNA, 32 nt, Human
uaguagagacggcauuucaccaugucagccag

SEQ ID NO: 223724 - RNA, 32 nt, Human
uaguagagacggcauuucaccauguuggccag

SEQ ID NO: 223725 - RNA, 32 nt, Human
uaguagagacggcguuucaccauguuggccag

SEQ ID NO: 223726 - RNA, 32 nt, Human
uaguagagacggcguuucaccauuuuggccgg

SEQ ID NO: 223727 - RNA, 32 nt, Human
uaguagagacggcguuucaccguguuggccag

SEQ ID NO: 223728 - RNA, 32 nt, Human
uaguagagacgggauuucaccauguuggccag

SEQ ID NO: 223729 - RNA, 32 nt, Human
uaguagagacgggauuucaccauguuggucag

SEQ ID NO: 223730 - RNA, 32 nt, Human
uaguagagacgggauuucuccauguugaucag

SEQ ID NO: 223731 - RNA, 32 nt, Human
uaguagagacgggcuuucaccauguuagccag

SEQ ID NO: 223732 - RNA, 32 nt, Human
uaguagagacggggauucaccauguuggccag

SEQ ID NO: 223733 - RNA, 32 nt, Human
uaguagagacggggcuucaccaucuuggccag

SEQ ID NO: 223734 - RNA, 32 nt, Human
uaguagagacggggcuucuccauguuggucag

SEQ ID NO: 223735 - RNA, 32 nt, Human
uaguagagacggggcuuugccauguuggccag

SEQ ID NO: 223736 - RNA, 32 nt, Human
uaguagagacggggguuugccauguugcccag

SEQ ID NO: 223737 - RNA, 32 nt, Human
uaguagagacgggguuuaaccauguuggccag

SEQ ID NO: 223738 - RNA, 32 nt, Human
uaguagagacgggguuucaacauauuggccag

SEQ ID NO: 223739 - RNA, 32 nt, Human
uaguagagacgggguuucaccacauugcucag

SEQ ID NO: 223740 - RNA, 32 nt, Human
uaguagagacgggguuucaccacauuggccag

SEQ ID NO: 223741 - RNA, 32 nt, Human
uaguagagacgggguuucaccacauuggucag

SEQ ID NO: 223742 - RNA, 32 nt, Human
uaguagagacgggguuucaccacguuggccag

SEQ ID NO: 223743 - RNA, 32 nt, Human
uaguagagacgggguuucaccacguuggccgg

SEQ ID NO: 223744 - RNA, 32 nt, Human
uaguagagacgggguuucaccagguuagccag

SEQ ID NO: 223745 - RNA, 32 nt, Human
uaguagagacgggguuucaccauacuggccag

SEQ ID NO: 223746 - RNA, 32 nt, Human
uaguagagacgggguuucaccauauuggccaa

SEQ ID NO: 223747 - RNA, 32 nt, Human
uaguagagacgggguuucaccauauuggccag

SEQ ID NO: 223748 - RNA, 32 nt, Human
uaguagagacgggguuucaccaucuuggccag

SEQ ID NO: 223749 - RNA, 32 nt, Human
uaguagagacgggguuucaccaugcuggccag

SEQ ID NO: 223750 - RNA, 32 nt, Human
uaguagagacgggguuucaccaugucggccag

SEQ ID NO: 223751 - RNA, 32 nt, Human
uaguagagacgggguuucaccauguuaccuag

SEQ ID NO: 223752 - RNA, 32 nt, Human
uaguagagacgggguuucaccauguuagacag

SEQ ID NO: 223753 - RNA, 32 nt, Human
uaguagagacgggguuucaccauguuagccag

SEQ ID NO: 223754 - RNA, 32 nt, Human
uaguagagacgggguuucaccauguuagcuag

SEQ ID NO: 223755 - RNA, 32 nt, Human
uaguagagacgggguuucaccauguugaccag

SEQ ID NO: 223756 - RNA, 32 nt, Human
uaguagagacgggguuucaccauguugcccag

SEQ ID NO: 223757 - RNA, 32 nt, Human
uaguagagacgggguuucaccauguugcucag

SEQ ID NO: 223758 - RNA, 32 nt, Human
uaguagagacgggguuucaccauguuggccaa

SEQ ID NO: 223759 - RNA, 32 nt, Human
uaguagagacgggguuucaccauguuggccag

SEQ ID NO: 223760 - RNA, 32 nt, Human
uaguagagacgggguuucaccauguuggccgg

SEQ ID NO: 223761 - RNA, 32 nt, Human
uaguagagacgggguuucaccauguuggcuag

SEQ ID NO: 223762 - RNA, 32 nt, Human
uaguagagacgggguuucaccauguugggcag

SEQ ID NO: 223763 - RNA, 32 nt, Human
uaguagagacgggguuucaccauguuggucag

SEQ ID NO: 223764 - RNA, 32 nt, Human
uaguagagacgggguuucaccauguugucagg

SEQ ID NO: 223765 - RNA, 32 nt, Human
uaguagagacgggguuucaccauuuugaccag

SEQ ID NO: 223766 - RNA, 32 nt, Human
uaguagagacgggguuucaccauuuuggccag

SEQ ID NO: 223767 - RNA, 32 nt, Human
uaguagagacgggguuucaccguguuaaccag

SEQ ID NO: 223768 - RNA, 32 nt, Human
uaguagagacgggguuucaccguguuagccag

SEQ ID NO: 223769 - RNA, 32 nt, Human
uaguagagacgggguuucaccguguuagccgg

SEQ ID NO: 223770 - RNA, 32 nt, Human
uaguagagacgggguuucaccguguuagucag

SEQ ID NO: 223771 - RNA, 32 nt, Human
uaguagagacgggguuucaccguguugaccag

SEQ ID NO: 223772 - RNA, 32 nt, Human
uaguagagacgggguuucaccguguugcccag

SEQ ID NO: 223773 - RNA, 32 nt, Human
uaguagagacgggguuucaccguguuggccag

SEQ ID NO: 223774 - RNA, 32 nt, Human
uaguagagacgggguuucaccguguuggccgg

SEQ ID NO: 223775 - RNA, 32 nt, Human
uaguagagacgggguuucaccguguuggcuag

SEQ ID NO: 223776 - RNA, 32 nt, Human
uaguagagacgggguuucaccguguuguccag

SEQ ID NO: 223777 - RNA, 32 nt, Human
uaguagagacgggguuucaccuuguuagccag

SEQ ID NO: 223778 - RNA, 32 nt, Human
uaguagagacgggguuucaccuuguuggccag

SEQ ID NO: 223779 - RNA, 32 nt, Human
uaguagagacgggguuucacuauauuggccag

SEQ ID NO: 223780 - RNA, 32 nt, Human
uaguagagacgggguuucacuaugcuggccag

SEQ ID NO: 223781 - RNA, 32 nt, Human
uaguagagacgggguuucacuauguuggccag

SEQ ID NO: 223782 - RNA, 32 nt, Human
uaguagagacgggguuucacuguguuagccag

SEQ ID NO: 223783 - RNA, 32 nt, Human
uaguagagacgggguuucacuguguuggccag

SEQ ID NO: 223784 - RNA, 32 nt, Human
uaguagagacgggguuucagcauguuggcuag

SEQ ID NO: 223785 - RNA, 32 nt, Human
uaguagagacgggguuucaucauauuggucag

SEQ ID NO: 223786 - RNA, 32 nt, Human
uaguagagacgggguuucaucauguuggccag

SEQ ID NO: 223787 - RNA, 32 nt, Human
uaguagagacgggguuucaucguguuaaccag

SEQ ID NO: 223788 - RNA, 32 nt, Human
uaguagagacgggguuucaucguguuagccag

SEQ ID NO: 223789 - RNA, 32 nt, Human
uaguagagacgggguuuccccauguuggucag

SEQ ID NO: 223790 - RNA, 32 nt, Human
uaguagagacgggguuuccccguguuagccag

SEQ ID NO: 223791 - RNA, 32 nt, Human
uaguagagacgggguuucgccauguugcccag

SEQ ID NO: 223792 - RNA, 32 nt, Human
uaguagagacgggguuucgccauguuggucag

SEQ ID NO: 223793 - RNA, 32 nt, Human
uaguagagacgggguuucgccauguuguccgg

SEQ ID NO: 223794 - RNA, 32 nt, Human
uaguagagacgggguuucgccauuuuggccag

SEQ ID NO: 223795 - RNA, 32 nt, Human
uaguagagacgggguuucgccguguuggccag

SEQ ID NO: 223796 - RNA, 32 nt, Human
uaguagagacgggguuucgcuauuuuggccgg

SEQ ID NO: 223797 - RNA, 32 nt, Human
uaguagagacgggguuucggcauguuggccag

SEQ ID NO: 223798 - RNA, 32 nt, Human
uaguagagacgggguuucuccacauuggucag

SEQ ID NO: 223799 - RNA, 32 nt, Human
uaguagagacgggguuucuccauguuagucag

SEQ ID NO: 223800 - RNA, 32 nt, Human
uaguagagacgggguuucuccauguuggucag

SEQ ID NO: 223801 - RNA, 32 nt, Human
uaguagagacgggguuucuccauguuggucug

SEQ ID NO: 223802 - RNA, 32 nt, Human
uaguagagacgggguuucuccauguugguuag

SEQ ID NO: 223803 - RNA, 32 nt, Human
uaguagagacgggguuucuccguguuggucag

SEQ ID NO: 223804 - RNA, 32 nt, Human
uaguagagacgggguuucuccuuguuggucag

SEQ ID NO: 223805 - RNA, 32 nt, Human
uaguagagacgggguuugaccauguuggucag

SEQ ID NO: 223806 - RNA, 32 nt, Human
uaguagagacgggguuuugccauguugcccgg

SEQ ID NO: 223807 - RNA, 32 nt, Human
uaguagagacgggguuuugccauguuggccag

SEQ ID NO: 223808 - RNA, 32 nt, Human
uaguagagacgggguuuugccauguuggccau

SEQ ID NO: 223809 - RNA, 32 nt, Human
uaguagagacggguuuucaccauguugccccg

SEQ ID NO: 223810 - RNA, 32 nt, Human
uaguagagacgguguuucaccauauuggccag

SEQ ID NO: 223811 - RNA, 32 nt, Human
uaguagagacgguguuucaccauguuggucag

SEQ ID NO: 223812 - RNA, 32 nt, Human
uaguagagacgugguuucaccauguuggccag

SEQ ID NO: 223813 - RNA, 32 nt, Human
uaguagagacucgguuucaccauguuggucag

SEQ ID NO: 223814 - RNA, 32 nt, Human
uaguagagacuggguuucaccacguuggccag

SEQ ID NO: 223815 - RNA, 32 nt, Human
uaguagagacuggguuucaccauguuggccag

SEQ ID NO: 223816 - RNA, 32 nt, Human
uaguagagacuggguuucaccguguuagcuag

SEQ ID NO: 223817 - RNA, 32 nt, Human
uaguagagagaauggcuucaguuauaccugcc

SEQ ID NO: 223818 - RNA, 32 nt, Human
uaguagagagggaguuucaccauguuggccag

SEQ ID NO: 223819 - RNA, 32 nt, Human
uaguagagagggaguuucaccauguuggucag

SEQ ID NO: 223820 - RNA, 32 nt, Human
uaguagagagggaguuucgccauguuggccag

SEQ ID NO: 223821 - RNA, 32 nt, Human
uaguagagagggcguuuugccauguuggcuag

SEQ ID NO: 223822 - RNA, 32 nt, Human
uaguagagaggggguuucaccacguuggccag

SEQ ID NO: 223823 - RNA, 32 nt, Human
uaguagagaggggguuucaccguguuagccag

SEQ ID NO: 223824 - RNA, 32 nt, Human
uaguagagaggggguuucaucauguuaccuag

SEQ ID NO: 223825 - RNA, 32 nt, Human
uaguagagaguggguuucacuauguuggccag

SEQ ID NO: 223826 - RNA, 32 nt, Human
uaguagagauagggauucaccauguuggccag

SEQ ID NO: 223827 - RNA, 32 nt, Human
uaguagagauagggucucaccauguuggccag

SEQ ID NO: 223828 - RNA, 32 nt, Human
uaguagagauaggguuucaccaugucucccag

SEQ ID NO: 223829 - RNA, 32 nt, Human
uaguagagauaggguuucaccauguugcccag

SEQ ID NO: 223830 - RNA, 32 nt, Human
uaguagagauaggguuucaccauguuggccag

SEQ ID NO: 223831 - RNA, 32 nt, Human
uaguagagaugaaguuucaccguguuggccag

SEQ ID NO: 223832 - RNA, 32 nt, Human
uaguagagaugagguuucaccauguuggccag

SEQ ID NO: 223833 - RNA, 32 nt, Human
uaguagagaugagguuucaccauuuuggccag

SEQ ID NO: 223834 - RNA, 32 nt, Human
uaguagagaugagguuucaccguguuggccag

SEQ ID NO: 223835 - RNA, 32 nt, Human
uaguagagaugagguuucaccuuguuggucag

SEQ ID NO: 223836 - RNA, 32 nt, Human
uaguagagaugagguuucacuguguuggccag

SEQ ID NO: 223837 - RNA, 32 nt, Human
uaguagagaugagguuucgccauguuggccag

SEQ ID NO: 223838 - RNA, 32 nt, Human
uaguagagauggaauuucaccauguuagccag

SEQ ID NO: 223839 - RNA, 32 nt, Human
uaguagagauggaguuucaccauguuacccag

SEQ ID NO: 223840 - RNA, 32 nt, Human
uaguagagauggaguuucaccauguugcccag

SEQ ID NO: 223841 - RNA, 32 nt, Human
uaguagagauggaguuucaccauguuggccag

SEQ ID NO: 223842 - RNA, 32 nt, Human
uaguagagauggcguuucaccauguuggccag

SEQ ID NO: 223843 - RNA, 32 nt, Human
uaguagagaugggaucuuucuauguugccuag

SEQ ID NO: 223844 - RNA, 32 nt, Human
uaguagagaugggauuucaccauguugcccag

SEQ ID NO: 223845 - RNA, 32 nt, Human
uaguagagaugggauuucaccauguuggccag

SEQ ID NO: 223846 - RNA, 32 nt, Human
uaguagagaugggauuucaccauguuggcuag

SEQ ID NO: 223847 - RNA, 32 nt, Human
uaguagagaugggauuucgccauguuggccag

SEQ ID NO: 223848 - RNA, 32 nt, Human
uaguagagaugggauuuucccuuguuggucag

SEQ ID NO: 223849 - RNA, 32 nt, Human
uaguagagaugggcuuucacuacguuagccag

SEQ ID NO: 223850 - RNA, 32 nt, Human
uaguagagauggggacuucaccguguuggcca

SEQ ID NO: 223851 - RNA, 32 nt, Human
uaguagagauggggcuucaccaucuugaccag

SEQ ID NO: 223852 - RNA, 32 nt, Human
uaguagagauggggcuucaccauguuggccag

SEQ ID NO: 223853 - RNA, 32 nt, Human
uaguagagauggggguuucaccauauuggcca

SEQ ID NO: 223854 - RNA, 32 nt, Human
uaguagagauggggguuucaccauauugguca

SEQ ID NO: 223855 - RNA, 32 nt, Human
uaguagagauggggguuucuccuuguugguca

SEQ ID NO: 223856 - RNA, 32 nt, Human
uaguagagauggggguuuuccauauugcccag

SEQ ID NO: 223857 - RNA, 32 nt, Human
uaguagagauggggucucaccauguuggccag

SEQ ID NO: 223858 - RNA, 32 nt, Human
uaguagagauggggucucacuauguugcccag

SEQ ID NO: 223859 - RNA, 32 nt, Human
uaguagagauggggucucacuguguuagccag

SEQ ID NO: 223860 - RNA, 32 nt, Human
uaguagagauggggucucuccauguuggucag

SEQ ID NO: 223861 - RNA, 32 nt, Human
uaguagagaugggguuccaccauguuggccag

SEQ ID NO: 223862 - RNA, 32 nt, Human
uaguagagaugggguuuauccauguuggucag

SEQ ID NO: 223863 - RNA, 32 nt, Human
uaguagagaugggguuucaacauauuggccag

SEQ ID NO: 223864 - RNA, 32 nt, Human
uaguagagaugggguuucaccaaguuagccag

SEQ ID NO: 223865 - RNA, 32 nt, Human
uaguagagaugggguuucaccacauuggccag

SEQ ID NO: 223866 - RNA, 32 nt, Human
uaguagagaugggguuucaccacguuagccag

SEQ ID NO: 223867 - RNA, 32 nt, Human
uaguagagaugggguuucaccacguugcccag

SEQ ID NO: 223868 - RNA, 32 nt, Human
uaguagagaugggguuucaccacguuggccac

SEQ ID NO: 223869 - RNA, 32 nt, Human
uaguagagaugggguuucaccacguuggccag

SEQ ID NO: 223870 - RNA, 32 nt, Human
uaguagagaugggguuucaccauacuggcuag

SEQ ID NO: 223871 - RNA, 32 nt, Human
uaguagagaugggguuucaccauauuggccaa

SEQ ID NO: 223872 - RNA, 32 nt, Human
uaguagagaugggguuucaccauauuggccag

SEQ ID NO: 223873 - RNA, 32 nt, Human
uaguagagaugggguuucaccauauuggucac

SEQ ID NO: 223874 - RNA, 32 nt, Human
uaguagagaugggguuucaccauauuggucag

SEQ ID NO: 223875 - RNA, 32 nt, Human
uaguagagaugggguuucaccauauuggugag

SEQ ID NO: 223876 - RNA, 32 nt, Human
uaguagagaugggguuucaccaucuuggccag

SEQ ID NO: 223877 - RNA, 32 nt, Human
uaguagagaugggguuucaccaugcuggccaa

SEQ ID NO: 223878 - RNA, 32 nt, Human
uaguagagaugggguuucaccaugcuggccag

SEQ ID NO: 223879 - RNA, 32 nt, Human
uaguagagaugggguuucaccauggccaggcu

SEQ ID NO: 223880 - RNA, 32 nt, Human
uaguagagaugggguuucaccauggcuaggcu

SEQ ID NO: 223881 - RNA, 32 nt, Human
uaguagagaugggguuucaccauguaggccag

SEQ ID NO: 223882 - RNA, 32 nt, Human
uaguagagaugggguuucaccaugucucaaac

SEQ ID NO: 223883 - RNA, 32 nt, Human
uaguagagaugggguuucaccaugugggccgg

SEQ ID NO: 223884 - RNA, 32 nt, Human
uaguagagaugggguuucaccauguuaaccag

SEQ ID NO: 223885 - RNA, 32 nt, Human
uaguagagaugggguuucaccauguuagccag

SEQ ID NO: 223886 - RNA, 32 nt, Human
uaguagagaugggguuucaccauguuagucag

SEQ ID NO: 223887 - RNA, 32 nt, Human
uaguagagaugggguuucaccauguugaccag

SEQ ID NO: 223888 - RNA, 32 nt, Human
uaguagagaugggguuucaccauguugaucag

SEQ ID NO: 223889 - RNA, 32 nt, Human
uaguagagaugggguuucaccauguugccugg

SEQ ID NO: 223890 - RNA, 32 nt, Human
uaguagagaugggguuucaccauguuggcaag

SEQ ID NO: 223891 - RNA, 32 nt, Human
uaguagagaugggguuucaccauguuggccag

SEQ ID NO: 223892 - RNA, 32 nt, Human
uaguagagaugggguuucaccauguuggcuag

SEQ ID NO: 223893 - RNA, 32 nt, Human
uaguagagaugggguuucaccauguuggcugg

SEQ ID NO: 223894 - RNA, 32 nt, Human
uaguagagaugggguuucaccauguuggucag

SEQ ID NO: 223895 - RNA, 32 nt, Human
uaguagagaugggguuucaccauguuguccag

SEQ ID NO: 223896 - RNA, 32 nt, Human
uaguagagaugggguuucaccauguugucuag

SEQ ID NO: 223897 - RNA, 32 nt, Human
uaguagagaugggguuucaccauguuugccag

SEQ ID NO: 223898 - RNA, 32 nt, Human
uaguagagaugggguuucaccauuuuggccau

SEQ ID NO: 223899 - RNA, 32 nt, Human
uaguagagaugggguuucacccuauuggucag

SEQ ID NO: 223900 - RNA, 32 nt, Human
uaguagagaugggguuucacccuguuagccag

SEQ ID NO: 223901 - RNA, 32 nt, Human
uaguagagaugggguuucaccggguuagccag

SEQ ID NO: 223902 - RNA, 32 nt, Human
uaguagagaugggguuucaccgugcuggccag

SEQ ID NO: 223903 - RNA, 32 nt, Human
uaguagagaugggguuucaccguguuagccag

SEQ ID NO: 223904 - RNA, 32 nt, Human
uaguagagaugggguuucaccguguuaggcag

SEQ ID NO: 223905 - RNA, 32 nt, Human
uaguagagaugggguuucaccguguuagucag

SEQ ID NO: 223906 - RNA, 32 nt, Human
uaguagagaugggguuucaccguguuggccag

SEQ ID NO: 223907 - RNA, 32 nt, Human
uaguagagaugggguuucaccuuguuggccag

SEQ ID NO: 223908 - RNA, 32 nt, Human
uaguagagaugggguuucaccuuguugggugg

SEQ ID NO: 223909 - RNA, 32 nt, Human
uaguagagaugggguuucaccuuguuggucaa

SEQ ID NO: 223910 - RNA, 32 nt, Human
uaguagagaugggguuucacgauguuggccag

SEQ ID NO: 223911 - RNA, 32 nt, Human
uaguagagaugggguuucacguuguuagccag

SEQ ID NO: 223912 - RNA, 32 nt, Human
uaguagagaugggguuucacuauguuggccag

SEQ ID NO: 223913 - RNA, 32 nt, Human
uaguagagaugggguuucacuauguuggucag

SEQ ID NO: 223914 - RNA, 32 nt, Human
uaguagagaugggguuucacuguguaggccag

SEQ ID NO: 223915 - RNA, 32 nt, Human
uaguagagaugggguuucacuguguuagccgg

SEQ ID NO: 223916 - RNA, 32 nt, Human
uaguagagaugggguuucacuguguuggccag

SEQ ID NO: 223917 - RNA, 32 nt, Human
uaguagagaugggguuucaucacguugaccag

SEQ ID NO: 223918 - RNA, 32 nt, Human
uaguagagaugggguuucaucauauuggucag

SEQ ID NO: 223919 - RNA, 32 nt, Human
uaguagagaugggguuucaucauguugcccag

SEQ ID NO: 223920 - RNA, 32 nt, Human
uaguagagaugggguuucaucauguuggccag

SEQ ID NO: 223921 - RNA, 32 nt, Human
uaguagagaugggguuucaucauguuugccag

SEQ ID NO: 223922 - RNA, 32 nt, Human
uaguagagaugggguuucaucguguuagccag

SEQ ID NO: 223923 - RNA, 32 nt, Human
uaguagagaugggguuucauuauguuggccag

SEQ ID NO: 223924 - RNA, 32 nt, Human
uaguagagaugggguuuccccauguuggccag

SEQ ID NO: 223925 - RNA, 32 nt, Human
uaguagagaugggguuucgccagguuggccag

SEQ ID NO: 223926 - RNA, 32 nt, Human
uaguagagaugggguuucgccauguuggccaa

SEQ ID NO: 223927 - RNA, 32 nt, Human
uaguagagaugggguuucgccauguuggccac

SEQ ID NO: 223928 - RNA, 32 nt, Human
uaguagagaugggguuucgccauguuggccag

SEQ ID NO: 223929 - RNA, 32 nt, Human
uaguagagaugggguuucgccauguuugucag

SEQ ID NO: 223930 - RNA, 32 nt, Human
uaguagagaugggguuucgcuauguuggccaa

SEQ ID NO: 223931 - RNA, 32 nt, Human
uaguagagaugggguuucgcuauguuggccag

SEQ ID NO: 223932 - RNA, 32 nt, Human
uaguagagaugggguuucucauauuggucagg

SEQ ID NO: 223933 - RNA, 32 nt, Human
uaguagagaugggguuucuccaugguggucag

SEQ ID NO: 223934 - RNA, 32 nt, Human
uaguagagaugggguuucuccaugucggucag

SEQ ID NO: 223935 - RNA, 32 nt, Human
uaguagagaugggguuucuccauguugaucag

SEQ ID NO: 223936 - RNA, 32 nt, Human
uaguagagaugggguuucuccauguuggccag

SEQ ID NO: 223937 - RNA, 32 nt, Human
uaguagagaugggguuucuccauguuggucag

SEQ ID NO: 223938 - RNA, 32 nt, Human
uaguagagaugggguuugaccauguuggccag

SEQ ID NO: 223939 - RNA, 32 nt, Human
uaguagagaugggguuugaccguguuagccag

SEQ ID NO: 223940 - RNA, 32 nt, Human
uaguagagaugggguuugccauguaggccagg

SEQ ID NO: 223941 - RNA, 32 nt, Human
uaguagagaugggguuuggccaugauggccag

SEQ ID NO: 223942 - RNA, 32 nt, Human
uaguagagaugggguuuuaccauauugcccag

SEQ ID NO: 223943 - RNA, 32 nt, Human
uaguagagaugggguuuuaccauguggccagg

SEQ ID NO: 223944 - RNA, 32 nt, Human
uaguagagaugggguuuuaccauguuaggaug

SEQ ID NO: 223945 - RNA, 32 nt, Human
uaguagagaugggguuuuaccauguuggccag

SEQ ID NO: 223946 - RNA, 32 nt, Human
uaguagagaugggguuuugccauauuggccag

SEQ ID NO: 223947 - RNA, 32 nt, Human
uaguagagaugggguuuugccauguugcccag

SEQ ID NO: 223948 - RNA, 32 nt, Human
uaguagagaugggguuuugccauguuggccag

SEQ ID NO: 223949 - RNA, 32 nt, Human
uaguagagaugggguuuugccauguuggucag

SEQ ID NO: 223950 - RNA, 32 nt, Human
uaguagagaugggguuuugccauguuugccgg

SEQ ID NO: 223951 - RNA, 32 nt, Human
uaguagagaugggguuuugccuuguuggccag

SEQ ID NO: 223952 - RNA, 32 nt, Human
uaguagagauggguuucaccauguuggccaug

SEQ ID NO: 223953 - RNA, 32 nt, Human
uaguagagauggguuucuccauguuggucggg

SEQ ID NO: 223954 - RNA, 32 nt, Human
uaguagagauggguuuucaccauauuggucag

SEQ ID NO: 223955 - RNA, 32 nt, Human
uaguagagauggguuuucaccaugguggccag

SEQ ID NO: 223956 - RNA, 32 nt, Human
uaguagagaugguguuucaccauguuggccag

SEQ ID NO: 223957 - RNA, 32 nt, Human
uaguagagaugugguuucuccauguuggccag

SEQ ID NO: 223958 - RNA, 32 nt, Human
uaguagagaugugguuuuaccauguuugccag

SEQ ID NO: 223959 - RNA, 32 nt, Human
uaguagagauuggguuucaccauguuggccag

SEQ ID NO: 223960 - RNA, 32 nt, Human
uaguagagccgggguuucaccaucuuggccag

SEQ ID NO: 223961 - RNA, 32 nt, Human
uaguagaggaugggguuucacuauguuggcca

SEQ ID NO: 223962 - RNA, 32 nt, Human
uaguagaggcaagguuucaccaucuuggucaa

SEQ ID NO: 223963 - RNA, 32 nt, Human
uaguagaggcagaguuucaccauguuggccag

SEQ ID NO: 223964 - RNA, 32 nt, Human
uaguagaggcaggguuuagccauguugaucag

SEQ ID NO: 223965 - RNA, 32 nt, Human
uaguagaggcaggguuucaccauguuagccag

SEQ ID NO: 223966 - RNA, 32 nt, Human
uaguagaggcaggguuucaccauguugaccag

SEQ ID NO: 223967 - RNA, 32 nt, Human
uaguagaggcaggguuucaccauguuggccag

SEQ ID NO: 223968 - RNA, 32 nt, Human
uaguagaggcaggguuucuccauguuggucag

SEQ ID NO: 223969 - RNA, 32 nt, Human
uaguagaggcgaaguuuccccauguuggccag

SEQ ID NO: 223970 - RNA, 32 nt, Human
uaguagaggcggaguuucaccauguuggccag

SEQ ID NO: 223971 - RNA, 32 nt, Human
uaguagaggcggaguuucgccauguuggucag

SEQ ID NO: 223972 - RNA, 32 nt, Human
uaguagaggcgggguuucaccaugcuggucag

SEQ ID NO: 223973 - RNA, 32 nt, Human
uaguagaggcgggguuucaccauguuagccag

SEQ ID NO: 223974 - RNA, 32 nt, Human
uaguagaggcgggguuucaccauguuggccag

SEQ ID NO: 223975 - RNA, 32 nt, Human
uaguagaggcgggguuucaccauguuggcuag

SEQ ID NO: 223976 - RNA, 32 nt, Human
uaguagaggcgggguuucaucauguuggccag

SEQ ID NO: 223977 - RNA, 32 nt, Human
uaguagaggugggguuucaccagguuggccag

SEQ ID NO: 223978 - RNA, 32 nt, Human
uaguagaggugggguuucaccaucuuggccag

SEQ ID NO: 223979 - RNA, 32 nt, Human
uaguagaggugggguuucaccaugcuggucag

SEQ ID NO: 223980 - RNA, 32 nt, Human
uaguagaggugggguuucaccguguuggucag

SEQ ID NO: 223981 - RNA, 32 nt, Human
uaguagaggugggguuucauguuucaccgugu

SEQ ID NO: 223982 - RNA, 32 nt, Human
uaguagagucgggguuucaccauguugcccag

SEQ ID NO: 223983 - RNA, 32 nt, Human
uaguagagugaggguuucaccauguuggccag

SEQ ID NO: 223984 - RNA, 32 nt, Human
uaguagaguuuuguuucuauuuuuauuuuuau

SEQ ID NO: 223985 - RNA, 32 nt, Human
uaguagauacaaguugaccuuucucuggcccc

SEQ ID NO: 223986 - RNA, 32 nt, Human
uaguagauacgggguuucaccaugcuggccag

SEQ ID NO: 223987 - RNA, 32 nt, Human
uaguagauauggaguuucaccacguuggccaa

SEQ ID NO: 223988 - RNA, 32 nt, Human
uaguagauaugggguuucaccguguuagccag

SEQ ID NO: 223989 - RNA, 32 nt, Human
uaguagaucuguggcgauaugagagggaugca

SEQ ID NO: 223990 - RNA, 32 nt, Human
uaguagaugagccacagccaggugcccaugua

SEQ ID NO: 223991 - RNA, 32 nt, Human
uaguagauucucucuuucucagccucuccccu

SEQ ID NO: 223992 - RNA, 32 nt, Human
uaguagauugcagccauguuguggaagcugcu

SEQ ID NO: 223993 - RNA, 32 nt, Human
uaguagcaaacaguaugcaguacuccuguguu

SEQ ID NO: 223994 - RNA, 32 nt, Human
uaguagcagcuacuccagaggcugaaauggga

SEQ ID NO: 223995 - RNA, 32 nt, Human
uaguagcauuucuuucucuccccauuauuuau

SEQ ID NO: 223996 - RNA, 32 nt, Human
uaguagccaugguguuucaccauguuggccag

SEQ ID NO: 223997 - RNA, 32 nt, Human
uaguagcgacaggguuguaccauguuggccau

SEQ ID NO: 223998 - RNA, 32 nt, Human
uaguagcuagagcucauggccuagcagaguga

SEQ ID NO: 223999 - RNA, 32 nt, Human
uaguagcucaacagagagggugccguggcuca

SEQ ID NO: 224000 - RNA, 21 nt, Human
uaguagcucaugccuguaauc

SEQ ID NO: 224001 - RNA, 32 nt, Human
uaguagcuuaagcaguuaugcauaucaggaua

SEQ ID NO: 224002 - RNA, 32 nt, Human
uaguaggaagugagcuguucagaggcaggagg

SEQ ID NO: 224003 - RNA, 32 nt, Human
uaguaggacccaagggaaaggaagggaagagu

SEQ ID NO: 224004 - RNA, 32 nt, Human
uaguaggagggcuucacaccagcacugcucac

SEQ ID NO: 224005 - RNA, 32 nt, Human
uaguaggauauauuucuccuagaacaucccuu

SEQ ID NO: 224006 - RNA, 32 nt, Human
uaguaggaucacugggacuccaagccucagca

SEQ ID NO: 224007 - RNA, 32 nt, Human
uaguaggcaagccugggcauuucugcauuugu

SEQ ID NO: 224008 - RNA, 32 nt, Human
uaguaggcagcaaaagaccaaaucucaguugu

SEQ ID NO: 224009 - RNA, 32 nt, Human
uaguagggacgggguuucaucauguuggccag

SEQ ID NO: 224010 - RNA, 32 nt, Human
uaguagggacuaaaccacacugaaaagaaucc

SEQ ID NO: 224011 - RNA, 32 nt, Human
uaguagggaugggguuucaccauguuagcuag

SEQ ID NO: 224012 - RNA, 32 nt, Human
uaguagggaugggguuucccauguuggccagg

SEQ ID NO: 224013 - RNA, 32 nt, Human
uaguagggaugggguuucuccauguuggucag

SEQ ID NO: 224014 - RNA, 32 nt, Human
uaguagggcuguagauggggucuuucgagguc

SEQ ID NO: 224015 - RNA, 32 nt, Human
uaguaggguacuucugcucaaguguccaacag

SEQ ID NO: 224016 - RNA, 31 nt, Human
uaguaggugcucaauaaauguugaaaccaac

SEQ ID NO: 224017 - RNA, 32 nt, Human
uaguagguuuuaauaaauauuucucugaguaa

SEQ ID NO: 224018 - RNA, 32 nt, Human
uaguaguaacgggguuucaccauguuggccag

SEQ ID NO: 224019 - RNA, 32 nt, Human
uaguaguagugggauuucaccauguuggccag

SEQ ID NO: 224020 - RNA, 32 nt, Human
uaguagugacgggguuucaccauguuggccag

SEQ ID NO: 224021 - RNA, 32 nt, Human
uaguagugacuggguuucaccauguuggccag

SEQ ID NO: 224022 - RNA, 32 nt, Human
uaguagugagacgugaagccagcuggacuucc

SEQ ID NO: 224023 - RNA, 32 nt, Human
uaguagugggauuacaggugcccgcuacuaug

SEQ ID NO: 224024 - RNA, 32 nt, Human
uaguagugguaggaauaggaaugugauuguaa

SEQ ID NO: 224025 - RNA, 32 nt, Human
uaguaguuaccucccuuuuacuuuucaaauuc

SEQ ID NO: 224026 - RNA, 32 nt, Human
uaguaguucaucuucuuuuugagcaaagacua

SEQ ID NO: 224027 - RNA, 32 nt, Human
uaguaguuguauccuagguaaauauggugauu

SEQ ID NO: 224028 - RNA, 32 nt, Human
uaguauaaaacacaggcuuucacaaauuuugu

SEQ ID NO: 224029 - RNA, 32 nt, Human
uaguauaagaaugaggaaaaagagguaauauc

SEQ ID NO: 224030 - RNA, 32 nt, Human
uaguauaaggguugcagcugaauggcucuaaa

SEQ ID NO: 224031 - RNA, 32 nt, Human
uaguauacaaaccauuaugauuuaugcuacuu

SEQ ID NO: 224032 - RNA, 32 nt, Human
uaguauagacacgguuucaccauguuggccag

SEQ ID NO: 224033 - RNA, 32 nt, Human
uaguauagauagcccugagccaaaaaguaaua

SEQ ID NO: 224034 - RNA, 32 nt, Human
uaguauagaugggguuucaccauguuggccag

SEQ ID NO: 224035 - RNA, 32 nt, Human
uaguauagggaaaggauaaaaauaagucaccu

SEQ ID NO: 224036 - RNA, 32 nt, Human
uaguauaguagaaagacaucugccuguaauua

SEQ ID NO: 224037 - RNA, 32 nt, Human
uaguauagucucaaagaccucaugcuucuagu

SEQ ID NO: 224038 - RNA, 32 nt, Human
uaguauaucacacuuagaggaaguacaugauu

SEQ ID NO: 224039 - RNA, 32 nt, Human
uaguauauucaugauucaguguagaauguaua

SEQ ID NO: 224040 - RNA, 32 nt, Human
uaguaucaauaucaauuucagaaaaauggacu

SEQ ID NO: 224041 - RNA, 32 nt, Human
uaguaucagauauuaauuuucuucaguguuca

SEQ ID NO: 224042 - RNA, 32 nt, Human
uaguaucaggagcaauugagaccccucaggag

SEQ ID NO: 224043 - RNA, 32 nt, Human
uaguaucccuggcugcuaagcccuuggcaggg

SEQ ID NO: 224044 - RNA, 32 nt, Human
uaguauccuagaguguuauagcagcaguccuc

SEQ ID NO: 224045 - RNA, 32 nt, Human
uaguauccuucccacuguaccacauuaucucu

SEQ ID NO: 224046 - RNA, 32 nt, Human
uaguauccuuuccucauucauccuggagagga

SEQ ID NO: 224047 - RNA, 32 nt, Human
uaguaucuagcaaucacaacacuggcugagcg

SEQ ID NO: 224048 - RNA, 32 nt, Human
uaguaucucauucugucaucagauccagaaga

SEQ ID NO: 224049 - RNA, 32 nt, Human
uaguaucuggagauggggccuuuggagguaau

SEQ ID NO: 224050 - RNA, 32 nt, Human
uaguaugaaagcuggggguggggaggggccuu

SEQ ID NO: 224051 - RNA, 32 nt, Human
uaguaugacugcgcucagccucggaugggagc

SEQ ID NO: 224052 - RNA, 32 nt, Human
uaguaugcuaaauauauuagauuucauauucu

SEQ ID NO: 224053 - RNA, 32 nt, Human
uaguauggaaugggagaagugaaaguucaguu

SEQ ID NO: 224054 - RNA, 32 nt, Human
uaguauggccugugucacucagcagugggaca

SEQ ID NO: 224055 - RNA, 32 nt, Human
uaguaugucaauguuauuuuaacuuucuuuga

SEQ ID NO: 224056 - RNA, 32 nt, Human
uaguaugucucauauucuuugacugacugacc

SEQ ID NO: 224057 - RNA, 32 nt, Human
uaguaugucuguaaucucuguauaaacuuugu

SEQ ID NO: 224058 - RNA, 32 nt, Human
uaguaugugacgagggagaacuguccacucau

SEQ ID NO: 224059 - RNA, 32 nt, Human
uaguauguucauguuggaaguggcuggcucug

SEQ ID NO: 224060 - RNA, 32 nt, Human
uaguauuaacaaacaugcuguaucggguuuuu

SEQ ID NO: 224061 - RNA, 32 nt, Human
uaguauuaaugguuuuggagcuggguccaguu

SEQ ID NO: 224062 - RNA, 32 nt, Human
uaguauuccugcuucuaccaagaagguauuua

SEQ ID NO: 224063 - RNA, 32 nt, Human
uaguauugugaacaagaacacuccucgaguaa

SEQ ID NO: 224064 - RNA, 32 nt, Human
uaguauuguuuuuccccucucccuccugcuuu

SEQ ID NO: 224065 - RNA, 32 nt, Human
uaguauuuaagucauaaugucauuucagaauu

SEQ ID NO: 224066 - RNA, 32 nt, Human
uaguauuuaauuaguugauuuauuuaauguaa

SEQ ID NO: 224067 - RNA, 32 nt, Human
uaguauuuauucacuuuuauuuagcaccaggg

SEQ ID NO: 224068 - RNA, 32 nt, Human
uaguauuuccuuugcccuagagcuagagucau

SEQ ID NO: 224069 - RNA, 32 nt, Human
uaguauuucucgccaugcuuugcucaugcgca

SEQ ID NO: 224070 - RNA, 32 nt, Human
uaguauuugguuuggaauauauuuuguggcuc

SEQ ID NO: 224071 - RNA, 32 nt, Human
uaguauuuugaccuucuacuagcagucagccu

SEQ ID NO: 224072 - RNA, 32 nt, Human
uaguauuuugcuucaagccuucugaaaauaua

SEQ ID NO: 224073 - RNA, 32 nt, Human
uaguauuuugucuuuguaauuuacagaaguua

SEQ ID NO: 224074 - RNA, 32 nt, Human
uaguauuuuugugaggaugaaaugcuaauaaa

SEQ ID NO: 224075 - RNA, 32 nt, Human
uagucaaagcacaaagucacgauuccacaaug

SEQ ID NO: 224076 - RNA, 32 nt, Human
uagucaaaucuuuuggaaagaauuucuggaag

SEQ ID NO: 224077 - RNA, 32 nt, Human
uagucaacagcagaccagccuggccaaugccu

SEQ ID NO: 224078 - RNA, 32 nt, Human
uagucaacauggugaaaccccgucuccauuaa

SEQ ID NO: 224079 - RNA, 32 nt, Human
uagucaaccugugccagcaacauucugaaauu

SEQ ID NO: 224080 - RNA, 32 nt, Human
uagucaagaauucacccaguguucuuuggaug

SEQ ID NO: 224081 - RNA, 32 nt, Human
uagucaaggagcuggucacaaaggcagaaaug

SEQ ID NO: 224082 - RNA, 32 nt, Human
uagucaauagggucuucagcuauuaauuguag

SEQ ID NO: 224083 - RNA, 32 nt, Human
uagucaaucccaguugcuuuuccccagauuug

SEQ ID NO: 224084 - RNA, 32 nt, Human
uagucaauccuaauugugguccugccucuuuu

SEQ ID NO: 224085 - RNA, 32 nt, Human
uagucaauccugguguuucucuguaucuucuc

SEQ ID NO: 224086 - RNA, 32 nt, Human
uagucacaaauuugaaaccgugcuucagaauc

SEQ ID NO: 224087 - RNA, 32 nt, Human
uagucacacaaacuguucaguguugcaggaac

SEQ ID NO: 224088 - RNA, 32 nt, Human
uagucacagcuacuccagaggcugaggcagga

SEQ ID NO: 224089 - RNA, 32 nt, Human
uagucacaguccggaagagaugauagaugcau

SEQ ID NO: 224090 - RNA, 32 nt, Human
uagucacaguuacacggcaggcugagguggga

SEQ ID NO: 224091 - RNA, 32 nt, Human
uagucacccgggcugggcucuacuaccuguac

SEQ ID NO: 224092 - RNA, 32 nt, Human
uagucaccuaugucugugccucccuucuuuau

SEQ ID NO: 224093 - RNA, 32 nt, Human
uagucaccuuuagugcugcagaacagcagaac

SEQ ID NO: 224094 - RNA, 31 nt, Human
uagucaccuuuuaaauccuguugaaaagcca

SEQ ID NO: 224095 - RNA, 32 nt, Human
uagucacgguuacugcagaggcugaggcagga

SEQ ID NO: 224096 - RNA, 32 nt, Human
uagucacucauccauccccuggcuccagagau

SEQ ID NO: 224097 - RNA, 32 nt, Human
uagucacugagcauacccuccuccuaccacuc

SEQ ID NO: 224098 - RNA, 32 nt, Human
uagucacugccagcacccagaaacccagcauu

SEQ ID NO: 224099 - RNA, 32 nt, Human
uagucacuuccuccgucuccgggacggcgugc

SEQ ID NO: 224100 - RNA, 32 nt, Human
uagucagagaaaaguagccagaagaauuugca

SEQ ID NO: 224101 - RNA, 32 nt, Human
uagucagaguaaguaggcagcacuuuuaaaaa

SEQ ID NO: 224102 - RNA, 32 nt, Human
uagucagauuccaugguagaggcaagcauucu

SEQ ID NO: 224103 - RNA, 18 nt, Human
uagucagcaaccauuuua

SEQ ID NO: 224104 - RNA, 32 nt, Human
uagucagcaagaagacugaguugcuucuacau

SEQ ID NO: 224105 - RNA, 32 nt, Human
uagucagcaugugcguuuuccugagaagugaa

SEQ ID NO: 224106 - RNA, 32 nt, Human
uagucagcuuucuuccccguagcuuguacacu

SEQ ID NO: 224107 - RNA, 32 nt, Human
uagucagggaaugggggagguggggaguuggg

SEQ ID NO: 224108 - RNA, 32 nt, Human
uagucaggguucccugaaggaaugaggagaaa

SEQ ID NO: 224109 - RNA, 32 nt, Human
uagucaggugaacaggaugacuucucaauuua

SEQ ID NO: 224110 - RNA, 32 nt, Human
uagucauacuccugugcucugucaccauggac

SEQ ID NO: 224111 - RNA, 32 nt, Human
uagucauaugugaagacagagcagaucagucu

SEQ ID NO: 224112 - RNA, 32 nt, Human
uagucaucacccagcugggcuucugcaguguu

SEQ ID NO: 224113 - RNA, 32 nt, Human
uagucauccuuuuuaagcugcaaagaagcauu

SEQ ID NO: 224114 - RNA, 32 nt, Human
uagucaucgucagagacacugccuacccaagc

SEQ ID NO: 224115 - RNA, 32 nt, Human
uagucaucuuccuacagcaccaucuagacauc

SEQ ID NO: 224116 - RNA, 32 nt, Human
uagucaugagccuccuacuucugggauugcag

SEQ ID NO: 224117 - RNA, 22 nt, Human
uagucaugagugauccuucaua

SEQ ID NO: 224118 - RNA, 32 nt, Human
uagucauguccagcagcacacgccuagucccg

SEQ ID NO: 224119 - RNA, 32 nt, Human
uagucauguuuccuauccaagagaccaguuaa

SEQ ID NO: 224120 - RNA, 32 nt, Human
uagucauuauuaacgugucuucccucuucccc

SEQ ID NO: 224121 - RNA, 32 nt, Human
uagucauucucaauucauauggaaucuagaug

SEQ ID NO: 224122 - RNA, 32 nt, Human
uaguccaagcuacucaagaggcugagguggga

SEQ ID NO: 224123 - RNA, 32 nt, Human
uaguccaagcuacucaggaggcugaggcagaa

SEQ ID NO: 224124 - RNA, 32 nt, Human
uaguccaagcuacuugggaggcugaaguggga

SEQ ID NO: 224125 - RNA, 32 nt, Human
uaguccaaucagcugaaauuaaaucacuuggg

SEQ ID NO: 224126 - RNA, 32 nt, Human
uaguccacaaguggagguggucguaagugaaa

SEQ ID NO: 224127 - RNA, 32 nt, Human
uaguccagcaggacaguggccauuuggacaga

SEQ ID NO: 224128 - RNA, 32 nt, Human
uaguccagccugagugacagagugagacccug

SEQ ID NO: 224129 - RNA, 32 nt, Human
uaguccagggacaggacuuugaagggaguaag

SEQ ID NO: 224130 - RNA, 25 nt, Human
uaguccagguauauuccugaucaaa

SEQ ID NO: 224131 - RNA, 32 nt, Human
uaguccagugggaagccagggguuggagaagg

SEQ ID NO: 224132 - RNA, 32 nt, Human
uaguccauccuuuccuccuuuugaaaaucagg

SEQ ID NO: 224133 - RNA, 32 nt, Human
uaguccaugugaagucacuuccuggguauaug

SEQ ID NO: 224134 - RNA, 32 nt, Human
uagucccaacuaccugggaggcugaggcggga

SEQ ID NO: 224135 - RNA, 32 nt, Human
uagucccaacuacuagggaggcugaggcagga

SEQ ID NO: 224136 - RNA, 32 nt, Human
uagucccaacuacuagggaggcugagguggga

SEQ ID NO: 224137 - RNA, 32 nt, Human
uagucccaacuacucaggaggcugaggcagga

SEQ ID NO: 224138 - RNA, 32 nt, Human
uagucccaacuacucaggaggcugaggcauga

SEQ ID NO: 224139 - RNA, 32 nt, Human
uagucccaacuacucaggaggcuggggcagga

SEQ ID NO: 224140 - RNA, 32 nt, Human
uagucccaacuacucggaaggcugaggcagga

SEQ ID NO: 224141 - RNA, 32 nt, Human
uagucccaacuacucgggaggcugaggcggga

SEQ ID NO: 224142 - RNA, 32 nt, Human
uagucccaacuacuuggaaggcugagguguga

SEQ ID NO: 224143 - RNA, 32 nt, Human
uagucccaacuacuugggaggcugaggcagga

SEQ ID NO: 224144 - RNA, 32 nt, Human
uagucccaacuacuugggaggcugagguggga

SEQ ID NO: 224145 - RNA, 32 nt, Human
uagucccaacuauucggcaggcugaggcagua

SEQ ID NO: 224146 - RNA, 32 nt, Human
uagucccaacuauuugggaggcugaggcagga

SEQ ID NO: 224147 - RNA, 32 nt, Human
uagucccaauuacucaggaggcugaggcgaga

SEQ ID NO: 224148 - RNA, 32 nt, Human
uagucccaauuacucgggaggcugcagcagga

SEQ ID NO: 224149 - RNA, 32 nt, Human
uagucccacaggccaaggauaagguugaaaug

SEQ ID NO: 224150 - RNA, 32 nt, Human
uagucccaccuacucaggaggcugaggaagga

SEQ ID NO: 224151 - RNA, 32 nt, Human
uagucccaccuacucaggaggcugaggcagga

SEQ ID NO: 224152 - RNA, 32 nt, Human
uagucccaccuacuguggaggcugaggugaga

SEQ ID NO: 224153 - RNA, 32 nt, Human
uagucccaccuacuugggaggcugaggcagga

SEQ ID NO: 224154 - RNA, 32 nt, Human
uagucccaccuauucgggaggcugaggcacaa

SEQ ID NO: 224155 - RNA, 32 nt, Human
uagucccaccucuugcuauuaaagcuucucug

SEQ ID NO: 224156 - RNA, 32 nt, Human
uagucccacuuagcaccccacacccaaagguc

SEQ ID NO: 224157 - RNA, 32 nt, Human
uagucccagagcucggcugccaccuccaccgg

SEQ ID NO: 224158 - RNA, 32 nt, Human
uagucccagagcuuugggaggcugaggugggu

SEQ ID NO: 224159 - RNA, 32 nt, Human
uagucccagauacucaggaggcugaggugaaa

SEQ ID NO: 224160 - RNA, 32 nt, Human
uagucccagauacucgggaggcugaggcagga

SEQ ID NO: 224161 - RNA, 32 nt, Human
uagucccagcaacucaggaggcugaggcagga

SEQ ID NO: 224162 - RNA, 32 nt, Human
uagucccagcaacucgggaggcugaggcagga

SEQ ID NO: 224163 - RNA, 32 nt, Human
uagucccagcaacuugggaggcugaggcagaa

SEQ ID NO: 224164 - RNA, 32 nt, Human
uagucccagcacucgggaaggccgagguggga

SEQ ID NO: 224165 - RNA, 32 nt, Human
uagucccagcacucugggaaccuggguuggga

SEQ ID NO: 224166 - RNA, 32 nt, Human
uagucccagcacuuugggaggccgagacaggc

SEQ ID NO: 224167 - RNA, 32 nt, Human
uagucccagcacuuugggaggccgaggcaggu

SEQ ID NO: 224168 - RNA, 32 nt, Human
uagucccagcacuuugggaggccgaggcgggu

SEQ ID NO: 224169 - RNA, 32 nt, Human
uagucccagcacuuugggaggccgaggcuggu

SEQ ID NO: 224170 - RNA, 32 nt, Human
uagucccagcacuuugggaggccgaggucagg

SEQ ID NO: 224171 - RNA, 32 nt, Human
uagucccagcacuuugggaggccgaggugggc

SEQ ID NO: 224172 - RNA, 32 nt, Human
uagucccagcacuuugggaggccggugggcag

SEQ ID NO: 224173 - RNA, 32 nt, Human
uagucccagcacuuugggaggcugaggcaggc

SEQ ID NO: 224174 - RNA, 32 nt, Human
uagucccagcacuuugggaggcugaggugggu

SEQ ID NO: 224175 - RNA, 32 nt, Human
uagucccagcagcuugggaggcugaggcugga

SEQ ID NO: 224176 - RNA, 32 nt, Human
uagucccagcauuuugggaggcugagugggau

SEQ ID NO: 224177 - RNA, 32 nt, Human
uagucccagccaagcuggaggcugaggcggga

SEQ ID NO: 224178 - RNA, 32 nt, Human
uagucccagccaccugggaggcugaggcagga

SEQ ID NO: 224179 - RNA, 32 nt, Human
uagucccagccacucagaaggcugaggcagga

SEQ ID NO: 224180 - RNA, 32 nt, Human
uagucccagccacuugagaggcugagguggaa

SEQ ID NO: 224181 - RNA, 32 nt, Human
uagucccagccacuugggaggcugaggcagga

SEQ ID NO: 224182 - RNA, 32 nt, Human
uagucccagccagucgggaggcugaggcggaa

SEQ ID NO: 224183 - RNA, 32 nt, Human
uagucccagcuaacugggaggcugaggcagga

SEQ ID NO: 224184 - RNA, 32 nt, Human
uagucccagcuaaucaggaggcugaggcaaga

SEQ ID NO: 224185 - RNA, 32 nt, Human
uagucccagcuacacaggaggcugaggcagga

SEQ ID NO: 224186 - RNA, 32 nt, Human
uagucccagcuacacgggaggcugaggcagga

SEQ ID NO: 224187 - RNA, 32 nt, Human
uagucccagcuacaugggaggcugaggcagga

SEQ ID NO: 224188 - RNA, 32 nt, Human
uagucccagcuacaugggaggcugaggcggga

SEQ ID NO: 224189 - RNA, 32 nt, Human
uagucccagcuacaugggaggcugagguggga

SEQ ID NO: 224190 - RNA, 32 nt, Human
uagucccagcuacccgggaggcugaggcagga

SEQ ID NO: 224191 - RNA, 32 nt, Human
uagucccagcuaccuaggaggcugaggcagga

SEQ ID NO: 224192 - RNA, 32 nt, Human
uagucccagcuaccugggaggcugagguggga

SEQ ID NO: 224193 - RNA, 32 nt, Human
uagucccagcuacgugagaggcugagguggga

SEQ ID NO: 224194 - RNA, 32 nt, Human
uagucccagcuacgugggaggcugaggcacga

SEQ ID NO: 224195 - RNA, 32 nt, Human
uagucccagcuacgugggaggcugaggcagca

SEQ ID NO: 224196 - RNA, 32 nt, Human
uagucccagcuacuaggaaggcugaggcagga

SEQ ID NO: 224197 - RNA, 32 nt, Human
uagucccagcuacuagggaggcugagccagga

SEQ ID NO: 224198 - RNA, 32 nt, Human
uagucccagcuacuagggaggcugaggcagga

SEQ ID NO: 224199 - RNA, 32 nt, Human
uagucccagcuacuauggagguugagguggga

SEQ ID NO: 224200 - RNA, 32 nt, Human
uagucccagcuacucaagaggcugaggcagaa

SEQ ID NO: 224201 - RNA, 32 nt, Human
uagucccagcuacucaagaggcugaggcagga

SEQ ID NO: 224202 - RNA, 32 nt, Human
uagucccagcuacucaggaggcugagacagga

SEQ ID NO: 224203 - RNA, 32 nt, Human
uagucccagcuacucaggaggcugaggaagau

SEQ ID NO: 224204 - RNA, 32 nt, Human
uagucccagcuacucaggaggcugaggcaagc

SEQ ID NO: 224205 - RNA, 32 nt, Human
uagucccagcuacucaggaggcugaggcagaa

SEQ ID NO: 224206 - RNA, 32 nt, Human
uagucccagcuacucaggaggcugaggcagga

SEQ ID NO: 224207 - RNA, 32 nt, Human
uagucccagcuacucaggaggcugaggcggga

SEQ ID NO: 224208 - RNA, 32 nt, Human
uagucccagcuacucaggaggcugaggcuaga

SEQ ID NO: 224209 - RNA, 32 nt, Human
uagucccagcuacucaggaggcugagguagga

SEQ ID NO: 224210 - RNA, 32 nt, Human
uagucccagcuacucaggaggcugagguggaa

SEQ ID NO: 224211 - RNA, 32 nt, Human
uagucccagcuacucaggaggcugagguggga

SEQ ID NO: 224212 - RNA, 32 nt, Human
uagucccagcuacucaggaggcugggcaggag

SEQ ID NO: 224213 - RNA, 32 nt, Human
uagucccagcuacucaggaggcuggggaagga

SEQ ID NO: 224214 - RNA, 32 nt, Human
uagucccagcuacucaggaggcuggggcagga

SEQ ID NO: 224215 - RNA, 32 nt, Human
uagucccagcuacucaggaggcugugguggga

SEQ ID NO: 224216 - RNA, 32 nt, Human
uagucccagcuacucagggggcugaggcggga

SEQ ID NO: 224217 - RNA, 32 nt, Human
uagucccagcuacuccagaggcugagauggau

SEQ ID NO: 224218 - RNA, 32 nt, Human
uagucccagcuacuccggaggcugaggcagga

SEQ ID NO: 224219 - RNA, 32 nt, Human
uagucccagcuacuccugaggcugagguggga

SEQ ID NO: 224220 - RNA, 32 nt, Human
uagucccagcuacucgaaaggcugaggcggga

SEQ ID NO: 224221 - RNA, 32 nt, Human
uagucccagcuacucgagaggcugaggcagga

SEQ ID NO: 224222 - RNA, 32 nt, Human
uagucccagcuacucgagaggcugaggcugga

SEQ ID NO: 224223 - RNA, 32 nt, Human
uagucccagcuacucggcaggcugagguggga

SEQ ID NO: 224224 - RNA, 32 nt, Human
uagucccagcuacucgggaggcugaagcggga

SEQ ID NO: 224225 - RNA, 32 nt, Human
uagucccagcuacucgggaggcugagacagaa

SEQ ID NO: 224226 - RNA, 32 nt, Human
uagucccagcuacucgggaggcugagacagga

SEQ ID NO: 224227 - RNA, 32 nt, Human
uagucccagcuacucgggaggcugagcuucga

SEQ ID NO: 224228 - RNA, 32 nt, Human
uagucccagcuacucgggaggcugaggaagga

SEQ ID NO: 224229 - RNA, 32 nt, Human
uagucccagcuacucgggaggcugaggcaaga

SEQ ID NO: 224230 - RNA, 32 nt, Human
uagucccagcuacucgggaggcugaggcacaa

SEQ ID NO: 224231 - RNA, 32 nt, Human
uagucccagcuacucgggaggcugaggcacga

SEQ ID NO: 224232 - RNA, 32 nt, Human
uagucccagcuacucgggaggcugaggcagaa

SEQ ID NO: 224233 - RNA, 32 nt, Human
uagucccagcuacucgggaggcugaggcagga

SEQ ID NO: 224234 - RNA, 32 nt, Human
uagucccagcuacucgggaggcugaggcaggg

SEQ ID NO: 224235 - RNA, 32 nt, Human
uagucccagcuacucgggaggcugaggcauga

SEQ ID NO: 224236 - RNA, 32 nt, Human
uagucccagcuacucgggaggcugaggccgua

SEQ ID NO: 224237 - RNA, 32 nt, Human
uagucccagcuacucgggaggcugaggcggga

SEQ ID NO: 224238 - RNA, 32 nt, Human
uagucccagcuacucgggaggcugaggcugga

SEQ ID NO: 224239 - RNA, 32 nt, Human
uagucccagcuacucgggaggcugagguagga

SEQ ID NO: 224240 - RNA, 32 nt, Human
uagucccagcuacucgggaggcugagguggga

SEQ ID NO: 224241 - RNA, 32 nt, Human
uagucccagcuacucgggaggcuggggcagga

SEQ ID NO: 224242 - RNA, 32 nt, Human
uagucccagcuacucuagaggcugagguggga

SEQ ID NO: 224243 - RNA, 32 nt, Human
uagucccagcuacucuggaggcugaaauggga

SEQ ID NO: 224244 - RNA, 32 nt, Human
uagucccagcuacucuggaggcugaagcagga

SEQ ID NO: 224245 - RNA, 32 nt, Human
uagucccagcuacucuggaggcugaaguugga

SEQ ID NO: 224246 - RNA, 32 nt, Human
uagucccagcuacucuggaggcugagacagga

SEQ ID NO: 224247 - RNA, 32 nt, Human
uagucccagcuacucuggaggcugaggcagga

SEQ ID NO: 224248 - RNA, 32 nt, Human
uagucccagcuacucuggaggcugaggcggga

SEQ ID NO: 224249 - RNA, 32 nt, Human
uagucccagcuacucuggaggcugaggugagg

SEQ ID NO: 224250 - RNA, 32 nt, Human
uagucccagcuacuggcgaggcugaggcugga

SEQ ID NO: 224251 - RNA, 32 nt, Human
uagucccagcuacuggggaggcugaggcagca

SEQ ID NO: 224252 - RNA, 32 nt, Human
uagucccagcuacuggggaggcugaggcagga

SEQ ID NO: 224253 - RNA, 32 nt, Human
uagucccagcuacuggggaggcugaggcaggg

SEQ ID NO: 224254 - RNA, 32 nt, Human
uagucccagcuacuuaggaggcugagauggga

SEQ ID NO: 224255 - RNA, 32 nt, Human
uagucccagcuacuuaggaggcugaggcauga

SEQ ID NO: 224256 - RNA, 32 nt, Human
uagucccagcuacuuaggaggcugaggggcaa

SEQ ID NO: 224257 - RNA, 32 nt, Human
uagucccagcuacuuaggaggcugagguagga

SEQ ID NO: 224258 - RNA, 32 nt, Human
uagucccagcuacuuaggaggcugagguggga

SEQ ID NO: 224259 - RNA, 32 nt, Human
uagucccagcuacuugagaggcugaggcaaga

SEQ ID NO: 224260 - RNA, 32 nt, Human
uagucccagcuacuugagaggcugaggcugga

SEQ ID NO: 224261 - RNA, 32 nt, Human
uagucccagcuacuuggaaggcugagacagga

SEQ ID NO: 224262 - RNA, 32 nt, Human
uagucccagcuacuuggcaggcugaggcagaa

SEQ ID NO: 224263 - RNA, 32 nt, Human
uagucccagcuacuuggcaggcugaggcagga

SEQ ID NO: 224264 - RNA, 18 nt, Human
uagucccagcuacuuggg

SEQ ID NO: 224265 - RNA, 32 nt, Human
uagucccagcuacuugggaggcugaaguggga

SEQ ID NO: 224266 - RNA, 32 nt, Human
uagucccagcuacuugggaggcugagacagga

SEQ ID NO: 224267 - RNA, 32 nt, Human
uagucccagcuacuugggaggcugagagagga

SEQ ID NO: 224268 - RNA, 32 nt, Human
uagucccagcuacuugggaggcugagauggga

SEQ ID NO: 224269 - RNA, 32 nt, Human
uagucccagcuacuugggaggcugagcccugg

SEQ ID NO: 224270 - RNA, 32 nt, Human
uagucccagcuacuugggaggcugaggcaaga

SEQ ID NO: 224271 - RNA, 32 nt, Human
uagucccagcuacuugggaggcugaggcacaa

SEQ ID NO: 224272 - RNA, 32 nt, Human
uagucccagcuacuugggaggcugaggcagaa

SEQ ID NO: 224273 - RNA, 32 nt, Human
uagucccagcuacuugggaggcugaggcagga

SEQ ID NO: 224274 - RNA, 32 nt, Human
uagucccagcuacuugggaggcugaggcaggg

SEQ ID NO: 224275 - RNA, 32 nt, Human
uagucccagcuacuugggaggcugagggcagg

SEQ ID NO: 224276 - RNA, 32 nt, Human
uagucccagcuacuugggaggcugagguagga

SEQ ID NO: 224277 - RNA, 32 nt, Human
uagucccagcuacuugggaggcugaggucaga

SEQ ID NO: 224278 - RNA, 32 nt, Human
uagucccagcuacuugggaggcugagguggaa

SEQ ID NO: 224279 - RNA, 32 nt, Human
uagucccagcuacuugggaggcugagguggag

SEQ ID NO: 224280 - RNA, 32 nt, Human
uagucccagcuacuugggaggcugagguggga

SEQ ID NO: 224281 - RNA, 32 nt, Human
uagucccagcuacuugggaggcugaggugggg

SEQ ID NO: 224282 - RNA, 32 nt, Human
uagucccagcuacuugggaggcugaguccgga

SEQ ID NO: 224283 - RNA, 32 nt, Human
uagucccagcuacuugggaggcugcagcugug

SEQ ID NO: 224284 - RNA, 32 nt, Human
uagucccagcuacuugggaggcuggggaagga

SEQ ID NO: 224285 - RNA, 32 nt, Human
uagucccagcuacuugggaggcuggggcauga

SEQ ID NO: 224286 - RNA, 32 nt, Human
uagucccagcuacuugguaggcugaggcagga

SEQ ID NO: 224287 - RNA, 32 nt, Human
uagucccagcuacuugugaggcugagggagga

SEQ ID NO: 224288 - RNA, 32 nt, Human
uagucccagcuacuugugaggcugagguggga

SEQ ID NO: 224289 - RNA, 32 nt, Human
uagucccagcuacuuuggaggcugaagcggaa

SEQ ID NO: 224290 - RNA, 32 nt, Human
uagucccagcuacuuuggaggcugaggcagga

SEQ ID NO: 224291 - RNA, 32 nt, Human
uagucccagcuagucaagaggcugaggccaga

SEQ ID NO: 224292 - RNA, 32 nt, Human
uagucccagcuagucgggaggcugaggcagga

SEQ ID NO: 224293 - RNA, 32 nt, Human
uagucccagcuauaugggaugcugaggcagaa

SEQ ID NO: 224294 - RNA, 32 nt, Human
uagucccagcuaucccagaggucgaggcugca

SEQ ID NO: 224295 - RNA, 32 nt, Human
uagucccagcuaucugggaggcugaggcagga

SEQ ID NO: 224296 - RNA, 32 nt, Human
uagucccagcuaugcgagaggcugaggcagga

SEQ ID NO: 224297 - RNA, 32 nt, Human
uagucccagcuaugugggaggcuaagguggga

SEQ ID NO: 224298 - RNA, 32 nt, Human
uagucccagcuauucagaaggcugaggcagga

SEQ ID NO: 224299 - RNA, 32 nt, Human
uagucccagcuauucaggaagcugagguggga

SEQ ID NO: 224300 - RNA, 32 nt, Human
uagucccagcuauucaggagcuguuguaggag

SEQ ID NO: 224301 - RNA, 32 nt, Human
uagucccagcuauucaggaggcuaagguaaga

SEQ ID NO: 224302 - RNA, 32 nt, Human
uagucccagcuauucaggaggcugaggcagga

SEQ ID NO: 224303 - RNA, 32 nt, Human
uagucccagcuauucaggaggcugagguggga

SEQ ID NO: 224304 - RNA, 32 nt, Human
uagucccagcuauuccagggggcugaggcagg

SEQ ID NO: 224305 - RNA, 32 nt, Human
uagucccagcuauucgggaggcugaggcagga

SEQ ID NO: 224306 - RNA, 32 nt, Human
uagucccagcuauucgggaggcugagguaaga

SEQ ID NO: 224307 - RNA, 32 nt, Human
uagucccagcuauucuagaggcugaggcggga

SEQ ID NO: 224308 - RNA, 32 nt, Human
uagucccagcuauucuggaggcugagauggga

SEQ ID NO: 224309 - RNA, 32 nt, Human
uagucccagcuauuugggaggcuaaggcagga

SEQ ID NO: 224310 - RNA, 32 nt, Human
uagucccagcuauuugggaggcugaggcagga

SEQ ID NO: 224311 - RNA, 32 nt, Human
uagucccagcuauuugggaggcugagguggga

SEQ ID NO: 224312 - RNA, 32 nt, Human
uagucccagcuauuugggaggcugaugcagga

SEQ ID NO: 224313 - RNA, 32 nt, Human
uagucccagcuccccaggaggcugagguggga

SEQ ID NO: 224314 - RNA, 32 nt, Human
uagucccagcuccucaggaggcugaggcagga

SEQ ID NO: 224315 - RNA, 32 nt, Human
uagucccagcucuucaggaggcugagaaaaga

SEQ ID NO: 224316 - RNA, 32 nt, Human
uagucccagcugcccaggaggcugaggcagga

SEQ ID NO: 224317 - RNA, 32 nt, Human
uagucccagcugcucaggaggcugaggcagga

SEQ ID NO: 224318 - RNA, 32 nt, Human
uagucccagcugcucaggaggcugaggcauga

SEQ ID NO: 224319 - RNA, 32 nt, Human
uagucccagcugcucaggaggcugagguggga

SEQ ID NO: 224320 - RNA, 32 nt, Human
uagucccagcugcuccugaggcugaggcagga

SEQ ID NO: 224321 - RNA, 32 nt, Human
uagucccagcugcucgggaggcugaggcagga

SEQ ID NO: 224322 - RNA, 32 nt, Human
uagucccagcugcucgggaggcugaggcaggg

SEQ ID NO: 224323 - RNA, 32 nt, Human
uagucccagcugcuugggaggcugaggcagga

SEQ ID NO: 224324 - RNA, 32 nt, Human
uagucccagcuguccuggaggcugaggcagaa

SEQ ID NO: 224325 - RNA, 32 nt, Human
uagucccagcuguucgagaggcugaggcaaga

SEQ ID NO: 224326 - RNA, 32 nt, Human
uagucccagcuucucaggaggcugggguggga

SEQ ID NO: 224327 - RNA, 32 nt, Human
uagucccagcuucucgggaggcugaggcagga

SEQ ID NO: 224328 - RNA, 32 nt, Human
uagucccagcuucuugggaggcugagguggga

SEQ ID NO: 224329 - RNA, 32 nt, Human
uagucccaggcugaggugggaggaucacuuga

SEQ ID NO: 224330 - RNA, 32 nt, Human
uagucccagguaaccauugggccaaaggauca

SEQ ID NO: 224331 - RNA, 32 nt, Human
uagucccagguacucaggaggcugaggcagga

SEQ ID NO: 224332 - RNA, 32 nt, Human
uagucccagguacucaggaggcugagguagga

SEQ ID NO: 224333 - RNA, 32 nt, Human
uagucccagguacucaggaggcugagguagua

SEQ ID NO: 224334 - RNA, 32 nt, Human
uagucccagguacucgggaggcugaggcagga

SEQ ID NO: 224335 - RNA, 32 nt, Human
uagucccagguacuugggaggcugaggcagga

SEQ ID NO: 224336 - RNA, 32 nt, Human
uagucccaguuacucgggaggcugaggcacga

SEQ ID NO: 224337 - RNA, 32 nt, Human
uagucccaguuacucgggaggcugaggcagga

SEQ ID NO: 224338 - RNA, 32 nt, Human
uagucccaguuacucggguggcugaggcagga

SEQ ID NO: 224339 - RNA, 32 nt, Human
uagucccaguuacucuggaggcugaggcagaa

SEQ ID NO: 224340 - RNA, 32 nt, Human
uagucccaguuacuugggaggcugagacagga

SEQ ID NO: 224341 - RNA, 32 nt, Human
uagucccaguuacuugggaggcugaggcagga

SEQ ID NO: 224342 - RNA, 32 nt, Human
uagucccaucuacuugggaggcugagguggau

SEQ ID NO: 224343 - RNA, 32 nt, Human
uagucccauguacuugggaggcugaggcagga

SEQ ID NO: 224344 - RNA, 32 nt, Human
uaguccccaagcggcaguccuggaccuaacgg

SEQ ID NO: 224345 - RNA, 32 nt, Human
uaguccccuggacugagucccccaggccuucc

SEQ ID NO: 224346 - RNA, 32 nt, Human
uaguccccugggggaggggaagggugggucua

SEQ ID NO: 224347 - RNA, 32 nt, Human
uagucccggcuacucgggaggcugaggcagga

SEQ ID NO: 224348 - RNA, 32 nt, Human
uagucccgguuacucgggaggcugagacagga

SEQ ID NO: 224349 - RNA, 32 nt, Human
uagucccucucaccugcuuccucagacgacuc

SEQ ID NO: 224350 - RNA, 32 nt, Human
uagucccucuccugccaccucuccaagacuuc

SEQ ID NO: 224351 - RNA, 32 nt, Human
uagucccugcaacucuggaggcugagguggga

SEQ ID NO: 224352 - RNA, 32 nt, Human
uagucccugcuacucaggaggcugaggcagga

SEQ ID NO: 224353 - RNA, 32 nt, Human
uagucccugcuacuugggaggcugaggcagga

SEQ ID NO: 224354 - RNA, 32 nt, Human
uagucccugcuacuugggaggcugagguagga

SEQ ID NO: 224355 - RNA, 32 nt, Human
uagucccugcuauuugagaggcugagguggga

SEQ ID NO: 224356 - RNA, 32 nt, Human
uagucccuggccaucccuccuguccuggaucc

SEQ ID NO: 224357 - RNA, 32 nt, Human
uaguccgagccacuugggaggcugagguggga

SEQ ID NO: 224358 - RNA, 32 nt, Human
uaguccgagcuacucgggaggcugaggcagaa

SEQ ID NO: 224359 - RNA, 32 nt, Human
uaguccgcgccaggaagagagcaacgaggaaa

SEQ ID NO: 224360 - RNA, 32 nt, Human
uaguccguccuggcacagaagaggagucaagu

SEQ ID NO: 224361 - RNA, 32 nt, Human
uaguccuaacugcucaggaggcugagguggga

SEQ ID NO: 224362 - RNA, 32 nt, Human
uaguccuaaggagaugaucagagauguguaaa

SEQ ID NO: 224363 - RNA, 32 nt, Human
uaguccuacaccuugcccugccugggcuuugg

SEQ ID NO: 224364 - RNA, 32 nt, Human
uaguccuacugagaaaaugagcacuuugauca

SEQ ID NO: 224365 - RNA, 32 nt, Human
uaguccuagcacuuugggaggcugaggcgggu

SEQ ID NO: 224366 - RNA, 32 nt, Human
uaguccuagccacucaggaggcugaggcagga

SEQ ID NO: 224367 - RNA, 32 nt, Human
uaguccuagcuacucaggaggcugagauggga

SEQ ID NO: 224368 - RNA, 32 nt, Human
uaguccuagcuacucaggaggcugaggcagga

SEQ ID NO: 224369 - RNA, 32 nt, Human
uaguccuagcuacucaggaggcugagguggga

SEQ ID NO: 224370 - RNA, 32 nt, Human
uaguccuagcuacuccggaggcugagccagga

SEQ ID NO: 224371 - RNA, 32 nt, Human
uaguccuagcuacucgagaggcugaggcagga

SEQ ID NO: 224372 - RNA, 32 nt, Human
uaguccuagcuacucggaaggcugaggcagga

SEQ ID NO: 224373 - RNA, 32 nt, Human
uaguccuagcuacucgggaggcugaggcacga

SEQ ID NO: 224374 - RNA, 32 nt, Human
uaguccuagcuacucgggaggcugaggcagga

SEQ ID NO: 224375 - RNA, 32 nt, Human
uaguccuagcuacugaggaggcugacggagga

SEQ ID NO: 224376 - RNA, 32 nt, Human
uaguccuagcuacuugggaggcugagauggga

SEQ ID NO: 224377 - RNA, 32 nt, Human
uaguccuagcuacuugggaggcugaggcagga

SEQ ID NO: 224378 - RNA, 32 nt, Human
uaguccuagcuacuugggaggcugagguggaa

SEQ ID NO: 224379 - RNA, 32 nt, Human
uaguccuagcuauuugggaggcugaggcugga

SEQ ID NO: 224380 - RNA, 32 nt, Human
uaguccuagcugcucaggaggcugaggcagga

SEQ ID NO: 224381 - RNA, 32 nt, Human
uaguccuagcugcucgggaggcugaggcagga

SEQ ID NO: 224382 - RNA, 32 nt, Human
uaguccuagcugcuugggaggcugaggcaggc

SEQ ID NO: 224383 - RNA, 32 nt, Human
uaguccuagcuucuugggaggcugaggcagga

SEQ ID NO: 224384 - RNA, 32 nt, Human
uaguccuaguuacuugggaggcugaagcggga

SEQ ID NO: 224385 - RNA, 32 nt, Human
uaguccuaguuacuugggaggcugagguggga

SEQ ID NO: 224386 - RNA, 32 nt, Human
uaguccuccaagaagaaagcaccaagacaaca

SEQ ID NO: 224387 - RNA, 32 nt, Human
uaguccuccugccucagcuuccugguugcgac

SEQ ID NO: 224388 - RNA, 32 nt, Human
uaguccuccugcuacaccacugaccaacagga

SEQ ID NO: 224389 - RNA, 32 nt, Human
uaguccucuguggguuggucuucagccagcau

SEQ ID NO: 224390 - RNA, 32 nt, Human
uaguccugcagaggauuuaacugugaaccugg

SEQ ID NO: 224391 - RNA, 32 nt, Human
uaguccuggaaacaacccuaugugguugggac

SEQ ID NO: 224392 - RNA, 32 nt, Human
uaguccuguaggucagccuuucucacaaacuc

SEQ ID NO: 224393 - RNA, 32 nt, Human
uaguccuuccuugguguuaacucugaaauuaa

SEQ ID NO: 224394 - RNA, 32 nt, Human
uagucgaaccccaaacauuguaaaaugugucc

SEQ ID NO: 224395 - RNA, 32 nt, Human
uagucgaagcuacucaggaggcugaggcagaa

SEQ ID NO: 224396 - RNA, 32 nt, Human
uagucgcaaugucauugucagaaaaauggaag

SEQ ID NO: 224397 - RNA, 32 nt, Human
uagucgcaccgcuggcaccuguaagaacgcgc

SEQ ID NO: 224398 - RNA, 32 nt, Human
uagucgcagccuuucgggaggcugagacagga

SEQ ID NO: 224399 - RNA, 32 nt, Human
uagucgcagcuacucagaaggcugagguggga

SEQ ID NO: 224400 - RNA, 32 nt, Human
uagucgcagcuacucaggaggcugaggcggga

SEQ ID NO: 224401 - RNA, 32 nt, Human
uagucgcagcuacuggggaggcugaggcagga

SEQ ID NO: 224402 - RNA, 32 nt, Human
uagucgcagcuacuugggaggcuggggcagga

SEQ ID NO: 224403 - RNA, 32 nt, Human
uagucgccgcaaugacgaccgcguccaccucg

SEQ ID NO: 224404 - RNA, 32 nt, Human
uagucgccuccaccucccugccugaaccucca

SEQ ID NO: 224405 - RNA, 32 nt, Human
uagucgcgggaaaggacccacacuccuuagcc

SEQ ID NO: 224406 - RNA, 32 nt, Human
uagucgcuggaguccgcgccucccugggacug

SEQ ID NO: 224407 - RNA, 21 nt, Human
uagucggcaccagaggcaagg

SEQ ID NO: 224408 - RNA, 32 nt, Human
uagucgggaagaggagcuucagcagcgcuguu

SEQ ID NO: 224409 - RNA, 32 nt, Human
uagucgggucggagaugaaaucagagggaguc

SEQ ID NO: 224410 - RNA, 32 nt, Human
uagucuaccacuguacaucugguaaccucaau

SEQ ID NO: 224411 - RNA, 32 nt, Human
uagucuacgagccaggaugacagggacagcga

SEQ ID NO: 224412 - RNA, 32 nt, Human
uagucuacuguauuuauuuauaugggaucaac

SEQ ID NO: 224413 - RNA, 20 nt, Human
uagucuauaaauucuucaca

SEQ ID NO: 224414 - RNA, 32 nt, Human
uagucucaaaacugugaagugacaugucagaa

SEQ ID NO: 224415 - RNA, 22 nt, Human
uagucucaaccuccugggcuca

SEQ ID NO: 224416 - RNA, 32 nt, Human
uagucucaacuauuugggaggcugaggcagga

SEQ ID NO: 224417 - RNA, 32 nt, Human
uagucucaagaauggaaaccugaaugucugag

SEQ ID NO: 224418 - RNA, 32 nt, Human
uagucucaccuacuccggaggcugagguggga

SEQ ID NO: 224419 - RNA, 32 nt, Human
uagucucagauacuugggaggcugagggugga

SEQ ID NO: 224420 - RNA, 32 nt, Human
uagucucagcacuuugggaggcugagguggga

SEQ ID NO: 224421 - RNA, 32 nt, Human
uagucucagccacucgggaggcugaggcagga

SEQ ID NO: 224422 - RNA, 32 nt, Human
uagucucagcuaccugggaggcugaggcagga

SEQ ID NO: 224423 - RNA, 32 nt, Human
uagucucagcuacuagggaggcugaggcaaga

SEQ ID NO: 224424 - RNA, 32 nt, Human
uagucucagcuacucaggaggcugagacagga

SEQ ID NO: 224425 - RNA, 32 nt, Human
uagucucagcuacucaggaggcugagaugaga

SEQ ID NO: 224426 - RNA, 32 nt, Human
uagucucagcuacucaggaggcugaggcagga

SEQ ID NO: 224427 - RNA, 32 nt, Human
uagucucagcuacucaggaggcuguggcagga

SEQ ID NO: 224428 - RNA, 32 nt, Human
uagucucagcuacucggaaggcugaggcagga

SEQ ID NO: 224429 - RNA, 32 nt, Human
uagucucagcuacucgggaggcugaggcagga

SEQ ID NO: 224430 - RNA, 32 nt, Human
uagucucagcuacucuggagguuuagcaggag

SEQ ID NO: 224431 - RNA, 32 nt, Human
uagucucagcuacuuaggaggcugagguggca

SEQ ID NO: 224432 - RNA, 32 nt, Human
uagucucagcuacuuaggaggcugagguggga

SEQ ID NO: 224433 - RNA, 32 nt, Human
uagucucagcuacuugggaggcugaggcacaa

SEQ ID NO: 224434 - RNA, 32 nt, Human
uagucucagcuacuugggaggcugaggcagga

SEQ ID NO: 224435 - RNA, 32 nt, Human
uagucucagcuauucgggaggaugaggcaaga

SEQ ID NO: 224436 - RNA, 32 nt, Human
uagucucagcuauugggaggcugaggcaagaa

SEQ ID NO: 224437 - RNA, 32 nt, Human
uagucucaucuucuuaacucccucaggcauca

SEQ ID NO: 224438 - RNA, 32 nt, Human
uagucucaugaagaauucuggcgugcagccag

SEQ ID NO: 224439 - RNA, 22 nt, Human
uagucucauuaugaccuucaca

SEQ ID NO: 224440 - RNA, 32 nt, Human
uagucuccagaacugugagacagugcauuuug

SEQ ID NO: 224441 - RNA, 32 nt, Human
uagucucccuuucacuguuuucuuauucugua

SEQ ID NO: 224442 - RNA, 32 nt, Human
uagucuccuacuuagagauauucuagaaaaug

SEQ ID NO: 224443 - RNA, 32 nt, Human
uagucuccuccccguggauucccccaaaccca

SEQ ID NO: 224444 - RNA, 22 nt, Human
uagucucgaccucccaggcuca

SEQ ID NO: 224445 - RNA, 32 nt, Human
uagucucuacagcuguuucccucuuuucccau

SEQ ID NO: 224446 - RNA, 32 nt, Human
uagucucuccaccuuggccauuuccagccagc

SEQ ID NO: 224447 - RNA, 32 nt, Human
uagucucuccagcacaugcacacagcaugcac

SEQ ID NO: 224448 - RNA, 32 nt, Human
uagucucuccccuucuuucccuuccacuucua

SEQ ID NO: 224449 - RNA, 32 nt, Human
uagucucugaaguucccccauuuccuucagua

SEQ ID NO: 224450 - RNA, 32 nt, Human
uagucucugagguuccuuuucacacacaaaaa

SEQ ID NO: 224451 - RNA, 32 nt, Human
uagucucugcuuucuuuccccagggcugggcc

SEQ ID NO: 224452 - RNA, 32 nt, Human
uagucucugucucuauagguuugcuuuuucag

SEQ ID NO: 224453 - RNA, 32 nt, Human
uagucucuucuucauugcccuuccucaccagc

SEQ ID NO: 224454 - RNA, 32 nt, Human
uagucugaacuuaaguguccuaaaaccuuguu

SEQ ID NO: 224455 - RNA, 22 nt, Human
uagucugaagcugucccaggcu

SEQ ID NO: 224456 - RNA, 32 nt, Human
uagucugaagugaaguacagagcuggcaucua

SEQ ID NO: 224457 - RNA, 23 nt, Human
uagucugaccccucacuuaggcu

SEQ ID NO: 224458 - RNA, 32 nt, Human
uagucugcauaggaagggaacaccuggacgug

SEQ ID NO: 224459 - RNA, 32 nt, Human
uagucugcaucuguaucuuuguggacuugaug

SEQ ID NO: 224460 - RNA, 32 nt, Human
uagucugcccuugaacacauacccucacuggg

SEQ ID NO: 224461 - RNA, 32 nt, Human
uagucugccucuacaccagcagagaccucccu

SEQ ID NO: 224462 - RNA, 32 nt, Human
uagucugccugggugaggcucccuuccuguuu

SEQ ID NO: 224463 - RNA, 32 nt, Human
uagucugcuggggcuuggccucuggguccugc

SEQ ID NO: 224464 - RNA, 32 nt, Human
uagucuggacugcuuccccaucagccuuccca

SEQ ID NO: 224465 - RNA, 32 nt, Human
uagucuggacuggccaauccaggucccugcac

SEQ ID NO: 224466 - RNA, 32 nt, Human
uagucuggccaacauggugaaacacuaucucu

SEQ ID NO: 224467 - RNA, 32 nt, Human
uagucuggccaacauggugaaaccccaucucu

SEQ ID NO: 224468 - RNA, 32 nt, Human
uagucuggucaacauggugaaaccccgucucc

SEQ ID NO: 224469 - RNA, 28 nt, Human
uagucugguuuuuguugcuuaucggguu

SEQ ID NO: 224470 - RNA, 32 nt, Human
uagucugucagggccuuggcccaggggucagc

SEQ ID NO: 224471 - RNA, 23 nt, Human
uagucugucucuuggcuuuguca

SEQ ID NO: 224472 - RNA, 24 nt, Human
uagucuguucucaugcugcuguua

SEQ ID NO: 224473 - RNA, 19 nt, Human
uagucuguuucauauuauu

SEQ ID NO: 224474 - RNA, 32 nt, Human
uagucuguuuucucugagcauguuggccaacu

SEQ ID NO: 224475 - RNA, 32 nt, Human
uagucuuagcuacucaggaggcugaggaggga

SEQ ID NO: 224476 - RNA, 32 nt, Human
uagucuuagcuacucaggaggcugaggcagga

SEQ ID NO: 224477 - RNA, 32 nt, Human
uagucuucauuucugucugauucuaccuuuac

SEQ ID NO: 224478 - RNA, 32 nt, Human
uagucuuccacucugggauauugagcagugcu

SEQ ID NO: 224479 - RNA, 32 nt, Human
uagucuucccauuuucuuccuauuacuuuauu

SEQ ID NO: 224480 - RNA, 32 nt, Human
uagucuuccgucuuuucuucuucaccaagcau

SEQ ID NO: 224481 - RNA, 32 nt, Human
uagucuuccuucauccuugcccucuguuggca

SEQ ID NO: 224482 - RNA, 32 nt, Human
uagucuucucagaugaccuugacuaauauacu

SEQ ID NO: 224483 - RNA, 32 nt, Human
uagucuugcugguacaauuugggcuaaggagu

SEQ ID NO: 224484 - RNA, 21 nt, Human
uagucuuggugaccuuuuaua

SEQ ID NO: 224485 - RNA, 32 nt, Human
uagucuuucccucuccccuccuguuuuaguuu

SEQ ID NO: 224486 - RNA, 20 nt, Human
uagucuuucucuccuucaua

SEQ ID NO: 224487 - RNA, 32 nt, Human
uagucuuuucaguuaucuucuaccuccuguau

SEQ ID NO: 224488 - RNA, 32 nt, Human
uagugaaaaacucaguucuauaagcuagcugu

SEQ ID NO: 224489 - RNA, 32 nt, Human
uagugaaaaggugaguuaugagcuuagauuac

SEQ ID NO: 224490 - RNA, 32 nt, Human
uagugaaagaaagauggaaaguguugagaaag

SEQ ID NO: 224491 - RNA, 32 nt, Human
uagugaaauaacugaagggccugcucuuucca

SEQ ID NO: 224492 - RNA, 32 nt, Human
uagugaaaucauaguagccauugagaacacaa

SEQ ID NO: 224493 - RNA, 32 nt, Human
uagugaacacagaguaugggcacggcuaugcu

SEQ ID NO: 224494 - RNA, 32 nt, Human
uagugaagacgguguuuugccauguugggcag

SEQ ID NO: 224495 - RNA, 32 nt, Human
uagugaagagcaacauguggcacacagggccu

SEQ ID NO: 224496 - RNA, 32 nt, Human
uagugaagccagaaucucagggccaggcaucc

SEQ ID NO: 224497 - RNA, 32 nt, Human
uagugaaucaggcaccggagugcagguucggg

SEQ ID NO: 224498 - RNA, 32 nt, Human
uagugaaugacuugaccugugaccucaauaca

SEQ ID NO: 224499 - RNA, 32 nt, Human
uagugaauuuguggaggcauugccaaaaauca

SEQ ID NO: 224500 - RNA, 32 nt, Human
uagugacaaccaggaaaacuuacuugggauua

SEQ ID NO: 224501 - RNA, 32 nt, Human
uagugacaccaguuuugggagaugucuuucau

SEQ ID NO: 224502 - RNA, 32 nt, Human
uagugacagaacuuccucggccauauggaggg

SEQ ID NO: 224503 - RNA, 32 nt, Human
uagugacagccauuucuugguugauggguugg

SEQ ID NO: 224504 - RNA, 31 nt, Human
uagugacagguggaaaagaaggaugaggaag

SEQ ID NO: 224505 - RNA, 32 nt, Human
uagugacaugcaggcaccucucuuucauccuu

SEQ ID NO: 224506 - RNA, 32 nt, Human
uagugacccagugcccucacugcccagccccg

SEQ ID NO: 224507 - RNA, 32 nt, Human
uagugacccucugaauaaccugagugacuggc

SEQ ID NO: 224508 - RNA, 32 nt, Human
uagugacccugcauuguggugccugagcccug

SEQ ID NO: 224509 - RNA, 32 nt, Human
uagugacggguuucaccauguuagccaggaug

SEQ ID NO: 224510 - RNA, 32 nt, Human
uagugacucugugcuugucuguuuaguucugu

SEQ ID NO: 224511 - RNA, 32 nt, Human
uagugacucuucugaagaagcuuucuggucug

SEQ ID NO: 224512 - RNA, 32 nt, Human
uagugacugagaaggauugauaucauggcuag

SEQ ID NO: 224513 - RNA, 21 nt, Human
uagugacugaugccuguaauc

SEQ ID NO: 224514 - RNA, 32 nt, Human
uagugacuucuccaccaagcuggagaaggauu

SEQ ID NO: 224515 - RNA, 32 nt, Human
uagugacuugacugagaaguuaggguagaaaa

SEQ ID NO: 224516 - RNA, 32 nt, Human
uagugagaaagagggaaggaauagaacgagga

SEQ ID NO: 224517 - RNA, 32 nt, Human
uagugagaauauagccucccaccccauuaacu

SEQ ID NO: 224518 - RNA, 23 nt, Human
uagugagacccaauuucuacaaa

SEQ ID NO: 224519 - RNA, 23 nt, Human
uagugagaccccaucccuauaaa

SEQ ID NO: 224520 - RNA, 21 nt, Human
uagugagaccccaucucuaca

SEQ ID NO: 224521 - RNA, 22 nt, Human
uagugagaccccaucucuacaa

SEQ ID NO: 224522 - RNA, 23 nt, Human
uagugagaccccaucucuacaaa

SEQ ID NO: 224523 - RNA, 23 nt, Human
uagugagaccccauuucuacaaa

SEQ ID NO: 224524 - RNA, 23 nt, Human
uagugagacccccaucucuacaa

SEQ ID NO: 224525 - RNA, 24 nt, Human
uagugagacccccaucucuacaaa

SEQ ID NO: 224526 - RNA, 24 nt, Human
uagugagacccccuaucucuacaa

SEQ ID NO: 224527 - RNA, 23 nt, Human
uagugagaccccgucuaugcaaa

SEQ ID NO: 224528 - RNA, 23 nt, Human
uagugagacccuaucucuacaaa

SEQ ID NO: 224529 - RNA, 23 nt, Human
uagugagacccuauuucuacaaa

SEQ ID NO: 224530 - RNA, 23 nt, Human
uagugagacccuguaucuacaaa

SEQ ID NO: 224531 - RNA, 23 nt, Human
uagugagacccugucucuacaaa

SEQ ID NO: 224532 - RNA, 24 nt, Human
uagugagacccugucucuagcaaa

SEQ ID NO: 224533 - RNA, 23 nt, Human
uagugagacccuuucucuacaaa

SEQ ID NO: 224534 - RNA, 23 nt, Human
uagugagaccuuggcgcuacaaa

SEQ ID NO: 224535 - RNA, 32 nt, Human
uagugagacuuucccagcauguuucuaccaaa

SEQ ID NO: 224536 - RNA, 32 nt, Human
uagugagaucccgucuccgaagaaaagauaug

SEQ ID NO: 224537 - RNA, 32 nt, Human
uagugagauguaugcaguauguggccauguuu

SEQ ID NO: 224538 - RNA, 32 nt, Human
uagugagccaagauccagccugggcgacagag

SEQ ID NO: 224539 - RNA, 32 nt, Human
uagugagcggagggacaggaaggguagggcaa

SEQ ID NO: 224540 - RNA, 32 nt, Human
uagugagcguaugacacacacagccauacggu

SEQ ID NO: 224541 - RNA, 32 nt, Human
uagugaggaaaugacugucgggugugcgggua

SEQ ID NO: 224542 - RNA, 32 nt, Human
uagugagggagagugucucuguucuuuugcuc

SEQ ID NO: 224543 - RNA, 32 nt, Human
uagugagggcaagugggcugcacuccuuucuc

SEQ ID NO: 224544 - RNA, 32 nt, Human
uagugaggguauaaaguguaagcaucaguuaa

SEQ ID NO: 224545 - RNA, 32 nt, Human
uagugaggugaggcugagaaagaaaaagcccg

SEQ ID NO: 224546 - RNA, 32 nt, Human
uagugagguuuacauuuucaggaauuuaaguu

SEQ ID NO: 224547 - RNA, 32 nt, Human
uagugaguuucuuggugugaugccauuuuuau

SEQ ID NO: 224548 - RNA, 32 nt, Human
uagugauaaucccaccacccuuugcugacucu

SEQ ID NO: 224549 - RNA, 32 nt, Human
uagugauagcuggacacacaaggaauucacaa

SEQ ID NO: 224550 - RNA, 32 nt, Human
uagugauccccuccucuucacccccagggcag

SEQ ID NO: 224551 - RNA, 32 nt, Human
uagugaugaaauuuuucuuugagaacuggcaa

SEQ ID NO: 224552 - RNA, 32 nt, Human
uagugaugagcuucacccuggagcuccucccg

SEQ ID NO: 224553 - RNA, 30 nt, Human
uagugaugcugaugcugcugguccggggaa

SEQ ID NO: 224554 - RNA, 32 nt, Human
uagugauggagagcagagggagagggccaggc

SEQ ID NO: 224555 - RNA, 32 nt, Human
uagugauggaugaacucucuuaucucuggcuu

SEQ ID NO: 224556 - RNA, 32 nt, Human
uagugaugggaguauguguagcuuugauuugg

SEQ ID NO: 224557 - RNA, 32 nt, Human
uagugauguggagcaccuuuucauauacuuaa

SEQ ID NO: 224558 - RNA, 32 nt, Human
uagugauguuguuugggagagugcaguaguaa

SEQ ID NO: 224559 - RNA, 32 nt, Human
uagugauucauaccucuaaugcuagcacuuuu

SEQ ID NO: 224560 - RNA, 32 nt, Human
uagugcaacaguaacccaaaaaugucaaugaa

SEQ ID NO: 224561 - RNA, 32 nt, Human
uagugcaacuacuaccuuggugccucaguuua

SEQ ID NO: 224562 - RNA, 32 nt, Human
uagugcaaucacagcugacugcagccuugacc

SEQ ID NO: 224563 - RNA, 32 nt, Human
uagugcacagugacuuuucuguuucuuaucac

SEQ ID NO: 224564 - RNA, 23 nt, Human
uagugcaccugaagggguccaca

SEQ ID NO: 224565 - RNA, 32 nt, Human
uagugcagaagcuuccaggcuguagagcccug

SEQ ID NO: 224566 - RNA, 32 nt, Human
uagugcagacacaccucagaguccugagcagg

SEQ ID NO: 224567 - RNA, 32 nt, Human
uagugcagagaagccagucaccauagaaggca

SEQ ID NO: 224568 - RNA, 32 nt, Human
uagugcagaguguuuagagaucacucaguuuu

SEQ ID NO: 224569 - RNA, 32 nt, Human
uagugcagccacuccugggggcuguggggaag

SEQ ID NO: 224570 - RNA, 32 nt, Human
uagugcagccucccucuccuccugaugacuuu

SEQ ID NO: 224571 - RNA, 32 nt, Human
uagugcagcuguggguggaggcuggggugucu

SEQ ID NO: 224572 - RNA, 32 nt, Human
uagugcaggguuugccuugaaaccauuacauu

SEQ ID NO: 224573 - RNA, 21 nt, Human
uagugcauauuuuuuauagua

SEQ ID NO: 224574 - RNA, 32 nt, Human
uagugcaugaaugaaugagucaugggcagugg

SEQ ID NO: 224575 - RNA, 32 nt, Human
uagugcaugccuguaaucccagcuacucagga

SEQ ID NO: 224576 - RNA, 32 nt, Human
uagugcaugccuguaaucccagcuacuuggga

SEQ ID NO: 224577 - RNA, 32 nt, Human
uagugcaugccuguagucccagcuaccuggga

SEQ ID NO: 224578 - RNA, 32 nt, Human
uagugcaugccuguagucccagcuacuuggga

SEQ ID NO: 224579 - RNA, 32 nt, Human
uagugcaugguguguggugcccccagggcucc

SEQ ID NO: 224580 - RNA, 32 nt, Human
uagugccaaggugggugcaagagugaacaaag

SEQ ID NO: 224581 - RNA, 32 nt, Human
uagugccacagcucuccagccugggcgacaga

SEQ ID NO: 224582 - RNA, 32 nt, Human
uagugccaccacaagcuuauggcaucucauug

SEQ ID NO: 224583 - RNA, 32 nt, Human
uagugccacugcaauucagccugggugacaua

SEQ ID NO: 224584 - RNA, 32 nt, Human
uagugccacugcacuacagcccgggcgacaga

SEQ ID NO: 224585 - RNA, 32 nt, Human
uagugccacugcacuccagccugggcaacaca

SEQ ID NO: 224586 - RNA, 32 nt, Human
uagugccacugcacuccagccugggugacaga

SEQ ID NO: 224587 - RNA, 32 nt, Human
uagugccacugcacuucagccugggugacaga

SEQ ID NO: 224588 - RNA, 32 nt, Human
uagugccacugcacuucagcuugggcaacaga

SEQ ID NO: 224589 - RNA, 32 nt, Human
uagugccacugcauuccggccugggcgacaga

SEQ ID NO: 224590 - RNA, 32 nt, Human
uagugccacugugcuccagccuggaugacgga

SEQ ID NO: 224591 - RNA, 32 nt, Human
uagugccagcauuuugggaggcugaagcaggc

SEQ ID NO: 224592 - RNA, 32 nt, Human
uagugccagcuacucaggaggcugaggcagga

SEQ ID NO: 224593 - RNA, 32 nt, Human
uagugccagcucuccccuaaaaguuccagcuc

SEQ ID NO: 224594 - RNA, 32 nt, Human
uagugccagcugcuugggaggcugaggugagg

SEQ ID NO: 224595 - RNA, 32 nt, Human
uagugccaggauucaggaaaauggcucccuua

SEQ ID NO: 224596 - RNA, 32 nt, Human
uagugccagucaccaaagaaggccuggaacuu

SEQ ID NO: 224597 - RNA, 32 nt, Human
uagugccaucgcacuccagccuggacaacaga

SEQ ID NO: 224598 - RNA, 32 nt, Human
uagugccauugcacuccggccugggcaacaga

SEQ ID NO: 224599 - RNA, 32 nt, Human
uagugccauuguacuccagcuugggcaacaga

SEQ ID NO: 224600 - RNA, 32 nt, Human
uagugcccagcccucuguugaaaaagagaacu

SEQ ID NO: 224601 - RNA, 32 nt, Human
uagugccccaggaaaccuggagguuccacucc

SEQ ID NO: 224602 - RNA, 32 nt, Human
uagugcccccucuaacccccagugccacagag

SEQ ID NO: 224603 - RNA, 32 nt, Human
uagugcccuagguuggugacagaagggacaga

SEQ ID NO: 224604 - RNA, 31 nt, Human
uagugcccucucucugggcccagggcugugg

SEQ ID NO: 224605 - RNA, 32 nt, Human
uagugcccugucucccugucucuagaagccuu

SEQ ID NO: 224606 - RNA, 32 nt, Human
uagugcccuugcaagagccuuuaacuuggcgg

SEQ ID NO: 224607 - RNA, 32 nt, Human
uagugccgcugcacuccauucugggcaagagc

SEQ ID NO: 224608 - RNA, 32 nt, Human
uagugccggcuacucaggaggcugaggcacaa

SEQ ID NO: 224609 - RNA, 32 nt, Human
uagugccuacggcaugggucagcucuuucugc

SEQ ID NO: 224610 - RNA, 32 nt, Human
uagugccuccuggaccuaaggggccucccuca

SEQ ID NO: 224611 - RNA, 32 nt, Human
uagugccucuacugaauuauuccucuuuuaaa

SEQ ID NO: 224612 - RNA, 32 nt, Human
uagugccucugcacuccagccugcgugacaaa

SEQ ID NO: 224613 - RNA, 32 nt, Human
uagugccuucuggaccuaaggggccucccuca

SEQ ID NO: 224614 - RNA, 32 nt, Human
uagugcgggccugggcccugcuccaccuccag

SEQ ID NO: 224615 - RNA, 32 nt, Human
uagugcuaagaggaucuccuguccaucagcca

SEQ ID NO: 224616 - RNA, 32 nt, Human
uagugcuagcuacucagaaggcugagguggga

SEQ ID NO: 224617 - RNA, 32 nt, Human
uagugcuauuauagugaaaaacucaguucuau

SEQ ID NO: 224618 - RNA, 32 nt, Human
uagugcuccaagucuaggaacucccucagauc

SEQ ID NO: 224619 - RNA, 32 nt, Human
uagugcucccuucacuauccugugccuuccuc

SEQ ID NO: 224620 - RNA, 32 nt, Human
uagugcucucagucuucauaccccagaaauua

SEQ ID NO: 224621 - RNA, 32 nt, Human
uagugcugaauguuuauuguaaaagagagucu

SEQ ID NO: 224622 - RNA, 32 nt, Human
uagugcugacauauauucagaguguuguaguu

SEQ ID NO: 224623 - RNA, 32 nt, Human
uagugcugcagugaacauacacaugcuuguau

SEQ ID NO: 224624 - RNA, 32 nt, Human
uagugcugcuggcccagcugagcuccaccuag

SEQ ID NO: 224625 - RNA, 32 nt, Human
uagugcugggauuacaggcaugagccaccuca

SEQ ID NO: 224626 - RNA, 32 nt, Human
uagugcugggauuacaggugugagccaccgca

SEQ ID NO: 224627 - RNA, 32 nt, Human
uagugcuggguguggagugaggcaccacccuu

SEQ ID NO: 224628 - RNA, 32 nt, Human
uagugcuucaaagcuccugggacaccuccagu

SEQ ID NO: 224629 - RNA, 32 nt, Human
uagugcuugcucccccugccuugucccaccag

SEQ ID NO: 224630 - RNA, 32 nt, Human
uagugcuugugagguucauccagguugcugua

SEQ ID NO: 224631 - RNA, 32 nt, Human
uagugcuuugugaucaaugaucuuugauguua

SEQ ID NO: 224632 - RNA, 32 nt, Human
uaguggaaagaguuaagagcaagauggaauga

SEQ ID NO: 224633 - RNA, 32 nt, Human
uaguggaaagucaggcuagcugugcugguauu

SEQ ID NO: 224634 - RNA, 32 nt, Human
uaguggaacccucuuuucccccuagaagaacc

SEQ ID NO: 224635 - RNA, 32 nt, Human
uaguggaaccgggguuucaccauguuggccag

SEQ ID NO: 224636 - RNA, 32 nt, Human
uaguggaacuccaggaaguauaaccuuuucag

SEQ ID NO: 224637 - RNA, 32 nt, Human
uaguggaagagcucagggaagagccaguggag

SEQ ID NO: 224638 - RNA, 32 nt, Human
uaguggaagagguaguaagcaccagcugccuc

SEQ ID NO: 224639 - RNA, 32 nt, Human
uaguggacacacuggaauaaugcugagaaauu

SEQ ID NO: 224640 - RNA, 32 nt, Human
uaguggacagagaagacucuuggccaggcaga

SEQ ID NO: 224641 - RNA, 32 nt, Human
uaguggacauggucacaguccuauguacagag

SEQ ID NO: 224642 - RNA, 32 nt, Human
uaguggacauuuacagaacagaugcacccgau

SEQ ID NO: 224643 - RNA, 31 nt, Human
uaguggagaagaugaaaaggcauucauugcc

SEQ ID NO: 224644 - RNA, 32 nt, Human
uaguggagaaggagcaaugcugaggggugagg

SEQ ID NO: 224645 - RNA, 32 nt, Human
uaguggagacaagcaguuaaccuagcaccauc

SEQ ID NO: 224646 - RNA, 32 nt, Human
uaguggagacaggauuuuaccauguuggccag

SEQ ID NO: 224647 - RNA, 32 nt, Human
uaguggagacgggauuucaccauguuggccau

SEQ ID NO: 224648 - RNA, 32 nt, Human
uaguggagacgggguuucaccaugcuggccag

SEQ ID NO: 224649 - RNA, 32 nt, Human
uaguggagacgggguuucaccauguuggccag

SEQ ID NO: 224650 - RNA, 32 nt, Human
uaguggagacgggguuucaccauguuggcuaa

SEQ ID NO: 224651 - RNA, 32 nt, Human
uaguggagacgggguuucaccauguuggucag

SEQ ID NO: 224652 - RNA, 32 nt, Human
uaguggagacgggguuucaccauguuguccag

SEQ ID NO: 224653 - RNA, 32 nt, Human
uaguggagacgggguuucaccguguuagccag

SEQ ID NO: 224654 - RNA, 32 nt, Human
uaguggagacgggguuucuccaugucggucag

SEQ ID NO: 224655 - RNA, 32 nt, Human
uaguggagacgggguuucuccauguuggucag

SEQ ID NO: 224656 - RNA, 32 nt, Human
uaguggagagggagcaagggaggccgcagagg

SEQ ID NO: 224657 - RNA, 32 nt, Human
uaguggagaggggguuucaccauguuggccag

SEQ ID NO: 224658 - RNA, 32 nt, Human
uaguggagauaggguuucacaauguuggccau

SEQ ID NO: 224659 - RNA, 32 nt, Human
uaguggagaugcgguuucaccauguuggccgg

SEQ ID NO: 224660 - RNA, 32 nt, Human
uaguggagaugcgguuucaccauguuggcugg

SEQ ID NO: 224661 - RNA, 32 nt, Human
uaguggagaugcuuacacauugucaaacauau

SEQ ID NO: 224662 - RNA, 32 nt, Human
uaguggagauggcguuuuaccauguuggucag

SEQ ID NO: 224663 - RNA, 32 nt, Human
uaguggagauggggugucaccauguuggccag

SEQ ID NO: 224664 - RNA, 32 nt, Human
uaguggagaugggguuucacaauguuggccag

SEQ ID NO: 224665 - RNA, 32 nt, Human
uaguggagaugggguuucaccauguuagccag

SEQ ID NO: 224666 - RNA, 32 nt, Human
uaguggagaugggguuucaccauguuggccag

SEQ ID NO: 224667 - RNA, 32 nt, Human
uaguggagaugggguuucacuguguuggccag

SEQ ID NO: 224668 - RNA, 32 nt, Human
uaguggagaugggguuucuccauauuggucag

SEQ ID NO: 224669 - RNA, 32 nt, Human
uaguggagaugggguuuuaccauguuggccag

SEQ ID NO: 224670 - RNA, 32 nt, Human
uaguggagaugggguuuugucauguuggccag

SEQ ID NO: 224671 - RNA, 32 nt, Human
uaguggagaugguguuucaccauguuggccag

SEQ ID NO: 224672 - RNA, 32 nt, Human
uaguggagcccaaaacaggccucauucccuac

SEQ ID NO: 224673 - RNA, 32 nt, Human
uaguggagcugcucaaccaccugcccagagcu

SEQ ID NO: 224674 - RNA, 32 nt, Human
uaguggagggagagaggacuuaagucagaugg

SEQ ID NO: 224675 - RNA, 32 nt, Human
uaguggaggugggauuuugccauguuggccag

SEQ ID NO: 224676 - RNA, 32 nt, Human
uaguggagugggaagaguugagacugaaaguu

SEQ ID NO: 224677 - RNA, 32 nt, Human
uaguggaucacuguuaggguaagggaauguau

SEQ ID NO: 224678 - RNA, 32 nt, Human
uaguggaucagugucuuucaaugaugugacug

SEQ ID NO: 224679 - RNA, 32 nt, Human
uaguggaugggguuucuguuguaucuuguggg

SEQ ID NO: 224680 - RNA, 32 nt, Human
uaguggaugguuggcaggauuaguagguucua

SEQ ID NO: 224681 - RNA, 31 nt, Human
uaguggauguaugguagauggguugaagcuu

SEQ ID NO: 224682 - RNA, 32 nt, Human
uaguggauuacugccauucacuucauaaucca

SEQ ID NO: 224683 - RNA, 32 nt, Human
uaguggauuugggaaagguucuuaaguagauc

SEQ ID NO: 224684 - RNA, 32 nt, Human
uaguggcaaaguccucugucaguaaacucuuu

SEQ ID NO: 224685 - RNA, 32 nt, Human
uaguggcaaccuugccuuccugaccucagcgg

SEQ ID NO: 224686 - RNA, 32 nt, Human
uaguggcaccgccuccccaccuccaggcuuuc

SEQ ID NO: 224687 - RNA, 32 nt, Human
uaguggcagccaugguucaucuguggguguuc

SEQ ID NO: 224688 - RNA, 32 nt, Human
uaguggcaggcaggagagagcaugugcagggg

SEQ ID NO: 224689 - RNA, 32 nt, Human
uaguggcaugaucauagaucacugcagccuca

SEQ ID NO: 224690 - RNA, 32 nt, Human
uaguggccaagcaugggcucuaccccucugcg

SEQ ID NO: 224691 - RNA, 32 nt, Human
uaguggccaucucauaccuacucugaaaugca

SEQ ID NO: 224692 - RNA, 32 nt, Human
uaguggcccugacuuccggucggcuggccagc

SEQ ID NO: 224693 - RNA, 32 nt, Human
uaguggccuaaagaagucugaaguggcugaug

SEQ ID NO: 224694 - RNA, 32 nt, Human
uaguggcgccugccuuuaguccuaguuacuug

SEQ ID NO: 224695 - RNA, 21 nt, Human
uaguggcucacgccuguaauc

SEQ ID NO: 224696 - RNA, 32 nt, Human
uaguggcugccaguguggcacauuuaugucaa

SEQ ID NO: 224697 - RNA, 32 nt, Human
uaguggcugggaaaaggggugugcgaggggaa

SEQ ID NO: 224698 - RNA, 32 nt, Human
uaguggcugggagcuugccaggaacccagugg

SEQ ID NO: 224699 - RNA, 32 nt, Human
uaguggcugucaucccagcacuuuaggaggcc

SEQ ID NO: 224700 - RNA, 21 nt, Human
uaguggcuuaugccuguaauc

SEQ ID NO: 224701 - RNA, 32 nt, Human
uaguggcuucaaaggcccagcugacacccucc

SEQ ID NO: 224702 - RNA, 32 nt, Human
uaguggcuucagauuggagaccagccugggac

SEQ ID NO: 224703 - RNA, 32 nt, Human
uaguggcuuucauuaaauacuugcuguaaagu

SEQ ID NO: 224704 - RNA, 32 nt, Human
uagugggaggggcagcaggcccaaaccccaac

SEQ ID NO: 224705 - RNA, 32 nt, Human
uagugggauagcacuugugaauagccacugca

SEQ ID NO: 224706 - RNA, 32 nt, Human
uagugggauuacaggugcccgcuacuaugccc

SEQ ID NO: 224707 - RNA, 32 nt, Human
uagugggauuucaggcaugaccaccuggccua

SEQ ID NO: 224708 - RNA, 32 nt, Human
uagugggcagucaccuuccaaccggggacagu

SEQ ID NO: 224709 - RNA, 32 nt, Human
uagugggccagaaaaaucagucucugguccca

SEQ ID NO: 224710 - RNA, 32 nt, Human
uagugggccauucucauuugauguucccuaga

SEQ ID NO: 224711 - RNA, 32 nt, Human
uagugggccuucgggggcucuacugacguccc

SEQ ID NO: 224712 - RNA, 32 nt, Human
uagugggcugagaagaggggacuaggaagggc

SEQ ID NO: 224713 - RNA, 32 nt, Human
uaguggggagggcugaacaggacaaccucuca

SEQ ID NO: 224714 - RNA, 32 nt, Human
uaguggggaugggguuucaccauguuggccag

SEQ ID NO: 224715 - RNA, 32 nt, Human
uaguggggaugggguuucaucauguuggccag

SEQ ID NO: 224716 - RNA, 32 nt, Human
uaguggggaugggguuuuaccauguuggccag

SEQ ID NO: 224717 - RNA, 32 nt, Human
uaguggggcagcucucuuccucauguuauaac

SEQ ID NO: 224718 - RNA, 32 nt, Human
uagugggggaccuggccccugaggcaguggcg

SEQ ID NO: 224719 - RNA, 32 nt, Human
uagugggggaggcggcggcagcguuaagugag

SEQ ID NO: 224720 - RNA, 32 nt, Human
uagugggucauuggccaucuccgccugccuaa

SEQ ID NO: 224721 - RNA, 32 nt, Human
uagugggugccuguaaucccagcuacuuggga

SEQ ID NO: 224722 - RNA, 32 nt, Human
uagugggugccuguagucccagcuacuuggga

SEQ ID NO: 224723 - RNA, 32 nt, Human
uaguggguggcuaaguccagcccacacuggag

SEQ ID NO: 224724 - RNA, 32 nt, Human
uaguggguuaucuuuuccaaggaacagguuug

SEQ ID NO: 224725 - RNA, 32 nt, Human
uaguggguucccaucacuccaugaggucacug

SEQ ID NO: 224726 - RNA, 32 nt, Human
uagugguagauucaaagcuccacccaccucau

SEQ ID NO: 224727 - RNA, 32 nt, Human
uaguggucauggacagcuaagacugagcauag

SEQ ID NO: 224728 - RNA, 24 nt, Human
uaguggucuaagcuccucccaggg

SEQ ID NO: 224729 - RNA, 32 nt, Human
uaguggucugacauauacuggaaauguaugua

SEQ ID NO: 224730 - RNA, 32 nt, Human
uaguggugaacaagacagacuugguccaagcu

SEQ ID NO: 224731 - RNA, 32 nt, Human
uaguggugaacucagauaacaaacuucccuuc

SEQ ID NO: 224732 - RNA, 32 nt, Human
uagugguggaaagaagaggcagagaggucguc

SEQ ID NO: 224733 - RNA, 32 nt, Human
uagugguggagcuguggggcugugggauacug

SEQ ID NO: 224734 - RNA, 32 nt, Human
uaguggugguaguuuguuuuguuucauaucau

SEQ ID NO: 224735 - RNA, 32 nt, Human
uaguggugugaucacagcucacugcagccuug

SEQ ID NO: 224736 - RNA, 32 nt, Human
uagugguuaacauuuagcaccuugguugucuu

SEQ ID NO: 224737 - RNA, 32 nt, Human
uagugguuaagcauuccuuucucuucagugcc

SEQ ID NO: 224738 - RNA, 32 nt, Human
uagugguuaugcccuguacuaccauuuugagg

SEQ ID NO: 224739 - RNA, 21 nt, Human
uagugguucaugccuguaauc

SEQ ID NO: 224740 - RNA, 32 nt, Human
uagugguuucccuggaaguggcagcagcagug

SEQ ID NO: 224741 - RNA, 32 nt, Human
uagugguuuuucucuagcuuuuugccagaaca

SEQ ID NO: 224742 - RNA, 32 nt, Human
uaguguaacauacuccccacagucuacuuuua

SEQ ID NO: 224743 - RNA, 32 nt, Human
uaguguacauucuucuuaaaguccacaacagc

SEQ ID NO: 224744 - RNA, 32 nt, Human
uaguguagacauacccuucaucuauuauauca

SEQ ID NO: 224745 - RNA, 32 nt, Human
uaguguagcaucuggggagacagcaggaucac

SEQ ID NO: 224746 - RNA, 31 nt, Human
uaguguaugagcggcaccagcaccccggcca

SEQ ID NO: 224747 - RNA, 32 nt, Human
uagugucacaguuuggcauuggugcucucugc

SEQ ID NO: 224748 - RNA, 32 nt, Human
uagugucacauucugaggggcagcccugugcc

SEQ ID NO: 224749 - RNA, 32 nt, Human
uagugucacccaggcuggagugcagugaucca

SEQ ID NO: 224750 - RNA, 32 nt, Human
uaguguccagucagcugagcuccacccugaug

SEQ ID NO: 224751 - RNA, 32 nt, Human
uaguguccuacaugggguugugaagcgaugga

SEQ ID NO: 224752 - RNA, 32 nt, Human
uagugucuagucugcagagagcugugugauua

SEQ ID NO: 224753 - RNA, 32 nt, Human
uagugucuccuuccuaaagagcacuuuuguau

SEQ ID NO: 224754 - RNA, 32 nt, Human
uagugucugcugcccuccuccuggccucccag

SEQ ID NO: 224755 - RNA, 32 nt, Human
uagugucuugugcucaccaagaggcucacggg

SEQ ID NO: 224756 - RNA, 32 nt, Human
uagugugaacccaggaggcggagcuugcagug

SEQ ID NO: 224757 - RNA, 32 nt, Human
uagugugaagaaaugggagggagcaggaugga

SEQ ID NO: 224758 - RNA, 32 nt, Human
uagugugacugcacacaucugggcucuaaaug

SEQ ID NO: 224759 - RNA, 32 nt, Human
uagugugagccacauaugugacuuuaaauuuu

SEQ ID NO: 224760 - RNA, 32 nt, Human
uagugugaucauagcucacugcagccucaaac

SEQ ID NO: 224761 - RNA, 32 nt, Human
uagugugauguaucacaaauugugcugagguu

SEQ ID NO: 224762 - RNA, 32 nt, Human
uagugugauuaggacuccacuuuccuuuguca

SEQ ID NO: 224763 - RNA, 32 nt, Human
uagugugcaagacucugggacggcaugagaaa

SEQ ID NO: 224764 - RNA, 32 nt, Human
uagugugcagagcggugguuugagacuaaaua

SEQ ID NO: 224765 - RNA, 32 nt, Human
uagugugcuaagcugagcagugcagugugaac

SEQ ID NO: 224766 - RNA, 32 nt, Human
uagugugcucccugccccagacuuuugccuuc

SEQ ID NO: 224767 - RNA, 32 nt, Human
uagugugcuuuccuuucuuuacuauguuucuc

SEQ ID NO: 224768 - RNA, 32 nt, Human
uaguguggagugaggcggggagcaugaagaua

SEQ ID NO: 224769 - RNA, 32 nt, Human
uaguguggccaagagcaggguuuucuuuuugu

SEQ ID NO: 224770 - RNA, 32 nt, Human
uaguguggccagggccugguggccugguggcc

SEQ ID NO: 224771 - RNA, 32 nt, Human
uaguguggccccugccccuuguugggcaggag

SEQ ID NO: 224772 - RNA, 32 nt, Human
uagugugucagaguaacaugccagcuuccugu

SEQ ID NO: 224773 - RNA, 32 nt, Human
uagugugugauguauaugugugugauguauac

SEQ ID NO: 224774 - RNA, 21 nt, Human
uagugugugcagugucuucgg

SEQ ID NO: 224775 - RNA, 32 nt, Human
uagugugugucacaauucugagguuuucgcag

SEQ ID NO: 224776 - RNA, 32 nt, Human
uaguguuaacucugcauuuuuacagcguagca

SEQ ID NO: 224777 - RNA, 32 nt, Human
uaguguuaggggcggugguggaggugggauca

SEQ ID NO: 224778 - RNA, 32 nt, Human
uaguguuaucaaagcaaaaagaaaaugcugca

SEQ ID NO: 224779 - RNA, 32 nt, Human
uaguguucauaagagaccuggccacaugugca

SEQ ID NO: 224780 - RNA, 32 nt, Human
uaguguucccucucauccccaggguucguccc

SEQ ID NO: 224781 - RNA, 32 nt, Human
uaguguucccuggccucccugccaucagguug

SEQ ID NO: 224782 - RNA, 32 nt, Human
uaguguucguuugucgagaggauuuccugaga

SEQ ID NO: 224783 - RNA, 32 nt, Human
uaguguugacuacugguuaccuuaaaguauuc

SEQ ID NO: 224784 - RNA, 29 nt, Human
uaguguugcccaggcuggagugcaguggc

SEQ ID NO: 224785 - RNA, 32 nt, Human
uaguguugcuuuccuugugcuuuccuuguggu

SEQ ID NO: 224786 - RNA, 32 nt, Human
uaguguuggcccagagugugguuacugcccug

SEQ ID NO: 224787 - RNA, 31 nt, Human
uaguguuggguggaggauggacgagugagcu

SEQ ID NO: 224788 - RNA, 32 nt, Human
uaguguugguguagcacagaagaaagaccugu

SEQ ID NO: 224789 - RNA, 32 nt, Human
uaguguuuagaacuuaggcuggaaaaccauau

SEQ ID NO: 224790 - RNA, 32 nt, Human
uaguguuucgcuucucagccuuugccaucucc

SEQ ID NO: 224791 - RNA, 32 nt, Human
uaguguuucugugggcuaaggguuguagcucu

SEQ ID NO: 224792 - RNA, 32 nt, Human
uaguguuuucucagaaucagcaacucaaggua

SEQ ID NO: 224793 - RNA, 32 nt, Human
uaguguuuuggcuucuguacugcuuaugguug

SEQ ID NO: 224794 - RNA, 32 nt, Human
uaguuaaaagagagugggucucuguggcuuuc

SEQ ID NO: 224795 - RNA, 32 nt, Human
uaguuaaaagcccauugccauuuggucuggau

SEQ ID NO: 224796 - RNA, 32 nt, Human
uaguuaaaagcccauugccauuugguguggau

SEQ ID NO: 224797 - RNA, 32 nt, Human
uaguuaacaucaugaauggacuucuuaagcug

SEQ ID NO: 224798 - RNA, 32 nt, Human
uaguuaaccagaggggcuuccuuuguauguua

SEQ ID NO: 224799 - RNA, 32 nt, Human
uaguuaagagcuaagagcaguacucugaagga

SEQ ID NO: 224800 - RNA, 32 nt, Human
uaguuaagauucacaaucuuuagaaagaauga

SEQ ID NO: 224801 - RNA, 32 nt, Human
uaguuaagcacaaaggaaaauauuucaauaaa

SEQ ID NO: 224802 - RNA, 31 nt, Human
uaguuaagugagagugugaacuguguggcaa

SEQ ID NO: 224803 - RNA, 32 nt, Human
uaguuaaucuuagauguaagguuccagaaugu

SEQ ID NO: 224804 - RNA, 32 nt, Human
uaguuaauuggguuuguccucugcugacuguu

SEQ ID NO: 224805 - RNA, 32 nt, Human
uaguuacaacaacacugagcaucuugaccaag

SEQ ID NO: 224806 - RNA, 32 nt, Human
uaguuacaacccaguaugcugagugccaaggc

SEQ ID NO: 224807 - RNA, 31 nt, Human
uaguuacaacucaaggauuuugguagaaagg

SEQ ID NO: 224808 - RNA, 32 nt, Human
uaguuacagcgccuccgucucucuccauugug

SEQ ID NO: 224809 - RNA, 32 nt, Human
uauggauuacuuugaaacuuagcaaugagagu

SEQ ID NO: 224810 - RNA, 32 nt, Human
uauggauuaugugaaagagcccagggacauua

SEQ ID NO: 224811 - RNA, 32 nt, Human
uauggauucaaagagauucugucuuaccggug

SEQ ID NO: 224812 - RNA, 32 nt, Human
uauggauucugucaguucaucaugucagauuc

SEQ ID NO: 224813 - RNA, 32 nt, Human
uauggauuuaaacauuagagcuggaguggggc

SEQ ID NO: 224814 - RNA, 32 nt, Human
uauggcaaauauagcgaaaucucuccacugcc

SEQ ID NO: 224815 - RNA, 32 nt, Human
uauggcaaaucaggaagcagcaauacaagcuu

SEQ ID NO: 224816 - RNA, 32 nt, Human
uauggcaaaugagauuuuguacauggaguuga

SEQ ID NO: 224817 - RNA, 32 nt, Human
uauggcaacuggaaaguauuuacuaugggauu

SEQ ID NO: 224818 - RNA, 32 nt, Human
uauggcaacuuuaauugaacauguggaagacc

SEQ ID NO: 224819 - RNA, 32 nt, Human
uauggcaagaaagaguggaagcacuucuuguc

SEQ ID NO: 224820 - RNA, 32 nt, Human
uauggcaagcugccccacaaagggcuaugccu

SEQ ID NO: 224821 - RNA, 32 nt, Human
uauggcacaaauguucaggaguguauauaaaa

SEQ ID NO: 224822 - RNA, 32 nt, Human
uauggcagaggccacagccacuguggggcacc

SEQ ID NO: 224823 - RNA, 32 nt, Human
uauggcaggaagccacugacaugugggagccg

SEQ ID NO: 224824 - RNA, 32 nt, Human
uauggcaggagcagcugggaugcagggcacca

SEQ ID NO: 224825 - RNA, 32 nt, Human
uauggcagguaaucacuugucauccaaagaau

SEQ ID NO: 224826 - RNA, 32 nt, Human
uauggcagguucuaugcagauugugccagagc

SEQ ID NO: 224827 - RNA, 18 nt, Human
uauggcaucugcugucuu

SEQ ID NO: 224828 - RNA, 32 nt, Human
uauggccaaacagaaagcucagcaggccaugu

SEQ ID NO: 224829 - RNA, 32 nt, Human
uauggccaacaugguaagacccugucucuacu

SEQ ID NO: 224830 - RNA, 32 nt, Human
uauggccaaucagcugagggugucaugugaug

SEQ ID NO: 224831 - RNA, 32 nt, Human
uauggccaggaucagggguacagauggcucgu

SEQ ID NO: 224832 - RNA, 32 nt, Human
uauggccaggaucgugucugggaaccagaaac

SEQ ID NO: 224833 - RNA, 32 nt, Human
uauggcccaaguggcagagcaacuugcacaac

SEQ ID NO: 224834 - RNA, 32 nt, Human
uauggcccaggagaaaauguagacccugagaa

SEQ ID NO: 224835 - RNA, 32 nt, Human
uauggccccaaacugaaaacacccuggaagcc

SEQ ID NO: 224836 - RNA, 32 nt, Human
uauggccucagcugccucacuuccuacaagag

SEQ ID NO: 224837 - RNA, 32 nt, Human
uauggccuccaccacacuagccuccuaaagcg

SEQ ID NO: 224838 - RNA, 32 nt, Human
uauggccuccaccacacuagccuccugaagcg

SEQ ID NO: 224839 - RNA, 32 nt, Human
uauggccucugcacuccagccugggugacaga

SEQ ID NO: 224840 - RNA, 32 nt, Human
uauggccugcuggcccaccucccuggaccccg

SEQ ID NO: 224841 - RNA, 32 nt, Human
uauggccugggugucauggcacagcuuagugg

SEQ ID NO: 224842 - RNA, 32 nt, Human
uauggccuguaugacccagcugcccauuucua

SEQ ID NO: 224843 - RNA, 32 nt, Human
uauggcggcuagugauacagagcgagauggac

SEQ ID NO: 224844 - RNA, 32 nt, Human
uauggcguauaucuugguucaucuucaaaauc

SEQ ID NO: 224845 - RNA, 32 nt, Human
uauggcuaguguuaauggcaaaaaguccuuuc

SEQ ID NO: 224846 - RNA, 32 nt, Human
uauggcuauuaaaauaauuauuagccuccugu

SEQ ID NO: 224847 - RNA, 32 nt, Human
uauggcucacugcaguuucaaccucccagauu

SEQ ID NO: 224848 - RNA, 32 nt, Human
uauggcucauuucuauguauuuuucuuacuuu

SEQ ID NO: 224849 - RNA, 32 nt, Human
uauggcuccuggcugcgucagccucccccacc

SEQ ID NO: 224850 - RNA, 32 nt, Human
uauggcucuguggcuggagugcagccauccag

SEQ ID NO: 224851 - RNA, 22 nt, Human
uauggcugcagugaauguggga

SEQ ID NO: 224852 - RNA, 32 nt, Human
uauggcugccacccucccuccugccugugucc

SEQ ID NO: 224853 - RNA, 32 nt, Human
uauggcugggcaggcacaggcagugaggccga

SEQ ID NO: 224854 - RNA, 32 nt, Human
uauggcuggucuuccauuugcuuuuucuuuaa

SEQ ID NO: 224855 - RNA, 32 nt, Human
uauggcuucaugaagucuuuuauguguuuuga

SEQ ID NO: 224856 - RNA, 32 nt, Human
uauggcuuccuauuucugugcgugucauccuu

SEQ ID NO: 224857 - RNA, 32 nt, Human
uauggcuuccuugauaugcucuugacagcucu

SEQ ID NO: 224858 - RNA, 32 nt, Human
uauggcuucuugagaaggcucacagcuguggu

SEQ ID NO: 224859 - RNA, 25 nt, Human
uaugggaaagcagagguugcaguga

SEQ ID NO: 224860 - RNA, 32 nt, Human
uaugggaagaauuccaguuguuaggaagagau

SEQ ID NO: 224861 - RNA, 32 nt, Human
uaugggaagcuucuugaacugcauuuacuauu

SEQ ID NO: 224862 - RNA, 32 nt, Human
uaugggaaugauaucuccuacuucacugaggu

SEQ ID NO: 224863 - RNA, 32 nt, Human
uaugggacaggugccaggugugugguggggac

SEQ ID NO: 224864 - RNA, 32 nt, Human
uaugggaccuugagucaugcaggaugggaucu

SEQ ID NO: 224865 - RNA, 32 nt, Human
uaugggagaaaccuuaugaauguaauaaaugu

SEQ ID NO: 224866 - RNA, 32 nt, Human
uaugggagaagcaggcuggggcuugaagccca

SEQ ID NO: 224867 - RNA, 32 nt, Human
uaugggagacacaccaacuacucuucaaauca

SEQ ID NO: 224868 - RNA, 32 nt, Human
uaugggagaugcuugcccauguguuucaucaa

SEQ ID NO: 224869 - RNA, 32 nt, Human
uaugggagcacaagcugaagcuuuagugccuu

SEQ ID NO: 224870 - RNA, 32 nt, Human
uaugggaggaaagcuccggaagaaggagaaac

SEQ ID NO: 224871 - RNA, 32 nt, Human
uaugggaggaauaggauauaagcaguugagga

SEQ ID NO: 224872 - RNA, 32 nt, Human
uaugggaggcugagagacugagggucuuucuu

SEQ ID NO: 224873 - RNA, 32 nt, Human
uaugggaggcuggagugcaauggugccaucuu

SEQ ID NO: 224874 - RNA, 32 nt, Human
uaugggagggagcaagaagggaaaggaugucu

SEQ ID NO: 224875 - RNA, 32 nt, Human
uaugggagugggcucuaugggguggucugcac

SEQ ID NO: 224876 - RNA, 32 nt, Human
uaugggaucucucaccuagucauuguauguug

SEQ ID NO: 224877 - RNA, 32 nt, Human
uaugggaugagaucaauaagccuacagagaug

SEQ ID NO: 224878 - RNA, 32 nt, Human
uaugggauggggaaugcauuucuucaguguuu

SEQ ID NO: 224879 - RNA, 32 nt, Human
uaugggauuagaaaauguccuuaccuuaaauc

SEQ ID NO: 224880 - RNA, 25 nt, Human
uaugggcaagcggagguugcaguga

SEQ ID NO: 224881 - RNA, 32 nt, Human
uaugggcacagagcaaauagcuucuuagacug

SEQ ID NO: 224882 - RNA, 32 nt, Human
uaugggcaucaguuggugggggugcgggggug

SEQ ID NO: 224883 - RNA, 32 nt, Human
uaugggccaggcuuugauaucugugaugugca

SEQ ID NO: 224884 - RNA, 32 nt, Human
uaugggccuaaauugggcucuaggucucuguc

SEQ ID NO: 224885 - RNA, 20 nt, Human
uaugggcgcccaccaccacg

SEQ ID NO: 224886 - RNA, 32 nt, Human
uaugggcgugaaccaccaugcccagccgaaaa

SEQ ID NO: 224887 - RNA, 32 nt, Human
uaugggcgugagccaccgugacuggccuguuu

SEQ ID NO: 224888 - RNA, 32 nt, Human
uaugggcuccugcgugaggccugugguacaca

SEQ ID NO: 224889 - RNA, 32 nt, Human
uaugggcucuacugccagugugaccucacccu

SEQ ID NO: 224890 - RNA, 32 nt, Human
uaugggcucuggggccauagagucuagguuug

SEQ ID NO: 224891 - RNA, 32 nt, Human
uaugggcugcugcagaggcggcuggagaacau

SEQ ID NO: 224892 - RNA, 32 nt, Human
uauggggaaaaccaggcaccagccucugcagc

SEQ ID NO: 224893 - RNA, 25 nt, Human
uauggggacacacaaccccuggaua

SEQ ID NO: 224894 - RNA, 32 nt, Human
uauggggacuuuauguugaaauauuguauaaa

SEQ ID NO: 224895 - RNA, 32 nt, Human
uauggggagaguauucauuauggcaggugucu

SEQ ID NO: 224896 - RNA, 32 nt, Human
uauggggagcaguuugggggcggccggcagca

SEQ ID NO: 224897 - RNA, 32 nt, Human
uauggggaggucuuguaacauuuuauucaggu

SEQ ID NO: 224898 - RNA, 24 nt, Human
uauggggcaggcaaugugugcgga

SEQ ID NO: 224899 - RNA, 32 nt, Human
uauggggcaggcagggucucaccugagccuca

SEQ ID NO: 224900 - RNA, 32 nt, Human
uauggggcucccagagugcaaaggacagugau

SEQ ID NO: 224901 - RNA, 32 nt, Human
uauggggcuuucuaaaacaauggucucuguuc

SEQ ID NO: 224902 - RNA, 32 nt, Human
uaugggggacuucuagcuuugugucuuguuuc

SEQ ID NO: 224903 - RNA, 32 nt, Human
uaugggggucauuccugccucuuggcaccagg

SEQ ID NO: 224904 - RNA, 32 nt, Human
uaugggguaaaagccccaggagcauacagaac

SEQ ID NO: 224905 - RNA, 32 nt, Human
uaugggguaccacgugagcugugugaggcugg

SEQ ID NO: 224906 - RNA, 32 nt, Human
uaugggguggucugcacccaucugggacucuu

SEQ ID NO: 224907 - RNA, 32 nt, Human
uaugggguuggagaggacaggagccagaagcu

SEQ ID NO: 224908 - RNA, 32 nt, Human
uauggguauauaagagggaauuuguuauggaa

SEQ ID NO: 224909 - RNA, 32 nt, Human
uauggguccugcccugcccucccaggagucca

SEQ ID NO: 224910 - RNA, 32 nt, Human
uaugggucucagucaauuuagaaaguuuauuu

SEQ ID NO: 224911 - RNA, 32 nt, Human
uaugggucuuuggaauagcaguaguuuuggaa

SEQ ID NO: 224912 - RNA, 32 nt, Human
uaugggugcaaacuagacauggggagugaagu

SEQ ID NO: 224913 - RNA, 32 nt, Human
uauggguggaagcagcacuuucugguuugacc

SEQ ID NO: 224914 - RNA, 32 nt, Human
uauggguggauguccucaggggccaagaagag

SEQ ID NO: 224915 - RNA, 31 nt, Human
uaugggugggugguggggaagcuuucaaaua

SEQ ID NO: 224916 - RNA, 32 nt, Human
uaugggugugagccaccgcgccuggccuauac

SEQ ID NO: 224917 - RNA, 32 nt, Human
uauggguguuaacgugcaugaggaucaguuug

SEQ ID NO: 224918 - RNA, 32 nt, Human
uauggguucuccccagagcaucuuucaggggu

SEQ ID NO: 224919 - RNA, 32 nt, Human
uauggguucugguaguccugggagaggcaggg

SEQ ID NO: 224920 - RNA, 32 nt, Human
uauggguuggggcaggggccugugggaggaug

SEQ ID NO: 224921 - RNA, 32 nt, Human
uaugguaacaccacugcacuccaaccugggca

SEQ ID NO: 224922 - RNA, 32 nt, Human
uaugguagcacacaccuguaaucccagcuacu

SEQ ID NO: 224923 - RNA, 32 nt, Human
uaugguagcacaggcuggccugugcaucggca

SEQ ID NO: 224924 - RNA, 32 nt, Human
uaugguagcaccacugcacuucagccuggaca

SEQ ID NO: 224925 - RNA, 32 nt, Human
uaugguagcucaugugggaggcugaggcagga

SEQ ID NO: 224926 - RNA, 32 nt, Human
uaugguaucuguguacguauccaaacuucuuu

SEQ ID NO: 224927 - RNA, 32 nt, Human
uaugguauuauuuuacauacugacacaaccua

SEQ ID NO: 224928 - RNA, 32 nt, Human
uaugguauuuggaacacaugaaaauggacugu

SEQ ID NO: 224929 - RNA, 32 nt, Human
uauggucacaccacugcacuccagccugggca

SEQ ID NO: 224930 - RNA, 32 nt, Human
uauggucacaccucucagugucucauagccca

SEQ ID NO: 224931 - RNA, 32 nt, Human
uauggucacagacuucuggccuaggaccccuc

SEQ ID NO: 224932 - RNA, 32 nt, Human
uauggucauaccaccgcacuccagccugagca

SEQ ID NO: 224933 - RNA, 32 nt, Human
uauggucauagaaaaugcaucuuugguuuugu

SEQ ID NO: 224934 - RNA, 32 nt, Human
uauggucaugccacugcacuccagccugggca

SEQ ID NO: 224935 - RNA, 32 nt, Human
uauggucauugguugcauaauuugauuugagg

SEQ ID NO: 224936 - RNA, 32 nt, Human
uauggucccagcuacucaacaggcugagguug

SEQ ID NO: 224937 - RNA, 32 nt, Human
uauggucgagugaccccaggagugauagggag

SEQ ID NO: 224938 - RNA, 28 nt, Human
uauggucgccagagggcagcauccccua

SEQ ID NO: 224939 - RNA, 32 nt, Human
uauggucuaucuuuccugauuggaccagauuu

SEQ ID NO: 224940 - RNA, 32 nt, Human
uauggucuccacugcuacuauccugcaugcau

SEQ ID NO: 224941 - RNA, 32 nt, Human
uauggucucuucacucaggucucagcuauaau

SEQ ID NO: 224942 - RNA, 32 nt, Human
uauggucuguauugcaacuauaguacacaacu

SEQ ID NO: 224943 - RNA, 32 nt, Human
uauggugaaacuccuaagaaacaggugguuuu

SEQ ID NO: 224944 - RNA, 32 nt, Human
uauggugacucaugccuguaauccuagcacuu

SEQ ID NO: 224945 - RNA, 32 nt, Human
uauggugagaucagauguggccaagggaagga

SEQ ID NO: 224946 - RNA, 32 nt, Human
uauggugcaguggcacaaucacagcucacugc

SEQ ID NO: 224947 - RNA, 32 nt, Human
uauggugcauuacgugggcauugucuuuuuag

SEQ ID NO: 224948 - RNA, 32 nt, Human
uauggugccaauggaaccuccuuucucuucuc

SEQ ID NO: 224949 - RNA, 23 nt, Human
uauggugccucacaccuguaauc

SEQ ID NO: 224950 - RNA, 32 nt, Human
uauggugccucacaccuguaaucccagcacuu

SEQ ID NO: 224951 - RNA, 32 nt, Human
uauggugcucaacacuuguuacugcaagcuac

SEQ ID NO: 224952 - RNA, 32 nt, Human
uaugguggaugaugauuucaucucacgugcug

SEQ ID NO: 224953 - RNA, 32 nt, Human
uaugguggcacacgccuguaaucccagcuacu

SEQ ID NO: 224954 - RNA, 32 nt, Human
uaugguggcacaugccuguaauuccagcugcu

SEQ ID NO: 224955 - RNA, 32 nt, Human
uaugguggcaccacugcacuccagccugggug

SEQ ID NO: 224956 - RNA, 32 nt, Human
uaugguggcacgugccuguaaucccagcuacc

SEQ ID NO: 224957 - RNA, 32 nt, Human
uaugguggcauacgccuguaauccuagcuacu

SEQ ID NO: 224958 - RNA, 32 nt, Human
uaugguggccggcgccuguaaucccagcuacu

SEQ ID NO: 224959 - RNA, 32 nt, Human
uaugguggcgggugccuguaaucucagcuacu

SEQ ID NO: 224960 - RNA, 32 nt, Human
uaugguggcucacaccuguaaucccaacacuu

SEQ ID NO: 224961 - RNA, 23 nt, Human
uaugguggcucacgccuauaauc

SEQ ID NO: 224962 - RNA, 32 nt, Human
uaugguggcucacgccuauaaucccagcacuu

SEQ ID NO: 224963 - RNA, 23 nt, Human
uaugguggcucacgccuguaauc

SEQ ID NO: 224964 - RNA, 32 nt, Human
uaugguggcucacgccuguaaucccagcacuu

SEQ ID NO: 224965 - RNA, 32 nt, Human
uaugguggcucacgccuguaaucccaguacug

SEQ ID NO: 224966 - RNA, 32 nt, Human
uaugguggcucaugccuguaaucccagcacuu

SEQ ID NO: 224967 - RNA, 32 nt, Human
uaugguggcucaugccuguaaucccagcauuu

SEQ ID NO: 224968 - RNA, 32 nt, Human
uaugguggcucaugccuguaaucucagcacuu

SEQ ID NO: 224969 - RNA, 32 nt, Human
uaugguggcucaugucuauaaucccagcacuu

SEQ ID NO: 224970 - RNA, 32 nt, Human
uaugguggcuuacgccuauaaucccagcuacu

SEQ ID NO: 224971 - RNA, 32 nt, Human
uauggugggagacgaacggaaggguugguggg

SEQ ID NO: 224972 - RNA, 32 nt, Human
uauggugggaggaucgcuugagcccagaaguc

SEQ ID NO: 224973 - RNA, 32 nt, Human
uauggugggccuuggcuggagaccucugucca

SEQ ID NO: 224974 - RNA, 32 nt, Human
uaugguggggauuuccugagggccaggauguc

SEQ ID NO: 224975 - RNA, 28 nt, Human
uauggugguacaugccuguaaucccagc

SEQ ID NO: 224976 - RNA, 23 nt, Human
uauggugguaugugccuguaauc

SEQ ID NO: 224977 - RNA, 32 nt, Human
uauggugguaugugccuguaaucccagcuacu

SEQ ID NO: 224978 - RNA, 32 nt, Human
uaugguggugaacaccuguaaucccagcuacu

SEQ ID NO: 224979 - RNA, 32 nt, Human
uaugguggugcacaccuguagucccagcuacu

SEQ ID NO: 224980 - RNA, 32 nt, Human
uaugguggugcacgcuuguaaucccagcuacu

SEQ ID NO: 224981 - RNA, 32 nt, Human
uaugguggugcauaccuguaaucccagcuacu

SEQ ID NO: 224982 - RNA, 32 nt, Human
uaugguggugcaugccuguaaucccagcuacu

SEQ ID NO: 224983 - RNA, 32 nt, Human
uaugguggugggcaccuguaaucccagcuacu

SEQ ID NO: 224984 - RNA, 32 nt, Human
uaugguggugggcaccuguaaucucagcuacu

SEQ ID NO: 224985 - RNA, 32 nt, Human
uaugguggugugaaccugcaaucccagugcuu

SEQ ID NO: 224986 - RNA, 32 nt, Human
uauggugucaugagauccucuaccucauaaca

SEQ ID NO: 224987 - RNA, 23 nt, Human
uauggugucucacaccuguaauc

SEQ ID NO: 224988 - RNA, 32 nt, Human
uauggugucucacaccuguaaucccagcacuu

SEQ ID NO: 224989 - RNA, 32 nt, Human
uaugguguguauagguaacauggggaaaaugc

SEQ ID NO: 224990 - RNA, 32 nt, Human
uaugguuacaaggacgagucagcgguggccua

SEQ ID NO: 224991 - RNA, 32 nt, Human
uaugguuacugaccccaggggcugccaucagc

SEQ ID NO: 224992 - RNA, 32 nt, Human
uaugguuagaccucugauucaggaagucucaa

SEQ ID NO: 224993 - RNA, 32 nt, Human
uaugguucuggaggaauccugcagccagccuu

SEQ ID NO: 224994 - RNA, 32 nt, Human
uaugguugcaccacuguacuccagccugggcg

SEQ ID NO: 224995 - RNA, 32 nt, Human
uaugguugugccacugcacuccagccugggua

SEQ ID NO: 224996 - RNA, 20 nt, Human
uaugguuguggccgcacgga

SEQ ID NO: 224997 - RNA, 32 nt, Human
uaugguuguuuuuguuuuccucccucuccucu

SEQ ID NO: 224998 - RNA, 32 nt, Human
uaugguuucagugaguuuccucauuucaucca

SEQ ID NO: 224999 - RNA, 32 nt, Human
uaugguuucugucauaaugugcuuuaucugau

SEQ ID NO: 225000 - RNA, 32 nt, Human
uaugguuugcugggucaaacaauguuuccaac

SEQ ID NO: 225001 - RNA, 32 nt, Human
uaugguuuuucaccaucaaagauuuuauugag

SEQ ID NO: 225002 - RNA, 32 nt, Human
uauguaaaaggagucguggucacaagacccug

SEQ ID NO: 225003 - RNA, 18 nt, Human
uauguaaacaucugagua

SEQ ID NO: 225004 - RNA, 32 nt, Human
uauguaaacucauaaagauguucauuuaauca

SEQ ID NO: 225005 - RNA, 32 nt, Human
uauguaaacuucaaggaggaaugguaaaaugu

SEQ ID NO: 225006 - RNA, 32 nt, Human
uauguaaagaacaaggaauaacaguuguagga

SEQ ID NO: 225007 - RNA, 32 nt, Human
uauguaaauagaaggaauggccaguucaaaag

SEQ ID NO: 225008 - RNA, 32 nt, Human
uauguaaauauuguaauuuaaauaugauugga

SEQ ID NO: 225009 - RNA, 32 nt, Human
uauguaaauucauauauguauuuuuggaauca

SEQ ID NO: 225010 - RNA, 32 nt, Human
uauguaacaaacccgcauguucugcacaugua

SEQ ID NO: 225011 - RNA, 32 nt, Human
uauguaacaaaccugcacauccugcacaugua

SEQ ID NO: 225012 - RNA, 32 nt, Human
uauguaacaaaccugcacauucugcacauaua

SEQ ID NO: 225013 - RNA, 32 nt, Human
uauguaacaaaccugcacauugugcacaugua

SEQ ID NO: 225014 - RNA, 32 nt, Human
uauguaacaaaccugcacguucagcacaugua

SEQ ID NO: 225015 - RNA, 32 nt, Human
uauguaacaaaccugcacguucugcacaugua

SEQ ID NO: 225016 - RNA, 32 nt, Human
uauguaacaaaccugcacguugugcacacgua

SEQ ID NO: 225017 - RNA, 32 nt, Human
uauguaacaaaccugcacguugugcacauggu

SEQ ID NO: 225018 - RNA, 32 nt, Human
uauguaacaaaccugcacguugugcacaugua

SEQ ID NO: 225019 - RNA, 32 nt, Human
uauguaacaaaccugcacuuguaccccugaac

SEQ ID NO: 225020 - RNA, 32 nt, Human
uauguaacaaaccugcauauccugcacaugua

SEQ ID NO: 225021 - RNA, 32 nt, Human
uauguaacaaaccugcauguugugcacaugua

SEQ ID NO: 225022 - RNA, 32 nt, Human
uauguaacaaaccugcauuuguaccccuaaac

SEQ ID NO: 225023 - RNA, 32 nt, Human
uauguaacaaaucugcacguugugcacaugua

SEQ ID NO: 225024 - RNA, 32 nt, Human
uauguaacaaauuugcaaauugugcacaugua

SEQ ID NO: 225025 - RNA, 32 nt, Human
uauguaacagauacacuacaguagaagaacuu

SEQ ID NO: 225026 - RNA, 32 nt, Human
uauguaacuaaccugcacauugugcacacgua

SEQ ID NO: 225027 - RNA, 32 nt, Human
uauguaacuaaccugcacauugugcacaugua

SEQ ID NO: 225028 - RNA, 32 nt, Human
uauguaagaaaaugacuguaaaucucaagaaa

SEQ ID NO: 225029 - RNA, 32 nt, Human
uauguaagacacacacugcccuaaccucacuu

SEQ ID NO: 225030 - RNA, 23 nt, Human
uauguaagcauguauacacugug

SEQ ID NO: 225031 - RNA, 32 nt, Human
uauguaaggagguuuauauaaguaauucagug

SEQ ID NO: 225032 - RNA, 24 nt, Human
uauguaaggcagugauauacuaua

SEQ ID NO: 225033 - RNA, 23 nt, Human
uauguaauauacauauauacaca

SEQ ID NO: 225034 - RNA, 32 nt, Human
uauguaaucccaaauacucgggaggcugaggc

SEQ ID NO: 225035 - RNA, 32 nt, Human
uauguaaucuguacauaaucucuuucacugaa

SEQ ID NO: 225036 - RNA, 32 nt, Human
uauguaauugucuccacuucuucaccucucac

SEQ ID NO: 225037 - RNA, 32 nt, Human
uauguacaacuugcagguuuguuacauaugua

SEQ ID NO: 225038 - RNA, 32 nt, Human
uauguacacaugcuucagaaauauuguugcuu

SEQ ID NO: 225039 - RNA, 32 nt, Human
uauguacacucugaaguacagccuggguuagu

SEQ ID NO: 225040 - RNA, 32 nt, Human
uauguacagcucuccccucccuuguccuugaa

SEQ ID NO: 225041 - RNA, 24 nt, Human
uauguacauacacauacauacaua

SEQ ID NO: 225042 - RNA, 24 nt, Human
uauguacauauacauguauauaca

SEQ ID NO: 225043 - RNA, 28 nt, Human
uauguacauauauauguguguauauaau

SEQ ID NO: 225044 - RNA, 32 nt, Human
uauguacauaugcauccacguguguguaugug

SEQ ID NO: 225045 - RNA, 22 nt, Human
uauguacauauguguguguaua

SEQ ID NO: 225046 - RNA, 32 nt, Human
uauguacauauguuuguguguauauguaaaua

SEQ ID NO: 225047 - RNA, 32 nt, Human
uauguacaugccacauucugggcuuucccacu

SEQ ID NO: 225048 - RNA, 32 nt, Human
uauguaccacauucuaucccagguauuggguu

SEQ ID NO: 225049 - RNA, 32 nt, Human
uauguaccauauauacacuguagcaaauauuu

SEQ ID NO: 225050 - RNA, 32 nt, Human
uauguacccacuguggggccaggcugggccgg

SEQ ID NO: 225051 - RNA, 32 nt, Human
uauguaccgccuggccaugaccggggcaggga

SEQ ID NO: 225052 - RNA, 32 nt, Human
uauguaccugcagugggguugcagagaugggg

SEQ ID NO: 225053 - RNA, 32 nt, Human
uauguacguccuccuaggugauggagaugugu

SEQ ID NO: 225054 - RNA, 29 nt, Human
uauguacucaauaaauauuuguuggcuuu

SEQ ID NO: 225055 - RNA, 32 nt, Human
uauguacugaacaccaacuguguggcauacac

SEQ ID NO: 225056 - RNA, 32 nt, Human
uauguacugcagccacauugugcagcccacca

SEQ ID NO: 225057 - RNA, 32 nt, Human
uauguacuugcuguugugaaguuugggcauga

SEQ ID NO: 225058 - RNA, 32 nt, Human
uauguagagaaaaggaggggacgggacagacg

SEQ ID NO: 225059 - RNA, 32 nt, Human
uauguagagaagaggucucccuguguugccca

SEQ ID NO: 225060 - RNA, 32 nt, Human
uauguagagacaggggucuugccaugucgccc

SEQ ID NO: 225061 - RNA, 32 nt, Human
uauguagagacagggucucacuuuguugccca

SEQ ID NO: 225062 - RNA, 22 nt, Human
uauguagagacguauacauaua

SEQ ID NO: 225063 - RNA, 32 nt, Human
uauguagagagagcaacaugacuggggcugca

SEQ ID NO: 225064 - RNA, 32 nt, Human
uauguagagaggaggucugggagaaagaugga

SEQ ID NO: 225065 - RNA, 32 nt, Human
uauguagagauagggucucacuauguugacca

SEQ ID NO: 225066 - RNA, 32 nt, Human
uauguagagcuaguucucaaagcugcccugcc

SEQ ID NO: 225067 - RNA, 32 nt, Human
uauguagagggagagaucgaagacugagugac

SEQ ID NO: 225068 - RNA, 32 nt, Human
uauguagauagucacauauacaccagacugag

SEQ ID NO: 225069 - RNA, 32 nt, Human
uauguagcaaaaaucagggcugggggagagcc

SEQ ID NO: 225070 - RNA, 32 nt, Human
uauguagcaaaaggcuuccauuucuggaaggg

SEQ ID NO: 225071 - RNA, 32 nt, Human
uauguagcaaacaggugucagagucagaauug

SEQ ID NO: 225072 - RNA, 32 nt, Human
uauguagccaggagugguggggaccagaagcc

SEQ ID NO: 225073 - RNA, 32 nt, Human
uauguagcuaacccuucguugugcacauguac

SEQ ID NO: 225074 - RNA, 32 nt, Human
uauguagcuucuaacaagugugugcuaguggu

SEQ ID NO: 225075 - RNA, 32 nt, Human
uauguagggagaaaaugcuugccaaccaccgg

SEQ ID NO: 225076 - RNA, 32 nt, Human
uauguaggugugcucccugggguggggaguuu

SEQ ID NO: 225077 - RNA, 32 nt, Human
uauguaguaaaaaguauaaggccacacauggu

SEQ ID NO: 225078 - RNA, 32 nt, Human
uauguaguaccuuagaaggcugugcugggagu

SEQ ID NO: 225079 - RNA, 32 nt, Human
uauguagugaagaaaauuuaguuguuaguugc

SEQ ID NO: 225080 - RNA, 25 nt, Human
uauguauaauauacauacauacaua

SEQ ID NO: 225081 - RNA, 31 nt, Human
uauguauacaguuagaauacccaaggagacc

SEQ ID NO: 225082 - RNA, 32 nt, Human
uauguauacauacauuuuccaaaaagaaaaau

SEQ ID NO: 225083 - RNA, 20 nt, Human
uauguauacauauauacaca

SEQ ID NO: 225084 - RNA, 32 nt, Human
uauguauacauauauacacauauauguauaca

SEQ ID NO: 225085 - RNA, 32 nt, Human
uauguauacauauauacacauauauucuacag

SEQ ID NO: 225086 - RNA, 24 nt, Human
uauguauacauguauauacauaua

SEQ ID NO: 225087 - RNA, 32 nt, Human
uauguauacuaauaaauauacacuaauauaua

SEQ ID NO: 225088 - RNA, 24 nt, Human
uauguauauacguguauauauaua

SEQ ID NO: 225089 - RNA, 32 nt, Human
uauguauauacucagugccucaguucagcuuc

SEQ ID NO: 225090 - RNA, 19 nt, Human
uauguauauacuguauaua

SEQ ID NO: 225091 - RNA, 24 nt, Human
uauguauauauacacacauauaua

SEQ ID NO: 225092 - RNA, 24 nt, Human
uauguauauauauguauauauaua

SEQ ID NO: 225093 - RNA, 24 nt, Human
uauguauauauauuuaaauacaca

SEQ ID NO: 225094 - RNA, 28 nt, Human
uauguauauaucucuguguguguauaua

SEQ ID NO: 225095 - RNA, 22 nt, Human
uauguauauaugcauauacaua

SEQ ID NO: 225096 - RNA, 22 nt, Human
uauguauauauguauauauaua

SEQ ID NO: 225097 - RNA, 32 nt, Human
uauguauauguauguaagauguguauauguau

SEQ ID NO: 225098 - RNA, 32 nt, Human
uauguauccuuuccucaaccuccuccuuuccc

SEQ ID NO: 225099 - RNA, 32 nt, Human
uauguaucuugaguucuucauaggggaagugu

SEQ ID NO: 225100 - RNA, 32 nt, Human
uauguaucuuucuuuuguuacacaugaguaac

SEQ ID NO: 225101 - RNA, 22 nt, Human
uauguaucuuuguaugcauaua

SEQ ID NO: 225102 - RNA, 32 nt, Human
uauguaugagaaagggauuuucugguauuuug

SEQ ID NO: 225103 - RNA, 32 nt, Human
uauguaugcauauguauguagauauguuuaua

SEQ ID NO: 225104 - RNA, 32 nt, Human
uauguaugcguauguauguauguauguaugcc

SEQ ID NO: 225105 - RNA, 19 nt, Human
uauguaugcucugguacac

SEQ ID NO: 225106 - RNA, 32 nt, Human
uauguaugcugggaaacggcuugaguggaugg

SEQ ID NO: 225107 - RNA, 31 nt, Human
uauguauggaaaggaacucauuuaucaaauu

SEQ ID NO: 225108 - RNA, 32 nt, Human
uauguauggagcaucuacuaugugccaggcgc

SEQ ID NO: 225109 - RNA, 24 nt, Human
uauguauguauauacacacguaca

SEQ ID NO: 225110 - RNA, 24 nt, Human
uauguauguauauacguauguaua

SEQ ID NO: 225111 - RNA, 22 nt, Human
uauguauguauauacguguaua

SEQ ID NO: 225112 - RNA, 24 nt, Human
uauguauguauguguauguacaua

SEQ ID NO: 225113 - RNA, 32 nt, Human
uauguaugucugguuugcuggaagagugauua

SEQ ID NO: 225114 - RNA, 32 nt, Human
uauguauguggacacaggcuggagucagguuc

SEQ ID NO: 225115 - RNA, 22 nt, Human
uauguauguguacauacacaua

SEQ ID NO: 225116 - RNA, 24 nt, Human
uauguauguguauauguguauaca

SEQ ID NO: 225117 - RNA, 32 nt, Human
uauguauguguauguauaugcaugcaugugua

SEQ ID NO: 225118 - RNA, 32 nt, Human
uauguauguguguggguauguguguauacagu

SEQ ID NO: 225119 - RNA, 32 nt, Human
uauguaugugugugugcgugcauaaauuauuu

SEQ ID NO: 225120 - RNA, 22 nt, Human
uauguauguuuauauacacaca

SEQ ID NO: 225121 - RNA, 32 nt, Human
uauguauucaguccuaggauuuugaaugguuu

SEQ ID NO: 225122 - RNA, 32 nt, Human
uauguauuuauugucauuacugccuuuggaag

SEQ ID NO: 225123 - RNA, 32 nt, Human
uauguauuuauuuaucuaucugucuacuccau

SEQ ID NO: 225124 - RNA, 32 nt, Human
uauguauuuccaccugaggagaaggccugggg

SEQ ID NO: 225125 - RNA, 32 nt, Human
uauguauuugcauauuaccuacucacaucuuc

SEQ ID NO: 225126 - RNA, 32 nt, Human
uauguauuuuuaguagagauggaguuucacca

SEQ ID NO: 225127 - RNA, 32 nt, Human
uaugucaaguuuaggucauuuagaagauuuga

SEQ ID NO: 225128 - RNA, 32 nt, Human
uaugucaaugaaaugcuagggggccagggaaa

SEQ ID NO: 225129 - RNA, 32 nt, Human
uaugucacucaggcuggagugcaguggcacaa

SEQ ID NO: 225130 - RNA, 32 nt, Human
uaugucacuccucugcugggcuguucauuguc

SEQ ID NO: 225131 - RNA, 32 nt, Human
uaugucacugcacuccauccugggugacaaga

SEQ ID NO: 225132 - RNA, 32 nt, Human
uaugucagaaugcaagcccugccucagcuucu

SEQ ID NO: 225133 - RNA, 32 nt, Human
uaugucagacacacccaagucaaucccaaccc

SEQ ID NO: 225134 - RNA, 32 nt, Human
uaugucagaugguggaaaaagcccacgugacc

SEQ ID NO: 225135 - RNA, 32 nt, Human
uaugucagcaacaggcugagguuccagaccug

SEQ ID NO: 225136 - RNA, 32 nt, Human
uaugucagcuuuucucacccucuucugugcug

SEQ ID NO: 225137 - RNA, 32 nt, Human
uaugucaggccuuccugacuucucccccucuu

SEQ ID NO: 225138 - RNA, 32 nt, Human
uaugucauacugucuccucccaauucauccuu

SEQ ID NO: 225139 - RNA, 32 nt, Human
uaugucaucucucauaaaaguuucuggcagga

SEQ ID NO: 225140 - RNA, 32 nt, Human
uaugucaugguuuucagauccauuccaaccug

SEQ ID NO: 225141 - RNA, 32 nt, Human
uaugucauuuucagauccuuccaaacucucua

SEQ ID NO: 225142 - RNA, 32 nt, Human
uauguccaacuuccacuuuuccacuucucacu

SEQ ID NO: 225143 - RNA, 32 nt, Human
uauguccaagagucaggaagacacugaauguc

SEQ ID NO: 225144 - RNA, 32 nt, Human
uauguccacaggccagggccugugcugcaguc

SEQ ID NO: 225145 - RNA, 32 nt, Human
uauguccacuuguggucgugaucaauauauuu

SEQ ID NO: 225146 - RNA, 22 nt, Human
uauguccaggagagggcaauag

SEQ ID NO: 225147 - RNA, 20 nt, Human
uauguccaggagugaauaca

SEQ ID NO: 225148 - RNA, 32 nt, Human
uauguccaggagugaauacaacagaaagaguu

SEQ ID NO: 225149 - RNA, 32 nt, Human
uaugucccaagagccauaagggggugggaauu

SEQ ID NO: 225150 - RNA, 32 nt, Human
uaugucccagccccaacaacuaucaaagucua

SEQ ID NO: 225151 - RNA, 32 nt, Human
uaugucccaggccguauucuaacaagggcaca

SEQ ID NO: 225152 - RNA, 32 nt, Human
uaugucccagggguauauuuagacccuguuuc

SEQ ID NO: 225153 - RNA, 32 nt, Human
uaugucccaguaaacccauuggaagucaaaug

SEQ ID NO: 225154 - RNA, 32 nt, Human
uauguccccauuccucccuccugccacaaauu

SEQ ID NO: 225155 - RNA, 32 nt, Human
uauguccuacuagauacacugcaaacuacagu

SEQ ID NO: 225156 - RNA, 32 nt, Human
uauguccuccaggcuuugcucagcugagcucc

SEQ ID NO: 225157 - RNA, 32 nt, Human
uauguccucuucucccuuuccaucuuucagca

SEQ ID NO: 225158 - RNA, 23 nt, Human
uauguccucuuuaauugcuuuca

SEQ ID NO: 225159 - RNA, 32 nt, Human
uauguccugacaaccaacacccagcaggccac

SEQ ID NO: 225160 - RNA, 32 nt, Human
uauguccuggugcaagucauuggaagacccug

SEQ ID NO: 225161 - RNA, 32 nt, Human
uauguccugugguguauuaacuccuuuuuauu

SEQ ID NO: 225162 - RNA, 32 nt, Human
uaugucuaaagguauuuggaacuuuuuacagg

SEQ ID NO: 225163 - RNA, 32 nt, Human
uaugucuauuaaaaaguacaaaauuuagccag

SEQ ID NO: 225164 - RNA, 32 nt, Human
uaugucuauuccaggauucagucuagaaacuu

SEQ ID NO: 225165 - RNA, 24 nt, Human
uaugucucacaauauauauacaca

SEQ ID NO: 225166 - RNA, 32 nt, Human
uaugucucacuugauaccagaauauacaucuu

SEQ ID NO: 225167 - RNA, 32 nt, Human
uaugucucauuucauaucuaacucauguuuuu

SEQ ID NO: 225168 - RNA, 32 nt, Human
uaugucucauuucucagccuuauuuuauaacg

SEQ ID NO: 225169 - RNA, 32 nt, Human
uaugucucccaggcuggagugcaguggcacag

SEQ ID NO: 225170 - RNA, 32 nt, Human
uaugucucucugucuuuuccugucuucugauu

SEQ ID NO: 225171 - RNA, 32 nt, Human
uaugucucuguaacauuggccuuuucauggcu

SEQ ID NO: 225172 - RNA, 32 nt, Human
uaugucugagacugaaugcgggagguucaaug

SEQ ID NO: 225173 - RNA, 32 nt, Human
uaugucuguccaucuuucuccuuucuuccagc

SEQ ID NO: 225174 - RNA, 32 nt, Human
uaugucugugccaugggcugagugccacgaca

SEQ ID NO: 225175 - RNA, 32 nt, Human
uaugucuguguauguauguauauaguguaaua

SEQ ID NO: 225176 - RNA, 32 nt, Human
uaugucuucaagcagcagaaccuggagcagcg

SEQ ID NO: 225177 - RNA, 32 nt, Human
uaugucuucuuaagccucuggcccucagaggc

SEQ ID NO: 225178 - RNA, 32 nt, Human
uaugucuugguuguuguauuguaccagugaaa

SEQ ID NO: 225179 - RNA, 32 nt, Human
uaugucuuugggguaauuuuugauuuagaauu

SEQ ID NO: 225180 - RNA, 32 nt, Human
uaugucuuuuaaagcgggccacacaacuguag

SEQ ID NO: 225181 - RNA, 32 nt, Human
uaugugaaaaguuuugagaacugugaaauguu

SEQ ID NO: 225182 - RNA, 32 nt, Human
uaugugaaaugagaaccauuguaucagauguu

SEQ ID NO: 225183 - RNA, 32 nt, Human
uaugugaaauggccaaagcacaugcaggcucc

SEQ ID NO: 225184 - RNA, 32 nt, Human
uaugugaacuccagucaucacaguuuaggugc

SEQ ID NO: 225185 - RNA, 31 nt, Human
uaugugaaggaugaaaggugggugaaaggac

SEQ ID NO: 225186 - RNA, 32 nt, Human
uaugugacacauaguacaaauaguuugcuagg

SEQ ID NO: 225187 - RNA, 32 nt, Human
uaugugacacuggagaaaaguggaccaggcau

SEQ ID NO: 225188 - RNA, 32 nt, Human
uaugugacagcuauauuguauuacaaaguaaa

SEQ ID NO: 225189 - RNA, 32 nt, Human
uaugugacugccucugugcugggcaccuggcc

SEQ ID NO: 225190 - RNA, 32 nt, Human
uaugugagaccauuuagcacacugcuugugaa

SEQ ID NO: 225191 - RNA, 32 nt, Human
uaugugagauauagauucuaaaaaccucaggu

SEQ ID NO: 225192 - RNA, 32 nt, Human
uaugugagauuugcauuuuacuuugcugacuu

SEQ ID NO: 225193 - RNA, 32 nt, Human
uaugugagcaccagagguaaagcaacacaaag

SEQ ID NO: 225194 - RNA, 32 nt, Human
uaugugagcgaagauggcaguaacuguuaaau

SEQ ID NO: 225195 - RNA, 32 nt, Human
uaugugaggccuuccccggugagccucaguuc

SEQ ID NO: 225196 - RNA, 24 nt, Human
uaugugaguauauauacacacaca

SEQ ID NO: 225197 - RNA, 32 nt, Human
uaugugaguguguguggcuguaaccugcacgu

SEQ ID NO: 225198 - RNA, 32 nt, Human
uaugugauguggauugcugguguccagcauga

SEQ ID NO: 225199 - RNA, 32 nt, Human
uaugugauuauccaugucccagccucucucca

SEQ ID NO: 225200 - RNA, 32 nt, Human
uaugugcaacagcaaugaaauuaacuccagaa

SEQ ID NO: 225201 - RNA, 32 nt, Human
uaugugcacacccggagguggggugaggacgg

SEQ ID NO: 225202 - RNA, 31 nt, Human
uaugugcagugucagcaccaccuggaagguu

SEQ ID NO: 225203 - RNA, 32 nt, Human
uaugugcaugugcacacacacucaaacaugua

SEQ ID NO: 225204 - RNA, 22 nt, Human
uaugugcauguguacacauaug

SEQ ID NO: 225205 - RNA, 32 nt, Human
uaugugccaguuccuguaacagguguggggac

SEQ ID NO: 225206 - RNA, 32 nt, Human
uaugugcccaagagcugcccagcuucagcuug

SEQ ID NO: 225207 - RNA, 32 nt, Human
uaugugcccaccccucucccauuauccuuuag

SEQ ID NO: 225208 - RNA, 32 nt, Human
uaugugccccucuguaucuuuugagaagugcg

SEQ ID NO: 225209 - RNA, 32 nt, Human
uaugugcccgccaccagacccggcuaauauuu

SEQ ID NO: 225210 - RNA, 32 nt, Human
uaugugcccugguggacacuugcccaccaucc

SEQ ID NO: 225211 - RNA, 32 nt, Human
uaugugccuggcuaugugcacacacaugugaa

SEQ ID NO: 225212 - RNA, 32 nt, Human
uaugugccuguaaucccagcuacuugggaggc

SEQ ID NO: 225213 - RNA, 32 nt, Human
uaugugccuuccacccagagggagacccagua

SEQ ID NO: 225214 - RNA, 24 nt, Human
uaugugcguguguguauacacaug

SEQ ID NO: 225215 - RNA, 32 nt, Human
uaugugcguguguguauacacaugcauauauu

SEQ ID NO: 225216 - RNA, 32 nt, Human
uaugugcuagauuuuaauauccuugagccugg

SEQ ID NO: 225217 - RNA, 32 nt, Human
uaugugcuaggugcuggggaaaacuugaccaa

SEQ ID NO: 225218 - RNA, 32 nt, Human
uaugugcucacugcuggcucaggccccaaccu

SEQ ID NO: 225219 - RNA, 32 nt, Human
uaugugcuccgcuuuuguugcaucacuaugug

SEQ ID NO: 225220 - RNA, 32 nt, Human
uaugugcugcugcugcucaagagcuggaucca

SEQ ID NO: 225221 - RNA, 32 nt, Human
uauguggagcucagcaacaaggcugcacagcu

SEQ ID NO: 225222 - RNA, 32 nt, Human
uauguggcaauauuaaccugguacaugaauau

SEQ ID NO: 225223 - RNA, 32 nt, Human
uauguggcaggccuacucaugggugggaaggg

SEQ ID NO: 225224 - RNA, 32 nt, Human
uauguggcauuuucuguuucucauugguaaua

SEQ ID NO: 225225 - RNA, 32 nt, Human
uauguggcuggucucaaacuccugggcucaag

SEQ ID NO: 225226 - RNA, 32 nt, Human
uauguggcuuuucuuugucuuccccaaggcug

SEQ ID NO: 225227 - RNA, 32 nt, Human
uaugugggacccauuccucaccaaaaugagga

SEQ ID NO: 225228 - RNA, 32 nt, Human
uaugugggagaaccuuacaaggcucuaaaaug

SEQ ID NO: 225229 - RNA, 32 nt, Human
uauguggggagguggaggggguccauguggac

SEQ ID NO: 225230 - RNA, 32 nt, Human
uauguggggcugagagucaaaagggaaagccu

SEQ ID NO: 225231 - RNA, 32 nt, Human
uauguggucaccagcaggagaaagcuuugaug

SEQ ID NO: 225232 - RNA, 32 nt, Human
uaugugguccacccucccucccaggcaacaaa

SEQ ID NO: 225233 - RNA, 22 nt, Human
uauguguaaauauauguacaaa

SEQ ID NO: 225234 - RNA, 24 nt, Human
uauguguacauauggacauacaca

SEQ ID NO: 225235 - RNA, 32 nt, Human
uauguguagaucuuugauccauugugaauuaa

SEQ ID NO: 225236 - RNA, 32 nt, Human
uauguguagcuguggggaaaagaaagagagau

SEQ ID NO: 225237 - RNA, 24 nt, Human
uauguguauagauucacauacaca

SEQ ID NO: 225238 - RNA, 25 nt, Human
uauguguauauaugauacauacaca

SEQ ID NO: 225239 - RNA, 24 nt, Human
uauguguauauauguauauauaua

SEQ ID NO: 225240 - RNA, 22 nt, Human
uauguguauauguauacacaua

SEQ ID NO: 225241 - RNA, 24 nt, Human
uauguguauauguauuuacauaua

SEQ ID NO: 225242 - RNA, 22 nt, Human
uauguguauauguguauacaca

SEQ ID NO: 225243 - RNA, 24 nt, Human
uauguguauauguguauacacaua

SEQ ID NO: 225244 - RNA, 23 nt, Human
uauguguauauguuauguauaca

SEQ ID NO: 225245 - RNA, 22 nt, Human
uauguguauguacacauacaua

SEQ ID NO: 225246 - RNA, 32 nt, Human
uauguguauguauguauguauauguauaugau

SEQ ID NO: 225247 - RNA, 32 nt, Human
uauguguauuucuccacagugcuugcuuugcc

SEQ ID NO: 225248 - RNA, 32 nt, Human
uaugugucaaggaucaucagcaaucagcaaau

SEQ ID NO: 225249 - RNA, 28 nt, Human
uauguguccaaugcugccuucccaugaa

SEQ ID NO: 225250 - RNA, 32 nt, Human
uaugugucucagaaaaucuguguguguacaug

SEQ ID NO: 225251 - RNA, 21 nt, Human
uaugugucucugaguguagua

SEQ ID NO: 225252 - RNA, 32 nt, Human
uaugugugcagguaucacagggugagagagga

SEQ ID NO: 225253 - RNA, 32 nt, Human
uauguguggacuuuugucauggguugaauagu

SEQ ID NO: 225254 - RNA, 24 nt, Human
uauguguguauacacauauacaca

SEQ ID NO: 225255 - RNA, 32 nt, Human
uauguguguauaggcugggugcgguggcucau

SEQ ID NO: 225256 - RNA, 22 nt, Human
uauguguguauauauauacaca

SEQ ID NO: 225257 - RNA, 25 nt, Human
uauguguguauuucauacacacaca

SEQ ID NO: 225258 - RNA, 32 nt, Human
uaugugugucagcuuugagaugguguguccug

SEQ ID NO: 225259 - RNA, 22 nt, Human
uaugugugucuauacacacaca

SEQ ID NO: 225260 - RNA, 29 nt, Human
uaugugugucugugugucucucuguggag

SEQ ID NO: 225261 - RNA, 24 nt, Human
uaugugugugauguauacuauaua

SEQ ID NO: 225262 - RNA, 32 nt, Human
uauguguguguaugugcaucugaagaugugua

SEQ ID NO: 225263 - RNA, 20 nt, Human
uauguguuccucuuguucua

SEQ ID NO: 225264 - RNA, 32 nt, Human
uauguguuggggcucugucaguucucagcccc

SEQ ID NO: 225265 - RNA, 32 nt, Human
uauguguuggguagggaggugacgauugccac

SEQ ID NO: 225266 - RNA, 24 nt, Human
uauguguuuauauguaugcauaua

SEQ ID NO: 225267 - RNA, 32 nt, Human
uauguguuuccagaucugcuuauuguuugggu

SEQ ID NO: 225268 - RNA, 32 nt, Human
uauguuaaccacuguauguaaccaacccuuau

SEQ ID NO: 225269 - RNA, 32 nt, Human
uauguuaagucacaaacccacuugacuucugg

SEQ ID NO: 225270 - RNA, 32 nt, Human
uauguuaauacacacauacauacgcacacaug

SEQ ID NO: 225271 - RNA, 32 nt, Human
uauguuacacauguucauguucaccucucauu

SEQ ID NO: 225272 - RNA, 32 nt, Human
uauguuaccgaaucaaauagccuuccagaggc

SEQ ID NO: 225273 - RNA, 32 nt, Human
uauguuauaguccagucuacuucuuuaaaaac

SEQ ID NO: 225274 - RNA, 32 nt, Human
uauguucacaccaauaauugccugcuucagag

SEQ ID NO: 225275 - RNA, 32 nt, Human
uauguucacaccaccacauucccauucacuuu

SEQ ID NO: 225276 - RNA, 32 nt, Human
uauguucacugcacucugauuuucuguaggua

SEQ ID NO: 225277 - RNA, 32 nt, Human
uauguucagggugggaugauggaaccgagggc

SEQ ID NO: 225278 - RNA, 32 nt, Human
uauguucaugacacugcacuccagccuuggca

SEQ ID NO: 225279 - RNA, 32 nt, Human
uauguucaugacucuguauuccaggcuggaug

SEQ ID NO: 225280 - RNA, 28 nt, Human
uauguuccaagugcuacucucacucagc

SEQ ID NO: 225281 - RNA, 32 nt, Human
uauguuccaggauaaaaucccaagaagaugga

SEQ ID NO: 225282 - RNA, 32 nt, Human
uauguucccucagacugaagcuacagucucau

SEQ ID NO: 225283 - RNA, 32 nt, Human
uauguucggacccaagcaaguuagcuaaacca

SEQ ID NO: 225284 - RNA, 32 nt, Human
uauguucgugcugcaagugaucuguaaucccu

SEQ ID NO: 225285 - RNA, 32 nt, Human
uauguucuauguugggccuccugcugcaaaac

SEQ ID NO: 225286 - RNA, 32 nt, Human
uauguucucuuuaccccuucccccucuucucu

SEQ ID NO: 225287 - RNA, 32 nt, Human
uauguucugaguaaacaaauauugcuauggga

SEQ ID NO: 225288 - RNA, 32 nt, Human
uauguucuuagcaauaaaugcuuuucuaaugc

SEQ ID NO: 225289 - RNA, 32 nt, Human
uauguugaaaacaaguauuucuugugugaaca

SEQ ID NO: 225290 - RNA, 32 nt, Human
  misc_feature (30)..(30): n is a, c, g, or u
uauguugaauuccauugccuccuuuucucnau

SEQ ID NO: 225291 - RNA, 32 nt, Human
uauguugaccugucugaauuauaaaccagccu

SEQ ID NO: 225292 - RNA, 32 nt, Human
uauguugaucagugaugaguugggcuuaaugc

SEQ ID NO: 225293 - RNA, 32 nt, Human
uauguugcacuaagaagguggggucgaggagu

SEQ ID NO: 225294 - RNA, 32 nt, Human
uauguugcauuuucauuaucauuuguuucaag

SEQ ID NO: 225295 - RNA, 22 nt, Human
uauguugcccaggcugaucuca

SEQ ID NO: 225296 - RNA, 32 nt, Human
uauguugcccaggcuggagugcaguggugcga

SEQ ID NO: 225297 - RNA, 32 nt, Human
uauguugcuuuucuaaauaaauguauugugaa

SEQ ID NO: 225298 - RNA, 32 nt, Human
uauguuggaaaucgcuuuugcuggugcaaagu

SEQ ID NO: 225299 - RNA, 32 nt, Human
uauguugggagugugauuuguucuccaaugug

SEQ ID NO: 225300 - RNA, 32 nt, Human
uauguugggccuuccuuuuuggaauguacgcu

SEQ ID NO: 225301 - RNA, 32 nt, Human
uauguuggucaacuuuucguuuucccuaacuc

SEQ ID NO: 225302 - RNA, 32 nt, Human
uauguuggugcaggcuugcaaucccagcuacu

SEQ ID NO: 225303 - RNA, 32 nt, Human
uauguugguguguuuguccuuacuugaaaugg

SEQ ID NO: 225304 - RNA, 32 nt, Human
uauguuguaaagcuggaaccaaguuugcauuu

SEQ ID NO: 225305 - RNA, 32 nt, Human
uauguuguaucgugaauaaauugcacauagua

SEQ ID NO: 225306 - RNA, 32 nt, Human
uauguugucaucucugguccacaggugucaca

SEQ ID NO: 225307 - RNA, 32 nt, Human
uauguugucuguuguaaaauguuaacgaauac

SEQ ID NO: 225308 - RNA, 32 nt, Human
uauguugugaaguuucccaguucacugaaaug

SEQ ID NO: 225309 - RNA, 32 nt, Human
uauguugugcugcuguccagcugcuaagaucc

SEQ ID NO: 225310 - RNA, 32 nt, Human
uauguugugggaaucuuugcaaguuaguguug

SEQ ID NO: 225311 - RNA, 32 nt, Human
uauguuguucugaagucuuguaauguuuaacu

SEQ ID NO: 225312 - RNA, 32 nt, Human
uauguuguugaauacuucauucacaagggaaa

SEQ ID NO: 225313 - RNA, 32 nt, Human
uauguuuacacaauuaauucaucccuuaauuu

SEQ ID NO: 225314 - RNA, 32 nt, Human
uauguuuacagaugugcccugcauuuagucug

SEQ ID NO: 225315 - RNA, 20 nt, Human
uauguuuacaucucuuugca

SEQ ID NO: 225316 - RNA, 32 nt, Human
uauguuuagcagcauuuugccccugggcauuu

SEQ ID NO: 225317 - RNA, 32 nt, Human
uauguuuauaagaacucagaagcaauggugag

SEQ ID NO: 225318 - RNA, 32 nt, Human
uauguuuauaugcacaaaugcacuaauuaguc

SEQ ID NO: 225319 - RNA, 22 nt, Human
uauguuuauauguguacauaua

SEQ ID NO: 225320 - RNA, 32 nt, Human
uauguuuauuuuuaugggauuuggguaaauuu

SEQ ID NO: 225321 - RNA, 32 nt, Human
uauguuucaauucaaaacaaagacaguuuucc

SEQ ID NO: 225322 - RNA, 32 nt, Human
uauguuucaguagcagauuuucacacaugugc

SEQ ID NO: 225323 - RNA, 32 nt, Human
uauguuucaguuacuuagauggucucauaagg

SEQ ID NO: 225324 - RNA, 32 nt, Human
uauguuucauuuucuuucuucuucaccucuau

SEQ ID NO: 225325 - RNA, 32 nt, Human
uauguuuccaugguuaccauggguguggaugg

SEQ ID NO: 225326 - RNA, 32 nt, Human
uauguuuccuuggccaggugcaauggcucaug

SEQ ID NO: 225327 - RNA, 32 nt, Human
uauguuuccuuucaaagggaucuugacguggu

SEQ ID NO: 225328 - RNA, 32 nt, Human
uauguuucugaauucacugucuucuaugcagc

SEQ ID NO: 225329 - RNA, 32 nt, Human
uauguuugcaauauuuguuuuaagcacuuuga

SEQ ID NO: 225330 - RNA, 32 nt, Human
uauguuuggacacaauagugcacuuuaaaacc

SEQ ID NO: 225331 - RNA, 32 nt, Human
uauguuuggaggcagugacaaaaggacuuuuu

SEQ ID NO: 225332 - RNA, 32 nt, Human
uauguuuggccugccccagugcagugggacgg

SEQ ID NO: 225333 - RNA, 32 nt, Human
uauguuugguuauggcaagauguuacagcauu

SEQ ID NO: 225334 - RNA, 32 nt, Human
uauguuuguuucugcugcugugaaaccccaaa

SEQ ID NO: 225335 - RNA, 32 nt, Human
uauguuuguuuggucaauguuuccgcaguauu

SEQ ID NO: 225336 - RNA, 32 nt, Human
uauguuuuaaaucucuuagugguuacauugcc

SEQ ID NO: 225337 - RNA, 32 nt, Human
uauguuuuacaguucuggaggcugggaagucc

SEQ ID NO: 225338 - RNA, 23 nt, Human
uauguuuucacuggcuuauguuu

SEQ ID NO: 225339 - RNA, 32 nt, Human
uauguuuucauaauuuagcucccacuuaugag

SEQ ID NO: 225340 - RNA, 22 nt, Human
uauguuuucauucuuggcuucu

SEQ ID NO: 225341 - RNA, 24 nt, Human
uauguuuucauuuccccucugucu

SEQ ID NO: 225342 - RNA, 32 nt, Human
uauguuuucgccucuucugugaucaccaauag

SEQ ID NO: 225343 - RNA, 32 nt, Human
uauguuuuggaaggcaaagucuuggcuuuuga

SEQ ID NO: 225344 - RNA, 23 nt, Human
uauguuuuguacauagauacaca

SEQ ID NO: 225345 - RNA, 32 nt, Human
uauguuuuguguugguguuuccuauuuucugc

SEQ ID NO: 225346 - RNA, 32 nt, Human
uauguuuuucucucaaaaaggcaacguuauuu

SEQ ID NO: 225347 - RNA, 32 nt, Human
uauuaaaaaccagcacauucugaaaagaagaa

SEQ ID NO: 225348 - RNA, 32 nt, Human
uauuaaaaaguacaaaauuuagccaggugugg

SEQ ID NO: 225349 - RNA, 32 nt, Human
uauuaaaaauaacaaaaauuagccaggcaugg

SEQ ID NO: 225350 - RNA, 32 nt, Human
uauuaaaaauacaaaaacuuagccagucaugg

SEQ ID NO: 225351 - RNA, 32 nt, Human
uauuaaaacuauuccacauauccuaaaauuuc

SEQ ID NO: 225352 - RNA, 32 nt, Human
uauuaaaacucauguggcaguauccuggucuu

SEQ ID NO: 225353 - RNA, 32 nt, Human
uauuaaaagacaguaguuuauuugaacugguu

SEQ ID NO: 225354 - RNA, 32 nt, Human
uauuaaaaguaguucugguuuauuaaucaacg

SEQ ID NO: 225355 - RNA, 32 nt, Human
uauuaaaaguuaagcaaauagauuaaugacgu

SEQ ID NO: 225356 - RNA, 24 nt, Human
uauuaaaaguucauacauuagaca

SEQ ID NO: 225357 - RNA, 32 nt, Human
uauuaaaaucuuccucauuuggauuugcuuuc

SEQ ID NO: 225358 - RNA, 32 nt, Human
uauuaaaauggcauauggaaaagcuuuguauu

SEQ ID NO: 225359 - RNA, 32 nt, Human
uauuaaaauuccagagugaccguggcacuugg

SEQ ID NO: 225360 - RNA, 30 nt, Human
uauuaaaauucuuguccuauuuugccauga

SEQ ID NO: 225361 - RNA, 32 nt, Human
uauuaaaccuggacagggagagggaggguguu

SEQ ID NO: 225362 - RNA, 32 nt, Human
uauuaaagaccaggcuguuggcaccagaacuu

SEQ ID NO: 225363 - RNA, 32 nt, Human
uauuaaagaccauuucuggcugggcagggcac

SEQ ID NO: 225364 - RNA, 32 nt, Human
uauuaaagaggcugcaaaguccagccacccug

SEQ ID NO: 225365 - RNA, 32 nt, Human
uauuaaaggagagaacuugguaacgugaagua

SEQ ID NO: 225366 - RNA, 32 nt, Human
uauuaaagggaccggagcggggcaguucccga

SEQ ID NO: 225367 - RNA, 32 nt, Human
uauuaaauauuuugauauguaaagcucuacac

SEQ ID NO: 225368 - RNA, 32 nt, Human
uauuaaaucaaccugagccacauguuaucuaa

SEQ ID NO: 225369 - RNA, 32 nt, Human
uauuaaauggccuucgggucugaaaagcuuuu

SEQ ID NO: 225370 - RNA, 32 nt, Human
uauuaaauguacuggugacuaguacauguauu

SEQ ID NO: 225371 - RNA, 32 nt, Human
uauuaaauuaugcaacugaaacuccugaauua

SEQ ID NO: 225372 - RNA, 32 nt, Human
uauuaacaacuaauugcauccauuaucuccuu

SEQ ID NO: 225373 - RNA, 32 nt, Human
uauuaacacagcuguuugggucugauccuaga

SEQ ID NO: 225374 - RNA, 32 nt, Human
uauuaaccagucauuacacugcggaacagcca

SEQ ID NO: 225375 - RNA, 24 nt, Human
uauuaaccccugaccaaaacgacu

SEQ ID NO: 225376 - RNA, 23 nt, Human
uauuaaccccugaccaaaacuac

SEQ ID NO: 225377 - RNA, 24 nt, Human
uauuaaccccugaccaaaacuacu

SEQ ID NO: 225378 - RNA, 24 nt, Human
uauuaaccccugaccaaaacuauu

SEQ ID NO: 225379 - RNA, 20 nt, Human
uauuaaccccuggcaaaacu

SEQ ID NO: 225380 - RNA, 32 nt, Human
uauuaacgacggucccagcagaaugcuguaug

SEQ ID NO: 225381 - RNA, 32 nt, Human
uauuaacgcaucuggccaacuuggguuauaaa

SEQ ID NO: 225382 - RNA, 32 nt, Human
uauuaacgcuaaagguguaagacuucagauuu

SEQ ID NO: 225383 - RNA, 32 nt, Human
uauuaacuguggcaauggcauggggguuauaa

SEQ ID NO: 225384 - RNA, 32 nt, Human
uauuaacugugguugugcuggaauggaggagg

SEQ ID NO: 225385 - RNA, 32 nt, Human
uauuaagagcacauuuauuuacauuuguauau

SEQ ID NO: 225386 - RNA, 32 nt, Human
uauuaagaguuaugccuggugggguguggugg

SEQ ID NO: 225387 - RNA, 32 nt, Human
uauuaagaugauucauuucauuuccacucgug

SEQ ID NO: 225388 - RNA, 32 nt, Human
uauuaagauggaaguaguuaaauauggguuau

SEQ ID NO: 225389 - RNA, 32 nt, Human
uauuaagcccaggaguugcuuuggggauggcu

SEQ ID NO: 225390 - RNA, 32 nt, Human
uauuaagcuccuacucugugcaaaucacucua

SEQ ID NO: 225391 - RNA, 32 nt, Human
uauuaaggaagcugagcaacuggagccucgag

SEQ ID NO: 225392 - RNA, 32 nt, Human
uauuaaggacucucugcuccagccucucacuc

SEQ ID NO: 225393 - RNA, 32 nt, Human
uauuaaggauguuaggagagauuugauuuaau

SEQ ID NO: 225394 - RNA, 32 nt, Human
uauuaagggaaaggaaaagaacacuagcuaag

SEQ ID NO: 225395 - RNA, 32 nt, Human
uauuaagguauuuuaagacagaaagagagaga

SEQ ID NO: 225396 - RNA, 32 nt, Human
uauuaaguaaccuguuuugaauccagacauuc

SEQ ID NO: 225397 - RNA, 32 nt, Human
uauuaaguauauguguucaucuuagcaauggu

SEQ ID NO: 225398 - RNA, 31 nt, Human
uauuaagugcacuucuuguauuucuaauaag

SEQ ID NO: 225399 - RNA, 32 nt, Human
uauuaagugcagcuugacauuauguuuuauuu

SEQ ID NO: 225400 - RNA, 32 nt, Human
uauuaauacaagggguuugaacuggacauccu

SEQ ID NO: 225401 - RNA, 32 nt, Human
uauuaauacaccgauaaccacaggggaagggc

SEQ ID NO: 225402 - RNA, 32 nt, Human
uauuaauacuaggaauaccaacauuauuaggg

SEQ ID NO: 225403 - RNA, 32 nt, Human
uauuaauacugaugugauggaugcauuuguuu

SEQ ID NO: 225404 - RNA, 23 nt, Human
uauuaauacuguaguuauacacc

SEQ ID NO: 225405 - RNA, 32 nt, Human
uauuaauagcacagcagaugugugcugcccau

SEQ ID NO: 225406 - RNA, 32 nt, Human
uauuaauaggcgcauucaguuuggaaaagaca

SEQ ID NO: 225407 - RNA, 32 nt, Human
uauuaauaggggcauaaauaaaggucgaagag

SEQ ID NO: 225408 - RNA, 32 nt, Human
uauuaauaugugcacacaaauauguguaaaag

SEQ ID NO: 225409 - RNA, 32 nt, Human
uauuaaucauaggagcuugcagucucacuagg

SEQ ID NO: 225410 - RNA, 32 nt, Human
uauuaauccauguuauccucccaauaacucug

SEQ ID NO: 225411 - RNA, 32 nt, Human
uauuaaucuuuuuaguguaaacaucaguaacu

SEQ ID NO: 225412 - RNA, 32 nt, Human
uauuaaugaaaaugcaucuauuucagagcuga

SEQ ID NO: 225413 - RNA, 32 nt, Human
uauuaaugacucaucaucagugccccagagga

SEQ ID NO: 225414 - RNA, 32 nt, Human
uauuaaugaguauuuggaagaaaauugaccua

SEQ ID NO: 225415 - RNA, 32 nt, Human
uauuaaugagucuacaacugcugcuuuguuca

SEQ ID NO: 225416 - RNA, 32 nt, Human
uauuaaugaugcagagguuggaggagagaggu

SEQ ID NO: 225417 - RNA, 32 nt, Human
uauuaauggaguuauugcuauuuuugcuguga

SEQ ID NO: 225418 - RNA, 32 nt, Human
uauuaaugggccugcuucuuagcaauauuaga

SEQ ID NO: 225419 - RNA, 32 nt, Human
uauuaaugucaguacuaccagcacuuugccaa

SEQ ID NO: 225420 - RNA, 32 nt, Human
uauuaauucauaaugaacuucccucuucugga

SEQ ID NO: 225421 - RNA, 32 nt, Human
uauuaauuccaucugagugauugucaguguaa

SEQ ID NO: 225422 - RNA, 32 nt, Human
uauuaauucccucccuuucuuuuucuuacuag

SEQ ID NO: 225423 - RNA, 32 nt, Human
uauuaauugacugucuuguaagccacuuguuu

SEQ ID NO: 225424 - RNA, 32 nt, Human
uauuaauugcuuacagauuauaccucauauua

SEQ ID NO: 225425 - RNA, 32 nt, Human
uauuaauuuagaaaauaccccauuuuugccac

SEQ ID NO: 225426 - RNA, 32 nt, Human
uauuaauuucccucaucucuuuuauaggccug

SEQ ID NO: 225427 - RNA, 32 nt, Human
uauuacaaaaccagacacuuuuacauucaugg

SEQ ID NO: 225428 - RNA, 32 nt, Human
uauuacaaagcaaauauuaccccaaauugucc

SEQ ID NO: 225429 - RNA, 32 nt, Human
uauuacaaaucugcauaaaauaccucauuuca

SEQ ID NO: 225430 - RNA, 32 nt, Human
uauuacaagcaccuggcagugacauugcacga

SEQ ID NO: 225431 - RNA, 32 nt, Human
uauuacacaagaaacuuggucugcagucugga

SEQ ID NO: 225432 - RNA, 25 nt, Human
uauuacacauaauuuauacuggaca

SEQ ID NO: 225433 - RNA, 32 nt, Human
uauuacagauggaaagaaugaggcucagggaa

SEQ ID NO: 225434 - RNA, 32 nt, Human
uauuacagcucucuggugucucuucucauuug

SEQ ID NO: 225435 - RNA, 32 nt, Human
uauuacaggagaaggauugggaacagaaugga

SEQ ID NO: 225436 - RNA, 32 nt, Human
uauuacaggauuucaucauguugcccaggcuc

SEQ ID NO: 225437 - RNA, 32 nt, Human
uauuacauauccaccaucacuucauuuagcug

SEQ ID NO: 225438 - RNA, 32 nt, Human
uauuacaugcugcaucuuucagccuggagacu

SEQ ID NO: 225439 - RNA, 32 nt, Human
uauuacauguaauacaaaacaaacauguaguu

SEQ ID NO: 225440 - RNA, 32 nt, Human
uauuaccacuccucucccauuuguggcaguuu

SEQ ID NO: 225441 - RNA, 32 nt, Human
uauuaccagcaacgucgcuucucaggccuugg

SEQ ID NO: 225442 - RNA, 32 nt, Human
uauuaccagcacuuacaagcacugugaaaacu

SEQ ID NO: 225443 - RNA, 32 nt, Human
uauuaccaggaggaagagaaagaggacaaaau

SEQ ID NO: 225444 - RNA, 32 nt, Human
uauuaccaggaucggagagagcgggccccuuu

SEQ ID NO: 225445 - RNA, 32 nt, Human
uauuaccaggcccaacucagucuucagugauu

SEQ ID NO: 225446 - RNA, 32 nt, Human
uauuacccacacaaacccacauugaguuagaa

SEQ ID NO: 225447 - RNA, 32 nt, Human
uauuaccccauacuugaagauagcuuagugua

SEQ ID NO: 225448 - RNA, 32 nt, Human
uauuacccucuacaauauacuuuuuauugagc

SEQ ID NO: 225449 - RNA, 32 nt, Human
uauuacccuucucuuuauaucaagggucuaau

SEQ ID NO: 225450 - RNA, 32 nt, Human
uauuacccuuuccuauguguuuuaucuaauua

SEQ ID NO: 225451 - RNA, 32 nt, Human
uauuaccucgcugcuacuuuucugcagggaua

SEQ ID NO: 225452 - RNA, 31 nt, Human
uauuaccugccuuagcuuugccaaagcaacg

SEQ ID NO: 225453 - RNA, 32 nt, Human
uauuaccuucaccuccuuuucucccccuucuc

SEQ ID NO: 225454 - RNA, 32 nt, Human
uauuaccuuugucucuucauaccgguuuuaug

SEQ ID NO: 225455 - RNA, 32 nt, Human
uauuacggcagggagaggaagaucgggagagc

SEQ ID NO: 225456 - RNA, 32 nt, Human
uauuacggggucuggcucugucacccaggcug

SEQ ID NO: 225457 - RNA, 32 nt, Human
uauuacguagacuuuccucucucccaaaagau

SEQ ID NO: 225458 - RNA, 32 nt, Human
uauuacgucauaaaccauugaaaacacaucua

SEQ ID NO: 225459 - RNA, 32 nt, Human
uauuacuaacagguccaacccuaagugagaca

SEQ ID NO: 225460 - RNA, 32 nt, Human
uauuacuacuucuguuccauggugugcagguc

SEQ ID NO: 225461 - RNA, 32 nt, Human
uauuacuauccuaaauggaaacucagaaucac

SEQ ID NO: 225462 - RNA, 32 nt, Human
uauuacucaaucuggaaagugcaaauacacac

SEQ ID NO: 225463 - RNA, 32 nt, Human
uauuacucagcagcaguaacaugguaacacuu

SEQ ID NO: 225464 - RNA, 32 nt, Human
uauuacucuuuggcaucucucuucuccaaagu

SEQ ID NO: 225465 - RNA, 32 nt, Human
uauuacugcagcugcccaaagaugcuuuauuu

SEQ ID NO: 225466 - RNA, 32 nt, Human
uauuacugcuuugugaaaguccagacugaacg

SEQ ID NO: 225467 - RNA, 32 nt, Human
uauuacugguggaugcaccguguccacagcag

SEQ ID NO: 225468 - RNA, 32 nt, Human
uauuacuguauuaguccaauguuaaacauuuu

SEQ ID NO: 225469 - RNA, 32 nt, Human
uauuacuguggugaaacaaaauaucuuuaaaa

SEQ ID NO: 225470 - RNA, 32 nt, Human
uauuacuuacuucaaacuguuucccaaaauaa

SEQ ID NO: 225471 - RNA, 32 nt, Human
uauuacuuuagcauuugacccuccaguggagu

SEQ ID NO: 225472 - RNA, 32 nt, Human
uauuacuuucauaugaauaaaaguaauccaug

SEQ ID NO: 225473 - RNA, 32 nt, Human
uauuacuuuguucuugguccuucacagggccu

SEQ ID NO: 225474 - RNA, 32 nt, Human
uauuacuuuuaccauggugagcuggaauggcc

SEQ ID NO: 225475 - RNA, 32 nt, Human
uauuagaaaagcuuuguuuuccuugaagaaug

SEQ ID NO: 225476 - RNA, 32 nt, Human
uauuagaaaaggacagggcuggcugaccuguc

SEQ ID NO: 225477 - RNA, 32 nt, Human
uauuagaacuucagaagacauaggagcaguua

SEQ ID NO: 225478 - RNA, 32 nt, Human
uauuagagaagagauugugguuucauucugua

SEQ ID NO: 225479 - RNA, 27 nt, Human
uauuagagacaggguuucuccguguug

SEQ ID NO: 225480 - RNA, 32 nt, Human
uauuagagacgggguuucaccauguuaggaua

SEQ ID NO: 225481 - RNA, 32 nt, Human
uauuagagaugggguuucaccauguuggccag

SEQ ID NO: 225482 - RNA, 32 nt, Human
uauuagaggaagagauugagagaccuagcaau

SEQ ID NO: 225483 - RNA, 32 nt, Human
uauuagaguuuauacuguagagaaaucauaug

SEQ ID NO: 225484 - RNA, 32 nt, Human
uauuagauguuuguguaaccacuugcuuauuu

SEQ ID NO: 225485 - RNA, 32 nt, Human
uauuagcaaugggguuucaccaugcuggccag

SEQ ID NO: 225486 - RNA, 21 nt, Human
uauuagcagauuaaacuagca

SEQ ID NO: 225487 - RNA, 32 nt, Human
uauuagcaggcauacuuuuccacacaucuuug

SEQ ID NO: 225488 - RNA, 30 nt, Human
uauuagcccuucuccauggcccugccaugc

SEQ ID NO: 225489 - RNA, 32 nt, Human
uauuagccucaagccuucuaaugaguccuugc

SEQ ID NO: 225490 - RNA, 32 nt, Human
uauuagccugaugcagauaccaaagauaauuu

SEQ ID NO: 225491 - RNA, 32 nt, Human
uauuagcguuuuaacaguuacaagcuuuaaau

SEQ ID NO: 225492 - RNA, 32 nt, Human
uauuagcuauugugugcuaagcauucaacuag

SEQ ID NO: 225493 - RNA, 32 nt, Human
uauuagcucuacuggaauuuucauacacguaa

SEQ ID NO: 225494 - RNA, 31 nt, Human
uauuagcuuaaaacuguacuguugaauucug

SEQ ID NO: 225495 - RNA, 32 nt, Human
uauuagcuuaucagcuaaaauauugcauagug

SEQ ID NO: 225496 - RNA, 32 nt, Human
uauuagcuuuuuaaguuccuuccaaauauguu

SEQ ID NO: 225497 - RNA, 32 nt, Human
uauuaggaaaggaauggaaaguagucauuaug

SEQ ID NO: 225498 - RNA, 32 nt, Human
uauuaggaaugugaagccagaaugggucaguu

SEQ ID NO: 225499 - RNA, 32 nt, Human
uauuaggagguggggucuuugggaggugaugu

SEQ ID NO: 225500 - RNA, 32 nt, Human
uauuagggaggcugaggcaggagaaucgcuug

SEQ ID NO: 225501 - RNA, 32 nt, Human
uauuagggauaaaacauauaggugcacaagag

SEQ ID NO: 225502 - RNA, 32 nt, Human
uauuagggucucaauacuuucucaaggggcua

SEQ ID NO: 225503 - RNA, 32 nt, Human
uauuaggguggaagaggaaucaagaguaaaga

SEQ ID NO: 225504 - RNA, 32 nt, Human
uauuagggugguuccugaugggaaaaggacau

SEQ ID NO: 225505 - RNA, 32 nt, Human
uauuagguauuuuuccuaaugcuaucccuccc

SEQ ID NO: 225506 - RNA, 32 nt, Human
uauuaggucauccuggguacucaggccucuag

SEQ ID NO: 225507 - RNA, 32 nt, Human
uauuaggugguugggccucuuccaaucaguug

SEQ ID NO: 225508 - RNA, 20 nt, Human
uauuaguaaacaucuggaua

SEQ ID NO: 225509 - RNA, 32 nt, Human
uauuagucucuucucaggcugcuaauaaacac

SEQ ID NO: 225510 - RNA, 21 nt, Human
uauuagucuguucucaugcug

SEQ ID NO: 225511 - RNA, 32 nt, Human
uauuagugagaggugaagccagcuggacuucc

SEQ ID NO: 225512 - RNA, 32 nt, Human
uauuagugauacaaaguuaaaauuucaauauu

SEQ ID NO: 225513 - RNA, 32 nt, Human
uauuagugguguggcacugggagcugcuccua

SEQ ID NO: 225514 - RNA, 32 nt, Human
uauuaguguuucuuauuuuggccaguucuuuu

SEQ ID NO: 225515 - RNA, 32 nt, Human
uauuaguuaugaguuugguugcaguguucuua

SEQ ID NO: 225516 - RNA, 32 nt, Human
uauuaguuauuguuauaaauaucuuauugugc

SEQ ID NO: 225517 - RNA, 32 nt, Human
uauuauaaacagaaaaucuuuccucuucucau

SEQ ID NO: 225518 - RNA, 32 nt, Human
uauuauaaacucaucaaauauauuucuucuug

SEQ ID NO: 225519 - RNA, 32 nt, Human
uauuauaaaguacauuuaaaguucaaggacua

SEQ ID NO: 225520 - RNA, 32 nt, Human
uauuauaauaauccucacccuacaaucauaac

SEQ ID NO: 225521 - RNA, 32 nt, Human
uauuauaauucaagugccauuagaugauauau

SEQ ID NO: 225522 - RNA, 29 nt, Human
uauuauacacuugaacauguguuuguaua

SEQ ID NO: 225523 - RNA, 32 nt, Human
uauuauaccaacaauugguuuuuacaagcuag

SEQ ID NO: 225524 - RNA, 32 nt, Human
uauuauacuguggcugguggacuauuuucauc

SEQ ID NO: 225525 - RNA, 32 nt, Human
uauuauagguauuuuugccugcccucuagggu

SEQ ID NO: 225526 - RNA, 32 nt, Human
uauuauauuuucacagacuuuugaagcacaaa

SEQ ID NO: 225527 - RNA, 32 nt, Human
uauuaucaacacccuccaugugcagaaaccug

SEQ ID NO: 225528 - RNA, 21 nt, Human
uauuaucaauaggcauggagg

SEQ ID NO: 225529 - RNA, 32 nt, Human
uauuaucaauucuccuucauagacauuuuaua

SEQ ID NO: 225530 - RNA, 32 nt, Human
uauuaucacaccauugcacucuugucugggug

SEQ ID NO: 225531 - RNA, 32 nt, Human
uauuaucacgccgcugcacuccagcuugaaug

SEQ ID NO: 225532 - RNA, 32 nt, Human
uauuaucccauaugcuaccuaguuugcugguc

SEQ ID NO: 225533 - RNA, 32 nt, Human
uauuaucccccagugcuccagaacagcgggag

SEQ ID NO: 225534 - RNA, 32 nt, Human
uauuaucccggcuuggagauuuugccagccug

SEQ ID NO: 225535 - RNA, 32 nt, Human
uauuaucugcucucacacugcucauaaagaca

SEQ ID NO: 225536 - RNA, 32 nt, Human
uauuaugacaacaucaccaauguugugguaaa

SEQ ID NO: 225537 - RNA, 32 nt, Human
uauuaugaccucacugacaguucuuuuucucu

SEQ ID NO: 225538 - RNA, 32 nt, Human
uauuaugaggagaagguaggaguguagcuagc

SEQ ID NO: 225539 - RNA, 32 nt, Human
uauuaugauggagggaagugaggugaauccag

SEQ ID NO: 225540 - RNA, 25 nt, Human
uauuaugcacuaaccuuuuuuggug

SEQ ID NO: 225541 - RNA, 32 nt, Human
uauuaugcaggggcaaacaccugcugaugugg

SEQ ID NO: 225542 - RNA, 32 nt, Human
uauuaugccugggccagucuugagccagcuuu

SEQ ID NO: 225543 - RNA, 22 nt, Human
uauuaugcuaucuuuuuugaua

SEQ ID NO: 225544 - RNA, 32 nt, Human
uauuaugggaggcuggagugcaauggugccau

SEQ ID NO: 225545 - RNA, 32 nt, Human
uauuaugguucacaucugagguaacccaucgg

SEQ ID NO: 225546 - RNA, 32 nt, Human
uauuauguauuuaauaaucacauaacucuuua

SEQ ID NO: 225547 - RNA, 32 nt, Human
uauuauuaagcagacuuaagggccaguggggg

SEQ ID NO: 225548 - RNA, 32 nt, Human
uauuauuaauagcaaccagggccgggugucgu

SEQ ID NO: 225549 - RNA, 32 nt, Human
uauuauuagcuucuaacuuugcacugaguguc

SEQ ID NO: 225550 - RNA, 32 nt, Human
uauuauuauauguauguguuuauauguaugca

SEQ ID NO: 225551 - RNA, 32 nt, Human
uauuauuauuguuuguaaaacaugguucacau

SEQ ID NO: 225552 - RNA, 32 nt, Human
uauuauuauuuguagaaaggcuuuuuaacuuc

SEQ ID NO: 225553 - RNA, 32 nt, Human
uauuauuauuuuuaguagagaugggguuucac

SEQ ID NO: 225554 - RNA, 32 nt, Human
uauuauuauuuuugauuuacuaagccaaugga

SEQ ID NO: 225555 - RNA, 32 nt, Human
uauuauucccuugcucauauaacuuuaaaaau

SEQ ID NO: 225556 - RNA, 32 nt, Human
uauuauugaguuguaagaguccuuuuauagcc

SEQ ID NO: 225557 - RNA, 32 nt, Human
uauuauugccuucuucagcacaauaaggcuuu

SEQ ID NO: 225558 - RNA, 32 nt, Human
uauuauugucugaaaaugaauguaguacugau

SEQ ID NO: 225559 - RNA, 23 nt, Human
uauuauuuacucuuuacuagaca

SEQ ID NO: 225560 - RNA, 32 nt, Human
uauuauuuacuucauuuauuuuuaugagguau

SEQ ID NO: 225561 - RNA, 32 nt, Human
uauuauuuauccacucaggauugaccaccccu

SEQ ID NO: 225562 - RNA, 32 nt, Human
uauuauuucuauaauuggauacucauucuucc

SEQ ID NO: 225563 - RNA, 32 nt, Human
uauuauuugcacagaagaguucuagggagaug

SEQ ID NO: 225564 - RNA, 32 nt, Human
uauuauuugggggaacagaaaaggacaaggaa

SEQ ID NO: 225565 - RNA, 32 nt, Human
uauuauuuguuagaggagugacuugauuugaa

SEQ ID NO: 225566 - RNA, 32 nt, Human
uauuauuuuaaaccugcaugauuguaccaugc

SEQ ID NO: 225567 - RNA, 32 nt, Human
uauuauuuucaucaguaugaucauaauuauga

SEQ ID NO: 225568 - RNA, 32 nt, Human
uauuauuuucaucaugggcuucugccuggcuc

SEQ ID NO: 225569 - RNA, 32 nt, Human
uauuauuuucuaaauuggguuaagucuaagaa

SEQ ID NO: 225570 - RNA, 32 nt, Human
uauuauuuugagacggagucuuacucuguugc

SEQ ID NO: 225571 - RNA, 30 nt, Human
uauuauuuugagacggaguuucgcucuugu

SEQ ID NO: 225572 - RNA, 32 nt, Human
uauuauuuugagacugagucuugcucuaucac

SEQ ID NO: 225573 - RNA, 32 nt, Human
uauuauuuugagauggagucucgcucugucac

SEQ ID NO: 225574 - RNA, 32 nt, Human
uauucaaaaggccaucccuguaaaggcagaaa

SEQ ID NO: 225575 - RNA, 31 nt, Human
uauucaaagacagagaagaccaaagcauugc

SEQ ID NO: 225576 - RNA, 32 nt, Human
uauucaaagcacuuucuuaagcauuuuagaaa

SEQ ID NO: 225577 - RNA, 32 nt, Human
uauucaaauaucuauuuaaagacauuuauauu

SEQ ID NO: 225578 - RNA, 32 nt, Human
uauucaaauccuggguccugagcugcuguuuc

SEQ ID NO: 225579 - RNA, 32 nt, Human
uauucaagaauaaugcauacaauucaguggua

SEQ ID NO: 225580 - RNA, 24 nt, Human
uauucaagcgauucuccugucuca

SEQ ID NO: 225581 - RNA, 32 nt, Human
uauucaagcuaaauguuacugcucucucccaa

SEQ ID NO: 225582 - RNA, 31 nt, Human
uauucaaggaaacuggguagaggcuacauga

SEQ ID NO: 225583 - RNA, 32 nt, Human
uauucaaggaugacucccucccuuccugucua

SEQ ID NO: 225584 - RNA, 32 nt, Human
uauucaaggucugagugccacguggacuucuu

SEQ ID NO: 225585 - RNA, 32 nt, Human
uauucaagugaugcucaugauccuguuacugu

SEQ ID NO: 225586 - RNA, 32 nt, Human
uauucaauaaaacaaaaauuucuagguauuug

SEQ ID NO: 225587 - RNA, 30 nt, Human
uauucaauaaaauaugcacagaacagaaag

SEQ ID NO: 225588 - RNA, 32 nt, Human
uauucaauaagccuggucaauucuauaguuau

SEQ ID NO: 225589 - RNA, 32 nt, Human
uauucaauagguaauaaaaauuaguugucccu

SEQ ID NO: 225590 - RNA, 32 nt, Human
uauucaauuacaaaugggcauuuaguauaguu

SEQ ID NO: 225591 - RNA, 32 nt, Human
uauucaauuagcaaaggagaaacuuucucaau

SEQ ID NO: 225592 - RNA, 32 nt, Human
uauucaauuucaucaagccuuguauacuucug

SEQ ID NO: 225593 - RNA, 32 nt, Human
uauucacacccaugcacgcacacacauacaca

SEQ ID NO: 225594 - RNA, 32 nt, Human
uauucacacuccucugcccucgauuugcauga

SEQ ID NO: 225595 - RNA, 32 nt, Human
uauucacagcaaccuggcagaagagaauguga

SEQ ID NO: 225596 - RNA, 32 nt, Human
uauucacagcacagcacagcagugcugacagc

SEQ ID NO: 225597 - RNA, 32 nt, Human
uauucacagcugcuuggauggcugaggcagga

SEQ ID NO: 225598 - RNA, 32 nt, Human
uauucacauaagauuccuagaagccaccgaau

SEQ ID NO: 225599 - RNA, 32 nt, Human
uauucacauauauaaugagaggaguaguaccu

SEQ ID NO: 225600 - RNA, 32 nt, Human
uauucaccaccaauaaaucagaccaugaaacc

SEQ ID NO: 225601 - RNA, 32 nt, Human
uauucacuccaagaaaaguaacaggcaaggca

SEQ ID NO: 225602 - RNA, 32 nt, Human
uauucacugagucucauggagagaugucuguu

SEQ ID NO: 225603 - RNA, 32 nt, Human
uauucacuuuuuauuaaaacaggaugaggcgu

SEQ ID NO: 225604 - RNA, 32 nt, Human
uauucagaccuaagacagggaggggucagagu

SEQ ID NO: 225605 - RNA, 32 nt, Human
uauucagagagaagaacaaauggcuggcuugg

SEQ ID NO: 225606 - RNA, 32 nt, Human
uauucagaggcagugaugacuugcuguccagg

SEQ ID NO: 225607 - RNA, 32 nt, Human
uauucagauacccucacgccacugcagaagcg

SEQ ID NO: 225608 - RNA, 32 nt, Human
uauucagaucaggagacugagauucagagcag

SEQ ID NO: 225609 - RNA, 32 nt, Human
uauucagcaauaaaaagacaugaagcauugac

SEQ ID NO: 225610 - RNA, 32 nt, Human
uauucagcaaucauaagugcugugcauaacua

SEQ ID NO: 225611 - RNA, 32 nt, Human
uauucagcacaugaaauaaacaaggggcaucc

SEQ ID NO: 225612 - RNA, 32 nt, Human
uauucagcagcagaguuggugacuuugacaac

SEQ ID NO: 225613 - RNA, 31 nt, Human
uauucagcagcuuucugacguggacaucaga

SEQ ID NO: 225614 - RNA, 32 nt, Human
uauucagccugaaagcauuucugccauaguug

SEQ ID NO: 225615 - RNA, 32 nt, Human
uauucaggaaacugaggugggaggaucacuug

SEQ ID NO: 225616 - RNA, 32 nt, Human
uauucaggccaggucuugcuguuguaucaagg

SEQ ID NO: 225617 - RNA, 32 nt, Human
uauucagggaacaccagugaguguucaucugc

SEQ ID NO: 225618 - RNA, 31 nt, Human
uauucagguuggcugugucagaugcuaaugu

SEQ ID NO: 225619 - RNA, 32 nt, Human
uauucagucuuuuauucuuuauaauugugugu

SEQ ID NO: 225620 - RNA, 32 nt, Human
uauucagugagcuaugggguaguguuucacuc

SEQ ID NO: 225621 - RNA, 32 nt, Human
uauucaguguccgaauugaggccauuugggaa

SEQ ID NO: 225622 - RNA, 32 nt, Human
uauucaguugcugcuuacaauaguugauaccc

SEQ ID NO: 225623 - RNA, 32 nt, Human
uauucauaagcuauuuuugguaagaauuuuaa

SEQ ID NO: 225624 - RNA, 32 nt, Human
uauucauaaugucgugugcuuaaaagugggcu

SEQ ID NO: 225625 - RNA, 32 nt, Human
uauucauagucuuuugugaaucauugccuuuu

SEQ ID NO: 225626 - RNA, 32 nt, Human
uauucauauagucagauauauguugucugcuu

SEQ ID NO: 225627 - RNA, 32 nt, Human
uauucauauuaguggccugagagguguuuguu

SEQ ID NO: 225628 - RNA, 32 nt, Human
uauucauauuccucucuguuguguuucggggg

SEQ ID NO: 225629 - RNA, 32 nt, Human
uauucaucaagugcccucuagcuguuaaguca

SEQ ID NO: 225630 - RNA, 32 nt, Human
uauucaucaccuuuguagcauuugacaaauuu

SEQ ID NO: 225631 - RNA, 32 nt, Human
uauucaucagcuugggcugccacagcaccaug

SEQ ID NO: 225632 - RNA, 32 nt, Human
uauucauccaacaagccauaaagccauaaugu

SEQ ID NO: 225633 - RNA, 32 nt, Human
uauucaucccuuaauauccccauuagaauaua

SEQ ID NO: 225634 - RNA, 32 nt, Human
uauucauccuuguuucccuugugggaucaggu

SEQ ID NO: 225635 - RNA, 32 nt, Human
uauucaucugggaggcagaacaggcuucggac

SEQ ID NO: 225636 - RNA, 32 nt, Human
uauucaucuuuaugaacacaucagccuuucaa

SEQ ID NO: 225637 - RNA, 32 nt, Human
uauucaucuuugucuucccucggaucagcuuu

SEQ ID NO: 225638 - RNA, 32 nt, Human
uauucaucuuugugucuccagcaucuaguaca

SEQ ID NO: 225639 - RNA, 32 nt, Human
uauucaugagggugguccugacacaugcguau

SEQ ID NO: 225640 - RNA, 32 nt, Human
uauucauggcagucacagcagggguagaggga

SEQ ID NO: 225641 - RNA, 32 nt, Human
uauucauucaagauuuuuguguccucauuaug

SEQ ID NO: 225642 - RNA, 32 nt, Human
uauucauucccaggaacucuugggguaggugu

SEQ ID NO: 225643 - RNA, 32 nt, Human
uauucauucucucuucuccaucacccauaccc

SEQ ID NO: 225644 - RNA, 32 nt, Human
uauucauugagcauauacuaugugccaagcau

SEQ ID NO: 225645 - RNA, 32 nt, Human
uauucauuguuuggcuucccacccauaagcuc

SEQ ID NO: 225646 - RNA, 32 nt, Human
uauucauuucuauuuucagcauguuucuacca

SEQ ID NO: 225647 - RNA, 32 nt, Human
uauucauuuuacuuuuucauuuuggggugaag

SEQ ID NO: 225648 - RNA, 32 nt, Human
uauuccaaaugagaguaugauggacagauauu

SEQ ID NO: 225649 - RNA, 32 nt, Human
uauuccaaggaacaacaucaguucacuguugu

SEQ ID NO: 225650 - RNA, 23 nt, Human
uauuccacaauuuggaguaaaca

SEQ ID NO: 225651 - RNA, 32 nt, Human
uauuccacccuugugacaugguauuagucaag

SEQ ID NO: 225652 - RNA, 32 nt, Human
uauuccaccugauaauagcccagauucuacug

SEQ ID NO: 225653 - RNA, 32 nt, Human
uauuccaccuguaauagcacuuuggaacugug

SEQ ID NO: 225654 - RNA, 32 nt, Human
uauuccagaacagcaaacuuccugggugaggg

SEQ ID NO: 225655 - RNA, 32 nt, Human
uauuccagacugggugacagagugagacucca

SEQ ID NO: 225656 - RNA, 32 nt, Human
uauuccagaggugggaggugggaggggaaggg

SEQ ID NO: 225657 - RNA, 32 nt, Human
uauuccagcaagaaagaaaagauuguuaugca

SEQ ID NO: 225658 - RNA, 32 nt, Human
uauuccagcaagaaagauugugaugcaagauu

SEQ ID NO: 225659 - RNA, 32 nt, Human
uauuccagcccgggugacagagcaagacugug

SEQ ID NO: 225660 - RNA, 32 nt, Human
uauuccagccuccuccuaagguccuccucagc

SEQ ID NO: 225661 - RNA, 32 nt, Human
uauuccagccuggacgacugagugagacccug

SEQ ID NO: 225662 - RNA, 32 nt, Human
uauuccagccuggaugacaaagcaagacccug

SEQ ID NO: 225663 - RNA, 32 nt, Human
uauuccagccugggugacagagugagauccug

SEQ ID NO: 225664 - RNA, 32 nt, Human
uauuccaggacgagauccaguucuccagcggg

SEQ ID NO: 225665 - RNA, 32 nt, Human
uauuccaggauuguuaaggauccucgcuucca

SEQ ID NO: 225666 - RNA, 32 nt, Human
uauuccagggggcugaggcaggagaauuguuu

SEQ ID NO: 225667 - RNA, 32 nt, Human
uauuccaguagucaguacacuuuucuagauaa

SEQ ID NO: 225668 - RNA, 32 nt, Human
uauuccagucugggugacagagugagacucug

SEQ ID NO: 225669 - RNA, 32 nt, Human
uauuccaucagggaggagucagaggaauuugc

SEQ ID NO: 225670 - RNA, 32 nt, Human
uauuccauccuguaauccuagcacuuuaaaag

SEQ ID NO: 225671 - RNA, 32 nt, Human
uauuccaucucucaagauauauuauaaaauuu

SEQ ID NO: 225672 - RNA, 32 nt, Human
uauuccaucugcuguagcaauggcuaaagggu

SEQ ID NO: 225673 - RNA, 27 nt, Human
uauuccauuaaaucuacugaagcagug

SEQ ID NO: 225674 - RNA, 24 nt, Human
uauuccauuuuuacuaaagcacug

SEQ ID NO: 225675 - RNA, 32 nt, Human
uauucccaacacuuuuggaggcugagguugga

SEQ ID NO: 225676 - RNA, 32 nt, Human
uauucccaauugcacuggcccugggcauggcc

SEQ ID NO: 225677 - RNA, 32 nt, Human
uauucccaccacauacuaggcacuccauaaau

SEQ ID NO: 225678 - RNA, 32 nt, Human
uauucccaccccugggccugaguggggaagga

SEQ ID NO: 225679 - RNA, 32 nt, Human
uauucccagagcuuugggaggcugaggcgaga

SEQ ID NO: 225680 - RNA, 32 nt, Human
uauucccagcacuuugggaggccgaggcaggu

SEQ ID NO: 225681 - RNA, 32 nt, Human
uauucccagcagacacauuuagaaacuaagcu

SEQ ID NO: 225682 - RNA, 32 nt, Human
uauucccagcauuuugggaggcugaggcagga

SEQ ID NO: 225683 - RNA, 32 nt, Human
uauucccagcuacucaugaggcugaggcagga

SEQ ID NO: 225684 - RNA, 32 nt, Human
uauucccagcuacucgggaggcugaggcagga

SEQ ID NO: 225685 - RNA, 32 nt, Human
uauucccagcuacucuggaggcugaggcggag

SEQ ID NO: 225686 - RNA, 32 nt, Human
uauucccagcuacuggggaggcugaggcagga

SEQ ID NO: 225687 - RNA, 32 nt, Human
uauucccagcuacuuggaaggcugagacagga

SEQ ID NO: 225688 - RNA, 32 nt, Human
uauucccagcuacuugggaggcugaggcagga

SEQ ID NO: 225689 - RNA, 32 nt, Human
uauucccagcugcuugggaggcugaggcagga

SEQ ID NO: 225690 - RNA, 32 nt, Human
uauucccagcuucucgggaggcugaggcagga

SEQ ID NO: 225691 - RNA, 32 nt, Human
uauucccaggccaaggagaguccuuccucucc

SEQ ID NO: 225692 - RNA, 32 nt, Human
uauucccaucuacuugggaggcugaggcagga

SEQ ID NO: 225693 - RNA, 18 nt, Human
uauuccccacaguuccca

SEQ ID NO: 225694 - RNA, 32 nt, Human
uauuccccaucugguccaguuccuucacuuac

SEQ ID NO: 225695 - RNA, 32 nt, Human
uauucccccucugccucuccccaccuucuuug

SEQ ID NO: 225696 - RNA, 32 nt, Human
uauuccccuaggcugagccugcucauguaccu

SEQ ID NO: 225697 - RNA, 32 nt, Human
uauuccccugcuccuccaccuuucaaucccuc

SEQ ID NO: 225698 - RNA, 32 nt, Human
uauuccccugggugugcacacagggcgggugu

SEQ ID NO: 225699 - RNA, 32 nt, Human
uauuccccuuucucuuccccacacagccagua

SEQ ID NO: 225700 - RNA, 32 nt, Human
uauucccggccacucgggaggcugaggcagga

SEQ ID NO: 225701 - RNA, 32 nt, Human
uauucccugacccuucacccccaaucaccuca

SEQ ID NO: 225702 - RNA, 32 nt, Human
uauucccuugauaccacucugucuuuaugacu

SEQ ID NO: 225703 - RNA, 32 nt, Human
uauucccuugggcugugguggaaaaaugaggg

SEQ ID NO: 225704 - RNA, 32 nt, Human
uauuccgugccugcugucugcuguaaggcugc

SEQ ID NO: 225705 - RNA, 32 nt, Human
uauuccuacauacuugcugaguucaucuucua

SEQ ID NO: 225706 - RNA, 32 nt, Human
uauuccuagcuacuuugauggcugaggcacaa

SEQ ID NO: 225707 - RNA, 32 nt, Human
uauuccuaucucaaggaugugggguuuaaaug

SEQ ID NO: 225708 - RNA, 27 nt, Human
uauuccuauguguuucuuuggccugug

SEQ ID NO: 225709 - RNA, 32 nt, Human
uauuccuauuggaaacagagagguuuuucuga

SEQ ID NO: 225710 - RNA, 32 nt, Human
uauuccucaaggagucaaccaaccuaugaucu

SEQ ID NO: 225711 - RNA, 32 nt, Human
uauuccucacuccauccagccucuugacaagc

SEQ ID NO: 225712 - RNA, 32 nt, Human
uauuccuccaccucuugcuccaaucagugguc

SEQ ID NO: 225713 - RNA, 32 nt, Human
uauuccuccccacccacccauguuuuuaaacu

SEQ ID NO: 225714 - RNA, 32 nt, Human
uauuccuccccuagcccugacccccugacagg

SEQ ID NO: 225715 - RNA, 32 nt, Human
uauuccuccuccauuccaucgacucccagcac

SEQ ID NO: 225716 - RNA, 32 nt, Human
uauuccucuccuccuccuccuccugggucccc

SEQ ID NO: 225717 - RNA, 32 nt, Human
uauuccucugaaggugaacucuaaagaggaaa

SEQ ID NO: 225718 - RNA, 32 nt, Human
uauuccucuuccaaaucucagcacuuuaaaaa

SEQ ID NO: 225719 - RNA, 32 nt, Human
uauuccucuuccagguaccaucuuuuguugga

SEQ ID NO: 225720 - RNA, 32 nt, Human
uauuccugacaggagcccugaugucuuaaauu

SEQ ID NO: 225721 - RNA, 32 nt, Human
uauuccugaggguuugcuccaccuucucuggu

SEQ ID NO: 225722 - RNA, 32 nt, Human
uauuccugagugggaacugagaagucaagauc

SEQ ID NO: 225723 - RNA, 32 nt, Human
uauuccugaguuuuacucugugacacauuuaa

SEQ ID NO: 225724 - RNA, 32 nt, Human
uauuccugcagaguaacaacacagccuaucua

SEQ ID NO: 225725 - RNA, 32 nt, Human
uauuccugcccccaucaugccccacacccauc

SEQ ID NO: 225726 - RNA, 32 nt, Human
uauuccuggcagugucaggaauauugguuuga

SEQ ID NO: 225727 - RNA, 32 nt, Human
uauuccugucauuccugacugaggcuguugua

SEQ ID NO: 225728 - RNA, 32 nt, Human
uauuccuguuucacauuugccccaaaucuuug

SEQ ID NO: 225729 - RNA, 32 nt, Human
uauuccuguuucauagauuacugugaaacaug

SEQ ID NO: 225730 - RNA, 32 nt, Human
uauuccuguuugguaaccucagucuccuguaa

SEQ ID NO: 225731 - RNA, 32 nt, Human
uauuccuuaaaaggugaaggacccugguccuu

SEQ ID NO: 225732 - RNA, 28 nt, Human
uauuccuuagucucaagggcuagcaucc

SEQ ID NO: 225733 - RNA, 32 nt, Human
uauuccuucccugguccaagcuccuaucuucg

SEQ ID NO: 225734 - RNA, 32 nt, Human
uauuccuucuuguuccucuguauucuaagaau

SEQ ID NO: 225735 - RNA, 32 nt, Human
uauuccuugcuuauuauaauauuauuauucau

SEQ ID NO: 225736 - RNA, 32 nt, Human
uauuccuugggucaaaacuuuugaggugggcu

SEQ ID NO: 225737 - RNA, 32 nt, Human
uauuccuuguucugcucugccacuacuugaau

SEQ ID NO: 225738 - RNA, 32 nt, Human
uauuccuuuguauccucaaggguccuugagaa

SEQ ID NO: 225739 - RNA, 32 nt, Human
uauucgauauuauguacgauggagauugggaa

SEQ ID NO: 225740 - RNA, 32 nt, Human
uauucgaugccauuaaaucaucccgugaccuu

SEQ ID NO: 225741 - RNA, 32 nt, Human
uauucgaugggcucuacguaucaggaagguac

SEQ ID NO: 225742 - RNA, 32 nt, Human
uauucgccguagccuucaaccuggucaagucu

SEQ ID NO: 225743 - RNA, 32 nt, Human
uauucgcggaauggcuuuagaggcagaugaag

SEQ ID NO: 225744 - RNA, 32 nt, Human
uauucgcucuuccuccagccucuggcaaccac

SEQ ID NO: 225745 - RNA, 32 nt, Human
uauucgggagagacuagggcaggcccagcaaa

SEQ ID NO: 225746 - RNA, 32 nt, Human
uauucgggaggcugagacaggagaaucacuug

SEQ ID NO: 225747 - RNA, 32 nt, Human
uauucgggaggcugaggcaggagaaucgcgug

SEQ ID NO: 225748 - RNA, 32 nt, Human
uauucgggaggcugaggcaggagaauugcuug

SEQ ID NO: 225749 - RNA, 32 nt, Human
uauucggggugaguaaguaguuggguauaaga

SEQ ID NO: 225750 - RNA, 32 nt, Human
uauucguaaggaugggaaggagggagguauuc

SEQ ID NO: 225751 - RNA, 32 nt, Human
uauucguccuguaggugcugugguggauggac

SEQ ID NO: 225752 - RNA, 32 nt, Human
uauucguugguaucugaaggggauugguucca

SEQ ID NO: 225753 - RNA, 32 nt, Human
uauucuaaaccagcugaugcugucaguguuca

SEQ ID NO: 225754 - RNA, 32 nt, Human
uauucuaauccaaaaguuaccccacacaaaag

SEQ ID NO: 225755 - RNA, 32 nt, Human
uauucuacaaauuccagccuucuguggucgcu

SEQ ID NO: 225756 - RNA, 32 nt, Human
uauucuacauauagugccuauaugacaaaauc

SEQ ID NO: 225757 - RNA, 32 nt, Human
uauucuacaugcuguaacuaucaggacauggu

SEQ ID NO: 225758 - RNA, 32 nt, Human
uauucuacauuuccucauuucucuacaccguc

SEQ ID NO: 225759 - RNA, 32 nt, Human
uauucuacucaaacuuaugucucagaguuccc

SEQ ID NO: 225760 - RNA, 32 nt, Human
uauucuacugccucuaggccaggguaguccua

SEQ ID NO: 225761 - RNA, 32 nt, Human
uauucuagcacagugccuugccuagaguagua

SEQ ID NO: 225762 - RNA, 32 nt, Human
uauucuagcuacucaggaggcugagaugggag

SEQ ID NO: 225763 - RNA, 32 nt, Human
uauucuaugccuauucccuccuaauuuaaggg

SEQ ID NO: 225764 - RNA, 32 nt, Human
uauucuauuuccucaucucccuaaccacuaau

SEQ ID NO: 225765 - RNA, 32 nt, Human
uauucucaacaucuguuuuugguguuaagcua

SEQ ID NO: 225766 - RNA, 32 nt, Human
uauucucagacacugcucuaguaccauuccuu

SEQ ID NO: 225767 - RNA, 32 nt, Human
uauucucagcuacucgggaggcugaggcagga

SEQ ID NO: 225768 - RNA, 32 nt, Human
uauucucaucuucccccacccuugccacuacc

SEQ ID NO: 225769 - RNA, 32 nt, Human
uauucucaugagcucauccaagccaagguugg

SEQ ID NO: 225770 - RNA, 32 nt, Human
uauucucauucuucccaacuugccuuugaaga

SEQ ID NO: 225771 - RNA, 32 nt, Human
uauucucauuuauuuugcuauacaggauguaa

SEQ ID NO: 225772 - RNA, 32 nt, Human
uauucucauuuuccuuuuaccuuucuccacca

SEQ ID NO: 225773 - RNA, 32 nt, Human
uauucuccaagaggaggagggcgacgccaagg

SEQ ID NO: 225774 - RNA, 32 nt, Human
uauucuccaccugagaauucacccaugagaga

SEQ ID NO: 225775 - RNA, 32 nt, Human
uauucuccucaucuccccaucauugguaccca

SEQ ID NO: 225776 - RNA, 32 nt, Human
uauucucuaaacuggcaucugcucuagauuca

SEQ ID NO: 225777 - RNA, 32 nt, Human
uauucucucagugccuuacagcagguuacucc

SEQ ID NO: 225778 - RNA, 32 nt, Human
uauucucucuccuuugcuuuccuugaagucag

SEQ ID NO: 225779 - RNA, 32 nt, Human
uauucucugcuccacugcccucucaccccggu

SEQ ID NO: 225780 - RNA, 32 nt, Human
uauucucugcugcaucuuacagaagaguaaac

SEQ ID NO: 225781 - RNA, 32 nt, Human
uauucucugcuguccucuguugucuuugucuu

SEQ ID NO: 225782 - RNA, 32 nt, Human
uauucucuggcuguauuuccagcaguuaugaa

SEQ ID NO: 225783 - RNA, 32 nt, Human
uauucucugggcaggcauuucaaguuuccuuu

SEQ ID NO: 225784 - RNA, 32 nt, Human
uauucucuuaaaaaucaaagaugaucucuauc

SEQ ID NO: 225785 - RNA, 32 nt, Human
uauucucuucuuucucccccacaccuaucugg

SEQ ID NO: 225786 - RNA, 32 nt, Human
uauucucuugguacuucagccuauuuaccaua

SEQ ID NO: 225787 - RNA, 32 nt, Human
uauucucuuugaagcaauugugaaugggaguu

SEQ ID NO: 225788 - RNA, 32 nt, Human
uauucugaaggugaaagauaccagagauucuc

SEQ ID NO: 225789 - RNA, 32 nt, Human
uauucugaaugugguuucugucuuagaccagg

SEQ ID NO: 225790 - RNA, 32 nt, Human
uauucugaauuuccaccugcccgccccuucgc

SEQ ID NO: 225791 - RNA, 32 nt, Human
uauucugacuuuaaauccuuugcucagacaca

SEQ ID NO: 225792 - RNA, 32 nt, Human
uauucugacuuuccacauacugucuuuaaaaa

SEQ ID NO: 225793 - RNA, 32 nt, Human
uauucugagaucuguagaugcuuagaauauca

SEQ ID NO: 225794 - RNA, 32 nt, Human
uauucugaggcugccuuggauggccucaggcc

SEQ ID NO: 225795 - RNA, 32 nt, Human
uauucugaguauggugauauuaaacauuuuuc

SEQ ID NO: 225796 - RNA, 32 nt, Human
uauucugaucuuuggcuuacuacuccauugca

SEQ ID NO: 225797 - RNA, 32 nt, Human
uauucugaugaugccacuacugcccagaacuc

SEQ ID NO: 225798 - RNA, 32 nt, Human
uauucugcacccaggguauagauaguagcccu

SEQ ID NO: 225799 - RNA, 32 nt, Human
uauucugcacuguucaguuuuauggaggaaaa

SEQ ID NO: 225800 - RNA, 32 nt, Human
uauucugcagugacuaugggaaagccuugaau

SEQ ID NO: 225801 - RNA, 32 nt, Human
uauucugccacauuugccacccucugagccca

SEQ ID NO: 225802 - RNA, 32 nt, Human
uauucugcucacauaucugucauuugagcagg

SEQ ID NO: 225803 - RNA, 32 nt, Human
uauucugcuccuagcagagugaccucaggcaa

SEQ ID NO: 225804 - RNA, 32 nt, Human
uauucugcucuaauacuguacuguguagugug

SEQ ID NO: 225805 - RNA, 32 nt, Human
uauucugcugucuggcuucaugccauugcaug

SEQ ID NO: 225806 - RNA, 32 nt, Human
uauucugcuuuucuagcuguuuuuaccuaguu

SEQ ID NO: 225807 - RNA, 32 nt, Human
uauucuggagcuuuguuaugaguugcagguua

SEQ ID NO: 225808 - RNA, 32 nt, Human
uauucuggauucacagcugcugaggaggagga

SEQ ID NO: 225809 - RNA, 32 nt, Human
uauucuguauagcacccuaaucugcuguagac

SEQ ID NO: 225810 - RNA, 32 nt, Human
uauucugucagcugaauauggaagagaucuuu

SEQ ID NO: 225811 - RNA, 32 nt, Human
uauucuguccuccaggcuggagugcaaugaca

SEQ ID NO: 225812 - RNA, 32 nt, Human
uauucuguccuguuugacauuuuuauugacuu

SEQ ID NO: 225813 - RNA, 32 nt, Human
uauucugugcaaccccucccaacccuucuucc

SEQ ID NO: 225814 - RNA, 32 nt, Human
uauucuguguuuucucuuggcucuuugggucu

SEQ ID NO: 225815 - RNA, 32 nt, Human
uauucuguucacugcuguauaucugcagcccu

SEQ ID NO: 225816 - RNA, 32 nt, Human
uauucuguucucaaauaaagcagugucacuag

SEQ ID NO: 225817 - RNA, 32 nt, Human
uauucuguugacagccagcucacaguuucuug

SEQ ID NO: 225818 - RNA, 32 nt, Human
uauucuguugacuaugagaaaguuaaaguuua

SEQ ID NO: 225819 - RNA, 25 nt, Human
uauucuuacuuuguauguuguguug

SEQ ID NO: 225820 - RNA, 32 nt, Human
uauucuuagcagugacuuauuaucuguugaag

SEQ ID NO: 225821 - RNA, 32 nt, Human
uauucuucaaccugcugacuucccucuggauu

SEQ ID NO: 225822 - RNA, 32 nt, Human
uauucuucacugaggauuucugaucugauuuu

SEQ ID NO: 225823 - RNA, 32 nt, Human
uauucuucaguggaugccagcuucccugcccc

SEQ ID NO: 225824 - RNA, 32 nt, Human
uauucuucauuuucuucuugauucagggcuuc

SEQ ID NO: 225825 - RNA, 32 nt, Human
uauucuuccaucuucauugucuuaccucugaa

SEQ ID NO: 225826 - RNA, 32 nt, Human
uauucuucuagucuucugaguuucuggucuuu

SEQ ID NO: 225827 - RNA, 32 nt, Human
uauucuucucagacccucagaaagacauccaa

SEQ ID NO: 225828 - RNA, 32 nt, Human
uauucuucugcugcugcuuauuaaauaaagaa

SEQ ID NO: 225829 - RNA, 32 nt, Human
uauucuucuuccagacacucucuguuucugcu

SEQ ID NO: 225830 - RNA, 22 nt, Human
uauucuugaagcacuccaccca

SEQ ID NO: 225831 - RNA, 32 nt, Human
uauucuugcauuuuucuagcugcagcaugcca

SEQ ID NO: 225832 - RNA, 15 nt, Human
uauucuuggacaguu

SEQ ID NO: 225833 - RNA, 32 nt, Human
uauucuugguauaaaggcuucuccggaucagu

SEQ ID NO: 225834 - RNA, 32 nt, Human
uauucuuuauuccaguguggcauaugugcccc

SEQ ID NO: 225835 - RNA, 30 nt, Human
uauucuuucaauaaauagccuucugaguug

SEQ ID NO: 225836 - RNA, 32 nt, Human
uauucuuuccagaggcuuccuucugccugccu

SEQ ID NO: 225837 - RNA, 32 nt, Human
uauucuuugacugacugaccucauuccacugg

SEQ ID NO: 225838 - RNA, 32 nt, Human
uauucuuugagacuauccugaacuugaaaucc

SEQ ID NO: 225839 - RNA, 32 nt, Human
uauucuuugccucuuuccugagccucuugcuu

SEQ ID NO: 225840 - RNA, 32 nt, Human
uauucuuuggcauugguguccauggcccuaua

SEQ ID NO: 225841 - RNA, 32 nt, Human
uauucuuuguuuccuuucccuccucuguuuuu

SEQ ID NO: 225842 - RNA, 32 nt, Human
uauucuuuuccacugcuugcagucuccaaugu

SEQ ID NO: 225843 - RNA, 32 nt, Human
uauucuuuugagacagucuggcucugcugccc

SEQ ID NO: 225844 - RNA, 32 nt, Human
uauucuuuugagauggaguuucacucuuguca

SEQ ID NO: 225845 - RNA, 32 nt, Human
uauucuuuuguucuaaaaaucucuuaugggau

SEQ ID NO: 225846 - RNA, 32 nt, Human
uauucuuuuugcuuaggauugcacuggcuuug

SEQ ID NO: 225847 - RNA, 32 nt, Human
uauucuuuuuguggcaguugugaaugggauua

SEQ ID NO: 225848 - RNA, 32 nt, Human
uauugaaaacuagauaaacugcuccaaaccaa

SEQ ID NO: 225849 - RNA, 32 nt, Human
uauugaaacaauuggagaaauucuaaagaaaa

SEQ ID NO: 225850 - RNA, 32 nt, Human
uauugaaaggcaguuuuaccaggccucaagcu

SEQ ID NO: 225851 - RNA, 32 nt, Human
uauugaaauucuaacccucaaugugaugguau

SEQ ID NO: 225852 - RNA, 32 nt, Human
uauugaacacaagugaguuuuauuaucaggaa

SEQ ID NO: 225853 - RNA, 32 nt, Human
uauugaacugucucccugugccuuuauaauau

SEQ ID NO: 225854 - RNA, 32 nt, Human
uauugaagacagcagacaggcccggacugaga

SEQ ID NO: 225855 - RNA, 32 nt, Human
uauugaagcuguucuuuuaaacuacaaggaag

SEQ ID NO: 225856 - RNA, 32 nt, Human
uauugaaggagagaaucagagcaagugauaau

SEQ ID NO: 225857 - RNA, 30 nt, Human
uauugaaguauccauagggcacaauuuuca

SEQ ID NO: 225858 - RNA, 32 nt, Human
uauugaauauggaggaucugauagugguaggu

SEQ ID NO: 225859 - RNA, 32 nt, Human
uauugaaucucuacccucucccaccacacagu

SEQ ID NO: 225860 - RNA, 32 nt, Human
uauugaaugccuuuugauuuagccagagucuc

SEQ ID NO: 225861 - RNA, 32 nt, Human
uauugaauuggacacuuugaaauggugaauuu

SEQ ID NO: 225862 - RNA, 32 nt, Human
uauugacaaacucucccuucacuccgaaaguu

SEQ ID NO: 225863 - RNA, 32 nt, Human
uauugacagccuugcuguuagaggcucuuucc

SEQ ID NO: 225864 - RNA, 32 nt, Human
uauugacaggagaagguuuaaauguucuugaa

SEQ ID NO: 225865 - RNA, 32 nt, Human
uauugaccgagcacauaccaugugccacacac

SEQ ID NO: 225866 - RNA, 32 nt, Human
uauugaccuggugcaagaaacaugcucuggug

SEQ ID NO: 225867 - RNA, 32 nt, Human
uauugacuacuauucagcacugccuucaauau

SEQ ID NO: 225868 - RNA, 32 nt, Human
uauugacuccuaucuggccuucaucaacugac

SEQ ID NO: 225869 - RNA, 31 nt, Human
uauugagaaagaccuguugcuagaaguuggg

SEQ ID NO: 225870 - RNA, 32 nt, Human
uauugagaaagggagagugggaaugugaagug

SEQ ID NO: 225871 - RNA, 32 nt, Human
uauugagaacagcaaaaauaucugaccaaaaa

SEQ ID NO: 225872 - RNA, 32 nt, Human
uauugagacuccugucucuccaaaacaauaaa

SEQ ID NO: 225873 - RNA, 32 nt, Human
uauugagagauagauuuuacucugauuagaaa

SEQ ID NO: 225874 - RNA, 32 nt, Human
uauugagaggccauaguaccuccuguuugaag

SEQ ID NO: 225875 - RNA, 32 nt, Human
uauugagcagagggacugugcuucuaugcacu

SEQ ID NO: 225876 - RNA, 32 nt, Human
uauugagccugauggcccagguauugagggcc

SEQ ID NO: 225877 - RNA, 32 nt, Human
uauugagcugaguuuucauuuugauuuuguua

SEQ ID NO: 225878 - RNA, 32 nt, Human
uauugagcuguugccucucugaguacucaggc

SEQ ID NO: 225879 - RNA, 32 nt, Human
uauugaggaggucacuaauuaguuggugcagu

SEQ ID NO: 225880 - RNA, 32 nt, Human
uauugaggcugcagcaggugcugggcuggacu

SEQ ID NO: 225881 - RNA, 32 nt, Human
uauugagggaguauauguauccaucucaguga

SEQ ID NO: 225882 - RNA, 32 nt, Human
uauugaggggcgaguagcagcucugcagacag

SEQ ID NO: 225883 - RNA, 32 nt, Human
uauugaguuuggauuaaaauguugacaugauu

SEQ ID NO: 225884 - RNA, 32 nt, Human
uauugaguuuguggaacccugccucuuccugc

SEQ ID NO: 225885 - RNA, 32 nt, Human
uauugauaaagcaaagcuaacuguguguuuag

SEQ ID NO: 225886 - RNA, 32 nt, Human
uauugauaagccauauauuaagaggaguauuu

SEQ ID NO: 225887 - RNA, 32 nt, Human
uauugauaagccauuuauuaaaaggaguauuu

SEQ ID NO: 225888 - RNA, 32 nt, Human
uauugauacaaacugugaccucagcuucagag

SEQ ID NO: 225889 - RNA, 32 nt, Human
uauugauacaauauugugcaugcuaguguugu

SEQ ID NO: 225890 - RNA, 32 nt, Human
uauugauacuuugcuauugauaccuuuacuug

SEQ ID NO: 225891 - RNA, 32 nt, Human
uauugaucacuauagaagcaaaagccaaauca

SEQ ID NO: 225892 - RNA, 32 nt, Human
uauugauccuccugucuccaccucccgaguug

SEQ ID NO: 225893 - RNA, 32 nt, Human
uauugaucuacuucuguaauuguguggauucu

SEQ ID NO: 225894 - RNA, 32 nt, Human
uauugaucuccacggaagccccaaacccucgc

SEQ ID NO: 225895 - RNA, 32 nt, Human
uauugaugaauaacuauccagcacucaccaug

SEQ ID NO: 225896 - RNA, 32 nt, Human
uauugaugagaagaaaaggcucaggggugagg

SEQ ID NO: 225897 - RNA, 32 nt, Human
uauugauggagucugcauuccaccacauaucc

SEQ ID NO: 225898 - RNA, 32 nt, Human
uauugauguaaggguuuccuggacacucauga

SEQ ID NO: 225899 - RNA, 32 nt, Human
uauugauguggcccuggcugccggcacggccc

SEQ ID NO: 225900 - RNA, 32 nt, Human
uauugauguguucggguuuccuuucccaagcc

SEQ ID NO: 225901 - RNA, 32 nt, Human
uauugauucaaaugucagcagcuuuaagccua

SEQ ID NO: 225902 - RNA, 32 nt, Human
uauugauugagcaucuacaaugugccaguugu

SEQ ID NO: 225903 - RNA, 32 nt, Human
uauugauuguguccaaagccucccgaggaccu

SEQ ID NO: 225904 - RNA, 32 nt, Human
uauugauuuuacuggcacuguauuuggaccug

SEQ ID NO: 225905 - RNA, 32 nt, Human
uauugauuuuaucuuuuccuuucaggguuuug

SEQ ID NO: 225906 - RNA, 32 nt, Human
uauugcaaaagauacagugccagaacagaaaa

SEQ ID NO: 225907 - RNA, 32 nt, Human
uauugcaaagucuguauuccagcucuuaagaa

SEQ ID NO: 225908 - RNA, 32 nt, Human
uauugcaauagagaguagaaauugagcuccac

SEQ ID NO: 225909 - RNA, 32 nt, Human
uauugcacauuugaaaacacacuaagagaagc

SEQ ID NO: 225910 - RNA, 32 nt, Human
uauugcaccacugaacuccagccugggccaca

SEQ ID NO: 225911 - RNA, 32 nt, Human
uauugcaccacugcucuccaagcugggcaaug

SEQ ID NO: 225912 - RNA, 32 nt, Human
uauugcaccauugcacuccugccugggcaaca

SEQ ID NO: 225913 - RNA, 32 nt, Human
uauugcacuacugcauuccagccugggugaca

SEQ ID NO: 225914 - RNA, 32 nt, Human
uauugcaggccagcaggcccucaguagguccu

SEQ ID NO: 225915 - RNA, 32 nt, Human
uauugcaggcuccacuccagaucaccacaaua

SEQ ID NO: 225916 - RNA, 32 nt, Human
uauugcagguuucccuguauaacguaaacaca

SEQ ID NO: 225917 - RNA, 32 nt, Human
uauugcagugugaaugcugggccccugcucaa

SEQ ID NO: 225918 - RNA, 32 nt, Human
uauugcaucaaugaauuaaaacaaaaaucuug

SEQ ID NO: 225919 - RNA, 32 nt, Human
uauugccaaaaaucaaaaaucauucccugaaa

SEQ ID NO: 225920 - RNA, 32 nt, Human
uauugccaaaacugggaaguugaaggaagccc

SEQ ID NO: 225921 - RNA, 32 nt, Human
uauugccaagggagcaaagcaugaugacaaug

SEQ ID NO: 225922 - RNA, 32 nt, Human
uauugccaccaaauuauuuauaguucugcggg

SEQ ID NO: 225923 - RNA, 32 nt, Human
uauugccaccuuccagcucuaacauuaauguc

SEQ ID NO: 225924 - RNA, 32 nt, Human
uauugccagcuacucggaaggcugaggcagga

SEQ ID NO: 225925 - RNA, 32 nt, Human
uauugccaggaaaauauaaggaaauacuguua

SEQ ID NO: 225926 - RNA, 32 nt, Human
uauugccaggagauacugaaaaucauccagaa

SEQ ID NO: 225927 - RNA, 32 nt, Human
uauugcccagccacaggcucucaaccaccaac

SEQ ID NO: 225928 - RNA, 21 nt, Human
uauugcccaggcuggagugca

SEQ ID NO: 225929 - RNA, 23 nt, Human
uauugcccaggcuggagugcagu

SEQ ID NO: 225930 - RNA, 32 nt, Human
uauugccccaggagccaggcccagccugcacc

SEQ ID NO: 225931 - RNA, 32 nt, Human
uauugccccucucuccccugacaaccacuaau

SEQ ID NO: 225932 - RNA, 32 nt, Human
uauugcccuaaucaugcuaagagacuauuauu

SEQ ID NO: 225933 - RNA, 32 nt, Human
uauugcccugccaccacuaucucuagucuccc

SEQ ID NO: 225934 - RNA, 32 nt, Human
uauugccgaucugccauguauuccagaaaggc

SEQ ID NO: 225935 - RNA, 19 nt, Human
uauugccgucaucuguuua

SEQ ID NO: 225936 - RNA, 32 nt, Human
uauugccuaguugacaacauugcuugaaugcu

SEQ ID NO: 225937 - RNA, 28 nt, Human
uauugccugcaugcugccugaucuugcg

SEQ ID NO: 225938 - RNA, 32 nt, Human
uauugcgcguuucucuuccuugcugacucucc

SEQ ID NO: 225939 - RNA, 32 nt, Human
uauugcuacucauuaacaaugcaccugguuac

SEQ ID NO: 225940 - RNA, 32 nt, Human
uauugcuagguagaauuuguacuuguuuucuu

SEQ ID NO: 225941 - RNA, 32 nt, Human
uauugcucacccagacaccaugugcaaugaca

SEQ ID NO: 225942 - RNA, 32 nt, Human
uauugcucacugcagccccucugccccuaucc

SEQ ID NO: 225943 - RNA, 32 nt, Human
uauugcucauuuccuucucuacccaaccugag

SEQ ID NO: 225944 - RNA, 32 nt, Human
uauugcugcuggggcuccccauuugcuuacuu

SEQ ID NO: 225945 - RNA, 32 nt, Human
uauugcugggcugggacaugaggcaggcagag

SEQ ID NO: 225946 - RNA, 32 nt, Human
uauugcugggguuagccaggagcaguguggau

SEQ ID NO: 225947 - RNA, 32 nt, Human
uauugcuuccuugcgcaacuucucaaaacgau

SEQ ID NO: 225948 - RNA, 32 nt, Human
uauugcuucucccuuuaguucugcugucuccc

SEQ ID NO: 225949 - RNA, 32 nt, Human
uauugcuucuguuuggacaaaauccacaucuu

SEQ ID NO: 225950 - RNA, 32 nt, Human
uauugcuuugauuucucccaaagaauaacuug

SEQ ID NO: 225951 - RNA, 32 nt, Human
uauuggaaauacaggcaugagccacugcuccu

SEQ ID NO: 225952 - RNA, 32 nt, Human
uauuggaagaggcagagccugaggugguagga

SEQ ID NO: 225953 - RNA, 32 nt, Human
uauuggaaugauuauauagaaaaugcucuuaa

SEQ ID NO: 225954 - RNA, 32 nt, Human
uauuggaauucuaugggagugaucucacugag

SEQ ID NO: 225955 - RNA, 32 nt, Human
uauuggacaacaaaacacucuuucaguuguga

SEQ ID NO: 225956 - RNA, 32 nt, Human
uauuggaccaaauuugguguuuguuuucaccu

SEQ ID NO: 225957 - RNA, 32 nt, Human
uauuggaccagaaacacucacaugucacuucc

SEQ ID NO: 225958 - RNA, 32 nt, Human
uauuggaccucuuccaucauggaaaggaaaga

SEQ ID NO: 225959 - RNA, 32 nt, Human
uauuggacuucucugcugucagucuuuguuuc

SEQ ID NO: 225960 - RNA, 32 nt, Human
uauuggagacaggguuucaccauguuggccag

SEQ ID NO: 225961 - RNA, 32 nt, Human
uauuggagacgggguuucacuguguuagccag

SEQ ID NO: 225962 - RNA, 32 nt, Human
uauuggaguaacucaaauugccugaggaaaaa

SEQ ID NO: 225963 - RNA, 32 nt, Human
uauuggaugcagagaagaucugcucggaauug

SEQ ID NO: 225964 - RNA, 32 nt, Human
uauuggcaacacagacagccgauucuuuacaa

SEQ ID NO: 225965 - RNA, 32 nt, Human
uauuggcaauguagccuggugcuucaugagac

SEQ ID NO: 225966 - RNA, 21 nt, Human
uauuggcacccuuuacuaaca

SEQ ID NO: 225967 - RNA, 32 nt, Human
uauuggcagcacagcuacucagaucugcacuc

SEQ ID NO: 225968 - RNA, 32 nt, Human
uauuggcauguagcuacaaauauuaaaggagg

SEQ ID NO: 225969 - RNA, 22 nt, Human
uauuggcauuuaauauuggaca

SEQ ID NO: 225970 - RNA, 32 nt, Human
uauuggccauuuucuuuuucuuuuucuuuauu

SEQ ID NO: 225971 - RNA, 32 nt, Human
uauuggcccuccugccuuccuuggggcucccc

SEQ ID NO: 225972 - RNA, 32 nt, Human
uauuggccuaaggggcugacuggggaggguca

SEQ ID NO: 225973 - RNA, 32 nt, Human
uauuggcggaaaggaaaauacagcggaaaaau

SEQ ID NO: 225974 - RNA, 32 nt, Human
uauuggcuacauaaucacuccaugcggugggc

SEQ ID NO: 225975 - RNA, 32 nt, Human
uauuggcucacugcaaccucugccuucugggu

SEQ ID NO: 225976 - RNA, 32 nt, Human
uauuggcucacugcagccucugcuccccagua

SEQ ID NO: 225977 - RNA, 32 nt, Human
uauuggcuguucuguugaaugucauaucuuac

SEQ ID NO: 225978 - RNA, 32 nt, Human
uauuggcuuuaugaugugaucaaacauaccug

SEQ ID NO: 225979 - RNA, 32 nt, Human
uauugggaaaucaaguggcuuaucauguauau

SEQ ID NO: 225980 - RNA, 32 nt, Human
uauugggacaaaaggcaagauggcaccauucu

SEQ ID NO: 225981 - RNA, 32 nt, Human
uauugggagcuaggagucugaaccugaaguau

SEQ ID NO: 225982 - RNA, 32 nt, Human
uauugggaggccgaggcgggaggaucacaaag

SEQ ID NO: 225983 - RNA, 32 nt, Human
uauugggaugucugauauuugagagcccgaag

SEQ ID NO: 225984 - RNA, 32 nt, Human
uauugggcaaaugaacuugaucuuccacaucu

SEQ ID NO: 225985 - RNA, 32 nt, Human
uauuggggcacacccaugcucacccuuuuaaa

SEQ ID NO: 225986 - RNA, 32 nt, Human
uauugggggaaucagagcccauuccacaccga

SEQ ID NO: 225987 - RNA, 32 nt, Human
uauugggggaggaagagagggaggcacguagg

SEQ ID NO: 225988 - RNA, 32 nt, Human
uauugggguuaggagaaaagacuagacaauua

SEQ ID NO: 225989 - RNA, 32 nt, Human
uauugggucuauugggcucugugggaagguau

SEQ ID NO: 225990 - RNA, 32 nt, Human
uauugggucugaguuucagggguggggcccca

SEQ ID NO: 225991 - RNA, 25 nt, Human
uauuggguuccuccuauucuugcca

SEQ ID NO: 225992 - RNA, 25 nt, Human
uauugguauauucacagacuguaga

SEQ ID NO: 225993 - RNA, 32 nt, Human
uauugguaucaaaagggauaaaagccaauuug

SEQ ID NO: 225994 - RNA, 32 nt, Human
uauuggucaccuaccucggcaguagggcagac

SEQ ID NO: 225995 - RNA, 32 nt, Human
uauugguccucauggaagaagagcaagauuua

SEQ ID NO: 225996 - RNA, 32 nt, Human
uauugguccuucucucauucuccgaacuuacu

SEQ ID NO: 225997 - RNA, 32 nt, Human
uauuggucucugcuuaaaauggcuugaagucc

SEQ ID NO: 225998 - RNA, 23 nt, Human
uauuggugagaauuaaacagcug

SEQ ID NO: 225999 - RNA, 32 nt, Human
uauuggugcgcuccagccgggcagguuuugag

SEQ ID NO: 226000 - RNA, 32 nt, Human
uauugguggcaccuggaggacaugcaccaagg

SEQ ID NO: 226001 - RNA, 32 nt, Human
uauugguggugaagcgccgcucuccuugacag

SEQ ID NO: 226002 - RNA, 32 nt, Human
uauugguucuuucuguaccauuuaaguauagu

SEQ ID NO: 226003 - RNA, 32 nt, Human
uauugguugugcuuuauauuugccaaaguccu

SEQ ID NO: 226004 - RNA, 32 nt, Human
uauuguaaauagugagcuaaaccucaaauuuc

SEQ ID NO: 226005 - RNA, 32 nt, Human
uauuguaacuuaggaggugaacgaccuaagau

SEQ ID NO: 226006 - RNA, 32 nt, Human
uauuguaauauauuucuguuauuuauagaugu

SEQ ID NO: 226007 - RNA, 32 nt, Human
uauuguaccuuuuaacaccugauguguacauc

SEQ ID NO: 226008 - RNA, 32 nt, Human
uauuguacgccgcccggcaggccugccgccua

SEQ ID NO: 226009 - RNA, 32 nt, Human
uauuguagaaggauuuuucucaugcucuuaua

SEQ ID NO: 226010 - RNA, 32 nt, Human
uauuguagauaagaggaaaagacugagcaugc

SEQ ID NO: 226011 - RNA, 32 nt, Human
uauuguauagucaauguuaaauaaaagccaaa

SEQ ID NO: 226012 - RNA, 32 nt, Human
uauuguaucucuucacuucugugaaaguaaua

SEQ ID NO: 226013 - RNA, 32 nt, Human
uauuguauuaccuguaaauugauuuacaagua

SEQ ID NO: 226014 - RNA, 32 nt, Human
uauuguauuggccaucccuuguuucauauucg

SEQ ID NO: 226015 - RNA, 32 nt, Human
uauuguauuugugguuguugagaggcauuuuc

SEQ ID NO: 226016 - RNA, 32 nt, Human
uauugucacaacacugaaccucuggcuagagg

SEQ ID NO: 226017 - RNA, 32 nt, Human
uauugucauuauuuccuucuucuacaucaggu

SEQ ID NO: 226018 - RNA, 32 nt, Human
uauuguccauucagaaaugugugacccuucau

SEQ ID NO: 226019 - RNA, 32 nt, Human
uauugucccaucuucacccccauuccagagca

SEQ ID NO: 226020 - RNA, 32 nt, Human
uauuguccuaaagaggguacauuggauuuuaa

SEQ ID NO: 226021 - RNA, 32 nt, Human
uauuguccuccuccuccuggcucggccucccu

SEQ ID NO: 226022 - RNA, 32 nt, Human
uauuguccucuuggcauaugcuucuggaauaa

SEQ ID NO: 226023 - RNA, 32 nt, Human
uauuguccuguugccaaacaaaagccagucau

SEQ ID NO: 226024 - RNA, 32 nt, Human
uauugucucucagaguugcaaacuagauugua

SEQ ID NO: 226025 - RNA, 32 nt, Human
uauugucucuuguagaggaaacuaauaaagug

SEQ ID NO: 226026 - RNA, 32 nt, Human
uauugucucuuuauaaaugucauuuuacaaau

SEQ ID NO: 226027 - RNA, 32 nt, Human
uauugucugaaaucccagaggacccauaagug

SEQ ID NO: 226028 - RNA, 32 nt, Human
uauugugaacugccuucucuucaucccaacau

SEQ ID NO: 226029 - RNA, 32 nt, Human
uauugugaccacaggcugguguguagguggua

SEQ ID NO: 226030 - RNA, 32 nt, Human
uauugugagaacacauuuagucaguuuggguu

SEQ ID NO: 226031 - RNA, 32 nt, Human
uauugugaggauaaaauaaaaggugugacauu

SEQ ID NO: 226032 - RNA, 32 nt, Human
uauugugaguaugaaaaagguuuuaaucagug

SEQ ID NO: 226033 - RNA, 32 nt, Human
uauugugauaaauauauuugaucauuaaugug

SEQ ID NO: 226034 - RNA, 32 nt, Human
uauugugauccccaagacuccagaccucagag

SEQ ID NO: 226035 - RNA, 32 nt, Human
uauugugauggaaaggcuguguggaaauucau

SEQ ID NO: 226036 - RNA, 32 nt, Human
uauugugauucuguuuauucuuccagaaugcu

SEQ ID NO: 226037 - RNA, 32 nt, Human
uauugugcaguaaaccuaaaagguaguggaga

SEQ ID NO: 226038 - RNA, 32 nt, Human
uauugugcauaacagauuguuccucuuauauu

SEQ ID NO: 226039 - RNA, 32 nt, Human
uauugugccacugcacuccagccugggcgaca

SEQ ID NO: 226040 - RNA, 32 nt, Human
uauugugcugggucccagccugguuugcaaag

SEQ ID NO: 226041 - RNA, 32 nt, Human
uauuguggcccaugcccuccuccugaguucuu

SEQ ID NO: 226042 - RNA, 32 nt, Human
uauuguggcccuggguccucuaccucucacga

SEQ ID NO: 226043 - RNA, 32 nt, Human
uauuguggcuuuuguauuucugcuucagugga

SEQ ID NO: 226044 - RNA, 32 nt, Human
uauugugggacagugggaauagcagcuuguag

SEQ ID NO: 226045 - RNA, 32 nt, Human
uauugugguguggcuucauuucucagagaaga

SEQ ID NO: 226046 - RNA, 32 nt, Human
uauugugucuaggggagaagauaaaaauauca

SEQ ID NO: 226047 - RNA, 32 nt, Human
uauugugugauuuuccggcugaucagaagugu

SEQ ID NO: 226048 - RNA, 32 nt, Human
uauugugugguuuucucuuuuugucuuuuuga

SEQ ID NO: 226049 - RNA, 32 nt, Human
uauuguguuacuugaccuuauuuuggaaguuu

SEQ ID NO: 226050 - RNA, 32 nt, Human
uauuguguuuuccauggugcuacaguuacaca

SEQ ID NO: 226051 - RNA, 32 nt, Human
uauuguuaaaaccuuacuuaaagcuuguuugu

SEQ ID NO: 226052 - RNA, 32 nt, Human
uauuguuaaaagucucucaaauuaggccagau

SEQ ID NO: 226053 - RNA, 32 nt, Human
uauuguuaauaucuucccucugacaguuauga

SEQ ID NO: 226054 - RNA, 32 nt, Human
uauuguuagaguagcugaaagauucaggaguu

SEQ ID NO: 226055 - RNA, 32 nt, Human
uauuguucaagagugagaucuuguagaguggc

SEQ ID NO: 226056 - RNA, 32 nt, Human
uauuguucagaaauggguaauguggccauuuc

SEQ ID NO: 226057 - RNA, 32 nt, Human
uauuguucauuucuuguaaaggucuuccuaca

SEQ ID NO: 226058 - RNA, 28 nt, Human
uauuguuccaagggagccucaucaaaac

SEQ ID NO: 226059 - RNA, 32 nt, Human
uauuguucuaauauuucuacuuuuguaugugu

SEQ ID NO: 226060 - RNA, 32 nt, Human
uauuguucucaauggucccaagaauuacucua

SEQ ID NO: 226061 - RNA, 32 nt, Human
uauuguucuuuaauggcugucuugcccuucca

SEQ ID NO: 226062 - RNA, 31 nt, Human
uauuguugcaauaaauauccuugaacacaaa

SEQ ID NO: 226063 - RNA, 32 nt, Human
uauuguugggggagcuaugaaccugacauguc

SEQ ID NO: 226064 - RNA, 32 nt, Human
uauuguuucuuugcuaaguccagaccugcuuu

SEQ ID NO: 226065 - RNA, 32 nt, Human
uauuguuucuuuucuuuuccgcgacagucuca

SEQ ID NO: 226066 - RNA, 32 nt, Human
uauuguuugccucacuccuggaugcugcguuu

SEQ ID NO: 226067 - RNA, 32 nt, Human
uauuguuugcuugcuucuagguguuuucgcca

SEQ ID NO: 226068 - RNA, 32 nt, Human
uauuguuuggacuguguuugucucacaaucac

SEQ ID NO: 226069 - RNA, 32 nt, Human
uauuguuuuuccccucucccuccugcuuucuu

SEQ ID NO: 226070 - RNA, 32 nt, Human
uauuuaaaaaccauggguccacuguuaaaacc

SEQ ID NO: 226071 - RNA, 32 nt, Human
uauuuaaaaauauacacacauguauguacaca

SEQ ID NO: 226072 - RNA, 32 nt, Human
uauuuaaaaauguaaguacaagaaauguguca

SEQ ID NO: 226073 - RNA, 32 nt, Human
uauuuaaaauugcuuaggaugaucucagacag

SEQ ID NO: 226074 - RNA, 32 nt, Human
uauuuaaacuaaauucauccuguuguguuccu

SEQ ID NO: 226075 - RNA, 32 nt, Human
uauuuaaacucaugggcuucaguuucaacauc

SEQ ID NO: 226076 - RNA, 32 nt, Human
uauuuaaagcucaagaagaacacagaagcaca

SEQ ID NO: 226077 - RNA, 32 nt, Human
uauuuaaauuccaauuccuggugacagaaaag

SEQ ID NO: 226078 - RNA, 32 nt, Human
uauuuaaauucugccucuuccuacucucuaac

SEQ ID NO: 226079 - RNA, 32 nt, Human
uauuuaaccuuccucccuucaucuuccucacc

SEQ ID NO: 226080 - RNA, 32 nt, Human
uauuuaacguuaaugcaccucugccuccacga

SEQ ID NO: 226081 - RNA, 32 nt, Human
uauuuaacuucuccaccuucauugcuagaucc

SEQ ID NO: 226082 - RNA, 32 nt, Human
uauuuaacuucugcuuugugcuagcuaguggg

SEQ ID NO: 226083 - RNA, 32 nt, Human
uauuuaagacugaaagaaggagaauuucuaac

SEQ ID NO: 226084 - RNA, 32 nt, Human
uauuuaagagguggggucccaggugggaaccc

SEQ ID NO: 226085 - RNA, 32 nt, Human
uauuuaagcauugugcaaucacuugggaaaaa

SEQ ID NO: 226086 - RNA, 32 nt, Human
uauuuaagcuuggacaguuuucagagacaaac

SEQ ID NO: 226087 - RNA, 32 nt, Human
uauuuaaggaagagaugaagcucugcaguuuu

SEQ ID NO: 226088 - RNA, 32 nt, Human
uauuuaagugugcugcucccucuugucuugaa

SEQ ID NO: 226089 - RNA, 32 nt, Human
uauuuaaguuucagcaguuuaacccugaaauu

SEQ ID NO: 226090 - RNA, 32 nt, Human
uauuuaauccaccuuaaaaccuaaauguauuu

SEQ ID NO: 226091 - RNA, 31 nt, Human
uauuuaaugaacucuuacuaugagccaguug

SEQ ID NO: 226092 - RNA, 32 nt, Human
uauuuaauugcucccuucuuccuuuccuuguu

SEQ ID NO: 226093 - RNA, 32 nt, Human
uauuuacaacuaauugaucacaaccaguuugu

SEQ ID NO: 226094 - RNA, 32 nt, Human
uauuuacaaggcaaagcaaagagaaccaaagu

SEQ ID NO: 226095 - RNA, 32 nt, Human
uauuuacacaguuaaggaacaggugauacauu

SEQ ID NO: 226096 - RNA, 32 nt, Human
uauuuacagcacaacaugaaaaggcaauuugu

SEQ ID NO: 226097 - RNA, 32 nt, Human
uauuuacaggagaaagaggugauuauggaggg

SEQ ID NO: 226098 - RNA, 32 nt, Human
uauuuacaggugaggaaauggaggcucagaga

SEQ ID NO: 226099 - RNA, 32 nt, Human
uauuuacagucuguaacuuuccacucuuccug

SEQ ID NO: 226100 - RNA, 32 nt, Human
uauuuacauacagcuuauauuaaaagagcugu

SEQ ID NO: 226101 - RNA, 32 nt, Human
uauuuacauauauuaauuugguuagggauuau

SEQ ID NO: 226102 - RNA, 32 nt, Human
uauuuacauaugcuuauauacaacuauguaca

SEQ ID NO: 226103 - RNA, 32 nt, Human
uauuuacauguuaaaggauuuggggaaauugg

SEQ ID NO: 226104 - RNA, 32 nt, Human
uauuuacauuccccucuccacgugaugucggu

SEQ ID NO: 226105 - RNA, 32 nt, Human
uauuuacauuuaugacaauauaccucaaagua

SEQ ID NO: 226106 - RNA, 32 nt, Human
uauuuaccagcuauuuuaaaugagcuguaacu

SEQ ID NO: 226107 - RNA, 32 nt, Human
uauuuaccgacauuccuuauacaugacagaca

SEQ ID NO: 226108 - RNA, 32 nt, Human
uauuuaccugggauauacacugcaagaaaauc

SEQ ID NO: 226109 - RNA, 32 nt, Human
uauuuacuaugcguguuuccagcaguuggcau

SEQ ID NO: 226110 - RNA, 32 nt, Human
uauuuacucugccaggugccuauauuccaaua

SEQ ID NO: 226111 - RNA, 32 nt, Human
uauuuacuuacugcuaucuacuaaguuuccuu

SEQ ID NO: 226112 - RNA, 32 nt, Human
uauuuagaagagccacgugaaacccaugacaa

SEQ ID NO: 226113 - RNA, 32 nt, Human
uauuuagaagcagggucucacuauguugcugg

SEQ ID NO: 226114 - RNA, 32 nt, Human
uauuuagagaaugauuuuaaaagggaaugaua

SEQ ID NO: 226115 - RNA, 32 nt, Human
uauuuagagacagggucucacucuguugccca

SEQ ID NO: 226116 - RNA, 32 nt, Human
uauuuagagacagggucucgcucuguugccaa

SEQ ID NO: 226117 - RNA, 32 nt, Human
uauuuagagauggcagagagugagguaguggc

SEQ ID NO: 226118 - RNA, 32 nt, Human
uauuuagagauuauaaggcucucugagccauc

SEQ ID NO: 226119 - RNA, 32 nt, Human
uauuuagauggaaagugauggcauucacaggc

SEQ ID NO: 226120 - RNA, 32 nt, Human
uauuuagauggccaugaagaggaugcugugaa

SEQ ID NO: 226121 - RNA, 32 nt, Human
uauuuagcaagacacacuacuacaauggagaa

SEQ ID NO: 226122 - RNA, 32 nt, Human
uauuuagcaagaucaaagacacucuggcugga

SEQ ID NO: 226123 - RNA, 32 nt, Human
uauuuagcuaaaacuaaaauggauuagagaua

SEQ ID NO: 226124 - RNA, 32 nt, Human
uauuuaggaaaggggcugggugcaguggcuca

SEQ ID NO: 226125 - RNA, 32 nt, Human
uauuuaggaggaugaaguugaagcuuagaaua

SEQ ID NO: 226126 - RNA, 32 nt, Human
uauuuagggcuagaugagcccagauuucuucc

SEQ ID NO: 226127 - RNA, 32 nt, Human
uauuuaguaauggcccagcuuagagacuucag

SEQ ID NO: 226128 - RNA, 32 nt, Human
uauuuaguauaccugaaucuugguuucuuuuu

SEQ ID NO: 226129 - RNA, 32 nt, Human
uauuuaguaugccaucaugucacugcagaggu

SEQ ID NO: 226130 - RNA, 32 nt, Human
uauuuaguaugccauuaugucacugcagaggu

SEQ ID NO: 226131 - RNA, 32 nt, Human
uauuuaguaugccuucaugucacugcagaggu

SEQ ID NO: 226132 - RNA, 32 nt, Human
uauuuauaccaaaggcugggucuucccaucua

SEQ ID NO: 226133 - RNA, 32 nt, Human
uauuuauacuauauucugcauacaguacuuua

SEQ ID NO: 226134 - RNA, 32 nt, Human
uauuuauaggaccacaggccagccugggagau

SEQ ID NO: 226135 - RNA, 32 nt, Human
uauuuauauggcaugaaaucucugguuuauuu

SEQ ID NO: 226136 - RNA, 32 nt, Human
uauuuauauucugccuuguuccagaaaagugu

SEQ ID NO: 226137 - RNA, 32 nt, Human
uauuuauauuuuuaagaaguaccacuugaaac

SEQ ID NO: 226138 - RNA, 32 nt, Human
uauuuauauuuuugggggugggagaaauccaa

SEQ ID NO: 226139 - RNA, 32 nt, Human
uauuuaucaaaauguaauggauuuuuaaaggc

SEQ ID NO: 226140 - RNA, 32 nt, Human
uauuuaucacccaauugccucugacacugacu

SEQ ID NO: 226141 - RNA, 32 nt, Human
uauuuauccugcuuagaauuuacagaacuucu

SEQ ID NO: 226142 - RNA, 32 nt, Human
uauuuaucuaguuucagggaaggucuaauaaa

SEQ ID NO: 226143 - RNA, 32 nt, Human
uauuuaugaagaaaccuugagaacgaaguuac

SEQ ID NO: 226144 - RNA, 32 nt, Human
uauuuaugacuaaucuuaccuacuucuacuuu

SEQ ID NO: 226145 - RNA, 32 nt, Human
uauuuaugaucagugaauaaaaaugucagaac

SEQ ID NO: 226146 - RNA, 32 nt, Human
uauuuauggagagaaguaaaaauaaguuccac

SEQ ID NO: 226147 - RNA, 32 nt, Human
uauuuauggccugggaaacaauuugcauuugu

SEQ ID NO: 226148 - RNA, 32 nt, Human
uauuuaugggucucacucuauugcccaggcug

SEQ ID NO: 226149 - RNA, 32 nt, Human
uauuuauuacugacaguauuguuuugauacag

SEQ ID NO: 226150 - RNA, 32 nt, Human
uauuuauuagagaccuugugggugggugggcu

SEQ ID NO: 226151 - RNA, 32 nt, Human
uauuuauuauaucuauuuggcaggugcacaau

SEQ ID NO: 226152 - RNA, 32 nt, Human
uauuuauuauucaaaagugucauuuuaauauu

SEQ ID NO: 226153 - RNA, 32 nt, Human
uauuuauucagcaccgcacuacccaggaaaua

SEQ ID NO: 226154 - RNA, 32 nt, Human
uauuuauucucauacuuuacauucaugcuuag

SEQ ID NO: 226155 - RNA, 32 nt, Human
uauuuauucugccaaaugaaacccauuucaag

SEQ ID NO: 226156 - RNA, 32 nt, Human
uauuuauucuguauugauaaaaagucagucuu

SEQ ID NO: 226157 - RNA, 32 nt, Human
uauuuauucuuauuuucucuccuuucagaguu

SEQ ID NO: 226158 - RNA, 32 nt, Human
uauuuauucuuccgcugucugccugcagcagu

SEQ ID NO: 226159 - RNA, 32 nt, Human
uauuuauucuuucuaugcagacauagguauac

SEQ ID NO: 226160 - RNA, 32 nt, Human
uauuuauugagcaccuacuaugugccagccac

SEQ ID NO: 226161 - RNA, 32 nt, Human
uauuuauugagcaccuacuaugugcccagccc

SEQ ID NO: 226162 - RNA, 32 nt, Human
uauuuauugagugcuuacuauguaccagguac

SEQ ID NO: 226163 - RNA, 32 nt, Human
uauuuauugcaaggucagauuuacagauuguu

SEQ ID NO: 226164 - RNA, 32 nt, Human
uauuuauugggcaccuacuaugugccaggcac

SEQ ID NO: 226165 - RNA, 32 nt, Human
uauuuauugggcagggggagggggagggcaca

SEQ ID NO: 226166 - RNA, 32 nt, Human
uauuuauuggggauaggagaagaggcauccug

SEQ ID NO: 226167 - RNA, 32 nt, Human
uauuuauuucucauuuguaccaaggcaucucc

SEQ ID NO: 226168 - RNA, 32 nt, Human
uauuuauuugugaauaaacuguacugguguca

SEQ ID NO: 226169 - RNA, 32 nt, Human
uauuuauuuucaaauaucaaauugaagaaaaa

SEQ ID NO: 226170 - RNA, 32 nt, Human
uauuuauuuucuccagaggcaggaugauccag

SEQ ID NO: 226171 - RNA, 32 nt, Human
uauuuauuuuugagacagucucgcccugucac

SEQ ID NO: 226172 - RNA, 32 nt, Human
uauuucaaaacagaagugucuccuugcacuua

SEQ ID NO: 226173 - RNA, 32 nt, Human
uauuucaaaccugugaacuaaccuugcaguuc

SEQ ID NO: 226174 - RNA, 32 nt, Human
uauuucaaaguuaauaaagacaaaguggcaac

SEQ ID NO: 226175 - RNA, 32 nt, Human
uauuucaaauuuguuugacuaauucuggaauu

SEQ ID NO: 226176 - RNA, 32 nt, Human
uauuucaacaaagaaguauuagaagaugacag

SEQ ID NO: 226177 - RNA, 32 nt, Human
uauuucaagccuuuccucuaagcucuaugcca

SEQ ID NO: 226178 - RNA, 32 nt, Human
uauuucacaucuuuauuauugcaguuuucucu

SEQ ID NO: 226179 - RNA, 32 nt, Human
uauuucaccaauucugguacacgcuaguuuuu

SEQ ID NO: 226180 - RNA, 32 nt, Human
uauuucagaaaggagagccaggagaacugggg

SEQ ID NO: 226181 - RNA, 32 nt, Human
uauuucagaaauguguauuuccauaauccaga

SEQ ID NO: 226182 - RNA, 32 nt, Human
uauuucagaauaacuaaaguacuucagaauga

SEQ ID NO: 226183 - RNA, 18 nt, Human
uauuucagaauugacaua

SEQ ID NO: 226184 - RNA, 32 nt, Human
uauuucagacaaaauagagaauucuuuuaaaa

SEQ ID NO: 226185 - RNA, 32 nt, Human
uauuucagccucccaaagggcuagaauuacag

SEQ ID NO: 226186 - RNA, 32 nt, Human
uauuucagccuucugcugccuuugccuggucc

SEQ ID NO: 226187 - RNA, 32 nt, Human
uauuucagcuccaggaaagagagcuaauucac

SEQ ID NO: 226188 - RNA, 32 nt, Human
uauuucagcugcuuugacaaaaugacuggcuc

SEQ ID NO: 226189 - RNA, 32 nt, Human
uauuucaggcaguuauggauagauacauuaca

SEQ ID NO: 226190 - RNA, 32 nt, Human
uauuucaggcugggcgugguggcucacgccug

SEQ ID NO: 226191 - RNA, 32 nt, Human
uauuucaggugggaucaaagaggucauaagaa

SEQ ID NO: 226192 - RNA, 32 nt, Human
uauuucaguaaagcuuucuaucuuuucaaaaa

SEQ ID NO: 226193 - RNA, 32 nt, Human
uauuucaguagaaauuacuugcaaaaugaaau

SEQ ID NO: 226194 - RNA, 31 nt, Human
uauuucagugagagaaggaaaguuguaaacu

SEQ ID NO: 226195 - RNA, 32 nt, Human
uauuucaguucaaaugucucacggaagaggca

SEQ ID NO: 226196 - RNA, 32 nt, Human
uauuucauagauacuucauuuguauuuacagu

SEQ ID NO: 226197 - RNA, 32 nt, Human
uauuucaucaccaagauauuaagccuaguacc

SEQ ID NO: 226198 - RNA, 32 nt, Human
uauuucaucacucuaaaagcacugaccucaaa

SEQ ID NO: 226199 - RNA, 25 nt, Human
uauuucaucuaaaucugauuucuca

SEQ ID NO: 226200 - RNA, 32 nt, Human
uauuucaucugaagaguucacaggcuauuaaa

SEQ ID NO: 226201 - RNA, 32 nt, Human
uauuucaugacacugaaacagagcaauaauug

SEQ ID NO: 226202 - RNA, 32 nt, Human
uauuucauuuaaagaauaugcugugcuaauaa

SEQ ID NO: 226203 - RNA, 32 nt, Human
uauuucauuugggauuucaaguuuacagaugg

SEQ ID NO: 226204 - RNA, 32 nt, Human
uauuucauuuguuuugcacauaugcauaugug

SEQ ID NO: 226205 - RNA, 32 nt, Human
uauuuccaaaaaccugagggggagaaaauacu

SEQ ID NO: 226206 - RNA, 32 nt, Human
uauuuccaaauaccaccaccuuaaggguuagg

SEQ ID NO: 226207 - RNA, 32 nt, Human
uauuuccaaaugguauccaaaaguacuuguaa

SEQ ID NO: 226208 - RNA, 32 nt, Human
uauuuccaauggagaccuagcccaggccaagg

SEQ ID NO: 226209 - RNA, 32 nt, Human
uauuuccacauucucucucacucacauuuucu

SEQ ID NO: 226210 - RNA, 32 nt, Human
uauuuccacugcacgcuggugcugggagcgcc

SEQ ID NO: 226211 - RNA, 32 nt, Human
uauuuccagccaccccagcagcuagggaggca

SEQ ID NO: 226212 - RNA, 32 nt, Human
uauuuccagcuucccucagccauucacaagca

SEQ ID NO: 226213 - RNA, 32 nt, Human
uauuuccagggccuuauaaagccagaugguag

SEQ ID NO: 226214 - RNA, 32 nt, Human
uauuuccauuucaauuuugcugugccuucacu

SEQ ID NO: 226215 - RNA, 25 nt, Human
uauuucccaagaggcucugcuccag

SEQ ID NO: 226216 - RNA, 32 nt, Human
uauuucccagaggaggaagcagcagcuagacu

SEQ ID NO: 226217 - RNA, 32 nt, Human
uauuucccauggcugcuucauuuguuguucau

SEQ ID NO: 226218 - RNA, 32 nt, Human
uauuucccaugugcacaagucuuuuuguauuc

SEQ ID NO: 226219 - RNA, 32 nt, Human
uauuuccccaaaacaacccagcuucaccccau

SEQ ID NO: 226220 - RNA, 32 nt, Human
uauuucccccuggaugguuguugggagggagg

SEQ ID NO: 226221 - RNA, 32 nt, Human
uauuucccccuucauccauccugagccaaauu

SEQ ID NO: 226222 - RNA, 32 nt, Human
uauuuccccuucauccuauuuuuaacuuaaac

SEQ ID NO: 226223 - RNA, 32 nt, Human
uauuuccccuuguggcuuucaaccaccugcuc

SEQ ID NO: 226224 - RNA, 32 nt, Human
uauuucccuggaauuuaauucaaaguuugugg

SEQ ID NO: 226225 - RNA, 32 nt, Human
uauuucccuugccucauaggcuucugggaugu

SEQ ID NO: 226226 - RNA, 32 nt, Human
uauuuccguucccgccgccguucucgcugacc

SEQ ID NO: 226227 - RNA, 32 nt, Human
uauuuccuaacaacagagagauucucuuaugu

SEQ ID NO: 226228 - RNA, 32 nt, Human
uauuuccucuguacugugagacugugggagau

SEQ ID NO: 226229 - RNA, 32 nt, Human
uauuuccugaagauccacccugggugaggcuu

SEQ ID NO: 226230 - RNA, 32 nt, Human
uauuuccugaagguaauauuguuaacuguuaa

SEQ ID NO: 226231 - RNA, 32 nt, Human
uauuuccugagaccaggcaggcucugccugca

SEQ ID NO: 226232 - RNA, 32 nt, Human
uauuuccugauaacauuauguggcccucugga

SEQ ID NO: 226233 - RNA, 23 nt, Human
uauuuccugggccuguuuucuca

SEQ ID NO: 226234 - RNA, 32 nt, Human
uauuuccuugaccucuuuacccugaagcuuuu

SEQ ID NO: 226235 - RNA, 32 nt, Human
uauuuccuuuauguguuucuccagaauggugc

SEQ ID NO: 226236 - RNA, 32 nt, Human
uauuucgaauauuuucucaaucuuaggaggaa

SEQ ID NO: 226237 - RNA, 32 nt, Human
uauuucuaccauuguaaccaccauugugcuau

SEQ ID NO: 226238 - RNA, 32 nt, Human
uauuucuacccaggcugcugucgucgugggag

SEQ ID NO: 226239 - RNA, 32 nt, Human
uauuucuagugaauuguuuguaucaguuucau

SEQ ID NO: 226240 - RNA, 32 nt, Human
uauuucuauccaauuugugaagaaggaggacu

SEQ ID NO: 226241 - RNA, 32 nt, Human
uauuucuauccuauauuucaugggcuuaccuc

SEQ ID NO: 226242 - RNA, 32 nt, Human
uauuucuaucuagugaaaugguacagagacac

SEQ ID NO: 226243 - RNA, 32 nt, Human
uauuucuaugugugccacacacaaugcaguau

SEQ ID NO: 226244 - RNA, 32 nt, Human
uauuucuauuugugccacaucuucccuccacu

SEQ ID NO: 226245 - RNA, 32 nt, Human
uauuucucacccaggaguggauuugugguuug

SEQ ID NO: 226246 - RNA, 32 nt, Human
uauuucucaguaggaacuuggaagggaagagc

SEQ ID NO: 226247 - RNA, 32 nt, Human
uauuucucaucacucccucaauccaaguaaca

SEQ ID NO: 226248 - RNA, 32 nt, Human
uauuucucauugaaaugcuuucccuuuuguau

SEQ ID NO: 226249 - RNA, 32 nt, Human
uauuucucauugugcuuucccuucccuucuuu

SEQ ID NO: 226250 - RNA, 32 nt, Human
uauuucuccaaacaacucaauauuucucuuua

SEQ ID NO: 226251 - RNA, 32 nt, Human
uauuucuccaucuccaguucuggacagugcag

SEQ ID NO: 226252 - RNA, 32 nt, Human
uauuucuccuuaaccccuaauaccuuucuuac

SEQ ID NO: 226253 - RNA, 32 nt, Human
uauuucucucaggugcgugccacaucaauaac

SEQ ID NO: 226254 - RNA, 32 nt, Human
uauuucucuccacccuaacucagaccucaccu

SEQ ID NO: 226255 - RNA, 32 nt, Human
uauuucucucucccauaacagugcagugauag

SEQ ID NO: 226256 - RNA, 32 nt, Human
uauuucucugcagcguuccuucccuggcccgg

SEQ ID NO: 226257 - RNA, 32 nt, Human
uauuucucugggaaaaauaggcugcaggucuc

SEQ ID NO: 226258 - RNA, 32 nt, Human
uauuucucuuaauaaucuuuuguaguuuucag

SEQ ID NO: 226259 - RNA, 32 nt, Human
uauuucucuuucccucucccugucccucucuu

SEQ ID NO: 226260 - RNA, 20 nt, Human
uauuucucuuugcuuucuca

SEQ ID NO: 226261 - RNA, 32 nt, Human
uauuucugaaguauucacuugaccuuccauca

SEQ ID NO: 226262 - RNA, 32 nt, Human
uauuucugaaucuuaaaauucaucccaugugu

SEQ ID NO: 226263 - RNA, 32 nt, Human
uauuucugcaaguagaacucacugccuuuaga

SEQ ID NO: 226264 - RNA, 32 nt, Human
uauuucugcugagugauaaagccagcggggag

SEQ ID NO: 226265 - RNA, 32 nt, Human
uauuucuggcugaauagcacagaaaaguauuu

SEQ ID NO: 226266 - RNA, 32 nt, Human
uauuucuggugaggaaugaaagggccaagugu

SEQ ID NO: 226267 - RNA, 32 nt, Human
uauuucuguagacagaaguucagucuagauuu

SEQ ID NO: 226268 - RNA, 32 nt, Human
uauuucuguaugaagaugcaaauaucaugaau

SEQ ID NO: 226269 - RNA, 32 nt, Human
uauuucuguauuuccuggauaaggaagagcaa

SEQ ID NO: 226270 - RNA, 32 nt, Human
uauuucugucagcugguguugcugacacuuuc

SEQ ID NO: 226271 - RNA, 32 nt, Human
uauuucugugaggucacugaggccuuauggac

SEQ ID NO: 226272 - RNA, 32 nt, Human
uauuucugugccagacacauuccaccucucca

SEQ ID NO: 226273 - RNA, 32 nt, Human
uauuucuguucauuuauucaagcuuuuucuuc

SEQ ID NO: 226274 - RNA, 31 nt, Human
uauuucuuaauaaauaaauuuggaacuauua

SEQ ID NO: 226275 - RNA, 32 nt, Human
uauuucuuauggugcuggauuacuccuacaga

SEQ ID NO: 226276 - RNA, 32 nt, Human
uauuucuuccuugagcuaaggaggccaguugu

SEQ ID NO: 226277 - RNA, 32 nt, Human
uauuucuuccuugauguccuccaccuaagauu

SEQ ID NO: 226278 - RNA, 32 nt, Human
uauuucuucuacugcuaucuacuacaaacuuc

SEQ ID NO: 226279 - RNA, 32 nt, Human
uauuucuucuuaagagaugccuaaaauguuuu

SEQ ID NO: 226280 - RNA, 32 nt, Human
uauuucuugaaugcguauuaugugccaagcac

SEQ ID NO: 226281 - RNA, 24 nt, Human
uauuucuugcugaccaaaucuacu

SEQ ID NO: 226282 - RNA, 23 nt, Human
uauuucuugucucuauuuuuuca

SEQ ID NO: 226283 - RNA, 32 nt, Human
uauuucuuguggcaggggguggucaaagagcc

SEQ ID NO: 226284 - RNA, 32 nt, Human
uauuucuuuaagauggagucuugcucuguugc

SEQ ID NO: 226285 - RNA, 32 nt, Human
uauuucuuucagccauuucauuucuuaucuau

SEQ ID NO: 226286 - RNA, 32 nt, Human
uauuucuuucagggguaucuuguaauucucau

SEQ ID NO: 226287 - RNA, 32 nt, Human
uauuucuuucaucagagcaaauuauaguggaa

SEQ ID NO: 226288 - RNA, 32 nt, Human
uauuucuuucuauuuugcuauuugcaaaugcu

SEQ ID NO: 226289 - RNA, 32 nt, Human
uauuucuuuucuuugcccuccugauucuuggc

SEQ ID NO: 226290 - RNA, 32 nt, Human
uauuugaaagaugccugugcucugcuucaggc

SEQ ID NO: 226291 - RNA, 32 nt, Human
uauuugaaagcaacugaacaauggagccagac

SEQ ID NO: 226292 - RNA, 32 nt, Human
uauuugaaguguccagcaguugcuugaaaugc

SEQ ID NO: 226293 - RNA, 32 nt, Human
uauuugaauauuagaugggaaaauuagugucu

SEQ ID NO: 226294 - RNA, 32 nt, Human
uauuugaaucucaaaaagggagcaugggaauc

SEQ ID NO: 226295 - RNA, 32 nt, Human
uauuugaccagaacuuuuuccucucgagauag

SEQ ID NO: 226296 - RNA, 32 nt, Human
uauuugacucccacuuguaauaacuccuuuaa

SEQ ID NO: 226297 - RNA, 32 nt, Human
uauuugacuguauuuggagacagggucuuuac

SEQ ID NO: 226298 - RNA, 32 nt, Human
uauuugacuguggccuucuuauugagaacucu

SEQ ID NO: 226299 - RNA, 32 nt, Human
uauuugagacagagucucacucuguugcccag

SEQ ID NO: 226300 - RNA, 32 nt, Human
uauuugagagcugaaccaaugguuuuugaugg

SEQ ID NO: 226301 - RNA, 32 nt, Human
uauuugagcuccgggucucuucuaccugcauu

SEQ ID NO: 226302 - RNA, 32 nt, Human
uauuugagcucuggaguuugagaccagccugg

SEQ ID NO: 226303 - RNA, 32 nt, Human
uauuugagcugcauaaucuaaacaugucaaac

SEQ ID NO: 226304 - RNA, 32 nt, Human
uauuugagguuagguguggccuugaccuuacc

SEQ ID NO: 226305 - RNA, 32 nt, Human
uauuugaguguacaaacccauggcugggcuca

SEQ ID NO: 226306 - RNA, 32 nt, Human
uauuugaguugcuuccuuucugggguaauaac

SEQ ID NO: 226307 - RNA, 32 nt, Human
uauuugauaaaugaucacaauguguaaaacac

SEQ ID NO: 226308 - RNA, 32 nt, Human
uauuugauagcacauacugauggcucuaaaga

SEQ ID NO: 226309 - RNA, 32 nt, Human
uauuugaucagaauauuuuguaaugaaaggau

SEQ ID NO: 226310 - RNA, 32 nt, Human
uauuugaugauauuuauuuucucugccaagcu

SEQ ID NO: 226311 - RNA, 32 nt, Human
uauuugaugcuucuucaagucagcucugacgu

SEQ ID NO: 226312 - RNA, 32 nt, Human
uauuugauuccuugugcacaugugggagaaaa

SEQ ID NO: 226313 - RNA, 32 nt, Human
uauuugauuucuuaccgccuuaggcaaguauu

SEQ ID NO: 226314 - RNA, 31 nt, Human
uauuugcaaaugucucuuauugacaaggaaa

SEQ ID NO: 226315 - RNA, 32 nt, Human
uauuugcagacuacagaaugggagaaaauguu

SEQ ID NO: 226316 - RNA, 32 nt, Human
uauuugcagauaauucuggaccagagacuugg

SEQ ID NO: 226317 - RNA, 32 nt, Human
uauuugcauauguaugauagugugcauguggu

SEQ ID NO: 226318 - RNA, 32 nt, Human
uauuugcauauguauuuuguauuugcauaugu

SEQ ID NO: 226319 - RNA, 32 nt, Human
uauuugcaucucagugcugcuuuggggucucg

SEQ ID NO: 226320 - RNA, 32 nt, Human
uauuugcauuaauuuucccuacucauacuuug

SEQ ID NO: 226321 - RNA, 32 nt, Human
uauuugccugcaggcagucaccaagucuguau

SEQ ID NO: 226322 - RNA, 32 nt, Human
uauuugcggucugauaaaaggguccuuguggg

SEQ ID NO: 226323 - RNA, 32 nt, Human
uauuugcgguuagaaucccauggauguuucuu

SEQ ID NO: 226324 - RNA, 32 nt, Human
uauuugcuaaaaaucugagguagaugggcggc

SEQ ID NO: 226325 - RNA, 32 nt, Human
uauuugcuccaaugcguaacagacugauguca

SEQ ID NO: 226326 - RNA, 32 nt, Human
uauuugcucuccugaacucucacucaauccuc

SEQ ID NO: 226327 - RNA, 31 nt, Human
uauuugcuucagguuauccuguugagggugg

SEQ ID NO: 226328 - RNA, 21 nt, Human
uauuuggaaaacaaacgucaa

SEQ ID NO: 226329 - RNA, 20 nt, Human
uauuuggaaaacaaucggcu

SEQ ID NO: 226330 - RNA, 32 nt, Human
uauuuggaaacagacaaguagaagaugcuaca

SEQ ID NO: 226331 - RNA, 32 nt, Human
uauuuggaaaccccuucuuuacuucccaggcc

SEQ ID NO: 226332 - RNA, 32 nt, Human
uauuuggaacuuaguaaccaguuguucucuag

SEQ ID NO: 226333 - RNA, 32 nt, Human
uauuuggaagcauguuugguaaugucaagugg

SEQ ID NO: 226334 - RNA, 32 nt, Human
uauuuggaagcuaccuacagaggaucgacgag

SEQ ID NO: 226335 - RNA, 32 nt, Human
uauuuggaauauuugaauaaugacagauggug

SEQ ID NO: 226336 - RNA, 32 nt, Human
uauuuggacaacaccccaacagagcaggcuga

SEQ ID NO: 226337 - RNA, 32 nt, Human
uauuuggagaacuauauugagguggagacuag

SEQ ID NO: 226338 - RNA, 32 nt, Human
uauuuggagagauuguguggauuuaagagacc

SEQ ID NO: 226339 - RNA, 32 nt, Human
uauuuggagaugaagcauuuggaggugauuaa

SEQ ID NO: 226340 - RNA, 22 nt, Human
uauuuggaguuuugugcuucaa

SEQ ID NO: 226341 - RNA, 32 nt, Human
uauuuggauuagugaauuuauuucucaaucca

SEQ ID NO: 226342 - RNA, 32 nt, Human
uauuuggcacuccuggaacaaguauaucuaac

SEQ ID NO: 226343 - RNA, 31 nt, Human
uauuuggcaguguucaucacaggcuagagag

SEQ ID NO: 226344 - RNA, 32 nt, Human
uauuuggcauugaaauaacacccagagcauga

SEQ ID NO: 226345 - RNA, 32 nt, Human
uauuuggccucucaaaugaacugagauuccug

SEQ ID NO: 226346 - RNA, 32 nt, Human
uauuuggccuucaucuuggcauggaagguggc

SEQ ID NO: 226347 - RNA, 32 nt, Human
uauuuggcucacauuucugccuggcaguggcu

SEQ ID NO: 226348 - RNA, 32 nt, Human
uauuuggcucaccucguuccacagcuccaccu

SEQ ID NO: 226349 - RNA, 32 nt, Human
uauuugggaggccaaggcaggagaauugccug

SEQ ID NO: 226350 - RNA, 32 nt, Human
uauuugggaggcugaggcaggagaaucgcuug

SEQ ID NO: 226351 - RNA, 32 nt, Human
uauuuggggcuguagcuccuuccaagcccaug

SEQ ID NO: 226352 - RNA, 32 nt, Human
uauuugggggaagggaaauguuucaagguaaa

SEQ ID NO: 226353 - RNA, 23 nt, Human
uauuugggggaaucuguuuucca

SEQ ID NO: 226354 - RNA, 32 nt, Human
uauuuggggucuucccccaguggaugucucau

SEQ ID NO: 226355 - RNA, 32 nt, Human
uauuugggucacugcagaucucugaguccccc

SEQ ID NO: 226356 - RNA, 32 nt, Human
uauuuggguccugggagggugggugaaauaaa

SEQ ID NO: 226357 - RNA, 32 nt, Human
uauuugguacuuucacuuacuacacaucauuu

SEQ ID NO: 226358 - RNA, 32 nt, Human
uauuuggugauggagaaucuucagcuguguua

SEQ ID NO: 226359 - RNA, 32 nt, Human
uauuuggugugcugaaaauuugaguugacaaa

SEQ ID NO: 226360 - RNA, 32 nt, Human
uauuugguuggaguuucucauauuugaaaaca

SEQ ID NO: 226361 - RNA, 32 nt, Human
uauuugguuggggaggcacagagcagagguuc

SEQ ID NO: 226362 - RNA, 32 nt, Human
uauuugguuucuagaucacugugcuuauuuug

SEQ ID NO: 226363 - RNA, 32 nt, Human
uauuuguaagaaaagaggagaauggagaaucu

SEQ ID NO: 226364 - RNA, 32 nt, Human
uauuuguaagagcuuugaaagccagccugaga

SEQ ID NO: 226365 - RNA, 32 nt, Human
uauuuguacacauacacacaugcacacccucu

SEQ ID NO: 226366 - RNA, 32 nt, Human
uauuuguauuuauuuccagaccaauaaauuug

SEQ ID NO: 226367 - RNA, 32 nt, Human
uauuugucaccugaaccuaauguauauucucc

SEQ ID NO: 226368 - RNA, 32 nt, Human
uauuugucagugccaugauggaagaagcugag

SEQ ID NO: 226369 - RNA, 32 nt, Human
uauuugucauaaggcggcgugggcgaggccug

SEQ ID NO: 226370 - RNA, 32 nt, Human
uauuugucgcuuauuugcccugcagcaauuca

SEQ ID NO: 226371 - RNA, 32 nt, Human
uauuugucuuuugaaaauuaaggcugggcgcg

SEQ ID NO: 226372 - RNA, 32 nt, Human
uauuugugauguucugucuuccuugucacuuc

SEQ ID NO: 226373 - RNA, 32 nt, Human
uauuugugccuagggcuugggcuguuugugug

SEQ ID NO: 226374 - RNA, 32 nt, Human
uauuugugcuggagugaggggaagaagcuguu

SEQ ID NO: 226375 - RNA, 32 nt, Human
uauuuguggagagagaguugaagauuagggaa

SEQ ID NO: 226376 - RNA, 32 nt, Human
uauuuguggcuuugcugagugaaggaagggga

SEQ ID NO: 226377 - RNA, 32 nt, Human
uauuuguguggacaagaugaggagcauaaaca

SEQ ID NO: 226378 - RNA, 32 nt, Human
uauuuguuaaauaacacaaaagucugaaauuc

SEQ ID NO: 226379 - RNA, 31 nt, Human
uauuuguucaauaaauaagugaauuaauuag

SEQ ID NO: 226380 - RNA, 32 nt, Human
uauuuguucccaaguagcuacugaacugcuca

SEQ ID NO: 226381 - RNA, 32 nt, Human
uauuuguucuaucacccagaauuuugagaagg

SEQ ID NO: 226382 - RNA, 32 nt, Human
uauuuguugaacacuuacauguaccagacauu

SEQ ID NO: 226383 - RNA, 32 nt, Human
uauuuguuguuuguuugcuuguuuuuguuuuu

SEQ ID NO: 226384 - RNA, 32 nt, Human
uauuuguuucaguagaugagcacacaaaugug

SEQ ID NO: 226385 - RNA, 32 nt, Human
uauuuguuugagacggggucucgcucugucgc

SEQ ID NO: 226386 - RNA, 32 nt, Human
uauuuguuuucuuguuuccaugaauuauauca

SEQ ID NO: 226387 - RNA, 32 nt, Human
uauuuguuuuugcaccugcuucugccuggaga

SEQ ID NO: 226388 - RNA, 32 nt, Human
uauuuuaaacuagaaauuauauuagaacucaa

SEQ ID NO: 226389 - RNA, 32 nt, Human
uauuuuaaaggcugcuuuaacuuguuuguuug

SEQ ID NO: 226390 - RNA, 32 nt, Human
uauuuuaaauauuugggagaguuaauuuguua

SEQ ID NO: 226391 - RNA, 32 nt, Human
uauuuuaaccaaagguuaucagagccaguugg

SEQ ID NO: 226392 - RNA, 32 nt, Human
uauuuuaacucauaccuuuaaaggaauucccc

SEQ ID NO: 226393 - RNA, 32 nt, Human
uauuuuaacucucagugugcugucuuuauauu

SEQ ID NO: 226394 - RNA, 32 nt, Human
uauuuuaagggccagaggguuaaucacaaaga

SEQ ID NO: 226395 - RNA, 32 nt, Human
uauuuuaauagugaucuugauccuguuguggg

SEQ ID NO: 226396 - RNA, 32 nt, Human
uauuuuaauuuuaugaccaacaugucauuugg

SEQ ID NO: 226397 - RNA, 32 nt, Human
uauuuuacaagugguuuucuuacauaggacuc

SEQ ID NO: 226398 - RNA, 32 nt, Human
uauuuuacaguacauguuuauuauguucaaua

SEQ ID NO: 226399 - RNA, 32 nt, Human
uauuuuacagugcagcauaaugccaugggcuu

SEQ ID NO: 226400 - RNA, 32 nt, Human
uauuuuacccuugagcuuagccgcgggucccu

SEQ ID NO: 226401 - RNA, 32 nt, Human
uauuuuaccuaaaagacucuagacaugggaug

SEQ ID NO: 226402 - RNA, 32 nt, Human
uauuuuacuaccugaaguacaauuuaacuuuu

SEQ ID NO: 226403 - RNA, 32 nt, Human
uauuuuacugacuuguuuaaaugauucgcuuu

SEQ ID NO: 226404 - RNA, 32 nt, Human
uauuuuagaagagaaggagcaagagaagaaga

SEQ ID NO: 226405 - RNA, 32 nt, Human
uauuuuaguagagacgggguuucuccacauug

SEQ ID NO: 226406 - RNA, 32 nt, Human
uauuuuaguagagacgggguuucuccauguug

SEQ ID NO: 226407 - RNA, 32 nt, Human
uauuuuauagauaggcaccugggaaccaaaca

SEQ ID NO: 226408 - RNA, 32 nt, Human
uauuuuauagggcuguugugaggauuaaauga

SEQ ID NO: 226409 - RNA, 32 nt, Human
uauuuuaucaacuuuuucucuuaguuacugug

SEQ ID NO: 226410 - RNA, 31 nt, Human
uauuuuaucacagaggagguuccagaaagga

SEQ ID NO: 226411 - RNA, 32 nt, Human
uauuuuaucaucccaaaagcaacauggagagu

SEQ ID NO: 226412 - RNA, 32 nt, Human
uauuuuaucucuucucuggggcugagagguga

SEQ ID NO: 226413 - RNA, 32 nt, Human
uauuuuaucugugugugcucaggaggugagcc

SEQ ID NO: 226414 - RNA, 32 nt, Human
uauuuuaugaauaauaugcagagaugcauauu

SEQ ID NO: 226415 - RNA, 32 nt, Human
uauuuuaugccucugugucucagcucuguguu

SEQ ID NO: 226416 - RNA, 32 nt, Human
uauuuuaugggucuugagugcauuugaaggug

SEQ ID NO: 226417 - RNA, 32 nt, Human
uauuuuauucucucucccuuuuuauuuugccu

SEQ ID NO: 226418 - RNA, 32 nt, Human
uauuuuauugaauuaccccuuuagaaaucaug

SEQ ID NO: 226419 - RNA, 32 nt, Human
uauuuuauuuuguauagagaacacguagcgac

SEQ ID NO: 226420 - RNA, 32 nt, Human
uauuuuauuuuuaauucucucuucuccuccag

SEQ ID NO: 226421 - RNA, 32 nt, Human
uauuuucaaacuugacaugagccuauguugac

SEQ ID NO: 226422 - RNA, 32 nt, Human
uauuuucaauuuccucccucacucccucuuac

SEQ ID NO: 226423 - RNA, 32 nt, Human
uauuuucacacguaagcacauucgggccauuu

SEQ ID NO: 226424 - RNA, 32 nt, Human
uauuuucacacuucaaagaccuaaggaaaaau

SEQ ID NO: 226425 - RNA, 32 nt, Human
uauuuucacaugcugcuuauacaagauuauua

SEQ ID NO: 226426 - RNA, 32 nt, Human
uauuuucacuggcuuuuccuucuccaaacuuu

SEQ ID NO: 226427 - RNA, 32 nt, Human
uauuuucagagaauucaggugcugcugguuuu

SEQ ID NO: 226428 - RNA, 32 nt, Human
uauuuucagauagcggggucuuuuccauuuau

SEQ ID NO: 226429 - RNA, 32 nt, Human
uauuuucagcacugcagcucugaugguccagc

SEQ ID NO: 226430 - RNA, 32 nt, Human
uauuuucagguuggaaugugaagguuccuggc

SEQ ID NO: 226431 - RNA, 32 nt, Human
uauuuucaguccuuucuuucugucuacucaaa

SEQ ID NO: 226432 - RNA, 32 nt, Human
uauuuucaguuuuccaaaauucuaucaucuuu

SEQ ID NO: 226433 - RNA, 32 nt, Human
uauuuucauaacacuaauaauacacugggauu

SEQ ID NO: 226434 - RNA, 32 nt, Human
uauuuucaucuaugagagaagaggagcccaaa

SEQ ID NO: 226435 - RNA, 32 nt, Human
uauuuucauuacacaaacuuaauuugucuugu

SEQ ID NO: 226436 - RNA, 32 nt, Human
uauuuucauuucucucaagcucuuucaauaaa

SEQ ID NO: 226437 - RNA, 32 nt, Human
uauuuuccaagugccuucaccaaaaggccaag

SEQ ID NO: 226438 - RNA, 32 nt, Human
uauuuuccagaacauagcccaacaaagaacuu

SEQ ID NO: 226439 - RNA, 32 nt, Human
uauuuuccauaagauggcgguggagaagagaa

SEQ ID NO: 226440 - RNA, 32 nt, Human
uauuuuccaucuuuguuuucuguucuacaaag

SEQ ID NO: 226441 - RNA, 32 nt, Human
uauuuuccauggaagacacagggucagagauc

SEQ ID NO: 226442 - RNA, 31 nt, Human
uauuuucccagcuagaaaaguauacucauuc

SEQ ID NO: 226443 - RNA, 32 nt, Human
uauuuucccauucaaguacaaaaauguuuuca

SEQ ID NO: 226444 - RNA, 32 nt, Human
uauuuuccccucuuaaggauuaauauucuuca

SEQ ID NO: 226445 - RNA, 32 nt, Human
uauuuucccugcaacaucuccaccucccaaua

SEQ ID NO: 226446 - RNA, 32 nt, Human
uauuuucccugcccucagguugccuauguauu

SEQ ID NO: 226447 - RNA, 32 nt, Human
uauuuuccuaaccuuucuucuggguccuuccu

SEQ ID NO: 226448 - RNA, 32 nt, Human
uauuuuccucauuucuuuacugcugccauuuu

SEQ ID NO: 226449 - RNA, 32 nt, Human
uauuuuccuccuccuccuuggccuacucaaca

SEQ ID NO: 226450 - RNA, 32 nt, Human
uauuuuccugcucugccuucugggacuagccu

SEQ ID NO: 226451 - RNA, 32 nt, Human
uauuuuccuugucugcugcuauuugaaguaau

SEQ ID NO: 226452 - RNA, 32 nt, Human
uauuuuccuuucuccaauuaauguggucauaa

SEQ ID NO: 226453 - RNA, 32 nt, Human
uauuuucggaaaguuaaauaacagggacuacg

SEQ ID NO: 226454 - RNA, 32 nt, Human
uauuuucguauguacacaaugcaagugugauu

SEQ ID NO: 226455 - RNA, 32 nt, Human
uauuuucuaagaagcugagcagcuccaagggc

SEQ ID NO: 226456 - RNA, 32 nt, Human
uauuuucuaagaagguugaagaaggaugagug

SEQ ID NO: 226457 - RNA, 32 nt, Human
uauuuucuagacaauucucuauuuuacugaag

SEQ ID NO: 226458 - RNA, 32 nt, Human
uauuuucucaacugccauauccuagggggcuu

SEQ ID NO: 226459 - RNA, 32 nt, Human
uauuuucucaagguguuucuagauuccacaua

SEQ ID NO: 226460 - RNA, 32 nt, Human
uauuuucucaggcucaucauccaucagaugca

SEQ ID NO: 226461 - RNA, 32 nt, Human
uauuuucucucaucuuuuucaagucuuuucca

SEQ ID NO: 226462 - RNA, 32 nt, Human
uauuuucugcagcugcucccagauuacuccuu

SEQ ID NO: 226463 - RNA, 32 nt, Human
uauuuucugcagggaccagccccacaugguca

SEQ ID NO: 226464 - RNA, 32 nt, Human
uauuuucugcuaaaggagugacugugcauaua

SEQ ID NO: 226465 - RNA, 32 nt, Human
uauuuucuggcaccuucucugcaugucugcag

SEQ ID NO: 226466 - RNA, 32 nt, Human
uauuuucuguuagcuugugggcauuuugaauu

SEQ ID NO: 226467 - RNA, 32 nt, Human
uauuuucuuagcaguuauuucuacaguuaauu

SEQ ID NO: 226468 - RNA, 32 nt, Human
uauuuucuuccuucuacuucucuauacauuuc

SEQ ID NO: 226469 - RNA, 32 nt, Human
uauuuucuuuccgcccccuccggggcugagcc

SEQ ID NO: 226470 - RNA, 32 nt, Human
uauuuucuuucuguugaaauaacugaaaaugu

SEQ ID NO: 226471 - RNA, 32 nt, Human
uauuuucuuuuaucuuuggaacaucagcacca

SEQ ID NO: 226472 - RNA, 32 nt, Human
uauuuucuuuucucccccagcugccccagggu

SEQ ID NO: 226473 - RNA, 32 nt, Human
uauuuucuuuuuccuuuauaauucuuucuuuu

SEQ ID NO: 226474 - RNA, 31 nt, Human
uauuuugaacaaugcagacaguacuugccag

SEQ ID NO: 226475 - RNA, 32 nt, Human
uauuuugagaguuucuucuucauaaaucuaca

SEQ ID NO: 226476 - RNA, 32 nt, Human
uauuuugagauggagucucgcucugucaccca

SEQ ID NO: 226477 - RNA, 32 nt, Human
uauuuugagauggagucuugcucugucgccca

SEQ ID NO: 226478 - RNA, 32 nt, Human
uauuuugagcaucuauuuugaggugauguuua

SEQ ID NO: 226479 - RNA, 32 nt, Human
uauuuugagggagggaggggcaagcccagugu

SEQ ID NO: 226480 - RNA, 32 nt, Human
uauuuugauauaacaaagacuucugucauaaa

SEQ ID NO: 226481 - RNA, 32 nt, Human
uauuuugaugaccaaguuuucuggaaguuucc

SEQ ID NO: 226482 - RNA, 32 nt, Human
uauuuugauuccugccuuuccccagccucagc

SEQ ID NO: 226483 - RNA, 32 nt, Human
uauuuugcaagacaggcccaagcauguaauac

SEQ ID NO: 226484 - RNA, 32 nt, Human
uauuuugcaagccagaugaguaaccagagggc

SEQ ID NO: 226485 - RNA, 32 nt, Human
uauuuugcacacagcaaaacaaacaauguuua

SEQ ID NO: 226486 - RNA, 32 nt, Human
uauuuugcagaucaccccacagagcuaggguu

SEQ ID NO: 226487 - RNA, 32 nt, Human
uauuuugcagugguagagguuguuuugcuaaa

SEQ ID NO: 226488 - RNA, 32 nt, Human
uauuuugcauugaagauacauugccagguugu

SEQ ID NO: 226489 - RNA, 31 nt, Human
uauuuugcauuuuuaugccaugcagaacaau

SEQ ID NO: 226490 - RNA, 32 nt, Human
uauuuugccacuggcuucaugcuggaguaaug

SEQ ID NO: 226491 - RNA, 32 nt, Human
uauuuugccauggagaaaucugacagcauugc

SEQ ID NO: 226492 - RNA, 32 nt, Human
uauuuugccugauaccuguuacucaaggcauu

SEQ ID NO: 226493 - RNA, 32 nt, Human
uauuuugcuaccaaaugcuuuuggcuaccaca

SEQ ID NO: 226494 - RNA, 32 nt, Human
uauuuugcuggagcguuauacauagcaguaaa

SEQ ID NO: 226495 - RNA, 32 nt, Human
uauuuugcuuuaaaucucugguaguuuuucca

SEQ ID NO: 226496 - RNA, 32 nt, Human
uauuuugcuuugucuuucucucccuucuuuua

SEQ ID NO: 226497 - RNA, 32 nt, Human
uauuuuggaaggccagacuaggaggagguggg

SEQ ID NO: 226498 - RNA, 32 nt, Human
uauuuuggacaaggaguucuggugacaagcua

SEQ ID NO: 226499 - RNA, 32 nt, Human
uauuuuggauaacauuuguauucagcaugcua

SEQ ID NO: 226500 - RNA, 32 nt, Human
uauuuuggggucucguuugcccagggagggcu

SEQ ID NO: 226501 - RNA, 32 nt, Human
uauuuugguagccuguaacacacggcaacacu

SEQ ID NO: 226502 - RNA, 32 nt, Human
uauuuugguaggaauuaggagaacaaaaagca

SEQ ID NO: 226503 - RNA, 32 nt, Human
uauuuuggucaggaagagaaaguggccauuua

SEQ ID NO: 226504 - RNA, 32 nt, Human
uauuuugguugagucuuugugauuuucuacac

SEQ ID NO: 226505 - RNA, 31 nt, Human
uauuuuguauuuauuuuacauuuaaauuccc

SEQ ID NO: 226506 - RNA, 32 nt, Human
uauuuugucaccgaggcuggagugcaauggcc

SEQ ID NO: 226507 - RNA, 32 nt, Human
uauuuugucuccaaacuacagcccaaguauga

SEQ ID NO: 226508 - RNA, 32 nt, Human
uauuuugucugcgccaccagaaugacaauaaa

SEQ ID NO: 226509 - RNA, 32 nt, Human
uauuuugucuuucuuuccuuuuugacuuuagu

SEQ ID NO: 226510 - RNA, 32 nt, Human
uauuuuguguacacagaagccauuccgagucu

SEQ ID NO: 226511 - RNA, 32 nt, Human
uauuuugugugaaaaucucuuuucuacagauu

SEQ ID NO: 226512 - RNA, 32 nt, Human
uauuuuguuaucugaacuguggaaucaucacu

SEQ ID NO: 226513 - RNA, 32 nt, Human
uauuuuguuguaaagcaucuuaacuacacaua

SEQ ID NO: 226514 - RNA, 32 nt, Human
uauuuuguuuaauaaagaacauucucaaaacg

SEQ ID NO: 226515 - RNA, 32 nt, Human
uauuuuguuuccuuugguuuccuuccucccca

SEQ ID NO: 226516 - RNA, 32 nt, Human
uauuuuguuuuaucuccaugcugacauuugaa

SEQ ID NO: 226517 - RNA, 32 nt, Human
uauuuuguuuugcucugcuggcucuuuaaaga

SEQ ID NO: 226518 - RNA, 32 nt, Human
uauuuuguuuuuaauaaauacaaccugauuua

SEQ ID NO: 226519 - RNA, 32 nt, Human
uauuuuuaaaaaggaaggaaggagcaagugaa

SEQ ID NO: 226520 - RNA, 32 nt, Human
uauuuuuaaaaauuuacaucaagagaggcagu

SEQ ID NO: 226521 - RNA, 32 nt, Human
uauuuuuaaaacacacgaaugaccaaggcuug

SEQ ID NO: 226522 - RNA, 32 nt, Human
uauuuuuaaaggcuuuuuaaaaaucugacaaa

SEQ ID NO: 226523 - RNA, 32 nt, Human
uauuuuuaaagugccaaacaaauccccuuccu

SEQ ID NO: 226524 - RNA, 32 nt, Human
uauuuuuaaauacauuguuucauuuaauucuu

SEQ ID NO: 226525 - RNA, 32 nt, Human
uauuuuuaacauccugugacuucaugcuagaa

SEQ ID NO: 226526 - RNA, 31 nt, Human
uauuuuuaaguguccucagcauugcagaaaa

SEQ ID NO: 226527 - RNA, 32 nt, Human
uauuuuuacaucauuuguuuuuccugaccagu

SEQ ID NO: 226528 - RNA, 32 nt, Human
uauuuuuaguagagacugguuucuccauguug

SEQ ID NO: 226529 - RNA, 32 nt, Human
uauuuuuaguagagauggguuucuccauguug

SEQ ID NO: 226530 - RNA, 32 nt, Human
uauuuuuaguagugucauaagaacggacuagu

SEQ ID NO: 226531 - RNA, 23 nt, Human
uauuuuuauaaauuauuuucuca

SEQ ID NO: 226532 - RNA, 32 nt, Human
uauuuuuauauguauauuuauuaacauguuua

SEQ ID NO: 226533 - RNA, 32 nt, Human
uauuuuuauuggcuuuagcugugucuuuugaa

SEQ ID NO: 226534 - RNA, 32 nt, Human
uauuuuuauuucuuuaagauggagucuugcuc

SEQ ID NO: 226535 - RNA, 32 nt, Human
uauuuuuauuuuauaaacuauuuuggaggccu

SEQ ID NO: 226536 - RNA, 32 nt, Human
uauuuuuauuuucuuccuugucucauaacguu

SEQ ID NO: 226537 - RNA, 32 nt, Human
uauuuuuauuuuuacuuagagacagggucuug

SEQ ID NO: 226538 - RNA, 32 nt, Human
uauuuuuauuuuuguagagacaggagucuugc

SEQ ID NO: 226539 - RNA, 32 nt, Human
uauuuuucaagguuuuaaaacagucuacauug

SEQ ID NO: 226540 - RNA, 32 nt, Human
uauuuuucagaagaauaugaggaacaguacuc

SEQ ID NO: 226541 - RNA, 32 nt, Human
uauuuuucauuaucacauguauggaaauggca

SEQ ID NO: 226542 - RNA, 32 nt, Human
uauuuuucauucuuauuaacacugauaaacuu

SEQ ID NO: 226543 - RNA, 32 nt, Human
uauuuuucauuuccagcucuggcucuaaauaa

SEQ ID NO: 226544 - RNA, 32 nt, Human
uauuuuucccuuucucuuacauuucucaugag

SEQ ID NO: 226545 - RNA, 32 nt, Human
uauuuuuccugcucucuuuuccacuuuuccac

SEQ ID NO: 226546 - RNA, 32 nt, Human
uauuuuuccuuugaguggugacccagcucuuu

SEQ ID NO: 226547 - RNA, 32 nt, Human
uauuuuucuaaauccaacagcccauauuugau

SEQ ID NO: 226548 - RNA, 32 nt, Human
uauuuuucuaauguuuugcauuucaaguggua

SEQ ID NO: 226549 - RNA, 32 nt, Human
uauuuuucuaggagaagaaccucuuugcccag

SEQ ID NO: 226550 - RNA, 32 nt, Human
uauuuuucuaggagccucuugccuugucacuu

SEQ ID NO: 226551 - RNA, 32 nt, Human
uauuuuucucagccaugucauucuuuaaauua

SEQ ID NO: 226552 - RNA, 32 nt, Human
uauuuuucuguagugugaaacagcugcccugu

SEQ ID NO: 226553 - RNA, 32 nt, Human
uauuuuucuguuagcuggguuuacaugugaug

SEQ ID NO: 226554 - RNA, 32 nt, Human
uauuuuucuguuugcggcccaggaagcagugg

SEQ ID NO: 226555 - RNA, 32 nt, Human
uauuuuugaaauaaauuuuucccagugggaga

SEQ ID NO: 226556 - RNA, 32 nt, Human
uauuuuugaagauggcuuauucuuuuguucuu

SEQ ID NO: 226557 - RNA, 32 nt, Human
uauuuuugaaggcauaaaagcaguugaguuuc

SEQ ID NO: 226558 - RNA, 32 nt, Human
uauuuuugacauaucugucaacccacuugacu

SEQ ID NO: 226559 - RNA, 32 nt, Human
uauuuuugaccagcuucauuugucagcuuugc

SEQ ID NO: 226560 - RNA, 32 nt, Human
uauuuuugagcccucuaugugguccaggcaga

SEQ ID NO: 226561 - RNA, 32 nt, Human
uauuuuugauacagcaagugucaaacuugcua

SEQ ID NO: 226562 - RNA, 32 nt, Human
uauuuuugcaaacuaaauacacaaagcaugcc

SEQ ID NO: 226563 - RNA, 32 nt, Human
uauuuuugccuuuauaagauuuucuuggaaaa

SEQ ID NO: 226564 - RNA, 32 nt, Human
uauuuuugcuaccagaugauagcuauuuucau

SEQ ID NO: 226565 - RNA, 32 nt, Human
uauuuuugcugaggcauguaagaggaaauugc

SEQ ID NO: 226566 - RNA, 32 nt, Human
uauuuuuggccauucucauaccacagacaaaa

SEQ ID NO: 226567 - RNA, 32 nt, Human
uauuuuugggaggcagagaggggcaggcuugg

SEQ ID NO: 226568 - RNA, 32 nt, Human
uauuuuugggcaaaugaaaccauaaacuccga

SEQ ID NO: 226569 - RNA, 32 nt, Human
uauuuuuguauuugugcuuuccauccaucuuc

SEQ ID NO: 226570 - RNA, 31 nt, Human
uauuuuugucuaaaagagugauuucuguuua

SEQ ID NO: 226571 - RNA, 32 nt, Human
uauuuuugugcaaaugaacuucuccuuuugac

SEQ ID NO: 226572 - RNA, 32 nt, Human
uauuuuugugguagggaagugggaugcuccuc

SEQ ID NO: 226573 - RNA, 32 nt, Human
uauuuuuguguauguguguauguucacuugaa

SEQ ID NO: 226574 - RNA, 25 nt, Human
uauuuuuguguuuugggguugguug

SEQ ID NO: 226575 - RNA, 32 nt, Human
uauuuuuguuuucagaguagcugugcuaugug

SEQ ID NO: 226576 - RNA, 20 nt, Human
ucaaaaaagugguuuugacc

SEQ ID NO: 226577 - RNA, 32 nt, Human
ucaaaaacaacaacaacaacaaaaacccuauu

SEQ ID NO: 226578 - RNA, 25 nt, Human
ucaaaaacaagacaacuuccucuca

SEQ ID NO: 226579 - RNA, 32 nt, Human
ucaaaaacacuguugguggaaucuuuuauuuc

SEQ ID NO: 226580 - RNA, 32 nt, Human
ucaaaaacucugauuucugcacuugagcauac

SEQ ID NO: 226581 - RNA, 32 nt, Human
ucaaaaacugaggugggguguguguuacgaau

SEQ ID NO: 226582 - RNA, 32 nt, Human
ucaaaaagacuguaugccugugucugaggaac

SEQ ID NO: 226583 - RNA, 32 nt, Human
ucaaaaaggauguaagacuuggagccagagca

SEQ ID NO: 226584 - RNA, 32 nt, Human
ucaaaaaggcagcuaggucagaaggaaacaua

SEQ ID NO: 226585 - RNA, 32 nt, Human
ucaaaaaggccauucaucugaagaagcucaau

SEQ ID NO: 226586 - RNA, 32 nt, Human
ucaaaaaguaagaaagaaaauuuggaaaauga

SEQ ID NO: 226587 - RNA, 32 nt, Human
ucaaaaaguuuaaaaagggaauucuuuagaga

SEQ ID NO: 226588 - RNA, 32 nt, Human
ucaaaaauacaaaaauuagcuggcaugguggu

SEQ ID NO: 226589 - RNA, 32 nt, Human
ucaaaaaucaggcuggagugcaguggcaugau

SEQ ID NO: 226590 - RNA, 25 nt, Human
ucaaaaaucccaggauuacaggcau

SEQ ID NO: 226591 - RNA, 32 nt, Human
ucaaaaaugcuaaaauaauuugggagaaaaua

SEQ ID NO: 226592 - RNA, 32 nt, Human
ucaaaaaugcugggaaagguugggagaaauuu

SEQ ID NO: 226593 - RNA, 32 nt, Human
ucaaaaauggcagaacacggaagcagggcgag

SEQ ID NO: 226594 - RNA, 32 nt, Human
ucaaaaauggcugcaaccacaugagccaugug

SEQ ID NO: 226595 - RNA, 32 nt, Human
ucaaaaaugggucacaggauggccuuuuaaaa

SEQ ID NO: 226596 - RNA, 32 nt, Human
ucaaaaauucaggcugauugucuuuuaucaga

SEQ ID NO: 226597 - RNA, 32 nt, Human
ucaaaaauuucaaagugaaagccacauccucc

SEQ ID NO: 226598 - RNA, 32 nt, Human
ucaaaacaagacccagcuuauuuucugcuugc

SEQ ID NO: 226599 - RNA, 32 nt, Human
ucaaaacaggcagagggaauaggagcaaaaag

SEQ ID NO: 226600 - RNA, 32 nt, Human
ucaaaacauaacacaucacagcacucaguaga

SEQ ID NO: 226601 - RNA, 32 nt, Human
ucaaaacaucauguccuacaucacugccaaga

SEQ ID NO: 226602 - RNA, 32 nt, Human
ucaaaacaugcuuacacuaacacuucuuucca

SEQ ID NO: 226603 - RNA, 24 nt, Human
ucaaaacauguuacagccugcauc

SEQ ID NO: 226604 - RNA, 32 nt, Human
ucaaaaccaauauagaccagaagacaguggaa

SEQ ID NO: 226605 - RNA, 32 nt, Human
ucaaaaccacagugagauauugccucauagga

SEQ ID NO: 226606 - RNA, 32 nt, Human
ucaaaaccagccugaccaacauggugaaaccc

SEQ ID NO: 226607 - RNA, 32 nt, Human
ucaaaaccagccugaccaauauggugaaaccc

SEQ ID NO: 226608 - RNA, 32 nt, Human
ucaaaaccagccuggacaaucuggcgaaaccc

SEQ ID NO: 226609 - RNA, 32 nt, Human
ucaaaaccagccuggccaacauagugaaaccc

SEQ ID NO: 226610 - RNA, 23 nt, Human
ucaaaaccagccuggccaacaug

SEQ ID NO: 226611 - RNA, 32 nt, Human
ucaaaaccagccuggccaacaugcugaaaccu

SEQ ID NO: 226612 - RNA, 32 nt, Human
ucaaaaccagccuggccaacauggugaaaccc

SEQ ID NO: 226613 - RNA, 32 nt, Human
ucaaaaccagccuggccaacauggugaaaccg

SEQ ID NO: 226614 - RNA, 32 nt, Human
ucaaaaccagccugggcaauauagugagaccg

SEQ ID NO: 226615 - RNA, 26 nt, Human
ucaaaaccagccuguccaauauagug

SEQ ID NO: 226616 - RNA, 21 nt, Human
ucaaaaccaguucaguguauc

SEQ ID NO: 226617 - RNA, 32 nt, Human
ucaaaaccauccuggcuaacauggugaaaccc

SEQ ID NO: 226618 - RNA, 32 nt, Human
ucaaaacccagccucuugcaagaagcuaaaaa

SEQ ID NO: 226619 - RNA, 21 nt, Human
ucaaaacggaaugguuuuccu

SEQ ID NO: 226620 - RNA, 21 nt, Human
ucaaaacuacauccucugcca

SEQ ID NO: 226621 - RNA, 32 nt, Human
ucaaaacuccucuuugauaucagaccugaugu

SEQ ID NO: 226622 - RNA, 32 nt, Human
ucaaaacuccuggcaguuccucagggacaggc

SEQ ID NO: 226623 - RNA, 32 nt, Human
ucaaaacugauaacaaugaaacugcggcucuu

SEQ ID NO: 226624 - RNA, 22 nt, Human
ucaaaacugccaugccccccug

SEQ ID NO: 226625 - RNA, 32 nt, Human
ucaaaacugccucugcauugggugaagacuaa

SEQ ID NO: 226626 - RNA, 32 nt, Human
ucaaaacugugugaccacuacagcagaguaaa

SEQ ID NO: 226627 - RNA, 20 nt, Human
ucaaaacuuaauccccaaug

SEQ ID NO: 226628 - RNA, 32 nt, Human
ucaaaacuuacuuuaaaccucuaguuucgugc

SEQ ID NO: 226629 - RNA, 32 nt, Human
ucaaaacuucauuuucugaauguuuuacauaa

SEQ ID NO: 226630 - RNA, 32 nt, Human
ucaaaacuuccagagaucuuaauggcuauaua

SEQ ID NO: 226631 - RNA, 32 nt, Human
ucaaaagaaagaggagaaaggaagggaagcau

SEQ ID NO: 226632 - RNA, 32 nt, Human
ucaaaagaacaaaauccacagaugcaauguga

SEQ ID NO: 226633 - RNA, 32 nt, Human
ucaaaagaacaggcaggcugugccaguuuagu

SEQ ID NO: 226634 - RNA, 32 nt, Human
ucaaaagacucuuugaauucagaaagaugauu

SEQ ID NO: 226635 - RNA, 32 nt, Human
ucaaaagagaagccagacccagcuucagauca

SEQ ID NO: 226636 - RNA, 21 nt, Human
ucaaaagauccaacuuuuucu

SEQ ID NO: 226637 - RNA, 32 nt, Human
ucaaaagauggacugagcuuccacuuggguuu

SEQ ID NO: 226638 - RNA, 32 nt, Human
ucaaaagauguucugauaacauugugauugua

SEQ ID NO: 226639 - RNA, 22 nt, Human
ucaaaagauuccaucagaacuu

SEQ ID NO: 226640 - RNA, 32 nt, Human
ucaaaagcaaaaagauaacgauccuuucuacu

SEQ ID NO: 226641 - RNA, 32 nt, Human
ucaaaagcaaagcauucucuucccagugccua

SEQ ID NO: 226642 - RNA, 32 nt, Human
ucaaaagcaccuucugcacacagucugcacac

SEQ ID NO: 226643 - RNA, 32 nt, Human
ucaaaagcuucuguccagcaaaggacacaguc

SEQ ID NO: 226644 - RNA, 32 nt, Human
ucaaaaggaaggcuuccuuuaaggucaaguuu

SEQ ID NO: 226645 - RNA, 32 nt, Human
ucaaaaggaauccugcaaguagccuuaauaac

SEQ ID NO: 226646 - RNA, 32 nt, Human
ucaaaaggacugcccucucuuguucuuggaaa

SEQ ID NO: 226647 - RNA, 32 nt, Human
ucaaaaggagaaaaguauaggcuguggacaau

SEQ ID NO: 226648 - RNA, 32 nt, Human
ucaaaaggauuucaggcugagugugguggcuc

SEQ ID NO: 226649 - RNA, 32 nt, Human
ucaaaaggcucaacagacugaauggccucuug

SEQ ID NO: 226650 - RNA, 32 nt, Human
ucaaaagggcuggcucggcacuggcuccuugc

SEQ ID NO: 226651 - RNA, 32 nt, Human
ucaaaagguauuagcaaauuuauguauucuuc

SEQ ID NO: 226652 - RNA, 32 nt, Human
ucaaaagguuuuaauaaaucuaauccuauuuc

SEQ ID NO: 226653 - RNA, 32 nt, Human
ucaaaaguaaaagcaguggcccugcuuugggg

SEQ ID NO: 226654 - RNA, 32 nt, Human
ucaaaagucacagaacuggaaaguuaauucau

SEQ ID NO: 226655 - RNA, 32 nt, Human
ucaaaagucuuucauuggcagaucuugguagc

SEQ ID NO: 226656 - RNA, 32 nt, Human
ucaaaaguuaucucccucucccugugaugccu

SEQ ID NO: 226657 - RNA, 32 nt, Human
ucaaaaguuuuuauuuugauauuugaaagaga

SEQ ID NO: 226658 - RNA, 32 nt, Human
ucaaaauaauaagaaccauauguaauaaaccc

SEQ ID NO: 226659 - RNA, 32 nt, Human
ucaaaauaccaaaaauuacagcuuuggaacug

SEQ ID NO: 226660 - RNA, 32 nt, Human
ucaaaauaccugccaaauggcaagaguuucca

SEQ ID NO: 226661 - RNA, 32 nt, Human
ucaaaauaccuguaaucccagcacuuugggag

SEQ ID NO: 226662 - RNA, 32 nt, Human
ucaaaauacuguaaucucagcauuuugggaga

SEQ ID NO: 226663 - RNA, 21 nt, Human
ucaaaauacuuuacucuuuca

SEQ ID NO: 226664 - RNA, 32 nt, Human
ucaaaauagggaggaaauagccagaaagucau

SEQ ID NO: 226665 - RNA, 32 nt, Human
ucaaaauauacaacuacagauucucugacaga

SEQ ID NO: 226666 - RNA, 32 nt, Human
ucaaaauauauacacccccaacacuggaguac

SEQ ID NO: 226667 - RNA, 32 nt, Human
ucaaaauauucucgaaggcagugcagucacua

SEQ ID NO: 226668 - RNA, 32 nt, Human
ucaaaaucagccagguagaccugaagggguac

SEQ ID NO: 226669 - RNA, 32 nt, Human
ucaaaaucagccuggccaaaaugcugaaacuc

SEQ ID NO: 226670 - RNA, 32 nt, Human
ucaaaaucauguccccuccacuuccacugcca

SEQ ID NO: 226671 - RNA, 32 nt, Human
ucaaaaucuggugccucucccuucccuuuccc

SEQ ID NO: 226672 - RNA, 32 nt, Human
ucaaaaugaaggaggaguacucaggaaaacau

SEQ ID NO: 226673 - RNA, 32 nt, Human
ucaaaaugaggccugugaaauacaagguuccc

SEQ ID NO: 226674 - RNA, 32 nt, Human
ucaaaaugaguggcuaauucuccauacguaau

SEQ ID NO: 226675 - RNA, 24 nt, Human
ucaaaaugcugggauuacaggugu

SEQ ID NO: 226676 - RNA, 32 nt, Human
ucaaaaugcuuucugggccagacaugguggcu

SEQ ID NO: 226677 - RNA, 21 nt, Human
ucaaaauggaaagaguauuca

SEQ ID NO: 226678 - RNA, 32 nt, Human
ucaaaaugggcucccaugagacugccuggcuc

SEQ ID NO: 226679 - RNA, 32 nt, Human
ucaaaauggggguaaacagaagaggcugcucc

SEQ ID NO: 226680 - RNA, 32 nt, Human
ucaaaauguagauucauugugucuguguggua

SEQ ID NO: 226681 - RNA, 32 nt, Human
ucaaaauuaacacuauuaaauguaauauaagc

SEQ ID NO: 226682 - RNA, 32 nt, Human
ucaaaauuagguauaguuaacacagaauaccc

SEQ ID NO: 226683 - RNA, 21 nt, Human
ucaaaauuccaaauuuuuucu

SEQ ID NO: 226684 - RNA, 22 nt, Human
ucaaaauucugcgccuuuuucu

SEQ ID NO: 226685 - RNA, 32 nt, Human
ucaaaauuuccagauuugggcuauuucuguau

SEQ ID NO: 226686 - RNA, 23 nt, Human
ucaaacaauacacuguuaccuuu

SEQ ID NO: 226687 - RNA, 32 nt, Human
ucaaacaaugcccuaaugcugaggcuuaucug

SEQ ID NO: 226688 - RNA, 32 nt, Human
ucaaacacacaaaaauacugccuuguacuggu

SEQ ID NO: 226689 - RNA, 32 nt, Human
ucaaacacacaugcucuacaaacaauuugugc

SEQ ID NO: 226690 - RNA, 32 nt, Human
ucaaacacacuuccagcuggcauauagguugc

SEQ ID NO: 226691 - RNA, 32 nt, Human
ucaaacagaacagcuccccuuguagcugucuu

SEQ ID NO: 226692 - RNA, 32 nt, Human
ucaaacagacacuuuccucaaacauauaaaug

SEQ ID NO: 226693 - RNA, 32 nt, Human
ucaaacagagcauucugaguguuuacaggcgg

SEQ ID NO: 226694 - RNA, 32 nt, Human
ucaaacagaguuuaccugagaugugcaucugg

SEQ ID NO: 226695 - RNA, 32 nt, Human
ucaaacaggccaggcuccagcacuucaguacg

SEQ ID NO: 226696 - RNA, 32 nt, Human
ucaaacaggccuggguaucugaggcuugcuug

SEQ ID NO: 226697 - RNA, 32 nt, Human
ucaaacagggagacagacagagguugcaguga

SEQ ID NO: 226698 - RNA, 32 nt, Human
ucaaaccaaacaguggggaccccaacagaaga

SEQ ID NO: 226699 - RNA, 32 nt, Human
ucaaaccacaauauauacauuuggaucagugu

SEQ ID NO: 226700 - RNA, 32 nt, Human
ucaaaccacauauguuauugggagaaacgauu

SEQ ID NO: 226701 - RNA, 32 nt, Human
ucaaaccacugcaauccagccugggcaacgag

SEQ ID NO: 226702 - RNA, 32 nt, Human
ucaaaccacuguaguccagccugagugacaga

SEQ ID NO: 226703 - RNA, 32 nt, Human
ucaaaccagcccugguguagcagacacugcaa

SEQ ID NO: 226704 - RNA, 32 nt, Human
ucaaaccagugaagcuugggaaagucauugac

SEQ ID NO: 226705 - RNA, 24 nt, Human
ucaaaccauuugagccaaacugua

SEQ ID NO: 226706 - RNA, 32 nt, Human
ucaaacccagaagguuuaaucacuucauccca

SEQ ID NO: 226707 - RNA, 23 nt, Human
ucaaaccccggaccucaggugau

SEQ ID NO: 226708 - RNA, 19 nt, Human
ucaaaccccugggcucaag

SEQ ID NO: 226709 - RNA, 32 nt, Human
ucaaacccugcucccacuuugugagagccagc

SEQ ID NO: 226710 - RNA, 32 nt, Human
ucaaacccuucccucacucucugccucauuuu

SEQ ID NO: 226711 - RNA, 32 nt, Human
ucaaaccggauguguacuuugccccucaguag

SEQ ID NO: 226712 - RNA, 19 nt, Human
ucaaaccguguugauuuuu

SEQ ID NO: 226713 - RNA, 32 nt, Human
ucaaaccguguugauuuuugcugguaaguauu

SEQ ID NO: 226714 - RNA, 24 nt, Human
ucaaaccuauaaucccagcacuuu

SEQ ID NO: 226715 - RNA, 32 nt, Human
ucaaaccuauaaucccagcacuuugggaggcc

SEQ ID NO: 226716 - RNA, 32 nt, Human
ucaaaccucacccugaccuccugcugccuaug

SEQ ID NO: 226717 - RNA, 32 nt, Human
ucaaaccuccauuagaccucaggacuccaaga

SEQ ID NO: 226718 - RNA, 32 nt, Human
ucaaaccugaccagacagcagaggggcggcuc

SEQ ID NO: 226719 - RNA, 32 nt, Human
ucaaaccugaguaucaguacaugccuagaccu

SEQ ID NO: 226720 - RNA, 18 nt, Human
ucaaaccugaugauucuu

SEQ ID NO: 226721 - RNA, 32 nt, Human
ucaaaccugcauauugugauuuuaauuugacc

SEQ ID NO: 226722 - RNA, 24 nt, Human
ucaaaccuggcggacagagugaga

SEQ ID NO: 226723 - RNA, 32 nt, Human
ucaaaccuggcggacagagugagacccuaucu

SEQ ID NO: 226724 - RNA, 32 nt, Human
ucaaaccugggaguuugaagcugcagugagcc

SEQ ID NO: 226725 - RNA, 24 nt, Human
ucaaaccuguaaucccagcacuuu

SEQ ID NO: 226726 - RNA, 32 nt, Human
ucaaaccuguaaucccagcacuuugggaggcc

SEQ ID NO: 226727 - RNA, 32 nt, Human
ucaaaccuguaaucccagcacuuugggaggcu

SEQ ID NO: 226728 - RNA, 32 nt, Human
ucaaaccugugguguguggaagugaccacugg

SEQ ID NO: 226729 - RNA, 32 nt, Human
ucaaaccuucagcugagacugcagcccugcca

SEQ ID NO: 226730 - RNA, 32 nt, Human
ucaaacgcggagggcugcgugcagugggagcg

SEQ ID NO: 226731 - RNA, 32 nt, Human
ucaaacgucccaaaaggagaaaugcuuucuua

SEQ ID NO: 226732 - RNA, 32 nt, Human
ucaaacuaagaugacuuauaagaaauaaaaga

SEQ ID NO: 226733 - RNA, 32 nt, Human
ucaaacuacaaauaggcuuuucccucuccccu

SEQ ID NO: 226734 - RNA, 18 nt, Human
ucaaacuacagagugaga

SEQ ID NO: 226735 - RNA, 32 nt, Human
ucaaacuacauacuugcuauccguuucacuag

SEQ ID NO: 226736 - RNA, 32 nt, Human
ucaaacuacugcccaguuucccuggacuagcc

SEQ ID NO: 226737 - RNA, 19 nt, Human
ucaaacuacugggcucaag

SEQ ID NO: 226738 - RNA, 24 nt, Human
ucaaacucauccuucaaggugauu

SEQ ID NO: 226739 - RNA, 23 nt, Human
ucaaacucaugggcucaagugau

SEQ ID NO: 226740 - RNA, 32 nt, Human
ucaaacuccaaccagucacccaaccagagccu

SEQ ID NO: 226741 - RNA, 19 nt, Human
ucaaacuccagggcucaag

SEQ ID NO: 226742 - RNA, 23 nt, Human
ucaaacucccaaagcgcaugauu

SEQ ID NO: 226743 - RNA, 23 nt, Human
ucaaacucccaaccucaagugau

SEQ ID NO: 226744 - RNA, 23 nt, Human
ucaaacucccaaccucaggugau

SEQ ID NO: 226745 - RNA, 23 nt, Human
ucaaacucccaggcucaagggau

SEQ ID NO: 226746 - RNA, 32 nt, Human
ucaaacuccccagcucgggugauucuuccugc

SEQ ID NO: 226747 - RNA, 22 nt, Human
ucaaacucccgaccucaaguga

SEQ ID NO: 226748 - RNA, 23 nt, Human
ucaaacucccgaccucaagugau

SEQ ID NO: 226749 - RNA, 23 nt, Human
ucaaacucccgaccucaggugau

SEQ ID NO: 226750 - RNA, 23 nt, Human
ucaaacucccgacuucaggugau

SEQ ID NO: 226751 - RNA, 19 nt, Human
ucaaacucccgggcucaag

SEQ ID NO: 226752 - RNA, 19 nt, Human
ucaaacuccggagcucaag

SEQ ID NO: 226753 - RNA, 23 nt, Human
ucaaacuccuaaccucaacugau

SEQ ID NO: 226754 - RNA, 21 nt, Human
ucaaacuccuagccucaagug

SEQ ID NO: 226755 - RNA, 23 nt, Human
ucaaacuccuaggcucaagcgau

SEQ ID NO: 226756 - RNA, 23 nt, Human
ucaaacuccuaggcucaggcgau

SEQ ID NO: 226757 - RNA, 23 nt, Human
ucaaacuccuccacucaggugau

SEQ ID NO: 226758 - RNA, 24 nt, Human
ucaaacuccucgguucaagcaauu

SEQ ID NO: 226759 - RNA, 23 nt, Human
ucaaacuccugaacucaggugau

SEQ ID NO: 226760 - RNA, 23 nt, Human
ucaaacuccugaccgcaggugau

SEQ ID NO: 226761 - RNA, 21 nt, Human
ucaaacuccugaccuagugau

SEQ ID NO: 226762 - RNA, 23 nt, Human
ucaaacuccugaccucaaaugau

SEQ ID NO: 226763 - RNA, 23 nt, Human
ucaaacuccugaccucaagcgau

SEQ ID NO: 226764 - RNA, 22 nt, Human
ucaaacuccugaccucaaggau

SEQ ID NO: 226765 - RNA, 20 nt, Human
ucaaacuccugaccucaagu

SEQ ID NO: 226766 - RNA, 22 nt, Human
ucaaacuccugaccucaaguga

SEQ ID NO: 226767 - RNA, 23 nt, Human
ucaaacuccugaccucaagugau

SEQ ID NO: 226768 - RNA, 23 nt, Human
ucaaacuccugaccucagaugau

SEQ ID NO: 226769 - RNA, 24 nt, Human
ucaaacuccugaccucagaugauu

SEQ ID NO: 226770 - RNA, 23 nt, Human
ucaaacuccugaccucaggcgau

SEQ ID NO: 226771 - RNA, 23 nt, Human
ucaaacuccugaccucaggugau

SEQ ID NO: 226772 - RNA, 23 nt, Human
ucaaacuccugaccucaguugau

SEQ ID NO: 226773 - RNA, 21 nt, Human
ucaaacuccugaccucaugau

SEQ ID NO: 226774 - RNA, 22 nt, Human
ucaaacuccugaccucaugauu

SEQ ID NO: 226775 - RNA, 23 nt, Human
ucaaacuccugaccuccagugau

SEQ ID NO: 226776 - RNA, 23 nt, Human
ucaaacuccugaccugaggcgau

SEQ ID NO: 226777 - RNA, 23 nt, Human
ucaaacuccugaccuuaggugau

SEQ ID NO: 226778 - RNA, 23 nt, Human
ucaaacuccugaccuuaguugau

SEQ ID NO: 226779 - RNA, 23 nt, Human
ucaaacuccugacgccaggugau

SEQ ID NO: 226780 - RNA, 21 nt, Human
ucaaacuccugacgucgugau

SEQ ID NO: 226781 - RNA, 23 nt, Human
ucaaacuccugacucgaagugau

SEQ ID NO: 226782 - RNA, 23 nt, Human
ucaaacuccugacuucaaaugau

SEQ ID NO: 226783 - RNA, 23 nt, Human
ucaaacuccugacuucaagugau

SEQ ID NO: 226784 - RNA, 23 nt, Human
ucaaacuccugacuucaggugau

SEQ ID NO: 226785 - RNA, 21 nt, Human
ucaaacuccugacuuugugau

SEQ ID NO: 226786 - RNA, 23 nt, Human
ucaaacuccugagcccaggugau

SEQ ID NO: 226787 - RNA, 19 nt, Human
ucaaacuccugagcucaag

SEQ ID NO: 226788 - RNA, 23 nt, Human
ucaaacuccugagcucaagcgau

SEQ ID NO: 226789 - RNA, 20 nt, Human
ucaaacuccugagcucaagu

SEQ ID NO: 226790 - RNA, 23 nt, Human
ucaaacuccugagcucaagugau

SEQ ID NO: 226791 - RNA, 23 nt, Human
ucaaacuccugaucucaagugau

SEQ ID NO: 226792 - RNA, 23 nt, Human
ucaaacuccugcucucaagugau

SEQ ID NO: 226793 - RNA, 19 nt, Human
ucaaacuccuggacucaag

SEQ ID NO: 226794 - RNA, 23 nt, Human
ucaaacuccuggacucaagcgau

SEQ ID NO: 226795 - RNA, 23 nt, Human
ucaaacuccuggacucaagugau

SEQ ID NO: 226796 - RNA, 23 nt, Human
ucaaacuccuggacucaugggau

SEQ ID NO: 226797 - RNA, 19 nt, Human
ucaaacuccuggccucaag

SEQ ID NO: 226798 - RNA, 23 nt, Human
ucaaacuccuggccucaagugau

SEQ ID NO: 226799 - RNA, 23 nt, Human
ucaaacuccuggccucaaguggu

SEQ ID NO: 226800 - RNA, 23 nt, Human
ucaaacuccuggccucaggcgau

SEQ ID NO: 226801 - RNA, 23 nt, Human
ucaaacuccuggccucaggugau

SEQ ID NO: 226802 - RNA, 23 nt, Human
ucaaacuccuggccucaugugau

SEQ ID NO: 226803 - RNA, 23 nt, Human
ucaaacuccuggcuucaagugau

SEQ ID NO: 226804 - RNA, 19 nt, Human
ucaaacuccugggcacaag

SEQ ID NO: 226805 - RNA, 19 nt, Human
ucaaacuccugggcucaag

SEQ ID NO: 226806 - RNA, 22 nt, Human
ucaaacuccugggcucaagcga

SEQ ID NO: 226807 - RNA, 23 nt, Human
ucaaacuccugggcucaagcgau

SEQ ID NO: 226808 - RNA, 23 nt, Human
ucaaacuccugggcucaagggau

SEQ ID NO: 226809 - RNA, 20 nt, Human
ucaaacuccugggcucaagu

SEQ ID NO: 226810 - RNA, 22 nt, Human
ucaaacuccugggcucaaguga

SEQ ID NO: 226811 - RNA, 23 nt, Human
ucaaacuccugggcucaagugau

SEQ ID NO: 226812 - RNA, 23 nt, Human
ucaaacuccugggcucagaugau

SEQ ID NO: 226813 - RNA, 19 nt, Human
ucaaacuccugggcucagg

SEQ ID NO: 226814 - RNA, 23 nt, Human
ucaaacuccugggcucaggcgau

SEQ ID NO: 226815 - RNA, 23 nt, Human
ucaaacuccugggcuccaacgau

SEQ ID NO: 226816 - RNA, 22 nt, Human
ucaaacuccugggcuccaguga

SEQ ID NO: 226817 - RNA, 23 nt, Human
ucaaacuccugggcuccagugau

SEQ ID NO: 226818 - RNA, 19 nt, Human
ucaaacuccuggggucaag

SEQ ID NO: 226819 - RNA, 23 nt, Human
ucaaacuccuggguucaagagau

SEQ ID NO: 226820 - RNA, 23 nt, Human
ucaaacuccuggucucaagugau

SEQ ID NO: 226821 - RNA, 22 nt, Human
ucaaacuccugugcucaaguga

SEQ ID NO: 226822 - RNA, 23 nt, Human
ucaaacuccuuggcugaagugau

SEQ ID NO: 226823 - RNA, 23 nt, Human
ucaaacucuaacgucaagugauu

SEQ ID NO: 226824 - RNA, 32 nt, Human
ucaaacucucauuuaggugacagccuggugac

SEQ ID NO: 226825 - RNA, 32 nt, Human
ucaaacucuccccaucucuacugccucacccc

SEQ ID NO: 226826 - RNA, 23 nt, Human
ucaaacucugcauccuucucuaa

SEQ ID NO: 226827 - RNA, 24 nt, Human
ucaaacucuggggcucaagcaguu

SEQ ID NO: 226828 - RNA, 23 nt, Human
ucaaacucuuaggcucaggcgau

SEQ ID NO: 226829 - RNA, 23 nt, Human
ucaaacucuugacuucaagugau

SEQ ID NO: 226830 - RNA, 19 nt, Human
ucaaacucuugggcucaag

SEQ ID NO: 226831 - RNA, 32 nt, Human
ucaaacugagaauguaaccguuuccagacuuu

SEQ ID NO: 226832 - RNA, 32 nt, Human
ucaaacugcaaagcuaaugauaugcuaucugc

SEQ ID NO: 226833 - RNA, 32 nt, Human
ucaaacugcagacauacugucaacaucuggga

SEQ ID NO: 226834 - RNA, 32 nt, Human
ucaaacugcauuugcaaaaugugcaaagaccu

SEQ ID NO: 226835 - RNA, 23 nt, Human
ucaaacugcuaacaucaagugau

SEQ ID NO: 226836 - RNA, 32 nt, Human
ucaaacugcugccuuugccuccagugcauccu

SEQ ID NO: 226837 - RNA, 32 nt, Human
ucaaacugggcuuccuggauguacaaauggaa

SEQ ID NO: 226838 - RNA, 32 nt, Human
ucaaacuguaauaagcucaucaauuucauuuc

SEQ ID NO: 226839 - RNA, 32 nt, Human
ucaaacuguaugccugcuccagccuggacugc

SEQ ID NO: 226840 - RNA, 32 nt, Human
ucaaacugucucaagcugagagauguuuuuag

SEQ ID NO: 226841 - RNA, 32 nt, Human
ucaaacuuaaggcugaucagcagaugggaugu

SEQ ID NO: 226842 - RNA, 23 nt, Human
ucaaacuucugaccucaagugau

SEQ ID NO: 226843 - RNA, 23 nt, Human
ucaaacuucuggacucaagugau

SEQ ID NO: 226844 - RNA, 23 nt, Human
ucaaacuucuggccucaagugau

SEQ ID NO: 226845 - RNA, 24 nt, Human
ucaaacuucugggcucaagcaauu

SEQ ID NO: 226846 - RNA, 20 nt, Human
ucaaacuucugggcucaagu

SEQ ID NO: 226847 - RNA, 19 nt, Human
ucaaacuucugggcuuaag

SEQ ID NO: 226848 - RNA, 32 nt, Human
ucaaacuugaaaagaaggacagagccacacaa

SEQ ID NO: 226849 - RNA, 32 nt, Human
ucaaacuugccuggcaguguuuguucaaaacu

SEQ ID NO: 226850 - RNA, 32 nt, Human
ucaaacuugcuugaccuccacuuuucaggaga

SEQ ID NO: 226851 - RNA, 32 nt, Human
ucaaacuuuugaaagaucuuugcaguguaauu

SEQ ID NO: 226852 - RNA, 32 nt, Human
ucaaagaaaaacaaacacugcguaaauuuuua

SEQ ID NO: 226853 - RNA, 32 nt, Human
ucaaagaaaaucaagaaauggcuuuggagaaa

SEQ ID NO: 226854 - RNA, 32 nt, Human
ucaaagaaacggcucugauccucuuuuccccc

SEQ ID NO: 226855 - RNA, 32 nt, Human
ucaaagaaaggaaggaaggaaggacaacuccc

SEQ ID NO: 226856 - RNA, 18 nt, Human
ucaaagaaauccuccaau

SEQ ID NO: 226857 - RNA, 32 nt, Human
ucaaagaacagagaggaggaggagggagaaau

SEQ ID NO: 226858 - RNA, 32 nt, Human
ucaaagaauaccagauauuuuagaguuggaag

SEQ ID NO: 226859 - RNA, 32 nt, Human
ucaaagaauuuauguaaccuucccagagucac

SEQ ID NO: 226860 - RNA, 32 nt, Human
ucaaagacaucacuggcuuugaagggaaaauu

SEQ ID NO: 226861 - RNA, 32 nt, Human
ucaaagacuauguccuaguggagggaguaauc

SEQ ID NO: 226862 - RNA, 32 nt, Human
ucaaagacugagcaguucagugguacauaaau

SEQ ID NO: 226863 - RNA, 32 nt, Human
ucaaagagaacaguaaugacagcuuccaacaa

SEQ ID NO: 226864 - RNA, 32 nt, Human
ucaaagagagugagagaagcaaguugcaugag

SEQ ID NO: 226865 - RNA, 32 nt, Human
ucaaagagagugaggaagagaaggagagagag

SEQ ID NO: 226866 - RNA, 32 nt, Human
ucaaagagauagagagcugcuuuuaugcugag

SEQ ID NO: 226867 - RNA, 32 nt, Human
ucaaagagccggcaagaauagagcagagacca

SEQ ID NO: 226868 - RNA, 32 nt, Human
ucaaagaggaaaggagaaaaacaaacagacca

SEQ ID NO: 226869 - RNA, 32 nt, Human
ucaaagaggaagaagaaaauagcagcaagaaa

SEQ ID NO: 226870 - RNA, 32 nt, Human
ucaaagaggagcugacacaagagaccacaguu

SEQ ID NO: 226871 - RNA, 32 nt, Human
ucaaagaggagggggaguggccucaccaugug

SEQ ID NO: 226872 - RNA, 32 nt, Human
ucaaagaggcauccuggcugggccaguugauu

SEQ ID NO: 226873 - RNA, 21 nt, Human
ucaaagauaaaaaacugggug

SEQ ID NO: 226874 - RNA, 32 nt, Human
ucaaagauagcucuuugcaagugccuugauua

SEQ ID NO: 226875 - RNA, 31 nt, Human
ucaaagaugacagccucagcucuugggggcc

SEQ ID NO: 226876 - RNA, 32 nt, Human
ucaaagaugccuuuugugagagugcccuaacc

SEQ ID NO: 226877 - RNA, 32 nt, Human
ucaaagauggcucaccaaucaccugccuguuu

SEQ ID NO: 226878 - RNA, 21 nt, Human
ucaaagauuuagaaccagaaa

SEQ ID NO: 226879 - RNA, 32 nt, Human
ucaaagcaaagucaugacaaugcagggcuccu

SEQ ID NO: 226880 - RNA, 21 nt, Human
ucaaagcaaauucaaauucuc

SEQ ID NO: 226881 - RNA, 32 nt, Human
ucaaagcaacaccaccaccacugaaguauuuu

SEQ ID NO: 226882 - RNA, 22 nt, Human
ucaaagcaagcaggagaaucuc

SEQ ID NO: 226883 - RNA, 32 nt, Human
ucaaagcaauagaaauagcuuggugguccuau

SEQ ID NO: 226884 - RNA, 32 nt, Human
ucaaagcaauugaaaugcauugcucuggaucu

SEQ ID NO: 226885 - RNA, 32 nt, Human
ucaaagcacaacucuauuucaugcuuucuguu

SEQ ID NO: 226886 - RNA, 32 nt, Human
ucaaagcacauuguagauauucagagagaaga

SEQ ID NO: 226887 - RNA, 32 nt, Human
ucaaagcaccagaauacacaaaguaaagacug

SEQ ID NO: 226888 - RNA, 32 nt, Human
ucaaagcaccugcuaaucaaagauuuccuauu

SEQ ID NO: 226889 - RNA, 32 nt, Human
ucaaagcacuuguauuuuccagccuaggcuuu

SEQ ID NO: 226890 - RNA, 22 nt, Human
ucaaagcaguggaggagcacac

SEQ ID NO: 226891 - RNA, 32 nt, Human
ucaaagcaguuggcuggaauacuuuugucaga

SEQ ID NO: 226892 - RNA, 32 nt, Human
ucaaagcaucucccccaucugcauacccagca

SEQ ID NO: 226893 - RNA, 22 nt, Human
ucaaagccaaacucaugcacac

SEQ ID NO: 226894 - RNA, 32 nt, Human
ucaaagccaaacucaugcacacacacgcagac

SEQ ID NO: 226895 - RNA, 32 nt, Human
ucaaagccaacuguccaccaggccugugcuag

SEQ ID NO: 226896 - RNA, 32 nt, Human
ucaaagccaagaccaagagccagugagguuug

SEQ ID NO: 226897 - RNA, 32 nt, Human
ucaaagccaagcaaaaugcacacccuuuuucu

SEQ ID NO: 226898 - RNA, 32 nt, Human
ucaaagccacaucgcauugaagccacaggugg

SEQ ID NO: 226899 - RNA, 23 nt, Human
ucaaagccagcacaagagcacac

SEQ ID NO: 226900 - RNA, 32 nt, Human
ucaaagccagccugagccacauagugagacug

SEQ ID NO: 226901 - RNA, 32 nt, Human
ucaaagccagcguccuccucugugaccaaugu

SEQ ID NO: 226902 - RNA, 32 nt, Human
ucaaagccaucccccaccagacugcuuagcgu

SEQ ID NO: 226903 - RNA, 32 nt, Human
ucaaagccaucuuuaaauaguucuuuaaaaau

SEQ ID NO: 226904 - RNA, 32 nt, Human
ucaaagcccacuuuagaaccuaaagcauuuug

SEQ ID NO: 226905 - RNA, 32 nt, Human
ucaaagcccagguaucucucagaucugcugcc

SEQ ID NO: 226906 - RNA, 32 nt, Human
ucaaagccccaaauuccugggcuggggauucc

SEQ ID NO: 226907 - RNA, 32 nt, Human
ucaaagcccccucugcacuggggugacuaucu

SEQ ID NO: 226908 - RNA, 32 nt, Human
ucaaagcccugccucugcccgacaggcugaag

SEQ ID NO: 226909 - RNA, 32 nt, Human
ucaaagcccugcuucuaagcagccagggagca

SEQ ID NO: 226910 - RNA, 32 nt, Human
ucaaagccgucgguuacagaggagacugacag

SEQ ID NO: 226911 - RNA, 32 nt, Human
ucaaagccuaucuaccuugauccaaaaacuac

SEQ ID NO: 226912 - RNA, 32 nt, Human
ucaaagccuucccaguccccagcaccugccuu

SEQ ID NO: 226913 - RNA, 32 nt, Human
ucaaagccuuuaccaguaucuuccuguauucc

SEQ ID NO: 226914 - RNA, 32 nt, Human
ucaaagccuuucuuuuccagccgagcgggccc

SEQ ID NO: 226915 - RNA, 32 nt, Human
ucaaagcgggccgugcugccccggcugccucg

SEQ ID NO: 226916 - RNA, 32 nt, Human
ucaaagcucacugcagccuugaacuccuaggc

SEQ ID NO: 226917 - RNA, 32 nt, Human
ucaaagcucacugcagccuugaauuccugggc

SEQ ID NO: 226918 - RNA, 32 nt, Human
ucaaagcucagagacugguuugaaugguuuaa

SEQ ID NO: 226919 - RNA, 32 nt, Human
ucaaagcuccacccaccucaucccagguacau

SEQ ID NO: 226920 - RNA, 32 nt, Human
ucaaagcuccauauucucuuguccucaaucau

SEQ ID NO: 226921 - RNA, 32 nt, Human
ucaaagcucuagacuuccauggcucuacauac

SEQ ID NO: 226922 - RNA, 18 nt, Human
ucaaagcucucucccaau

SEQ ID NO: 226923 - RNA, 32 nt, Human
ucaaagcugcaaucugcccacucucagguacu

SEQ ID NO: 226924 - RNA, 21 nt, Human
ucaaagcugcacugcaaaggg

SEQ ID NO: 226925 - RNA, 32 nt, Human
ucaaagcugcuugcuguaacugugugagauug

SEQ ID NO: 226926 - RNA, 32 nt, Human
ucaaagcuggacugaguugguccuguucuggc

SEQ ID NO: 226927 - RNA, 20 nt, Human
ucaaagcuguauuuccaaga

SEQ ID NO: 226928 - RNA, 30 nt, Human
ucaaagcuucugcagauagaaagaccagca

SEQ ID NO: 226929 - RNA, 32 nt, Human
ucaaagcuuguuuuauuucaccacuguaggaa

SEQ ID NO: 226930 - RNA, 21 nt, Human
ucaaagcuuucuccuccaaga

SEQ ID NO: 226931 - RNA, 32 nt, Human
ucaaaggaaaguuuuuaaaauguuuuuaaaac

SEQ ID NO: 226932 - RNA, 32 nt, Human
ucaaaggaagcaggggauucagugagugugaa

SEQ ID NO: 226933 - RNA, 32 nt, Human
ucaaaggaaugagaaaagacaaguuaagaaug

SEQ ID NO: 226934 - RNA, 32 nt, Human
ucaaaggaaugaguaaagcagaaaaacuuuua

SEQ ID NO: 226935 - RNA, 32 nt, Human
ucaaaggaauguaccagccacugugaaccaaa

SEQ ID NO: 226936 - RNA, 32 nt, Human
ucaaaggacacgagagaaaggaaggggaagaa

SEQ ID NO: 226937 - RNA, 32 nt, Human
ucaaaggacaggcgaggagcugugggcgcagg

SEQ ID NO: 226938 - RNA, 32 nt, Human
ucaaaggaccccacagcaccugggccagacca

SEQ ID NO: 226939 - RNA, 32 nt, Human
ucaaaggaccuucuggcagacacuucaucaaa

SEQ ID NO: 226940 - RNA, 32 nt, Human
ucaaaggagguggguuacauggguaaugcauu

SEQ ID NO: 226941 - RNA, 32 nt, Human
ucaaaggagucaggaauuauuuauguagaaac

SEQ ID NO: 226942 - RNA, 32 nt, Human
ucaaaggauaaaccuuggacagcagggcugcc

SEQ ID NO: 226943 - RNA, 32 nt, Human
ucaaaggcaaagaaagcacauuguuuuccuuc

SEQ ID NO: 226944 - RNA, 32 nt, Human
ucaaaggcaaaggacacuccuuucuaauugca

SEQ ID NO: 226945 - RNA, 32 nt, Human
ucaaaggcaaccugcuccacagagccagcccc

SEQ ID NO: 226946 - RNA, 32 nt, Human
ucaaaggcagaggggcuuccaggcccuggaug

SEQ ID NO: 226947 - RNA, 32 nt, Human
ucaaaggcauccugcaaccaccccauccaucc

SEQ ID NO: 226948 - RNA, 32 nt, Human
ucaaaggcccccuuucuauguucauguuaguu

SEQ ID NO: 226949 - RNA, 32 nt, Human
ucaaaggccguguucaccuccacgcagaagcc

SEQ ID NO: 226950 - RNA, 32 nt, Human
ucaaaggccuucaggaccccagccucuuucca

SEQ ID NO: 226951 - RNA, 32 nt, Human
ucaaaggcugggagauucuaagaggcuguugc

SEQ ID NO: 226952 - RNA, 32 nt, Human
ucaaaggcugguaccaggaagccagacgguca

SEQ ID NO: 226953 - RNA, 32 nt, Human
ucaaagggaccugggaacgacacuccucugca

SEQ ID NO: 226954 - RNA, 32 nt, Human
ucaaagggagccaccaguaccaaacccaauac

SEQ ID NO: 226955 - RNA, 32 nt, Human
ucaaagggaggcugaagagauuucaaagaauu

SEQ ID NO: 226956 - RNA, 32 nt, Human
ucaaagggcugauacugucaccacugggacca

SEQ ID NO: 226957 - RNA, 32 nt, Human
ucaaagggcuggccugcuucucagccuacauu

SEQ ID NO: 226958 - RNA, 31 nt, Human
ucaaaggggaaacugacaucaaaugugcugu

SEQ ID NO: 226959 - RNA, 31 nt, Human
ucaaaggguaaagaaagaugggaggaaaacu

SEQ ID NO: 226960 - RNA, 32 nt, Human
ucaaagguauuuuuauaguucaaaucgcuuca

SEQ ID NO: 226961 - RNA, 24 nt, Human
ucaaaggucaucaagcaguguuca

SEQ ID NO: 226962 - RNA, 32 nt, Human
ucaaaggugacucuccugcucuucuggacucu

SEQ ID NO: 226963 - RNA, 32 nt, Human
ucaaagguuuuuaugcacuggcuauuuguguu

SEQ ID NO: 226964 - RNA, 32 nt, Human
ucaaaguaaacauaagggaaaauaucagcucu

SEQ ID NO: 226965 - RNA, 24 nt, Human
ucaaaguaccaggauuauaggcau

SEQ ID NO: 226966 - RNA, 24 nt, Human
ucaaaguauugagauuacaggcau

SEQ ID NO: 226967 - RNA, 32 nt, Human
ucaaagucacucaacagaaagagaccaagagc

SEQ ID NO: 226968 - RNA, 19 nt, Human
ucaaagucauauuuugccu

SEQ ID NO: 226969 - RNA, 20 nt, Human
ucaaagucuccuacccuucu

SEQ ID NO: 226970 - RNA, 32 nt, Human
ucaaagucucugcucucucuuccuaugaucac

SEQ ID NO: 226971 - RNA, 21 nt, Human
ucaaagugacaagcucauuca

SEQ ID NO: 226972 - RNA, 32 nt, Human
ucaaagugagggcugaggagggugcuagcacc

SEQ ID NO: 226973 - RNA, 24 nt, Human
ucaaagugaguagcaacauauuca

SEQ ID NO: 226974 - RNA, 32 nt, Human
ucaaagugccagagaauuagauccuguccucu

SEQ ID NO: 226975 - RNA, 24 nt, Human
ucaaagugcugggauuacagacau

SEQ ID NO: 226976 - RNA, 24 nt, Human
ucaaagugcugggauuacaggcau

SEQ ID NO: 226977 - RNA, 24 nt, Human
ucaaagugcugggauuacaggcgu

SEQ ID NO: 226978 - RNA, 24 nt, Human
ucaaagugcugggauuacagguau

SEQ ID NO: 226979 - RNA, 21 nt, Human
ucaaagugguauuacagacau

SEQ ID NO: 226980 - RNA, 24 nt, Human
ucaaagugguauuacagacauuca

SEQ ID NO: 226981 - RNA, 24 nt, Human
ucaaaguguugagaucacaggcgu

SEQ ID NO: 226982 - RNA, 24 nt, Human
ucaaaguguugagauuacaggcgu

SEQ ID NO: 226983 - RNA, 24 nt, Human
ucaaaguguuggaguuacaagcau

SEQ ID NO: 226984 - RNA, 24 nt, Human
ucaaaguguuggaguuacaggcau

SEQ ID NO: 226985 - RNA, 24 nt, Human
ucaaaguguugggauaacaggcau

SEQ ID NO: 226986 - RNA, 22 nt, Human
ucaaaguguugggauuacaggc

SEQ ID NO: 226987 - RNA, 23 nt, Human
ucaaaguucaacuuccccuccca

SEQ ID NO: 226988 - RNA, 32 nt, Human
ucaaaguucccgaggagagauggaugccgcgu

SEQ ID NO: 226989 - RNA, 24 nt, Human
ucaaaguucuaaaagcagaacuca

SEQ ID NO: 226990 - RNA, 24 nt, Human
ucaaaguucugggacuacaggcau

SEQ ID NO: 226991 - RNA, 32 nt, Human
ucaaaguugcuucccagaacaggaagcaaaac

SEQ ID NO: 226992 - RNA, 32 nt, Human
ucaaaguugguggaacucuggagagguaaaga

SEQ ID NO: 226993 - RNA, 32 nt, Human
ucaaauaagaggagagaaaagaacucaagggg

SEQ ID NO: 226994 - RNA, 32 nt, Human
ucaaauacaaauucugguaaacuguuagguuu

SEQ ID NO: 226995 - RNA, 32 nt, Human
ucaaauacaacaaaauucccuuuaugaacuuu

SEQ ID NO: 226996 - RNA, 32 nt, Human
ucaaauacacagauauuggggcaaauauucug

SEQ ID NO: 226997 - RNA, 32 nt, Human
ucaaauacauagucuucaggcuguccauuggu

SEQ ID NO: 226998 - RNA, 32 nt, Human
ucaaauacuaccuuuucuagggaaaauuaggc

SEQ ID NO: 226999 - RNA, 32 nt, Human
ucaaauacuuguugaauaaauacaugaaugug

SEQ ID NO: 227000 - RNA, 32 nt, Human
ucaaauacuuuuuauuagacacggccaggcag

SEQ ID NO: 227001 - RNA, 32 nt, Human
ucaaauagacacacggccccagccaccugcaa

SEQ ID NO: 227002 - RNA, 32 nt, Human
ucaaauagaugccgccccugcccgcgcuuugc

SEQ ID NO: 227003 - RNA, 32 nt, Human
ucaaauagcacacaggaaucaaacuuugguaa

SEQ ID NO: 227004 - RNA, 23 nt, Human
ucaaauagcugggacuacaggca

SEQ ID NO: 227005 - RNA, 32 nt, Human
ucaaauagcugguuccucuguaucauucauaa

SEQ ID NO: 227006 - RNA, 32 nt, Human
ucaaauaguugaauagauucaccagaauaauu

SEQ ID NO: 227007 - RNA, 21 nt, Human
ucaaauauaaaugguuucccu

SEQ ID NO: 227008 - RNA, 23 nt, Human
ucaaauauguaagaauacaggca

SEQ ID NO: 227009 - RNA, 32 nt, Human
ucaaauauguaugcucucacuccaaguucaga

SEQ ID NO: 227010 - RNA, 32 nt, Human
ucaaaucaacaucuuucuggauaaaucuauuu

SEQ ID NO: 227011 - RNA, 32 nt, Human
ucaaaucaccacccacuguucucccccuuugg

SEQ ID NO: 227012 - RNA, 32 nt, Human
ucaaaucacugcagucaugaaauacugaacaa

SEQ ID NO: 227013 - RNA, 32 nt, Human
ucaaaucagacuccucucaucccagaugaccc

SEQ ID NO: 227014 - RNA, 32 nt, Human
ucaaaucaguaguuugggcagugccuuuuggg

SEQ ID NO: 227015 - RNA, 18 nt, Human
ucaaaucagucaguucuu

SEQ ID NO: 227016 - RNA, 32 nt, Human
ucaaaucaguucagugaaaauaguacagauuu

SEQ ID NO: 227017 - RNA, 20 nt, Human
ucaaauccaggccaagugau

SEQ ID NO: 227018 - RNA, 32 nt, Human
ucaaaucccaccacggugucuccucccaccuc

SEQ ID NO: 227019 - RNA, 32 nt, Human
ucaaauccuacaguauggaggguggcguugca

SEQ ID NO: 227020 - RNA, 32 nt, Human
ucaaauccugcacucaggccugguggugaaga

SEQ ID NO: 227021 - RNA, 32 nt, Human
ucaaauccuuguuuuugcacuuauugucugga

SEQ ID NO: 227022 - RNA, 32 nt, Human
ucaaaucucaacuugaauucucccagaauucc

SEQ ID NO: 227023 - RNA, 32 nt, Human
ucaaaucucuccuccucccccucucuccuucc

SEQ ID NO: 227024 - RNA, 32 nt, Human
ucaaaucugcuccaaucauccacuucucucuu

SEQ ID NO: 227025 - RNA, 32 nt, Human
ucaaaugacccaccuaccucagccucucaaag

SEQ ID NO: 227026 - RNA, 32 nt, Human
ucaaaugacugcagcauuuugagugaaaccaa

SEQ ID NO: 227027 - RNA, 20 nt, Human
ucaaaugagagcaaacuuua

SEQ ID NO: 227028 - RNA, 32 nt, Human
ucaaaugaucugcccaccucuaccuccaaagu

SEQ ID NO: 227029 - RNA, 32 nt, Human
ucaaaugaugcaugugaggucaggauucauug

SEQ ID NO: 227030 - RNA, 20 nt, Human
ucaaaugaugcucuucuucc

SEQ ID NO: 227031 - RNA, 22 nt, Human
ucaaaugaugcucuucuuccca

SEQ ID NO: 227032 - RNA, 32 nt, Human
ucaaaugcaaccugggccgggccgugcagcuc

SEQ ID NO: 227033 - RNA, 32 nt, Human
ucaaaugcagcacugcaccacccugcaacacc

SEQ ID NO: 227034 - RNA, 32 nt, Human
ucaaaugcaugcugggacucacccugaagaga

SEQ ID NO: 227035 - RNA, 32 nt, Human
ucaaaugccaugacauuggaaaaaggucauca

SEQ ID NO: 227036 - RNA, 32 nt, Human
ucaaaugccaugacauuggaagaaggugguca

SEQ ID NO: 227037 - RNA, 32 nt, Human
ucaaaugccuccaucuccauaccauuucaguu

SEQ ID NO: 227038 - RNA, 32 nt, Human
ucaaaugccuguaaucccaguacuuugggagg

SEQ ID NO: 227039 - RNA, 32 nt, Human
ucaaaugcuaaccaccucuucccgucccugcc

SEQ ID NO: 227040 - RNA, 32 nt, Human
ucaaaugcuacuguucagcaggugccugacac

SEQ ID NO: 227041 - RNA, 32 nt, Human
ucaaauggaagacacauugaaaguguuuuucc

SEQ ID NO: 227042 - RNA, 32 nt, Human
ucaaauggagaaacaggcccagagaggaaggu

SEQ ID NO: 227043 - RNA, 32 nt, Human
ucaaauggauuguucuauuccauucuggucuc

SEQ ID NO: 227044 - RNA, 21 nt, Human
ucaaauggccacauguccacu

SEQ ID NO: 227045 - RNA, 32 nt, Human
ucaaauggcugcagauugguacaugagaccuc

SEQ ID NO: 227046 - RNA, 32 nt, Human
ucaaauggcugcauacuuauaccuggaugggu

SEQ ID NO: 227047 - RNA, 22 nt, Human
ucaaaugggggaccuguccauu

SEQ ID NO: 227048 - RNA, 32 nt, Human
ucaaaugggggaccuguccauugugcucuauu

SEQ ID NO: 227049 - RNA, 32 nt, Human
ucaaaugggguuuucuguguuauuucauaaaa

SEQ ID NO: 227050 - RNA, 29 nt, Human
ucaaauggugccucaaauugagggaaaca

SEQ ID NO: 227051 - RNA, 32 nt, Human
ucaaauguuagaagaauccuguguucaguuau

SEQ ID NO: 227052 - RNA, 32 nt, Human
ucaaauguuugcugaauugaaaaagaauauuc

SEQ ID NO: 227053 - RNA, 32 nt, Human
ucaaauuaaaaaggaaaagauuuguuuggaag

SEQ ID NO: 227054 - RNA, 32 nt, Human
ucaaauuaaggaagcucugaaugugauuugug

SEQ ID NO: 227055 - RNA, 32 nt, Human
ucaaauuacaauaaacauacuaagacaauggg

SEQ ID NO: 227056 - RNA, 32 nt, Human
ucaaauuacaauggugggaacaggcauaggau

SEQ ID NO: 227057 - RNA, 32 nt, Human
ucaaauuagauguuucaacugugcuccuguuu

SEQ ID NO: 227058 - RNA, 32 nt, Human
ucaaauuagauucccuaggagguauaauauau

SEQ ID NO: 227059 - RNA, 32 nt, Human
ucaaauuagguuuggagggaaacuugaucuuc

SEQ ID NO: 227060 - RNA, 32 nt, Human
ucaaauuaucucacauuauguguucaacauuu

SEQ ID NO: 227061 - RNA, 32 nt, Human
ucaaauucaaugcuucuaucagacucaguuuu

SEQ ID NO: 227062 - RNA, 32 nt, Human
ucaaauucagcccuagaggggccugucucugc

SEQ ID NO: 227063 - RNA, 32 nt, Human
ucaaauuccgagugcagaaaagaaaccggacc

SEQ ID NO: 227064 - RNA, 32 nt, Human
ucaaauuccuacaguuucuggcuggcuucauu

SEQ ID NO: 227065 - RNA, 23 nt, Human
ucaaauuccugagcuaaagcgau

SEQ ID NO: 227066 - RNA, 32 nt, Human
ucaaauuccugccuuuccucaagagaagagcc

SEQ ID NO: 227067 - RNA, 23 nt, Human
ucaaauuccuggccucaagcgau

SEQ ID NO: 227068 - RNA, 19 nt, Human
ucaaauuccugggcucaag

SEQ ID NO: 227069 - RNA, 23 nt, Human
ucaaauuccugggcucaagggau

SEQ ID NO: 227070 - RNA, 24 nt, Human
ucaaauuccugggcucaagugauu

SEQ ID NO: 227071 - RNA, 32 nt, Human
ucaaauuccuuucucauuggagccuagugaaa

SEQ ID NO: 227072 - RNA, 32 nt, Human
ucaaauucuaaggagcuugaucaggagggcug

SEQ ID NO: 227073 - RNA, 32 nt, Human
ucaaauucuaguuucaaguaucucacuguacc

SEQ ID NO: 227074 - RNA, 32 nt, Human
ucaaauucucauaggggcucaugacccacaau

SEQ ID NO: 227075 - RNA, 21 nt, Human
ucaaauucucgggcucaagug

SEQ ID NO: 227076 - RNA, 23 nt, Human
ucaaauucucgggcucaaguggu

SEQ ID NO: 227077 - RNA, 32 nt, Human
ucaaauucugccacuccagcuccuggguuagg

SEQ ID NO: 227078 - RNA, 23 nt, Human
ucaaauucuugaucucaagugau

SEQ ID NO: 227079 - RNA, 32 nt, Human
ucaaauugaccugucaaugucaaccuaguagu

SEQ ID NO: 227080 - RNA, 32 nt, Human
ucaaauugagauuguugccacugugguuugcc

SEQ ID NO: 227081 - RNA, 32 nt, Human
ucaaauugcuagaaaauucacagggaagaaaa

SEQ ID NO: 227082 - RNA, 32 nt, Human
ucaaauugcucacacaauuuuaauugcaauag

SEQ ID NO: 227083 - RNA, 32 nt, Human
ucaaauugcucccccuccccaggaugacacac

SEQ ID NO: 227084 - RNA, 32 nt, Human
ucaaauuucucuuccauugagcuuccugccug

SEQ ID NO: 227085 - RNA, 32 nt, Human
ucaaauuuugcagagcucugcuaucacugaau

SEQ ID NO: 227086 - RNA, 32 nt, Human
ucaacaaaaagaaaaauccagagcagccuuuc

SEQ ID NO: 227087 - RNA, 32 nt, Human
ucaacaaaaaggaguuuaucaggccggguggc

SEQ ID NO: 227088 - RNA, 32 nt, Human
ucaacaaaagaauguccaugguggugucuggc

SEQ ID NO: 227089 - RNA, 32 nt, Human
ucaacaaaaucggcaaggucucagggaccuug

SEQ ID NO: 227090 - RNA, 21 nt, Human
ucaacaaacgaggggcugcuu

SEQ ID NO: 227091 - RNA, 32 nt, Human
ucaacaaagcagggugggguaggugacauuug

SEQ ID NO: 227092 - RNA, 32 nt, Human
ucaacaaauguuacgagaucugaugagugaug

SEQ ID NO: 227093 - RNA, 32 nt, Human
ucaacaacaagagauugaaauaagcuaugggu

SEQ ID NO: 227094 - RNA, 32 nt, Human
ucaacaacacagagugcuggaagccuguggca

SEQ ID NO: 227095 - RNA, 32 nt, Human
ucaacaacacuccaccaugucugagaaugugu

SEQ ID NO: 227096 - RNA, 32 nt, Human
ucaacaacccuuuaaugagccuguaaggacca

SEQ ID NO: 227097 - RNA, 32 nt, Human
ucaacaacuucuuccucugcuuuuucaccugu

SEQ ID NO: 227098 - RNA, 32 nt, Human
ucaacaagacucaggaaacucugugaaaagag

SEQ ID NO: 227099 - RNA, 32 nt, Human
ucaacaagaggauuuuaacagcaaagaagaga

SEQ ID NO: 227100 - RNA, 32 nt, Human
ucaacaagaguugucuuguccccucuugaccc

SEQ ID NO: 227101 - RNA, 32 nt, Human
ucaacaagauuucagaaagguauaaucaugua

SEQ ID NO: 227102 - RNA, 17 nt, Human
ucaacaagcaccucuuu

SEQ ID NO: 227103 - RNA, 32 nt, Human
ucaacaagcggcucucaaaguccucugccacg

SEQ ID NO: 227104 - RNA, 32 nt, Human
ucaacaaggaaaagcaguuggaggucucuucc

SEQ ID NO: 227105 - RNA, 32 nt, Human
ucaacaaggagcuggcccugcacauccauaca

SEQ ID NO: 227106 - RNA, 32 nt, Human
ucaacaauacccucugccugaccaacauggug

SEQ ID NO: 227107 - RNA, 32 nt, Human
ucaacaaugccagaugaauggaagagggaaca

SEQ ID NO: 227108 - RNA, 32 nt, Human
ucaacacaacuugcuucucuccagacuugggc

SEQ ID NO: 227109 - RNA, 32 nt, Human
ucaacacacaacagcagauggcaccaacggga

SEQ ID NO: 227110 - RNA, 32 nt, Human
ucaacacacauccccacccuguguacacacaa

SEQ ID NO: 227111 - RNA, 32 nt, Human
ucaacacagcuggcuggaugauugggacuuua

SEQ ID NO: 227112 - RNA, 32 nt, Human
ucaacacauggaacggaccacacccucucucc

SEQ ID NO: 227113 - RNA, 32 nt, Human
ucaacaccaacagcucugaccugggcagccuu

SEQ ID NO: 227114 - RNA, 32 nt, Human
ucaacaccacccugcuguccaguccccagccu

SEQ ID NO: 227115 - RNA, 32 nt, Human
ucaacaccacuuugcagcauucagcugcugag

SEQ ID NO: 227116 - RNA, 32 nt, Human
ucaacaccagccugagcaacaugguaaaaccc

SEQ ID NO: 227117 - RNA, 32 nt, Human
ucaacaccagccuggccaacauagugaaaccc

SEQ ID NO: 227118 - RNA, 32 nt, Human
ucaacaccagccuggccaacauggaaaaaccc

SEQ ID NO: 227119 - RNA, 32 nt, Human
ucaacaccagccuggccaacauggugaaaccc

SEQ ID NO: 227120 - RNA, 32 nt, Human
ucaacaccagccugggccauauugugagaaca

SEQ ID NO: 227121 - RNA, 18 nt, Human
ucaacaccauccaucccu

SEQ ID NO: 227122 - RNA, 32 nt, Human
ucaacaccucccaguaccuggcuggagguggc

SEQ ID NO: 227123 - RNA, 32 nt, Human
ucaacaccuuccuuaagucuuugcugucauaa

SEQ ID NO: 227124 - RNA, 32 nt, Human
ucaacacgaaggcagaaguuggagugaugagu

SEQ ID NO: 227125 - RNA, 32 nt, Human
ucaacacuacacuugcacaaugucuuugaaac

SEQ ID NO: 227126 - RNA, 31 nt, Human
ucaacacuacuuuucugauaugagggcagca

SEQ ID NO: 227127 - RNA, 32 nt, Human
ucaacacucccagcccuugcugggggcuccuu

SEQ ID NO: 227128 - RNA, 32 nt, Human
ucaacacucuucuugagcagaccgugauuugg

SEQ ID NO: 227129 - RNA, 32 nt, Human
ucaacacugagccuccacaggcuccauuccaa

SEQ ID NO: 227130 - RNA, 32 nt, Human
ucaacacugcacuccagccugggcgacagagu

SEQ ID NO: 227131 - RNA, 32 nt, Human
ucaacacugcagcauuuugcugcuuuaucaaa

SEQ ID NO: 227132 - RNA, 32 nt, Human
ucaacacuuuggccaggcagccugcugagcaa

SEQ ID NO: 227133 - RNA, 32 nt, Human
ucaacagaaagccacugacggcuuucuucaag

SEQ ID NO: 227134 - RNA, 32 nt, Human
ucaacagaaauuacauuuauaaugcuuuuguu

SEQ ID NO: 227135 - RNA, 32 nt, Human
ucaacagaaguugacugcauccuuuucugucc

SEQ ID NO: 227136 - RNA, 32 nt, Human
ucaacagaaguuguucuucuuccuucgaagag

SEQ ID NO: 227137 - RNA, 18 nt, Human
ucaacagagaacucuguc

SEQ ID NO: 227138 - RNA, 32 nt, Human
ucaacagagacugaagugggcuuuuguguuau

SEQ ID NO: 227139 - RNA, 32 nt, Human
ucaacagagagggagaaaggaggagacagagg

SEQ ID NO: 227140 - RNA, 32 nt, Human
ucaacagaggccacgagauguguuacaggcag

SEQ ID NO: 227141 - RNA, 21 nt, Human
ucaacagagugagacucuguc

SEQ ID NO: 227142 - RNA, 32 nt, Human
ucaacagcaaaugccagcaauucuuucuccga

SEQ ID NO: 227143 - RNA, 32 nt, Human
ucaacagccacuuugaggagugaccagccugc

SEQ ID NO: 227144 - RNA, 22 nt, Human
ucaacagccauucagaagaaug

SEQ ID NO: 227145 - RNA, 32 nt, Human
ucaacagcccgccagcugauuggaugucuagg

SEQ ID NO: 227146 - RNA, 32 nt, Human
ucaacagcccugcuagauuuuguaugaugcug

SEQ ID NO: 227147 - RNA, 32 nt, Human
ucaacagcccuugucugugaccugcuucagcc

SEQ ID NO: 227148 - RNA, 32 nt, Human
ucaacagccgccagaaguacacgaggaaccgg

SEQ ID NO: 227149 - RNA, 32 nt, Human
ucaacagccugacagaagguucagucuaugga

SEQ ID NO: 227150 - RNA, 32 nt, Human
ucaacagcuagacacagaugcucacagccgac

SEQ ID NO: 227151 - RNA, 21 nt, Human
ucaacaggauggagcucuuca

SEQ ID NO: 227152 - RNA, 32 nt, Human
ucaacaggauguguaacaguuuuccuucacca

SEQ ID NO: 227153 - RNA, 32 nt, Human
ucaacaggcuacaccugaaccccagguuuggg

SEQ ID NO: 227154 - RNA, 19 nt, Human
ucaacagggaaauucuuca

SEQ ID NO: 227155 - RNA, 32 nt, Human
ucaacagggaggaugucuguugcucagagagg

SEQ ID NO: 227156 - RNA, 32 nt, Human
ucaacagggaugacucagcagacucagcaggg

SEQ ID NO: 227157 - RNA, 23 nt, Human
ucaacagggcaguucugcugcuc

SEQ ID NO: 227158 - RNA, 32 nt, Human
ucaacaggggcgugaggucccaggaaguggcc

SEQ ID NO: 227159 - RNA, 16 nt, Human
ucaacagggucuucug

SEQ ID NO: 227160 - RNA, 21 nt, Human
ucaacaggugacaggcugcuu

SEQ ID NO: 227161 - RNA, 32 nt, Human
ucaacagguggaagaagaucaugagagaugaa

SEQ ID NO: 227162 - RNA, 32 nt, Human
ucaacaggugucagcugucacccaggaccuag

SEQ ID NO: 227163 - RNA, 32 nt, Human
ucaacagguucaaauauucaagaagguagaac

SEQ ID NO: 227164 - RNA, 32 nt, Human
ucaacagguuuuagaggcaugccaccauuuuu

SEQ ID NO: 227165 - RNA, 32 nt, Human
ucaacaguaauguuugagaauuacuggguuaa

SEQ ID NO: 227166 - RNA, 32 nt, Human
ucaacaguagcucuagaggagugcugucccau

SEQ ID NO: 227167 - RNA, 32 nt, Human
ucaacagucaaagucccugaagagcucacugc

SEQ ID NO: 227168 - RNA, 32 nt, Human
ucaacagucaggaaagcuaaacuggucaguau

SEQ ID NO: 227169 - RNA, 32 nt, Human
ucaacagugcacugcacguugaggacaaggcc

SEQ ID NO: 227170 - RNA, 32 nt, Human
ucaacagugcuuugggaagcuguguggauucc

SEQ ID NO: 227171 - RNA, 32 nt, Human
ucaacaguggugcuguggaaugcccagcuagu

SEQ ID NO: 227172 - RNA, 32 nt, Human
ucaacagugugaagcuggaucguccacaacag

SEQ ID NO: 227173 - RNA, 18 nt, Human
ucaacaguuaaaaucuaa

SEQ ID NO: 227174 - RNA, 32 nt, Human
ucaacaguucccuccccuccacuaccccauuu

SEQ ID NO: 227175 - RNA, 32 nt, Human
ucaacaguuucucaaguuuaaagucaugucag

SEQ ID NO: 227176 - RNA, 32 nt, Human
ucaacauagggugaaacuauuucugauaaaga

SEQ ID NO: 227177 - RNA, 32 nt, Human
ucaacaucaaagaauucauacuggagaaaaac

SEQ ID NO: 227178 - RNA, 32 nt, Human
ucaacaucaaagaauucauacuggugagaaac

SEQ ID NO: 227179 - RNA, 32 nt, Human
ucaacaucacacucaggagaagaaggagauug

SEQ ID NO: 227180 - RNA, 32 nt, Human
ucaacaucagccuggccaacaugaugaaaccu

SEQ ID NO: 227181 - RNA, 28 nt, Human
ucaacaucguauugaaguuuguuauuua

SEQ ID NO: 227182 - RNA, 32 nt, Human
ucaacaucugcucuuuggccucuugggaguug

SEQ ID NO: 227183 - RNA, 32 nt, Human
ucaacaucuguauacccccuucccagggguaa

SEQ ID NO: 227184 - RNA, 32 nt, Human
ucaacaugacuaauuaacacugaaaagucagu

SEQ ID NO: 227185 - RNA, 32 nt, Human
ucaacaugagauuugggcagggagacagaucc

SEQ ID NO: 227186 - RNA, 32 nt, Human
ucaacaugagggcaacuuacuucaagaucucu

SEQ ID NO: 227187 - RNA, 32 nt, Human
ucaacaugccugguuuaggcagcagcuugggc

SEQ ID NO: 227188 - RNA, 32 nt, Human
ucaacaugcuggggcaggauggacaugguaga

SEQ ID NO: 227189 - RNA, 32 nt, Human
ucaacauggaaaugauccucauugauuaauac

SEQ ID NO: 227190 - RNA, 32 nt, Human
ucaacauggaagaauuccaaaauguaugacua

SEQ ID NO: 227191 - RNA, 20 nt, Human
ucaacauggagaaaccccgu

SEQ ID NO: 227192 - RNA, 32 nt, Human
ucaacauguugaccaggauggucucgaucucu

SEQ ID NO: 227193 - RNA, 32 nt, Human
ucaacauguuggccaggauggucucaaucucu

SEQ ID NO: 227194 - RNA, 22 nt, Human
ucaacauguuuaagaaagauag

SEQ ID NO: 227195 - RNA, 32 nt, Human
ucaacauuaagcugcaacauccuaaccaccau

SEQ ID NO: 227196 - RNA, 18 nt, Human
ucaacauuagaauuuuga

SEQ ID NO: 227197 - RNA, 32 nt, Human
ucaacauuauuauuaguggauuucuuaauagg

SEQ ID NO: 227198 - RNA, 32 nt, Human
ucaacauuauuuucucuucuuccucagcuucu

SEQ ID NO: 227199 - RNA, 32 nt, Human
ucaacauuccuuuuguuggugacauuugugau

SEQ ID NO: 227200 - RNA, 32 nt, Human
ucaacauugaagguggagguggaagaugcagu

SEQ ID NO: 227201 - RNA, 23 nt, Human
ucaacauugugauauaugcuacu

SEQ ID NO: 227202 - RNA, 32 nt, Human
ucaacauuguggcucagcucucuucaacagcu

SEQ ID NO: 227203 - RNA, 32 nt, Human
ucaacauuuugaccaacagcaggaaugcucgg

SEQ ID NO: 227204 - RNA, 32 nt, Human
ucaaccaacccagcaacaacaaaacaggucua

SEQ ID NO: 227205 - RNA, 23 nt, Human
ucaaccaacugaaaccugacuuu

SEQ ID NO: 227206 - RNA, 32 nt, Human
ucaaccaaggagccugagcccaggaaggggcu

SEQ ID NO: 227207 - RNA, 32 nt, Human
ucaaccacaaaauagucuucucagaugaccuu

SEQ ID NO: 227208 - RNA, 32 nt, Human
ucaaccacagaagucugauauuguaguauuag

SEQ ID NO: 227209 - RNA, 32 nt, Human
ucaaccaccuuuccucagcuuucuuaaaaugg

SEQ ID NO: 227210 - RNA, 32 nt, Human
ucaaccacgcaaaacaugaauauaaagcucuu

SEQ ID NO: 227211 - RNA, 32 nt, Human
ucaaccacugaacugccuucuuccauuguccu

SEQ ID NO: 227212 - RNA, 32 nt, Human
ucaaccacugcacuccacuaagcaacuggcac

SEQ ID NO: 227213 - RNA, 32 nt, Human
ucaaccagagucccacaguuugagccucacug

SEQ ID NO: 227214 - RNA, 32 nt, Human
ucaaccagauuggagugcaguggugcaaucuc

SEQ ID NO: 227215 - RNA, 32 nt, Human
ucaaccagccuggacaacaaagcaagacccca

SEQ ID NO: 227216 - RNA, 32 nt, Human
ucaaccagcgguuucccagcaggacaacuguc

SEQ ID NO: 227217 - RNA, 32 nt, Human
ucaaccagcuacucaggaggcugggcaggaga

SEQ ID NO: 227218 - RNA, 32 nt, Human
ucaaccagcuguagaugggcuuguuccgaguu

SEQ ID NO: 227219 - RNA, 32 nt, Human
ucaaccaggaaggcacaccacuguauuaguuu

SEQ ID NO: 227220 - RNA, 32 nt, Human
ucaaccaggagacugugggaggaugugagcuc

SEQ ID NO: 227221 - RNA, 32 nt, Human
ucaaccaggcuggagugcacuggcgcaaucuc

SEQ ID NO: 227222 - RNA, 32 nt, Human
ucaaccagggaggcagagguugcagugagccg

SEQ ID NO: 227223 - RNA, 32 nt, Human
ucaaccaucucucagcaguuauugaucauuuc

SEQ ID NO: 227224 - RNA, 19 nt, Human
ucaaccauggccugggcau

SEQ ID NO: 227225 - RNA, 32 nt, Human
ucaaccauuaguuauuguuaaaggaguaauuu

SEQ ID NO: 227226 - RNA, 32 nt, Human
ucaaccauucacugcaaugccuauuccaaacu

SEQ ID NO: 227227 - RNA, 31 nt, Human
ucaacccaaauguccaucagugacagacugg

SEQ ID NO: 227228 - RNA, 19 nt, Human
ucaacccaaccuccucuca

SEQ ID NO: 227229 - RNA, 32 nt, Human
ucaacccaacuccggugagcgaagagcgguca

SEQ ID NO: 227230 - RNA, 31 nt, Human
ucaacccaagaaccuguuuccuggaccagug

SEQ ID NO: 227231 - RNA, 21 nt, Human
ucaacccaagggaccccuccc

SEQ ID NO: 227232 - RNA, 32 nt, Human
ucaacccacugccucuguucauccaagacuuc

SEQ ID NO: 227233 - RNA, 32 nt, Human
ucaacccacugcuggccagcuucuucagcaag

SEQ ID NO: 227234 - RNA, 32 nt, Human
ucaacccagcagcaauuugaggggaugagggg

SEQ ID NO: 227235 - RNA, 32 nt, Human
ucaacccaggaggcagacguugcagcgagcca

SEQ ID NO: 227236 - RNA, 32 nt, Human
ucaacccaggaggcagaggcuacagugagcug

SEQ ID NO: 227237 - RNA, 32 nt, Human
ucaaccccaccaugacaugaaggaggccaccg

SEQ ID NO: 227238 - RNA, 32 nt, Human
ucaaccccacgccuuuuaggaaaaagaaaagu

SEQ ID NO: 227239 - RNA, 20 nt, Human
ucaaccccaggccaccccca

SEQ ID NO: 227240 - RNA, 32 nt, Human
ucaacccccuccauuuucuccacaaaggcccu

SEQ ID NO: 227241 - RNA, 32 nt, Human
ucaaccccucacugcacucugcucaucacggg

SEQ ID NO: 227242 - RNA, 32 nt, Human
ucaaccccuccccuccaucccuggcccccucc

SEQ ID NO: 227243 - RNA, 20 nt, Human
ucaaccccucuccucuccca

SEQ ID NO: 227244 - RNA, 20 nt, Human
ucaaccccuggcccccuccc

SEQ ID NO: 227245 - RNA, 32 nt, Human
ucaaccccuuucucccacccagccccaacccc

SEQ ID NO: 227246 - RNA, 32 nt, Human
ucaacccggaugggugacaggcuggauggccu

SEQ ID NO: 227247 - RNA, 32 nt, Human
ucaacccgggaggcggagcuugcagugagccg

SEQ ID NO: 227248 - RNA, 32 nt, Human
ucaacccgggaggcugagguugcagugagugg

SEQ ID NO: 227249 - RNA, 32 nt, Human
ucaacccucacacuccugcucacuagccccca

SEQ ID NO: 227250 - RNA, 21 nt, Human
ucaacccucacccuccuccca

SEQ ID NO: 227251 - RNA, 32 nt, Human
ucaacccucugccucccuacucaaccugagac

SEQ ID NO: 227252 - RNA, 20 nt, Human
ucaacccugaaccccuccca

SEQ ID NO: 227253 - RNA, 32 nt, Human
ucaacccugcacccacccuccuccagggauca

SEQ ID NO: 227254 - RNA, 32 nt, Human
ucaacccuguaauuccagcacuuugggagggu

SEQ ID NO: 227255 - RNA, 32 nt, Human
ucaacccuucagacucccuccuggcagcugua

SEQ ID NO: 227256 - RNA, 32 nt, Human
ucaaccgccugccucugucuagcaacgcagug

SEQ ID NO: 227257 - RNA, 32 nt, Human
ucaaccgcgguggccacgccuccugggaaagg

SEQ ID NO: 227258 - RNA, 32 nt, Human
ucaaccggccuccccuaccccugcuggccggg

SEQ ID NO: 227259 - RNA, 32 nt, Human
ucaaccgggccgugccccagaugcccaccggg

SEQ ID NO: 227260 - RNA, 32 nt, Human
ucaaccgggcuggagugcaguggugcaaucuu

SEQ ID NO: 227261 - RNA, 32 nt, Human
ucaaccgguagcagauacuuccaaggaguggc

SEQ ID NO: 227262 - RNA, 31 nt, Human
ucaaccuaaauguccaucaaugacagacuag

SEQ ID NO: 227263 - RNA, 32 nt, Human
ucaaccuaaccagccacagccaagggcccaag

SEQ ID NO: 227264 - RNA, 31 nt, Human
ucaaccuaaguguccaucaauggaugaaugg

SEQ ID NO: 227265 - RNA, 32 nt, Human
ucaaccuaccaccccuuccugucccaccucuu

SEQ ID NO: 227266 - RNA, 32 nt, Human
ucaaccuaggaaaaaggagagcuuucuuacau

SEQ ID NO: 227267 - RNA, 32 nt, Human
ucaaccuauaucucccuugaaaauacuuucag

SEQ ID NO: 227268 - RNA, 32 nt, Human
ucaaccuauguauacuagauccuuccaguuug

SEQ ID NO: 227269 - RNA, 32 nt, Human
ucaaccucagccacagcccuguguccaucccc

SEQ ID NO: 227270 - RNA, 32 nt, Human
ucaaccuccagccagcuucuugagccuauuug

SEQ ID NO: 227271 - RNA, 32 nt, Human
ucaaccucccaaaagugcuggauuacagggau

SEQ ID NO: 227272 - RNA, 32 nt, Human
ucaaccucccaaagcgcugggauuacaggcgu

SEQ ID NO: 227273 - RNA, 32 nt, Human
ucaaccucccaaagugcugagauuacaggcgu

SEQ ID NO: 227274 - RNA, 32 nt, Human
ucaaccucccaaagugcuggaauuacagcuua

SEQ ID NO: 227275 - RNA, 32 nt, Human
ucaaccucccaaagugcuggaauuacaguucc

SEQ ID NO: 227276 - RNA, 32 nt, Human
ucaaccucccaaagugcugggauuacaggcau

SEQ ID NO: 227277 - RNA, 32 nt, Human
ucaaccucccaaagugcugggauuacaggcgu

SEQ ID NO: 227278 - RNA, 32 nt, Human
ucaaccucccaaagugcugggauuacaggugu

SEQ ID NO: 227279 - RNA, 32 nt, Human
ucaaccucccaaagugcugggauugcaggcgu

SEQ ID NO: 227280 - RNA, 32 nt, Human
ucaaccucccaaauaguugggauuacaggcac

SEQ ID NO: 227281 - RNA, 32 nt, Human
ucaaccucccaaguagcuagaccuauaggcgc

SEQ ID NO: 227282 - RNA, 23 nt, Human
ucaaccucccaggcucaagugau

SEQ ID NO: 227283 - RNA, 32 nt, Human
ucaaccucccgaguaacugggauuacaggugu

SEQ ID NO: 227284 - RNA, 32 nt, Human
ucaaccucccggauagcugggauuacaggcgu

SEQ ID NO: 227285 - RNA, 32 nt, Human
ucaaccucccuaguagcugggauuacaggugc

SEQ ID NO: 227286 - RNA, 32 nt, Human
ucaaccuccgauucugaagaagaaggagauga

SEQ ID NO: 227287 - RNA, 23 nt, Human
ucaaccuccugaccucaagugau

SEQ ID NO: 227288 - RNA, 32 nt, Human
ucaaccuccugccucagccuuccgagcagcug

SEQ ID NO: 227289 - RNA, 23 nt, Human
ucaaccuccuggccucaagugau

SEQ ID NO: 227290 - RNA, 19 nt, Human
ucaaccuccugggcucaag

SEQ ID NO: 227291 - RNA, 22 nt, Human
ucaaccuccugggcucaaguga

SEQ ID NO: 227292 - RNA, 23 nt, Human
ucaaccuccugggcucaagugau

SEQ ID NO: 227293 - RNA, 32 nt, Human
ucaaccuccuguacagcacccugccaguucuc

SEQ ID NO: 227294 - RNA, 32 nt, Human
ucaaccucgcugucugcugcgucucaggaguc

SEQ ID NO: 227295 - RNA, 24 nt, Human
ucacccuaggcgggcugggcgggg

SEQ ID NO: 227296 - RNA, 32 nt, Human
ucacccuagucucugcaggccauguccugaag

SEQ ID NO: 227297 - RNA, 32 nt, Human
ucacccuaugucaagugcuuuaucucuuuugg

SEQ ID NO: 227298 - RNA, 32 nt, Human
ucacccuauuccagggacacagucugcuuggc

SEQ ID NO: 227299 - RNA, 32 nt, Human
ucacccucaacccucuggggccacgugggccc

SEQ ID NO: 227300 - RNA, 31 nt, Human
ucacccucaauaaauacuguuaauuggagau

SEQ ID NO: 227301 - RNA, 32 nt, Human
ucacccucacaccacacgccuuaaaucuaauc

SEQ ID NO: 227302 - RNA, 32 nt, Human
ucacccucacccaagugauguggugguggcug

SEQ ID NO: 227303 - RNA, 32 nt, Human
ucacccucaccccauccuuccccaccaauaca

SEQ ID NO: 227304 - RNA, 22 nt, Human
ucacccucagacccccucgccu

SEQ ID NO: 227305 - RNA, 32 nt, Human
ucacccucagcuguccagcccugcugccuguc

SEQ ID NO: 227306 - RNA, 32 nt, Human
ucacccuccacaccugguggccucagccaugg

SEQ ID NO: 227307 - RNA, 32 nt, Human
ucacccuccacaccuuagaauguggcuguauc

SEQ ID NO: 227308 - RNA, 32 nt, Human
ucacccuccacccuccccacccccucggggca

SEQ ID NO: 227309 - RNA, 32 nt, Human
ucacccuccacuuguccgucuaccucauucuu

SEQ ID NO: 227310 - RNA, 32 nt, Human
ucacccuccagcccuggaggcuuuugcuggga

SEQ ID NO: 227311 - RNA, 32 nt, Human
ucacccuccagucugaaagugaagagcagagu

SEQ ID NO: 227312 - RNA, 32 nt, Human
ucacccucccaaaaugcugggauuacaggcgu

SEQ ID NO: 227313 - RNA, 32 nt, Human
ucacccucccaaagugcugggauuacaggcau

SEQ ID NO: 227314 - RNA, 32 nt, Human
ucacccucccaaagugcugggauuauaggcau

SEQ ID NO: 227315 - RNA, 32 nt, Human
ucacccucccaaguagcugggauuacaggugc

SEQ ID NO: 227316 - RNA, 32 nt, Human
ucacccucccauguagcugggauuacagcugc

SEQ ID NO: 227317 - RNA, 32 nt, Human
ucacccucccgaguagcugggauuacaggcac

SEQ ID NO: 227318 - RNA, 32 nt, Human
ucacccucccgagucacugggauuacaggcgc

SEQ ID NO: 227319 - RNA, 32 nt, Human
ucacccuccucucccacaucaggcuggcacuc

SEQ ID NO: 227320 - RNA, 32 nt, Human
ucacccuccugaggcccucagcucauacgggc

SEQ ID NO: 227321 - RNA, 32 nt, Human
ucacccuccugcacuccaacaauuggcugggg

SEQ ID NO: 227322 - RNA, 32 nt, Human
ucacccuccuggccaauuguguugcaccuugg

SEQ ID NO: 227323 - RNA, 32 nt, Human
ucacccucuaccucccugugcucaugcacuag

SEQ ID NO: 227324 - RNA, 32 nt, Human
ucacccucugacugcaggccugggcgacugcg

SEQ ID NO: 227325 - RNA, 32 nt, Human
ucacccucugcaggcccagcuccugccuccaa

SEQ ID NO: 227326 - RNA, 32 nt, Human
ucacccucuggacccgccuccucuggggagug

SEQ ID NO: 227327 - RNA, 27 nt, Human
ucacccucuucagacuggagucagugg

SEQ ID NO: 227328 - RNA, 32 nt, Human
ucacccucuuuccaccaugugaggauauaaug

SEQ ID NO: 227329 - RNA, 32 nt, Human
ucacccugagacugugggauguguucaucuug

SEQ ID NO: 227330 - RNA, 32 nt, Human
ucacccugaggguugcagggaggcagggauau

SEQ ID NO: 227331 - RNA, 32 nt, Human
ucacccugaguacacacacaaucacugccacu

SEQ ID NO: 227332 - RNA, 32 nt, Human
ucacccugcauccuucucccauuccccaaagu

SEQ ID NO: 227333 - RNA, 32 nt, Human
ucacccugccaagggagcuacuguucccaacc

SEQ ID NO: 227334 - RNA, 31 nt, Human
ucacccugccagagcagcuguaggagaugga

SEQ ID NO: 227335 - RNA, 32 nt, Human
ucacccugcccuccuccccagccuggaaucgg

SEQ ID NO: 227336 - RNA, 32 nt, Human
ucacccugcccuuggagcagucuuccaucgcg

SEQ ID NO: 227337 - RNA, 32 nt, Human
ucacccugccuagcaguugucaccauucacaa

SEQ ID NO: 227338 - RNA, 32 nt, Human
ucacccugcucugcccagccucgcgugaccuc

SEQ ID NO: 227339 - RNA, 32 nt, Human
ucacccuggaggugcacugguuuggggaaggc

SEQ ID NO: 227340 - RNA, 21 nt, Human
ucacccuggcuggagugcagu

SEQ ID NO: 227341 - RNA, 32 nt, Human
ucacccuggcuggagugcaguagugcgaucgc

SEQ ID NO: 227342 - RNA, 32 nt, Human
ucacccugggcaacagagugagaccccaucuc

SEQ ID NO: 227343 - RNA, 32 nt, Human
ucacccugguauccaauaucugagcauggcaa

SEQ ID NO: 227344 - RNA, 17 nt, Human
ucacccugucaauacuu

SEQ ID NO: 227345 - RNA, 32 nt, Human
ucacccugucauggucucagggaacagccugc

SEQ ID NO: 227346 - RNA, 32 nt, Human
ucacccuguguaucucuucaucuggcuguuca

SEQ ID NO: 227347 - RNA, 32 nt, Human
ucacccuguugccaggcuggaaugcaguggcg

SEQ ID NO: 227348 - RNA, 32 nt, Human
ucacccuguuucuuccccuccuccaguucuuu

SEQ ID NO: 227349 - RNA, 32 nt, Human
ucacccuuaaugaagagucacagggagaagac

SEQ ID NO: 227350 - RNA, 32 nt, Human
ucacccuuagagacaggguuucacuauguugc

SEQ ID NO: 227351 - RNA, 32 nt, Human
ucacccuuauccuuaucucugcugucaccccc

SEQ ID NO: 227352 - RNA, 32 nt, Human
ucacccuuccaggacacccaccuugugcaucu

SEQ ID NO: 227353 - RNA, 32 nt, Human
ucacccuucccaacuuggucuccuccaacaug

SEQ ID NO: 227354 - RNA, 32 nt, Human
ucacccuuccugagcugagacuucggggcugu

SEQ ID NO: 227355 - RNA, 32 nt, Human
ucacccuuccugcccgacggagcugcuucugc

SEQ ID NO: 227356 - RNA, 32 nt, Human
ucacccuuccuugacuuaccuccccaccugag

SEQ ID NO: 227357 - RNA, 32 nt, Human
ucacccuugcauuccagccugugaaauaaagg

SEQ ID NO: 227358 - RNA, 24 nt, Human
ucacccuuguaaucccagcacuuu

SEQ ID NO: 227359 - RNA, 32 nt, Human
ucacccuuguaaucccagcacuuugggaggcu

SEQ ID NO: 227360 - RNA, 32 nt, Human
ucacccuuguucccucuccuucuaugcccucc

SEQ ID NO: 227361 - RNA, 32 nt, Human
ucacccuuguugcccaggcuggagugcaaugg

SEQ ID NO: 227362 - RNA, 32 nt, Human
ucacccuuuccaggucucggaauggugcugaa

SEQ ID NO: 227363 - RNA, 32 nt, Human
ucacccuuuguugggggccaggcacagggcau

SEQ ID NO: 227364 - RNA, 32 nt, Human
ucaccgaagagaggaaccaccacacccagcag

SEQ ID NO: 227365 - RNA, 32 nt, Human
ucaccgacccuccuuuaugugagagagaaaua

SEQ ID NO: 227366 - RNA, 32 nt, Human
ucaccgaggaacacugggcugagcacaugaca

SEQ ID NO: 227367 - RNA, 32 nt, Human
ucaccgaggcuacagugcagugguucaaucgc

SEQ ID NO: 227368 - RNA, 32 nt, Human
ucaccgaggcuggagugcaaugacaugaucuc

SEQ ID NO: 227369 - RNA, 32 nt, Human
ucaccgaggcuggagugcaguggcgcgaucuc

SEQ ID NO: 227370 - RNA, 32 nt, Human
ucaccgagguuggagugcagugguaugaucau

SEQ ID NO: 227371 - RNA, 32 nt, Human
ucaccgauuucuuccuaugcaggaaaugagca

SEQ ID NO: 227372 - RNA, 21 nt, Human
ucaccgcauggacaagcccag

SEQ ID NO: 227373 - RNA, 32 nt, Human
ucaccgcauuugcugcuaucugugcccuggau

SEQ ID NO: 227374 - RNA, 32 nt, Human
ucaccgccacuacugcagcucagugcccagug

SEQ ID NO: 227375 - RNA, 32 nt, Human
ucaccgcccccaccaaccaccaccuccuaaau

SEQ ID NO: 227376 - RNA, 32 nt, Human
ucaccgcccggaggguaugggaagagaaauga

SEQ ID NO: 227377 - RNA, 32 nt, Human
ucaccgccuccuucauugauucuucaugcguu

SEQ ID NO: 227378 - RNA, 32 nt, Human
ucaccgccugaacacggagauugucuuucugc

SEQ ID NO: 227379 - RNA, 32 nt, Human
ucaccgcgcccagccgggaaugcaugcuuuua

SEQ ID NO: 227380 - RNA, 32 nt, Human
ucaccgcgccuauaauccuagcacuuugggag

SEQ ID NO: 227381 - RNA, 32 nt, Human
ucaccggccagagaagaccacugugagcauuu

SEQ ID NO: 227382 - RNA, 18 nt, Human
ucaccggccugcuuggca

SEQ ID NO: 227383 - RNA, 32 nt, Human
ucaccggcgcggaggcaggaggagcagucuca

SEQ ID NO: 227384 - RNA, 32 nt, Human
ucaccgggacgguggaggagauccucaacgug

SEQ ID NO: 227385 - RNA, 26 nt, Human
ucaccguaauccuacccagcaucuuu

SEQ ID NO: 227386 - RNA, 32 nt, Human
ucaccgucaagccuuucaccuuccucaaaaug

SEQ ID NO: 227387 - RNA, 21 nt, Human
ucaccgucaccgucaucauca

SEQ ID NO: 227388 - RNA, 32 nt, Human
ucaccgucacuggggucacugugcucguguug

SEQ ID NO: 227389 - RNA, 24 nt, Human
ucaccgucaucaucaucaucacca

SEQ ID NO: 227390 - RNA, 32 nt, Human
ucaccgucccccaggcuggagugccguggcgu

SEQ ID NO: 227391 - RNA, 32 nt, Human
ucaccgucuccucuuaagcucacucgggccag

SEQ ID NO: 227392 - RNA, 32 nt, Human
ucaccgugagccaucaaugugcucuggucuga

SEQ ID NO: 227393 - RNA, 22 nt, Human
ucaccgugcccagccuccugca

SEQ ID NO: 227394 - RNA, 32 nt, Human
ucaccgugcccagccuggacuugccuuuuacc

SEQ ID NO: 227395 - RNA, 32 nt, Human
ucaccgugcccagccuggaugagggucuuuag

SEQ ID NO: 227396 - RNA, 32 nt, Human
ucaccgugcgcuguugcgaucuggaccccgag

SEQ ID NO: 227397 - RNA, 32 nt, Human
ucaccgugugagccaggauggucucaaucucc

SEQ ID NO: 227398 - RNA, 32 nt, Human
ucaccguguggaaguuuuacagaaggauccca

SEQ ID NO: 227399 - RNA, 32 nt, Human
ucaccguguuaaccaggauggucucgaucucc

SEQ ID NO: 227400 - RNA, 32 nt, Human
ucaccguguuagccaggauggacuccaucucc

SEQ ID NO: 227401 - RNA, 32 nt, Human
ucaccguguuagccaggaugguccugaucucc

SEQ ID NO: 227402 - RNA, 32 nt, Human
ucaccguguuagccaggauggucucaaucucc

SEQ ID NO: 227403 - RNA, 32 nt, Human
ucaccguguuagccaggauggucucgaucccc

SEQ ID NO: 227404 - RNA, 32 nt, Human
ucaccguguuagccaggauggucucgaucucc

SEQ ID NO: 227405 - RNA, 32 nt, Human
ucaccguguuagccaggauggucucgaucuuc

SEQ ID NO: 227406 - RNA, 32 nt, Human
ucaccguguuagccaggauggucucgauuucc

SEQ ID NO: 227407 - RNA, 32 nt, Human
ucaccguguuagccaggauggucuggaucucc

SEQ ID NO: 227408 - RNA, 32 nt, Human
ucaccguguuagccaggauggucuugaucucc

SEQ ID NO: 227409 - RNA, 32 nt, Human
ucaccguguuagccaggauggucuugaucucu

SEQ ID NO: 227410 - RNA, 32 nt, Human
ucaccguguuagccaggauggugucgaucucc

SEQ ID NO: 227411 - RNA, 32 nt, Human
ucaccguguuggccaggauggucuugaucucc

SEQ ID NO: 227412 - RNA, 32 nt, Human
ucaccguguuggccaggauggucuugaucucu

SEQ ID NO: 227413 - RNA, 32 nt, Human
ucaccuaaaacuuccuuaagugagugacaagc

SEQ ID NO: 227414 - RNA, 32 nt, Human
ucaccuaaaccaaagaucacugaagauaaugu

SEQ ID NO: 227415 - RNA, 32 nt, Human
ucaccuaaaggcaguuggcaagagaccaacau

SEQ ID NO: 227416 - RNA, 32 nt, Human
ucaccuaacauuaccagccuuugcaaggagag

SEQ ID NO: 227417 - RNA, 32 nt, Human
ucaccuaagcauaaggggaaaaacucucaggg

SEQ ID NO: 227418 - RNA, 32 nt, Human
ucaccuaagcuggagugcagugcgcgaucucg

SEQ ID NO: 227419 - RNA, 32 nt, Human
ucaccuaaggaaaugcauuugaugagugcugg

SEQ ID NO: 227420 - RNA, 32 nt, Human
ucaccuacaagaaggugaccccguaaccuaga

SEQ ID NO: 227421 - RNA, 32 nt, Human
ucaccuacaaugcuggcuuucucccacugagu

SEQ ID NO: 227422 - RNA, 32 nt, Human
ucaccuacacgguccucacacccuuccucagc

SEQ ID NO: 227423 - RNA, 23 nt, Human
ucaccuaccgaguucaagugauu

SEQ ID NO: 227424 - RNA, 32 nt, Human
ucaccuaccucauaggggagguugugaggcca

SEQ ID NO: 227425 - RNA, 32 nt, Human
ucaccuagacuagacuggagugcaauggccug

SEQ ID NO: 227426 - RNA, 32 nt, Human
ucaccuagagacaagacuccuuagugguggaa

SEQ ID NO: 227427 - RNA, 32 nt, Human
ucaccuagcauuccucuuccucauguucagau

SEQ ID NO: 227428 - RNA, 32 nt, Human
ucaccuagcugguuaauggcagcauucagaac

SEQ ID NO: 227429 - RNA, 32 nt, Human
ucaccuagcuugccacaaaaauucuuuggcga

SEQ ID NO: 227430 - RNA, 32 nt, Human
ucaccuaggcaagagugcaauggcacaaucuc

SEQ ID NO: 227431 - RNA, 32 nt, Human
ucaccuaggcuacagugcaguggugugaucac

SEQ ID NO: 227432 - RNA, 32 nt, Human
ucaccuaggcuagagugcaguggugcgaucuc

SEQ ID NO: 227433 - RNA, 32 nt, Human
ucaccuaggcuagagugcaguggugugaucuc

SEQ ID NO: 227434 - RNA, 32 nt, Human
ucaccuaggcugcagugcaguggcacaagauu

SEQ ID NO: 227435 - RNA, 32 nt, Human
ucaccuaggcuggaaugcaguggugcaaucau

SEQ ID NO: 227436 - RNA, 20 nt, Human
ucaccuaggcuggagugcag

SEQ ID NO: 227437 - RNA, 23 nt, Human
ucaccuaggcuggagugcagcgg

SEQ ID NO: 227438 - RNA, 21 nt, Human
ucaccuaggcuggagugcagu

SEQ ID NO: 227439 - RNA, 22 nt, Human
ucaccuaggcuggagugcagug

SEQ ID NO: 227440 - RNA, 32 nt, Human
ucaccuaggcuggagugcaguggcacaaucuc

SEQ ID NO: 227441 - RNA, 32 nt, Human
ucaccuaggcuggagugcaguggcacaaucuu

SEQ ID NO: 227442 - RNA, 32 nt, Human
ucaccuaggcuggagugcaguggcacagucuc

SEQ ID NO: 227443 - RNA, 32 nt, Human
ucaccuaggcuggagugcaguggcgcaaucuc

SEQ ID NO: 227444 - RNA, 32 nt, Human
ucaccuaggcuggagugcaguggggcaaucuc

SEQ ID NO: 227445 - RNA, 32 nt, Human
ucaccuaggcuggagugcagugguaaaucucg

SEQ ID NO: 227446 - RNA, 32 nt, Human
ucaccuaggcuggagugcaguggugcaauuau

SEQ ID NO: 227447 - RNA, 32 nt, Human
ucaccuaggcuggaguguaguggcgcaaucgu

SEQ ID NO: 227448 - RNA, 32 nt, Human
ucaccuaggcuggaguugcagugguuugaucu

SEQ ID NO: 227449 - RNA, 32 nt, Human
ucaccuaggcuggauugcaauggugcaaucuu

SEQ ID NO: 227450 - RNA, 32 nt, Human
ucaccuaggguggagugcaguggcacaaucac

SEQ ID NO: 227451 - RNA, 32 nt, Human
ucaccuaggugaggauaggcgcgggagccucg

SEQ ID NO: 227452 - RNA, 32 nt, Human
ucaccuauccacccucugcauccccuuggccc

SEQ ID NO: 227453 - RNA, 32 nt, Human
ucaccuauuguacaaagaaauugcgauguaua

SEQ ID NO: 227454 - RNA, 32 nt, Human
ucaccucaacuccagccagggaggaauagaug

SEQ ID NO: 227455 - RNA, 32 nt, Human
ucaccucaagacgaccauggccaccaucccag

SEQ ID NO: 227456 - RNA, 32 nt, Human
ucaccucacaccugaguuaagacgaggaaaua

SEQ ID NO: 227457 - RNA, 31 nt, Human
ucaccucaccucucugagccuguucccuccu

SEQ ID NO: 227458 - RNA, 32 nt, Human
ucaccucacugcaaccuccaccuccuagguuc

SEQ ID NO: 227459 - RNA, 32 nt, Human
ucaccucacugcaaccuccgccuccuggguuc

SEQ ID NO: 227460 - RNA, 32 nt, Human
ucaccucacugcaaccucugccucccgggucc

SEQ ID NO: 227461 - RNA, 32 nt, Human
ucaccucacugcaagcucugccucccgggcuc

SEQ ID NO: 227462 - RNA, 32 nt, Human
ucaccucacugcacgcuagccugggcaacaga

SEQ ID NO: 227463 - RNA, 22 nt, Human
ucaccucaggccaggugcagug

SEQ ID NO: 227464 - RNA, 23 nt, Human
ucaccucaggccaggugcagugg

SEQ ID NO: 227465 - RNA, 32 nt, Human
ucaccucaggccaggugcaguggcucacgccu

SEQ ID NO: 227466 - RNA, 22 nt, Human
ucaccucaggcccugccagggg

SEQ ID NO: 227467 - RNA, 32 nt, Human
ucaccucagugcaacagcugggagggggccgu

SEQ ID NO: 227468 - RNA, 32 nt, Human
ucaccucauugcaaccuccgccucccggguuc

SEQ ID NO: 227469 - RNA, 32 nt, Human
ucaccucauuuguggguggauuuucuagaauu

SEQ ID NO: 227470 - RNA, 26 nt, Human
ucaccuccaaagcaggcaaagacagu

SEQ ID NO: 227471 - RNA, 22 nt, Human
ucaccuccaaaggagaguacag

SEQ ID NO: 227472 - RNA, 19 nt, Human
ucaccuccaaaugaggaca

SEQ ID NO: 227473 - RNA, 32 nt, Human
ucaccuccaacgugaagaucaggcugggccau

SEQ ID NO: 227474 - RNA, 18 nt, Human
ucaccuccagcucagggg

SEQ ID NO: 227475 - RNA, 21 nt, Human
ucaccuccaggauacagacag

SEQ ID NO: 227476 - RNA, 22 nt, Human
ucaccuccagguucaagugauu

SEQ ID NO: 227477 - RNA, 32 nt, Human
ucaccuccauccucugucucuggggcucaucu

SEQ ID NO: 227478 - RNA, 32 nt, Human
ucaccucccagccugccuuccuggucuaucug

SEQ ID NO: 227479 - RNA, 32 nt, Human
ucaccuccccuccuagggacccagagcuuccc

SEQ ID NO: 227480 - RNA, 32 nt, Human
ucaccuccccuguaucugcagcacuuugagcu

SEQ ID NO: 227481 - RNA, 32 nt, Human
ucaccucccuacuccugucauuacauuuacuu

SEQ ID NO: 227482 - RNA, 32 nt, Human
ucaccucccuacuccuuuuauuuuacaugagu

SEQ ID NO: 227483 - RNA, 19 nt, Human
ucaccuccgcuccuugagc

SEQ ID NO: 227484 - RNA, 32 nt, Human
ucaccuccuauuuuauacccuaccuucugguu

SEQ ID NO: 227485 - RNA, 32 nt, Human
ucaccuccucaccucugcuccuugcccucuca

SEQ ID NO: 227486 - RNA, 32 nt, Human
ucaccuccuccacccuucuugcuuaaauccau

SEQ ID NO: 227487 - RNA, 32 nt, Human
ucaccuccuccacucacuccagcccaacagaa

SEQ ID NO: 227488 - RNA, 32 nt, Human
ucaccuccuccaggaagccuucccagcuaccc

SEQ ID NO: 227489 - RNA, 32 nt, Human
ucaccuccuccaggaagccuuccugcucccca

SEQ ID NO: 227490 - RNA, 32 nt, Human
ucaccuccuccaggaaguccucuggauugacu

SEQ ID NO: 227491 - RNA, 32 nt, Human
ucaccuccuccaggacaacacucucucugugg

SEQ ID NO: 227492 - RNA, 32 nt, Human
ucaccuccucccaggcuccugggaagcaccug

SEQ ID NO: 227493 - RNA, 32 nt, Human
ucaccuccucuggccuuuuugcugauggcaga

SEQ ID NO: 227494 - RNA, 32 nt, Human
ucaccuccucuucaugugauguggaccccugg

SEQ ID NO: 227495 - RNA, 18 nt, Human
ucaccuccugcccucagg

SEQ ID NO: 227496 - RNA, 32 nt, Human
ucaccucuaguuauaagccagcaacaggaacu

SEQ ID NO: 227497 - RNA, 32 nt, Human
ucaccucucccaggcccaaggcugcgggcgcc

SEQ ID NO: 227498 - RNA, 32 nt, Human
ucaccucuccccuucugcugagcuucugcgca

SEQ ID NO: 227499 - RNA, 32 nt, Human
ucaccucucucuucaacugccucucuccagag

SEQ ID NO: 227500 - RNA, 32 nt, Human
ucaccucucuucugagaguagcaugagggucc

SEQ ID NO: 227501 - RNA, 32 nt, Human
ucaccucugagagccaaaugucugacuauaga

SEQ ID NO: 227502 - RNA, 32 nt, Human
ucaccucugccacccaucuacuugcauucguc

SEQ ID NO: 227503 - RNA, 32 nt, Human
ucaccucugcuccugucuucaucaccuucucu

SEQ ID NO: 227504 - RNA, 32 nt, Human
ucaccucugcuccuugcccucucaccugguuc

SEQ ID NO: 227505 - RNA, 32 nt, Human
ucaccucugcugucccucucuucccucauccc

SEQ ID NO: 227506 - RNA, 24 nt, Human
ucaccucuguaaucccagcacuuu

SEQ ID NO: 227507 - RNA, 32 nt, Human
ucaccucuguaaucccagcacuuugggaggcc

SEQ ID NO: 227508 - RNA, 32 nt, Human
ucaccucuguaauuuuucagcucucuguauaa

SEQ ID NO: 227509 - RNA, 32 nt, Human
ucaccucuguagaaaaguuucuccccaguucu

SEQ ID NO: 227510 - RNA, 32 nt, Human
ucaccucuguagugugagggucuguggguggu

SEQ ID NO: 227511 - RNA, 32 nt, Human
ucaccucuuaaggagcucugagacuccacuuc

SEQ ID NO: 227512 - RNA, 32 nt, Human
ucaccucuuccaccaucauuugcuagggccaa

SEQ ID NO: 227513 - RNA, 32 nt, Human
ucaccucuuccuggaagccuuccucuuuucca

SEQ ID NO: 227514 - RNA, 32 nt, Human
ucaccucuucugcaaucaugaccucuugaugu

SEQ ID NO: 227515 - RNA, 32 nt, Human
ucaccucuuuuacaccaaaaggucugcagggu

SEQ ID NO: 227516 - RNA, 18 nt, Human
ucaccucuuuugcuagca

SEQ ID NO: 227517 - RNA, 32 nt, Human
ucaccugaacccaggaggcagagguugcagug

SEQ ID NO: 227518 - RNA, 32 nt, Human
ucaccugaaccccagaggcagagguugcagug

SEQ ID NO: 227519 - RNA, 32 nt, Human
ucaccugaacucucuggaccucagguuuccau

SEQ ID NO: 227520 - RNA, 32 nt, Human
ucaccugaagucagaaguuugagaccagccug

SEQ ID NO: 227521 - RNA, 32 nt, Human
ucaccugaagucaggagagaccagccuggcca

SEQ ID NO: 227522 - RNA, 32 nt, Human
ucaccugaagucaggaguucgagaccagccug

SEQ ID NO: 227523 - RNA, 32 nt, Human
ucaccugaagucaggaguuugagaccagccug

SEQ ID NO: 227524 - RNA, 32 nt, Human
ucaccugaagucagggauuugagaccagccug

SEQ ID NO: 227525 - RNA, 32 nt, Human
ucaccugaaucugacuaugaagaaacaucaga

SEQ ID NO: 227526 - RNA, 32 nt, Human
ucaccugagcagguaaagucugaaaagcucaa

SEQ ID NO: 227527 - RNA, 32 nt, Human
ucaccugagcccaggaggucaagacugcagug

SEQ ID NO: 227528 - RNA, 32 nt, Human
ucaccugagcccaggagguggaggcugcagug

SEQ ID NO: 227529 - RNA, 32 nt, Human
ucaccugagccgggggaaucaccugagcccag

SEQ ID NO: 227530 - RNA, 32 nt, Human
ucaccugaggccaccaggcucaagccacugcu

SEQ ID NO: 227531 - RNA, 32 nt, Human
ucaccugagguauggcaaacauggugaaacgc

SEQ ID NO: 227532 - RNA, 32 nt, Human
ucaccugaggucaggaguucgagcccagccug

SEQ ID NO: 227533 - RNA, 32 nt, Human
ucaccugaguccaggaggucgaggcugcagug

SEQ ID NO: 227534 - RNA, 32 nt, Human
ucaccugaucacucaacugcuucuuaacaccu

SEQ ID NO: 227535 - RNA, 21 nt, Human
ucaccugaugcucugccagug

SEQ ID NO: 227536 - RNA, 32 nt, Human
ucaccugcaaagcucuguggccacauuuucag

SEQ ID NO: 227537 - RNA, 32 nt, Human
ucaccugcaacaagcucugauacuccagggga

SEQ ID NO: 227538 - RNA, 32 nt, Human
ucaccugcaccaggauagaaagcacgugaugg

SEQ ID NO: 227539 - RNA, 19 nt, Human
ucaccugcagcuggccaca

SEQ ID NO: 227540 - RNA, 21 nt, Human
ucaccugcaggcuggccuggg

SEQ ID NO: 227541 - RNA, 32 nt, Human
ucaccugcaguugggagccagcuacaacccaa

SEQ ID NO: 227542 - RNA, 32 nt, Human
ucaccugcauauacauuuuuccauuuuaugcu

SEQ ID NO: 227543 - RNA, 32 nt, Human
ucaccugcccaccauacuauccuugaaaaucu

SEQ ID NO: 227544 - RNA, 31 nt, Human
ucaccugcccucucuggacuuguuucuucaa

SEQ ID NO: 227545 - RNA, 32 nt, Human
ucaccugcccugcugagucccaggcugagccu

SEQ ID NO: 227546 - RNA, 31 nt, Human
ucaccugccggcucugggcuggcugcuccua

SEQ ID NO: 227547 - RNA, 32 nt, Human
ucaccugccuccucaucauggaaggggguggg

SEQ ID NO: 227548 - RNA, 32 nt, Human
ucaccugccugggaccugccccgccuccgcau

SEQ ID NO: 227549 - RNA, 32 nt, Human
ucaccugccuuuccuucucccauccuuuuucu

SEQ ID NO: 227550 - RNA, 32 nt, Human
ucaccugcggcagaggugugcagaggcagaau

SEQ ID NO: 227551 - RNA, 32 nt, Human
ucaccugcuaggagccucaccugcuggggacc

SEQ ID NO: 227552 - RNA, 32 nt, Human
ucaccugcucacgcccucccacccccacccua

SEQ ID NO: 227553 - RNA, 32 nt, Human
ucaccugcuccaccccuucacggcgacccacu

SEQ ID NO: 227554 - RNA, 32 nt, Human
ucaccugcucugccuugaaauggcuauuuggg

SEQ ID NO: 227555 - RNA, 32 nt, Human
ucaccugcucuggggcccuccugcgcccagag

SEQ ID NO: 227556 - RNA, 32 nt, Human
ucaccugcugugguuaugaugcucugaguuca

SEQ ID NO: 227557 - RNA, 32 nt, Human
ucaccugcugugguugaguuucucacucaugc

SEQ ID NO: 227558 - RNA, 32 nt, Human
ucaccugcuucucugcccagcuuuucauugcu

SEQ ID NO: 227559 - RNA, 32 nt, Human
ucaccugcuuuaccaccuccuuuucccucagc

SEQ ID NO: 227560 - RNA, 32 nt, Human
ucaccuggaacagcaugucaggccgcagugua

SEQ ID NO: 227561 - RNA, 32 nt, Human
ucaccuggaacagcaugucaggccgcagugug

SEQ ID NO: 227562 - RNA, 32 nt, Human
ucaccuggaaggcagaucuaacagagaaccug

SEQ ID NO: 227563 - RNA, 32 nt, Human
ucaccuggagccuucaauucaccggaagaaaa

SEQ ID NO: 227564 - RNA, 32 nt, Human
ucaccuggauuuugagaaagaaaauaacuucu

SEQ ID NO: 227565 - RNA, 31 nt, Human
ucaccuggauuuuucugaauguuuuaaagaa

SEQ ID NO: 227566 - RNA, 32 nt, Human
ucaccuggcacauucauuuucucaguugaaga

SEQ ID NO: 227567 - RNA, 32 nt, Human
ucaccuggcaccacccucccgcucucacccac

SEQ ID NO: 227568 - RNA, 21 nt, Human
ucaccuggcaggucucugcca

SEQ ID NO: 227569 - RNA, 32 nt, Human
ucaccuggccuggaguguguugggcagccagu

SEQ ID NO: 227570 - RNA, 32 nt, Human
ucaccuggccugggccgcacagcuggugcaug

SEQ ID NO: 227571 - RNA, 32 nt, Human
ucaccuggcuucuccacugcccucucuguucc

SEQ ID NO: 227572 - RNA, 26 nt, Human
ucaccuggcuuuacuucuggugggaa

SEQ ID NO: 227573 - RNA, 21 nt, Human
ucaccugggacucugccagug

SEQ ID NO: 227574 - RNA, 32 nt, Human
ucaccugggaggaccuccugggccagaaucug

SEQ ID NO: 227575 - RNA, 32 nt, Human
ucaccugggagguggggcagggaugguguuuc

SEQ ID NO: 227576 - RNA, 32 nt, Human
ucaccugggaucaggaguccaagaucagccug

SEQ ID NO: 227577 - RNA, 32 nt, Human
ucaccugggccagaggucagaaggucggggca

SEQ ID NO: 227578 - RNA, 32 nt, Human
ucaccuggggaaaugacuggguugucgaugga

SEQ ID NO: 227579 - RNA, 32 nt, Human
ucaccuggggcugcuggccugaaugcuuauag

SEQ ID NO: 227580 - RNA, 32 nt, Human
ucaccugggucgggauucucaggucaugaacg

SEQ ID NO: 227581 - RNA, 32 nt, Human
ucaccuguaagaguccuguccucugccagacu

SEQ ID NO: 227582 - RNA, 22 nt, Human
ucaccuguaaucccagcacuuu

SEQ ID NO: 227583 - RNA, 32 nt, Human
ucaccuguccuggucuugcugugugaugggaa

SEQ ID NO: 227584 - RNA, 23 nt, Human
ucaccugucgcuggagugcagug

SEQ ID NO: 227585 - RNA, 23 nt, Human
ucaccugucucaggaaccaccug

SEQ ID NO: 227586 - RNA, 32 nt, Human
ucaccugucugaaccucaguuuccuugucugu

SEQ ID NO: 227587 - RNA, 32 nt, Human
ucaccugugaagccaucugcgccaagccuugc

SEQ ID NO: 227588 - RNA, 32 nt, Human
ucaccuguggcagaggugugcagaggcagagu

SEQ ID NO: 227589 - RNA, 27 nt, Human
ucaccuguggcuucuucccccagugua

SEQ ID NO: 227590 - RNA, 32 nt, Human
ucaccugugggugggggagggagagggcaguu

SEQ ID NO: 227591 - RNA, 32 nt, Human
ucaccuguugcagcuucaccugccuggggauu

SEQ ID NO: 227592 - RNA, 32 nt, Human
ucaccuguuuaaugccaagauaacaaagcgcu

SEQ ID NO: 227593 - RNA, 32 nt, Human
ucaccuuaaacuugacaguggcucaugcugau

SEQ ID NO: 227594 - RNA, 32 nt, Human
ucaccuuacagcuggggaaacugaggccugga

SEQ ID NO: 227595 - RNA, 32 nt, Human
ucaccuuaccaucagagcagugcagugcucuu

SEQ ID NO: 227596 - RNA, 19 nt, Human
ucaccuuacuccccucagg

SEQ ID NO: 227597 - RNA, 32 nt, Human
ucaccuuagcuccugugguccuuggggcuuag

SEQ ID NO: 227598 - RNA, 32 nt, Human
ucaccuuauucccaggcuggagugcaaugucg

SEQ ID NO: 227599 - RNA, 32 nt, Human
ucaccuucagguagcgcuccagcuucuugcug

SEQ ID NO: 227600 - RNA, 32 nt, Human
ucaccuucauucuucaauucagucuaggaaac

SEQ ID NO: 227601 - RNA, 32 nt, Human
ucaccuucgccucugcugaagucuccccgcag

SEQ ID NO: 227602 - RNA, 32 nt, Human
ucaccuucuccucucuucacggggcccuuuug

SEQ ID NO: 227603 - RNA, 32 nt, Human
ucaccuucugaugucccaucacucccugaugu

SEQ ID NO: 227604 - RNA, 32 nt, Human
ucaccuucugcuccuaggaggcugcuuguugc

SEQ ID NO: 227605 - RNA, 32 nt, Human
ucaccuucuggguucaaguguccuccugccuu

SEQ ID NO: 227606 - RNA, 32 nt, Human
ucaccuugcucaccuucuacuugcccacauac

SEQ ID NO: 227607 - RNA, 32 nt, Human
ucaccuugcuccgucuaugucuucccagcuca

SEQ ID NO: 227608 - RNA, 32 nt, Human
ucaccuuggcugcaacugcugagugcugguaa

SEQ ID NO: 227609 - RNA, 32 nt, Human
ucaccuuguccuauguccagaucuaucuauuc

SEQ ID NO: 227610 - RNA, 23 nt, Human
ucaccuuguggggcuggccgugg

SEQ ID NO: 227611 - RNA, 32 nt, Human
ucaccuuguuagccaggauggucucacguuuu

SEQ ID NO: 227612 - RNA, 32 nt, Human
ucaccuuguuagccaggauggucucgaucucc

SEQ ID NO: 227613 - RNA, 32 nt, Human
ucaccuuguucccuccugccccgguucgagag

SEQ ID NO: 227614 - RNA, 32 nt, Human
ucaccuuguuggccaggauggucucgaucucc

SEQ ID NO: 227615 - RNA, 32 nt, Human
ucaccuuuaacugacguuuuguccucaauaau

SEQ ID NO: 227616 - RNA, 32 nt, Human
ucaccuuuacaaaggccuuucuuuagaucugu

SEQ ID NO: 227617 - RNA, 32 nt, Human
ucaccuuucaugccagacaaaagccccaguga

SEQ ID NO: 227618 - RNA, 32 nt, Human
ucaccuuucccaccucucuccccaaagugauc

SEQ ID NO: 227619 - RNA, 23 nt, Human
ucaccuuucccaucuuccaaggg

SEQ ID NO: 227620 - RNA, 32 nt, Human
ucaccuuuccgagccucgguuuccuuaucugu

SEQ ID NO: 227621 - RNA, 20 nt, Human
ucaccuuuccggagcagggg

SEQ ID NO: 227622 - RNA, 32 nt, Human
ucaccuuucuccuguccaacuucaccaccacc

SEQ ID NO: 227623 - RNA, 18 nt, Human
ucaccuuucucuccucag

SEQ ID NO: 227624 - RNA, 32 nt, Human
ucaccuuugcacuugcugaaucugucuuuguu

SEQ ID NO: 227625 - RNA, 32 nt, Human
ucaccuuuguguuuccagcugcagagaaagua

SEQ ID NO: 227626 - RNA, 32 nt, Human
ucaccuuuugccacccccuccccaccagaggc

SEQ ID NO: 227627 - RNA, 32 nt, Human
ucaccuuuuucuuccucacacuuuuuagucuu

SEQ ID NO: 227628 - RNA, 32 nt, Human
ucacgaacaggcaaagcugcagacuaugguau

SEQ ID NO: 227629 - RNA, 32 nt, Human
ucacgaaggaaauaguaauaugcugaauaaua

SEQ ID NO: 227630 - RNA, 32 nt, Human
ucacgaaugccagaggcagugaugucccaucc

SEQ ID NO: 227631 - RNA, 32 nt, Human
ucacgacacugcacuccagccugggcaacgga

SEQ ID NO: 227632 - RNA, 32 nt, Human
ucacgacagcacagacugacuuuauaccuuca

SEQ ID NO: 227633 - RNA, 32 nt, Human
ucacgaccaccgaccugagccugguggagaug

SEQ ID NO: 227634 - RNA, 32 nt, Human
ucacgaccagccuggccaacauggugaaaccc

SEQ ID NO: 227635 - RNA, 32 nt, Human
ucacgaccagccuggccaacauugugaaaccc

SEQ ID NO: 227636 - RNA, 32 nt, Human
ucacgaccauccuggcuaacauggugguaccc

SEQ ID NO: 227637 - RNA, 32 nt, Human
ucacgacccucucacguggacccccuuagagu

SEQ ID NO: 227638 - RNA, 32 nt, Human
ucacgaccugcaaggggccagcagggacgugg

SEQ ID NO: 227639 - RNA, 32 nt, Human
ucacgacuaagcucucacgauuaaggcacgcc

SEQ ID NO: 227640 - RNA, 32 nt, Human
ucacgacucauuggcucacugcagccuagacc

SEQ ID NO: 227641 - RNA, 32 nt, Human
ucacgagaauagcacagaaaagacuggccucc

SEQ ID NO: 227642 - RNA, 32 nt, Human
ucacgagacacagaaccuggaggggugugcac

SEQ ID NO: 227643 - RNA, 32 nt, Human
ucacgagagcacacaaaauauacaaaggauga

SEQ ID NO: 227644 - RNA, 32 nt, Human
ucacgagcacugggucugcagcuguggggaca

SEQ ID NO: 227645 - RNA, 32 nt, Human
ucacgagcugcuuucaaaaaguugacacaaua

SEQ ID NO: 227646 - RNA, 32 nt, Human
ucacgaggacccucagcugcuggaggccaccc

SEQ ID NO: 227647 - RNA, 32 nt, Human
ucacgaggcuuggaccugcuguggagggugcc

SEQ ID NO: 227648 - RNA, 32 nt, Human
ucacgaggucaggaguucgagggcagccugac

SEQ ID NO: 227649 - RNA, 32 nt, Human
ucacgaucccagauuuagugacuuuaaaccag

SEQ ID NO: 227650 - RNA, 32 nt, Human
ucacgauccugcacuccagccugggcaacaga

SEQ ID NO: 227651 - RNA, 20 nt, Human
ucacgaugcuggcucaggcu

SEQ ID NO: 227652 - RNA, 32 nt, Human
ucacgauuaauaggcucugugguucugguuuu

SEQ ID NO: 227653 - RNA, 31 nt, Human
ucacgauucaauaaauauuggaugaaauuaa

SEQ ID NO: 227654 - RNA, 32 nt, Human
ucacgcaaguuggaaugcaguggugugauguc

SEQ ID NO: 227655 - RNA, 22 nt, Human
ucacgcaaugcucaccucgccu

SEQ ID NO: 227656 - RNA, 17 nt, Human
ucacgcagcagcuggga

SEQ ID NO: 227657 - RNA, 21 nt, Human
ucacgcagcaggagcagggga

SEQ ID NO: 227658 - RNA, 22 nt, Human
ucacgcaggcuagagugcagug

SEQ ID NO: 227659 - RNA, 32 nt, Human
ucacgcaggcuagagugcaguggcgcaaacau

SEQ ID NO: 227660 - RNA, 32 nt, Human
ucacgcaugagaaggagguucccacuggaaaa

SEQ ID NO: 227661 - RNA, 22 nt, Human
ucacgcauguaaucccagcacu

SEQ ID NO: 227662 - RNA, 32 nt, Human
ucacgcauguaaucccagcacucugggaggcu

SEQ ID NO: 227663 - RNA, 24 nt, Human
ucacgcauguaaucccagcacuuu

SEQ ID NO: 227664 - RNA, 32 nt, Human
ucacgcauguaaucccagcacuuugggaggcc

SEQ ID NO: 227665 - RNA, 32 nt, Human
ucacgcauguaaucccugcacuuugggaggcc

SEQ ID NO: 227666 - RNA, 24 nt, Human
ucacgcauguaauccuaacacuuu

SEQ ID NO: 227667 - RNA, 32 nt, Human
ucacgcauuccucccaccuccaccucccaaac

SEQ ID NO: 227668 - RNA, 32 nt, Human
ucacgccacagcacuccagccugggcgacaga

SEQ ID NO: 227669 - RNA, 24 nt, Human
ucacgccacuaaucccaacauuuu

SEQ ID NO: 227670 - RNA, 32 nt, Human
ucacgccacuacacuccaaccugggugacaga

SEQ ID NO: 227671 - RNA, 32 nt, Human
ucacgccacuacacuccagccugggcaacaga

SEQ ID NO: 227672 - RNA, 32 nt, Human
ucacgccacuacacuccagccugggcgacaga

SEQ ID NO: 227673 - RNA, 32 nt, Human
ucacgccacuacauuccagcugggcaacacag

SEQ ID NO: 227674 - RNA, 32 nt, Human
ucacgccacugaacuccagccugggagacagc

SEQ ID NO: 227675 - RNA, 32 nt, Human
ucacgccacugaacuccagccugggugacaga

SEQ ID NO: 227676 - RNA, 32 nt, Human
ucacgccacugcaacuccagcuugggugacag

SEQ ID NO: 227677 - RNA, 32 nt, Human
ucacgccacugcaccccagccugggugacaga

SEQ ID NO: 227678 - RNA, 32 nt, Human
ucacgccacugcacuacagccuggacgacaga

SEQ ID NO: 227679 - RNA, 32 nt, Human
ucacgccacugcacuauagccuaggugacaga

SEQ ID NO: 227680 - RNA, 32 nt, Human
ucacgccacugcacucaagccugggcgacaga

SEQ ID NO: 227681 - RNA, 32 nt, Human
ucacgccacugcacuccaaccugggugacaga

SEQ ID NO: 227682 - RNA, 32 nt, Human
ucacgccacugcacuccaacuugggcaacaga

SEQ ID NO: 227683 - RNA, 32 nt, Human
ucacgccacugcacuccaccugggcaacaaga

SEQ ID NO: 227684 - RNA, 32 nt, Human
ucacgccacugcacuccacuccaucucaaaaa

SEQ ID NO: 227685 - RNA, 32 nt, Human
ucacgccacugcacuccagcacccugggcgac

SEQ ID NO: 227686 - RNA, 32 nt, Human
ucacgccacugcacuccagcccgggcgacagu

SEQ ID NO: 227687 - RNA, 32 nt, Human
ucacgccacugcacuccagcccgggcggcaga

SEQ ID NO: 227688 - RNA, 32 nt, Human
ucacgccacugcacuccagcccggggacagag

SEQ ID NO: 227689 - RNA, 32 nt, Human
ucacgccacugcacuccagccuaggcgacaga

SEQ ID NO: 227690 - RNA, 32 nt, Human
ucacgccacugcacuccagccucggugacaga

SEQ ID NO: 227691 - RNA, 32 nt, Human
ucacgccacugcacuccagccugagugacaga

SEQ ID NO: 227692 - RNA, 32 nt, Human
ucacgccacugcacuccagccugcggacagac

SEQ ID NO: 227693 - RNA, 32 nt, Human
ucacgccacugcacuccagccuggacaacaga

SEQ ID NO: 227694 - RNA, 32 nt, Human
ucacgccacugcacuccagccuggaugacaga

SEQ ID NO: 227695 - RNA, 32 nt, Human
ucacgccacugcacuccagccuggcgacagag

SEQ ID NO: 227696 - RNA, 32 nt, Human
ucacgccacugcacuccagccugggagacaga

SEQ ID NO: 227697 - RNA, 32 nt, Human
ucacgccacugcacuccagccugggcaacaag

SEQ ID NO: 227698 - RNA, 32 nt, Human
ucacgccacugcacuccagccugggcaacaga

SEQ ID NO: 227699 - RNA, 32 nt, Human
ucacgccacugcacuccagccugggcaacagu

SEQ ID NO: 227700 - RNA, 32 nt, Human
ucacgccacugcacuccagccugggcaacgga

SEQ ID NO: 227701 - RNA, 32 nt, Human
ucacgccacugcacuccagccugggccacaga

SEQ ID NO: 227702 - RNA, 32 nt, Human
ucacgccacugcacuccagccugggcgacaga

SEQ ID NO: 227703 - RNA, 32 nt, Human
ucacgccacugcacuccagccugggcgacagu

SEQ ID NO: 227704 - RNA, 32 nt, Human
ucacgccacugcacuccagccugggcgaugga

SEQ ID NO: 227705 - RNA, 32 nt, Human
ucacgccacugcacuccagccugggcugcagg

SEQ ID NO: 227706 - RNA, 32 nt, Human
ucacgccacugcacuccagccuggguaacaag

SEQ ID NO: 227707 - RNA, 32 nt, Human
ucacgccacugcacuccagccuggguaacaga

SEQ ID NO: 227708 - RNA, 32 nt, Human
ucacgccacugcacuccagccugggugacaga

SEQ ID NO: 227709 - RNA, 32 nt, Human
ucacgccacugcacuccagccuggucaacaga

SEQ ID NO: 227710 - RNA, 32 nt, Human
ucacgccacugcacuccagccuggugacagag

SEQ ID NO: 227711 - RNA, 32 nt, Human
ucacgccacugcacuccagccuggugacagcg

SEQ ID NO: 227712 - RNA, 32 nt, Human
ucacgccacugcacuccagccuguugacaaag

SEQ ID NO: 227713 - RNA, 32 nt, Human
ucacgccacugcacuccagcuggagugacaga

SEQ ID NO: 227714 - RNA, 32 nt, Human
ucacgccacugcacuccagcuugggugacaaa

SEQ ID NO: 227715 - RNA, 32 nt, Human
ucacgccacugcacuccagucugggugacaga

SEQ ID NO: 227716 - RNA, 32 nt, Human
ucacgccacugcacuccauccagccuggguga

SEQ ID NO: 227717 - RNA, 32 nt, Human
ucacgccacugcacucuagccuaggcgacaga

SEQ ID NO: 227718 - RNA, 32 nt, Human
ucacgccacugcacucuagccugggauacaga

SEQ ID NO: 227719 - RNA, 32 nt, Human
ucacgccacugcacucuagccugggcaacaag

SEQ ID NO: 227720 - RNA, 32 nt, Human
ucacgccacugcacucuagccugggcaauaag

SEQ ID NO: 227721 - RNA, 32 nt, Human
ucacgccacugcacuugagccugggcgacaca

SEQ ID NO: 227722 - RNA, 32 nt, Human
ucacgccacugcauuacagccuggugcagagc

SEQ ID NO: 227723 - RNA, 32 nt, Human
ucacgccacugcauuccagacugggcgacaga

SEQ ID NO: 227724 - RNA, 32 nt, Human
ucacgccacugcauuccagccugggcgacaga

SEQ ID NO: 227725 - RNA, 32 nt, Human
ucacgccacugcauuccagccuggugacagag

SEQ ID NO: 227726 - RNA, 32 nt, Human
ucacgccacugcauuccagccugugcgacaga

SEQ ID NO: 227727 - RNA, 32 nt, Human
ucacgccacugcauucuauccugggcaacaga

SEQ ID NO: 227728 - RNA, 32 nt, Human
ucacgccacugcccuccagccuggggagacag

SEQ ID NO: 227729 - RNA, 32 nt, Human
ucacgccacugcgcuacagccugggcgacaca

SEQ ID NO: 227730 - RNA, 32 nt, Human
ucacgccacugcgcuccagccugggcgaaaga

SEQ ID NO: 227731 - RNA, 32 nt, Human
ucacgccacuguacuccagccuggaugacaca

SEQ ID NO: 227732 - RNA, 32 nt, Human
ucacgccacuguacuccagccugggagacaca

SEQ ID NO: 227733 - RNA, 32 nt, Human
ucacgccacugugcuccagccugggcaacaaa

SEQ ID NO: 227734 - RNA, 32 nt, Human
ucacgccagaagcacacuugaggcugcagucg

SEQ ID NO: 227735 - RNA, 32 nt, Human
ucacgccagcugcaguguggaggcacaagugg

SEQ ID NO: 227736 - RNA, 24 nt, Human
ucacgccaggaaucccagcacuuu

SEQ ID NO: 227737 - RNA, 32 nt, Human
ucacgccaggaaucccagcacuuugggaggcc

SEQ ID NO: 227738 - RNA, 32 nt, Human
ucacgccaggaggcuguggcugcugugggccc

SEQ ID NO: 227739 - RNA, 21 nt, Human
ucacgccaguaaucccagcac

SEQ ID NO: 227740 - RNA, 24 nt, Human
ucacgccaguaaucccagcacuuu

SEQ ID NO: 227741 - RNA, 32 nt, Human
ucacgccaguaaucccagcacuuuggagggcu

SEQ ID NO: 227742 - RNA, 32 nt, Human
ucacgccaguaaucccagcacuuugggaggcc

SEQ ID NO: 227743 - RNA, 32 nt, Human
ucacgccagugcacuccagccugagagacaga

SEQ ID NO: 227744 - RNA, 32 nt, Human
ucacgccaucacacugcagccuaggugacaga

SEQ ID NO: 227745 - RNA, 32 nt, Human
ucacgccauuacacuccagccuggcugacagu

SEQ ID NO: 227746 - RNA, 32 nt, Human
ucacgccauuacacuccagccugggcaacaga

SEQ ID NO: 227747 - RNA, 32 nt, Human
ucacgccauugcacuacagccugggugacaga

SEQ ID NO: 227748 - RNA, 32 nt, Human
ucacgccauugcacuccaaccugggugacaag

SEQ ID NO: 227749 - RNA, 32 nt, Human
ucacgccauugcacuccagccuaggcaacgag

SEQ ID NO: 227750 - RNA, 32 nt, Human
ucacgccauugcacuccagccuaggcgacaga

SEQ ID NO: 227751 - RNA, 32 nt, Human
ucacgccauugcacuccagccugggcaacaag

SEQ ID NO: 227752 - RNA, 32 nt, Human
ucacgccauugcacuccagccugggcaacaga

SEQ ID NO: 227753 - RNA, 32 nt, Human
ucacgccauugcacuccagccugggcaacagu

SEQ ID NO: 227754 - RNA, 32 nt, Human
ucacgccauugcacuccagccugggcaacgag

SEQ ID NO: 227755 - RNA, 32 nt, Human
ucacgccauugcacuccagccugggcaauaag

SEQ ID NO: 227756 - RNA, 32 nt, Human
ucacgccauugcacuccagccugggcgacaga

SEQ ID NO: 227757 - RNA, 32 nt, Human
ucacgccauugcacuccagccugggggacaga

SEQ ID NO: 227758 - RNA, 32 nt, Human
ucacgccauugcacuccagccugggugacaca

SEQ ID NO: 227759 - RNA, 32 nt, Human
ucacgccauugcacuccagccugggugacaga

SEQ ID NO: 227760 - RNA, 32 nt, Human
ucacgccauugcacuccagccugugcgacaag

SEQ ID NO: 227761 - RNA, 32 nt, Human
ucacgccauugcacuccagucugagcaacaag

SEQ ID NO: 227762 - RNA, 32 nt, Human
ucacgccauugcacuccagucugguugacaga

SEQ ID NO: 227763 - RNA, 32 nt, Human
ucacgccauuguacuccagccuggcaacagag

SEQ ID NO: 227764 - RNA, 32 nt, Human
ucacgccauuguacuccagccugggcaacaag

SEQ ID NO: 227765 - RNA, 32 nt, Human
ucacgccauuguacuccagccugggcgacaga

SEQ ID NO: 227766 - RNA, 23 nt, Human
ucacgcccauaauccagcacuuu

SEQ ID NO: 227767 - RNA, 32 nt, Human
ucacgcccauaaucccagcacuuugggaggcc

SEQ ID NO: 227768 - RNA, 24 nt, Human
ucacgcccguaaucccagggcuuu

SEQ ID NO: 227769 - RNA, 23 nt, Human
ucacgcccucugaacugcucuuc

SEQ ID NO: 227770 - RNA, 22 nt, Human
ucacgcccuucaaugcugcagg

SEQ ID NO: 227771 - RNA, 32 nt, Human
ucacgcccuuuccaccaugugagguuauggug

SEQ ID NO: 227772 - RNA, 21 nt, Human
ucacgcccuuucuccccgccu

SEQ ID NO: 227773 - RNA, 32 nt, Human
ucacgcccuuucuccccgccuuuuugcugggc

SEQ ID NO: 227774 - RNA, 32 nt, Human
ucacgccgcugcacuccagccugagcacagag

SEQ ID NO: 227775 - RNA, 32 nt, Human
ucacgccgcugcacuccagcuugaaugacaga

SEQ ID NO: 227776 - RNA, 24 nt, Human
ucacgccgguaaucccagcacuuu

SEQ ID NO: 227777 - RNA, 32 nt, Human
ucacgccgguaaucccagcacuuugggaggcc

SEQ ID NO: 227778 - RNA, 32 nt, Human
ucacgccgguaaucccagcauuucgggaggcu

SEQ ID NO: 227779 - RNA, 23 nt, Human
ucacgccguaaugccaacacuuu

SEQ ID NO: 227780 - RNA, 32 nt, Human
ucacgccgucccgcagggcccagcacagcccc

SEQ ID NO: 227781 - RNA, 32 nt, Human
ucacgccguugcacuccagccugggcaacaag

SEQ ID NO: 227782 - RNA, 32 nt, Human
ucacgccuacagccccaacacaagcuccaguc

SEQ ID NO: 227783 - RNA, 24 nt, Human
ucacgccuagaaucccagcacuuu

SEQ ID NO: 227784 - RNA, 24 nt, Human
ucacgccuauaaucccaacaguuu

SEQ ID NO: 227785 - RNA, 32 nt, Human
ucacgccuauaaucccagaggcugaggcaggc

SEQ ID NO: 227786 - RNA, 32 nt, Human
ucacgccuauaaucccagcacagugggaggcc

SEQ ID NO: 227787 - RNA, 23 nt, Human
ucacgccuauaaucccagcacuu

SEQ ID NO: 227788 - RNA, 32 nt, Human
ucacgccuauaaucccagcacuuagggaggcc

SEQ ID NO: 227789 - RNA, 32 nt, Human
ucacgccuauaaucccagcacuuccagagucc

SEQ ID NO: 227790 - RNA, 24 nt, Human
ucacgccuauaaucccagcacuuu

SEQ ID NO: 227791 - RNA, 32 nt, Human
ucacgccuauaaucccagcacuuuaggaggcc

SEQ ID NO: 227792 - RNA, 32 nt, Human
ucacgccuauaaucccagcacuuugcgaggcc

SEQ ID NO: 227793 - RNA, 32 nt, Human
ucacgccuauaaucccagcacuuugggaggcc

SEQ ID NO: 227794 - RNA, 32 nt, Human
ucacgccuauaaucccagcacuuugggaggcu

SEQ ID NO: 227795 - RNA, 32 nt, Human
ucacgccuauaaucccagcaguuugggaggcu

SEQ ID NO: 227796 - RNA, 32 nt, Human
ucacgccuauaaucccagcauuuugggaggcc

SEQ ID NO: 227797 - RNA, 24 nt, Human
ucacgccuauaauccuaucacuuu

SEQ ID NO: 227798 - RNA, 21 nt, Human
ucacgccuauaaucucagcac

SEQ ID NO: 227799 - RNA, 22 nt, Human
ucacgccuauaaucucagcacu

SEQ ID NO: 227800 - RNA, 24 nt, Human
ucacgccuauaaucucagcacuuu

SEQ ID NO: 227801 - RNA, 24 nt, Human
ucacgccuauaauuccagcacuuu

SEQ ID NO: 227802 - RNA, 24 nt, Human
ucacgccuauacacccagcacuuu

SEQ ID NO: 227803 - RNA, 24 nt, Human
ucacgccuaugaucccagcacuuu

SEQ ID NO: 227804 - RNA, 32 nt, Human
ucacgccuaugaucccagcacuuugggaggcu

SEQ ID NO: 227805 - RNA, 24 nt, Human
ucacgccucuaaucccagcacuuu

SEQ ID NO: 227806 - RNA, 32 nt, Human
ucacgccucuaaucccagcacuuugggagguc

SEQ ID NO: 227807 - RNA, 24 nt, Human
ucacgccucuaaucccaggacuuu

SEQ ID NO: 227808 - RNA, 32 nt, Human
ucacgccucuaaucccaggacuuugggaggcc

SEQ ID NO: 227809 - RNA, 24 nt, Human
ucacgccucuaaucgcagcacuuu

SEQ ID NO: 227810 - RNA, 24 nt, Human
ucacgccucuaaucucagcacuuu

SEQ ID NO: 227811 - RNA, 32 nt, Human
ucacgccucugcacuccagccugggcaacaag

SEQ ID NO: 227812 - RNA, 24 nt, Human
ucacgccugaaaucccagcacuuu

SEQ ID NO: 227813 - RNA, 32 nt, Human
ucacgccugaaaucccagcacuuugggagacu

SEQ ID NO: 227814 - RNA, 32 nt, Human
ucacgccugaaaucccagcacuuugggaggcc

SEQ ID NO: 227815 - RNA, 24 nt, Human
ucacgccugaaaucucagcacuuu

SEQ ID NO: 227816 - RNA, 32 nt, Human
ucacgccugcaaucccaacacuuuaggaggcc

SEQ ID NO: 227817 - RNA, 32 nt, Human
ucacgccugcaaucccagagcuuugggaagcc

SEQ ID NO: 227818 - RNA, 32 nt, Human
ucacgccugcaaucccagcaccaugggaggcu

SEQ ID NO: 227819 - RNA, 24 nt, Human
ucacgccugcaaucccagcacuuu

SEQ ID NO: 227820 - RNA, 32 nt, Human
ucacgccugcaaucccagcacuuugggagacu

SEQ ID NO: 227821 - RNA, 32 nt, Human
ucacgccugcaaucccagcacuuugggaggcc

SEQ ID NO: 227822 - RNA, 32 nt, Human
ucacgccugcaaucccagcgcuuugggaggcc

SEQ ID NO: 227823 - RNA, 24 nt, Human
ucacgccugcagucccagcacuuu

SEQ ID NO: 227824 - RNA, 22 nt, Human
ucacgccuggaaucccagcacu

SEQ ID NO: 227825 - RNA, 32 nt, Human
ucacgccuggaaucccagcacugugggaggcc

SEQ ID NO: 227826 - RNA, 23 nt, Human
ucacgccuggaaucccagcacuu

SEQ ID NO: 227827 - RNA, 32 nt, Human
ucacgccuggaaucccagcacuugaggccagg

SEQ ID NO: 227828 - RNA, 24 nt, Human
ucacgccuggaaucccagcacuuu

SEQ ID NO: 227829 - RNA, 32 nt, Human
ucacgccuggaaucccagcacuuugggaagcc

SEQ ID NO: 227830 - RNA, 32 nt, Human
ucacgccuggaaucccagcacuuugggaggcc

SEQ ID NO: 227831 - RNA, 32 nt, Human
ucacgccuggaaucccagcauuuugggaggcc

SEQ ID NO: 227832 - RNA, 24 nt, Human
ucacgccuguaaacccagcacuuu

SEQ ID NO: 227833 - RNA, 32 nt, Human
ucacgccuguaaccccaacacuuugggaggcc

SEQ ID NO: 227834 - RNA, 21 nt, Human
ucacgccuguaaccccagcac

SEQ ID NO: 227835 - RNA, 32 nt, Human
ucacgccuguaaccccagcacauugggaggcc

SEQ ID NO: 227836 - RNA, 24 nt, Human
ucacgccuguaaccccagcacuuu

SEQ ID NO: 227837 - RNA, 32 nt, Human
ucacgccuguaaccccagcacuuugggaggcc

SEQ ID NO: 227838 - RNA, 32 nt, Human
ucacgccuguaaccccagcacuuugggaggcu

SEQ ID NO: 227839 - RNA, 24 nt, Human
ucacgccuguaaccccaucacuuu

SEQ ID NO: 227840 - RNA, 32 nt, Human
ucacgccuguaaccccaucacuuugggaggcc

SEQ ID NO: 227841 - RNA, 32 nt, Human
ucacgccuguaacccuagcacuuugggagucc

SEQ ID NO: 227842 - RNA, 22 nt, Human
ucacgccuguaaccucagcacu

SEQ ID NO: 227843 - RNA, 32 nt, Human
ucacgccuguaaccucagcacugugggaggcc

SEQ ID NO: 227844 - RNA, 24 nt, Human
ucacgccuguaaccucagcacuuu

SEQ ID NO: 227845 - RNA, 32 nt, Human
ucacgccuguaaccucagcacuuugggaggcc

SEQ ID NO: 227846 - RNA, 21 nt, Human
ucacgccuguaauaccagcac

SEQ ID NO: 227847 - RNA, 32 nt, Human
ucacgccuguaauaccagcaccuuagaggucg

SEQ ID NO: 227848 - RNA, 22 nt, Human
ucacgccuguaauaccagcacu

SEQ ID NO: 227849 - RNA, 24 nt, Human
ucacgccuguaauaccagcacuuu

SEQ ID NO: 227850 - RNA, 32 nt, Human
ucacgccuguaauaccagcacuuugggaggcu

SEQ ID NO: 227851 - RNA, 24 nt, Human
ucacgccuguaaucacagcacuuu

SEQ ID NO: 227852 - RNA, 32 nt, Human
ucacgccuguaaucacagcacuuugggaggcc

SEQ ID NO: 227853 - RNA, 32 nt, Human
ucacgccuguaaucacagcacuuugggaggcu

SEQ ID NO: 227854 - RNA, 24 nt, Human
ucacgccuguaaucacaguauuuu

SEQ ID NO: 227855 - RNA, 23 nt, Human
ucacgccuguaauccaacacuuu

SEQ ID NO: 227856 - RNA, 32 nt, Human
ucacgccuguaauccaacacuuugagaggcug

SEQ ID NO: 227857 - RNA, 23 nt, Human
ucacgccuguaauccaagcacuu

SEQ ID NO: 227858 - RNA, 32 nt, Human
ucacgccuguaauccaagcacuuggggaggcc

SEQ ID NO: 227859 - RNA, 32 nt, Human
ucacgccuguaauccagcaauuugggaggcca

SEQ ID NO: 227860 - RNA, 21 nt, Human
ucacgccuguaauccagcacu

SEQ ID NO: 227861 - RNA, 32 nt, Human
ucacgccuguaauccagcacugugggaggccu

SEQ ID NO: 227862 - RNA, 23 nt, Human
ucacgccuguaauccagcacuuu

SEQ ID NO: 227863 - RNA, 32 nt, Human
ucacgccuguaauccagcacuuugggaggccc

SEQ ID NO: 227864 - RNA, 24 nt, Human
ucacgccuguaaucccaaagugcu

SEQ ID NO: 227865 - RNA, 32 nt, Human
ucacgccuguaaucccaaagugcugggauuac

SEQ ID NO: 227866 - RNA, 32 nt, Human
ucacgccuguaaucccaacaacacuuugggag

SEQ ID NO: 227867 - RNA, 21 nt, Human
ucacgccuguaaucccaacac

SEQ ID NO: 227868 - RNA, 32 nt, Human
ucacgccuguaaucccaacaccuugggaggcc

SEQ ID NO: 227869 - RNA, 32 nt, Human
ucacgccuguaaucccaacacucugggaggcc

SEQ ID NO: 227870 - RNA, 23 nt, Human
ucacgccuguaaucccaacacuu

SEQ ID NO: 227871 - RNA, 24 nt, Human
ucacgccuguaaucccaacacuuu

SEQ ID NO: 227872 - RNA, 32 nt, Human
ucacgccuguaaucccaacacuuuaggagacc

SEQ ID NO: 227873 - RNA, 32 nt, Human
ucacgccuguaaucccaacacuuuaggagucc

SEQ ID NO: 227874 - RNA, 32 nt, Human
ucacgccuguaaucccaacacuuugggagccc

SEQ ID NO: 227875 - RNA, 32 nt, Human
ucacgccuguaaucccaacacuuugggaggca

SEQ ID NO: 227876 - RNA, 32 nt, Human
ucacgccuguaaucccaacacuuugggaggcc

SEQ ID NO: 227877 - RNA, 32 nt, Human
ucacgccuguaaucccaacacuuugggaggcu

SEQ ID NO: 227878 - RNA, 32 nt, Human
ucacgccuguaaucccaacacuuugggaggug

SEQ ID NO: 227879 - RNA, 32 nt, Human
ucacgccuguaaucccaacacuuuucgaggcc

SEQ ID NO: 227880 - RNA, 24 nt, Human
ucacgccuguaaucccaacauuuu

SEQ ID NO: 227881 - RNA, 32 nt, Human
ucacgccuguaaucccaacauuuugggaggcc

SEQ ID NO: 227882 - RNA, 32 nt, Human
ucacgccuguaaucccaauacuuugggaggcc

SEQ ID NO: 227883 - RNA, 24 nt, Human
ucacgccuguaaucccaccacuuu

SEQ ID NO: 227884 - RNA, 32 nt, Human
ucacgccuguaaucccaccacuuuggaaagcu

SEQ ID NO: 227885 - RNA, 32 nt, Human
ucacgccuguaaucccaccacuuugggaggac

SEQ ID NO: 227886 - RNA, 22 nt, Human
ucacgccuguaaucccagaacu

SEQ ID NO: 227887 - RNA, 32 nt, Human
ucacgccuguaaucccagaacuaugugaggcu

SEQ ID NO: 227888 - RNA, 32 nt, Human
ucacgccuguaaucccagaacucugggaagcc

SEQ ID NO: 227889 - RNA, 24 nt, Human
ucacgccuguaaucccagaacuuu

SEQ ID NO: 227890 - RNA, 32 nt, Human
ucacgccuguaaucccagaacuuuaggaggcu

SEQ ID NO: 227891 - RNA, 32 nt, Human
ucacgccuguaaucccagaacuuugagaggcc

SEQ ID NO: 227892 - RNA, 32 nt, Human
ucacgccuguaaucccagaacuuugggaagcc

SEQ ID NO: 227893 - RNA, 32 nt, Human
ucacgccuguaaucccagaacuuugggaggcu

SEQ ID NO: 227894 - RNA, 24 nt, Human
ucacgccuguaaucccagaauuuu

SEQ ID NO: 227895 - RNA, 32 nt, Human
ucacgccuguaaucccagaauuuuaggaggcu

SEQ ID NO: 227896 - RNA, 21 nt, Human
ucacgccuguaaucccagacu

SEQ ID NO: 227897 - RNA, 23 nt, Human
ucacgccuguaaucccagacuuu

SEQ ID NO: 227898 - RNA, 32 nt, Human
ucacgccuguaaucccagacuuugggaggccg

SEQ ID NO: 227899 - RNA, 20 nt, Human
ucacgccuguaaucccagca

SEQ ID NO: 227900 - RNA, 24 nt, Human
ucacgccuguaaucccagcaaguu

SEQ ID NO: 227901 - RNA, 32 nt, Human
ucacgccuguaaucccagcaaguugggaggcu

SEQ ID NO: 227902 - RNA, 32 nt, Human
ucacgccuguaaucccagcaauugggaaggcc

SEQ ID NO: 227903 - RNA, 32 nt, Human
ucacgccuguaaucccagcaauuugggaggcu

SEQ ID NO: 227904 - RNA, 32 nt, Human
ucacgccuguaaucccagcaauuugggagguc

SEQ ID NO: 227905 - RNA, 32 nt, Human
ucacgccuguaaucccagcaauuugggagucc

SEQ ID NO: 227906 - RNA, 21 nt, Human
ucacgccuguaaucccagcac

SEQ ID NO: 227907 - RNA, 32 nt, Human
ucacgccuguaaucccagcacacugggaggcc

SEQ ID NO: 227908 - RNA, 32 nt, Human
ucacgccuguaaucccagcacauugggaggcc

SEQ ID NO: 227909 - RNA, 32 nt, Human
ucacgccuguaaucccagcaccuugggaggcc

SEQ ID NO: 227910 - RNA, 32 nt, Human
ucacgccuguaaucccagcaccuugggaggcu

SEQ ID NO: 227911 - RNA, 32 nt, Human
ucacgccuguaaucccagcacgcugggaggcc

SEQ ID NO: 227912 - RNA, 22 nt, Human
ucacgccuguaaucccagcacu

SEQ ID NO: 227913 - RNA, 32 nt, Human
ucacgccuguaaucccagcacuaggaggccga

SEQ ID NO: 227914 - RNA, 32 nt, Human
ucacgccuguaaucccagcacucugggaggca

SEQ ID NO: 227915 - RNA, 32 nt, Human
ucacgccuguaaucccagcacucugggaggcu

SEQ ID NO: 227916 - RNA, 32 nt, Human
ucacgccuguaaucccagcacugagaggccga

SEQ ID NO: 227917 - RNA, 32 nt, Human
ucacgccuguaaucccagcacuggaaggccaa

SEQ ID NO: 227918 - RNA, 32 nt, Human
ucacgccuguaaucccagcacugggaggccga

SEQ ID NO: 227919 - RNA, 32 nt, Human
ucacgccuguaaucccagcacugugagaggcu

SEQ ID NO: 227920 - RNA, 32 nt, Human
ucacgccuguaaucccagcacugugggaggcc

SEQ ID NO: 227921 - RNA, 32 nt, Human
ucacgccuguaaucccagcacugugggaggcg

SEQ ID NO: 227922 - RNA, 23 nt, Human
ucacgccuguaaucccagcacuu

SEQ ID NO: 227923 - RNA, 32 nt, Human
ucacgccuguaaucccagcacuuaggaagacc

SEQ ID NO: 227924 - RNA, 32 nt, Human
ucacgccuguaaucccagcacuuagggaggcu

SEQ ID NO: 227925 - RNA, 32 nt, Human
ucacgccuguaaucccagcacuuagggugggc

SEQ ID NO: 227926 - RNA, 32 nt, Human
ucacgccuguaaucccagcacuucgggaggcc

SEQ ID NO: 227927 - RNA, 32 nt, Human
ucacgccuguaaucccagcacuugggaggcca

SEQ ID NO: 227928 - RNA, 32 nt, Human
ucacgccuguaaucccagcacuuggggaggac

SEQ ID NO: 227929 - RNA, 32 nt, Human
ucacgccuguaaucccagcacuuggggaggcc

SEQ ID NO: 227930 - RNA, 32 nt, Human
ucacgccuguaaucccagcacuuggggaggcu

SEQ ID NO: 227931 - RNA, 24 nt, Human
ucacgccuguaaucccagcacuuu

SEQ ID NO: 227932 - RNA, 32 nt, Human
ucacgccuguaaucccagcacuuuaagaggcc

SEQ ID NO: 227933 - RNA, 32 nt, Human
ucacgccuguaaucccagcacuuuagaucacu

SEQ ID NO: 227934 - RNA, 32 nt, Human
ucacgccuguaaucccagcacuuuaggaggcc

SEQ ID NO: 227935 - RNA, 32 nt, Human
ucacgccuguaaucccagcacuuucggaggca

SEQ ID NO: 227936 - RNA, 32 nt, Human
ucacgccuguaaucccagcacuuugagaagcc

SEQ ID NO: 227937 - RNA, 32 nt, Human
ucacgccuguaaucccagcacuuugagagacc

SEQ ID NO: 227938 - RNA, 32 nt, Human
ucacgccuguaaucccagcacuuugagaggcc

SEQ ID NO: 227939 - RNA, 32 nt, Human
ucacgccuguaaucccagcacuuugagaggcu

SEQ ID NO: 227940 - RNA, 32 nt, Human
ucacgccuguaaucccagcacuuugagaugcu

SEQ ID NO: 227941 - RNA, 32 nt, Human
ucacgccuguaaucccagcacuuugcgauacc

SEQ ID NO: 227942 - RNA, 32 nt, Human
ucacgccuguaaucccagcacuuugcggggcu

SEQ ID NO: 227943 - RNA, 32 nt, Human
ucacgccuguaaucccagcacuuuggaaggcc

SEQ ID NO: 227944 - RNA, 32 nt, Human
ucacgccuguaaucccagcacuuuggaaggcu

SEQ ID NO: 227945 - RNA, 32 nt, Human
ucacgccuguaaucccagcacuuuggaggcca

SEQ ID NO: 227946 - RNA, 32 nt, Human
ucacgccuguaaucccagcacuuuggcaggcc

SEQ ID NO: 227947 - RNA, 32 nt, Human
ucacgccuguaaucccagcacuuugggaagcc

SEQ ID NO: 227948 - RNA, 32 nt, Human
ucacgccuguaaucccagcacuuugggaagcu

SEQ ID NO: 227949 - RNA, 32 nt, Human
ucacgccuguaaucccagcacuuugggacacc

SEQ ID NO: 227950 - RNA, 32 nt, Human
ucacgccuguaaucccagcacuuugggagccc

SEQ ID NO: 227951 - RNA, 32 nt, Human
ucacgccuguaaucccagcacuuugggaggac

SEQ ID NO: 227952 - RNA, 32 nt, Human
ucacgccuguaaucccagcacuuugggaggau

SEQ ID NO: 227953 - RNA, 32 nt, Human
ucacgccuguaaucccagcacuuugggaggca

SEQ ID NO: 227954 - RNA, 32 nt, Human
ucacgccuguaaucccagcacuuugggaggcc

SEQ ID NO: 227955 - RNA, 32 nt, Human
ucacgccuguaaucccagcacuuugggaggcg

SEQ ID NO: 227956 - RNA, 32 nt, Human
ucacgccuguaaucccagcacuuugggaggcu

SEQ ID NO: 227957 - RNA, 32 nt, Human
ucacgccuguaaucccagcacuuugggagggc

SEQ ID NO: 227958 - RNA, 32 nt, Human
ucacgccuguaaucccagcacuuugggagggg

SEQ ID NO: 227959 - RNA, 32 nt, Human
ucacgccuguaaucccagcacuuugggagguc

SEQ ID NO: 227960 - RNA, 32 nt, Human
ucacgccuguaaucccagcacuuugggaggug

SEQ ID NO: 227961 - RNA, 32 nt, Human
ucacgccuguaaucccagcacuuugggagguu

SEQ ID NO: 227962 - RNA, 32 nt, Human
ucacgccuguaaucccagcacuuugggagucc

SEQ ID NO: 227963 - RNA, 32 nt, Human
ucacgccuguaaucccagcacuuugggaugcc

SEQ ID NO: 227964 - RNA, 32 nt, Human
ucacgccuguaaucccagcacuuuggggagcc

SEQ ID NO: 227965 - RNA, 32 nt, Human
ucacgccuguaaucccagcacuuugguaggcc

SEQ ID NO: 227966 - RNA, 32 nt, Human
ucacgccuguaaucccagcacuuugguugggu

SEQ ID NO: 227967 - RNA, 32 nt, Human
ucacgccuguaaucccagcacuuuguggggcu

SEQ ID NO: 227968 - RNA, 32 nt, Human
ucacgccuguaaucccagcacuuuucagaggc

SEQ ID NO: 227969 - RNA, 32 nt, Human
ucacgccuguaaucccagcacuuuuggaggcc

SEQ ID NO: 227970 - RNA, 32 nt, Human
ucacgccuguaaucccagcacuuuugggaggc

SEQ ID NO: 227971 - RNA, 24 nt, Human
ucacgccuguaaucccagcaguuu

SEQ ID NO: 227972 - RNA, 32 nt, Human
ucacgccuguaaucccagcaguuugggaagcc

SEQ ID NO: 227973 - RNA, 32 nt, Human
ucacgccuguaaucccagcaguuugggagguc

SEQ ID NO: 227974 - RNA, 23 nt, Human
ucacgccuguaaucccagcauuu

SEQ ID NO: 227975 - RNA, 32 nt, Human
ucacgccuguaaucccagcauuugggaggcug

SEQ ID NO: 227976 - RNA, 24 nt, Human
ucacgccuguaaucccagcauuuu

SEQ ID NO: 227977 - RNA, 32 nt, Human
ucacgccuguaaucccagcauuuugggagcuu

SEQ ID NO: 227978 - RNA, 32 nt, Human
ucacgccuguaaucccagcauuuugggaggcc

SEQ ID NO: 227979 - RNA, 32 nt, Human
ucacgccuguaaucccagcauuuugggaggcu

SEQ ID NO: 227980 - RNA, 22 nt, Human
ucacgccuguaaucccagcccu

SEQ ID NO: 227981 - RNA, 32 nt, Human
ucacgccuguaaucccagcccuaugggaggcu

SEQ ID NO: 227982 - RNA, 24 nt, Human
ucacgccuguaaucccagcccuuu

SEQ ID NO: 227983 - RNA, 32 nt, Human
ucacgccuguaaucccagcccuuugggaggcc

SEQ ID NO: 227984 - RNA, 32 nt, Human
ucacgccuguaaucccagcccuuugggaggcu

SEQ ID NO: 227985 - RNA, 24 nt, Human
ucacgccuguaaucccagcgcuuu

SEQ ID NO: 227986 - RNA, 32 nt, Human
ucacgccuguaaucccagcgcuuugggagagc

SEQ ID NO: 227987 - RNA, 32 nt, Human
ucacgccuguaaucccagcgcuuugggaggca

SEQ ID NO: 227988 - RNA, 32 nt, Human
ucacgccuguaaucccagcgcuuugggaggcc

SEQ ID NO: 227989 - RNA, 23 nt, Human
ucacgccuguaaucccagcuacu

SEQ ID NO: 227990 - RNA, 32 nt, Human
ucacgccuguaaucccagcuacucaggaggcu

SEQ ID NO: 227991 - RNA, 24 nt, Human
ucacgccuguaaucccagcucuuu

SEQ ID NO: 227992 - RNA, 32 nt, Human
ucacgccuguaaucccagcucuuugggaggcc

SEQ ID NO: 227993 - RNA, 32 nt, Human
ucacgccuguaaucccagcucuuugggaggcu

SEQ ID NO: 227994 - RNA, 32 nt, Human
ucacgccuguaaucccagcucuuuguggggcc

SEQ ID NO: 227995 - RNA, 32 nt, Human
ucacgccuguaaucccaggacuuuaggaggcc

SEQ ID NO: 227996 - RNA, 32 nt, Human
ucacgccuguaaucccaggacuuugggaggcc

SEQ ID NO: 227997 - RNA, 32 nt, Human
ucacgccuguaaucccagggugcugagauuac

SEQ ID NO: 227998 - RNA, 32 nt, Human
ucacgccuguaaucccaguacugugggaggcc

SEQ ID NO: 227999 - RNA, 23 nt, Human
ucacgccuguaaucccaguacuu

SEQ ID NO: 228000 - RNA, 32 nt, Human
ucacgccuguaaucccaguacuugggaggcca

SEQ ID NO: 228001 - RNA, 24 nt, Human
ucacgccuguaaucccaguacuuu

SEQ ID NO: 228002 - RNA, 32 nt, Human
ucacgccuguaaucccaguacuuugggagcca

SEQ ID NO: 228003 - RNA, 32 nt, Human
ucacgccuguaaucccaguacuuugggaggcc

SEQ ID NO: 228004 - RNA, 32 nt, Human
ucacgccuguaaucccaguacuuugggaggcu

SEQ ID NO: 228005 - RNA, 24 nt, Human
ucacgccuguaaucccaguaguuu

SEQ ID NO: 228006 - RNA, 32 nt, Human
ucacgccuguaaucccaguaguuugggaggcc

SEQ ID NO: 228007 - RNA, 32 nt, Human
ucacgccuguaaucccaguauuuugggagucc

SEQ ID NO: 228008 - RNA, 24 nt, Human
ucacgccuguaaucccaucacuuu

SEQ ID NO: 228009 - RNA, 32 nt, Human
ucacgccuguaaucccaucacuuugggaggcu

SEQ ID NO: 228010 - RNA, 23 nt, Human
ucacgccuguaaucccaucauuu

SEQ ID NO: 228011 - RNA, 23 nt, Human
ucacgccuguaauccccacacuu

SEQ ID NO: 228012 - RNA, 32 nt, Human
ucacgccuguaaucccccagcaauuugggagg

SEQ ID NO: 228013 - RNA, 32 nt, Human
ucacgccuguaauccccgcacuuugggaggcc

SEQ ID NO: 228014 - RNA, 22 nt, Human
ucacgccuguaaucccggcacu

SEQ ID NO: 228015 - RNA, 32 nt, Human
ucacgccuguaaucccggcacugugggaggcu

SEQ ID NO: 228016 - RNA, 24 nt, Human
ucacgccuguaaucccggcacuuu

SEQ ID NO: 228017 - RNA, 32 nt, Human
ucacgccuguaaucccggcacuuugggaggcc

SEQ ID NO: 228018 - RNA, 32 nt, Human
ucacgccuguaaucccggcacuuugggaggcu

SEQ ID NO: 228019 - RNA, 32 nt, Human
ucacgccuguaaucccggcaguuugggaggcu

SEQ ID NO: 228020 - RNA, 32 nt, Human
ucacgccuguaaucccgguauuuugggaggcc

SEQ ID NO: 228021 - RNA, 24 nt, Human
ucacgccuguaaucccuacacuuu

SEQ ID NO: 228022 - RNA, 32 nt, Human
ucacgccuguaaucccuacacuuugggaggcc

SEQ ID NO: 228023 - RNA, 24 nt, Human
ucacgccuguaaucccugcacuuu

SEQ ID NO: 228024 - RNA, 24 nt, Human
ucacgccuguaaucccugcauuuu

SEQ ID NO: 228025 - RNA, 32 nt, Human
ucacgccuguaaucccuuagcuacucaggagg

SEQ ID NO: 228026 - RNA, 24 nt, Human
ucacgccuguaauccgagcacuuu

SEQ ID NO: 228027 - RNA, 24 nt, Human
ucacgccuguaauccuaacacuuu

SEQ ID NO: 228028 - RNA, 32 nt, Human
ucacgccuguaauccuaacacuuugggaggcc

SEQ ID NO: 228029 - RNA, 32 nt, Human
ucacgccuguaauccuagcaauuugggaggcc

SEQ ID NO: 228030 - RNA, 21 nt, Human
ucacgccuguaauccuagcac

SEQ ID NO: 228031 - RNA, 32 nt, Human
ucacgccuguaauccuagcaccuugggaggcc

SEQ ID NO: 228032 - RNA, 32 nt, Human
ucacgccuguaauccuagcaccuuggggguca

SEQ ID NO: 228033 - RNA, 23 nt, Human
ucacgccuguaauccuagcacuu

SEQ ID NO: 228034 - RNA, 32 nt, Human
ucacgccuguaauccuagcacuugggaggcag

SEQ ID NO: 228035 - RNA, 24 nt, Human
ucacgccuguaauccuagcacuuu

SEQ ID NO: 228036 - RNA, 32 nt, Human
ucacgccuguaauccuagcacuuuggaaggcc

SEQ ID NO: 228037 - RNA, 32 nt, Human
ucacgccuguaauccuagcacuuugggaggcc

SEQ ID NO: 228038 - RNA, 32 nt, Human
ucacgccuguaauccuagcacuuugggaggcu

SEQ ID NO: 228039 - RNA, 32 nt, Human
ucacgccuguaauccuagcacuuuugggaggc

SEQ ID NO: 228040 - RNA, 24 nt, Human
ucacgccuguaauccuagcaguuu

SEQ ID NO: 228041 - RNA, 32 nt, Human
ucacgccuguaauccuagcaguuugggaggcu

SEQ ID NO: 228042 - RNA, 24 nt, Human
ucacgccuguaauccuagcauuuu

SEQ ID NO: 228043 - RNA, 32 nt, Human
ucacgccuguaauccuagcauuuugggaggcc

SEQ ID NO: 228044 - RNA, 32 nt, Human
ucacgccuguaauccuagcauuuugggugacu

SEQ ID NO: 228045 - RNA, 32 nt, Human
ucacgccuguaauccuagcauuuuuggaggcc

SEQ ID NO: 228046 - RNA, 24 nt, Human
ucacgccuguaauccuagcccuuu

SEQ ID NO: 228047 - RNA, 23 nt, Human
ucacgccuguaauccuauccuuu

SEQ ID NO: 228048 - RNA, 24 nt, Human
ucacgccuguaauccuggcacuuu

SEQ ID NO: 228049 - RNA, 32 nt, Human
ucacgccuguaauccuggcacuuugggaggac

SEQ ID NO: 228050 - RNA, 32 nt, Human
ucacgccuguaauccuggcacuuugggaggcu

SEQ ID NO: 228051 - RNA, 24 nt, Human
ucacgccuguaaucgcagcacuuu

SEQ ID NO: 228052 - RNA, 32 nt, Human
ucacgccuguaaucgcagcacuuugggaggcc

SEQ ID NO: 228053 - RNA, 24 nt, Human
ucacgccuguaaucgcggcacuuu

SEQ ID NO: 228054 - RNA, 32 nt, Human
ucacgccuguaaucgcggcacuuugggaggcc

SEQ ID NO: 228055 - RNA, 24 nt, Human
ucacgccuguaaucucaacacuuu

SEQ ID NO: 228056 - RNA, 32 nt, Human
ucacgccuguaaucucaacacuuugggaggcc

SEQ ID NO: 228057 - RNA, 32 nt, Human
ucacgccuguaaucucagcacauugggaggcu

SEQ ID NO: 228058 - RNA, 24 nt, Human
ucacgccuguaaucucagcacuuu

SEQ ID NO: 228059 - RNA, 32 nt, Human
ucacgccuguaaucucagcacuuuaagaggcc

SEQ ID NO: 228060 - RNA, 32 nt, Human
ucacgccuguaaucucagcacuuugggaggcc

SEQ ID NO: 228061 - RNA, 32 nt, Human
ucacgccuguaaucucagcacuuugggaggcu

SEQ ID NO: 228062 - RNA, 32 nt, Human
ucacgccuguaaucucagcacuuuggguggcc

SEQ ID NO: 228063 - RNA, 32 nt, Human
ucacgccuguaaucucagcauuuugggaggcc

SEQ ID NO: 228064 - RNA, 32 nt, Human
ucacgccuguaaucucggcacuuugggagacu

SEQ ID NO: 228065 - RNA, 24 nt, Human
ucacgccuguaaucuuagcacuuu

SEQ ID NO: 228066 - RNA, 32 nt, Human
ucacgccuguaaugccagcacucugggaggcc

SEQ ID NO: 228067 - RNA, 24 nt, Human
ucacgccuguaaugccagcacuuu

SEQ ID NO: 228068 - RNA, 32 nt, Human
ucacgccuguaaugccagcacuuugggaggcc

SEQ ID NO: 228069 - RNA, 32 nt, Human
ucacgccuguaaugccagcacuuugggagggu

SEQ ID NO: 228070 - RNA, 32 nt, Human
ucacgccuguaauuccagcacuucgagaggcu

SEQ ID NO: 228071 - RNA, 24 nt, Human
ucacgccuguaauuccagcacuuu

SEQ ID NO: 228072 - RNA, 32 nt, Human
ucacgccuguaauuccagcacuuugagaggca

SEQ ID NO: 228073 - RNA, 32 nt, Human
ucacgccuguaauuccagcacuuugggagacu

SEQ ID NO: 228074 - RNA, 32 nt, Human
ucacgccuguaauuccagcacuuugggaggca

SEQ ID NO: 228075 - RNA, 32 nt, Human
ucacgccuguaauuccagcacuuugggaggcc

SEQ ID NO: 228076 - RNA, 32 nt, Human
ucacgccuguaauuccagcacuuugggaggcu

SEQ ID NO: 228077 - RNA, 32 nt, Human
ucacgccuguaauuccagcauguugggaggcc

SEQ ID NO: 228078 - RNA, 32 nt, Human
ucacgccuguaauuccagugcuuugggaggcc

SEQ ID NO: 228079 - RNA, 32 nt, Human
ucacgccuguaauuccaucauuuugggaggcc

SEQ ID NO: 228080 - RNA, 24 nt, Human
ucacgccuguaauucuagcacuuu

SEQ ID NO: 228081 - RNA, 32 nt, Human
ucacgccuguaauucuagcacuuugggagacu

SEQ ID NO: 228082 - RNA, 32 nt, Human
ucacgccuguaauucuagcacuuugggaggcc

SEQ ID NO: 228083 - RNA, 23 nt, Human
ucacgccuguagucccaacacuu

SEQ ID NO: 228084 - RNA, 24 nt, Human
ucacgccuguagucccaacacuuu

SEQ ID NO: 228085 - RNA, 24 nt, Human
ucacgccuguagucccagcacuuu

SEQ ID NO: 228086 - RNA, 24 nt, Human
ucacgccuguagucccagcauuuu

SEQ ID NO: 228087 - RNA, 32 nt, Human
ucacgccuguagucccagcuacuugggaggcu

SEQ ID NO: 228088 - RNA, 24 nt, Human
ucacgccuguauucccagcaguuu

SEQ ID NO: 228089 - RNA, 24 nt, Human
ucacgccugucaucccagcacuuu

SEQ ID NO: 228090 - RNA, 32 nt, Human
ucacgccugucaucccagcacuuugggaggca

SEQ ID NO: 228091 - RNA, 32 nt, Human
ucacgccugucaucccagcacuuugggaggcc

SEQ ID NO: 228092 - RNA, 32 nt, Human
ucacgccugucaucccagcacuuugggaggcu

SEQ ID NO: 228093 - RNA, 24 nt, Human
ucacgccugucauccuagcacuuu

SEQ ID NO: 228094 - RNA, 24 nt, Human
ucacgccugucaucucagcacuuu

SEQ ID NO: 228095 - RNA, 24 nt, Human
ucacgccugugaucccagcacuuu

SEQ ID NO: 228096 - RNA, 32 nt, Human
ucacgccugugaucccagcacuuugggaggcc

SEQ ID NO: 228097 - RNA, 32 nt, Human
ucacgccugugaucccagcauuuugggaggcc

SEQ ID NO: 228098 - RNA, 24 nt, Human
ucacgccugugaucccggcacuuu

SEQ ID NO: 228099 - RNA, 32 nt, Human
ucacgccugugcaguggcccccacagaaagac

SEQ ID NO: 228100 - RNA, 24 nt, Human
ucacgccuguggucccagcacuuu

SEQ ID NO: 228101 - RNA, 32 nt, Human
ucacgccuguggucccagcuacucgggaggcu

SEQ ID NO: 228102 - RNA, 24 nt, Human
ucacgccuguggucucagcacuuu

SEQ ID NO: 228103 - RNA, 32 nt, Human
ucacgccuguuaaguccagcacuuugggaggc

SEQ ID NO: 228104 - RNA, 24 nt, Human
ucacgccuguuaucccagcacuuu

SEQ ID NO: 228105 - RNA, 32 nt, Human
ucacgccuguuaucccagcacuuugggaggcc

SEQ ID NO: 228106 - RNA, 32 nt, Human
ucacgccuguuaucccagcacuuugggaggcu

SEQ ID NO: 228107 - RNA, 32 nt, Human
ucacgccuucgccguagcaucuuucgcagcgg

SEQ ID NO: 228108 - RNA, 32 nt, Human
ucacgccuuguaaucccagcacuuugggaggc

SEQ ID NO: 228109 - RNA, 32 nt, Human
ucacgccuuugucucgggcuuuugguuuucaa

SEQ ID NO: 228110 - RNA, 32 nt, Human
ucacgcgccaaggucugaauucggcguggcuc

SEQ ID NO: 228111 - RNA, 22 nt, Human
ucacgcggggaccgacugcaga

SEQ ID NO: 228112 - RNA, 32 nt, Human
ucacgcuacuccccagaucucuucccccauuc

SEQ ID NO: 228113 - RNA, 32 nt, Human
ucacgcuacugcgcuccagccugagugauaga

SEQ ID NO: 228114 - RNA, 32 nt, Human
ucacgcuacuugggaaacucacucuggccacu

SEQ ID NO: 228115 - RNA, 32 nt, Human
ucacgcucggugcaggaccucagggcugucgg

SEQ ID NO: 228116 - RNA, 32 nt, Human
ucacgcugagagaccccacuccccugcugaga

SEQ ID NO: 228117 - RNA, 22 nt, Human
ucacgcuggacugagcugcucu

SEQ ID NO: 228118 - RNA, 32 nt, Human
ucacgcugguuucuccccaggacccaugagcu

SEQ ID NO: 228119 - RNA, 32 nt, Human
ucacgcugucaccaggcuggagugcaguggcg

SEQ ID NO: 228120 - RNA, 24 nt, Human
ucacgcuuacagucccagcacuuu

SEQ ID NO: 228121 - RNA, 24 nt, Human
ucacgcuuauaaucccagcacuuu

SEQ ID NO: 228122 - RNA, 32 nt, Human
ucacgcuuauaaucccagcacuuugggaggcc

SEQ ID NO: 228123 - RNA, 32 nt, Human
ucacgcuuguaaucccaacacuuugggaggcc

SEQ ID NO: 228124 - RNA, 24 nt, Human
ucacgcuuguaaucccagcacuuu

SEQ ID NO: 228125 - RNA, 32 nt, Human
ucacgcuuguaaucccagcacuuugggaagcc

SEQ ID NO: 228126 - RNA, 32 nt, Human
ucacgcuuguaaucccagcacuuugggaagcu

SEQ ID NO: 228127 - RNA, 32 nt, Human
ucacgcuuguaaucccagcacuuugggaggcc

SEQ ID NO: 228128 - RNA, 32 nt, Human
ucacgcuuguaaucccagcacuuugggaggcu

SEQ ID NO: 228129 - RNA, 32 nt, Human
ucacgcuuguaaucccagcuacucuggaggcu

SEQ ID NO: 228130 - RNA, 32 nt, Human
ucacgcuuguaaucccaguacuuugggaggcc

SEQ ID NO: 228131 - RNA, 32 nt, Human
ucacgcuuguaaucccaucacuuugggaggcc

SEQ ID NO: 228132 - RNA, 32 nt, Human
ucacgcuuguaaucccggcacuuuaggagggc

SEQ ID NO: 228133 - RNA, 24 nt, Human
ucacgcuuguaaucgcagcacuuu

SEQ ID NO: 228134 - RNA, 24 nt, Human
ucacgcuuguaauuccagcacuuu

SEQ ID NO: 228135 - RNA, 32 nt, Human
ucacggaaaaggcagugaaguugggaguacug

SEQ ID NO: 228136 - RNA, 32 nt, Human
ucacggaccacagggaaacggagugggcgggc

SEQ ID NO: 228137 - RNA, 32 nt, Human
ucacggagaggaagggaaggaaggagagggag

SEQ ID NO: 228138 - RNA, 32 nt, Human
ucacggagagugagauagucacagagacugag

SEQ ID NO: 228139 - RNA, 32 nt, Human
ucacggaggagggaagaggaagaggcaagggg

SEQ ID NO: 228140 - RNA, 32 nt, Human
ucacggaggcugggaccaggcagcccuucggu

SEQ ID NO: 228141 - RNA, 32 nt, Human
ucacggagggcacugguugcagaggcuggaag

SEQ ID NO: 228142 - RNA, 32 nt, Human
ucacggagggccgugugacacucucgugguau

SEQ ID NO: 228143 - RNA, 32 nt, Human
ucacggcacacagcagggaaucccaggccccc

SEQ ID NO: 228144 - RNA, 32 nt, Human
ucacggcaccgacugacggccacccaccaugg

SEQ ID NO: 228145 - RNA, 32 nt, Human
ucacggcacugcgcugcagccugggcaacaca

SEQ ID NO: 228146 - RNA, 32 nt, Human
ucacggcagcaaccccagccuucccaaagcag

SEQ ID NO: 228147 - RNA, 32 nt, Human
ucacggcagggagggggcgcgggagccgccgg

SEQ ID NO: 228148 - RNA, 32 nt, Human
ucacggcauucaguuuucuugccugcagagug

SEQ ID NO: 228149 - RNA, 32 nt, Human
ucacggccacugcccaugucuuggacacugga

SEQ ID NO: 228150 - RNA, 32 nt, Human
ucacggcccgggcugggcugggcagggcaacg

SEQ ID NO: 228151 - RNA, 32 nt, Human
ucacggccucacccagcccccugggcccaugg

SEQ ID NO: 228152 - RNA, 32 nt, Human
ucacggccuccucguugguagaucuuaaggcu

SEQ ID NO: 228153 - RNA, 32 nt, Human
ucacggcucacugcaaccuccaccuccugagu

SEQ ID NO: 228154 - RNA, 32 nt, Human
ucacggcucacugcagccucaaacuccuaggc

SEQ ID NO: 228155 - RNA, 32 nt, Human
ucacggcucacugcagccucaaccuccugggc

SEQ ID NO: 228156 - RNA, 32 nt, Human
ucacggcucacugcagccucgaccuccccagc

SEQ ID NO: 228157 - RNA, 32 nt, Human
ucacggcucacugcagccucuaccuccccagg

SEQ ID NO: 228158 - RNA, 32 nt, Human
ucacggcucacugcagccuugacgcccugggc

SEQ ID NO: 228159 - RNA, 32 nt, Human
ucacggcucacugcagcuucaaacuccugggc

SEQ ID NO: 228160 - RNA, 32 nt, Human
ucacggcucacugcagucucugccucccagau

SEQ ID NO: 228161 - RNA, 32 nt, Human
ucacggcucacugcaguuucaaguuccugggc

SEQ ID NO: 228162 - RNA, 32 nt, Human
ucacggcucacugcauccucaaccuccugggu

SEQ ID NO: 228163 - RNA, 32 nt, Human
ucacggcucacuguagucucaaccuccugggc

SEQ ID NO: 228164 - RNA, 32 nt, Human
ucacggcucacuguagucucgaccucccaggc

SEQ ID NO: 228165 - RNA, 32 nt, Human
ucacggcuguaaucccagcacuuugggaggcu

SEQ ID NO: 228166 - RNA, 32 nt, Human
ucacgggaggcagaaggccaaauaaauacucu

SEQ ID NO: 228167 - RNA, 32 nt, Human
ucacgggccaccagagcaccuacuagagcagc

SEQ ID NO: 228168 - RNA, 32 nt, Human
ucacgggccugaugcaguccuccugccguucc

SEQ ID NO: 228169 - RNA, 32 nt, Human
ucacgggccuggggcccacccagcacagaucu

SEQ ID NO: 228170 - RNA, 32 nt, Human
ucacgggcuggcugagcuggacuuuggucagc

SEQ ID NO: 228171 - RNA, 32 nt, Human
ucacggggaggggacguggcagggaaugugag

SEQ ID NO: 228172 - RNA, 32 nt, Human
ucacggggccuggcucaugguggaaaaucgca

SEQ ID NO: 228173 - RNA, 32 nt, Human
ucacggggccuuccauuuccagccaggccuca

SEQ ID NO: 228174 - RNA, 32 nt, Human
ucacgggguuggcuguuccagacucagguucc

SEQ ID NO: 228175 - RNA, 32 nt, Human
ucacggguagguggaguggagaggcugguuac

SEQ ID NO: 228176 - RNA, 32 nt, Human
ucacgggugcccacugcaguuccugcuucucc

SEQ ID NO: 228177 - RNA, 22 nt, Human
ucacgggugcccugugacccca

SEQ ID NO: 228178 - RNA, 32 nt, Human
ucacgggugcgguggaggcggccuugcggugg

SEQ ID NO: 228179 - RNA, 32 nt, Human
ucacggguucaagcaauucuccugccucagcc

SEQ ID NO: 228180 - RNA, 24 nt, Human
ucacgguaaccucugccucccagg

SEQ ID NO: 228181 - RNA, 32 nt, Human
ucacgguagugggagcaaucacaaaacuguaa

SEQ ID NO: 228182 - RNA, 32 nt, Human
ucacggucacaaacuggcaaugucaagaaggu

SEQ ID NO: 228183 - RNA, 32 nt, Human
ucacggucacccgaaagccagguguuggugaa

SEQ ID NO: 228184 - RNA, 32 nt, Human
ucacggucaugcuggagggaugcagaaacuaa

SEQ ID NO: 228185 - RNA, 32 nt, Human
ucacggucauuuccacagccucaaccacuguc

SEQ ID NO: 228186 - RNA, 32 nt, Human
ucacgguccugggccugccugcucuggccaag

SEQ ID NO: 228187 - RNA, 32 nt, Human
ucacggugcccaugcugcccagccuggaggua

SEQ ID NO: 228188 - RNA, 32 nt, Human
ucacgguggcuccgagcaugagguccgccucc

SEQ ID NO: 228189 - RNA, 32 nt, Human
ucacgguuguuuccaagcgccuccugggggag

SEQ ID NO: 228190 - RNA, 31 nt, Human
ucacguaagcagcacacuaggaggcccaggc

SEQ ID NO: 228191 - RNA, 32 nt, Human
ucacguacagaaaauuugccacuguuccaaga

SEQ ID NO: 228192 - RNA, 24 nt, Human
ucacguauguaaucccagcacuuu

SEQ ID NO: 228193 - RNA, 32 nt, Human
ucacguauguaaucccagcacuuugggaagcc

SEQ ID NO: 228194 - RNA, 32 nt, Human
ucacgucacugcacuccagcuugggcaacaga

SEQ ID NO: 228195 - RNA, 32 nt, Human
ucacgucacugcacuccggccugggugacaga

SEQ ID NO: 228196 - RNA, 32 nt, Human
ucacgucacugcacucuagccugggcaacaga

SEQ ID NO: 228197 - RNA, 32 nt, Human
ucacgucacugcauuccagccuggauaauaga

SEQ ID NO: 228198 - RNA, 32 nt, Human
ucacgucacugcauuucagccugagcgacaga

SEQ ID NO: 228199 - RNA, 32 nt, Human
ucacgucacuguacuccagccugggugacaga

SEQ ID NO: 228200 - RNA, 32 nt, Human
ucacgucaggcuguggagcaggagcacagcag

SEQ ID NO: 228201 - RNA, 32 nt, Human
ucacgucauugcacuccagccuggucaacaag

SEQ ID NO: 228202 - RNA, 32 nt, Human
ucacgucauugcacuccauccugagccacaag

SEQ ID NO: 228203 - RNA, 32 nt, Human
ucacgucauugcucuccagccugggcaacaga

SEQ ID NO: 228204 - RNA, 32 nt, Human
ucacguccuauguuugcuuucucccauuuuua

SEQ ID NO: 228205 - RNA, 32 nt, Human
ucacguccucagccucccagcauucaaucgua

SEQ ID NO: 228206 - RNA, 32 nt, Human
ucacguccugaacaugagccuccuccucuccu

SEQ ID NO: 228207 - RNA, 22 nt, Human
ucacgucuauaaucccagcacu

SEQ ID NO: 228208 - RNA, 32 nt, Human
ucacgucuauaaucccagcacugugggaggcc

SEQ ID NO: 228209 - RNA, 32 nt, Human
ucacgucucacugcagccucaaccuccugggu

SEQ ID NO: 228210 - RNA, 32 nt, Human
ucacgucucuccccagugggcuccuaaggggg

SEQ ID NO: 228211 - RNA, 32 nt, Human
ucacgucugcugcaaccugaagcuugcaucuc

SEQ ID NO: 228212 - RNA, 32 nt, Human
ucacgucuggaucuggcuuccucuccaaucca

SEQ ID NO: 228213 - RNA, 32 nt, Human
ucacgucugggagcuagcuuguauggcuucug

SEQ ID NO: 228214 - RNA, 20 nt, Human
ucacgucuguaaucccagca

SEQ ID NO: 228215 - RNA, 32 nt, Human
ucacgucuguaaucccagcaauuugggaggcu

SEQ ID NO: 228216 - RNA, 21 nt, Human
ucacgucuguaaucccagcac

SEQ ID NO: 228217 - RNA, 32 nt, Human
ucacgucuguaaucccagcaccuugggaggcc

SEQ ID NO: 228218 - RNA, 24 nt, Human
ucacgucuguaaucccagcacuuu

SEQ ID NO: 228219 - RNA, 32 nt, Human
ucacgucuguaaucccagcacuuuggaaggcc

SEQ ID NO: 228220 - RNA, 32 nt, Human
ucacgucuguaaucccagcacuuugggagccu

SEQ ID NO: 228221 - RNA, 32 nt, Human
ucacgucuguaaucccagcacuuugggaggcc

SEQ ID NO: 228222 - RNA, 32 nt, Human
ucacgucuguaaucccagcacuuugggaggcu

SEQ ID NO: 228223 - RNA, 32 nt, Human
ucacgucuguaaucccagcacuuugggagggc

SEQ ID NO: 228224 - RNA, 24 nt, Human
ucacgucuguaaucccagcaguuu

SEQ ID NO: 228225 - RNA, 32 nt, Human
ucacgucuguaaucccagcaguuugggaggcc

SEQ ID NO: 228226 - RNA, 22 nt, Human
ucacgucuguaaucccagcgcu

SEQ ID NO: 228227 - RNA, 24 nt, Human
ucacgucuguaaucccagcgcuuu

SEQ ID NO: 228228 - RNA, 32 nt, Human
ucacgucuguaaucccagcgcuuugggaggcc

SEQ ID NO: 228229 - RNA, 32 nt, Human
ucacgucuguaaucccaggacuuugggaggcu

SEQ ID NO: 228230 - RNA, 32 nt, Human
ucacgucuguaaucucagcacuuagggaggcc

SEQ ID NO: 228231 - RNA, 21 nt, Human
ucacgugaaauccugagcuca

SEQ ID NO: 228232 - RNA, 21 nt, Human
ucacgugacacugagggaugg

SEQ ID NO: 228233 - RNA, 32 nt, Human
ucacgugaggcaggcggcgagcgcgggugggg

SEQ ID NO: 228234 - RNA, 32 nt, Human
ucacgugaggucugugaggaccaauuuguggg

SEQ ID NO: 228235 - RNA, 32 nt, Human
ucacgugaugggagaguuuuguaggagcugug

SEQ ID NO: 228236 - RNA, 32 nt, Human
ucacgugccacauuugcuuggggaagguacgu

SEQ ID NO: 228237 - RNA, 32 nt, Human
ucacgugccugcagggccaggaaagggaaaug

SEQ ID NO: 228238 - RNA, 32 nt, Human
ucacguggcuuucaaagggaaggaagggcagu

SEQ ID NO: 228239 - RNA, 32 nt, Human
ucacgugggaaaaaguggcuuuucaguaaacg

SEQ ID NO: 228240 - RNA, 32 nt, Human
ucacgugggacccgcuccaucuuccguggaac

SEQ ID NO: 228241 - RNA, 32 nt, Human
ucacgugggcaggcccuguucuggggccccac

SEQ ID NO: 228242 - RNA, 32 nt, Human
ucacgugucccaggaccuccgugggcuuccgu

SEQ ID NO: 228243 - RNA, 32 nt, Human
ucacgugugcccaggcccugaggugggccgga

SEQ ID NO: 228244 - RNA, 32 nt, Human
ucacguguggguugauguuggcuugucuccag

SEQ ID NO: 228245 - RNA, 32 nt, Human
ucacguuaacguacacacacaaacacacgccc

SEQ ID NO: 228246 - RNA, 32 nt, Human
ucacguucaaaacaauccuuugacuacaacuc

SEQ ID NO: 228247 - RNA, 32 nt, Human
ucacguucccacccagccuggcuggcggugcc

SEQ ID NO: 228248 - RNA, 32 nt, Human
ucacguugagccaagugcacgagcugguccug

SEQ ID NO: 228249 - RNA, 32 nt, Human
ucacguugggagaagagagagagugccaggag

SEQ ID NO: 228250 - RNA, 32 nt, Human
ucacguuucucagcagccugacaggugucuga

SEQ ID NO: 228251 - RNA, 24 nt, Human
ucacguuuguaaucccagcacuuu

SEQ ID NO: 228252 - RNA, 32 nt, Human
ucacguuuguaaucccagcacuuugggaggcc

SEQ ID NO: 228253 - RNA, 32 nt, Human
ucacuaaaaaggaguguuguguguggcggcca

SEQ ID NO: 228254 - RNA, 32 nt, Human
ucacuaaaaaguacauguaaaaguacauuuga

SEQ ID NO: 228255 - RNA, 32 nt, Human
ucacuaaaaauacaaaaauuacccgggcaugg

SEQ ID NO: 228256 - RNA, 32 nt, Human
ucacuaaaagguuaauuuccagucuugucaaa

SEQ ID NO: 228257 - RNA, 32 nt, Human
ucacuaaagauggaaacacuggagucugaauu

SEQ ID NO: 228258 - RNA, 32 nt, Human
ucacuaaaggucaggcaguccugcugagcagg

SEQ ID NO: 228259 - RNA, 32 nt, Human
ucacuaacagaaguaacuuugguuaauuauuu

SEQ ID NO: 228260 - RNA, 32 nt, Human
ucacuaaccaguugacgagcagugcauuuaca

SEQ ID NO: 228261 - RNA, 32 nt, Human
ucacuaacccuugaagaucauuuagucaaaga

SEQ ID NO: 228262 - RNA, 32 nt, Human
ucacuaagaacuagguuucuuugguucauuuu

SEQ ID NO: 228263 - RNA, 32 nt, Human
ucacuaagaucacccauuaguaagaauuacua

SEQ ID NO: 228264 - RNA, 21 nt, Human
ucacuaagcucugccagcgug

SEQ ID NO: 228265 - RNA, 32 nt, Human
ucacuaagcugggcagccuccacccacagagc

SEQ ID NO: 228266 - RNA, 30 nt, Human
ucacuaagcuugcauuuuggcagaaagaaa

SEQ ID NO: 228267 - RNA, 31 nt, Human
ucacuaagugagaaugagaacugcugugaua

SEQ ID NO: 228268 - RNA, 32 nt, Human
ucacuacacaguuuagaauagacguucucauu

SEQ ID NO: 228269 - RNA, 32 nt, Human
ucacuacaugcuccacugccucccagguucau

SEQ ID NO: 228270 - RNA, 32 nt, Human
ucacuacauuauaaaugucucuuuaaugucac

SEQ ID NO: 228271 - RNA, 32 nt, Human
ucacuacccacuggccagccacccagccaaca

SEQ ID NO: 228272 - RNA, 32 nt, Human
ucacuacguguucacaggcugcuaauauuaaa

SEQ ID NO: 228273 - RNA, 24 nt, Human
ucacuacucuaauuccagcacuuu

SEQ ID NO: 228274 - RNA, 32 nt, Human
ucacuacucugagcacugugccuggugucauc

SEQ ID NO: 228275 - RNA, 28 nt, Human
ucacuacuuaaguuagccucaucauuuu

SEQ ID NO: 228276 - RNA, 32 nt, Human
ucacuacuuccucucugaucguucugaagcuu

SEQ ID NO: 228277 - RNA, 32 nt, Human
ucacuacuuggcuuugcuuagcagguucugcu

SEQ ID NO: 228278 - RNA, 32 nt, Human
ucacuagaaagagacagguggcccuggguuuu

SEQ ID NO: 228279 - RNA, 32 nt, Human
ucacuagaaguuaccugaguaucucugggagg

SEQ ID NO: 228280 - RNA, 32 nt, Human
ucacuagacuaucucccuuauucuccauguga

SEQ ID NO: 228281 - RNA, 32 nt, Human
ucacuagagacugguuucaccauguucgccag

SEQ ID NO: 228282 - RNA, 32 nt, Human
ucacuagccccagggauugaggucuuggauac

SEQ ID NO: 228283 - RNA, 32 nt, Human
ucacuagccugucuuuugccucuagggaugga

SEQ ID NO: 228284 - RNA, 32 nt, Human
ucacuagccugugaucccagcacuuugggagg

SEQ ID NO: 228285 - RNA, 32 nt, Human
ucacuaggaggcagagguugcagugagcaguu

SEQ ID NO: 228286 - RNA, 32 nt, Human
ucacuaggccugggugucuggguugugaaaug

SEQ ID NO: 228287 - RNA, 32 nt, Human
ucacuaggcugcugaggaagaucaauaauacc

SEQ ID NO: 228288 - RNA, 32 nt, Human
ucacuaggcuucugguugaugccugugaacug

SEQ ID NO: 228289 - RNA, 32 nt, Human
ucacuaggugaaaugagguuuuuaggauuauu

SEQ ID NO: 228290 - RNA, 32 nt, Human
ucacuauaagcuccaccucccagguucaugcc

SEQ ID NO: 228291 - RNA, 32 nt, Human
ucacuauacaacuccccucucccugcaaaaac

SEQ ID NO: 228292 - RNA, 32 nt, Human
ucacuauagugggagagauuuggaagacaaag

SEQ ID NO: 228293 - RNA, 32 nt, Human
ucacuauauuugaguguucccuuacagguaug

SEQ ID NO: 228294 - RNA, 32 nt, Human
ucacuaucacccaggcuagagggcaguggcac

SEQ ID NO: 228295 - RNA, 32 nt, Human
ucacuaucaguguggagacaagcacagcacac

SEQ ID NO: 228296 - RNA, 32 nt, Human
ucacuaucauucucaguaaacuaucgcaagaa

SEQ ID NO: 228297 - RNA, 32 nt, Human
ucacuaucauuugagagcccuaccuuuuccug

SEQ ID NO: 228298 - RNA, 17 nt, Human
ucacuauccacaugcca

SEQ ID NO: 228299 - RNA, 32 nt, Human
ucacuauccuugacucauugcacuuugaccuc

SEQ ID NO: 228300 - RNA, 30 nt, Human
ucacuaugaagaaaagugguguucuuuucc

SEQ ID NO: 228301 - RNA, 32 nt, Human
ucacuauguuagacaccauuuacauuggaugu

SEQ ID NO: 228302 - RNA, 32 nt, Human
ucacuauguuggccaggauggucucgaucucu

SEQ ID NO: 228303 - RNA, 32 nt, Human
ucacuauugaacacuauucuguucacuaucug

SEQ ID NO: 228304 - RNA, 32 nt, Human
ucacuauuuugcaaaugccgacccuguggccu

SEQ ID NO: 228305 - RNA, 32 nt, Human
ucacucaaaaccugucuauaaccaaagaauuc

SEQ ID NO: 228306 - RNA, 32 nt, Human
ucacucaaaccugaaacuucagcauauuuguu

SEQ ID NO: 228307 - RNA, 32 nt, Human
ucacucaaagggagccagaaguccaaggaggg

SEQ ID NO: 228308 - RNA, 32 nt, Human
ucacucaaaucuggaaacugggugagagacug

SEQ ID NO: 228309 - RNA, 32 nt, Human
ucacucaaccccaggcuagggguacaccugac

SEQ ID NO: 228310 - RNA, 32 nt, Human
ucacucaacuccauugacccucuccuuuccca

SEQ ID NO: 228311 - RNA, 32 nt, Human
ucacucaagcuguagugcaguggugccaucuu

SEQ ID NO: 228312 - RNA, 32 nt, Human
ucacucacaaguccucauggagacucugccgu

SEQ ID NO: 228313 - RNA, 32 nt, Human
ucacucacacuggccucuuuaggaucagggga

SEQ ID NO: 228314 - RNA, 32 nt, Human
ucacucaccagcuccugcugucuuccaugcug

SEQ ID NO: 228315 - RNA, 32 nt, Human
ucacucaccauggccagccaguucugccuccc

SEQ ID NO: 228316 - RNA, 31 nt, Human
ucacucacgucagaagagguuggggcaaaac

SEQ ID NO: 228317 - RNA, 32 nt, Human
ucacucacgucagaagagguuggggcaaaaca

SEQ ID NO: 228318 - RNA, 32 nt, Human
ucacucacuagccauggagccucggcaauuau

SEQ ID NO: 228319 - RNA, 32 nt, Human
ucacucacucacccugacccugggcaaguuac

SEQ ID NO: 228320 - RNA, 32 nt, Human
ucacucacucuccaccagccugggaaaugaau

SEQ ID NO: 228321 - RNA, 32 nt, Human
ucacucacugcaauugcuucuacucugggcac

SEQ ID NO: 228322 - RNA, 32 nt, Human
ucacucagaaaugaucaaugcagggacucuuu

SEQ ID NO: 228323 - RNA, 32 nt, Human
ucacucagaccaccauauccuucugauuaaag

SEQ ID NO: 228324 - RNA, 32 nt, Human
ucacucagagcugauucacaggaggaggggag

SEQ ID NO: 228325 - RNA, 32 nt, Human
ucacucagauguauuuuagauaagcuauuuag

SEQ ID NO: 228326 - RNA, 32 nt, Human
ucacucagccaccucccucucccucuucaggu

SEQ ID NO: 228327 - RNA, 32 nt, Human
ucacucagcccgggaagcaggaagccccuucu

SEQ ID NO: 228328 - RNA, 32 nt, Human
ucacucagccuggcagaggaagaaggaaggca

SEQ ID NO: 228329 - RNA, 32 nt, Human
ucacucaggcugcagugcaguggcgcaaucuc

SEQ ID NO: 228330 - RNA, 32 nt, Human
ucacucaggcuggaaugcaguggcgcgaucuc

SEQ ID NO: 228331 - RNA, 32 nt, Human
ucacucaggcuggagcacaguggugugaucac

SEQ ID NO: 228332 - RNA, 21 nt, Human
ucacucaggcuggaguacagu

SEQ ID NO: 228333 - RNA, 22 nt, Human
ucacucaggcuggaguacagug

SEQ ID NO: 228334 - RNA, 32 nt, Human
ucacucaggcuggaguacaguggcacaaucau

SEQ ID NO: 228335 - RNA, 32 nt, Human
ucacucaggcuggaguacaguggugccaucau

SEQ ID NO: 228336 - RNA, 32 nt, Human
ucacucaggcuggagugcaaugacgugaucuc

SEQ ID NO: 228337 - RNA, 21 nt, Human
ucacucaggcuggagugcagu

SEQ ID NO: 228338 - RNA, 22 nt, Human
ucacucaggcuggagugcagug

SEQ ID NO: 228339 - RNA, 32 nt, Human
ucacucaggcuggagugcaguggcacaaucuu

SEQ ID NO: 228340 - RNA, 32 nt, Human
ucacucaggcuggagugcaguggcgcgaucuu

SEQ ID NO: 228341 - RNA, 32 nt, Human
ucacucaggcuggagugcaguggcgugaucuu

SEQ ID NO: 228342 - RNA, 32 nt, Human
ucacucaggcuggagugcagugguauaaucau

SEQ ID NO: 228343 - RNA, 32 nt, Human
ucacucaggcuggagugcagugguauaaucuc

SEQ ID NO: 228344 - RNA, 32 nt, Human
ucacucaggcuggagugcaguggugugaucuc

SEQ ID NO: 228345 - RNA, 32 nt, Human
ucacucaggcuggagugcggugguauaaucuc

SEQ ID NO: 228346 - RNA, 31 nt, Human
ucacucagguuugcuuccccuguguccacug

SEQ ID NO: 228347 - RNA, 32 nt, Human
ucacucagugucccucguuuugcucggagaca

SEQ ID NO: 228348 - RNA, 19 nt, Human
ucacucaucaugcuuagca

SEQ ID NO: 228349 - RNA, 32 nt, Human
ucacucaucucuaaguaaaccuuucccgggac

SEQ ID NO: 228350 - RNA, 32 nt, Human
ucacucaugcuggagugcaguggcgugaucuc

SEQ ID NO: 228351 - RNA, 19 nt, Human
ucacucauguccccuccca

SEQ ID NO: 228352 - RNA, 32 nt, Human
ucacucauguugaaguucugucuuccaggaaa

SEQ ID NO: 228353 - RNA, 32 nt, Human
ucacuccaacuugguauugauuuucuccacgg

SEQ ID NO: 228354 - RNA, 32 nt, Human
ucacuccaagcccaguuacagcagaaaguuuu

SEQ ID NO: 228355 - RNA, 32 nt, Human
ucacuccaccucucugugccucaguuuccccc

SEQ ID NO: 228356 - RNA, 32 nt, Human
ucacuccacugcacuccagccugggcaacaga

SEQ ID NO: 228357 - RNA, 32 nt, Human
ucacuccacugcacuccagccugggcgacaga

SEQ ID NO: 228358 - RNA, 32 nt, Human
ucacuccacugcacuccagccugggugacaga

SEQ ID NO: 228359 - RNA, 32 nt, Human
ucacuccacuuggacaugggccccagauacca

SEQ ID NO: 228360 - RNA, 32 nt, Human
ucacuccagcccaacagaaggaaggaggaggg

SEQ ID NO: 228361 - RNA, 32 nt, Human
ucacuccagccuggauaaaagagcaagacucc

SEQ ID NO: 228362 - RNA, 32 nt, Human
ucacuccaggcagaguggggcggaaggcugcu

SEQ ID NO: 228363 - RNA, 32 nt, Human
ucacuccagugcacucgagccugggugacagg

SEQ ID NO: 228364 - RNA, 32 nt, Human
ucacuccaugaaugacuggaguguaggggcag

SEQ ID NO: 228365 - RNA, 32 nt, Human
ucacucccaacagcguccagcacacaaauaaa

SEQ ID NO: 228366 - RNA, 31 nt, Human
ucacucccacucaaggaaaggagauuauaca

SEQ ID NO: 228367 - RNA, 17 nt, Human
ucacucccaugccagcc

SEQ ID NO: 228368 - RNA, 21 nt, Human
ucacucccauucuauugcuga

SEQ ID NO: 228369 - RNA, 32 nt, Human
ucacuccccacccccucccccgggucggggga

SEQ ID NO: 228370 - RNA, 32 nt, Human
ucacucccccuuccuuggucuccacgggcccc

SEQ ID NO: 228371 - RNA, 32 nt, Human
ucacucccggaggccucugccugcggcugacc

SEQ ID NO: 228372 - RNA, 32 nt, Human
ucacucccgugccauucccagccuuccuucag

SEQ ID NO: 228373 - RNA, 32 nt, Human
ucacucccugcucccaccuggaaccuugccag

SEQ ID NO: 228374 - RNA, 32 nt, Human
ucacucccugcuccccgcacccggagccucag

SEQ ID NO: 228375 - RNA, 32 nt, Human
ucacucccuucagaagcagacauggcaucugu

SEQ ID NO: 228376 - RNA, 32 nt, Human
ucacuccgccuccucacucucacugcauuucc

SEQ ID NO: 228377 - RNA, 32 nt, Human
ucacuccgcgggcggaggacgcacgucggggc

SEQ ID NO: 228378 - RNA, 32 nt, Human
ucacuccgcuccacuccucgggcuggcucucc

SEQ ID NO: 228379 - RNA, 32 nt, Human
ucacuccguugccaggcuggagugcuguggcg

SEQ ID NO: 228380 - RNA, 32 nt, Human
ucacuccuauaaucccagcacuucgggaggcc

SEQ ID NO: 228381 - RNA, 32 nt, Human
ucacuccuccacuccuacuccuucucuuacug

SEQ ID NO: 228382 - RNA, 32 nt, Human
ucacuccuccagccuggaaugugaagugacuc

SEQ ID NO: 228383 - RNA, 32 nt, Human
ucacuccucgggucucuccauaauucagccca

SEQ ID NO: 228384 - RNA, 32 nt, Human
ucacuccucuccccuuucucuuucucucuguu

SEQ ID NO: 228385 - RNA, 32 nt, Human
ucacuccucuucucccugcccugaucagauuc

SEQ ID NO: 228386 - RNA, 32 nt, Human
ucacuccugacucuuccucuucccagcggacg

SEQ ID NO: 228387 - RNA, 27 nt, Human
ucacuccugauuucucuuuccaaggca

SEQ ID NO: 228388 - RNA, 32 nt, Human
ucacuccugauuucucuuuccaaggcacugua

SEQ ID NO: 228389 - RNA, 32 nt, Human
ucacuccugccaagcugaccucagcuggguaa

SEQ ID NO: 228390 - RNA, 32 nt, Human
ucacuccugccuccucagcuuugcuucauguu

SEQ ID NO: 228391 - RNA, 32 nt, Human
ucacuccugccugacugccaagccaccugcau

SEQ ID NO: 228392 - RNA, 32 nt, Human
ucacuccugcuguaaauuuggcuucuguuguc

SEQ ID NO: 228393 - RNA, 32 nt, Human
ucacuccugggaacugucuggcagguaggcug

SEQ ID NO: 228394 - RNA, 32 nt, Human
ucacuccugggccugcugggccuguggcugcc

SEQ ID NO: 228395 - RNA, 32 nt, Human
ucacuccuggguuccaggucacugcaucuguc

SEQ ID NO: 228396 - RNA, 32 nt, Human
ucacuccuggucccuuugcaagugaacccugc

SEQ ID NO: 228397 - RNA, 24 nt, Human
ucacuccuguaauaccagcacuuu

SEQ ID NO: 228398 - RNA, 32 nt, Human
ucacuccuguaauaccagcacuuugggaggcc

SEQ ID NO: 228399 - RNA, 32 nt, Human
ucacuccuguaaucccaacacuuugagaggcu

SEQ ID NO: 228400 - RNA, 32 nt, Human
ucacuccuguaaucccaccacuuugggaggcc

SEQ ID NO: 228401 - RNA, 32 nt, Human
ucacuccuguaaucccagcacucuagaaggcc

SEQ ID NO: 228402 - RNA, 24 nt, Human
ucacuccuguaaucccagcacuuu

SEQ ID NO: 228403 - RNA, 32 nt, Human
ucacuccuguaaucccagcacuuuggaggccg

SEQ ID NO: 228404 - RNA, 32 nt, Human
ucacuccuguaaucccagcacuuugggaagcc

SEQ ID NO: 228405 - RNA, 32 nt, Human
ucacuccuguaaucccagcacuuugggaagcu

SEQ ID NO: 228406 - RNA, 32 nt, Human
ucacuccuguaaucccagcacuuugggaggcc

SEQ ID NO: 228407 - RNA, 32 nt, Human
ucacuccuguaaucccagcacuuugggaggcu

SEQ ID NO: 228408 - RNA, 32 nt, Human
ucacuccuguaaucccagcacuuugggagguc

SEQ ID NO: 228409 - RNA, 32 nt, Human
ucacuccuguaaucccagcacuuugggagguu

SEQ ID NO: 228410 - RNA, 24 nt, Human
ucacuccuguaaucccagcauuuu

SEQ ID NO: 228411 - RNA, 32 nt, Human
ucacuccuguaaucccagcauuuugagaggcc

SEQ ID NO: 228412 - RNA, 32 nt, Human
ucacuccuguaaucccagcauuuugggaggcc

SEQ ID NO: 228413 - RNA, 24 nt, Human
ucacuccuguaaucccggcacuuu

SEQ ID NO: 228414 - RNA, 32 nt, Human
ucacuccuguaaucccggcacuuuggaaugcc

SEQ ID NO: 228415 - RNA, 32 nt, Human
ucacuccuguaauccgagcaauuugggaggcc

SEQ ID NO: 228416 - RNA, 32 nt, Human
ucacuccuguaaucucaacaauuugagaggcc

SEQ ID NO: 228417 - RNA, 32 nt, Human
ucacuccuguaaucucagaacuuugggaggcu

SEQ ID NO: 228418 - RNA, 32 nt, Human
ucacuccuguaauuccagcacuuugggaggcc

SEQ ID NO: 228419 - RNA, 32 nt, Human
ucacuccuguaguccuagcuacucggggaggc

SEQ ID NO: 228420 - RNA, 32 nt, Human
ucacuccuguccaaacuguuguauaaggacug

SEQ ID NO: 228421 - RNA, 32 nt, Human
ucacuccuguuacccaggcuggaggacaguga

SEQ ID NO: 228422 - RNA, 32 nt, Human
ucacuccuucauuccuccucugucucuuugca

SEQ ID NO: 228423 - RNA, 32 nt, Human
ucacuccuucgggcugccucccccuccccuug

SEQ ID NO: 228424 - RNA, 32 nt, Human
ucacuccuuguccuccaugcuguggcuguauc

SEQ ID NO: 228425 - RNA, 32 nt, Human
ucacuccuuugccucccaaauaugucuguaug

SEQ ID NO: 228426 - RNA, 32 nt, Human
ucacuccuuuguucaagaaccuuccacagcuc

SEQ ID NO: 228427 - RNA, 32 nt, Human
ucacuccuuuuacucacugggcucaugacagu

SEQ ID NO: 228428 - RNA, 32 nt, Human
ucacucgaacccaggaggcagagguugcagug

SEQ ID NO: 228429 - RNA, 32 nt, Human
ucacucgagaccccaaaccuccaggccugagg

SEQ ID NO: 228430 - RNA, 25 nt, Human
ucacucgagcccagcuaacucggug

SEQ ID NO: 228431 - RNA, 25 nt, Human
ucacucgagcccgcacggcucggug

SEQ ID NO: 228432 - RNA, 25 nt, Human
ucacucgagcucagugcacucggug

SEQ ID NO: 228433 - RNA, 32 nt, Human
ucacucgcacacacagacacaagcgcgcacac

SEQ ID NO: 228434 - RNA, 32 nt, Human
ucacucggaaggcagcugugugagcugccaag

SEQ ID NO: 228435 - RNA, 32 nt, Human
ucacucgggcugugugaacccagcaagucaca

SEQ ID NO: 228436 - RNA, 20 nt, Human
ucacucgguuccaucccccu

SEQ ID NO: 228437 - RNA, 32 nt, Human
ucacucgucaccccagcuggagugcaguggug

SEQ ID NO: 228438 - RNA, 32 nt, Human
ucacucguugcccaggcuggagugcaguggcg

SEQ ID NO: 228439 - RNA, 32 nt, Human
ucacucguugcccaggcuggaguguagaggcg

SEQ ID NO: 228440 - RNA, 32 nt, Human
ucacucuacuuuccuuucaauuuucuuuucuc

SEQ ID NO: 228441 - RNA, 21 nt, Human
ucacucuagccuugaauuccu

SEQ ID NO: 228442 - RNA, 32 nt, Human
ucacucuagucacuaaagaaggauuuuacucc

SEQ ID NO: 228443 - RNA, 32 nt, Human
ucacucuauaccuugcaggcucauuucagcag

SEQ ID NO: 228444 - RNA, 32 nt, Human
ucacucuauccuggauaggcacuugggaacuu

SEQ ID NO: 228445 - RNA, 32 nt, Human
ucacucucaaguuucacaggcauacaacggga

SEQ ID NO: 228446 - RNA, 32 nt, Human
ucacucucacccaggcuggagugcaguggcac

SEQ ID NO: 228447 - RNA, 32 nt, Human
ucacucucacugcauuucccaccuuccugugg

SEQ ID NO: 228448 - RNA, 32 nt, Human
ucacucucagcacaggugcugugugacggccu

SEQ ID NO: 228449 - RNA, 32 nt, Human
ucacucucagccauagcacuuuguucacuguc

SEQ ID NO: 228450 - RNA, 32 nt, Human
ucacucucauugcccaggcuggagugcaguga

SEQ ID NO: 228451 - RNA, 32 nt, Human
ucacucuccacauccccgccucccagacauau

SEQ ID NO: 228452 - RNA, 32 nt, Human
ucacucuccauaguaggaccuggaucuuugca

SEQ ID NO: 228453 - RNA, 32 nt, Human
ucacucucccucccuucucucacucucacucu

SEQ ID NO: 228454 - RNA, 31 nt, Human
ucacucucccucucugggcaugucugcuaca

SEQ ID NO: 228455 - RNA, 32 nt, Human
ucacucuccgagagcuaugagcucuccucgga

SEQ ID NO: 228456 - RNA, 32 nt, Human
ucacucucgggccgcagacaaugcugugagca

SEQ ID NO: 228457 - RNA, 32 nt, Human
ucacucucgucgcccaggcuggaaugcagugg

SEQ ID NO: 228458 - RNA, 32 nt, Human
ucacucucguugcccaggcuggagugcaaugg

SEQ ID NO: 228459 - RNA, 32 nt, Human
ucacucucuaacccacucucucucauucccuu

SEQ ID NO: 228460 - RNA, 32 nt, Human
ucacucucugcagguuuuugccuacacuuuga

SEQ ID NO: 228461 - RNA, 32 nt, Human
ucacucucuggccuaaaaccuuccuuggcucc

SEQ ID NO: 228462 - RNA, 27 nt, Human
ucacucucuucuuccuuaguuucugga

SEQ ID NO: 228463 - RNA, 32 nt, Human
ucacucugaggaagaagcaggacuugguacgg

SEQ ID NO: 228464 - RNA, 32 nt, Human
ucacucugaggggccacgucuguuaguuuccu

SEQ ID NO: 228465 - RNA, 32 nt, Human
ucacucugccuguggacgcugcaccugccacu

SEQ ID NO: 228466 - RNA, 32 nt, Human
ucacucugccuuuucauccaggccagugacuu

SEQ ID NO: 228467 - RNA, 21 nt, Human
ucacucugcggaacuguccug

SEQ ID NO: 228468 - RNA, 32 nt, Human
ucacucugcuagcaccuccucccuuuccccaa

SEQ ID NO: 228469 - RNA, 32 nt, Human
ucacucugcuccuccccugccugggccuuaaa

SEQ ID NO: 228470 - RNA, 32 nt, Human
ucacucuggaaagagcaugaccgauaaagaaa

SEQ ID NO: 228471 - RNA, 32 nt, Human
ucacucuggcauccuucagcauuuuucuuuuu

SEQ ID NO: 228472 - RNA, 32 nt, Human
ucacucuggccuugcugcuucucuccagcucc

SEQ ID NO: 228473 - RNA, 32 nt, Human
ucacucuggcgcucuggagugcagugguguga

SEQ ID NO: 228474 - RNA, 32 nt, Human
ucacucugggaggggucggcggugcuggcggc

SEQ ID NO: 228475 - RNA, 32 nt, Human
ucacucugggcuguguuuaugagcaucaccca

SEQ ID NO: 228476 - RNA, 32 nt, Human
ucacucuggucaccuuguuugcucugggucug

SEQ ID NO: 228477 - RNA, 32 nt, Human
ucacucugguugcccaggcuggagugcagugg

SEQ ID NO: 228478 - RNA, 32 nt, Human
ucacucugucaccagacuggagugcaguggcg

SEQ ID NO: 228479 - RNA, 32 nt, Human
ucacucugucaccaggcuggagugcagugccg

SEQ ID NO: 228480 - RNA, 32 nt, Human
ucacucugucaccaggcuggagugcaguggcg

SEQ ID NO: 228481 - RNA, 32 nt, Human
ucacucuguccgcccaggcugggugcagucac

SEQ ID NO: 228482 - RNA, 32 nt, Human
ucacucugucgccaggcuggaaugcaguaggg

SEQ ID NO: 228483 - RNA, 32 nt, Human
ucacucugucgccaggcuggagugcaguggcg

SEQ ID NO: 228484 - RNA, 32 nt, Human
ucacucugucgccaggcuggagugcaguggug

SEQ ID NO: 228485 - RNA, 32 nt, Human
ucacucugucgccugggcuggaguacaguggu

SEQ ID NO: 228486 - RNA, 32 nt, Human
ucacucugucucccagacuggagugaguggug

SEQ ID NO: 228487 - RNA, 32 nt, Human
ucacucuguugccaggcuggaaugcaguggcg

SEQ ID NO: 228488 - RNA, 32 nt, Human
ucacucuguugccaggcuggagugcaguggcg

SEQ ID NO: 228489 - RNA, 32 nt, Human
ucacucuguugccaggcuggucucaaacuucu

SEQ ID NO: 228490 - RNA, 32 nt, Human
ucacucuguugcccagcuggagugcaguggcg

SEQ ID NO: 228491 - RNA, 32 nt, Human
ucacucuguugccccaggcuggagugcagugg

SEQ ID NO: 228492 - RNA, 32 nt, Human
ucacucuguugcuaggcuggagugcaguggca

SEQ ID NO: 228493 - RNA, 32 nt, Human
ucacucuuaccucccugucugcuuacucaccc

SEQ ID NO: 228494 - RNA, 32 nt, Human
ucacucuuauugcccaggcuagagugcaaugg

SEQ ID NO: 228495 - RNA, 32 nt, Human
ucacucuuauugcccaggcuggagugcaaugg

SEQ ID NO: 228496 - RNA, 32 nt, Human
ucacucuucaggcuggggugugcucccugacc

SEQ ID NO: 228497 - RNA, 32 nt, Human
ucacucuuccaccccuuuucucccucuccccu

SEQ ID NO: 228498 - RNA, 23 nt, Human
ucacucuuccauuuaagggauag

SEQ ID NO: 228499 - RNA, 21 nt, Human
ucacucuucugacauccugca

SEQ ID NO: 228500 - RNA, 32 nt, Human
ucacucuugcccaggcuggagugcaguggugc

SEQ ID NO: 228501 - RNA, 32 nt, Human
ucacucuugcccaggcuggggugucguggcgu

SEQ ID NO: 228502 - RNA, 32 nt, Human
ucacucuugcccaggcuguagugcuguggcac

SEQ ID NO: 228503 - RNA, 32 nt, Human
ucacucuugcugcccaggcuggagugcaaugg

SEQ ID NO: 228504 - RNA, 32 nt, Human
ucacucuugcugcccaggcuggagugcagugg

SEQ ID NO: 228505 - RNA, 22 nt, Human
ucacucuugcugucuuaaguuc

SEQ ID NO: 228506 - RNA, 32 nt, Human
ucacucuugggaggguguauguguccaggaau

SEQ ID NO: 228507 - RNA, 24 nt, Human
ucacucuuguaaucccaaaacuuu

SEQ ID NO: 228508 - RNA, 32 nt, Human
ucacucuuguaaucccaaaacuuuaggaggcc

SEQ ID NO: 228509 - RNA, 32 nt, Human
ucacucuuguaccccaggcuggagugcaaugg

SEQ ID NO: 228510 - RNA, 32 nt, Human
ucacucuugucacccaggcuggaguacagugg

SEQ ID NO: 228511 - RNA, 32 nt, Human
ucacucuugucacccaggcuggagugcaaugg

SEQ ID NO: 228512 - RNA, 32 nt, Human
ucacucuugucacccaggcuggagugcaguag

SEQ ID NO: 228513 - RNA, 32 nt, Human
ucacucuugucacccaggcuggagugcagugg

SEQ ID NO: 228514 - RNA, 32 nt, Human
ucacucuugucacccaggcuggaguguagugg

SEQ ID NO: 228515 - RNA, 32 nt, Human
ucacucuuguugcccaggcuagagggcaaugg

SEQ ID NO: 228516 - RNA, 32 nt, Human
ucacucuuguugcccaggcuggaaugcagugg

SEQ ID NO: 228517 - RNA, 32 nt, Human
ucacucuuguugcccaggcuggaguacaaugg

SEQ ID NO: 228518 - RNA, 32 nt, Human
ucacucuuguugcccaggcuggagugcaauag

SEQ ID NO: 228519 - RNA, 32 nt, Human
ucacucuuguugcccaggcuggagugcaaugc

SEQ ID NO: 228520 - RNA, 32 nt, Human
ucacucuuguugcccaggcuggagugcaaugg

SEQ ID NO: 228521 - RNA, 32 nt, Human
ucacucuuguugcccaggcuggagugcaguag

SEQ ID NO: 228522 - RNA, 32 nt, Human
ucacucuuguugcccaggcuggagugcagugg

SEQ ID NO: 228523 - RNA, 32 nt, Human
ucacucuuguugcccaggcuggagugcggugg

SEQ ID NO: 228524 - RNA, 32 nt, Human
ucacucuuguugcccaggcuggagugcguugg

SEQ ID NO: 228525 - RNA, 32 nt, Human
ucacucuuuccagauaagcagaguugcucuuc

SEQ ID NO: 228526 - RNA, 32 nt, Human
ucacucuuucccaggcugcaguacagugacac

SEQ ID NO: 228527 - RNA, 32 nt, Human
ucacucuuuccucucucccucuccuuguccua

SEQ ID NO: 228528 - RNA, 32 nt, Human
ucacucuuuuuacccaggcuggagugcaauga

SEQ ID NO: 228529 - RNA, 32 nt, Human
ucacugaacccaugcugaucuccagggaacca

SEQ ID NO: 228530 - RNA, 32 nt, Human
ucacugaagagcagacccguuuggguucucca

SEQ ID NO: 228531 - RNA, 32 nt, Human
ucacugacaaauucuggcauuaaaaauggcaa

SEQ ID NO: 228532 - RNA, 32 nt, Human
ucacugacaggagagcagagacaggacguguc

SEQ ID NO: 228533 - RNA, 32 nt, Human
ucacugacauccugacaucucaggauccuacc

SEQ ID NO: 228534 - RNA, 32 nt, Human
ucacugaccaaccaaccaaacuccacacuuca

SEQ ID NO: 228535 - RNA, 32 nt, Human
ucacugaccagccaccaaguugcccauugaug

SEQ ID NO: 228536 - RNA, 28 nt, Human
ucacugaccccaggggccucauccuccc

SEQ ID NO: 228537 - RNA, 32 nt, Human
ucacugaccuccugaccccugaccucaucacc

SEQ ID NO: 228538 - RNA, 32 nt, Human
ucacugacuccccgucuuccuggcagacacaa

SEQ ID NO: 228539 - RNA, 32 nt, Human
ucacugagagaagaggauggauaaggacguua

SEQ ID NO: 228540 - RNA, 32 nt, Human
ucacugagcgcucgccgccgcccagccucucc

SEQ ID NO: 228541 - RNA, 32 nt, Human
ucacugagcuaaauuuaucuuuguaaaucuuu

SEQ ID NO: 228542 - RNA, 32 nt, Human
ucacugagcuuccucugagccuugaaggguuu

SEQ ID NO: 228543 - RNA, 32 nt, Human
ucacugaggcucaggacacggccacaccaagu

SEQ ID NO: 228544 - RNA, 32 nt, Human
ucacugaggcuggagugcaguggcgcaauuuc

SEQ ID NO: 228545 - RNA, 32 nt, Human
ucacugagggcagggaaaaggaacacucaggu

SEQ ID NO: 228546 - RNA, 32 nt, Human
ucacugagguggccaccaugcuggccugcggc

SEQ ID NO: 228547 - RNA, 32 nt, Human
ucacugaguuuaccucagcaacuuuuuaaaaa

SEQ ID NO: 228548 - RNA, 32 nt, Human
ucacugauauuccaaguguggcuaucuguuca

SEQ ID NO: 228549 - RNA, 32 nt, Human
ucacugaucacgccugccccagagcagugugu

SEQ ID NO: 228550 - RNA, 29 nt, Human
ucacugaucacugcagccuccacuuccca

SEQ ID NO: 228551 - RNA, 32 nt, Human
ucacugaucccaauuacucugauccuuuugcc

SEQ ID NO: 228552 - RNA, 32 nt, Human
ucacugaucccagccaccccagaaaagcugca

SEQ ID NO: 228553 - RNA, 32 nt, Human
ucacugaugcucaaacaugagaagacugggac

SEQ ID NO: 228554 - RNA, 32 nt, Human
ucacugauggccugagagggccuauggcugcu

SEQ ID NO: 228555 - RNA, 32 nt, Human
ucacugauugcauuccagccugggugacagag

SEQ ID NO: 228556 - RNA, 32 nt, Human
ucacugcaacauccagcuccuggguuucagca

SEQ ID NO: 228557 - RNA, 32 nt, Human
ucacugcaacccugcaaccucugccuaccggg

SEQ ID NO: 228558 - RNA, 20 nt, Human
ucacugcaaccuccaccucc

SEQ ID NO: 228559 - RNA, 32 nt, Human
ucacugcaaccuccaccucuuauguucaagca

SEQ ID NO: 228560 - RNA, 32 nt, Human
ucacugcaaccuccaccucuuggguucaagcg

SEQ ID NO: 228561 - RNA, 21 nt, Human
ucacugcaaccuccgccuccu

SEQ ID NO: 228562 - RNA, 32 nt, Human
ucacugcaaccucgaccucuuggguucaagug

SEQ ID NO: 228563 - RNA, 32 nt, Human
ucacugcaaccucugccccaccaaaauucaag

SEQ ID NO: 228564 - RNA, 20 nt, Human
ucacugcaaccucugccucc

SEQ ID NO: 228565 - RNA, 21 nt, Human
ucacugcaaccucugccuccu

SEQ ID NO: 228566 - RNA, 21 nt, Human
ucacugcaaccucugcuuccu

SEQ ID NO: 228567 - RNA, 32 nt, Human
ucacugcaagagauauucaaguucuacaauca

SEQ ID NO: 228568 - RNA, 32 nt, Human
ucacugcaagcuccgccuccucccggguucac

SEQ ID NO: 228569 - RNA, 32 nt, Human
ucacugcaaucucgacuuccaguuucagguga

SEQ ID NO: 228570 - RNA, 32 nt, Human
ucacugcaaucucugccuccuggguuuaagcc

SEQ ID NO: 228571 - RNA, 32 nt, Human
ucacugcaaugcuggacacuacagguaucugu

SEQ ID NO: 228572 - RNA, 32 nt, Human
ucacugcaaugugcaacccacacccacagcca

SEQ ID NO: 228573 - RNA, 32 nt, Human
ucacugcacaugcaaguauaccacccuuccau

SEQ ID NO: 228574 - RNA, 32 nt, Human
ucacugcacucaggcuggagugcagugguacg

SEQ ID NO: 228575 - RNA, 32 nt, Human
ucacugcacuggcagcgugcacuggcguauuu

SEQ ID NO: 228576 - RNA, 32 nt, Human
ucacugcacuuucuuccugccuuagguaguug

SEQ ID NO: 228577 - RNA, 32 nt, Human
ucacugcagaaugacagagaaggugaagcucc

SEQ ID NO: 228578 - RNA, 20 nt, Human
ucacugcagccccccucgcc

SEQ ID NO: 228579 - RNA, 32 nt, Human
ucacugcagccuccuucuccuggguccaagca

SEQ ID NO: 228580 - RNA, 21 nt, Human
ucacugcagccucugccuccu

SEQ ID NO: 228581 - RNA, 32 nt, Human
ucacugcagccuguccguggaugucucugccu

SEQ ID NO: 228582 - RNA, 32 nt, Human
ucacugcagcuggcaaaaggcauuggccagcu

SEQ ID NO: 228583 - RNA, 32 nt, Human
ucacugcaggcccacucugaaagagaaauccc

SEQ ID NO: 228584 - RNA, 32 nt, Human
ucacugcagugucuaaagguagaugcaaauua

SEQ ID NO: 228585 - RNA, 21 nt, Human
ucacugcaguuucaaguuccu

SEQ ID NO: 228586 - RNA, 32 nt, Human
ucacugcauaugcacaucaacucacugcauau

SEQ ID NO: 228587 - RNA, 32 nt, Human
ucacugcauuggauggaugaacaucagugccc

SEQ ID NO: 228588 - RNA, 32 nt, Human
ucacugccaacaacaacgagguuccuauaauu

SEQ ID NO: 228589 - RNA, 32 nt, Human
ucacugccacacagcaaguuccgagaccaugg

SEQ ID NO: 228590 - RNA, 32 nt, Human
ucacugccacacgcagcucagccugggcggca

SEQ ID NO: 228591 - RNA, 32 nt, Human
ucacugccaccugugcccaugggcaccccaga

SEQ ID NO: 228592 - RNA, 32 nt, Human
ucacugccacugcucuugccucuugugauguc

SEQ ID NO: 228593 - RNA, 32 nt, Human
ucacugccagaggccugggcugcaugaggacc

SEQ ID NO: 228594 - RNA, 32 nt, Human
ucacugccagcgcuugggcugaaggaagcucc

SEQ ID NO: 228595 - RNA, 32 nt, Human
ucacugccagggaggcucaggcugccauggcu

SEQ ID NO: 228596 - RNA, 32 nt, Human
ucacugccagugccuguggcggaagccaucuu

SEQ ID NO: 228597 - RNA, 32 nt, Human
ucacugccauuuugugaggugcugcugucucu

SEQ ID NO: 228598 - RNA, 32 nt, Human
ucacugcccaagucauggcaacaggcuggagc

SEQ ID NO: 228599 - RNA, 32 nt, Human
ucacugccccaccagccaccucuugggcaugc

SEQ ID NO: 228600 - RNA, 31 nt, Human
ucacugccccucucugggcuucaguuuccuc

SEQ ID NO: 228601 - RNA, 32 nt, Human
ucacugccccuuuguuuacagcuccugccucc

SEQ ID NO: 228602 - RNA, 32 nt, Human
ucacugcccuuccuccccagcccagccuggga

SEQ ID NO: 228603 - RNA, 32 nt, Human
ucacugccgccucaaccucuccuggguucagg

SEQ ID NO: 228604 - RNA, 32 nt, Human
ucacugccuccuuccuccugguguugccacuu

SEQ ID NO: 228605 - RNA, 32 nt, Human
ucacugccugggcaguggcacaaccauccccc

SEQ ID NO: 228606 - RNA, 32 nt, Human
ucacugccugguaucuuaguguggaccgaagc

SEQ ID NO: 228607 - RNA, 32 nt, Human
ucacugccugucacaagccucaguguggccug

SEQ ID NO: 228608 - RNA, 32 nt, Human
ucacugccuguuccccacugccuguguucgca

SEQ ID NO: 228609 - RNA, 32 nt, Human
ucacugccuuaaaacagauuucuaugacaguu

SEQ ID NO: 228610 - RNA, 32 nt, Human
ucacugccuucuuccuccucuugccccauuca

SEQ ID NO: 228611 - RNA, 32 nt, Human
ucacugccuugccacuccaucucccuccgugc

SEQ ID NO: 228612 - RNA, 32 nt, Human
ucacugccuuuauuuucccuccucccucuugu

SEQ ID NO: 228613 - RNA, 21 nt, Human
ucacugcgaccucugcuuccu

SEQ ID NO: 228614 - RNA, 32 nt, Human
ucacugcggccuugaacuccugggcuuaagug

SEQ ID NO: 228615 - RNA, 32 nt, Human
ucacugcgggcuccugagccugcuucugccug

SEQ ID NO: 228616 - RNA, 32 nt, Human
ucacugcuacucagccugagguugcagacugg

SEQ ID NO: 228617 - RNA, 23 nt, Human
ucacugcucacccaccugcugcu

SEQ ID NO: 228618 - RNA, 32 nt, Human
ucacugcucacuguagccuugacucuggagcu

SEQ ID NO: 228619 - RNA, 32 nt, Human
ucacugcucagugcaaccucugccucccagga

SEQ ID NO: 228620 - RNA, 32 nt, Human
ucacugcucaguuaaagguuccagggauucca

SEQ ID NO: 228621 - RNA, 32 nt, Human
ucacugcuccucuccacccagcagugggcuag

SEQ ID NO: 228622 - RNA, 25 nt, Human
ucacugcucuauguccucugcuccu

SEQ ID NO: 228623 - RNA, 32 nt, Human
ucacugcucugcauggccuggugcagggcucc

SEQ ID NO: 228624 - RNA, 25 nt, Human
ucacugcucuguguccucugcuccu

SEQ ID NO: 228625 - RNA, 32 nt, Human
ucacugcugagugagagggcuaggcagugucu

SEQ ID NO: 228626 - RNA, 32 nt, Human
ucacugcugcaaccucccccuccuggguucaa

SEQ ID NO: 228627 - RNA, 32 nt, Human
ucacugcugcagggccuuccugccuggacaga

SEQ ID NO: 228628 - RNA, 32 nt, Human
ucacugcugcgcgcacagucucccgggacuug

SEQ ID NO: 228629 - RNA, 32 nt, Human
ucacugcugcugucugugacuccacgucugug

SEQ ID NO: 228630 - RNA, 21 nt, Human
ucacugcugucucugccuccu

SEQ ID NO: 228631 - RNA, 21 nt, Human
ucacugcuguggcaaacccag

SEQ ID NO: 228632 - RNA, 31 nt, Human
ucacugcuguucucugggcuuguugacuguc

SEQ ID NO: 228633 - RNA, 32 nt, Human
ucacugcuuccagaauuuuagaguacugguaa

SEQ ID NO: 228634 - RNA, 32 nt, Human
ucacugcuugagccacugcccuaguuggcacu

SEQ ID NO: 228635 - RNA, 32 nt, Human
ucacugcuuugcaaaguggggccugagguaga

SEQ ID NO: 228636 - RNA, 32 nt, Human
ucacuggaggcuggaaugaaugaucacuagaa

SEQ ID NO: 228637 - RNA, 32 nt, Human
ucacuggagggagauuugauggguacagagca

SEQ ID NO: 228638 - RNA, 32 nt, Human
ucacuggagguugaagccaaguggggugcugg

SEQ ID NO: 228639 - RNA, 32 nt, Human
ucacuggagugcaccugccucuaccucauggg

SEQ ID NO: 228640 - RNA, 32 nt, Human
ucacuggaguucgaggcugcagugagcuauga

SEQ ID NO: 228641 - RNA, 31 nt, Human
ucacuggauaaauaaaauaugugaacaagug

SEQ ID NO: 228642 - RNA, 32 nt, Human
ucacuggauccaccacggccuggguggacggc

SEQ ID NO: 228643 - RNA, 32 nt, Human
ucacuggcaaagggucuagaauaaccuuuagg

SEQ ID NO: 228644 - RNA, 32 nt, Human
ucacuggcacuucucccuccggccacacggcg

SEQ ID NO: 228645 - RNA, 32 nt, Human
ucacuggcagccccagcaccaccaggucuccc

SEQ ID NO: 228646 - RNA, 32 nt, Human
ucacuggcaggaagagcuaaagauccgagaaa

SEQ ID NO: 228647 - RNA, 31 nt, Human
ucacuggcaucagcuaauaccaaagugaguu

SEQ ID NO: 228648 - RNA, 32 nt, Human
ucacuggcauggaugaucaggagcugccuaua

SEQ ID NO: 228649 - RNA, 32 nt, Human
ucacuggccacaucuuuggaaggggauggugg

SEQ ID NO: 228650 - RNA, 32 nt, Human
ucacuggcccagugguguucuaccuccuaccc

SEQ ID NO: 228651 - RNA, 32 nt, Human
ucacuggcccugagcacuugaaggugcagcaa

SEQ ID NO: 228652 - RNA, 32 nt, Human
ucacuggccggaaggaugugucucagcccugc

SEQ ID NO: 228653 - RNA, 32 nt, Human
ucacuggccuuacccuccuccuggccuuacua

SEQ ID NO: 228654 - RNA, 32 nt, Human
ucacuggccuuugcaguccccaaaggaucagg

SEQ ID NO: 228655 - RNA, 32 nt, Human
ucacuggcuccaggaaacccgcugguguugac

SEQ ID NO: 228656 - RNA, 25 nt, Human
ucacuggcuuguuuguucccuacca

SEQ ID NO: 228657 - RNA, 32 nt, Human
ucacuggcuuguuuguucccuaccaauauucu

SEQ ID NO: 228658 - RNA, 32 nt, Human
ucacuggcuuugcccuggaauuugccagaugc

SEQ ID NO: 228659 - RNA, 32 nt, Human
ucacugggaauagcauugugcguguccggaaa

SEQ ID NO: 228660 - RNA, 32 nt, Human
ucacugggagagaagagccguccagggaccca

SEQ ID NO: 228661 - RNA, 32 nt, Human
ucacugggagcaaugggguugcagcugaaguc

SEQ ID NO: 228662 - RNA, 32 nt, Human
ucacugggcauauccuccuucuccuuaaccag

SEQ ID NO: 228663 - RNA, 32 nt, Human
ucacugggccaggcaccucucuccccauggug

SEQ ID NO: 228664 - RNA, 32 nt, Human
ucacugggcugacauggagaaggcuggcaagc

SEQ ID NO: 228665 - RNA, 21 nt, Human
ucacugggcugggugcagugg

SEQ ID NO: 228666 - RNA, 32 nt, Human
ucacuggggaaaggagggaaaagugcauuuau

SEQ ID NO: 228667 - RNA, 32 nt, Human
ucacuggggcccugucugugugcugagccagu

SEQ ID NO: 228668 - RNA, 32 nt, Human
ucacuggggcggaggcagcggcuguagcgggg

SEQ ID NO: 228669 - RNA, 32 nt, Human
ucacugggguuagagguggguccgaaauaauc

SEQ ID NO: 228670 - RNA, 32 nt, Human
ucacugggucaccaucgagaucaauccuccuc

SEQ ID NO: 228671 - RNA, 32 nt, Human
ucacuggguuggucaaagguagucaccuuggc

SEQ ID NO: 228672 - RNA, 32 nt, Human
ucacuggucaaccuuugugcucccagauccca

SEQ ID NO: 228673 - RNA, 32 nt, Human
ucacuggucauugugugaaauaaagauaaucu

SEQ ID NO: 228674 - RNA, 32 nt, Human
ucacugguccacccuuccugucagggcuuuuc

SEQ ID NO: 228675 - RNA, 32 nt, Human
ucacuggucugacuugucaccugccaaugccu

SEQ ID NO: 228676 - RNA, 32 nt, Human
ucacuggucuuguaacuguccucuccuuauua

SEQ ID NO: 228677 - RNA, 32 nt, Human
ucacugguggcuguuccugaaggaggcccugc

SEQ ID NO: 228678 - RNA, 32 nt, Human
ucacuggugggcuuugggagaugaggaggaua

SEQ ID NO: 228679 - RNA, 32 nt, Human
ucacugguucagucuuaaaugccugcauggug

SEQ ID NO: 228680 - RNA, 32 nt, Human
ucacugguucuucaucuuuugucuguugcacg

SEQ ID NO: 228681 - RNA, 24 nt, Human
ucacugguuucagauguucauuua

SEQ ID NO: 228682 - RNA, 32 nt, Human
ucacugguuugcaggcgcuuuccucuuggaag

SEQ ID NO: 228683 - RNA, 32 nt, Human
ucacuguaaagcaguugaaagaauuuauucag

SEQ ID NO: 228684 - RNA, 32 nt, Human
ucacuguauuagccaggauggucucgaucucc

SEQ ID NO: 228685 - RNA, 32 nt, Human
ucacuguauuuuugaaacuucuaacgucauaa

SEQ ID NO: 228686 - RNA, 32 nt, Human
ucacugucaaccaggccagagugcagugaaga

SEQ ID NO: 228687 - RNA, 32 nt, Human
ucacugucaccaaggcuuagugcagugacaca

SEQ ID NO: 228688 - RNA, 32 nt, Human
ucacugucaccaggcuggagugcaguggugca

SEQ ID NO: 228689 - RNA, 32 nt, Human
ucacugucacccaggccggagugcaguggcac

SEQ ID NO: 228690 - RNA, 32 nt, Human
ucacugucacccaggcugaacugcaguggugu

SEQ ID NO: 228691 - RNA, 32 nt, Human
ucacugucacccaggcuggagugcaguggcau

SEQ ID NO: 228692 - RNA, 32 nt, Human
ucacugucacccagucuggaguggaguggcau

SEQ ID NO: 228693 - RNA, 32 nt, Human
ucacugucaccuaggcuggagugcagugguaa

SEQ ID NO: 228694 - RNA, 32 nt, Human
ucacuguccaguuuggugggaggaacugaaug

SEQ ID NO: 228695 - RNA, 31 nt, Human
ucacugucccucucugucugucucucagccu

SEQ ID NO: 228696 - RNA, 32 nt, Human
ucacugucgcccaggcuggagugcaguggcgc

SEQ ID NO: 228697 - RNA, 32 nt, Human
ucacugucgcccaggcuggagugcaguggcgu

SEQ ID NO: 228698 - RNA, 32 nt, Human
ucacugucgcccaggcuggagugcgguggugc

SEQ ID NO: 228699 - RNA, 22 nt, Human
ucacugucuacaccaucccucu

SEQ ID NO: 228700 - RNA, 32 nt, Human
ucacugucucccaggcuggaauguagggugug

SEQ ID NO: 228701 - RNA, 32 nt, Human
ucacugucuccuaggcuggagugcaguggugu

SEQ ID NO: 228702 - RNA, 32 nt, Human
ucacugucugcagcugccugucuggugucugu

SEQ ID NO: 228703 - RNA, 32 nt, Human
ucacugugaaaccuugcagaggaggagagggc

SEQ ID NO: 228704 - RNA, 32 nt, Human
ucacugugaacacauucugguugugcagaacc

SEQ ID NO: 228705 - RNA, 32 nt, Human
ucacugugagccagacacuguguuaaauacug

SEQ ID NO: 228706 - RNA, 32 nt, Human
ucacugugagucugaugugugaagaaggguau

SEQ ID NO: 228707 - RNA, 32 nt, Human
ucacugugagucuugcucugucgcccaggcug

SEQ ID NO: 228708 - RNA, 32 nt, Human
ucacugugccacucuacuccagccugggcaac

SEQ ID NO: 228709 - RNA, 32 nt, Human
ucacugugcuacucuacuccagccugggcaac

SEQ ID NO: 228710 - RNA, 32 nt, Human
ucacugugcuucaagguuguagaaagagcaca

SEQ ID NO: 228711 - RNA, 18 nt, Human
ucacugugcuucgagcca

SEQ ID NO: 228712 - RNA, 32 nt, Human
ucacuguggguagccugggauuaggccucauc

SEQ ID NO: 228713 - RNA, 32 nt, Human
ucacuguggugggaaagaucacacuacaugcc

SEQ ID NO: 228714 - RNA, 32 nt, Human
ucacugugguuacaaggcccuguccuggcugg

SEQ ID NO: 228715 - RNA, 32 nt, Human
ucacugugucagccaggauggucucgaucucc

SEQ ID NO: 228716 - RNA, 32 nt, Human
ucacugugucccacccuuccuagcuuugugcc

SEQ ID NO: 228717 - RNA, 32 nt, Human
ucacuguguuagccaggauggucucaaucucc

SEQ ID NO: 228718 - RNA, 32 nt, Human
ucacuguguuagccaggauggucucgaucucc

SEQ ID NO: 228719 - RNA, 32 nt, Human
ucacuguguuagccaggauggucuggaucucc

SEQ ID NO: 228720 - RNA, 32 nt, Human
ucacuguguuagccaggauggucuugaucucc

SEQ ID NO: 228721 - RNA, 32 nt, Human
ucacuguguuagccaggauggucuuggucucc

SEQ ID NO: 228722 - RNA, 32 nt, Human
ucacuguguugccaggcuggucucaaacuccu

SEQ ID NO: 228723 - RNA, 32 nt, Human
ucacuguuaccuguguuaguaucugcaaaugc

SEQ ID NO: 228724 - RNA, 32 nt, Human
ucacuguuaguguggccaagagcaggguuuuc

SEQ ID NO: 228725 - RNA, 32 nt, Human
ucacuguuauccaggcuggagugcagaggcac

SEQ ID NO: 228726 - RNA, 32 nt, Human
ucacuguuccaggaauucuugcaguguagagg

SEQ ID NO: 228727 - RNA, 32 nt, Human
ucacuguucccuggcaaauucugaccacaccu

SEQ ID NO: 228728 - RNA, 32 nt, Human
ucacuguucucccaucacacccuucagcccau

SEQ ID NO: 228729 - RNA, 21 nt, Human
ucacuguugacucuauucuga

SEQ ID NO: 228730 - RNA, 32 nt, Human
ucacuguugccaggcuggagugcaguggcaca

SEQ ID NO: 228731 - RNA, 32 nt, Human
ucacuguugcccaggcuggagugcaguggugc

SEQ ID NO: 228732 - RNA, 32 nt, Human
ucacuguugcccaggcuggagugcauugaugu

SEQ ID NO: 228733 - RNA, 32 nt, Human
ucacuguugcccaggcuggcgugcaguggugc

SEQ ID NO: 228734 - RNA, 32 nt, Human
ucacuguugccuggcuggagcacuuugguuua

SEQ ID NO: 228735 - RNA, 32 nt, Human
ucacuguuguugcccaggcuggagugcagugg

SEQ ID NO: 228736 - RNA, 32 nt, Human
ucacuuaaacccaggaggcggagguugcagug

SEQ ID NO: 228737 - RNA, 32 nt, Human
ucacuuaaacccaggagguggagguugcagug

SEQ ID NO: 228738 - RNA, 32 nt, Human
ucacuuaaaggccauaugaccuuagacaaguc

SEQ ID NO: 228739 - RNA, 32 nt, Human
ucacuuaaaggccaugaguuacucgggaggcu

SEQ ID NO: 228740 - RNA, 32 nt, Human
ucacuuaaccaccccauaccagucaccuccug

SEQ ID NO: 228741 - RNA, 20 nt, Human
ucacuuaacuguuguuaaga

SEQ ID NO: 228742 - RNA, 32 nt, Human
ucacuuaaggccaugaguuugaggcuacagag

SEQ ID NO: 228743 - RNA, 32 nt, Human
ucacuuacaggggagaaggaaaugcagggcac

SEQ ID NO: 228744 - RNA, 32 nt, Human
ucacuuaccauggcuagagaugggggugagac

SEQ ID NO: 228745 - RNA, 32 nt, Human
ucacuuacuaguuugcagugcugggcagguga

SEQ ID NO: 228746 - RNA, 32 nt, Human
ucacuuaggcuggagugcaguggcguggucac

SEQ ID NO: 228747 - RNA, 22 nt, Human
ucacuuaggcuuuccucugcca

SEQ ID NO: 228748 - RNA, 32 nt, Human
ucacuuagggcaucuccugcugccuucagcug

SEQ ID NO: 228749 - RNA, 32 nt, Human
ucacuuagggccuggggcucaaggagcuguag

SEQ ID NO: 228750 - RNA, 32 nt, Human
ucacuuaggucaucuaaaagcuuuuagagauu

SEQ ID NO: 228751 - RNA, 32 nt, Human
ucacuuauagcuuggaaauugucuucuguugg

SEQ ID NO: 228752 - RNA, 32 nt, Human
ucacuucaauaacagccuccuccaacucauuu

SEQ ID NO: 228753 - RNA, 32 nt, Human
ucacuucacacuuggcaugcacugugaaagcu

SEQ ID NO: 228754 - RNA, 32 nt, Human
ucacuucaccuccauaagaaccuguguuucca

SEQ ID NO: 228755 - RNA, 32 nt, Human
ucacuucaccucucugugccuugguuuccuca

SEQ ID NO: 228756 - RNA, 32 nt, Human
ucacuucacugcacuccagucugggugacaga

SEQ ID NO: 228757 - RNA, 32 nt, Human
ucacuucacugcauuccagauuggacauguuc

SEQ ID NO: 228758 - RNA, 32 nt, Human
ucacuucagcccaggagguggagguugcagug

SEQ ID NO: 228759 - RNA, 32 nt, Human
ucacuucagcccaggaguuuaaggcugcagug

SEQ ID NO: 228760 - RNA, 21 nt, Human
ucacuucagucauauccugga

SEQ ID NO: 228761 - RNA, 32 nt, Human
ucacuucagugcagugugguguagguguuacg

SEQ ID NO: 228762 - RNA, 22 nt, Human
ucacuucaguuucccaguuccu

SEQ ID NO: 228763 - RNA, 32 nt, Human
ucacuucauauuuuucuuguauuaacuguuua

SEQ ID NO: 228764 - RNA, 32 nt, Human
ucacuucauccagcaacuagcacccggugcag

SEQ ID NO: 228765 - RNA, 32 nt, Human
ucacuucaucuucucagcucccauuucuacuc

SEQ ID NO: 228766 - RNA, 32 nt, Human
ucacuucauuguccucaccaucccacccugaa

SEQ ID NO: 228767 - RNA, 31 nt, Human
ucacuuccauuugucugacauggagauugag

SEQ ID NO: 228768 - RNA, 32 nt, Human
ucacuucccagagggugcaggagccagcucug

SEQ ID NO: 228769 - RNA, 32 nt, Human
ucacuucccugagacuugguucuggguccuua

SEQ ID NO: 228770 - RNA, 24 nt, Human
ucacuucccugggaacucauccug

SEQ ID NO: 228771 - RNA, 32 nt, Human
ucacuuccggccucucugcccuggcuuaugug

SEQ ID NO: 228772 - RNA, 32 nt, Human
ucacuuccuaaacugcagcccggcccacccgg

SEQ ID NO: 228773 - RNA, 32 nt, Human
ucacuuccuaaacugcagccuggcccacccgg

SEQ ID NO: 228774 - RNA, 32 nt, Human
ucacuuccugguuccucuaccuuucccguuug

SEQ ID NO: 228775 - RNA, 19 nt, Human
ucacuuccuuacuccucca

SEQ ID NO: 228776 - RNA, 24 nt, Human
ucacuucuacaaaucagcaagaua

SEQ ID NO: 228777 - RNA, 32 nt, Human
ucacuucucccaggaacguguguaugugaaug

SEQ ID NO: 228778 - RNA, 32 nt, Human
ucacuucucuacugccucccagccccacgguu

SEQ ID NO: 228779 - RNA, 32 nt, Human
ucacuucucugcuucuuccccaacacagcugc

SEQ ID NO: 228780 - RNA, 32 nt, Human
ucacuucugacaggggaaguggguccccaggu

SEQ ID NO: 228781 - RNA, 32 nt, Human
ucacuucugcuccaauucucuuccucucuaaa

SEQ ID NO: 228782 - RNA, 32 nt, Human
ucacuucugcucucacacuacugccauacauu

SEQ ID NO: 228783 - RNA, 32 nt, Human
ucacuucugggaugugccccagcacugagaac

SEQ ID NO: 228784 - RNA, 32 nt, Human
ucacuucugucagucuguaagcuuugauaacc

SEQ ID NO: 228785 - RNA, 32 nt, Human
ucacuucugucucuuaggcagacuuguacggc

SEQ ID NO: 228786 - RNA, 32 nt, Human
ucacuugaaccaaggagguggagguugcagug

SEQ ID NO: 228787 - RNA, 32 nt, Human
ucacuugaacccagaagacagguugcagugag

SEQ ID NO: 228788 - RNA, 32 nt, Human
ucacuugaacccagaaggcggaaguugcagug

SEQ ID NO: 228789 - RNA, 32 nt, Human
ucacuugaacccagaaggugcagguugcagug

SEQ ID NO: 228790 - RNA, 32 nt, Human
ucacuugaacccagcaggcggagguugcggug

SEQ ID NO: 228791 - RNA, 32 nt, Human
ucacuugaacccaggaagcggagguugcaauc

SEQ ID NO: 228792 - RNA, 32 nt, Human
ucacuugaacccaggaagcgggguugcaguga

SEQ ID NO: 228793 - RNA, 32 nt, Human
ucacuugaacccaggaaguggagguugcagug

SEQ ID NO: 228794 - RNA, 32 nt, Human
ucacuugaacccaggagacggagguugcggug

SEQ ID NO: 228795 - RNA, 32 nt, Human
ucacuugaacccaggagacggugguugcagug

SEQ ID NO: 228796 - RNA, 32 nt, Human
ucacuugaacccaggaggcagagguugcaguc

SEQ ID NO: 228797 - RNA, 32 nt, Human
ucacuugaacccaggaggcagagguugcagug

SEQ ID NO: 228798 - RNA, 32 nt, Human
ucacuugaacccaggaggcagagguugcggug

SEQ ID NO: 228799 - RNA, 32 nt, Human
ucacuugaacccaggaggcagagguuggggug

SEQ ID NO: 228800 - RNA, 32 nt, Human
ucacuugaacccaggaggcagcuguugcagug

SEQ ID NO: 228801 - RNA, 32 nt, Human
ucacuugaacccaggaggcggaaguugcagug

SEQ ID NO: 228802 - RNA, 32 nt, Human
ucacuugaacccaggaggcggagguugcagug

SEQ ID NO: 228803 - RNA, 32 nt, Human
ucacuugaacccaggaggcggagguugcggug

SEQ ID NO: 228804 - RNA, 32 nt, Human
ucacuugaacccaggagguagaggcugcagug

SEQ ID NO: 228805 - RNA, 32 nt, Human
ucacuugaacccaggagguagagguugcagug

SEQ ID NO: 228806 - RNA, 32 nt, Human
ucacuugaacccaggagguggagauugcagug

SEQ ID NO: 228807 - RNA, 32 nt, Human
ucacuugaacccaggagguggaggcugcggug

SEQ ID NO: 228808 - RNA, 32 nt, Human
ucacuugaacccaggagguggagguuacagug

SEQ ID NO: 228809 - RNA, 32 nt, Human
ucacuugaacccaggagguggagguugcagca

SEQ ID NO: 228810 - RNA, 32 nt, Human
ucacuugaacccaggagguggagguugcagug

SEQ ID NO: 228811 - RNA, 32 nt, Human
ucacuugaacccaggagguggagguuguagug

SEQ ID NO: 228812 - RNA, 32 nt, Human
ucacuugaacccaggagguggagguuguggug

SEQ ID NO: 228813 - RNA, 32 nt, Human
ucacuugaacccaggaggugggcauugcagug

SEQ ID NO: 228814 - RNA, 32 nt, Human
ucacuugaacccaggagguggugguugcagug

SEQ ID NO: 228815 - RNA, 32 nt, Human
ucacuugaacccaggagguguugcagugaacc

SEQ ID NO: 228816 - RNA, 32 nt, Human
ucacuugaacccaggagguugaggcugcagug

SEQ ID NO: 228817 - RNA, 32 nt, Human
ucacuugaacccaguaggcggaaguugcagug

SEQ ID NO: 228818 - RNA, 32 nt, Human
ucacuugaaccccagaggcagaggcugaagug

SEQ ID NO: 228819 - RNA, 32 nt, Human
ucacuugaacucaggagguggagguugcagug

SEQ ID NO: 228820 - RNA, 32 nt, Human
ucacuugaacucgggaggaagagguugcagug

SEQ ID NO: 228821 - RNA, 32 nt, Human
ucacuugaagccaggaggcggagguugcagug

SEQ ID NO: 228822 - RNA, 32 nt, Human
ucacuugaagucaggaguuugagaccagccug

SEQ ID NO: 228823 - RNA, 32 nt, Human
ucacuugaauccaggaggcgaagguugcagug

SEQ ID NO: 228824 - RNA, 32 nt, Human
ucacuugaauccaggaggcggaguuuguggug

SEQ ID NO: 228825 - RNA, 32 nt, Human
ucacuugaauucaggagguggagguugcagug

SEQ ID NO: 228826 - RNA, 32 nt, Human
ucacuugagcccagaaguuugagaccagccug

SEQ ID NO: 228827 - RNA, 32 nt, Human
ucacuugagcccaggaggccaagguugcagug

SEQ ID NO: 228828 - RNA, 32 nt, Human
ucacuugagcccaggaggucaaggcugcagug

SEQ ID NO: 228829 - RNA, 32 nt, Human
ucacuugagcccaggaggucgaggcugcagug

SEQ ID NO: 228830 - RNA, 32 nt, Human
ucacuugagcccaggaggucgagguugcagug

SEQ ID NO: 228831 - RNA, 32 nt, Human
ucacuugagcccaggaggucuaggcugcagug

SEQ ID NO: 228832 - RNA, 32 nt, Human
ucacuugagcccaggagguggagguugcagug

SEQ ID NO: 228833 - RNA, 32 nt, Human
ucacuugagcccaggagguggagguuucagcg

SEQ ID NO: 228834 - RNA, 32 nt, Human
ucacuugagcccaggagguugaggcugcagug

SEQ ID NO: 228835 - RNA, 32 nt, Human
ucacuugagcccaggagugcaaaagcagccug

SEQ ID NO: 228836 - RNA, 32 nt, Human
ucacuugagcccaggaguucaagaccaacaug

SEQ ID NO: 228837 - RNA, 32 nt, Human
ucacuugagcccaggaguucaagaccagccug

SEQ ID NO: 228838 - RNA, 32 nt, Human
ucacuugagcccaggaguucaagaccagcuug

SEQ ID NO: 228839 - RNA, 32 nt, Human
ucacuugagcccaggaguuccagaccagugug

SEQ ID NO: 228840 - RNA, 32 nt, Human
ucacuugagcccaggaguucuagacaagccug

SEQ ID NO: 228841 - RNA, 32 nt, Human
ucacuugagcccaggaguucugggcuguagug

SEQ ID NO: 228842 - RNA, 32 nt, Human
ucacuugagcccaggaguuggaggccgcagug

SEQ ID NO: 228843 - RNA, 32 nt, Human
ucacuugagcccaggaguuuaagaccagccug

SEQ ID NO: 228844 - RNA, 32 nt, Human
ucacuugagcccaggaguuugagguugcagug

SEQ ID NO: 228845 - RNA, 32 nt, Human
ucacuugagcccaggaguuuugaguccagccu

SEQ ID NO: 228846 - RNA, 32 nt, Human
ucacuugagcccagggguucgagaccagcuug

SEQ ID NO: 228847 - RNA, 32 nt, Human
ucacuugagccccagaggucaaggcugcagug

SEQ ID NO: 228848 - RNA, 32 nt, Human
ucacuugagccccagggguggaggcugcaaug

SEQ ID NO: 228849 - RNA, 32 nt, Human
ucacuugagcccgggagguugaggcugcagug

SEQ ID NO: 228850 - RNA, 32 nt, Human
ucacuugagccugggagguugugguugcagug

SEQ ID NO: 228851 - RNA, 32 nt, Human
ucacuugaggaguucaagaccagccuggucaa

SEQ ID NO: 228852 - RNA, 32 nt, Human
ucacuugaguuucuugaaggcuuccuggccuc

SEQ ID NO: 228853 - RNA, 32 nt, Human
ucacuugaucccaggaggcggagguugcagug

SEQ ID NO: 228854 - RNA, 32 nt, Human
ucacuugauuuggaaggacacagggcugucaa

SEQ ID NO: 228855 - RNA, 32 nt, Human
ucacuugcaaaggaccucacacaugccccggc

SEQ ID NO: 228856 - RNA, 32 nt, Human
ucacuugcagcuccauuuccaucacgugguaa

SEQ ID NO: 228857 - RNA, 32 nt, Human
ucacuugcaguuuccuguucuccucauugccu

SEQ ID NO: 228858 - RNA, 32 nt, Human
ucacuugcccuugagucaaucuuuccauguca

SEQ ID NO: 228859 - RNA, 32 nt, Human
ucacuugccggcccuuugcaaugaaugacucu

SEQ ID NO: 228860 - RNA, 32 nt, Human
ucacuugccgggaagguggcucgggccaggcu

SEQ ID NO: 228861 - RNA, 32 nt, Human
ucacuugccuuuggcuuccuguugacuucuuc

SEQ ID NO: 228862 - RNA, 32 nt, Human
ucacuugcucauccuugcucuaccucaacgug

SEQ ID NO: 228863 - RNA, 31 nt, Human
ucacuugcucucucuggccucuuucaggcuc

SEQ ID NO: 228864 - RNA, 32 nt, Human
ucacuugcuggcugugaaaccaggacaagcua

SEQ ID NO: 228865 - RNA, 32 nt, Human
ucacuuggacuccagagguggagguugcagua

SEQ ID NO: 228866 - RNA, 32 nt, Human
ucacuuggagugacaaugggagaggucaggaa

SEQ ID NO: 228867 - RNA, 32 nt, Human
ucacuuggaugcaugaccucuucaugaagaac

SEQ ID NO: 228868 - RNA, 31 nt, Human
ucacuuggcaaagcagcucggcgucucagcc

SEQ ID NO: 228869 - RNA, 19 nt, Human
ucacuuggcaccugccccu

SEQ ID NO: 228870 - RNA, 32 nt, Human
ucacuuggcaccugccccugaggguccugaga

SEQ ID NO: 228871 - RNA, 32 nt, Human
ucacuuggcuccccucuccuccuuagccagaa

SEQ ID NO: 228872 - RNA, 32 nt, Human
ucacuugggagcuuauugaaaugcagauccca

SEQ ID NO: 228873 - RNA, 32 nt, Human
ucacuugggcccaggaggucaagccugcagcg

SEQ ID NO: 228874 - RNA, 32 nt, Human
ucacuuggguccaggagguggaggcugcagug

SEQ ID NO: 228875 - RNA, 32 nt, Human
ucacuuggguuggagugcaguugcaggaucau

SEQ ID NO: 228876 - RNA, 18 nt, Human
ucacuugguacacaccuu

SEQ ID NO: 228877 - RNA, 32 nt, Human
ucacuuggucugucugucucugucuugguagu

SEQ ID NO: 228878 - RNA, 32 nt, Human
ucacuuguaaccauuguacucuuauggauuug

SEQ ID NO: 228879 - RNA, 32 nt, Human
ucacuuguacccaggagguggagguugcggug

SEQ ID NO: 228880 - RNA, 32 nt, Human
ucacuuguacuguugcugauuuuugcaucuuc

SEQ ID NO: 228881 - RNA, 32 nt, Human
ucacuuguaggugauuaaaaagauugacagcc

SEQ ID NO: 228882 - RNA, 32 nt, Human
ucacuuguagguuucucugccuccagguugcc

SEQ ID NO: 228883 - RNA, 32 nt, Human
ucacuugucacccaggcuggagugcaguggcu

SEQ ID NO: 228884 - RNA, 32 nt, Human
ucacuugucuuaaaggaggacaggcagucucu

SEQ ID NO: 228885 - RNA, 21 nt, Human
ucacuugugcuuagcuuagca

SEQ ID NO: 228886 - RNA, 32 nt, Human
ucacuugugcuuugaugccugcuucugaacaa

SEQ ID NO: 228887 - RNA, 32 nt, Human
ucacuugugggagcuggaccagccuggguuuc

SEQ ID NO: 228888 - RNA, 32 nt, Human
ucacuuguguagguagguuggaaucaggauag

SEQ ID NO: 228889 - RNA, 32 nt, Human
ucacuugugucacccccauagucauuggguug

SEQ ID NO: 228890 - RNA, 32 nt, Human
ucacuuguuggacauuuuuccaauaaagguuc

SEQ ID NO: 228891 - RNA, 32 nt, Human
ucacuuuagacaggacccaauggcugcacugc

SEQ ID NO: 228892 - RNA, 32 nt, Human
ucacuuuaucugccaagcugcuguguuuuaag

SEQ ID NO: 228893 - RNA, 32 nt, Human
ucacuuuauuccagcacuucucuguguuuuac

SEQ ID NO: 228894 - RNA, 32 nt, Human
ucacuuucaagaaguuaugaagaaaagagaag

SEQ ID NO: 228895 - RNA, 32 nt, Human
ucacuuucauguccagagcugcuuagacugau

SEQ ID NO: 228896 - RNA, 32 nt, Human
ucacuuucauuuucuuacuuacuagaccauuu

SEQ ID NO: 228897 - RNA, 32 nt, Human
ucacuuuccaccacugucagccuggaaagaga

SEQ ID NO: 228898 - RNA, 32 nt, Human
ucacuuucccucuccaggccuccaggccuccu

SEQ ID NO: 228899 - RNA, 32 nt, Human
ucacuuuccucuuccacuuugauaccauuggg

SEQ ID NO: 228900 - RNA, 32 nt, Human
ucacuuuccuggauccaggauaauuuuuaaac

SEQ ID NO: 228901 - RNA, 32 nt, Human
ucacuuucgcugcguuggaggcugaggagaau

SEQ ID NO: 228902 - RNA, 32 nt, Human
ucacuuucucccuggcugcagaacuagacacc

SEQ ID NO: 228903 - RNA, 32 nt, Human
ucacuuucuccuccuccucaugcccugccuug

SEQ ID NO: 228904 - RNA, 32 nt, Human
ucacuuucucuagcccaucauuaccugugaac

SEQ ID NO: 228905 - RNA, 32 nt, Human
ucacuuucucucucacuccacucaagcagcgg

SEQ ID NO: 228906 - RNA, 32 nt, Human
ucacuuucucugaaugcuucugagccuugccu

SEQ ID NO: 228907 - RNA, 32 nt, Human
ucacuuucugacuccagccuugccagccugac

SEQ ID NO: 228908 - RNA, 32 nt, Human
ucacuuugaacaaaccacuuugcccaaccuga

SEQ ID NO: 228909 - RNA, 32 nt, Human
ucacuuugaaguauuuguauccuuuuacaaaa

SEQ ID NO: 228910 - RNA, 32 nt, Human
ucacuuugaaucuguugguuuuucccccuaca

SEQ ID NO: 228911 - RNA, 32 nt, Human
ucacuuugagaaauucaccaaauaugaauuuu

SEQ ID NO: 228912 - RNA, 32 nt, Human
ucacuuugcugugguuggcuuaagagguuugu

SEQ ID NO: 228913 - RNA, 32 nt, Human
ucacuuugcuugcugaccccuuccucauaguu

SEQ ID NO: 228914 - RNA, 32 nt, Human
ucacuuuggcauucaucgccucuuuuccucuu

SEQ ID NO: 228915 - RNA, 32 nt, Human
ucacuuugggaggccagggcagguggauugcc

SEQ ID NO: 228916 - RNA, 32 nt, Human
ucacuuuggggaggggaaaaagaauaguaugc

SEQ ID NO: 228917 - RNA, 32 nt, Human
ucacuuuguaaaccaggugggggcaucucaca

SEQ ID NO: 228918 - RNA, 32 nt, Human
ucacuuuguagggugggggauuacugagaguc

SEQ ID NO: 228919 - RNA, 32 nt, Human
ucacuuugucucuggcaucuagcauggugccu

SEQ ID NO: 228920 - RNA, 32 nt, Human
ucacuuuguuagccaggauggucucaaucucc

SEQ ID NO: 228921 - RNA, 32 nt, Human
ucacuuuguugcccaggcuagucucaaacucc

SEQ ID NO: 228922 - RNA, 32 nt, Human
ucacuuuucaacagagucaucuagaagggagg

SEQ ID NO: 228923 - RNA, 32 nt, Human
ucacuuuuccagagugaaauguaggagggagc

SEQ ID NO: 228924 - RNA, 32 nt, Human
ucacuuuucccacccuguauuuuguuucuuua

SEQ ID NO: 228925 - RNA, 32 nt, Human
ucacuuuuccuggggccccucuccccaacccu

SEQ ID NO: 228926 - RNA, 32 nt, Human
ucacuuuucggaucuucugucccagauccugc

SEQ ID NO: 228927 - RNA, 32 nt, Human
ucacuuuugaagaaccaaaugaccucacuggu

SEQ ID NO: 228928 - RNA, 32 nt, Human
ucacuuuugauccuuccagcuccagggucucg

SEQ ID NO: 228929 - RNA, 32 nt, Human
ucacuuuugcccaggcuggagugcaguggcgu

SEQ ID NO: 228930 - RNA, 32 nt, Human
ucacuuuugcuccgaagcuacuucuccacugu

SEQ ID NO: 228931 - RNA, 32 nt, Human
ucacuuuuguugcccaggcuggagugcaacgg

SEQ ID NO: 228932 - RNA, 32 nt, Human
ucacuuuuguugcccaggcuggagugcaauga

SEQ ID NO: 228933 - RNA, 32 nt, Human
ucacuuuuguugcccaggcuggagugcaaugg

SEQ ID NO: 228934 - RNA, 32 nt, Human
ucacuuuuguugcccaggcuggaguguagugg

SEQ ID NO: 228935 - RNA, 32 nt, Human
ucacuuuuguugcccaggcuggaguucagugg

SEQ ID NO: 228936 - RNA, 32 nt, Human
ucacuuuuuauuuuuauggggguggguggugc

SEQ ID NO: 228937 - RNA, 32 nt, Human
ucacuuuuucaaggauauacacaucuguguuu

SEQ ID NO: 228938 - RNA, 32 nt, Human
ucacuuuuugagaagauucgcccuguacccca

SEQ ID NO: 228939 - RNA, 22 nt, Human
ucagaaaaaacaaauagaagaa

SEQ ID NO: 228940 - RNA, 22 nt, Human
ucagaaaaaagcaacaaaaaga

SEQ ID NO: 228941 - RNA, 32 nt, Human
ucagaaaaacucagaacauugagcuggcuuua

SEQ ID NO: 228942 - RNA, 32 nt, Human
ucagaaaacacaccuggaauacgaugcagccc

SEQ ID NO: 228943 - RNA, 32 nt, Human
ucagaaaacaugucucgaagauaugacuccag

SEQ ID NO: 228944 - RNA, 32 nt, Human
ucagaaaaccauuuucucugcaaagaaaggaa

SEQ ID NO: 228945 - RNA, 32 nt, Human
ucagaaaagacauauauuuccaugccuuuuua

SEQ ID NO: 228946 - RNA, 32 nt, Human
ucagaaaaggagagaggaaauuagcagagcga

SEQ ID NO: 228947 - RNA, 32 nt, Human
ucagaaaauacugauagacugacagaccccua

SEQ ID NO: 228948 - RNA, 32 nt, Human
ucagaaaaugcugcugacugugguauugcccc

SEQ ID NO: 228949 - RNA, 23 nt, Human
ucagaaaauucauuuuugagaua

SEQ ID NO: 228950 - RNA, 32 nt, Human
ucagaaacaaaaggacauuaaugaggaauaag

SEQ ID NO: 228951 - RNA, 32 nt, Human
ucagaaacacacucugaaaacaugcacagaac

SEQ ID NO: 228952 - RNA, 32 nt, Human
ucagaaacauaaagauugaaggggcaugugac

SEQ ID NO: 228953 - RNA, 32 nt, Human
ucagaaacccgcaaggcucugaaggguucuug

SEQ ID NO: 228954 - RNA, 20 nt, Human
ucagaaaccuucuccaagug

SEQ ID NO: 228955 - RNA, 32 nt, Human
ucagaaacuacugcaaacacuucuaugcauac

SEQ ID NO: 228956 - RNA, 32 nt, Human
ucagaaacucacugugauuccaaaaauguuuc

SEQ ID NO: 228957 - RNA, 32 nt, Human
ucagaaacucugagagagagcaugggcagaca

SEQ ID NO: 228958 - RNA, 32 nt, Human
ucagaaacugacaagaaaaucugaccuucauc

SEQ ID NO: 228959 - RNA, 32 nt, Human
ucagaaacugauuauuuggaucagaaaccauu

SEQ ID NO: 228960 - RNA, 32 nt, Human
ucagaaagaaacuuccaacacaguuucccaaa

SEQ ID NO: 228961 - RNA, 32 nt, Human
ucagaaagcagccacaggcccugucuggggca

SEQ ID NO: 228962 - RNA, 32 nt, Human
ucagaaagcuuuguauauuuugcaguugccag

SEQ ID NO: 228963 - RNA, 32 nt, Human
ucagaaaggagaaagcagaggccucuaacgca

SEQ ID NO: 228964 - RNA, 32 nt, Human
ucagaaaggagaaggauaucagaugagggaag

SEQ ID NO: 228965 - RNA, 32 nt, Human
ucagaaaggcuaacugugaugaugacacuuug

SEQ ID NO: 228966 - RNA, 32 nt, Human
ucagaaagggagaacgccagagcccuggcugg

SEQ ID NO: 228967 - RNA, 16 nt, Human
ucagaaagggcacuga

SEQ ID NO: 228968 - RNA, 21 nt, Human
ucagaaagucaccaggacuug

SEQ ID NO: 228969 - RNA, 21 nt, Human
ucagaaaguggucagaacuua

SEQ ID NO: 228970 - RNA, 25 nt, Human
ucagaaaucuuacaaaugugaagaa

SEQ ID NO: 228971 - RNA, 32 nt, Human
ucagaaaugaauauacaaguauacaaauuucc

SEQ ID NO: 228972 - RNA, 32 nt, Human
ucagaaaugaggcugacuauaaggcugcucug

SEQ ID NO: 228973 - RNA, 19 nt, Human
ucagaaaugcccccuccca

SEQ ID NO: 228974 - RNA, 31 nt, Human
ucagaaauggugaaugaauacaagaaaauuc

SEQ ID NO: 228975 - RNA, 32 nt, Human
ucagaaaugucaaugagacuaaagugguuuug

SEQ ID NO: 228976 - RNA, 18 nt, Human
ucagaaaugucaauucuu

SEQ ID NO: 228977 - RNA, 32 nt, Human
ucagaaaugugucuaugugcucugggaaccug

SEQ ID NO: 228978 - RNA, 32 nt, Human
ucagaaauuaagaauacacauauaaaauguug

SEQ ID NO: 228979 - RNA, 32 nt, Human
ucagaaauucaggcugugagggguuagauuag

SEQ ID NO: 228980 - RNA, 32 nt, Human
ucagaaauugucuuaagcaacagccccaaaug

SEQ ID NO: 228981 - RNA, 32 nt, Human
ucagaacaagaguuaauaucugccuguaucuu

SEQ ID NO: 228982 - RNA, 32 nt, Human
ucagaacagacacgccgcccuccuuguguucu

SEQ ID NO: 228983 - RNA, 32 nt, Human
ucagaacagugggcagugccugggugaacgug

SEQ ID NO: 228984 - RNA, 32 nt, Human
ucagaacauuccuucuuuacuggucacagcca

SEQ ID NO: 228985 - RNA, 21 nt, Human
ucagaaccaacccccagcauc

SEQ ID NO: 228986 - RNA, 22 nt, Human
ucagaaccaagaugccaacauc

SEQ ID NO: 228987 - RNA, 23 nt, Human
ucagaaccaauaacuucugcauc

SEQ ID NO: 228988 - RNA, 32 nt, Human
ucagaaccagccuggacaacauagugagaccc

SEQ ID NO: 228989 - RNA, 18 nt, Human
ucagaaccagcgcaagca

SEQ ID NO: 228990 - RNA, 23 nt, Human
ucagaaccagcuccacccaaauc

SEQ ID NO: 228991 - RNA, 18 nt, Human
ucagaaccaguccccugc

SEQ ID NO: 228992 - RNA, 32 nt, Human
ucagaacccacgucuucagcagcauuugaaac

SEQ ID NO: 228993 - RNA, 32 nt, Human
ucagaacccagaaucuuugaggguaagguuau

SEQ ID NO: 228994 - RNA, 32 nt, Human
ucagaaccuccacccucccccacaccaaagac

SEQ ID NO: 228995 - RNA, 32 nt, Human
ucagaaccucuugagaggcaacagugacagag

SEQ ID NO: 228996 - RNA, 32 nt, Human
ucagaaccuuccugaaaugagcagaaauuguu

SEQ ID NO: 228997 - RNA, 32 nt, Human
ucagaacgauggagagcucccgcgugaggcug

SEQ ID NO: 228998 - RNA, 32 nt, Human
ucagaacuaccuggcaucuuccugaacaagac

SEQ ID NO: 228999 - RNA, 32 nt, Human
ucagaacucacugcagccucuacaucccuggg

SEQ ID NO: 229000 - RNA, 32 nt, Human
ucagaacuccauguuuguuucucucuaucccc

SEQ ID NO: 229001 - RNA, 32 nt, Human
ucagaacugaaaacuccaccuuccguugggcc

SEQ ID NO: 229002 - RNA, 32 nt, Human
ucagaacugaagagaggaaggggaggagccga

SEQ ID NO: 229003 - RNA, 17 nt, Human
ucagaacugcaauucuu

SEQ ID NO: 229004 - RNA, 32 nt, Human
ucagaacugcauguuaccaagaucccagguga

SEQ ID NO: 229005 - RNA, 25 nt, Human
ucagaacugucucuccugggcccag

SEQ ID NO: 229006 - RNA, 32 nt, Human
ucagaacuuucuccccgcccccaaaccuggau

SEQ ID NO: 229007 - RNA, 32 nt, Human
ucagaagaacauccuucucugcuugaccugaa

SEQ ID NO: 229008 - RNA, 32 nt, Human
ucagaagaagugaacguuaauuagaauuuaau

SEQ ID NO: 229009 - RNA, 32 nt, Human
ucagaagaaucauguacuccagccucccuuga

SEQ ID NO: 229010 - RNA, 32 nt, Human
ucagaagacaaacuggugugugccucauugcu

SEQ ID NO: 229011 - RNA, 32 nt, Human
ucagaagacauuucauaccugcccugguccug

SEQ ID NO: 229012 - RNA, 32 nt, Human
ucagaagacuccagaagcagccacuuaguaga

SEQ ID NO: 229013 - RNA, 32 nt, Human
ucagaagagaauuccccggcagcagcguggcg

SEQ ID NO: 229014 - RNA, 32 nt, Human
ucagaagagcuggagaugcaagcucuaggcug

SEQ ID NO: 229015 - RNA, 32 nt, Human
ucagaagagucgaugaucaccaagcaggaaag

SEQ ID NO: 229016 - RNA, 32 nt, Human
ucagaagaucguggccaccugggaagccauca

SEQ ID NO: 229017 - RNA, 32 nt, Human
ucagaagaugccugcauuucuccaugaagaaa

SEQ ID NO: 229018 - RNA, 32 nt, Human
ucagaagaugccugcauuucuccaugaagaag

SEQ ID NO: 229019 - RNA, 32 nt, Human
ucagaagcaaaguacacccauuauuuaugcag

SEQ ID NO: 229020 - RNA, 32 nt, Human
ucagaagcagcaguaauagcaagagacagagg

SEQ ID NO: 229021 - RNA, 32 nt, Human
ucagaagcagcccuuggcugggugaggugugc

SEQ ID NO: 229022 - RNA, 32 nt, Human
ucagaagcauuuuaccagugaagcccucauua

SEQ ID NO: 229023 - RNA, 23 nt, Human
ucagaagcauuuuggauuucaga

SEQ ID NO: 229024 - RNA, 32 nt, Human
ucagaagccacauuuggccaggccucccgccu

SEQ ID NO: 229025 - RNA, 32 nt, Human
ucagaagccagucugcgucaggcacgucuccu

SEQ ID NO: 229026 - RNA, 32 nt, Human
ucagaagcccugcagugccuccagauggaaag

SEQ ID NO: 229027 - RNA, 32 nt, Human
ucagaagcucacaaccugguuugaaucccuca

SEQ ID NO: 229028 - RNA, 32 nt, Human
ucagaagcuccaggaggaagaagaucgggaag

SEQ ID NO: 229029 - RNA, 28 nt, Human
ucagaagcuccccuggcacaauuucaga

SEQ ID NO: 229030 - RNA, 32 nt, Human
ucagaagcuggaagggacaaggaaugguuucu

SEQ ID NO: 229031 - RNA, 32 nt, Human
ucagaagcuguugcuacugcgucucucugucu

SEQ ID NO: 229032 - RNA, 21 nt, Human
ucagaaggaaauuggguccag

SEQ ID NO: 229033 - RNA, 32 nt, Human
ucagaaggagccaauggacacugguguagaca

SEQ ID NO: 229034 - RNA, 20 nt, Human
ucagaaggagcguggcccag

SEQ ID NO: 229035 - RNA, 28 nt, Human
ucagaaggaggagagacaccgggcccag

SEQ ID NO: 229036 - RNA, 24 nt, Human
ucagaaggagggcugggugcccag

SEQ ID NO: 229037 - RNA, 32 nt, Human
ucagaaggcaagcaucuucauuuugcuagcuu

SEQ ID NO: 229038 - RNA, 27 nt, Human
ucagaaggcaccagcaccagggcccag

SEQ ID NO: 229039 - RNA, 32 nt, Human
ucagaaggccgaggugggagaaucacuugaau

SEQ ID NO: 229040 - RNA, 32 nt, Human
ucagaaggcugagaggguuugcaguggagccc

SEQ ID NO: 229041 - RNA, 32 nt, Human
ucagaaggcugaggcaggagaaucacuugaac

SEQ ID NO: 229042 - RNA, 32 nt, Human
ucagaaggcugaggcaggagaauugcuugaac

SEQ ID NO: 229043 - RNA, 32 nt, Human
ucagaaggcugaggcaggaggaucgcuugaga

SEQ ID NO: 229044 - RNA, 32 nt, Human
ucagaaggcugaggcaugagaaucacuugaac

SEQ ID NO: 229045 - RNA, 32 nt, Human
ucagaaggcugaggugggagaaucccuugaac

SEQ ID NO: 229046 - RNA, 31 nt, Human
ucagaaggcuggugacaucuguugaagcaac

SEQ ID NO: 229047 - RNA, 23 nt, Human
ucagaaggcugucuggcacccag

SEQ ID NO: 229048 - RNA, 21 nt, Human
ucagaagggaccuuggcacag

SEQ ID NO: 229049 - RNA, 32 nt, Human
ucagaagggcuggccuggagugcucacuccau

SEQ ID NO: 229050 - RNA, 17 nt, Human
ucagaaggggagcuguc

SEQ ID NO: 229051 - RNA, 21 nt, Human
ucagaaggggccacggccucc

SEQ ID NO: 229052 - RNA, 24 nt, Human
ucagaaggggccaucugggcccag

SEQ ID NO: 229053 - RNA, 22 nt, Human
ucagaagggugccaggccacag

SEQ ID NO: 229054 - RNA, 21 nt, Human
ucagaaggguggugugggccc

SEQ ID NO: 229055 - RNA, 23 nt, Human
ucagaagguuuagcugggcccag

SEQ ID NO: 229056 - RNA, 23 nt, Human
ucagaaguagcauuaggaucuuc

SEQ ID NO: 229057 - RNA, 21 nt, Human
ucagaagucaccgcucaguga

SEQ ID NO: 229058 - RNA, 32 nt, Human
ucagaagucauuuugacugcccucaauaaaau

SEQ ID NO: 229059 - RNA, 32 nt, Human
ucagaagucgcuguccuuacuacuuuugcgga

SEQ ID NO: 229060 - RNA, 32 nt, Human
ucagaagucugcuuuucagguuuauuccuaca

SEQ ID NO: 229061 - RNA, 32 nt, Human
ucagaagucuucuucuucuuuuaauucauaag

SEQ ID NO: 229062 - RNA, 32 nt, Human
ucagaagugauuuaguuguggaaagauaauaa

SEQ ID NO: 229063 - RNA, 32 nt, Human
ucagaaguggcugauuggaaggggacaagcuu

SEQ ID NO: 229064 - RNA, 32 nt, Human
ucagaaguuaaggcugguguccuggccccagu

SEQ ID NO: 229065 - RNA, 32 nt, Human
ucagaaguuaucucccucucccugugaugccu

SEQ ID NO: 229066 - RNA, 32 nt, Human
ucagaaguuccacugcacuccagccuggguua

SEQ ID NO: 229067 - RNA, 21 nt, Human
ucagaaguuccccucccugcc

SEQ ID NO: 229068 - RNA, 32 nt, Human
ucagaaguugcagagcagccugggcaacaugg

SEQ ID NO: 229069 - RNA, 32 nt, Human
ucagaaguuguaguccaagcacacacaaauag

SEQ ID NO: 229070 - RNA, 32 nt, Human
ucagaaguugucuuugacauuuaccaugaaaa

SEQ ID NO: 229071 - RNA, 32 nt, Human
ucagaauaaagugucuguuagacuucguuuug

SEQ ID NO: 229072 - RNA, 22 nt, Human
ucagaauaacugcugucuccca

SEQ ID NO: 229073 - RNA, 32 nt, Human
ucagaauaggaggcuaaagaaaagccagccca

SEQ ID NO: 229074 - RNA, 32 nt, Human
ucagaauauguauguaccugagcauauguaca

SEQ ID NO: 229075 - RNA, 32 nt, Human
ucagaaucaccuccucuccccaaaauuuguag

SEQ ID NO: 229076 - RNA, 32 nt, Human
ucagaaucacuuaggauggagacugggaccug

SEQ ID NO: 229077 - RNA, 32 nt, Human
ucagaaucagaauaugucuucugugucauggu

SEQ ID NO: 229078 - RNA, 32 nt, Human
ucagaauccauggcuggaagagguaguaaggc

SEQ ID NO: 229079 - RNA, 32 nt, Human
ucagaaucccagggacgggcgugagaguuugg

SEQ ID NO: 229080 - RNA, 32 nt, Human
ucagaaucccuuagggauggggcauuagaaac

SEQ ID NO: 229081 - RNA, 32 nt, Human
ucagaauccuccaggaucuagaagaaggaaga

SEQ ID NO: 229082 - RNA, 32 nt, Human
ucagaaucuaccacagcauucccuaucagccc

SEQ ID NO: 229083 - RNA, 23 nt, Human
ucagaaucucgcugucuccuucc

SEQ ID NO: 229084 - RNA, 32 nt, Human
ucagaaucuuuucucccucuugaguuuuugca

SEQ ID NO: 229085 - RNA, 21 nt, Human
ucagaaugaaagagguugcuu

SEQ ID NO: 229086 - RNA, 30 nt, Human
ucagaaugacaccuucucagguugccuuug

SEQ ID NO: 229087 - RNA, 32 nt, Human
ucagaaugaccgcuuuuggccuagcgguuugu

SEQ ID NO: 229088 - RNA, 32 nt, Human
ucagaaugaccguaagauagcuuacauuuccu

SEQ ID NO: 229089 - RNA, 32 nt, Human
ucagaaugagcaguaaaccuuccccaguccua

SEQ ID NO: 229090 - RNA, 32 nt, Human
ucagaauggcaguccuggaggcagggggugag

SEQ ID NO: 229091 - RNA, 32 nt, Human
ucagaaugggcuuuagggaugaagcagcuggg

SEQ ID NO: 229092 - RNA, 32 nt, Human
ucagaauguuaucaccuguuugucaaagcuug

SEQ ID NO: 229093 - RNA, 32 nt, Human
ucagaauuaaucucuuaaaauauuuuacagag

SEQ ID NO: 229094 - RNA, 32 nt, Human
ucagaauuccucccccugccucuccucccuga

SEQ ID NO: 229095 - RNA, 19 nt, Human
ucagaauuggaacuuuuua

SEQ ID NO: 229096 - RNA, 32 nt, Human
ucagaauuucaagcucuggguaauaacugcug

SEQ ID NO: 229097 - RNA, 32 nt, Human
ucagaauuuucucuuuuaaucacaagaagccu

SEQ ID NO: 229098 - RNA, 32 nt, Human
ucagacaacccccacccccacuguuucugggg

SEQ ID NO: 229099 - RNA, 32 nt, Human
ucagacaacuucuuccuucuccguggagcuca

SEQ ID NO: 229100 - RNA, 32 nt, Human
ucagacaaugccuucuccauuacuugaagcuu

SEQ ID NO: 229101 - RNA, 32 nt, Human
ucagacaauucagaaaagacuggugagagagu

SEQ ID NO: 229102 - RNA, 32 nt, Human
ucagacacacucccuucugccuuccggcuuaa

SEQ ID NO: 229103 - RNA, 32 nt, Human
ucagacacagccguguaugcucccagcagcaa

SEQ ID NO: 229104 - RNA, 32 nt, Human
ucagacacgggcccugggcagacagcccccag

SEQ ID NO: 229105 - RNA, 32 nt, Human
ucagacacucagggaacaaaauggucagccag

SEQ ID NO: 229106 - RNA, 32 nt, Human
ucagacacuccguccucacacuggcaggacgg

SEQ ID NO: 229107 - RNA, 32 nt, Human
ucagacacugcucagcuucccuccaggagguu

SEQ ID NO: 229108 - RNA, 32 nt, Human
ucagacagaugugguugcauccuaacuccaug

SEQ ID NO: 229109 - RNA, 32 nt, Human
ucagacagcaggaaggagagaaggaaggaagg

SEQ ID NO: 229110 - RNA, 32 nt, Human
ucagacagccaugaagcuggccagcagcgaca

SEQ ID NO: 229111 - RNA, 32 nt, Human
ucagacaggacuagagaauaacaucauuucac

SEQ ID NO: 229112 - RNA, 32 nt, Human
ucagacagggucucgcuauguugcccaggcug

SEQ ID NO: 229113 - RNA, 32 nt, Human
ucagacagggucuuacucugucacccaggcug

SEQ ID NO: 229114 - RNA, 32 nt, Human
ucagacagugaucaggacugaggauggaguua

SEQ ID NO: 229115 - RNA, 32 nt, Human
ucagacagugcuggugcuucugcuucuuaagu

SEQ ID NO: 229116 - RNA, 32 nt, Human
ucagacaguggaugagacacacaacggcagug

SEQ ID NO: 229117 - RNA, 32 nt, Human
ucagacaguguguggaggggcaggagcgugau

SEQ ID NO: 229118 - RNA, 32 nt, Human
ucagacaguuuauggugaaaggaagcagguua

SEQ ID NO: 229119 - RNA, 32 nt, Human
ucagacaucuaguggggcagcucucuuccuca

SEQ ID NO: 229120 - RNA, 32 nt, Human
ucagaccaagaucacacacagaaucaauugca

SEQ ID NO: 229121 - RNA, 32 nt, Human
ucagaccaaugccuuccacugcuccuuuauga

SEQ ID NO: 229122 - RNA, 32 nt, Human
ucagaccacaaacaacaacaacaauccaaaaa

SEQ ID NO: 229123 - RNA, 32 nt, Human
ucagaccacaccaucaaugauccagagcaaca

SEQ ID NO: 229124 - RNA, 32 nt, Human
ucagaccacugcaaucuaugggcagaccgccu

SEQ ID NO: 229125 - RNA, 32 nt, Human
ucagaccacugcccuccagccugggcaauaga

SEQ ID NO: 229126 - RNA, 32 nt, Human
ucagaccacuugcuucccacauaacaaugucg

SEQ ID NO: 229127 - RNA, 32 nt, Human
ucagaccagccaggaaccucucagagcugaag

SEQ ID NO: 229128 - RNA, 32 nt, Human
ucagaccagcugggaugggauccugccuccag

SEQ ID NO: 229129 - RNA, 32 nt, Human
ucagaccaggaggcauugcugugaaagauaau

SEQ ID NO: 229130 - RNA, 32 nt, Human
ucagaccaggucuugcugguguauccagggac

SEQ ID NO: 229131 - RNA, 32 nt, Human
ucagaccagugaaagaguagugcauuuaauug

SEQ ID NO: 229132 - RNA, 32 nt, Human
ucagaccagugggaguaaaccgaguguuaagu

SEQ ID NO: 229133 - RNA, 32 nt, Human
ucagaccauacaaccgcagcucuggcucuggg

SEQ ID NO: 229134 - RNA, 32 nt, Human
ucagaccaucucaaaaaggaggaaaagaugac

SEQ ID NO: 229135 - RNA, 32 nt, Human
ucagacccacacagaacaggggcugagggcac

SEQ ID NO: 229136 - RNA, 32 nt, Human
ucagacccacuuuuucauacacuugcuauaua

SEQ ID NO: 229137 - RNA, 32 nt, Human
ucagacccaguucugucagcucuagaggcacc

SEQ ID NO: 229138 - RNA, 21 nt, Human
ucagacccaucaccuuugccg

SEQ ID NO: 229139 - RNA, 32 nt, Human
ucagacccaucuccaaccaugagcaaugccau

SEQ ID NO: 229140 - RNA, 19 nt, Human
ucagaccccagggcagcau

SEQ ID NO: 229141 - RNA, 22 nt, Human
ucagacccccacuccucugcug

SEQ ID NO: 229142 - RNA, 32 nt, Human
ucagaccccgcccaugcuguguggucucugca

SEQ ID NO: 229143 - RNA, 32 nt, Human
ucagaccccuggguacaugguggaugauuuua

SEQ ID NO: 229144 - RNA, 32 nt, Human
ucagacccgcucuuccuuuucccuucauuccc

SEQ ID NO: 229145 - RNA, 32 nt, Human
ucagacccuccugugggcaggguucuuagugg

SEQ ID NO: 229146 - RNA, 18 nt, Human
ucagacccucgccuucca

SEQ ID NO: 229147 - RNA, 32 nt, Human
ucagacccucuuccucccagguaaaggccggg

SEQ ID NO: 229148 - RNA, 32 nt, Human
ucagacccugaggaacaugcagaaggaagcua

SEQ ID NO: 229149 - RNA, 32 nt, Human
ucagaccggggaggcccgggccagcagcuccc

SEQ ID NO: 229150 - RNA, 32 nt, Human
ucagaccgguguaaacaaaccagccagccgcc

SEQ ID NO: 229151 - RNA, 24 nt, Human
ucagaccuauaaucccagcacuuu

SEQ ID NO: 229152 - RNA, 32 nt, Human
ucagaccuauaaucccagcacuuugggagucc

SEQ ID NO: 229153 - RNA, 32 nt, Human
ucagaccuccgcacccucaccccaccaucacu

SEQ ID NO: 229154 - RNA, 32 nt, Human
ucagaccuccuccaaacaaaccaacuccacca

SEQ ID NO: 229155 - RNA, 32 nt, Human
ucagaccuccugggugggguuuggcuucaggg

SEQ ID NO: 229156 - RNA, 32 nt, Human
ucagaccucugcuccaccuuggacuagccuuu

SEQ ID NO: 229157 - RNA, 19 nt, Human
ucagaccugcccccuccca

SEQ ID NO: 229158 - RNA, 32 nt, Human
ucagaccuguaaucccagaacuuugggagccg

SEQ ID NO: 229159 - RNA, 32 nt, Human
ucagaccuucugccucuggcucugccuacuca

SEQ ID NO: 229160 - RNA, 32 nt, Human
ucagacgacacacacgaccuacccugaugguu

SEQ ID NO: 229161 - RNA, 21 nt, Human
ucagacgccaacuggccuucu

SEQ ID NO: 229162 - RNA, 32 nt, Human
ucagacggcugcaggcacagggaggaggcgcg

SEQ ID NO: 229163 - RNA, 19 nt, Human
ucagacgugcucccuccca

SEQ ID NO: 229164 - RNA, 32 nt, Human
ucagacguucccaccacugaagaugagguuga

SEQ ID NO: 229165 - RNA, 32 nt, Human
ucagacuaacaucuuaaaacacugaccucuau

SEQ ID NO: 229166 - RNA, 32 nt, Human
ucagacuaauuuccuucuuuccucgcacuucu

SEQ ID NO: 229167 - RNA, 32 nt, Human
ucagacuauacccauggugccucugggcuuga

SEQ ID NO: 229168 - RNA, 32 nt, Human
ucagacucaaugauaagucugaaguggaaaga

SEQ ID NO: 229169 - RNA, 24 nt, Human
ucagacucacaugagaagcuggga

SEQ ID NO: 229170 - RNA, 32 nt, Human
ucagacucagcccuccuggaggcugucaugua

SEQ ID NO: 229171 - RNA, 24 nt, Human
ucagacuccaucccuccucugccg

SEQ ID NO: 229172 - RNA, 32 nt, Human
ucagacucccaaagugcugggauuacaggugu

SEQ ID NO: 229173 - RNA, 32 nt, Human
ucagacucccaaagugcugggauuauagggau

SEQ ID NO: 229174 - RNA, 32 nt, Human
ucagacucccaaauagcuaugauuacaggcac

SEQ ID NO: 229175 - RNA, 32 nt, Human
ucagacucccgaauagcugggauuacagacag

SEQ ID NO: 229176 - RNA, 32 nt, Human
ucagacucccgaguagcugggauuacaggcac

SEQ ID NO: 229177 - RNA, 32 nt, Human
ucagacuccgaggaggugucuagugagagugg

SEQ ID NO: 229178 - RNA, 32 nt, Human
ucagacuccuaaguagcugggauuacaggcac

SEQ ID NO: 229179 - RNA, 22 nt, Human
ucagacuccugaucucagguga

SEQ ID NO: 229180 - RNA, 23 nt, Human
ucagacuccugggcucaagcgau

SEQ ID NO: 229181 - RNA, 32 nt, Human
ucagacucucagaagggucuguggguguugua

SEQ ID NO: 229182 - RNA, 32 nt, Human
ucagacucuccccaauagcggaagucgaucuu

SEQ ID NO: 229183 - RNA, 23 nt, Human
ucagacucuccuccgccucuacc

SEQ ID NO: 229184 - RNA, 32 nt, Human
ucagacucucuccucucucucccuccacuccu

SEQ ID NO: 229185 - RNA, 32 nt, Human
ucagacucugggacuccugagaugggagaggc

SEQ ID NO: 229186 - RNA, 32 nt, Human
ucagacucuggggcagagagggggauucucag

SEQ ID NO: 229187 - RNA, 32 nt, Human
ucagacucugugggcucugcguggccgggccu

SEQ ID NO: 229188 - RNA, 32 nt, Human
ucagacugaauaauuccugcugcagcaaggaa

SEQ ID NO: 229189 - RNA, 21 nt, Human
ucagacugaccugggagcccu

SEQ ID NO: 229190 - RNA, 32 nt, Human
ucagacugagcuuccugccugccuguaccccg

SEQ ID NO: 229191 - RNA, 32 nt, Human
ucagacuggacaacauauugaaaccucauguc

SEQ ID NO: 229192 - RNA, 32 nt, Human
ucagacugggugugugucuucccuggacauca

SEQ ID NO: 229193 - RNA, 31 nt, Human
ucagacuguaaugcuuucaugccaaguaaau

SEQ ID NO: 229194 - RNA, 32 nt, Human
ucagacuguuugagccuguugucuagaauauu

SEQ ID NO: 229195 - RNA, 32 nt, Human
ucagacuucagcacugcggucuugcccacucu

SEQ ID NO: 229196 - RNA, 32 nt, Human
ucagacuucaucuuuugaugggagaagaaaag

SEQ ID NO: 229197 - RNA, 32 nt, Human
ucagacuuccaaguagcugggauuacagacau

SEQ ID NO: 229198 - RNA, 32 nt, Human
ucagacuuccgaguggcugggauuacaggcgc

SEQ ID NO: 229199 - RNA, 32 nt, Human
ucagacuucuucagauuuuguccaacugauga

SEQ ID NO: 229200 - RNA, 32 nt, Human
ucagacuugcaggguaauccaaaaugaaguuu

SEQ ID NO: 229201 - RNA, 32 nt, Human
ucagacuuuaacauaugaauuucugggguggg

SEQ ID NO: 229202 - RNA, 32 nt, Human
ucagacuuugaggagggaagggggaagugaag

SEQ ID NO: 229203 - RNA, 32 nt, Human
ucagagaaaccagcugagucugucacuucuaa

SEQ ID NO: 229204 - RNA, 32 nt, Human
ucagagaacagcuauacaggcuggaggccucc

SEQ ID NO: 229205 - RNA, 32 nt, Human
ucagagaagcccaccuucccccucucuguccc

SEQ ID NO: 229206 - RNA, 32 nt, Human
ucagagaagcuggcaagagcugagggagugag

SEQ ID NO: 229207 - RNA, 32 nt, Human
ucagagaaggugcggcuggagauccugccugu

SEQ ID NO: 229208 - RNA, 32 nt, Human
ucagagaaguaaaggaaaagaaucucaaagug

SEQ ID NO: 229209 - RNA, 32 nt, Human
ucagagaagugcguuucaugcacagaaguuug

SEQ ID NO: 229210 - RNA, 32 nt, Human
ucagagaaguuaacuacuccaaagucauauag

SEQ ID NO: 229211 - RNA, 32 nt, Human
ucagagaauccuagagauacugaagauguucc

SEQ ID NO: 229212 - RNA, 32 nt, Human
ucagagaaugcacacuggacggaaaucuuaca

SEQ ID NO: 229213 - RNA, 32 nt, Human
ucagagaauucacacagacuuuacagcacauc

SEQ ID NO: 229214 - RNA, 32 nt, Human
ucagagacaagccaggcagacacuguccagag

SEQ ID NO: 229215 - RNA, 32 nt, Human
ucagagacacuguucagggccacggagaauuc

SEQ ID NO: 229216 - RNA, 32 nt, Human
ucagagacacuguucccugcucccaggguuag

SEQ ID NO: 229217 - RNA, 32 nt, Human
ucagagacauccuucaggauugugagcuggau

SEQ ID NO: 229218 - RNA, 32 nt, Human
ucagagaccacucauccucuggaaucaaccuc

SEQ ID NO: 229219 - RNA, 32 nt, Human
ucagagaccauguaguucaacuuuccacucaa

SEQ ID NO: 229220 - RNA, 32 nt, Human
ucagagacccaggaguugggagcuuucgcucc

SEQ ID NO: 229221 - RNA, 32 nt, Human
ucagagaccuugccaggcccaggcugggugcc

SEQ ID NO: 229222 - RNA, 32 nt, Human
ucagagacugucucgaucucuccacucaccgu

SEQ ID NO: 229223 - RNA, 22 nt, Human
ucagagacuucaaucuccuccc

SEQ ID NO: 229224 - RNA, 32 nt, Human
ucagagagaaacccaucaauugcucaaauacu

SEQ ID NO: 229225 - RNA, 32 nt, Human
ucagagagagugacccagcagaggugugacgg

SEQ ID NO: 229226 - RNA, 32 nt, Human
ucagagagauagggucucucuauguugcccua

SEQ ID NO: 229227 - RNA, 32 nt, Human
ucagagagcucuuugcaguguagugacacugg

SEQ ID NO: 229228 - RNA, 32 nt, Human
ucagagaggcuaggugacuuugccaaggcugc

SEQ ID NO: 229229 - RNA, 32 nt, Human
ucagagagggagcaggucuagagaagaaccag

SEQ ID NO: 229230 - RNA, 32 nt, Human
ucagagagggcauccaaaaaggccaacaguuc

SEQ ID NO: 229231 - RNA, 32 nt, Human
ucagagaggggcugccuggucuggggccugac

SEQ ID NO: 229232 - RNA, 32 nt, Human
ucagagagggguugacgaaggagaagcauuca

SEQ ID NO: 229233 - RNA, 32 nt, Human
ucagagagucacaggagggccuuaaaccccac

SEQ ID NO: 229234 - RNA, 32 nt, Human
ucagagagucuacagaacacgcacgacgacag

SEQ ID NO: 229235 - RNA, 32 nt, Human
ucagagagugugagcuacuggcccaagauuau

SEQ ID NO: 229236 - RNA, 32 nt, Human
ucagagaucagcaggcacuguacuggguagag

SEQ ID NO: 229237 - RNA, 32 nt, Human
ucagagaucaggagaaaagacauaagagaauu

SEQ ID NO: 229238 - RNA, 32 nt, Human
ucagagaucugauucaggaagccccagauggg

SEQ ID NO: 229239 - RNA, 32 nt, Human
ucagagaugcuguagcuccuuggggcaaaggu

SEQ ID NO: 229240 - RNA, 32 nt, Human
ucagagauggggaccaggcucagaguucuacc

SEQ ID NO: 229241 - RNA, 32 nt, Human
ucagagauguggucucgcuuuguugccuacac

SEQ ID NO: 229242 - RNA, 32 nt, Human
ucagagauugaggcugaaagaggauccaccau

SEQ ID NO: 229243 - RNA, 32 nt, Human
ucagagauuuggguaaaagaauggguaauguu

SEQ ID NO: 229244 - RNA, 32 nt, Human
ucagagauuuugaaggaauacuuccuaacuca

SEQ ID NO: 229245 - RNA, 32 nt, Human
ucagagcaauuaggaaggaaggagaacaggag

SEQ ID NO: 229246 - RNA, 32 nt, Human
ucagagcacaugcacacugucagggcuagccu

SEQ ID NO: 229247 - RNA, 32 nt, Human
ucagagcaccuugcagauucccaagaaacacc

SEQ ID NO: 229248 - RNA, 32 nt, Human
ucagagcacuggcucuccagccccaggaggag

SEQ ID NO: 229249 - RNA, 32 nt, Human
ucagagcagccccaggagguaagggcucuuuu

SEQ ID NO: 229250 - RNA, 32 nt, Human
ucagagcagcccugcagaacggggugggggcu

SEQ ID NO: 229251 - RNA, 32 nt, Human
ucagagcagccucuguccuggcugugcacauu

SEQ ID NO: 229252 - RNA, 32 nt, Human
ucagagcagcuucaacaccacagccauuucca

SEQ ID NO: 229253 - RNA, 32 nt, Human
ucagagcaggagaaguugcagcuuacugaucc

SEQ ID NO: 229254 - RNA, 32 nt, Human
ucagagcaggccagccaagcaggaagcacacu

SEQ ID NO: 229255 - RNA, 32 nt, Human
ucagagcagucagcagacgggagccagucuga

SEQ ID NO: 229256 - RNA, 32 nt, Human
ucagagcagugcagggggaggagaggagaaag

SEQ ID NO: 229257 - RNA, 32 nt, Human
ucagagcaguggagacuggagcccuguuugca

SEQ ID NO: 229258 - RNA, 32 nt, Human
ucagagcagugggucacgugaccugcgcacgg

SEQ ID NO: 229259 - RNA, 32 nt, Human
ucagagcaguuguaaguagaucugccaucuag

SEQ ID NO: 229260 - RNA, 32 nt, Human
ucagagcaucaugcuuugagguuuggggugcu

SEQ ID NO: 229261 - RNA, 27 nt, Human
ucagagcaucuacugggacuacaggug

SEQ ID NO: 229262 - RNA, 32 nt, Human
ucagagcaucugacugcccugccuuggaggag

SEQ ID NO: 229263 - RNA, 20 nt, Human
ucagagcaugcccccuccca

SEQ ID NO: 229264 - RNA, 32 nt, Human
ucagagcauugauccuggaaugugugcuggag

SEQ ID NO: 229265 - RNA, 19 nt, Human
ucagagccaaaagugccuu

SEQ ID NO: 229266 - RNA, 32 nt, Human
ucagagccaaccuggugggcuuggucuaucac

SEQ ID NO: 229267 - RNA, 32 nt, Human
ucagagccacuccgcuccauaucaguaucuca

SEQ ID NO: 229268 - RNA, 32 nt, Human
ucagagccacuuggugacagagccaggaugag

SEQ ID NO: 229269 - RNA, 32 nt, Human
ucagagccauggaggcaaguaccuuaauuagu

SEQ ID NO: 229270 - RNA, 32 nt, Human
ucagagccauuacccuuucaagccccugguca

SEQ ID NO: 229271 - RNA, 32 nt, Human
ucagagcccgggaggugaagcaaaugcggcag

SEQ ID NO: 229272 - RNA, 22 nt, Human
ucagagcccugaaucucuuccu

SEQ ID NO: 229273 - RNA, 32 nt, Human
ucagagcccugacuaaaacccagauccacagc

SEQ ID NO: 229274 - RNA, 32 nt, Human
ucagagccgagccgacagagagcagggaaccg

SEQ ID NO: 229275 - RNA, 32 nt, Human
ucagagccgcacagcaagcccaccacccugaa

SEQ ID NO: 229276 - RNA, 32 nt, Human
ucagagccuagccaccucccaccccacuucag

SEQ ID NO: 229277 - RNA, 32 nt, Human
ucagagccugcucuuccugaacccacucggca

SEQ ID NO: 229278 - RNA, 32 nt, Human
ucagagccuuggaguuuacagagcagaggcca

SEQ ID NO: 229279 - RNA, 23 nt, Human
ucagagccuuggcccucuuuccu

SEQ ID NO: 229280 - RNA, 32 nt, Human
ucagagcuaugggugcuacaggcuugucuuuc

SEQ ID NO: 229281 - RNA, 32 nt, Human
ucagagcucaagucugaacucuaccuccagac

SEQ ID NO: 229282 - RNA, 32 nt, Human
ucagagcucacugcagcuucaacaccccaggg

SEQ ID NO: 229283 - RNA, 32 nt, Human
ucagagcucacugcagcuucaaucuccuggcu

SEQ ID NO: 229284 - RNA, 32 nt, Human
ucagagcucacugcauccuugaccucccagac

SEQ ID NO: 229285 - RNA, 32 nt, Human
ucagagcucacuguaaccucaaaauccugggc

SEQ ID NO: 229286 - RNA, 32 nt, Human
ucagagcuccacaucugaccuucuagucauga

SEQ ID NO: 229287 - RNA, 32 nt, Human
ucagagcucugaguccucuacucaauacccau

SEQ ID NO: 229288 - RNA, 32 nt, Human
ucagagcugaccaacccgccaggccugcucaa

SEQ ID NO: 229289 - RNA, 32 nt, Human
ucagagcugcagcuacacagcugcccaguguc

SEQ ID NO: 229290 - RNA, 24 nt, Human
ucagagcugcuagagaccauccug

SEQ ID NO: 229291 - RNA, 32 nt, Human
ucagagcuggcaccccucagugcccccuuuug

SEQ ID NO: 229292 - RNA, 32 nt, Human
ucagagcuggggcagcugccucccaggggugg

SEQ ID NO: 229293 - RNA, 32 nt, Human
ucagagcugggucugccccaucaaagagcaag

SEQ ID NO: 229294 - RNA, 32 nt, Human
ucagagcuguaacagaucguggcagauucugc

SEQ ID NO: 229295 - RNA, 32 nt, Human
ucagagcuuaccagccccaccccaccauggua

SEQ ID NO: 229296 - RNA, 32 nt, Human
ucagaggaagaaggggaagaagaagaggagga

SEQ ID NO: 229297 - RNA, 32 nt, Human
ucagaggaagauggagaggagcuucggaccaa

SEQ ID NO: 229298 - RNA, 32 nt, Human
ucagaggacaacaaugaguaagccaucacaca

SEQ ID NO: 229299 - RNA, 23 nt, Human
ucagaggacagcagucuccuucc

SEQ ID NO: 229300 - RNA, 32 nt, Human
ucagaggagaacggcuguuccaccugccagca

SEQ ID NO: 229301 - RNA, 32 nt, Human
ucagaggagaagaaggucaguguuuggaggug

SEQ ID NO: 229302 - RNA, 32 nt, Human
ucagaggagagggaggaaggaucucaagagca

SEQ ID NO: 229303 - RNA, 32 nt, Human
ucagaggagaggggcaccagccgggggcccug

SEQ ID NO: 229304 - RNA, 32 nt, Human
ucagaggaggagaaaggccggagccagccgag

SEQ ID NO: 229305 - RNA, 32 nt, Human
ucagaggaggcagagauggggugguggcugag

SEQ ID NO: 229306 - RNA, 32 nt, Human
ucagaggaggccugagaagaagguccugggaa

SEQ ID NO: 229307 - RNA, 32 nt, Human
ucagaggaggccugagauuucgaaugggcagu

SEQ ID NO: 229308 - RNA, 32 nt, Human
ucagaggaggugagaggagaggaaggagaaaa

SEQ ID NO: 229309 - RNA, 32 nt, Human
ucagaggcaagaaaaacucuuuacagguuuuu

SEQ ID NO: 229310 - RNA, 32 nt, Human
ucagaggcaagucccugaugcaaggcaguagc

SEQ ID NO: 229311 - RNA, 32 nt, Human
ucagaggcaccaccccucaccccagcugccug

SEQ ID NO: 229312 - RNA, 32 nt, Human
ucagaggcagaaacacagcaauggaugcacag

SEQ ID NO: 229313 - RNA, 32 nt, Human
ucagaggcauaauuugcagccauuccauccua

SEQ ID NO: 229314 - RNA, 17 nt, Human
ucagaggccaccauggc

SEQ ID NO: 229315 - RNA, 32 nt, Human
ucagaggccagccugcauagccucuguccuca

SEQ ID NO: 229316 - RNA, 22 nt, Human
ucagaggccauagcaaaagcaa

SEQ ID NO: 229317 - RNA, 23 nt, Human
ucagaggccauaugucucagcaa

SEQ ID NO: 229318 - RNA, 23 nt, Human
ucagaggccauggauacugacaa

SEQ ID NO: 229319 - RNA, 32 nt, Human
ucagaggcccaggaaucggagcgaagcagaga

SEQ ID NO: 229320 - RNA, 32 nt, Human
ucagaggcccccaguggggacagggaggggga

SEQ ID NO: 229321 - RNA, 32 nt, Human
ucagaggcccggggaagggaagagcaggucag

SEQ ID NO: 229322 - RNA, 32 nt, Human
ucagaggcccugccaagucuagcauguuccug

SEQ ID NO: 229323 - RNA, 32 nt, Human
ucagaggcccugcugagguggggcaaugagca

SEQ ID NO: 229324 - RNA, 32 nt, Human
ucagaggcccuucucuggacaucuaaagguca

SEQ ID NO: 229325 - RNA, 32 nt, Human
ucagaggccgcuccuaggcuccucggaggagg

SEQ ID NO: 229326 - RNA, 32 nt, Human
ucagaggccucugcuucucucuugcuccuaga

SEQ ID NO: 229327 - RNA, 32 nt, Human
ucagaggccugacaccucaggcugccaaaugu

SEQ ID NO: 229328 - RNA, 32 nt, Human
ucagaggccugcugccagugcagccacuggcu

SEQ ID NO: 229329 - RNA, 21 nt, Human
ucagaggcuggagugcaaugg

SEQ ID NO: 229330 - RNA, 32 nt, Human
ucagaggcuuacauucagauuuggaagaggcg

SEQ ID NO: 229331 - RNA, 32 nt, Human
ucagaggcuucugggaacccaggcugggccug

SEQ ID NO: 229332 - RNA, 32 nt, Human
ucagaggcuugugauuaacuguggcggcagac

SEQ ID NO: 229333 - RNA, 32 nt, Human
ucagaggcuuugcccgaauugcuucguccugu

SEQ ID NO: 229334 - RNA, 32 nt, Human
ucagagggaccagcccagguggggcaggcaga

SEQ ID NO: 229335 - RNA, 32 nt, Human
ucagagggacugucagcugagcuugagcuccc

SEQ ID NO: 229336 - RNA, 32 nt, Human
ucagagggagagaggcuggagaccugggcugg

SEQ ID NO: 229337 - RNA, 32 nt, Human
ucagagggaucacgaccucagcagagccagga

SEQ ID NO: 229338 - RNA, 32 nt, Human
ucagagggauccucccacacacccagcagaga

SEQ ID NO: 229339 - RNA, 32 nt, Human
ucagagggcaacaggaagaugcaggccuucaa

SEQ ID NO: 229340 - RNA, 31 nt, Human
ucagagggcaccaaggaggguggcagagccu

SEQ ID NO: 229341 - RNA, 32 nt, Human
ucagagggcaggcugagccagggagcaaaaag

SEQ ID NO: 229342 - RNA, 32 nt, Human
ucagagggcugcccuccagaggcugcacccag

SEQ ID NO: 229343 - RNA, 32 nt, Human
ucagagggcuuaaauaaauuacucuaggucuu

SEQ ID NO: 229344 - RNA, 32 nt, Human
ucagagggcuucaagcaaaacaaacagccuuu

SEQ ID NO: 229345 - RNA, 32 nt, Human
ucagaggggaaaaugcaauccgggagguguuu

SEQ ID NO: 229346 - RNA, 32 nt, Human
ucagaggggccuggggccugugucugagaccc

SEQ ID NO: 229347 - RNA, 32 nt, Human
ucagagggggaugucaacaacagaucaagccg

SEQ ID NO: 229348 - RNA, 32 nt, Human
ucagagggguuuuucauuuacuuuugaaaaga

SEQ ID NO: 229349 - RNA, 32 nt, Human
ucagaggguacuuggcaucaccggugcacagc

SEQ ID NO: 229350 - RNA, 32 nt, Human
ucagaggguagguggagagugaagccaagccc

SEQ ID NO: 229351 - RNA, 32 nt, Human
ucagagggucuggggcaccagguggagaccau

SEQ ID NO: 229352 - RNA, 32 nt, Human
ucagagggugggaucuggcagcucggggaagu

SEQ ID NO: 229353 - RNA, 32 nt, Human
ucagagggugggggaacaaaccccuaugcacu

SEQ ID NO: 229354 - RNA, 32 nt, Human
ucagagggugguaggaggugaagaggaacaag

SEQ ID NO: 229355 - RNA, 32 nt, Human
ucagagguagagaagacagggauugggaagug

SEQ ID NO: 229356 - RNA, 32 nt, Human
ucagagguaggagaagucucuaggggucagga

SEQ ID NO: 229357 - RNA, 32 nt, Human
ucagagguauugugagguuacugugaugauua

SEQ ID NO: 229358 - RNA, 32 nt, Human
ucagaggucaccaaguucagucgucccaaaac

SEQ ID NO: 229359 - RNA, 32 nt, Human
ucagaggucacucagggucaauacucaggguc

SEQ ID NO: 229360 - RNA, 32 nt, Human
ucagaggucagcagugucugugguguaggaug

SEQ ID NO: 229361 - RNA, 32 nt, Human
ucagaggucgugaacggcugaggcagacgcag

SEQ ID NO: 229362 - RNA, 32 nt, Human
ucagagguucuccugccuggaaucaagugaug

SEQ ID NO: 229363 - RNA, 32 nt, Human
ucagaguaaaccugaggcauuuggggacaagu

SEQ ID NO: 229364 - RNA, 32 nt, Human
ucagaguaaauucuucuauacaguuauaucua

SEQ ID NO: 229365 - RNA, 32 nt, Human
ucagaguaauggaccagcaaugcugaagacgc

SEQ ID NO: 229366 - RNA, 22 nt, Human
ucagaguagcugggacuacagg

SEQ ID NO: 229367 - RNA, 32 nt, Human
ucagaguaggacugcaucaccaggcaaauacc

SEQ ID NO: 229368 - RNA, 32 nt, Human
ucagagucaaggaggcaggaugaauuuaaauu

SEQ ID NO: 229369 - RNA, 32 nt, Human
ucagagucagggacacagcagcguccggcgag

SEQ ID NO: 229370 - RNA, 21 nt, Human
ucagagucaucucgcccuucc

SEQ ID NO: 229371 - RNA, 32 nt, Human
ucagagucauugaaggguguucacccauccca

SEQ ID NO: 229372 - RNA, 21 nt, Human
ucagaguccccaguccugccu

SEQ ID NO: 229373 - RNA, 22 nt, Human
ucagaguccgacucucccaccu

SEQ ID NO: 229374 - RNA, 32 nt, Human
ucagaguccuacagugguagacuggucuucug

SEQ ID NO: 229375 - RNA, 32 nt, Human
ucagagucgcgggcugcgcccugggcagaggc

SEQ ID NO: 229376 - RNA, 32 nt, Human
ucagagucuaucuccucugucacuucuccccc

SEQ ID NO: 229377 - RNA, 19 nt, Human
ucagagucuccagccuacc

SEQ ID NO: 229378 - RNA, 32 nt, Human
ucagagucugaaugccuccagucugcguggaa

SEQ ID NO: 229379 - RNA, 21 nt, Human
ucagagucuguccccgcuccu

SEQ ID NO: 229380 - RNA, 32 nt, Human
ucagagucuucuccucucucugaucucugugc

SEQ ID NO: 229381 - RNA, 32 nt, Human
ucagagugagcagcagcagcugaccagauugg

SEQ ID NO: 229382 - RNA, 25 nt, Human
ucagagugcaagcugggagcacagg

SEQ ID NO: 229383 - RNA, 32 nt, Human
ucagagugcaagcugggagcacaggcacugca

SEQ ID NO: 229384 - RNA, 31 nt, Human
ucagagugcccgucagggccugugcauccgc

SEQ ID NO: 229385 - RNA, 21 nt, Human
ucagagugcugggaucacagg

SEQ ID NO: 229386 - RNA, 24 nt, Human
ucagagugcugggaucacaggcgu

SEQ ID NO: 229387 - RNA, 32 nt, Human
ucagagugggagacagagagacaagugugcuc

SEQ ID NO: 229388 - RNA, 32 nt, Human
ucagagugggaggcagagagagaagugugcuc

SEQ ID NO: 229389 - RNA, 32 nt, Human
ucagaguggggaggggacagccuggggcugcc

SEQ ID NO: 229390 - RNA, 32 nt, Human
ucagagugggggagagaaaugagcaauccugg

SEQ ID NO: 229391 - RNA, 32 nt, Human
ucagagugugguuccuggaccagcaacaucag

SEQ ID NO: 229392 - RNA, 32 nt, Human
ucagaguuaguguucuggaaggaaagcagcag

SEQ ID NO: 229393 - RNA, 24 nt, Human
ucagaguucuagaauuacaggcau

SEQ ID NO: 229394 - RNA, 32 nt, Human
ucagaguucucugcuccuguuggcaaaucgca

SEQ ID NO: 229395 - RNA, 22 nt, Human
ucagaguugaauaucucuuucc

SEQ ID NO: 229396 - RNA, 32 nt, Human
ucagaguugcaaccucagccucgcuauggcuc

SEQ ID NO: 229397 - RNA, 32 nt, Human
ucagaguugggaggggcucugagcaguguugg

SEQ ID NO: 229398 - RNA, 32 nt, Human
ucagaguuuuaauaaaggugugaggaggcugg

SEQ ID NO: 229399 - RNA, 32 nt, Human
ucagaguuuuccauuggcagugccaguuucua

SEQ ID NO: 229400 - RNA, 32 nt, Human
ucagauaaaaccuacaaagauccugugaauua

SEQ ID NO: 229401 - RNA, 32 nt, Human
ucagauaacacuguaauccaccuccagguuuc

SEQ ID NO: 229402 - RNA, 32 nt, Human
ucagauaagguaaaaugccaugaugccucugu

SEQ ID NO: 229403 - RNA, 32 nt, Human
ucagauaauacagcucaucauaccucaggaaa

SEQ ID NO: 229404 - RNA, 32 nt, Human
ucagauacagucagauggagugccuugguuuu

SEQ ID NO: 229405 - RNA, 32 nt, Human
ucagauaccuuaaaucaucucugucaaguuca

SEQ ID NO: 229406 - RNA, 32 nt, Human
ucagauagaucauuguuagauauuucacauuu

SEQ ID NO: 229407 - RNA, 32 nt, Human
ucagauagauuuuucucccagcauguucuacu

SEQ ID NO: 229408 - RNA, 32 nt, Human
ucagauagcuggacccacccccagcauuucug

SEQ ID NO: 229409 - RNA, 32 nt, Human
ucagauagggaaagaaaguugauuggaauggc

SEQ ID NO: 229410 - RNA, 32 nt, Human
ucagauagugccacugcacuccagccugggug

SEQ ID NO: 229411 - RNA, 32 nt, Human
ucagauaguguugccaucaagaaagcaugcaa

SEQ ID NO: 229412 - RNA, 32 nt, Human
ucagauauagaaggcuggagcacaguguaaac

SEQ ID NO: 229413 - RNA, 32 nt, Human
ucagauauauaagcagauaagcacagauuauu

SEQ ID NO: 229414 - RNA, 32 nt, Human
ucagauaucagcucugcuauuuucuaacugaa

SEQ ID NO: 229415 - RNA, 32 nt, Human
ucagauaucugcaacuggggaugauaucugga

SEQ ID NO: 229416 - RNA, 32 nt, Human
ucagauauguuaaguaauaaaaaguuaaugug

SEQ ID NO: 229417 - RNA, 32 nt, Human
ucagauauuucauguaaugucauugcagaagc

SEQ ID NO: 229418 - RNA, 32 nt, Human
ucagaucaccuuugguaaacuggaccucagga

SEQ ID NO: 229419 - RNA, 32 nt, Human
ucagaucacugcaaccuccaccucccagguuc

SEQ ID NO: 229420 - RNA, 32 nt, Human
ucagaucacugcaaccuccgccuccuggguuc

SEQ ID NO: 229421 - RNA, 32 nt, Human
ucagaucacugcaaccucugccucccggguuc

SEQ ID NO: 229422 - RNA, 32 nt, Human
ucagaucacuguggccacacuuugcugaaaga

SEQ ID NO: 229423 - RNA, 32 nt, Human
ucagaucaguggcaaucucaguccccuggcua

SEQ ID NO: 229424 - RNA, 32 nt, Human
ucagauccaagauccaauuggucaccaauucg

SEQ ID NO: 229425 - RNA, 32 nt, Human
ucagauccaugccaccaaacaucucccaccga

SEQ ID NO: 229426 - RNA, 32 nt, Human
ucagauccgaggugccuccugcagugaccccu

SEQ ID NO: 229427 - RNA, 32 nt, Human
ucagauccgauuuuggaccccuccgagugaga

SEQ ID NO: 229428 - RNA, 32 nt, Human
ucagauccuccucuuugggaguccagugucuu

SEQ ID NO: 229429 - RNA, 32 nt, Human
ucagauccugaacaagagagaacaaaaucucu

SEQ ID NO: 229430 - RNA, 32 nt, Human
ucagaucgagucuugcucugucacccgggcug

SEQ ID NO: 229431 - RNA, 32 nt, Human
ucagaucgugccacugcacuccagccugggug

SEQ ID NO: 229432 - RNA, 32 nt, Human
ucagaucucaccauugcacuccagccugggcg

SEQ ID NO: 229433 - RNA, 32 nt, Human
ucagaucucaggcuugucccccugucagcugc

SEQ ID NO: 229434 - RNA, 32 nt, Human
ucagaucucccauccagggcaaggacagacua

SEQ ID NO: 229435 - RNA, 32 nt, Human
ucagaucucuccccgucucccucccaacuuau

SEQ ID NO: 229436 - RNA, 32 nt, Human
ucagaucugcuccccagcaucuucuguuuccu

SEQ ID NO: 229437 - RNA, 32 nt, Human
ucagaucuugaccaagaaaccccagcgauuuc

SEQ ID NO: 229438 - RNA, 32 nt, Human
ucagaucuugggauuggcccaaggucacagag

SEQ ID NO: 229439 - RNA, 32 nt, Human
ucagaucuuuagccuagacagagugucgcugg

SEQ ID NO: 229440 - RNA, 32 nt, Human
ucagaugaacagagacuucuggaguugauuug

SEQ ID NO: 229441 - RNA, 32 nt, Human
ucagaugaagaaauugagucuugaagaacuug

SEQ ID NO: 229442 - RNA, 21 nt, Human
ucagaugaagucagggauaga

SEQ ID NO: 229443 - RNA, 32 nt, Human
ucagaugaagucagggauagaagacccuugga

SEQ ID NO: 229444 - RNA, 32 nt, Human
ucagaugacagcaugcaggcaccaagagagug

SEQ ID NO: 229445 - RNA, 32 nt, Human
ucagaugagaauggagucugaauggccuuccu

SEQ ID NO: 229446 - RNA, 24 nt, Human
ucagaugaggaggcuucuaucuug

SEQ ID NO: 229447 - RNA, 32 nt, Human
ucagaugaucagcucuguaucugguuaagucg

SEQ ID NO: 229448 - RNA, 24 nt, Human
ucagaugaugccagcugucuccca

SEQ ID NO: 229449 - RNA, 31 nt, Human
ucagaugcaaacuucaucacagcagggauuu

SEQ ID NO: 229450 - RNA, 32 nt, Human
ucagaugcagugagaccuggccuuccuguugu

SEQ ID NO: 229451 - RNA, 32 nt, Human
ucagaugcauuugcacaggacuuggauccuga

SEQ ID NO: 229452 - RNA, 32 nt, Human
ucagaugccccugagaccacccagaaaucaag

SEQ ID NO: 229453 - RNA, 29 nt, Human
ucagaugccggccucagagcucaaggcuu

SEQ ID NO: 229454 - RNA, 32 nt, Human
ucagaugccuauuaaaagaggaaugguuuaaa

SEQ ID NO: 229455 - RNA, 32 nt, Human
ucagaugccugaggagcucccagucucaaagg

SEQ ID NO: 229456 - RNA, 32 nt, Human
ucagaugccugggaagcccagccccucaggug

SEQ ID NO: 229457 - RNA, 32 nt, Human
ucagaugccuguagucccagcuacuugugagg

SEQ ID NO: 229458 - RNA, 32 nt, Human
ucagaugcuaucugccgcugcuguuugguggg

SEQ ID NO: 229459 - RNA, 32 nt, Human
ucagaugcucagcucgguccccuccgccugac

SEQ ID NO: 229460 - RNA, 32 nt, Human
ucagauggaagcucuguggccuuuccuaacuc

SEQ ID NO: 229461 - RNA, 32 nt, Human
ucagauggccacggugagggcuuggaaggaga

SEQ ID NO: 229462 - RNA, 22 nt, Human
ucagauggcccagggccacaca

SEQ ID NO: 229463 - RNA, 32 nt, Human
ucagauggcccagggccacacagggaaggagu

SEQ ID NO: 229464 - RNA, 32 nt, Human
ucagauggccugagccucccgaggcuugcugc

SEQ ID NO: 229465 - RNA, 32 nt, Human
ucagauggccugggugcuauguggagcaggug

SEQ ID NO: 229466 - RNA, 32 nt, Human
ucagauggcugaggcaggagaacuacuugaac

SEQ ID NO: 229467 - RNA, 23 nt, Human
ucagauggcugugacuacaggug

SEQ ID NO: 229468 - RNA, 32 nt, Human
ucagauggcuugucaguaucugcucugaggaa

SEQ ID NO: 229469 - RNA, 32 nt, Human
ucagaugggagagagccagagagaggagugag

SEQ ID NO: 229470 - RNA, 32 nt, Human
ucagauggggccugggcuguugugucuggagc

SEQ ID NO: 229471 - RNA, 32 nt, Human
ucagauggugccacugcacuccagccugggug

SEQ ID NO: 229472 - RNA, 32 nt, Human
ucagauggugcuggugacuuucuguuccuuuu

SEQ ID NO: 229473 - RNA, 32 nt, Human
ucagauggugcuguguccugugucacgucacc

SEQ ID NO: 229474 - RNA, 32 nt, Human
ucagauggugugccaguccaggaguugucaga

SEQ ID NO: 229475 - RNA, 22 nt, Human
ucagauguagcauuaggaccuu

SEQ ID NO: 229476 - RNA, 29 nt, Human
ucagaugucauguaauccuuccuuuggug

SEQ ID NO: 229477 - RNA, 32 nt, Human
ucagaugucuucaugucgguaauuauagaacu

SEQ ID NO: 229478 - RNA, 32 nt, Human
ucagaugugugaaggcaaaaagguuuccuggc

SEQ ID NO: 229479 - RNA, 22 nt, Human
ucagauguucuccuauuucugg

SEQ ID NO: 229480 - RNA, 21 nt, Human
ucagauguuuucuguuucugg

SEQ ID NO: 229481 - RNA, 22 nt, Human
ucagauuaaucauuucggcaga

SEQ ID NO: 229482 - RNA, 32 nt, Human
ucagauuauuacagaagaagaggcauugaaga

SEQ ID NO: 229483 - RNA, 32 nt, Human
ucagauucaacagggggaagaaaauggagauu

SEQ ID NO: 229484 - RNA, 32 nt, Human
ucagauucaagcaauucuccugccucagccuc

SEQ ID NO: 229485 - RNA, 32 nt, Human
ucagauucacacaggagcauuugcuuacaaau

SEQ ID NO: 229486 - RNA, 32 nt, Human
ucagauucacugcagcucuccucuuaauaugu

SEQ ID NO: 229487 - RNA, 32 nt, Human
ucagauucaggaccgggccccuuguuccgagu

SEQ ID NO: 229488 - RNA, 20 nt, Human
ucagauucagguuuugaaau

SEQ ID NO: 229489 - RNA, 32 nt, Human
ucagauuccacuacacuuucuuccucauaggu

SEQ ID NO: 229490 - RNA, 32 nt, Human
ucagauuccaggcuggagugugauucuguggg

SEQ ID NO: 229491 - RNA, 32 nt, Human
ucagauucccgaguagcugggauuacagaugu

SEQ ID NO: 229492 - RNA, 32 nt, Human
ucagauucuccuggaauucuucucccucagga

SEQ ID NO: 229493 - RNA, 23 nt, Human
ucagauucucugaaaacauuuuu

SEQ ID NO: 229494 - RNA, 32 nt, Human
ucagauugaggagguaccgaaagggaaggagc

SEQ ID NO: 229495 - RNA, 32 nt, Human
ucagauugcaccacugcacuccagccugggca

SEQ ID NO: 229496 - RNA, 32 nt, Human
ucagauugcaccauugcacuccagccugcgca

SEQ ID NO: 229497 - RNA, 32 nt, Human
ucagauugcgucacugcacuccaaccugggug

SEQ ID NO: 229498 - RNA, 32 nt, Human
ucagauuggcugcuuuagcuccauaguucucu

SEQ ID NO: 229499 - RNA, 32 nt, Human
ucagauugguaaauaaugacaccugguggaua

SEQ ID NO: 229500 - RNA, 32 nt, Human
ucagauugugcaaguuugaacgcuuguuuccc

SEQ ID NO: 229501 - RNA, 32 nt, Human
ucagauuuaauuagcaucagaguugauuuuau

SEQ ID NO: 229502 - RNA, 32 nt, Human
ucagauuuacagaguagcauuugcauucuucu

SEQ ID NO: 229503 - RNA, 22 nt, Human
ucagauuuaguacuuguaaaua

SEQ ID NO: 229504 - RNA, 32 nt, Human
ucagauuuaguucaauaagaacagugaaacuu

SEQ ID NO: 229505 - RNA, 32 nt, Human
ucagauuuaucugaaugcugagaagaugaugu

SEQ ID NO: 229506 - RNA, 32 nt, Human
ucagauuucauagaaaggagcaaccaaaaugu

SEQ ID NO: 229507 - RNA, 32 nt, Human
ucagauuugcugcacucauuguggacuucaug

SEQ ID NO: 229508 - RNA, 32 nt, Human
ucagauuuucaaggccuuaacaaaguuaaagg

SEQ ID NO: 229509 - RNA, 32 nt, Human
ucagauuuugcuggauucugauucaggaggag

SEQ ID NO: 229510 - RNA, 32 nt, Human
ucagauuuuguuugaaguuaacaugccugaca

SEQ ID NO: 229511 - RNA, 32 nt, Human
ucagcaaacagcacaaucucacccucacagga

SEQ ID NO: 229512 - RNA, 32 nt, Human
ucagcaaagagugggccgcuguguuuggagac

SEQ ID NO: 229513 - RNA, 32 nt, Human
ucagcaaagccuugcucucuggagcuuacuau

SEQ ID NO: 229514 - RNA, 32 nt, Human
ucagcaaagcuacaggacugguacucaagcca

SEQ ID NO: 229515 - RNA, 32 nt, Human
ucagcaaaggggacacccaugaggcuucggcc

SEQ ID NO: 229516 - RNA, 32 nt, Human
ucagcaaauuccagauuuguuuccuuuuggcc

SEQ ID NO: 229517 - RNA, 32 nt, Human
ucagcaaauuucauacuaguugcucaggacug

SEQ ID NO: 229518 - RNA, 32 nt, Human
ucagcaacacagugaaaccccgucucuacuaa

SEQ ID NO: 229519 - RNA, 32 nt, Human
ucagcaacaccccgggcuguuucacaagcaag

SEQ ID NO: 229520 - RNA, 32 nt, Human
ucagcaacugauucacugaucagauuacaggc

SEQ ID NO: 229521 - RNA, 32 nt, Human
ucagcaagaccacccaccccuucuaguaccag

SEQ ID NO: 229522 - RNA, 32 nt, Human
ucagcaagagcaccccaucuucagguggcggc

SEQ ID NO: 229523 - RNA, 32 nt, Human
ucagcaagaggaagccgggaaugggagauggc

SEQ ID NO: 229524 - RNA, 32 nt, Human
ucagcaagcuacagcaaagcccauuggccaga

SEQ ID NO: 229525 - RNA, 32 nt, Human
ucagcaaggaauugucucccagugcauuuugc

SEQ ID NO: 229526 - RNA, 32 nt, Human
ucagcaaggauaugaugagauuuugcucacag

SEQ ID NO: 229527 - RNA, 32 nt, Human
ucagcaaggcuuucauauccuugcuguggguc

SEQ ID NO: 229528 - RNA, 32 nt, Human
ucagcaagggaugggccucucugccucgccca

SEQ ID NO: 229529 - RNA, 32 nt, Human
ucagcaaggucacaggcuagaucaauauacag

SEQ ID NO: 229530 - RNA, 32 nt, Human
ucagcaauagcagagacagagggaagguaucu

SEQ ID NO: 229531 - RNA, 32 nt, Human
ucagcaauguugccuggcaacagggaaggggc

SEQ ID NO: 229532 - RNA, 19 nt, Human
ucagcaauuaaaauguuaa

SEQ ID NO: 229533 - RNA, 18 nt, Human
ucagcaauucugauucug

SEQ ID NO: 229534 - RNA, 32 nt, Human
ucagcaauuucaucucuugaacacugacucac

SEQ ID NO: 229535 - RNA, 32 nt, Human
ucagcacaaaccguaaacagcaggugcucggg

SEQ ID NO: 229536 - RNA, 32 nt, Human
ucagcacaaaccuuucaaguauguuguuucuu

SEQ ID NO: 229537 - RNA, 32 nt, Human
ucagcacaaaggaggcuuuuucugugcuuuga

SEQ ID NO: 229538 - RNA, 32 nt, Human
ucagcacaacacagcugggcgccacugggauu

SEQ ID NO: 229539 - RNA, 32 nt, Human
ucagcacacagcuguauccugguagauuauaa

SEQ ID NO: 229540 - RNA, 32 nt, Human
ucagcacacaggcugguaguguugggcacccc

SEQ ID NO: 229541 - RNA, 32 nt, Human
ucagcacagagcagugcccuggcuguguccug

SEQ ID NO: 229542 - RNA, 18 nt, Human
ucagcacagcaguggaga

SEQ ID NO: 229543 - RNA, 32 nt, Human
ucagcacaggaaguacccacauggacagaggg

SEQ ID NO: 229544 - RNA, 32 nt, Human
ucagcacagggagaauguugacuuagaagcaa

SEQ ID NO: 229545 - RNA, 24 nt, Human
ucagcacaguccagggaucuuuug

SEQ ID NO: 229546 - RNA, 32 nt, Human
ucagcaccaaaccaaaccauucuuauuuaaac

SEQ ID NO: 229547 - RNA, 32 nt, Human
ucagcaccaagggcccccgacacuccacuccu

SEQ ID NO: 229548 - RNA, 32 nt, Human
ucagcaccaaguaacaccacacacacgcagca

SEQ ID NO: 229549 - RNA, 19 nt, Human
ucagcaccacccccuccca

SEQ ID NO: 229550 - RNA, 32 nt, Human
ucagcaccagacgucugugcugccugguuugc

SEQ ID NO: 229551 - RNA, 22 nt, Human
ucagcaccaggaagucauccug

SEQ ID NO: 229552 - RNA, 32 nt, Human
ucagcaccauggcugcucauacccugccucga

SEQ ID NO: 229553 - RNA, 32 nt, Human
ucagcaccaugugagagcuccuuugauuggaa

SEQ ID NO: 229554 - RNA, 32 nt, Human
ucagcacccaggacaguggugucuguuaaggc

SEQ ID NO: 229555 - RNA, 32 nt, Human
ucagcacccaggacggagaggagcagagaagc

SEQ ID NO: 229556 - RNA, 32 nt, Human
ucagcacccauggggaccaggagacuuuaaag

SEQ ID NO: 229557 - RNA, 30 nt, Human
ucagcacccgccacagcagccagccauggg

SEQ ID NO: 229558 - RNA, 32 nt, Human
ucagcacccgccacagcagccagccauggggu

SEQ ID NO: 229559 - RNA, 32 nt, Human
ucagcacccucccaggcgcuccuggagccagg

SEQ ID NO: 229560 - RNA, 32 nt, Human
ucagcaccuccagguugguucuggguguccug

SEQ ID NO: 229561 - RNA, 32 nt, Human
ucagcaccugagcgugcugagcuccagguaua

SEQ ID NO: 229562 - RNA, 32 nt, Human
ucagcaccugagucacagcccaggugcccgga

SEQ ID NO: 229563 - RNA, 32 nt, Human
ucagcaccuggaaguggagugcaggcugcagc

SEQ ID NO: 229564 - RNA, 22 nt, Human
ucagcaccuucaauucaacaga

SEQ ID NO: 229565 - RNA, 32 nt, Human
ucagcacgcucacuaacccagcaugccacuuc

SEQ ID NO: 229566 - RNA, 32 nt, Human
ucagcacgugagccuucaccgccugcuucauu

SEQ ID NO: 229567 - RNA, 32 nt, Human
ucagcacuagagggagggagggggagggagga

SEQ ID NO: 229568 - RNA, 15 nt, Human
ucagcacucaccucu

SEQ ID NO: 229569 - RNA, 32 nt, Human
ucagcacucauuucagaaaucugauuauaaca

SEQ ID NO: 229570 - RNA, 32 nt, Human
ucagcacucauuucagaaaucugauuauaaua

SEQ ID NO: 229571 - RNA, 19 nt, Human
ucagcacucuguaagaugg

SEQ ID NO: 229572 - RNA, 32 nt, Human
ucagcacucuucucucuccaucucuccuuccu

SEQ ID NO: 229573 - RNA, 32 nt, Human
ucagcacucuugcccuuugaggguggggccaa

SEQ ID NO: 229574 - RNA, 28 nt, Human
ucagcacugaguacugccucaucugcug

SEQ ID NO: 229575 - RNA, 21 nt, Human
ucagcacugcccccucucuga

SEQ ID NO: 229576 - RNA, 32 nt, Human
ucagcacugggguggaggcggcaggaaggggc

SEQ ID NO: 229577 - RNA, 32 nt, Human
ucagcacuguccugcugcuccccaccagcacg

SEQ ID NO: 229578 - RNA, 32 nt, Human
ucagcacugucgucuucuuggagggcaaacuu

SEQ ID NO: 229579 - RNA, 32 nt, Human
ucagcacugugccaguggaagcagguguauug

SEQ ID NO: 229580 - RNA, 32 nt, Human
ucagcacuuacugcuaucaccuauuacuuuua

SEQ ID NO: 229581 - RNA, 32 nt, Human
ucagcacuuucgggggcagagcuggcccagca

SEQ ID NO: 229582 - RNA, 32 nt, Human
ucagcagaaaccuugcucugaagaccagagac

SEQ ID NO: 229583 - RNA, 32 nt, Human
ucagcagaaagagacccugagaucuucgccug

SEQ ID NO: 229584 - RNA, 25 nt, Human
ucagcagaaucaggcucagguucug

SEQ ID NO: 229585 - RNA, 32 nt, Human
ucagcagaaucaucuuaaaaccugccaaacuu

SEQ ID NO: 229586 - RNA, 18 nt, Human
ucagcagaccaccccggc

SEQ ID NO: 229587 - RNA, 32 nt, Human
ucagcagacgcuucccuucccuuccccuaggg

SEQ ID NO: 229588 - RNA, 32 nt, Human
ucagcagagaugcggugcauccugaucuuggg

SEQ ID NO: 229589 - RNA, 32 nt, Human
ucagcagagauggugccccggccuggauccuc

SEQ ID NO: 229590 - RNA, 32 nt, Human
ucagcagagcagcagcccugcugcugaaggcc

SEQ ID NO: 229591 - RNA, 32 nt, Human
ucagcagaggagagcauuugauaacuaagagg

SEQ ID NO: 229592 - RNA, 22 nt, Human
ucagcagagucauuucauucug

SEQ ID NO: 229593 - RNA, 32 nt, Human
ucagcagagucuucuugugcugccuuugggcu

SEQ ID NO: 229594 - RNA, 32 nt, Human
ucagcagaguggcgccugccugugcuggccca

SEQ ID NO: 229595 - RNA, 32 nt, Human
ucagcagauccggaagcugaucaaagaugggc

SEQ ID NO: 229596 - RNA, 32 nt, Human
ucagcagcaaagagaagagcauuggggcugga

SEQ ID NO: 229597 - RNA, 32 nt, Human
ucagcagcagaggcuccuggccuucuucaagu

SEQ ID NO: 229598 - RNA, 32 nt, Human
ucagcagcagcccaaaagguucuccuucuuca

SEQ ID NO: 229599 - RNA, 32 nt, Human
ucagcagcagcccagauuuaggggacauuuga

SEQ ID NO: 229600 - RNA, 32 nt, Human
ucagcagcaucuccaccugccaucucacccuc

SEQ ID NO: 229601 - RNA, 32 nt, Human
ucagcagccacaggccuuccaggagcuguuau

SEQ ID NO: 229602 - RNA, 32 nt, Human
ucagcagcccaccucugagucucagcuuugcu

SEQ ID NO: 229603 - RNA, 32 nt, Human
ucagcagcccagugaguguccucugcaccggg

SEQ ID NO: 229604 - RNA, 23 nt, Human
ucagcagcccccuccccccggcc

SEQ ID NO: 229605 - RNA, 22 nt, Human
ucagcagcccuggagcaggcca

SEQ ID NO: 229606 - RNA, 32 nt, Human
ucagcagcccuggcagaacugaagagcggcac

SEQ ID NO: 229607 - RNA, 32 nt, Human
ucagcagccgcaucugcuaccugauuuuaucc

SEQ ID NO: 229608 - RNA, 32 nt, Human
ucagcagccucuuccuccuccaggacccagaa

SEQ ID NO: 229609 - RNA, 32 nt, Human
ucagcagcgcuggugggcucuuuguccuggug

SEQ ID NO: 229610 - RNA, 32 nt, Human
ucagcagcugaccugugagaaggaggcgcugu

SEQ ID NO: 229611 - RNA, 32 nt, Human
ucagcagcugagccuaggucugugcuguaaau

SEQ ID NO: 229612 - RNA, 32 nt, Human
ucagcagcugguaaucuugcucugcuugacaa

SEQ ID NO: 229613 - RNA, 32 nt, Human
ucagcagcugugguggggaaacauuucuccug

SEQ ID NO: 229614 - RNA, 32 nt, Human
ucagcagcuuggaagaaaucccagaagcggac

SEQ ID NO: 229615 - RNA, 32 nt, Human
ucagcaggaaaaagaucacaagccugccacga

SEQ ID NO: 229616 - RNA, 32 nt, Human
ucagcaggaagugaacaggcucagggaacugg

SEQ ID NO: 229617 - RNA, 32 nt, Human
ucagcaggagagaggcccagaggcuccagcug

SEQ ID NO: 229618 - RNA, 32 nt, Human
ucagcaggagcagcagcagggauguauagaaa

SEQ ID NO: 229619 - RNA, 32 nt, Human
ucagcaggaguaauaaauuuacucacagcacu

SEQ ID NO: 229620 - RNA, 32 nt, Human
ucagcaggaugugugagccaggaucccucuuu

SEQ ID NO: 229621 - RNA, 32 nt, Human
ucagcaggcuccuggguaaagagggugggagg

SEQ ID NO: 229622 - RNA, 32 nt, Human
ucagcagggcaggccagggaucuggacaaugg

SEQ ID NO: 229623 - RNA, 32 nt, Human
ucagcagggcugugcuuggcucacaggaauag

SEQ ID NO: 229624 - RNA, 32 nt, Human
ucagcagggucccagcccacggccacacaugc

SEQ ID NO: 229625 - RNA, 32 nt, Human
ucagcagggucugcccacucccuacgcuggcc

SEQ ID NO: 229626 - RNA, 20 nt, Human
ucagcaggguggagugcagu

SEQ ID NO: 229627 - RNA, 32 nt, Human
ucagcagguccagcuccugccucccaguggcc

SEQ ID NO: 229628 - RNA, 32 nt, Human
ucagcagguccucccaccccauguggaacuca

SEQ ID NO: 229629 - RNA, 32 nt, Human
ucagcaggugugaucaggggcucagagccagg

SEQ ID NO: 229630 - RNA, 32 nt, Human
ucagcagguuaaagaugguugcagcuggaggg

SEQ ID NO: 229631 - RNA, 32 nt, Human
ucagcagguuccagugccugacuugggauagg

SEQ ID NO: 229632 - RNA, 32 nt, Human
ucagcagguuucucuccugcagccaggugaag

SEQ ID NO: 229633 - RNA, 29 nt, Human
ucagcagucugugcugugccuggauguaa

SEQ ID NO: 229634 - RNA, 19 nt, Human
ucagcagugacagaagaga

SEQ ID NO: 229635 - RNA, 32 nt, Human
ucagcaguggcuagguuaugcuuagugguuua

SEQ ID NO: 229636 - RNA, 18 nt, Human
ucagcaguugaagccuga

SEQ ID NO: 229637 - RNA, 32 nt, Human
ucagcaguuggcccgggagacucuggaggagc

SEQ ID NO: 229638 - RNA, 32 nt, Human
ucagcaguuuguuccuuuucauugcugaguag

SEQ ID NO: 229639 - RNA, 24 nt, Human
ucagcauaaaccugggggcccuca

SEQ ID NO: 229640 - RNA, 22 nt, Human
ucagcauaacucaaccugcuuu

SEQ ID NO: 229641 - RNA, 32 nt, Human
ucagcauacauaacugaagcaugugaaacagu

SEQ ID NO: 229642 - RNA, 32 nt, Human
ucagcauacuccucaaacuccuccuccucagc

SEQ ID NO: 229643 - RNA, 24 nt, Human
ucagcaucaaaauauuucagugaa

SEQ ID NO: 229644 - RNA, 32 nt, Human
ucagcaucacacaguguuccugcuggagagag

SEQ ID NO: 229645 - RNA, 25 nt, Human
ucagcaucacccgggaacuuuuuua

SEQ ID NO: 229646 - RNA, 32 nt, Human
ucagcaucaccugggugugagacauggaguca

SEQ ID NO: 229647 - RNA, 32 nt, Human
ucagcaucagauaauucacaccagagagaaac

SEQ ID NO: 229648 - RNA, 32 nt, Human
ucagcaucauuuccuugagaugcauccaggcu

SEQ ID NO: 229649 - RNA, 32 nt, Human
ucagcauccaauaguuguuaaaugaauaaaua

SEQ ID NO: 229650 - RNA, 32 nt, Human
ucagcaucccaaacuccugggauuuuaggcau

SEQ ID NO: 229651 - RNA, 32 nt, Human
ucagcaucccaaagugcugggauuacaggcau

SEQ ID NO: 229652 - RNA, 32 nt, Human
ucagcaucccaaaguguugggauuacagccgu

SEQ ID NO: 229653 - RNA, 32 nt, Human
ucagcaucccaaguagcugggauaacaggugc

SEQ ID NO: 229654 - RNA, 32 nt, Human
ucagcaucccaaguagcugggauuacaggcac

SEQ ID NO: 229655 - RNA, 32 nt, Human
ucagcauccuacuccuggcaacaucaggccaa

SEQ ID NO: 229656 - RNA, 32 nt, Human
ucagcauccuccucuuccucgguggugggugu

SEQ ID NO: 229657 - RNA, 32 nt, Human
ucagcaucgcuuucaauaggcuuuucaggacc

SEQ ID NO: 229658 - RNA, 32 nt, Human
ucagcaucuccugguccugcaguguugcugua

SEQ ID NO: 229659 - RNA, 32 nt, Human
ucagcaucucgaguagcugggauuacaggcau

SEQ ID NO: 229660 - RNA, 32 nt, Human
ucagcaucugcugcccugaucacagagacggg

SEQ ID NO: 229661 - RNA, 18 nt, Human
ucagcaucugugccucuc

SEQ ID NO: 229662 - RNA, 32 nt, Human
ucagcaucuguggagauguguagagacaggga

SEQ ID NO: 229663 - RNA, 32 nt, Human
ucagcaugaccugcaugugagacauggaguca

SEQ ID NO: 229664 - RNA, 32 nt, Human
ucagcaugacuucaccuccauccugguggaca

SEQ ID NO: 229665 - RNA, 32 nt, Human
ucagcaugagccaagacuggggucagggagca

SEQ ID NO: 229666 - RNA, 32 nt, Human
ucagcaugagccugggaagcugaagguugggg

SEQ ID NO: 229667 - RNA, 30 nt, Human
ucagcaugauuuccagguuccaugucuucu

SEQ ID NO: 229668 - RNA, 32 nt, Human
ucagcaugcaggaaguuuggggagagcucggc

SEQ ID NO: 229669 - RNA, 19 nt, Human
ucagcaugcaguguuucca

SEQ ID NO: 229670 - RNA, 32 nt, Human
ucagcauggagacaucaccacaugcacugugg

SEQ ID NO: 229671 - RNA, 32 nt, Human
ucagcaugggcaacaugguaagaccuccgccu

SEQ ID NO: 229672 - RNA, 32 nt, Human
ucagcaugggcaaccucggagaucuucagcag

SEQ ID NO: 229673 - RNA, 32 nt, Human
ucagcaugggccaguuuugacaaggacuuguc

SEQ ID NO: 229674 - RNA, 32 nt, Human
ucagcaugggguuugggaagccuagcagugga

SEQ ID NO: 229675 - RNA, 32 nt, Human
ucagcauggugaaacgccaucccuacuaagga

SEQ ID NO: 229676 - RNA, 32 nt, Human
ucagcauguacuccccuccucugauuccccgu

SEQ ID NO: 229677 - RNA, 30 nt, Human
ucagcaugugggaccugguucucuccaucg

SEQ ID NO: 229678 - RNA, 32 nt, Human
ucagcauuaagauccaggugucagccuauguc

SEQ ID NO: 229679 - RNA, 32 nt, Human
ucagcauuaucucugaguccaccagaaguugu

SEQ ID NO: 229680 - RNA, 32 nt, Human
ucagcauucagcccagggaaugugguuuucac

SEQ ID NO: 229681 - RNA, 32 nt, Human
ucagcauugucucauguacagcucccuucccu

SEQ ID NO: 229682 - RNA, 32 nt, Human
ucagcauuuccuugucccgucuggaccugggg

SEQ ID NO: 229683 - RNA, 32 nt, Human
ucagcauuugggaugccagggaacagagagug

SEQ ID NO: 229684 - RNA, 32 nt, Human
ucagcauuuuugucaucccugcccuuggccaa

SEQ ID NO: 229685 - RNA, 32 nt, Human
ucagccaaaggagagaggugcauuuuaaguau

SEQ ID NO: 229686 - RNA, 32 nt, Human
ucagccaaaggaugagaacauuaugggauuau

SEQ ID NO: 229687 - RNA, 32 nt, Human
ucagccaacccagaggauguagacccuguccu

SEQ ID NO: 229688 - RNA, 20 nt, Human
ucagccaaccccccucacca

SEQ ID NO: 229689 - RNA, 32 nt, Human
ucagccaagagccugaggcugaagggaaaagu

SEQ ID NO: 229690 - RNA, 23 nt, Human
ucagccaagaguugaggcugcca

SEQ ID NO: 229691 - RNA, 32 nt, Human
ucagccaagaugguuuuucuuccuucagugag

SEQ ID NO: 229692 - RNA, 32 nt, Human
ucagccaagccgcgccaccagcuaagccggga

SEQ ID NO: 229693 - RNA, 32 nt, Human
ucagccaaguccaaggggaaccccuccucguc

SEQ ID NO: 229694 - RNA, 32 nt, Human
ucagccaauucaaccuccagccagcuucuuga

SEQ ID NO: 229695 - RNA, 32 nt, Human
ucagccaauucuguaggacacugaggcucuug

SEQ ID NO: 229696 - RNA, 32 nt, Human
ucagccacaaaugugacccaggauacagagug

SEQ ID NO: 229697 - RNA, 32 nt, Human
ucagccacagcccagccccauuaguggguuag

SEQ ID NO: 229698 - RNA, 32 nt, Human
ucagccacaggccuuccugguuggaguucugg

SEQ ID NO: 229699 - RNA, 32 nt, Human
ucagccaccacugugccauggugacacaggcc

SEQ ID NO: 229700 - RNA, 32 nt, Human
ucagccacccaaaaugcugggauuacaggcau

SEQ ID NO: 229701 - RNA, 32 nt, Human
ucagccaccuggcuccccuccugggaggccuc

SEQ ID NO: 229702 - RNA, 32 nt, Human
ucagccacugcaagcuggagugcugauauggu

SEQ ID NO: 229703 - RNA, 17 nt, Human
ucagccacuggagucug

SEQ ID NO: 229704 - RNA, 32 nt, Human
ucagccacuguaguacagccaccuggcaugcc

SEQ ID NO: 229705 - RNA, 32 nt, Human
ucagccacugugggcccugccucugccuguuc

SEQ ID NO: 229706 - RNA, 32 nt, Human
ucagccacuguucccagccacaauuuuuaucu

SEQ ID NO: 229707 - RNA, 32 nt, Human
ucagccagagaggcagagaacuugcagcgcga

SEQ ID NO: 229708 - RNA, 32 nt, Human
ucagccagaguuguuucucuccacucugccuc

SEQ ID NO: 229709 - RNA, 32 nt, Human
ucagccagcagagaauuuugacuugcaguagg

SEQ ID NO: 229710 - RNA, 20 nt, Human
ucagccagcagcccccuccc

SEQ ID NO: 229711 - RNA, 32 nt, Human
ucagccagcccagccuugcccaccauuuaaga

SEQ ID NO: 229712 - RNA, 32 nt, Human
ucagccagccuccagcaccuucccucucacca

SEQ ID NO: 229713 - RNA, 32 nt, Human
ucagccagccucccagacugcaccucuucuau

SEQ ID NO: 229714 - RNA, 32 nt, Human
ucagccaggaagaguuugccaggcagcuacag

SEQ ID NO: 229715 - RNA, 32 nt, Human
ucagccaggagaagaaugaccucaccauccag

SEQ ID NO: 229716 - RNA, 32 nt, Human
ucagccaggcagcccaccccacccuggggccc

SEQ ID NO: 229717 - RNA, 32 nt, Human
ucagccaggccccggggagggagccagccaca

SEQ ID NO: 229718 - RNA, 32 nt, Human
ucagccaggcccuccuccuccugggcuugccc

SEQ ID NO: 229719 - RNA, 32 nt, Human
ucagccaggcuggagugcaaugugcaauggca

SEQ ID NO: 229720 - RNA, 32 nt, Human
ucagccaggcuggagugcaguggugcaaucuc

SEQ ID NO: 229721 - RNA, 32 nt, Human
ucagccaggcuggagugugguggcacaaucuc

SEQ ID NO: 229722 - RNA, 32 nt, Human
ucagccagggugaagggaaaguaguuggggcu

SEQ ID NO: 229723 - RNA, 32 nt, Human
ucagccagguaaagggacucacugugaucgug

SEQ ID NO: 229724 - RNA, 32 nt, Human
ucagccagucccuguuggcugaguacccuggu

SEQ ID NO: 229725 - RNA, 32 nt, Human
ucagccauccucgucugcucuccucucucuuc

SEQ ID NO: 229726 - RNA, 31 nt, Human
ucagccaugaagacagaaacagugccaccgu

SEQ ID NO: 229727 - RNA, 32 nt, Human
ucagccaugaggccucaggacccacucugcuc

SEQ ID NO: 229728 - RNA, 32 nt, Human
ucagccaugcaagccucaguuuucccaucugu

SEQ ID NO: 229729 - RNA, 31 nt, Human
ucagccauggacaugcuucauccaucaucgg

SEQ ID NO: 229730 - RNA, 31 nt, Human
ucagccauggccccaagaaagagagguggac

SEQ ID NO: 229731 - RNA, 32 nt, Human
ucagccauucggcuuggggcaccaggcucccc

SEQ ID NO: 229732 - RNA, 32 nt, Human
ucagccauuggucacuuaagagcacuaacccc

SEQ ID NO: 229733 - RNA, 24 nt, Human
ucagcccaacacgcuccccuccca

SEQ ID NO: 229734 - RNA, 32 nt, Human
ucagcccaagauucuucagucuggacuauauu

SEQ ID NO: 229735 - RNA, 32 nt, Human
ucagcccaagcacuagaugugcagccccagcc

SEQ ID NO: 229736 - RNA, 32 nt, Human
ucagcccaaggaggaggaagaggaaaacaaga

SEQ ID NO: 229737 - RNA, 32 nt, Human
ucagcccaagguuccuccucuccuaccaagca

SEQ ID NO: 229738 - RNA, 19 nt, Human
ucagcccacacccuuccca

SEQ ID NO: 229739 - RNA, 20 nt, Human
ucagcccaccucccucacca

SEQ ID NO: 229740 - RNA, 32 nt, Human
ucagcccacucuugaagccucugaggagucuc

SEQ ID NO: 229741 - RNA, 32 nt, Human
ucagcccacugcacucuccacucugccagaaa

SEQ ID NO: 229742 - RNA, 19 nt, Human
ucagcccagaagcccuucc

SEQ ID NO: 229743 - RNA, 32 nt, Human
ucagcccagacccuggcucacagggaagcaga

SEQ ID NO: 229744 - RNA, 19 nt, Human
ucagcccagacuccugcca

SEQ ID NO: 229745 - RNA, 21 nt, Human
ucagcccagcaccugcuccca

SEQ ID NO: 229746 - RNA, 23 nt, Human
ucagcccagccaggcccccuccc

SEQ ID NO: 229747 - RNA, 18 nt, Human
ucagcccagcccacccuc

SEQ ID NO: 229748 - RNA, 20 nt, Human
ucagcccagcccuaacccuc

SEQ ID NO: 229749 - RNA, 18 nt, Human
ucagcccagcuacuuccc

SEQ ID NO: 229750 - RNA, 21 nt, Human
ucagcccagcucugccucgca

SEQ ID NO: 229751 - RNA, 20 nt, Human
ucagcccagcugcuuggccu

SEQ ID NO: 229752 - RNA, 18 nt, Human
ucagcccagcuggguucc

SEQ ID NO: 229753 - RNA, 32 nt, Human
ucagcccaggaauucaagaccagccugggcaa

SEQ ID NO: 229754 - RNA, 32 nt, Human
ucagcccaggagagagggguccugaucuuaac

SEQ ID NO: 229755 - RNA, 32 nt, Human
ucagcccaggagagccagggguccagugcagc

SEQ ID NO: 229756 - RNA, 32 nt, Human
ucagcccaggagguggagguugcagugagcgg

SEQ ID NO: 229757 - RNA, 32 nt, Human
ucagcccaggagguuguggauacagugaguua

SEQ ID NO: 229758 - RNA, 32 nt, Human
ucagcccaggcagaagcugcucuaggaccugg

SEQ ID NO: 229759 - RNA, 32 nt, Human
ucagcccagggcuucagucuuccuuuauuuau

SEQ ID NO: 229760 - RNA, 20 nt, Human
ucagcccaugcccccuccca

SEQ ID NO: 229761 - RNA, 32 nt, Human
ucagcccaugucaaucaagaugggugauuaug

SEQ ID NO: 229762 - RNA, 32 nt, Human
ucagcccaugucuucacagcagccacucccaa

SEQ ID NO: 229763 - RNA, 22 nt, Human
ucagcccauucaaagagcaagg

SEQ ID NO: 229764 - RNA, 19 nt, Human
ucagccccaacccccuccc

SEQ ID NO: 229765 - RNA, 32 nt, Human
ucagccccaaguaggugggacuccaggcaugc

SEQ ID NO: 229766 - RNA, 32 nt, Human
ucagccccacagcugcugccacaggggccaac

SEQ ID NO: 229767 - RNA, 18 nt, Human
ucagccccacccccuccc

SEQ ID NO: 229768 - RNA, 32 nt, Human
ucagccccacucccucuccaugcccaucaaac

SEQ ID NO: 229769 - RNA, 32 nt, Human
ucagccccacuuccuuucuuucuaacuccuac

SEQ ID NO: 229770 - RNA, 32 nt, Human
ucagccccagcccaagaugauccaauucuguu

SEQ ID NO: 229771 - RNA, 32 nt, Human
ucagccccaguucagaacacagaacuucacac

SEQ ID NO: 229772 - RNA, 32 nt, Human
ucagccccaugguggugaauucuguuucuuuc

SEQ ID NO: 229773 - RNA, 32 nt, Human
ucagcccccaccaggggaaggaaggagggcac

SEQ ID NO: 229774 - RNA, 19 nt, Human
ucagcccccaccucagguu

SEQ ID NO: 229775 - RNA, 32 nt, Human
ucagcccccaccuccagccacacacacauuac

SEQ ID NO: 229776 - RNA, 22 nt, Human
ucagcccccagccccagucuca

SEQ ID NO: 229777 - RNA, 20 nt, Human
ucagcccccagccccggguu

SEQ ID NO: 229778 - RNA, 20 nt, Human
ucagcccccagccccucccc

SEQ ID NO: 229779 - RNA, 32 nt, Human
ucagcccccagccuccaggccugcuguggagg

SEQ ID NO: 229780 - RNA, 32 nt, Human
ucagcccccaugcuucugccucaggccccacc

SEQ ID NO: 229781 - RNA, 21 nt, Human
ucagccccccucccccagacu

SEQ ID NO: 229782 - RNA, 32 nt, Human
ucagcccccggcccuuccuuguggcccagccc

SEQ ID NO: 229783 - RNA, 32 nt, Human
ucagcccccucagcacagacaaaagccagcag

SEQ ID NO: 229784 - RNA, 32 nt, Human
ucagcccccugaagacucuggucccagucagc

SEQ ID NO: 229785 - RNA, 32 nt, Human
ucagcccccuggaaggaggccauagucgugug

SEQ ID NO: 229786 - RNA, 32 nt, Human
ucagcccccuggcucugccucuccuuguuggc

SEQ ID NO: 229787 - RNA, 32 nt, Human
ucagccccggccccagcuucagcucuucgagu

SEQ ID NO: 229788 - RNA, 20 nt, Human
ucagccccuacccgggcucg

SEQ ID NO: 229789 - RNA, 20 nt, Human
ucagccccucacccugcauc

SEQ ID NO: 229790 - RNA, 32 nt, Human
ucagccccuccccuccaacucucaucccauug

SEQ ID NO: 229791 - RNA, 32 nt, Human
ucagccccuccccugacagcugucccucaccu

SEQ ID NO: 229792 - RNA, 32 nt, Human
ucauacucugccauuuugucucuuaaugcgcu

SEQ ID NO: 229793 - RNA, 32 nt, Human
ucauacuugcuuuacugaucagccaggcaaua

SEQ ID NO: 229794 - RNA, 32 nt, Human
ucauacuuguaacccagcacuuugggaagccg

SEQ ID NO: 229795 - RNA, 24 nt, Human
ucauacuuguaaucccugcacuuu

SEQ ID NO: 229796 - RNA, 32 nt, Human
ucauacuuucucuucucucucuuuuaauuuuc

SEQ ID NO: 229797 - RNA, 32 nt, Human
ucauacuuuguaugugcuuuagggaaggggug

SEQ ID NO: 229798 - RNA, 32 nt, Human
ucauacuuuuguuuugcaacauagaagucaca

SEQ ID NO: 229799 - RNA, 32 nt, Human
ucauagaaaaauggccuuauuucuccagaagu

SEQ ID NO: 229800 - RNA, 32 nt, Human
ucauagaaaauaaggaacaaagagaaacuugu

SEQ ID NO: 229801 - RNA, 32 nt, Human
ucauagaacuauacuaaucuucucacaaaagg

SEQ ID NO: 229802 - RNA, 32 nt, Human
ucauagacaauuccuccagagacacugagcca

SEQ ID NO: 229803 - RNA, 32 nt, Human
ucauagacaugcgccaccuccacgugagaaca

SEQ ID NO: 229804 - RNA, 32 nt, Human
ucauagaccaagucccgggggucuccacucag

SEQ ID NO: 229805 - RNA, 32 nt, Human
ucauagaccccgccugccguccggucaauaaa

SEQ ID NO: 229806 - RNA, 32 nt, Human
ucauagacuccucuguaucacugccuugaggc

SEQ ID NO: 229807 - RNA, 32 nt, Human
ucauagacuuuucuuuuuaaccuucugcaaaa

SEQ ID NO: 229808 - RNA, 32 nt, Human
ucauagagaacaauucgagagacagagagacg

SEQ ID NO: 229809 - RNA, 32 nt, Human
ucauagagacaggguuucaccauguuggccag

SEQ ID NO: 229810 - RNA, 32 nt, Human
ucauagagacuggguuucaccauguagaccag

SEQ ID NO: 229811 - RNA, 32 nt, Human
ucauagagauggggucucacuauguugcccag

SEQ ID NO: 229812 - RNA, 32 nt, Human
ucauagagaugggguuucaccauguuggccag

SEQ ID NO: 229813 - RNA, 32 nt, Human
ucauagagccaguuuucaaagcuccuucugca

SEQ ID NO: 229814 - RNA, 32 nt, Human
ucauagaggaagagcuagaaauccaguagcau

SEQ ID NO: 229815 - RNA, 32 nt, Human
ucauagaucacugcagccucaaacuccugggc

SEQ ID NO: 229816 - RNA, 32 nt, Human
ucauagcaaagcuucuuuuguaaagaacucca

SEQ ID NO: 229817 - RNA, 32 nt, Human
ucauagcacaggaugaggguaaggugaggguu

SEQ ID NO: 229818 - RNA, 32 nt, Human
ucauagcagaagaaauaggauuaucaauguga

SEQ ID NO: 229819 - RNA, 32 nt, Human
ucauagcaucauagcucacugcagccuccaac

SEQ ID NO: 229820 - RNA, 32 nt, Human
ucauagcaucccucagcacucgccaggugcag

SEQ ID NO: 229821 - RNA, 32 nt, Human
ucauagccauggugacacaaaggcccucaaga

SEQ ID NO: 229822 - RNA, 32 nt, Human
ucauagcccagauaggaauccucugcuccucc

SEQ ID NO: 229823 - RNA, 32 nt, Human
ucauagcccagcugcacugacuccuccuccag

SEQ ID NO: 229824 - RNA, 32 nt, Human
ucauagcccugguacaugguacacacaccccc

SEQ ID NO: 229825 - RNA, 32 nt, Human
ucauagccucaaacuccuggucucaagugauc

SEQ ID NO: 229826 - RNA, 32 nt, Human
ucauagccucaguugucccaguuauuuguccu

SEQ ID NO: 229827 - RNA, 32 nt, Human
ucauagccuggacacuucuguggcuguauauc

SEQ ID NO: 229828 - RNA, 32 nt, Human
ucauagccuguuuauucuacugugccauuaaa

SEQ ID NO: 229829 - RNA, 32 nt, Human
ucauagcuacuugggagguugaggcaggagaa

SEQ ID NO: 229830 - RNA, 32 nt, Human
ucauagcucacugaagccucaaccucccuggg

SEQ ID NO: 229831 - RNA, 32 nt, Human
ucauagcucacugcaaccucaaacuccugggc

SEQ ID NO: 229832 - RNA, 32 nt, Human
ucauagcucacugcacccucaaccuccugggu

SEQ ID NO: 229833 - RNA, 32 nt, Human
ucauagcucacugcagacuccaacuccuggcc

SEQ ID NO: 229834 - RNA, 32 nt, Human
ucauagcucacugcagccucaaacuccuggau

SEQ ID NO: 229835 - RNA, 32 nt, Human
ucauagcucacugcagccucaaacuccugggc

SEQ ID NO: 229836 - RNA, 32 nt, Human
ucauagcucacugcagccucaaacucuuuggc

SEQ ID NO: 229837 - RNA, 32 nt, Human
ucauagcucacugcagccucauacuccugggc

SEQ ID NO: 229838 - RNA, 32 nt, Human
ucauagcucacugcagccuccaacuccugggu

SEQ ID NO: 229839 - RNA, 32 nt, Human
ucauagcucacugcagccucgaacuccugggc

SEQ ID NO: 229840 - RNA, 32 nt, Human
ucauagcucacugcagccucgaacucuugggc

SEQ ID NO: 229841 - RNA, 32 nt, Human
ucauagcucacugcagccucgaaucccugggc

SEQ ID NO: 229842 - RNA, 32 nt, Human
ucauagcucacugcagccuggaacuccugggc

SEQ ID NO: 229843 - RNA, 32 nt, Human
ucauagcucacugcagccuggaacuccuuggc

SEQ ID NO: 229844 - RNA, 32 nt, Human
ucauagcucacugcagccuggaauuccugggc

SEQ ID NO: 229845 - RNA, 32 nt, Human
ucauagcucacugcagccuucaacuucugggc

SEQ ID NO: 229846 - RNA, 32 nt, Human
ucauagcucacugcagccuugaacuccuggga

SEQ ID NO: 229847 - RNA, 32 nt, Human
ucauagcucacugcagccuugaauuccuaggc

SEQ ID NO: 229848 - RNA, 32 nt, Human
ucauagcucacugcagccuugacccccucccu

SEQ ID NO: 229849 - RNA, 32 nt, Human
ucauagcucacugcagccuugagcuccuaggc

SEQ ID NO: 229850 - RNA, 32 nt, Human
ucauagcucacugcagccuugagcuccugggc

SEQ ID NO: 229851 - RNA, 32 nt, Human
ucauagcucacugcagccuuuaacuacugggc

SEQ ID NO: 229852 - RNA, 32 nt, Human
ucauagcucacugcagcuucaaacucuugggc

SEQ ID NO: 229853 - RNA, 32 nt, Human
ucauagcucacugcagcuuugaccucccagac

SEQ ID NO: 229854 - RNA, 32 nt, Human
ucauagcucacugcagcuuugacuuccugggc

SEQ ID NO: 229855 - RNA, 32 nt, Human
ucauagcucacugcauccuccaguuccugggu

SEQ ID NO: 229856 - RNA, 32 nt, Human
ucauagcucacugcugccucaaccucccaggc

SEQ ID NO: 229857 - RNA, 32 nt, Human
ucauagcucacugcugcugcuccacccacuuc

SEQ ID NO: 229858 - RNA, 32 nt, Human
ucauagcucacuggagccucuaaugccugggc

SEQ ID NO: 229859 - RNA, 32 nt, Human
ucauagcucacuguaaccucaaacuccuggac

SEQ ID NO: 229860 - RNA, 32 nt, Human
ucauagcucacuguaaccucaaacucuggggc

SEQ ID NO: 229861 - RNA, 32 nt, Human
ucauagcucacuguaacuucgaccaccugggc

SEQ ID NO: 229862 - RNA, 32 nt, Human
ucauagcucacuguacccuugaacuccugggc

SEQ ID NO: 229863 - RNA, 32 nt, Human
ucauagcucacuguagccucgaccuuccggga

SEQ ID NO: 229864 - RNA, 32 nt, Human
ucauagcucacuguagccuuaaacuucuggac

SEQ ID NO: 229865 - RNA, 32 nt, Human
ucauagcugaagcccaaaucgcucaaacgugu

SEQ ID NO: 229866 - RNA, 32 nt, Human
ucauagcugacacagagccaucugccacaaac

SEQ ID NO: 229867 - RNA, 32 nt, Human
ucauagcugccuaucagaauuucccaaauauu

SEQ ID NO: 229868 - RNA, 32 nt, Human
ucauagcugguaaaauuauucccacuguuuua

SEQ ID NO: 229869 - RNA, 32 nt, Human
ucauagcugucugaccucuacggaccucacau

SEQ ID NO: 229870 - RNA, 32 nt, Human
ucauaggaauaugcucucacaggagauaaugu

SEQ ID NO: 229871 - RNA, 32 nt, Human
ucauaggacucaauggagagugaggcagcugg

SEQ ID NO: 229872 - RNA, 32 nt, Human
ucauaggacucacauuucucucaguuauauuu

SEQ ID NO: 229873 - RNA, 32 nt, Human
ucauaggagaauugaauaauuucuaucaauau

SEQ ID NO: 229874 - RNA, 32 nt, Human
ucauaggagguaaucaccagacaacugcagaa

SEQ ID NO: 229875 - RNA, 32 nt, Human
ucauaggaguagcuguggacagaggaaccaac

SEQ ID NO: 229876 - RNA, 32 nt, Human
ucauaggauaacucauacuggagagaaaccau

SEQ ID NO: 229877 - RNA, 32 nt, Human
ucauaggcaaguuaguaggaccaccugauucc

SEQ ID NO: 229878 - RNA, 32 nt, Human
ucauaggccucagacuccaacugguguuaucc

SEQ ID NO: 229879 - RNA, 32 nt, Human
ucauaggccuuccuuuuacuaguagggcauaa

SEQ ID NO: 229880 - RNA, 32 nt, Human
ucauaggcucaaguaaucuuccugccucaacc

SEQ ID NO: 229881 - RNA, 32 nt, Human
ucauaggucacugcagccucaaacucccaaau

SEQ ID NO: 229882 - RNA, 32 nt, Human
ucauaggugacuggcauacacacuccucauaa

SEQ ID NO: 229883 - RNA, 32 nt, Human
ucauagguggggacucaagguacaggaccaag

SEQ ID NO: 229884 - RNA, 32 nt, Human
ucauagguugugugagccuaugaaaaagugua

SEQ ID NO: 229885 - RNA, 32 nt, Human
ucauaguaggugcugcuggccccuggugaucc

SEQ ID NO: 229886 - RNA, 32 nt, Human
ucauagucaccuacuccaacauucauaaguag

SEQ ID NO: 229887 - RNA, 32 nt, Human
ucauagucauuuuucuuaauugcccuuaauau

SEQ ID NO: 229888 - RNA, 32 nt, Human
ucauagucuuucauuugcuagcugugauccaa

SEQ ID NO: 229889 - RNA, 32 nt, Human
ucauagugguauaaaguucacacaguauuaug

SEQ ID NO: 229890 - RNA, 32 nt, Human
ucauaguucacugcagccuugaacucuuuggc

SEQ ID NO: 229891 - RNA, 32 nt, Human
ucauaguucccagcgugaggaaaaugaagaaa

SEQ ID NO: 229892 - RNA, 32 nt, Human
ucauaguucuagaggcuggaaguccacagugc

SEQ ID NO: 229893 - RNA, 32 nt, Human
ucauaguugcccacucccucuccuuacuuagc

SEQ ID NO: 229894 - RNA, 32 nt, Human
ucauauaaaguuccaaaugacaccagaaaaau

SEQ ID NO: 229895 - RNA, 32 nt, Human
ucauauaacuauauguuaucuuccaagcuuuu

SEQ ID NO: 229896 - RNA, 32 nt, Human
ucauauaagacagauggaugaucugugaacau

SEQ ID NO: 229897 - RNA, 32 nt, Human
ucauauacaucguuaugaaaauauugcuauga

SEQ ID NO: 229898 - RNA, 32 nt, Human
ucauauacauucucuugcuaucuacaauaagg

SEQ ID NO: 229899 - RNA, 32 nt, Human
ucauauaccagccuggcagccccgugcacauu

SEQ ID NO: 229900 - RNA, 32 nt, Human
ucauauagcaucucucccuacacacaguuucc

SEQ ID NO: 229901 - RNA, 32 nt, Human
ucauauagcuuguccccucugggccugccugu

SEQ ID NO: 229902 - RNA, 32 nt, Human
ucauauauaccuuguggaugagagcuauauac

SEQ ID NO: 229903 - RNA, 32 nt, Human
ucauauauuuggaguuuuucugaaaaauggag

SEQ ID NO: 229904 - RNA, 32 nt, Human
ucauaucacugcacuccagccuggcugacaga

SEQ ID NO: 229905 - RNA, 32 nt, Human
ucauauccaagaaaucauuacagaauucaaua

SEQ ID NO: 229906 - RNA, 32 nt, Human
ucauauccgugcugccccggaccccugugacu

SEQ ID NO: 229907 - RNA, 32 nt, Human
ucauauccuggcucuucucugggcaagaugag

SEQ ID NO: 229908 - RNA, 19 nt, Human
ucauaucuauugccuacaa

SEQ ID NO: 229909 - RNA, 32 nt, Human
ucauaucucuacacugcaaauuuugggucuca

SEQ ID NO: 229910 - RNA, 32 nt, Human
ucauaucucuacgcugcaaauuuugggucuca

SEQ ID NO: 229911 - RNA, 32 nt, Human
ucauaucucuagaccuggggcuucacggaggc

SEQ ID NO: 229912 - RNA, 32 nt, Human
ucauaucugccucuuccccuuaccaucguaau

SEQ ID NO: 229913 - RNA, 32 nt, Human
ucauaucuucauugucacuuugucuuaccuca

SEQ ID NO: 229914 - RNA, 32 nt, Human
ucauaucuugccuaggaacuccaggcuugucu

SEQ ID NO: 229915 - RNA, 32 nt, Human
ucauaugaagugagagagaguuuggucguggc

SEQ ID NO: 229916 - RNA, 32 nt, Human
ucauaugagcacuuugguguaggcuuggaaaa

SEQ ID NO: 229917 - RNA, 32 nt, Human
ucauaugauaaauaagugauuuauaaacaaga

SEQ ID NO: 229918 - RNA, 32 nt, Human
ucauaugcaauauuucuucuggcuucucaugg

SEQ ID NO: 229919 - RNA, 32 nt, Human
ucauaugccuccagccauuauaugagaacugu

SEQ ID NO: 229920 - RNA, 32 nt, Human
ucauaugcugcuuugagugaaccagagaaaca

SEQ ID NO: 229921 - RNA, 32 nt, Human
ucauaugcuguauuuaaaaagcaacaaugaua

SEQ ID NO: 229922 - RNA, 32 nt, Human
ucauaugcuguugcauaugacucucaucacaa

SEQ ID NO: 229923 - RNA, 32 nt, Human
ucauaugcuuauugaccauuuguacuucuuuc

SEQ ID NO: 229924 - RNA, 32 nt, Human
ucauauggagcgagguguuggggaaggcgggg

SEQ ID NO: 229925 - RNA, 32 nt, Human
ucauauggcuuaauuuuaacaaaaccauacgu

SEQ ID NO: 229926 - RNA, 32 nt, Human
ucauaugggaguuuuagagagcugugucccaa

SEQ ID NO: 229927 - RNA, 32 nt, Human
ucauauguauaugucauaugacuuuauaaaau

SEQ ID NO: 229928 - RNA, 32 nt, Human
ucauauguccccugucuuccuccaucugagaa

SEQ ID NO: 229929 - RNA, 32 nt, Human
ucauaugucccugugcuccuuuuaaccaaaua

SEQ ID NO: 229930 - RNA, 32 nt, Human
ucauaugugaaggcacguucuccagccaucag

SEQ ID NO: 229931 - RNA, 32 nt, Human
ucauauguuucaagcuaaucuuguagcuaagc

SEQ ID NO: 229932 - RNA, 32 nt, Human
ucauauuauaugcacuaaacuauaugcaugaa

SEQ ID NO: 229933 - RNA, 32 nt, Human
ucauauucaagcuucagaagcuagugaccauc

SEQ ID NO: 229934 - RNA, 32 nt, Human
ucauauucacauauguaaaccagaacauucua

SEQ ID NO: 229935 - RNA, 32 nt, Human
ucauauuccuugagccccuucacuaaagcaag

SEQ ID NO: 229936 - RNA, 32 nt, Human
ucauauucuguuggaagcuuguuuuccagucu

SEQ ID NO: 229937 - RNA, 32 nt, Human
ucauauugccacugugcuauccuugaacuacc

SEQ ID NO: 229938 - RNA, 32 nt, Human
ucauauugcucaaacacacaugcuguauaauu

SEQ ID NO: 229939 - RNA, 32 nt, Human
ucauauugucauuuguuuugagcagucugaau

SEQ ID NO: 229940 - RNA, 31 nt, Human
ucauauuuacucaaggagggaccaggaugau

SEQ ID NO: 229941 - RNA, 32 nt, Human
ucauauuuagagcuaaggccacugaggaaaga

SEQ ID NO: 229942 - RNA, 32 nt, Human
ucauauuucacuucuagccuuuuaguauggca

SEQ ID NO: 229943 - RNA, 32 nt, Human
ucauauuucagcaguuugccacugugacuguc

SEQ ID NO: 229944 - RNA, 32 nt, Human
ucauauuuuauucauuuucucccuuuagcaau

SEQ ID NO: 229945 - RNA, 32 nt, Human
ucauauuuugcagccagcaaugaaguucugcc

SEQ ID NO: 229946 - RNA, 32 nt, Human
ucaucaaaaccuuugccucccuaguucaagcg

SEQ ID NO: 229947 - RNA, 32 nt, Human
ucaucaaaagagccauuggaggggacaccaga

SEQ ID NO: 229948 - RNA, 32 nt, Human
ucaucaaaauggcagccuuuuccccagcuacu

SEQ ID NO: 229949 - RNA, 32 nt, Human
ucaucaaagacacccuugcccucuggcgucgc

SEQ ID NO: 229950 - RNA, 32 nt, Human
ucaucaacaagauuuccuugugcaaaauauuu

SEQ ID NO: 229951 - RNA, 32 nt, Human
ucaucaacauagugagaccccaucucuauuaa

SEQ ID NO: 229952 - RNA, 32 nt, Human
ucaucaaccagcugccuuuguuucauuucacc

SEQ ID NO: 229953 - RNA, 32 nt, Human
ucaucaacccacaaggagagagaugugcggga

SEQ ID NO: 229954 - RNA, 32 nt, Human
ucaucaacggaagucccuccacuggauuccuu

SEQ ID NO: 229955 - RNA, 32 nt, Human
ucaucaacuacaaaauaugaaaucagcauucc

SEQ ID NO: 229956 - RNA, 32 nt, Human
ucaucaacucacacuccucucccugucuuccg

SEQ ID NO: 229957 - RNA, 32 nt, Human
ucaucaacucagagacagagccaggggcugcu

SEQ ID NO: 229958 - RNA, 32 nt, Human
ucaucaagaagcagaggcuaguucacccacuc

SEQ ID NO: 229959 - RNA, 24 nt, Human
ucaucaagcuccacaucacugagg

SEQ ID NO: 229960 - RNA, 32 nt, Human
ucaucaagcuccacccuccuggccucauacag

SEQ ID NO: 229961 - RNA, 32 nt, Human
ucaucaaggucuagccuuccaggaaggggcug

SEQ ID NO: 229962 - RNA, 32 nt, Human
ucaucaauaacucaccagcaaauacuuccuga

SEQ ID NO: 229963 - RNA, 23 nt, Human
ucaucaaucauacagucagugaa

SEQ ID NO: 229964 - RNA, 24 nt, Human
ucaucaaucuuucacuuucuuccu

SEQ ID NO: 229965 - RNA, 32 nt, Human
ucaucaaugccccaguucacauccaccugcuu

SEQ ID NO: 229966 - RNA, 32 nt, Human
ucaucaaugcucaauuucuacuucuucauuac

SEQ ID NO: 229967 - RNA, 32 nt, Human
ucaucaauuauuagacaaaucccacuggccua

SEQ ID NO: 229968 - RNA, 32 nt, Human
ucaucaauucaccuuuaugcaugggcaccaaa

SEQ ID NO: 229969 - RNA, 32 nt, Human
ucaucaauuucugcuucuucauggaaugcuga

SEQ ID NO: 229970 - RNA, 32 nt, Human
ucaucacaaaaguucaucagcaaacaggaaaa

SEQ ID NO: 229971 - RNA, 32 nt, Human
ucaucacaaacaucuccaaaggccaugcugcc

SEQ ID NO: 229972 - RNA, 32 nt, Human
ucaucacaccacuccgcugccugggguuuuca

SEQ ID NO: 229973 - RNA, 32 nt, Human
ucaucacaccaguacacuccaggcuaggucac

SEQ ID NO: 229974 - RNA, 24 nt, Human
ucaucacagagaaggucaaaugaa

SEQ ID NO: 229975 - RNA, 32 nt, Human
ucaucacaggggccauuucugccuugugaugg

SEQ ID NO: 229976 - RNA, 32 nt, Human
ucaucacaguuauccugaguugaguuuaagcc

SEQ ID NO: 229977 - RNA, 32 nt, Human
ucaucacaucuucucuggcccucgacugagau

SEQ ID NO: 229978 - RNA, 32 nt, Human
ucaucacaugagcccugcugggcacagcugcg

SEQ ID NO: 229979 - RNA, 32 nt, Human
ucaucacaugccaccacacuguaccauggggg

SEQ ID NO: 229980 - RNA, 32 nt, Human
ucaucacaugucuaacaccacuuccaccccac

SEQ ID NO: 229981 - RNA, 31 nt, Human
ucaucaccaaugucugucaugcugagcaaga

SEQ ID NO: 229982 - RNA, 22 nt, Human
ucaucaccaccuuccaucauca

SEQ ID NO: 229983 - RNA, 23 nt, Human
ucaucaccauggccauccugcaa

SEQ ID NO: 229984 - RNA, 32 nt, Human
ucaucaccauuuccuccuuuaccuuucagugc

SEQ ID NO: 229985 - RNA, 32 nt, Human
ucaucaccauuuuuccugaguagggcuuaguu

SEQ ID NO: 229986 - RNA, 32 nt, Human
ucaucacccacacucccuauuuugggcccuca

SEQ ID NO: 229987 - RNA, 32 nt, Human
ucaucacccacuggauuaugccccaggcuucc

SEQ ID NO: 229988 - RNA, 32 nt, Human
ucaucacccacuggcacugaucagggcaccac

SEQ ID NO: 229989 - RNA, 32 nt, Human
ucaucacccaggcuagagugcaguggcacaaa

SEQ ID NO: 229990 - RNA, 32 nt, Human
ucaucacccaguuuuucccucuggacccagga

SEQ ID NO: 229991 - RNA, 32 nt, Human
ucaucacccccaaaagaauccccacacccauu

SEQ ID NO: 229992 - RNA, 32 nt, Human
ucaucacccgaugaggcaaccagccagaacgc

SEQ ID NO: 229993 - RNA, 32 nt, Human
ucaucaccuccaggaacaccgcucaggccuga

SEQ ID NO: 229994 - RNA, 18 nt, Human
ucaucaccugcuggcccc

SEQ ID NO: 229995 - RNA, 32 nt, Human
ucaucaccuucaccugccuuggucauggcucu

SEQ ID NO: 229996 - RNA, 32 nt, Human
ucaucaccuuccuccccaguguuuccacuuau

SEQ ID NO: 229997 - RNA, 32 nt, Human
ucaucacuaccuaauuccaaaacauuuuuauc

SEQ ID NO: 229998 - RNA, 32 nt, Human
ucaucacucauuccguggaugauucuaccucc

SEQ ID NO: 229999 - RNA, 32 nt, Human
ucaucacuggacugcauggggaggcagcagag

SEQ ID NO: 230000 - RNA, 32 nt, Human
ucaucacuggcuggggacagagccgggcacca

SEQ ID NO: 230001 - RNA, 32 nt, Human
ucaucacugggugggaccacgagggcaaugcu

SEQ ID NO: 230002 - RNA, 32 nt, Human
ucaucacugguagcaaagauuuacagaauguc

SEQ ID NO: 230003 - RNA, 32 nt, Human
ucaucacugguaggaggcaaagcagugggucc

SEQ ID NO: 230004 - RNA, 32 nt, Human
ucaucacuuccucucuccacccccucuccaac

SEQ ID NO: 230005 - RNA, 32 nt, Human
ucaucacuuccugucugguucugcuucugugg

SEQ ID NO: 230006 - RNA, 32 nt, Human
ucaucagaaaaauguuuuacgguggcugcuug

SEQ ID NO: 230007 - RNA, 32 nt, Human
ucaucagaaauaccuccagaagauucaaggag

SEQ ID NO: 230008 - RNA, 32 nt, Human
ucaucagaagcaucauucaucaaucaacuuga

SEQ ID NO: 230009 - RNA, 32 nt, Human
ucaucagagcauagagcugacagaacaugaug

SEQ ID NO: 230010 - RNA, 32 nt, Human
ucaucagaggcagccuuccaggcacagcucug

SEQ ID NO: 230011 - RNA, 32 nt, Human
ucaucagaugcccucuggaaugguuagcaucc

SEQ ID NO: 230012 - RNA, 32 nt, Human
ucaucagauguucaccauggccaccgcagaac

SEQ ID NO: 230013 - RNA, 32 nt, Human
ucaucagcaacaacaaaaccugauauuccaag

SEQ ID NO: 230014 - RNA, 32 nt, Human
ucaucagccagcauuggugaauauucaguuua

SEQ ID NO: 230015 - RNA, 32 nt, Human
ucaucagccagccugcaugagccucuacauuu

SEQ ID NO: 230016 - RNA, 32 nt, Human
ucaucagccccaggcugcaggugaggcuucag

SEQ ID NO: 230017 - RNA, 32 nt, Human
ucaucagcccuagaggguagaaaguuuuccca

SEQ ID NO: 230018 - RNA, 32 nt, Human
ucaucagcccucuuuuccggugccggaacuau

SEQ ID NO: 230019 - RNA, 32 nt, Human
ucaucagcccugccuguuuugcaccugggaag

SEQ ID NO: 230020 - RNA, 32 nt, Human
ucaucagcuaaauaaucaucucugccucaaau

SEQ ID NO: 230021 - RNA, 32 nt, Human
ucaucagcucuaaacucucugccuccacaaaa

SEQ ID NO: 230022 - RNA, 32 nt, Human
ucaucagcugcccgcuagcauguggccagggg

SEQ ID NO: 230023 - RNA, 32 nt, Human
ucaucaggaaauccuugcagcagggguuuaga

SEQ ID NO: 230024 - RNA, 31 nt, Human
ucaucaggagcaucucccaucucaagauuca

SEQ ID NO: 230025 - RNA, 32 nt, Human
ucaucaggauucaggagcugggauggguacac

SEQ ID NO: 230026 - RNA, 20 nt, Human
ucaucaggccgggugcagug

SEQ ID NO: 230027 - RNA, 21 nt, Human
ucaucaggccgggugcagugg

SEQ ID NO: 230028 - RNA, 32 nt, Human
ucaucagggccacccccugcaguauugagcac

SEQ ID NO: 230029 - RNA, 22 nt, Human
ucaucagucccucuccuggagc

SEQ ID NO: 230030 - RNA, 32 nt, Human
ucaucagucuagacugacugcugcuauaagua

SEQ ID NO: 230031 - RNA, 32 nt, Human
ucaucagucucucaauggaauguucaugguca

SEQ ID NO: 230032 - RNA, 32 nt, Human
ucaucagugaaauguugaauaguagcaaugau

SEQ ID NO: 230033 - RNA, 32 nt, Human
ucaucauaagacagaguaagaauuuuuaacag

SEQ ID NO: 230034 - RNA, 24 nt, Human
ucaucauaaguacuugcugaugga

SEQ ID NO: 230035 - RNA, 32 nt, Human
ucaucauacaucccacacagucuguauuacuu

SEQ ID NO: 230036 - RNA, 32 nt, Human
ucaucauacauguacauuuccaccaugugcag

SEQ ID NO: 230037 - RNA, 32 nt, Human
ucaucauauucacggguucuggagauuagcuc

SEQ ID NO: 230038 - RNA, 32 nt, Human
ucaucaucacccagcuaugaacuaucuaucau

SEQ ID NO: 230039 - RNA, 24 nt, Human
ucaucaucacccuuucauucauca

SEQ ID NO: 230040 - RNA, 32 nt, Human
ucaucaucacccuuucauucaucauagggaua

SEQ ID NO: 230041 - RNA, 20 nt, Human
ucaucaucacgaucuucugg

SEQ ID NO: 230042 - RNA, 20 nt, Human
ucaucaucagauucuccugg

SEQ ID NO: 230043 - RNA, 32 nt, Human
ucaucaucagguuuccccuauaagcuuucucc

SEQ ID NO: 230044 - RNA, 32 nt, Human
ucaucaucaguaguccuccagccugggcagcu

SEQ ID NO: 230045 - RNA, 32 nt, Human
ucaucaucagugucagagcccaaaaggagaau

SEQ ID NO: 230046 - RNA, 24 nt, Human
ucaucaucaucauccucauccuca

SEQ ID NO: 230047 - RNA, 23 nt, Human
ucaucaucaucaucuucaucauc

SEQ ID NO: 230048 - RNA, 21 nt, Human
ucaucaucaucgucaucauca

SEQ ID NO: 230049 - RNA, 32 nt, Human
ucaucaucaucucugcuacagucauguuucug

SEQ ID NO: 230050 - RNA, 32 nt, Human
ucaucaucucauucacauuugggaaacgaaca

SEQ ID NO: 230051 - RNA, 32 nt, Human
ucaucaucuuccuaaggaacagacuuaaguau

SEQ ID NO: 230052 - RNA, 32 nt, Human
ucaucaugccacugcacuuccagccuggguga

SEQ ID NO: 230053 - RNA, 21 nt, Human
ucaucaugcugugcuaaugaa

SEQ ID NO: 230054 - RNA, 32 nt, Human
ucaucauggaaaugauucucauugacuaauac

SEQ ID NO: 230055 - RNA, 32 nt, Human
ucaucauggaaaugauucucauugacuaaugc

SEQ ID NO: 230056 - RNA, 32 nt, Human
ucaucauggcaacaagagcugcagccugggac

SEQ ID NO: 230057 - RNA, 32 nt, Human
ucaucauggccagcuuaauccuuccacuuccc

SEQ ID NO: 230058 - RNA, 32 nt, Human
ucaucauguuagccaggauggucuugaucucc

SEQ ID NO: 230059 - RNA, 32 nt, Human
ucaucauguuggccaggauggucucgaucucc

SEQ ID NO: 230060 - RNA, 32 nt, Human
ucaucauguuggccaggauggucuugaucucu

SEQ ID NO: 230061 - RNA, 32 nt, Human
ucaucauguuggccaggaugguuuugaucucc

SEQ ID NO: 230062 - RNA, 22 nt, Human
ucaucauuaccccuacuggguc

SEQ ID NO: 230063 - RNA, 32 nt, Human
ucaucauugcuugcccugggccuaucccauga

SEQ ID NO: 230064 - RNA, 32 nt, Human
ucaucauuuuccuaaggaacagacuuaaguau

SEQ ID NO: 230065 - RNA, 24 nt, Human
ucaucauuuugacagucaucauca

SEQ ID NO: 230066 - RNA, 32 nt, Human
ucauccaaaaugucuuaggaaccuccuuaguu

SEQ ID NO: 230067 - RNA, 22 nt, Human
ucauccaaacuggagugcagug

SEQ ID NO: 230068 - RNA, 32 nt, Human
ucauccaaagagaagaaaggugaccucacauu

SEQ ID NO: 230069 - RNA, 32 nt, Human
ucauccaaccuggaaucuuagcuuugaccccc

SEQ ID NO: 230070 - RNA, 22 nt, Human
ucauccaagcuggagugcagug

SEQ ID NO: 230071 - RNA, 32 nt, Human
ucauccaagcuggagugcaguggugcaauccu

SEQ ID NO: 230072 - RNA, 32 nt, Human
ucauccacaaacacccucauagacgcacccag

SEQ ID NO: 230073 - RNA, 32 nt, Human
ucauccacaggcaagcaucuuggaucuugcaa

SEQ ID NO: 230074 - RNA, 32 nt, Human
ucauccaccagaagcauuuccagcacauccag

SEQ ID NO: 230075 - RNA, 18 nt, Human
ucauccacccaucccucu

SEQ ID NO: 230076 - RNA, 32 nt, Human
ucauccaccccuccccaucuggaccauaauag

SEQ ID NO: 230077 - RNA, 32 nt, Human
ucauccacccucuggcacccagccucugaggg

SEQ ID NO: 230078 - RNA, 32 nt, Human
ucauccacccugagcucccuggcugauuuauu

SEQ ID NO: 230079 - RNA, 32 nt, Human
ucauccaccgcaacccauccagugccagcuuu

SEQ ID NO: 230080 - RNA, 32 nt, Human
ucauccacgaccagaccuccccaaaccccaag

SEQ ID NO: 230081 - RNA, 32 nt, Human
ucauccacucaggucuuccucuggaccugcau

SEQ ID NO: 230082 - RNA, 32 nt, Human
ucauccagaaaaucuugcucaguggcucugag

SEQ ID NO: 230083 - RNA, 32 nt, Human
ucauccagaaagccaugaaagagggacgcuac

SEQ ID NO: 230084 - RNA, 24 nt, Human
ucauccagaagucaacauccugca

SEQ ID NO: 230085 - RNA, 32 nt, Human
ucauccagacccccugcccugucuuggcaacc

SEQ ID NO: 230086 - RNA, 32 nt, Human
ucauccagaggacccaaccacccggaucugag

SEQ ID NO: 230087 - RNA, 32 nt, Human
ucauccagaugcuucuggaggaggggcaggag

SEQ ID NO: 230088 - RNA, 23 nt, Human
ucauccagcagccuccccuccca

SEQ ID NO: 230089 - RNA, 23 nt, Human
ucauccagcagcuccccccacca

SEQ ID NO: 230090 - RNA, 18 nt, Human
ucauccagcaucuccugg

SEQ ID NO: 230091 - RNA, 32 nt, Human
ucauccagccucccagaagaauacucaacaac

SEQ ID NO: 230092 - RNA, 32 nt, Human
ucauccagcucaccaguuaucaacugacgacc

SEQ ID NO: 230093 - RNA, 32 nt, Human
ucauccaggaggccgccuucacccucauuggc

SEQ ID NO: 230094 - RNA, 22 nt, Human
ucauccaggcuagagugcagug

SEQ ID NO: 230095 - RNA, 20 nt, Human
ucauccaggcugcagugcag

SEQ ID NO: 230096 - RNA, 32 nt, Human
ucauccaggcuggacaguucagugauuugccu

SEQ ID NO: 230097 - RNA, 32 nt, Human
ucauccaggcuggaggguaguggcgugaccag

SEQ ID NO: 230098 - RNA, 22 nt, Human
ucauccaggcuggagugcagug

SEQ ID NO: 230099 - RNA, 32 nt, Human
ucauccaggcuggagugcagugaugcgauuga

SEQ ID NO: 230100 - RNA, 32 nt, Human
ucauccaggcuggagugcaguggcgcaaucuc

SEQ ID NO: 230101 - RNA, 32 nt, Human
ucauccaggcuggagugcaguggugcaaucau

SEQ ID NO: 230102 - RNA, 32 nt, Human
ucauccaggcuggagugcaguggugugaucac

SEQ ID NO: 230103 - RNA, 32 nt, Human
ucauccaggcuggagugcggugguggaaucau

SEQ ID NO: 230104 - RNA, 32 nt, Human
ucauccaggcuggauguggcuugggagagacc

SEQ ID NO: 230105 - RNA, 21 nt, Human
ucauccagguucccccuccca

SEQ ID NO: 230106 - RNA, 32 nt, Human
ucauccagucugugcugaucugcaggccaaaa

SEQ ID NO: 230107 - RNA, 32 nt, Human
ucauccauacccuucucuuuugcauggcuucu

SEQ ID NO: 230108 - RNA, 32 nt, Human
ucauccauccauccaucauccauccguccauc

SEQ ID NO: 230109 - RNA, 32 nt, Human
ucauccaucuuccucuacuucucuccuucauu

SEQ ID NO: 230110 - RNA, 32 nt, Human
ucauccaugcguccgccugccugccugcgcuu

SEQ ID NO: 230111 - RNA, 32 nt, Human
ucauccauggugccauguuaaagaaguuggaa

SEQ ID NO: 230112 - RNA, 32 nt, Human
ucauccauguuguuacuuaggcauuuuaucuu

SEQ ID NO: 230113 - RNA, 32 nt, Human
ucaucccaaaagagcuggagugacaugggagg

SEQ ID NO: 230114 - RNA, 32 nt, Human
ucaucccaaaggacagccgccuggagaugacu

SEQ ID NO: 230115 - RNA, 32 nt, Human
ucaucccacaauauagacaggcauugucacuu

SEQ ID NO: 230116 - RNA, 32 nt, Human
ucaucccacaggcugcacugucaggaagagga

SEQ ID NO: 230117 - RNA, 32 nt, Human
ucaucccacuccaacucuucccccucucccag

SEQ ID NO: 230118 - RNA, 19 nt, Human
ucaucccagaccaauggca

SEQ ID NO: 230119 - RNA, 32 nt, Human
ucaucccagauguugguuaucuuucugaagua

SEQ ID NO: 230120 - RNA, 32 nt, Human
ucaucccagcaauuugggaggcugaggugggc

SEQ ID NO: 230121 - RNA, 32 nt, Human
ucaucccagcacugugggaggccgaggcgggu

SEQ ID NO: 230122 - RNA, 32 nt, Human
ucaucccagcacuuugggaagcugaggcgagc

SEQ ID NO: 230123 - RNA, 32 nt, Human
ucaucccagcacuuugggaggccgagacggga

SEQ ID NO: 230124 - RNA, 32 nt, Human
ucaucccagcacuuugggaggccgaggcagga

SEQ ID NO: 230125 - RNA, 32 nt, Human
ucaucccagcacuuugggaggccgaggugggc

SEQ ID NO: 230126 - RNA, 32 nt, Human
ucaucccagcacuuugggaggcugaggcaggc

SEQ ID NO: 230127 - RNA, 32 nt, Human
ucaucccagcagcucuuaaggcugaggcacaa

SEQ ID NO: 230128 - RNA, 32 nt, Human
ucaucccagccuagucuccugaugucugugcu

SEQ ID NO: 230129 - RNA, 32 nt, Human
ucaucccagcuacuccagaggcugagauggga

SEQ ID NO: 230130 - RNA, 32 nt, Human
ucaucccagcuacucgggaggcugaggcagga

SEQ ID NO: 230131 - RNA, 32 nt, Human
ucaucccagcuacucgggaggcugagguggga

SEQ ID NO: 230132 - RNA, 32 nt, Human
ucaucccagcuacucgguaggcugaggcagga

SEQ ID NO: 230133 - RNA, 32 nt, Human
ucaucccagcuacuugggaggcugaggcagga

SEQ ID NO: 230134 - RNA, 32 nt, Human
ucaucccauacagucacaacaacugauaaaau

SEQ ID NO: 230135 - RNA, 32 nt, Human
ucaucccaugauguagugccucuuucauccac

SEQ ID NO: 230136 - RNA, 32 nt, Human
ucaucccauguccaccauguaggggagggacu

SEQ ID NO: 230137 - RNA, 28 nt, Human
ucauccccaagugccccuucugccucag

SEQ ID NO: 230138 - RNA, 32 nt, Human
ucauccccaagugccccuucugccucaguccu

SEQ ID NO: 230139 - RNA, 32 nt, Human
ucaucccccugccucuaccuucauuccaaacc

SEQ ID NO: 230140 - RNA, 32 nt, Human
ucauccccgggccaggaggaugagguuguccu

SEQ ID NO: 230141 - RNA, 32 nt, Human
ucauccccuaugaaccugggucuuauucuguc

SEQ ID NO: 230142 - RNA, 32 nt, Human
ucauccccucaggagucugaacacugggcuua

SEQ ID NO: 230143 - RNA, 32 nt, Human
ucauccccuccccgcgcguuccuucgcacacu

SEQ ID NO: 230144 - RNA, 32 nt, Human
ucauccccuccuggggccaggcuuggguuuca

SEQ ID NO: 230145 - RNA, 32 nt, Human
ucauccccucuuccuuucuuguccuuguccca

SEQ ID NO: 230146 - RNA, 32 nt, Human
ucauccccugcagacgugucaucgagcaggcu

SEQ ID NO: 230147 - RNA, 32 nt, Human
ucauccccuucccaccaaaccccagacucugu

SEQ ID NO: 230148 - RNA, 32 nt, Human
ucauccccuugccuuuucaagcucugcggagg

SEQ ID NO: 230149 - RNA, 32 nt, Human
ucauccccuuuauuuucccuguguauacauuc

SEQ ID NO: 230150 - RNA, 32 nt, Human
ucaucccgagcaccuccacauccuccacguuc

SEQ ID NO: 230151 - RNA, 32 nt, Human
ucaucccgcuacugcugcugggaucagguuga

SEQ ID NO: 230152 - RNA, 25 nt, Human
ucaucccgcuucucuccggccugag

SEQ ID NO: 230153 - RNA, 32 nt, Human
ucaucccggggcaaagcaggcaucaaaaccag

SEQ ID NO: 230154 - RNA, 19 nt, Human
ucaucccggggcccuggua

SEQ ID NO: 230155 - RNA, 20 nt, Human
ucaucccucacccccuccca

SEQ ID NO: 230156 - RNA, 32 nt, Human
ucaucccuccacucugacucugacuauggcag

SEQ ID NO: 230157 - RNA, 32 nt, Human
ucaucccucugccuccaagaaggccuguauua

SEQ ID NO: 230158 - RNA, 32 nt, Human
ucaucccucugccucugagaaaauauaagagg

SEQ ID NO: 230159 - RNA, 32 nt, Human
ucaucccugcuccccgugugucccucgguccu

SEQ ID NO: 230160 - RNA, 32 nt, Human
ucaucccuguaaucccagcacuuaaggaguac

SEQ ID NO: 230161 - RNA, 32 nt, Human
ucaucccuguaaucccagugcuuugggaggcc

SEQ ID NO: 230162 - RNA, 32 nt, Human
ucaucccuguaauuccagcacuuuggaaggcc

SEQ ID NO: 230163 - RNA, 32 nt, Human
ucaucccuucugagaaauguacccuauuauuu

SEQ ID NO: 230164 - RNA, 32 nt, Human
ucauccgaccccaaguggcccacaguuuccuu

SEQ ID NO: 230165 - RNA, 32 nt, Human
ucauccgaggcagggucaggagaggggcagaa

SEQ ID NO: 230166 - RNA, 32 nt, Human
ucauccgccugcacagcugaguccagugggag

SEQ ID NO: 230167 - RNA, 32 nt, Human
ucauccgccuguggcuggaguaaaauauacgg

SEQ ID NO: 230168 - RNA, 32 nt, Human
ucauccgcuacuugcaccaaccagucccgggu

SEQ ID NO: 230169 - RNA, 32 nt, Human
ucauccgugcugaaaaucagggcccugggaaa

SEQ ID NO: 230170 - RNA, 28 nt, Human
ucauccuaaagugcuggccucucauucc

SEQ ID NO: 230171 - RNA, 32 nt, Human
ucauccuaaggugugcagcccaggcccugccc

SEQ ID NO: 230172 - RNA, 32 nt, Human
ucauccuacagccucagcucgggcccagccuu

SEQ ID NO: 230173 - RNA, 32 nt, Human
ucauccuacucuuuaccuugucaccacaaaaa

SEQ ID NO: 230174 - RNA, 32 nt, Human
ucauccuauauuuuacaaagcaugugaauucu

SEQ ID NO: 230175 - RNA, 32 nt, Human
ucauccuaugccacagaaucugugugugaugu

SEQ ID NO: 230176 - RNA, 32 nt, Human
ucauccuauggacugagccggccacucucugg

SEQ ID NO: 230177 - RNA, 32 nt, Human
ucauccucaaauucuauauguaaagagcauuu

SEQ ID NO: 230178 - RNA, 32 nt, Human
ucauccucagcuguccauccaggcccagaagg

SEQ ID NO: 230179 - RNA, 32 nt, Human
ucauccucagcuugcacaaacugguugaacgg

SEQ ID NO: 230180 - RNA, 32 nt, Human
ucauccucauccuccuccuccuccacuugcag

SEQ ID NO: 230181 - RNA, 32 nt, Human
ucauccuccaaaagugcugggauuacaggcau

SEQ ID NO: 230182 - RNA, 32 nt, Human
ucauccuccauacauuugaauucaaguuguuu

SEQ ID NO: 230183 - RNA, 32 nt, Human
ucauccucccaaaaugcugggauuacaggcau

SEQ ID NO: 230184 - RNA, 32 nt, Human
ucauccucccaaagugcugggauuacaggugu

SEQ ID NO: 230185 - RNA, 32 nt, Human
ucauccucccaaagugcugggauuauaggccu

SEQ ID NO: 230186 - RNA, 32 nt, Human
ucauccucccaaaguguugggauuacaggugu

SEQ ID NO: 230187 - RNA, 32 nt, Human
ucauccucccaaguaggugggauuacaggugc

SEQ ID NO: 230188 - RNA, 32 nt, Human
ucauccuccggaguagcugggauuacaggcgc

SEQ ID NO: 230189 - RNA, 32 nt, Human
ucauccuccuacccuguacucccaccaaacca

SEQ ID NO: 230190 - RNA, 18 nt, Human
ucauccuccucuuugcca

SEQ ID NO: 230191 - RNA, 32 nt, Human
ucauccucgccaggagcuugugggccgucccu

SEQ ID NO: 230192 - RNA, 32 nt, Human
ucauccucguuggcuucucugccuucccccac

SEQ ID NO: 230193 - RNA, 32 nt, Human
ucauccucucuucuggcauccauguuuucugc

SEQ ID NO: 230194 - RNA, 32 nt, Human
ucauccucuggaccauggagacuagcucagaa

SEQ ID NO: 230195 - RNA, 31 nt, Human
ucauccucuuuuucugggccccugugucucg

SEQ ID NO: 230196 - RNA, 32 nt, Human
ucauccugaaguagcuggauugauagaaugac

SEQ ID NO: 230197 - RNA, 32 nt, Human
ucauccugagauacuucuaauuucauuguaua

SEQ ID NO: 230198 - RNA, 32 nt, Human
ucauccugaucuaaccauuccccagucauccc

SEQ ID NO: 230199 - RNA, 32 nt, Human
ucauccugccaaacuccaggcucagaugaugu

SEQ ID NO: 230200 - RNA, 32 nt, Human
ucauccugccaaacuccaggcucagaugucac

SEQ ID NO: 230201 - RNA, 32 nt, Human
ucauccugccaaacuccaggcucagauugucu

SEQ ID NO: 230202 - RNA, 32 nt, Human
ucauccugcccagcccugccuccuggccaugc

SEQ ID NO: 230203 - RNA, 21 nt, Human
ucauccugcccaucucuggua

SEQ ID NO: 230204 - RNA, 21 nt, Human
ucauccugcggggcuggcugg

SEQ ID NO: 230205 - RNA, 32 nt, Human
ucauccugcuccacccucccacuccuuggauu

SEQ ID NO: 230206 - RNA, 32 nt, Human
ucauccugcugcccuccuccagugcuggggcu

SEQ ID NO: 230207 - RNA, 32 nt, Human
ucauccugcugucaccaacuagcucuguggcc

SEQ ID NO: 230208 - RNA, 32 nt, Human
ucauccugcuucucuuuuccucgcagaugaua

SEQ ID NO: 230209 - RNA, 32 nt, Human
ucauccuggagcagcaccucacccucacuugc

SEQ ID NO: 230210 - RNA, 32 nt, Human
ucauccuggaguaccuuccuggaccacucucu

SEQ ID NO: 230211 - RNA, 32 nt, Human
ucauccuggcuggagugugauggugcgaucuu

SEQ ID NO: 230212 - RNA, 32 nt, Human
ucauccugggagcaacugggaggcagagcacc

SEQ ID NO: 230213 - RNA, 32 nt, Human
ucauccugggcagagguugccuaguugguaua

SEQ ID NO: 230214 - RNA, 32 nt, Human
ucauccugggcccuggccgaugugcauaucaa

SEQ ID NO: 230215 - RNA, 32 nt, Human
ucauccugggcuuuuccuacugugucuuguua

SEQ ID NO: 230216 - RNA, 32 nt, Human
ucauccuggggcucugcacagagcagcagagc

SEQ ID NO: 230217 - RNA, 21 nt, Human
ucauccugguaaaucccagug

SEQ ID NO: 230218 - RNA, 32 nt, Human
ucauccugugccucauccuccuaaccauugag

SEQ ID NO: 230219 - RNA, 32 nt, Human
ucauccuuaacuuugugcuagagcgagaccca

SEQ ID NO: 230220 - RNA, 32 nt, Human
ucauccuuacuagcuccugccugcuagcagaa

SEQ ID NO: 230221 - RNA, 32 nt, Human
ucauccuucuaaagugcugggauuacaggugu

SEQ ID NO: 230222 - RNA, 32 nt, Human
ucauccuucuucucuguguuuucugguuuaaa

SEQ ID NO: 230223 - RNA, 32 nt, Human
ucauccuugcaaccccauucaccaggagccuu

SEQ ID NO: 230224 - RNA, 32 nt, Human
ucauccuuuccccagcccucuucagcccuccc

SEQ ID NO: 230225 - RNA, 32 nt, Human
ucaucgacuuccucaucgacacuuacuccagu

SEQ ID NO: 230226 - RNA, 32 nt, Human
ucaucgagaucuuguuaaaauguagauccugg

SEQ ID NO: 230227 - RNA, 32 nt, Human
ucaucgagcaccuucgcucccacccgggggag

SEQ ID NO: 230228 - RNA, 32 nt, Human
ucaucgaggagaacuugguagauggggagaaa

SEQ ID NO: 230229 - RNA, 32 nt, Human
ucaucgcaacaaacgcaacaguggcuuucaaa

SEQ ID NO: 230230 - RNA, 32 nt, Human
ucaucgcagcugucugaacucuugaucaucug

SEQ ID NO: 230231 - RNA, 32 nt, Human
ucaucgcuuaacaacaggaauauguucugaac

SEQ ID NO: 230232 - RNA, 32 nt, Human
ucaucggaggcugggccccugggaugggacca

SEQ ID NO: 230233 - RNA, 32 nt, Human
ucaucggugauaagcaaagccacacacaauau

SEQ ID NO: 230234 - RNA, 32 nt, Human
ucaucgguguggcagccaaucuguaccuggac

SEQ ID NO: 230235 - RNA, 32 nt, Human
ucaucguacuagggaggaagaagcgggugaga

SEQ ID NO: 230236 - RNA, 20 nt, Human
ucaucgucaucaucaucauc

SEQ ID NO: 230237 - RNA, 32 nt, Human
ucaucgucuccuccuacgccuuccgguaccac

SEQ ID NO: 230238 - RNA, 32 nt, Human
ucaucgugggagcagcccugccccacccucca

SEQ ID NO: 230239 - RNA, 32 nt, Human
ucaucgugggcguggcuccaggaggacuuccu

SEQ ID NO: 230240 - RNA, 32 nt, Human
ucaucguggguggcucauacguguaaucccag

SEQ ID NO: 230241 - RNA, 32 nt, Human
ucaucguguguauaccacauuugugccccacu

SEQ ID NO: 230242 - RNA, 32 nt, Human
ucaucguguuaaccaggauggucucgaucucc

SEQ ID NO: 230243 - RNA, 32 nt, Human
ucaucguguuagccaggauggucucgaucucc

SEQ ID NO: 230244 - RNA, 32 nt, Human
ucaucuaacgccccaaaccuucauuugggccu

SEQ ID NO: 230245 - RNA, 32 nt, Human
ucaucuaaguagcagugagcauugcacggaac

SEQ ID NO: 230246 - RNA, 32 nt, Human
ucaucuacauaaagccauuagauuguaauacg

SEQ ID NO: 230247 - RNA, 32 nt, Human
ucaucuaccugccaggccucaggcccaggacc

SEQ ID NO: 230248 - RNA, 32 nt, Human
ucaucuacuacaaagagacucuaaauggcaaa

SEQ ID NO: 230249 - RNA, 32 nt, Human
ucaucuacucacuguagugcccuccuugaaau

SEQ ID NO: 230250 - RNA, 32 nt, Human
ucaucuagacacguccaaaggagugcauggcc

SEQ ID NO: 230251 - RNA, 32 nt, Human
ucaucuagacacugcaaccucuugcucguauc

SEQ ID NO: 230252 - RNA, 32 nt, Human
ucaucuagcaccuucucuaccucccagggucu

SEQ ID NO: 230253 - RNA, 32 nt, Human
ucaucuagccaucugauaucuuccucauuuga

SEQ ID NO: 230254 - RNA, 32 nt, Human
ucaucuagccauggaguuuaccuucaccucca

SEQ ID NO: 230255 - RNA, 32 nt, Human
ucaucuagcuaaauuauauuucuuuauagaga

SEQ ID NO: 230256 - RNA, 32 nt, Human
ucaucuagcuaaauuguauuucuuuauagaga

SEQ ID NO: 230257 - RNA, 32 nt, Human
ucaucuaggagagaaacaauauaaaugugaug

SEQ ID NO: 230258 - RNA, 32 nt, Human
ucaucuaggcagggggagagccugggcugaac

SEQ ID NO: 230259 - RNA, 21 nt, Human
ucaucuaggcuggagugcaau

SEQ ID NO: 230260 - RNA, 22 nt, Human
ucaucuaggcuggagugcaaug

SEQ ID NO: 230261 - RNA, 32 nt, Human
ucaucuaggcuggagugcaaugguuugaucuc

SEQ ID NO: 230262 - RNA, 21 nt, Human
ucaucuaggcuggagugcagu

SEQ ID NO: 230263 - RNA, 22 nt, Human
ucaucuaggcuggagugcagug

SEQ ID NO: 230264 - RNA, 32 nt, Human
ucaucuaggcuggagugcaguggugugaucuc

SEQ ID NO: 230265 - RNA, 32 nt, Human
ucaucuaguagucggggagaucaagagaggua

SEQ ID NO: 230266 - RNA, 32 nt, Human
ucaucuauagaagugccuuccccuauguguau

SEQ ID NO: 230267 - RNA, 32 nt, Human
ucaucucaacaucggcuggugguugguagggg

SEQ ID NO: 230268 - RNA, 22 nt, Human
ucaucucaacguucaaccgggg

SEQ ID NO: 230269 - RNA, 32 nt, Human
ucaucucacgcagaggaugccaggcaggaaaa

SEQ ID NO: 230270 - RNA, 32 nt, Human
ucaucucacugcaaccuccaccucccagguuc

SEQ ID NO: 230271 - RNA, 32 nt, Human
ucaucucacuguaucccuccaggaguuccugg

SEQ ID NO: 230272 - RNA, 24 nt, Human
ucaucucacuugggggccugcaug

SEQ ID NO: 230273 - RNA, 32 nt, Human
ucaucucagccugagcccuggaggcugggccu

SEQ ID NO: 230274 - RNA, 32 nt, Human
ucaucucagcuacucaggaggcugaggcagga

SEQ ID NO: 230275 - RNA, 32 nt, Human
ucaucucaggagacaaggacugugccgagugu

SEQ ID NO: 230276 - RNA, 32 nt, Human
ucaucucaggcccuccccuugugccugauacc

SEQ ID NO: 230277 - RNA, 24 nt, Human
ucaucucaggcgggcuggccgggg

SEQ ID NO: 230278 - RNA, 32 nt, Human
ucaucucagggccacugcuccauugcucuggg

SEQ ID NO: 230279 - RNA, 32 nt, Human
ucaucucagugcaaccuccaccucucacguuc

SEQ ID NO: 230280 - RNA, 32 nt, Human
ucaucucaguggggucuugcucugucacccag

SEQ ID NO: 230281 - RNA, 32 nt, Human
ucaucucauuuaauccucccuuccucccuauu

SEQ ID NO: 230282 - RNA, 32 nt, Human
ucaucuccaaccacuugcccugccucaguuuc

SEQ ID NO: 230283 - RNA, 32 nt, Human
ucaucuccagaauuuguucucagucccaaacu

SEQ ID NO: 230284 - RNA, 32 nt, Human
ucaucucccaaagccccuuccucuuuggccuc

SEQ ID NO: 230285 - RNA, 32 nt, Human
ucaucucccaggagagucucguccaaaggagg

SEQ ID NO: 230286 - RNA, 32 nt, Human
ucaucuccccaaaggcggcagaugcuugauuc

SEQ ID NO: 230287 - RNA, 32 nt, Human
ucaucucccucacuuaagucucaggccuguca

SEQ ID NO: 230288 - RNA, 32 nt, Human
ucaucucccuccugcgaggagcugagccaguc

SEQ ID NO: 230289 - RNA, 21 nt, Human
ucaucuccuaaagauccugca

SEQ ID NO: 230290 - RNA, 32 nt, Human
ucaucuccuagacuguuucacccagaugcuag

SEQ ID NO: 230291 - RNA, 32 nt, Human
ucaucuccuccacuguuuccuuuucuaugucc

SEQ ID NO: 230292 - RNA, 32 nt, Human
ucaucuccugacaaaagaaugcaauuucaacu

SEQ ID NO: 230293 - RNA, 32 nt, Human
ucaucucuacccauccccugaugcccagguca

SEQ ID NO: 230294 - RNA, 32 nt, Human
ucaucucuagagaauuuuugcuucuuagcuau

SEQ ID NO: 230295 - RNA, 32 nt, Human
ucaucucucagguguugauuugcuucugauag

SEQ ID NO: 230296 - RNA, 32 nt, Human
ucaucucugagcucccugucacuggccuggac

SEQ ID NO: 230297 - RNA, 32 nt, Human
ucaucucugcaacuccuuccucccugggccuc

SEQ ID NO: 230298 - RNA, 32 nt, Human
ucaucucuggacguguagaccagauccagaag

SEQ ID NO: 230299 - RNA, 32 nt, Human
ucaucucuggacugcaacggucuucuugugcu

SEQ ID NO: 230300 - RNA, 32 nt, Human
ucaucucuggcauugcuuccucuccuuccuuc

SEQ ID NO: 230301 - RNA, 32 nt, Human
ucaucucuggugcagccccuguccucaccacu

SEQ ID NO: 230302 - RNA, 32 nt, Human
ucaucucuguauccucuacacacgaugcuugg

SEQ ID NO: 230303 - RNA, 32 nt, Human
ucaucucugucuuuaccagcaggcucuguauu

SEQ ID NO: 230304 - RNA, 32 nt, Human
ucaucugaaagccaagaaaagagcgacacaga

SEQ ID NO: 230305 - RNA, 32 nt, Human
ucaucugaacccaggagacagguugcagugag

SEQ ID NO: 230306 - RNA, 32 nt, Human
ucaucugacaaagggcuaauauacagaaucua

SEQ ID NO: 230307 - RNA, 32 nt, Human
ucaucugacauaggggaagaagacuuacauag

SEQ ID NO: 230308 - RNA, 32 nt, Human
ucaucugaccucaguuccucuccaugugggcu

SEQ ID NO: 230309 - RNA, 21 nt, Human
ucaucugacuagcucucaaca

SEQ ID NO: 230310 - RNA, 32 nt, Human
ucaucugacugaugaaaaagaggaaagaauaa

SEQ ID NO: 230311 - RNA, 22 nt, Human
ucaucugacuucugaucaagca

SEQ ID NO: 230312 - RNA, 32 nt, Human
ucaucugagccucaggagguugaggcugcagu

SEQ ID NO: 230313 - RNA, 32 nt, Human
ucaucugagcuggaugcaguggcuuguuccua

SEQ ID NO: 230314 - RNA, 32 nt, Human
ucaucugaggucaggaguucgagcccagccca

SEQ ID NO: 230315 - RNA, 32 nt, Human
ucaucugcagagcccuggaggaggcccaccua

SEQ ID NO: 230316 - RNA, 32 nt, Human
ucaucugccaaaaauagagaacuuaugaucua

SEQ ID NO: 230317 - RNA, 32 nt, Human
ucaucugccucucucugagcaggaagccccuc

SEQ ID NO: 230318 - RNA, 32 nt, Human
ucaucugccuggggacauuccucauuggcuuc

SEQ ID NO: 230319 - RNA, 22 nt, Human
ucaucugcucagaggagaacgg

SEQ ID NO: 230320 - RNA, 23 nt, Human
ucaucugcucaguacaucugcgg

SEQ ID NO: 230321 - RNA, 32 nt, Human
ucaucugcuugaaucacuaacuugucuccacu

SEQ ID NO: 230322 - RNA, 32 nt, Human
ucaucuggaaggagggaggcuuggaugagcag

SEQ ID NO: 230323 - RNA, 32 nt, Human
ucaucuggagaccccauggagggacuuggaaa

SEQ ID NO: 230324 - RNA, 32 nt, Human
ucaucuggagagaggcaagaacagggcagcuu

SEQ ID NO: 230325 - RNA, 32 nt, Human
ucaucugggcugcagugcagugguguaaucac

SEQ ID NO: 230326 - RNA, 32 nt, Human
ucaucugggugaguuagugccagauggaauuu

SEQ ID NO: 230327 - RNA, 32 nt, Human
ucaucuggucugggugaccuccgagacuggcc

SEQ ID NO: 230328 - RNA, 32 nt, Human
ucaucuggucuugcccucaagcaacaauugcu

SEQ ID NO: 230329 - RNA, 32 nt, Human
ucaucugguggagcaggaagugcaggcagagu

SEQ ID NO: 230330 - RNA, 20 nt, Human
ucaucuguaaaugucagugu

SEQ ID NO: 230331 - RNA, 32 nt, Human
ucaucuguagccugaaaagccugaauccagcu

SEQ ID NO: 230332 - RNA, 32 nt, Human
ucaucugucacccaggcuggagugcaauggca

SEQ ID NO: 230333 - RNA, 32 nt, Human
ucaucugucacccaggcuggagugcaguagug

SEQ ID NO: 230334 - RNA, 21 nt, Human
ucaucugucagauccagugua

SEQ ID NO: 230335 - RNA, 32 nt, Human
ucaucuguggccacugccuucuagccguccuc

SEQ ID NO: 230336 - RNA, 32 nt, Human
ucaucuguggccaggcacgccuguaaucccag

SEQ ID NO: 230337 - RNA, 32 nt, Human
ucaucugugguucaccuguagacagagagcag

SEQ ID NO: 230338 - RNA, 32 nt, Human
ucaucuguguacacuccagcuguuugaagaga

SEQ ID NO: 230339 - RNA, 32 nt, Human
ucaucuguguacugaaccacuagccuaauaga

SEQ ID NO: 230340 - RNA, 23 nt, Human
ucaucuguguagaugccacugua

SEQ ID NO: 230341 - RNA, 32 nt, Human
ucaucugugugugacagaagagauuuuaaaaa

SEQ ID NO: 230342 - RNA, 32 nt, Human
ucaucuguguguguuuucuggauuuucucucu

SEQ ID NO: 230343 - RNA, 32 nt, Human
ucaucuguguuuugugguuggagagaaacugg

SEQ ID NO: 230344 - RNA, 23 nt, Human
ucaucuguuaggaagccauucua

SEQ ID NO: 230345 - RNA, 25 nt, Human
ucaucuguuuacucugcucagugua

SEQ ID NO: 230346 - RNA, 32 nt, Human
ucaucuguuuguucugaaaaugcagcugcugu

SEQ ID NO: 230347 - RNA, 32 nt, Human
ucaucuuacauuucucacccuacucuggaugg

SEQ ID NO: 230348 - RNA, 32 nt, Human
ucaucuuaccuguaauccuagcacuuugagac

SEQ ID NO: 230349 - RNA, 32 nt, Human
ucaucuuagcauugggcagacaccagggcaac

SEQ ID NO: 230350 - RNA, 32 nt, Human
ucaucuuagcucaggcugcuguaacaggguaa

SEQ ID NO: 230351 - RNA, 32 nt, Human
ucaucuuaggagugcuugcucugagugaggcu

SEQ ID NO: 230352 - RNA, 32 nt, Human
ucaucuuaugcaaaacacaggugaauucauac

SEQ ID NO: 230353 - RNA, 32 nt, Human
ucaucuucaaaaaggaaagauuuggaauuuua

SEQ ID NO: 230354 - RNA, 32 nt, Human
ucaucuucaagcacgccaacuucaggcagugu

SEQ ID NO: 230355 - RNA, 32 nt, Human
ucaucuucacugcacccuggauuugcauacau

SEQ ID NO: 230356 - RNA, 32 nt, Human
ucaucuucacugcauagccucaggcuagugag

SEQ ID NO: 230357 - RNA, 32 nt, Human
ucaucuucaguauuuucugucauuugcaaaag

SEQ ID NO: 230358 - RNA, 32 nt, Human
ucaucuucccaauguugcuguaucuaagaggc

SEQ ID NO: 230359 - RNA, 32 nt, Human
ucaucuucccagguagcugggauuacaggcau

SEQ ID NO: 230360 - RNA, 22 nt, Human
ucaucuuccccacacauaauca

SEQ ID NO: 230361 - RNA, 32 nt, Human
ucaucuuccccgagaaagggugcaguggccuc

SEQ ID NO: 230362 - RNA, 32 nt, Human
ucaucuuccucaagaucuuuguuuccacaaac

SEQ ID NO: 230363 - RNA, 32 nt, Human
ucaucuucugccacagucucucagauagcuca

SEQ ID NO: 230364 - RNA, 32 nt, Human
ucaucuucugccucccuuccuacuccuuuugg

SEQ ID NO: 230365 - RNA, 32 nt, Human
ucaucuucuguaacaauucucuuuuccaccuc

SEQ ID NO: 230366 - RNA, 32 nt, Human
ucaucuucuuccugcuccuccaccuccuccuc

SEQ ID NO: 230367 - RNA, 32 nt, Human
ucaucuucuuggugucucauguccucauucuc

SEQ ID NO: 230368 - RNA, 32 nt, Human
ucaucuucuuuccucuuucuucccacauuucu

SEQ ID NO: 230369 - RNA, 32 nt, Human
ucaucuucuuucucaaaacuaguuuuugaugc

SEQ ID NO: 230370 - RNA, 27 nt, Human
ucaucuugaugaugaucgucaucauca

SEQ ID NO: 230371 - RNA, 32 nt, Human
ucaucuugcagcagcaccgcacccucacuagc

SEQ ID NO: 230372 - RNA, 32 nt, Human
ucaucuugcaggcuggaagcaccagggaauua

SEQ ID NO: 230373 - RNA, 32 nt, Human
ucaucuugcuuaauaaauaucugcuggauucu

SEQ ID NO: 230374 - RNA, 32 nt, Human
ucaucuugcuuuccuuaaucaucgauccugga

SEQ ID NO: 230375 - RNA, 32 nt, Human
ucaucuuggagcugcuccaccuuagagggccg

SEQ ID NO: 230376 - RNA, 32 nt, Human
ucaucuuguauuguuccauggacauuaaauga

SEQ ID NO: 230377 - RNA, 32 nt, Human
ucaucuuguucccagucugucugucuguccau

SEQ ID NO: 230378 - RNA, 32 nt, Human
ucaucuuuaaacugaggccuucagggaagcuu

SEQ ID NO: 230379 - RNA, 22 nt, Human
ucaucuuuacucucagugaauu

SEQ ID NO: 230380 - RNA, 32 nt, Human
ucaucuuucccaagcauugaucugcccguuuc

SEQ ID NO: 230381 - RNA, 20 nt, Human
ucaucuuuccuuucuuggua

SEQ ID NO: 230382 - RNA, 19 nt, Human
ucaucuuuggaaugggaga

SEQ ID NO: 230383 - RNA, 32 nt, Human
ucaucuuugguuuacuaaauuuacuuagaaau

SEQ ID NO: 230384 - RNA, 32 nt, Human
ucaucuuugugucugcagagcucuggcacucg

SEQ ID NO: 230385 - RNA, 32 nt, Human
ucaucuuuuucuuccuccuaccuucuguuuuu

SEQ ID NO: 230386 - RNA, 32 nt, Human
ucaugaaaacagccccuuuaccugccaagaca

SEQ ID NO: 230387 - RNA, 32 nt, Human
ucaugaaaaguauguuguuguuuugauaguaa

SEQ ID NO: 230388 - RNA, 32 nt, Human
ucaugaaaaugucuauucaaaauaucaaaacc

SEQ ID NO: 230389 - RNA, 32 nt, Human
ucaugaaaccaaucuucagaugcucuguaaac

SEQ ID NO: 230390 - RNA, 32 nt, Human
ucaugaacaagaaaauugcuuaaccauuugau

SEQ ID NO: 230391 - RNA, 32 nt, Human
ucaugaacauggucagaaccuuuggacaagag

SEQ ID NO: 230392 - RNA, 32 nt, Human
ucaugaaccagcccuuucucagagccagugau

SEQ ID NO: 230393 - RNA, 32 nt, Human
ucaugaacccaggaggcagagguugcagugag

SEQ ID NO: 230394 - RNA, 32 nt, Human
ucaugaaccccugguagcugaauagcagcuug

SEQ ID NO: 230395 - RNA, 32 nt, Human
ucaugaaccugggcuggagcuuggggaccccu

SEQ ID NO: 230396 - RNA, 32 nt, Human
ucaugaacuggcagccauguggaaagaagacu

SEQ ID NO: 230397 - RNA, 23 nt, Human
ucaugaagaauacugcaagugaa

SEQ ID NO: 230398 - RNA, 31 nt, Human
ucaugaagauauacauuacauuugaaaaacu

SEQ ID NO: 230399 - RNA, 32 nt, Human
ucaugaagcccacuccuguccucugcccuacc

SEQ ID NO: 230400 - RNA, 31 nt, Human
ucaugaagcuauacauuacauuugaaaaacu

SEQ ID NO: 230401 - RNA, 27 nt, Human
ucaugaagcuguuccagcgcuccacgc

SEQ ID NO: 230402 - RNA, 32 nt, Human
ucaugaaggaagaggcaggccacgcaacacuu

SEQ ID NO: 230403 - RNA, 27 nt, Human
ucaugaaggccacuaucauccuccuuc

SEQ ID NO: 230404 - RNA, 32 nt, Human
ucaugaaucugcaaugugggcagagauuggaa

SEQ ID NO: 230405 - RNA, 32 nt, Human
ucaugaauguacaaaguagacuuucuuacaau

SEQ ID NO: 230406 - RNA, 22 nt, Human
ucaugaauguggccauggcccc

SEQ ID NO: 230407 - RNA, 32 nt, Human
ucaugaauuuacccacacaggugugauccucc

SEQ ID NO: 230408 - RNA, 32 nt, Human
ucaugacaauuuaggaacgaaugaccucacug

SEQ ID NO: 230409 - RNA, 32 nt, Human
ucaugacacagcccugauguuguaccggcuag

SEQ ID NO: 230410 - RNA, 32 nt, Human
ucaugacacugcacuccagccugggcaacaga

SEQ ID NO: 230411 - RNA, 32 nt, Human
ucaugacacugcacuccagccugggugauaga

SEQ ID NO: 230412 - RNA, 32 nt, Human
ucaugacacugcacuccagccuuggcaacaaa

SEQ ID NO: 230413 - RNA, 32 nt, Human
ucaugacacugcacuccagccuuggcaacaga

SEQ ID NO: 230414 - RNA, 32 nt, Human
ucaugacacugcccuccagccuggacaacaga

SEQ ID NO: 230415 - RNA, 27 nt, Human
ucaugacagauguuccggcuacauuua

SEQ ID NO: 230416 - RNA, 32 nt, Human
ucaugacagucuaugugagagaauguccauuu

SEQ ID NO: 230417 - RNA, 32 nt, Human
ucaugacauacugaagcuccagccagggggau

SEQ ID NO: 230418 - RNA, 32 nt, Human
ucaugacaucaaaacaccagcuuuucaccuuu

SEQ ID NO: 230419 - RNA, 27 nt, Human
ucaugacaucacaaccuguucccaaug

SEQ ID NO: 230420 - RNA, 32 nt, Human
ucaugacaugucgggcgaugcuuggaaaagcc

SEQ ID NO: 230421 - RNA, 32 nt, Human
ucaugaccauccuggccaacacagugaaaccu

SEQ ID NO: 230422 - RNA, 32 nt, Human
ucaugacccacguccaagucacccugcacauc

SEQ ID NO: 230423 - RNA, 32 nt, Human
ucaugacccgccuggccaacauggugaaaccc

SEQ ID NO: 230424 - RNA, 32 nt, Human
ucaugaccucaagugauccgcccacuucgguc

SEQ ID NO: 230425 - RNA, 24 nt, Human
ucaugaccucaagugaucugcuca

SEQ ID NO: 230426 - RNA, 32 nt, Human
ucaugaccucaagugaucugcucaccuuggcc

SEQ ID NO: 230427 - RNA, 32 nt, Human
ucaugaccuccagggagccuagaagcuggugg

SEQ ID NO: 230428 - RNA, 32 nt, Human
ucaugacgcucauggaaccucuuucuuugauc

SEQ ID NO: 230429 - RNA, 32 nt, Human
ucaugacggaagaagagagugagccgcaauug

SEQ ID NO: 230430 - RNA, 32 nt, Human
ucaugacuauaaucccagcuguuugagaggcc

SEQ ID NO: 230431 - RNA, 32 nt, Human
ucaugacucacugcagccucaaacuccugggu

SEQ ID NO: 230432 - RNA, 32 nt, Human
ucaugacucccagagaggauggcaucuagaag

SEQ ID NO: 230433 - RNA, 32 nt, Human
ucaugacugcacuuuggagacugaagcaucuc

SEQ ID NO: 230434 - RNA, 32 nt, Human
ucaugacuguaaucccaacacuuuggaggagg

SEQ ID NO: 230435 - RNA, 24 nt, Human
ucaugacuguaaucccagcacuuu

SEQ ID NO: 230436 - RNA, 32 nt, Human
ucaugacuguaaucccagcacuuugggaggcc

SEQ ID NO: 230437 - RNA, 32 nt, Human
ucaugacuguaaucccaguacuuugggaagcc

SEQ ID NO: 230438 - RNA, 32 nt, Human
ucaugacuguaauccuaguacuuuggaaggcu

SEQ ID NO: 230439 - RNA, 32 nt, Human
ucaugacuucacccucuacucuuccaaccaau

SEQ ID NO: 230440 - RNA, 32 nt, Human
ucaugacuuuauuuucuugucuucuuguauug

SEQ ID NO: 230441 - RNA, 32 nt, Human
ucaugagaaaugucuaaucccaugggaaaacc

SEQ ID NO: 230442 - RNA, 32 nt, Human
ucaugagaagagcuuggauacagugaguuugc

SEQ ID NO: 230443 - RNA, 32 nt, Human
ucaugagacaauacaggcaucacuggcagagg

SEQ ID NO: 230444 - RNA, 32 nt, Human
ucaugagagguuuccauguaacaagccugccu

SEQ ID NO: 230445 - RNA, 32 nt, Human
ucaugagaguggaggccugccacccagaaagg

SEQ ID NO: 230446 - RNA, 32 nt, Human
ucaugagaucaaucacuuguaugucucacgca

SEQ ID NO: 230447 - RNA, 32 nt, Human
ucaugagcaccguccccacccccagguggauc

SEQ ID NO: 230448 - RNA, 22 nt, Human
ucaugagcaggcacugccguca

SEQ ID NO: 230449 - RNA, 32 nt, Human
ucaugagcauuuguuuaauaagcauaccauug

SEQ ID NO: 230450 - RNA, 32 nt, Human
ucaugagccaucagcuccucuggggccagcua

SEQ ID NO: 230451 - RNA, 32 nt, Human
ucaugagcccaggagcuccugcuacauaaaac

SEQ ID NO: 230452 - RNA, 23 nt, Human
ucaugagccuaaggaccauucua

SEQ ID NO: 230453 - RNA, 32 nt, Human
ucaugagcuccaacacauucuucagugcaauc

SEQ ID NO: 230454 - RNA, 32 nt, Human
ucaugagcuggguggggcaugcagggaaggag

SEQ ID NO: 230455 - RNA, 32 nt, Human
ucaugagcuuugcugaucucuuugccaucucu

SEQ ID NO: 230456 - RNA, 32 nt, Human
ucaugaggaaggaaaguugaugaacuaguacg

SEQ ID NO: 230457 - RNA, 32 nt, Human
ucaugaggacagugauguguguucugaaauug

SEQ ID NO: 230458 - RNA, 32 nt, Human
ucaugaggccaucagucauacuggauuaggga

SEQ ID NO: 230459 - RNA, 32 nt, Human
ucaugaggcccagaugugggcaggcagcccgg

SEQ ID NO: 230460 - RNA, 32 nt, Human
ucaugaggcugaggcaggagaauggcgugaac

SEQ ID NO: 230461 - RNA, 18 nt, Human
ucaugaggcuucuagcca

SEQ ID NO: 230462 - RNA, 32 nt, Human
ucaugagggaaagggaagguuaguagcagaac

SEQ ID NO: 230463 - RNA, 32 nt, Human
ucaugagggcacugacgcugaauggugcagug

SEQ ID NO: 230464 - RNA, 32 nt, Human
ucaugagggcuccaauuucuccaccuccuuag

SEQ ID NO: 230465 - RNA, 24 nt, Human
ucaugagggggcgggccgagcggg

SEQ ID NO: 230466 - RNA, 32 nt, Human
ucaugagggugaaaggaggaugagagacguga

SEQ ID NO: 230467 - RNA, 31 nt, Human
ucaugaggguugugccuucagaugcucagca

SEQ ID NO: 230468 - RNA, 32 nt, Human
ucaugagguacccuuugugucaccagcucaag

SEQ ID NO: 230469 - RNA, 32 nt, Human
ucaugaggucaugguaccauauaugggauuuu

SEQ ID NO: 230470 - RNA, 32 nt, Human
ucaugaggucuggcucaugccuguaaucccag

SEQ ID NO: 230471 - RNA, 21 nt, Human
ucaugaggugggauggcccca

SEQ ID NO: 230472 - RNA, 32 nt, Human
ucaugaguaagaagauucaccaucccauguga

SEQ ID NO: 230473 - RNA, 32 nt, Human
ucaugaguacuugccuuuuaacuuucccccac

SEQ ID NO: 230474 - RNA, 32 nt, Human
ucaugagugugguccguaucuugguuuggaau

SEQ ID NO: 230475 - RNA, 32 nt, Human
ucaugaguuccaaguugaaacaugguugugca

SEQ ID NO: 230476 - RNA, 32 nt, Human
ucaugaguucccccaacuggagugcagacaag

SEQ ID NO: 230477 - RNA, 32 nt, Human
ucaugaguuugcuuuggacaccccaaauucua

SEQ ID NO: 230478 - RNA, 32 nt, Human
ucaugauaaagugaaauugagucagaacaaga

SEQ ID NO: 230479 - RNA, 32 nt, Human
ucaugauaguuuuugcagaugaaaaucacuuc

SEQ ID NO: 230480 - RNA, 32 nt, Human
ucaugaucauuucccuaagccauuuccagaau

SEQ ID NO: 230481 - RNA, 32 nt, Human
ucaugaucuuaagcuuccugagguugcaccag

SEQ ID NO: 230482 - RNA, 32 nt, Human
ucaugaucuuuuucuuuccuucccaagaaacu

SEQ ID NO: 230483 - RNA, 32 nt, Human
ucaugaugaaaccaagugguggccggaucagu

SEQ ID NO: 230484 - RNA, 32 nt, Human
ucaugaugauaaucauagcagcacuuuucaca

SEQ ID NO: 230485 - RNA, 32 nt, Human
ucaugaugcaggaaucugcgacagagacaaua

SEQ ID NO: 230486 - RNA, 32 nt, Human
ucaugaugcuucuagcauuggaaauccuccag

SEQ ID NO: 230487 - RNA, 32 nt, Human
ucaugauggagacaguaaccaagguaauguuc

SEQ ID NO: 230488 - RNA, 32 nt, Human
ucaugauggagacaguaaccaagguaauguuu

SEQ ID NO: 230489 - RNA, 23 nt, Human
ucaugauggguggcagagcaaga

SEQ ID NO: 230490 - RNA, 32 nt, Human
ucaugaugguuuggagauacugucuguggaug

SEQ ID NO: 230491 - RNA, 32 nt, Human
ucaugauguuaagaaaaugcaggcaguauccc

SEQ ID NO: 230492 - RNA, 32 nt, Human
ucaugauuacagucuagaguuacuugaaaugg

SEQ ID NO: 230493 - RNA, 32 nt, Human
ucaugauuacuuuaagcccacauccacugagu

SEQ ID NO: 230494 - RNA, 32 nt, Human
ucaugauuauaaucaaccacacuuauugauuu

SEQ ID NO: 230495 - RNA, 32 nt, Human
ucaugauucuucagaucaucacaccuuuaaaa

SEQ ID NO: 230496 - RNA, 27 nt, Human
ucaugcaaaaacugcaacucuguguuu

SEQ ID NO: 230497 - RNA, 32 nt, Human
ucaugcaaaaugucuccugaaauaagggaaaa

SEQ ID NO: 230498 - RNA, 32 nt, Human
ucaugcaaauucuauauuuuacauucuuggaa

SEQ ID NO: 230499 - RNA, 21 nt, Human
ucaugcaaucuuccugccuca

SEQ ID NO: 230500 - RNA, 32 nt, Human
ucaugcaauugcacuccagccugggcaacaag

SEQ ID NO: 230501 - RNA, 32 nt, Human
ucaugcacacaaaauuagcugggcaugguggc

SEQ ID NO: 230502 - RNA, 32 nt, Human
ucaugcacagcccccagaugccagggaagagg

SEQ ID NO: 230503 - RNA, 32 nt, Human
ucaugcacauggucaguacucaauaaauauuu

SEQ ID NO: 230504 - RNA, 32 nt, Human
ucaugcaccaacccauacagaguaaaucuuuu

SEQ ID NO: 230505 - RNA, 32 nt, Human
ucaugcaccacuugaaguugaguuccagaaag

SEQ ID NO: 230506 - RNA, 21 nt, Human
ucaugcaccgacccaacccag

SEQ ID NO: 230507 - RNA, 32 nt, Human
ucaugcacguucccccugggccauucucugau

SEQ ID NO: 230508 - RNA, 32 nt, Human
ucaugcacuccaggaggggcacuuagcagccu

SEQ ID NO: 230509 - RNA, 22 nt, Human
ucaugcagacuggagugcagug

SEQ ID NO: 230510 - RNA, 32 nt, Human
ucaugcagcugcuuccuguaacgcaggacucc

SEQ ID NO: 230511 - RNA, 21 nt, Human
ucaugcagcuggacuacagca

SEQ ID NO: 230512 - RNA, 32 nt, Human
ucaugcagcuuucaguggacauggugagaugg

SEQ ID NO: 230513 - RNA, 32 nt, Human
ucaugcagcuuugggaccaucaguuuuauacu

SEQ ID NO: 230514 - RNA, 32 nt, Human
ucaugcaggagagaaaugucacaagugugaug

SEQ ID NO: 230515 - RNA, 32 nt, Human
ucaugcaggaggaucacuugagcccaggaguu

SEQ ID NO: 230516 - RNA, 32 nt, Human
ucaugcaggccugucugugugauugucaggga

SEQ ID NO: 230517 - RNA, 27 nt, Human
ucaugcaggcuggagugaagucgugug

SEQ ID NO: 230518 - RNA, 32 nt, Human
ucaugcaggcuggagugcgguggugcgaucau

SEQ ID NO: 230519 - RNA, 32 nt, Human
ucaugcagggagagcugugcuccugggugcug

SEQ ID NO: 230520 - RNA, 32 nt, Human
ucaugcagucacaggaaugacaaucauucaac

SEQ ID NO: 230521 - RNA, 32 nt, Human
ucaugcagugagccagccuggccgcuccaccc

SEQ ID NO: 230522 - RNA, 32 nt, Human
ucaugcagugaguggguggggugcaggagaca

SEQ ID NO: 230523 - RNA, 32 nt, Human
ucaugcaugagacagugaaggaccuggcuccg

SEQ ID NO: 230524 - RNA, 32 nt, Human
ucaugcauguaaucccagcacuuugggaggcc

SEQ ID NO: 230525 - RNA, 32 nt, Human
ucaugcaugucuguuuacuuuagugacguucc

SEQ ID NO: 230526 - RNA, 32 nt, Human
ucaugcauucucugcaggaagaaaguuugaug

SEQ ID NO: 230527 - RNA, 32 nt, Human
ucaugcauuuccacauauccacaaacacagaa

SEQ ID NO: 230528 - RNA, 32 nt, Human
ucaugccaacagcuuggaagcugcaguaauua

SEQ ID NO: 230529 - RNA, 32 nt, Human
ucaugccaacuugaaaacucuccaguuuguag

SEQ ID NO: 230530 - RNA, 32 nt, Human
ucaugccaagagucagugccaucugauuggcu

SEQ ID NO: 230531 - RNA, 32 nt, Human
ucaugccaauuuucacaucuuccacaaacucc

SEQ ID NO: 230532 - RNA, 32 nt, Human
ucaugccacaccguacuccagccugggcgaca

SEQ ID NO: 230533 - RNA, 32 nt, Human
ucaugccacaggaucccagcacuuugggaggc

SEQ ID NO: 230534 - RNA, 32 nt, Human
ucaugccacaucacuccaaccugggcaacaga

SEQ ID NO: 230535 - RNA, 32 nt, Human
ucaugccacaucacuccagccugggcaacaga

SEQ ID NO: 230536 - RNA, 32 nt, Human
ucaugccaccgcacuccagccugggcaacaga

SEQ ID NO: 230537 - RNA, 32 nt, Human
ucaugccaccgcacuucagccugggugacaga

SEQ ID NO: 230538 - RNA, 32 nt, Human
ucaugccaccgcacuuccagccugggugacag

SEQ ID NO: 230539 - RNA, 32 nt, Human
ucaugccacuacacuccagccuggcgacagag

SEQ ID NO: 230540 - RNA, 32 nt, Human
ucaugccacuccacuccagucugggcgacaga

SEQ ID NO: 230541 - RNA, 32 nt, Human
ucaugccacugaacuccagccugggcaacaga

SEQ ID NO: 230542 - RNA, 32 nt, Human
ucaugccacugaacuccagccugggcaacagg

SEQ ID NO: 230543 - RNA, 32 nt, Human
ucaugccacugaacuccagccugggugacaga

SEQ ID NO: 230544 - RNA, 32 nt, Human
ucaugccacugcaaucuagccugggugacaga

SEQ ID NO: 230545 - RNA, 32 nt, Human
ucaugccacugcacccaucuugggcaacagaa

SEQ ID NO: 230546 - RNA, 32 nt, Human
ucaugccacugcaccccagcaccuggcuacag

SEQ ID NO: 230547 - RNA, 32 nt, Human
ucaugccacugcaccccagccugggcaacaga

SEQ ID NO: 230548 - RNA, 32 nt, Human
ucaugccacugcacccuagcuuggguggcaaa

SEQ ID NO: 230549 - RNA, 32 nt, Human
ucaugccacugcacccuagcuuggguggcaga

SEQ ID NO: 230550 - RNA, 32 nt, Human
ucaugccacugcacuagagccugggcaacaga

SEQ ID NO: 230551 - RNA, 32 nt, Human
ucaugccacugcacucaaaccuggcggacaga

SEQ ID NO: 230552 - RNA, 32 nt, Human
ucaugccacugcacuccaaccugggcaacaga

SEQ ID NO: 230553 - RNA, 32 nt, Human
ucaugccacugcacuccaaccugggcagcaga

SEQ ID NO: 230554 - RNA, 32 nt, Human
ucaugccacugcacuccaaccugggcgacaga

SEQ ID NO: 230555 - RNA, 32 nt, Human
ucaugccacugcacuccaaccugggugacaga

SEQ ID NO: 230556 - RNA, 32 nt, Human
ucaugccacugcacuccacucugggcaacaga

SEQ ID NO: 230557 - RNA, 32 nt, Human
ucaugccacugcacuccagcaugcaugacaga

SEQ ID NO: 230558 - RNA, 32 nt, Human
ucaugccacugcacuccagcaugggugaugga

SEQ ID NO: 230559 - RNA, 32 nt, Human
ucaugccacugcacuccagcccaggugacaga

SEQ ID NO: 230560 - RNA, 32 nt, Human
ucaugccacugcacuccagccuaugugacuag

SEQ ID NO: 230561 - RNA, 32 nt, Human
ucaugccacugcacuccagccugagugacaga

SEQ ID NO: 230562 - RNA, 32 nt, Human
ucaugccacugcacuccagccuggacaacaga

SEQ ID NO: 230563 - RNA, 32 nt, Human
ucaugccacugcacuccagccuggaugacaga

SEQ ID NO: 230564 - RNA, 32 nt, Human
ucaugccacugcacuccagccuggaugacagc

SEQ ID NO: 230565 - RNA, 32 nt, Human
ucaugccacugcacuccagccuggccugggca

SEQ ID NO: 230566 - RNA, 32 nt, Human
ucaugccacugcacuccagccugggagacaga

SEQ ID NO: 230567 - RNA, 32 nt, Human
ucaugccacugcacuccagccugggcaacaaa

SEQ ID NO: 230568 - RNA, 32 nt, Human
ucaugccacugcacuccagccugggcaacaag

SEQ ID NO: 230569 - RNA, 32 nt, Human
ucaugccacugcacuccagccugggcaacaca

SEQ ID NO: 230570 - RNA, 32 nt, Human
ucaugccacugcacuccagccugggcaacaga

SEQ ID NO: 230571 - RNA, 32 nt, Human
ucaugccacugcacuccagccugggcaacagc

SEQ ID NO: 230572 - RNA, 32 nt, Human
ucaugccacugcacuccagccugggcaaccag

SEQ ID NO: 230573 - RNA, 32 nt, Human
ucaugccacugcacuccagccugggcaaugga

SEQ ID NO: 230574 - RNA, 32 nt, Human
ucaugccacugcacuccagccugggcagcaga

SEQ ID NO: 230575 - RNA, 32 nt, Human
ucaugccacugcacuccagccugggcaugaga

SEQ ID NO: 230576 - RNA, 32 nt, Human
ucaugccacugcacuccagccugggccagaau

SEQ ID NO: 230577 - RNA, 32 nt, Human
ucaugccacugcacuccagccugggcgacaga

SEQ ID NO: 230578 - RNA, 32 nt, Human
ucaugccacugcacuccagccugggcgacgga

SEQ ID NO: 230579 - RNA, 32 nt, Human
ucaugccacugcacuccagccugggcgaugga

SEQ ID NO: 230580 - RNA, 32 nt, Human
ucaugccacugcacuccagccugggcggcaga

SEQ ID NO: 230581 - RNA, 32 nt, Human
ucaugccacugcacuccagccuggggcugaca

SEQ ID NO: 230582 - RNA, 32 nt, Human
ucaugccacugcacuccagccugggugacaga

SEQ ID NO: 230583 - RNA, 32 nt, Human
ucaugccacugcacuccagcuugggcgacaga

SEQ ID NO: 230584 - RNA, 32 nt, Human
ucaugccacugcacuccagcuugggugagagu

SEQ ID NO: 230585 - RNA, 32 nt, Human
ucaugccacugcacuccagucuggaugacaga

SEQ ID NO: 230586 - RNA, 32 nt, Human
ucaugccacugcacuccagucugggugacagc

SEQ ID NO: 230587 - RNA, 32 nt, Human
ucaugccacugcacuccauccugggcaacaag

SEQ ID NO: 230588 - RNA, 32 nt, Human
ucaugccacugcacuccauccugggugacagc

SEQ ID NO: 230589 - RNA, 32 nt, Human
ucaugccacugcacuccggccuaggugacaga

SEQ ID NO: 230590 - RNA, 32 nt, Human
ucaugccacugcacuccuccgugggugacaga

SEQ ID NO: 230591 - RNA, 32 nt, Human
ucaugccacugcacuccugccugggugacaaa

SEQ ID NO: 230592 - RNA, 32 nt, Human
ucaugccacugcacucuagccuaggcuacaga

SEQ ID NO: 230593 - RNA, 32 nt, Human
ucaugccacugcacucuagccugggugacaga

SEQ ID NO: 230594 - RNA, 32 nt, Human
ucaugccacugcacucugggcuggguaacaga

SEQ ID NO: 230595 - RNA, 32 nt, Human
ucaugccacugcacugcacuccagccugggug

SEQ ID NO: 230596 - RNA, 32 nt, Human
ucaugccacugcacugcagcccgggcgacaga

SEQ ID NO: 230597 - RNA, 32 nt, Human
ucaugccacugcacugcagccugggcgacaga

SEQ ID NO: 230598 - RNA, 32 nt, Human
ucaugccacugcacuuccagccugggugacac

SEQ ID NO: 230599 - RNA, 32 nt, Human
ucaugccacugcacuuccagccugggugacag

SEQ ID NO: 230600 - RNA, 32 nt, Human
ucaugccacugcacuuuagccugggcaacaga

SEQ ID NO: 230601 - RNA, 32 nt, Human
ucaugccacugcacuuuagccugggugacaga

SEQ ID NO: 230602 - RNA, 32 nt, Human
ucaugccacugcaugccagccugggcaacaga

SEQ ID NO: 230603 - RNA, 32 nt, Human
ucaugccacugcauuccagccugggcaacaga

SEQ ID NO: 230604 - RNA, 32 nt, Human
ucaugccacugcauuccagccugggcgacaga

SEQ ID NO: 230605 - RNA, 32 nt, Human
ucaugccacugcauuccagccugugugaugga

SEQ ID NO: 230606 - RNA, 32 nt, Human
ucaugccacugcauucuagccugggcaacaga

SEQ ID NO: 230607 - RNA, 32 nt, Human
ucaugccacugcauucuagcuuugauggcgaa

SEQ ID NO: 230608 - RNA, 32 nt, Human
ucaugccacuggacuccagccugggugaaaga

SEQ ID NO: 230609 - RNA, 32 nt, Human
ucaugccacuguacuccagccuaggugacaga

SEQ ID NO: 230610 - RNA, 32 nt, Human
ucaugccacuguacuccagccugggcgacagc

SEQ ID NO: 230611 - RNA, 32 nt, Human
ucaugccacuguacuccagccugggugacaga

SEQ ID NO: 230612 - RNA, 32 nt, Human
ucaugccagaagcggcuggacaguggcugccu

SEQ ID NO: 230613 - RNA, 32 nt, Human
ucaugccagauggggaaacugaggcucagaga

SEQ ID NO: 230614 - RNA, 24 nt, Human
ucaugccagcaauccuagcacuuu

SEQ ID NO: 230615 - RNA, 32 nt, Human
ucaugccagccuguccuucuggcuuccucugu

SEQ ID NO: 230616 - RNA, 32 nt, Human
ucaugccaggauacaugaggugcucuauagua

SEQ ID NO: 230617 - RNA, 32 nt, Human
ucaugccagggaaagagagauggaauucagaa

SEQ ID NO: 230618 - RNA, 32 nt, Human
ucaugccagggacugacaaaagacuugagaca

SEQ ID NO: 230619 - RNA, 24 nt, Human
ucaugccaguaaucccagcacuuu

SEQ ID NO: 230620 - RNA, 32 nt, Human
ucaugccaguaaucccagcacuuucggaggcc

SEQ ID NO: 230621 - RNA, 24 nt, Human
ucaugccagugauccgaguacuuu

SEQ ID NO: 230622 - RNA, 32 nt, Human
ucaugccagugcacuccagccugggcaacaga

SEQ ID NO: 230623 - RNA, 24 nt, Human
ucaugccaguuaucccagcacuuu

SEQ ID NO: 230624 - RNA, 32 nt, Human
ucaugccaguuaucccagcacuuugggaggcc

SEQ ID NO: 230625 - RNA, 21 nt, Human
ucaugccaucugccugccuua

SEQ ID NO: 230626 - RNA, 32 nt, Human
ucaugccauggcacuccauccugggugacaaa

SEQ ID NO: 230627 - RNA, 32 nt, Human
ucaugccauggcacuccguccugggugacaaa

SEQ ID NO: 230628 - RNA, 32 nt, Human
ucaugccauggcagucuagccugggcaacaga

SEQ ID NO: 230629 - RNA, 32 nt, Human
ucaugccauuacacuccagccugggcgacaga

SEQ ID NO: 230630 - RNA, 32 nt, Human
ucaugccauuacuccagccugggugacauagg

SEQ ID NO: 230631 - RNA, 32 nt, Human
ucaugccauuauacuccagccugggugacaga

SEQ ID NO: 230632 - RNA, 32 nt, Human
ucaugccauugcacagcagccugggugacaga

SEQ ID NO: 230633 - RNA, 32 nt, Human
ucaugccauugcacuccaaccugggugacaga

SEQ ID NO: 230634 - RNA, 32 nt, Human
ucaugccauugcacuccagcccagguaacaga

SEQ ID NO: 230635 - RNA, 32 nt, Human
ucaugccauugcacuccagcccggguuacagu

SEQ ID NO: 230636 - RNA, 32 nt, Human
ucaugccauugcacuccagccuaggcaacaag

SEQ ID NO: 230637 - RNA, 32 nt, Human
ucaugccauugcacuccagccugagugacaag

SEQ ID NO: 230638 - RNA, 32 nt, Human
ucaugccauugcacuccagccuggacaacaga

SEQ ID NO: 230639 - RNA, 32 nt, Human
ucaugccauugcacuccagccugggcaacaag

SEQ ID NO: 230640 - RNA, 32 nt, Human
ucaugccauugcacuccagccugggcaacaga

SEQ ID NO: 230641 - RNA, 32 nt, Human
ucaugccauugcacuccagccugggcaacgag

SEQ ID NO: 230642 - RNA, 32 nt, Human
ucaugccauugcacuccagccugggcgacaag

SEQ ID NO: 230643 - RNA, 32 nt, Human
ucaugccauugcacuccagccugggcgacaga

SEQ ID NO: 230644 - RNA, 32 nt, Human
ucaugccauugcacuccagccugggugacaag

SEQ ID NO: 230645 - RNA, 32 nt, Human
ucaugccauugcacuccagccugggugacaga

SEQ ID NO: 230646 - RNA, 32 nt, Human
ucaugccauugcacuccagccugggugauaag

SEQ ID NO: 230647 - RNA, 32 nt, Human
ucaugccauugcacuccagcuugggugacaga

SEQ ID NO: 230648 - RNA, 32 nt, Human
ucaugccauugcacuccagucugggcgacagg

SEQ ID NO: 230649 - RNA, 32 nt, Human
ucaugccauugcacuccgacucugggcaacag

SEQ ID NO: 230650 - RNA, 32 nt, Human
ucaugccauugcacucgagccugggcaacaag

SEQ ID NO: 230651 - RNA, 27 nt, Human
ucaugccauugcacucuagccugggug

SEQ ID NO: 230652 - RNA, 32 nt, Human
ucaugccauugcacugcaccugggcaacaaga

SEQ ID NO: 230653 - RNA, 32 nt, Human
ucaugccauugcauuccagccuaggcaacacg

SEQ ID NO: 230654 - RNA, 32 nt, Human
ucaugccauugcauuccagccuuggcgacaga

SEQ ID NO: 230655 - RNA, 32 nt, Human
ucaugccauuguacuccagccugggcaacaag

SEQ ID NO: 230656 - RNA, 32 nt, Human
ucaugccauuguacuucaccugggcaacaaga

SEQ ID NO: 230657 - RNA, 32 nt, Human
ucaugccauugucuuccagccugagugucaga

SEQ ID NO: 230658 - RNA, 32 nt, Human
ucaugccauugugcaaccuucaccaccgccca

SEQ ID NO: 230659 - RNA, 24 nt, Human
ucaugcccauaaucccagcacuuu

SEQ ID NO: 230660 - RNA, 32 nt, Human
ucaugcccauaaucccagcacuuugggagaug

SEQ ID NO: 230661 - RNA, 24 nt, Human
ucaugcccauaaucccagcccuuu

SEQ ID NO: 230662 - RNA, 32 nt, Human
ucaugcccauaaucccagcccuuugggaagcu

SEQ ID NO: 230663 - RNA, 32 nt, Human
ucaugccccgggaaacagucuuucuucagaau

SEQ ID NO: 230664 - RNA, 32 nt, Human
ucaugccccugcauuccagccuaggcgacaga

SEQ ID NO: 230665 - RNA, 32 nt, Human
ucaugccccuguacuccagccugggugacaga

SEQ ID NO: 230666 - RNA, 24 nt, Human
ucaugcccguaaucccagcacuuu

SEQ ID NO: 230667 - RNA, 32 nt, Human
ucaugcccguaaucccagcacuuugguaggcc

SEQ ID NO: 230668 - RNA, 24 nt, Human
ucaugcccguaauucucacauuuu

SEQ ID NO: 230669 - RNA, 24 nt, Human
ucaugcccguaauuucugcacuuu

SEQ ID NO: 230670 - RNA, 32 nt, Human
ucaugcccucggucucuugccucggcaccugg

SEQ ID NO: 230671 - RNA, 32 nt, Human
ucaugcccugcuccugucuugugcuuuauccu

SEQ ID NO: 230672 - RNA, 32 nt, Human
ucaugcccuguaauccuagaacuuugggaggc

SEQ ID NO: 230673 - RNA, 32 nt, Human
ucaugcccuguaauccuagcacuuugggaggg

SEQ ID NO: 230674 - RNA, 22 nt, Human
ucaugcccuuagcaaguacuuu

SEQ ID NO: 230675 - RNA, 18 nt, Human
ucaugcccuuucuggcca

SEQ ID NO: 230676 - RNA, 32 nt, Human
ucaugccgagguggagguaguggaggaagcua

SEQ ID NO: 230677 - RNA, 20 nt, Human
ucaugccgauaaucccagca

SEQ ID NO: 230678 - RNA, 32 nt, Human
ucaugccgcaagggcuuucugcucuggccuua

SEQ ID NO: 230679 - RNA, 32 nt, Human
ucaugccgccugaugacccccugggccgccau

SEQ ID NO: 230680 - RNA, 27 nt, Human
ucaugccgcgacuugaggcugugaggu

SEQ ID NO: 230681 - RNA, 27 nt, Human
ucaugccgcugcauuccagccugggug

SEQ ID NO: 230682 - RNA, 32 nt, Human
ucaugccguuguacuccagcuugggcaacaga

SEQ ID NO: 230683 - RNA, 24 nt, Human
ucaugccuacaaucccagcacuuu

SEQ ID NO: 230684 - RNA, 23 nt, Human
ucaugccuacaaucccagcauuu

SEQ ID NO: 230685 - RNA, 32 nt, Human
ucaugccuacaaucccagcauuugggaggcuc

SEQ ID NO: 230686 - RNA, 32 nt, Human
ucaugccuacugcacuccagccugggcaacaa

SEQ ID NO: 230687 - RNA, 26 nt, Human
ucaugccuauaaaauuccagcacuuu

SEQ ID NO: 230688 - RNA, 32 nt, Human
ucaugccuauaaaauuccagcacuuugggagg

SEQ ID NO: 230689 - RNA, 24 nt, Human
ucaugccuauaaccccagcacuuu

SEQ ID NO: 230690 - RNA, 24 nt, Human
ucaugccuauaauacccacacuuu

SEQ ID NO: 230691 - RNA, 20 nt, Human
ucaugccuauaaucagcacu

SEQ ID NO: 230692 - RNA, 21 nt, Human
ucaugccuauaauccaagcac

SEQ ID NO: 230693 - RNA, 21 nt, Human
ucaugccuauaaucccaacac

SEQ ID NO: 230694 - RNA, 24 nt, Human
ucaugccuauaaucccaacacuuu

SEQ ID NO: 230695 - RNA, 32 nt, Human
ucaugccuauaaucccaacacuuuaggaggcu

SEQ ID NO: 230696 - RNA, 21 nt, Human
ucaugccuauaaucccagcac

SEQ ID NO: 230697 - RNA, 32 nt, Human
ucaugccuauaaucccagcaccuugggaggcc

SEQ ID NO: 230698 - RNA, 32 nt, Human
ucaugccuauaaucccagcacguugggaggcu

SEQ ID NO: 230699 - RNA, 24 nt, Human
ucaugccuauaaucccagcacuuu

SEQ ID NO: 230700 - RNA, 32 nt, Human
ucaugccuauaaucccagcacuuuaggagccc

SEQ ID NO: 230701 - RNA, 32 nt, Human
ucaugccuauaaucccagcacuuuaggaggcc

SEQ ID NO: 230702 - RNA, 32 nt, Human
ucaugccuauaaucccagcacuuugagaggcc

SEQ ID NO: 230703 - RNA, 32 nt, Human
ucaugccuauaaucccagcacuuuggaaggcu

SEQ ID NO: 230704 - RNA, 32 nt, Human
ucaugccuauaaucccagcacuuuggcaggcu

SEQ ID NO: 230705 - RNA, 32 nt, Human
ucaugccuauaaucccagcacuuugggaagcc

SEQ ID NO: 230706 - RNA, 32 nt, Human
ucaugccuauaaucccagcacuuugggaaguc

SEQ ID NO: 230707 - RNA, 32 nt, Human
ucaugccuauaaucccagcacuuugggaggcc

SEQ ID NO: 230708 - RNA, 32 nt, Human
ucaugccuauaaucccagcacuuugggaggcu

SEQ ID NO: 230709 - RNA, 32 nt, Human
ucaugccuauaaucccagcacuuuuggaggcu

SEQ ID NO: 230710 - RNA, 24 nt, Human
ucaugccuauaaucccagcgcuuu

SEQ ID NO: 230711 - RNA, 32 nt, Human
ucaugccuauaaucccagcgcuuugggagguc

SEQ ID NO: 230712 - RNA, 32 nt, Human
ucaugccuauaaucccagcucuuagggaggca

SEQ ID NO: 230713 - RNA, 24 nt, Human
ucaugccuauaaucccaggacuuu

SEQ ID NO: 230714 - RNA, 32 nt, Human
ucaugccuauaaucccaggacuuugggaagcu

SEQ ID NO: 230715 - RNA, 24 nt, Human
ucaugccuauaaucccagugcuuu

SEQ ID NO: 230716 - RNA, 32 nt, Human
ucaugccuauaaucccagugcuuugggaagcc

SEQ ID NO: 230717 - RNA, 24 nt, Human
ucaugccuauaaucccggcacuuu

SEQ ID NO: 230718 - RNA, 24 nt, Human
ucaugccuauaauccuaacacuuu

SEQ ID NO: 230719 - RNA, 24 nt, Human
ucaugccuauaauccuagcacuuu

SEQ ID NO: 230720 - RNA, 24 nt, Human
ucaugccuauaaucucagcacuuu

SEQ ID NO: 230721 - RNA, 24 nt, Human
ucaugccuauaaucuuagcacuuu

SEQ ID NO: 230722 - RNA, 28 nt, Human
ucaugccuauaauuaaucccaguacuuu

SEQ ID NO: 230723 - RNA, 24 nt, Human
ucaugccuauaauuccaacccuuu

SEQ ID NO: 230724 - RNA, 24 nt, Human
ucaugccuauaauuccagcacuuu

SEQ ID NO: 230725 - RNA, 32 nt, Human
ucaugccuauaguaguucuagcacuuugagag

SEQ ID NO: 230726 - RNA, 24 nt, Human
ucaugccuauagucccagcacuuu

SEQ ID NO: 230727 - RNA, 24 nt, Human
ucaugccuauauucccagcacuuu

SEQ ID NO: 230728 - RNA, 24 nt, Human
ucaugccuauauucccugcacuuu

SEQ ID NO: 230729 - RNA, 24 nt, Human
ucaugccuaucaucccagcacuuu

SEQ ID NO: 230730 - RNA, 32 nt, Human
ucaugccuaucaucccagcacuuugggaggcc

SEQ ID NO: 230731 - RNA, 24 nt, Human
ucaugccuauuaucccagcacuuu

SEQ ID NO: 230732 - RNA, 32 nt, Human
ucaugccuauuaucccagcacuuugggaggcc

SEQ ID NO: 230733 - RNA, 32 nt, Human
ucaugccucacugcagccucgaccucccuggg

SEQ ID NO: 230734 - RNA, 32 nt, Human
ucaugccucacugcagccucggcuuccugggc

SEQ ID NO: 230735 - RNA, 24 nt, Human
ucaugccuccaaucccagcacuuu

SEQ ID NO: 230736 - RNA, 32 nt, Human
ucaugccucccagaauaugaggucuaauuaag

SEQ ID NO: 230737 - RNA, 22 nt, Human
ucaugccuccuaccaagccuuu

SEQ ID NO: 230738 - RNA, 24 nt, Human
ucaugccucuaaucccagcacuuu

SEQ ID NO: 230739 - RNA, 32 nt, Human
ucaugccucuaaucccagcacuuuggaagacc

SEQ ID NO: 230740 - RNA, 32 nt, Human
ucaugccucuaaucccagcacuuugggaggcu

SEQ ID NO: 230741 - RNA, 32 nt, Human
ucaugccucuccugccaacauccuccaagggc

SEQ ID NO: 230742 - RNA, 32 nt, Human
ucaugccucucuacuccagccugggcaauagg

SEQ ID NO: 230743 - RNA, 32 nt, Human
ucaugccucugcauuccagccuuggugacaga

SEQ ID NO: 230744 - RNA, 24 nt, Human
ucaugccucuugucccagcacuuu

SEQ ID NO: 230745 - RNA, 24 nt, Human
ucaugccugaaaucccaacacuuu

SEQ ID NO: 230746 - RNA, 24 nt, Human
ucaugccugaaaucccugcacuuu

SEQ ID NO: 230747 - RNA, 24 nt, Human
ucaugccugaaauccuagcacuuu

SEQ ID NO: 230748 - RNA, 23 nt, Human
ucaugccugaaucucagcacuuu

SEQ ID NO: 230749 - RNA, 23 nt, Human
ucaugccugacaucucagcacuu

SEQ ID NO: 230750 - RNA, 32 nt, Human
ucaugccugcaaucccagcacuguagaaggca

SEQ ID NO: 230751 - RNA, 24 nt, Human
ucaugccugcaaucccagcacuuu

SEQ ID NO: 230752 - RNA, 32 nt, Human
ucaugccugcaaucccagcacuuugggaggca

SEQ ID NO: 230753 - RNA, 32 nt, Human
ucaugccugcaaucccagcacuuugggaggcc

SEQ ID NO: 230754 - RNA, 24 nt, Human
ucaugccugcaauuccagcacuuu

SEQ ID NO: 230755 - RNA, 32 nt, Human
ucaugccugccuguaaucccagcacuguggga

SEQ ID NO: 230756 - RNA, 32 nt, Human
ucaugccugcggucccagcuacuuagggaggc

SEQ ID NO: 230757 - RNA, 24 nt, Human
ucaugccuggaaucccagcacuuu

SEQ ID NO: 230758 - RNA, 32 nt, Human
ucaugccuggaaucccagcacuuugagaggcc

SEQ ID NO: 230759 - RNA, 32 nt, Human
ucaugccuggaaucccagcacuuugggaggcc

SEQ ID NO: 230760 - RNA, 32 nt, Human
ucaugccuggaaucccagcacuuugggaggug

SEQ ID NO: 230761 - RNA, 24 nt, Human
ucaugccuggaauccuagcacuuu

SEQ ID NO: 230762 - RNA, 32 nt, Human
ucaugccugguggugucacaucccaaggcagc

SEQ ID NO: 230763 - RNA, 24 nt, Human
ucaugccuguaaacccagcacuuu

SEQ ID NO: 230764 - RNA, 25 nt, Human
ucaugccuguaaaucccagcacuuu

SEQ ID NO: 230765 - RNA, 32 nt, Human
ucaugccuguaaaucccagcacuuugguagcc

SEQ ID NO: 230766 - RNA, 24 nt, Human
ucaugccuguaaccccagcacuuu

SEQ ID NO: 230767 - RNA, 32 nt, Human
ucaugccuguaaccccagcacuuugggaggcc

SEQ ID NO: 230768 - RNA, 32 nt, Human
ucaugccuguaaccccagcgcuuugggaagcc

SEQ ID NO: 230769 - RNA, 23 nt, Human
ucaugccuguaacccuggcacuu

SEQ ID NO: 230770 - RNA, 32 nt, Human
ucaugccuguaacccuggcacuuaaggggcca

SEQ ID NO: 230771 - RNA, 24 nt, Human
ucaugccuguaaccucagcacuuu

SEQ ID NO: 230772 - RNA, 32 nt, Human
ucaugccuguaaccucagcacuuugggaggcu

SEQ ID NO: 230773 - RNA, 24 nt, Human
ucaugccuguaagcccaacacuuu

SEQ ID NO: 230774 - RNA, 24 nt, Human
ucaugccuguaagcccagcacuuu

SEQ ID NO: 230775 - RNA, 32 nt, Human
ucaugccuguaauaccagcguuuugggaggcu

SEQ ID NO: 230776 - RNA, 32 nt, Human
ucaugccuguaauagcagcuacucgggaggcu

SEQ ID NO: 230777 - RNA, 32 nt, Human
ucaugccuguaaucaaucccagcacuuuggga

SEQ ID NO: 230778 - RNA, 32 nt, Human
ucaugccuguaaucauagcauuaugggaggcu

SEQ ID NO: 230779 - RNA, 21 nt, Human
ucaugccuguaauccaacauu

SEQ ID NO: 230780 - RNA, 32 nt, Human
ucaugccuguaauccaagcacuuugagaggcu

SEQ ID NO: 230781 - RNA, 24 nt, Human
ucaugccuguaauccaagcauuuu

SEQ ID NO: 230782 - RNA, 32 nt, Human
ucaugccuguaauccaagcauuuugagaggcc

SEQ ID NO: 230783 - RNA, 23 nt, Human
ucaugccuguaauccagcacuuu

SEQ ID NO: 230784 - RNA, 32 nt, Human
ucaugccuguaauccagcacuuugggaggccg

SEQ ID NO: 230785 - RNA, 32 nt, Human
ucaugccuguaauccagcacuuugggaggcua

SEQ ID NO: 230786 - RNA, 23 nt, Human
ucaugccuguaauccaguacuuu

SEQ ID NO: 230787 - RNA, 32 nt, Human
ucaugccuguaauccaguacuuuaggaggcca

SEQ ID NO: 230788 - RNA, 24 nt, Human
ucaugccuguaaucccaaaacuuu

SEQ ID NO: 230789 - RNA, 32 nt, Human
ucaugccuguaaucccaaaacuuugggagucc

SEQ ID NO: 230790 - RNA, 22 nt, Human
ucaugccuguaaucccaacacu

SEQ ID NO: 230791 - RNA, 32 nt, Human
ucaugccuguaaucccaacacucugggaggcc

SEQ ID NO: 230792 - RNA, 23 nt, Human
ucaugccuguaaucccaacacuu

SEQ ID NO: 230793 - RNA, 32 nt, Human
ucaugccuguaaucccaacacuuagggaggcu

SEQ ID NO: 230794 - RNA, 32 nt, Human
ucaugccuguaaucccaacacuuaggguggcu

SEQ ID NO: 230795 - RNA, 24 nt, Human
ucaugccuguaaucccaacacuuu

SEQ ID NO: 230796 - RNA, 32 nt, Human
ucaugccuguaaucccaacacuuugagaagcu

SEQ ID NO: 230797 - RNA, 32 nt, Human
ucaugccuguaaucccaacacuuugagaggcc

SEQ ID NO: 230798 - RNA, 32 nt, Human
ucaugccuguaaucccaacacuuugggagacu

SEQ ID NO: 230799 - RNA, 32 nt, Human
ucaugccuguaaucccaacacuuugggaggaa

SEQ ID NO: 230800 - RNA, 32 nt, Human
ucaugccuguaaucccaacacuuugggaggcc

SEQ ID NO: 230801 - RNA, 32 nt, Human
ucaugccuguaaucccaacacuuugggaggcu

SEQ ID NO: 230802 - RNA, 32 nt, Human
ucaugccuguaaucccaacacuuugggagucc

SEQ ID NO: 230803 - RNA, 32 nt, Human
ucaugccuguaaucccaacacuuuugggaggu

SEQ ID NO: 230804 - RNA, 22 nt, Human
ucaugccuguaaucccaacauu

SEQ ID NO: 230805 - RNA, 32 nt, Human
ucaugccuguaaucccaacauucugggaggcc

SEQ ID NO: 230806 - RNA, 24 nt, Human
ucaugccuguaaucccaacauuuu

SEQ ID NO: 230807 - RNA, 32 nt, Human
ucaugccuguaaucccaacauuuugggaggcc

SEQ ID NO: 230808 - RNA, 23 nt, Human
ucaugccuguaaucccaacucuu

SEQ ID NO: 230809 - RNA, 32 nt, Human
ucaugccuguaaucccaacucuuggggaggca

SEQ ID NO: 230810 - RNA, 24 nt, Human
ucaugccuguaaucccaauacuuu

SEQ ID NO: 230811 - RNA, 32 nt, Human
ucaugccuguaaucccaauacuuugggaggcu

SEQ ID NO: 230812 - RNA, 32 nt, Human
ucaugccuguaaucccaaugcuuugggaggcc

SEQ ID NO: 230813 - RNA, 32 nt, Human
ucaugccuguaaucccaccacugaggucagga

SEQ ID NO: 230814 - RNA, 24 nt, Human
ucaugccuguaaucccaccacuuu

SEQ ID NO: 230815 - RNA, 32 nt, Human
ucaugccuguaaucccaccacuuugggaggcc

SEQ ID NO: 230816 - RNA, 32 nt, Human
ucaugccuguaaucccagaacuucgggaggcc

SEQ ID NO: 230817 - RNA, 24 nt, Human
ucaugccuguaaucccagaacuuu

SEQ ID NO: 230818 - RNA, 32 nt, Human
ucaugccuguaaucccagaacuuugggaggcc

SEQ ID NO: 230819 - RNA, 32 nt, Human
ucaugccuguaaucccagaauuuugggaggcc

SEQ ID NO: 230820 - RNA, 19 nt, Human
ucaugccuguaaucccagc

SEQ ID NO: 230821 - RNA, 20 nt, Human
ucaugccuguaaucccagca

SEQ ID NO: 230822 - RNA, 32 nt, Human
ucaugccuguaaucccagcaauuuaggaggcc

SEQ ID NO: 230823 - RNA, 21 nt, Human
ucaugccuguaaucccagcac

SEQ ID NO: 230824 - RNA, 32 nt, Human
ucaugccuguaaucccagcacauugggaagau

SEQ ID NO: 230825 - RNA, 32 nt, Human
ucaugccuguaaucccagcacccugggaggcc

SEQ ID NO: 230826 - RNA, 32 nt, Human
ucaugccuguaaucccagcaccuugaaggccg

SEQ ID NO: 230827 - RNA, 32 nt, Human
ucaugccuguaaucccagcaccuugggaggcc

SEQ ID NO: 230828 - RNA, 32 nt, Human
ucaugccuguaaucccagcacguugggaggcc

SEQ ID NO: 230829 - RNA, 22 nt, Human
ucaugccuguaaucccagcacu

SEQ ID NO: 230830 - RNA, 32 nt, Human
ucaugccuguaaucccagcacuaugggaggcc

SEQ ID NO: 230831 - RNA, 32 nt, Human
ucaugccuguaaucccagcacuaugggaggcu

SEQ ID NO: 230832 - RNA, 32 nt, Human
ucaugccuguaaucccagcacucuggaaggcu

SEQ ID NO: 230833 - RNA, 32 nt, Human
ucaugccuguaaucccagcacucugggaggcc

SEQ ID NO: 230834 - RNA, 32 nt, Human
ucaugccuguaaucccagcacucugggaggcu

SEQ ID NO: 230835 - RNA, 32 nt, Human
ucaugccuguaaucccagcacuguaggcggcc

SEQ ID NO: 230836 - RNA, 32 nt, Human
ucaugccuguaaucccagcacugugggaagcu

SEQ ID NO: 230837 - RNA, 32 nt, Human
ucaugccuguaaucccagcacugugggaggcu

SEQ ID NO: 230838 - RNA, 23 nt, Human
ucaugccuguaaucccagcacuu

SEQ ID NO: 230839 - RNA, 32 nt, Human
ucaugccuguaaucccagcacuucaggaggcc

SEQ ID NO: 230840 - RNA, 32 nt, Human
ucaugccuguaaucccagcacuucgggaggcc

SEQ ID NO: 230841 - RNA, 32 nt, Human
ucaugccuguaaucccagcacuuggagaggcu

SEQ ID NO: 230842 - RNA, 32 nt, Human
ucaugccuguaaucccagcacuugggaggcca

SEQ ID NO: 230843 - RNA, 32 nt, Human
ucaugccuguaaucccagcacuugggaggccg

SEQ ID NO: 230844 - RNA, 32 nt, Human
ucaugccuguaaucccagcacuuggggaggcc

SEQ ID NO: 230845 - RNA, 24 nt, Human
ucaugccuguaaucccagcacuuu

SEQ ID NO: 230846 - RNA, 32 nt, Human
ucaugccuguaaucccagcacuuucagaggcu

SEQ ID NO: 230847 - RNA, 32 nt, Human
ucaugccuguaaucccagcacuuucggaggcc

SEQ ID NO: 230848 - RNA, 32 nt, Human
ucaugccuguaaucccagcacuuugagagacc

SEQ ID NO: 230849 - RNA, 32 nt, Human
ucaugccuguaaucccagcacuuugagagacu

SEQ ID NO: 230850 - RNA, 32 nt, Human
ucaugccuguaaucccagcacuuugagaggcc

SEQ ID NO: 230851 - RNA, 32 nt, Human
ucaugccuguaaucccagcacuuugagaggcu

SEQ ID NO: 230852 - RNA, 32 nt, Human
ucaugccuguaaucccagcacuuugauaggcu

SEQ ID NO: 230853 - RNA, 32 nt, Human
ucaugccuguaaucccagcacuuugcgaggcc

SEQ ID NO: 230854 - RNA, 32 nt, Human
ucaugccuguaaucccagcacuuuggaaggcc

SEQ ID NO: 230855 - RNA, 32 nt, Human
ucaugccuguaaucccagcacuuuggaaggcu

SEQ ID NO: 230856 - RNA, 32 nt, Human
ucaugccuguaaucccagcacuuuggcaggac

SEQ ID NO: 230857 - RNA, 32 nt, Human
ucaugccuguaaucccagcacuuugggaagca

SEQ ID NO: 230858 - RNA, 32 nt, Human
ucaugccuguaaucccagcacuuugggaagcc

SEQ ID NO: 230859 - RNA, 32 nt, Human
ucaugccuguaaucccagcacuuugggaagcu

SEQ ID NO: 230860 - RNA, 32 nt, Human
ucaugccuguaaucccagcacuuugggaaguc

SEQ ID NO: 230861 - RNA, 32 nt, Human
ucaugccuguaaucccagcacuuugggagacu

SEQ ID NO: 230862 - RNA, 32 nt, Human
ucaugccuguaaucccagcacuuugggaggag

SEQ ID NO: 230863 - RNA, 32 nt, Human
ucaugccuguaaucccagcacuuugggaggca

SEQ ID NO: 230864 - RNA, 32 nt, Human
ucaugccuguaaucccagcacuuugggaggcc

SEQ ID NO: 230865 - RNA, 32 nt, Human
ucaugccuguaaucccagcacuuugggaggcg

SEQ ID NO: 230866 - RNA, 32 nt, Human
ucaugccuguaaucccagcacuuugggaggcu

SEQ ID NO: 230867 - RNA, 32 nt, Human
ucaugccuguaaucccagcacuuugggagguc

SEQ ID NO: 230868 - RNA, 32 nt, Human
ucaugccuguaaucccagcacuuugggagguu

SEQ ID NO: 230869 - RNA, 32 nt, Human
ucaugccuguaaucccagcacuuugggagucu

SEQ ID NO: 230870 - RNA, 32 nt, Human
ucaugccuguaaucccagcacuuugggaugcu

SEQ ID NO: 230871 - RNA, 32 nt, Human
ucaugccuguaaucccagcacuuugggauucu

SEQ ID NO: 230872 - RNA, 32 nt, Human
ucaugccuguaaucccagcacuuuggggagcc

SEQ ID NO: 230873 - RNA, 32 nt, Human
ucaugccuguaaucccagcacuuuggggaggc

SEQ ID NO: 230874 - RNA, 32 nt, Human
ucaugccuguaaucccagcacuuugggggcca

SEQ ID NO: 230875 - RNA, 32 nt, Human
ucaugccuguaaucccagcacuuugguaggcu

SEQ ID NO: 230876 - RNA, 32 nt, Human
ucaugccuguaaucccagcacuuuucggaggc

SEQ ID NO: 230877 - RNA, 32 nt, Human
ucaugccuguaaucccagcacuuuugaggcug

SEQ ID NO: 230878 - RNA, 32 nt, Human
ucaugccuguaaucccagcacuuuuggaggcc

SEQ ID NO: 230879 - RNA, 22 nt, Human
ucaugccuguaaucccagcauu

SEQ ID NO: 230880 - RNA, 24 nt, Human
ucaugccuguaaucccagcauuuu

SEQ ID NO: 230881 - RNA, 32 nt, Human
ucaugccuguaaucccagcauuuugagaggcu

SEQ ID NO: 230882 - RNA, 32 nt, Human
ucaugccuguaaucccagcauuuugggagacc

SEQ ID NO: 230883 - RNA, 32 nt, Human
ucaugccuguaaucccagcauuuugggaggca

SEQ ID NO: 230884 - RNA, 32 nt, Human
ucaugccuguaaucccagcauuuugggaggcc

SEQ ID NO: 230885 - RNA, 32 nt, Human
ucaugccuguaaucccagcauuuugggaggcu

SEQ ID NO: 230886 - RNA, 24 nt, Human
ucaugccuguaaucccagcccuuu

SEQ ID NO: 230887 - RNA, 32 nt, Human
ucaugccuguaaucccagcccuuugggaggcu

SEQ ID NO: 230888 - RNA, 24 nt, Human
ucaugccuguaaucccagcgcuuu

SEQ ID NO: 230889 - RNA, 32 nt, Human
ucaugccuguaaucccagcgcuuugggaggcc

SEQ ID NO: 230890 - RNA, 32 nt, Human
ucaugccuguaaucccagcgcuuugggaggcu

SEQ ID NO: 230891 - RNA, 22 nt, Human
ucaugccuguaaucccagcuac

SEQ ID NO: 230892 - RNA, 32 nt, Human
ucaugccuguaaucccagcuacgcaggaggcc

SEQ ID NO: 230893 - RNA, 32 nt, Human
ucaugccuguaaucccagcuacucaggaggcu

SEQ ID NO: 230894 - RNA, 24 nt, Human
ucaugccuguaaucccaggacuuu

SEQ ID NO: 230895 - RNA, 32 nt, Human
ucaugccuguaaucccaggacuuugggaggcc

SEQ ID NO: 230896 - RNA, 32 nt, Human
ucaugccuguaaucccaggacuuugguaggcc

SEQ ID NO: 230897 - RNA, 22 nt, Human
ucaugccuguaaucccaguacu

SEQ ID NO: 230898 - RNA, 32 nt, Human
ucaugccuguaaucccaguacucugggaagcc

SEQ ID NO: 230899 - RNA, 24 nt, Human
ucaugccuguaaucccaguacuuu

SEQ ID NO: 230900 - RNA, 32 nt, Human
ucaugccuguaaucccaguacuuuggaaagcc

SEQ ID NO: 230901 - RNA, 32 nt, Human
ucaugccuguaaucccaguacuuugggaggcc

SEQ ID NO: 230902 - RNA, 32 nt, Human
ucaugccuguaaucccaguacuuugggaggcu

SEQ ID NO: 230903 - RNA, 24 nt, Human
ucaugccuguaaucccagugcuuu

SEQ ID NO: 230904 - RNA, 32 nt, Human
ucaugccuguaaucccagugcuuugggaggcu

SEQ ID NO: 230905 - RNA, 24 nt, Human
ucaugccuguaauccccgcacuuu

SEQ ID NO: 230906 - RNA, 32 nt, Human
ucaugccuguaaucccgacacuuugggaggcc

SEQ ID NO: 230907 - RNA, 32 nt, Human
ucaugccuguaaucccggcacuuugggaggcc

SEQ ID NO: 230908 - RNA, 20 nt, Human
ucaugccuguaaucccugca

SEQ ID NO: 230909 - RNA, 32 nt, Human
ucaugccuguaaucccugcaauuugggagacc

SEQ ID NO: 230910 - RNA, 23 nt, Human
ucaugccuguaaucccugcacuu

SEQ ID NO: 230911 - RNA, 24 nt, Human
ucaugccuguaaucccugcacuuu

SEQ ID NO: 230912 - RNA, 32 nt, Human
ucaugccuguaaucccugcacuuugggaggcu

SEQ ID NO: 230913 - RNA, 32 nt, Human
ucaugccuguaaucccugcacuuugggaugcc

SEQ ID NO: 230914 - RNA, 23 nt, Human
ucaugccuguaauccgagcacuu

SEQ ID NO: 230915 - RNA, 32 nt, Human
ucaugccuguaauccgagcacuucgggaagcu

SEQ ID NO: 230916 - RNA, 24 nt, Human
ucaugccuguaauccgagcacuuu

SEQ ID NO: 230917 - RNA, 32 nt, Human
ucaugccuguaauccgagcacuuugggaggcc

SEQ ID NO: 230918 - RNA, 32 nt, Human
ucaugccuguaauccgagugcuuuaggaggcc

SEQ ID NO: 230919 - RNA, 23 nt, Human
ucaugccuguaauccuaacacuu

SEQ ID NO: 230920 - RNA, 24 nt, Human
ucaugccuguaauccuaacacuuu

SEQ ID NO: 230921 - RNA, 32 nt, Human
ucaugccuguaauccuaacacuuugggaggcc

SEQ ID NO: 230922 - RNA, 21 nt, Human
ucaugccuguaauccuagcac

SEQ ID NO: 230923 - RNA, 32 nt, Human
ucaugccuguaauccuagcaccuugggaggcu

SEQ ID NO: 230924 - RNA, 24 nt, Human
ucaugccuguaauccuagcacuuu

SEQ ID NO: 230925 - RNA, 32 nt, Human
ucaugccuguaauccuagcacuuugagaggcc

SEQ ID NO: 230926 - RNA, 32 nt, Human
ucaugccuguaauccuagcacuuuggaaggcu

SEQ ID NO: 230927 - RNA, 32 nt, Human
ucaugccuguaauccuagcacuuuggaagguc

SEQ ID NO: 230928 - RNA, 32 nt, Human
ucaugccuguaauccuagcacuuugggaagcc

SEQ ID NO: 230929 - RNA, 32 nt, Human
ucaugccuguaauccuagcacuuugggaggcc

SEQ ID NO: 230930 - RNA, 32 nt, Human
ucaugccuguaauccuagcacuuugggaggcu

SEQ ID NO: 230931 - RNA, 32 nt, Human
ucaugccuguaauccuagcacuuuggguggcu

SEQ ID NO: 230932 - RNA, 24 nt, Human
ucaugccuguaauccuagcagcuu

SEQ ID NO: 230933 - RNA, 32 nt, Human
ucaugccuguaauccuagcagcuugggaggcc

SEQ ID NO: 230934 - RNA, 32 nt, Human
ucaugccuguaauccuagcagguugggaggcc

SEQ ID NO: 230935 - RNA, 24 nt, Human
ucaugccuguaauccuagcauuuu

SEQ ID NO: 230936 - RNA, 32 nt, Human
ucaugccuguaauccuagcauuuugggaggac

SEQ ID NO: 230937 - RNA, 24 nt, Human
ucaugccuguaauccuaguacuuu

SEQ ID NO: 230938 - RNA, 32 nt, Human
ucaugccuguaauccuaguacuuugggaggcc

SEQ ID NO: 230939 - RNA, 24 nt, Human
ucaugccuguaauccuggcacuuu

SEQ ID NO: 230940 - RNA, 32 nt, Human
ucaugccuguaauccuggcacuuugggaggcu

SEQ ID NO: 230941 - RNA, 24 nt, Human
ucaugccuguaaucgcagcacuuu

SEQ ID NO: 230942 - RNA, 32 nt, Human
ucaugccuguaaucgcagcacuuugggaggcc

SEQ ID NO: 230943 - RNA, 24 nt, Human
ucaugccuguaaucguagcacuuu

SEQ ID NO: 230944 - RNA, 32 nt, Human
ucaugccuguaaucguagcacuuugagaggcc

SEQ ID NO: 230945 - RNA, 32 nt, Human
ucaugccuguaaucucaacacuuugggaagcc

SEQ ID NO: 230946 - RNA, 25 nt, Human
ucaugccuguaaucucaagcacuuu

SEQ ID NO: 230947 - RNA, 24 nt, Human
ucaugccuguaaucucagaacuuu

SEQ ID NO: 230948 - RNA, 32 nt, Human
ucaugccuguaaucucagaacuuugggaggcc

SEQ ID NO: 230949 - RNA, 20 nt, Human
ucaugccuguaaucucagca

SEQ ID NO: 230950 - RNA, 32 nt, Human
ucaugccuguaaucucagcaauuugggaggcc

SEQ ID NO: 230951 - RNA, 32 nt, Human
ucaugccuguaaucucagcacuguaggaggcc

SEQ ID NO: 230952 - RNA, 24 nt, Human
ucaugccuguaaucucagcacuuu

SEQ ID NO: 230953 - RNA, 32 nt, Human
ucaugccuguaaucucagcacuuugagaggcu

SEQ ID NO: 230954 - RNA, 32 nt, Human
ucaugccuguaaucucagcacuuugggagacu

SEQ ID NO: 230955 - RNA, 32 nt, Human
ucaugccuguaaucucagcacuuugggaggcc

SEQ ID NO: 230956 - RNA, 32 nt, Human
ucaugccuguaaucucagcacuuugggaggcu

SEQ ID NO: 230957 - RNA, 24 nt, Human
ucaugccuguaaucucagcuacuu

SEQ ID NO: 230958 - RNA, 32 nt, Human
ucaugccuguaaucucagcuacuuggcuggcu

SEQ ID NO: 230959 - RNA, 21 nt, Human
ucaugccuguaaucucaguac

SEQ ID NO: 230960 - RNA, 32 nt, Human
ucaugccuguaaucucaguacauugggaggcc

SEQ ID NO: 230961 - RNA, 24 nt, Human
ucaugccuguaaucucaguacuuu

SEQ ID NO: 230962 - RNA, 32 nt, Human
ucaugccuguaaucucaguacuuugggaggua

SEQ ID NO: 230963 - RNA, 25 nt, Human
ucaugccuguaaucuccagcacuuu

SEQ ID NO: 230964 - RNA, 32 nt, Human
ucaugccuguaaucuccagcacuuugggaggc

SEQ ID NO: 230965 - RNA, 24 nt, Human
ucaugccuguaaucugagcacuuu

SEQ ID NO: 230966 - RNA, 24 nt, Human
ucaugccuguaaucuuaguacuuu

SEQ ID NO: 230967 - RNA, 24 nt, Human
ucaugccuguaaucuuaucacuuu

SEQ ID NO: 230968 - RNA, 24 nt, Human
ucaugccuguaaugccagcacuuu

SEQ ID NO: 230969 - RNA, 24 nt, Human
ucaugccuguaauuccagcacuuu

SEQ ID NO: 230970 - RNA, 32 nt, Human
ucaugccuguaauuccagcacuuuaggaggcc

SEQ ID NO: 230971 - RNA, 32 nt, Human
ucaugccuguaauuccagcacuuugggaggau

SEQ ID NO: 230972 - RNA, 32 nt, Human
ucaugccuguaauuccagcacuuugggaggca

SEQ ID NO: 230973 - RNA, 32 nt, Human
ucaugccuguaauuccagcacuuugggaggcc

SEQ ID NO: 230974 - RNA, 32 nt, Human
ucaugccuguaauuccagcacuuugggaggcg

SEQ ID NO: 230975 - RNA, 32 nt, Human
ucaugccuguaauuccagcacuuugggaggcu

SEQ ID NO: 230976 - RNA, 32 nt, Human
ucaugccuguaauuccggcacuuugggaggcc

SEQ ID NO: 230977 - RNA, 24 nt, Human
ucaugccuguaauucuagcacuuu

SEQ ID NO: 230978 - RNA, 32 nt, Human
ucaugccuguaauuucaguacuuugggaggcc

SEQ ID NO: 230979 - RNA, 32 nt, Human
ucaugccuguaguaaucccagcacuuuuggag

SEQ ID NO: 230980 - RNA, 22 nt, Human
ucaugccuguagucccagcacu

SEQ ID NO: 230981 - RNA, 24 nt, Human
ucaugccuguagucccagcacucg

SEQ ID NO: 230982 - RNA, 24 nt, Human
ucaugccuguagucccagcacuuu

SEQ ID NO: 230983 - RNA, 32 nt, Human
ucaugccuguagucccagcuacuccagagguc

SEQ ID NO: 230984 - RNA, 32 nt, Human
ucaugccuguagucccagcuacucuggaggcu

SEQ ID NO: 230985 - RNA, 32 nt, Human
ucaugccuguagucccagcuacuugggaggcu

SEQ ID NO: 230986 - RNA, 26 nt, Human
ucaugccuguauaaucccagcacuuu

SEQ ID NO: 230987 - RNA, 32 nt, Human
ucaugccuguauaaucccagcacuuugggagg

SEQ ID NO: 230988 - RNA, 24 nt, Human
ucaugccuguauucccaccacuuu

SEQ ID NO: 230989 - RNA, 24 nt, Human
ucaugccuguauucucagcacuuu

SEQ ID NO: 230990 - RNA, 24 nt, Human
ucaugccugucaucccagcacuuu

SEQ ID NO: 230991 - RNA, 32 nt, Human
ucaugccugucaucccagcacuuugggaagcu

SEQ ID NO: 230992 - RNA, 32 nt, Human
ucaugccugucaucccagcacuuugggaggcc

SEQ ID NO: 230993 - RNA, 23 nt, Human
ucaugccugucaucccagcauuu

SEQ ID NO: 230994 - RNA, 32 nt, Human
ucaugccugucaucccagcauuugggaggcug

SEQ ID NO: 230995 - RNA, 22 nt, Human
ucaugccugugaucccagcacu

SEQ ID NO: 230996 - RNA, 24 nt, Human
ucaugccugugaucccagcacuuu

SEQ ID NO: 230997 - RNA, 32 nt, Human
ucaugccugugaucccagcacuuugggaggcg

SEQ ID NO: 230998 - RNA, 32 nt, Human
ucaugccugugaucccagcacuuuggguggcu

SEQ ID NO: 230999 - RNA, 32 nt, Human
ucaugccugugaucccagcuacucgggaggcu

SEQ ID NO: 231000 - RNA, 24 nt, Human
ucaugccugugaucccuacacuuu

SEQ ID NO: 231001 - RNA, 24 nt, Human
ucaugccugugauccuagcacuuu

SEQ ID NO: 231002 - RNA, 24 nt, Human
ucaugccuguggucccagaacuuu

SEQ ID NO: 231003 - RNA, 24 nt, Human
ucaugccuguggucccagcacuuu

SEQ ID NO: 231004 - RNA, 24 nt, Human
ucaugccuguggucccagcgcuuu

SEQ ID NO: 231005 - RNA, 32 nt, Human
ucaugccuguggucccagcuacuugagaggcu

SEQ ID NO: 231006 - RNA, 32 nt, Human
ucaugccuguguucccagcuauucaggaggcu

SEQ ID NO: 231007 - RNA, 19 nt, Human
ucaugccuuguuuuugaua

SEQ ID NO: 231008 - RNA, 32 nt, Human
ucaugccuuguuuuugauaccuccuggcagcu

SEQ ID NO: 231009 - RNA, 24 nt, Human
ucaugccuuuaaucccagcacuuu

SEQ ID NO: 231010 - RNA, 32 nt, Human
ucaugccuuuaaucccagcacuuugggaggcc

SEQ ID NO: 231011 - RNA, 32 nt, Human
ucaugccuuuaaucccagcacuuugggaggcu

SEQ ID NO: 231012 - RNA, 24 nt, Human
ucaugccuuuaaucccagcauuuu

SEQ ID NO: 231013 - RNA, 32 nt, Human
ucaugccuuuaaucccagcauuuugggaggcu

SEQ ID NO: 231014 - RNA, 22 nt, Human
ucaugccuuugacaagcauuuu

SEQ ID NO: 231015 - RNA, 32 nt, Human
ucaugcgacugcacuccagccugggugacuga

SEQ ID NO: 231016 - RNA, 32 nt, Human
ucaugcgagagggagaugugugggcgagagcc

SEQ ID NO: 231017 - RNA, 32 nt, Human
ucaugcgccgguuaaacucugccauuaugccu

SEQ ID NO: 231018 - RNA, 32 nt, Human
ucaugcgcgguggcucacgccuguaauucuag

SEQ ID NO: 231019 - RNA, 32 nt, Human
ucaugcggcacgggggccccuuguucagcgag

SEQ ID NO: 231020 - RNA, 32 nt, Human
ucaugcgggaggcaaugagcugcuggagcaca

SEQ ID NO: 231021 - RNA, 32 nt, Human
ucaugcgggcccagagggcagcagagccgcuu

SEQ ID NO: 231022 - RNA, 32 nt, Human
ucaugcgggucagaggaugaaggggcacaggg

SEQ ID NO: 231023 - RNA, 20 nt, Human
ucaugcggugggugcugcca

SEQ ID NO: 231024 - RNA, 32 nt, Human
ucaugcgucacugcagccuccaccucccgggc

SEQ ID NO: 231025 - RNA, 32 nt, Human
ucaugcguguaaucccagcacuuugggaggcc

SEQ ID NO: 231026 - RNA, 32 nt, Human
ucaugcuacccaccaccucagugcugagguca

SEQ ID NO: 231027 - RNA, 32 nt, Human
ucaugcuacugcacuccagccuaggugacaga

SEQ ID NO: 231028 - RNA, 32 nt, Human
ucaugcuacugcacuccagccugggcgacaga

SEQ ID NO: 231029 - RNA, 32 nt, Human
ucaugcuacugcacuccagccugggugacaga

SEQ ID NO: 231030 - RNA, 32 nt, Human
ucaugcuacugcacuccagcuuagguggcaaa

SEQ ID NO: 231031 - RNA, 32 nt, Human
ucaugcuacugcacucuagccugagcgacaga

SEQ ID NO: 231032 - RNA, 32 nt, Human
ucaugcuacugcaugccagccugggugacaaa

SEQ ID NO: 231033 - RNA, 32 nt, Human
ucaugcuagugcgcuccagccugggcaacaga

SEQ ID NO: 231034 - RNA, 32 nt, Human
ucaugcucaauccagccuuagcugagcaccug

SEQ ID NO: 231035 - RNA, 32 nt, Human
ucaugcucagugccaggggcagaacacugggg

SEQ ID NO: 231036 - RNA, 23 nt, Human
ucaugcuccccgaucuccuuccu

SEQ ID NO: 231037 - RNA, 32 nt, Human
ucaugcucccuccagcccaugacccggggcua

SEQ ID NO: 231038 - RNA, 32 nt, Human
ucaugcuccuuugcacagcccagggccuguuu

SEQ ID NO: 231039 - RNA, 32 nt, Human
ucaugcucucuaaauuuauucugccauagaag

SEQ ID NO: 231040 - RNA, 32 nt, Human
ucaugcucugcucucuucaaccagaccucuac

SEQ ID NO: 231041 - RNA, 32 nt, Human
ucaugcucuguggcuccaggguuucuguuacu

SEQ ID NO: 231042 - RNA, 32 nt, Human
ucaugcugaccuugcaaauucagccgcugcuu

SEQ ID NO: 231043 - RNA, 32 nt, Human
ucaugcugagcgcucucuuaggcacaggcugg

SEQ ID NO: 231044 - RNA, 32 nt, Human
ucaugcugagugucuucauguuucauguaagu

SEQ ID NO: 231045 - RNA, 32 nt, Human
ucaugcugcaccuucagagccaguccucuagu

SEQ ID NO: 231046 - RNA, 22 nt, Human
ucaugcugcagaauauguuaua

SEQ ID NO: 231047 - RNA, 27 nt, Human
ucaugcugcccgcugccuccucccuca

SEQ ID NO: 231048 - RNA, 32 nt, Human
ucaugcugcuccaccagugggccuuggaaaau

SEQ ID NO: 231049 - RNA, 22 nt, Human
ucaugcuggccggcguggcccc

SEQ ID NO: 231050 - RNA, 23 nt, Human
ucaugcuguaaucccaucacuuu

SEQ ID NO: 231051 - RNA, 32 nt, Human
ucaugcugucucuccgcuaaagccugaggccc

SEQ ID NO: 231052 - RNA, 32 nt, Human
ucaugcuguggcuggggccucuugcuuccugc

SEQ ID NO: 231053 - RNA, 32 nt, Human
ucaugcuguuaugauuucaccuggugaaucag

SEQ ID NO: 231054 - RNA, 32 nt, Human
ucaugcuucucccccauucccacccucucugc

SEQ ID NO: 231055 - RNA, 32 nt, Human
ucaugcuugccuugaucuccucuccuuccucu

SEQ ID NO: 231056 - RNA, 23 nt, Human
ucaugcuuguaaucccaacacuu

SEQ ID NO: 231057 - RNA, 24 nt, Human
ucaugcuuguaaucccaacacuuu

SEQ ID NO: 231058 - RNA, 32 nt, Human
ucaugcuuguaaucccaacacuuugggaagcc

SEQ ID NO: 231059 - RNA, 32 nt, Human
ucaugcuuguaaucccagcacuuggggaggcc

SEQ ID NO: 231060 - RNA, 24 nt, Human
ucaugcuuguaaucccagcacuuu

SEQ ID NO: 231061 - RNA, 32 nt, Human
ucaugcuuguaaucccagcacuuugggaagcu

SEQ ID NO: 231062 - RNA, 32 nt, Human
ucaugcuuguaaucccagcacuuugggaggcc

SEQ ID NO: 231063 - RNA, 32 nt, Human
ucaugcuuguaaucccagcacuuugguaggcu

SEQ ID NO: 231064 - RNA, 24 nt, Human
ucaugcuuguaaucccaguacuuu

SEQ ID NO: 231065 - RNA, 32 nt, Human
ucaugcuuguaaucccaguacuuuaggaggcu

SEQ ID NO: 231066 - RNA, 24 nt, Human
ucaugcuuguaaucccggcacuuu

SEQ ID NO: 231067 - RNA, 24 nt, Human
ucaugcuuguaauccuagcacuuu

SEQ ID NO: 231068 - RNA, 32 nt, Human
ucaugcuuguaauccuagcacuuuuugaggcc

SEQ ID NO: 231069 - RNA, 32 nt, Human
ucaugcuuguggucccagcuguucaggaggau

SEQ ID NO: 231070 - RNA, 32 nt, Human
ucaugcuuuucaaagcauccuaacuugcuaag

SEQ ID NO: 231071 - RNA, 32 nt, Human
ucauggaaagacucaacuugcaacugugcccu

SEQ ID NO: 231072 - RNA, 32 nt, Human
ucauggaaaggguggagaauggaggggaacca

SEQ ID NO: 231073 - RNA, 32 nt, Human
ucauggaacuaggggauugucucacuucucca

SEQ ID NO: 231074 - RNA, 32 nt, Human
ucauggaaggagacccaggagucaacuuguuu

SEQ ID NO: 231075 - RNA, 32 nt, Human
ucauggaaggaucagacugggaaccacagagg

SEQ ID NO: 231076 - RNA, 32 nt, Human
ucauggaagggccgcugagcaaauggacuaac

SEQ ID NO: 231077 - RNA, 32 nt, Human
ucauggaauagaaugcugucaccagaaaaugc

SEQ ID NO: 231078 - RNA, 22 nt, Human
ucauggaauguuguuguguuag

SEQ ID NO: 231079 - RNA, 27 nt, Human
ucauggacauacagcuggacccugcca

SEQ ID NO: 231080 - RNA, 23 nt, Human
ucauggacgaaguugccgaugga

SEQ ID NO: 231081 - RNA, 32 nt, Human
ucauggacgggagcgcaguggggaagguaggg

SEQ ID NO: 231082 - RNA, 32 nt, Human
ucauggacgucuuaaucuuccacacacauccc

SEQ ID NO: 231083 - RNA, 32 nt, Human
ucauggacucaagugaucugccugccucagcc

SEQ ID NO: 231084 - RNA, 32 nt, Human
ucauggacugaagccugaggccaucuguccgu

SEQ ID NO: 231085 - RNA, 32 nt, Human
ucauggacuguacaagucucuauacaaugucu

SEQ ID NO: 231086 - RNA, 32 nt, Human
ucauggagaacuguuucccuacaaugacaaaa

SEQ ID NO: 231087 - RNA, 32 nt, Human
ucauggagcacuuccuuuccagaaacugauuu

SEQ ID NO: 231088 - RNA, 32 nt, Human
ucauggagcugcagagagcuccuccagccugg

SEQ ID NO: 231089 - RNA, 32 nt, Human
ucauggaggagaaaggacgugagauccugcug

SEQ ID NO: 231090 - RNA, 32 nt, Human
ucauggaggcuggcagcugagcucagagguuc

SEQ ID NO: 231091 - RNA, 27 nt, Human
ucauggagguggccgagguggaaaguc

SEQ ID NO: 231092 - RNA, 32 nt, Human
ucauggaguagagucaggagaaaccccugaca

SEQ ID NO: 231093 - RNA, 32 nt, Human
ucauggagucagcaggcacguggauaaaaccu

SEQ ID NO: 231094 - RNA, 32 nt, Human
ucauggaguuagcuaacagcccagggaacugg

SEQ ID NO: 231095 - RNA, 32 nt, Human
ucauggaguugauaacaagaagaauaaagggc

SEQ ID NO: 231096 - RNA, 32 nt, Human
ucauggauagcucagagguauccucuuuuugc

SEQ ID NO: 231097 - RNA, 32 nt, Human
ucauggauauuggccuguaauuuuauuuucuu

SEQ ID NO: 231098 - RNA, 32 nt, Human
ucauggaucagacuuaguauuguuaagauggc

SEQ ID NO: 231099 - RNA, 32 nt, Human
ucauggaucccagcuacucucaacaaggcuua

SEQ ID NO: 231100 - RNA, 24 nt, Human
ucauggaugcaggggcuugucuga

SEQ ID NO: 231101 - RNA, 32 nt, Human
ucauggauggggcugcuuuugcagugggugcc

SEQ ID NO: 231102 - RNA, 32 nt, Human
ucauggauguuaggaaaucuagucaucuuccc

SEQ ID NO: 231103 - RNA, 32 nt, Human
ucauggauuguaacuaaagaagaaacgguucc

SEQ ID NO: 231104 - RNA, 32 nt, Human
ucauggcaacaucagcuuucuaauguucuaaa

SEQ ID NO: 231105 - RNA, 21 nt, Human
ucauggcaagggcuggcccca

SEQ ID NO: 231106 - RNA, 32 nt, Human
ucauggcacugcacuccagccugggcaacaga

SEQ ID NO: 231107 - RNA, 27 nt, Human
ucauggcacugccaccugggccuuugg

SEQ ID NO: 231108 - RNA, 27 nt, Human
ucauggcagaggaagcagcuguguucg

SEQ ID NO: 231109 - RNA, 32 nt, Human
ucauggcagaggaggaagaugagggcacggac

SEQ ID NO: 231110 - RNA, 32 nt, Human
ucauggcagcgaugaguaaucugugaugauac

SEQ ID NO: 231111 - RNA, 32 nt, Human
ucauggcaucaaggcucacugcagccuggacc

SEQ ID NO: 231112 - RNA, 32 nt, Human
ucauggcaucauugcauuccagccugggcaac

SEQ ID NO: 231113 - RNA, 32 nt, Human
ucauggccaagcgucuaaccuaaagucccagg

SEQ ID NO: 231114 - RNA, 32 nt, Human
ucauggccaccuggacaacuggcaaaccauuc

SEQ ID NO: 231115 - RNA, 32 nt, Human
ucauggccagccaggccuaccuggaggagacc

SEQ ID NO: 231116 - RNA, 32 nt, Human
ucauggccagccuguguuugcagaucacuggg

SEQ ID NO: 231117 - RNA, 32 nt, Human
ucauggccauaucaugaacccaggacaggcac

SEQ ID NO: 231118 - RNA, 32 nt, Human
ucauggccauuuccugcccuccuccaacuugu

SEQ ID NO: 231119 - RNA, 24 nt, Human
ucauggccauuuggcaugauugca

SEQ ID NO: 231120 - RNA, 32 nt, Human
ucauggcccagagacccaaaagaaugaaaggu

SEQ ID NO: 231121 - RNA, 19 nt, Human
ucauggcccagauugugaa

SEQ ID NO: 231122 - RNA, 32 nt, Human
ucauggcccauagauauucaaaagcaagauau

SEQ ID NO: 231123 - RNA, 32 nt, Human
ucauggcccauuuuauugucugccuuucagua

SEQ ID NO: 231124 - RNA, 32 nt, Human
ucauggcccugaggugggucagcuacucuccu

SEQ ID NO: 231125 - RNA, 32 nt, Human
ucauggccgacuggaauccugaguccugggaa

SEQ ID NO: 231126 - RNA, 32 nt, Human
ucauggccucggacaggcagaggcugugaaau

SEQ ID NO: 231127 - RNA, 27 nt, Human
ucauggcggacccuagagauaaggcgc

SEQ ID NO: 231128 - RNA, 32 nt, Human
ucauggcggaggcggaggcggagguugcagug

SEQ ID NO: 231129 - RNA, 32 nt, Human
ucauggcgugccaggguggugacaguugaaca

SEQ ID NO: 231130 - RNA, 32 nt, Human
ucauggcucacugaagccucgacuuccagggc

SEQ ID NO: 231131 - RNA, 32 nt, Human
ucauggcucacugaagucuugaccccgcugcc

SEQ ID NO: 231132 - RNA, 32 nt, Human
ucauggcucacugcaaccuccaccuccugggu

SEQ ID NO: 231133 - RNA, 32 nt, Human
ucauggcucacugcaaccucugccucccgguu

SEQ ID NO: 231134 - RNA, 32 nt, Human
ucauggcucacugcaaccuugaccucccaggc

SEQ ID NO: 231135 - RNA, 32 nt, Human
ucauggcucacugcaaccuugacgucccaggu

SEQ ID NO: 231136 - RNA, 32 nt, Human
ucauggcucacugcagccccaaccuucagggc

SEQ ID NO: 231137 - RNA, 32 nt, Human
ucauggcucacugcagccccgaacuacugggc

SEQ ID NO: 231138 - RNA, 32 nt, Human
ucauggcucacugcagccucaaccuagccauc

SEQ ID NO: 231139 - RNA, 32 nt, Human
ucauggcucacugcagccucaaccugcugggc

SEQ ID NO: 231140 - RNA, 32 nt, Human
ucauggcucacugcagccucaaccuugaagac

SEQ ID NO: 231141 - RNA, 32 nt, Human
ucauggcucacugcagccuccaccucccaggc

SEQ ID NO: 231142 - RNA, 32 nt, Human
ucauggcucacugcagccuccaccuccuugac

SEQ ID NO: 231143 - RNA, 32 nt, Human
ucauggcucacugcagccucgaacuccugggc

SEQ ID NO: 231144 - RNA, 32 nt, Human
ucauggcucacugcagccucgaccucccaggc

SEQ ID NO: 231145 - RNA, 32 nt, Human
ucauggcucacugcagccucgaccuccugggc

SEQ ID NO: 231146 - RNA, 32 nt, Human
ucauggcucacugcagccucgagcuccugagc

SEQ ID NO: 231147 - RNA, 32 nt, Human
ucauggcucacugcagccuggagcuccugggc

SEQ ID NO: 231148 - RNA, 32 nt, Human
ucauggcucacugcagccuugaacucccagac

SEQ ID NO: 231149 - RNA, 32 nt, Human
ucauggcucacugcagccuugaacuccugagc

SEQ ID NO: 231150 - RNA, 32 nt, Human
ucauggcucacugcagccuugaacuccuggcc

SEQ ID NO: 231151 - RNA, 32 nt, Human
ucauggcucacugcagccuugaccuuccagcc

SEQ ID NO: 231152 - RNA, 32 nt, Human
ucauggcucacugcagccuugacuucucaggc

SEQ ID NO: 231153 - RNA, 32 nt, Human
ucauggcucacugcagcuuaagcucacugccu

SEQ ID NO: 231154 - RNA, 32 nt, Human
ucauggcucacugcagucucaaucucucuggc

SEQ ID NO: 231155 - RNA, 32 nt, Human
ucauggcucacugcagucucugccucccaggc

SEQ ID NO: 231156 - RNA, 32 nt, Human
ucauggcucacugcggccucaaacuccggggc

SEQ ID NO: 231157 - RNA, 32 nt, Human
ucauggcucacuguaaccucugccucccaggc

SEQ ID NO: 231158 - RNA, 32 nt, Human
ucauggcucacuguagccacaaccucucaggc

SEQ ID NO: 231159 - RNA, 32 nt, Human
ucauggcucacuguagccucgaccuccugggc

SEQ ID NO: 231160 - RNA, 32 nt, Human
ucauggcucauugcaaccuugaauuccugggc

SEQ ID NO: 231161 - RNA, 32 nt, Human
ucauggcucccaucuuggccccuggaggugag

SEQ ID NO: 231162 - RNA, 32 nt, Human
ucauggcucucggcagccuucccaggccccgc

SEQ ID NO: 231163 - RNA, 32 nt, Human
ucauggcucucggcggccuucccaggccccgc

SEQ ID NO: 231164 - RNA, 32 nt, Human
ucauggcucucggcggucuucccaggccccgc

SEQ ID NO: 231165 - RNA, 32 nt, Human
ucauggcugagcugcaaucuaacacuuuacug

SEQ ID NO: 231166 - RNA, 18 nt, Human
ucauggcugccaguucuu

SEQ ID NO: 231167 - RNA, 19 nt, Human
ucauggcuguccccuccca

SEQ ID NO: 231168 - RNA, 32 nt, Human
ucauggcuucaucucuaucuuuacuuucucuu

SEQ ID NO: 231169 - RNA, 32 nt, Human
ucauggcuuggaagaauguguuaggaaacucu

SEQ ID NO: 231170 - RNA, 32 nt, Human
ucauggcuugggcuggagugggcucucuggac

SEQ ID NO: 231171 - RNA, 32 nt, Human
ucauggcuuucaauaaguacacaauauaaugu

SEQ ID NO: 231172 - RNA, 32 nt, Human
ucaugggaaaucuaccuagaaagaaguucuug

SEQ ID NO: 231173 - RNA, 32 nt, Human
ucaugggacugcacuccagccugggugacaga

SEQ ID NO: 231174 - RNA, 32 nt, Human
ucaugggaggcagagcugggggagcgaggcug

SEQ ID NO: 231175 - RNA, 32 nt, Human
ucaugggaugcagcaguucuucaacgaaaacc

SEQ ID NO: 231176 - RNA, 24 nt, Human
ucaugggcaagaagccugacccca

SEQ ID NO: 231177 - RNA, 32 nt, Human
ucaugggcacucccacaggccagccugcacag

SEQ ID NO: 231178 - RNA, 32 nt, Human
ucaugggccacuguucucuuugaggggacagg

SEQ ID NO: 231179 - RNA, 32 nt, Human
ucaugggcuaacacucucuggugcacagggau

SEQ ID NO: 231180 - RNA, 32 nt, Human
ucaugggcucaagcaguccucccaccucagcc

SEQ ID NO: 231181 - RNA, 32 nt, Human
ucaugggcucaagcgauucuccugccucagcc

SEQ ID NO: 231182 - RNA, 32 nt, Human
ucaugggcucaagggauccugccaucucagcu

SEQ ID NO: 231183 - RNA, 32 nt, Human
ucauggggaaacucgcuccuucuguuggcaga

SEQ ID NO: 231184 - RNA, 32 nt, Human
ucauggggaaggaaaaugcagcacucuaaaug

SEQ ID NO: 231185 - RNA, 32 nt, Human
ucauggggaggggcccuucagagcagagucca

SEQ ID NO: 231186 - RNA, 32 nt, Human
ucauggggccagcccuagcugcuggagggacu

SEQ ID NO: 231187 - RNA, 21 nt, Human
ucauggggccucacucugcca

SEQ ID NO: 231188 - RNA, 32 nt, Human
ucauggggcuuugugaggguuugaaaaaguga

SEQ ID NO: 231189 - RNA, 32 nt, Human
ucauggggguccucuggcuggcccaggagcac

SEQ ID NO: 231190 - RNA, 22 nt, Human
ucaugggguuugguugugcuga

SEQ ID NO: 231191 - RNA, 23 nt, Human
ucaugggucaggaaccgcuccug

SEQ ID NO: 231192 - RNA, 32 nt, Human
ucauggguccagcaucaggccugaggucagca

SEQ ID NO: 231193 - RNA, 32 nt, Human
ucauggguccugagucaucccacacacagccu

SEQ ID NO: 231194 - RNA, 21 nt, Human
ucaugggugccuccugcccca

SEQ ID NO: 231195 - RNA, 24 nt, Human
ucauggguggcggguaugaucuca

SEQ ID NO: 231196 - RNA, 24 nt, Human
ucauggguguuaccugcuggcccu

SEQ ID NO: 231197 - RNA, 32 nt, Human
ucauggguuagaaggaaguguuugaaagucac

SEQ ID NO: 231198 - RNA, 32 nt, Human
ucaugguagcuggcugcagguguccugggcca

SEQ ID NO: 231199 - RNA, 27 nt, Human
ucaugguauugggaaccauagauuugu

SEQ ID NO: 231200 - RNA, 32 nt, Human
ucaugguccaagcaaauguuccagguauuuaa

SEQ ID NO: 231201 - RNA, 32 nt, Human
ucaugguccacacccaucacaccauggaaucu

SEQ ID NO: 231202 - RNA, 32 nt, Human
ucaugguccgguguccuuuucacuacaccaug

SEQ ID NO: 231203 - RNA, 32 nt, Human
ucauggucgugggcccuuucccauggaggcug

SEQ ID NO: 231204 - RNA, 32 nt, Human
ucauggucuacuccucuuuccguggcuggggg

SEQ ID NO: 231205 - RNA, 27 nt, Human
ucauggucucccaggcccucaggcucc

SEQ ID NO: 231206 - RNA, 32 nt, Human
ucauggucucuuccagcccagacauccuguga

SEQ ID NO: 231207 - RNA, 32 nt, Human
ucauggucugcuuaagaaaacuuaaagaaagg

SEQ ID NO: 231208 - RNA, 32 nt, Human
ucauggucuuccaggguuuuuauccuggcugu

SEQ ID NO: 231209 - RNA, 18 nt, Human
ucauggugaauuaucuca

SEQ ID NO: 231210 - RNA, 32 nt, Human
ucauggugaccaacucucagaaacuccagcug

SEQ ID NO: 231211 - RNA, 32 nt, Human
ucauggugucacaguuugguucuuuuguuuug

SEQ ID NO: 231212 - RNA, 32 nt, Human
ucaugguuaccugagucugggcaucugugaag

SEQ ID NO: 231213 - RNA, 32 nt, Human
ucaugguucacugcaaucucgacuuccaguuu

SEQ ID NO: 231214 - RNA, 27 nt, Human
ucaugguucacugcagccucagccucc

SEQ ID NO: 231215 - RNA, 32 nt, Human
ucaugguucacugcagccucgaccucccaggc

SEQ ID NO: 231216 - RNA, 32 nt, Human
ucaugguucacugcagccuugaccuccagggc

SEQ ID NO: 231217 - RNA, 32 nt, Human
ucaugguucacugcagucuugaccucccaggc

SEQ ID NO: 231218 - RNA, 32 nt, Human
ucaugguucacugcagucuugaccuuuugggc

SEQ ID NO: 231219 - RNA, 32 nt, Human
ucaugguucacuucaaccccuaccuccugggc

SEQ ID NO: 231220 - RNA, 32 nt, Human
ucaugguucuagcucccagucgccaagcguug

SEQ ID NO: 231221 - RNA, 32 nt, Human
ucaugguugagacucauugucuaccugugcag

SEQ ID NO: 231222 - RNA, 32 nt, Human
ucaugguugcaaugagucaugaucacgccacu

SEQ ID NO: 231223 - RNA, 32 nt, Human
ucaugguugcagcauuugaacuuuugguguua

SEQ ID NO: 231224 - RNA, 32 nt, Human
ucaugguugggagcugagggaaggcugagaau

SEQ ID NO: 231225 - RNA, 18 nt, Human
ucaugguuguccauuuga

SEQ ID NO: 231226 - RNA, 32 nt, Human
ucaugguuuugguaucaggaugaugcuggccu

SEQ ID NO: 231227 - RNA, 32 nt, Human
ucauguaaggacucaauuuggggaagagcauu

SEQ ID NO: 231228 - RNA, 32 nt, Human
ucauguaauaguggcuuucauuucuuauuaac

SEQ ID NO: 231229 - RNA, 32 nt, Human
ucauguaauccaggcuggggaagauggcggug

SEQ ID NO: 231230 - RNA, 32 nt, Human
ucauguaccgcuucuagugaaauguagaggaa

SEQ ID NO: 231231 - RNA, 32 nt, Human
ucauguacuaacugugcuuuucccucuugugu

SEQ ID NO: 231232 - RNA, 32 nt, Human
ucauguacuacugcacuugagcaugaaugggu

SEQ ID NO: 231233 - RNA, 19 nt, Human
ucauguaggucuucugguc

SEQ ID NO: 231234 - RNA, 32 nt, Human
ucauguauacagucauuuaugccuaaagccug

SEQ ID NO: 231235 - RNA, 23 nt, Human
ucauguauguaauccuagcacuu

SEQ ID NO: 231236 - RNA, 32 nt, Human
ucauguauguaauccuagcacuucgagaggcc

SEQ ID NO: 231237 - RNA, 32 nt, Human
ucauguauuccaucauaccaucaugccgugga

SEQ ID NO: 231238 - RNA, 19 nt, Human
ucaugucaagcaccucuca

SEQ ID NO: 231239 - RNA, 32 nt, Human
ucaugucaauaugggauuaaugccuaaacuuu

SEQ ID NO: 231240 - RNA, 19 nt, Human
ucaugucaaugaccauuca

SEQ ID NO: 231241 - RNA, 32 nt, Human
ucaugucaccgccauccuccugggcuuccucg

SEQ ID NO: 231242 - RNA, 32 nt, Human
ucaugucacggcaaccuccgccucccagguuc

SEQ ID NO: 231243 - RNA, 21 nt, Human
ucaugucacucgccacacuca

SEQ ID NO: 231244 - RNA, 32 nt, Human
ucaugucacugauugcauuccagccuggguga

SEQ ID NO: 231245 - RNA, 32 nt, Human
ucaugucacugcacuccagccugggugacaga

SEQ ID NO: 231246 - RNA, 32 nt, Human
ucaugucacugcacucuagcuugggagacaga

SEQ ID NO: 231247 - RNA, 32 nt, Human
ucaugucacugcagagguaugaaaaggagagc

SEQ ID NO: 231248 - RNA, 32 nt, Human
ucaugucacuguacuccagccugggcaacaga

SEQ ID NO: 231249 - RNA, 19 nt, Human
ucaugucagcaucagcuca

SEQ ID NO: 231250 - RNA, 19 nt, Human
ucaugucaguccacauuca

SEQ ID NO: 231251 - RNA, 32 nt, Human
ucaugucauugcacucuagucugggugacaag

SEQ ID NO: 231252 - RNA, 32 nt, Human
ucaugucauuuguucaagaaacaagugauaau

SEQ ID NO: 231253 - RNA, 32 nt, Human
ucauguccaaacguccucuuuaguuuuugguu

SEQ ID NO: 231254 - RNA, 32 nt, Human
ucauguccagaggcugaggauggagguggaag

SEQ ID NO: 231255 - RNA, 32 nt, Human
ucaugucccacaggccacagagcccagugugu

SEQ ID NO: 231256 - RNA, 32 nt, Human
ucaugucccagccugggcaacauagcaagacc

SEQ ID NO: 231257 - RNA, 32 nt, Human
ucauguccccucccaugcaaagccccuacugg

SEQ ID NO: 231258 - RNA, 32 nt, Human
ucauguccucgccucugccacaaaccauccuc

SEQ ID NO: 231259 - RNA, 24 nt, Human
ucauguccucggucucuugccuca

SEQ ID NO: 231260 - RNA, 32 nt, Human
ucauguccuucaggaucucugcccucaaaauu

SEQ ID NO: 231261 - RNA, 31 nt, Human
ucauguccuuccaaggaggcugggaccucuc

SEQ ID NO: 231262 - RNA, 19 nt, Human
ucaugucggugucauguca

SEQ ID NO: 231263 - RNA, 32 nt, Human
ucaugucgugcuuuguaaaugucuuauuugug

SEQ ID NO: 231264 - RNA, 24 nt, Human
ucaugucuauaaucccagcacuuu

SEQ ID NO: 231265 - RNA, 32 nt, Human
ucaugucuauaaucccagcacuuugggagguu

SEQ ID NO: 231266 - RNA, 32 nt, Human
ucaugucuaugccuuggucccuuuccccucag

SEQ ID NO: 231267 - RNA, 32 nt, Human
ucaugucucaauaccaaucuuuuaaacuacug

SEQ ID NO: 231268 - RNA, 24 nt, Human
ucaugucucuaaucccagcacuuu

SEQ ID NO: 231269 - RNA, 32 nt, Human
ucaugucucuaaucccagcacuuugggagacu

SEQ ID NO: 231270 - RNA, 32 nt, Human
ucaugucucuuggccucuuccucucucaagau

SEQ ID NO: 231271 - RNA, 32 nt, Human
ucaugucucuuuggggagagcuggcagugugc

SEQ ID NO: 231272 - RNA, 32 nt, Human
ucaugucugagcugauucuguuugcuccacgu

SEQ ID NO: 231273 - RNA, 32 nt, Human
ucaugucugcaaucccagcgauuugggagguu

SEQ ID NO: 231274 - RNA, 32 nt, Human
ucaugucugcagccccagcuacucgggaggcu

SEQ ID NO: 231275 - RNA, 32 nt, Human
ucaugucugcccagggggacugcgaguuccug

SEQ ID NO: 231276 - RNA, 32 nt, Human
ucaugucuguaaucccagcaauuuggaggcug

SEQ ID NO: 231277 - RNA, 22 nt, Human
ucaugucuguaaucccagcacu

SEQ ID NO: 231278 - RNA, 24 nt, Human
ucaugucuguaaucccagcacuuu

SEQ ID NO: 231279 - RNA, 27 nt, Human
ucaugucuguaaucccagcacuuuggg

SEQ ID NO: 231280 - RNA, 32 nt, Human
ucaugucuguaaucccagcacuuugggaggcc

SEQ ID NO: 231281 - RNA, 32 nt, Human
ucaugucuguaaucccagcacuuugggagguc

SEQ ID NO: 231282 - RNA, 32 nt, Human
ucaugucuguaaucccagcacuuugugaggcu

SEQ ID NO: 231283 - RNA, 32 nt, Human
ucaugucuguaauccuagcacugugggaggcc

SEQ ID NO: 231284 - RNA, 32 nt, Human
ucaugugaacauuugaacuaguuauaggauaa

SEQ ID NO: 231285 - RNA, 32 nt, Human
ucaugugacacaaaauaucauucuucuuuuua

SEQ ID NO: 231286 - RNA, 32 nt, Human
ucaugugagaaaaaccuguuucccucugguuc

SEQ ID NO: 231287 - RNA, 32 nt, Human
ucaugugaggaaauaaugcacaugcucuaacu

SEQ ID NO: 231288 - RNA, 32 nt, Human
ucaugugcaaggggucacgugaggucacugac

SEQ ID NO: 231289 - RNA, 27 nt, Human
ucaugugcaggauggggacauccaggc

SEQ ID NO: 231290 - RNA, 32 nt, Human
ucaugugcaugagucugaagcugcagagguua

SEQ ID NO: 231291 - RNA, 32 nt, Human
ucaugugccacagaagcucagccugggcuuca

SEQ ID NO: 231292 - RNA, 32 nt, Human
ucaugugccagccuccacccucacgccauuuc

SEQ ID NO: 231293 - RNA, 32 nt, Human
ucaugugccagggcaucccauuccaggcuucc

SEQ ID NO: 231294 - RNA, 32 nt, Human
ucaugugcuguccacaugaauguguugacugu

SEQ ID NO: 231295 - RNA, 32 nt, Human
ucauguggaaagcuuuuagcacaguaucuggu

SEQ ID NO: 231296 - RNA, 32 nt, Human
ucauguggaagaacgugggccgccacguggca

SEQ ID NO: 231297 - RNA, 32 nt, Human
ucauguggcucucuuuucaucuuugaugucag

SEQ ID NO: 231298 - RNA, 32 nt, Human
ucauguggcugugugugaccucugccugaaaa

SEQ ID NO: 231299 - RNA, 32 nt, Human
ucaugugggaggcugaggcaggaguauuguga

SEQ ID NO: 231300 - RNA, 32 nt, Human
ucaugugggucugaguguugcuuuuggaaaag

SEQ ID NO: 231301 - RNA, 32 nt, Human
ucaugugguucacccuucaccccagauacaaa

SEQ ID NO: 231302 - RNA, 32 nt, Human
ucauguguccccaaccuuuaaaaauguuuauu

SEQ ID NO: 231303 - RNA, 32 nt, Human
ucaugugucccccaacuccaccccucacaguu

SEQ ID NO: 231304 - RNA, 32 nt, Human
ucaugugugaaucauggagaaaucucauaaua

SEQ ID NO: 231305 - RNA, 32 nt, Human
ucaugugugcaucaugucucuuugccaaggga

SEQ ID NO: 231306 - RNA, 32 nt, Human
ucauguguggacugucccucucuuugggucuc

SEQ ID NO: 231307 - RNA, 32 nt, Human
ucaugugugggaaccacaguuccuggcugccu

SEQ ID NO: 231308 - RNA, 22 nt, Human
ucauguguguaaucccagcacu

SEQ ID NO: 231309 - RNA, 32 nt, Human
ucauguguguaaucccagcacucugggaggcu

SEQ ID NO: 231310 - RNA, 32 nt, Human
ucauguguucauuuauuuccaccacagcagau

SEQ ID NO: 231311 - RNA, 32 nt, Human
ucauguuaaagugcuuauagggaaagaagccu

SEQ ID NO: 231312 - RNA, 32 nt, Human
ucauguuacagguauuuaccugagaugaugcc

SEQ ID NO: 231313 - RNA, 32 nt, Human
ucauguuaggccacccuccgguuccuuaauga

SEQ ID NO: 231314 - RNA, 31 nt, Human
ucauguucaauaaauauuggguguauugaaa

SEQ ID NO: 231315 - RNA, 32 nt, Human
ucauguucacuacccuucaugcaugaaagaca

SEQ ID NO: 231316 - RNA, 32 nt, Human
ucauguucauccccaucuauuuauuuaagccu

SEQ ID NO: 231317 - RNA, 32 nt, Human
ucauguuccagaaccagcaagugcuccagagu

SEQ ID NO: 231318 - RNA, 32 nt, Human
ucauguucucugaaguggaauguggcuuuccu

SEQ ID NO: 231319 - RNA, 22 nt, Human
ucauguucuggaacugugcuaa

SEQ ID NO: 231320 - RNA, 32 nt, Human
ucauguucuguugaauacugcagccgcugccc

SEQ ID NO: 231321 - RNA, 32 nt, Human
ucauguugaacaaacuaagagugccaggaagu

SEQ ID NO: 231322 - RNA, 32 nt, Human
ucauguugaacacagcucucuccacucccuug

SEQ ID NO: 231323 - RNA, 32 nt, Human
ucauguugacccuggcccuggauagcagcuuu

SEQ ID NO: 231324 - RNA, 32 nt, Human
ucauguugauucuuguaagcacuggacugucu

SEQ ID NO: 231325 - RNA, 32 nt, Human
ucauguugcacacccacucagcuccgugaacu

SEQ ID NO: 231326 - RNA, 32 nt, Human
ucauguuggaaagaaaugaaagauuagaaacc

SEQ ID NO: 231327 - RNA, 32 nt, Human
ucauguuggaaaugcaacugcaucccaggaac

SEQ ID NO: 231328 - RNA, 32 nt, Human
ucauguuggccaggcuggucuccaacuccuag

SEQ ID NO: 231329 - RNA, 32 nt, Human
ucauguuggcucagaaucaaccucuuuaaaua

SEQ ID NO: 231330 - RNA, 32 nt, Human
ucauguugugugugugcauguacauguaugga

SEQ ID NO: 231331 - RNA, 32 nt, Human
ucauguuguugcccugcggcgccccuuugaag

SEQ ID NO: 231332 - RNA, 32 nt, Human
ucauguuuaugaggagaugauaacugggggcc

SEQ ID NO: 231333 - RNA, 32 nt, Human
ucauguuuccacccuuccucuugccccuccac

SEQ ID NO: 231334 - RNA, 32 nt, Human
ucauguuuccauccucacuguugacuccuggc

SEQ ID NO: 231335 - RNA, 32 nt, Human
ucauguuucccuucuaguuuuggcugacagga

SEQ ID NO: 231336 - RNA, 32 nt, Human
ucauguuucuuauuggcucugccuccugugcu

SEQ ID NO: 231337 - RNA, 32 nt, Human
ucauguuucuuucuguggccauggguauagug

SEQ ID NO: 231338 - RNA, 27 nt, Human
ucauguuugggaagaaaaagaaaaaga

SEQ ID NO: 231339 - RNA, 25 nt, Human
ucauguuuguaaaucccagcacuuu

SEQ ID NO: 231340 - RNA, 32 nt, Human
ucauguuuguaaaucccagcacuuugggaagg

SEQ ID NO: 231341 - RNA, 32 nt, Human
ucauguuuguaaucccagcacuuugggggauu

SEQ ID NO: 231342 - RNA, 24 nt, Human
ucauguuuguaauccuagcacuuu

SEQ ID NO: 231343 - RNA, 32 nt, Human
ucauguuuguaauccuagcacuuugggaggcu

SEQ ID NO: 231344 - RNA, 32 nt, Human
ucauguuuugaagcagcagguccaggucacuu

SEQ ID NO: 231345 - RNA, 32 nt, Human
ucauguuuuguuuaacucuuuauccuuauccu

SEQ ID NO: 231346 - RNA, 32 nt, Human
ucauuaaaaccagcuuaagagcagauaugaca

SEQ ID NO: 231347 - RNA, 32 nt, Human
ucauuaaagaugaguccucauggcucuuacag

SEQ ID NO: 231348 - RNA, 32 nt, Human
ucauuaaagccgccaacgccauccagcagcaa

SEQ ID NO: 231349 - RNA, 32 nt, Human
ucauuaaauguucaaaauuguaguuuuaaaaa

SEQ ID NO: 231350 - RNA, 32 nt, Human
ucauuaaauucagaaacuacagccugagugaa

SEQ ID NO: 231351 - RNA, 32 nt, Human
ucauuaacaugcugcaauucaggagcugguua

SEQ ID NO: 231352 - RNA, 32 nt, Human
ucauuaaccauggccugauauuaguucuuaga

SEQ ID NO: 231353 - RNA, 32 nt, Human
ucauuaacccaagugaaccaaccaaagucacc

SEQ ID NO: 231354 - RNA, 32 nt, Human
ucauuaacuauacugugcuuucccuugacuga

SEQ ID NO: 231355 - RNA, 32 nt, Human
ucauuaagaacugcauucccacauccucacac

SEQ ID NO: 231356 - RNA, 32 nt, Human
ucauuaagacuggaaucaagcuuacauguaaa

SEQ ID NO: 231357 - RNA, 32 nt, Human
ucauuaaguaauuuugguuuguucagaaacuu

SEQ ID NO: 231358 - RNA, 32 nt, Human
ucauuaaucaggaaaccuggacugccugcuug

SEQ ID NO: 231359 - RNA, 32 nt, Human
ucauuaauucagugaaguugagacuucauagu

SEQ ID NO: 231360 - RNA, 24 nt, Human
ucauuacaaaauauuuagugugaa

SEQ ID NO: 231361 - RNA, 32 nt, Human
ucauuacaaaccucagauggacacuaagcacu

SEQ ID NO: 231362 - RNA, 32 nt, Human
ucauuacaaaggaugugagaggaaaaauuuau

SEQ ID NO: 231363 - RNA, 32 nt, Human
ucauuacacuuucacccauagcagaaaacacu

SEQ ID NO: 231364 - RNA, 32 nt, Human
ucauuacaucaaggagcugccccugucagggu

SEQ ID NO: 231365 - RNA, 32 nt, Human
ucauuacaucugccagggccugccucaagaag

SEQ ID NO: 231366 - RNA, 32 nt, Human
ucauuacauuguuuugacuaagcacaauuaga

SEQ ID NO: 231367 - RNA, 18 nt, Human
ucauuaccacaguuuuaa

SEQ ID NO: 231368 - RNA, 32 nt, Human
ucauuacccaggcuggagugcaaggcacgauc

SEQ ID NO: 231369 - RNA, 32 nt, Human
ucauuaccuggcagaggcaaagaaaggugaga

SEQ ID NO: 231370 - RNA, 32 nt, Human
ucauuacugugaccuugggaagcagcaggaca

SEQ ID NO: 231371 - RNA, 32 nt, Human
ucauuacuguugggugaaccugugaagauaac

SEQ ID NO: 231372 - RNA, 32 nt, Human
ucauuacuuacuacugcacuccugcuuuugug

SEQ ID NO: 231373 - RNA, 32 nt, Human
ucauuacuuaggagccagggcuuuucagauau

SEQ ID NO: 231374 - RNA, 32 nt, Human
ucauuacuuuguaccccuauccuuccaagcac

SEQ ID NO: 231375 - RNA, 32 nt, Human
ucauuagaaaauuuguacugaggggaauucua

SEQ ID NO: 231376 - RNA, 32 nt, Human
ucauuagaccgagacaucacuagaaauucugg

SEQ ID NO: 231377 - RNA, 32 nt, Human
ucauuagacuuaaauuuuaauucuucagaaug

SEQ ID NO: 231378 - RNA, 32 nt, Human
ucauuagagagggagacaccagcucuuugguu

SEQ ID NO: 231379 - RNA, 32 nt, Human
ucauuagagcugcauuucaguaccaaagagga

SEQ ID NO: 231380 - RNA, 32 nt, Human
ucauuagcaaauguguugcuucaugccuuggu

SEQ ID NO: 231381 - RNA, 32 nt, Human
ucauuagcagcuuuuccuccucuucccugcac

SEQ ID NO: 231382 - RNA, 32 nt, Human
ucauuagcaguuuuaauacugcugugucaguu

SEQ ID NO: 231383 - RNA, 32 nt, Human
ucauuagcauggcaaugaggaguuucuguaau

SEQ ID NO: 231384 - RNA, 32 nt, Human
ucauuagcuacacugcuucccacuugauuaga

SEQ ID NO: 231385 - RNA, 32 nt, Human
ucauuagcuagauaugggacccuggcaaguga

SEQ ID NO: 231386 - RNA, 32 nt, Human
ucauuaggaagggagagcugcaguacguuagg

SEQ ID NO: 231387 - RNA, 32 nt, Human
ucauuaggagagaccugucguuaaggauuugu

SEQ ID NO: 231388 - RNA, 32 nt, Human
ucauuagggaaagggguuaagugaaaaugcug

SEQ ID NO: 231389 - RNA, 32 nt, Human
ucauuagggcaaagaucucagcagccagcucc

SEQ ID NO: 231390 - RNA, 22 nt, Human
ucauuauaaaauauuguuaaug

SEQ ID NO: 231391 - RNA, 32 nt, Human
ucauuauacuucugaccuuugggcuuucuuuu

SEQ ID NO: 231392 - RNA, 32 nt, Human
ucauuaucaaaagugaucagcaaugaagaacu

SEQ ID NO: 231393 - RNA, 32 nt, Human
ucauuaucaguauuucucaugcuguacacaau

SEQ ID NO: 231394 - RNA, 32 nt, Human
ucauuaucccacaaugcaccccuuagcauuaa

SEQ ID NO: 231395 - RNA, 32 nt, Human
ucauuauccuucucuuucugcacaaggaaaaa

SEQ ID NO: 231396 - RNA, 32 nt, Human
ucauuaucuaucuucuucucccuucccucgcc

SEQ ID NO: 231397 - RNA, 32 nt, Human
ucauuaucucucuuuuucagauaacaaaaugu

SEQ ID NO: 231398 - RNA, 32 nt, Human
ucauuaugaauccauggauggcucaauucuua

SEQ ID NO: 231399 - RNA, 32 nt, Human
ucauuaugagauacagucgguuuaccucagga

SEQ ID NO: 231400 - RNA, 32 nt, Human
ucauuaugagaugucgucucucggugccuccu

SEQ ID NO: 231401 - RNA, 32 nt, Human
ucauuaugcucuucugccuggggcugucaucu

SEQ ID NO: 231402 - RNA, 32 nt, Human
ucauuauguaaauacuuuaauucuacucuuuu

SEQ ID NO: 231403 - RNA, 32 nt, Human
ucauuaugugaaauaggugaaaagccagaucc

SEQ ID NO: 231404 - RNA, 32 nt, Human
ucauuauuuagauacuuucuuccuucacucac

SEQ ID NO: 231405 - RNA, 32 nt, Human
ucauuauuuccacuugcaggccagcuuaaccu

SEQ ID NO: 231406 - RNA, 32 nt, Human
ucauuauuuuucacugccccagacacagugcc

SEQ ID NO: 231407 - RNA, 32 nt, Human
ucauucaaaccagcucaggucagaaacaaaaa

SEQ ID NO: 231408 - RNA, 32 nt, Human
ucauucaaauguguaaaugucauauucauuca

SEQ ID NO: 231409 - RNA, 32 nt, Human
ucauucaacacacaugaccacccgugugaucu

SEQ ID NO: 231410 - RNA, 27 nt, Human
ucauucaacauugaagcuaggcuucaa

SEQ ID NO: 231411 - RNA, 32 nt, Human
ucauucaaccauuguuuacaugucguucagga

SEQ ID NO: 231412 - RNA, 32 nt, Human
ucauucaagaggaagauggaaggggcuguuua

SEQ ID NO: 231413 - RNA, 23 nt, Human
ucauucacaucaacagagcgagg

SEQ ID NO: 231414 - RNA, 32 nt, Human
ucauucacugaaguaaaagcaccugaugcugc

SEQ ID NO: 231415 - RNA, 32 nt, Human
ucauucagagguggguauaagugaaugggaga

SEQ ID NO: 231416 - RNA, 32 nt, Human
ucauucagccuaucuugcgaggcccgggcagc

SEQ ID NO: 231417 - RNA, 32 nt, Human
ucauucagccuccacugugucugucuuuucuu

SEQ ID NO: 231418 - RNA, 32 nt, Human
ucauucaggccacccugcucauggcccuuccu

SEQ ID NO: 231419 - RNA, 32 nt, Human
ucauucaggcuggagugcaguggugcaaucuc

SEQ ID NO: 231420 - RNA, 32 nt, Human
ucauucaggcuggagugcaguggugcgaucuc

SEQ ID NO: 231421 - RNA, 32 nt, Human
ucauucagucuguuauuuuguacagcaacccu

SEQ ID NO: 231422 - RNA, 32 nt, Human
ucauucaguuauauccuuuggcucagcuagcu

SEQ ID NO: 231423 - RNA, 32 nt, Human
ucauucaugucucugcaaaugauaugaucuca

SEQ ID NO: 231424 - RNA, 32 nt, Human
ucauucauuaugcacccagugcugggugcuug

SEQ ID NO: 231425 - RNA, 32 nt, Human
ucauucauucaccccaugauguucuggaagua

SEQ ID NO: 231426 - RNA, 32 nt, Human
ucauucauucacuaggggugcauuauuuagga

SEQ ID NO: 231427 - RNA, 32 nt, Human
ucauuccacaaacccuaugggggcugccacgu

SEQ ID NO: 231428 - RNA, 32 nt, Human
ucauuccacugcauuucagccugggggauaca

SEQ ID NO: 231429 - RNA, 20 nt, Human
ucauuccagaucuccagggc

SEQ ID NO: 231430 - RNA, 32 nt, Human
ucauuccaguccuuauuuuuguaaguauuacu

SEQ ID NO: 231431 - RNA, 32 nt, Human
ucauuccaugccagcaccucugcagccugcug

SEQ ID NO: 231432 - RNA, 32 nt, Human
ucauuccauuacacuccagccugggcaccagg

SEQ ID NO: 231433 - RNA, 19 nt, Human
ucauuccauuuauccuaga

SEQ ID NO: 231434 - RNA, 28 nt, Human
ucauucccaagugcccuugugcccuguu

SEQ ID NO: 231435 - RNA, 32 nt, Human
ucauucccaucccugucaccagucccagcucc

SEQ ID NO: 231436 - RNA, 19 nt, Human
ucauuccccacccccuccc

SEQ ID NO: 231437 - RNA, 32 nt, Human
ucauuccccuccgguucuccucggugacucac

SEQ ID NO: 231438 - RNA, 32 nt, Human
ucauuccccuuuccccuaauauuuccuauuau

SEQ ID NO: 231439 - RNA, 32 nt, Human
ucauucccuagggcuaguccaagucuccuggc

SEQ ID NO: 231440 - RNA, 32 nt, Human
ucauucccucgccuccccuuguggacgggggu

SEQ ID NO: 231441 - RNA, 32 nt, Human
ucauucccucugccuaggcccuggugaaacca

SEQ ID NO: 231442 - RNA, 32 nt, Human
ucauuccggaggaggagccaggcagcagggcc

SEQ ID NO: 231443 - RNA, 32 nt, Human
ucauuccucacaggacagaagcagagugggug

SEQ ID NO: 231444 - RNA, 32 nt, Human
ucauuccuccccuggcucuucucccucuucag

SEQ ID NO: 231445 - RNA, 25 nt, Human
ucauuccucccugggaaucagggua

SEQ ID NO: 231446 - RNA, 24 nt, Human
ucauuccucuccuuccuugcugca

SEQ ID NO: 231447 - RNA, 20 nt, Human
ucauuccucucuuagggggc

SEQ ID NO: 231448 - RNA, 32 nt, Human
ucauuccucucuuuucucauccuuccccuuuu

SEQ ID NO: 231449 - RNA, 22 nt, Human
ucauuccucuuucccaagggca

SEQ ID NO: 231450 - RNA, 32 nt, Human
ucauuccucuuuugaaacuuucugcuuugccu

SEQ ID NO: 231451 - RNA, 32 nt, Human
ucauuccugcacugguugccaccaacauucuc

SEQ ID NO: 231452 - RNA, 32 nt, Human
ucauuccugcaggagcugcagccacccaaagu

SEQ ID NO: 231453 - RNA, 32 nt, Human
ucauuccugccugaagccaugacccgcuucuc

SEQ ID NO: 231454 - RNA, 32 nt, Human
ucauuccuggaaccagccaggccaggcaacca

SEQ ID NO: 231455 - RNA, 32 nt, Human
ucauuccugguaaaacagcagcugguuagcca

SEQ ID NO: 231456 - RNA, 24 nt, Human
ucauuccuguaaucccagcacuuu

SEQ ID NO: 231457 - RNA, 32 nt, Human
ucauuccuguaaucccagcacuuugggaggcc

SEQ ID NO: 231458 - RNA, 32 nt, Human
ucauuccuguaaucccagcucuuugggaggcu

SEQ ID NO: 231459 - RNA, 32 nt, Human
ucauuccuucaaaacagagagccuuaaucuuu

SEQ ID NO: 231460 - RNA, 32 nt, Human
ucauuccuucauuccuuccuuuguuccuuugu

SEQ ID NO: 231461 - RNA, 32 nt, Human
ucauuccuugguuugugacugcaucucccucu

SEQ ID NO: 231462 - RNA, 32 nt, Human
ucauucgagacaacauguguguaugugugugu

SEQ ID NO: 231463 - RNA, 32 nt, Human
ucauucgcugggacuuaagaaaggagauauuu

SEQ ID NO: 231464 - RNA, 32 nt, Human
ucauucggacacugauuugcagugcauuggca

SEQ ID NO: 231465 - RNA, 32 nt, Human
ucauucuaagccucuggagagacuguaaugau

SEQ ID NO: 231466 - RNA, 32 nt, Human
ucauucuaguuaagauucauuucacaaaauuu

SEQ ID NO: 231467 - RNA, 32 nt, Human
ucauucucaaguggcugcaauuacaggcaacc

SEQ ID NO: 231468 - RNA, 32 nt, Human
ucauucucacucugcuuugcaucccccaaacu

SEQ ID NO: 231469 - RNA, 32 nt, Human
ucauucucagaaaauccaaccauaucuuagag

SEQ ID NO: 231470 - RNA, 32 nt, Human
ucauucucaggcacccacuccccacacaaugc

SEQ ID NO: 231471 - RNA, 32 nt, Human
ucauucucaucuguugaggaugugggaacuuu

SEQ ID NO: 231472 - RNA, 32 nt, Human
ucauucuccagaaccagguguggauugugauc

SEQ ID NO: 231473 - RNA, 32 nt, Human
ucauucuccccaguagcugggauuacaggugc

SEQ ID NO: 231474 - RNA, 32 nt, Human
ucauucuccugaguagcugggauugcuggugc

SEQ ID NO: 231475 - RNA, 32 nt, Human
ucauucuccugccucagccucccgaguagcug

SEQ ID NO: 231476 - RNA, 32 nt, Human
ucauucuccugccucagccucuugcgagcuga

SEQ ID NO: 231477 - RNA, 32 nt, Human
ucauucuccuuccuuuuuccucccgcuucccu

SEQ ID NO: 231478 - RNA, 32 nt, Human
ucauucucuccaccaggccuccagguccugag

SEQ ID NO: 231479 - RNA, 16 nt, Human
ucauucucuccccucc

SEQ ID NO: 231480 - RNA, 32 nt, Human
ucauucucucugagcagaggagcaggaauccc

SEQ ID NO: 231481 - RNA, 32 nt, Human
ucauucucucuuccuucccuccuuccuacuuc

SEQ ID NO: 231482 - RNA, 32 nt, Human
ucauucucugcagcagcugccugggcccaagg

SEQ ID NO: 231483 - RNA, 32 nt, Human
ucauucucuggccucaucuugucgcucuccuc

SEQ ID NO: 231484 - RNA, 32 nt, Human
ucauucugaaucucuaccagcugcucccagaa

SEQ ID NO: 231485 - RNA, 32 nt, Human
ucauucugcuaaucauuguuacagaaugguga

SEQ ID NO: 231486 - RNA, 32 nt, Human
ucauucugcucccuauguuauuucaagggccu

SEQ ID NO: 231487 - RNA, 32 nt, Human
ucauucugcuggggguagagaugaggggaggg

SEQ ID NO: 231488 - RNA, 32 nt, Human
ucauucugcuuuguacuaggacaccaaagaca

SEQ ID NO: 231489 - RNA, 32 nt, Human
ucauucuggaaccauacuaucaaauggcgaca

SEQ ID NO: 231490 - RNA, 32 nt, Human
ucauucuggccuggccugguuuugccaucuga

SEQ ID NO: 231491 - RNA, 32 nt, Human
ucauucugucaugcugccccagugagauagug

SEQ ID NO: 231492 - RNA, 32 nt, Human
ucauucugugugcguuguggggugggggaggg

SEQ ID NO: 231493 - RNA, 32 nt, Human
ucauucuguguggaggugaguggaguggggca

SEQ ID NO: 231494 - RNA, 32 nt, Human
ucauucuguuuucuagacugugcuacagccug

SEQ ID NO: 231495 - RNA, 32 nt, Human
ucauucuguuuuugcuuaaaauaaucugcaac

SEQ ID NO: 231496 - RNA, 32 nt, Human
ucauucuuaucuuucuucuguuucuuccuccc

SEQ ID NO: 231497 - RNA, 32 nt, Human
ucauucuuccuugauugugaccaugcccaggc

SEQ ID NO: 231498 - RNA, 32 nt, Human
ucauucuugaguggagagacagaggaagcaaa

SEQ ID NO: 231499 - RNA, 32 nt, Human
ucauucuugauuaaaugcacugaaaaguaaag

SEQ ID NO: 231500 - RNA, 32 nt, Human
ucauucuugcaguugccauacagugccuuucc

SEQ ID NO: 231501 - RNA, 32 nt, Human
ucauucuugcuaaccuagucuaggugaccuac

SEQ ID NO: 231502 - RNA, 32 nt, Human
ucauucuugcuccccgguaccuggauuuuucu

SEQ ID NO: 231503 - RNA, 32 nt, Human
ucauucuugcugcuucagccccuaucacauag

SEQ ID NO: 231504 - RNA, 32 nt, Human
ucauucuuggaagguggcagagccaagaguaa

SEQ ID NO: 231505 - RNA, 32 nt, Human
ucauucuuuucccccuuccuucucaucuuccu

SEQ ID NO: 231506 - RNA, 32 nt, Human
ucauucuuuucugaaguuguguguugcugcua

SEQ ID NO: 231507 - RNA, 32 nt, Human
ucauugaaaaugugagaguugauauaccagcc

SEQ ID NO: 231508 - RNA, 32 nt, Human
ucauugaaaauguuaauuacacacacaugcau

SEQ ID NO: 231509 - RNA, 32 nt, Human
ucauugaaaccagcuucagaaaacaagaugcc

SEQ ID NO: 231510 - RNA, 32 nt, Human
ucauugaacaucagaggacauauccuggagaa

SEQ ID NO: 231511 - RNA, 32 nt, Human
ucauugaagggaaaaugugagcauuaagcacu

SEQ ID NO: 231512 - RNA, 32 nt, Human
ucauugacaauguaguuggccacccaagagcu

SEQ ID NO: 231513 - RNA, 32 nt, Human
ucauugaccagaaggcuuucuuagucccaaca

SEQ ID NO: 231514 - RNA, 32 nt, Human
ucauugaccugaggcccuucucuccagccccu

SEQ ID NO: 231515 - RNA, 32 nt, Human
ucauugagaaacacccucacaggaacacucag

SEQ ID NO: 231516 - RNA, 32 nt, Human
ucauugagcaccuacuaugugccaggccaauu

SEQ ID NO: 231517 - RNA, 32 nt, Human
ucauugagcagcaggaggcugaaggaggggag

SEQ ID NO: 231518 - RNA, 32 nt, Human
ucauugagcuggcagagcuggagcucaaacac

SEQ ID NO: 231519 - RNA, 32 nt, Human
ucauugaggaagcaacuacagauucagcaaca

SEQ ID NO: 231520 - RNA, 32 nt, Human
ucauugagggaaugccuuggaaggcaaagucc

SEQ ID NO: 231521 - RNA, 32 nt, Human
ucauugauaacucccuuucucccuucccuucu

SEQ ID NO: 231522 - RNA, 32 nt, Human
ucauugauauccacuggucacaucauaacugu

SEQ ID NO: 231523 - RNA, 32 nt, Human
ucauugaugccugggauauaacaauugcauau

SEQ ID NO: 231524 - RNA, 32 nt, Human
ucauugauguuggguggaugaaucugugagug

SEQ ID NO: 231525 - RNA, 32 nt, Human
ucauugauugaauaguuauaaagauguuauag

SEQ ID NO: 231526 - RNA, 32 nt, Human
ucauugcacauuacaugaucacuuccagagua

SEQ ID NO: 231527 - RNA, 32 nt, Human
ucauugcaccacuuuacuuagccugggugaca

SEQ ID NO: 231528 - RNA, 32 nt, Human
ucauugcacugagugaccugcuuccugauugc

SEQ ID NO: 231529 - RNA, 32 nt, Human
ucauugcacugcccuggcacaugggcacaacg

SEQ ID NO: 231530 - RNA, 32 nt, Human
ucauugcagccaucacaaggugcgaucgaagc

SEQ ID NO: 231531 - RNA, 32 nt, Human
ucauugcagccucaaacuccugggcucaagca

SEQ ID NO: 231532 - RNA, 32 nt, Human
ucauugcagccucagacuccuggguucaagca

SEQ ID NO: 231533 - RNA, 32 nt, Human
ucauugcagccuccacuuccugggcucaagcg

SEQ ID NO: 231534 - RNA, 32 nt, Human
ucauugcagccucgaacuccugggcucauauu

SEQ ID NO: 231535 - RNA, 32 nt, Human
ucauugcagccucgaacuccugggcuuaaggg

SEQ ID NO: 231536 - RNA, 32 nt, Human
ucauugcagccuucaauuccugggcucaggca

SEQ ID NO: 231537 - RNA, 32 nt, Human
ucauugcagcuuugaccuccugggcuuaggug

SEQ ID NO: 231538 - RNA, 32 nt, Human
ucauugcaggaaugaaugcuguggaagaaaac

SEQ ID NO: 231539 - RNA, 32 nt, Human
ucauugcagugcggcggcccuaccucggcccu

SEQ ID NO: 231540 - RNA, 32 nt, Human
ucauugcauugcacuccagcuugagcaacaga

SEQ ID NO: 231541 - RNA, 24 nt, Human
ucauugccaaauuauuagugaaug

SEQ ID NO: 231542 - RNA, 32 nt, Human
ucauugccaauauggaacagagcccagggcca

SEQ ID NO: 231543 - RNA, 32 nt, Human
ucauugccagaaucuucuucuccuggggucug

SEQ ID NO: 231544 - RNA, 32 nt, Human
ucauugcccaggcuggagugcagugagcuauu

SEQ ID NO: 231545 - RNA, 22 nt, Human
ucauugcccggcaaacacuuuu

SEQ ID NO: 231546 - RNA, 32 nt, Human
ucauugcccuccaguaagggcucaggguuuug

SEQ ID NO: 231547 - RNA, 32 nt, Human
ucauugccgacacugcagcagaaucucuccgg

SEQ ID NO: 231548 - RNA, 32 nt, Human
ucauugccguuacacuucccagccuggugguc

SEQ ID NO: 231549 - RNA, 32 nt, Human
ucauugccucaaacccugggguagguggaacg

SEQ ID NO: 231550 - RNA, 32 nt, Human
ucauugccucacaggcccugagccucccgaag

SEQ ID NO: 231551 - RNA, 32 nt, Human
ucauugccugcacuuacuggucggaagagaga

SEQ ID NO: 231552 - RNA, 32 nt, Human
ucauugccuguaaucccagcacuuugggaggc

SEQ ID NO: 231553 - RNA, 32 nt, Human
ucauugccuuccugggcaacccggccaaaggc

SEQ ID NO: 231554 - RNA, 32 nt, Human
ucauugccuucucccuuccuguucccucaucc

SEQ ID NO: 231555 - RNA, 32 nt, Human
ucauugcgccacugcaaaccagccugggcaau

SEQ ID NO: 231556 - RNA, 32 nt, Human
ucauugcgucccccucugcccacuggacuugg

SEQ ID NO: 231557 - RNA, 32 nt, Human
ucauugcucacuguagccucgaauuccugggc

SEQ ID NO: 231558 - RNA, 32 nt, Human
ucauugcuccuucucagugaucuuugagcucc

SEQ ID NO: 231559 - RNA, 32 nt, Human
ucauugcucugcagaacucaaaaagaaaauug

SEQ ID NO: 231560 - RNA, 32 nt, Human
ucauugcugaggucaaggcacaguagaggaga

SEQ ID NO: 231561 - RNA, 32 nt, Human
ucauugcugcagcuccuugucgacaucauccc

SEQ ID NO: 231562 - RNA, 32 nt, Human
ucauugcuggggaugggaaggagaagcagugg

SEQ ID NO: 231563 - RNA, 32 nt, Human
ucauugcuggucccagcacaccuggaaaguuc

SEQ ID NO: 231564 - RNA, 21 nt, Human
ucauugcuuccacaguuaaug

SEQ ID NO: 231565 - RNA, 32 nt, Human
ucauugcuugucucccuggcaugugccaguua

SEQ ID NO: 231566 - RNA, 32 nt, Human
ucauugcuuugcuaaggagggaaggaaguuac

SEQ ID NO: 231567 - RNA, 32 nt, Human
ucauuggaaacccagaggcugcagagagcaaa

SEQ ID NO: 231568 - RNA, 32 nt, Human
ucauuggaaggaaaaagaagguacuauuuuua

SEQ ID NO: 231569 - RNA, 32 nt, Human
ucauuggaauccacguuuuggccacaguaguu

SEQ ID NO: 231570 - RNA, 32 nt, Human
ucauuggagguugggaaggaagugaggagaaa

SEQ ID NO: 231571 - RNA, 31 nt, Human
ucauuggauauaaaagagugauuuuccucac

SEQ ID NO: 231572 - RNA, 32 nt, Human
ucauuggcaagggacaggcucaugggagcugg

SEQ ID NO: 231573 - RNA, 32 nt, Human
ucauuggcagacauauauguccuugaaccuuu

SEQ ID NO: 231574 - RNA, 27 nt, Human
ucauuggcagagagcauugcuagugag

SEQ ID NO: 231575 - RNA, 32 nt, Human
ucauuggcaguggaugaagccuaagccagcug

SEQ ID NO: 231576 - RNA, 32 nt, Human
ucauuggccaggacccucagacccacgggcca

SEQ ID NO: 231577 - RNA, 32 nt, Human
ucauuggcucacugcagccuagaccucccagc

SEQ ID NO: 231578 - RNA, 32 nt, Human
ucauuggcugcuugcaggcugcugauuggcug

SEQ ID NO: 231579 - RNA, 32 nt, Human
ucauuggcuucugauuggcugccuguaagaua

SEQ ID NO: 231580 - RNA, 32 nt, Human
ucauugggccacugcagucgagccugggcgac

SEQ ID NO: 231581 - RNA, 32 nt, Human
ucauugggccugguuccaguucuguagccauu

SEQ ID NO: 231582 - RNA, 32 nt, Human
ucauuggggaagagagccugaggcuggcaauc

SEQ ID NO: 231583 - RNA, 31 nt, Human
ucauuggggauucugccucagguacuuugau

SEQ ID NO: 231584 - RNA, 32 nt, Human
ucauuggggcauccccuuucugcugcaggaac

SEQ ID NO: 231585 - RNA, 32 nt, Human
ucauuggggguaaggguaugaggugaucagga

SEQ ID NO: 231586 - RNA, 32 nt, Human
ucauuggguugcaggccauggaggagggaccu

SEQ ID NO: 231587 - RNA, 32 nt, Human
ucauuggucugucugggacgugcaguguucau

SEQ ID NO: 231588 - RNA, 32 nt, Human
ucauuguaacaccagagugcagccuggaucuc

SEQ ID NO: 231589 - RNA, 32 nt, Human
ucauuguaaccagcauuuuguaauacucuuaa

SEQ ID NO: 231590 - RNA, 32 nt, Human
ucauuguaaguucuguccuacagagaagugug

SEQ ID NO: 231591 - RNA, 32 nt, Human
ucauuguacacagcagccaguuuucaucggug

SEQ ID NO: 231592 - RNA, 32 nt, Human
ucauuguacagggggaaauggguaugagagac

SEQ ID NO: 231593 - RNA, 32 nt, Human
ucauuguacugcaaccucagcuggcaucaugg

SEQ ID NO: 231594 - RNA, 32 nt, Human
ucauuguagauacuagggaaaagcuuuguuga

SEQ ID NO: 231595 - RNA, 31 nt, Human
ucauuguaguuucaggacuuugucaguacaa

SEQ ID NO: 231596 - RNA, 32 nt, Human
ucauugucacccagacaccacauuacaugcgc

SEQ ID NO: 231597 - RNA, 32 nt, Human
ucauugucacccaggcuggaguacaguggcau

SEQ ID NO: 231598 - RNA, 21 nt, Human
ucauugucauuacuguuuuaa

SEQ ID NO: 231599 - RNA, 32 nt, Human
ucauugucggccucugucucuggcugcccucg

SEQ ID NO: 231600 - RNA, 22 nt, Human
ucauugucgggcacuguccacu

SEQ ID NO: 231601 - RNA, 32 nt, Human
ucauugucucaccuuuugccuggguggcugcc

SEQ ID NO: 231602 - RNA, 32 nt, Human
ucauugucucaucuagacaucaagcagggaaa

SEQ ID NO: 231603 - RNA, 32 nt, Human
ucauugugaagagaaagaaagguauagcaguc

SEQ ID NO: 231604 - RNA, 32 nt, Human
ucauugugacugcugcucucauugcuaucaug

SEQ ID NO: 231605 - RNA, 32 nt, Human
ucauugugagguggaugggggagugaaauugu

SEQ ID NO: 231606 - RNA, 32 nt, Human
ucauugugcacacguggcuugccugaaugaac

SEQ ID NO: 231607 - RNA, 32 nt, Human
ucauugugccaugagguaaauguaauguuuca

SEQ ID NO: 231608 - RNA, 32 nt, Human
ucauugugcugauuuuuggugaucaagccuca

SEQ ID NO: 231609 - RNA, 32 nt, Human
ucauugugcuguccugacaacaugcuccaaac

SEQ ID NO: 231610 - RNA, 32 nt, Human
ucauuguggaagcagaagguugucauggaaau

SEQ ID NO: 231611 - RNA, 32 nt, Human
ucauugugucauuucaaaauguauugauaucu

SEQ ID NO: 231612 - RNA, 32 nt, Human
ucauuguguccccagcccucuucucgguuccc

SEQ ID NO: 231613 - RNA, 32 nt, Human
ucauugugucuuuucugccucugucaggcgaa

SEQ ID NO: 231614 - RNA, 32 nt, Human
ucauuguuccagcauaaugagauggaaucugc

SEQ ID NO: 231615 - RNA, 32 nt, Human
ucauuguucucuccaucucccuagucaucauu

SEQ ID NO: 231616 - RNA, 32 nt, Human
ucauuguugcccaggaagagacggaggaugca

SEQ ID NO: 231617 - RNA, 32 nt, Human
ucauuguuuccuuggccccuguauccagauau

SEQ ID NO: 231618 - RNA, 32 nt, Human
ucauuguuuuccccauccucuuccucaacaca

SEQ ID NO: 231619 - RNA, 32 nt, Human
ucauuguuuuggaagccauggagaccugccuc

SEQ ID NO: 231620 - RNA, 32 nt, Human
ucauuuaacacaugcauuugacauauaaacag

SEQ ID NO: 231621 - RNA, 32 nt, Human
ucauuuaauggaaacugccccucauacaauga

SEQ ID NO: 231622 - RNA, 32 nt, Human
ucauuuacacagugcuuuccagccuuuggugc

SEQ ID NO: 231623 - RNA, 32 nt, Human
ucauuuacuguggcuucuuaaucuuuucacaa

SEQ ID NO: 231624 - RNA, 32 nt, Human
ucauuuacuguugaacacggacaaucauauuc

SEQ ID NO: 231625 - RNA, 32 nt, Human
ucauuuagauugaaaacuuuucucagauggau

SEQ ID NO: 231626 - RNA, 32 nt, Human
ucauuuagguuugaauugggcguauuguguaa

SEQ ID NO: 231627 - RNA, 32 nt, Human
ucauuuaguuuuaauuuauguucagucuccca

SEQ ID NO: 231628 - RNA, 32 nt, Human
ucauuuaucaaaaguaaacacagcauuaguac

SEQ ID NO: 231629 - RNA, 32 nt, Human
ucauuuaugucugucuuucuaucauaaagaau

SEQ ID NO: 231630 - RNA, 32 nt, Human
ucauuuauucugcuucgaggguccccagggcc

SEQ ID NO: 231631 - RNA, 32 nt, Human
ucauuuauuuauggcccaccagucucccccaa

SEQ ID NO: 231632 - RNA, 32 nt, Human
ucauuuauuucuggagccccugguacacucca

SEQ ID NO: 231633 - RNA, 32 nt, Human
ucauuuauuuuccauugucugucuucggucuu

SEQ ID NO: 231634 - RNA, 32 nt, Human
ucauuucaaauauguacucuugaagucaagca

SEQ ID NO: 231635 - RNA, 32 nt, Human
ucauuucacagccuuucguucugcugaccaaa

SEQ ID NO: 231636 - RNA, 32 nt, Human
ucauuucaccaggagcuuucagaaguuucacc

SEQ ID NO: 231637 - RNA, 32 nt, Human
ucauuucaccucacuccagccugggugacagc

SEQ ID NO: 231638 - RNA, 32 nt, Human
ucauuucagaaaccgaaacagaaacgacauag

SEQ ID NO: 231639 - RNA, 22 nt, Human
ucauuucagaagcuuugcuucu

SEQ ID NO: 231640 - RNA, 32 nt, Human
ucauuucaguucuauugcaguccuggugccau

SEQ ID NO: 231641 - RNA, 32 nt, Human
ucauuucauaggcaucuauuccugccuggugu

SEQ ID NO: 231642 - RNA, 32 nt, Human
ucauuucauaugcacuauaucaaguacaaaca

SEQ ID NO: 231643 - RNA, 32 nt, Human
ucauuucauguuauguuuucauuuccccucug

SEQ ID NO: 231644 - RNA, 32 nt, Human
ucauuucauuuuauucccaucuguuuucaaac

SEQ ID NO: 231645 - RNA, 32 nt, Human
ucauuuccaaaacacauuugguccccagaguu

SEQ ID NO: 231646 - RNA, 32 nt, Human
ucauuuccaagaggggagaaaaaguggaguca

SEQ ID NO: 231647 - RNA, 32 nt, Human
ucauuuccacccaaccccaggauuuccacagc

SEQ ID NO: 231648 - RNA, 32 nt, Human
ucauuuccacccacgcucccagccucuuagcu

SEQ ID NO: 231649 - RNA, 32 nt, Human
ucauuuccacccagccccaggauuuccagagc

SEQ ID NO: 231650 - RNA, 32 nt, Human
ucauuucccaccccugcuccagccucgauuug

SEQ ID NO: 231651 - RNA, 20 nt, Human
ucauuucccacccuuugcca

SEQ ID NO: 231652 - RNA, 22 nt, Human
ucauuucccagggacccuccua

SEQ ID NO: 231653 - RNA, 32 nt, Human
ucauuuccccagccuaggcaagggugaccuuu

SEQ ID NO: 231654 - RNA, 19 nt, Human
ucauuuccccccuugacca

SEQ ID NO: 231655 - RNA, 31 nt, Human
ucauuuccccucucugagccucggugucuuc

SEQ ID NO: 231656 - RNA, 32 nt, Human
ucauuucccuauuuaggccucaguuuaaucac

SEQ ID NO: 231657 - RNA, 32 nt, Human
ucauuuccuagacucuacuccaugauuuaacu

SEQ ID NO: 231658 - RNA, 32 nt, Human
ucauuuccugggaggggagagggugcgaccaa

SEQ ID NO: 231659 - RNA, 32 nt, Human
ucauuuccuucuuuuauuccuccccaccccaa

SEQ ID NO: 231660 - RNA, 32 nt, Human
ucauuucguuuaauuaaagcuaccuccuaaac

SEQ ID NO: 231661 - RNA, 32 nt, Human
ucauuucguuuuggggaagaaaucuguacugu

SEQ ID NO: 231662 - RNA, 32 nt, Human
ucauuucuacagugaagucugaugcuuuguua

SEQ ID NO: 231663 - RNA, 32 nt, Human
ucauuucuauuuuuccccuccuuuccuccucc

SEQ ID NO: 231664 - RNA, 32 nt, Human
ucauuucucaggagaacuuauggcuucagaau

SEQ ID NO: 231665 - RNA, 32 nt, Human
ucauuucuccggaagcugagccagucuccugg

SEQ ID NO: 231666 - RNA, 32 nt, Human
ucauuucucuuccuccucaccuccaccacccc

SEQ ID NO: 231667 - RNA, 32 nt, Human
ucauuucugcauuggagagacuucucauacuu

SEQ ID NO: 231668 - RNA, 32 nt, Human
ucauuucugccagcuucuuaugguccugaggc

SEQ ID NO: 231669 - RNA, 32 nt, Human
ucauuucugcuggcuuuucuccaaugaacauu

SEQ ID NO: 231670 - RNA, 32 nt, Human
ucauuucuggagauggggcagcagguggcucu

SEQ ID NO: 231671 - RNA, 32 nt, Human
ucauuucugucugacuugaguacccggggucc

SEQ ID NO: 231672 - RNA, 32 nt, Human
ucauuucuuagcagccucucuacauacaucuc

SEQ ID NO: 231673 - RNA, 32 nt, Human
ucauuucuucuuuucccuguggcaucguggau

SEQ ID NO: 231674 - RNA, 32 nt, Human
ucauuucuugacuuucauguggguaaccaguu

SEQ ID NO: 231675 - RNA, 32 nt, Human
ucauuucuugccaauaggaaggcuggugcuuc

SEQ ID NO: 231676 - RNA, 32 nt, Human
ucauuucuuuacugcugccauuuuccucacca

SEQ ID NO: 231677 - RNA, 32 nt, Human
ucauuugaaccuaggagguggcgguugcugug

SEQ ID NO: 231678 - RNA, 32 nt, Human
ucauuugaacuuaccuaaaagacuuguauuuc

SEQ ID NO: 231679 - RNA, 31 nt, Human
ucauuugacaacacaugugggagaggagguc

SEQ ID NO: 231680 - RNA, 32 nt, Human
ucauuugagagggagagcugugguacuggcua

SEQ ID NO: 231681 - RNA, 32 nt, Human
ucauuugagccaggagguugagguugcaguga

SEQ ID NO: 231682 - RNA, 32 nt, Human
ucauuugagcccagagguagaggcugcaguga

SEQ ID NO: 231683 - RNA, 32 nt, Human
ucauuugagcccaggaggucaaggcugcagug

SEQ ID NO: 231684 - RNA, 32 nt, Human
ucauuugagcccaggaguuccagaccagccua

SEQ ID NO: 231685 - RNA, 32 nt, Human
ucauuugagcugggauucccacauccucugag

SEQ ID NO: 231686 - RNA, 32 nt, Human
ucauuugaguuaacagugguguuagugauaga

SEQ ID NO: 231687 - RNA, 32 nt, Human
ucauuugauagucugugauccauuucaaguug

SEQ ID NO: 231688 - RNA, 32 nt, Human
ucauuugaugauuuucuagaguguaguggcgu

SEQ ID NO: 231689 - RNA, 32 nt, Human
ucauuugauguacauaccacacuccuuggcuu

SEQ ID NO: 231690 - RNA, 32 nt, Human
ucauuugcaagagcaccucuucagauauggca

SEQ ID NO: 231691 - RNA, 32 nt, Human
ucauuugcacacaaaaauaaagacuagagcaa

SEQ ID NO: 231692 - RNA, 31 nt, Human
ucauuugcacuuugacagagcagaggcagag

SEQ ID NO: 231693 - RNA, 21 nt, Human
ucauuugcagcaaacuguaca

SEQ ID NO: 231694 - RNA, 32 nt, Human
ucauuugcagcaguucuaguuccugacuuuua

SEQ ID NO: 231695 - RNA, 32 nt, Human
ucauuugcccuuaaggacaaaaaugaacugaa

SEQ ID NO: 231696 - RNA, 32 nt, Human
ucauuugcgaaaagcaggcucaucgaauacag

SEQ ID NO: 231697 - RNA, 32 nt, Human
ucauuugcuacaccaacuauguuuucagaauu

SEQ ID NO: 231698 - RNA, 32 nt, Human
ucauuugcucuaauucucaacuguaggcaaac

SEQ ID NO: 231699 - RNA, 32 nt, Human
ucauuugcucuaauucucaauuguaggcaaac

SEQ ID NO: 231700 - RNA, 32 nt, Human
ucauuugcugaaugggggaccugcucugagcc

SEQ ID NO: 231701 - RNA, 32 nt, Human
ucauuugcugccucuuggucaucaggagcugc

SEQ ID NO: 231702 - RNA, 32 nt, Human
ucauuugcuggagcucugcccauccugccccu

SEQ ID NO: 231703 - RNA, 32 nt, Human
ucauuugcuguugcuugcugaacugugaagaa

SEQ ID NO: 231704 - RNA, 32 nt, Human
ucauuuggaaaaagugaguacuguggauauuu

SEQ ID NO: 231705 - RNA, 32 nt, Human
ucauuuggaaagggaaaaccagcuucuguugc

SEQ ID NO: 231706 - RNA, 32 nt, Human
ucauuuggccuccuccugacuuguugcuccag

SEQ ID NO: 231707 - RNA, 32 nt, Human
ucauuugggggcugaaguuagcaacugggccu

SEQ ID NO: 231708 - RNA, 32 nt, Human
ucauuugggguuuggcauccugcccagccacu

SEQ ID NO: 231709 - RNA, 32 nt, Human
ucauuuggguaugaggaucaaaucaugacugc

SEQ ID NO: 231710 - RNA, 32 nt, Human
ucauuugguaggcggagagugaauuaccaaca

SEQ ID NO: 231711 - RNA, 32 nt, Human
ucauuuggucucauggcaguaagccucaugua

SEQ ID NO: 231712 - RNA, 32 nt, Human
ucauuugguuccuguuaaaguuguucucacug

SEQ ID NO: 231713 - RNA, 32 nt, Human
ucauuuguccaaauuucugggcucagcgcuug

SEQ ID NO: 231714 - RNA, 32 nt, Human
ucauuuguggaugucauggaauuucgggauca

SEQ ID NO: 231715 - RNA, 32 nt, Human
ucauuuguguguggcuuugcguuccaggcugu

SEQ ID NO: 231716 - RNA, 32 nt, Human
ucauuuguguuuuuggggaauguuuggaccua

SEQ ID NO: 231717 - RNA, 32 nt, Human
ucauuuguuaaaggagaagcaagagcaagaac

SEQ ID NO: 231718 - RNA, 32 nt, Human
ucauuuguuagccaagcaaagccauuuauuga

SEQ ID NO: 231719 - RNA, 32 nt, Human
ucauuuguucucucccugcuccaacccugcag

SEQ ID NO: 231720 - RNA, 32 nt, Human
ucauuuguugcagaaaaacaauggauacauuu

SEQ ID NO: 231721 - RNA, 32 nt, Human
ucauuuguuucugauuguuuucauccugauac

SEQ ID NO: 231722 - RNA, 32 nt, Human
ucauuuuacauacacacacauauuuuacacac

SEQ ID NO: 231723 - RNA, 32 nt, Human
ucauuuuaggaacuaaggaaaauaaauuuaaa

SEQ ID NO: 231724 - RNA, 31 nt, Human
ucauuuuaguucauugagguuggcagggauu

SEQ ID NO: 231725 - RNA, 32 nt, Human
ucauuuuauauguccagaaauggcuuugaauu

SEQ ID NO: 231726 - RNA, 32 nt, Human
ucauuuuaugagaucgcuaucuguaaguccag

SEQ ID NO: 231727 - RNA, 32 nt, Human
ucauuuuauguuuuauauagcuuucuuagaca

SEQ ID NO: 231728 - RNA, 32 nt, Human
ucauuuucaggucugcagaaccauagcuucca

SEQ ID NO: 231729 - RNA, 32 nt, Human
ucauuuucaucuuuucuugcugcuacccaucu

SEQ ID NO: 231730 - RNA, 32 nt, Human
ucauuuucauggcagaccuaagcucagacccu

SEQ ID NO: 231731 - RNA, 32 nt, Human
ucauuuucauuuccauuaaccuggaagcuuuc

SEQ ID NO: 231732 - RNA, 32 nt, Human
ucauuuuccauuucugaaaacucccagguggu

SEQ ID NO: 231733 - RNA, 32 nt, Human
ucauuuucccccagaaagggugcaguggccuc

SEQ ID NO: 231734 - RNA, 32 nt, Human
ucauuuucccuucacagauuccuccgccagaa

SEQ ID NO: 231735 - RNA, 32 nt, Human
ucauuuucguaacagucgucgaacuaggccuc

SEQ ID NO: 231736 - RNA, 32 nt, Human
ucauuuucuaauucucuuuucaaacacacaca

SEQ ID NO: 231737 - RNA, 32 nt, Human
ucauuuucuagcccucucccucaguccuuuau

SEQ ID NO: 231738 - RNA, 32 nt, Human
ucauuuucucacguuggucuucuaaagucacc

SEQ ID NO: 231739 - RNA, 32 nt, Human
ucauuuucugaauggauugauuccaauaaaag

SEQ ID NO: 231740 - RNA, 21 nt, Human
ucauuuucugaauuacuuggu

SEQ ID NO: 231741 - RNA, 32 nt, Human
ucauuuucugccucuuugugugucuauuaauc

SEQ ID NO: 231742 - RNA, 32 nt, Human
ucauuuucuucagggaaucacagucucuccuc

SEQ ID NO: 231743 - RNA, 32 nt, Human
ucauuuugagcaauuuugcccuguguuauaug

SEQ ID NO: 231744 - RNA, 32 nt, Human
ucauuuugauuuucucucucacaaucaguaau

SEQ ID NO: 231745 - RNA, 32 nt, Human
ucauuuugcacuguaaauugcuggcagaugcu

SEQ ID NO: 231746 - RNA, 32 nt, Human
ucauuuugcaggcuggaagcaccagggaauua

SEQ ID NO: 231747 - RNA, 32 nt, Human
ucauuuugccaugagccagucuugagauuuuc

SEQ ID NO: 231748 - RNA, 32 nt, Human
ucauuuuggaaaugcuucuccaccaaauaagg

SEQ ID NO: 231749 - RNA, 32 nt, Human
ucauuuuggcugcuuuugauuauuuuauacag

SEQ ID NO: 231750 - RNA, 32 nt, Human
ucauuuugggcugccuuagccaugaagcuccu

SEQ ID NO: 231751 - RNA, 32 nt, Human
ucauuuugguucuguguuuugacauuuuuccc

SEQ ID NO: 231752 - RNA, 32 nt, Human
ucauuuuguguuaauagucuauaguaacucgg

SEQ ID NO: 231753 - RNA, 32 nt, Human
ucauuuuguuuucauaagacaauguuucagau

SEQ ID NO: 231754 - RNA, 32 nt, Human
ucauuuuuaaaaagaaguuuucauggcaucag

SEQ ID NO: 231755 - RNA, 32 nt, Human
ucauuuuucagaccuuuuaacuccucaauucc

SEQ ID NO: 231756 - RNA, 32 nt, Human
ucauuuuuccaucugcugaaaugccauuucag

SEQ ID NO: 231757 - RNA, 32 nt, Human
ucauuuuuccucaugcagauaacagcaggaag

SEQ ID NO: 231758 - RNA, 32 nt, Human
ucauuuuuccuccucccuccccaaaccccaag

SEQ ID NO: 231759 - RNA, 32 nt, Human
ucauuuuucucaagaugugagcucuuuaucaa

SEQ ID NO: 231760 - RNA, 23 nt, Human
ucauuuuucucuucugaacccca

SEQ ID NO: 231761 - RNA, 32 nt, Human
ucauuuuucuucuuguggccucuggaauguga

SEQ ID NO: 231762 - RNA, 32 nt, Human
ucauuuuucuuuucuuuuuacauauguacaaa

SEQ ID NO: 231763 - RNA, 32 nt, Human
ucauuuuugggaacuccuuuccaaagccauau

SEQ ID NO: 231764 - RNA, 31 nt, Human
ucauuuuuguauuuauuucauuuaaaaucau

SEQ ID NO: 231765 - RNA, 32 nt, Human
ucauuuuuguuuccuuuguuccuuuuuacguu

SEQ ID NO: 231766 - RNA, 23 nt, Human
ucauuuuuugucuucuguuuuaa

SEQ ID NO: 231767 - RNA, 32 nt, Human
uccaaaaacaaaaacaaaacacacaccacaca

SEQ ID NO: 231768 - RNA, 32 nt, Human
uccaaaaaccaaaucagaugaaucaggggagg

SEQ ID NO: 231769 - RNA, 32 nt, Human
uccaaaaagaacaaauacacguauguuauaac

SEQ ID NO: 231770 - RNA, 32 nt, Human
uccaaaaagaagauccguuucuucucaaagau

SEQ ID NO: 231771 - RNA, 32 nt, Human
uccaaaaagagcuuccuuucgugacgagacgc

SEQ ID NO: 231772 - RNA, 32 nt, Human
uccaaaaaggccaacgaucugccccucagccu

SEQ ID NO: 231773 - RNA, 32 nt, Human
uccaaaaaucuacucuuccucuacaucuuacu

SEQ ID NO: 231774 - RNA, 32 nt, Human
uccaaaaauucacauaguauuaccucacagua

SEQ ID NO: 231775 - RNA, 32 nt, Human
uccaaaacaaagagagcacagguugugcaaga

SEQ ID NO: 231776 - RNA, 32 nt, Human
uccaaaacacauauguuggaaaucgcuuuugc

SEQ ID NO: 231777 - RNA, 32 nt, Human
uccaaaaccaaggaaguccuugguguucucca

SEQ ID NO: 231778 - RNA, 20 nt, Human
uccaaaaccugccauucuca

SEQ ID NO: 231779 - RNA, 32 nt, Human
uccaaaagaaaccagcccugcccacgccuuga

SEQ ID NO: 231780 - RNA, 32 nt, Human
uccaaaagaccggcaauaacacuugcugguga

SEQ ID NO: 231781 - RNA, 32 nt, Human
uccaaaagauuaaaaggaguuguucuuuucuc

SEQ ID NO: 231782 - RNA, 32 nt, Human
uccaaaagccgaguccucugauggcucccuua

SEQ ID NO: 231783 - RNA, 32 nt, Human
uccaaaagccucuucccucccuuuccuuuucc

SEQ ID NO: 231784 - RNA, 32 nt, Human
uccaaaagccugagaagagagaaguggagggg

SEQ ID NO: 231785 - RNA, 19 nt, Human
uccaaaagcucccagggcc

SEQ ID NO: 231786 - RNA, 22 nt, Human
uccaaaagucaaaauacuguga

SEQ ID NO: 231787 - RNA, 32 nt, Human
uccaaaagucucaguguaauagcaggaccaaa

SEQ ID NO: 231788 - RNA, 32 nt, Human
uccaaaagugaagauuuugugaggaauaagug

SEQ ID NO: 231789 - RNA, 23 nt, Human
uccaaaauagaaauguuuucaua

SEQ ID NO: 231790 - RNA, 32 nt, Human
uccaaaaucacccaaaugagcucguacuuugu

SEQ ID NO: 231791 - RNA, 32 nt, Human
uccaaaauccagcaagaaaaauccuucucaga

SEQ ID NO: 231792 - RNA, 22 nt, Human
uccaaaaugaugccuuggggug

SEQ ID NO: 231793 - RNA, 31 nt, Human
uccaaaauggcauccuccucuggcacugcaa

SEQ ID NO: 231794 - RNA, 32 nt, Human
uccaaaauguugaucuuccacugcaaauuuca

SEQ ID NO: 231795 - RNA, 32 nt, Human
uccaaaauuuacuaauacagaagcuugacaag

SEQ ID NO: 231796 - RNA, 32 nt, Human
uccaaacaaaacugggcacagagaaucagcua

SEQ ID NO: 231797 - RNA, 32 nt, Human
uccaaacaauguuacugcugggcacagcucug

SEQ ID NO: 231798 - RNA, 32 nt, Human
uccaaacaccucagccaccaggaaaagggagu

SEQ ID NO: 231799 - RNA, 32 nt, Human
uccaaacagaccagcucccugccuugccagga

SEQ ID NO: 231800 - RNA, 32 nt, Human
uccaaacagcccuucagguauggaaucauccc

SEQ ID NO: 231801 - RNA, 32 nt, Human
uccaaacagggaucugucucuuuggcucucag

SEQ ID NO: 231802 - RNA, 32 nt, Human
uccaaacauggccucucucuuuacuuggacuu

SEQ ID NO: 231803 - RNA, 32 nt, Human
uccaaacauguaggaggaaaugaggaaaucgc

SEQ ID NO: 231804 - RNA, 21 nt, Human
uccaaacauguucccaaggcc

SEQ ID NO: 231805 - RNA, 32 nt, Human
uccaaaccacacacaaagcacaaguaaagccu

SEQ ID NO: 231806 - RNA, 32 nt, Human
uccaaaccccugccuggaagacgggcugucgc

SEQ ID NO: 231807 - RNA, 32 nt, Human
uccaaacccuucagaagaagguaguaaacuug

SEQ ID NO: 231808 - RNA, 32 nt, Human
uccaaacccuugcacauauccaaaaggugcau

SEQ ID NO: 231809 - RNA, 32 nt, Human
uccaaaccucaaguccucuuggaggccugugu

SEQ ID NO: 231810 - RNA, 32 nt, Human
uccaaaccuuauacugaauaacuacugaaucc

SEQ ID NO: 231811 - RNA, 32 nt, Human
uccaaacgaauuugucaauuacuccaacgcgg

SEQ ID NO: 231812 - RNA, 32 nt, Human
uccaaacgcaggaauuagaaguagccuugugu

SEQ ID NO: 231813 - RNA, 32 nt, Human
uccaaacucaggaaguuugcagagagcagaca

SEQ ID NO: 231814 - RNA, 32 nt, Human
uccaaacuccacguaguaacagcagcugaaag

SEQ ID NO: 231815 - RNA, 21 nt, Human
uccaaacucgaaccccaggca

SEQ ID NO: 231816 - RNA, 32 nt, Human
uccaaacugaugcccaauaugcagccuauauc

SEQ ID NO: 231817 - RNA, 32 nt, Human
uccaaacugccugggccguggcugccucguga

SEQ ID NO: 231818 - RNA, 21 nt, Human
uccaaacugcuugccaccucu

SEQ ID NO: 231819 - RNA, 20 nt, Human
uccaaacuggagugcagugg

SEQ ID NO: 231820 - RNA, 24 nt, Human
uccaaacugggugacauggugaga

SEQ ID NO: 231821 - RNA, 32 nt, Human
uccaaacuucacacuucccugccugcagagga

SEQ ID NO: 231822 - RNA, 32 nt, Human
uccaaacuugcagacagggcagggagcgguca

SEQ ID NO: 231823 - RNA, 32 nt, Human
uccaaagaacuccaccaggaauuccugugacg

SEQ ID NO: 231824 - RNA, 32 nt, Human
uccaaagacagugacagcugacugagggcaaa

SEQ ID NO: 231825 - RNA, 32 nt, Human
uccaaagacaugcuauguuagcauuugaugca

SEQ ID NO: 231826 - RNA, 32 nt, Human
uccaaagacugugcuucauccauccacuuugc

SEQ ID NO: 231827 - RNA, 32 nt, Human
uccaaagagacacacuaauaaauacuucauua

SEQ ID NO: 231828 - RNA, 32 nt, Human
uccaaagagcuacuucgugacacuggccaucu

SEQ ID NO: 231829 - RNA, 32 nt, Human
uccaaagaggagaugauagaauaauacauuca

SEQ ID NO: 231830 - RNA, 32 nt, Human
uccaaagaguuucuuuuacaggcucucagauc

SEQ ID NO: 231831 - RNA, 32 nt, Human
uccaaagauccagcaggguaucaggaaagaau

SEQ ID NO: 231832 - RNA, 32 nt, Human
uccaaagauccucucaccuccaccucccaaag

SEQ ID NO: 231833 - RNA, 32 nt, Human
uccaaagcaagaaucuuucucagugaaaucuc

SEQ ID NO: 231834 - RNA, 31 nt, Human
uccaaagcacuuuuggauacucaggaggaaa

SEQ ID NO: 231835 - RNA, 32 nt, Human
uccaaagcaggcugguuggcauaauauguaau

SEQ ID NO: 231836 - RNA, 23 nt, Human
uccaaagcauuaauauccaauca

SEQ ID NO: 231837 - RNA, 32 nt, Human
uccaaagccagccugggcaacauggugaaacc

SEQ ID NO: 231838 - RNA, 32 nt, Human
uccaaagccaggcuaggacaucugccaccaag

SEQ ID NO: 231839 - RNA, 32 nt, Human
uccaaagccauggugaaacaucucugugcuaa

SEQ ID NO: 231840 - RNA, 32 nt, Human
uccaaagccccaaaucccuagagugcuuucug

SEQ ID NO: 231841 - RNA, 32 nt, Human
uccaaagccuccugccggcagggaaccaaauc

SEQ ID NO: 231842 - RNA, 32 nt, Human
uccaaagcgugcccuguuucccuuccuuagcg

SEQ ID NO: 231843 - RNA, 32 nt, Human
uccaaagcuugcuuccuuccuccuggcugcac

SEQ ID NO: 231844 - RNA, 32 nt, Human
uccaaagcuuuuucucuguguccacucuccaa

SEQ ID NO: 231845 - RNA, 32 nt, Human
uccaaaggaagucuaggagcugggaggaaaag

SEQ ID NO: 231846 - RNA, 32 nt, Human
uccaaaggacaagucuccuacucccaaaacua

SEQ ID NO: 231847 - RNA, 32 nt, Human
uccaaaggacagugugucacugugaacuggaa

SEQ ID NO: 231848 - RNA, 32 nt, Human
uccaaaggaggaaggagaagaaguaaaagugc

SEQ ID NO: 231849 - RNA, 32 nt, Human
uccaaaggaugccaccaucagcuccaccuggg

SEQ ID NO: 231850 - RNA, 32 nt, Human
uccaaaggauuacaacuccuugccaggaaugg

SEQ ID NO: 231851 - RNA, 32 nt, Human
uccaaaggccacacuuucagcaaacuucacau

SEQ ID NO: 231852 - RNA, 32 nt, Human
uccaaaggccucagccugugccugugucgagc

SEQ ID NO: 231853 - RNA, 27 nt, Human
uccaaaggcucuuuucagagccacuua

SEQ ID NO: 231854 - RNA, 32 nt, Human
uccaaagggaauggggguauggaccugggccu

SEQ ID NO: 231855 - RNA, 32 nt, Human
uccaaagggauaaggcuucagugcuguuggga

SEQ ID NO: 231856 - RNA, 32 nt, Human
uccaaaggucauccuuaauaacaacagaucug

SEQ ID NO: 231857 - RNA, 21 nt, Human
uccaaagguggagguugcagu

SEQ ID NO: 231858 - RNA, 32 nt, Human
uccaaagguuucugaggacuucucccaggaga

SEQ ID NO: 231859 - RNA, 32 nt, Human
uccaaagucacacaaauucuucaagaaauuca

SEQ ID NO: 231860 - RNA, 32 nt, Human
uccaaagucaccaugaggccacccuggaauca

SEQ ID NO: 231861 - RNA, 32 nt, Human
uccaaagucacgugccaaaaucaugucugagc

SEQ ID NO: 231862 - RNA, 32 nt, Human
uccaaaguccuaucucaugccaaaggacagug

SEQ ID NO: 231863 - RNA, 32 nt, Human
uccaaaguccucuaaacugacagggucucauu

SEQ ID NO: 231864 - RNA, 32 nt, Human
uccaaagucugcaucuggauuuggggguguuu

SEQ ID NO: 231865 - RNA, 32 nt, Human
uccaaagucuuucauaggcagaucuugguagc

SEQ ID NO: 231866 - RNA, 32 nt, Human
uccaaagucuuucauuggcagaucuugguagc

SEQ ID NO: 231867 - RNA, 32 nt, Human
uccaaagugagcuccacuuugggucugaggag

SEQ ID NO: 231868 - RNA, 32 nt, Human
uccaaagugauggacaggaaggggcagaguga

SEQ ID NO: 231869 - RNA, 32 nt, Human
uccaaaguguucuuuaguuugagaacuaaaaa

SEQ ID NO: 231870 - RNA, 32 nt, Human
uccaaaguuuuuaaagaauacgggucuguggu

SEQ ID NO: 231871 - RNA, 32 nt, Human
uccaaauaugcugaacuaagguaucuggggga

SEQ ID NO: 231872 - RNA, 32 nt, Human
uccaaaucagauuccucaaaccaccuuugaaa

SEQ ID NO: 231873 - RNA, 32 nt, Human
uccaaaucagauugccaggaagaaauaggacg

SEQ ID NO: 231874 - RNA, 32 nt, Human
uccaaaucagcccuugagauuugaggccuugg

SEQ ID NO: 231875 - RNA, 32 nt, Human
uccaaaucaggaggcaaagaaagagaagaaag

SEQ ID NO: 231876 - RNA, 32 nt, Human
uccaaauccaaucugaauuuaccuggaagagg

SEQ ID NO: 231877 - RNA, 32 nt, Human
uccaaauccagccuguuaccugacuuuuguca

SEQ ID NO: 231878 - RNA, 22 nt, Human
uccaaauccaggagcaacgcca

SEQ ID NO: 231879 - RNA, 32 nt, Human
uccaaauccuuccugggauucccccaaaccca

SEQ ID NO: 231880 - RNA, 18 nt, Human
uccaaaucucugucucuc

SEQ ID NO: 231881 - RNA, 19 nt, Human
uccaaaucuuucccaggcc

SEQ ID NO: 231882 - RNA, 31 nt, Human
uccaaaugacuucugcauuuguaaagauaac

SEQ ID NO: 231883 - RNA, 32 nt, Human
uccaaaugagccacaacacccagccagucaca

SEQ ID NO: 231884 - RNA, 32 nt, Human
uccaaaugauaguguauaugcuaacuggaugc

SEQ ID NO: 231885 - RNA, 32 nt, Human
uccaaaugcaugaugaaggaguucucauccac

SEQ ID NO: 231886 - RNA, 32 nt, Human
uccaaauggaguuucgcucucguugccgaggc

SEQ ID NO: 231887 - RNA, 29 nt, Human
uccaaauggcugcugucuuccucuaguac

SEQ ID NO: 231888 - RNA, 29 nt, Human
uccaaauggcugcuuuugucucccuuacc

SEQ ID NO: 231889 - RNA, 32 nt, Human
uccaaauggucuguuuuggccuccauuccuau

SEQ ID NO: 231890 - RNA, 20 nt, Human
uccaaauggugcccaaggcu

SEQ ID NO: 231891 - RNA, 32 nt, Human
uccaaaugugcaaaauacaugcuucgagcaaa

SEQ ID NO: 231892 - RNA, 20 nt, Human
uccaaauucacccauucuca

SEQ ID NO: 231893 - RNA, 22 nt, Human
uccaaauucagcucuucaguua

SEQ ID NO: 231894 - RNA, 19 nt, Human
uccaaauuccauuaagguc

SEQ ID NO: 231895 - RNA, 32 nt, Human
uccaaauucuggccucucaucccaggcugcag

SEQ ID NO: 231896 - RNA, 23 nt, Human
uccaaauuguaguuuugcugcuc

SEQ ID NO: 231897 - RNA, 21 nt, Human
uccaacaaagacuacauuuug

SEQ ID NO: 231898 - RNA, 22 nt, Human
uccaacaacagcgaccucucca

SEQ ID NO: 231899 - RNA, 32 nt, Human
uccaacaacuccaggaaaacuguuuuucaaaa

SEQ ID NO: 231900 - RNA, 32 nt, Human
uccaacaagacacuccaaagccaacuggauuu

SEQ ID NO: 231901 - RNA, 32 nt, Human
uccaacaagaggcaucagccacugugucuuuc

SEQ ID NO: 231902 - RNA, 32 nt, Human
uccaacaagguguggguggaaagaucaaauua

SEQ ID NO: 231903 - RNA, 32 nt, Human
uccaacaauccucccaucucagccucugaagu

SEQ ID NO: 231904 - RNA, 32 nt, Human
uccaacaaugcgagcauuguucucagaucaca

SEQ ID NO: 231905 - RNA, 20 nt, Human
uccaacaaugggauccaggg

SEQ ID NO: 231906 - RNA, 32 nt, Human
uccaacacaggcaauauuccagcuauggagcu

SEQ ID NO: 231907 - RNA, 32 nt, Human
uccaacacagguuuuggcaucuuuugugcugu

SEQ ID NO: 231908 - RNA, 32 nt, Human
uccaacacauuuucucuuuucauuccccugaa

SEQ ID NO: 231909 - RNA, 32 nt, Human
uccaacacugguuaucucuugucuuuuugaua

SEQ ID NO: 231910 - RNA, 32 nt, Human
uccaacagaaggaggaagugaaaacaaacuau

SEQ ID NO: 231911 - RNA, 32 nt, Human
uccaacagacaggauugugugagcagcugaaa

SEQ ID NO: 231912 - RNA, 32 nt, Human
uccaacagauuucccaacacagucccagaauu

SEQ ID NO: 231913 - RNA, 32 nt, Human
uccaacagccaucaggaguguuucuugaaugc

SEQ ID NO: 231914 - RNA, 32 nt, Human
uccaacagccuggauuaucugcgagauuccug

SEQ ID NO: 231915 - RNA, 32 nt, Human
uccaacagcuuucccugccacuguggguggaa

SEQ ID NO: 231916 - RNA, 32 nt, Human
uccaacaggcacaucuccuccuuugugguucc

SEQ ID NO: 231917 - RNA, 32 nt, Human
uccaacagucaguguuacagcauuucaccuug

SEQ ID NO: 231918 - RNA, 32 nt, Human
uccaacaguggcucccagccugcauggggagg

SEQ ID NO: 231919 - RNA, 32 nt, Human
uccaacaguucuggccuccuggccuucucuca

SEQ ID NO: 231920 - RNA, 32 nt, Human
uccaacauauccacaagcaaguuaucugucuu

SEQ ID NO: 231921 - RNA, 32 nt, Human
uccaacaucucuccccaccucaugauugucau

SEQ ID NO: 231922 - RNA, 32 nt, Human
uccaacaugaccuacaaggaggaagacuucga

SEQ ID NO: 231923 - RNA, 32 nt, Human
uccaacauggugaaacccccaucucuacuaaa

SEQ ID NO: 231924 - RNA, 32 nt, Human
uccaacauuccuccggauggugcucaauuacc

SEQ ID NO: 231925 - RNA, 32 nt, Human
uccaaccaacuugguucugcuucaauaaaucu

SEQ ID NO: 231926 - RNA, 32 nt, Human
uccaaccaaguggaaaggcaaguuggucuuau

SEQ ID NO: 231927 - RNA, 32 nt, Human
uccaaccaaucacaccccucccugcacccaug

SEQ ID NO: 231928 - RNA, 32 nt, Human
uccaaccaccaccaccugacaacccugcaugg

SEQ ID NO: 231929 - RNA, 32 nt, Human
uccaaccaccagcacugacuccugggcucuga

SEQ ID NO: 231930 - RNA, 32 nt, Human
uccaaccagcacaaauuccauagucagguuuu

SEQ ID NO: 231931 - RNA, 24 nt, Human
uccaaccauguggaaucugagggc

SEQ ID NO: 231932 - RNA, 32 nt, Human
uccaaccauuguucuaagcuguguagaagucc

SEQ ID NO: 231933 - RNA, 32 nt, Human
uccaacccaagugccuccagcugaccucuggc

SEQ ID NO: 231934 - RNA, 32 nt, Human
uccaacccaauaagcaggcagcuuugaggaca

SEQ ID NO: 231935 - RNA, 32 nt, Human
uccaacccaccugaaccugccugcacggugga

SEQ ID NO: 231936 - RNA, 32 nt, Human
uccaacccagugcuuccuaagaggguuacgga

SEQ ID NO: 231937 - RNA, 32 nt, Human
uccaaccccaaaacaccacuggccuucuuuca

SEQ ID NO: 231938 - RNA, 32 nt, Human
uccaacccucauucaguauuucuaucaagaaa

SEQ ID NO: 231939 - RNA, 24 nt, Human
uccaacccucgguacagagcagga

SEQ ID NO: 231940 - RNA, 32 nt, Human
uccaaccgggaugggagccgggcaaacuggcc

SEQ ID NO: 231941 - RNA, 32 nt, Human
uccaaccuagcccuacugcccaccccacccca

SEQ ID NO: 231942 - RNA, 24 nt, Human
uccaaccuaggugacagagcaaga

SEQ ID NO: 231943 - RNA, 32 nt, Human
uccaaccuaggugacagagcaagacccugucu

SEQ ID NO: 231944 - RNA, 21 nt, Human
uccaaccucagucuggcccca

SEQ ID NO: 231945 - RNA, 24 nt, Human
uccaaccucugacuggcugguccu

SEQ ID NO: 231946 - RNA, 32 nt, Human
uccaaccugagcgagugggugugugugcaaag

SEQ ID NO: 231947 - RNA, 32 nt, Human
uccaaccugcacuccagccugggcaacagagc

SEQ ID NO: 231948 - RNA, 32 nt, Human
uccaaccuggacaacaagagcgaaacuccguc

SEQ ID NO: 231949 - RNA, 32 nt, Human
uccaaccuggacaacacagcgagauuccgucu

SEQ ID NO: 231950 - RNA, 24 nt, Human
uccaaccuggacaacagagcgaga

SEQ ID NO: 231951 - RNA, 32 nt, Human
uccaaccuggacaacagagcgagacuccaucu

SEQ ID NO: 231952 - RNA, 24 nt, Human
uccaaccuggacgacagagcaaga

SEQ ID NO: 231953 - RNA, 32 nt, Human
uccaaccuggacgacagagcaagacuccaucu

SEQ ID NO: 231954 - RNA, 32 nt, Human
uccaaccuggaugacagagugagacuccagcu

SEQ ID NO: 231955 - RNA, 32 nt, Human
uccaaccugggcaacagaaugagacccugucu

SEQ ID NO: 231956 - RNA, 32 nt, Human
uccaaccugggcaacagagcaagacucggucu

SEQ ID NO: 231957 - RNA, 24 nt, Human
uccaaccugggcaacagaguaaga

SEQ ID NO: 231958 - RNA, 32 nt, Human
uccaaccugggcaacagagugagacccugucu

SEQ ID NO: 231959 - RNA, 24 nt, Human
uccaaccugggcagcagagcaaga

SEQ ID NO: 231960 - RNA, 32 nt, Human
uccaaccugggcagcagagcaagacucugucu

SEQ ID NO: 231961 - RNA, 24 nt, Human
uccaaccugggcgacagagcaaga

SEQ ID NO: 231962 - RNA, 32 nt, Human
uccaaccugggcgacagagcaagacuccaucu

SEQ ID NO: 231963 - RNA, 32 nt, Human
uccaaccugggcgacagagcaagacugugucu

SEQ ID NO: 231964 - RNA, 24 nt, Human
uccaaccugggcgacagggcgaga

SEQ ID NO: 231965 - RNA, 24 nt, Human
uccaaccugggcggcagagugaga

SEQ ID NO: 231966 - RNA, 32 nt, Human
uccaaccuggggaacagagcaagaucuugucu

SEQ ID NO: 231967 - RNA, 24 nt, Human
uccaaccuggguaacagagugaga

SEQ ID NO: 231968 - RNA, 24 nt, Human
uccaaccuggguaacagggcaaga

SEQ ID NO: 231969 - RNA, 32 nt, Human
uccaaccugggugacaagagcaaaacucuguc

SEQ ID NO: 231970 - RNA, 23 nt, Human
uccaaccugggugacaagaguga

SEQ ID NO: 231971 - RNA, 31 nt, Human
uccaaccugggugacaagagugaaacugaau

SEQ ID NO: 231972 - RNA, 24 nt, Human
uccaaccugggugacagaccgaga

SEQ ID NO: 231973 - RNA, 32 nt, Human
uccaaccugggugacagaccgagacccugucu

SEQ ID NO: 231974 - RNA, 24 nt, Human
uccaaccugggugacagagcaaga

SEQ ID NO: 231975 - RNA, 22 nt, Human
uccaaccugggugacagagcga

SEQ ID NO: 231976 - RNA, 32 nt, Human
uccaaccugggugacagagcgaaacuccaucu

SEQ ID NO: 231977 - RNA, 24 nt, Human
uccaaccugggugacagagcgaga

SEQ ID NO: 231978 - RNA, 32 nt, Human
uccaaccugggugacagagcgagacuccaccu

SEQ ID NO: 231979 - RNA, 32 nt, Human
uccaaccugggugacagagcgagacuccgucu

SEQ ID NO: 231980 - RNA, 24 nt, Human
uccaaccugggugacagagugaga

SEQ ID NO: 231981 - RNA, 32 nt, Human
uccaaccugggugacagagugagacccugucu

SEQ ID NO: 231982 - RNA, 32 nt, Human
uccaaccugggugacagagugagacuccaucu

SEQ ID NO: 231983 - RNA, 32 nt, Human
uccaaccugggugacagagugagauuccaucu

SEQ ID NO: 231984 - RNA, 32 nt, Human
uccaaccugggugacagagugagugagacucu

SEQ ID NO: 231985 - RNA, 23 nt, Human
uccaaccugggugacgagugaga

SEQ ID NO: 231986 - RNA, 32 nt, Human
uccaaccugggugacgagugagacuccaucuc

SEQ ID NO: 231987 - RNA, 24 nt, Human
uccaaccugggugagagagcgaga

SEQ ID NO: 231988 - RNA, 32 nt, Human
uccaaccugggugagagagcgagacccugucu

SEQ ID NO: 231989 - RNA, 24 nt, Human
uccaaccugggugauggagcaaga

SEQ ID NO: 231990 - RNA, 32 nt, Human
uccaaccugggugauggagcaagacuccaucu

SEQ ID NO: 231991 - RNA, 32 nt, Human
uccaaccugguggcauaggcuuggcaaaugga

SEQ ID NO: 231992 - RNA, 32 nt, Human
uccaaccuuccagaaagccgauuaucuucauu

SEQ ID NO: 231993 - RNA, 32 nt, Human
uccaacgcauaugccagcagcuucucacucca

SEQ ID NO: 231994 - RNA, 32 nt, Human
uccaacguccgcgcggccaccaugaugcaaau

SEQ ID NO: 231995 - RNA, 20 nt, Human
uccaacguucucacacugga

SEQ ID NO: 231996 - RNA, 32 nt, Human
uccaacucacaguccacuagcuucacuccuuu

SEQ ID NO: 231997 - RNA, 32 nt, Human
uccaacucauuuucagccugauccagcaucuu

SEQ ID NO: 231998 - RNA, 32 nt, Human
uccaacuccaacacuuaacacagggccaauga

SEQ ID NO: 231999 - RNA, 32 nt, Human
uccaacuccagccaccacuuuccugugcauuu

SEQ ID NO: 232000 - RNA, 32 nt, Human
uccaacucccuagcccagacccucaggucagg

SEQ ID NO: 232001 - RNA, 32 nt, Human
uccaacucccuuaaaauaccuagaccuaaacg

SEQ ID NO: 232002 - RNA, 32 nt, Human
uccaacuccuaguaaaagugggggacugaccc

SEQ ID NO: 232003 - RNA, 32 nt, Human
uccaacucgcccagaucucugcacuucucagu

SEQ ID NO: 232004 - RNA, 32 nt, Human
uccaacucucagacaaaaagcuuugucagaua

SEQ ID NO: 232005 - RNA, 20 nt, Human
uccaacucuuagagacucau

SEQ ID NO: 232006 - RNA, 32 nt, Human
uccaacugaagcacccgguucaucucacuggg

SEQ ID NO: 232007 - RNA, 32 nt, Human
uccaacugacaagccuuugugccugcaucucc

SEQ ID NO: 232008 - RNA, 32 nt, Human
uccaacugacucugcucccugcccucaccauc

SEQ ID NO: 232009 - RNA, 32 nt, Human
uccaacugagcucagugaccugggugggcagu

SEQ ID NO: 232010 - RNA, 32 nt, Human
uccaacugagguacccgguucaucugauuggg

SEQ ID NO: 232011 - RNA, 32 nt, Human
uccaacugauggguaaugucugccuuuaagcc

SEQ ID NO: 232012 - RNA, 32 nt, Human
uccaacugccagaaggaaggaggaagcuuauu

SEQ ID NO: 232013 - RNA, 32 nt, Human
uccaacuggagcaugaccacagacccauucag

SEQ ID NO: 232014 - RNA, 25 nt, Human
uccaacuggucagggcagagugauc

SEQ ID NO: 232015 - RNA, 32 nt, Human
uccaacuguauaccugcaucagugucauuccu

SEQ ID NO: 232016 - RNA, 32 nt, Human
uccaacuguggaggcuguaaauccagauuuuc

SEQ ID NO: 232017 - RNA, 32 nt, Human
uccaacuguuggaccugcacugccuuuccagc

SEQ ID NO: 232018 - RNA, 32 nt, Human
uccaacuuaggcuacagaaugagacucugccc

SEQ ID NO: 232019 - RNA, 32 nt, Human
uccaacuuccaauauuuauccauucguugugg

SEQ ID NO: 232020 - RNA, 32 nt, Human
uccaacuuccuuccuuucuuguccuguuuccc

SEQ ID NO: 232021 - RNA, 32 nt, Human
uccaacuucucacuccuccuuacuaggcuugg

SEQ ID NO: 232022 - RNA, 32 nt, Human
uccaacuugggugacagagcacgacucugucu

SEQ ID NO: 232023 - RNA, 32 nt, Human
uccaacuuguuuuuccagccuaguuggaaacu

SEQ ID NO: 232024 - RNA, 32 nt, Human
uccaacuuucuacauaauggcuaguucugacu

SEQ ID NO: 232025 - RNA, 32 nt, Human
uccaagaaaagaaagggugucacuggaaccac

SEQ ID NO: 232026 - RNA, 32 nt, Human
uccaagaaaagaaccaaagagggcagaggaac

SEQ ID NO: 232027 - RNA, 32 nt, Human
uccaagaaagggaggggaaggaaugagcuaaa

SEQ ID NO: 232028 - RNA, 32 nt, Human
uccaagaacucaccaagauguuuuucagagau

SEQ ID NO: 232029 - RNA, 20 nt, Human
uccaagaacuccugcugcuu

SEQ ID NO: 232030 - RNA, 32 nt, Human
uccaagaagaugggaggaaggggagccccguc

SEQ ID NO: 232031 - RNA, 32 nt, Human
uccaagaagugcuguugagaggcgaggaggua

SEQ ID NO: 232032 - RNA, 32 nt, Human
uccaagaccaaagaaggaaggaagguggacgg

SEQ ID NO: 232033 - RNA, 32 nt, Human
uccaagaccacccuggccaacauggugaaguc

SEQ ID NO: 232034 - RNA, 32 nt, Human
uccaagaccagacucgccaacauggugaaacc

SEQ ID NO: 232035 - RNA, 32 nt, Human
uccaagaccagccuggccaacauggugaaacc

SEQ ID NO: 232036 - RNA, 32 nt, Human
uccaagaccagccuggccaacauggugaaauc

SEQ ID NO: 232037 - RNA, 32 nt, Human
uccaagaccagccuggccaauguggugaaacu

SEQ ID NO: 232038 - RNA, 32 nt, Human
uccaagaccagccugggcaacauggcaaaaca

SEQ ID NO: 232039 - RNA, 32 nt, Human
uccaagaccguuggugccuagaggacuagaau

SEQ ID NO: 232040 - RNA, 26 nt, Human
uccaagacggaggucccugguccacu

SEQ ID NO: 232041 - RNA, 32 nt, Human
uccaagacuaaguugagaaaagagauacuauu

SEQ ID NO: 232042 - RNA, 23 nt, Human
uccaagacuaguuuguuaucuca

SEQ ID NO: 232043 - RNA, 32 nt, Human
uccaagagagucaguguagcugaaacuuuguc

SEQ ID NO: 232044 - RNA, 32 nt, Human
uccaagagcaaacucaguggugaacagcucca

SEQ ID NO: 232045 - RNA, 32 nt, Human
uccaagagccagccccuuucugcuccacaaaa

SEQ ID NO: 232046 - RNA, 32 nt, Human
uccaagagggaaaugcuggucugagaggagaa

SEQ ID NO: 232047 - RNA, 32 nt, Human
uccaagagucgggggucucccuauguuuccca

SEQ ID NO: 232048 - RNA, 32 nt, Human
uccaagagugugaaggaaaauggggcaauucc

SEQ ID NO: 232049 - RNA, 32 nt, Human
uccaagaguguguggaggacaugaccagaggc

SEQ ID NO: 232050 - RNA, 21 nt, Human
uccaagaguuuagugauuuca

SEQ ID NO: 232051 - RNA, 32 nt, Human
uccaagaucagccuggccaacaugucgaagug

SEQ ID NO: 232052 - RNA, 32 nt, Human
uccaagaucucagucucucagugcuuggcaga

SEQ ID NO: 232053 - RNA, 31 nt, Human
uccaagauggcggcagaagcagcugguggga

SEQ ID NO: 232054 - RNA, 22 nt, Human
uccaagauuugagaucaauuua

SEQ ID NO: 232055 - RNA, 32 nt, Human
uccaagcaaaaucuccccgccugggccauggg

SEQ ID NO: 232056 - RNA, 32 nt, Human
uccaagcaacccaaccuucagaucaacuccug

SEQ ID NO: 232057 - RNA, 32 nt, Human
uccaagcaagggaaaagaagccuuggcggaga

SEQ ID NO: 232058 - RNA, 32 nt, Human
uccaagcacugccucccuccugcucuguccag

SEQ ID NO: 232059 - RNA, 18 nt, Human
uccaagcagccaaccuaa

SEQ ID NO: 232060 - RNA, 32 nt, Human
uccaagcagccaucuuuccggaagcucaugga

SEQ ID NO: 232061 - RNA, 29 nt, Human
uccaagcagcugcuaucaacccucucucc

SEQ ID NO: 232062 - RNA, 32 nt, Human
uccaagccaagcucugugggcuuucuguuccu

SEQ ID NO: 232063 - RNA, 32 nt, Human
uccaagccacaguguagugaaccucaucacaa

SEQ ID NO: 232064 - RNA, 21 nt, Human
uccaagccaguccccccagcc

SEQ ID NO: 232065 - RNA, 32 nt, Human
uccaagccauagcuugggcugaaggacaaauu

SEQ ID NO: 232066 - RNA, 32 nt, Human
uccaagcccacugcagccuuguggauuuucca

SEQ ID NO: 232067 - RNA, 32 nt, Human
uccaagccccagagucccucuggaccaacccc

SEQ ID NO: 232068 - RNA, 20 nt, Human
uccaagccccaucuggggcu

SEQ ID NO: 232069 - RNA, 32 nt, Human
uccaagccgauguugcucuguccuuccucaca

SEQ ID NO: 232070 - RNA, 32 nt, Human
uccaagccgccugucucugcccuggguccugg

SEQ ID NO: 232071 - RNA, 32 nt, Human
uccaagccggugccgggcgcccagggguugcc

SEQ ID NO: 232072 - RNA, 32 nt, Human
uccaagccucguuccuccuucugccuccccgg

SEQ ID NO: 232073 - RNA, 32 nt, Human
uccaagccugaacaaugggaccugccccuccc

SEQ ID NO: 232074 - RNA, 25 nt, Human
uccaagccugcugcuggaaaccuca

SEQ ID NO: 232075 - RNA, 32 nt, Human
uccaagccuggcccuccaugcccccaugaccu

SEQ ID NO: 232076 - RNA, 32 nt, Human
uccaagccuuccaccaaaacagugccccaccu

SEQ ID NO: 232077 - RNA, 32 nt, Human
uccaagccuuccccaaccucccccucugugag

SEQ ID NO: 232078 - RNA, 32 nt, Human
uccaagcgaacagcaaccuccugcuacccucc

SEQ ID NO: 232079 - RNA, 30 nt, Human
uccaagcggggccacaggguggggucauag

SEQ ID NO: 232080 - RNA, 32 nt, Human
uccaagcuaaagaugucgucacaugccacauc

SEQ ID NO: 232081 - RNA, 20 nt, Human
uccaagcuacucggaaggcu

SEQ ID NO: 232082 - RNA, 32 nt, Human
uccaagcuccacuggcauuucagucugacgug

SEQ ID NO: 232083 - RNA, 32 nt, Human
uccaagcucuauccuccccggguccagaggcc

SEQ ID NO: 232084 - RNA, 32 nt, Human
uccaagcucuuauuacuaaaguauuuaguauc

SEQ ID NO: 232085 - RNA, 32 nt, Human
uccaagcucuuucacacucaggcucuuccugg

SEQ ID NO: 232086 - RNA, 32 nt, Human
uccaagcugcugcucaccuaugcugacaacau

SEQ ID NO: 232087 - RNA, 20 nt, Human
uccaagcuggagugcagugg

SEQ ID NO: 232088 - RNA, 22 nt, Human
uccaagcuggagugcaguggug

SEQ ID NO: 232089 - RNA, 32 nt, Human
uccaagcugguccccucuguguaucacucuac

SEQ ID NO: 232090 - RNA, 32 nt, Human
uccaagcuggucucaaacuccuggguucaagc

SEQ ID NO: 232091 - RNA, 32 nt, Human
uccaagcuguggcccagcuggaagaggagagg

SEQ ID NO: 232092 - RNA, 32 nt, Human
uccaagcuuugcuugagaacuuuuguaacgug

SEQ ID NO: 232093 - RNA, 32 nt, Human
uccaaggaacugcugcccucccuuccuucuac

SEQ ID NO: 232094 - RNA, 32 nt, Human
uccaaggagccagggcccugggucuagccgug

SEQ ID NO: 232095 - RNA, 20 nt, Human
uccaaggagcuucugcugcu

SEQ ID NO: 232096 - RNA, 32 nt, Human
uccaaggaggagaccugaguugcugggaauuu

SEQ ID NO: 232097 - RNA, 32 nt, Human
uccaaggaggcagggauggggguggagugucu

SEQ ID NO: 232098 - RNA, 18 nt, Human
uccaaggaguucagggcc

SEQ ID NO: 232099 - RNA, 32 nt, Human
uccaaggaugaauccuggaaauugcaguuagc

SEQ ID NO: 232100 - RNA, 19 nt, Human
uccaaggaugcccaaggcc

SEQ ID NO: 232101 - RNA, 32 nt, Human
uccaaggaugcugaauguaaugccuggucaau

SEQ ID NO: 232102 - RNA, 32 nt, Human
uccaaggauuaggugaucggagcuugaaaaga

SEQ ID NO: 232103 - RNA, 32 nt, Human
uccaaggcaaaagagguaagcagaucacaccu

SEQ ID NO: 232104 - RNA, 22 nt, Human
uccaaggcaccuccuggcccca

SEQ ID NO: 232105 - RNA, 28 nt, Human
uccaaggccaaugcugccugcucuguuu

SEQ ID NO: 232106 - RNA, 32 nt, Human
uccaaggcccccagcaggcucuccagucccag

SEQ ID NO: 232107 - RNA, 32 nt, Human
uccaaggcucaucucuggcucuugccuggucu

SEQ ID NO: 232108 - RNA, 32 nt, Human
uccaaggcugcuuggaaaaugcuuugcuagac

SEQ ID NO: 232109 - RNA, 32 nt, Human
uccaaggcuggccacuuuucucuccaaggugc

SEQ ID NO: 232110 - RNA, 32 nt, Human
uccaaggcuuuugagacacaagggaaucucaa

SEQ ID NO: 232111 - RNA, 32 nt, Human
uccaagggagaaacuucugggagccuccaaac

SEQ ID NO: 232112 - RNA, 32 nt, Human
uccaagggcaggcagagcucaugaaugccucu

SEQ ID NO: 232113 - RNA, 21 nt, Human
uccaagggcaucccauucuca

SEQ ID NO: 232114 - RNA, 32 nt, Human
uccaagggccagaagcagaacagucuccgcag

SEQ ID NO: 232115 - RNA, 32 nt, Human
uccaagggccuuuuguccuguuagcaauugag

SEQ ID NO: 232116 - RNA, 32 nt, Human
uccaaggggaaagggcagcaucucagcaugca

SEQ ID NO: 232117 - RNA, 32 nt, Human
uccaaggggccuccuggauucaguccccacug

SEQ ID NO: 232118 - RNA, 31 nt, Human
uccaaggggcuucucccuuuccuugagcucu

SEQ ID NO: 232119 - RNA, 20 nt, Human
uccaaggguacuucuuugga

SEQ ID NO: 232120 - RNA, 32 nt, Human
uccaaggguccccggcucuacccuccaguuau

SEQ ID NO: 232121 - RNA, 32 nt, Human
uccaagguacgcuuguuuuccaaggaagugcc

SEQ ID NO: 232122 - RNA, 32 nt, Human
uccaagguccaauugacugcgcccuugacagc

SEQ ID NO: 232123 - RNA, 32 nt, Human
uccaaggucucccccagcacugaggagcucgc

SEQ ID NO: 232124 - RNA, 32 nt, Human
uccaaggugccuggagccagaggucggggagu

SEQ ID NO: 232125 - RNA, 19 nt, Human
uccaaggugcucacucuua

SEQ ID NO: 232126 - RNA, 32 nt, Human
uccaagguugcuagcaggaaauggcagagcca

SEQ ID NO: 232127 - RNA, 23 nt, Human
uccaaguacauaguucacucaca

SEQ ID NO: 232128 - RNA, 32 nt, Human
uccaaguaccagagaguauuguguaugcucuc

SEQ ID NO: 232129 - RNA, 32 nt, Human
uccaaguacccacuccaggggccagcccacgu

SEQ ID NO: 232130 - RNA, 32 nt, Human
uccaaguacucacaggggcucugggugcccau

SEQ ID NO: 232131 - RNA, 22 nt, Human
uccaaguagcugggacuacagg

SEQ ID NO: 232132 - RNA, 22 nt, Human
uccaaguagcugggacuauagg

SEQ ID NO: 232133 - RNA, 22 nt, Human
uccaaguagcugggucuacagg

SEQ ID NO: 232134 - RNA, 19 nt, Human
uccaagucaccaccuagua

SEQ ID NO: 232135 - RNA, 32 nt, Human
uccaagucaccuaggccuugggcagugccucc

SEQ ID NO: 232136 - RNA, 32 nt, Human
uccaagucaccuggccugggaaaguacuugcc

SEQ ID NO: 232137 - RNA, 32 nt, Human
uccaagucucuuucccugucugggccucacuc

SEQ ID NO: 232138 - RNA, 32 nt, Human
uccaagucugcagccucccauucucuaggccu

SEQ ID NO: 232139 - RNA, 32 nt, Human
uccaagucugcuccuuggcuuccucuccugag

SEQ ID NO: 232140 - RNA, 18 nt, Human
uccaagugacccagggcc

SEQ ID NO: 232141 - RNA, 19 nt, Human
uccaagugaggcccuguca

SEQ ID NO: 232142 - RNA, 32 nt, Human
uccaagugccagagaaguggaggcagaucgcu

SEQ ID NO: 232143 - RNA, 32 nt, Human
uccaagugccccaccacuccccaaccccucuc

SEQ ID NO: 232144 - RNA, 29 nt, Human
uccaagugccugucugugccugggagaac

SEQ ID NO: 232145 - RNA, 32 nt, Human
uccaaguguagcuaaaauauuuuugcagguaa

SEQ ID NO: 232146 - RNA, 32 nt, Human
uccaaguguucaggacuuuuauaccuguuaua

SEQ ID NO: 232147 - RNA, 32 nt, Human
uccaaguuacguguugucacuggguugaagua

SEQ ID NO: 232148 - RNA, 32 nt, Human
uccaaguucaaggacugggcuggcaaacccag

SEQ ID NO: 232149 - RNA, 32 nt, Human
uccaaguuccaggguauuuuucauuccuagua

SEQ ID NO: 232150 - RNA, 23 nt, Human
uccaaguuuuauuuguuaucaca

SEQ ID NO: 232151 - RNA, 18 nt, Human
uccaaguuuuuucaggcu

SEQ ID NO: 232152 - RNA, 32 nt, Human
uccaauaaaguuuaauuuuacuuucuguuauu

SEQ ID NO: 232153 - RNA, 32 nt, Human
uccaauacucuuuccaaaacccccuccugggu

SEQ ID NO: 232154 - RNA, 32 nt, Human
uccaauacugcuuaauuauagcacuuuauuuu

SEQ ID NO: 232155 - RNA, 32 nt, Human
uccaauacuugccugaaagcugugaagaagaa

SEQ ID NO: 232156 - RNA, 32 nt, Human
uccaauauaacuaggcaaaaagaagugaggag

SEQ ID NO: 232157 - RNA, 32 nt, Human
uccaauauuguaauccuagcacuuugggaggc

SEQ ID NO: 232158 - RNA, 32 nt, Human
uccaauauuuggacacuuagagugguuuuugu

SEQ ID NO: 232159 - RNA, 32 nt, Human
uccaaucauaugcauugacauacacagcaaag

SEQ ID NO: 232160 - RNA, 32 nt, Human
uccaauccaaacguucaccuguuuccuuuccu

SEQ ID NO: 232161 - RNA, 32 nt, Human
uccaaucccaacucccuuucccaaacaaaaag

SEQ ID NO: 232162 - RNA, 19 nt, Human
uccaaucccagacugggaa

SEQ ID NO: 232163 - RNA, 32 nt, Human
uccaaucccaucuauucucugccuuuacuaua

SEQ ID NO: 232164 - RNA, 32 nt, Human
uccaaucccauugccgaggacaucccaaaccc

SEQ ID NO: 232165 - RNA, 32 nt, Human
uccaaucuauguugguuuaccuguaguguuuu

SEQ ID NO: 232166 - RNA, 32 nt, Human
uccaaucucacagcagucaucuccuaugcggg

SEQ ID NO: 232167 - RNA, 32 nt, Human
uccaaucucccaucccuaugagggaggcagaa

SEQ ID NO: 232168 - RNA, 32 nt, Human
uccaaucucucaccaucucuaaagcagccguu

SEQ ID NO: 232169 - RNA, 32 nt, Human
uccaaucucucaggaccccguggaauugcauc

SEQ ID NO: 232170 - RNA, 23 nt, Human
uccaaucuggcaacagagcgaga

SEQ ID NO: 232171 - RNA, 32 nt, Human
uccaaucugggcaacauggggaaaccccagcu

SEQ ID NO: 232172 - RNA, 24 nt, Human
uccaaucugggugacagaauaaga

SEQ ID NO: 232173 - RNA, 32 nt, Human
uccaaucugggugacagaauaagaccccgucu

SEQ ID NO: 232174 - RNA, 32 nt, Human
uccaaucuguaugguggcugucuucuauggca

SEQ ID NO: 232175 - RNA, 32 nt, Human
uccaaucuuccagccuuugggagcaggggagg

SEQ ID NO: 232176 - RNA, 32 nt, Human
uccaaugaaggggugauauuaucaacugaagg

SEQ ID NO: 232177 - RNA, 31 nt, Human
uccaaugacaaaggaaguggugaucagucug

SEQ ID NO: 232178 - RNA, 25 nt, Human
uccaaugaggcagagguugcaguga

SEQ ID NO: 232179 - RNA, 32 nt, Human
uccaaugaggcagagguugcagugagcugaga

SEQ ID NO: 232180 - RNA, 32 nt, Human
uccaaugaucaugccaaucgagaggcugaaau

SEQ ID NO: 232181 - RNA, 32 nt, Human
uccaaugcaaaugauccuucuguucuuucgaa

SEQ ID NO: 232182 - RNA, 32 nt, Human
uccaaugcagucaaguccacccugcccagacu

SEQ ID NO: 232183 - RNA, 32 nt, Human
uccaaugcaugaagccaccccaaaauacagca

SEQ ID NO: 232184 - RNA, 32 nt, Human
uccaaugcccugguuuuccugcuugaaucugu

SEQ ID NO: 232185 - RNA, 32 nt, Human
uccaaugccugaugguuccccagaucuaugaa

SEQ ID NO: 232186 - RNA, 32 nt, Human
uccaaugcucaagugagucacaucugccuguu

SEQ ID NO: 232187 - RNA, 32 nt, Human
uccaaugcuccuggcauuucuggagcaggagg

SEQ ID NO: 232188 - RNA, 32 nt, Human
uccaaugcuguugucaacuuugauucuggguu

SEQ ID NO: 232189 - RNA, 32 nt, Human
uccaauggaauuuucuucaguguuggaaaugg

SEQ ID NO: 232190 - RNA, 32 nt, Human
uccaauggacugcauaaauaaccggggauucu

SEQ ID NO: 232191 - RNA, 32 nt, Human
uccaauggagggcugacagcuucccgccuccu

SEQ ID NO: 232192 - RNA, 26 nt, Human
uccaauguggcagguagcacagagcu

SEQ ID NO: 232193 - RNA, 32 nt, Human
uccaaugugguacaccccacagagcuaaucua

SEQ ID NO: 232194 - RNA, 32 nt, Human
uccaauguguaggucccuccaggcuggggcuu

SEQ ID NO: 232195 - RNA, 32 nt, Human
uccaauguucgcgcaggcacuggagucagaga

SEQ ID NO: 232196 - RNA, 32 nt, Human
uccaauuaaaacgccuacagcugccuccuaga

SEQ ID NO: 232197 - RNA, 32 nt, Human
uccaauuacuccaccaucaccucucuccccua

SEQ ID NO: 232198 - RNA, 32 nt, Human
uccaauuagcugugugauaaacuucaguuuuc

SEQ ID NO: 232199 - RNA, 32 nt, Human
uccaauucaaaaauaaauuagaaaaauauaug

SEQ ID NO: 232200 - RNA, 32 nt, Human
uccaauuccaaagccuuuuucacauuuuaaga

SEQ ID NO: 232201 - RNA, 32 nt, Human
uccaauucuuuuucucuccuuagaucuaugac

SEQ ID NO: 232202 - RNA, 32 nt, Human
uccaauugcuggcugcuucacuccuggaacug

SEQ ID NO: 232203 - RNA, 32 nt, Human
uccaauugcugucugccccagaguuucauccu

SEQ ID NO: 232204 - RNA, 32 nt, Human
uccaauugggacucccauucuuugccaggaga

SEQ ID NO: 232205 - RNA, 32 nt, Human
uccaauuggguguguaguaaagacuuaaaccu

SEQ ID NO: 232206 - RNA, 32 nt, Human
uccaauuuacaggcuggagcagcagcugcauc

SEQ ID NO: 232207 - RNA, 32 nt, Human
uccaauuucucggccucaaccccagccucauu

SEQ ID NO: 232208 - RNA, 32 nt, Human
uccaauuuugcagagaagaauaccucuguuua

SEQ ID NO: 232209 - RNA, 32 nt, Human
uccacaaaacagugccuucuaagccgggcugg

SEQ ID NO: 232210 - RNA, 32 nt, Human
uccacaaaagaaugacucuaacagcagaaagg

SEQ ID NO: 232211 - RNA, 32 nt, Human
uccacaaagauaccagccaaggggacaccauu

SEQ ID NO: 232212 - RNA, 32 nt, Human
uccacaaagugcugggauuacaggugugagcu

SEQ ID NO: 232213 - RNA, 25 nt, Human
uccacaaauaacauguuggcaguga

SEQ ID NO: 232214 - RNA, 32 nt, Human
uccacaaaucaucuguaacaauuauguuuuca

SEQ ID NO: 232215 - RNA, 32 nt, Human
uccacaacagccaggggagcaguuggcaaagg

SEQ ID NO: 232216 - RNA, 32 nt, Human
uccacaacccaagcaacauuuguauggauuua

SEQ ID NO: 232217 - RNA, 32 nt, Human
uccacaaccccugucacauaccuuucaggagg

SEQ ID NO: 232218 - RNA, 32 nt, Human
uccacaaccgagagagcuuggaagaggguccc

SEQ ID NO: 232219 - RNA, 32 nt, Human
uccacaacugcaacaauucagugccaggaaag

SEQ ID NO: 232220 - RNA, 32 nt, Human
uccacaagaucuguaauguuauuuccacuuau

SEQ ID NO: 232221 - RNA, 25 nt, Human
uccacaagcacucaggccacuggca

SEQ ID NO: 232222 - RNA, 32 nt, Human
uccacaagcagcacaaccacacugguugguga

SEQ ID NO: 232223 - RNA, 32 nt, Human
uccacaagcgaggguagcagaggcucuccuca

SEQ ID NO: 232224 - RNA, 32 nt, Human
uccacaaggagagcacacaggagagaauggcu

SEQ ID NO: 232225 - RNA, 32 nt, Human
uccacaaggagagugacaagaggcgacgggga

SEQ ID NO: 232226 - RNA, 32 nt, Human
uccacaaucagagccauuuuuguuaaaguggc

SEQ ID NO: 232227 - RNA, 32 nt, Human
uccacaaugaccacagcaaaugaccaagcaug

SEQ ID NO: 232228 - RNA, 32 nt, Human
uccacaauucagaggccacauucuaacagggg

SEQ ID NO: 232229 - RNA, 32 nt, Human
uccacaauuugcuggggaggccccagggucca

SEQ ID NO: 232230 - RNA, 32 nt, Human
uccacacaagggcagagaguccgucuagauuu

SEQ ID NO: 232231 - RNA, 32 nt, Human
uccacacacaccuccaugguauuccuucuuuc

SEQ ID NO: 232232 - RNA, 32 nt, Human
uccacacaccugccaacccugggaagcaucca

SEQ ID NO: 232233 - RNA, 32 nt, Human
uccacacacugcacccccacuccuggggcagg

SEQ ID NO: 232234 - RNA, 32 nt, Human
uccacacacuucuuccaaaaggaagcacccgu

SEQ ID NO: 232235 - RNA, 32 nt, Human
uccacacagcagcaaaucgcuucaccuucuug

SEQ ID NO: 232236 - RNA, 32 nt, Human
uccacacagcauggggcuucagcugcuggccc

SEQ ID NO: 232237 - RNA, 32 nt, Human
uccacacagcggcgcucccagccugaucugcc

SEQ ID NO: 232238 - RNA, 32 nt, Human
uccacacaggcagacuugaccuugaccagaua

SEQ ID NO: 232239 - RNA, 32 nt, Human
uccacacaggccaggagggaaggaccaggcca

SEQ ID NO: 232240 - RNA, 32 nt, Human
uccacacaguccuggccucaucaggggugggg

SEQ ID NO: 232241 - RNA, 22 nt, Human
uccacacaguguguaucauuua

SEQ ID NO: 232242 - RNA, 21 nt, Human
uccacacaguuuccacccuca

SEQ ID NO: 232243 - RNA, 32 nt, Human
uccacacaucuucuuggucuugcauaaggcag

SEQ ID NO: 232244 - RNA, 25 nt, Human
uccacacauggccaggacacugcca

SEQ ID NO: 232245 - RNA, 32 nt, Human
uccacaccaacaugaagacacugaccuugucc

SEQ ID NO: 232246 - RNA, 32 nt, Human
uccacacccaggagucuaggccuugguaacua

SEQ ID NO: 232247 - RNA, 32 nt, Human
uccacaccccugcaccugaccaagggaccaau

SEQ ID NO: 232248 - RNA, 32 nt, Human
uccacaccuucccugucaccccaaacugugcg

SEQ ID NO: 232249 - RNA, 32 nt, Human
uccacacgccgcugccccagcaacccuguuca

SEQ ID NO: 232250 - RNA, 32 nt, Human
uccacacggcccacggccacaugugauggcca

SEQ ID NO: 232251 - RNA, 32 nt, Human
uccacacguccugcucccccuggugaagaagc

SEQ ID NO: 232252 - RNA, 32 nt, Human
uccacacgugccuguagcauuccagagcucac

SEQ ID NO: 232253 - RNA, 32 nt, Human
uccacacuaggcugggcccagcaauacaggag

SEQ ID NO: 232254 - RNA, 32 nt, Human
uccacacucacacauccacuucucccuccaga

SEQ ID NO: 232255 - RNA, 32 nt, Human
uccacacucacaccucuauucacagaccagca

SEQ ID NO: 232256 - RNA, 32 nt, Human
uccacacuccagguucccucaggcuugugucc

SEQ ID NO: 232257 - RNA, 32 nt, Human
uccacacuccuggacagggcucuggacaguug

SEQ ID NO: 232258 - RNA, 24 nt, Human
uccacacugaagcucaguuugcaa

SEQ ID NO: 232259 - RNA, 32 nt, Human
uccacacugccacccagcuuccaaggcugagu

SEQ ID NO: 232260 - RNA, 32 nt, Human
uccacacugccucugcuaccugcccguugguc

SEQ ID NO: 232261 - RNA, 16 nt, Human
uccacacugccuggca

SEQ ID NO: 232262 - RNA, 32 nt, Human
uccacacuggaagucgaauuccagcucgccuu

SEQ ID NO: 232263 - RNA, 32 nt, Human
uccacacuguaaccacugggucugggcuccau

SEQ ID NO: 232264 - RNA, 32 nt, Human
uccacacugugccaguagccuaggugucucag

SEQ ID NO: 232265 - RNA, 32 nt, Human
uccacacuucugggcccuaggcugcuuccggu

SEQ ID NO: 232266 - RNA, 32 nt, Human
uccacagaaauagccacagcuuccaguggugg

SEQ ID NO: 232267 - RNA, 32 nt, Human
uccacagaaauccuguucguauccccauuuug

SEQ ID NO: 232268 - RNA, 32 nt, Human
uccacagaaccuuugucaacuucaguugaaaa

SEQ ID NO: 232269 - RNA, 32 nt, Human
uccacagaacuccacucggaacuuucuucuuu

SEQ ID NO: 232270 - RNA, 32 nt, Human
uccacagaagcccucucacaggcauggccacc

SEQ ID NO: 232271 - RNA, 21 nt, Human
uccacagacacgcagcacagg

SEQ ID NO: 232272 - RNA, 32 nt, Human
uccacagagagggacagcaugugcaaaggcug

SEQ ID NO: 232273 - RNA, 32 nt, Human
uccacagagagggagagcagagaaagaagucc

SEQ ID NO: 232274 - RNA, 22 nt, Human
uccacagagcccacccuccagg

SEQ ID NO: 232275 - RNA, 32 nt, Human
uccacagagccugggcugggcccgguggaggc

SEQ ID NO: 232276 - RNA, 22 nt, Human
uccacagagcuggcucugcuca

SEQ ID NO: 232277 - RNA, 19 nt, Human
uccacagaggaccuucagg

SEQ ID NO: 232278 - RNA, 32 nt, Human
uccacagaggaggaaagagcaggcagcagaga

SEQ ID NO: 232279 - RNA, 32 nt, Human
uccacagaggcugagagcaguggcucaugccu

SEQ ID NO: 232280 - RNA, 32 nt, Human
uccacagaguggggcucaggcaucugugacug

SEQ ID NO: 232281 - RNA, 32 nt, Human
uccacagaugacaccaggcugguccagggccg

SEQ ID NO: 232282 - RNA, 32 nt, Human
uccacagcagaggaccgguugcagcuuaccca

SEQ ID NO: 232283 - RNA, 32 nt, Human
uccacagcauagccagcaggccacuuuucacu

SEQ ID NO: 232284 - RNA, 32 nt, Human
uccacagcauucacauucucaggauaaacaug

SEQ ID NO: 232285 - RNA, 32 nt, Human
uccacagcccaugcgagccacacugcuggguu

SEQ ID NO: 232286 - RNA, 32 nt, Human
uccacagccucaccccucccacccccauacug

SEQ ID NO: 232287 - RNA, 32 nt, Human
uccaguggggcagaggacagagggucacaacc

SEQ ID NO: 232288 - RNA, 22 nt, Human
uccaguggucacacacugguca

SEQ ID NO: 232289 - RNA, 32 nt, Human
uccagugguggaggcgcuguggauggcugcuu

SEQ ID NO: 232290 - RNA, 32 nt, Human
uccaguguaaugcauggcauuguggugucugu

SEQ ID NO: 232291 - RNA, 24 nt, Human
uccaguguaggcaacagagugaga

SEQ ID NO: 232292 - RNA, 32 nt, Human
uccagugucaaagauuuggggcacugcccguc

SEQ ID NO: 232293 - RNA, 32 nt, Human
uccaguguccccagcacugagugcaaggcccc

SEQ ID NO: 232294 - RNA, 32 nt, Human
uccagugugcagaagagccagcagggaaccgg

SEQ ID NO: 232295 - RNA, 32 nt, Human
uccagugugcagcagcccugggagccacugcc

SEQ ID NO: 232296 - RNA, 24 nt, Human
uccagugugcaugccagagugggg

SEQ ID NO: 232297 - RNA, 32 nt, Human
uccaguguggauagcacgaagagaugcaacug

SEQ ID NO: 232298 - RNA, 24 nt, Human
uccaguguggaugacagagcgaga

SEQ ID NO: 232299 - RNA, 32 nt, Human
uccaguguggcugcaggcgguggugcagccuu

SEQ ID NO: 232300 - RNA, 32 nt, Human
uccaguguggugaugccaugcccaucauggga

SEQ ID NO: 232301 - RNA, 32 nt, Human
uccaguguguauccugcaucugccuuuccuga

SEQ ID NO: 232302 - RNA, 32 nt, Human
uccaguguucagcccugccaauccagaaagcu

SEQ ID NO: 232303 - RNA, 32 nt, Human
uccaguguuggacugugccacuguggugucca

SEQ ID NO: 232304 - RNA, 22 nt, Human
uccaguguuguccaaggaaaug

SEQ ID NO: 232305 - RNA, 32 nt, Human
uccaguguuuuuaagagaauguuucuuaaaac

SEQ ID NO: 232306 - RNA, 32 nt, Human
uccaguuaaagggccuguuucuuacuggccug

SEQ ID NO: 232307 - RNA, 32 nt, Human
uccaguuaaccaagucagcccaacaggcaggu

SEQ ID NO: 232308 - RNA, 21 nt, Human
uccaguuaccaccuccugccu

SEQ ID NO: 232309 - RNA, 32 nt, Human
uccaguuaccugcugcuggggucggggcugga

SEQ ID NO: 232310 - RNA, 32 nt, Human
uccaguuaggcuucgggcgggucuccauguua

SEQ ID NO: 232311 - RNA, 32 nt, Human
uccaguucacacccuucacugugcgugcagac

SEQ ID NO: 232312 - RNA, 32 nt, Human
uccaguucaccccucaccuccagccuggagga

SEQ ID NO: 232313 - RNA, 32 nt, Human
uccaguucagaaaacccaagcuagcaacuucu

SEQ ID NO: 232314 - RNA, 32 nt, Human
uccaguucagacagcaccaccacuaagcgugu

SEQ ID NO: 232315 - RNA, 19 nt, Human
uccaguuccagauugugaa

SEQ ID NO: 232316 - RNA, 32 nt, Human
uccaguuccauggccugguggaggacccugug

SEQ ID NO: 232317 - RNA, 32 nt, Human
uccaguucccuccuggucaccugcugccugau

SEQ ID NO: 232318 - RNA, 32 nt, Human
uccaguuccuacucuaguuucaucucaugcug

SEQ ID NO: 232319 - RNA, 32 nt, Human
uccaguuccuuccauaaaacaggcuggacaaa

SEQ ID NO: 232320 - RNA, 32 nt, Human
uccaguuccuuuccucucuugccucuucccac

SEQ ID NO: 232321 - RNA, 32 nt, Human
uccaguucggaggaggaggaggaagauuacag

SEQ ID NO: 232322 - RNA, 32 nt, Human
uccaguucucacuuaaauuaugcaaugauauu

SEQ ID NO: 232323 - RNA, 32 nt, Human
uccaguucucaucugcucaggugucccgggcg

SEQ ID NO: 232324 - RNA, 32 nt, Human
uccaguucucccagggcagaggggcgagggag

SEQ ID NO: 232325 - RNA, 32 nt, Human
uccaguucucuguugauccugagacuaacaau

SEQ ID NO: 232326 - RNA, 32 nt, Human
uccaguucugcaccuauacccucugguguugc

SEQ ID NO: 232327 - RNA, 18 nt, Human
uccaguucugcccagguc

SEQ ID NO: 232328 - RNA, 23 nt, Human
uccaguugcggagacaguaacag

SEQ ID NO: 232329 - RNA, 20 nt, Human
uccaguugcugccucagguc

SEQ ID NO: 232330 - RNA, 32 nt, Human
uccaguugcugccuccuugucuugucuugggu

SEQ ID NO: 232331 - RNA, 32 nt, Human
uccaguugcuggggccucuugggaucuuggga

SEQ ID NO: 232332 - RNA, 32 nt, Human
uccaguuggucuugguuugcuucucucuguac

SEQ ID NO: 232333 - RNA, 32 nt, Human
uccaguugguuucuuucuuucucuuaccugaa

SEQ ID NO: 232334 - RNA, 32 nt, Human
uccaguuguauuugucaccuggggugacaaga

SEQ ID NO: 232335 - RNA, 32 nt, Human
uccaguuuaaugaacuaccaucugauguuuca

SEQ ID NO: 232336 - RNA, 32 nt, Human
uccaguuuaguuugcugcuauuagcagaaacu

SEQ ID NO: 232337 - RNA, 32 nt, Human
uccaguuuaucugugccccagcuuccucacuu

SEQ ID NO: 232338 - RNA, 32 nt, Human
uccaguuucaaccagaguuccaaccaaugggc

SEQ ID NO: 232339 - RNA, 32 nt, Human
uccaguuuccaagugagaaggggagcaggugu

SEQ ID NO: 232340 - RNA, 22 nt, Human
uccaguuucccugcgggccccu

SEQ ID NO: 232341 - RNA, 32 nt, Human
uccaguuucccugucaugcagacuuguugcug

SEQ ID NO: 232342 - RNA, 32 nt, Human
uccaguuucuauccaggaauguucacauccaa

SEQ ID NO: 232343 - RNA, 32 nt, Human
uccaguuucuguaugaauaaaauccaugauga

SEQ ID NO: 232344 - RNA, 24 nt, Human
uccaguuugagcaacagaucaaga

SEQ ID NO: 232345 - RNA, 32 nt, Human
uccaguuugcagguguuccugugacccugaca

SEQ ID NO: 232346 - RNA, 32 nt, Human
uccaguuugcccugagagaugcaccugaccag

SEQ ID NO: 232347 - RNA, 24 nt, Human
uccaguuuggaaaaggagcagaga

SEQ ID NO: 232348 - RNA, 24 nt, Human
uccaguuuggacuacagagugaga

SEQ ID NO: 232349 - RNA, 23 nt, Human
uccaguuuggcaacagagugaga

SEQ ID NO: 232350 - RNA, 24 nt, Human
uccaguuugggcaacagaaugagg

SEQ ID NO: 232351 - RNA, 22 nt, Human
uccaguuuggggcggaaugagg

SEQ ID NO: 232352 - RNA, 32 nt, Human
uccaguuuguaucgucagcccagaccuguccc

SEQ ID NO: 232353 - RNA, 32 nt, Human
uccaguuuuaaaagauguuguggaaguuaggu

SEQ ID NO: 232354 - RNA, 32 nt, Human
uccaguuuucucuguaccuguguguauagaaa

SEQ ID NO: 232355 - RNA, 32 nt, Human
uccaguuuucugcacuucaucaucuagggaug

SEQ ID NO: 232356 - RNA, 32 nt, Human
uccaguuuuguauuuuguguauuauaaaagcg

SEQ ID NO: 232357 - RNA, 32 nt, Human
uccaguuuuuaacaagaucacauaacuggcuu

SEQ ID NO: 232358 - RNA, 32 nt, Human
uccauaaaaugaagguagccaggccugccuca

SEQ ID NO: 232359 - RNA, 32 nt, Human
uccauaaaccauggcauguuggguuugcagga

SEQ ID NO: 232360 - RNA, 32 nt, Human
uccauaaagccuuagcccugguucucaauaga

SEQ ID NO: 232361 - RNA, 32 nt, Human
uccauaaaggaugcuagccugccuuguacuaa

SEQ ID NO: 232362 - RNA, 32 nt, Human
uccauaaaucugcaaugucucaguuaagaaag

SEQ ID NO: 232363 - RNA, 32 nt, Human
uccauaaauuuagaggugacuggagaacucuc

SEQ ID NO: 232364 - RNA, 32 nt, Human
uccauaaccuucucuucuaugacccaacaaca

SEQ ID NO: 232365 - RNA, 32 nt, Human
uccauaacugaauucuccugcaggggcgugac

SEQ ID NO: 232366 - RNA, 19 nt, Human
uccauaacuucccucugca

SEQ ID NO: 232367 - RNA, 32 nt, Human
uccauaaugcauaagggauauaaacucugugu

SEQ ID NO: 232368 - RNA, 32 nt, Human
uccauaauggaugggacagagagcugggaucu

SEQ ID NO: 232369 - RNA, 32 nt, Human
uccauacaaaugcacacaugguacaaugauag

SEQ ID NO: 232370 - RNA, 32 nt, Human
uccauacaacccagccagcugucagaagacaa

SEQ ID NO: 232371 - RNA, 22 nt, Human
uccauacaaccuguauuuacuu

SEQ ID NO: 232372 - RNA, 32 nt, Human
uccauacacccaggcuaugcauugaagaguuu

SEQ ID NO: 232373 - RNA, 32 nt, Human
uccauacaggcgcuguuaccaguucagggcuc

SEQ ID NO: 232374 - RNA, 32 nt, Human
uccauacccccugcccuccucugacaggcccc

SEQ ID NO: 232375 - RNA, 32 nt, Human
uccauaccccuucaaacauguugcuuugcuuu

SEQ ID NO: 232376 - RNA, 32 nt, Human
uccauaccgugccauggaggcuguuuuagaag

SEQ ID NO: 232377 - RNA, 32 nt, Human
uccauaccucugccuccccaaaaagcuccuau

SEQ ID NO: 232378 - RNA, 32 nt, Human
uccauaccuggaauccugguugaguggguuuu

SEQ ID NO: 232379 - RNA, 32 nt, Human
uccauacucacugaagacaaaaagccaccuuu

SEQ ID NO: 232380 - RNA, 32 nt, Human
uccauacucaggacuccucuccgcaguuccug

SEQ ID NO: 232381 - RNA, 32 nt, Human
uccauacugaacacuuguuucuccuuggccag

SEQ ID NO: 232382 - RNA, 18 nt, Human
uccauacugcaguucccu

SEQ ID NO: 232383 - RNA, 32 nt, Human
uccauacugggagcugagcuuucucugaguuu

SEQ ID NO: 232384 - RNA, 32 nt, Human
uccauagacaucaguauucugccaucauuuuu

SEQ ID NO: 232385 - RNA, 32 nt, Human
uccauagagaagaaagaugggauagcucaacu

SEQ ID NO: 232386 - RNA, 32 nt, Human
uccauagagcugcauauguugugaauaaauuc

SEQ ID NO: 232387 - RNA, 32 nt, Human
uccauagaggaaaaggaagaugacgaggccau

SEQ ID NO: 232388 - RNA, 32 nt, Human
uccauagccuggccaaggagaccaugaguagc

SEQ ID NO: 232389 - RNA, 32 nt, Human
uccauagcuaccaaguuaaccugcucuaaacu

SEQ ID NO: 232390 - RNA, 32 nt, Human
uccauagcucuucacuuccuccagaagccucc

SEQ ID NO: 232391 - RNA, 32 nt, Human
uccauagcugcucugcagggcggaagacaccu

SEQ ID NO: 232392 - RNA, 31 nt, Human
uccauagcuuugguugggccugugucacauc

SEQ ID NO: 232393 - RNA, 32 nt, Human
uccauaguaugggacuggccucugcugauccu

SEQ ID NO: 232394 - RNA, 32 nt, Human
uccauagucucaacuguauugugucaucuccu

SEQ ID NO: 232395 - RNA, 32 nt, Human
uccauaguggaggcugggaugggugagagaau

SEQ ID NO: 232396 - RNA, 32 nt, Human
uccauaguucccugcggccucugccuugggga

SEQ ID NO: 232397 - RNA, 32 nt, Human
uccauaguuuuacagcauaugaagagcuguca

SEQ ID NO: 232398 - RNA, 32 nt, Human
uccauaguuuugccuuuuccagaauguuguaa

SEQ ID NO: 232399 - RNA, 20 nt, Human
uccauauaaucuucuacuua

SEQ ID NO: 232400 - RNA, 32 nt, Human
uccauauagcugguggggaccaaguuucuaac

SEQ ID NO: 232401 - RNA, 26 nt, Human
uccauauauggcugaaauuuacauca

SEQ ID NO: 232402 - RNA, 32 nt, Human
uccauauccaacuccauuugggauugugcccc

SEQ ID NO: 232403 - RNA, 32 nt, Human
uccauaucuccacacugaacauguauaagaaa

SEQ ID NO: 232404 - RNA, 32 nt, Human
uccauaucuccaccacauccccugcuugagcc

SEQ ID NO: 232405 - RNA, 32 nt, Human
uccauaucucuucuuugccauggaaacuacac

SEQ ID NO: 232406 - RNA, 30 nt, Human
uccauauggagacgccaccagucaauacaa

SEQ ID NO: 232407 - RNA, 32 nt, Human
uccauaugguggccgggaucgcuaugaugacc

SEQ ID NO: 232408 - RNA, 32 nt, Human
uccauauuaauaggcuucuucucuuaagucuu

SEQ ID NO: 232409 - RNA, 32 nt, Human
uccauauucucaucuuucauaccauaucacac

SEQ ID NO: 232410 - RNA, 32 nt, Human
uccauauucuuacaggccuuccagucaauaau

SEQ ID NO: 232411 - RNA, 32 nt, Human
uccauauuggaaggaaaagacuuaguacaauu

SEQ ID NO: 232412 - RNA, 32 nt, Human
uccauauuguagugcaagaggauucuugugga

SEQ ID NO: 232413 - RNA, 32 nt, Human
uccauauuguagugcaagaggauucuuugugg

SEQ ID NO: 232414 - RNA, 32 nt, Human
uccauauuuagugguacucugaaauuggucac

SEQ ID NO: 232415 - RNA, 32 nt, Human
uccauauuuccucugcgcaggcugcuuucucu

SEQ ID NO: 232416 - RNA, 23 nt, Human
uccaucaaccauauggaaugccc

SEQ ID NO: 232417 - RNA, 32 nt, Human
uccaucaagccaagccuccugugguccugagc

SEQ ID NO: 232418 - RNA, 32 nt, Human
uccaucaaguauuacaggagaaggauugggaa

SEQ ID NO: 232419 - RNA, 32 nt, Human
uccaucacagcccaggcucaccccaagaacuc

SEQ ID NO: 232420 - RNA, 32 nt, Human
uccaucaccaggcuggagugcaguggugcgau

SEQ ID NO: 232421 - RNA, 24 nt, Human
uccaucacccaggcuggaguccag

SEQ ID NO: 232422 - RNA, 32 nt, Human
uccaucaccccuucugccaugugaaagggaga

SEQ ID NO: 232423 - RNA, 32 nt, Human
uccaucaccuuccuccucugcucuggguggua

SEQ ID NO: 232424 - RNA, 32 nt, Human
uccaucacuaaucuaaaacaaagguggcacuu

SEQ ID NO: 232425 - RNA, 32 nt, Human
uccaucacuuaccagucaggaacccuggcgau

SEQ ID NO: 232426 - RNA, 21 nt, Human
uccaucagagcuggucugcac

SEQ ID NO: 232427 - RNA, 32 nt, Human
uccaucagccaggcuggagugcaguggugcaa

SEQ ID NO: 232428 - RNA, 32 nt, Human
uccaucagccuccagcuuccuuucuucauucu

SEQ ID NO: 232429 - RNA, 32 nt, Human
uccaucagccuggcuggcagcagccuuggacu

SEQ ID NO: 232430 - RNA, 32 nt, Human
uccaucaggagaaggaaaggauaaacccuggg

SEQ ID NO: 232431 - RNA, 32 nt, Human
uccaucaggagaaugcagggccucuucuauag

SEQ ID NO: 232432 - RNA, 22 nt, Human
uccaucaggccucucuccagca

SEQ ID NO: 232433 - RNA, 32 nt, Human
uccaucagggaaaugagcugaauggcccagca

SEQ ID NO: 232434 - RNA, 32 nt, Human
uccaucagugucuuccagccugcauggggagg

SEQ ID NO: 232435 - RNA, 32 nt, Human
uccaucauaaccaccccagccugggaaggaga

SEQ ID NO: 232436 - RNA, 32 nt, Human
uccaucauacagucuucagcaaccuugaaaga

SEQ ID NO: 232437 - RNA, 20 nt, Human
uccaucauagccaggccacu

SEQ ID NO: 232438 - RNA, 32 nt, Human
uccaucauccugacagcgcugccugcaaaaua

SEQ ID NO: 232439 - RNA, 32 nt, Human
uccaucaucuuccuuccucccuaucucugugu

SEQ ID NO: 232440 - RNA, 32 nt, Human
uccaucaugacugugucacuccugccacuguu

SEQ ID NO: 232441 - RNA, 32 nt, Human
uccaucaugucagagcaggugaagagccagaa

SEQ ID NO: 232442 - RNA, 32 nt, Human
uccaucauuauguagaugaaaaagccauaggu

SEQ ID NO: 232443 - RNA, 32 nt, Human
uccaucauucagcuggucaucugguggcccaa

SEQ ID NO: 232444 - RNA, 32 nt, Human
uccaucauucuggcagauacauucauaggagu

SEQ ID NO: 232445 - RNA, 32 nt, Human
uccauccaacuaaggguagcggugagacccga

SEQ ID NO: 232446 - RNA, 32 nt, Human
uccauccaaucuauuauuucucuaauuaugca

SEQ ID NO: 232447 - RNA, 32 nt, Human
uccauccacaguugaagcuacagugaagucac

SEQ ID NO: 232448 - RNA, 32 nt, Human
uccauccacaugaccucaucucuugcacaaac

SEQ ID NO: 232449 - RNA, 19 nt, Human
uccauccaccucggccucc

SEQ ID NO: 232450 - RNA, 32 nt, Human
uccauccacugcauugaguagugaccccgacg

SEQ ID NO: 232451 - RNA, 32 nt, Human
uccauccacugccucccagcaccugugcugcc

SEQ ID NO: 232452 - RNA, 32 nt, Human
uccauccacuggagaagagcagaggaacuggg

SEQ ID NO: 232453 - RNA, 32 nt, Human
uccauccaggauugggggccucucugcucacc

SEQ ID NO: 232454 - RNA, 32 nt, Human
uccauccagguagacacagacacacacagaga

SEQ ID NO: 232455 - RNA, 32 nt, Human
uccauccaucacugcugacccucuccggaccu

SEQ ID NO: 232456 - RNA, 32 nt, Human
uccauccauccacccauccaucauccauccau

SEQ ID NO: 232457 - RNA, 32 nt, Human
uccauccauccacucuuccacccucuaccccu

SEQ ID NO: 232458 - RNA, 32 nt, Human
uccauccaucugucugucccuccuucucaugc

SEQ ID NO: 232459 - RNA, 32 nt, Human
uccauccaugaauuaugccagcaagaaugaag

SEQ ID NO: 232460 - RNA, 21 nt, Human
uccauccaugcucucuccagc

SEQ ID NO: 232461 - RNA, 32 nt, Human
uccauccauugaaacugucuaccaggauguuc

SEQ ID NO: 232462 - RNA, 32 nt, Human
uccauccauugggccuuugaaaggacuaauca

SEQ ID NO: 232463 - RNA, 32 nt, Human
uccaucccaaaaacaaaacaaaacaaaacaaa

SEQ ID NO: 232464 - RNA, 32 nt, Human
uccaucccaaaccugacgaagcagaagcugca

SEQ ID NO: 232465 - RNA, 32 nt, Human
uccaucccaaaggaaaauguagacaucaccug

SEQ ID NO: 232466 - RNA, 32 nt, Human
uccaucccaagugccugcggagcccgaggaga

SEQ ID NO: 232467 - RNA, 32 nt, Human
uccaucccagaaccagaccuugcagggaccuc

SEQ ID NO: 232468 - RNA, 32 nt, Human
uccaucccagcgcuggaagggccagugggaag

SEQ ID NO: 232469 - RNA, 32 nt, Human
uccauccccacuguguccucagcuccuagaac

SEQ ID NO: 232470 - RNA, 32 nt, Human
uccaucccgacuccaucucccccaccaggcug

SEQ ID NO: 232471 - RNA, 19 nt, Human
uccaucccguccugcgcag

SEQ ID NO: 232472 - RNA, 32 nt, Human
uccaucccuaauuucugcccucuugucugucu

SEQ ID NO: 232473 - RNA, 32 nt, Human
uccaucccucaucccucccaaccacaguggga

SEQ ID NO: 232474 - RNA, 32 nt, Human
uccaucccuccaggcucucauuguggaaagac

SEQ ID NO: 232475 - RNA, 32 nt, Human
uccaucccugagccgccugccaccucccacuc

SEQ ID NO: 232476 - RNA, 32 nt, Human
uccaucccugcaaguucugggcucagaauuug

SEQ ID NO: 232477 - RNA, 22 nt, Human
uccauccgcgccgccgccgccg

SEQ ID NO: 232478 - RNA, 29 nt, Human
uccauccggcuccugucauccccuacacu

SEQ ID NO: 232479 - RNA, 32 nt, Human
uccauccgucuauccauccaucauccauccau

SEQ ID NO: 232480 - RNA, 32 nt, Human
uccauccuaaaaguaccugccuccuucccagc

SEQ ID NO: 232481 - RNA, 32 nt, Human
uccauccuacuggaugaugguuuagaauaaac

SEQ ID NO: 232482 - RNA, 32 nt, Human
uccauccuacuguaaugggagaggaggagaau

SEQ ID NO: 232483 - RNA, 32 nt, Human
uccauccucacaccuucugccuuuguccugcu

SEQ ID NO: 232484 - RNA, 32 nt, Human
uccauccucagcccucugcccacugggcccag

SEQ ID NO: 232485 - RNA, 32 nt, Human
uccauccucauccucugcccucccaggaaguc

SEQ ID NO: 232486 - RNA, 32 nt, Human
uccauccuccauccauccaucuauccauccau

SEQ ID NO: 232487 - RNA, 32 nt, Human
uccauccuccauccauccauucauccucuauc

SEQ ID NO: 232488 - RNA, 32 nt, Human
uccauccuccaucccagcaucccuccaucccu

SEQ ID NO: 232489 - RNA, 32 nt, Human
uccauccuccauccgucauccauccguccauc

SEQ ID NO: 232490 - RNA, 32 nt, Human
uccauccuccuccuccccuuaauggauugugg

SEQ ID NO: 232491 - RNA, 32 nt, Human
uccauccucuaaggagccaacuuggcuuuuac

SEQ ID NO: 232492 - RNA, 32 nt, Human
uccauccucuacuucuggugcaguccugggac

SEQ ID NO: 232493 - RNA, 32 nt, Human
uccauccucucccacuuccaucuggcguccca

SEQ ID NO: 232494 - RNA, 32 nt, Human
uccauccucuugugguacccguagugcccagc

SEQ ID NO: 232495 - RNA, 32 nt, Human
uccauccucuuucaucagcccugagagcagaa

SEQ ID NO: 232496 - RNA, 22 nt, Human
uccauccugaaccccuggaaaa

SEQ ID NO: 232497 - RNA, 32 nt, Human
uccauccugaagguguuuuucauucacuuuaa

SEQ ID NO: 232498 - RNA, 18 nt, Human
uccauccugacucuugaa

SEQ ID NO: 232499 - RNA, 32 nt, Human
uccauccugcaccccagucccccagcccuaaa

SEQ ID NO: 232500 - RNA, 32 nt, Human
uccauccugcucccugagaauggcagugcagg

SEQ ID NO: 232501 - RNA, 32 nt, Human
uccauccugcugucucuguccugucccaaguu

SEQ ID NO: 232502 - RNA, 32 nt, Human
uccauccuggacaacagagugagacuccuucu

SEQ ID NO: 232503 - RNA, 32 nt, Human
uccauccuggacaacaggagugaaacuccguc

SEQ ID NO: 232504 - RNA, 32 nt, Human
uccauccuggacaacucggugagaggcagugg

SEQ ID NO: 232505 - RNA, 32 nt, Human
uccauccuggcaccacggcacacaccuccagc

SEQ ID NO: 232506 - RNA, 32 nt, Human
uccauccugggcagcauacugagacccugccu

SEQ ID NO: 232507 - RNA, 24 nt, Human
uccauccugggucacagagugaga

SEQ ID NO: 232508 - RNA, 24 nt, Human
uccauccugggugacaaagugaga

SEQ ID NO: 232509 - RNA, 32 nt, Human
uccauccugggugacaaagugagacucccucu

SEQ ID NO: 232510 - RNA, 32 nt, Human
uccauccugggugacaagagcgaaacuccauc

SEQ ID NO: 232511 - RNA, 24 nt, Human
uccauccugggugacagagagaga

SEQ ID NO: 232512 - RNA, 32 nt, Human
uccauccugggugacagagagagacccugucu

SEQ ID NO: 232513 - RNA, 24 nt, Human
uccauccugggugacagagcaaga

SEQ ID NO: 232514 - RNA, 32 nt, Human
uccauccugggugacagagcaagacuuccucu

SEQ ID NO: 232515 - RNA, 32 nt, Human
uccauccugggugacagcaagaucuugucuca

SEQ ID NO: 232516 - RNA, 22 nt, Human
uccauccugggugauggagcga

SEQ ID NO: 232517 - RNA, 21 nt, Human
uccauccuguuuucugcaaca

SEQ ID NO: 232518 - RNA, 32 nt, Human
uccauccuuccagagaagucucugggaccuuu

SEQ ID NO: 232519 - RNA, 32 nt, Human
uccauccuucuuuccuucauccuuuuccuuca

SEQ ID NO: 232520 - RNA, 20 nt, Human
uccauccuugcaccccuggg

SEQ ID NO: 232521 - RNA, 32 nt, Human
uccauccuuguaguaugaaacaugcuccaagg

SEQ ID NO: 232522 - RNA, 32 nt, Human
uccaucgagcugguugucuucuugccugcccu

SEQ ID NO: 232523 - RNA, 32 nt, Human
uccaucgaucuauuuauauguacaugagaagg

SEQ ID NO: 232524 - RNA, 24 nt, Human
uccaucgcccaggccugggaugca

SEQ ID NO: 232525 - RNA, 24 nt, Human
uccaucgcccaggcugcagugcag

SEQ ID NO: 232526 - RNA, 32 nt, Human
uccaucgcccaggcugcagugcagugacacga

SEQ ID NO: 232527 - RNA, 32 nt, Human
uccaucgcugccucugaggguggagaaggagg

SEQ ID NO: 232528 - RNA, 32 nt, Human
uccaucguccaggcuggagugcaguggcgcga

SEQ ID NO: 232529 - RNA, 32 nt, Human
uccaucgucccaggaaucccagggggcagcac

SEQ ID NO: 232530 - RNA, 22 nt, Human
uccaucgugccguccgccgcug

SEQ ID NO: 232531 - RNA, 32 nt, Human
uccaucguggacaacauagcaagauuccaucu

SEQ ID NO: 232532 - RNA, 32 nt, Human
uccaucguggcucugccuucaaagggaaauuu

SEQ ID NO: 232533 - RNA, 32 nt, Human
uccaucuaagaucucuuccccuuguccauagc

SEQ ID NO: 232534 - RNA, 32 nt, Human
uccaucuacuucugaaugugagacuuucccuu

SEQ ID NO: 232535 - RNA, 32 nt, Human
uccaucuacuuuuccacuccagagugggaaaa

SEQ ID NO: 232536 - RNA, 32 nt, Human
uccaucuaucuaggauauguugauacaaaguc

SEQ ID NO: 232537 - RNA, 32 nt, Human
uccaucucaaaaacaaaacaaauaaacgaaca

SEQ ID NO: 232538 - RNA, 32 nt, Human
uccaucucaaaacaaaaacaaacaaacaaaca

SEQ ID NO: 232539 - RNA, 32 nt, Human
uccaucucaaauaggcuugguggccuguggaa

SEQ ID NO: 232540 - RNA, 32 nt, Human
uccaucucaccucugcuccagaaauaaaugcc

SEQ ID NO: 232541 - RNA, 28 nt, Human
uccaucucacgcgcugccucugucauuu

SEQ ID NO: 232542 - RNA, 19 nt, Human
uccaucucagcugcaucua

SEQ ID NO: 232543 - RNA, 32 nt, Human
uccaucucauucucuccccuccagaagaagca

SEQ ID NO: 232544 - RNA, 32 nt, Human
uccaucuccaauggcugggauuuguggcaggg

SEQ ID NO: 232545 - RNA, 32 nt, Human
uccaucucccaaagugcugggaugacaggcgu

SEQ ID NO: 232546 - RNA, 32 nt, Human
uccaucuccccagccaccugagaagggagaug

SEQ ID NO: 232547 - RNA, 32 nt, Human
uccaucuccuguguaaucaaggccagugcuaa

SEQ ID NO: 232548 - RNA, 32 nt, Human
uccaucucgagagaaagggagugguugaaagc

SEQ ID NO: 232549 - RNA, 32 nt, Human
uccaucucgcucaucaucaccgacacguccuu

SEQ ID NO: 232550 - RNA, 32 nt, Human
uccaucucuauauaaaaacaaaaaccacgaaa

SEQ ID NO: 232551 - RNA, 32 nt, Human
uccaucucucauccuccaguaccuugcuucuu

SEQ ID NO: 232552 - RNA, 32 nt, Human
uccaucucuccuauucuuucucuuucuucucu

SEQ ID NO: 232553 - RNA, 32 nt, Human
uccaucucuccucauccuuuugccuuuguuau

SEQ ID NO: 232554 - RNA, 32 nt, Human
uccaucucucuccccucucuucucucaugaug

SEQ ID NO: 232555 - RNA, 21 nt, Human
uccaucucucuuccccauaga

SEQ ID NO: 232556 - RNA, 32 nt, Human
uccaucucucuucccuuccugcugucaguaag

SEQ ID NO: 232557 - RNA, 22 nt, Human
uccaucucugaagaucugcuca

SEQ ID NO: 232558 - RNA, 20 nt, Human
uccaucucugcaagcucccu

SEQ ID NO: 232559 - RNA, 32 nt, Human
uccaucucuguacgcuuauugaucucauccuc

SEQ ID NO: 232560 - RNA, 32 nt, Human
uccaucucuguggaccuacagaggcacagagg

SEQ ID NO: 232561 - RNA, 32 nt, Human
uccaucugacagcuaagccaagccacagaggg

SEQ ID NO: 232562 - RNA, 32 nt, Human
uccaucugagaccaccucagccuggauuuuau

SEQ ID NO: 232563 - RNA, 17 nt, Human
uccaucugaggaccaga

SEQ ID NO: 232564 - RNA, 32 nt, Human
uccaucugagguaccggguucaucucacuacg

SEQ ID NO: 232565 - RNA, 32 nt, Human
uccaucugccccuaaucucuguccccuuugcc

SEQ ID NO: 232566 - RNA, 20 nt, Human
uccaucugccugggagaugc

SEQ ID NO: 232567 - RNA, 32 nt, Human
uccaucugggcaaccugguuuuccaaauauca

SEQ ID NO: 232568 - RNA, 32 nt, Human
uccaucugggcucugcagcccagcucuguggc

SEQ ID NO: 232569 - RNA, 32 nt, Human
uccaucugggcugcuaggaaggggcacucauc

SEQ ID NO: 232570 - RNA, 32 nt, Human
uccaucugggggagggacuuguuuacaagcag

SEQ ID NO: 232571 - RNA, 32 nt, Human
uccaucuguccguggucagaaguggggucagu

SEQ ID NO: 232572 - RNA, 32 nt, Human
uccaucugucugucccuccuucucaugccccu

SEQ ID NO: 232573 - RNA, 32 nt, Human
uccaucugugagaaggagccagagcccaaggg

SEQ ID NO: 232574 - RNA, 32 nt, Human
uccaucuguggcugggacagccagggggugug

SEQ ID NO: 232575 - RNA, 23 nt, Human
uccaucugugguccuuucugcca

SEQ ID NO: 232576 - RNA, 32 nt, Human
uccaucugugguuggagcgccucuuugggauu

SEQ ID NO: 232577 - RNA, 32 nt, Human
uccaucuuagccacacuucucccuucaggggc

SEQ ID NO: 232578 - RNA, 32 nt, Human
uccaucuuaguauuugugcacacugcuauaac

SEQ ID NO: 232579 - RNA, 32 nt, Human
uccaucuucaaaacaaaacaaaacaaaacaaa

SEQ ID NO: 232580 - RNA, 17 nt, Human
uccaucuucaccccaga

SEQ ID NO: 232581 - RNA, 23 nt, Human
uccaucuuccaaucccuggaaaa

SEQ ID NO: 232582 - RNA, 32 nt, Human
uccaucuuccaggauggcagcaauggcgcugu

SEQ ID NO: 232583 - RNA, 32 nt, Human
uccaucuuccauccccuacauggcaguuaaua

SEQ ID NO: 232584 - RNA, 32 nt, Human
uccaucuucuccccaccaccgccccggugugc

SEQ ID NO: 232585 - RNA, 32 nt, Human
uccaucuugaccaggacugcaccaagaagcac

SEQ ID NO: 232586 - RNA, 32 nt, Human
uccaucuugggcaacacagugagacccccauc

SEQ ID NO: 232587 - RNA, 32 nt, Human
uccaucuuuaaaaugcucaaacauggauucag

SEQ ID NO: 232588 - RNA, 32 nt, Human
uccaucuuuccagaauccaugccuguguaaug

SEQ ID NO: 232589 - RNA, 32 nt, Human
uccaucuuugguggggacagggcccagcagca

SEQ ID NO: 232590 - RNA, 32 nt, Human
uccaucuuuugucagcucugcaugucauacag

SEQ ID NO: 232591 - RNA, 28 nt, Human
uccaugaaaauugcucucugccaaagag

SEQ ID NO: 232592 - RNA, 32 nt, Human
uccaugaaaccaagcucagaaaagcuuuaacu

SEQ ID NO: 232593 - RNA, 32 nt, Human
uccaugaaagaaugacccuggugagugcucua

SEQ ID NO: 232594 - RNA, 32 nt, Human
uccaugaaaggagucauuuuagugaugagcug

SEQ ID NO: 232595 - RNA, 32 nt, Human
uccaugaaaucaggaacugcuugaugaaaugu

SEQ ID NO: 232596 - RNA, 32 nt, Human
uccaugaaccugggcuaaugggagacuguaga

SEQ ID NO: 232597 - RNA, 32 nt, Human
uccaugaagaguuaagaauuuuaucccagcac

SEQ ID NO: 232598 - RNA, 32 nt, Human
uccaugaagccccagagguagaagggaccuca

SEQ ID NO: 232599 - RNA, 32 nt, Human
uccaugaauuccagaaauaucacugaaauuau

SEQ ID NO: 232600 - RNA, 32 nt, Human
uccaugacaagccacaccgaaauguagcaagc

SEQ ID NO: 232601 - RNA, 32 nt, Human
uccaugacaaucaugugagcucagccacagac

SEQ ID NO: 232602 - RNA, 32 nt, Human
uccaugacccucccugugugguggguugaacg

SEQ ID NO: 232603 - RNA, 32 nt, Human
uccaugagaaaaggauuguuugcucaaaaagc

SEQ ID NO: 232604 - RNA, 32 nt, Human
uccaugagaacagcaggguagucugguuucua

SEQ ID NO: 232605 - RNA, 32 nt, Human
uccaugagaccaaaugguuuuauauggaacca

SEQ ID NO: 232606 - RNA, 32 nt, Human
uccaugaggaugaccugcaccgugugccuuua

SEQ ID NO: 232607 - RNA, 32 nt, Human
uccaugaggccuggacuggaggccuucucuag

SEQ ID NO: 232608 - RNA, 32 nt, Human
uccaugaggccuuauuagcaaaggacacccag

SEQ ID NO: 232609 - RNA, 32 nt, Human
uccaugaggcugccuguguagcuguucuuguc

SEQ ID NO: 232610 - RNA, 32 nt, Human
uccaugaggcuggugcuugcaguuccugcaag

SEQ ID NO: 232611 - RNA, 32 nt, Human
uccaugaguuucaucgagucacugugagugga

SEQ ID NO: 232612 - RNA, 24 nt, Human
uccaugcaaacuaccaucugcuca

SEQ ID NO: 232613 - RNA, 32 nt, Human
uccaugcagaagcacaacugggcagcccuggc

SEQ ID NO: 232614 - RNA, 32 nt, Human
uccaugcaggacagggucuccugcugcaaguc

SEQ ID NO: 232615 - RNA, 32 nt, Human
uccaugcagguguuggaagggagagcugaacc

SEQ ID NO: 232616 - RNA, 21 nt, Human
uccaugcauugcacgcugcca

SEQ ID NO: 232617 - RNA, 32 nt, Human
uccaugccaagcagaaaacucauagucaauac

SEQ ID NO: 232618 - RNA, 32 nt, Human
uccaugccaaggccccauaccugggccggggg

SEQ ID NO: 232619 - RNA, 32 nt, Human
uccaugccaagucccugcacuguugguggccu

SEQ ID NO: 232620 - RNA, 32 nt, Human
uccaugccacugccagagcuggccuagcaaga

SEQ ID NO: 232621 - RNA, 32 nt, Human
uccaugccagggcugugacugcagccugugua

SEQ ID NO: 232622 - RNA, 32 nt, Human
uccaugcccagaaaucagaagucagauugaac

SEQ ID NO: 232623 - RNA, 32 nt, Human
uccaugccccgagggccucucucaguucuggg

SEQ ID NO: 232624 - RNA, 32 nt, Human
uccaugcccguagaggaagugugcagauggga

SEQ ID NO: 232625 - RNA, 32 nt, Human
uccaugcccugggcuggaggccagcuucgggg

SEQ ID NO: 232626 - RNA, 32 nt, Human
uccaugccgacaucaugucacucuaggccugg

SEQ ID NO: 232627 - RNA, 21 nt, Human
uccaugccguccacagcgccu

SEQ ID NO: 232628 - RNA, 32 nt, Human
uccaugccucagccuuugccuaccccaggaau

SEQ ID NO: 232629 - RNA, 32 nt, Human
uccaugccucaggauagaacagccuggcuuau

SEQ ID NO: 232630 - RNA, 32 nt, Human
uccaugccuccaggaguguggcagagcuucuc

SEQ ID NO: 232631 - RNA, 32 nt, Human
uccaugccugccauaccugccagcuucagaca

SEQ ID NO: 232632 - RNA, 32 nt, Human
uccaugccugccuccccucucugccacgcccc

SEQ ID NO: 232633 - RNA, 32 nt, Human
uccaugcgggaggggccacccacccacuggag

SEQ ID NO: 232634 - RNA, 22 nt, Human
uccaugcgggcaccaccacucc

SEQ ID NO: 232635 - RNA, 32 nt, Human
uccaugcucacugcucaugcacuuuuuacacg

SEQ ID NO: 232636 - RNA, 20 nt, Human
uccaugcucaggcucucagc

SEQ ID NO: 232637 - RNA, 23 nt, Human
uccaugcuccuucccugacccca

SEQ ID NO: 232638 - RNA, 32 nt, Human
uccaugcucucuggcucauugugucauuucaa

SEQ ID NO: 232639 - RNA, 32 nt, Human
uccaugcucuuaacucccaguugaagugggcc

SEQ ID NO: 232640 - RNA, 24 nt, Human
uccaugcugccaucaaggcauuua

SEQ ID NO: 232641 - RNA, 32 nt, Human
uccaugcugccuggcuuuccuccugcuaccaa

SEQ ID NO: 232642 - RNA, 28 nt, Human
uccaugcugcugcugacucggagcccca

SEQ ID NO: 232643 - RNA, 32 nt, Human
uccaugcuuucucuacucccugccucaaacca

SEQ ID NO: 232644 - RNA, 32 nt, Human
uccauggaaucagagcaagauuuccuuucugc

SEQ ID NO: 232645 - RNA, 32 nt, Human
uccauggacgagcaagggcaucccagaaacgu

SEQ ID NO: 232646 - RNA, 21 nt, Human
uccauggagaauccagccuca

SEQ ID NO: 232647 - RNA, 32 nt, Human
uccauggagcuucccucagcucuuaccucacc

SEQ ID NO: 232648 - RNA, 32 nt, Human
uccauggaugaacauuguaaagaggcuggaga

SEQ ID NO: 232649 - RNA, 32 nt, Human
uccauggcacacugcccucugccacugacagg

SEQ ID NO: 232650 - RNA, 22 nt, Human
uccauggcaggacagagcggga

SEQ ID NO: 232651 - RNA, 32 nt, Human
uccauggccauggaacaaguaaacgcaacccc

SEQ ID NO: 232652 - RNA, 28 nt, Human
uccauggccauggagauagacagcaggc

SEQ ID NO: 232653 - RNA, 28 nt, Human
uccauggcccagaaggaagaggcugcug

SEQ ID NO: 232654 - RNA, 32 nt, Human
uccauggccgaacccaccccacugccuguuac

SEQ ID NO: 232655 - RNA, 32 nt, Human
uccauggccuccucucugggcaguguugcugc

SEQ ID NO: 232656 - RNA, 32 nt, Human
uccauggccuucugcuguuucucgccaacacu

SEQ ID NO: 232657 - RNA, 32 nt, Human
uccauggccuucuucuggacacugcuaggauc

SEQ ID NO: 232658 - RNA, 32 nt, Human
uccauggcgguggaugccugacuggaagcccg

SEQ ID NO: 232659 - RNA, 32 nt, Human
uccauggcucaagugauccuccugccucagcc

SEQ ID NO: 232660 - RNA, 32 nt, Human
uccauggcugccaucucaccuccugcugggca

SEQ ID NO: 232661 - RNA, 32 nt, Human
uccauggcuggccugcucacagagcucuaccu

SEQ ID NO: 232662 - RNA, 32 nt, Human
uccauggcuggcuggguccccuucgcaguguu

SEQ ID NO: 232663 - RNA, 32 nt, Human
uccaugggaagccaugauggccuagcauggag

SEQ ID NO: 232664 - RNA, 22 nt, Human
uccaugggaaggaagcauggga

SEQ ID NO: 232665 - RNA, 32 nt, Human
uccaugggaggaaaguuuucuucuagcugcaa

SEQ ID NO: 232666 - RNA, 26 nt, Human
uccaugggaggcugcacagaagaccc

SEQ ID NO: 232667 - RNA, 32 nt, Human
uccaugggcacuaacccaccucccaggcugau

SEQ ID NO: 232668 - RNA, 32 nt, Human
uccaugggccccaggggaagcugcaguguggg

SEQ ID NO: 232669 - RNA, 32 nt, Human
uccaugggcccugcaggaggggagacccaccu

SEQ ID NO: 232670 - RNA, 32 nt, Human
uccaugggccuuccagaauggagggaggcucu

SEQ ID NO: 232671 - RNA, 32 nt, Human
uccauggggacagaagcuccagcauuugccca

SEQ ID NO: 232672 - RNA, 32 nt, Human
uccauggggaggugggcucugaaggugaaggu

SEQ ID NO: 232673 - RNA, 28 nt, Human
uccaugggggcggccagcugcgaggaug

SEQ ID NO: 232674 - RNA, 20 nt, Human
uccauggggucccauucuca

SEQ ID NO: 232675 - RNA, 32 nt, Human
uccaugggguuaucacccacugugcugaguca

SEQ ID NO: 232676 - RNA, 32 nt, Human
uccaugggugagucaccaugcuuggccacauu

SEQ ID NO: 232677 - RNA, 32 nt, Human
uccaugguccugguuggcccuggcuuugccua

SEQ ID NO: 232678 - RNA, 32 nt, Human
uccauggucucccggcuggcaauguggugaag

SEQ ID NO: 232679 - RNA, 26 nt, Human
uccauggucucuagaugguuuacuua

SEQ ID NO: 232680 - RNA, 32 nt, Human
uccaugguggccugggccacgcaggcuguacc

SEQ ID NO: 232681 - RNA, 32 nt, Human
uccaugguguuagaagccaggggaacaguuaa

SEQ ID NO: 232682 - RNA, 32 nt, Human
uccaugguuuuccuugguggccggcgcguguu

SEQ ID NO: 232683 - RNA, 32 nt, Human
uccauguaacccaguacuggaggucaagaugg

SEQ ID NO: 232684 - RNA, 32 nt, Human
uccauguaaggaggggagagugcucagagucc

SEQ ID NO: 232685 - RNA, 32 nt, Human
uccauguacuucugcccugccuccuccuuucg

SEQ ID NO: 232686 - RNA, 32 nt, Human
uccauguauagagagaaaauuuggaaaacagg

SEQ ID NO: 232687 - RNA, 32 nt, Human
uccaugucacagaacauaucagccucaagaag

SEQ ID NO: 232688 - RNA, 32 nt, Human
uccaugucaccacguggugaauggcugccuca

SEQ ID NO: 232689 - RNA, 32 nt, Human
uccaugucaccuuucccaccucuuucaaaaac

SEQ ID NO: 232690 - RNA, 31 nt, Human
uccaugucacucagaaggacuuugagguagu

SEQ ID NO: 232691 - RNA, 32 nt, Human
uccaugucccacguugggauggauuacagagg

SEQ ID NO: 232692 - RNA, 32 nt, Human
uccaugucucccaguuuguauaguuaaauugu

SEQ ID NO: 232693 - RNA, 32 nt, Human
uccaugucuccucauuccuacaccuauuuucu

SEQ ID NO: 232694 - RNA, 28 nt, Human
uccaugucucugaggagcggcgggcggc

SEQ ID NO: 232695 - RNA, 32 nt, Human
uccaugucucugcuuagcugugcuggcagcua

SEQ ID NO: 232696 - RNA, 32 nt, Human
uccaugucugugguagaagaagccccacacag

SEQ ID NO: 232697 - RNA, 32 nt, Human
uccaugugaucauucugccucuccucaggaga

SEQ ID NO: 232698 - RNA, 32 nt, Human
uccaugugaucugccauuggcuugcuucagug

SEQ ID NO: 232699 - RNA, 32 nt, Human
uccaugugaugcacaggaagcugagaugaacc

SEQ ID NO: 232700 - RNA, 32 nt, Human
uccaugugcucugcacaaaaacagaccuguug

SEQ ID NO: 232701 - RNA, 32 nt, Human
uccauguggagaaaggagugaaaccuuuaggg

SEQ ID NO: 232702 - RNA, 32 nt, Human
uccaugugggagcagaggugugaagagaauuu

SEQ ID NO: 232703 - RNA, 32 nt, Human
uccauguguagagugcuuagaaaccccaucaa

SEQ ID NO: 232704 - RNA, 29 nt, Human
uccauguguaugugugugucugguguuug

SEQ ID NO: 232705 - RNA, 32 nt, Human
uccaugugucuggcgggggauggguggacugu

SEQ ID NO: 232706 - RNA, 32 nt, Human
uccauguuauucucucacaguguacucuauaa

SEQ ID NO: 232707 - RNA, 32 nt, Human
uccauguucagggaugaggggagcagcagcag

SEQ ID NO: 232708 - RNA, 32 nt, Human
uccauguuccuccuccucucuccccacuugaa

SEQ ID NO: 232709 - RNA, 32 nt, Human
uccauguuggacauggccgcccccagguaguc

SEQ ID NO: 232710 - RNA, 32 nt, Human
uccauguuggccugucaccagacccgagucaa

SEQ ID NO: 232711 - RNA, 32 nt, Human
uccauguuuacucucuucuauuuggagaauaa

SEQ ID NO: 232712 - RNA, 32 nt, Human
uccauguuucaccucaugggugaguggauugc

SEQ ID NO: 232713 - RNA, 30 nt, Human
uccauuaaacuucuacugagcaaaugguua

SEQ ID NO: 232714 - RNA, 32 nt, Human
uccauuaauuugccgucagcucucacaugacc

SEQ ID NO: 232715 - RNA, 32 nt, Human
uccauuaccaaagccuggaaguucucaucacc

SEQ ID NO: 232716 - RNA, 32 nt, Human
uccauuaccccaagacuuucuucuagauauau

SEQ ID NO: 232717 - RNA, 32 nt, Human
uccauuagcuuccuuugcaaaggcuacuuaug

SEQ ID NO: 232718 - RNA, 32 nt, Human
uccauuauggcagauaaggaggcacgucaggc

SEQ ID NO: 232719 - RNA, 31 nt, Human
uccauuaugucugugugccuggaugucugug

SEQ ID NO: 232720 - RNA, 32 nt, Human
uccauuauuaccuggucacaccagauuuuccc

SEQ ID NO: 232721 - RNA, 32 nt, Human
uccauucacaugcucauauguuuauaaacugu

SEQ ID NO: 232722 - RNA, 32 nt, Human
uccauucacccagcgggaggugggaugugaga

SEQ ID NO: 232723 - RNA, 32 nt, Human
uccauucacuauacuacacuuuauugaagaca

SEQ ID NO: 232724 - RNA, 32 nt, Human
uccauucacucccaggugagaauucaggcaaa

SEQ ID NO: 232725 - RNA, 32 nt, Human
uccauucacucuguuucucuucugcuggauua

SEQ ID NO: 232726 - RNA, 32 nt, Human
uccauucacugcaaaccucguuccccauuucu

SEQ ID NO: 232727 - RNA, 32 nt, Human
uccauucacuugcccaacucugacaggauacg

SEQ ID NO: 232728 - RNA, 32 nt, Human
uccauucacuuuggguuccaucuugcuuuaaa

SEQ ID NO: 232729 - RNA, 32 nt, Human
uccauucagacuccuuuccugccuugugaccu

SEQ ID NO: 232730 - RNA, 32 nt, Human
uccauucagaggagggaggacaggaggccaca

SEQ ID NO: 232731 - RNA, 32 nt, Human
uccauucaggaaauaucgacagggcuacacgu

SEQ ID NO: 232732 - RNA, 32 nt, Human
uccauucaggagcaaagagcaccaugauucca

SEQ ID NO: 232733 - RNA, 32 nt, Human
uccauucagguucucaaaccuucuucuugaau

SEQ ID NO: 232734 - RNA, 32 nt, Human
uccauucauucaacacacaugaccacccgugu

SEQ ID NO: 232735 - RNA, 32 nt, Human
uccauuccacagugaaacagguggccucgugg

SEQ ID NO: 232736 - RNA, 32 nt, Human
uccauuccacaugugcccuggccacauuugca

SEQ ID NO: 232737 - RNA, 32 nt, Human
uccauuccagagcugcagaaccagucccucug

SEQ ID NO: 232738 - RNA, 32 nt, Human
uccauuccagccacagcagccccucagcgucc

SEQ ID NO: 232739 - RNA, 32 nt, Human
uccauuccagguagcuuugccaccccaccugc

SEQ ID NO: 232740 - RNA, 32 nt, Human
uccauuccagucaucauaggcaucaaaucuua

SEQ ID NO: 232741 - RNA, 32 nt, Human
uccauuccaguucucugauuauagaauccaga

SEQ ID NO: 232742 - RNA, 32 nt, Human
uccauuccauggauuuaaucagucccaagaag

SEQ ID NO: 232743 - RNA, 20 nt, Human
uccauucccuucuccuuccc

SEQ ID NO: 232744 - RNA, 32 nt, Human
uccauucccuuucuuuucaugcccaucccgau

SEQ ID NO: 232745 - RNA, 32 nt, Human
uccauuccuccuggcccaccuggggcauucac

SEQ ID NO: 232746 - RNA, 32 nt, Human
uccauuccucucucccugcccuuuuccugccu

SEQ ID NO: 232747 - RNA, 32 nt, Human
uccauuccuucuucccccucucugcagccucu

SEQ ID NO: 232748 - RNA, 32 nt, Human
uccauuccuuuuggcccugcagcaugucaugc

SEQ ID NO: 232749 - RNA, 32 nt, Human
uccauuccuuuuggcccugcagcaugucgugc

SEQ ID NO: 232750 - RNA, 32 nt, Human
uccauucgccagguuacccaggagaacaagga

SEQ ID NO: 232751 - RNA, 25 nt, Human
uccauucuaaagaugccucugggau

SEQ ID NO: 232752 - RNA, 32 nt, Human
uccauucuagaauuaugagaccaccuuggaga

SEQ ID NO: 232753 - RNA, 32 nt, Human
uccauucucagagcgguuaggauuacuguuua

SEQ ID NO: 232754 - RNA, 32 nt, Human
uccauucucagggcguuugaaugugaauuagg

SEQ ID NO: 232755 - RNA, 24 nt, Human
uccauucucaguuucuuccccaca

SEQ ID NO: 232756 - RNA, 32 nt, Human
uccauucuccaccgugucucauucaucacugc

SEQ ID NO: 232757 - RNA, 22 nt, Human
uccauucuccaugaucccucac

SEQ ID NO: 232758 - RNA, 32 nt, Human
uccauucucccaggagcuucucugcagacuga

SEQ ID NO: 232759 - RNA, 32 nt, Human
uccauucuccccucagauuagcggccggacac

SEQ ID NO: 232760 - RNA, 32 nt, Human
uccauucucuuuuugcugaaucacgucaagua

SEQ ID NO: 232761 - RNA, 32 nt, Human
uccauucugaggguuucaucgucaggugggag

SEQ ID NO: 232762 - RNA, 32 nt, Human
uccauucugcccucccggcuucccaguaagca

SEQ ID NO: 232763 - RNA, 32 nt, Human
uccauucugccuggcuguccauccucucaaca

SEQ ID NO: 232764 - RNA, 24 nt, Human
uccauucuggcaucccagagugga

SEQ ID NO: 232765 - RNA, 20 nt, Human
uccauucugggucgagugga

SEQ ID NO: 232766 - RNA, 32 nt, Human
uccauucuucaauuccagaugcuauucauaau

SEQ ID NO: 232767 - RNA, 32 nt, Human
uccauucuuccuccagccaaccccugaaaauu

SEQ ID NO: 232768 - RNA, 32 nt, Human
uccauucuucucucagcuuuccugugggcagg

SEQ ID NO: 232769 - RNA, 32 nt, Human
uccauucuucuuucaaucuucucagcuuauaa

SEQ ID NO: 232770 - RNA, 32 nt, Human
uccauucuugcccucuggagaagugguuccug

SEQ ID NO: 232771 - RNA, 32 nt, Human
uccauucuuggcuuuuucauucauagagauag

SEQ ID NO: 232772 - RNA, 32 nt, Human
uccauugaaaacaaauccaugagugagaggga

SEQ ID NO: 232773 - RNA, 32 nt, Human
uccauugauuagcucagagaacuguagguaua

SEQ ID NO: 232774 - RNA, 32 nt, Human
uccauugcaauuacuuaucuuccucuucuauc

SEQ ID NO: 232775 - RNA, 32 nt, Human
uccauugcacuccagccugggugacagugaaa

SEQ ID NO: 232776 - RNA, 32 nt, Human
uccauugccacugucuccagguucaguaccug

SEQ ID NO: 232777 - RNA, 23 nt, Human
uccauugcccaggcuggaguaca

SEQ ID NO: 232778 - RNA, 32 nt, Human
uccauugcccuccuggugcuggguuugcccuc

SEQ ID NO: 232779 - RNA, 32 nt, Human
uccauugcccugcucaguuuggcugcauuugg

SEQ ID NO: 232780 - RNA, 32 nt, Human
uccauugcgcccaggcugguaugcagucaugu

SEQ ID NO: 232781 - RNA, 32 nt, Human
uccauugcucaugucacuugugcagugacuga

SEQ ID NO: 232782 - RNA, 32 nt, Human
uccauugcuuuucccuuccuggagucgaugcc

SEQ ID NO: 232783 - RNA, 32 nt, Human
uccauuggaaacaguugcuugaaguagcacag

SEQ ID NO: 232784 - RNA, 32 nt, Human
uccauuggaauauuaagcccaggaguugcuuu

SEQ ID NO: 232785 - RNA, 21 nt, Human
uccauuggauguccccacucc

SEQ ID NO: 232786 - RNA, 32 nt, Human
uccauuggcaauucaaaacaggcugacauaca

SEQ ID NO: 232787 - RNA, 32 nt, Human
uccauuggcaguaccagcaagccagacacucc

SEQ ID NO: 232788 - RNA, 24 nt, Human
uccauuggcugguuuuaccacucc

SEQ ID NO: 232789 - RNA, 32 nt, Human
uccauuggcuugagacacaugacccaaacaua

SEQ ID NO: 232790 - RNA, 32 nt, Human
uccauugggacaugaaguuaaccacagucggg

SEQ ID NO: 232791 - RNA, 32 nt, Human
uccauugggaggguggccagaggagcaggugg

SEQ ID NO: 232792 - RNA, 32 nt, Human
uccauugggggaaagauauucuuggaaccacu

SEQ ID NO: 232793 - RNA, 32 nt, Human
uccauuggucacagugcugccucugggggcca

SEQ ID NO: 232794 - RNA, 32 nt, Human
uccauuguacauugucuauacacacacauaaa

SEQ ID NO: 232795 - RNA, 32 nt, Human
uccauuguaguaguguaggauguaggccauuu

SEQ ID NO: 232796 - RNA, 24 nt, Human
uccauuguaucagauccuuuugua

SEQ ID NO: 232797 - RNA, 32 nt, Human
uccauugucauagcccuuccccuaggccggga

SEQ ID NO: 232798 - RNA, 32 nt, Human
uccauugucuccuggccccacccuccauuggg

SEQ ID NO: 232799 - RNA, 32 nt, Human
uccauugugcaucugccucuuuugacguugga

SEQ ID NO: 232800 - RNA, 32 nt, Human
uccauugugcugccgcccuccgcgcucuccag

SEQ ID NO: 232801 - RNA, 32 nt, Human
uccauuguggguuccugagaguaggacacauu

SEQ ID NO: 232802 - RNA, 32 nt, Human
uccauuguggguuccuggaguaggacacauug

SEQ ID NO: 232803 - RNA, 32 nt, Human
uccauuguggugaggagaauacuucaaugucc

SEQ ID NO: 232804 - RNA, 15 nt, Human
uccauuuaagcuccc

SEQ ID NO: 232805 - RNA, 32 nt, Human
uccauuuacaccauuaugcugugucuccucuu

SEQ ID NO: 232806 - RNA, 23 nt, Human
uccauuuacuguagcucugcuua

SEQ ID NO: 232807 - RNA, 32 nt, Human
uccauuuagaaaauguuaaacugcuuuuccag

SEQ ID NO: 232808 - RNA, 32 nt, Human
uccauuuagacuacuuuccucuucuauuguuu

SEQ ID NO: 232809 - RNA, 32 nt, Human
uccauuuagcuucagguugucuuguuucugua

SEQ ID NO: 232810 - RNA, 32 nt, Human
uccauuuaggguaaccaugcaugugguuaguc

SEQ ID NO: 232811 - RNA, 32 nt, Human
uccauuuauguacccaccuacccggccugggc

SEQ ID NO: 232812 - RNA, 20 nt, Human
uccauuuauucaucauccua

SEQ ID NO: 232813 - RNA, 32 nt, Human
uccauuuauuuagaucuuuuauuucuuucaaa

SEQ ID NO: 232814 - RNA, 18 nt, Human
uccauuucaauacugccg

SEQ ID NO: 232815 - RNA, 32 nt, Human
uccauuuccaucccaucauccuuguccaaugc

SEQ ID NO: 232816 - RNA, 32 nt, Human
uccauuuccugccucuccuuucaccaagcucu

SEQ ID NO: 232817 - RNA, 32 nt, Human
uccauuucgcagaaauaagaaggagaauaaaa

SEQ ID NO: 232818 - RNA, 32 nt, Human
uccauuucucucucauauaucuauauuuaucu

SEQ ID NO: 232819 - RNA, 32 nt, Human
uccauuucugcagcuuagcuuguguccugccc

SEQ ID NO: 232820 - RNA, 32 nt, Human
uccauuucugcucucaaacccuacugggauca

SEQ ID NO: 232821 - RNA, 32 nt, Human
uccauuucuguucacuuuguggagagggcauu

SEQ ID NO: 232822 - RNA, 32 nt, Human
uccauuucuuccacgauggugcaguguaacga

SEQ ID NO: 232823 - RNA, 32 nt, Human
uccauuugaagcaggaggggcuggauuuggaa

SEQ ID NO: 232824 - RNA, 22 nt, Human
uccauuugacaccgcaguucug

SEQ ID NO: 232825 - RNA, 32 nt, Human
uccauuugcaauauuugguuacaccauuugcu

SEQ ID NO: 232826 - RNA, 32 nt, Human
uccauuugcaauauuugguuacaccauuuguu

SEQ ID NO: 232827 - RNA, 25 nt, Human
uccauuugcaccaugccacacugcu

SEQ ID NO: 232828 - RNA, 32 nt, Human
uccauuugguguguauuucacaggguaacaau

SEQ ID NO: 232829 - RNA, 32 nt, Human
uccauuugguuuuacuauuuuaaagugggcgu

SEQ ID NO: 232830 - RNA, 32 nt, Human
uccauuugucagcacuuuccagccugccaauu

SEQ ID NO: 232831 - RNA, 32 nt, Human
uccauuuguggaccaaaagauggaguugguuu

SEQ ID NO: 232832 - RNA, 32 nt, Human
uccauuugugugugugcaaguguguaugugcg

SEQ ID NO: 232833 - RNA, 32 nt, Human
uccauuuguugugaaugaagacuuguccuaua

SEQ ID NO: 232834 - RNA, 25 nt, Human
uccauuuuagcgccgcccgccgucg

SEQ ID NO: 232835 - RNA, 32 nt, Human
uccauuuucaaaggaucuucggcucuacuuuu

SEQ ID NO: 232836 - RNA, 32 nt, Human
uccauuuucccauccaguucuggaguucguag

SEQ ID NO: 232837 - RNA, 32 nt, Human
uccauuuuccccuucagguccucaguggauua

SEQ ID NO: 232838 - RNA, 32 nt, Human
uccauuuucuacaaugcaaccaacagcaacau

SEQ ID NO: 232839 - RNA, 32 nt, Human
uccauuuugauguuuccaauugccuccucucc

SEQ ID NO: 232840 - RNA, 21 nt, Human
uccauuuuguaaaaauauaaa

SEQ ID NO: 232841 - RNA, 32 nt, Human
uccauuuugugaaaccuuagaggacagcggcu

SEQ ID NO: 232842 - RNA, 32 nt, Human
uccauuuuugauucauuccugagaauggcuua

SEQ ID NO: 232843 - RNA, 32 nt, Human
ucccaaaacagcuuccuccauuuccugaaagu

SEQ ID NO: 232844 - RNA, 32 nt, Human
ucccaaaaccacauuuugaaacuagaauagug

SEQ ID NO: 232845 - RNA, 21 nt, Human
ucccaaaaccucauucccuuu

SEQ ID NO: 232846 - RNA, 32 nt, Human
ucccaaaagcagcagaaggugaagcaggaagc

SEQ ID NO: 232847 - RNA, 24 nt, Human
ucccaaaagcuucuugcagucuaa

SEQ ID NO: 232848 - RNA, 32 nt, Human
ucccaaaaggcagaugacggggaguuaggcau

SEQ ID NO: 232849 - RNA, 32 nt, Human
ucccaaaauugcugggauuacaggugugagcc

SEQ ID NO: 232850 - RNA, 32 nt, Human
ucccaaacaaauucugauuccacagagugggg

SEQ ID NO: 232851 - RNA, 18 nt, Human
ucccaaacaccagaccac

SEQ ID NO: 232852 - RNA, 32 nt, Human
ucccaaacagcccaagggccggaacagcaggu

SEQ ID NO: 232853 - RNA, 32 nt, Human
ucccaaacucaggcuuucagcugugcuuuuug

SEQ ID NO: 232854 - RNA, 22 nt, Human
ucccaaagaagaagaugaggaa

SEQ ID NO: 232855 - RNA, 32 nt, Human
ucccaaagaugcacaaugauaaugaugcugau

SEQ ID NO: 232856 - RNA, 32 nt, Human
ucccaaagccaagguucuggcuucauuggcaa

SEQ ID NO: 232857 - RNA, 19 nt, Human
ucccaaagccagccugccu

SEQ ID NO: 232858 - RNA, 20 nt, Human
ucccaaagccguguguuugu

SEQ ID NO: 232859 - RNA, 25 nt, Human
ucccaaagcugcccaguccaugggg

SEQ ID NO: 232860 - RNA, 24 nt, Human
ucccaaaggaauguuuauuuauua

SEQ ID NO: 232861 - RNA, 23 nt, Human
ucccaaaggaauugaaauuuuca

SEQ ID NO: 232862 - RNA, 18 nt, Human
ucccaaaggagcccuuga

SEQ ID NO: 232863 - RNA, 32 nt, Human
ucccaaaggcagcagggaagugcggcggcugu

SEQ ID NO: 232864 - RNA, 32 nt, Human
ucccaaaggccaggaaagguuggggucauuuu

SEQ ID NO: 232865 - RNA, 32 nt, Human
ucccaaagggcucauuccagccauuccaaucu

SEQ ID NO: 232866 - RNA, 32 nt, Human
ucccaaagggcugggacugcaggugcaugcac

SEQ ID NO: 232867 - RNA, 32 nt, Human
ucccaaaggggcaacgggaggaaggggaggcu

SEQ ID NO: 232868 - RNA, 32 nt, Human
ucccaaagugcuagaauuacaggugugagcca

SEQ ID NO: 232869 - RNA, 32 nt, Human
ucccaaagugcuaggauaacaggugugagcca

SEQ ID NO: 232870 - RNA, 32 nt, Human
ucccaaagugcuaggauuacaggcuggagcua

SEQ ID NO: 232871 - RNA, 32 nt, Human
ucccaaagugcucaggauuacaggcgugagcc

SEQ ID NO: 232872 - RNA, 32 nt, Human
ucccaaagugcugggaauacaggugugaacca

SEQ ID NO: 232873 - RNA, 32 nt, Human
ucccaaagugcugggaugacaggugugagcca

SEQ ID NO: 232874 - RNA, 32 nt, Human
ucccaaagugcugggauuacaggcgugagcca

SEQ ID NO: 232875 - RNA, 32 nt, Human
ucccaaagugcugggauuacaggugggagcca

SEQ ID NO: 232876 - RNA, 21 nt, Human
ucccaaaucggccacggcaca

SEQ ID NO: 232877 - RNA, 32 nt, Human
ucccaaaucugaaggacuucaucucccgcuuu

SEQ ID NO: 232878 - RNA, 32 nt, Human
ucccaaaucugucagcaucuggcugucuagaa

SEQ ID NO: 232879 - RNA, 32 nt, Human
ucccaaaugaaauuaugcaacuuugauaucau

SEQ ID NO: 232880 - RNA, 21 nt, Human
ucccaaaugaugaguuuguca

SEQ ID NO: 232881 - RNA, 32 nt, Human
ucccaaauugcccuugcccuaccagagcuccc

SEQ ID NO: 232882 - RNA, 32 nt, Human
ucccaaauugcugggauuuacaggcaugagcc

SEQ ID NO: 232883 - RNA, 32 nt, Human
ucccaacaaggagagaacaauaugucaaccau

SEQ ID NO: 232884 - RNA, 32 nt, Human
ucccaacacagcacacuagucagcccacugcc

SEQ ID NO: 232885 - RNA, 32 nt, Human
ucccaacacaugucuagcuuucaccuccagga

SEQ ID NO: 232886 - RNA, 25 nt, Human
ucccaacacuuugggaggacaggac

SEQ ID NO: 232887 - RNA, 18 nt, Human
ucccaacacuuuugggag

SEQ ID NO: 232888 - RNA, 20 nt, Human
ucccaacagguggacuuguc

SEQ ID NO: 232889 - RNA, 32 nt, Human
ucccaacagugcagaagcacagccugagucuc

SEQ ID NO: 232890 - RNA, 32 nt, Human
ucccaacaguguaaaagcauucauguuucucc

SEQ ID NO: 232891 - RNA, 32 nt, Human
ucccaacaguuugggagguugaggcaggagga

SEQ ID NO: 232892 - RNA, 32 nt, Human
ucccaacauagcacuugagcucugcugaggga

SEQ ID NO: 232893 - RNA, 21 nt, Human
ucccaacaucucaucuucuuu

SEQ ID NO: 232894 - RNA, 32 nt, Human
ucccaacauggugaaaccccaucucuacuaaa

SEQ ID NO: 232895 - RNA, 32 nt, Human
ucccaaccaaaaccacaccauaggguuuucug

SEQ ID NO: 232896 - RNA, 22 nt, Human
ucccaaccaaccagucuucacu

SEQ ID NO: 232897 - RNA, 32 nt, Human
ucccaaccacagugggagccagacugaauaua

SEQ ID NO: 232898 - RNA, 32 nt, Human
ucccaaccacugccgaguuucugccuggagca

SEQ ID NO: 232899 - RNA, 32 nt, Human
ucccaacccacucugccuucuuuuucagcuug

SEQ ID NO: 232900 - RNA, 32 nt, Human
ucccaaccccagcagccugaauacugugcccu

SEQ ID NO: 232901 - RNA, 20 nt, Human
ucccaacccgccacuggcca

SEQ ID NO: 232902 - RNA, 32 nt, Human
ucccaacccuggcuccaaucagccugccuacg

SEQ ID NO: 232903 - RNA, 32 nt, Human
ucccaaccgaagucacuccaggcugggaucaa

SEQ ID NO: 232904 - RNA, 32 nt, Human
ucccaaccucaagugauccacccaccuuguuc

SEQ ID NO: 232905 - RNA, 32 nt, Human
ucccaaccucaagugauccgccugccucgacc

SEQ ID NO: 232906 - RNA, 32 nt, Human
ucccaaccucaagugaucugcccgccucggcc

SEQ ID NO: 232907 - RNA, 32 nt, Human
ucccaaccucagcucucuuccccagccuuuau

SEQ ID NO: 232908 - RNA, 21 nt, Human
ucccaaccucaggugauccgc

SEQ ID NO: 232909 - RNA, 32 nt, Human
ucccaaccucaggugauccuccugccuccgcc

SEQ ID NO: 232910 - RNA, 32 nt, Human
ucccaaccuuucucuccucagucccugcuccu

SEQ ID NO: 232911 - RNA, 32 nt, Human
ucccaacgccagcccuucauccuuccucccuc

SEQ ID NO: 232912 - RNA, 32 nt, Human
ucccaacgugcugggauuacaggugugagcca

SEQ ID NO: 232913 - RNA, 32 nt, Human
ucccaacucagccacaagcucugugaggaugg

SEQ ID NO: 232914 - RNA, 32 nt, Human
ucccaacucagccugcucucacuacgaguuuu

SEQ ID NO: 232915 - RNA, 32 nt, Human
ucccaacucauucuagcuuauuugguguucga

SEQ ID NO: 232916 - RNA, 32 nt, Human
ucccaacuccacccucuuccugccaagcaauc

SEQ ID NO: 232917 - RNA, 32 nt, Human
ucccaacucccaugaccucuggcuucaguggu

SEQ ID NO: 232918 - RNA, 23 nt, Human
ucccaacuccucaugucuucuca

SEQ ID NO: 232919 - RNA, 32 nt, Human
ucccaacucucagucccuuuguucucaugagc

SEQ ID NO: 232920 - RNA, 19 nt, Human
ucccaacugggugcagugg

SEQ ID NO: 232921 - RNA, 32 nt, Human
ucccaacuuagcccugggugggccgggccggg

SEQ ID NO: 232922 - RNA, 32 nt, Human
ucccaacuuccuccaggucauuucccagugug

SEQ ID NO: 232923 - RNA, 32 nt, Human
ucccaagaaaguucagcccagauggaaggugu

SEQ ID NO: 232924 - RNA, 25 nt, Human
ucccaagaaugcagcugucuucucc

SEQ ID NO: 232925 - RNA, 32 nt, Human
ucccaagacaaaccuccagcaggacuucagua

SEQ ID NO: 232926 - RNA, 32 nt, Human
ucccaagacagagcuagagcaagggucucuuu

SEQ ID NO: 232927 - RNA, 32 nt, Human
ucccaagacuuguugagagaugugacaugguu

SEQ ID NO: 232928 - RNA, 19 nt, Human
ucccaagagccccaugagg

SEQ ID NO: 232929 - RNA, 32 nt, Human
ucccaagaggaggagagggaggcugcagacgc

SEQ ID NO: 232930 - RNA, 32 nt, Human
ucccaagagguuaggguuggagaagaaaucac

SEQ ID NO: 232931 - RNA, 32 nt, Human
ucccaagaugcuggagcuaaggggaccugacc

SEQ ID NO: 232932 - RNA, 23 nt, Human
ucccaagcaauccucccaccuca

SEQ ID NO: 232933 - RNA, 32 nt, Human
ucccaagcagaggccccucccucaggcacucc

SEQ ID NO: 232934 - RNA, 18 nt, Human
ucccaagccaccaaugca

SEQ ID NO: 232935 - RNA, 29 nt, Human
ucccaagccacugcacuucggaggggcug

SEQ ID NO: 232936 - RNA, 32 nt, Human
ucccaagccaggcugcccuuccucauuuccca

SEQ ID NO: 232937 - RNA, 32 nt, Human
ucccaagcucaggggcuucucagcauuuaccu

SEQ ID NO: 232938 - RNA, 19 nt, Human
ucccaagcuccauaugcca

SEQ ID NO: 232939 - RNA, 32 nt, Human
ucccaagcugcuguuucaaggcugagcuggcc

SEQ ID NO: 232940 - RNA, 32 nt, Human
ucccaagcuggagucugguggaagaugaggcu

SEQ ID NO: 232941 - RNA, 32 nt, Human
ucccaagcuggcugggguggccuguguggcca

SEQ ID NO: 232942 - RNA, 32 nt, Human
ucccaagcuguuguugaggcugcauuagguca

SEQ ID NO: 232943 - RNA, 32 nt, Human
ucccaagcuucucaaacuguuagcugcugucu

SEQ ID NO: 232944 - RNA, 32 nt, Human
ucccaaggaacacgugacuguguguuuccaca

SEQ ID NO: 232945 - RNA, 32 nt, Human
ucccaaggauguggaggggcagugaggccugg

SEQ ID NO: 232946 - RNA, 32 nt, Human
ucccaaggcauauuucuccuagacccuacagc

SEQ ID NO: 232947 - RNA, 32 nt, Human
ucccaaggcuaaacuuucuaauucccuucuuu

SEQ ID NO: 232948 - RNA, 32 nt, Human
ucccaaggcugaggcaggagaauugcuugagc

SEQ ID NO: 232949 - RNA, 25 nt, Human
ucccaaggcuggcacuaaccaggua

SEQ ID NO: 232950 - RNA, 32 nt, Human
ucccaagggaaacucaggcgugugcugguccc

SEQ ID NO: 232951 - RNA, 32 nt, Human
ucccaagggaagagaaugggcagcagguaugu

SEQ ID NO: 232952 - RNA, 32 nt, Human
ucccaagggacugaaguauacauuuaguuaac

SEQ ID NO: 232953 - RNA, 32 nt, Human
ucccaaggggcuguuugcuguguuuauugacu

SEQ ID NO: 232954 - RNA, 18 nt, Human
ucccaagggucacaugcc

SEQ ID NO: 232955 - RNA, 32 nt, Human
ucccaagggucugggcucugaguuggaacccg

SEQ ID NO: 232956 - RNA, 32 nt, Human
ucccaagguauucuguccuccaggacucugaa

SEQ ID NO: 232957 - RNA, 32 nt, Human
ucccaaggugcuggaauuacaggugugagcca

SEQ ID NO: 232958 - RNA, 32 nt, Human
ucccaaggugcugggauuacaggugugagcca

SEQ ID NO: 232959 - RNA, 32 nt, Human
ucccaagguggaggagggggaaggacaggcag

SEQ ID NO: 232960 - RNA, 32 nt, Human
ucccaagguuugcugggcucugggauccacga

SEQ ID NO: 232961 - RNA, 32 nt, Human
ucccaaguagcuagcugggacuacaggcacgc

SEQ ID NO: 232962 - RNA, 23 nt, Human
ucccaaguagcugggauuacagg

SEQ ID NO: 232963 - RNA, 32 nt, Human
ucccaaguccugcuccuuucugcccagccugc

SEQ ID NO: 232964 - RNA, 27 nt, Human
ucccaagucuucaaggagaagauucuc

SEQ ID NO: 232965 - RNA, 32 nt, Human
ucccaagugugcccucuucccucucuccagau

SEQ ID NO: 232966 - RNA, 32 nt, Human
ucccaaguucaagcgauuguccugccucagcu

SEQ ID NO: 232967 - RNA, 32 nt, Human
ucccaaguucaagugauucuccugccugagcc

SEQ ID NO: 232968 - RNA, 32 nt, Human
ucccaaguucacaccauucuccugccucagcc

SEQ ID NO: 232969 - RNA, 32 nt, Human
ucccaaguucacgccauucuccugccucagcc

SEQ ID NO: 232970 - RNA, 32 nt, Human
ucccaaguucaugccauucuccugccucagcc

SEQ ID NO: 232971 - RNA, 32 nt, Human
ucccaaguuucccacccuccacccuaaaaauu

SEQ ID NO: 232972 - RNA, 32 nt, Human
ucccaaguuugaagguucagacuuaaaccuga

SEQ ID NO: 232973 - RNA, 22 nt, Human
ucccaaguuuucauccaacugc

SEQ ID NO: 232974 - RNA, 21 nt, Human
ucccaauacaggcaugaacca

SEQ ID NO: 232975 - RNA, 32 nt, Human
ucccaauagggugggggccugugggccagagg

SEQ ID NO: 232976 - RNA, 32 nt, Human
ucccaaucaaagugccaagugagcuugaaguu

SEQ ID NO: 232977 - RNA, 32 nt, Human
ucccaaucaccagaggaaguugcuguaagccc

SEQ ID NO: 232978 - RNA, 32 nt, Human
ucccaauccagucuacccucaaaggagcuggg

SEQ ID NO: 232979 - RNA, 32 nt, Human
ucccaauccccacagacacacacauugauccu

SEQ ID NO: 232980 - RNA, 22 nt, Human
ucccaauccugcugucuucucc

SEQ ID NO: 232981 - RNA, 32 nt, Human
ucccaaucgggagggagagacagagacagagc

SEQ ID NO: 232982 - RNA, 32 nt, Human
ucccaaucuggugagcgcuacacaccuucauc

SEQ ID NO: 232983 - RNA, 32 nt, Human
ucccaauggaggggagguugcaggggagagcu

SEQ ID NO: 232984 - RNA, 31 nt, Human
ucccaauggaugggcucagccaauuucaccc

SEQ ID NO: 232985 - RNA, 30 nt, Human
ucccaauggcccuguccuuuucuuuacuga

SEQ ID NO: 232986 - RNA, 23 nt, Human
ucccaaugucagucugccucuuu

SEQ ID NO: 232987 - RNA, 32 nt, Human
ucccaauguccaccccugccuccccuucacug

SEQ ID NO: 232988 - RNA, 32 nt, Human
ucccaaugugaaugcaucuacagaagaaacug

SEQ ID NO: 232989 - RNA, 32 nt, Human
ucccaauuuucuuuuuacucccccucuuaagg

SEQ ID NO: 232990 - RNA, 32 nt, Human
ucccacaaaaaccugaggcagcucuuuugccc

SEQ ID NO: 232991 - RNA, 21 nt, Human
ucccacaaaagucagcaccuu

SEQ ID NO: 232992 - RNA, 22 nt, Human
ucccacaaaagucagcaccuuc

SEQ ID NO: 232993 - RNA, 32 nt, Human
ucccacaaagugcugggauuacaggugugagc

SEQ ID NO: 232994 - RNA, 32 nt, Human
ucccacaacaccaagccucagugagaaaucaa

SEQ ID NO: 232995 - RNA, 32 nt, Human
ucccacaacagcuucccacagcaugaagaucu

SEQ ID NO: 232996 - RNA, 32 nt, Human
ucccacaacgaugacucugccucuugucagcc

SEQ ID NO: 232997 - RNA, 32 nt, Human
ucccacaagaagcugguggagcagaguguucc

SEQ ID NO: 232998 - RNA, 32 nt, Human
ucccacaagccuuaggcuuuacaggguuguau

SEQ ID NO: 232999 - RNA, 32 nt, Human
ucccacaaggcugcuuggccucagugggugcu

SEQ ID NO: 233000 - RNA, 32 nt, Human
ucccacaaguugagagugugucucucccucau

SEQ ID NO: 233001 - RNA, 32 nt, Human
ucccacaaugcugaugaaaacugucaagcugc

SEQ ID NO: 233002 - RNA, 32 nt, Human
ucccacaauuugcuuucuccuccucaaggguu

SEQ ID NO: 233003 - RNA, 32 nt, Human
ucccacacaaucccuguacucugacccauagc

SEQ ID NO: 233004 - RNA, 32 nt, Human
ucccacacacuguucaaaaauagacugccauu

SEQ ID NO: 233005 - RNA, 20 nt, Human
ucccacacagcccauggagg

SEQ ID NO: 233006 - RNA, 32 nt, Human
ucccacacagccgccucugcuccagcaaggau

SEQ ID NO: 233007 - RNA, 32 nt, Human
ucccacacagcugucuguucugccaguuagug

SEQ ID NO: 233008 - RNA, 32 nt, Human
ucccacacaguuccugagcuggugccaggcag

SEQ ID NO: 233009 - RNA, 32 nt, Human
ucccacacaugauccuucuucccuucaucacc

SEQ ID NO: 233010 - RNA, 21 nt, Human
ucccacaccacuguagucaga

SEQ ID NO: 233011 - RNA, 18 nt, Human
ucccacaccagcugugaa

SEQ ID NO: 233012 - RNA, 32 nt, Human
ucccacacccacccuggcuuccaucaugagug

SEQ ID NO: 233013 - RNA, 24 nt, Human
ucccacaccccacccucccuuccc

SEQ ID NO: 233014 - RNA, 20 nt, Human
ucccacaccccagccaucca

SEQ ID NO: 233015 - RNA, 18 nt, Human
ucccacaccggcugugga

SEQ ID NO: 233016 - RNA, 32 nt, Human
ucccacaccucacuuuucacagccucugaggg

SEQ ID NO: 233017 - RNA, 32 nt, Human
ucccacaccuguaaucucagcacuuuaggagg

SEQ ID NO: 233018 - RNA, 32 nt, Human
ucccacaccuuuguuccucaauagcugggggc

SEQ ID NO: 233019 - RNA, 32 nt, Human
ucccacacgagcccagcucucccuucgaguag

SEQ ID NO: 233020 - RNA, 32 nt, Human
ucccacacgccugggcuguauggcaggaccuc

SEQ ID NO: 233021 - RNA, 32 nt, Human
ucccacacucacucacuuuccuaggagcccac

SEQ ID NO: 233022 - RNA, 32 nt, Human
ucccacacugcagcuuuaucuuuaggcuuaug

SEQ ID NO: 233023 - RNA, 32 nt, Human
ucccacacugcucccaguccugggcacagugg

SEQ ID NO: 233024 - RNA, 25 nt, Human
ucccacacuucuuuucucccauccc

SEQ ID NO: 233025 - RNA, 32 nt, Human
ucccacagacaucuuacacuugcucgacacug

SEQ ID NO: 233026 - RNA, 19 nt, Human
ucccacagacaugccuucc

SEQ ID NO: 233027 - RNA, 18 nt, Human
ucccacagacugccccag

SEQ ID NO: 233028 - RNA, 18 nt, Human
ucccacagcagcugugaa

SEQ ID NO: 233029 - RNA, 21 nt, Human
ucccacagcagggacugugag

SEQ ID NO: 233030 - RNA, 32 nt, Human
ucccacagcauggccacacugcaccuccuucg

SEQ ID NO: 233031 - RNA, 32 nt, Human
ucccacagcccagcagauagcucauuggcuua

SEQ ID NO: 233032 - RNA, 32 nt, Human
ucccacagccuccuucucaccuuuuccauaac

SEQ ID NO: 233033 - RNA, 32 nt, Human
ucccacagccuggucccugauacugggcucug

SEQ ID NO: 233034 - RNA, 32 nt, Human
ucccacagccuguaacucaguguuuuguacuu

SEQ ID NO: 233035 - RNA, 32 nt, Human
ucccacagcuggagcacgcagagcaggcauca

SEQ ID NO: 233036 - RNA, 32 nt, Human
ucccacagcuuccugagggcuaauucugggaa

SEQ ID NO: 233037 - RNA, 30 nt, Human
ucccacagcuugcaaggaccaagggaggcc

SEQ ID NO: 233038 - RNA, 32 nt, Human
ucccacagcuuucugcccauuguuucuuacua

SEQ ID NO: 233039 - RNA, 32 nt, Human
ucccacaggauugugggcucucugcuuccuua

SEQ ID NO: 233040 - RNA, 23 nt, Human
ucccacaggcaauaccccugggc

SEQ ID NO: 233041 - RNA, 32 nt, Human
ucccacaggccugucugguauuuguggagcau

SEQ ID NO: 233042 - RNA, 32 nt, Human
ucccacaggcuggagugcaauggugugaucuc

SEQ ID NO: 233043 - RNA, 32 nt, Human
ucccacagggcaccuggcuggggcucaugccu

SEQ ID NO: 233044 - RNA, 32 nt, Human
ucccacaggggaaaucugggcgugcuguagcu

SEQ ID NO: 233045 - RNA, 32 nt, Human
ucccacaguccccaccgcgggacuguuccauu

SEQ ID NO: 233046 - RNA, 32 nt, Human
ucccacagugggcaggaggccaccaagaggug

SEQ ID NO: 233047 - RNA, 32 nt, Human
ucccacagugugcuggaaugguuaucacaaga

SEQ ID NO: 233048 - RNA, 32 nt, Human
ucccacaguugcccuggugaugacuuagggcu

SEQ ID NO: 233049 - RNA, 32 nt, Human
ucccacaguuguucccgcucugcaccuguguu

SEQ ID NO: 233050 - RNA, 21 nt, Human
ucccacaucccaguccugagg

SEQ ID NO: 233051 - RNA, 25 nt, Human
ucccacauccguccucccccuuccc

SEQ ID NO: 233052 - RNA, 32 nt, Human
ucccacauccucccccucccuuuccucaugaa

SEQ ID NO: 233053 - RNA, 32 nt, Human
ucccacaucugccucagacuggagggggcuca

SEQ ID NO: 233054 - RNA, 32 nt, Human
ucccacaucuuuccucaaguaucuucuauuuu

SEQ ID NO: 233055 - RNA, 22 nt, Human
ucccacaugccacccccuuccc

SEQ ID NO: 233056 - RNA, 32 nt, Human
ucccacaugccacccccuucccuguccuuccc

SEQ ID NO: 233057 - RNA, 32 nt, Human
ucccacaugccccgcaugcgugcaaugccucc

SEQ ID NO: 233058 - RNA, 20 nt, Human
ucccacauggaaauguaucc

SEQ ID NO: 233059 - RNA, 24 nt, Human
ucccacauggaagacgcuauucca

SEQ ID NO: 233060 - RNA, 18 nt, Human
ucccaccacagccaccca

SEQ ID NO: 233061 - RNA, 18 nt, Human
ucccaccacagccuccca

SEQ ID NO: 233062 - RNA, 22 nt, Human
ucccaccacagccucccaggua

SEQ ID NO: 233063 - RNA, 32 nt, Human
ucccaccaccaccaccaccagcaccaccacuc

SEQ ID NO: 233064 - RNA, 32 nt, Human
ucccaccacugcacuccagccugggaagcaga

SEQ ID NO: 233065 - RNA, 32 nt, Human
ucccaccacugcacuccagccugggcgacaca

SEQ ID NO: 233066 - RNA, 32 nt, Human
ucccaccacugcacuccagccugggcgacaga

SEQ ID NO: 233067 - RNA, 32 nt, Human
ucccaccacugcacuccagccugggugacaga

SEQ ID NO: 233068 - RNA, 32 nt, Human
ucccaccagcccaguggcuggggucagcuuag

SEQ ID NO: 233069 - RNA, 19 nt, Human
ucccaccagugaucgagaa

SEQ ID NO: 233070 - RNA, 32 nt, Human
ucccaccauacagacagcgagauccaagaaga

SEQ ID NO: 233071 - RNA, 32 nt, Human
ucccaccaucuuaccuggaauauaaggcugcc

SEQ ID NO: 233072 - RNA, 32 nt, Human
ucccaccauugcacuccagccugggcaacaga

SEQ ID NO: 233073 - RNA, 32 nt, Human
ucccaccauuuucucaguuucucccucucucu

SEQ ID NO: 233074 - RNA, 32 nt, Human
ucccacccaaccacaggccccacuugcuaagg

SEQ ID NO: 233075 - RNA, 32 nt, Human
ucccacccacaugugacacauaugcaccuugu

SEQ ID NO: 233076 - RNA, 32 nt, Human
ucccacccaccacccuucccucugaacaaaug

SEQ ID NO: 233077 - RNA, 19 nt, Human
ucccacccacccucccaca

SEQ ID NO: 233078 - RNA, 32 nt, Human
ucccacccaccucuggcugaaggugcucaaga

SEQ ID NO: 233079 - RNA, 32 nt, Human
ucccacccaccugagcgccauguguucccgga

SEQ ID NO: 233080 - RNA, 32 nt, Human
ucccacccagaacgcuucaguucugcucugca

SEQ ID NO: 233081 - RNA, 32 nt, Human
ucccacccagcagaccaggagauagcuggggg

SEQ ID NO: 233082 - RNA, 32 nt, Human
ucccacccauagacuggcugggccaggaggga

SEQ ID NO: 233083 - RNA, 32 nt, Human
ucccacccauagguaguucuuaaaccagguga

SEQ ID NO: 233084 - RNA, 32 nt, Human
ucccacccaucuccaguaggaaauugauuuug

SEQ ID NO: 233085 - RNA, 32 nt, Human
ucccaccccaacuccagcauccucuccagcuc

SEQ ID NO: 233086 - RNA, 20 nt, Human
ucccaccccacaaacaaagg

SEQ ID NO: 233087 - RNA, 32 nt, Human
ucccaccccacaccccucccagaucugcucac

SEQ ID NO: 233088 - RNA, 16 nt, Human
ucccaccccacuucua

SEQ ID NO: 233089 - RNA, 32 nt, Human
ucccaccccagacgucaccacagggaccagaa

SEQ ID NO: 233090 - RNA, 22 nt, Human
ucccaccccagccucccaagua

SEQ ID NO: 233091 - RNA, 22 nt, Human
ucccaccccagccucccaggua

SEQ ID NO: 233092 - RNA, 26 nt, Human
ucccaccccagggggugcccccaggc

SEQ ID NO: 233093 - RNA, 32 nt, Human
ucccaccccauucuggcgacacuuggagccau

SEQ ID NO: 233094 - RNA, 32 nt, Human
ucccacccccaaaccaccgacucucauugccg

SEQ ID NO: 233095 - RNA, 32 nt, Human
ucccacccccaccuuuguucugaggccuuuag

SEQ ID NO: 233096 - RNA, 32 nt, Human
ucccacccccuucucugcuccaccacauccuc

SEQ ID NO: 233097 - RNA, 32 nt, Human
ucccaccccuaaugcugacaaaaagcuuagcc

SEQ ID NO: 233098 - RNA, 32 nt, Human
ucccaccccuaccucuaguaaauuuaagucca

SEQ ID NO: 233099 - RNA, 16 nt, Human
ucccaccccucccucu

SEQ ID NO: 233100 - RNA, 32 nt, Human
ucccaccccucggaguagagcugcacaugcgg

SEQ ID NO: 233101 - RNA, 32 nt, Human
ucccaccccugccccacuuuaccauagagacc

SEQ ID NO: 233102 - RNA, 32 nt, Human
ucccaccccugccuccuccagaccgcugacca

SEQ ID NO: 233103 - RNA, 32 nt, Human
ucccaccccugccuguuccccuucucccggcc

SEQ ID NO: 233104 - RNA, 32 nt, Human
ucccaccccugccuuugcggccccgcacauuu

SEQ ID NO: 233105 - RNA, 26 nt, Human
ucccaccccugcucccuucaucccuc

SEQ ID NO: 233106 - RNA, 22 nt, Human
ucccaccccuggacugggcugg

SEQ ID NO: 233107 - RNA, 32 nt, Human
ucccaccccuucucuaacacuagcuucaaggc

SEQ ID NO: 233108 - RNA, 32 nt, Human
ucccaccccuugcccuuuccccaaaggaccuu

SEQ ID NO: 233109 - RNA, 24 nt, Human
ucccacccgaccuuccucucuguc

SEQ ID NO: 233110 - RNA, 32 nt, Human
ucccacccgcgucucccuaucccuggaggccu

SEQ ID NO: 233111 - RNA, 25 nt, Human
ucccacccgggaucuccaucucucu

SEQ ID NO: 233112 - RNA, 32 nt, Human
ucccacccgggggccuugggccccagacaugc

SEQ ID NO: 233113 - RNA, 32 nt, Human
ucccacccucacugcgggccucugcugucaca

SEQ ID NO: 233114 - RNA, 32 nt, Human
ucccacccuccccuccugacccuccuacgagg

SEQ ID NO: 233115 - RNA, 23 nt, Human
ucccacccucuagacaacucucu

SEQ ID NO: 233116 - RNA, 26 nt, Human
ucccacccucuauguucuuaccccuc

SEQ ID NO: 233117 - RNA, 32 nt, Human
ucccacccugaacaacgagccuuuucacccuu

SEQ ID NO: 233118 - RNA, 32 nt, Human
ucccacccugaaggagcucaugccaggcaggg

SEQ ID NO: 233119 - RNA, 19 nt, Human
ucccacccugcccccuaca

SEQ ID NO: 233120 - RNA, 19 nt, Human
ucccacccuuucuccucaa

SEQ ID NO: 233121 - RNA, 22 nt, Human
ucccacccuuuucucuccuccc

SEQ ID NO: 233122 - RNA, 32 nt, Human
ucccaccgaaugcucccucuaacacacucuua

SEQ ID NO: 233123 - RNA, 32 nt, Human
ucccaccgcacuccagccugggcaacagagug

SEQ ID NO: 233124 - RNA, 32 nt, Human
ucccaccgccuaccuuagcacagggucucugc

SEQ ID NO: 233125 - RNA, 24 nt, Human
ucccaccgcugccucguagaguga

SEQ ID NO: 233126 - RNA, 21 nt, Human
ucccaccguccacaucccucu

SEQ ID NO: 233127 - RNA, 32 nt, Human
ucccaccuauaaucccagcaguuugggaggcu

SEQ ID NO: 233128 - RNA, 32 nt, Human
ucccaccuauucucccugccggugcccaaguu

SEQ ID NO: 233129 - RNA, 32 nt, Human
ucccaccucacacccuucacucuccuuuuucu

SEQ ID NO: 233130 - RNA, 32 nt, Human
ucccaccucacagaggagacggaggccaggag

SEQ ID NO: 233131 - RNA, 18 nt, Human
ucccaccucagccaccca

SEQ ID NO: 233132 - RNA, 18 nt, Human
ucccaccucagccaucca

SEQ ID NO: 233133 - RNA, 22 nt, Human
ucccaccucagccucccaagca

SEQ ID NO: 233134 - RNA, 22 nt, Human
ucccaccucagccucccaagua

SEQ ID NO: 233135 - RNA, 32 nt, Human
ucccaccucagccucuggaguagcugggacca

SEQ ID NO: 233136 - RNA, 19 nt, Human
ucccaccucagcuucucaa

SEQ ID NO: 233137 - RNA, 21 nt, Human
ucccaccucauuccccaccuc

SEQ ID NO: 233138 - RNA, 32 nt, Human
ucccaccucauuccccaccucuaccuuucuaa

SEQ ID NO: 233139 - RNA, 32 nt, Human
ucccaccuccacugucugcugccucugugugu

SEQ ID NO: 233140 - RNA, 32 nt, Human
ucccaccucccagggcuccuugccuuaggugg

SEQ ID NO: 233141 - RNA, 24 nt, Human
ucccaccucccccucccccuucuc

SEQ ID NO: 233142 - RNA, 22 nt, Human
ucccaccuccgcggcccugggc

SEQ ID NO: 233143 - RNA, 23 nt, Human
ucccaccuccugcccaucccucu

SEQ ID NO: 233144 - RNA, 32 nt, Human
ucccaccuccuugagcuccgccacccuucccg

SEQ ID NO: 233145 - RNA, 32 nt, Human
ucccaccucgcugaacaccaucccgccauuag

SEQ ID NO: 233146 - RNA, 19 nt, Human
ucccaccucucccccucca

SEQ ID NO: 233147 - RNA, 32 nt, Human
ucccaccucucuccaccacauacuuacagggc

SEQ ID NO: 233148 - RNA, 21 nt, Human
ucccaccucugccucccgagu

SEQ ID NO: 233149 - RNA, 22 nt, Human
ucccaccucugugaccucaggc

SEQ ID NO: 233150 - RNA, 32 nt, Human
ucccaccucuuccuccuccuagcuccccaagc

SEQ ID NO: 233151 - RNA, 32 nt, Human
ucccaccucuuucccaggcaccugggcccugc

SEQ ID NO: 233152 - RNA, 32 nt, Human
ucccaccugaguccuguucccugaaacuggga

SEQ ID NO: 233153 - RNA, 32 nt, Human
ucccaccugcagcaugcccagcccaagugccc

SEQ ID NO: 233154 - RNA, 32 nt, Human
ucccaccugcagcugcccuggaauucccuucg

SEQ ID NO: 233155 - RNA, 32 nt, Human
ucccaccugccuguccacugcccaugacugag

SEQ ID NO: 233156 - RNA, 32 nt, Human
ucccaccugcuacccugaucagagucaucaug

SEQ ID NO: 233157 - RNA, 32 nt, Human
ucccaccugcugcuacacucaugucugaggca

SEQ ID NO: 233158 - RNA, 23 nt, Human
ucccaccuggacuggcucaguga

SEQ ID NO: 233159 - RNA, 32 nt, Human
ucccaccuggauacccagaagcuaagaaggug

SEQ ID NO: 233160 - RNA, 32 nt, Human
ucccaccuggggaggaaaggaagggcugggaa

SEQ ID NO: 233161 - RNA, 32 nt, Human
ucccaccuguaaucucagcccuucccgaggcu

SEQ ID NO: 233162 - RNA, 32 nt, Human
ucccaccugugcaguguggccccggccagacg

SEQ ID NO: 233163 - RNA, 32 nt, Human
ucccaccuguggcaaaugcuggagccucaguu

SEQ ID NO: 233164 - RNA, 32 nt, Human
ucccaccuucacccucuuccuuccccagccag

SEQ ID NO: 233165 - RNA, 32 nt, Human
ucccaccuucaggcaggauuggguauacaugu

SEQ ID NO: 233166 - RNA, 32 nt, Human
ucccaccuugcauuucagaccugggcuggcag

SEQ ID NO: 233167 - RNA, 32 nt, Human
ucccacgaauaacauuuucauuucuuaaaauu

SEQ ID NO: 233168 - RNA, 32 nt, Human
ucccacgagaucuggagguuuuuguugaaaug

SEQ ID NO: 233169 - RNA, 25 nt, Human
ucccacgaggcucagcucucaggca

SEQ ID NO: 233170 - RNA, 21 nt, Human
ucccacgcccccaccccccac

SEQ ID NO: 233171 - RNA, 32 nt, Human
ucccacgcgccgcgcagccucggugggcgccc

SEQ ID NO: 233172 - RNA, 17 nt, Human
ucccacgcucuccggug

SEQ ID NO: 233173 - RNA, 32 nt, Human
ucccacgcugccccuaguccugggcauggagc

SEQ ID NO: 233174 - RNA, 32 nt, Human
ucccacgcuuccucucucucgaggccacugaa

SEQ ID NO: 233175 - RNA, 32 nt, Human
ucccacgggaacaggcuuccaccccagcacuu

SEQ ID NO: 233176 - RNA, 25 nt, Human
ucccacgggguuccggccucccagg

SEQ ID NO: 233177 - RNA, 32 nt, Human
ucccacgguucccaggggccaggcugggagcc

SEQ ID NO: 233178 - RNA, 32 nt, Human
ucccacguccaggagacaaggaagguagggca

SEQ ID NO: 233179 - RNA, 18 nt, Human
ucccacgucuaacuggaa

SEQ ID NO: 233180 - RNA, 22 nt, Human
ucccacguggacaccagcucca

SEQ ID NO: 233181 - RNA, 20 nt, Human
ucccacguguuccuguugaa

SEQ ID NO: 233182 - RNA, 32 nt, Human
ucccacguguucuuucccaucuggcggccgcg

SEQ ID NO: 233183 - RNA, 32 nt, Human
ucccacuacauacaggucucuuccuguuucau

SEQ ID NO: 233184 - RNA, 32 nt, Human
ucccacuacaucugggacugacuuuccgagcc

SEQ ID NO: 233185 - RNA, 32 nt, Human
ucccacuacugcauuccagccuggguggacag

SEQ ID NO: 233186 - RNA, 32 nt, Human
ucccacuacuuuccuuucccucugcccugcca

SEQ ID NO: 233187 - RNA, 32 nt, Human
ucccacuagccugaagcaaugaccucauucca

SEQ ID NO: 233188 - RNA, 32 nt, Human
ucccacuaucuugcacacaggugcucuaacca

SEQ ID NO: 233189 - RNA, 32 nt, Human
ucccacucacuggaaucuccagccuuccagau

SEQ ID NO: 233190 - RNA, 32 nt, Human
ucccacucagauugcuucaagagaccaacaga

SEQ ID NO: 233191 - RNA, 32 nt, Human
ucccacuccacuccaggcugccggcaccugcc

SEQ ID NO: 233192 - RNA, 16 nt, Human
ucccacuccagcccca

SEQ ID NO: 233193 - RNA, 32 nt, Human
ucccacuccaggccuggaucccuuccuucuau

SEQ ID NO: 233194 - RNA, 32 nt, Human
ucccacucccacaugucugggcaccugcccug

SEQ ID NO: 233195 - RNA, 32 nt, Human
ucccacucccuaauccuggagaccccuucaaa

SEQ ID NO: 233196 - RNA, 24 nt, Human
ucccacucccuuuccccucuuccc

SEQ ID NO: 233197 - RNA, 32 nt, Human
ucccacuccgcccucugaggaugguaccaaga

SEQ ID NO: 233198 - RNA, 32 nt, Human
ucccacuccuaaucaagagucucuccagccuc

SEQ ID NO: 233199 - RNA, 32 nt, Human
ucccacuccucuucagucuuuacacccugcca

SEQ ID NO: 233200 - RNA, 32 nt, Human
ucccacuccuucuccccauuucugucccacag

SEQ ID NO: 233201 - RNA, 32 nt, Human
ucccacuccuuuccugucugugugguguaagu

SEQ ID NO: 233202 - RNA, 32 nt, Human
ucccacucuccacuucccaguuugcaaaugug

SEQ ID NO: 233203 - RNA, 32 nt, Human
ucccacucuccugccccaaucuaucuaguacu

SEQ ID NO: 233204 - RNA, 32 nt, Human
ucccacucucucuccaaauuuccucuucggag

SEQ ID NO: 233205 - RNA, 32 nt, Human
ucccacucuuaucaccucuccccagcaagugc

SEQ ID NO: 233206 - RNA, 32 nt, Human
ucccacucuugccucuuugugcugcuguuucg

SEQ ID NO: 233207 - RNA, 18 nt, Human
ucccacucuuucuucaua

SEQ ID NO: 233208 - RNA, 25 nt, Human
ucccacugaaggaaacucuuucuca

SEQ ID NO: 233209 - RNA, 32 nt, Human
ucccacugagcacaucguggcuaccugacuug

SEQ ID NO: 233210 - RNA, 32 nt, Human
ucccacugaggcggcuccagccccagacaaca

SEQ ID NO: 233211 - RNA, 32 nt, Human
ucccacugagucucauuccucuguccccgagc

SEQ ID NO: 233212 - RNA, 32 nt, Human
ucccacugauaggagguguugggugguguuau

SEQ ID NO: 233213 - RNA, 32 nt, Human
ucccacugcaacuuuucagcucagggguuguu

SEQ ID NO: 233214 - RNA, 32 nt, Human
ucccacugcacacucccacuuccucagcgacc

SEQ ID NO: 233215 - RNA, 32 nt, Human
ucccacugcacuccagccugagugacagagcg

SEQ ID NO: 233216 - RNA, 32 nt, Human
ucccacugcacuccagccuggccaauaagacc

SEQ ID NO: 233217 - RNA, 32 nt, Human
ucccacugcacuccagccugggcaacagagug

SEQ ID NO: 233218 - RNA, 32 nt, Human
ucccacugcacuccagccugggcgacagagcc

SEQ ID NO: 233219 - RNA, 32 nt, Human
ucccacugcacuccccaguggcuggcguggcu

SEQ ID NO: 233220 - RNA, 32 nt, Human
ucccacugcagaagggccucuugagugcgaug

SEQ ID NO: 233221 - RNA, 32 nt, Human
ucccacugcagagaugacauccccucuucucc

SEQ ID NO: 233222 - RNA, 32 nt, Human
ucccacugcagccucugccugcucugccgccg

SEQ ID NO: 233223 - RNA, 32 nt, Human
ucccacugcauauuuccaucuugaauuggugg

SEQ ID NO: 233224 - RNA, 32 nt, Human
ucccacugcauuccagccugggcaacagcgug

SEQ ID NO: 233225 - RNA, 21 nt, Human
ucccacugccagucugucuuc

SEQ ID NO: 233226 - RNA, 22 nt, Human
ucccacugcccaccccaucaca

SEQ ID NO: 233227 - RNA, 32 nt, Human
ucccacugcccucagccccacuucucagccug

SEQ ID NO: 233228 - RNA, 32 nt, Human
ucccacugcucaccuuggucucucuuccuucu

SEQ ID NO: 233229 - RNA, 32 nt, Human
ucccacugcugcacuuuagccugggugaaaaa

SEQ ID NO: 233230 - RNA, 32 nt, Human
ucccacugcuucuuccuccuuucucaaccauc

SEQ ID NO: 233231 - RNA, 19 nt, Human
ucccacuggaaggaccaga

SEQ ID NO: 233232 - RNA, 32 nt, Human
ucccacuggcacugcacgaggggccaggagag

SEQ ID NO: 233233 - RNA, 32 nt, Human
ucccacuggccucuguacauuucccugugguu

SEQ ID NO: 233234 - RNA, 32 nt, Human
ucccacuggcgaagauggucuccauaucagcu

SEQ ID NO: 233235 - RNA, 32 nt, Human
ucccacuggcucugcugaccuugugccuugga

SEQ ID NO: 233236 - RNA, 32 nt, Human
ucccacugggaagcuucaacauagcuguggaa

SEQ ID NO: 233237 - RNA, 32 nt, Human
ucccacugggagggcggcgggccugcagcccg

SEQ ID NO: 233238 - RNA, 18 nt, Human
ucccacuggggacuguga

SEQ ID NO: 233239 - RNA, 32 nt, Human
ucccacugggguccagggagcaggcggugggc

SEQ ID NO: 233240 - RNA, 32 nt, Human
ucccacugucucucuccuucucuccaguuuug

SEQ ID NO: 233241 - RNA, 31 nt, Human
ucccacuuacucaaggaggugggggcaggga

SEQ ID NO: 233242 - RNA, 32 nt, Human
ucccacuucagaggaggcagaaauggaagcau

SEQ ID NO: 233243 - RNA, 22 nt, Human
ucccacuucagccucccaagca

SEQ ID NO: 233244 - RNA, 32 nt, Human
ucccacuucagugcuguccuccugggcgugug

SEQ ID NO: 233245 - RNA, 32 nt, Human
ucccacuucauaaagcuuuuacccaaucuuau

SEQ ID NO: 233246 - RNA, 32 nt, Human
ucccacuucauuuuaaagccagucccagcagg

SEQ ID NO: 233247 - RNA, 32 nt, Human
ucccacuuccccucucugauuggggguguaua

SEQ ID NO: 233248 - RNA, 16 nt, Human
ucccacuucccugaca

SEQ ID NO: 233249 - RNA, 32 nt, Human
ucccacuuccucagccccaucugucccuccau

SEQ ID NO: 233250 - RNA, 32 nt, Human
ucccacuuccuguuuccaucugcuugggauau

SEQ ID NO: 233251 - RNA, 32 nt, Human
ucccacuuccuucagggauucucccuaaauuu

SEQ ID NO: 233252 - RNA, 32 nt, Human
ucccacuucucaucuuaaaaauauugucaugu

SEQ ID NO: 233253 - RNA, 32 nt, Human
ucccacuugagguugaggcguacuggagacaa

SEQ ID NO: 233254 - RNA, 32 nt, Human
ucccacuugcaaucccagcuauuugggaggcu

SEQ ID NO: 233255 - RNA, 32 nt, Human
ucccacuugcccacucuccuuccuggaguguu

SEQ ID NO: 233256 - RNA, 16 nt, Human
ucccacuuguccucca

SEQ ID NO: 233257 - RNA, 22 nt, Human
ucccacuuuagccucccaagua

SEQ ID NO: 233258 - RNA, 32 nt, Human
ucccacuuuguccaggaggagccugaggccca

SEQ ID NO: 233259 - RNA, 19 nt, Human
ucccagaaaaagccagagg

SEQ ID NO: 233260 - RNA, 30 nt, Human
ucccagaaaauguaaagaauggauaccagc

SEQ ID NO: 233261 - RNA, 32 nt, Human
ucccagaaaccaaaggcucuuuucagagccac

SEQ ID NO: 233262 - RNA, 32 nt, Human
ucccagaaaccaguccuauaucuggccagagg

SEQ ID NO: 233263 - RNA, 32 nt, Human
ucccagaaagggucugccauggaguuggcagu

SEQ ID NO: 233264 - RNA, 18 nt, Human
ucccagaaaugucaugag

SEQ ID NO: 233265 - RNA, 32 nt, Human
ucccagaaauuggcuuagcaugugaguguugc

SEQ ID NO: 233266 - RNA, 24 nt, Human
ucccagaacaugacaaauuaugaa

SEQ ID NO: 233267 - RNA, 22 nt, Human
ucccagaacccagccaugcugg

SEQ ID NO: 233268 - RNA, 24 nt, Human
ucccagaacccagccaugcuggca

SEQ ID NO: 233269 - RNA, 32 nt, Human
ucccagaacccagcgcgcucugugcuggcggg

SEQ ID NO: 233270 - RNA, 32 nt, Human
ucccagaacccccuuccucugcuccuccauga

SEQ ID NO: 233271 - RNA, 19 nt, Human
ucccagaaccccguugggg

SEQ ID NO: 233272 - RNA, 22 nt, Human
ucccagaacccucucuccaagg

SEQ ID NO: 233273 - RNA, 21 nt, Human
ucccagaaccuccucacuagg

SEQ ID NO: 233274 - RNA, 19 nt, Human
ucccagaaccugccacagg

SEQ ID NO: 233275 - RNA, 19 nt, Human
ucccagaaccuugaugggg

SEQ ID NO: 233276 - RNA, 21 nt, Human
ucccagaacugacuccuaagg

SEQ ID NO: 233277 - RNA, 32 nt, Human
ucccagaacugacuccuaaggucuccagccag

SEQ ID NO: 233278 - RNA, 19 nt, Human
ucccagaagaagccagagg

SEQ ID NO: 233279 - RNA, 22 nt, Human
ucccagaagagaaccuaugagg

SEQ ID NO: 233280 - RNA, 32 nt, Human
ucccagaagagagaaauaaaaguccuaaauaa

SEQ ID NO: 233281 - RNA, 32 nt, Human
ucccagaagauaaccucuccuccugggccacc

SEQ ID NO: 233282 - RNA, 32 nt, Human
ucccagaagauggaaugggggugugggggucc

SEQ ID NO: 233283 - RNA, 32 nt, Human
ucccagaagcagcucuggugcugaagagagca

SEQ ID NO: 233284 - RNA, 32 nt, Human
ucccagaagcuccgugagccucagccaccccu

SEQ ID NO: 233285 - RNA, 32 nt, Human
ucccagaagcuccugccccucugacagcuguc

SEQ ID NO: 233286 - RNA, 21 nt, Human
ucccagaagcuguaucaugag

SEQ ID NO: 233287 - RNA, 32 nt, Human
ucccagaagguaacguuaauguuuucagucau

SEQ ID NO: 233288 - RNA, 21 nt, Human
ucccagaagguaccccugagg

SEQ ID NO: 233289 - RNA, 18 nt, Human
ucccagaagucucccgag

SEQ ID NO: 233290 - RNA, 32 nt, Human
ucccagaagugcuaggauuacaaacgugagcc

SEQ ID NO: 233291 - RNA, 32 nt, Human
ucccagaaugguagaaaccaggcugugcauaa

SEQ ID NO: 233292 - RNA, 32 nt, Human
ucccagaaugguuugggguaucacacaaaaca

SEQ ID NO: 233293 - RNA, 32 nt, Human
ucccagacaaaaacaaaagcugagggauuuca

SEQ ID NO: 233294 - RNA, 32 nt, Human
ucccagacagccaggcccaucugcugcccagg

SEQ ID NO: 233295 - RNA, 32 nt, Human
ucccagacaggucccugaguacugacggucac

SEQ ID NO: 233296 - RNA, 32 nt, Human
ucccagacccaagugauccucccaccucagcc

SEQ ID NO: 233297 - RNA, 32 nt, Human
ucccagaccugggcaggagcugugcugggaga

SEQ ID NO: 233298 - RNA, 19 nt, Human
ucccagaccugucaugagg

SEQ ID NO: 233299 - RNA, 32 nt, Human
ucccagacgggccuggugaauuggcuggccag

SEQ ID NO: 233300 - RNA, 32 nt, Human
ucccagacuacuuauggagaauugcaguuuaa

SEQ ID NO: 233301 - RNA, 32 nt, Human
ucccagacuagaccaaauagccagaaaaauga

SEQ ID NO: 233302 - RNA, 32 nt, Human
ucccagacucaagugauccucuugccucagcc

SEQ ID NO: 233303 - RNA, 32 nt, Human
ucccagacucaagugauccuuccaccucagcc

SEQ ID NO: 233304 - RNA, 32 nt, Human
ucccagacuccaaagcccugguccuuuccuga

SEQ ID NO: 233305 - RNA, 32 nt, Human
ucccagacucucuguccccaccccagaccagg

SEQ ID NO: 233306 - RNA, 32 nt, Human
ucccagacugaguccucuccccaaaucagggc

SEQ ID NO: 233307 - RNA, 32 nt, Human
ucccagacugccuccuugcccaugccucucuc

SEQ ID NO: 233308 - RNA, 19 nt, Human
ucccagagaaaaugaugaa

SEQ ID NO: 233309 - RNA, 19 nt, Human
ucccagagaaccuuaugga

SEQ ID NO: 233310 - RNA, 20 nt, Human
ucccagagaagccaggugaa

SEQ ID NO: 233311 - RNA, 32 nt, Human
ucccagagacaagaagcccaaccuucuggccu

SEQ ID NO: 233312 - RNA, 19 nt, Human
ucccagagacggccaccca

SEQ ID NO: 233313 - RNA, 32 nt, Human
ucccagagagacauagcuggaaaauuccuauu

SEQ ID NO: 233314 - RNA, 32 nt, Human
ucccagagagccccagagcucucaagcuccuu

SEQ ID NO: 233315 - RNA, 32 nt, Human
ucccagagagugaagaacaggagcaugaagag

SEQ ID NO: 233316 - RNA, 32 nt, Human
ucccagagagugcucuuucuucauacuuccuu

SEQ ID NO: 233317 - RNA, 32 nt, Human
ucccagagaugccaccacuugugucuccacaa

SEQ ID NO: 233318 - RNA, 32 nt, Human
ucccagagcagcuucagggagaguguggggcc

SEQ ID NO: 233319 - RNA, 32 nt, Human
ucccagagcaucucacccccacccucauguuc

SEQ ID NO: 233320 - RNA, 32 nt, Human
ucccagagcgcccagcccugggaaccugcuga

SEQ ID NO: 233321 - RNA, 32 nt, Human
ucccagagcuaaauaguuuagcugcuucaacu

SEQ ID NO: 233322 - RNA, 32 nt, Human
ucccagagcucccuccuuauggcagcagcuuc

SEQ ID NO: 233323 - RNA, 32 nt, Human
ucccagagcugagcuccuccagcgggaugacg

SEQ ID NO: 233324 - RNA, 19 nt, Human
ucccagagcugggcagugu

SEQ ID NO: 233325 - RNA, 31 nt, Human
ucccagagcugucagcaccggccucagccca

SEQ ID NO: 233326 - RNA, 19 nt, Human
ucccagaggcacccagagg

SEQ ID NO: 233327 - RNA, 32 nt, Human
ucccagaggccaccccucccaccccagacauc

SEQ ID NO: 233328 - RNA, 32 nt, Human
ucccagaggcccguggaggagcccaccagccc

SEQ ID NO: 233329 - RNA, 17 nt, Human
ucccagaggcucugagc

SEQ ID NO: 233330 - RNA, 32 nt, Human
ucccagaggcuuccaggagcacgagggccuug

SEQ ID NO: 233331 - RNA, 25 nt, Human
ucccagagggagaagauccaugagg

SEQ ID NO: 233332 - RNA, 32 nt, Human
ucccagagggccuggaguggcugaucuacacu

SEQ ID NO: 233333 - RNA, 17 nt, Human
ucccagaggggccucau

SEQ ID NO: 233334 - RNA, 21 nt, Human
ucccagaggguuuccaugggg

SEQ ID NO: 233335 - RNA, 32 nt, Human
ucccagaggucgaggcugcagugagcugugau

SEQ ID NO: 233336 - RNA, 32 nt, Human
ucccagaggugaggcaggaggcggcaguuucu

SEQ ID NO: 233337 - RNA, 32 nt, Human
ucccagagugagcuuggcagggccaggcgggg

SEQ ID NO: 233338 - RNA, 32 nt, Human
ucccagagugcuaggauuacaggccuuuugac

SEQ ID NO: 233339 - RNA, 32 nt, Human
ucccagagugcugagauuuacaggcgugagcc

SEQ ID NO: 233340 - RNA, 32 nt, Human
ucccagagugcugggauuuacaggcaugagcc

SEQ ID NO: 233341 - RNA, 21 nt, Human
ucccagaguggcccagugagg

SEQ ID NO: 233342 - RNA, 22 nt, Human
ucccagauaaggcaaugugcug

SEQ ID NO: 233343 - RNA, 32 nt, Human
ucccagauagcaccuacccaacccaggaugaa

SEQ ID NO: 233344 - RNA, 32 nt, Human
ucccagaucugagcauucuaggccuguuucac

SEQ ID NO: 233345 - RNA, 32 nt, Human
ucccagaucuuucuaacccaggaccuacuugg

SEQ ID NO: 233346 - RNA, 32 nt, Human
ucccagaugaagccuaugggagucaggacccu

SEQ ID NO: 233347 - RNA, 32 nt, Human
ucccagaugcuggggagaaugaagagcuaaaa

SEQ ID NO: 233348 - RNA, 32 nt, Human
ucccagaugggccuuggucacacuccuuggcu

SEQ ID NO: 233349 - RNA, 32 nt, Human
ucccagauguggggaagaggccagcagccuag

SEQ ID NO: 233350 - RNA, 32 nt, Human
ucccagauucaagcaacucucugccucagccu

SEQ ID NO: 233351 - RNA, 32 nt, Human
ucccagauucacgccauucuccugccucagcc

SEQ ID NO: 233352 - RNA, 32 nt, Human
ucccagauucgcugcuggagugcuggauggag

SEQ ID NO: 233353 - RNA, 32 nt, Human
ucccagcaaagaaaaagaaaaagauacgcuug

SEQ ID NO: 233354 - RNA, 21 nt, Human
ucccagcaaaucaucgggcca

SEQ ID NO: 233355 - RNA, 32 nt, Human
ucccagcaaaugccaagugcucugccugccuu

SEQ ID NO: 233356 - RNA, 32 nt, Human
ucccagcaacgcacccucagcagacccacggg

SEQ ID NO: 233357 - RNA, 32 nt, Human
ucccagcaaggccgugccaucuucccaccucc

SEQ ID NO: 233358 - RNA, 21 nt, Human
ucccagcaagguagggugcug

SEQ ID NO: 233359 - RNA, 32 nt, Human
ucccagcacaccuggaaaguucugcaaggccu

SEQ ID NO: 233360 - RNA, 32 nt, Human
ucccagcacacgugugcacgcaaggcagccuu

SEQ ID NO: 233361 - RNA, 32 nt, Human
ucccagcacagcccuuguuggagggcgcaccc

SEQ ID NO: 233362 - RNA, 32 nt, Human
ucccagcacaucucucucaaucuuugauuaag

SEQ ID NO: 233363 - RNA, 32 nt, Human
ucccagcacccacucuuggagcagcucuccag

SEQ ID NO: 233364 - RNA, 32 nt, Human
ucccagcacccgccccuuccucaccucuuccu

SEQ ID NO: 233365 - RNA, 32 nt, Human
ucccagcaccuugcagacuugggcccaucaag

SEQ ID NO: 233366 - RNA, 32 nt, Human
ucccagcacugagaggaggguagugacggauu

SEQ ID NO: 233367 - RNA, 32 nt, Human
ucccagcacugaguucugcccgggagaagccg

SEQ ID NO: 233368 - RNA, 32 nt, Human
ucccagcacugcaccccaggcagccacuccua

SEQ ID NO: 233369 - RNA, 32 nt, Human
ucccagcacugucuccuuccucccacuggcau

SEQ ID NO: 233370 - RNA, 32 nt, Human
ucccagcacuguggaaggccuaggcaggagga

SEQ ID NO: 233371 - RNA, 32 nt, Human
ucccagcacuguuucaggcaagaacuuucccu

SEQ ID NO: 233372 - RNA, 18 nt, Human
ucccagcacuuaugggag

SEQ ID NO: 233373 - RNA, 32 nt, Human
ucccagcacuuugggagccccaggugggcaga

SEQ ID NO: 233374 - RNA, 32 nt, Human
ucccagcacuuugggagcccgaggugggcaga

SEQ ID NO: 233375 - RNA, 32 nt, Human
ucccagcagacacccuguguccuccuucagcu

SEQ ID NO: 233376 - RNA, 32 nt, Human
ucccagcagaucuccaggguucuaggaaaggg

SEQ ID NO: 233377 - RNA, 32 nt, Human
ucccagcagcaggaguuaggggccugcgcuug

SEQ ID NO: 233378 - RNA, 32 nt, Human
ucccagcagccccaggcauagcaucccuucuc

SEQ ID NO: 233379 - RNA, 32 nt, Human
ucccagcagccggaacacagacaggagagagu

SEQ ID NO: 233380 - RNA, 24 nt, Human
ucccagcagccggagcccugcagg

SEQ ID NO: 233381 - RNA, 32 nt, Human
ucccagcagcuguaauguacaguuccuucuga

SEQ ID NO: 233382 - RNA, 32 nt, Human
ucccagcaguuuuccauuucuccacaguaucc

SEQ ID NO: 233383 - RNA, 32 nt, Human
ucccagcauacuuugugaaccuggcuccuucu

SEQ ID NO: 233384 - RNA, 32 nt, Human
ucccagccaaaugucugugcucucugugucac

SEQ ID NO: 233385 - RNA, 21 nt, Human
ucccagccaagaucugucuuc

SEQ ID NO: 233386 - RNA, 31 nt, Human
ucccagccacagccaggcaggagggagaagc

SEQ ID NO: 233387 - RNA, 32 nt, Human
ucccagccacugcccuugcuggaggaccgcug

SEQ ID NO: 233388 - RNA, 18 nt, Human
ucccagccagacugagaa

SEQ ID NO: 233389 - RNA, 32 nt, Human
ucccagccagcgagucaggagcaggggagaca

SEQ ID NO: 233390 - RNA, 19 nt, Human
ucccagccagcugguucua

SEQ ID NO: 233391 - RNA, 20 nt, Human
ucccagccaggcuggcuggg

SEQ ID NO: 233392 - RNA, 21 nt, Human
ucccagccauuuaucuucuuu

SEQ ID NO: 233393 - RNA, 32 nt, Human
ucccagcccaggagaacuaagagcuuccuaaa

SEQ ID NO: 233394 - RNA, 28 nt, Human
ucccagcccccugcugccuucucuaugc

SEQ ID NO: 233395 - RNA, 21 nt, Human
ucccagccccggagccucaua

SEQ ID NO: 233396 - RNA, 32 nt, Human
ucccagccccuggaaaggggcaggaacgacaa

SEQ ID NO: 233397 - RNA, 32 nt, Human
ucccagccccuggguccguggagggguugggu

SEQ ID NO: 233398 - RNA, 32 nt, Human
ucccagcccugaggcccaccccagaggcugga

SEQ ID NO: 233399 - RNA, 32 nt, Human
ucccagcccugagggguggacuaggcccuaca

SEQ ID NO: 233400 - RNA, 20 nt, Human
ucccagcccugcccagagua

SEQ ID NO: 233401 - RNA, 32 nt, Human
ucccagcccugcccggcugcucugcuuccggu

SEQ ID NO: 233402 - RNA, 32 nt, Human
ucccagcccuggagccuggagggagaccaccc

SEQ ID NO: 233403 - RNA, 21 nt, Human
ucccagcccuggccucaucac

SEQ ID NO: 233404 - RNA, 32 nt, Human
ucccagcccuggggccugcugacugcccaguc

SEQ ID NO: 233405 - RNA, 32 nt, Human
ucccagcccuggggcuaccugaucugacaaag

SEQ ID NO: 233406 - RNA, 32 nt, Human
ucccagcccugggucugcuccccacaucucuc

SEQ ID NO: 233407 - RNA, 32 nt, Human
ucccagcccuugcaguccgcuaggugagagga

SEQ ID NO: 233408 - RNA, 32 nt, Human
ucccagcccuugcccagccugggggagugggg

SEQ ID NO: 233409 - RNA, 32 nt, Human
ucccagcccuuugaccuggaaguaaguuagcg

SEQ ID NO: 233410 - RNA, 32 nt, Human
ucccagccgccaggcaguuuuacagggcucug

SEQ ID NO: 233411 - RNA, 32 nt, Human
ucccagccuagacugcuuaccccauagccaca

SEQ ID NO: 233412 - RNA, 32 nt, Human
ucccagccucacaauacuucugacccuucccc

SEQ ID NO: 233413 - RNA, 32 nt, Human
ucccagccuccagaacugagaaaugauuucug

SEQ ID NO: 233414 - RNA, 21 nt, Human
ucccagccuggaaugcagugg

SEQ ID NO: 233415 - RNA, 25 nt, Human
ucccagccugggagacagagugaga

SEQ ID NO: 233416 - RNA, 32 nt, Human
ucccagccuggggcucccucucugguuuccua

SEQ ID NO: 233417 - RNA, 32 nt, Human
ucccagccuuucuucucucuuugugugcuccc

SEQ ID NO: 233418 - RNA, 32 nt, Human
ucccagccuuucuuucuucagggagccauucu

SEQ ID NO: 233419 - RNA, 32 nt, Human
ucccagccuuugaggccgggugcaguggcuca

SEQ ID NO: 233420 - RNA, 32 nt, Human
ucccagcgauuugggagguugagcugguagga

SEQ ID NO: 233421 - RNA, 32 nt, Human
ucccagcgugaggaaaaugaagaaaggguguc

SEQ ID NO: 233422 - RNA, 32 nt, Human
ucccagcuacucaagagguugcagugagcuga

SEQ ID NO: 233423 - RNA, 31 nt, Human
ucccagcuacucaaggcugaggcaggagaau

SEQ ID NO: 233424 - RNA, 32 nt, Human
ucccagcuacucaggagguugaggugggaaga

SEQ ID NO: 233425 - RNA, 32 nt, Human
ucccagcuacucaggagguugaggugggagga

SEQ ID NO: 233426 - RNA, 32 nt, Human
ucccagcuacucgggagguugaggcaggagaa

SEQ ID NO: 233427 - RNA, 32 nt, Human
ucccagcuacucgggagguugagggaggagaa

SEQ ID NO: 233428 - RNA, 32 nt, Human
ucccagcuauauuucuccagacuugcauuuuu

SEQ ID NO: 233429 - RNA, 32 nt, Human
ucccagcuaugcagcacuagcagguguuuugu

SEQ ID NO: 233430 - RNA, 32 nt, Human
ucccagcucacccucaccccagccucuucccc

SEQ ID NO: 233431 - RNA, 32 nt, Human
ucccagcucacugcaaccuccgccuccugggu

SEQ ID NO: 233432 - RNA, 32 nt, Human
ucccagcucacugcaacuuccgccccgccagg

SEQ ID NO: 233433 - RNA, 32 nt, Human
ucccagcucacugcagccucgaccucccuggc

SEQ ID NO: 233434 - RNA, 32 nt, Human
ucccagcucaggcucucugccuuccagaggcc

SEQ ID NO: 233435 - RNA, 32 nt, Human
ucccagcucauuacagccuccaccucccaguu

SEQ ID NO: 233436 - RNA, 32 nt, Human
ucccagcuccacagggaguaagaaggagcugc

SEQ ID NO: 233437 - RNA, 20 nt, Human
ucccagcuccacccccucca

SEQ ID NO: 233438 - RNA, 32 nt, Human
ucccagcuccacccccuccacagugaugcaga

SEQ ID NO: 233439 - RNA, 32 nt, Human
ucccagcuccagagccccuuguggggucagug

SEQ ID NO: 233440 - RNA, 32 nt, Human
ucccagcucccaauccugucucaggucaaugc

SEQ ID NO: 233441 - RNA, 32 nt, Human
ucccagcucccaggacccccaggccggcagcg

SEQ ID NO: 233442 - RNA, 32 nt, Human
ucccagcucccaggcacucguggggccaccgc

SEQ ID NO: 233443 - RNA, 32 nt, Human
ucccagcuccccaaccugggagaugguucuua

SEQ ID NO: 233444 - RNA, 32 nt, Human
ucccagcucgcugcagccuccaccucccggac

SEQ ID NO: 233445 - RNA, 32 nt, Human
ucccagcucuauucuaccgucuuauggccucu

SEQ ID NO: 233446 - RNA, 32 nt, Human
ucccagcucuccuguuggcuucgugcuugggg

SEQ ID NO: 233447 - RNA, 32 nt, Human
ucccagcucugccuccugcccgccugcucucu

SEQ ID NO: 233448 - RNA, 32 nt, Human
ucccagcucugccucugacucgcuguguaccc

SEQ ID NO: 233449 - RNA, 32 nt, Human
ucccagcucugccuuugaagcacuuguggcca

SEQ ID NO: 233450 - RNA, 32 nt, Human
ucccagcucuguccugagagggcccacagccc

SEQ ID NO: 233451 - RNA, 32 nt, Human
ucccagcucuuuaggggagguggauuugaggc

SEQ ID NO: 233452 - RNA, 32 nt, Human
ucccagcugaaacucagcgggcuggucaggcc

SEQ ID NO: 233453 - RNA, 32 nt, Human
ucccagcugaaacucggaaggcuggucaggcc

SEQ ID NO: 233454 - RNA, 32 nt, Human
ucccagcugacggcaguaaauccacagugagu

SEQ ID NO: 233455 - RNA, 32 nt, Human
ucccagcugacucgcucacugccuucgaaguc

SEQ ID NO: 233456 - RNA, 32 nt, Human
ucccagcugauucuuuuucccuccagcauccu

SEQ ID NO: 233457 - RNA, 19 nt, Human
ucccagcugcagccuaggc

SEQ ID NO: 233458 - RNA, 32 nt, Human
ucccagcugccucuugccuugauaguggugcu

SEQ ID NO: 233459 - RNA, 32 nt, Human
ucccagcugccuggccagcccacccuccugca

SEQ ID NO: 233460 - RNA, 32 nt, Human
ucccagcuggagucauggagccucccaaacau

SEQ ID NO: 233461 - RNA, 32 nt, Human
ucccagcugggcuggacuguugccaacaucac

SEQ ID NO: 233462 - RNA, 32 nt, Human
ucccagcuggggaaggugcagggggccuggga

SEQ ID NO: 233463 - RNA, 32 nt, Human
ucccagcugugaggcugccaucaacacccaca

SEQ ID NO: 233464 - RNA, 32 nt, Human
ucccagcuuucccagccccagcguuuuggguc

SEQ ID NO: 233465 - RNA, 32 nt, Human
ucccagcuuuggugagaaaacuaaucuugaac

SEQ ID NO: 233466 - RNA, 32 nt, Human
ucccaggaaacacacuuggaaauaagucagcu

SEQ ID NO: 233467 - RNA, 32 nt, Human
ucccaggaaauccuacaacuucuccuuuccuu

SEQ ID NO: 233468 - RNA, 32 nt, Human
ucccaggaagcagaacucuccagaagaagggu

SEQ ID NO: 233469 - RNA, 32 nt, Human
ucccaggaagcagacaacacaggccugcgugc

SEQ ID NO: 233470 - RNA, 32 nt, Human
ucccaggaagcggacaacacagcccugcgugc

SEQ ID NO: 233471 - RNA, 32 nt, Human
ucccaggaagcggacaacacaggccugcgugc

SEQ ID NO: 233472 - RNA, 32 nt, Human
ucccaggaagcggacaacacaggccugcgugu

SEQ ID NO: 233473 - RNA, 32 nt, Human
ucccaggaagcggacaacacaggccugugugc

SEQ ID NO: 233474 - RNA, 32 nt, Human
ucccaggaauuggaauucagcaccuguuccgc

SEQ ID NO: 233475 - RNA, 32 nt, Human
ucccaggaauuugagguugcaguaagcuauga

SEQ ID NO: 233476 - RNA, 20 nt, Human
ucccaggacacccucccaca

SEQ ID NO: 233477 - RNA, 32 nt, Human
ucccaggacacugccucuucugggcagaaggc

SEQ ID NO: 233478 - RNA, 32 nt, Human
ucccaggaccugagccuggccauguccucaac

SEQ ID NO: 233479 - RNA, 32 nt, Human
ucccaggaccugcagcacagugguguacaccu

SEQ ID NO: 233480 - RNA, 32 nt, Human
ucccaggacuccaaacagggaucugucucuuu

SEQ ID NO: 233481 - RNA, 32 nt, Human
ucccaggagacagagguugcagugagccgaga

SEQ ID NO: 233482 - RNA, 32 nt, Human
ucccaggagagggaagaugggagccagggcaa

SEQ ID NO: 233483 - RNA, 32 nt, Human
ucccaggagaggggcauuucuagagcagugac

SEQ ID NO: 233484 - RNA, 32 nt, Human
ucccaggagccuccagaaggaaccuugguguu

SEQ ID NO: 233485 - RNA, 32 nt, Human
ucccaggagccugcccagcccccuggucuuug

SEQ ID NO: 233486 - RNA, 32 nt, Human
ucccaggagcuuccacucucagaccuugccuc

SEQ ID NO: 233487 - RNA, 23 nt, Human
ucccaggaggacaggaugagcca

SEQ ID NO: 233488 - RNA, 20 nt, Human
ucccaggaggcagaagcucc

SEQ ID NO: 233489 - RNA, 32 nt, Human
ucccaggaggccugugcacacaucccaggcau

SEQ ID NO: 233490 - RNA, 32 nt, Human
ucccaggaggcggagguugcagugaguugcag

SEQ ID NO: 233491 - RNA, 32 nt, Human
ucccaggaggcugaggcugcuguaucacucac

SEQ ID NO: 233492 - RNA, 32 nt, Human
ucccaggaggugcaguggagggggcaagcuuu

SEQ ID NO: 233493 - RNA, 32 nt, Human
ucccaggagucagaucauaaggcuccaugcac

SEQ ID NO: 233494 - RNA, 32 nt, Human
ucccaggauacuguuuguaaauaaucugcugu

SEQ ID NO: 233495 - RNA, 32 nt, Human
ucccaggaucaagugauucuccugccucagcc

SEQ ID NO: 233496 - RNA, 32 nt, Human
ucccaggaucugccaagaguccagguuuuuag

SEQ ID NO: 233497 - RNA, 16 nt, Human
ucccaggauggcuguu

SEQ ID NO: 233498 - RNA, 16 nt, Human
ucccaggauggguguc

SEQ ID NO: 233499 - RNA, 24 nt, Human
ucccaggauuacaggcaugagcca

SEQ ID NO: 233500 - RNA, 32 nt, Human
ucccaggcaagccuggcuguaguagcgaguga

SEQ ID NO: 233501 - RNA, 32 nt, Human
ucccaggcacacacaggugggacacaaauaag

SEQ ID NO: 233502 - RNA, 32 nt, Human
ucccaggcaccaacagcacagagcaggccagu

SEQ ID NO: 233503 - RNA, 20 nt, Human
ucccaggcagaaaaacggga

SEQ ID NO: 233504 - RNA, 32 nt, Human
ucccaggcauacacuuccacugccuucagcug

SEQ ID NO: 233505 - RNA, 32 nt, Human
ucccaggcaugcuggagggacuuggggacauu

SEQ ID NO: 233506 - RNA, 32 nt, Human
ucccaggccacaggagcuuauuggccaggagg

SEQ ID NO: 233507 - RNA, 32 nt, Human
ucccaggccacugggugcucucugcagugugc

SEQ ID NO: 233508 - RNA, 32 nt, Human
ucccaggccccgcuuuugacuuuuggcagccu

SEQ ID NO: 233509 - RNA, 32 nt, Human
ucccaggccccgcuuuugacuuuuggcggccu

SEQ ID NO: 233510 - RNA, 32 nt, Human
ucccaggcccgagaggaugaaggcgggauuac

SEQ ID NO: 233511 - RNA, 32 nt, Human
ucccaggcccuaggggucacauuugcucagga

SEQ ID NO: 233512 - RNA, 32 nt, Human
ucccaggcccucucaggauugcagaacaacac

SEQ ID NO: 233513 - RNA, 32 nt, Human
ucccaggcccugggggugagggggaggggacu

SEQ ID NO: 233514 - RNA, 22 nt, Human
ucccaggccgacuggccuuggg

SEQ ID NO: 233515 - RNA, 32 nt, Human
ucccaggccgcauggccccuccaggaacauuc

SEQ ID NO: 233516 - RNA, 21 nt, Human
ucccaggccggagugcagugg

SEQ ID NO: 233517 - RNA, 32 nt, Human
ucccaggccugggcgugguggaggaaggggug

SEQ ID NO: 233518 - RNA, 32 nt, Human
ucccaggccuguguagugucucuccccugcug

SEQ ID NO: 233519 - RNA, 32 nt, Human
ucccaggccuuggucuugguccugggccugga

SEQ ID NO: 233520 - RNA, 32 nt, Human
ucccaggcgaugacaagucugaacccacgaaa

SEQ ID NO: 233521 - RNA, 22 nt, Human
ucccaggcuacacccgcccaca

SEQ ID NO: 233522 - RNA, 21 nt, Human
ucccaggcuagagugcaaugg

SEQ ID NO: 233523 - RNA, 21 nt, Human
ucccaggcuagagugcagugg

SEQ ID NO: 233524 - RNA, 21 nt, Human
ucccaggcuaggaggaagcug

SEQ ID NO: 233525 - RNA, 32 nt, Human
ucccaggcucaagaaauccucccaccucagcc

SEQ ID NO: 233526 - RNA, 32 nt, Human
ucccaggcucaagcaauccuugugccucagcc

SEQ ID NO: 233527 - RNA, 32 nt, Human
ucccaggcucaagcaauucuccuaccucagcc

SEQ ID NO: 233528 - RNA, 32 nt, Human
ucccaggcucaagcaauucuccugccucaacc

SEQ ID NO: 233529 - RNA, 32 nt, Human
ucccaggcucaagcaauucuccugccucagcc

SEQ ID NO: 233530 - RNA, 32 nt, Human
ucccaggcucaagcaauucuuacgccucagcc

SEQ ID NO: 233531 - RNA, 32 nt, Human
ucccaggcucaagcacuuuuccugucucagcc

SEQ ID NO: 233532 - RNA, 32 nt, Human
ucccaggcucaagccaucuuuccaccucagcc

SEQ ID NO: 233533 - RNA, 32 nt, Human
ucccaggcucaagcgauccucccaccucagcu

SEQ ID NO: 233534 - RNA, 32 nt, Human
ucccaggcucaagcgauccucccagcucagcc

SEQ ID NO: 233535 - RNA, 32 nt, Human
ucccaggcucaagcgauccucccgccuuaacu

SEQ ID NO: 233536 - RNA, 32 nt, Human
ucccaggcucaagcgauccuccugccucagac

SEQ ID NO: 233537 - RNA, 32 nt, Human
ucccaggcucaagcgauccuccugccucagcc

SEQ ID NO: 233538 - RNA, 32 nt, Human
ucccaggcucaagcgauccuucugccucagcc

SEQ ID NO: 233539 - RNA, 32 nt, Human
ucccaggcucaagcgauucucucacuucagcu

SEQ ID NO: 233540 - RNA, 32 nt, Human
ucccaggcucaagcuauccuugcaccucagcc

SEQ ID NO: 233541 - RNA, 32 nt, Human
ucccaggcucaagcuguccucccaccucagcc

SEQ ID NO: 233542 - RNA, 32 nt, Human
ucccaggcucaagggauccuccugcaucagcc

SEQ ID NO: 233543 - RNA, 32 nt, Human
ucccaggcucaagggauccuccugccucggcc

SEQ ID NO: 233544 - RNA, 32 nt, Human
ucccaggcucaagggauccucucaccucagcu

SEQ ID NO: 233545 - RNA, 32 nt, Human
ucccaggcucaagugauccucccaccccagcc

SEQ ID NO: 233546 - RNA, 32 nt, Human
ucccaggcucaagugauccucccaccucagcc

SEQ ID NO: 233547 - RNA, 32 nt, Human
ucccaggcucaagugauccucccaccucaguc

SEQ ID NO: 233548 - RNA, 32 nt, Human
ucccaggcucaagugauccucccacuucagcu

SEQ ID NO: 233549 - RNA, 32 nt, Human
ucccaggcucaagugauccucccagcucucag

SEQ ID NO: 233550 - RNA, 32 nt, Human
ucccaggcucaagugauccuuccaccucagcc

SEQ ID NO: 233551 - RNA, 32 nt, Human
ucccaggcucaagugaucugcccuccucagcc

SEQ ID NO: 233552 - RNA, 32 nt, Human
ucccaggcucaagugauucuccugcuucagcc

SEQ ID NO: 233553 - RNA, 32 nt, Human
ucccaggcucaaucaagguguggcuuccauug

SEQ ID NO: 233554 - RNA, 32 nt, Human
ucccaggcucacccaggcucugcucaggcugg

SEQ ID NO: 233555 - RNA, 32 nt, Human
ucccaggcucaugugauccucccaccucagcc

SEQ ID NO: 233556 - RNA, 19 nt, Human
ucccaggcuccucuucugc

SEQ ID NO: 233557 - RNA, 21 nt, Human
ucccaggcugaagugcaguga

SEQ ID NO: 233558 - RNA, 21 nt, Human
ucccaggcugaagugcagugg

SEQ ID NO: 233559 - RNA, 19 nt, Human
ucccaggcugacccaccca

SEQ ID NO: 233560 - RNA, 32 nt, Human
ucccaggcugcaacauccaccucccagguuca

SEQ ID NO: 233561 - RNA, 32 nt, Human
ucccaggcugcccccaacaacuccaggcccug

SEQ ID NO: 233562 - RNA, 21 nt, Human
ucccaggcuggaaugcagugg

SEQ ID NO: 233563 - RNA, 21 nt, Human
ucccaggcuggaguacagugg

SEQ ID NO: 233564 - RNA, 20 nt, Human
ucccaggcuggagugcaaug

SEQ ID NO: 233565 - RNA, 21 nt, Human
ucccaggcuggagugcaaugg

SEQ ID NO: 233566 - RNA, 21 nt, Human
ucccaggcuggagugcaguga

SEQ ID NO: 233567 - RNA, 21 nt, Human
ucccaggcuggagugcagugg

SEQ ID NO: 233568 - RNA, 32 nt, Human
ucccaggcuggcgcugagaugggcaggugcug

SEQ ID NO: 233569 - RNA, 32 nt, Human
ucccaggcuggggauggaugcucugaccacag

SEQ ID NO: 233570 - RNA, 32 nt, Human
ucccaggcuggucucaaacuccugggcucaag

SEQ ID NO: 233571 - RNA, 32 nt, Human
ucccaggcuggucucgaacuccugggcucggg

SEQ ID NO: 233572 - RNA, 32 nt, Human
ucccaggcugugguggcuccugugggaacuac

SEQ ID NO: 233573 - RNA, 32 nt, Human
ucccaggcuuaggugauccuucugucucagcc

SEQ ID NO: 233574 - RNA, 32 nt, Human
ucccaggcuuccuggugggugcagcccaaucc

SEQ ID NO: 233575 - RNA, 32 nt, Human
ucccaggcuucuguguucccagucuccuguaa

SEQ ID NO: 233576 - RNA, 32 nt, Human
ucccaggcuugccccuggucagccugcgggcc

SEQ ID NO: 233577 - RNA, 32 nt, Human
ucccagggacaguggguuuggaucugucuaga

SEQ ID NO: 233578 - RNA, 32 nt, Human
ucccagggacucaggucacuaauggagguggc

SEQ ID NO: 233579 - RNA, 32 nt, Human
ucccagggagaacgggaaguggaccccagccc

SEQ ID NO: 233580 - RNA, 32 nt, Human
ucccagggagugagauggguaagggaagaugg

SEQ ID NO: 233581 - RNA, 32 nt, Human
ucccagggcaagaggaagacccugccauucca

SEQ ID NO: 233582 - RNA, 32 nt, Human
ucccagggcauuccagcucaagcugcuggcag

SEQ ID NO: 233583 - RNA, 32 nt, Human
ucccagggccaccaagcaaaccaccgugggcc

SEQ ID NO: 233584 - RNA, 32 nt, Human
ucccagggcccaaggaggagaaugcugccucc

SEQ ID NO: 233585 - RNA, 31 nt, Human
ucccagggccucucugucgcugucgccgucg

SEQ ID NO: 233586 - RNA, 32 nt, Human
ucccagggccuugaaaguccaucucugaccca

SEQ ID NO: 233587 - RNA, 32 nt, Human
ucccagggcucugccagggccuugcucagucc

SEQ ID NO: 233588 - RNA, 32 nt, Human
ucccagggcugaugcuguacagguacaggcug

SEQ ID NO: 233589 - RNA, 32 nt, Human
ucccagggcugcagaucgaaaucccuaaggau

SEQ ID NO: 233590 - RNA, 32 nt, Human
ucccagggcugcaggcgggcggagguuccagg

SEQ ID NO: 233591 - RNA, 32 nt, Human
ucccagggcuggccaagagagaagacuggacg

SEQ ID NO: 233592 - RNA, 32 nt, Human
ucccagggcuuacggcccugccuugggcccuc

SEQ ID NO: 233593 - RNA, 32 nt, Human
ucccagggcuuggaacagagccugacauauac

SEQ ID NO: 233594 - RNA, 32 nt, Human
ucccaggggaaugugucuacugccuggugguu

SEQ ID NO: 233595 - RNA, 22 nt, Human
ucccaggggagcaggucuuguc

SEQ ID NO: 233596 - RNA, 32 nt, Human
ucccaggggccugcacacauggagaggccucc

SEQ ID NO: 233597 - RNA, 23 nt, Human
ucccaggggcuccaggcaugcac

SEQ ID NO: 233598 - RNA, 32 nt, Human
ucccagggggauguccugcgccucaggguccg

SEQ ID NO: 233599 - RNA, 32 nt, Human
ucccagggggcagaggcaggggcgggaggggg

SEQ ID NO: 233600 - RNA, 26 nt, Human
ucccagggggccugauuucucucuca

SEQ ID NO: 233601 - RNA, 32 nt, Human
ucccagggguccacacuuuaccuccuguaucu

SEQ ID NO: 233602 - RNA, 32 nt, Human
ucccagggugcugagauuacaggugugagcca

SEQ ID NO: 233603 - RNA, 32 nt, Human
ucccagggugcugggauuacaggugugagcca

SEQ ID NO: 233604 - RNA, 32 nt, Human
ucccagggugggcucaggguuggggaaguccu

SEQ ID NO: 233605 - RNA, 32 nt, Human
ucccagguaaggcggaggcugcuggugugagg

SEQ ID NO: 233606 - RNA, 32 nt, Human
ucccagguacuugguaggcuguggcaggagaa

SEQ ID NO: 233607 - RNA, 32 nt, Human
ucccaggucaucucuuggaccagcgggcauca

SEQ ID NO: 233608 - RNA, 32 nt, Human
ucccaggucaucugccugcccacacgcuccug

SEQ ID NO: 233609 - RNA, 32 nt, Human
ucccaggucauugugucuguuuccgaggggcc

SEQ ID NO: 233610 - RNA, 18 nt, Human
ucccagguccugcagcuu

SEQ ID NO: 233611 - RNA, 32 nt, Human
ucccagguccugggccugguuuucuaaugcug

SEQ ID NO: 233612 - RNA, 32 nt, Human
ucccaggucucaguggaacuugcucagucuua

SEQ ID NO: 233613 - RNA, 32 nt, Human
ucccaggucugugucugauagcauacacacac

SEQ ID NO: 233614 - RNA, 32 nt, Human
ucccaggucuucccucuccucagcgccuaaga

SEQ ID NO: 233615 - RNA, 32 nt, Human
ucccaggucuuuccucacucuccuucgucuuu

SEQ ID NO: 233616 - RNA, 32 nt, Human
ucccaggugaucugguuacagugcagugcuga

SEQ ID NO: 233617 - RNA, 32 nt, Human
ucccaggugauuccggagugaguuggagcugc

SEQ ID NO: 233618 - RNA, 32 nt, Human
ucccaggugcaagugaugccccugccucagcc

SEQ ID NO: 233619 - RNA, 22 nt, Human
ucccaggugcaggcaugagcca

SEQ ID NO: 233620 - RNA, 32 nt, Human
ucccagguggcguuccagcccagauccggcca

SEQ ID NO: 233621 - RNA, 32 nt, Human
ucccagguuaucugggcauagaugcaggugag

SEQ ID NO: 233622 - RNA, 32 nt, Human
ucccagguucaaaccauucucuugccucagcc

SEQ ID NO: 233623 - RNA, 32 nt, Human
ucccagguucaaacgauucuccugccucagcc

SEQ ID NO: 233624 - RNA, 32 nt, Human
ucccagguucaaacgauucucuugccucaguc

SEQ ID NO: 233625 - RNA, 32 nt, Human
ucccagguucaaaucauucucuugccucagac

SEQ ID NO: 233626 - RNA, 32 nt, Human
ucccagguucaagcaauucucuugccucagcc

SEQ ID NO: 233627 - RNA, 32 nt, Human
ucccagguucaagcaauucucuugccucggcc

SEQ ID NO: 233628 - RNA, 32 nt, Human
ucccagguucaagcgauucuccugccucaacc

SEQ ID NO: 233629 - RNA, 32 nt, Human
ucccagguucaagcgauucuccugccucagac

SEQ ID NO: 233630 - RNA, 32 nt, Human
ucccagguucaagcgauucuccugccucagcc

SEQ ID NO: 233631 - RNA, 32 nt, Human
ucccagguucaagcgauucuccugccucagcg

SEQ ID NO: 233632 - RNA, 32 nt, Human
ucccagguucaagcgauucuccugccucaggc

SEQ ID NO: 233633 - RNA, 32 nt, Human
ucccagguucaagcgauucuccugccucaucc

SEQ ID NO: 233634 - RNA, 32 nt, Human
ucccagguucaagcgauucuccugccuccucc

SEQ ID NO: 233635 - RNA, 32 nt, Human
ucccagguucaagcgauucuccugccuuagcc

SEQ ID NO: 233636 - RNA, 32 nt, Human
ucccagguucaagcgauucucuugccucagcc

SEQ ID NO: 233637 - RNA, 32 nt, Human
ucccagguucaagcgauucucuugccucugcc

SEQ ID NO: 233638 - RNA, 32 nt, Human
ucccagguucaagcuauucuccugccucagcc

SEQ ID NO: 233639 - RNA, 32 nt, Human
ucccagguucaagugacucuccugccucagcc

SEQ ID NO: 233640 - RNA, 32 nt, Human
ucccagguucaagugagucucaugccucagcc

SEQ ID NO: 233641 - RNA, 32 nt, Human
ucccagguucaagugagucucgugccucagcc

SEQ ID NO: 233642 - RNA, 32 nt, Human
ucccagguucaagugauucccuugcuucagcc

SEQ ID NO: 233643 - RNA, 32 nt, Human
ucccagguucaagugauucucaugccucaguc

SEQ ID NO: 233644 - RNA, 32 nt, Human
ucccagguucaagugauucucccaccucagcc

SEQ ID NO: 233645 - RNA, 32 nt, Human
ucccagguucaagugauucucccugccuccgc

SEQ ID NO: 233646 - RNA, 32 nt, Human
ucccagguucaagugauucuccuaccucagcc

SEQ ID NO: 233647 - RNA, 32 nt, Human
ucccagguucaagugauucuccugccucagcc

SEQ ID NO: 233648 - RNA, 32 nt, Human
ucccagguucaagugauucuccugccucagcu

SEQ ID NO: 233649 - RNA, 32 nt, Human
ucccagguucaagugauucuccugccucaguc

SEQ ID NO: 233650 - RNA, 32 nt, Human
ucccagguucaagugauucuccugccucaucc

SEQ ID NO: 233651 - RNA, 32 nt, Human
ucccagguucaagugauucuccugccucggcc

SEQ ID NO: 233652 - RNA, 32 nt, Human
ucccagguucaagugauucuccugucucagcc

SEQ ID NO: 233653 - RNA, 32 nt, Human
ucccagguucaagugauucuccugucucaguc

SEQ ID NO: 233654 - RNA, 32 nt, Human
ucccagguucaagugauucucuugccucagcc

SEQ ID NO: 233655 - RNA, 32 nt, Human
ucccagguucaagugauucuucugccucagcc

SEQ ID NO: 233656 - RNA, 32 nt, Human
ucccagguucaagugauucuucuugccucagc

SEQ ID NO: 233657 - RNA, 32 nt, Human
ucccagguucaagugauucuugugccucagcc

SEQ ID NO: 233658 - RNA, 32 nt, Human
ucccagguucaagugauugucccauuucagcc

SEQ ID NO: 233659 - RNA, 32 nt, Human
ucccagguucacaccauucuccugccucaacc

SEQ ID NO: 233660 - RNA, 32 nt, Human
ucccagguucacaccauucuccugccucagcc

SEQ ID NO: 233661 - RNA, 32 nt, Human
ucccagguucacaccauucuccugccucagcu

SEQ ID NO: 233662 - RNA, 32 nt, Human
ucccagguucacaccauucucuugccucagcc

SEQ ID NO: 233663 - RNA, 32 nt, Human
ucccagguucacgccauccuccugccucagcu

SEQ ID NO: 233664 - RNA, 32 nt, Human
ucccagguucacgccauucuccugccucagcc

SEQ ID NO: 233665 - RNA, 32 nt, Human
ucccagguucacgccauuguccugccucagcc

SEQ ID NO: 233666 - RNA, 32 nt, Human
ucccagguucaggcgauucuccugccucagcc

SEQ ID NO: 233667 - RNA, 32 nt, Human
ucccagguucaggcgauucuccugccucaguc

SEQ ID NO: 233668 - RNA, 32 nt, Human
ucccagguucaugccauucuccugccccagcu

SEQ ID NO: 233669 - RNA, 32 nt, Human
ucccagguucaugccauucuccugccucaccc

SEQ ID NO: 233670 - RNA, 32 nt, Human
ucccagguucaugccauucuccugccucagcc

SEQ ID NO: 233671 - RNA, 32 nt, Human
ucccagguucaugucauucuccugccucagcc

SEQ ID NO: 233672 - RNA, 32 nt, Human
ucccagguucccgccauucuccugccucagcc

SEQ ID NO: 233673 - RNA, 32 nt, Human
ucccagguugaaugauuuauggauuaaaguac

SEQ ID NO: 233674 - RNA, 32 nt, Human
ucccagguugacaccauucuccugccucaccc

SEQ ID NO: 233675 - RNA, 32 nt, Human
ucccagguugcugggguuacaggugugugcca

SEQ ID NO: 233676 - RNA, 32 nt, Human
ucccagguuuaagcgauucucuugccucagcc

SEQ ID NO: 233677 - RNA, 32 nt, Human
ucccaguaaacccauuggaagucaaaugcauu

SEQ ID NO: 233678 - RNA, 32 nt, Human
ucccaguaacauggugaaaggaagcaccacca

SEQ ID NO: 233679 - RNA, 32 nt, Human
ucccaguaacuucuaccugccagcccagaggg

SEQ ID NO: 233680 - RNA, 32 nt, Human
ucccaguacauaguugcauggcaaacaauccu

SEQ ID NO: 233681 - RNA, 22 nt, Human
ucccaguaccucgggcugcaag

SEQ ID NO: 233682 - RNA, 32 nt, Human
ucccaguagcgaugaguaacagagguggcugu

SEQ ID NO: 233683 - RNA, 32 nt, Human
ucccaguaggagccagggcugaguguggaaau

SEQ ID NO: 233684 - RNA, 22 nt, Human
ucccaguauucagagcugugaa

SEQ ID NO: 233685 - RNA, 32 nt, Human
ucccagucacugcauggccucugcccauccug

SEQ ID NO: 233686 - RNA, 32 nt, Human
ucccaguccacagaaccugugaaugugaccuu

SEQ ID NO: 233687 - RNA, 32 nt, Human
ucccaguccaucuccuggaggcagacagaugg

SEQ ID NO: 233688 - RNA, 32 nt, Human
ucccaguccccaggaaccuagcucuuuaaacu

SEQ ID NO: 233689 - RNA, 17 nt, Human
ucccaguccuccuucua

SEQ ID NO: 233690 - RNA, 32 nt, Human
ucccaguccugaugugugugcguuguucucuc

SEQ ID NO: 233691 - RNA, 32 nt, Human
ucccagucuccaagugcuaacacauaaacaca

SEQ ID NO: 233692 - RNA, 32 nt, Human
ucccagucuuccugcuaagccuaauccaagcc

SEQ ID NO: 233693 - RNA, 32 nt, Human
ucccagugaaaugcugcugcugccauuucaac

SEQ ID NO: 233694 - RNA, 32 nt, Human
ucccagugaccuccccuccacaccugcuguga

SEQ ID NO: 233695 - RNA, 32 nt, Human
ucccagugacgggucuggagugcgugggggac

SEQ ID NO: 233696 - RNA, 21 nt, Human
ucccagugagaacugaccuga

SEQ ID NO: 233697 - RNA, 32 nt, Human
ucccagugaugcaccaugccaauaguggauaa

SEQ ID NO: 233698 - RNA, 20 nt, Human
ucccagugcccagccaccca

SEQ ID NO: 233699 - RNA, 32 nt, Human
ucccagugccgagaaggaagccucccacgacu

SEQ ID NO: 233700 - RNA, 32 nt, Human
ucccagugcucuggaucagugucuaaaaauca

SEQ ID NO: 233701 - RNA, 32 nt, Human
ucccagugcuuccugcagucaggcacuuccug

SEQ ID NO: 233702 - RNA, 22 nt, Human
ucccaguggaggggaaagggga

SEQ ID NO: 233703 - RNA, 32 nt, Human
ucccaguggaugagaugcuguccucugggcuc

SEQ ID NO: 233704 - RNA, 32 nt, Human
ucccagugggcgaugugggcagaggagcuccg

SEQ ID NO: 233705 - RNA, 32 nt, Human
ucccaguggugggacucagcccagacugcccu

SEQ ID NO: 233706 - RNA, 32 nt, Human
ucccaguguguacggagccaguggaauauggg

SEQ ID NO: 233707 - RNA, 32 nt, Human
ucccaguuaccugggaggcugaggcaggagaa

SEQ ID NO: 233708 - RNA, 32 nt, Human
ucccaguucauaaucacaacccuucagauuug

SEQ ID NO: 233709 - RNA, 32 nt, Human
ucccaguuccagagcaccucaggacaacccca

SEQ ID NO: 233710 - RNA, 32 nt, Human
ucccaguuccagggggaggccugcaggccccu

SEQ ID NO: 233711 - RNA, 19 nt, Human
ucccaguuccccacugcca

SEQ ID NO: 233712 - RNA, 32 nt, Human
ucccaguucuaccuccccagaagccuuccucc

SEQ ID NO: 233713 - RNA, 32 nt, Human
ucccaguucugcggcuggagugggugggugca

SEQ ID NO: 233714 - RNA, 17 nt, Human
ucccaguugcaaucuca

SEQ ID NO: 233715 - RNA, 32 nt, Human
ucccaguugcuuuuccccagauuuggugacuc

SEQ ID NO: 233716 - RNA, 32 nt, Human
ucccaguugggagcucgcucacagucuuuaag

SEQ ID NO: 233717 - RNA, 32 nt, Human
ucccaguugggcgucccggagcucagggacug

SEQ ID NO: 233718 - RNA, 32 nt, Human
ucccaguuucaagcgauucuccugccucagcc

SEQ ID NO: 233719 - RNA, 32 nt, Human
ucccaguuuccugcauaaguucuugaacagaa

SEQ ID NO: 233720 - RNA, 21 nt, Human
ucccaguuuuccagaccugaa

SEQ ID NO: 233721 - RNA, 32 nt, Human
ucccaguuuuccagaccugaaguguuuuccaa

SEQ ID NO: 233722 - RNA, 32 nt, Human
ucccaguuuuucuccccuuuugguuuaauagu

SEQ ID NO: 233723 - RNA, 32 nt, Human
ucccauaagcagcugugguggcagugagggag

SEQ ID NO: 233724 - RNA, 32 nt, Human
ucccauaagugaaauauaauauuuuucaaagu

SEQ ID NO: 233725 - RNA, 32 nt, Human
ucccauaaguuucugcugcuucucccauaacu

SEQ ID NO: 233726 - RNA, 32 nt, Human
ucccauaauagaaaugagcaugcagggcuaag

SEQ ID NO: 233727 - RNA, 24 nt, Human
ucccauaauauuuuuucuuuuuca

SEQ ID NO: 233728 - RNA, 32 nt, Human
ucccauaauuccagaaagcaaaaggcuuacaa

SEQ ID NO: 233729 - RNA, 32 nt, Human
ucccauacaagucaagguaacagaacaaaagg

SEQ ID NO: 233730 - RNA, 32 nt, Human
ucccauacacagaaacacaaaacacuuugauc

SEQ ID NO: 233731 - RNA, 32 nt, Human
ucccauacaggacauccaggcaucuaaaaggu

SEQ ID NO: 233732 - RNA, 32 nt, Human
ucccauaccuccacugcugaaguuccuccagc

SEQ ID NO: 233733 - RNA, 32 nt, Human
ucccauacuccucaggguucugagguccuugu

SEQ ID NO: 233734 - RNA, 32 nt, Human
ucccauacuguacugcuaucaguagccagugu

SEQ ID NO: 233735 - RNA, 19 nt, Human
ucccauagcacuccaugua

SEQ ID NO: 233736 - RNA, 32 nt, Human
ucccauagcuaauagacauuucccaggccuug

SEQ ID NO: 233737 - RNA, 21 nt, Human
ucccauaggaguucucaggca

SEQ ID NO: 233738 - RNA, 32 nt, Human
ucccauauaggugagggaagccugaaaaacua

SEQ ID NO: 233739 - RNA, 23 nt, Human
ucccauaugucauucauuucuca

SEQ ID NO: 233740 - RNA, 23 nt, Human
ucccauauuucugcuuccccuca

SEQ ID NO: 233741 - RNA, 32 nt, Human
ucccaucaaggccucuggagggaaggcuaagc

SEQ ID NO: 233742 - RNA, 32 nt, Human
ucccaucacagaacuguguuccaucaaaaaga

SEQ ID NO: 233743 - RNA, 25 nt, Human
ucccaucacagaagguggacagggc

SEQ ID NO: 233744 - RNA, 32 nt, Human
ucccaucacauucuggucuaaggcuuauuuau

SEQ ID NO: 233745 - RNA, 32 nt, Human
ucccaucaccaccaccaccaccaccaccauca

SEQ ID NO: 233746 - RNA, 32 nt, Human
ucccaucaccaucaccaccaccaccaccauca

SEQ ID NO: 233747 - RNA, 32 nt, Human
ucccaucaccuugcccucauugucuucccucu

SEQ ID NO: 233748 - RNA, 32 nt, Human
ucccaucagccuguccaggcccagcucaugcc

SEQ ID NO: 233749 - RNA, 32 nt, Human
ucccaucagccuguuucuccaccuuagaaaag

SEQ ID NO: 233750 - RNA, 32 nt, Human
ucccaucagcgcagaagagagcaaucuggacu

SEQ ID NO: 233751 - RNA, 32 nt, Human
ucccaucaucuacucaggaggcugaggcagga

SEQ ID NO: 233752 - RNA, 32 nt, Human
ucccaucaugggaacagugguucuuccccagu

SEQ ID NO: 233753 - RNA, 21 nt, Human
ucccauccaagugaccagaug

SEQ ID NO: 233754 - RNA, 32 nt, Human
ucccauccaccugucuguccuggccuaaugcc

SEQ ID NO: 233755 - RNA, 32 nt, Human
ucccauccaggauggauuuacccccuaaaagu

SEQ ID NO: 233756 - RNA, 32 nt, Human
ucccauccaguucuggaguucguagagaguga

SEQ ID NO: 233757 - RNA, 32 nt, Human
ucccauccaugaaaccuaauaaaagaguagaa

SEQ ID NO: 233758 - RNA, 32 nt, Human
ucccaucccauggacucccacucuggggagcc

SEQ ID NO: 233759 - RNA, 32 nt, Human
ucccaucccauugcagccuccaccaccuguaa

SEQ ID NO: 233760 - RNA, 32 nt, Human
ucccauccccaaggagcccuucagcgcgcccu

SEQ ID NO: 233761 - RNA, 32 nt, Human
ucccaucccuuuccugagucauggccucaaaa

SEQ ID NO: 233762 - RNA, 32 nt, Human
ucccauccucaggguaggagggcaguugcacg

SEQ ID NO: 233763 - RNA, 32 nt, Human
ucccauccuccacagucucccaucccaccagc

SEQ ID NO: 233764 - RNA, 32 nt, Human
ucccauccuccccugauaggccccuccuccuu

SEQ ID NO: 233765 - RNA, 19 nt, Human
ucccauccuccucucuuca

SEQ ID NO: 233766 - RNA, 32 nt, Human
ucccauccuggcucugucauuuacuuacagaa

SEQ ID NO: 233767 - RNA, 32 nt, Human
ucccauccuuguccuucucucccucagaagcc

SEQ ID NO: 233768 - RNA, 32 nt, Human
ucccauccuuucucccuggcugcccuguuaac

SEQ ID NO: 233769 - RNA, 32 nt, Human
ucccaucgaccagcaagcccagccccagggcg

SEQ ID NO: 233770 - RNA, 32 nt, Human
ucccaucgcucuguguuuccugcuccagguuu

SEQ ID NO: 233771 - RNA, 32 nt, Human
ucccaucggaggugguuggugcagauggaagu

SEQ ID NO: 233772 - RNA, 32 nt, Human
ucccaucgugggcagccagagcuccgaggcuc

SEQ ID NO: 233773 - RNA, 32 nt, Human
ucccaucuaagcugcagcuuccugucaacacu

SEQ ID NO: 233774 - RNA, 32 nt, Human
ucccaucuaccuccucuucauccaccaccaug

SEQ ID NO: 233775 - RNA, 32 nt, Human
ucccaucucaagauucaucaccgaguucccua

SEQ ID NO: 233776 - RNA, 32 nt, Human
ucccaucucaaggacuuggaaguaagggaaau

SEQ ID NO: 233777 - RNA, 32 nt, Human
ucccaucucaagguccuuaacagcauguggaa

SEQ ID NO: 233778 - RNA, 32 nt, Human
ucccaucucaaucauugagccugaaggcuuca

SEQ ID NO: 233779 - RNA, 19 nt, Human
ucccaucucagccaugagg

SEQ ID NO: 233780 - RNA, 22 nt, Human
ucccaucucagccucccaagua

SEQ ID NO: 233781 - RNA, 32 nt, Human
ucccaucuccaccccuuccugucauccucuau

SEQ ID NO: 233782 - RNA, 32 nt, Human
ucccaucucccucagugaccuggaucugaccu

SEQ ID NO: 233783 - RNA, 32 nt, Human
ucccaucuccugccauggccaggugugagaga

SEQ ID NO: 233784 - RNA, 21 nt, Human
ucccaucucggcuucccaaug

SEQ ID NO: 233785 - RNA, 32 nt, Human
ucccaucucuacaacaaaaauacaaaaauuag

SEQ ID NO: 233786 - RNA, 32 nt, Human
ucccaucucucggcguuccagcauccugucaa

SEQ ID NO: 233787 - RNA, 32 nt, Human
ucccaucucucuggauuuccuuuugcuucauu

SEQ ID NO: 233788 - RNA, 32 nt, Human
ucccaucucugccccucugucucccaucugcc

SEQ ID NO: 233789 - RNA, 32 nt, Human
ucccaucucugccucuggcacccugcuggaaa

SEQ ID NO: 233790 - RNA, 32 nt, Human
ucccaucucuuuaguucuuccuccugguuccu

SEQ ID NO: 233791 - RNA, 32 nt, Human
ucccaucugaagaguggaaauggggaacuccc

SEQ ID NO: 233792 - RNA, 32 nt, Human
ucccaucugcgcaccaggcugcagauccaagg

SEQ ID NO: 233793 - RNA, 32 nt, Human
ucccaucugcuccccaauucuugaucucuccc

SEQ ID NO: 233794 - RNA, 32 nt, Human
ucccaucuguaggagauuagugaggcaaggug

SEQ ID NO: 233795 - RNA, 32 nt, Human
ucccaucuguuuucucuguucucuuucuggaa

SEQ ID NO: 233796 - RNA, 32 nt, Human
ucccaucuuccaggauggauauuggggugggg

SEQ ID NO: 233797 - RNA, 32 nt, Human
ucccaucuuguccuagcccaucccccagacua

SEQ ID NO: 233798 - RNA, 32 nt, Human
ucccaugaagaaagggaacggugaaguacuaa

SEQ ID NO: 233799 - RNA, 32 nt, Human
ucccaugaaucuguuuacuagcuugguggaug

SEQ ID NO: 233800 - RNA, 21 nt, Human
ucccaugacaaggaccagcug

SEQ ID NO: 233801 - RNA, 32 nt, Human
ucccaugacccaccccugugcuccgugccucc

SEQ ID NO: 233802 - RNA, 32 nt, Human
ucccaugaccugugggcucugcagauggaccu

SEQ ID NO: 233803 - RNA, 32 nt, Human
ucccaugagaccaguaauacugucugccucag

SEQ ID NO: 233804 - RNA, 23 nt, Human
ucccaugaggaggcuuccaggca

SEQ ID NO: 233805 - RNA, 32 nt, Human
ucccaugaguaugcaaaucaauaguuuuaacc

SEQ ID NO: 233806 - RNA, 32 nt, Human
ucccaugagugccaagacggugcaauggguag

SEQ ID NO: 233807 - RNA, 32 nt, Human
ucccaugaucacuucaaccacaggccuuugac

SEQ ID NO: 233808 - RNA, 23 nt, Human
ucccaugcaaguagcuggcugua

SEQ ID NO: 233809 - RNA, 32 nt, Human
ucccaugcacuugcacguccaggacuccuggg

SEQ ID NO: 233810 - RNA, 32 nt, Human
ucccaugcagacaggaucaccuaacagagaug

SEQ ID NO: 233811 - RNA, 32 nt, Human
ucccaugcaguuuccccaggcaccuuugcuca

SEQ ID NO: 233812 - RNA, 32 nt, Human
ucccaugcaucagcugcucccaccccucaucc

SEQ ID NO: 233813 - RNA, 32 nt, Human
ucccaugccaaaggacaaacaggugugacauu

SEQ ID NO: 233814 - RNA, 21 nt, Human
ucccaugcccacagucaccca

SEQ ID NO: 233815 - RNA, 32 nt, Human
ucccaugcucgcuugcucacacacccuucacu

SEQ ID NO: 233816 - RNA, 22 nt, Human
ucccaugcugcaauuucuuccu

SEQ ID NO: 233817 - RNA, 32 nt, Human
ucccaugcugucacccucaggaagcaucauga

SEQ ID NO: 233818 - RNA, 32 nt, Human
ucccaugcuuacgugauccucucaccucagcc

SEQ ID NO: 233819 - RNA, 32 nt, Human
ucccaugcuugcuugcucacacacccuucacu

SEQ ID NO: 233820 - RNA, 32 nt, Human
ucccauggaaacacagcugaaaugaaauggga

SEQ ID NO: 233821 - RNA, 32 nt, Human
ucccauggaagccacguuccagaaguuuccau

SEQ ID NO: 233822 - RNA, 32 nt, Human
ucccauggaaguuuccucacaaagucagcucc

SEQ ID NO: 233823 - RNA, 25 nt, Human
ucccauggaccaugccgcagcacag

SEQ ID NO: 233824 - RNA, 32 nt, Human
ucccauggagaccaacauggccaggggagggc

SEQ ID NO: 233825 - RNA, 22 nt, Human
ucccauggaucucuucccagca

SEQ ID NO: 233826 - RNA, 32 nt, Human
ucccauggccugcucccucaggaacagcucca

SEQ ID NO: 233827 - RNA, 32 nt, Human
ucccauggcugaagcggagcagcuggauugcu

SEQ ID NO: 233828 - RNA, 32 nt, Human
ucccauggcugcaucuuaagauggaugcacgg

SEQ ID NO: 233829 - RNA, 32 nt, Human
ucccaugggaaugccgcagggagccaggcugg

SEQ ID NO: 233830 - RNA, 32 nt, Human
ucccaugggaggugggucuggccaauggagau

SEQ ID NO: 233831 - RNA, 32 nt, Human
ucccaugggagguguaggauaaggugggggcg

SEQ ID NO: 233832 - RNA, 22 nt, Human
ucccaugggcagaggaccaggc

SEQ ID NO: 233833 - RNA, 32 nt, Human
ucccaugggcagaggaccaggcuguaggaaau

SEQ ID NO: 233834 - RNA, 32 nt, Human
ucccaugggcgcagcagcacacccagcuccca

SEQ ID NO: 233835 - RNA, 19 nt, Human
ucccaugggcuggucucca

SEQ ID NO: 233836 - RNA, 20 nt, Human
ucccaugggugaggaccaga

SEQ ID NO: 233837 - RNA, 32 nt, Human
ucccaugggugaggaccagaaccagacucuga

SEQ ID NO: 233838 - RNA, 18 nt, Human
ucccaugguagacuguga

SEQ ID NO: 233839 - RNA, 20 nt, Human
ucccauggucaugccaccca

SEQ ID NO: 233840 - RNA, 32 nt, Human
ucccauggugaaggcaggggacauagacaagg

SEQ ID NO: 233841 - RNA, 32 nt, Human
ucccauguagcaggaaccacaggcaggcacca

SEQ ID NO: 233842 - RNA, 20 nt, Human
ucccauguaggcaccaagug

SEQ ID NO: 233843 - RNA, 32 nt, Human
ucccaugucacaaguccucuggccucucccug

SEQ ID NO: 233844 - RNA, 18 nt, Human
ucccaugucagccuccca

SEQ ID NO: 233845 - RNA, 22 nt, Human
ucccaugucagccucccaagua

SEQ ID NO: 233846 - RNA, 19 nt, Human
ucccauguccgaggcggug

SEQ ID NO: 233847 - RNA, 18 nt, Human
ucccauguccugaccaga

SEQ ID NO: 233848 - RNA, 18 nt, Human
ucccaugucugaaaacca

SEQ ID NO: 233849 - RNA, 32 nt, Human
ucccaugucuuagcggggcaugguacgguuuc

SEQ ID NO: 233850 - RNA, 32 nt, Human
ucccaugugcaggguucagcaguuauguggga

SEQ ID NO: 233851 - RNA, 32 nt, Human
ucccaugugggauggagcagaacugcauuauu

SEQ ID NO: 233852 - RNA, 32 nt, Human
ucccaugugucuucagcuuucuuuugcaaagg

SEQ ID NO: 233853 - RNA, 32 nt, Human
ucccauguucaagugauucuccugccucagcc

SEQ ID NO: 233854 - RNA, 32 nt, Human
ucccauguucucccauggucauggcuucccgg

SEQ ID NO: 233855 - RNA, 32 nt, Human
ucccauguucucuauagacuugggaccuuccu

SEQ ID NO: 233856 - RNA, 32 nt, Human
ucccauguugcccaggcuggucucaaauuucu

SEQ ID NO: 233857 - RNA, 32 nt, Human
ucccauguuggccaggcuggucucgaacuuau

SEQ ID NO: 233858 - RNA, 32 nt, Human
ucccauguuggccucugcaaccacacagggau

SEQ ID NO: 233859 - RNA, 32 nt, Human
ucccauguuguccuggcaugugcaguauacac

SEQ ID NO: 233860 - RNA, 32 nt, Human
ucccauuaaacuugaacuguggcuauauugaa

SEQ ID NO: 233861 - RNA, 32 nt, Human
ucccauuacgcacacacauaaugucauuucuc

SEQ ID NO: 233862 - RNA, 20 nt, Human
ucccauuaggaaaccaggug

SEQ ID NO: 233863 - RNA, 32 nt, Human
ucccauuaguuuucccuuuuuccuuuuuaaua

SEQ ID NO: 233864 - RNA, 32 nt, Human
ucccauuaucccucagcucugaguccucuugu

SEQ ID NO: 233865 - RNA, 32 nt, Human
ucccauucagcguuuuguuucuuucuguccau

SEQ ID NO: 233866 - RNA, 32 nt, Human
ucccauuccaauuugaaucuuucuauuucuuu

SEQ ID NO: 233867 - RNA, 32 nt, Human
ucccauucccaauauuuauuccaagacucagu

SEQ ID NO: 233868 - RNA, 32 nt, Human
ucccauucccccaugucuccucccaucccucc

SEQ ID NO: 233869 - RNA, 32 nt, Human
ucccauuccucagaccagcaggaaaagagggg

SEQ ID NO: 233870 - RNA, 32 nt, Human
ucccauucuaaggaggugaggugguuggaaua

SEQ ID NO: 233871 - RNA, 32 nt, Human
ucccauucucacagcccugcuggaccaaggca

SEQ ID NO: 233872 - RNA, 32 nt, Human
ucccauucucccccucucccugagaguccccu

SEQ ID NO: 233873 - RNA, 32 nt, Human
ucccauucucuagccucaccuaucuggccggu

SEQ ID NO: 233874 - RNA, 32 nt, Human
ucccauucugaaacugacaguucucuuuacaa

SEQ ID NO: 233875 - RNA, 32 nt, Human
ucccauucuguucuguucuguucuccuaauac

SEQ ID NO: 233876 - RNA, 32 nt, Human
ucccauucuuauugaauacaagcccugaucuu

SEQ ID NO: 233877 - RNA, 32 nt, Human
ucccauucuucuuuaccuggucuccuuccuuc

SEQ ID NO: 233878 - RNA, 32 nt, Human
ucccauugauugugagcaagauauuuaucucu

SEQ ID NO: 233879 - RNA, 22 nt, Human
ucccauugcaaacauuauucca

SEQ ID NO: 233880 - RNA, 32 nt, Human
ucccauugcccagccucagugcauuuggcaaa

SEQ ID NO: 233881 - RNA, 23 nt, Human
ucccauugcccuauucuagcauc

SEQ ID NO: 233882 - RNA, 23 nt, Human
ucccauugccucucccccuuucc

SEQ ID NO: 233883 - RNA, 32 nt, Human
ucccauugccucucccccuuuccucgacagcu

SEQ ID NO: 233884 - RNA, 31 nt, Human
ucccauugccucucuugagugucagcgccuc

SEQ ID NO: 233885 - RNA, 32 nt, Human
ucccauugcugucugcaggcugugggaauuuc

SEQ ID NO: 233886 - RNA, 32 nt, Human
ucccauuggccuauugaaucuuccuugcucuu

SEQ ID NO: 233887 - RNA, 32 nt, Human
ucccauuggucuuugguugcucaucccucuaa

SEQ ID NO: 233888 - RNA, 32 nt, Human
ucccauuuacccggacgccucugacaaugugu

SEQ ID NO: 233889 - RNA, 32 nt, Human
ucccauuuagaccgcaaaacagugccacaggg

SEQ ID NO: 233890 - RNA, 32 nt, Human
ucccauuucaaucaugcagaugguuucuuuuu

SEQ ID NO: 233891 - RNA, 32 nt, Human
ucccauuugacuuccuuucuucuuucaggcuu

SEQ ID NO: 233892 - RNA, 32 nt, Human
ucccauuugccucccuccagcucugcuuaggc

SEQ ID NO: 233893 - RNA, 32 nt, Human
ucccauuugucuggccagucucugugugucuu

SEQ ID NO: 233894 - RNA, 32 nt, Human
ucccauuuucccuugcugggaguagccacaug

SEQ ID NO: 233895 - RNA, 32 nt, Human
ucccauuuuccucugacguccaccuccuaccc

SEQ ID NO: 233896 - RNA, 32 nt, Human
ucccauuuucgcuuuccucugguuugaaagcc

SEQ ID NO: 233897 - RNA, 32 nt, Human
ucccauuuucucucugcuuucucuccaacugc

SEQ ID NO: 233898 - RNA, 32 nt, Human
ucccauuuugacugagaauauugacauauaag

SEQ ID NO: 233899 - RNA, 32 nt, Human
ucccauuuuuaucugcuacucuuuauuucaua

SEQ ID NO: 233900 - RNA, 32 nt, Human
uccccaaacaguaggcuucaguucccugccag

SEQ ID NO: 233901 - RNA, 32 nt, Human
uccccaaacaucucccucccuaccucccuccc

SEQ ID NO: 233902 - RNA, 32 nt, Human
uccccaaacugugcccugccuucagcuuuggu

SEQ ID NO: 233903 - RNA, 32 nt, Human
uccccaaagaccugaguggcugagggggcccc

SEQ ID NO: 233904 - RNA, 32 nt, Human
uccccaaaggagguagaagauggggaagauga

SEQ ID NO: 233905 - RNA, 32 nt, Human
uccccaaagugcugggaugacaggcaugagcc

SEQ ID NO: 233906 - RNA, 32 nt, Human
uccccaaagugcugggauuacaggcaugagcc

SEQ ID NO: 233907 - RNA, 32 nt, Human
uccccaaagugcugggauuacaggcgugagcc

SEQ ID NO: 233908 - RNA, 32 nt, Human
uccccaaagugcugggauuacagguacaauga

SEQ ID NO: 233909 - RNA, 32 nt, Human
uccccaaagugcugggauugcaggcgugagcc

SEQ ID NO: 233910 - RNA, 20 nt, Human
uccccaaauacagcaccuuc

SEQ ID NO: 233911 - RNA, 25 nt, Human
uccccaacaaggcagcugauuccag

SEQ ID NO: 233912 - RNA, 22 nt, Human
uccccaacaggcacugggcucu

SEQ ID NO: 233913 - RNA, 32 nt, Human
uccccaaccacgagaagagggccgggaagcug

SEQ ID NO: 233914 - RNA, 32 nt, Human
uccccaaccagcucccugucccugcuucuggg

SEQ ID NO: 233915 - RNA, 32 nt, Human
uccccaaccccaaaucaagaccaccuuucuuc

SEQ ID NO: 233916 - RNA, 32 nt, Human
uccccaaccccagcaccucaaggagcacaaaa

SEQ ID NO: 233917 - RNA, 32 nt, Human
uccccaacccuuuagcuccuuuugcuuugagu

SEQ ID NO: 233918 - RNA, 32 nt, Human
uccccaacuccucgcuucacuucaccugugcc

SEQ ID NO: 233919 - RNA, 32 nt, Human
uccccaacuucauuugcuucucucaacaaccu

SEQ ID NO: 233920 - RNA, 32 nt, Human
uccccaacuucuccaccugcuggugcagcucu

SEQ ID NO: 233921 - RNA, 32 nt, Human
uccccaacuuuguggcgcccucaggccgcggc

SEQ ID NO: 233922 - RNA, 32 nt, Human
uccccaacuuuugccagaaagcagaaaaaugc

SEQ ID NO: 233923 - RNA, 21 nt, Human
uccccaagaagagggaaggca

SEQ ID NO: 233924 - RNA, 32 nt, Human
uccccaagacauggggacuuugcagugagcaa

SEQ ID NO: 233925 - RNA, 22 nt, Human
uccccaagagaggaaccagaag

SEQ ID NO: 233926 - RNA, 18 nt, Human
uccccaagagcuggcacc

SEQ ID NO: 233927 - RNA, 32 nt, Human
uccccaagauucacaccugacucugaaaucug

SEQ ID NO: 233928 - RNA, 32 nt, Human
uccccaagcacacuccuagcugcuccagucuc

SEQ ID NO: 233929 - RNA, 32 nt, Human
uccccaagccugacccgagugggcgcgaacuu

SEQ ID NO: 233930 - RNA, 18 nt, Human
uccccaaggaaaguccuu

SEQ ID NO: 233931 - RNA, 20 nt, Human
uccccaaggacucccccuuc

SEQ ID NO: 233932 - RNA, 26 nt, Human
uccccaaggacugaccagggaccuuu

SEQ ID NO: 233933 - RNA, 32 nt, Human
uccccaaggauagugcuggcuuccauggaaac

SEQ ID NO: 233934 - RNA, 32 nt, Human
uccccaaggauccacucccccagcuccuuuag

SEQ ID NO: 233935 - RNA, 19 nt, Human
uccccaaggauggggcucu

SEQ ID NO: 233936 - RNA, 32 nt, Human
uccccaaggcagguggccuccacccacguucu

SEQ ID NO: 233937 - RNA, 32 nt, Human
uccccaaggcuggagugcaguggugcaaucuu

SEQ ID NO: 233938 - RNA, 32 nt, Human
uccccaagggcacucagccacagggaugaacu

SEQ ID NO: 233939 - RNA, 32 nt, Human
uccccaaguccagaaggaaggaauggagcuga

SEQ ID NO: 233940 - RNA, 32 nt, Human
uccccaagucgcuucuguggcaccccgcauuc

SEQ ID NO: 233941 - RNA, 18 nt, Human
uccccaaguggauugcag

SEQ ID NO: 233942 - RNA, 32 nt, Human
uccccaaguuccaaaagcacagacucaaaggg

SEQ ID NO: 233943 - RNA, 32 nt, Human
uccccaauaccacauuaaaucaucucaucuga

SEQ ID NO: 233944 - RNA, 32 nt, Human
uccccaauaccacauuaaaucgucucaucuga

SEQ ID NO: 233945 - RNA, 32 nt, Human
uccccaauccccaggucucuagaucauucugu

SEQ ID NO: 233946 - RNA, 19 nt, Human
uccccaaucccucugccca

SEQ ID NO: 233947 - RNA, 32 nt, Human
uccccaauccuggcaaaagcccaaagauccca

SEQ ID NO: 233948 - RNA, 32 nt, Human
uccccaaucugaauaccugcaggcucccacau

SEQ ID NO: 233949 - RNA, 32 nt, Human
uccccaaugccugugggagguggacucccugg

SEQ ID NO: 233950 - RNA, 21 nt, Human
uccccaauuacuauucccuuu

SEQ ID NO: 233951 - RNA, 32 nt, Human
uccccaauuagcacaaauacgccaagggaaca

SEQ ID NO: 233952 - RNA, 32 nt, Human
uccccaauucacugcaaggagaccucuacugu

SEQ ID NO: 233953 - RNA, 28 nt, Human
uccccacaagaugaugccucaucuccac

SEQ ID NO: 233954 - RNA, 32 nt, Human
uccccacacaacagugcccuccagaagcagcc

SEQ ID NO: 233955 - RNA, 32 nt, Human
uccccacacagcagcacagccaucacaggauu

SEQ ID NO: 233956 - RNA, 32 nt, Human
uccccacaccuacuccaaagaacagcuggacg

SEQ ID NO: 233957 - RNA, 32 nt, Human
uccccacacgugcucgcagccuggcggggcag

SEQ ID NO: 233958 - RNA, 32 nt, Human
uccccacacugcagcccugccacuugcuuguc

SEQ ID NO: 233959 - RNA, 32 nt, Human
uccccacacuguggaggaagggaccuguggca

SEQ ID NO: 233960 - RNA, 32 nt, Human
uccccacagggaacacagcggaaaguagagag

SEQ ID NO: 233961 - RNA, 32 nt, Human
uccccacaugcacacagaacucugacacagga

SEQ ID NO: 233962 - RNA, 32 nt, Human
uccccaccacacccacaccacagccgcugaau

SEQ ID NO: 233963 - RNA, 32 nt, Human
uccccaccacagugaccacacccucacuggcu

SEQ ID NO: 233964 - RNA, 23 nt, Human
uccccaccaccaaccuauagcag

SEQ ID NO: 233965 - RNA, 32 nt, Human
uccccaccaccaccaucuccaucacccaccaa

SEQ ID NO: 233966 - RNA, 32 nt, Human
uccccaccaggcuguucucugcccuuacacca

SEQ ID NO: 233967 - RNA, 32 nt, Human
uccccaccaucccagcugcugugaaaugggca

SEQ ID NO: 233968 - RNA, 19 nt, Human
uccccaccaucccuggccu

SEQ ID NO: 233969 - RNA, 32 nt, Human
uccccacccaaaucucaucuugaauucccaug

SEQ ID NO: 233970 - RNA, 32 nt, Human
uccccacccaaaucucaucuuguagcucccau

SEQ ID NO: 233971 - RNA, 32 nt, Human
uccccacccaggacugagaggcuggagacccc

SEQ ID NO: 233972 - RNA, 32 nt, Human
uccccacccaggagggagguggcacuucuuaa

SEQ ID NO: 233973 - RNA, 20 nt, Human
uccccaccccaccccuaccu

SEQ ID NO: 233974 - RNA, 32 nt, Human
uccccacccccacccaagauggagucuggcuu

SEQ ID NO: 233975 - RNA, 32 nt, Human
uccccacccccaggcuggcaguagcacugcug

SEQ ID NO: 233976 - RNA, 18 nt, Human
uccccacccccggucccc

SEQ ID NO: 233977 - RNA, 17 nt, Human
uccccacccccuccuca

SEQ ID NO: 233978 - RNA, 32 nt, Human
uccccaccccucucccccaaaugcagcugaag

SEQ ID NO: 233979 - RNA, 23 nt, Human
uccccaccccucuccucugccca

SEQ ID NO: 233980 - RNA, 32 nt, Human
uccccaccccuucugccagacugccuuugaaa

SEQ ID NO: 233981 - RNA, 32 nt, Human
uccccacccucaccuccaucccaucaaagccc

SEQ ID NO: 233982 - RNA, 32 nt, Human
uccccacccugccucaguguucccauucacac

SEQ ID NO: 233983 - RNA, 32 nt, Human
uccccacccugccuccucccugcugcuuugca

SEQ ID NO: 233984 - RNA, 20 nt, Human
uccccacccuuccugaccug

SEQ ID NO: 233985 - RNA, 32 nt, Human
uccccacccuucuccccuuccuuugcccgggg

SEQ ID NO: 233986 - RNA, 32 nt, Human
uccccacccuuggcaaguucuccccaccccca

SEQ ID NO: 233987 - RNA, 32 nt, Human
uccccaccgcuuccugucucagcggaccuacu

SEQ ID NO: 233988 - RNA, 32 nt, Human
uccccaccgcuuucagugguagaaagaauucc

SEQ ID NO: 233989 - RNA, 32 nt, Human
uccccaccuccaccuugucacuccagguucug

SEQ ID NO: 233990 - RNA, 18 nt, Human
uccccaccuccccuucca

SEQ ID NO: 233991 - RNA, 32 nt, Human
uccccaccuccuugcucuccccagccugccaa

SEQ ID NO: 233992 - RNA, 32 nt, Human
uccccaccucucagugcugacggugccuucau

SEQ ID NO: 233993 - RNA, 32 nt, Human
uccccaccuguacaacaacggaaaggugugug

SEQ ID NO: 233994 - RNA, 24 nt, Human
uccccaccugucaggccugugacc

SEQ ID NO: 233995 - RNA, 32 nt, Human
uccccaccuuuccccgcuuucuauuccacaaa

SEQ ID NO: 233996 - RNA, 22 nt, Human
uccccacgaacuggccuggcca

SEQ ID NO: 233997 - RNA, 32 nt, Human
uccccacgccgauuuauaacaaaggccccugc

SEQ ID NO: 233998 - RNA, 32 nt, Human
uccccacgcugcuccccucuuccuaagcggcc

SEQ ID NO: 233999 - RNA, 22 nt, Human
uccccacggggccucgggaccu

SEQ ID NO: 234000 - RNA, 32 nt, Human
uccccacggugccacgggaggcucccuggcag

SEQ ID NO: 234001 - RNA, 27 nt, Human
uccccacgugagcaacagcuggcccag

SEQ ID NO: 234002 - RNA, 32 nt, Human
uccccacuaauggcuaggauggcaggguaggc

SEQ ID NO: 234003 - RNA, 32 nt, Human
uccccacuagccuuauagagggacugugugag

SEQ ID NO: 234004 - RNA, 32 nt, Human
uccccacuaugaccugcugugaccucaagcuc

SEQ ID NO: 234005 - RNA, 32 nt, Human
uccccacuaugcccaggagucuucccaaguug

SEQ ID NO: 234006 - RNA, 32 nt, Human
uccccacuauuccauuagaccccacaaauguu

SEQ ID NO: 234007 - RNA, 32 nt, Human
uccccacucagaucucaucuugaauucccaug

SEQ ID NO: 234008 - RNA, 32 nt, Human
uccccacuccaccccaacccucaccccacucu

SEQ ID NO: 234009 - RNA, 20 nt, Human
uccccacuccacuccgccca

SEQ ID NO: 234010 - RNA, 19 nt, Human
uccccacuccagccccuga

SEQ ID NO: 234011 - RNA, 32 nt, Human
uccccacucccccagccccuggcaaccacaaa

SEQ ID NO: 234012 - RNA, 32 nt, Human
uccccacucccccuguccccagucccugguaa

SEQ ID NO: 234013 - RNA, 32 nt, Human
uccccacucucacuucccuucccuucacagac

SEQ ID NO: 234014 - RNA, 32 nt, Human
uccccacucucaggcuggugggguggggaaag

SEQ ID NO: 234015 - RNA, 32 nt, Human
uccccacucugaugaucuccagccuccacugc

SEQ ID NO: 234016 - RNA, 24 nt, Human
uccccacucugcccaccucucuca

SEQ ID NO: 234017 - RNA, 32 nt, Human
uccccacugagcugggacccaggucauccacc

SEQ ID NO: 234018 - RNA, 24 nt, Human
uccccacugagucaggcuggggca

SEQ ID NO: 234019 - RNA, 32 nt, Human
uccccacugccgcguuguccaucacuaggacu

SEQ ID NO: 234020 - RNA, 32 nt, Human
uccccacugccuggccagagccauuguugucc

SEQ ID NO: 234021 - RNA, 32 nt, Human
uccccacugcucaugacagggaaccccuggau

SEQ ID NO: 234022 - RNA, 32 nt, Human
uccccacuggacugcauggcgacggcgugugg

SEQ ID NO: 234023 - RNA, 32 nt, Human
uccccacuggacugugagcugccugaggucag

SEQ ID NO: 234024 - RNA, 32 nt, Human
uccccacuggccagcuggaguagaugaaguuc

SEQ ID NO: 234025 - RNA, 32 nt, Human
uccccacugggggucuuccuccaccucccacu

SEQ ID NO: 234026 - RNA, 32 nt, Human
uccccacugucacuaaaaggcuuuuuacauuu

SEQ ID NO: 234027 - RNA, 18 nt, Human
uccccacugucagcaccu

SEQ ID NO: 234028 - RNA, 32 nt, Human
uccccacugucauucagggccugggucuccag

SEQ ID NO: 234029 - RNA, 32 nt, Human
uccccacuguggucugugcucuucuucauuau

SEQ ID NO: 234030 - RNA, 32 nt, Human
uccccacuuccuccugacaacccaggcacagc

SEQ ID NO: 234031 - RNA, 32 nt, Human
uccccacuuucuccuuuuccuuccuuccuggc

SEQ ID NO: 234032 - RNA, 32 nt, Human
uccccacuuucugcuuuccuugcccauguguc

SEQ ID NO: 234033 - RNA, 18 nt, Human
uccccacuuuuccuggcc

SEQ ID NO: 234034 - RNA, 24 nt, Human
uccccacuuuuuuaaaaccagaaa

SEQ ID NO: 234035 - RNA, 32 nt, Human
uccccagaacacugcucgacauggacaccggu

SEQ ID NO: 234036 - RNA, 32 nt, Human
uccccagaacaggcacugagcugaggaaaggc

SEQ ID NO: 234037 - RNA, 32 nt, Human
uccccagaaccagcugcagauggagguuuugu

SEQ ID NO: 234038 - RNA, 32 nt, Human
uccccagaagcagggaccucaggcaggaguac

SEQ ID NO: 234039 - RNA, 32 nt, Human
uccccagaauuugaguuugaggaagaauuuag

SEQ ID NO: 234040 - RNA, 32 nt, Human
uccccagacacauucuccugugccccucagag

SEQ ID NO: 234041 - RNA, 21 nt, Human
uccccagacagguauacuucu

SEQ ID NO: 234042 - RNA, 32 nt, Human
uccccagacaguuucagccagcgcugaggaaa

SEQ ID NO: 234043 - RNA, 32 nt, Human
uccccagaccucacuugccucugccuccaucu

SEQ ID NO: 234044 - RNA, 32 nt, Human
uccccagacgcuggcuugcaagcacagcagca

SEQ ID NO: 234045 - RNA, 32 nt, Human
uccccagacuugccccagcacagcuguggggg

SEQ ID NO: 234046 - RNA, 32 nt, Human
uccccagagaacacauuugucuucugagcugc

SEQ ID NO: 234047 - RNA, 32 nt, Human
uccccagagagggaggagccggugcccggcac

SEQ ID NO: 234048 - RNA, 24 nt, Human
uccccagagcaacagcuggcccag

SEQ ID NO: 234049 - RNA, 19 nt, Human
uccccagagggcucaccuu

SEQ ID NO: 234050 - RNA, 32 nt, Human
uccccagauggaagcuuccuccaaccuucagu

SEQ ID NO: 234051 - RNA, 32 nt, Human
uccccagauggggagacugaggccguggcugu

SEQ ID NO: 234052 - RNA, 32 nt, Human
uccccagauuccagauccaaggauuuggggau

SEQ ID NO: 234053 - RNA, 22 nt, Human
uccccagcaaaucaucgggcca

SEQ ID NO: 234054 - RNA, 32 nt, Human
uccccagcaagggggugcagcccagggucagg

SEQ ID NO: 234055 - RNA, 32 nt, Human
uccccagcaaugcagagcccccauggagggca

SEQ ID NO: 234056 - RNA, 24 nt, Human
uccccagcagaugcauccuggcca

SEQ ID NO: 234057 - RNA, 32 nt, Human
uccccagcagucucacuggacuggguugcuau

SEQ ID NO: 234058 - RNA, 32 nt, Human
uccccagcauugcuugcuccugggcaaacauu

SEQ ID NO: 234059 - RNA, 22 nt, Human
uccccagccacagcacacagga

SEQ ID NO: 234060 - RNA, 32 nt, Human
uccccagccagccucacucugucuccggcccg

SEQ ID NO: 234061 - RNA, 32 nt, Human
uccccagccaggaccccaggauguagacgccc

SEQ ID NO: 234062 - RNA, 32 nt, Human
uccccagccaucaucucuuacuacggaggccc

SEQ ID NO: 234063 - RNA, 32 nt, Human
uccccagccaugagucaguuugugcccaugaa

SEQ ID NO: 234064 - RNA, 32 nt, Human
uccccagcccaccuggcucacacacagccuca

SEQ ID NO: 234065 - RNA, 32 nt, Human
uccccagcccaccuggcucacacacagccucg

SEQ ID NO: 234066 - RNA, 32 nt, Human
uccccagcccagacauugagaaacuugggaag

SEQ ID NO: 234067 - RNA, 32 nt, Human
uccccagcccagacucuagcucccucuggcug

SEQ ID NO: 234068 - RNA, 32 nt, Human
uccccagcccaggagaggcugcggagccgcag

SEQ ID NO: 234069 - RNA, 32 nt, Human
uccccagcccaggagguggcuggauugcaggg

SEQ ID NO: 234070 - RNA, 32 nt, Human
uccccagccccaucccaaacccuucagugcca

SEQ ID NO: 234071 - RNA, 18 nt, Human
uccccagcccccucagag

SEQ ID NO: 234072 - RNA, 32 nt, Human
uccccagcccgcucccccucucugugcccugg

SEQ ID NO: 234073 - RNA, 21 nt, Human
uccccagcccugaaggccaag

SEQ ID NO: 234074 - RNA, 32 nt, Human
uccccagcccuggguuucuccgucuucaagac

SEQ ID NO: 234075 - RNA, 32 nt, Human
uccccagcccuuccagcuugggaacucauggg

SEQ ID NO: 234076 - RNA, 18 nt, Human
uccccagcccuuugcagg

SEQ ID NO: 234077 - RNA, 32 nt, Human
uccccagccucagccccagccccagccccagu

SEQ ID NO: 234078 - RNA, 32 nt, Human
uccccagccuccaacucaucaccucucaggcc

SEQ ID NO: 234079 - RNA, 32 nt, Human
uccccagccugcacuccugggcgaaggcugac

SEQ ID NO: 234080 - RNA, 32 nt, Human
uccccagccugcagagaacuccauguuaguac

SEQ ID NO: 234081 - RNA, 32 nt, Human
uccccagccugcuccuagcccagaggcucuaa

SEQ ID NO: 234082 - RNA, 32 nt, Human
uccccagccugggaaagccccugccccuccuc

SEQ ID NO: 234083 - RNA, 32 nt, Human
uccccagccugggaagaugucucacuguccac

SEQ ID NO: 234084 - RNA, 32 nt, Human
uccccagccuggugucccgcagucccaggaag

SEQ ID NO: 234085 - RNA, 32 nt, Human
uccccagccuuccucuggaggcugcggaaaua

SEQ ID NO: 234086 - RNA, 32 nt, Human
uccccagccuucuuucucucccagaagccuca

SEQ ID NO: 234087 - RNA, 32 nt, Human
uccccagcgagauacuuaccacucucucuucu

SEQ ID NO: 234088 - RNA, 32 nt, Human
uccccagcgccccaccaccaccacgugcaggu

SEQ ID NO: 234089 - RNA, 32 nt, Human
uccccagcgcucgcaggaaggaagaagggagc

SEQ ID NO: 234090 - RNA, 32 nt, Human
uccccagcggcuccuggccagcuccccacgga

SEQ ID NO: 234091 - RNA, 25 nt, Human
uccccagcguggccucacugucuuc

SEQ ID NO: 234092 - RNA, 32 nt, Human
uccccagcuacacuaugccugcagagagcggu

SEQ ID NO: 234093 - RNA, 32 nt, Human
uccccagcucaagugauccucccaccucagcc

SEQ ID NO: 234094 - RNA, 32 nt, Human
uccccagcucacugcgccccuuuuccagcccg

SEQ ID NO: 234095 - RNA, 19 nt, Human
uccccagcuccaucccaca

SEQ ID NO: 234096 - RNA, 32 nt, Human
uccccagcucgccucccugccugugcuggccu

SEQ ID NO: 234097 - RNA, 32 nt, Human
uccccagcucuacaaaccaggacagcugaauc

SEQ ID NO: 234098 - RNA, 32 nt, Human
uccccagcugcuccgagagaucaaaggacaca

SEQ ID NO: 234099 - RNA, 32 nt, Human
uccccagcuguccuccccuuggugcuccucuu

SEQ ID NO: 234100 - RNA, 32 nt, Human
uccccagcugucucccugaggcuccgcccugg

SEQ ID NO: 234101 - RNA, 32 nt, Human
uccccaggaaaugaucuuccacuugagcaacc

SEQ ID NO: 234102 - RNA, 32 nt, Human
uccccaggaagaugugggggaggcucuggccc

SEQ ID NO: 234103 - RNA, 32 nt, Human
uccccaggaccuggaugacacccgccucacug

SEQ ID NO: 234104 - RNA, 32 nt, Human
uccccaggagcagaagagaguggggccugccc

SEQ ID NO: 234105 - RNA, 32 nt, Human
uccccaggagccaggggucagggaggaggcug

SEQ ID NO: 234106 - RNA, 32 nt, Human
uccccaggagccaguccucugcucgucugcag

SEQ ID NO: 234107 - RNA, 21 nt, Human
uccccaggagccucugccuca

SEQ ID NO: 234108 - RNA, 32 nt, Human
uccccaggaggccaugguuagguuaucuccaa

SEQ ID NO: 234109 - RNA, 32 nt, Human
uccccaggaucacugggcaaugccggaaagag

SEQ ID NO: 234110 - RNA, 32 nt, Human
uccccaggaucacugggcaaugcuggaaagag

SEQ ID NO: 234111 - RNA, 32 nt, Human
uccccaggcaacacugauaguaccaaaagcug

SEQ ID NO: 234112 - RNA, 23 nt, Human
uccccaggcagcucgccuggcca

SEQ ID NO: 234113 - RNA, 32 nt, Human
uccccaggcaggaugugccaggagaacugcuc

SEQ ID NO: 234114 - RNA, 32 nt, Human
uccccaggcaggcaggaggccgcggggagcac

SEQ ID NO: 234115 - RNA, 32 nt, Human
uccccaggcagugcaugcugggagggaggaug

SEQ ID NO: 234116 - RNA, 32 nt, Human
uccccaggcaguucccaugcaggugauccacg

SEQ ID NO: 234117 - RNA, 32 nt, Human
uccccaggcaucaucccuaccucugcaggcuc

SEQ ID NO: 234118 - RNA, 32 nt, Human
uccccaggccaagaugggcaggugucacaaag

SEQ ID NO: 234119 - RNA, 23 nt, Human
uccccaggccauucugggaccua

SEQ ID NO: 234120 - RNA, 32 nt, Human
uccccaggccccggacaaagagcccagaggcc

SEQ ID NO: 234121 - RNA, 21 nt, Human
uccccaggcccguggucccua

SEQ ID NO: 234122 - RNA, 19 nt, Human
uccccaggcccugugaccu

SEQ ID NO: 234123 - RNA, 22 nt, Human
uccccaggccggagugcagugg

SEQ ID NO: 234124 - RNA, 31 nt, Human
uccccaggccucucugccugaaucugccucu

SEQ ID NO: 234125 - RNA, 23 nt, Human
uccccaggccucugccagccucu

SEQ ID NO: 234126 - RNA, 32 nt, Human
uccccaggcgcucacauguucauuccaauggc

SEQ ID NO: 234127 - RNA, 32 nt, Human
uccccaggcguuuucuguguucagaaguagua

SEQ ID NO: 234128 - RNA, 19 nt, Human
uccccaggcuccagcuggg

SEQ ID NO: 234129 - RNA, 32 nt, Human
uccccaggcugaucuugaacuccugggcucaa

SEQ ID NO: 234130 - RNA, 32 nt, Human
uccccaggcugcaucggccugccuguguuucc

SEQ ID NO: 234131 - RNA, 18 nt, Human
uccccaggcuggagugca

SEQ ID NO: 234132 - RNA, 20 nt, Human
uccccaggcuggagugcaau

SEQ ID NO: 234133 - RNA, 21 nt, Human
uccccaggcuggagugcaaug

SEQ ID NO: 234134 - RNA, 22 nt, Human
uccccaggcuggagugcaaugg

SEQ ID NO: 234135 - RNA, 32 nt, Human
uccccagggaaaggagaaaagagaaaacaggc

SEQ ID NO: 234136 - RNA, 32 nt, Human
uccccagggaagcagagugcaagagcagaaga

SEQ ID NO: 234137 - RNA, 32 nt, Human
uccccagggagggcucgaaggaagugcaggga

SEQ ID NO: 234138 - RNA, 32 nt, Human
uccccagggcaggccccuggauggacgcggcg

SEQ ID NO: 234139 - RNA, 32 nt, Human
uccccagggcccggcaccuccugcugcgagac

SEQ ID NO: 234140 - RNA, 32 nt, Human
uccccagggccugaaaccuacuccaccuuccu

SEQ ID NO: 234141 - RNA, 25 nt, Human
uccccagggccuuuuccuccucugc

SEQ ID NO: 234142 - RNA, 32 nt, Human
uccccaggggagagggucuggagaagcaguga

SEQ ID NO: 234143 - RNA, 32 nt, Human
uccccaggggguacucuggagugagcaguccc

SEQ ID NO: 234144 - RNA, 32 nt, Human
uccccagggguguacgguauuucuugacucug

SEQ ID NO: 234145 - RNA, 23 nt, Human
uccccagggugagcacaggaccu

SEQ ID NO: 234146 - RNA, 32 nt, Human
uccccagggugggagagcggcuccgcggccac

SEQ ID NO: 234147 - RNA, 32 nt, Human
uccccagggugggggugccaggagcccuuguc

SEQ ID NO: 234148 - RNA, 32 nt, Human
uccccagguagaagacuuucuccuucuuaaaa

SEQ ID NO: 234149 - RNA, 32 nt, Human
uccccagguagggagagccagaggugccagcc

SEQ ID NO: 234150 - RNA, 32 nt, Human
uccccagguccccaguggggcagcccucccca

SEQ ID NO: 234151 - RNA, 32 nt, Human
uccccaggugagugguaaccaccagaaguggc

SEQ ID NO: 234152 - RNA, 32 nt, Human
uccccaggugcuggguccaugcuguuugaacc

SEQ ID NO: 234153 - RNA, 32 nt, Human
uccccaguaccuucaguuccaggauuuaaaau

SEQ ID NO: 234154 - RNA, 32 nt, Human
uccccaguagagcugggacuacagguaugcgc

SEQ ID NO: 234155 - RNA, 32 nt, Human
uccccaguagcaucugccaagaagggugcuga

SEQ ID NO: 234156 - RNA, 20 nt, Human
uccccagucaccucuucugc

SEQ ID NO: 234157 - RNA, 32 nt, Human
uccccaguccaggacaaccauuaguccugaug

SEQ ID NO: 234158 - RNA, 32 nt, Human
uccccagucgagcccuccucccuuccccugcc

SEQ ID NO: 234159 - RNA, 32 nt, Human
uccccagucuucgccuuccucuuuuuaagcug

SEQ ID NO: 234160 - RNA, 32 nt, Human
uccccagugaaaaggcaagacgaucaaucaag

SEQ ID NO: 234161 - RNA, 28 nt, Human
uccccagugaaagcugccucauucuuuu

SEQ ID NO: 234162 - RNA, 32 nt, Human
uccccaguggaggcucugaaaggucuggugga

SEQ ID NO: 234163 - RNA, 32 nt, Human
uccccaguggggcagggugagcaggggcuucc

SEQ ID NO: 234164 - RNA, 32 nt, Human
uccccagugucugggagcaucuggcuuccucu

SEQ ID NO: 234165 - RNA, 32 nt, Human
uccccaguucaagcgauucuccugccucagcc

SEQ ID NO: 234166 - RNA, 32 nt, Human
uccccaguucacacgauucuccugccucagcc

SEQ ID NO: 234167 - RNA, 32 nt, Human
uccccaguucauggaaaaugauccucauggga

SEQ ID NO: 234168 - RNA, 32 nt, Human
uccccaguuccccagcccugcugugacuucca

SEQ ID NO: 234169 - RNA, 32 nt, Human
uccccaguucucuccagcuuucccugcagcug

SEQ ID NO: 234170 - RNA, 32 nt, Human
uccccaguuuuaaacuccuaucuuuuucuuua

SEQ ID NO: 234171 - RNA, 24 nt, Human
uccccauaaggagagacccugaca

SEQ ID NO: 234172 - RNA, 18 nt, Human
uccccauacaguagccug

SEQ ID NO: 234173 - RNA, 32 nt, Human
uccccauaccaaagugcugacaggcccuccgu

SEQ ID NO: 234174 - RNA, 32 nt, Human
uccccauauaagugagaaugaacaguauuucu

SEQ ID NO: 234175 - RNA, 32 nt, Human
uccccauauaagugagaaugagcaguauuucu

SEQ ID NO: 234176 - RNA, 32 nt, Human
uccccauaucuucucucccccaccuuuaucga

SEQ ID NO: 234177 - RNA, 32 nt, Human
uccccauaugccacccuucccccaaagcugau

SEQ ID NO: 234178 - RNA, 32 nt, Human
uccccaucaaggccagccugggaacauggagu

SEQ ID NO: 234179 - RNA, 32 nt, Human
uccccaucagcacagugggcucugccugugac

SEQ ID NO: 234180 - RNA, 22 nt, Human
uccccaucaguguggccugcca

SEQ ID NO: 234181 - RNA, 32 nt, Human
uccccaucaucucuucccagcaucaauacuuu

SEQ ID NO: 234182 - RNA, 32 nt, Human
uccccauccaagugucaucuugaauucccaca

SEQ ID NO: 234183 - RNA, 32 nt, Human
uccccauccauggcccgagggggaaccuggug

SEQ ID NO: 234184 - RNA, 23 nt, Human
uccccaucccccgugucucucac

SEQ ID NO: 234185 - RNA, 32 nt, Human
uccccaucccggcaagggaggaagggacgccc

SEQ ID NO: 234186 - RNA, 32 nt, Human
uccccauccuagguauggaacagaucaaacca

SEQ ID NO: 234187 - RNA, 32 nt, Human
uccccauccuccauccccgucucccaucgccg

SEQ ID NO: 234188 - RNA, 32 nt, Human
uccccaucuccuggcccuucugauucuggucc

SEQ ID NO: 234189 - RNA, 20 nt, Human
uccccaucuccuugagucag

SEQ ID NO: 234190 - RNA, 32 nt, Human
uccccaucucuucuccuuuguaccugucaaca

SEQ ID NO: 234191 - RNA, 32 nt, Human
uccccaucugaagaauggggacaggaaaggau

SEQ ID NO: 234192 - RNA, 32 nt, Human
uccccaucuggcugguuccauuuccuuggcuc

SEQ ID NO: 234193 - RNA, 32 nt, Human
uccccaucuuggcugcuguccugccucugacc

SEQ ID NO: 234194 - RNA, 21 nt, Human
uccccaugaccccguguggcc

SEQ ID NO: 234195 - RNA, 20 nt, Human
uccccaugacccuccaccug

SEQ ID NO: 234196 - RNA, 32 nt, Human
uccccaugagcagagucuguccucugcucuuc

SEQ ID NO: 234197 - RNA, 19 nt, Human
uccccaugauguugugacc

SEQ ID NO: 234198 - RNA, 32 nt, Human
uccccaugcaccuugcucacacacccaauccc

SEQ ID NO: 234199 - RNA, 21 nt, Human
uccccaugccccuguguccug

SEQ ID NO: 234200 - RNA, 32 nt, Human
uccccaugcgcacacacauacacacaccccaa

SEQ ID NO: 234201 - RNA, 20 nt, Human
uccccaugcugcccaugacc

SEQ ID NO: 234202 - RNA, 32 nt, Human
uccccaugcugcucauccuccugggccccauc

SEQ ID NO: 234203 - RNA, 32 nt, Human
uccccaugcuguucccugcacuguuccccaug

SEQ ID NO: 234204 - RNA, 22 nt, Human
uccccauggaugaccgcaaccu

SEQ ID NO: 234205 - RNA, 32 nt, Human
uccccauggccacagcugagugccccagggag

SEQ ID NO: 234206 - RNA, 22 nt, Human
uccccaugggugggggaaccug

SEQ ID NO: 234207 - RNA, 24 nt, Human
uccccauggguuguggaaggguug

SEQ ID NO: 234208 - RNA, 20 nt, Human
uccccaugguaacugaucug

SEQ ID NO: 234209 - RNA, 23 nt, Human
uccccaugguacgucccacccug

SEQ ID NO: 234210 - RNA, 22 nt, Human
uccccauggugaagucaggccu

SEQ ID NO: 234211 - RNA, 20 nt, Human
uccccauggugaauguuacc

SEQ ID NO: 234212 - RNA, 32 nt, Human
uccccaugguuuccagcucaauccaccccuga

SEQ ID NO: 234213 - RNA, 32 nt, Human
uccccauguacauacaugcacauacucaaaca

SEQ ID NO: 234214 - RNA, 32 nt, Human
uccccauguagaagcuggaagcugcugaguuu

SEQ ID NO: 234215 - RNA, 32 nt, Human
uccccaugugcugcaucagauucccccaaaua

SEQ ID NO: 234216 - RNA, 32 nt, Human
uccccauuaaacugggugccuggugaggacac

SEQ ID NO: 234217 - RNA, 32 nt, Human
uccccauucacagagccuuuuucacaauucca

SEQ ID NO: 234218 - RNA, 23 nt, Human
uccccauucccagggccccucca

SEQ ID NO: 234219 - RNA, 32 nt, Human
uccccauuccuagcagggccugaggcccuccu

SEQ ID NO: 234220 - RNA, 24 nt, Human
uccccauuccucccuccugccaca

SEQ ID NO: 234221 - RNA, 32 nt, Human
uccccauucgaggccuucacagugucacccac

SEQ ID NO: 234222 - RNA, 32 nt, Human
uccccauucucuccuuucaccaucucuccucu

SEQ ID NO: 234223 - RNA, 18 nt, Human
uccccauucugugugcug

SEQ ID NO: 234224 - RNA, 26 nt, Human
uccccauucuugaaagcugcuggggc

SEQ ID NO: 234225 - RNA, 32 nt, Human
uccccauugggaacagggugauugaggaaagu

SEQ ID NO: 234226 - RNA, 32 nt, Human
uccccauugguggaccaggugcucugaggcug

SEQ ID NO: 234227 - RNA, 32 nt, Human
uccccauuguagauuagucucuucucacuaaa

SEQ ID NO: 234228 - RNA, 32 nt, Human
uccccauuuccagaugggaggccacuguccag

SEQ ID NO: 234229 - RNA, 32 nt, Human
uccccauuuuacaaccaaggcaucuaaagcaa

SEQ ID NO: 234230 - RNA, 32 nt, Human
ucccccaaaggguguccguucuuaauucccac

SEQ ID NO: 234231 - RNA, 32 nt, Human
ucccccaacauacacacacuucauacaccaca

SEQ ID NO: 234232 - RNA, 32 nt, Human
ucccccaaccagagauccaaggccugugggcc

SEQ ID NO: 234233 - RNA, 32 nt, Human
ucccccaaccucccccuccuguccccucuguu

SEQ ID NO: 234234 - RNA, 32 nt, Human
ucccccaacgcaucccagccagugccaugucc

SEQ ID NO: 234235 - RNA, 32 nt, Human
ucccccaacucuuaugcacagaacacaggcag

SEQ ID NO: 234236 - RNA, 32 nt, Human
ucccccaacucuugaacgaugaugauauucag

SEQ ID NO: 234237 - RNA, 32 nt, Human
ucccccaagacuugaauggcuugagugggacu

SEQ ID NO: 234238 - RNA, 19 nt, Human
ucccccaagaggccagugg

SEQ ID NO: 234239 - RNA, 32 nt, Human
ucccccaagcacuguguucuggcucggcccaa

SEQ ID NO: 234240 - RNA, 22 nt, Human
ucccccaagcuggaguacaaug

SEQ ID NO: 234241 - RNA, 22 nt, Human
ucccccaagggcccccucuaag

SEQ ID NO: 234242 - RNA, 23 nt, Human
ucccccaaucccugcugggcugc

SEQ ID NO: 234243 - RNA, 32 nt, Human
ucccccacaauacaacauugggcugcugaacc

SEQ ID NO: 234244 - RNA, 32 nt, Human
ucccccacagccucuuccucccuucccucccc

SEQ ID NO: 234245 - RNA, 32 nt, Human
ucccccacaggcaugucaaggagagaaccugc

SEQ ID NO: 234246 - RNA, 32 nt, Human
ucccccacauccuccccugaguccggagcuac

SEQ ID NO: 234247 - RNA, 32 nt, Human
ucccccacccacccauucccgcccuuugcagc

SEQ ID NO: 234248 - RNA, 32 nt, Human
ucccccaccccacaggugguguugggacaccu

SEQ ID NO: 234249 - RNA, 32 nt, Human
ucccccaccccaccaccucggcccagcgcccc

SEQ ID NO: 234250 - RNA, 32 nt, Human
ucccccaccccgaggccuggguagggacaggg

SEQ ID NO: 234251 - RNA, 32 nt, Human
ucccccacccucucuccuccccaacccuucag

SEQ ID NO: 234252 - RNA, 32 nt, Human
ucccccacccugacccucccauggcccucucc

SEQ ID NO: 234253 - RNA, 32 nt, Human
ucccccacccuuguuccaguuguuaguuacua

SEQ ID NO: 234254 - RNA, 32 nt, Human
ucccccaccgcaaccuccaucucccggguuca

SEQ ID NO: 234255 - RNA, 32 nt, Human
ucccccaccgccgccucggagcucagcacacc

SEQ ID NO: 234256 - RNA, 25 nt, Human
ucccccaccucagccagugagucag

SEQ ID NO: 234257 - RNA, 32 nt, Human
ucccccaccucuccacuaguuggaccaagguu

SEQ ID NO: 234258 - RNA, 32 nt, Human
ucccccaccugggucugugcccugccccgcgc

SEQ ID NO: 234259 - RNA, 32 nt, Human
ucccccaccuuucaccagagaagaggacguug

SEQ ID NO: 234260 - RNA, 32 nt, Human
ucccccaccuuugccugcuguugcuggaagag

SEQ ID NO: 234261 - RNA, 32 nt, Human
ucccccacuacugcagcaccuccaggccuguu

SEQ ID NO: 234262 - RNA, 32 nt, Human
ucccccacucaggccucuggaagguccaggga

SEQ ID NO: 234263 - RNA, 32 nt, Human
ucccccacugucugggacacaggacagguguu

SEQ ID NO: 234264 - RNA, 32 nt, Human
ucccccagaagaacuggagaaauaccagcaaa

SEQ ID NO: 234265 - RNA, 32 nt, Human
ucccccagaaggaaugcagccucucugacacc

SEQ ID NO: 234266 - RNA, 18 nt, Human
ucccccagaccccuccca

SEQ ID NO: 234267 - RNA, 32 nt, Human
ucccccagaccccuccugggcaggcaggugcc

SEQ ID NO: 234268 - RNA, 32 nt, Human
ucccccagacuggacagggaaucucagcuuuc

SEQ ID NO: 234269 - RNA, 32 nt, Human
ucccccagacuggagugcaauggcacgaucuc

SEQ ID NO: 234270 - RNA, 32 nt, Human
ucccccagauccaagccugggggaucccggga

SEQ ID NO: 234271 - RNA, 32 nt, Human
ucccccagauucugauucuacagcugcagaau

SEQ ID NO: 234272 - RNA, 32 nt, Human
ucccccagcacacacacauacaacacagauca

SEQ ID NO: 234273 - RNA, 32 nt, Human
ucccccagcagagccacacagccuucgugaca

SEQ ID NO: 234274 - RNA, 32 nt, Human
ucccccagcccaaacagccuugguucaucagu

SEQ ID NO: 234275 - RNA, 32 nt, Human
ucccccagccugacacccguaaagcgucugug

SEQ ID NO: 234276 - RNA, 32 nt, Human
ucccccagccugacacccguaaagggucugug

SEQ ID NO: 234277 - RNA, 32 nt, Human
ucccccagccugacaucagggacagaccacac

SEQ ID NO: 234278 - RNA, 32 nt, Human
ucccccagcgcugaagcacgggguucagcggc

SEQ ID NO: 234279 - RNA, 23 nt, Human
ucccccaggagcccaaaaccaca

SEQ ID NO: 234280 - RNA, 32 nt, Human
ucccccaggcagcagcugugugauucaucacc

SEQ ID NO: 234281 - RNA, 22 nt, Human
ucccccaggcuggagugcagug

SEQ ID NO: 234282 - RNA, 32 nt, Human
ucccccaggcuggagugcaguggcacaaugac

SEQ ID NO: 234283 - RNA, 32 nt, Human
ucccccaggcuggagugcaguggcgcgaucuu

SEQ ID NO: 234284 - RNA, 32 nt, Human
ucccccaggcuggagugcagugguacaagcac

SEQ ID NO: 234285 - RNA, 32 nt, Human
ucccccaggcuggagugcaguggugcgaucuc

SEQ ID NO: 234286 - RNA, 32 nt, Human
ucccccaggcuggagugccguggcgugaucuc

SEQ ID NO: 234287 - RNA, 22 nt, Human
ucccccaggcuggaguguagug

SEQ ID NO: 234288 - RNA, 23 nt, Human
ucccccaggcuggaguguagugg

SEQ ID NO: 234289 - RNA, 32 nt, Human
ucccccaggcuggcgugcaguagcaugaucuu

SEQ ID NO: 234290 - RNA, 32 nt, Human
ucccccaggcugguggccgagcugcagggcgc

SEQ ID NO: 234291 - RNA, 22 nt, Human
ucccccaggcuugagugcaaug

SEQ ID NO: 234292 - RNA, 32 nt, Human
ucccccagggcugaggaccccuccaggccccu

SEQ ID NO: 234293 - RNA, 32 nt, Human
ucccccagggucuugcucugucacccaggcug

SEQ ID NO: 234294 - RNA, 32 nt, Human
ucccccagugcugaucuugcugggccuuagcu

SEQ ID NO: 234295 - RNA, 32 nt, Human
ucccccaguuguucucauaguaaugaguucuc

SEQ ID NO: 234296 - RNA, 25 nt, Human
ucccccauagcaccaccgugcuggc

SEQ ID NO: 234297 - RNA, 32 nt, Human
ucccccauccacuccuguucccuuccucucuu

SEQ ID NO: 234298 - RNA, 32 nt, Human
ucccccauccccauccuccagcuucugguacu

SEQ ID NO: 234299 - RNA, 32 nt, Human
ucccccaucuccucaaauggucaauuuucuga

SEQ ID NO: 234300 - RNA, 32 nt, Human
ucccccaucuucuucuuccuccuccgucuccu

SEQ ID NO: 234301 - RNA, 32 nt, Human
ucccccaugaccuccucccacccucccccugc

SEQ ID NO: 234302 - RNA, 32 nt, Human
ucccccaugccaccacccaccccaaacuucca

SEQ ID NO: 234303 - RNA, 32 nt, Human
ucccccaugcccagguguggugaagugaaucc

SEQ ID NO: 234304 - RNA, 32 nt, Human
ucccccauguggauauuucuuauacuaauugu

SEQ ID NO: 234305 - RNA, 32 nt, Human
ucccccauuagacaccugcuccuccaagccug

SEQ ID NO: 234306 - RNA, 32 nt, Human
ucccccauuccuucuuuugggcucuagaaagu

SEQ ID NO: 234307 - RNA, 32 nt, Human
ucccccauucucccugcauccuuguccuugca

SEQ ID NO: 234308 - RNA, 32 nt, Human
ucccccauuguguuaagaacccagcaacccag

SEQ ID NO: 234309 - RNA, 19 nt, Human
uccccccaaaccccucuca

SEQ ID NO: 234310 - RNA, 17 nt, Human
uccccccaaccuccuca

SEQ ID NO: 234311 - RNA, 23 nt, Human
uccccccaaggcuugcugaccca

SEQ ID NO: 234312 - RNA, 17 nt, Human
uccccccacacugcuca

SEQ ID NO: 234313 - RNA, 21 nt, Human
uccccccaccccagggaugga

SEQ ID NO: 234314 - RNA, 18 nt, Human
uccccccacccgcugccu

SEQ ID NO: 234315 - RNA, 18 nt, Human
uccccccacggccccuca

SEQ ID NO: 234316 - RNA, 22 nt, Human
uccccccgccagcuccaucccc

SEQ ID NO: 234317 - RNA, 21 nt, Human
uccccccgccccacccgcccc

SEQ ID NO: 234318 - RNA, 32 nt, Human
ucccccgaccaccuccuccucugccucaaaga

SEQ ID NO: 234319 - RNA, 32 nt, Human
ucccccgaccgcacuccagccugggcgacaga

SEQ ID NO: 234320 - RNA, 32 nt, Human
ucccccgaguagcugggauuacagaugcccac

SEQ ID NO: 234321 - RNA, 32 nt, Human
ucccccgauuagcuggaauuacaggugccugc

SEQ ID NO: 234322 - RNA, 32 nt, Human
ucccccgcaggccucccuccccugugacuccc

SEQ ID NO: 234323 - RNA, 32 nt, Human
ucccccgccccaggcccuuccccaccgagacg

SEQ ID NO: 234324 - RNA, 32 nt, Human
ucccccggcaggcggcgcucagcuggacacug

SEQ ID NO: 234325 - RNA, 32 nt, Human
ucccccggccuggguggggagagcgagcuggg

SEQ ID NO: 234326 - RNA, 22 nt, Human
ucccccggcuucccucuucugu

SEQ ID NO: 234327 - RNA, 32 nt, Human
ucccccgggcagcuccagggauguggccucau

SEQ ID NO: 234328 - RNA, 32 nt, Human
ucccccggggcagcggcugagccccagccggg

SEQ ID NO: 234329 - RNA, 32 nt, Human
ucccccggucugagagaggggaggccgagcag

SEQ ID NO: 234330 - RNA, 32 nt, Human
ucccccgguguugggcagguucugagcugccc

SEQ ID NO: 234331 - RNA, 32 nt, Human
ucccccuaaagccacagggaugggguaucuuc

SEQ ID NO: 234332 - RNA, 32 nt, Human
ucccccuaacagccuggucaaacugggcuaua

SEQ ID NO: 234333 - RNA, 32 nt, Human
ucccccuacuucuccccaagggccaagaacug

SEQ ID NO: 234334 - RNA, 32 nt, Human
ucccccuagccugccuccccugccucaccagc

SEQ ID NO: 234335 - RNA, 32 nt, Human
ucccccucacccaagggcagugggcaugaauc

SEQ ID NO: 234336 - RNA, 32 nt, Human
ucccccucaggccaccuccuguccucacuccu

SEQ ID NO: 234337 - RNA, 23 nt, Human
ucccccucaucuccagugacuca

SEQ ID NO: 234338 - RNA, 32 nt, Human
ucccccucauuucucuuccuccucaccuccac

SEQ ID NO: 234339 - RNA, 32 nt, Human
ucccccuccagccucccacuugguagcaccuu

SEQ ID NO: 234340 - RNA, 32 nt, Human
ucccccuccaucucucagggagacaaagaacc

SEQ ID NO: 234341 - RNA, 32 nt, Human
ucccccuccaugguuuccccaggauaugaguu

SEQ ID NO: 234342 - RNA, 32 nt, Human
ucccccucccacaggacgcccccacacagcug

SEQ ID NO: 234343 - RNA, 32 nt, Human
ucccccucccccagccacuccccagccagccu

SEQ ID NO: 234344 - RNA, 32 nt, Human
ucccccucccccagcucagaccacagaggugg

SEQ ID NO: 234345 - RNA, 32 nt, Human
ucccccuccccucccccuccccaacucagauc

SEQ ID NO: 234346 - RNA, 32 nt, Human
ucccccucccuacagagagaugcugucccgug

SEQ ID NO: 234347 - RNA, 32 nt, Human
ucccccucccucauccucccaucccaguaaac

SEQ ID NO: 234348 - RNA, 31 nt, Human
ucccccuccuacucugggccucaguuucccu

SEQ ID NO: 234349 - RNA, 32 nt, Human
ucccccuccuacucugggccucaguuucccua

SEQ ID NO: 234350 - RNA, 32 nt, Human
ucccccuccuccaccccagccugcugcugcua

SEQ ID NO: 234351 - RNA, 32 nt, Human
ucccccuccucccccuccuuuccgucuucccu

SEQ ID NO: 234352 - RNA, 32 nt, Human
ucccccuccucuucucccuccucucuccucuu

SEQ ID NO: 234353 - RNA, 32 nt, Human
ucccccuccuucccccucuccccauuguauuu

SEQ ID NO: 234354 - RNA, 22 nt, Human
ucccccuccuucucucuccugc

SEQ ID NO: 234355 - RNA, 32 nt, Human
ucccccucggaggcggcgggcggaggcggcgg

SEQ ID NO: 234356 - RNA, 32 nt, Human
ucccccucggccgccuccacgacccggaguag

SEQ ID NO: 234357 - RNA, 32 nt, Human
ucccccucgguguuugcaugcgccccggcccu

SEQ ID NO: 234358 - RNA, 32 nt, Human
ucccccucgguuuuauccauuuccuugccucc

SEQ ID NO: 234359 - RNA, 32 nt, Human
ucccccucuccucucccccagguuggggcugg

SEQ ID NO: 234360 - RNA, 32 nt, Human
ucccccucucuuccaauauccaugucucauac

SEQ ID NO: 234361 - RNA, 32 nt, Human
ucccccucuggccguguucccuccccggcuca

SEQ ID NO: 234362 - RNA, 32 nt, Human
ucccccucuggcuccagcuggccgggagccug

SEQ ID NO: 234363 - RNA, 32 nt, Human
ucccccugcaacuuccgcugaggggucucgga

SEQ ID NO: 234364 - RNA, 32 nt, Human
ucccccugcacagacaugagaccauaggggac

SEQ ID NO: 234365 - RNA, 32 nt, Human
ucccccugcagcuacucuucagaucuggcucu

SEQ ID NO: 234366 - RNA, 32 nt, Human
ucccccugcauuccugucugggugaagaggag

SEQ ID NO: 234367 - RNA, 32 nt, Human
ucccccugccaagacaaaggguccagaaggcu

SEQ ID NO: 234368 - RNA, 32 nt, Human
ucccccugccgugcccuggccucccacuaacu

SEQ ID NO: 234369 - RNA, 32 nt, Human
ucccccugccuccuccuccuccucgucuuagg

SEQ ID NO: 234370 - RNA, 31 nt, Human
ucccccugccucucuggccucuugucucccc

SEQ ID NO: 234371 - RNA, 31 nt, Human
ucccccugccucuucggcuguguuuucucuu

SEQ ID NO: 234372 - RNA, 32 nt, Human
ucccccugcucaaaggagggguuggcggugca

SEQ ID NO: 234373 - RNA, 25 nt, Human
ucccccuguaagaugcuguaucauu

SEQ ID NO: 234374 - RNA, 32 nt, Human
ucccccuguaggaugaggaaaccagguggcua

SEQ ID NO: 234375 - RNA, 32 nt, Human
ucccccugucccccacccucauggcccaccuc

SEQ ID NO: 234376 - RNA, 32 nt, Human
ucccccugugccagauccuccccuaugcugac

SEQ ID NO: 234377 - RNA, 32 nt, Human
ucccccuguucccagcccuagcugcaccuccc

SEQ ID NO: 234378 - RNA, 32 nt, Human
ucccccuguucuggucccuccuggagcgcccg

SEQ ID NO: 234379 - RNA, 32 nt, Human
ucccccuuaccucccccacccccuuuaucacc

SEQ ID NO: 234380 - RNA, 32 nt, Human
ucccccuucccaaguccauucccacuguaggc

SEQ ID NO: 234381 - RNA, 32 nt, Human
ucccccuucccccuccaacacauacaccgcaa

SEQ ID NO: 234382 - RNA, 32 nt, Human
ucccccuucccuaccucuuucuccuuacugac

SEQ ID NO: 234383 - RNA, 32 nt, Human
ucccccuuccgcccucucccacccucuccucc

SEQ ID NO: 234384 - RNA, 32 nt, Human
ucccccuuccucucccccuuccucucucccuu

SEQ ID NO: 234385 - RNA, 32 nt, Human
ucccccuucuccccaucccggucuccagagac

SEQ ID NO: 234386 - RNA, 32 nt, Human
ucccccuucugagggauggcucugagagggac

SEQ ID NO: 234387 - RNA, 32 nt, Human
ucccccuucugugugucccucucccccaguua

SEQ ID NO: 234388 - RNA, 32 nt, Human
ucccccuucuuacccugucugugaucuugucu

SEQ ID NO: 234389 - RNA, 32 nt, Human
ucccccuugccuggcuccugugguggcaggcu

SEQ ID NO: 234390 - RNA, 16 nt, Human
ucccccuugcuugcca

SEQ ID NO: 234391 - RNA, 32 nt, Human
ucccccuuggucgguggcggagcugcugagcg

SEQ ID NO: 234392 - RNA, 32 nt, Human
ucccccuuguaacccaugugccagaugugugg

SEQ ID NO: 234393 - RNA, 23 nt, Human
ucccccuugucagucagcaccuu

SEQ ID NO: 234394 - RNA, 32 nt, Human
ucccccuuuauuuuccuuuuugcccaauaaau

SEQ ID NO: 234395 - RNA, 32 nt, Human
ucccccuuucaucaguccgauucgcaguuugu

SEQ ID NO: 234396 - RNA, 32 nt, Human
ucccccuuucccauaauucaugacaucaaaac

SEQ ID NO: 234397 - RNA, 32 nt, Human
ucccccuuucguacuucauuuguguucucuua

SEQ ID NO: 234398 - RNA, 32 nt, Human
ucccccuuucucuccagccugacuuggggaga

SEQ ID NO: 234399 - RNA, 32 nt, Human
ucccccuuucuguuguuugcacaugccccucu

SEQ ID NO: 234400 - RNA, 21 nt, Human
ucccccuuuucccuccucugu

SEQ ID NO: 234401 - RNA, 32 nt, Human
uccccgaagacaccugcacccuccaugcggag

SEQ ID NO: 234402 - RNA, 32 nt, Human
uccccgaauuuccucuggugcauggggcauca

SEQ ID NO: 234403 - RNA, 32 nt, Human
uccccgacacccagacagaggcugcagggcug

SEQ ID NO: 234404 - RNA, 32 nt, Human
uccccgagagacaugguuuccaugagcacagu

SEQ ID NO: 234405 - RNA, 32 nt, Human
uccccgagcacuccagccuggcagucagcacc

SEQ ID NO: 234406 - RNA, 32 nt, Human
uccccgaggacaucuuucucugcaaguuuuuc

SEQ ID NO: 234407 - RNA, 32 nt, Human
uccccgaggccggagugcaauggcgugaucuc

SEQ ID NO: 234408 - RNA, 32 nt, Human
uccccgaggcggagguugcacugagccgagau

SEQ ID NO: 234409 - RNA, 32 nt, Human
uccccgagucccgccccgugugcaguguauug

SEQ ID NO: 234410 - RNA, 32 nt, Human
uccccgagugccuguggugcccaagagcuaug

SEQ ID NO: 234411 - RNA, 32 nt, Human
uccccgaucagugugugccuguuuacagcacu

SEQ ID NO: 234412 - RNA, 32 nt, Human
uccccgauccacccaggccuuucuguaaauaa

SEQ ID NO: 234413 - RNA, 32 nt, Human
uccccgauccugggcucccucuugauuaguag

SEQ ID NO: 234414 - RNA, 32 nt, Human
uccccgauggccugggugagggcaggcuggcu

SEQ ID NO: 234415 - RNA, 32 nt, Human
uccccgauguuccucuccugaauucuggauuu

SEQ ID NO: 234416 - RNA, 32 nt, Human
uccccgauucacgccauucuccugccucagcc

SEQ ID NO: 234417 - RNA, 32 nt, Human
uccccgauucaucuacccugcugaccucccag

SEQ ID NO: 234418 - RNA, 23 nt, Human
uccccgauucugugccuggccua

SEQ ID NO: 234419 - RNA, 26 nt, Human
uccccgcaacccaccucggggaucug

SEQ ID NO: 234420 - RNA, 32 nt, Human
uccccgcacccaccuccugucucccucccucc

SEQ ID NO: 234421 - RNA, 17 nt, Human
uccccgcacccuggccu

SEQ ID NO: 234422 - RNA, 32 nt, Human
uccccgcagcaugggcaccagccucagcccga

SEQ ID NO: 234423 - RNA, 32 nt, Human
uccccgcagccccugugccggauuucauuucc

SEQ ID NO: 234424 - RNA, 32 nt, Human
uccccgcagggguggagccugagcgaggagcc

SEQ ID NO: 234425 - RNA, 18 nt, Human
uccccgcagucccugccu

SEQ ID NO: 234426 - RNA, 32 nt, Human
uccccgcaguugccuccuucucugccugccug

SEQ ID NO: 234427 - RNA, 32 nt, Human
uccccgcauuguggcaucagugcugcugcuuc

SEQ ID NO: 234428 - RNA, 18 nt, Human
uccccgccaacccugccu

SEQ ID NO: 234429 - RNA, 32 nt, Human
uccccgccaagucccgcaggucucgcagucgc

SEQ ID NO: 234430 - RNA, 32 nt, Human
uccccgccacucagaccuggguggugauaacc

SEQ ID NO: 234431 - RNA, 32 nt, Human
uccccgccagaggcggcggcggcggcggcagc

SEQ ID NO: 234432 - RNA, 18 nt, Human
uccccgccccaccuccca

SEQ ID NO: 234433 - RNA, 20 nt, Human
uccccgccccucccgccgcc

SEQ ID NO: 234434 - RNA, 18 nt, Human
uccccgccccucucccca

SEQ ID NO: 234435 - RNA, 32 nt, Human
uccccgcccuaaaaggaggcagugaggaccag

SEQ ID NO: 234436 - RNA, 19 nt, Human
uccccgcccugccccgccc

SEQ ID NO: 234437 - RNA, 32 nt, Human
uccccgccuaggacaggagcugucuggagcuc

SEQ ID NO: 234438 - RNA, 32 nt, Human
uccccgccucacugcccuucugcccaucucca

SEQ ID NO: 234439 - RNA, 32 nt, Human
uccccgccucagggaaugcacaugccucccca

SEQ ID NO: 234440 - RNA, 32 nt, Human
uccccgccuccaggacagagccucggucugca

SEQ ID NO: 234441 - RNA, 32 nt, Human
uccccgccucccucucugggcagauguguuac

SEQ ID NO: 234442 - RNA, 16 nt, Human
uccccgccucgccgcc

SEQ ID NO: 234443 - RNA, 19 nt, Human
uccccgccucucccugccc

SEQ ID NO: 234444 - RNA, 17 nt, Human
uccccgccucugcgccc

SEQ ID NO: 234445 - RNA, 18 nt, Human
uccccgccugccuggacu

SEQ ID NO: 234446 - RNA, 32 nt, Human
uccccgccugcugcagcuccucccagaaccgc

SEQ ID NO: 234447 - RNA, 32 nt, Human
uccccgccuggcgccugcccuccagggcuggg

SEQ ID NO: 234448 - RNA, 32 nt, Human
uccccgccugggagcucagcuuuccucagaac

SEQ ID NO: 234449 - RNA, 32 nt, Human
uccccgccugggcuccccuugcugcccuugcc

SEQ ID NO: 234450 - RNA, 18 nt, Human
uccccgccuguccugccu

SEQ ID NO: 234451 - RNA, 32 nt, Human
uccccgccuucccucacucuuccucauccugc

SEQ ID NO: 234452 - RNA, 32 nt, Human
uccccgcgcggcgcaucccagccugggcggga

SEQ ID NO: 234453 - RNA, 32 nt, Human
uccccgcgcuuccucuugcuccucgcugcucc

SEQ ID NO: 234454 - RNA, 32 nt, Human
uccccgcggcaggaagagucucucucugccca

SEQ ID NO: 234455 - RNA, 32 nt, Human
uccccgcggggccggugcaggcuguggcugcc

SEQ ID NO: 234456 - RNA, 32 nt, Human
uccccgcuacccccugcaccugaggcccagcg

SEQ ID NO: 234457 - RNA, 32 nt, Human
uccccgcuacccccugcaccugaggcccaggg

SEQ ID NO: 234458 - RNA, 32 nt, Human
uccccgcucagggggagcaggaggacagcugg

SEQ ID NO: 234459 - RNA, 32 nt, Human
uccccgcucagucuuugagcgagcccauuuug

SEQ ID NO: 234460 - RNA, 32 nt, Human
uccccgcucaugucccacaccugccauauuga

SEQ ID NO: 234461 - RNA, 32 nt, Human
uccccgcuccaggagacgcucgagucugcguc

SEQ ID NO: 234462 - RNA, 23 nt, Human
uccccgcucuucccagugaagga

SEQ ID NO: 234463 - RNA, 18 nt, Human
uccccgcugcccugggcu

SEQ ID NO: 234464 - RNA, 32 nt, Human
uccccgcuggcugcuuucuuccugccccugcu

SEQ ID NO: 234465 - RNA, 22 nt, Human
uccccgcugugguuggcagcca

SEQ ID NO: 234466 - RNA, 19 nt, Human
uccccgcuuuccugggccu

SEQ ID NO: 234467 - RNA, 32 nt, Human
uccccgcuuucuuuggaggcagcagcucccgc

SEQ ID NO: 234468 - RNA, 32 nt, Human
uccccgcuuuuucacucccauaccuuuaaugg

SEQ ID NO: 234469 - RNA, 32 nt, Human
uccccggacaagcccaggacacugccuuugcu

SEQ ID NO: 234470 - RNA, 18 nt, Human
uccccggaccccgacccc

SEQ ID NO: 234471 - RNA, 32 nt, Human
uccccggagaggggcagcagugcgggaggggc

SEQ ID NO: 234472 - RNA, 18 nt, Human
uccccggcaccucacucc

SEQ ID NO: 234473 - RNA, 32 nt, Human
uccccggcagugagcuauggacuuucuucccc

SEQ ID NO: 234474 - RNA, 32 nt, Human
uccccggccauguggaacucccagagacagaa

SEQ ID NO: 234475 - RNA, 32 nt, Human
uccccggcccucagaggccuggcacugcggga

SEQ ID NO: 234476 - RNA, 21 nt, Human
uccccggcuccagcccggucc

SEQ ID NO: 234477 - RNA, 32 nt, Human
uccccggcuccggacagcccagggcggccggg

SEQ ID NO: 234478 - RNA, 28 nt, Human
uccccggcuccguggcucuggggcacug

SEQ ID NO: 234479 - RNA, 32 nt, Human
uccccggcugugacacucuacccuccagaacc

SEQ ID NO: 234480 - RNA, 27 nt, Human
uccccggcuucagggcugcggggccug

SEQ ID NO: 234481 - RNA, 32 nt, Human
uccccggcuuucuccccacggagcccagccug

SEQ ID NO: 234482 - RNA, 32 nt, Human
uccccgggagaaacauggccgggagcagcgag

SEQ ID NO: 234483 - RNA, 32 nt, Human
uccccgggagagaggacgaagcgaggagaguu

SEQ ID NO: 234484 - RNA, 21 nt, Human
uccccgggaggcagcuggggc

SEQ ID NO: 234485 - RNA, 23 nt, Human
uccccgggcugcgucgggaccug

SEQ ID NO: 234486 - RNA, 32 nt, Human
uccccggggcgcugugcgucuccaguccggga

SEQ ID NO: 234487 - RNA, 32 nt, Human
uccccggggucugcaagacgccggcucagggc

SEQ ID NO: 234488 - RNA, 32 nt, Human
uccccgggugcgcccaagugaagcgcaugcgc

SEQ ID NO: 234489 - RNA, 32 nt, Human
uccccggugagccucaguuccugggcuggacg

SEQ ID NO: 234490 - RNA, 32 nt, Human
uccccggugcuccuggggcuaaggcuggggcu

SEQ ID NO: 234491 - RNA, 32 nt, Human
uccccgguggaccugcaaggaccugaggaaaa

SEQ ID NO: 234492 - RNA, 32 nt, Human
uccccgguggcgaacccagugacccagggaca

SEQ ID NO: 234493 - RNA, 32 nt, Human
uccccgguucaagugauucuccugccucagac

SEQ ID NO: 234494 - RNA, 32 nt, Human
uccccgguucaagugauucuccugccucagcc

SEQ ID NO: 234495 - RNA, 32 nt, Human
uccccgguugagaaucugucccagaggaacac

SEQ ID NO: 234496 - RNA, 23 nt, Human
uccccgucagacccacugggaga

SEQ ID NO: 234497 - RNA, 32 nt, Human
uccccgucuccucugguuguuucguuuuggcu

SEQ ID NO: 234498 - RNA, 32 nt, Human
uccccgucucugcccugggcuccucuuagcuc

SEQ ID NO: 234499 - RNA, 32 nt, Human
uccccgucucugcuuagcgucugggugagaaa

SEQ ID NO: 234500 - RNA, 20 nt, Human
uccccgucuggacccuccca

SEQ ID NO: 234501 - RNA, 21 nt, Human
uccccgucuuccccuuccugc

SEQ ID NO: 234502 - RNA, 32 nt, Human
uccccgugagugccaagcauacaguaggggcu

SEQ ID NO: 234503 - RNA, 21 nt, Human
uccccguggacccuucgccca

SEQ ID NO: 234504 - RNA, 22 nt, Human
uccccguggcccuacgaucccc

SEQ ID NO: 234505 - RNA, 32 nt, Human
uccccgugggcaagggcuuggcagcagcccug

SEQ ID NO: 234506 - RNA, 32 nt, Human
uccccguguuagccaggauggucucgaucucc

SEQ ID NO: 234507 - RNA, 32 nt, Human
uccccguuccucacuuuucccuuuucauuccc

SEQ ID NO: 234508 - RNA, 32 nt, Human
uccccguuuaauuagcagacaagcagagauau

SEQ ID NO: 234509 - RNA, 32 nt, Human
uccccuaaggggauguuuagcuuaaauugcac

SEQ ID NO: 234510 - RNA, 32 nt, Human
uccccuaagguccuggcccaggccuguccaaa

SEQ ID NO: 234511 - RNA, 32 nt, Human
uccccuaaucauuacuugguaguuauuaaucc

SEQ ID NO: 234512 - RNA, 32 nt, Human
uccccuacacacaccccacaccuucaccccuu

SEQ ID NO: 234513 - RNA, 32 nt, Human
uccccuacaccaacaaagaggaauggcugcaa

SEQ ID NO: 234514 - RNA, 32 nt, Human
uccccuacccccuccucucugccgcaauacag

SEQ ID NO: 234515 - RNA, 32 nt, Human
uccccuacccucuuuucuugccugaauaguac

SEQ ID NO: 234516 - RNA, 32 nt, Human
uccccuacccuucccuccucugucuauugccc

SEQ ID NO: 234517 - RNA, 32 nt, Human
uccccuaccucauguccucucauuugggggau

SEQ ID NO: 234518 - RNA, 32 nt, Human
uccccuaccuuccaggcaaccagugucaaucu

SEQ ID NO: 234519 - RNA, 32 nt, Human
uccccuacgcuuucuuguccuggacuccugca

SEQ ID NO: 234520 - RNA, 20 nt, Human
uccccuacuccaucuucugc

SEQ ID NO: 234521 - RNA, 32 nt, Human
uccccuacuccaucuucugcguucccccaguu

SEQ ID NO: 234522 - RNA, 32 nt, Human
uccccuacucuucaccccuuguuuucaccuau

SEQ ID NO: 234523 - RNA, 32 nt, Human
uccccuaggagcgcuuggccagcugggaaggc

SEQ ID NO: 234524 - RNA, 22 nt, Human
uccccuaggcaggcccugcagg

SEQ ID NO: 234525 - RNA, 24 nt, Human
uccccuaggccgggaaccccuccc

SEQ ID NO: 234526 - RNA, 32 nt, Human
uccccuaggcugcagugcaguggcgcgauugc

SEQ ID NO: 234527 - RNA, 32 nt, Human
uccccuagggcacaugcuggaagcccugggcc

SEQ ID NO: 234528 - RNA, 32 nt, Human
uccccuagggcacaugcuggaagcccugggcu

SEQ ID NO: 234529 - RNA, 32 nt, Human
uccccuaggucacaacucugggaaggauacag

SEQ ID NO: 234530 - RNA, 32 nt, Human
uccccuagugacuaucacaguugacugacagc

SEQ ID NO: 234531 - RNA, 32 nt, Human
uccccuauaaccaacacucaacuacaaauagg

SEQ ID NO: 234532 - RNA, 32 nt, Human
uccccuauaguuaggaggugaacucacacaug

SEQ ID NO: 234533 - RNA, 23 nt, Human
uccccuauuacauacaucuuuca

SEQ ID NO: 234534 - RNA, 32 nt, Human
uccccuauuaccuggugcaaaaugacucauca

SEQ ID NO: 234535 - RNA, 23 nt, Human
uccccuauugagacccacugcuu

SEQ ID NO: 234536 - RNA, 32 nt, Human
uccccuauuuuugcacaggggcagcagauaca

SEQ ID NO: 234537 - RNA, 32 nt, Human
uccccucaaccagguguuuucuuuucagccug

SEQ ID NO: 234538 - RNA, 32 nt, Human
uccccucaauggaaggcaauacacuuagcagg

SEQ ID NO: 234539 - RNA, 32 nt, Human
uccccucaccacccucucgugccccucauuac

SEQ ID NO: 234540 - RNA, 32 nt, Human
uccccucaccacccucugguguccccucauca

SEQ ID NO: 234541 - RNA, 32 nt, Human
uccccucacugcacauggugaagcucccuccc

SEQ ID NO: 234542 - RNA, 32 nt, Human
uccccucacugcacuuuggaccccuggggcca

SEQ ID NO: 234543 - RNA, 32 nt, Human
uccccucagcaauuccugcaaaggguuaaaaa

SEQ ID NO: 234544 - RNA, 32 nt, Human
uccccucagcuagacgcacagacucagcaaua

SEQ ID NO: 234545 - RNA, 32 nt, Human
uccccucaggacccuaccccacccucuuugaa

SEQ ID NO: 234546 - RNA, 32 nt, Human
uccccucaggaggccaccucaggaaggauuuu

SEQ ID NO: 234547 - RNA, 32 nt, Human
uccccucauccccuucucgucuccuuauuguu

SEQ ID NO: 234548 - RNA, 32 nt, Human
uccccucaucuucuccacuacuauccacauga

SEQ ID NO: 234549 - RNA, 32 nt, Human
uccccucauuuagcaaccuccauaccacaagg

SEQ ID NO: 234550 - RNA, 32 nt, Human
uccccuccaagggggcagaaauuccaccagaa

SEQ ID NO: 234551 - RNA, 23 nt, Human
uccccuccaccuguccgcuggca

SEQ ID NO: 234552 - RNA, 32 nt, Human
uccccuccagaacaccagccagggaggggugg

SEQ ID NO: 234553 - RNA, 32 nt, Human
uccccuccagccugggcgacagagugagacuu

SEQ ID NO: 234554 - RNA, 19 nt, Human
uccccuccauggcccugaa

SEQ ID NO: 234555 - RNA, 32 nt, Human
uccccucccaaaccacucuccacagcuuuuua

SEQ ID NO: 234556 - RNA, 18 nt, Human
uccccucccaccuggugc

SEQ ID NO: 234557 - RNA, 32 nt, Human
uccccucccacucugggcucaggcugucccug

SEQ ID NO: 234558 - RNA, 21 nt, Human
uccccucccaucucgugcugg

SEQ ID NO: 234559 - RNA, 24 nt, Human
uccccucccauguggcucgugcug

SEQ ID NO: 234560 - RNA, 32 nt, Human
uccccuccccacccucacccaccugccaugga

SEQ ID NO: 234561 - RNA, 20 nt, Human
uccccuccccaccuccugcc

SEQ ID NO: 234562 - RNA, 19 nt, Human
uccccuccccagacugccu

SEQ ID NO: 234563 - RNA, 32 nt, Human
uccccuccccaggacacucccaggcuuggguu

SEQ ID NO: 234564 - RNA, 21 nt, Human
uccccuccccaucuguguucu

SEQ ID NO: 234565 - RNA, 18 nt, Human
uccccucccccaccugcc

SEQ ID NO: 234566 - RNA, 32 nt, Human
uccccuccccucacuucucccaccugcagagc

SEQ ID NO: 234567 - RNA, 32 nt, Human
uccccuccccuccagcccaccccugcacagcc

SEQ ID NO: 234568 - RNA, 32 nt, Human
uccccuccccuccagggugcccccggcuuucu

SEQ ID NO: 234569 - RNA, 32 nt, Human
uccccuccccuccccuccccuccucuccuggu

SEQ ID NO: 234570 - RNA, 32 nt, Human
uccccuccccuccccucccucuuuuuaguuuu

SEQ ID NO: 234571 - RNA, 32 nt, Human
uccccuccccuccccuccucuccugguauacc

SEQ ID NO: 234572 - RNA, 32 nt, Human
uccccuccccuucuucuccaucuccauucuuu

SEQ ID NO: 234573 - RNA, 19 nt, Human
uccccuccccuuuuguccu

SEQ ID NO: 234574 - RNA, 32 nt, Human
uccccucccuccaguauugcccccucucacuu

SEQ ID NO: 234575 - RNA, 32 nt, Human
uccccucccuccauccccacuuuggcguuugc

SEQ ID NO: 234576 - RNA, 18 nt, Human
uccccucccucccagcca

SEQ ID NO: 234577 - RNA, 32 nt, Human
uccccucccucccucacuuccucccucucccc

SEQ ID NO: 234578 - RNA, 32 nt, Human
uccccucccuccugccugguuccgagcccagg

SEQ ID NO: 234579 - RNA, 32 nt, Human
uccccucccucggaccaaacagugcucaugcu

SEQ ID NO: 234580 - RNA, 32 nt, Human
uccccucccugagauguuccuccugccccagc

SEQ ID NO: 234581 - RNA, 32 nt, Human
uccccucccugccuugguuaauugacucacac

SEQ ID NO: 234582 - RNA, 32 nt, Human
uccccucccuucuccccucuuuccuucugccg

SEQ ID NO: 234583 - RNA, 32 nt, Human
uccccuccguaggagcucacagucuagauuag

SEQ ID NO: 234584 - RNA, 32 nt, Human
uccccuccuaggcucucccuguucccugcagc

SEQ ID NO: 234585 - RNA, 32 nt, Human
uccccuccucaccugcuucccuaccacuccuc

SEQ ID NO: 234586 - RNA, 32 nt, Human
uccccuccuccacucucccccacccccucccc

SEQ ID NO: 234587 - RNA, 32 nt, Human
uccccuccuccccuuuucuuuccuucccaauu

SEQ ID NO: 234588 - RNA, 32 nt, Human
uccccuccuccgugccugucauguccucuaag

SEQ ID NO: 234589 - RNA, 32 nt, Human
uccccuccuccuccucuccaauucgccucccc

SEQ ID NO: 234590 - RNA, 32 nt, Human
uccccuccuccuccuugucacuggccucccac

SEQ ID NO: 234591 - RNA, 32 nt, Human
uccccuccucuccccuccacugucuucuucag

SEQ ID NO: 234592 - RNA, 32 nt, Human
uccccuccucuccccuccccucuccuccgccc

SEQ ID NO: 234593 - RNA, 32 nt, Human
uccccuccucuucacccccagggcagguuguu

SEQ ID NO: 234594 - RNA, 32 nt, Human
uccccuccucuucccucucuccuuccuuuagc

SEQ ID NO: 234595 - RNA, 32 nt, Human
uccccuccugaggcccugucaggguccuuacc

SEQ ID NO: 234596 - RNA, 32 nt, Human
uccccuccugcucucccucccugcccaauaca

SEQ ID NO: 234597 - RNA, 32 nt, Human
uccccuccuggccggcagagggcgcaggagcc

SEQ ID NO: 234598 - RNA, 32 nt, Human
uccccuccuuccugccaaggcuggaggccgcc

SEQ ID NO: 234599 - RNA, 32 nt, Human
uccccuccuuuuccuuccuuccuuccuuuccu

SEQ ID NO: 234600 - RNA, 22 nt, Human
uccccuccuuuucgcaaaugua

SEQ ID NO: 234601 - RNA, 32 nt, Human
uccccucgacaauuuaugaugccaccagcaau

SEQ ID NO: 234602 - RNA, 32 nt, Human
uccccucgacucaagcccuuguccucauuauc

SEQ ID NO: 234603 - RNA, 32 nt, Human
uccccucgcagcgucagugguacgacccuucc

SEQ ID NO: 234604 - RNA, 32 nt, Human
uccccucgccccaggcccugagccugcguccu

SEQ ID NO: 234605 - RNA, 32 nt, Human
uccccucgcuguccugcugugugaauucccag

SEQ ID NO: 234606 - RNA, 31 nt, Human
uccccucggaaacugcuucugcuggaggaua

SEQ ID NO: 234607 - RNA, 32 nt, Human
uccccucuaaugcucacgcucccaacacaagg

SEQ ID NO: 234608 - RNA, 19 nt, Human
uccccucuacaacuccugc

SEQ ID NO: 234609 - RNA, 32 nt, Human
uccccucuaggcagccuccccuccaggcagcc

SEQ ID NO: 234610 - RNA, 32 nt, Human
uccccucuccacccaccccacagcaggccccg

SEQ ID NO: 234611 - RNA, 32 nt, Human
uccccucucccaggcugggcuggcccugggcg

SEQ ID NO: 234612 - RNA, 32 nt, Human
uccccucuccccuucucuuccccgaggcuaug

SEQ ID NO: 234613 - RNA, 32 nt, Human
uccccucucccgggcuccccugcugcauggug

SEQ ID NO: 234614 - RNA, 32 nt, Human
uccccucucccucccuccuucucucuuucuuu

SEQ ID NO: 234615 - RNA, 32 nt, Human
uccccucuccgggcacagcccagauccacccc

SEQ ID NO: 234616 - RNA, 32 nt, Human
uccccucuccguugugcccuggaccucgggca

SEQ ID NO: 234617 - RNA, 32 nt, Human
uccccucuccuccccucucuccuccuuccccc

SEQ ID NO: 234618 - RNA, 32 nt, Human
uccccucucgcucccucuacccucuauccccu

SEQ ID NO: 234619 - RNA, 32 nt, Human
uccccucucucccgccccuccuccucccuuuc

SEQ ID NO: 234620 - RNA, 32 nt, Human
uccccucucucuuguccccaggcacagccuag

SEQ ID NO: 234621 - RNA, 32 nt, Human
uccccucucuuucuaagagaccugaacugggc

SEQ ID NO: 234622 - RNA, 32 nt, Human
uccccucucuuugacccccuuugaggcaucug

SEQ ID NO: 234623 - RNA, 19 nt, Human
uccccucugaaccuccugc

SEQ ID NO: 234624 - RNA, 31 nt, Human
uccccucugaauaaauacccauugaacucug

SEQ ID NO: 234625 - RNA, 32 nt, Human
uccccucugagauucgaucaggggacuggaua

SEQ ID NO: 234626 - RNA, 32 nt, Human
uccccucugaggagccugccugccucacaacu

SEQ ID NO: 234627 - RNA, 32 nt, Human
uccccucugcaaccaaaaauccuugggguccc

SEQ ID NO: 234628 - RNA, 32 nt, Human
uccccucugcaacccccauuuugggaguugac

SEQ ID NO: 234629 - RNA, 32 nt, Human
uccccucugccucugagggcuucaguauugau

SEQ ID NO: 234630 - RNA, 32 nt, Human
uccccucugccuuuuaaacccauccccuccga

SEQ ID NO: 234631 - RNA, 32 nt, Human
uccccucugggaauugggcagcccugggcagu

SEQ ID NO: 234632 - RNA, 32 nt, Human
uccccucugggcagggccaacgggaggcucuu

SEQ ID NO: 234633 - RNA, 20 nt, Human
uccccucuucuaccuccugc

SEQ ID NO: 234634 - RNA, 32 nt, Human
uccccucuucucaugcagaagacagucaugcc

SEQ ID NO: 234635 - RNA, 32 nt, Human
uccccucuucuccuuuauugaucucugcuuuu

SEQ ID NO: 234636 - RNA, 32 nt, Human
uccccucuucuuccuucuaucuccuuccccgg

SEQ ID NO: 234637 - RNA, 32 nt, Human
uccccucuucuuucucuuucuuuucccuuugg

SEQ ID NO: 234638 - RNA, 32 nt, Human
uccccucuucuuucuuuguucucuuucauuaa

SEQ ID NO: 234639 - RNA, 32 nt, Human
uccccucuugaacucagcuggggccaggggcc

SEQ ID NO: 234640 - RNA, 32 nt, Human
uccccucuugcacuuucucuccagucaccaug

SEQ ID NO: 234641 - RNA, 32 nt, Human
uccccucuuggaugguguuugccccucucuca

SEQ ID NO: 234642 - RNA, 32 nt, Human
uccccugaacaaccucuuggaacucuccacau

SEQ ID NO: 234643 - RNA, 32 nt, Human
uccccugaaguccugccaucucuggcuggauu

SEQ ID NO: 234644 - RNA, 32 nt, Human
uccccugaagugcugggauuacaggugugagc

SEQ ID NO: 234645 - RNA, 22 nt, Human
uccccugacaaggcgcuggggc

SEQ ID NO: 234646 - RNA, 19 nt, Human
uccccugacacugcugcau

SEQ ID NO: 234647 - RNA, 23 nt, Human
uccccugaccaaaacuccuuccc

SEQ ID NO: 234648 - RNA, 32 nt, Human
uccccugaccaccacacagcagcugcggcggc

SEQ ID NO: 234649 - RNA, 32 nt, Human
uccccugaccccaagcccggugcucauuccac

SEQ ID NO: 234650 - RNA, 32 nt, Human
uccccugacucccgucuccaucugucacgugg

SEQ ID NO: 234651 - RNA, 21 nt, Human
uccccugacuccuggcucucc

SEQ ID NO: 234652 - RNA, 32 nt, Human
uccccugacuguuccacccaggaggaggaaac

SEQ ID NO: 234653 - RNA, 32 nt, Human
uccccugagaacacaggacaggccugcugaca

SEQ ID NO: 234654 - RNA, 32 nt, Human
uccccugagacaaucccccacgcccagcuaca

SEQ ID NO: 234655 - RNA, 32 nt, Human
uccccugagaugggguauggaggggcccuucc

SEQ ID NO: 234656 - RNA, 32 nt, Human
uccccugagccccagagcuggcagcuguuggg

SEQ ID NO: 234657 - RNA, 18 nt, Human
uccccugagcccucuucu

SEQ ID NO: 234658 - RNA, 32 nt, Human
uccccugagcuaacccggaggaaaggcagucc

SEQ ID NO: 234659 - RNA, 32 nt, Human
uccccugagguugggaguuaaagaccagccug

SEQ ID NO: 234660 - RNA, 32 nt, Human
uccccugauauccccuggcucaguccuaacaa

SEQ ID NO: 234661 - RNA, 32 nt, Human
uccccugauccccuaccucugccugcccucca

SEQ ID NO: 234662 - RNA, 19 nt, Human
uccccugaucuagugcuca

SEQ ID NO: 234663 - RNA, 32 nt, Human
uccccugaucucauggcugaaaagccacacca

SEQ ID NO: 234664 - RNA, 32 nt, Human
uccccugaugaagaaagugccagaggcagcaa

SEQ ID NO: 234665 - RNA, 32 nt, Human
uccccugaugaugcagccccacccucaacucu

SEQ ID NO: 234666 - RNA, 32 nt, Human
uccccugcaaacuggggguugugggaagugag

SEQ ID NO: 234667 - RNA, 32 nt, Human
uccccugcaauggcccugcugugugaugcuca

SEQ ID NO: 234668 - RNA, 32 nt, Human
uccccugcacacuguagaugacuaggacaaga

SEQ ID NO: 234669 - RNA, 32 nt, Human
uccccugcacccgcuaccacaccagcucagcc

SEQ ID NO: 234670 - RNA, 32 nt, Human
uccccugcagaggcgcuccacucccagaagcg

SEQ ID NO: 234671 - RNA, 32 nt, Human
uccccugcaggcgcugugugagcuggcccugc

SEQ ID NO: 234672 - RNA, 32 nt, Human
uccccugcaguuucuggguaacagggcacacc

SEQ ID NO: 234673 - RNA, 32 nt, Human
uccccugcaugugccccugccucuaccugucc

SEQ ID NO: 234674 - RNA, 32 nt, Human
uccccugccagaaacauauacacagauacaca

SEQ ID NO: 234675 - RNA, 32 nt, Human
uccccugccaggacucagccugaaggagcugc

SEQ ID NO: 234676 - RNA, 32 nt, Human
uccccugccaugugugcugauccugcuggcag

SEQ ID NO: 234677 - RNA, 32 nt, Human
uccccugcccaggagucugguugcaaacccug

SEQ ID NO: 234678 - RNA, 32 nt, Human
uccccugcccaugccuaccacccgccauggac

SEQ ID NO: 234679 - RNA, 32 nt, Human
uccccugccccagaggucgcagcuacccucag

SEQ ID NO: 234680 - RNA, 21 nt, Human
uccccugccccccucuccugu

SEQ ID NO: 234681 - RNA, 32 nt, Human
uccccugcccuggagcaacuuaaacaggcccu

SEQ ID NO: 234682 - RNA, 22 nt, Human
uccccugcccuugccaacaucu

SEQ ID NO: 234683 - RNA, 16 nt, Human
uccccugcccuuuucu

SEQ ID NO: 234684 - RNA, 32 nt, Human
uccccugccgcuccgguuccgauggcacucga

SEQ ID NO: 234685 - RNA, 32 nt, Human
uccccugccucaagcccugcccccagcucaag

SEQ ID NO: 234686 - RNA, 32 nt, Human
uccccugccucaccgcuuccuccucgcucuuc

SEQ ID NO: 234687 - RNA, 32 nt, Human
uccccugccugccuccugccuccccugccugc

SEQ ID NO: 234688 - RNA, 32 nt, Human
uccccugccugggaggcucucccaggggcuga

SEQ ID NO: 234689 - RNA, 32 nt, Human
uccccugccugggcacucccuccucccugcgc

SEQ ID NO: 234690 - RNA, 32 nt, Human
uccccugcguccugccaggaagcugaucagua

SEQ ID NO: 234691 - RNA, 32 nt, Human
uccccugcucacucuuccacagauauaaagaa

SEQ ID NO: 234692 - RNA, 32 nt, Human
uccccugcuccuccugccuugucugccuggca

SEQ ID NO: 234693 - RNA, 32 nt, Human
uccccugcuccuuccaggaacagugagcccag

SEQ ID NO: 234694 - RNA, 32 nt, Human
uccccugcuggguuugggaagcaguuagggag

SEQ ID NO: 234695 - RNA, 32 nt, Human
uccccugcugugguaggaacuccaguggugaa

SEQ ID NO: 234696 - RNA, 18 nt, Human
uccccugcuuccaaccuc

SEQ ID NO: 234697 - RNA, 32 nt, Human
uccccuggaagcccacagagacagagacagca

SEQ ID NO: 234698 - RNA, 32 nt, Human
uccccuggagcuccggccugcccagcagguca

SEQ ID NO: 234699 - RNA, 32 nt, Human
uccccuggcaccacucaguuuugcuuuugcga

SEQ ID NO: 234700 - RNA, 32 nt, Human
uccccuggcagcagaagugggugcaggaaggu

SEQ ID NO: 234701 - RNA, 32 nt, Human
uccccuggccacacuuggcagcccuccuccaa

SEQ ID NO: 234702 - RNA, 32 nt, Human
uccccuggccaggucccucaggguugaugcgu

SEQ ID NO: 234703 - RNA, 32 nt, Human
uccccuggcccucaugggcaccgucagcucca

SEQ ID NO: 234704 - RNA, 32 nt, Human
uccccuggccuccccgagccuccuuaggcaau

SEQ ID NO: 234705 - RNA, 32 nt, Human
uccccuggccuggacccaggagacccaggaga

SEQ ID NO: 234706 - RNA, 32 nt, Human
uccccuggcgguggugaaagagacucgggagu

SEQ ID NO: 234707 - RNA, 32 nt, Human
uccccuggcugaagagugccaaucauuacaaa

SEQ ID NO: 234708 - RNA, 32 nt, Human
uccccuggcuuaggcagguaggggaauuaggg

SEQ ID NO: 234709 - RNA, 22 nt, Human
uccccugggacccaccguggga

SEQ ID NO: 234710 - RNA, 32 nt, Human
uccccugggaccccgcccccucauccugccuc

SEQ ID NO: 234711 - RNA, 32 nt, Human
uccccugggcccuggacucggacuggggccuc

SEQ ID NO: 234712 - RNA, 32 nt, Human
uccccugggccggaagacugggaauuccugcu

SEQ ID NO: 234713 - RNA, 32 nt, Human
uccccugggcuggagugcaauggugcgaucau

SEQ ID NO: 234714 - RNA, 23 nt, Human
uccccuggggaaccaggaccucc

SEQ ID NO: 234715 - RNA, 32 nt, Human
uccccugggguuucccuuucggcgcaggcggg

SEQ ID NO: 234716 - RNA, 32 nt, Human
uccccuggucagccuggaagaagccugugucg

SEQ ID NO: 234717 - RNA, 32 nt, Human
uccccugguccucauaagauccuugaagcagg

SEQ ID NO: 234718 - RNA, 32 nt, Human
uccccuggucucacugcugaccugggcugguc

SEQ ID NO: 234719 - RNA, 32 nt, Human
uccccuggugcuuucugugccuaguaauuuuu

SEQ ID NO: 234720 - RNA, 32 nt, Human
uccccugguucaguagaggccccgguuuccca

SEQ ID NO: 234721 - RNA, 32 nt, Human
uccccugguuccugucuguuauuuguaaacug

SEQ ID NO: 234722 - RNA, 32 nt, Human
uccccuguacauuccucccuggaggugcccgg

SEQ ID NO: 234723 - RNA, 19 nt, Human
uccccuguaggaggccagg

SEQ ID NO: 234724 - RNA, 22 nt, Human
uccccugucaggucucuccugu

SEQ ID NO: 234725 - RNA, 21 nt, Human
uccccuguccccugcucuucu

SEQ ID NO: 234726 - RNA, 32 nt, Human
uccccugucuccuuuccuccuccuggguucau

SEQ ID NO: 234727 - RNA, 21 nt, Human
uccccugucuguucucuuugc

SEQ ID NO: 234728 - RNA, 32 nt, Human
uccccugugaagaaacagguguucucggcuga

SEQ ID NO: 234729 - RNA, 32 nt, Human
uccccugugcggccagcgucagagccauggcg

SEQ ID NO: 234730 - RNA, 32 nt, Human
uccccugugcucccuuucucuccucucuccuu

SEQ ID NO: 234731 - RNA, 32 nt, Human
uccccuguggcagcuguauguguaguucaaug

SEQ ID NO: 234732 - RNA, 32 nt, Human
uccccuguggugagcuggagguuggagccuga

SEQ ID NO: 234733 - RNA, 32 nt, Human
uccccugugugagagaaaagaauggaauaagc

SEQ ID NO: 234734 - RNA, 32 nt, Human
uccccuguguuuguagagaacucccuuauaca

SEQ ID NO: 234735 - RNA, 32 nt, Human
uccccuguugcccaggcuggagugcaguggga

SEQ ID NO: 234736 - RNA, 32 nt, Human
uccccuguugcucuccuuaucuuggucaucag

SEQ ID NO: 234737 - RNA, 32 nt, Human
uccccuguuuucuuccucuguaaccuugggca

SEQ ID NO: 234738 - RNA, 32 nt, Human
uccccuguuuuucugccugcguuuucuccaca

SEQ ID NO: 234739 - RNA, 32 nt, Human
uccccuuaaagaaagagacuguagcaauacaa

SEQ ID NO: 234740 - RNA, 32 nt, Human
uccccuuaccuugugggcuugggaaacacgac

SEQ ID NO: 234741 - RNA, 32 nt, Human
uccccuuagcauggcccugaccguggcuguca

SEQ ID NO: 234742 - RNA, 32 nt, Human
uccccuuagccaaccucugucuuuuugaauuu

SEQ ID NO: 234743 - RNA, 32 nt, Human
uccccuucaaagcagacugaggagggaggaga

SEQ ID NO: 234744 - RNA, 22 nt, Human
uccccuucagccccccggcuga

SEQ ID NO: 234745 - RNA, 32 nt, Human
uccccuucagcccucagguagauggaagcugc

SEQ ID NO: 234746 - RNA, 32 nt, Human
uccccuucaguuaccaagaauaacuguaaaau

SEQ ID NO: 234747 - RNA, 32 nt, Human
uccccuucauuucuucaccgcgguuccucguc

SEQ ID NO: 234748 - RNA, 32 nt, Human
uccccuuccaaaucucaucuugaauucccacg

SEQ ID NO: 234749 - RNA, 32 nt, Human
uccccuucccacccucacaucugcuuagccag

SEQ ID NO: 234750 - RNA, 32 nt, Human
uccccuucccacccuccagccaaggagcagcc

SEQ ID NO: 234751 - RNA, 32 nt, Human
uccccuucccacccucuccguuggccucagag

SEQ ID NO: 234752 - RNA, 22 nt, Human
uccccuuccccacguuccagcc

SEQ ID NO: 234753 - RNA, 32 nt, Human
uccccuuccccucccccuccccaacucagauc

SEQ ID NO: 234754 - RNA, 32 nt, Human
uccccuucccucccccuuccucucuuccuucc

SEQ ID NO: 234755 - RNA, 32 nt, Human
uccccuucccuccuccucaggguggggugaac

SEQ ID NO: 234756 - RNA, 32 nt, Human
uccccuucccuucccuucccuuccaucucuuc

SEQ ID NO: 234757 - RNA, 32 nt, Human
uccccuuccggacgcugccaucauguugaagc

SEQ ID NO: 234758 - RNA, 19 nt, Human
uccccuuccucccaccccu

SEQ ID NO: 234759 - RNA, 32 nt, Human
uccccuuccucucucccaccagggggcgcgcu

SEQ ID NO: 234760 - RNA, 32 nt, Human
uccccuuccucuucuuguuuuggugaaucugc

SEQ ID NO: 234761 - RNA, 32 nt, Human
uccccuuccuuguaggugacacaugcucugcc

SEQ ID NO: 234762 - RNA, 32 nt, Human
uccccuucgccuuccaccaugacuguaaguuu

SEQ ID NO: 234763 - RNA, 32 nt, Human
uccccuucuaccuccuccucggccagcucagg

SEQ ID NO: 234764 - RNA, 32 nt, Human
uccccuucuccccucuaaaccuucucccaucu

SEQ ID NO: 234765 - RNA, 32 nt, Human
uccccuucuccugcuucuccagccucuucggc

SEQ ID NO: 234766 - RNA, 32 nt, Human
uccccuucucucucuacauguucaauaaaagu

SEQ ID NO: 234767 - RNA, 32 nt, Human
uccccuucucucuuacuccugcucucacuaug

SEQ ID NO: 234768 - RNA, 32 nt, Human
uccccuucucugcccugcuccaggcaccaggc

SEQ ID NO: 234769 - RNA, 32 nt, Human
uccccuucugaaucagcugggaugacuggcuu

SEQ ID NO: 234770 - RNA, 32 nt, Human
uccccuucugguuccugugucucccaauaaac

SEQ ID NO: 234771 - RNA, 32 nt, Human
uccccuugagaggucagaggggccucuguggg

SEQ ID NO: 234772 - RNA, 32 nt, Human
uccccuugcaguggaggagagagccagagugg

SEQ ID NO: 234773 - RNA, 32 nt, Human
uccccuugccaccggcucugguguuuuggcuu

SEQ ID NO: 234774 - RNA, 23 nt, Human
uccccuugcccucccccagccca

SEQ ID NO: 234775 - RNA, 32 nt, Human
uccccuugccucucaggaauuuugccaggaug

SEQ ID NO: 234776 - RNA, 32 nt, Human
uccccuugccugaaucuggagugggguugagc

SEQ ID NO: 234777 - RNA, 32 nt, Human
uccccuugccuuccuaagaaccccuguguuuc

SEQ ID NO: 234778 - RNA, 32 nt, Human
uccccuuggaaaugcauguaugaacuacccua

SEQ ID NO: 234779 - RNA, 32 nt, Human
uccccuuggaccucaguuagaaccugacauuu

SEQ ID NO: 234780 - RNA, 32 nt, Human
uccccuuggagcuggguggcagaggagauaaa

SEQ ID NO: 234781 - RNA, 32 nt, Human
uccccuuggccuguccagcccagagcauccuu

SEQ ID NO: 234782 - RNA, 29 nt, Human
uccccuuggcugcucuuugccuucaauga

SEQ ID NO: 234783 - RNA, 32 nt, Human
uccccuugggcuguguuggagugagcaccucc

SEQ ID NO: 234784 - RNA, 32 nt, Human
uccccuugggggagcaggaugagaccuuugga

SEQ ID NO: 234785 - RNA, 32 nt, Human
uccccuuguauacauaucaaaauauuaccaau

SEQ ID NO: 234786 - RNA, 32 nt, Human
uccccuugugaaacuguaucauaauuucuucu

SEQ ID NO: 234787 - RNA, 32 nt, Human
uccccuuguucucgcacaaucucucuaaccug

SEQ ID NO: 234788 - RNA, 32 nt, Human
uccccuuuagagacuugcccccgucguauacc

SEQ ID NO: 234789 - RNA, 32 nt, Human
uccccuuucccuccaggcccagugccagcacc

SEQ ID NO: 234790 - RNA, 32 nt, Human
uccccuuucccuuucuugcguccuuuccucuu

SEQ ID NO: 234791 - RNA, 32 nt, Human
uccccuuuccuucuuauggccaccccaucacc

SEQ ID NO: 234792 - RNA, 32 nt, Human
uccccuuugauguucucccccaaguugggcag

SEQ ID NO: 234793 - RNA, 32 nt, Human
uccccuuugcccacccucuuccugucuccacc

SEQ ID NO: 234794 - RNA, 32 nt, Human
uccccuuugccccugcuucaucccagcucugu

SEQ ID NO: 234795 - RNA, 32 nt, Human
uccccuuugcuucuacugcucugauuuugugg

SEQ ID NO: 234796 - RNA, 32 nt, Human
uccccuuuguaaaacuaugaauccaaauaaau

SEQ ID NO: 234797 - RNA, 32 nt, Human
uccccuuugucuuccucugucuuccuuuuuac

SEQ ID NO: 234798 - RNA, 32 nt, Human
uccccuuuuauaccugcucuuguucuacugag

SEQ ID NO: 234799 - RNA, 32 nt, Human
uccccuuuucacuucacucugccuuuucaucc

SEQ ID NO: 234800 - RNA, 32 nt, Human
uccccuuuuguaguuggauaguugggcuugcc

SEQ ID NO: 234801 - RNA, 32 nt, Human
ucccgaaaccagagggauggggccggcugugc

SEQ ID NO: 234802 - RNA, 32 nt, Human
ucccgaaagccgugcucuccagccuggcugcc

SEQ ID NO: 234803 - RNA, 18 nt, Human
ucccgaaaggaggcuguc

SEQ ID NO: 234804 - RNA, 32 nt, Human
ucccgaaagugcugggauuacagucaugagcc

SEQ ID NO: 234805 - RNA, 32 nt, Human
ucccgaagccacacccucccuuuuccucacug

SEQ ID NO: 234806 - RNA, 22 nt, Human
ucccgaaggaacagcugauuca

SEQ ID NO: 234807 - RNA, 32 nt, Human
ucccgaaugugucucgcacuauuggacacuuu

SEQ ID NO: 234808 - RNA, 32 nt, Human
ucccgaauucaagugauucuccugccucagcc

SEQ ID NO: 234809 - RNA, 32 nt, Human
ucccgacagcagcaaccugauccccaagcuuu

SEQ ID NO: 234810 - RNA, 16 nt, Human
ucccgacagccugcca

SEQ ID NO: 234811 - RNA, 32 nt, Human
ucccgaccccaucccuauccauaguccugguc

SEQ ID NO: 234812 - RNA, 32 nt, Human
ucccgaccucaagugauccgcccaccuuggcc

SEQ ID NO: 234813 - RNA, 32 nt, Human
ucccgaccucaagugauccucccaccucaccc

SEQ ID NO: 234814 - RNA, 32 nt, Human
ucccgaccucaagugaucugcccgccuuggcc

SEQ ID NO: 234815 - RNA, 32 nt, Human
ucccgaccucaagugaucugucuaccucggcc

SEQ ID NO: 234816 - RNA, 32 nt, Human
uccucauaauuaucagcaccacugccuuaauu

SEQ ID NO: 234817 - RNA, 32 nt, Human
uccucauaccucagugguuagaagcaugucuc

SEQ ID NO: 234818 - RNA, 22 nt, Human
uccucauagcaucuucuuugga

SEQ ID NO: 234819 - RNA, 32 nt, Human
uccucauaggugagucuuuucacacaucugca

SEQ ID NO: 234820 - RNA, 32 nt, Human
uccucauaugcuacuacuagcaucuagcauuu

SEQ ID NO: 234821 - RNA, 32 nt, Human
uccucaucaccuccuacucccaaaaaggacaa

SEQ ID NO: 234822 - RNA, 32 nt, Human
uccucaucagccuuucauccuuaguuugagaa

SEQ ID NO: 234823 - RNA, 32 nt, Human
uccucaucaucaggcagauacagagcacugca

SEQ ID NO: 234824 - RNA, 32 nt, Human
uccucaucauccagggcaggaaaggaguguga

SEQ ID NO: 234825 - RNA, 32 nt, Human
uccucaucccacccucgccacuugccugagcu

SEQ ID NO: 234826 - RNA, 32 nt, Human
uccucauccccaggcuugaaggcacauggcuu

SEQ ID NO: 234827 - RNA, 16 nt, Human
uccucaucccucccca

SEQ ID NO: 234828 - RNA, 32 nt, Human
uccucaucccugggguggaguugggaugugug

SEQ ID NO: 234829 - RNA, 32 nt, Human
uccucauccucaucaucaucuaccuccaggga

SEQ ID NO: 234830 - RNA, 32 nt, Human
uccucauccuccuccuccuccacuugcagcga

SEQ ID NO: 234831 - RNA, 32 nt, Human
uccucauccucuuccucugauaaagccccuac

SEQ ID NO: 234832 - RNA, 32 nt, Human
uccucauccugagacggucucuacccauguuu

SEQ ID NO: 234833 - RNA, 32 nt, Human
uccucaucgccuuccaccuuuaggaaaugcua

SEQ ID NO: 234834 - RNA, 32 nt, Human
uccucaucucagcccacucugaaaaugugcag

SEQ ID NO: 234835 - RNA, 32 nt, Human
uccucaucuccaggaugugaggcuggagggga

SEQ ID NO: 234836 - RNA, 32 nt, Human
uccucaucuguaaacuggagagagcccagcac

SEQ ID NO: 234837 - RNA, 32 nt, Human
uccucaucugugugacggcaggaagcucugcc

SEQ ID NO: 234838 - RNA, 32 nt, Human
uccucaugagggcuggaugcucucguugaccc

SEQ ID NO: 234839 - RNA, 25 nt, Human
uccucaugcagcagugugcuggggc

SEQ ID NO: 234840 - RNA, 21 nt, Human
uccucaugcccaugcuggggc

SEQ ID NO: 234841 - RNA, 32 nt, Human
uccucaugccuguaucccagcacuuugggagg

SEQ ID NO: 234842 - RNA, 32 nt, Human
uccucaugccuguauucuccaggaaacuuguc

SEQ ID NO: 234843 - RNA, 32 nt, Human
uccucauggagaacccaggggacagcuggugc

SEQ ID NO: 234844 - RNA, 32 nt, Human
uccucauggcgcugcugccaucuuuccuccca

SEQ ID NO: 234845 - RNA, 23 nt, Human
uccucauggcuacggaccuauca

SEQ ID NO: 234846 - RNA, 32 nt, Human
uccucaugggaugcuccagaauuuguagcucc

SEQ ID NO: 234847 - RNA, 32 nt, Human
uccucauguaucaguccucugaaccuuugugg

SEQ ID NO: 234848 - RNA, 32 nt, Human
uccucaugucuuugagggaucccaccacaggu

SEQ ID NO: 234849 - RNA, 19 nt, Human
uccucaugugacuucuggg

SEQ ID NO: 234850 - RNA, 32 nt, Human
uccucauguuaaaaaucgaaaaaugggccagg

SEQ ID NO: 234851 - RNA, 28 nt, Human
uccucauucccagcugccucuuccuacu

SEQ ID NO: 234852 - RNA, 32 nt, Human
uccucauucccauccugucacuugcagcagaa

SEQ ID NO: 234853 - RNA, 32 nt, Human
uccucauucucuuuaccaguauccuggcaaug

SEQ ID NO: 234854 - RNA, 32 nt, Human
uccucauucugcaaauugcaaaccugagggcc

SEQ ID NO: 234855 - RNA, 32 nt, Human
uccucauucuguuccucuuuugaacuuuuccu

SEQ ID NO: 234856 - RNA, 32 nt, Human
uccucauucuuucucagaccucaggcugcaug

SEQ ID NO: 234857 - RNA, 23 nt, Human
uccucauugccuucucccuuccu

SEQ ID NO: 234858 - RNA, 32 nt, Human
uccucauuucaguuccuucugcagccugugaa

SEQ ID NO: 234859 - RNA, 32 nt, Human
uccucauuucaucagaccuaguguucucacac

SEQ ID NO: 234860 - RNA, 32 nt, Human
uccucauuucauccaaguugugcaauguauca

SEQ ID NO: 234861 - RNA, 32 nt, Human
uccucauuugucagagaaaggacagagaagau

SEQ ID NO: 234862 - RNA, 32 nt, Human
uccuccaaacccccaaacucugcaggagaaag

SEQ ID NO: 234863 - RNA, 32 nt, Human
uccuccaaagugcugggauuacaggcaugagc

SEQ ID NO: 234864 - RNA, 32 nt, Human
uccuccaacaugcugucuucauguggagcccu

SEQ ID NO: 234865 - RNA, 32 nt, Human
uccuccaaccagcagcgcugaccuaagagcuc

SEQ ID NO: 234866 - RNA, 17 nt, Human
uccuccaagcacaagga

SEQ ID NO: 234867 - RNA, 18 nt, Human
uccuccaaguacccaggg

SEQ ID NO: 234868 - RNA, 32 nt, Human
uccuccaagucccagaaccccaagaaugggca

SEQ ID NO: 234869 - RNA, 32 nt, Human
uccuccaaugaggcagagguugcagugagcug

SEQ ID NO: 234870 - RNA, 32 nt, Human
uccuccacaagccuaguccauccugccugagc

SEQ ID NO: 234871 - RNA, 32 nt, Human
uccuccacagcaccucguggcccguacucuug

SEQ ID NO: 234872 - RNA, 32 nt, Human
uccuccacagcccugagucuaagcaaaagccc

SEQ ID NO: 234873 - RNA, 32 nt, Human
uccuccacaggugaagacagggccagcaggag

SEQ ID NO: 234874 - RNA, 32 nt, Human
uccuccacagucugaauggccauguuuccucu

SEQ ID NO: 234875 - RNA, 28 nt, Human
uccuccacaguggcugccuccucauuug

SEQ ID NO: 234876 - RNA, 32 nt, Human
uccuccacccgcugcccccgccaugucugcua

SEQ ID NO: 234877 - RNA, 32 nt, Human
uccuccacccucuucccuucgcagcugugaau

SEQ ID NO: 234878 - RNA, 32 nt, Human
uccuccacccuggccucaaauggaugccagau

SEQ ID NO: 234879 - RNA, 32 nt, Human
uccuccacccuguucuggcugugugugaagga

SEQ ID NO: 234880 - RNA, 18 nt, Human
uccuccaccucccacugg

SEQ ID NO: 234881 - RNA, 32 nt, Human
uccuccaccucccagguucaagcgauucucuu

SEQ ID NO: 234882 - RNA, 32 nt, Human
uccuccaccuccuggguucaagugauucuccu

SEQ ID NO: 234883 - RNA, 19 nt, Human
uccuccaccugacaagcag

SEQ ID NO: 234884 - RNA, 32 nt, Human
uccuccaccugagacgagcacagggucuccac

SEQ ID NO: 234885 - RNA, 32 nt, Human
uccuccacggcccagcccccacugucuuacca

SEQ ID NO: 234886 - RNA, 32 nt, Human
uccuccacgucauccuccucuuccucagauga

SEQ ID NO: 234887 - RNA, 21 nt, Human
uccuccacucccucccuuccc

SEQ ID NO: 234888 - RNA, 32 nt, Human
uccuccagagaccgagagguugaugucacucc

SEQ ID NO: 234889 - RNA, 31 nt, Human
uccuccagaggggucacguguaggagugaga

SEQ ID NO: 234890 - RNA, 32 nt, Human
uccuccagcacuuuugggguaaggaggacagu

SEQ ID NO: 234891 - RNA, 32 nt, Human
uccuccagccaagaacaggaucucagcacccc

SEQ ID NO: 234892 - RNA, 32 nt, Human
uccuccagcccagcggcccucuuuccugucug

SEQ ID NO: 234893 - RNA, 32 nt, Human
uccuccagcccagcugggcuuccuuuguugga

SEQ ID NO: 234894 - RNA, 32 nt, Human
uccuccagcccugcccacccucccuccacucc

SEQ ID NO: 234895 - RNA, 32 nt, Human
uccuccagccucccuuggguuuucuuuugaua

SEQ ID NO: 234896 - RNA, 30 nt, Human
uccuccagccucucuggaugcuccaugggu

SEQ ID NO: 234897 - RNA, 19 nt, Human
uccuccagccugcccaggg

SEQ ID NO: 234898 - RNA, 32 nt, Human
uccuccagcuaccacuucauuugucuguuucu

SEQ ID NO: 234899 - RNA, 32 nt, Human
uccuccagcuggcucccuugucuccagggcuu

SEQ ID NO: 234900 - RNA, 19 nt, Human
uccuccaggacgaccagug

SEQ ID NO: 234901 - RNA, 32 nt, Human
uccuccaggccggaguccaguggugcaaucuc

SEQ ID NO: 234902 - RNA, 32 nt, Human
uccuccaggccucagcccuguuggcccaggug

SEQ ID NO: 234903 - RNA, 32 nt, Human
uccuccaggccuggccgugcccgcucaggacc

SEQ ID NO: 234904 - RNA, 32 nt, Human
uccuccaggccuggggacaggaaagccacuga

SEQ ID NO: 234905 - RNA, 32 nt, Human
uccuccaggcggggaggcccagcuggagucuc

SEQ ID NO: 234906 - RNA, 24 nt, Human
uccuccagggcccaccuggccugc

SEQ ID NO: 234907 - RNA, 32 nt, Human
uccuccagggcugcaggcaccagcacuacgcu

SEQ ID NO: 234908 - RNA, 22 nt, Human
uccuccagggcugguccauuca

SEQ ID NO: 234909 - RNA, 32 nt, Human
uccuccaggggcuuccucacuggggaauugcc

SEQ ID NO: 234910 - RNA, 32 nt, Human
uccuccaguaugggugacagagugagaccugg

SEQ ID NO: 234911 - RNA, 32 nt, Human
uccuccaguccugucucaucuccugggagagg

SEQ ID NO: 234912 - RNA, 32 nt, Human
uccuccagucgggcugcaccucugccuugcac

SEQ ID NO: 234913 - RNA, 32 nt, Human
uccuccagugccugcugaaccaucuuaggguc

SEQ ID NO: 234914 - RNA, 32 nt, Human
uccuccagugcugaucuugcugggccuuagcu

SEQ ID NO: 234915 - RNA, 32 nt, Human
uccuccaguucugaugaggcacgccugccuuc

SEQ ID NO: 234916 - RNA, 32 nt, Human
uccuccaguucuuccucuuuuacuaauuaguu

SEQ ID NO: 234917 - RNA, 20 nt, Human
uccuccaucaauuggcagaa

SEQ ID NO: 234918 - RNA, 32 nt, Human
uccuccaucagugucaucaccaaagcuggcug

SEQ ID NO: 234919 - RNA, 31 nt, Human
uccuccaucagugucauuaccaaagcuggcu

SEQ ID NO: 234920 - RNA, 19 nt, Human
uccuccauccuugaaucag

SEQ ID NO: 234921 - RNA, 20 nt, Human
uccuccaucuucagagccag

SEQ ID NO: 234922 - RNA, 32 nt, Human
uccuccaucuuccccuccuuuacccuugguuc

SEQ ID NO: 234923 - RNA, 32 nt, Human
uccuccaucuucuuccugaagaagaaccuucu

SEQ ID NO: 234924 - RNA, 32 nt, Human
uccuccaugaacaucauggacugagcuggggg

SEQ ID NO: 234925 - RNA, 25 nt, Human
uccuccaugaaucccaauggccugc

SEQ ID NO: 234926 - RNA, 32 nt, Human
uccuccaugcaaguucugcuuccucuuauaag

SEQ ID NO: 234927 - RNA, 31 nt, Human
uccuccauggccagcuaagccaacaccuccc

SEQ ID NO: 234928 - RNA, 20 nt, Human
uccuccauguauuuacucca

SEQ ID NO: 234929 - RNA, 32 nt, Human
uccuccauguggccucuccagcaggcuagcuc

SEQ ID NO: 234930 - RNA, 19 nt, Human
uccuccauucuugagucag

SEQ ID NO: 234931 - RNA, 21 nt, Human
uccuccauuucccuggccugc

SEQ ID NO: 234932 - RNA, 32 nt, Human
uccucccaaaagaaaaggcaucaggcucccca

SEQ ID NO: 234933 - RNA, 32 nt, Human
uccucccaaaggacagcagugauggagaggac

SEQ ID NO: 234934 - RNA, 32 nt, Human
uccucccaaaguagcugggacugcaggugcac

SEQ ID NO: 234935 - RNA, 32 nt, Human
uccucccaaccagacucuucugauucugcugc

SEQ ID NO: 234936 - RNA, 32 nt, Human
uccucccaacuaccgaagaggcugaggagcuu

SEQ ID NO: 234937 - RNA, 32 nt, Human
uccucccaaguuggaaaauguuuacaugaauu

SEQ ID NO: 234938 - RNA, 32 nt, Human
uccucccaauguuaccccuuccaucuuccaag

SEQ ID NO: 234939 - RNA, 32 nt, Human
uccucccaauguuagaaagaagaaaagggaga

SEQ ID NO: 234940 - RNA, 32 nt, Human
uccucccacaacacagccacagcaguggcagc

SEQ ID NO: 234941 - RNA, 22 nt, Human
uccucccacacaggcucggugg

SEQ ID NO: 234942 - RNA, 32 nt, Human
uccucccacacgugcucacccacccgcagccu

SEQ ID NO: 234943 - RNA, 32 nt, Human
uccucccaccccaccucuucucagccuugcag

SEQ ID NO: 234944 - RNA, 32 nt, Human
uccucccaccugccacacagcgcuccggggcc

SEQ ID NO: 234945 - RNA, 32 nt, Human
uccucccacgcagcaggccuccacccuagcac

SEQ ID NO: 234946 - RNA, 32 nt, Human
uccucccacugagccucugcccuucccuuuuc

SEQ ID NO: 234947 - RNA, 32 nt, Human
uccucccacugcaccagccagcagguucaugu

SEQ ID NO: 234948 - RNA, 32 nt, Human
uccucccacuggcuccugauaucuugcuguau

SEQ ID NO: 234949 - RNA, 32 nt, Human
uccucccacuucuguauccucagagaugcugc

SEQ ID NO: 234950 - RNA, 32 nt, Human
uccucccacuuuaccauccuccuuccuccccu

SEQ ID NO: 234951 - RNA, 32 nt, Human
uccucccagaagcagguccuccagugacugau

SEQ ID NO: 234952 - RNA, 32 nt, Human
uccucccagaugacagaggugccugguguuug

SEQ ID NO: 234953 - RNA, 22 nt, Human
uccucccagccagagcuggcgg

SEQ ID NO: 234954 - RNA, 19 nt, Human
uccucccagccucuuugua

SEQ ID NO: 234955 - RNA, 19 nt, Human
uccucccagccugccucag

SEQ ID NO: 234956 - RNA, 32 nt, Human
uccucccaggaagcugaauccagcaagaacaa

SEQ ID NO: 234957 - RNA, 32 nt, Human
uccucccaggagauaguuugauggauggucac

SEQ ID NO: 234958 - RNA, 32 nt, Human
uccucccagggcaggugaauggagaggguggc

SEQ ID NO: 234959 - RNA, 32 nt, Human
uccucccagggcugccacuaccagagaccugg

SEQ ID NO: 234960 - RNA, 32 nt, Human
uccucccagguggugcgggggcuggugggcgg

SEQ ID NO: 234961 - RNA, 32 nt, Human
uccucccagucugggaguauagcaggaggccc

SEQ ID NO: 234962 - RNA, 32 nt, Human
uccucccaguguccaagccccuccaggagggu

SEQ ID NO: 234963 - RNA, 32 nt, Human
uccucccauccccucaucuucuccacuacuau

SEQ ID NO: 234964 - RNA, 32 nt, Human
uccucccaucgcccuccuacucccucuccucc

SEQ ID NO: 234965 - RNA, 32 nt, Human
uccucccaugucagguggcucucagaguacag

SEQ ID NO: 234966 - RNA, 32 nt, Human
uccucccauucaaccacccuagagaacugccu

SEQ ID NO: 234967 - RNA, 32 nt, Human
uccuccccaacaaacaguaccugggauggagc

SEQ ID NO: 234968 - RNA, 32 nt, Human
uccuccccacucgccuccucuccacuagacuu

SEQ ID NO: 234969 - RNA, 32 nt, Human
uccuccccagcccuguggaaagcuguggaguc

SEQ ID NO: 234970 - RNA, 32 nt, Human
uccuccccaggcugugcccuccagaggacccu

SEQ ID NO: 234971 - RNA, 32 nt, Human
uccuccccagguggaggugccaggaagcuccc

SEQ ID NO: 234972 - RNA, 32 nt, Human
uccuccccaucuuuccauccuuccugcugagc

SEQ ID NO: 234973 - RNA, 32 nt, Human
uccuccccauuuggcccugggcucaggggacc

SEQ ID NO: 234974 - RNA, 32 nt, Human
uccucccccaccagcucuccccacagggcccc

SEQ ID NO: 234975 - RNA, 32 nt, Human
uccucccccagaccccucccagcccucuccuc

SEQ ID NO: 234976 - RNA, 32 nt, Human
uccucccccagccugggagcgggguugucaag

SEQ ID NO: 234977 - RNA, 32 nt, Human
uccucccccugccucuccucccugacccaggg

SEQ ID NO: 234978 - RNA, 32 nt, Human
uccuccccguggaggccaccuggacuuccagu

SEQ ID NO: 234979 - RNA, 32 nt, Human
uccuccccucagcccccagccuccaggccugc

SEQ ID NO: 234980 - RNA, 32 nt, Human
uccuccccuccacuccagcccaccggugacuc

SEQ ID NO: 234981 - RNA, 32 nt, Human
uccuccccuccagauccgggccccaggcugcu

SEQ ID NO: 234982 - RNA, 16 nt, Human
uccuccccuccaggua

SEQ ID NO: 234983 - RNA, 32 nt, Human
uccuccccucccccuccgcccuccuccgcucc

SEQ ID NO: 234984 - RNA, 32 nt, Human
uccuccccuccccggcccucccacagcugcug

SEQ ID NO: 234985 - RNA, 32 nt, Human
uccuccccuccccucacuucucccaccugcag

SEQ ID NO: 234986 - RNA, 32 nt, Human
uccuccccuccccucccucaguccucccuccc

SEQ ID NO: 234987 - RNA, 32 nt, Human
uccuccccuccccucccuuccucuccucccca

SEQ ID NO: 234988 - RNA, 32 nt, Human
uccuccccuccccucccuucucauuccuuuuc

SEQ ID NO: 234989 - RNA, 32 nt, Human
uccuccccuccccugacgagaucugcccuccu

SEQ ID NO: 234990 - RNA, 32 nt, Human
uccuccccuccccuucccuugcuucuccuucu

SEQ ID NO: 234991 - RNA, 32 nt, Human
uccuccccuccccuuucacucaauucucacca

SEQ ID NO: 234992 - RNA, 32 nt, Human
uccuccccuccggguuuucacacugggcgaag

SEQ ID NO: 234993 - RNA, 32 nt, Human
uccuccccucgcuccucgcccugggccucagc

SEQ ID NO: 234994 - RNA, 20 nt, Human
uccuccccuucccaccugcu

SEQ ID NO: 234995 - RNA, 32 nt, Human
uccuccccuucccauuagcaguucccuccuuu

SEQ ID NO: 234996 - RNA, 32 nt, Human
uccuccccuucccuucucccaucucugucccu

SEQ ID NO: 234997 - RNA, 32 nt, Human
uccuccccuucucuuuucuccacaugaagacg

SEQ ID NO: 234998 - RNA, 32 nt, Human
uccuccccuuuccccuucuccccaccaaagga

SEQ ID NO: 234999 - RNA, 32 nt, Human
uccuccccuuucuccccuccguccccgcuucc

SEQ ID NO: 235000 - RNA, 32 nt, Human
uccucccgaccucccggccugccgcuccggcc

SEQ ID NO: 235001 - RNA, 32 nt, Human
uccucccgacuccccucaccucucccagggaa

SEQ ID NO: 235002 - RNA, 32 nt, Human
uccucccgcaagucucaaacauucauacacug

SEQ ID NO: 235003 - RNA, 32 nt, Human
uccucccgccaucuuccuuucuuggauggauc

SEQ ID NO: 235004 - RNA, 32 nt, Human
uccucccgcccggcacuucuguggaccccuuc

SEQ ID NO: 235005 - RNA, 32 nt, Human
uccucccgcccggggccccaugggccgccgca

SEQ ID NO: 235006 - RNA, 22 nt, Human
uccucccgcccugggcuggccu

SEQ ID NO: 235007 - RNA, 32 nt, Human
uccucccggaccccuggacacacacagcccug

SEQ ID NO: 235008 - RNA, 32 nt, Human
uccucccggcacuucgaggccacugagccacc

SEQ ID NO: 235009 - RNA, 32 nt, Human
uccucccggguuuuauuucucucuuucuugag

SEQ ID NO: 235010 - RNA, 32 nt, Human
uccucccguccaccccagaggggaaguuccuc

SEQ ID NO: 235011 - RNA, 32 nt, Human
uccucccguccgccccagagggaccagacaca

SEQ ID NO: 235012 - RNA, 32 nt, Human
uccucccguggaucucccggggugggggcagg

SEQ ID NO: 235013 - RNA, 32 nt, Human
uccucccuagacaauauguugggcacuaggga

SEQ ID NO: 235014 - RNA, 32 nt, Human
uccucccuaugccucuggcaccugcgcagcaa

SEQ ID NO: 235015 - RNA, 32 nt, Human
uccucccuccaaacugaaacuaauuugauuuu

SEQ ID NO: 235016 - RNA, 32 nt, Human
uccucccuccacaguccuccagcuucggaucc

SEQ ID NO: 235017 - RNA, 32 nt, Human
uccucccuccccaaccuccuccauuuccccag

SEQ ID NO: 235018 - RNA, 32 nt, Human
uccucccuccccucuugcggccucccgcuguc

SEQ ID NO: 235019 - RNA, 32 nt, Human
uccucccucccucccucccucccucccuuucu

SEQ ID NO: 235020 - RNA, 32 nt, Human
uccucccucccucccuccuccuccuuccucgu

SEQ ID NO: 235021 - RNA, 32 nt, Human
uccucccucccucccuuccuugggcagaauga

SEQ ID NO: 235022 - RNA, 32 nt, Human
uccucccuccgccccacuuccaacacaacccc

SEQ ID NO: 235023 - RNA, 32 nt, Human
uccucccuccucccccuccucucuggcaggga

SEQ ID NO: 235024 - RNA, 32 nt, Human
uccucccuccucuccucacauccuggucccua

SEQ ID NO: 235025 - RNA, 28 nt, Human
uccucccuccuugcugccucuucccacc

SEQ ID NO: 235026 - RNA, 32 nt, Human
uccucccucuccugaaccucuacccucacccu

SEQ ID NO: 235027 - RNA, 32 nt, Human
uccucccucuccugaauccuuuucuacaugau

SEQ ID NO: 235028 - RNA, 32 nt, Human
uccucccucugccucuguucagcuccaccuug

SEQ ID NO: 235029 - RNA, 32 nt, Human
uccucccucugccuucccagugcauaaagucu

SEQ ID NO: 235030 - RNA, 16 nt, Human
uccucccucugcugcc

SEQ ID NO: 235031 - RNA, 32 nt, Human
uccucccugcaaccaggcagaugagaaauaug

SEQ ID NO: 235032 - RNA, 32 nt, Human
uccucccugccucuccgucuuguaaugaguug

SEQ ID NO: 235033 - RNA, 32 nt, Human
uccucccugcucugcaaccuuucucuucucac

SEQ ID NO: 235034 - RNA, 32 nt, Human
uccucccuggacaaaggcaucaugaguuguca

SEQ ID NO: 235035 - RNA, 32 nt, Human
uccucccuggagcuagugucuccucucuggug

SEQ ID NO: 235036 - RNA, 32 nt, Human
uccucccugggaacagggugaaggccgagaac

SEQ ID NO: 235037 - RNA, 32 nt, Human
uccucccugucaccugccuccucaucauggaa

SEQ ID NO: 235038 - RNA, 32 nt, Human
uccucccugucuggcccucccucuccagcaag

SEQ ID NO: 235039 - RNA, 32 nt, Human
uccucccugugcaggguauccuguagggugac

SEQ ID NO: 235040 - RNA, 19 nt, Human
uccucccuucccccuggca

SEQ ID NO: 235041 - RNA, 32 nt, Human
uccucccuucuuucuuugaagccuaauggccc

SEQ ID NO: 235042 - RNA, 32 nt, Human
uccucccuugcuggcccugauggggugggguc

SEQ ID NO: 235043 - RNA, 32 nt, Human
uccucccuuuuccuccccacuccuucccacca

SEQ ID NO: 235044 - RNA, 32 nt, Human
uccucccuuuucucccuauccuucugcccccu

SEQ ID NO: 235045 - RNA, 32 nt, Human
uccuccgacgcgauggggaaggugcuauccaa

SEQ ID NO: 235046 - RNA, 32 nt, Human
uccuccgacucccugguucaagcgauuguccu

SEQ ID NO: 235047 - RNA, 32 nt, Human
uccuccgagauaauggcaucagcugcuaagga

SEQ ID NO: 235048 - RNA, 20 nt, Human
uccuccgcccuuuuuguccu

SEQ ID NO: 235049 - RNA, 32 nt, Human
uccuccgccucccggguucaagcaaugcuccc

SEQ ID NO: 235050 - RNA, 32 nt, Human
uccuccgccucccggguucaagcgauucuccc

SEQ ID NO: 235051 - RNA, 32 nt, Human
uccuccgccucccggguucaagugauucucau

SEQ ID NO: 235052 - RNA, 23 nt, Human
uccuccgccuguccacagccccu

SEQ ID NO: 235053 - RNA, 32 nt, Human
uccuccgcggcggguuugggugcaguggaccc

SEQ ID NO: 235054 - RNA, 32 nt, Human
uccuccgcguggcucacuccagccucggaugu

SEQ ID NO: 235055 - RNA, 32 nt, Human
uccuccgcugcagcuuuccaucucaucuccuu

SEQ ID NO: 235056 - RNA, 32 nt, Human
uccuccggacagaaccuauuguguugaggcug

SEQ ID NO: 235057 - RNA, 32 nt, Human
uccuccgggaaugaauuccucaugaaaaugac

SEQ ID NO: 235058 - RNA, 32 nt, Human
uccuccgggggaggaggaugggguugggaacg

SEQ ID NO: 235059 - RNA, 32 nt, Human
uccuccgggggcggaggcagcugaggcgcuuc

SEQ ID NO: 235060 - RNA, 32 nt, Human
uccuccgggugaggggagcgaagguugggggu

SEQ ID NO: 235061 - RNA, 32 nt, Human
uccuccggugucucuucucuccacaucuguaa

SEQ ID NO: 235062 - RNA, 32 nt, Human
uccuccgguugacaguggaaggugcugcagca

SEQ ID NO: 235063 - RNA, 32 nt, Human
uccuccgucuucuucccuggcccuggucaggc

SEQ ID NO: 235064 - RNA, 32 nt, Human
uccuccgugggugacagagcgagaccugacuc

SEQ ID NO: 235065 - RNA, 22 nt, Human
uccuccgugugaaggcagcugg

SEQ ID NO: 235066 - RNA, 32 nt, Human
uccuccguguggacugugccucaggccagggc

SEQ ID NO: 235067 - RNA, 32 nt, Human
uccuccguuauugauuucuccuuucucccuaa

SEQ ID NO: 235068 - RNA, 32 nt, Human
uccuccguucucauuguuuccugcuuuccuuc

SEQ ID NO: 235069 - RNA, 32 nt, Human
uccuccuaccucugccauucaugagaacugug

SEQ ID NO: 235070 - RNA, 32 nt, Human
uccuccuagccacccaccacacugauccagcc

SEQ ID NO: 235071 - RNA, 32 nt, Human
uccuccuagggugcccuugagccgcaaaacug

SEQ ID NO: 235072 - RNA, 18 nt, Human
uccuccuaguucucaaga

SEQ ID NO: 235073 - RNA, 32 nt, Human
uccuccuaugccacgugcucucaccagaacug

SEQ ID NO: 235074 - RNA, 26 nt, Human
uccuccuaugccuucccaugagucag

SEQ ID NO: 235075 - RNA, 32 nt, Human
uccuccucaagagcagaggaaaagccauauaa

SEQ ID NO: 235076 - RNA, 32 nt, Human
uccuccucaccuuuuguugcuaucggcagcug

SEQ ID NO: 235077 - RNA, 32 nt, Human
uccuccucacucagcccugccgcugcccaggg

SEQ ID NO: 235078 - RNA, 32 nt, Human
uccuccucagccagcggcagaagcagggcuga

SEQ ID NO: 235079 - RNA, 32 nt, Human
uccuccucaggcucggaccauggugcaguccc

SEQ ID NO: 235080 - RNA, 32 nt, Human
uccuccucaguucugugccugagaaccacugc

SEQ ID NO: 235081 - RNA, 32 nt, Human
uccuccucauccucuucgucuuccucaucuuc

SEQ ID NO: 235082 - RNA, 20 nt, Human
uccuccucaucuaaugcuca

SEQ ID NO: 235083 - RNA, 32 nt, Human
uccuccucauucccuuccaucucccuccccuc

SEQ ID NO: 235084 - RNA, 32 nt, Human
uccuccuccacuccagucugcuccgcagaacc

SEQ ID NO: 235085 - RNA, 32 nt, Human
uccuccuccagcccccagcccgcaggguacuu

SEQ ID NO: 235086 - RNA, 24 nt, Human
uccuccuccaugcucugcaacuca

SEQ ID NO: 235087 - RNA, 32 nt, Human
uccuccuccauuuccuuuuugggauuugucac

SEQ ID NO: 235088 - RNA, 32 nt, Human
uccuccucccaaagugcugggauuacaggcgu

SEQ ID NO: 235089 - RNA, 18 nt, Human
uccuccuccccgcgcggc

SEQ ID NO: 235090 - RNA, 21 nt, Human
uccuccuccccuacgugacca

SEQ ID NO: 235091 - RNA, 32 nt, Human
uccuccuccccuccucuucccuuagccucucc

SEQ ID NO: 235092 - RNA, 32 nt, Human
uccuccuccccuggcaacugcugaucgacuuu

SEQ ID NO: 235093 - RNA, 32 nt, Human
uccuccucccuccccucugcccucucccuucc

SEQ ID NO: 235094 - RNA, 32 nt, Human
uccuccucccugccaaccuccuccucuccugc

SEQ ID NO: 235095 - RNA, 22 nt, Human
uccuccucccuuacugaaccac

SEQ ID NO: 235096 - RNA, 23 nt, Human
uccuccuccucaccaagggccca

SEQ ID NO: 235097 - RNA, 25 nt, Human
uccuccuccucaguccaagugauca

SEQ ID NO: 235098 - RNA, 21 nt, Human
uccuccuccucauucagacca

SEQ ID NO: 235099 - RNA, 32 nt, Human
uccuccuccucccuccucccccuccucucugg

SEQ ID NO: 235100 - RNA, 22 nt, Human
uccuccuccuccgagcugacuu

SEQ ID NO: 235101 - RNA, 32 nt, Human
uccuccuccuccucccggcggugggugccgcc

SEQ ID NO: 235102 - RNA, 32 nt, Human
uccuccuccuccuccggaggugggaucccaga

SEQ ID NO: 235103 - RNA, 32 nt, Human
uccuccuccuccuccuccggaggugggauccc

SEQ ID NO: 235104 - RNA, 32 nt, Human
uccuccuccuccuccuccuccggaggugggau

SEQ ID NO: 235105 - RNA, 32 nt, Human
uccuccuccucucuccccacuugaaccaugaa

SEQ ID NO: 235106 - RNA, 32 nt, Human
uccuccuccucuuccuccuccuccuccccacc

SEQ ID NO: 235107 - RNA, 32 nt, Human
uccuccuccucuuccuccuccuccuccucucc

SEQ ID NO: 235108 - RNA, 32 nt, Human
uccuccuccucuuccuccuccuccuccucucu

SEQ ID NO: 235109 - RNA, 32 nt, Human
uccuccuccucuuccuccuccucuucaauucu

SEQ ID NO: 235110 - RNA, 32 nt, Human
uccuccuccucuuccuccuccucuuccucuuc

SEQ ID NO: 235111 - RNA, 32 nt, Human
uccuccuccugccucucuucgcuucgccugca

SEQ ID NO: 235112 - RNA, 32 nt, Human
uccuccuccuguucuugccuuggaccugcagg

SEQ ID NO: 235113 - RNA, 32 nt, Human
uccuccuccuucacgugcacagacauacacac

SEQ ID NO: 235114 - RNA, 32 nt, Human
uccuccuccuucuccuccucucacccaggauc

SEQ ID NO: 235115 - RNA, 22 nt, Human
uccuccucgggguguugcacaa

SEQ ID NO: 235116 - RNA, 28 nt, Human
uccuccucguuugcugccuccuccuccu

SEQ ID NO: 235117 - RNA, 32 nt, Human
uccuccucuauagcuucugggugucccccuag

SEQ ID NO: 235118 - RNA, 32 nt, Human
uccuccucuccccucuccucuuucagagcacu

SEQ ID NO: 235119 - RNA, 32 nt, Human
uccuccucucugagaccagggcugucacuuuu

SEQ ID NO: 235120 - RNA, 32 nt, Human
uccuccucucugugugccucagucuccugccg

SEQ ID NO: 235121 - RNA, 32 nt, Human
uccuccucugaugcgucacagucacagguccu

SEQ ID NO: 235122 - RNA, 32 nt, Human
uccuccucugcaggauguaagguuuaucagcc

SEQ ID NO: 235123 - RNA, 32 nt, Human
uccuccucuuccuccuccuccuccaaacucgc

SEQ ID NO: 235124 - RNA, 32 nt, Human
uccuccucuuccuccuccuccuccaccuccgg

SEQ ID NO: 235125 - RNA, 32 nt, Human
uccuccucuuccuccuccuccuccccaccacc

SEQ ID NO: 235126 - RNA, 32 nt, Human
uccuccucuuccuccuccuccugggccgggcu

SEQ ID NO: 235127 - RNA, 32 nt, Human
uccuccucuuccuccuccucuucaauucuccc

SEQ ID NO: 235128 - RNA, 32 nt, Human
uccuccucuuccuccuuccuccuuccuccugc

SEQ ID NO: 235129 - RNA, 32 nt, Human
uccuccucuuccuggcugcagggagugcuugu

SEQ ID NO: 235130 - RNA, 32 nt, Human
uccuccucuucuccucccucuucccucaucuc

SEQ ID NO: 235131 - RNA, 32 nt, Human
uccuccucuugcuaccuccaccuccaccgcca

SEQ ID NO: 235132 - RNA, 32 nt, Human
uccuccucuuggaaggcagaacucccugaaau

SEQ ID NO: 235133 - RNA, 32 nt, Human
uccuccucuuucccucuccccgcugccaaaaa

SEQ ID NO: 235134 - RNA, 32 nt, Human
uccuccucuuucuccuccuccuuauccgaacc

SEQ ID NO: 235135 - RNA, 32 nt, Human
uccuccucuuucuccuccuucucccgcggcuu

SEQ ID NO: 235136 - RNA, 32 nt, Human
uccuccucuuucuugcuuucucuuuucccucu

SEQ ID NO: 235137 - RNA, 32 nt, Human
uccuccugaagcagucuaggagcuugcagcca

SEQ ID NO: 235138 - RNA, 32 nt, Human
uccuccugaccacccauaaccuggcugaggcg

SEQ ID NO: 235139 - RNA, 32 nt, Human
uccuccugagcagcaacccacaguagguagga

SEQ ID NO: 235140 - RNA, 32 nt, Human
uccuccugagccgcaacggcucugaggccucc

SEQ ID NO: 235141 - RNA, 32 nt, Human
uccuccugagccugauucccagggaaguguua

SEQ ID NO: 235142 - RNA, 32 nt, Human
uccuccugaggcagacauccaguaggcauggg

SEQ ID NO: 235143 - RNA, 32 nt, Human
uccuccugcaggaacuggcccaaaaggccaag

SEQ ID NO: 235144 - RNA, 32 nt, Human
uccuccugcaggagcccaacccuggcaucgag

SEQ ID NO: 235145 - RNA, 32 nt, Human
uccuccugcagggccugugagcugcucacaac

SEQ ID NO: 235146 - RNA, 32 nt, Human
uccuccugccaggggagagccacccacaggcc

SEQ ID NO: 235147 - RNA, 32 nt, Human
uccuccugccccugggcucucagggacccccu

SEQ ID NO: 235148 - RNA, 32 nt, Human
uccuccugcccuuucaaagaauaaccacagcu

SEQ ID NO: 235149 - RNA, 19 nt, Human
uccuccugccucccagugg

SEQ ID NO: 235150 - RNA, 30 nt, Human
uccuccugccucuccucugccccuguccag

SEQ ID NO: 235151 - RNA, 31 nt, Human
uccuccugccucuccucugccccuguccagu

SEQ ID NO: 235152 - RNA, 23 nt, Human
uccuccugcucccuaguggccca

SEQ ID NO: 235153 - RNA, 32 nt, Human
uccuccuggaaggggccucaugacagauucgg

SEQ ID NO: 235154 - RNA, 32 nt, Human
uccuccuggacuugggccugguggaagggcuc

SEQ ID NO: 235155 - RNA, 32 nt, Human
uccuccuggauuccugcaacuauauucucacu

SEQ ID NO: 235156 - RNA, 28 nt, Human
uccuccuggcagcccccugcugaccugu

SEQ ID NO: 235157 - RNA, 32 nt, Human
uccuccuggccccgcccugcccagccccuccc

SEQ ID NO: 235158 - RNA, 32 nt, Human
uccuccuggcugcaccuggguagggauggugg

SEQ ID NO: 235159 - RNA, 22 nt, Human
uccuccugggagccuggccugc

SEQ ID NO: 235160 - RNA, 32 nt, Human
uccuccugggcaacagagugagacccuaucac

SEQ ID NO: 235161 - RNA, 32 nt, Human
uccuccuggggcccuguucccuguggggacug

SEQ ID NO: 235162 - RNA, 32 nt, Human
uccuccuggggcuggggcccagauccugggga

SEQ ID NO: 235163 - RNA, 32 nt, Human
uccuccugucuuccuccuugucccaugaaggc

SEQ ID NO: 235164 - RNA, 32 nt, Human
uccuccuguggaaaaggagagcuguuccagaa

SEQ ID NO: 235165 - RNA, 32 nt, Human
uccuccuguggaaggaacuggauucaucccuu

SEQ ID NO: 235166 - RNA, 32 nt, Human
uccuccuguggacagaccuuccucacccgcuc

SEQ ID NO: 235167 - RNA, 32 nt, Human
uccuccuguggccucugcuuguacagaacugg

SEQ ID NO: 235168 - RNA, 32 nt, Human
uccuccuguguagcugccaccuccccgcuggg

SEQ ID NO: 235169 - RNA, 32 nt, Human
uccuccuuacucuuggauaaauaaacagccug

SEQ ID NO: 235170 - RNA, 32 nt, Human
uccuccuuccagggacugaggucuccaagcua

SEQ ID NO: 235171 - RNA, 32 nt, Human
uccuccuucccaucuucugugcuuccagagaa

SEQ ID NO: 235172 - RNA, 32 nt, Human
uccuccuuccuggucacauucaaaccuuccca

SEQ ID NO: 235173 - RNA, 32 nt, Human
uccuccuucucccgcucccucucccgugccuc

SEQ ID NO: 235174 - RNA, 32 nt, Human
uccuccuugccacccuuccagccuuccaggcu

SEQ ID NO: 235175 - RNA, 32 nt, Human
uccuccuugggagcugggcucuucugcccugg

SEQ ID NO: 235176 - RNA, 32 nt, Human
uccuccuuguaggcauuucaucuguguguguu

SEQ ID NO: 235177 - RNA, 32 nt, Human
uccuccuugucuuaaucguccugcugcugcug

SEQ ID NO: 235178 - RNA, 32 nt, Human
uccuccuuuccagugaaacuacaccugaagcc

SEQ ID NO: 235179 - RNA, 32 nt, Human
uccuccuuucccucuuauuccuccuucuccuc

SEQ ID NO: 235180 - RNA, 32 nt, Human
uccuccuuucggagucaaggaaagccuuucua

SEQ ID NO: 235181 - RNA, 32 nt, Human
uccuccuuucuuggcgggugggagacuccggg

SEQ ID NO: 235182 - RNA, 32 nt, Human
uccuccuuuguuguuucuuaauuuggaaacua

SEQ ID NO: 235183 - RNA, 32 nt, Human
uccuccuuuucuagcaggcagcucuucuaggc

SEQ ID NO: 235184 - RNA, 32 nt, Human
uccucgacagaagagugggaggugagaagccc

SEQ ID NO: 235185 - RNA, 32 nt, Human
uccucgaccccucucccccuugacuauccaaa

SEQ ID NO: 235186 - RNA, 32 nt, Human
uccucgagaacagcacguaacugcaaugcagc

SEQ ID NO: 235187 - RNA, 32 nt, Human
uccucgagaucaaacacuaggcacggggcugg

SEQ ID NO: 235188 - RNA, 32 nt, Human
uccucgagcacgucacacacacaugccagugu

SEQ ID NO: 235189 - RNA, 24 nt, Human
uccucgagcccagcuaacucggug

SEQ ID NO: 235190 - RNA, 24 nt, Human
uccucgagcccgcacggcucggug

SEQ ID NO: 235191 - RNA, 24 nt, Human
uccucgagcucagugcacucggug

SEQ ID NO: 235192 - RNA, 22 nt, Human
uccucgagcuccccggggcuug

SEQ ID NO: 235193 - RNA, 32 nt, Human
uccucgaugugcagaaguugucaguggaaaau

SEQ ID NO: 235194 - RNA, 32 nt, Human
uccucgcaacacagguaccuugucaugucaga

SEQ ID NO: 235195 - RNA, 32 nt, Human
uccucgcagguguguugugaagauuaaugcag

SEQ ID NO: 235196 - RNA, 23 nt, Human
uccucgccacccagcagcacccu

SEQ ID NO: 235197 - RNA, 32 nt, Human
uccucgccagccucgccagccugcugccagua

SEQ ID NO: 235198 - RNA, 32 nt, Human
uccucgcccaggagucaucucaugccgccgcc

SEQ ID NO: 235199 - RNA, 32 nt, Human
uccucgcccugccuccugccauucccggccug

SEQ ID NO: 235200 - RNA, 32 nt, Human
uccucgccgcccgcccagaggaguccccgcgc

SEQ ID NO: 235201 - RNA, 32 nt, Human
uccucgccuccccucuuccucauuccauugcc

SEQ ID NO: 235202 - RNA, 22 nt, Human
uccucgccuuccaccuccugcu

SEQ ID NO: 235203 - RNA, 24 nt, Human
uccucgccuuuagauauuuauuca

SEQ ID NO: 235204 - RNA, 32 nt, Human
uccucgccuuucucgcaccugcuccugcgcca

SEQ ID NO: 235205 - RNA, 32 nt, Human
uccucgccuuucuuccccgcgcaucgccagcg

SEQ ID NO: 235206 - RNA, 32 nt, Human
uccucgcuccacccacccacgcugcugucacc

SEQ ID NO: 235207 - RNA, 32 nt, Human
uccucgcugcucaugcccacagcccucccaga

SEQ ID NO: 235208 - RNA, 32 nt, Human
uccucgcuuagccugcaccuccuguccugaag

SEQ ID NO: 235209 - RNA, 32 nt, Human
uccucggacugaagcaagagacagggaaggaa

SEQ ID NO: 235210 - RNA, 32 nt, Human
uccucggaggagcagagguggccgccgugggg

SEQ ID NO: 235211 - RNA, 32 nt, Human
uccucggaguaguggugagauggccuuggguu

SEQ ID NO: 235212 - RNA, 32 nt, Human
uccucggauuacaggcaugagccaccacaccc

SEQ ID NO: 235213 - RNA, 23 nt, Human
uccucggcaggaccccagucuca

SEQ ID NO: 235214 - RNA, 32 nt, Human
uccucggccagccuggcugucaguuggggauu

SEQ ID NO: 235215 - RNA, 32 nt, Human
uccucggccaugucacugcucugcgugcgcgu

SEQ ID NO: 235216 - RNA, 32 nt, Human
uccucggccuuggagagcagcggcggcggcgg

SEQ ID NO: 235217 - RNA, 32 nt, Human
uccucggcgaacaugucucuccugaguccaga

SEQ ID NO: 235218 - RNA, 32 nt, Human
uccucggcucaagcaauccuuccuacucagcc

SEQ ID NO: 235219 - RNA, 22 nt, Human
uccucggcugcccuuggacuug

SEQ ID NO: 235220 - RNA, 32 nt, Human
uccucggcuguggucuggaugcugccacccuc

SEQ ID NO: 235221 - RNA, 32 nt, Human
uccucgggaggcaggagaaucgcuugaacccc

SEQ ID NO: 235222 - RNA, 32 nt, Human
uccucgggaggcugaggcaggagaaucgcuug

SEQ ID NO: 235223 - RNA, 32 nt, Human
uccucgggccuccugggucugggacgugccuc

SEQ ID NO: 235224 - RNA, 32 nt, Human
uccucgggccucucuucgucgaagagucuccu

SEQ ID NO: 235225 - RNA, 32 nt, Human
uccucgggcucccuaaggaccugcucucccag

SEQ ID NO: 235226 - RNA, 32 nt, Human
uccucggggccccugcagccacccaacgucac

SEQ ID NO: 235227 - RNA, 32 nt, Human
uccucgggggauguuacuccuaaugucacacg

SEQ ID NO: 235228 - RNA, 32 nt, Human
uccucgggguuuagggucgagcuguuccugau

SEQ ID NO: 235229 - RNA, 31 nt, Human
uccucgguccuucagcaccccucggcccgac

SEQ ID NO: 235230 - RNA, 32 nt, Human
uccucggugaggugagccccucuacagccagu

SEQ ID NO: 235231 - RNA, 32 nt, Human
uccucgucuccuccuccuucccacaggccggc

SEQ ID NO: 235232 - RNA, 32 nt, Human
uccucgugccugcugcucacagcccccgagag

SEQ ID NO: 235233 - RNA, 32 nt, Human
uccucgugcuguucuuguguggcuuucugggc

SEQ ID NO: 235234 - RNA, 32 nt, Human
uccucguggagcggagcaaggccaggcggccc

SEQ ID NO: 235235 - RNA, 32 nt, Human
uccucguggcagaggccugcaugugggugcca

SEQ ID NO: 235236 - RNA, 32 nt, Human
uccucgugguugccugccccacucccugccga

SEQ ID NO: 235237 - RNA, 32 nt, Human
uccucguucugugggagagaccagccuucugg

SEQ ID NO: 235238 - RNA, 32 nt, Human
uccucguugcccuguaaggacauccguguaua

SEQ ID NO: 235239 - RNA, 32 nt, Human
uccucguuucaagugauccuccugccucagcu

SEQ ID NO: 235240 - RNA, 23 nt, Human
uccucuaacuuguuuugcugcuc

SEQ ID NO: 235241 - RNA, 25 nt, Human
uccucuaagcaugcuccuggccucu

SEQ ID NO: 235242 - RNA, 32 nt, Human
uccucuacaagccuggugugcccacacaccac

SEQ ID NO: 235243 - RNA, 32 nt, Human
uccucuacaugacaaagaaagacuggaaaagu

SEQ ID NO: 235244 - RNA, 32 nt, Human
uccucuacccagcaaaaaugagugucucagaa

SEQ ID NO: 235245 - RNA, 23 nt, Human
uccucuaccugaauccagugcuc

SEQ ID NO: 235246 - RNA, 32 nt, Human
uccucuaccugcacucccgcccugaggcccgg

SEQ ID NO: 235247 - RNA, 32 nt, Human
uccucuaccuguucaacaacagccuggccucg

SEQ ID NO: 235248 - RNA, 32 nt, Human
uccucuacgcccagguuccggaagguggugag

SEQ ID NO: 235249 - RNA, 32 nt, Human
uccucuacuacugccugcucuucauuuugggc

SEQ ID NO: 235250 - RNA, 32 nt, Human
uccucuagccucauacccgugcccucacagag

SEQ ID NO: 235251 - RNA, 32 nt, Human
uccucuagccucugcuggagugcagugaggau

SEQ ID NO: 235252 - RNA, 32 nt, Human
uccucuagccugggcaguagaggaagaaaugc

SEQ ID NO: 235253 - RNA, 32 nt, Human
uccucuaguuuugagacagcugccucaaccuc

SEQ ID NO: 235254 - RNA, 32 nt, Human
uccucuauccugggcuuuuguuuugcuuuuua

SEQ ID NO: 235255 - RNA, 32 nt, Human
uccucuauguacccccugcccaccucgggccu

SEQ ID NO: 235256 - RNA, 23 nt, Human
uccucuauucuuuccuccuuccc

SEQ ID NO: 235257 - RNA, 32 nt, Human
uccucucaacucucgcugcccaaccagaaagg

SEQ ID NO: 235258 - RNA, 32 nt, Human
uccucucaagccccaggacccuucaaagggcu

SEQ ID NO: 235259 - RNA, 32 nt, Human
uccucucacagaaacacugggccaaacagugg

SEQ ID NO: 235260 - RNA, 32 nt, Human
uccucucacagccucuguaucucugcaggcca

SEQ ID NO: 235261 - RNA, 31 nt, Human
uccucucacagcuagaacugaaacaaacccu

SEQ ID NO: 235262 - RNA, 32 nt, Human
uccucucacccacaccccuggccauggcuaac

SEQ ID NO: 235263 - RNA, 23 nt, Human
uccucucaccucucccucgauca

SEQ ID NO: 235264 - RNA, 32 nt, Human
uccucucacucugccuggagauacuuccugcc

SEQ ID NO: 235265 - RNA, 31 nt, Human
uccucucacugcuagaauauucaccaagggu

SEQ ID NO: 235266 - RNA, 32 nt, Human
uccucucagagccucagcuucugggggagaca

SEQ ID NO: 235267 - RNA, 32 nt, Human
uccucucaggcaggcuugcucugucccuuccu

SEQ ID NO: 235268 - RNA, 32 nt, Human
uccucucaggggcaaauggagcacagaucuag

SEQ ID NO: 235269 - RNA, 32 nt, Human
uccucucagucauucaucaauguggccagcuu

SEQ ID NO: 235270 - RNA, 32 nt, Human
uccucucaguccuucugcaacgcccagugccu

SEQ ID NO: 235271 - RNA, 32 nt, Human
uccucucaguuguaaaagaugaacucuuugag

SEQ ID NO: 235272 - RNA, 32 nt, Human
uccucucauacucccugagacucugagaacag

SEQ ID NO: 235273 - RNA, 32 nt, Human
uccucucauccugcaucaucagccuggacuug

SEQ ID NO: 235274 - RNA, 21 nt, Human
uccucuccaaacacuucggga

SEQ ID NO: 235275 - RNA, 32 nt, Human
uccucuccaaauuuacauguugaaguccuaau

SEQ ID NO: 235276 - RNA, 31 nt, Human
uccucuccacccucugggccucagugucuug

SEQ ID NO: 235277 - RNA, 32 nt, Human
uccucuccacucccccuccucacuuuccuguc

SEQ ID NO: 235278 - RNA, 32 nt, Human
uccucuccagaacagggaaaugugguguuuac

SEQ ID NO: 235279 - RNA, 32 nt, Human
uccucuccagaacuccagaaagagcagugugc

SEQ ID NO: 235280 - RNA, 32 nt, Human
uccucuccagcaucuguuguuuccugacuuuu

SEQ ID NO: 235281 - RNA, 32 nt, Human
uccucuccagcccuauggaagucucaagguca

SEQ ID NO: 235282 - RNA, 20 nt, Human
uccucuccaggaauccgcgg

SEQ ID NO: 235283 - RNA, 32 nt, Human
uccucuccagugggguuggcuuuuauuguuuc

SEQ ID NO: 235284 - RNA, 32 nt, Human
uccucuccaucagugccuuugccugcagcuac

SEQ ID NO: 235285 - RNA, 32 nt, Human
uccucuccaugcccaagucgguuuccagccgc

SEQ ID NO: 235286 - RNA, 32 nt, Human
uccucuccauuuuucucuuucuccuccuggcc

SEQ ID NO: 235287 - RNA, 32 nt, Human
uccucucccaaguucuuucuccaucccucucc

SEQ ID NO: 235288 - RNA, 18 nt, Human
uccucucccagacuguga

SEQ ID NO: 235289 - RNA, 32 nt, Human
uccucucccagaucgucuucuccuucaguuuc

SEQ ID NO: 235290 - RNA, 32 nt, Human
uccucuccccagccugggaagaugucucacug

SEQ ID NO: 235291 - RNA, 32 nt, Human
uccucuccccaggccucuggcugcagugaugc

SEQ ID NO: 235292 - RNA, 32 nt, Human
uccucucccccgaaccucuccccagcuagucu

SEQ ID NO: 235293 - RNA, 22 nt, Human
uccucucccccucucuccuccc

SEQ ID NO: 235294 - RNA, 16 nt, Human
uccucuccccgcgccg

SEQ ID NO: 235295 - RNA, 32 nt, Human
uccucuccccucauuuccaucucccagccccc

SEQ ID NO: 235296 - RNA, 16 nt, Human
uccucuccccuccuca

SEQ ID NO: 235297 - RNA, 22 nt, Human
uccucuccccuccucccauccc

SEQ ID NO: 235298 - RNA, 32 nt, Human
uccucucccucccauugcauggcucacaccug

SEQ ID NO: 235299 - RNA, 32 nt, Human
uccucucccuccuguggauucucccaucagcc

SEQ ID NO: 235300 - RNA, 32 nt, Human
uccucucccucgggacccaaggccacaaagga

SEQ ID NO: 235301 - RNA, 32 nt, Human
uccucucccugccaagucucagaagagguugg

SEQ ID NO: 235302 - RNA, 32 nt, Human
uccucuccgcgcccuccgaccucucucggccc

SEQ ID NO: 235303 - RNA, 21 nt, Human
uccucuccggggugguggaga

SEQ ID NO: 235304 - RNA, 32 nt, Human
uccucuccgucucccuucccugccuccuuucc

SEQ ID NO: 235305 - RNA, 32 nt, Human
uccucuccgugcuccucagcaguccuccgcua

SEQ ID NO: 235306 - RNA, 23 nt, Human
uccucuccuacccacuggucugc

SEQ ID NO: 235307 - RNA, 20 nt, Human
uccucuccuaccuggcucuu

SEQ ID NO: 235308 - RNA, 32 nt, Human
uccucuccucaccuggccccagcuccugcccc

SEQ ID NO: 235309 - RNA, 32 nt, Human
uccucuccucauuccuuugguuuuggcccaaa

SEQ ID NO: 235310 - RNA, 32 nt, Human
uccucuccuccaccuuccccuaucauuuagug

SEQ ID NO: 235311 - RNA, 32 nt, Human
uccucuccuccagaggccuggaagggaggugg

SEQ ID NO: 235312 - RNA, 32 nt, Human
uccucuccuccccuacucccccagagaaccaa

SEQ ID NO: 235313 - RNA, 20 nt, Human
uccucuccuccucccuuccc

SEQ ID NO: 235314 - RNA, 32 nt, Human
uccucuccuccucccuucccuuccccucuccu

SEQ ID NO: 235315 - RNA, 32 nt, Human
uccucuccuccuccuccuccucuuccuccucc

SEQ ID NO: 235316 - RNA, 32 nt, Human
uccucuccuccuccuccuccugggucccccag

SEQ ID NO: 235317 - RNA, 32 nt, Human
uccucuccuccucugugcuccugucccucccu

SEQ ID NO: 235318 - RNA, 32 nt, Human
uccucuccuccuucccucucccucucugcuuc

SEQ ID NO: 235319 - RNA, 32 nt, Human
uccucuccucuccccucccuugcuuuccccag

SEQ ID NO: 235320 - RNA, 32 nt, Human
uccucuccucuccuauggugagcccagcgugg

SEQ ID NO: 235321 - RNA, 32 nt, Human
uccucuccucuccucucuuuccuuccuuccuu

SEQ ID NO: 235322 - RNA, 32 nt, Human
uccucuccugaauacacuccccaaaacacccc

SEQ ID NO: 235323 - RNA, 32 nt, Human
uccucuccugggccccugcucuucccaaagcu

SEQ ID NO: 235324 - RNA, 32 nt, Human
uccucuccuuccaccccucauuuccuuuuugc

SEQ ID NO: 235325 - RNA, 32 nt, Human
uccucuccuuucucuucgucuucuccucuucc

SEQ ID NO: 235326 - RNA, 32 nt, Human
uccucucgcccaggcuggagugcagugguguc

SEQ ID NO: 235327 - RNA, 32 nt, Human
uccucucgcugccacuuuggaaaauaagagac

SEQ ID NO: 235328 - RNA, 24 nt, Human
uccucucgggagccuguggccugc

SEQ ID NO: 235329 - RNA, 32 nt, Human
uccucucuaaaggguugaggcugagcuauaau

SEQ ID NO: 235330 - RNA, 32 nt, Human
uccucucuaggcagcgggugggcacagccccu

SEQ ID NO: 235331 - RNA, 32 nt, Human
uccucucucacugcuccuuccuggucucuucu

SEQ ID NO: 235332 - RNA, 32 nt, Human
uccucucucacuucccuuccucucucucaccu

SEQ ID NO: 235333 - RNA, 32 nt, Human
uccucucuccacccccucuccaacacuggccc

SEQ ID NO: 235334 - RNA, 32 nt, Human
uccucucucccaggcaggcagcugcaggcgcu

SEQ ID NO: 235335 - RNA, 32 nt, Human
uccucucuccccacuugaaccaugaaguuucc

SEQ ID NO: 235336 - RNA, 24 nt, Human
uccucucucccucucucccuuccc

SEQ ID NO: 235337 - RNA, 32 nt, Human
uccucucucccuggaccucagaggugacaccc

SEQ ID NO: 235338 - RNA, 32 nt, Human
uccucucuccuccagcucuccccaucaugaaa

SEQ ID NO: 235339 - RNA, 32 nt, Human
uccucucuccuccccuccuuccucucuccucu

SEQ ID NO: 235340 - RNA, 32 nt, Human
uccucucuccucucccccucucuccucccuuc

SEQ ID NO: 235341 - RNA, 32 nt, Human
uccucucuccuuccuuuccuuccuuuuucucu

SEQ ID NO: 235342 - RNA, 32 nt, Human
uccucucucucaaaauaaacuaaccuauucau

SEQ ID NO: 235343 - RNA, 32 nt, Human
uccucucucucccuccacuccucccaacucug

SEQ ID NO: 235344 - RNA, 22 nt, Human
uccucucucuccuccccuuccc

SEQ ID NO: 235345 - RNA, 32 nt, Human
uccucucucuuucauccacacuucuguuaacu

SEQ ID NO: 235346 - RNA, 32 nt, Human
uccucucucuuuccuuucuuuccgccuaucuu

SEQ ID NO: 235347 - RNA, 32 nt, Human
uccucucugagucccagcuauggggaacaucu

SEQ ID NO: 235348 - RNA, 32 nt, Human
uccucucugcaaugagcuuucucagcucucag

SEQ ID NO: 235349 - RNA, 32 nt, Human
uccucucugcccuucucugccaccccggggag

SEQ ID NO: 235350 - RNA, 32 nt, Human
uccucucugcucauguuaccugccuauaggac

SEQ ID NO: 235351 - RNA, 32 nt, Human
uccucucugcuccaauaccaccaccuugucca

SEQ ID NO: 235352 - RNA, 32 nt, Human
uccucucugcuugcauguguaaaguuuucauu

SEQ ID NO: 235353 - RNA, 32 nt, Human
uccucucugggagaggccgcucuggcuuuucc

SEQ ID NO: 235354 - RNA, 25 nt, Human
uccucucugugcugaacauccugug

SEQ ID NO: 235355 - RNA, 32 nt, Human
uccucucuuccaaaccuccuugcuuuggacaa

SEQ ID NO: 235356 - RNA, 24 nt, Human
uccucucuuccucacucccuuccc

SEQ ID NO: 235357 - RNA, 32 nt, Human
uccucucuuccuucccuucuuuaucaucuccc

SEQ ID NO: 235358 - RNA, 32 nt, Human
uccucucuucuccagccucucccuuucacucu

SEQ ID NO: 235359 - RNA, 32 nt, Human
uccucucuucucuccagccuugcagcguggcc

SEQ ID NO: 235360 - RNA, 32 nt, Human
uccucucuucucucccccucagccuuucucuc

SEQ ID NO: 235361 - RNA, 32 nt, Human
uccucucuucuuccucuucucucucacugcca

SEQ ID NO: 235362 - RNA, 23 nt, Human
uccucucuucuuuccucccuccc

SEQ ID NO: 235363 - RNA, 32 nt, Human
uccucucuugacuugagaaugaucagucaaua

SEQ ID NO: 235364 - RNA, 32 nt, Human
uccucucuuuuccacacacaacuaucuguuua

SEQ ID NO: 235365 - RNA, 32 nt, Human
uccucugaagcacaaaaguuaauuuugaugaa

SEQ ID NO: 235366 - RNA, 21 nt, Human
uccucugaagcccaggucuug

SEQ ID NO: 235367 - RNA, 23 nt, Human
uccucugaaguaacugccucuug

SEQ ID NO: 235368 - RNA, 32 nt, Human
uccucugacaacucacuugggguggggaaagg

SEQ ID NO: 235369 - RNA, 19 nt, Human
uccucugacaccacuggcu

SEQ ID NO: 235370 - RNA, 20 nt, Human
uccucugacaccuugacuuu

SEQ ID NO: 235371 - RNA, 32 nt, Human
uccucugacaguagugaagacaaggaugaaaa

SEQ ID NO: 235372 - RNA, 19 nt, Human
uccucugacccaucagcuc

SEQ ID NO: 235373 - RNA, 32 nt, Human
uccucugacccccaucucccccuuccuuuccc

SEQ ID NO: 235374 - RNA, 32 nt, Human
uccucugagaggcggagagugcugacuguagu

SEQ ID NO: 235375 - RNA, 32 nt, Human
uccucugagagggcagaacacacauauccaag

SEQ ID NO: 235376 - RNA, 32 nt, Human
uccucugagcccucagaaccagccucuucugc

SEQ ID NO: 235377 - RNA, 32 nt, Human
uccucugagcuucuccugcuccucucugccuc

SEQ ID NO: 235378 - RNA, 32 nt, Human
uccucugaggcugaaauucagaauauuaguga

SEQ ID NO: 235379 - RNA, 32 nt, Human
uccucugaguggggagagguugggcagugagu

SEQ ID NO: 235380 - RNA, 32 nt, Human
uccucugauacccagagcauuacgugagccag

SEQ ID NO: 235381 - RNA, 32 nt, Human
uccucugaucagcugaagcagagaaagcauau

SEQ ID NO: 235382 - RNA, 32 nt, Human
uccucugauucaccuagaaccuguucucugcc

SEQ ID NO: 235383 - RNA, 32 nt, Human
uccucugcaaaaagauuuaacaaauacauuca

SEQ ID NO: 235384 - RNA, 32 nt, Human
uccucugcaaagauguugucccuggggaacag

SEQ ID NO: 235385 - RNA, 22 nt, Human
uccucugcaauguggguugcug

SEQ ID NO: 235386 - RNA, 32 nt, Human
uccucugcagagcccaguggagccagccaugu

SEQ ID NO: 235387 - RNA, 32 nt, Human
uccucugcagaggcggauuucccugacugaag

SEQ ID NO: 235388 - RNA, 32 nt, Human
uccucugcagcaggaggcagagcugugggaug

SEQ ID NO: 235389 - RNA, 32 nt, Human
uccucugcagcaggcaagaccaaucaaucacu

SEQ ID NO: 235390 - RNA, 32 nt, Human
uccucugcagccugcagaacugugagccaauu

SEQ ID NO: 235391 - RNA, 32 nt, Human
uccucugcaguugaugugguccuggauccaga

SEQ ID NO: 235392 - RNA, 32 nt, Human
uccucugccagacuuuuuaaucucuucauuaa

SEQ ID NO: 235393 - RNA, 32 nt, Human
uccucugccaugagccuagcugugaccuuaga

SEQ ID NO: 235394 - RNA, 32 nt, Human
uccucugcccaagcccuuccuccccuccauca

SEQ ID NO: 235395 - RNA, 31 nt, Human
uccucugcccucucuggaguuugccuccccc

SEQ ID NO: 235396 - RNA, 32 nt, Human
uccucugcccugcauuggccuugaccacauga

SEQ ID NO: 235397 - RNA, 32 nt, Human
uccucugcccugcccaccagccugugauuuga

SEQ ID NO: 235398 - RNA, 32 nt, Human
uccucugccucccggguucaagcaauucuccu

SEQ ID NO: 235399 - RNA, 32 nt, Human
uccucugccucccggguucaagcaauucucug

SEQ ID NO: 235400 - RNA, 32 nt, Human
uccucugccuggggccauugagcccagccucc

SEQ ID NO: 235401 - RNA, 32 nt, Human
uccucugcucaggagaaaacuuacaaacuuuu

SEQ ID NO: 235402 - RNA, 32 nt, Human
uccucugcuccuucuaccuccacuguauccug

SEQ ID NO: 235403 - RNA, 32 nt, Human
uccucugcugacaaccucugccgcaaacugga

SEQ ID NO: 235404 - RNA, 32 nt, Human
uccucuggaaaaggaaaagaacuacgagagga

SEQ ID NO: 235405 - RNA, 32 nt, Human
uccucuggaacuugaggaagugaacauuucgg

SEQ ID NO: 235406 - RNA, 19 nt, Human
uccucuggacucugucuga

SEQ ID NO: 235407 - RNA, 32 nt, Human
uccucuggagccagccgagcaggaggccuagg

SEQ ID NO: 235408 - RNA, 32 nt, Human
uccucuggaggccugggcugagacagugcucu

SEQ ID NO: 235409 - RNA, 32 nt, Human
uccucuggagugagaggcuccacccacuacag

SEQ ID NO: 235410 - RNA, 25 nt, Human
uccucuggaguuugagacccugaca

SEQ ID NO: 235411 - RNA, 21 nt, Human
uccucuggcaaacuuuucuuu

SEQ ID NO: 235412 - RNA, 32 nt, Human
uccucuggcaacacccucacagacacacccag

SEQ ID NO: 235413 - RNA, 19 nt, Human
uccucuggccccccagguc

SEQ ID NO: 235414 - RNA, 32 nt, Human
uccucuggccucucccugcaugucuuaaguau

SEQ ID NO: 235415 - RNA, 32 nt, Human
uccucuggcugaguuugagaagcugccaugca

SEQ ID NO: 235416 - RNA, 32 nt, Human
uccucuggcugaucccagcccuaaaggaaggg

SEQ ID NO: 235417 - RNA, 32 nt, Human
uccucuggcuucucuccuccugcuggagugcc

SEQ ID NO: 235418 - RNA, 32 nt, Human
uccucugggacccccuguggcccucgcucugc

SEQ ID NO: 235419 - RNA, 32 nt, Human
uccucugggcucccugaaguccuggggagccg

SEQ ID NO: 235420 - RNA, 32 nt, Human
uccucugggcugggcccugugucuccuccuuc

SEQ ID NO: 235421 - RNA, 32 nt, Human
uccucuggggagaaggaggagcugcucacccu

SEQ ID NO: 235422 - RNA, 32 nt, Human
uccucuggggcucuaccucuccacacuucccc

SEQ ID NO: 235423 - RNA, 32 nt, Human
uccucuggguaaugucagcugcuuagugauaa

SEQ ID NO: 235424 - RNA, 25 nt, Human
uccucuggugagaagguggugaggc

SEQ ID NO: 235425 - RNA, 32 nt, Human
uccucuggugcugcagccagagcucccuguug

SEQ ID NO: 235426 - RNA, 32 nt, Human
uccucugguuagucucucaaauugaggcuguu

SEQ ID NO: 235427 - RNA, 24 nt, Human
uccucuguaauaaacuggccaaga

SEQ ID NO: 235428 - RNA, 32 nt, Human
uccucuguaguggaagggaagggaggacacac

SEQ ID NO: 235429 - RNA, 32 nt, Human
uccucugucauuuuaaccucagguggcaccca

SEQ ID NO: 235430 - RNA, 32 nt, Human
uccucugucccccauagagucaagccuagugc

SEQ ID NO: 235431 - RNA, 32 nt, Human
uccucugucgcccaggcuggagugcaauggcg

SEQ ID NO: 235432 - RNA, 32 nt, Human
uccucugucuccuaagcuggagugcaguggca

SEQ ID NO: 235433 - RNA, 32 nt, Human
uccucugucuucaagcaccacgcagaaauaca

SEQ ID NO: 235434 - RNA, 32 nt, Human
uccucugucuuuuccacaacauaggacuuuga

SEQ ID NO: 235435 - RNA, 32 nt, Human
uccucugugagcuccauguggggccucagucu

SEQ ID NO: 235436 - RNA, 32 nt, Human
uccucugugcauaguuuugucucauuuuaacg

SEQ ID NO: 235437 - RNA, 32 nt, Human
uccucugugccugguggggugggggugccagg

SEQ ID NO: 235438 - RNA, 32 nt, Human
uccucugugcgccucagacucggggugaggga

SEQ ID NO: 235439 - RNA, 32 nt, Human
uccucuguggcccaggcugaagagcaguagug

SEQ ID NO: 235440 - RNA, 32 nt, Human
uccucuguggccugggagaccucugcccagac

SEQ ID NO: 235441 - RNA, 20 nt, Human
uccucuguggcucacaccca

SEQ ID NO: 235442 - RNA, 32 nt, Human
uccucuguggggcucugaccucagggcuccca

SEQ ID NO: 235443 - RNA, 32 nt, Human
uccucuguuccuucuggccgggcaccacagca

SEQ ID NO: 235444 - RNA, 32 nt, Human
uccucuguucucuaccugucaugcuucaagag

SEQ ID NO: 235445 - RNA, 18 nt, Human
uccucuguucugagucag

SEQ ID NO: 235446 - RNA, 32 nt, Human
uccucuguugccaggcuggaaugccguggcgc

SEQ ID NO: 235447 - RNA, 32 nt, Human
uccucuguugcccaggcuggagugcaguggug

SEQ ID NO: 235448 - RNA, 32 nt, Human
uccucuguuuauuccuccucucccucccauug

SEQ ID NO: 235449 - RNA, 32 nt, Human
uccucuguuucuuccaauucucucuucugcuu

SEQ ID NO: 235450 - RNA, 32 nt, Human
uccucuuaccuuccuuucucuuuccuaacuua

SEQ ID NO: 235451 - RNA, 19 nt, Human
uccucuuagcucagcugag

SEQ ID NO: 235452 - RNA, 21 nt, Human
uccucuuauugaauuugccaa

SEQ ID NO: 235453 - RNA, 32 nt, Human
uccucuucaagcagcaauccaacccagagcag

SEQ ID NO: 235454 - RNA, 32 nt, Human
uccucuucacuagccucucugaagguguccug

SEQ ID NO: 235455 - RNA, 20 nt, Human
uccucuucagaaagagccaa

SEQ ID NO: 235456 - RNA, 32 nt, Human
uccucuucagcguagcucuccaccucuacccg

SEQ ID NO: 235457 - RNA, 32 nt, Human
uccucuucauagauuaaaugugcugcugugga

SEQ ID NO: 235458 - RNA, 32 nt, Human
uccucuucauucuucucagcugaggccccucc

SEQ ID NO: 235459 - RNA, 20 nt, Human
uccucuuccagagcucgcug

SEQ ID NO: 235460 - RNA, 32 nt, Human
uccucuuccauugcaguccugaugauccuaac

SEQ ID NO: 235461 - RNA, 32 nt, Human
uccucuuccccaacuucauuugcuucucucaa

SEQ ID NO: 235462 - RNA, 32 nt, Human
uccucuuccccaauccaaaccccacagucucu

SEQ ID NO: 235463 - RNA, 32 nt, Human
uccucuucccccaagcuaucugguguuggaaa

SEQ ID NO: 235464 - RNA, 20 nt, Human
uccucuucccugcacuuccc

SEQ ID NO: 235465 - RNA, 20 nt, Human
uccucuucccugucuucgcc

SEQ ID NO: 235466 - RNA, 32 nt, Human
uccucuucccuuagccucucccacccggccac

SEQ ID NO: 235467 - RNA, 32 nt, Human
uccucuuccgcuuggccccagaaaguuucggu

SEQ ID NO: 235468 - RNA, 32 nt, Human
uccucuuccgggcagaaacaauaaaaccacuu

SEQ ID NO: 235469 - RNA, 32 nt, Human
uccucuuccuauucugucaucucccucacuua

SEQ ID NO: 235470 - RNA, 32 nt, Human
uccucuuccucaacacacauacaugcacaaca

SEQ ID NO: 235471 - RNA, 17 nt, Human
uccucuuccuccagguc

SEQ ID NO: 235472 - RNA, 32 nt, Human
uccucuuccuccuccuccuccaaacucgcgag

SEQ ID NO: 235473 - RNA, 32 nt, Human
uccucuuccuccuccuccuccaccuccggcuu

SEQ ID NO: 235474 - RNA, 32 nt, Human
uccucuuccuccuccuccuccccaccaccacc

SEQ ID NO: 235475 - RNA, 19 nt, Human
uccucuuccuccucuuccu

SEQ ID NO: 235476 - RNA, 32 nt, Human
uccucuuccugccuccucaucucccuuaagca

SEQ ID NO: 235477 - RNA, 21 nt, Human
uccucuuccugccuccugucu

SEQ ID NO: 235478 - RNA, 32 nt, Human
uccucuuccugccucucucauggcuugggcug

SEQ ID NO: 235479 - RNA, 20 nt, Human
uccucuuccuggauccuccu

SEQ ID NO: 235480 - RNA, 32 nt, Human
uccucuuccuucugcuucugugacgguuuaga

SEQ ID NO: 235481 - RNA, 32 nt, Human
uccucuuccuuucccuuccuucucuuuucuuu

SEQ ID NO: 235482 - RNA, 21 nt, Human
uccucuuccuuuccuccuccc

SEQ ID NO: 235483 - RNA, 32 nt, Human
uccucuuccuuuucucuucacgcuucuuuaca

SEQ ID NO: 235484 - RNA, 32 nt, Human
uccucuucguccugaugcugcucuucuucacu

SEQ ID NO: 235485 - RNA, 32 nt, Human
uccucuucuaaccugcuuucugaggcuucugc

SEQ ID NO: 235486 - RNA, 32 nt, Human
uccucuucuagacugcauuagauucauucauc

SEQ ID NO: 235487 - RNA, 32 nt, Human
uccucuucucaaagcugggauuacagguguga

SEQ ID NO: 235488 - RNA, 21 nt, Human
uccucuucucagagaccuccc

SEQ ID NO: 235489 - RNA, 32 nt, Human
uccucuucucaguguuucccaaaggggcggcu

SEQ ID NO: 235490 - RNA, 32 nt, Human
uccucuucuccccucacuuuucccuacuuccu

SEQ ID NO: 235491 - RNA, 22 nt, Human
uccucuucuccucccucuuccc

SEQ ID NO: 235492 - RNA, 32 nt, Human
uccucuucuccucuccgcacaucugcaugccu

SEQ ID NO: 235493 - RNA, 19 nt, Human
uccucuucucgcccuuccc

SEQ ID NO: 235494 - RNA, 21 nt, Human
uccucuucucggagaccuccc

SEQ ID NO: 235495 - RNA, 32 nt, Human
uccucuucucugcaguugagguuucagguuuc

SEQ ID NO: 235496 - RNA, 22 nt, Human
uccucuucucuuaguucucucc

SEQ ID NO: 235497 - RNA, 32 nt, Human
uccucuucugcagugccagcugacuuaaggga

SEQ ID NO: 235498 - RNA, 32 nt, Human
uccucuucuuccuccucuuccuccuccucuug

SEQ ID NO: 235499 - RNA, 32 nt, Human
uccucuucuuguaguccaucucccagacuugu

SEQ ID NO: 235500 - RNA, 32 nt, Human
uccucuucuuugcauauuucccccucuaauua

SEQ ID NO: 235501 - RNA, 31 nt, Human
uccucuugacuucuuuuuguaacaaggauaa

SEQ ID NO: 235502 - RNA, 32 nt, Human
uccucuugaugauucuaacagaccugcuuccu

SEQ ID NO: 235503 - RNA, 21 nt, Human
uccucuugcaguaccgccugc

SEQ ID NO: 235504 - RNA, 32 nt, Human
uccucuugcccucugcuuuacucucauguggc

SEQ ID NO: 235505 - RNA, 32 nt, Human
uccucuugcccugauuucauccucccuauccc

SEQ ID NO: 235506 - RNA, 23 nt, Human
uccucuugccuacccuguccugc

SEQ ID NO: 235507 - RNA, 23 nt, Human
uccucuugcuagcucggcccagc

SEQ ID NO: 235508 - RNA, 32 nt, Human
uccucuugcugcuaaucucugcugugaacaca

SEQ ID NO: 235509 - RNA, 22 nt, Human
uccucuugcugucucugcccgc

SEQ ID NO: 235510 - RNA, 32 nt, Human
uccucuuggaaaaagcgccaaauguuugaagg

SEQ ID NO: 235511 - RNA, 32 nt, Human
uccucuuggcucuauugggagccucagggccg

SEQ ID NO: 235512 - RNA, 32 nt, Human
uccucuugucagaaugaauauagacacaugua

SEQ ID NO: 235513 - RNA, 23 nt, Human
uccucuuguccccccguugcugc

SEQ ID NO: 235514 - RNA, 22 nt, Human
uccucuugucccuccugagaaa

SEQ ID NO: 235515 - RNA, 32 nt, Human
uccucuuguccuccucagccucggugccuugg

SEQ ID NO: 235516 - RNA, 32 nt, Human
uccucuuguccugcagaggcaggcugguguga

SEQ ID NO: 235517 - RNA, 32 nt, Human
uccucuuguccuggcccuucagucugcuccac

SEQ ID NO: 235518 - RNA, 32 nt, Human
uccucuugugaugagacugagauacagaucag

SEQ ID NO: 235519 - RNA, 32 nt, Human
uccucuugugccuaguuaagugggaauguguu

SEQ ID NO: 235520 - RNA, 21 nt, Human
uccucuugugcuucuguacca

SEQ ID NO: 235521 - RNA, 24 nt, Human
uccucuuguucccugcuggccugc

SEQ ID NO: 235522 - RNA, 32 nt, Human
uccucuuuauaagaaaaggaacacgugagcaa

SEQ ID NO: 235523 - RNA, 32 nt, Human
uccucuuuauucucucccgcccuccuacaagc

SEQ ID NO: 235524 - RNA, 31 nt, Human
uccucuuucaauaaacccccauugaaacagc

SEQ ID NO: 235525 - RNA, 32 nt, Human
uccucuuucaaugugugaaccugccuaaagca

SEQ ID NO: 235526 - RNA, 32 nt, Human
uccucuuuccucucuuuguucucagcuccccc

SEQ ID NO: 235527 - RNA, 32 nt, Human
uccucuuucuccuccuccuuauccgaacccca

SEQ ID NO: 235528 - RNA, 32 nt, Human
uccucuuucuuuccuuucuuuccucccuuuuu

SEQ ID NO: 235529 - RNA, 32 nt, Human
uccucuuugcagaaguucuguguccaucucau

SEQ ID NO: 235530 - RNA, 32 nt, Human
uccucuuugccugucuucugucuuccuugucu

SEQ ID NO: 235531 - RNA, 32 nt, Human
uccucuuugcgcccuuucucucccucuuggug

SEQ ID NO: 235532 - RNA, 32 nt, Human
uccucuuugucuacuuggacagcugcagcagg

SEQ ID NO: 235533 - RNA, 32 nt, Human
uccucuuuuccaccauccaaaacccucuuaau

SEQ ID NO: 235534 - RNA, 32 nt, Human
uccucuuuucccccuucucucucccucucccu

SEQ ID NO: 235535 - RNA, 32 nt, Human
uccucuuuugccaggcuggaugcugucgucuc

SEQ ID NO: 235536 - RNA, 32 nt, Human
uccugaaaagagacuugguuuggggaccccac

SEQ ID NO: 235537 - RNA, 32 nt, Human
uccugaaaagccugcagaacugugagccaauu

SEQ ID NO: 235538 - RNA, 32 nt, Human
uccugaaaaugcugcaguauaaaagagcaaag

SEQ ID NO: 235539 - RNA, 32 nt, Human
uccugaaacagcauauaucacugugaaacuaa

SEQ ID NO: 235540 - RNA, 32 nt, Human
uccugaaacucuucucccuuguuuuaucugau

SEQ ID NO: 235541 - RNA, 32 nt, Human
uccugaaagauuccuuuccuauccauccuucc

SEQ ID NO: 235542 - RNA, 32 nt, Human
uccugaaagccuggccugcuccgcgugucccc

SEQ ID NO: 235543 - RNA, 32 nt, Human
uccugaaagcuaguaaagacugacugccaguc

SEQ ID NO: 235544 - RNA, 32 nt, Human
uccugaaaggaucuggagacaccagcuccaca

SEQ ID NO: 235545 - RNA, 26 nt, Human
uccugaaaucacagggcagggggcug

SEQ ID NO: 235546 - RNA, 32 nt, Human
uccugaaaugauuuuucuuccuaacugugguu

SEQ ID NO: 235547 - RNA, 32 nt, Human
uccugaaaugccaagugccugcuuaguagcuu

SEQ ID NO: 235548 - RNA, 32 nt, Human
uccugaaauguggacucuggcagcaguggacc

SEQ ID NO: 235549 - RNA, 32 nt, Human
uccugaaauucaugggcuuccucgggggcccg

SEQ ID NO: 235550 - RNA, 22 nt, Human
uccugaacacacccugaagaaa

SEQ ID NO: 235551 - RNA, 32 nt, Human
uccugaacacauugccuccucaucuucuuccu

SEQ ID NO: 235552 - RNA, 32 nt, Human
uccugaacacuauccugaguaauuaugaccac

SEQ ID NO: 235553 - RNA, 32 nt, Human
uccugaacaggguggaggggugugggaaagaa

SEQ ID NO: 235554 - RNA, 21 nt, Human
uccugaaccaggaggcuucau

SEQ ID NO: 235555 - RNA, 32 nt, Human
uccugaaccugcgcugucuggguggccacaca

SEQ ID NO: 235556 - RNA, 32 nt, Human
uccugaaccuggaugagguguuuaaggucaug

SEQ ID NO: 235557 - RNA, 32 nt, Human
uccugaacuauaacaccugccaccacuauaaa

SEQ ID NO: 235558 - RNA, 32 nt, Human
uccugaacucaagugauccgcccaccucagcc

SEQ ID NO: 235559 - RNA, 32 nt, Human
uccugaacucaagugauucacccaccuuagcc

SEQ ID NO: 235560 - RNA, 23 nt, Human
uccugaacugaggaauguguccu

SEQ ID NO: 235561 - RNA, 32 nt, Human
uccugaacuuucucccucaucggcccggcgcu

SEQ ID NO: 235562 - RNA, 22 nt, Human
uccugaacuuuucuuucuucca

SEQ ID NO: 235563 - RNA, 24 nt, Human
uccugaagaaacugaacacuguca

SEQ ID NO: 235564 - RNA, 32 nt, Human
uccugaagaccugaacaccgcucccauaaagc

SEQ ID NO: 235565 - RNA, 32 nt, Human
uccugaagagcugaguguucucacuuugguuu

SEQ ID NO: 235566 - RNA, 32 nt, Human
uccugaagagggcugacagcugcaggcugccu

SEQ ID NO: 235567 - RNA, 32 nt, Human
uccugaagccagccucuccaaugccucagcca

SEQ ID NO: 235568 - RNA, 32 nt, Human
uccugaagcccaacgauggaccauucucaccc

SEQ ID NO: 235569 - RNA, 32 nt, Human
uccugaagccccgggaggagaggaaggcagcg

SEQ ID NO: 235570 - RNA, 32 nt, Human
uccugaagcgcaggcagggggaucauuggcuc

SEQ ID NO: 235571 - RNA, 32 nt, Human
uccugaagcuguuucuggagagccacacauuu

SEQ ID NO: 235572 - RNA, 22 nt, Human
uccugaaggacacugacuguca

SEQ ID NO: 235573 - RNA, 32 nt, Human
uccugaaggucacugacaaagacuucauuguc

SEQ ID NO: 235574 - RNA, 32 nt, Human
uccugaaggugaagcaaagucuaaagaaaggg

SEQ ID NO: 235575 - RNA, 32 nt, Human
uccugaauagauagcuuuauuccuucaaggua

SEQ ID NO: 235576 - RNA, 32 nt, Human
uccugaauauagaaugaauaucuuuaugacaa

SEQ ID NO: 235577 - RNA, 32 nt, Human
uccugaauauuaucaaugcagaacagcugugg

SEQ ID NO: 235578 - RNA, 32 nt, Human
uccugaaucaaauucugcaguggaauggagag

SEQ ID NO: 235579 - RNA, 32 nt, Human
uccugaaugcuaggcuggaaaguggugccugu

SEQ ID NO: 235580 - RNA, 21 nt, Human
uccugaauguggcugaccugg

SEQ ID NO: 235581 - RNA, 32 nt, Human
uccugaauucaagugauucuccugccucagcc

SEQ ID NO: 235582 - RNA, 32 nt, Human
uccugaauuccaacucuccauacaucccaaug

SEQ ID NO: 235583 - RNA, 32 nt, Human
uccugacaaaggcggcuucugcgucgucacug

SEQ ID NO: 235584 - RNA, 32 nt, Human
uccugacaccugcugccugcaggcauucacug

SEQ ID NO: 235585 - RNA, 32 nt, Human
uccugacagagcaccugcuguuuuuaugaagc

SEQ ID NO: 235586 - RNA, 32 nt, Human
uccugacagccccuuuacagguuacaucauug

SEQ ID NO: 235587 - RNA, 27 nt, Human
uccugacagcgcugccugcaaaauaga

SEQ ID NO: 235588 - RNA, 32 nt, Human
uccugacagcuccgucauggcacuuuuuaacg

SEQ ID NO: 235589 - RNA, 32 nt, Human
uccugacaggaaagguuuaagggggacagagc

SEQ ID NO: 235590 - RNA, 21 nt, Human
uccugacaucaggugauccac

SEQ ID NO: 235591 - RNA, 32 nt, Human
uccugacauggaggccugggccagcagcagca

SEQ ID NO: 235592 - RNA, 19 nt, Human
uccugaccaagugauccac

SEQ ID NO: 235593 - RNA, 24 nt, Human
uccugaccacaugugguccaccca

SEQ ID NO: 235594 - RNA, 32 nt, Human
uccugaccaccccgccccagaccugcuuucuc

SEQ ID NO: 235595 - RNA, 22 nt, Human
uccugaccacgugauccgccca

SEQ ID NO: 235596 - RNA, 21 nt, Human
uccugaccagagucucagugg

SEQ ID NO: 235597 - RNA, 32 nt, Human
uccugaccagcaaccaggcccugcugcagcuu

SEQ ID NO: 235598 - RNA, 32 nt, Human
uccugaccagugaacaaagauuugagaaagac

SEQ ID NO: 235599 - RNA, 32 nt, Human
uccugaccaucuuuccccggaggucucuucca

SEQ ID NO: 235600 - RNA, 32 nt, Human
uccugaccccaauccccaaccucccaggacug

SEQ ID NO: 235601 - RNA, 24 nt, Human
uccugaccccaggugauccgccca

SEQ ID NO: 235602 - RNA, 24 nt, Human
uccugaccccaggugaucugccca

SEQ ID NO: 235603 - RNA, 22 nt, Human
uccugaccccaugauccacccg

SEQ ID NO: 235604 - RNA, 32 nt, Human
uccugacccccaccauccccagagccuggguu

SEQ ID NO: 235605 - RNA, 22 nt, Human
uccugaccccugaccucaucac

SEQ ID NO: 235606 - RNA, 32 nt, Human
uccugacccggauuggcccugccccucccccu

SEQ ID NO: 235607 - RNA, 25 nt, Human
uccugacccucaagugaucugccca

SEQ ID NO: 235608 - RNA, 19 nt, Human
uccugacccugugauccac

SEQ ID NO: 235609 - RNA, 22 nt, Human
uccugacccugugauccgcccg

SEQ ID NO: 235610 - RNA, 32 nt, Human
uccugacccuuggagccagaaguggccccucu

SEQ ID NO: 235611 - RNA, 24 nt, Human
uccugaccgcaagugauccacccg

SEQ ID NO: 235612 - RNA, 21 nt, Human
uccugaccgcaggugauccac

SEQ ID NO: 235613 - RNA, 32 nt, Human
uccugaccgcauaauccacccaccucggccuc

SEQ ID NO: 235614 - RNA, 32 nt, Human
uccugaccggcaccuggcgaggcucaugcguc

SEQ ID NO: 235615 - RNA, 32 nt, Human
uccugaccuaaccuuagaacuggauuagggug

SEQ ID NO: 235616 - RNA, 24 nt, Human
uccugaccucaaacgaucugccca

SEQ ID NO: 235617 - RNA, 21 nt, Human
uccugaccucaaaugauccac

SEQ ID NO: 235618 - RNA, 24 nt, Human
uccugaccucaacugguccacccg

SEQ ID NO: 235619 - RNA, 24 nt, Human
uccugaccucaagcgauccaccca

SEQ ID NO: 235620 - RNA, 24 nt, Human
uccugaccucaagcgaucugcccg

SEQ ID NO: 235621 - RNA, 22 nt, Human
uccugaccucaaggaucugucu

SEQ ID NO: 235622 - RNA, 32 nt, Human
uccugaccucaagggaauuggucccagguaca

SEQ ID NO: 235623 - RNA, 21 nt, Human
uccugaccucaaguaauccac

SEQ ID NO: 235624 - RNA, 32 nt, Human
uccugaccucaagugauauguucaccucagcc

SEQ ID NO: 235625 - RNA, 20 nt, Human
uccugaccucaagugaucca

SEQ ID NO: 235626 - RNA, 21 nt, Human
uccugaccucaagugauccac

SEQ ID NO: 235627 - RNA, 23 nt, Human
uccugaccucaagugauccacca

SEQ ID NO: 235628 - RNA, 32 nt, Human
uccugaccucaagugauccaccacuuccgccu

SEQ ID NO: 235629 - RNA, 24 nt, Human
uccugaccucaagugauccaccca

SEQ ID NO: 235630 - RNA, 32 nt, Human
uccugaccucaagugauccacccaccucagcc

SEQ ID NO: 235631 - RNA, 32 nt, Human
uccugaccucaagugauccacccaccucggcc

SEQ ID NO: 235632 - RNA, 32 nt, Human
uccugaccucaagugauccacccaccucgucu

SEQ ID NO: 235633 - RNA, 32 nt, Human
uccugaccucaagugauccacccaccuuggcc

SEQ ID NO: 235634 - RNA, 32 nt, Human
uccugaccucaagugauccacccacuucagcc

SEQ ID NO: 235635 - RNA, 32 nt, Human
uccugaccucaagugauccacccaucucagcc

SEQ ID NO: 235636 - RNA, 24 nt, Human
uccugaccucaagugauccacccg

SEQ ID NO: 235637 - RNA, 32 nt, Human
uccugaccucaagugauccacccgccucaguc

SEQ ID NO: 235638 - RNA, 32 nt, Human
uccugaccucaagugauccacccgccucggcc

SEQ ID NO: 235639 - RNA, 32 nt, Human
uccugaccucaagugauccacccgccuugacu

SEQ ID NO: 235640 - RNA, 32 nt, Human
uccugaccucaagugauccacccgccuuggcc

SEQ ID NO: 235641 - RNA, 32 nt, Human
uccugaccucaagugauccaccuaccuaggcc

SEQ ID NO: 235642 - RNA, 32 nt, Human
uccugaccucaagugauccaccuaccucggcc

SEQ ID NO: 235643 - RNA, 32 nt, Human
uccugaccucaagugauccaccugccucagcc

SEQ ID NO: 235644 - RNA, 32 nt, Human
uccugaccucaagugauccaccuuccuugugc

SEQ ID NO: 235645 - RNA, 22 nt, Human
uccugaccucaagugauccacu

SEQ ID NO: 235646 - RNA, 32 nt, Human
uccugaccucaagugauccacucaccucggcc

SEQ ID NO: 235647 - RNA, 32 nt, Human
uccugaccucaagugauccacugccucagccu

SEQ ID NO: 235648 - RNA, 32 nt, Human
uccugaccucaagugauccacuggccuuggcc

SEQ ID NO: 235649 - RNA, 32 nt, Human
uccugaccucaagugauccacuugccucagcc

SEQ ID NO: 235650 - RNA, 32 nt, Human
uccugaccucaagugauccacuugccucagcu

SEQ ID NO: 235651 - RNA, 21 nt, Human
uccugaccucaagugauccgc

SEQ ID NO: 235652 - RNA, 24 nt, Human
uccugaccucaagugauccgcccg

SEQ ID NO: 235653 - RNA, 32 nt, Human
uccugaccucaagugauccgcccgccuugguc

SEQ ID NO: 235654 - RNA, 32 nt, Human
uccugaccucaagugauccgcccgcuuggccu

SEQ ID NO: 235655 - RNA, 32 nt, Human
uccugaccucaagugauccgccucccuuggcc

SEQ ID NO: 235656 - RNA, 32 nt, Human
uccugaccucaagugauccgccugccucagcc

SEQ ID NO: 235657 - RNA, 32 nt, Human
uccugaccucaagugauccgccugccuuggcc

SEQ ID NO: 235658 - RNA, 32 nt, Human
uccugaccucaagugauccguccgccugggcc

SEQ ID NO: 235659 - RNA, 32 nt, Human
uccugaccucaagugauccucccaccucagcc

SEQ ID NO: 235660 - RNA, 32 nt, Human
uccugaccucaagugauccuccccaccuuggu

SEQ ID NO: 235661 - RNA, 32 nt, Human
uccugaccucaagugauccucucgccuuggcc

SEQ ID NO: 235662 - RNA, 32 nt, Human
uccugaccucaagugauccucucuccuuggcc

SEQ ID NO: 235663 - RNA, 32 nt, Human
uccugaccucaagugaucggcccaccucagcc

SEQ ID NO: 235664 - RNA, 21 nt, Human
uccugaccucaagugaucuac

SEQ ID NO: 235665 - RNA, 24 nt, Human
uccugaccucaagugaucuaccca

SEQ ID NO: 235666 - RNA, 32 nt, Human
uccugaccucaagugaucuacccaccucggcu

SEQ ID NO: 235667 - RNA, 24 nt, Human
uccugaccucaagugaucugccca

SEQ ID NO: 235668 - RNA, 32 nt, Human
uccugaccucaagugaucugcccaccucagcc

SEQ ID NO: 235669 - RNA, 32 nt, Human
uccugaccucaagugaucugcccaccuugguc

SEQ ID NO: 235670 - RNA, 32 nt, Human
uccugaccucaagugaucugcccacuucggac

SEQ ID NO: 235671 - RNA, 24 nt, Human
uccugaccucaagugaucugcccg

SEQ ID NO: 235672 - RNA, 32 nt, Human
uccugaccucaagugaucugcccgccucagcc

SEQ ID NO: 235673 - RNA, 32 nt, Human
uccugaccucaagugaucugcccgccucgacc

SEQ ID NO: 235674 - RNA, 32 nt, Human
uccugaccucaagugaucugcccgccucggcc

SEQ ID NO: 235675 - RNA, 32 nt, Human
uccugaccucaagugaucugcccgccuuggcc

SEQ ID NO: 235676 - RNA, 32 nt, Human
uccugaccucaagugaucugcccuccucagcc

SEQ ID NO: 235677 - RNA, 32 nt, Human
uccugaccucaagugaucugccuaccuuggcc

SEQ ID NO: 235678 - RNA, 32 nt, Human
uccugaccucaagugaucugccugccucagcc

SEQ ID NO: 235679 - RNA, 32 nt, Human
uccugaccucaagugaucugccugccucgucc

SEQ ID NO: 235680 - RNA, 32 nt, Human
uccugaccucaagugaucugccugccuugguc

SEQ ID NO: 235681 - RNA, 32 nt, Human
uccugaccucaagugaucuucccaccuuggcc

SEQ ID NO: 235682 - RNA, 32 nt, Human
uccugaccucaagugaucuuccggccucagcc

SEQ ID NO: 235683 - RNA, 24 nt, Human
uccugaccucaagugauuugccca

SEQ ID NO: 235684 - RNA, 32 nt, Human
uccugaccucaagugguccacccaccuuggcc

SEQ ID NO: 235685 - RNA, 32 nt, Human
uccugaccucacacaauccuccugccuuagcc

SEQ ID NO: 235686 - RNA, 20 nt, Human
uccugaccucagacucacuu

SEQ ID NO: 235687 - RNA, 21 nt, Human
uccugaccucagauaauccac

SEQ ID NO: 235688 - RNA, 24 nt, Human
uccugaccucagauaaucugcccg

SEQ ID NO: 235689 - RNA, 21 nt, Human
uccugaccucagaugacccac

SEQ ID NO: 235690 - RNA, 21 nt, Human
uccugaccucagaugauccac

SEQ ID NO: 235691 - RNA, 21 nt, Human
uccugaccucagaugauccgc

SEQ ID NO: 235692 - RNA, 23 nt, Human
uccugaccucagaugaucuacca

SEQ ID NO: 235693 - RNA, 24 nt, Human
uccugaccucagaugaucuacccg

SEQ ID NO: 235694 - RNA, 24 nt, Human
uccugaccucagaugaucugccca

SEQ ID NO: 235695 - RNA, 24 nt, Human
uccugaccucagaugauucacccg

SEQ ID NO: 235696 - RNA, 24 nt, Human
uccugaccucagaugguccaccca

SEQ ID NO: 235697 - RNA, 24 nt, Human
uccugaccucaggcaaucugcccg

SEQ ID NO: 235698 - RNA, 21 nt, Human
uccugaccucaggcgauccac

SEQ ID NO: 235699 - RNA, 24 nt, Human
uccugaccucaggcgauccgcccg

SEQ ID NO: 235700 - RNA, 24 nt, Human
uccugaccucaggcgaucuacccg

SEQ ID NO: 235701 - RNA, 24 nt, Human
uccugaccucaggcgaucugccca

SEQ ID NO: 235702 - RNA, 24 nt, Human
uccugaccucaggggauccacccg

SEQ ID NO: 235703 - RNA, 21 nt, Human
uccugaccucagguaauccac

SEQ ID NO: 235704 - RNA, 24 nt, Human
uccugaccucagguaauccgccca

SEQ ID NO: 235705 - RNA, 23 nt, Human
uccugaccucagguaauccgucu

SEQ ID NO: 235706 - RNA, 21 nt, Human
uccugaccucagguaaucgac

SEQ ID NO: 235707 - RNA, 24 nt, Human
uccugaccucaggugagccacccg

SEQ ID NO: 235708 - RNA, 21 nt, Human
uccugaccucaggugagccgc

SEQ ID NO: 235709 - RNA, 23 nt, Human
uccugaccucaggugaucaccgc

SEQ ID NO: 235710 - RNA, 19 nt, Human
uccugaccucaggugaucc

SEQ ID NO: 235711 - RNA, 23 nt, Human
uccugaccucaggugauccaacu

SEQ ID NO: 235712 - RNA, 21 nt, Human
uccugaccucaggugauccac

SEQ ID NO: 235713 - RNA, 23 nt, Human
uccugaccucaggugauccacca

SEQ ID NO: 235714 - RNA, 24 nt, Human
uccugaccucaggugauccaccca

SEQ ID NO: 235715 - RNA, 24 nt, Human
uccugaccucaggugauccacccg

SEQ ID NO: 235716 - RNA, 23 nt, Human
uccugaccucaggugauccacuc

SEQ ID NO: 235717 - RNA, 23 nt, Human
uccugaccucaggugauccauca

SEQ ID NO: 235718 - RNA, 32 nt, Human
uccugaccucaggugauccaucagccugggcc

SEQ ID NO: 235719 - RNA, 24 nt, Human
uccugaccucaggugauccgaccg

SEQ ID NO: 235720 - RNA, 21 nt, Human
uccugaccucaggugauccgc

SEQ ID NO: 235721 - RNA, 24 nt, Human
uccugaccucaggugauccgccca

SEQ ID NO: 235722 - RNA, 24 nt, Human
uccugaccucaggugauccgcccg

SEQ ID NO: 235723 - RNA, 24 nt, Human
uccugaccucaggugauccgucca

SEQ ID NO: 235724 - RNA, 23 nt, Human
uccugaccucaggugauccgucu

SEQ ID NO: 235725 - RNA, 32 nt, Human
uccugaccucaggugauccucccaccucggcc

SEQ ID NO: 235726 - RNA, 32 nt, Human
uccugaccucaggugauccucccgccucggcc

SEQ ID NO: 235727 - RNA, 32 nt, Human
uccugaccucaggugauccuccugccucggcc

SEQ ID NO: 235728 - RNA, 21 nt, Human
uccugaccucaggugaucuac

SEQ ID NO: 235729 - RNA, 24 nt, Human
uccugaccucaggugaucuaccca

SEQ ID NO: 235730 - RNA, 21 nt, Human
uccugaccucaggugaucugc

SEQ ID NO: 235731 - RNA, 24 nt, Human
uccugaccucaggugaucugccca

SEQ ID NO: 235732 - RNA, 24 nt, Human
uccugaccucaggugaucugcccg

SEQ ID NO: 235733 - RNA, 21 nt, Human
uccugaccucaggugaucugu

SEQ ID NO: 235734 - RNA, 21 nt, Human
uccugaccucaggugaugcac

SEQ ID NO: 235735 - RNA, 24 nt, Human
uccugaccucaggugaugcaccca

SEQ ID NO: 235736 - RNA, 23 nt, Human
uccugaccucaggugauucacca

SEQ ID NO: 235737 - RNA, 23 nt, Human
uccugaccucaggugauucgccg

SEQ ID NO: 235738 - RNA, 21 nt, Human
uccugaccucaggugcuccac

SEQ ID NO: 235739 - RNA, 21 nt, Human
uccugaccucaguugauccac

SEQ ID NO: 235740 - RNA, 24 nt, Human
uccugaccucaguugauccaccca

SEQ ID NO: 235741 - RNA, 24 nt, Human
uccugaccucaguugauccacccg

SEQ ID NO: 235742 - RNA, 21 nt, Human
uccugaccucaguugauccgc

SEQ ID NO: 235743 - RNA, 22 nt, Human
uccugaccucauauuccacccg

SEQ ID NO: 235744 - RNA, 22 nt, Human
uccugaccucaugagccgcccg

SEQ ID NO: 235745 - RNA, 32 nt, Human
uccugaccucaugauccacccaccucagccuc

SEQ ID NO: 235746 - RNA, 32 nt, Human
uccugaccucaugauccacccaccucagccuu

SEQ ID NO: 235747 - RNA, 32 nt, Human
uccugaccucaugauccacccaccucggccuc

SEQ ID NO: 235748 - RNA, 32 nt, Human
uccugaccucaugauccucccgccucagccuc

SEQ ID NO: 235749 - RNA, 32 nt, Human
uccugaccucaugauccucccgccucggccuc

SEQ ID NO: 235750 - RNA, 19 nt, Human
uccugaccucaugaucugc

SEQ ID NO: 235751 - RNA, 22 nt, Human
uccugaccucaugaucugccca

SEQ ID NO: 235752 - RNA, 32 nt, Human
uccugaccucaugaucugcccaccucggccuc

SEQ ID NO: 235753 - RNA, 22 nt, Human
uccugaccucaugaucugcccg

SEQ ID NO: 235754 - RNA, 24 nt, Human
uccugaccucauguaauccaccca

SEQ ID NO: 235755 - RNA, 32 nt, Human
uccugaccuccaggaugucucccgguuucuuc

SEQ ID NO: 235756 - RNA, 24 nt, Human
uccugaccuccagugaucugccca

SEQ ID NO: 235757 - RNA, 32 nt, Human
uccugaccuccccucauuguggccccacaccc

SEQ ID NO: 235758 - RNA, 32 nt, Human
uccugaccuccgagccucagcuaugcccucug

SEQ ID NO: 235759 - RNA, 24 nt, Human
uccugaccuccggugaucugccca

SEQ ID NO: 235760 - RNA, 22 nt, Human
uccugaccuccugauccaccca

SEQ ID NO: 235761 - RNA, 32 nt, Human
uccugaccuccugauccacccaccucagcguc

SEQ ID NO: 235762 - RNA, 22 nt, Human
uccugaccuccugauccgccca

SEQ ID NO: 235763 - RNA, 32 nt, Human
uccugaccuccugauccgcccaccucagccuc

SEQ ID NO: 235764 - RNA, 32 nt, Human
uccugaccuccugauccgcccaccucggccag

SEQ ID NO: 235765 - RNA, 32 nt, Human
uccugaccuccuggugggguuggagcaucugu

SEQ ID NO: 235766 - RNA, 24 nt, Human
uccugaccucgggugauccacccg

SEQ ID NO: 235767 - RNA, 19 nt, Human
uccugaccucguaauccac

SEQ ID NO: 235768 - RNA, 22 nt, Human
uccugaccucgugacccacccg

SEQ ID NO: 235769 - RNA, 21 nt, Human
uccugaccucgugagccacca

SEQ ID NO: 235770 - RNA, 32 nt, Human
uccugaccucgugaucagcccaccucagccuc

SEQ ID NO: 235771 - RNA, 32 nt, Human
uccugaccucgugauccacccaccucagccuc

SEQ ID NO: 235772 - RNA, 32 nt, Human
uccugaccucgugauccacccaccucaggaag

SEQ ID NO: 235773 - RNA, 32 nt, Human
uccugaccucgugauccacccaccucggccuc

SEQ ID NO: 235774 - RNA, 32 nt, Human
uccugaccucgugauccgcccaccucagccuc

SEQ ID NO: 235775 - RNA, 32 nt, Human
uccugaccucgugauccgcccaccucggccuc

SEQ ID NO: 235776 - RNA, 32 nt, Human
uccugaccucgugaucuacccaccucggucuc

SEQ ID NO: 235777 - RNA, 22 nt, Human
uccugaccucgugaucugccca

SEQ ID NO: 235778 - RNA, 32 nt, Human
uccugaccucgugaucugcccaccucagccuc

SEQ ID NO: 235779 - RNA, 32 nt, Human
uccugaccucgugaucugcccaccucagccug

SEQ ID NO: 235780 - RNA, 32 nt, Human
uccugaccucgugaucugcccaccucggccuc

SEQ ID NO: 235781 - RNA, 22 nt, Human
uccugaccucgugaucugcccg

SEQ ID NO: 235782 - RNA, 32 nt, Human
uccugaccucgugauucacccaccucagccuc

SEQ ID NO: 235783 - RNA, 32 nt, Human
uccugaccucgugauuggcccaccucagccuc

SEQ ID NO: 235784 - RNA, 24 nt, Human
uccugaccucugaugaucuacccg

SEQ ID NO: 235785 - RNA, 24 nt, Human
uccugaccucuggugaucugccca

SEQ ID NO: 235786 - RNA, 19 nt, Human
uccugaccucuugauccgc

SEQ ID NO: 235787 - RNA, 22 nt, Human
uccugaccucuugaucugccca

SEQ ID NO: 235788 - RNA, 21 nt, Human
uccugaccugaagugauccac

SEQ ID NO: 235789 - RNA, 32 nt, Human
uccugaccugccucccccuccccgcccgaccc

SEQ ID NO: 235790 - RNA, 21 nt, Human
uccugaccuuaagugauccac

SEQ ID NO: 235791 - RNA, 24 nt, Human
uccugaccuuaagugauccaccca

SEQ ID NO: 235792 - RNA, 32 nt, Human
uccugaccuuaagugauccacccaccucggcc

SEQ ID NO: 235793 - RNA, 32 nt, Human
uccugaccuuaagugauccacccaccuuggcc

SEQ ID NO: 235794 - RNA, 24 nt, Human
uccugaccuuacgugauccacccg

SEQ ID NO: 235795 - RNA, 23 nt, Human
uccugaccuuaggugauccacuc

SEQ ID NO: 235796 - RNA, 24 nt, Human
uccugaccuuaggugauccgcccg

SEQ ID NO: 235797 - RNA, 24 nt, Human
uccugaccuuaggugaucugccca

SEQ ID NO: 235798 - RNA, 24 nt, Human
uccugaccuuaguugaucugccca

SEQ ID NO: 235799 - RNA, 22 nt, Human
uccugaccuuauaauccgccca

SEQ ID NO: 235800 - RNA, 22 nt, Human
uccugaccuucaggugauccac

SEQ ID NO: 235801 - RNA, 24 nt, Human
uccugaccuucaucucugggcuug

SEQ ID NO: 235802 - RNA, 32 nt, Human
uccugaccuucaucucugggcuuguuccggga

SEQ ID NO: 235803 - RNA, 21 nt, Human
uccugaccuuggguaauccac

SEQ ID NO: 235804 - RNA, 23 nt, Human
uccugaccuuggugauccacccg

SEQ ID NO: 235805 - RNA, 22 nt, Human
uccugaccuugugaaccacccg

SEQ ID NO: 235806 - RNA, 32 nt, Human
uccugaccuugugauccaccuccucggccucc

SEQ ID NO: 235807 - RNA, 22 nt, Human
uccugaccuugugaucugccca

SEQ ID NO: 235808 - RNA, 22 nt, Human
uccugaccuugugaucugcccg

SEQ ID NO: 235809 - RNA, 32 nt, Human
uccugaccuugugaucugcucuccucagccuc

SEQ ID NO: 235810 - RNA, 21 nt, Human
uccugaccuuuguaucuacuc

SEQ ID NO: 235811 - RNA, 32 nt, Human
uccugacgcagggccaggacccugcccgaugc

SEQ ID NO: 235812 - RNA, 24 nt, Human
uccugacgccaggugaucugccca

SEQ ID NO: 235813 - RNA, 32 nt, Human
uccugacggccagaaccuggggugguggggag

SEQ ID NO: 235814 - RNA, 24 nt, Human
uccugacggccaggcagggaugcu

SEQ ID NO: 235815 - RNA, 32 nt, Human
uccugacggcgccuuuuuggccugugauguuu

SEQ ID NO: 235816 - RNA, 23 nt, Human
uccugacgucaagugauccauuc

SEQ ID NO: 235817 - RNA, 32 nt, Human
uccugacgucaagugauccauucgccucggcc

SEQ ID NO: 235818 - RNA, 32 nt, Human
uccugacgucaagugaucuucccgccucgacu

SEQ ID NO: 235819 - RNA, 24 nt, Human
uccugacgucaggugauccacccg

SEQ ID NO: 235820 - RNA, 24 nt, Human
uccugacgucaggugauccgccca

SEQ ID NO: 235821 - RNA, 22 nt, Human
uccugacgucgugauccacccg

SEQ ID NO: 235822 - RNA, 22 nt, Human
uccugacgucgugauccgccca

SEQ ID NO: 235823 - RNA, 24 nt, Human
uccugacucgaagugauccgccca

SEQ ID NO: 235824 - RNA, 32 nt, Human
uccugacucgaagugauccgcccaccuuggcc

SEQ ID NO: 235825 - RNA, 32 nt, Human
uccugacugcagcucuuuucauuuugccaucc

SEQ ID NO: 235826 - RNA, 32 nt, Human
uccugacuggggcuugcgacucacaggauugc

SEQ ID NO: 235827 - RNA, 24 nt, Human
uccugacuggucaggugcuacuua

SEQ ID NO: 235828 - RNA, 21 nt, Human
uccugacuucaagugauccac

SEQ ID NO: 235829 - RNA, 32 nt, Human
uccugacuucaagugauccgccugccuuggcc

SEQ ID NO: 235830 - RNA, 32 nt, Human
uccugacuucaagugaucugcccaccucugcc

SEQ ID NO: 235831 - RNA, 24 nt, Human
uccugacuucaggugacccacccg

SEQ ID NO: 235832 - RNA, 20 nt, Human
uccugacuucaggugaucca

SEQ ID NO: 235833 - RNA, 24 nt, Human
uccugacuucaggugauccacccg

SEQ ID NO: 235834 - RNA, 21 nt, Human
uccugacuucaggugauccgc

SEQ ID NO: 235835 - RNA, 23 nt, Human
uccugacuucaggugaucugucu

SEQ ID NO: 235836 - RNA, 32 nt, Human
uccugacuucaugauccacccaccucggccuc

SEQ ID NO: 235837 - RNA, 32 nt, Human
uccugacuucaugguccgccugccucagccuc

SEQ ID NO: 235838 - RNA, 23 nt, Human
uccugacuucaugugauccgcca

SEQ ID NO: 235839 - RNA, 32 nt, Human
uccugacuucauuuuguguuugccugaaaauu

SEQ ID NO: 235840 - RNA, 32 nt, Human
uccugacuuccagauuaguguuauuuuuacuu

SEQ ID NO: 235841 - RNA, 21 nt, Human
uccugacuucgcccuacugca

SEQ ID NO: 235842 - RNA, 22 nt, Human
uccugacuucguuauccacccg

SEQ ID NO: 235843 - RNA, 22 nt, Human
uccugacuucuaauaucauuca

SEQ ID NO: 235844 - RNA, 24 nt, Human
uccugacuugaaaugauccauaca

SEQ ID NO: 235845 - RNA, 32 nt, Human
uccugacuugcagccacagagauaguccugcc

SEQ ID NO: 235846 - RNA, 21 nt, Human
uccugacuuuaggugauccac

SEQ ID NO: 235847 - RNA, 23 nt, Human
uccugacuuuuuauauccaguca

SEQ ID NO: 235848 - RNA, 32 nt, Human
uccugagaaauguuaaagguucacagggguuc

SEQ ID NO: 235849 - RNA, 32 nt, Human
uccugagaacaucccucaguaacuugauauuc

SEQ ID NO: 235850 - RNA, 32 nt, Human
uccugagaagugagaguugaaagggaagcagg

SEQ ID NO: 235851 - RNA, 32 nt, Human
uccugagaauaaccuccccuccagccagagau

SEQ ID NO: 235852 - RNA, 32 nt, Human
uccugagaaugccccucccaaccacagcagcc

SEQ ID NO: 235853 - RNA, 32 nt, Human
uccugagacggggccagcggaggcagagccgg

SEQ ID NO: 235854 - RNA, 32 nt, Human
uccugagacucugcugaaguugcuuaucaggu

SEQ ID NO: 235855 - RNA, 32 nt, Human
uccugagagaggaggaggcugggcagggcccc

SEQ ID NO: 235856 - RNA, 32 nt, Human
uccugagagccccagccccacucugaccucua

SEQ ID NO: 235857 - RNA, 32 nt, Human
uccugagaggacgugggugaggggcagauuuc

SEQ ID NO: 235858 - RNA, 32 nt, Human
uccugagaguuuugagaaaaacuggcaggaag

SEQ ID NO: 235859 - RNA, 32 nt, Human
uccugagauccagcccuccaccccuucaggua

SEQ ID NO: 235860 - RNA, 32 nt, Human
uccugagaugcuguuccugggagcccccucag

SEQ ID NO: 235861 - RNA, 32 nt, Human
uccugagauggaagaucuguccucuccagacu

SEQ ID NO: 235862 - RNA, 23 nt, Human
uccugagcaacugcaucccucca

SEQ ID NO: 235863 - RNA, 22 nt, Human
uccugagcaagugacaaucuaa

SEQ ID NO: 235864 - RNA, 32 nt, Human
uccugagcagagaggaagggauggguggacuc

SEQ ID NO: 235865 - RNA, 32 nt, Human
uccugagcagccucuuuucuaggaucaauaug

SEQ ID NO: 235866 - RNA, 32 nt, Human
uccugagcagcuaaaguauuuucuccaauggc

SEQ ID NO: 235867 - RNA, 23 nt, Human
uccugagcagcugggauuacagg

SEQ ID NO: 235868 - RNA, 18 nt, Human
uccugagccaaggaggug

SEQ ID NO: 235869 - RNA, 32 nt, Human
uccugagccaaggaggugaggagcagagcagg

SEQ ID NO: 235870 - RNA, 23 nt, Human
uccugagccacugaccacggcca

SEQ ID NO: 235871 - RNA, 32 nt, Human
uccugagccacuucagaguucuggaagugacc

SEQ ID NO: 235872 - RNA, 20 nt, Human
uccugagcccaaguccccca

SEQ ID NO: 235873 - RNA, 22 nt, Human
uccugagcccaggugauccucc

SEQ ID NO: 235874 - RNA, 21 nt, Human
uccugagccccaggucucuuc

SEQ ID NO: 235875 - RNA, 32 nt, Human
uccugagccccaggucucuucagucugggcac

SEQ ID NO: 235876 - RNA, 21 nt, Human
uccugagccccgcccucuucc

SEQ ID NO: 235877 - RNA, 22 nt, Human
uccugagccccuccuggccuca

SEQ ID NO: 235878 - RNA, 24 nt, Human
uccugagcccgugucauucuucca

SEQ ID NO: 235879 - RNA, 32 nt, Human
uccugagccgaggaggagggacugcaagugga

SEQ ID NO: 235880 - RNA, 32 nt, Human
uccugagccuaaaaggccaccucugagcacuu

SEQ ID NO: 235881 - RNA, 32 nt, Human
uccugagccuccucaugcccuggaccagccug

SEQ ID NO: 235882 - RNA, 32 nt, Human
uccugagcgcaagugauccacccgucucagcc

SEQ ID NO: 235883 - RNA, 19 nt, Human
uccugagcgggcacggcca

SEQ ID NO: 235884 - RNA, 24 nt, Human
uccugagcgguuccgucuccugcu

SEQ ID NO: 235885 - RNA, 32 nt, Human
uccugagcuaacucccuguucuuucccgaggc

SEQ ID NO: 235886 - RNA, 32 nt, Human
uccugagcucaaaugauccuccugccuuggcc

SEQ ID NO: 235887 - RNA, 32 nt, Human
uccugagcucaagugauccacccaccucagcc

SEQ ID NO: 235888 - RNA, 32 nt, Human
uccugagcucaagugauccgccugccuuggcc

SEQ ID NO: 235889 - RNA, 24 nt, Human
uccugagcucaagugauccuccca

SEQ ID NO: 235890 - RNA, 32 nt, Human
uccugagcucaagugauccucccaccucagcc

SEQ ID NO: 235891 - RNA, 32 nt, Human
uccugagcucaagugauccuccuaccucaguc

SEQ ID NO: 235892 - RNA, 32 nt, Human
uccugagcucaagugauccucucuuggcuugg

SEQ ID NO: 235893 - RNA, 32 nt, Human
uccugagcucaagugauccucugccucagccu

SEQ ID NO: 235894 - RNA, 32 nt, Human
uccugagcucaagugauccuuccacccugguc

SEQ ID NO: 235895 - RNA, 32 nt, Human
uccugagcucaagugaucugcccaucucagcc

SEQ ID NO: 235896 - RNA, 32 nt, Human
uccugagcucaagugaucugcccgccucagcc

SEQ ID NO: 235897 - RNA, 32 nt, Human
uccugagcucaagugaucuuccugccuuggca

SEQ ID NO: 235898 - RNA, 24 nt, Human
uccugagcucagaugaucugccca

SEQ ID NO: 235899 - RNA, 24 nt, Human
uccugagcucaggugauccacccg

SEQ ID NO: 235900 - RNA, 24 nt, Human
uccugagcucaggugaucugccca

SEQ ID NO: 235901 - RNA, 32 nt, Human
uccugagcuccaaagauccucucaccuccacc

SEQ ID NO: 235902 - RNA, 32 nt, Human
uccugagcucugauuccucuucugucuggcug

SEQ ID NO: 235903 - RNA, 21 nt, Human
uccugagcucugccucuucca

SEQ ID NO: 235904 - RNA, 19 nt, Human
uccugagcugccacucuca

SEQ ID NO: 235905 - RNA, 22 nt, Human
uccugagcugcugcuguguuug

SEQ ID NO: 235906 - RNA, 24 nt, Human
uccugagcugcuguugcagucuaa

SEQ ID NO: 235907 - RNA, 22 nt, Human
uccugagcugcuguuuccaauc

SEQ ID NO: 235908 - RNA, 20 nt, Human
uccugagcugggauuacagg

SEQ ID NO: 235909 - RNA, 32 nt, Human
uccugagcuucagaacuagggaacugauggua

SEQ ID NO: 235910 - RNA, 32 nt, Human
uccugaggacaaagggccuggccacacuaggg

SEQ ID NO: 235911 - RNA, 22 nt, Human
uccugaggacagagacugcucu

SEQ ID NO: 235912 - RNA, 32 nt, Human
uccugaggaggaacuccaggccucccaucgug

SEQ ID NO: 235913 - RNA, 32 nt, Human
uccugaggaggcgggguuggccuaggcgaaga

SEQ ID NO: 235914 - RNA, 32 nt, Human
uccugaggauuccaggcgggacuauccagcuc

SEQ ID NO: 235915 - RNA, 32 nt, Human
uccugaggcauuucuugcccagcuggguccaa

SEQ ID NO: 235916 - RNA, 32 nt, Human
uccugaggccagcccauagcauguguuccaga

SEQ ID NO: 235917 - RNA, 32 nt, Human
uccugaggccccagaggaagagaccaugaaag

SEQ ID NO: 235918 - RNA, 32 nt, Human
uccugaggcuacacccaugcgucucuaggaac

SEQ ID NO: 235919 - RNA, 32 nt, Human
uccugaggcucccugcacugccacagcccaga

SEQ ID NO: 235920 - RNA, 32 nt, Human
uccugaggcugaggcaggaagaucacuugaac

SEQ ID NO: 235921 - RNA, 32 nt, Human
uccugagggcaccagcuguggugcaggagcca

SEQ ID NO: 235922 - RNA, 32 nt, Human
uccugagggcagcaggccugguugcagcuggc

SEQ ID NO: 235923 - RNA, 32 nt, Human
uccugagggcaguuguuugugauugccuuccc

SEQ ID NO: 235924 - RNA, 32 nt, Human
uccugagggcuggagaacacugcugggcacac

SEQ ID NO: 235925 - RNA, 32 nt, Human
uccugagggcugugucacaggccauguucacu

SEQ ID NO: 235926 - RNA, 32 nt, Human
uccugagggggaccuugggcaccuccugguau

SEQ ID NO: 235927 - RNA, 32 nt, Human
uccugaggucucauuaggaaacccucaccgcu

SEQ ID NO: 235928 - RNA, 32 nt, Human
uccugaggugucuggggagcacugcggcaaga

SEQ ID NO: 235929 - RNA, 32 nt, Human
uccugagguucccuucaccccucucucuugcc

SEQ ID NO: 235930 - RNA, 23 nt, Human
uccugaguaacuggaauugcagg

SEQ ID NO: 235931 - RNA, 23 nt, Human
uccugaguaacugggauuacagg

SEQ ID NO: 235932 - RNA, 23 nt, Human
uccugaguaccugggauuacagg

SEQ ID NO: 235933 - RNA, 32 nt, Human
uccugaguagcuggaaccacaggcaugugcca

SEQ ID NO: 235934 - RNA, 23 nt, Human
uccugaguagcugggaucacagg

SEQ ID NO: 235935 - RNA, 22 nt, Human
uccugaguagcugggauuacag

SEQ ID NO: 235936 - RNA, 23 nt, Human
uccugaguagcugggauuacagg

SEQ ID NO: 235937 - RNA, 23 nt, Human
uccugaguagcugggauugcagg

SEQ ID NO: 235938 - RNA, 32 nt, Human
uccugaguagcuggggauuacaggcgcccgcc

SEQ ID NO: 235939 - RNA, 32 nt, Human
uccugaguagcugggguugcaggugugcacca

SEQ ID NO: 235940 - RNA, 23 nt, Human
uccugaguaucugggauuacagg

SEQ ID NO: 235941 - RNA, 32 nt, Human
uccugagucaggagguugaggcugcagugagc

SEQ ID NO: 235942 - RNA, 23 nt, Human
uccugagucuccagagcucggug

SEQ ID NO: 235943 - RNA, 32 nt, Human
uccugagucugcuucagucuggagcuguuugu

SEQ ID NO: 235944 - RNA, 32 nt, Human
uccugagugcauuucccugcacugugucguca

SEQ ID NO: 235945 - RNA, 32 nt, Human
uccugagugcccaccuguccugcuucucugca

SEQ ID NO: 235946 - RNA, 23 nt, Human
uccugagugccccuuccuguccu

SEQ ID NO: 235947 - RNA, 23 nt, Human
uccugaguggcugggauuacagg

SEQ ID NO: 235948 - RNA, 23 nt, Human
uccugaguggcugggauugcagg

SEQ ID NO: 235949 - RNA, 32 nt, Human
uccugagugggccuccuuuucccacugugcca

SEQ ID NO: 235950 - RNA, 23 nt, Human
uccugagugggugccuucuccca

SEQ ID NO: 235951 - RNA, 32 nt, Human
uccugaguguccuguggguucaucucggaugg

SEQ ID NO: 235952 - RNA, 19 nt, Human
uccugaguguugccugcca

SEQ ID NO: 235953 - RNA, 32 nt, Human
uccugaguguuugcugugcuccaggcucagua

SEQ ID NO: 235954 - RNA, 32 nt, Human
uccugaguucaaaugauucuccugccucagcc

SEQ ID NO: 235955 - RNA, 32 nt, Human
uccugaguucaagcgauucuccugccucagcc

SEQ ID NO: 235956 - RNA, 32 nt, Human
uccugaguucaagucauucuccugccucagcc

SEQ ID NO: 235957 - RNA, 32 nt, Human
uccugaguucaagugauccuccugcuucagcc

SEQ ID NO: 235958 - RNA, 32 nt, Human
uccugaguucaagugauuccugugccucaguc

SEQ ID NO: 235959 - RNA, 32 nt, Human
uccugaguucacgcgauucuccugccucagcc

SEQ ID NO: 235960 - RNA, 28 nt, Human
uccugaguuugguucagauggucuguca

SEQ ID NO: 235961 - RNA, 32 nt, Human
uccugauaaauacuuucucucucaccuguacu

SEQ ID NO: 235962 - RNA, 25 nt, Human
uccugauacauggauguuucacuua

SEQ ID NO: 235963 - RNA, 32 nt, Human
uccugauacucauccugauaaucucuuaagag

SEQ ID NO: 235964 - RNA, 32 nt, Human
uccugauacucccaagagcaggccccaggggu

SEQ ID NO: 235965 - RNA, 32 nt, Human
uccugauaucaagugaucuucccgccucggcc

SEQ ID NO: 235966 - RNA, 22 nt, Human
uccugauauggcaaaaauuaaa

SEQ ID NO: 235967 - RNA, 25 nt, Human
uccugaucaccccuccccucuuccc

SEQ ID NO: 235968 - RNA, 32 nt, Human
uccugaucaccuaggcaggccugucuccaguu

SEQ ID NO: 235969 - RNA, 32 nt, Human
uccugaucacuuccuaaacugcagccuggccc

SEQ ID NO: 235970 - RNA, 32 nt, Human
uccugaucaucagaaauuucaccagaaacaac

SEQ ID NO: 235971 - RNA, 21 nt, Human
uccugaucauuauuuacccca

SEQ ID NO: 235972 - RNA, 32 nt, Human
uccugauccaagcagaacccuguuauuugaag

SEQ ID NO: 235973 - RNA, 32 nt, Human
uccugauccacggguugcacagaucuguggaa

SEQ ID NO: 235974 - RNA, 32 nt, Human
uccugaucccaucucacucucuggaccuacca

SEQ ID NO: 235975 - RNA, 32 nt, Human
uccugaucccucucccaccagacuggacucug

SEQ ID NO: 235976 - RNA, 32 nt, Human
uccugaucgagagauucacccaccucggccuc

SEQ ID NO: 235977 - RNA, 32 nt, Human
uccugaucgccaaccuuucccccaccagcuaa

SEQ ID NO: 235978 - RNA, 24 nt, Human
uccugaucucaagugaucugccca

SEQ ID NO: 235979 - RNA, 32 nt, Human
uccugaucucaagugaucugcccaccucagcc

SEQ ID NO: 235980 - RNA, 24 nt, Human
uccugaucucaggcaauccaccca

SEQ ID NO: 235981 - RNA, 24 nt, Human
uccugaucucaggugaccugccca

SEQ ID NO: 235982 - RNA, 24 nt, Human
uccugaucucaggugaucugccca

SEQ ID NO: 235983 - RNA, 32 nt, Human
uccugaucucgugguccacccaccucggcuuc

SEQ ID NO: 235984 - RNA, 23 nt, Human
uccugaucugccagggucugcuc

SEQ ID NO: 235985 - RNA, 32 nt, Human
uccugaucugucguugccaucaccuccagggg

SEQ ID NO: 235986 - RNA, 30 nt, Human
uccugaugcaccugcuggucugcgucuucg

SEQ ID NO: 235987 - RNA, 22 nt, Human
uccugaugcccuccccaccuca

SEQ ID NO: 235988 - RNA, 32 nt, Human
uccugaugcccuggugggcuuagggaaccauc

SEQ ID NO: 235989 - RNA, 32 nt, Human
uccugaugcugugcucaaucagccuggccauc

SEQ ID NO: 235990 - RNA, 27 nt, Human
uccugaugcuuuucacacuucuugucu

SEQ ID NO: 235991 - RNA, 30 nt, Human
uccugauggaguuucacuauguugcccagg

SEQ ID NO: 235992 - RNA, 32 nt, Human
uccugaugggcaaccacaccacugccuggcgc

SEQ ID NO: 235993 - RNA, 32 nt, Human
uccugauggugucauucugccugcuccaucgc

SEQ ID NO: 235994 - RNA, 32 nt, Human
uccugauguacacccaucgccaucauagcaag

SEQ ID NO: 235995 - RNA, 32 nt, Human
uccugauguagaaucauuguguugcugauuuu

SEQ ID NO: 235996 - RNA, 22 nt, Human
uccugaugucccucucccuccc

SEQ ID NO: 235997 - RNA, 32 nt, Human
uccugaugucucagcacccagcacggcuguca

SEQ ID NO: 235998 - RNA, 32 nt, Human
uccugauguuuagggacuuguccugguucauc

SEQ ID NO: 235999 - RNA, 32 nt, Human
uccugauguuuugccguggcuuggggauugua

SEQ ID NO: 236000 - RNA, 32 nt, Human
uccugauucucuucuucuaccucuacccucuc

SEQ ID NO: 236001 - RNA, 32 nt, Human
uccugauugcagcugccaugcuggcuggauau

SEQ ID NO: 236002 - RNA, 32 nt, Human
uccugauugucauuuaaaauugugacauacca

SEQ ID NO: 236003 - RNA, 32 nt, Human
uccugauuucccuaaggagccugggaugaugu

SEQ ID NO: 236004 - RNA, 32 nt, Human
uccugcaaaccuacacaccaaagcuuuauuua

SEQ ID NO: 236005 - RNA, 24 nt, Human
uccugcaaagcagaguuggcugug

SEQ ID NO: 236006 - RNA, 24 nt, Human
uccugcaaccccaggcaugaacca

SEQ ID NO: 236007 - RNA, 32 nt, Human
uccugcaacccccacugcucagccucuaggag

SEQ ID NO: 236008 - RNA, 32 nt, Human
uccugcaaccucaagagacuucccaggcgcuc

SEQ ID NO: 236009 - RNA, 21 nt, Human
uccugcaaccuccuccaccuc

SEQ ID NO: 236010 - RNA, 32 nt, Human
uccugcaaccugaaguacacagaaggaguaca

SEQ ID NO: 236011 - RNA, 32 nt, Human
uccugcaacuaaacacgagccugggcagaacc

SEQ ID NO: 236012 - RNA, 32 nt, Human
uccugcaauuggaauuccaccuuguccagccc

SEQ ID NO: 236013 - RNA, 32 nt, Human
uccugcacaagaaaccacggauucuccaguga

SEQ ID NO: 236014 - RNA, 32 nt, Human
uccugcacaagucccugcaacuggacgugcag

SEQ ID NO: 236015 - RNA, 32 nt, Human
uccugcacacucgggaccucagcuccaaggcg

SEQ ID NO: 236016 - RNA, 32 nt, Human
uccugcacacuggccuucagugguaucagcca

SEQ ID NO: 236017 - RNA, 24 nt, Human
uccugcacagcucagcccacccca

SEQ ID NO: 236018 - RNA, 32 nt, Human
uccugcaccaccagaauaaacuugccgaguuu

SEQ ID NO: 236019 - RNA, 32 nt, Human
uccugcaccagacguggggacaggguccugag

SEQ ID NO: 236020 - RNA, 32 nt, Human
uccugcaccagaggacuccugcccugccacac

SEQ ID NO: 236021 - RNA, 32 nt, Human
uccugcaccauugcugacgccuggugauccau

SEQ ID NO: 236022 - RNA, 32 nt, Human
uccugcacccacucccuucauacaaucuaguc

SEQ ID NO: 236023 - RNA, 32 nt, Human
uccugcaccgcgaccugaagcucaguaacuuc

SEQ ID NO: 236024 - RNA, 32 nt, Human
uccugcaccucacccccucggcuugguccugg

SEQ ID NO: 236025 - RNA, 23 nt, Human
uccugcaccucauccuccaccca

SEQ ID NO: 236026 - RNA, 22 nt, Human
uccugcaccuccucccucuccc

SEQ ID NO: 236027 - RNA, 24 nt, Human
uccugcacggccgcacccaccuca

SEQ ID NO: 236028 - RNA, 27 nt, Human
uccugcacggugccaccuccacacuca

SEQ ID NO: 236029 - RNA, 32 nt, Human
uccugcacuccaagggaccccuccaggggacc

SEQ ID NO: 236030 - RNA, 32 nt, Human
uccugcacucggccuggauccucauucugcac

SEQ ID NO: 236031 - RNA, 32 nt, Human
uccugcacucuuccucccucaguaaguaaaug

SEQ ID NO: 236032 - RNA, 32 nt, Human
uccugcacugaggagguggaaagaagaggauu

SEQ ID NO: 236033 - RNA, 32 nt, Human
uccugcacugcagcuuccugcuccucugacuc

SEQ ID NO: 236034 - RNA, 32 nt, Human
uccugcacugcucugacccugugaaaggacca

SEQ ID NO: 236035 - RNA, 31 nt, Human
uccugcacugugucucccacacugagaaacc

SEQ ID NO: 236036 - RNA, 32 nt, Human
uccugcagaaaagagugugaggagccagggaa

SEQ ID NO: 236037 - RNA, 32 nt, Human
uccugcagaacacacagugccuuaugccacag

SEQ ID NO: 236038 - RNA, 32 nt, Human
uccugcagaacuccaggaggcagcauucuaug

SEQ ID NO: 236039 - RNA, 21 nt, Human
uccugcagaagagacaugcag

SEQ ID NO: 236040 - RNA, 21 nt, Human
uccugcagaagcagaagugca

SEQ ID NO: 236041 - RNA, 32 nt, Human
uccugcagaccccacuccauucccgcuccugg

SEQ ID NO: 236042 - RNA, 32 nt, Human
uccugcagacuggccuaugcgcccggcccugc

SEQ ID NO: 236043 - RNA, 23 nt, Human
uccugcagagagaggagccgcag

SEQ ID NO: 236044 - RNA, 32 nt, Human
uccugcagagccucuuucccucugccacaguu

SEQ ID NO: 236045 - RNA, 32 nt, Human
uccugcagagcugcaggcaagagcagagcaau

SEQ ID NO: 236046 - RNA, 32 nt, Human
uccugcagagggucaaggagcagggauguugg

SEQ ID NO: 236047 - RNA, 21 nt, Human
uccugcagcaagagaaggcag

SEQ ID NO: 236048 - RNA, 32 nt, Human
uccugcagcacccccgggacaggcugggacca

SEQ ID NO: 236049 - RNA, 32 nt, Human
uccugcagcauggccccugccuuaggccuacc

SEQ ID NO: 236050 - RNA, 32 nt, Human
uccugcagcauggucccugccuuaggccuacc

SEQ ID NO: 236051 - RNA, 23 nt, Human
uccugcagccagugcagaugcag

SEQ ID NO: 236052 - RNA, 32 nt, Human
uccugcagccuggaaagaggagggaggccaag

SEQ ID NO: 236053 - RNA, 32 nt, Human
uccugcagccuggggaggagugugacgacggu

SEQ ID NO: 236054 - RNA, 32 nt, Human
uccugcagccuucccaguccugcugcuugugg

SEQ ID NO: 236055 - RNA, 32 nt, Human
uccugcagcucagcagaccuccuggccguggc

SEQ ID NO: 236056 - RNA, 23 nt, Human
uccugcagcucuggggagaccag

SEQ ID NO: 236057 - RNA, 32 nt, Human
uccugcagcucuggggagaccagcacagaacu

SEQ ID NO: 236058 - RNA, 32 nt, Human
uccugcagcuggcuggcuaccaguggcagcgg

SEQ ID NO: 236059 - RNA, 32 nt, Human
uccugcaggaagcaggacggggcaggcagcac

SEQ ID NO: 236060 - RNA, 32 nt, Human
uccugcaggccugagggggcuucccucugcuu

SEQ ID NO: 236061 - RNA, 32 nt, Human
uccugcaggccugcggggaucucuccccacuu

SEQ ID NO: 236062 - RNA, 32 nt, Human
uccugcaggccuggucuugcccagcugggcug

SEQ ID NO: 236063 - RNA, 32 nt, Human
uccugcaggcuggucucugagccugcccccac

SEQ ID NO: 236064 - RNA, 32 nt, Human
uccugcagggccuggagguggggaggccagag

SEQ ID NO: 236065 - RNA, 32 nt, Human
uccugcagggcuggcccuggcucgggcagggu

SEQ ID NO: 236066 - RNA, 32 nt, Human
uccugcagggugcugcucagaugccucgaccc

SEQ ID NO: 236067 - RNA, 32 nt, Human
uccugcagguguccucgggucucagguggcug

SEQ ID NO: 236068 - RNA, 32 nt, Human
uccugcagguucaagcuccucagucccaggga

SEQ ID NO: 236069 - RNA, 32 nt, Human
uccugcagguuucugugccccugugguggaag

SEQ ID NO: 236070 - RNA, 32 nt, Human
uccugcagugcccugaggacuaggcucccguc

SEQ ID NO: 236071 - RNA, 32 nt, Human
uccugcaguggaacuccaugccccgccuccca

SEQ ID NO: 236072 - RNA, 32 nt, Human
uccugcaguuuuuauccaauaacauuguggga

SEQ ID NO: 236073 - RNA, 24 nt, Human
uccugcauagcucaccccaccuca

SEQ ID NO: 236074 - RNA, 32 nt, Human
uccugcauagucuaucuuuguauaucuuugaa

SEQ ID NO: 236075 - RNA, 32 nt, Human
uccugcauaugcagaggacggagcaggcucag

SEQ ID NO: 236076 - RNA, 32 nt, Human
uccugcaucagcuacauuaauagcugauugua

SEQ ID NO: 236077 - RNA, 32 nt, Human
uccugcauccaccccugcucagagccuccaug

SEQ ID NO: 236078 - RNA, 32 nt, Human
uccugcauccagcccccaacauggugccaaag

SEQ ID NO: 236079 - RNA, 20 nt, Human
uccugcaucccucugugccu

SEQ ID NO: 236080 - RNA, 32 nt, Human
uccugcaucucccaucaccuccucaaagaaaa

SEQ ID NO: 236081 - RNA, 32 nt, Human
uccugcaucugccucuuccacuccuccagcga

SEQ ID NO: 236082 - RNA, 32 nt, Human
uccugcaugaagcacagacuucacugcuagcu

SEQ ID NO: 236083 - RNA, 32 nt, Human
uccugcaugcuccuccccuugggcucucagau

SEQ ID NO: 236084 - RNA, 32 nt, Human
uccugcauguaauauaucugcugucaucuuag

SEQ ID NO: 236085 - RNA, 20 nt, Human
uccugcaugugucaccaccc

SEQ ID NO: 236086 - RNA, 22 nt, Human
uccugcaugugucaccacccca

SEQ ID NO: 236087 - RNA, 23 nt, Human
uccugcauuccuccuccccuccu

SEQ ID NO: 236088 - RNA, 32 nt, Human
uccugcauucuagucccugcugugcugcagga

SEQ ID NO: 236089 - RNA, 22 nt, Human
uccugcauugggugaucauuca

SEQ ID NO: 236090 - RNA, 32 nt, Human
uccugccaagaguuugaccauucugcuugaga

SEQ ID NO: 236091 - RNA, 32 nt, Human
uccugccaagcauuccauugacugccuguaug

SEQ ID NO: 236092 - RNA, 32 nt, Human
uccugccacacucugcuuucuuccugccaugg

SEQ ID NO: 236093 - RNA, 32 nt, Human
uccugccacagcuuaggacagaacugggccca

SEQ ID NO: 236094 - RNA, 32 nt, Human
uccugccacauccuucucaaggugguagacug

SEQ ID NO: 236095 - RNA, 22 nt, Human
uccugccaccaagauguguucu

SEQ ID NO: 236096 - RNA, 32 nt, Human
uccugccacccacacaccacucucccuagacu

SEQ ID NO: 236097 - RNA, 18 nt, Human
uccugccaccgggaggug

SEQ ID NO: 236098 - RNA, 32 nt, Human
uccugccaccucagccucccagguacugggac

SEQ ID NO: 236099 - RNA, 32 nt, Human
uccugccaccuugugaagaugccuugguuccu

SEQ ID NO: 236100 - RNA, 32 nt, Human
uccugccacugcacaccagccugggugacaga

SEQ ID NO: 236101 - RNA, 32 nt, Human
uccugccacugcacuccagccugggcaacaga

SEQ ID NO: 236102 - RNA, 32 nt, Human
uccugccacugcacuccagccugggcgacagc

SEQ ID NO: 236103 - RNA, 32 nt, Human
uccugccacugcacuccagccugugccacaga

SEQ ID NO: 236104 - RNA, 32 nt, Human
uccugccacugcagugcucgagccccgugcag

SEQ ID NO: 236105 - RNA, 32 nt, Human
uccugccacuguaaucucuucuaauuuguaau

SEQ ID NO: 236106 - RNA, 32 nt, Human
uccugccacuucuaugucucuggaccacagga

SEQ ID NO: 236107 - RNA, 32 nt, Human
uccugccagaaagagaaugaaugacagaaaaa

SEQ ID NO: 236108 - RNA, 32 nt, Human
uccugccaggcugcccccgccugcugugcacc

SEQ ID NO: 236109 - RNA, 31 nt, Human
uccugccaggcuggauaacuguugaauggac

SEQ ID NO: 236110 - RNA, 32 nt, Human
uccugccagggugggcagacagacagauggac

SEQ ID NO: 236111 - RNA, 32 nt, Human
uccugccaguaggacaucugggcucugggcug

SEQ ID NO: 236112 - RNA, 32 nt, Human
uccugccauacccuuuuugguuccucuaauuc

SEQ ID NO: 236113 - RNA, 32 nt, Human
uccugccauagugagagaaaugggauuucauc

SEQ ID NO: 236114 - RNA, 32 nt, Human
uccugccaucaaauauuuuuaguagaaaaagc

SEQ ID NO: 236115 - RNA, 19 nt, Human
uccugccauccacacuaug

SEQ ID NO: 236116 - RNA, 32 nt, Human
uccugccauccacacuaugagcauuuugaaau

SEQ ID NO: 236117 - RNA, 32 nt, Human
uccugccaucccugcacacagccuggggagaa

SEQ ID NO: 236118 - RNA, 32 nt, Human
uccugccauucuucuguggggcgggcuuccca

SEQ ID NO: 236119 - RNA, 32 nt, Human
uccugccauuucuccccucucuuccuucaucu

SEQ ID NO: 236120 - RNA, 32 nt, Human
uccugcccaagugacagcugcggcagccccuc

SEQ ID NO: 236121 - RNA, 32 nt, Human
uccugcccaaguggacccagcggcaaagguga

SEQ ID NO: 236122 - RNA, 32 nt, Human
uccugcccacaaagaacucacagucugauuag

SEQ ID NO: 236123 - RNA, 18 nt, Human
uccugcccacagcgcccu

SEQ ID NO: 236124 - RNA, 23 nt, Human
uccugcccaccaggaaccugcuu

SEQ ID NO: 236125 - RNA, 32 nt, Human
uccugcccaccaggaaccugcuuuaguggggg

SEQ ID NO: 236126 - RNA, 32 nt, Human
uccugcccacucucugcuucaggcuggagcug

SEQ ID NO: 236127 - RNA, 32 nt, Human
uccugcccagauguggaagacugaggccuguu

SEQ ID NO: 236128 - RNA, 32 nt, Human
uccugcccagcaccugguggccucuauaugcc

SEQ ID NO: 236129 - RNA, 32 nt, Human
uccugcccagccaggccgcgcaggcagaaggg

SEQ ID NO: 236130 - RNA, 32 nt, Human
uccugcccaugaggaugaggacaggaagccag

SEQ ID NO: 236131 - RNA, 32 nt, Human
uccugccccacacaccugcuccuucccugggc

SEQ ID NO: 236132 - RNA, 19 nt, Human
uccugccccacagcccugc

SEQ ID NO: 236133 - RNA, 32 nt, Human
uccugccccacugugccugggcccauaaacaa

SEQ ID NO: 236134 - RNA, 32 nt, Human
uccugccccacugugggccauuuccagaagug

SEQ ID NO: 236135 - RNA, 32 nt, Human
uccugccccagccuccugaguagcugggauua

SEQ ID NO: 236136 - RNA, 21 nt, Human
uccugccccagccuccugucu

SEQ ID NO: 236137 - RNA, 32 nt, Human
uccugccccagccucuugaguggcugggauug

SEQ ID NO: 236138 - RNA, 32 nt, Human
uccugccccaggauuuagaucuuggcuacugu

SEQ ID NO: 236139 - RNA, 21 nt, Human
uccugcccccaagacugcucu

SEQ ID NO: 236140 - RNA, 21 nt, Human
uccugcccccaaggaggcagc

SEQ ID NO: 236141 - RNA, 22 nt, Human
uccugcccccacagcugcugcu

SEQ ID NO: 236142 - RNA, 21 nt, Human
uccugcccccagcucccuguu

SEQ ID NO: 236143 - RNA, 20 nt, Human
uccugcccccagcugcagcu

SEQ ID NO: 236144 - RNA, 19 nt, Human
uccugcccccaggcccugc

SEQ ID NO: 236145 - RNA, 19 nt, Human
uccugcccccggguccugc

SEQ ID NO: 236146 - RNA, 21 nt, Human
uccugcccccugcacccugcu

SEQ ID NO: 236147 - RNA, 22 nt, Human
uccugccccgaaagugcugacu

SEQ ID NO: 236148 - RNA, 22 nt, Human
uccugccccgaggaagugcugu

SEQ ID NO: 236149 - RNA, 19 nt, Human
uccugccccgcggcgcugc

SEQ ID NO: 236150 - RNA, 20 nt, Human
uccugccccguagugccccu

SEQ ID NO: 236151 - RNA, 32 nt, Human
uccugccccgugagcugggccuagccacucac

SEQ ID NO: 236152 - RNA, 32 nt, Human
uccugccccguggacuuaggggagcaccacgc

SEQ ID NO: 236153 - RNA, 32 nt, Human
uccugccccuccugcugugggaugcugagcac

SEQ ID NO: 236154 - RNA, 32 nt, Human
uccugccccucucugcccccucccucuguccu

SEQ ID NO: 236155 - RNA, 32 nt, Human
uccugccccuggcugcuguuucccagccuuuc

SEQ ID NO: 236156 - RNA, 32 nt, Human
uccugccccuggcugugcucuacaccuuagug

SEQ ID NO: 236157 - RNA, 32 nt, Human
uccugccccuuccucuaucccuagggcucagu

SEQ ID NO: 236158 - RNA, 32 nt, Human
uccugccccuucucagaaccaguccccugcug

SEQ ID NO: 236159 - RNA, 32 nt, Human
uccugccccuucugcccugccuugccccugca

SEQ ID NO: 236160 - RNA, 32 nt, Human
uccugcccggggucccuaugcccaguccccgu

SEQ ID NO: 236161 - RNA, 32 nt, Human
uccugcccguuccccugccccugggccgccag

SEQ ID NO: 236162 - RNA, 32 nt, Human
uccugcccucaaggcacuuacaguccaguuuc

SEQ ID NO: 236163 - RNA, 32 nt, Human
uccugcccucaaguggcuuccaccucaagugg

SEQ ID NO: 236164 - RNA, 32 nt, Human
uccugcccucacugcauucccucaccucuacc

SEQ ID NO: 236165 - RNA, 24 nt, Human
uccugcccucaggugauccaccca

SEQ ID NO: 236166 - RNA, 32 nt, Human
uccugcccucauugccuccaauccggacucuu

SEQ ID NO: 236167 - RNA, 26 nt, Human
uccugcccuccccaccuugugaccca

SEQ ID NO: 236168 - RNA, 32 nt, Human
uccugcccucccccaacccucccuuggcggcu

SEQ ID NO: 236169 - RNA, 32 nt, Human
uccugcccuccccuucacucccucccuggcuc

SEQ ID NO: 236170 - RNA, 32 nt, Human
uccugcccucccuucuggaggcuggaggggag

SEQ ID NO: 236171 - RNA, 32 nt, Human
uccugcccuccuccucuucucagggcacugca

SEQ ID NO: 236172 - RNA, 32 nt, Human
uccugcccuccugugucucaggcccguuuucc

SEQ ID NO: 236173 - RNA, 31 nt, Human
uccugcccucugccugggccucggucccucc

SEQ ID NO: 236174 - RNA, 32 nt, Human
uccugcccucuuggaguuuauaugacaugagc

SEQ ID NO: 236175 - RNA, 32 nt, Human
uccugcccugauucaggagauccccaucuauu

SEQ ID NO: 236176 - RNA, 32 nt, Human
uccugcccugcagcacgcggccuugucugggu

SEQ ID NO: 236177 - RNA, 32 nt, Human
uccugcccugcagggccuuucuacccgugucc

SEQ ID NO: 236178 - RNA, 32 nt, Human
uccugcccugccuuccuccugccuguagccca

SEQ ID NO: 236179 - RNA, 32 nt, Human
uccugcccugcucucagccauagugaaggacc

SEQ ID NO: 236180 - RNA, 32 nt, Human
uccugcccuggugcugccaguuggguggagau

SEQ ID NO: 236181 - RNA, 32 nt, Human
uccugcccuugaacccccucccugucccaggg

SEQ ID NO: 236182 - RNA, 32 nt, Human
uccugcccuugggagcacagacaggcuccuag

SEQ ID NO: 236183 - RNA, 32 nt, Human
uccugccgaggucuccggccccuucccccuuc

SEQ ID NO: 236184 - RNA, 32 nt, Human
uccugccgcccaggcaggaugucagaugagga

SEQ ID NO: 236185 - RNA, 32 nt, Human
uccugccgcccaggccuuggagguacugcugc

SEQ ID NO: 236186 - RNA, 32 nt, Human
uccugccgcccgagguggcugccuggagcccc

SEQ ID NO: 236187 - RNA, 23 nt, Human
uccugccgccgcccgggacccga

SEQ ID NO: 236188 - RNA, 20 nt, Human
uccugccgccgccgccgccg

SEQ ID NO: 236189 - RNA, 32 nt, Human
uccugccgcugcccuccacgccuccaaucccc

SEQ ID NO: 236190 - RNA, 20 nt, Human
uccugccgggcucacggcca

SEQ ID NO: 236191 - RNA, 32 nt, Human
uccugccggugggaguggcugcauuugaacca

SEQ ID NO: 236192 - RNA, 32 nt, Human
uccugccgucuguccuggaacacauugcucca

SEQ ID NO: 236193 - RNA, 32 nt, Human
uccugccgugcccugccugagcucucagggcc

SEQ ID NO: 236194 - RNA, 32 nt, Human
uccugccguggaguuugcugggggagacacau

SEQ ID NO: 236195 - RNA, 32 nt, Human
uccugccguugcuuccuauccugggcuuggaa

SEQ ID NO: 236196 - RNA, 32 nt, Human
uccugccuaacuuuucauugaaaugucuagua

SEQ ID NO: 236197 - RNA, 20 nt, Human
uccugccuacuacgugcugc

SEQ ID NO: 236198 - RNA, 32 nt, Human
uccugccuaggugacagagcaagacuccgccu

SEQ ID NO: 236199 - RNA, 27 nt, Human
uccugccuagguuucuaccuuuucucu

SEQ ID NO: 236200 - RNA, 32 nt, Human
uccugccuauaaucccagcacuuugggaggcu

SEQ ID NO: 236201 - RNA, 32 nt, Human
uccugccuaucuuuacaauaaaacucuccuua

SEQ ID NO: 236202 - RNA, 32 nt, Human
uccugccucacaggugaagauuaaagagacaa

SEQ ID NO: 236203 - RNA, 32 nt, Human
uccugccucagacaccagaguagcugggacca

SEQ ID NO: 236204 - RNA, 18 nt, Human
uccugccucagccaccca

SEQ ID NO: 236205 - RNA, 32 nt, Human
uccugccucagccucaugaauagcugggauua

SEQ ID NO: 236206 - RNA, 32 nt, Human
uccugccucagccucaugaguagcugggacua

SEQ ID NO: 236207 - RNA, 32 nt, Human
uccugccucagccucaugaguagcugggauua

SEQ ID NO: 236208 - RNA, 22 nt, Human
uccugccucagccucccaagca

SEQ ID NO: 236209 - RNA, 32 nt, Human
uccugccucagccuccccaguagcugugauua

SEQ ID NO: 236210 - RNA, 32 nt, Human
uccugccucagccucuugaauagcugggauua

SEQ ID NO: 236211 - RNA, 32 nt, Human
uccugccucagccucuugaguagcuagguaca

SEQ ID NO: 236212 - RNA, 32 nt, Human
uccugccucagccucuugaguagcugggacua

SEQ ID NO: 236213 - RNA, 32 nt, Human
uccugccucagccucuugaguagcugggauua

SEQ ID NO: 236214 - RNA, 32 nt, Human
uccugccucagccucuugaguggcugggauug

SEQ ID NO: 236215 - RNA, 32 nt, Human
uccugccucagggcuuuucggagccuggaucc

SEQ ID NO: 236216 - RNA, 32 nt, Human
uccugccucaugucucaaggcagcagcuccuc

SEQ ID NO: 236217 - RNA, 32 nt, Human
uccugccuccaaagccugccucaugucucggc

SEQ ID NO: 236218 - RNA, 23 nt, Human
uccugccuccacccaguucccca

SEQ ID NO: 236219 - RNA, 32 nt, Human
uccugccuccacccucuuucucgccgcgaagg

SEQ ID NO: 236220 - RNA, 32 nt, Human
uccugccucccuauuugccaggcuuucauuuc

SEQ ID NO: 236221 - RNA, 32 nt, Human
uccugccucccucuccccucuccaccaugggc

SEQ ID NO: 236222 - RNA, 32 nt, Human
uccugccucccugccucagccugggaccugag

SEQ ID NO: 236223 - RNA, 32 nt, Human
uccugccucccuuccccugccugcugcugggg

SEQ ID NO: 236224 - RNA, 23 nt, Human
uccugccuccucucucuccuccc

SEQ ID NO: 236225 - RNA, 17 nt, Human
uccugccuccugagaag

SEQ ID NO: 236226 - RNA, 20 nt, Human
uccugccuccugccccagca

SEQ ID NO: 236227 - RNA, 32 nt, Human
uccugccuccugccuccccugccugccuggga

SEQ ID NO: 236228 - RNA, 32 nt, Human
uccugccuccuucacauuuccuccccagcuuu

SEQ ID NO: 236229 - RNA, 32 nt, Human
uccugccucgcagcaggcuuuccaggcccagc

SEQ ID NO: 236230 - RNA, 32 nt, Human
uccugccucgcguguacauacaucacgggccc

SEQ ID NO: 236231 - RNA, 32 nt, Human
uccugccucuacugucucuccauagcccuggu

SEQ ID NO: 236232 - RNA, 32 nt, Human
uccugccucuccgccaccuccaccgcggcuua

SEQ ID NO: 236233 - RNA, 32 nt, Human
uccugccucucucccaacauguuuccagcaag

SEQ ID NO: 236234 - RNA, 32 nt, Human
uccugccucugaagccacaaaaugcuuuagac

SEQ ID NO: 236235 - RNA, 32 nt, Human
uccugccucugccucccagccccucacccagc

SEQ ID NO: 236236 - RNA, 32 nt, Human
uccugccucuggaagguggguggggcccugca

SEQ ID NO: 236237 - RNA, 32 nt, Human
uccugccucugugccccugccucucccugugu

SEQ ID NO: 236238 - RNA, 32 nt, Human
uccugccugacucuugguccuucuggcaggga

SEQ ID NO: 236239 - RNA, 32 nt, Human
uccugccugcaaccccucuccccagcuuggcg

SEQ ID NO: 236240 - RNA, 20 nt, Human
uccugccugcagagcgcugc

SEQ ID NO: 236241 - RNA, 32 nt, Human
uccugccugcaggugauucuaugggacaggca

SEQ ID NO: 236242 - RNA, 32 nt, Human
uccugccugcauuuccagagcuggugccaggg

SEQ ID NO: 236243 - RNA, 19 nt, Human
uccugccugcccugagcca

SEQ ID NO: 236244 - RNA, 32 nt, Human
uccugccugccgccucucuguacaguaacgcc

SEQ ID NO: 236245 - RNA, 32 nt, Human
uccugccugccuguaccccgccaacagcuuca

SEQ ID NO: 236246 - RNA, 32 nt, Human
uccugccugccugucugccugugaccugugua

SEQ ID NO: 236247 - RNA, 32 nt, Human
uccugccugccuuauccuugggccaucagccc

SEQ ID NO: 236248 - RNA, 32 nt, Human
uccugccugcgcccucugcccaggacucgucu

SEQ ID NO: 236249 - RNA, 20 nt, Human
uccugccugcggaccagaug

SEQ ID NO: 236250 - RNA, 32 nt, Human
uccugccugcucauuucccagcccucuucuuc

SEQ ID NO: 236251 - RNA, 32 nt, Human
uccugccugcucucccugcguugccuagggua

SEQ ID NO: 236252 - RNA, 32 nt, Human
uccugccuggccaggcagaucugugccccaug

SEQ ID NO: 236253 - RNA, 22 nt, Human
uccugccuggcccugcucccca

SEQ ID NO: 236254 - RNA, 23 nt, Human
uccugccugggaggggaaugcag

SEQ ID NO: 236255 - RNA, 32 nt, Human
uccugccugggugacaaagugagacucugucu

SEQ ID NO: 236256 - RNA, 24 nt, Human
uccugccugggugacacagcgaga

SEQ ID NO: 236257 - RNA, 32 nt, Human
uccugccugggugacagaagagacccugucuc

SEQ ID NO: 236258 - RNA, 24 nt, Human
uccugccugggugacagagcgaga

SEQ ID NO: 236259 - RNA, 21 nt, Human
uccugccugguggugucccca

SEQ ID NO: 236260 - RNA, 24 nt, Human
uccugccugguugacagagugaga

SEQ ID NO: 236261 - RNA, 32 nt, Human
uccugccuguaaucccagcacuuugggaggcc

SEQ ID NO: 236262 - RNA, 32 nt, Human
uccugccuguaaucccaucacuuugggaggcu

SEQ ID NO: 236263 - RNA, 32 nt, Human
uccugccuguaaucgcagcacuuugggaggcu

SEQ ID NO: 236264 - RNA, 31 nt, Human
uccugccuguccccauggccuguguccccac

SEQ ID NO: 236265 - RNA, 32 nt, Human
uccugccuguucccccacaccugccaggauau

SEQ ID NO: 236266 - RNA, 32 nt, Human
uccugccuguucuggcuccucugcucccacgc

SEQ ID NO: 236267 - RNA, 21 nt, Human
uccugccuuaccccugcugcu

SEQ ID NO: 236268 - RNA, 32 nt, Human
uccugccuuccauagcugucauggccucaccu

SEQ ID NO: 236269 - RNA, 32 nt, Human
uccugccuuccucccuuuucccaguccacuuc

SEQ ID NO: 236270 - RNA, 32 nt, Human
uccugccuucgccgcccugcccuccgccgcuc

SEQ ID NO: 236271 - RNA, 32 nt, Human
uccugccuugcacuugcagccugaagcggaga

SEQ ID NO: 236272 - RNA, 32 nt, Human
uccugccuuggcagaggaggaggagucaaggg

SEQ ID NO: 236273 - RNA, 32 nt, Human
uccugccuuggcugacuggguuccuggaccau

SEQ ID NO: 236274 - RNA, 32 nt, Human
uccugccuuugaggagcucacuguuuaguugg

SEQ ID NO: 236275 - RNA, 32 nt, Human
uccugcgaagcuccucccagccggucucucug

SEQ ID NO: 236276 - RNA, 32 nt, Human
uccugcgaccuugcaaccucaccuuccugugg

SEQ ID NO: 236277 - RNA, 32 nt, Human
uccugcgacgcugucuguuccugccuucugug

SEQ ID NO: 236278 - RNA, 32 nt, Human
uccugcgaucgaaggggacuugagacucaccg

SEQ ID NO: 236279 - RNA, 32 nt, Human
uccugcgaugaauccggcccuaggcaaccaga

SEQ ID NO: 236280 - RNA, 32 nt, Human
uccugcgcacugccuguuccuccuggguguca

SEQ ID NO: 236281 - RNA, 19 nt, Human
uccugcgccaaucaccacc

SEQ ID NO: 236282 - RNA, 32 nt, Human
uccugcgcccccucccccuucccggguucuga

SEQ ID NO: 236283 - RNA, 23 nt, Human
uccugcgcgcacacccccaggag

SEQ ID NO: 236284 - RNA, 22 nt, Human
uccugcgcgccugggccgugaa

SEQ ID NO: 236285 - RNA, 22 nt, Human
uccugcgcggacgacccuggaa

SEQ ID NO: 236286 - RNA, 21 nt, Human
uccugcgcggggcccccggga

SEQ ID NO: 236287 - RNA, 32 nt, Human
uccugcgcucaggugauccuccagcuucagcu

SEQ ID NO: 236288 - RNA, 32 nt, Human
uccugcgcugcagugagaccugggugaaaauc

SEQ ID NO: 236289 - RNA, 32 nt, Human
uccugcgcuggcgcccccaccuggugaugccg

SEQ ID NO: 236290 - RNA, 32 nt, Human
uccugcggccaaaucugucucccuucaugggc

SEQ ID NO: 236291 - RNA, 32 nt, Human
uccugcggccaugggccaggguugggcuacug

SEQ ID NO: 236292 - RNA, 32 nt, Human
uccugcggccggcacgcgguucccagggggcc

SEQ ID NO: 236293 - RNA, 32 nt, Human
uccugcggcuuuggugacagugugcagacagc

SEQ ID NO: 236294 - RNA, 32 nt, Human
uccugcgggcuaggcagccaggagcucugucc

SEQ ID NO: 236295 - RNA, 32 nt, Human
uccugcggggguagcagagagcucggcccacc

SEQ ID NO: 236296 - RNA, 32 nt, Human
uccugcgucaucuguguggccacucgcaggag

SEQ ID NO: 236297 - RNA, 32 nt, Human
uccugcguccugcccauguggaaagugaccac

SEQ ID NO: 236298 - RNA, 32 nt, Human
uccugcgucuuucugccugagcuuguucuuug

SEQ ID NO: 236299 - RNA, 21 nt, Human
uccugcgugcagcucacggcc

SEQ ID NO: 236300 - RNA, 20 nt, Human
uccugcgugcauccccggga

SEQ ID NO: 236301 - RNA, 32 nt, Human
uccugcguuucuuccuccugcccugggucaau

SEQ ID NO: 236302 - RNA, 32 nt, Human
uccugcuaaaaauacaaaaauuagcugggcuu

SEQ ID NO: 236303 - RNA, 32 nt, Human
uccugcuaccagucugugccuuagaggucguu

SEQ ID NO: 236304 - RNA, 32 nt, Human
uccugcuacuuagguacugggaaacaaugcuu

SEQ ID NO: 236305 - RNA, 32 nt, Human
uccugcuagggcugcacuguccuggguguugg

SEQ ID NO: 236306 - RNA, 25 nt, Human
uccugcuauaaguucuuuucuugga

SEQ ID NO: 236307 - RNA, 32 nt, Human
uccugcucacaucugaaucuccuuguuguucu

SEQ ID NO: 236308 - RNA, 32 nt, Human
uccugcucacccagcuugcuguaguggaagag

SEQ ID NO: 236309 - RNA, 32 nt, Human
uccugcucaccugggccacccucucuccagga

SEQ ID NO: 236310 - RNA, 32 nt, Human
uccugcucaccuuuugcugccugcucauggca

SEQ ID NO: 236311 - RNA, 32 nt, Human
uccugcucacucaagcaaaagcagccucuggc

SEQ ID NO: 236312 - RNA, 32 nt, Human
uccugcucaugagggcagacaggccuuuccag

SEQ ID NO: 236313 - RNA, 32 nt, Human
uccugcuccagccuuccauucccuugugugac

SEQ ID NO: 236314 - RNA, 23 nt, Human
uccugcuccagcuucccuguccu

SEQ ID NO: 236315 - RNA, 21 nt, Human
uccugcuccccaccuccuguc

SEQ ID NO: 236316 - RNA, 32 nt, Human
uccugcucccgcgauguggaagugucacacgg

SEQ ID NO: 236317 - RNA, 32 nt, Human
uccugcucccuguguucccacccuccaguguu

SEQ ID NO: 236318 - RNA, 32 nt, Human
uccugcuccgacaccaccuccacaggggaagc

SEQ ID NO: 236319 - RNA, 19 nt, Human
uccugcuccgccucugacc

SEQ ID NO: 236320 - RNA, 25 nt, Human
uccugcuccucagcucuccacccca

SEQ ID NO: 236321 - RNA, 32 nt, Human
uccugcuccucuacgcugccucaggcccccag

SEQ ID NO: 236322 - RNA, 32 nt, Human
uccugcuccucugcaaccugccccucuuuuuc

SEQ ID NO: 236323 - RNA, 32 nt, Human
uccugcucgcaaccucgcgguuccuggggugc

SEQ ID NO: 236324 - RNA, 24 nt, Human
uccugcucgccgcaccuccgggag

SEQ ID NO: 236325 - RNA, 32 nt, Human
uccugcucgugcaggguggccccaagggccca

SEQ ID NO: 236326 - RNA, 32 nt, Human
uccugcucuaagggugucacugccuggcaucc

SEQ ID NO: 236327 - RNA, 32 nt, Human
uccugcucucaagugauccuccugccucagcc

SEQ ID NO: 236328 - RNA, 32 nt, Human
uccugcucucagagguggaagagcaaggcugg

SEQ ID NO: 236329 - RNA, 32 nt, Human
uccugcucucauccuccccugcccugauguca

SEQ ID NO: 236330 - RNA, 32 nt, Human
uccugcucucccaggagcagugaguugugagu

SEQ ID NO: 236331 - RNA, 32 nt, Human
uccugcucucccaugaggguuauugaaucauu

SEQ ID NO: 236332 - RNA, 32 nt, Human
uccugcucuccuccgcagcaucauggcggagc

SEQ ID NO: 236333 - RNA, 32 nt, Human
uccugcucuccuccguggacauuucauuacca

SEQ ID NO: 236334 - RNA, 32 nt, Human
uccugcucucuccccucuuuugugaagaaagc

SEQ ID NO: 236335 - RNA, 32 nt, Human
uccugcucugcuggccugagccccaggccuug

SEQ ID NO: 236336 - RNA, 22 nt, Human
uccugcucugggaaugcugcuu

SEQ ID NO: 236337 - RNA, 24 nt, Human
uccugcucuuauaaauaaaccuua

SEQ ID NO: 236338 - RNA, 32 nt, Human
uccugcucuuuagaaaaagcagucuuugugcu

SEQ ID NO: 236339 - RNA, 32 nt, Human
uccugcucuuuccaaaaagccaggugccgccg

SEQ ID NO: 236340 - RNA, 32 nt, Human
uccugcucuuucuccccgcugugccuccccca

SEQ ID NO: 236341 - RNA, 21 nt, Human
uccugcucuuugcuguugccu

SEQ ID NO: 236342 - RNA, 32 nt, Human
uccugcugaaccacuccagccugcugcgugca

SEQ ID NO: 236343 - RNA, 32 nt, Human
uccugcugaaggagggaaggagggagaggaag

SEQ ID NO: 236344 - RNA, 32 nt, Human
uccugcugaaguaucuccauguaaucacaaua

SEQ ID NO: 236345 - RNA, 32 nt, Human
uccugcugaccugcacuguccaggccucacca

SEQ ID NO: 236346 - RNA, 32 nt, Human
uccugcugagcucuguucucuccagcaccucc

SEQ ID NO: 236347 - RNA, 19 nt, Human
uccugcugaggaccagcug

SEQ ID NO: 236348 - RNA, 32 nt, Human
uccugcugaggcggagacugcagugagcugag

SEQ ID NO: 236349 - RNA, 32 nt, Human
uccugcugagggagacaccagcaagccucuug

SEQ ID NO: 236350 - RNA, 32 nt, Human
uccugcugagguggagacugcagugagcugag

SEQ ID NO: 236351 - RNA, 32 nt, Human
uccugcugagguggagauugcagugaacuaag

SEQ ID NO: 236352 - RNA, 32 nt, Human
uccugcugcaacaucuucuccuccaggaaggc

SEQ ID NO: 236353 - RNA, 32 nt, Human
uccugcugcaccacugcccugccuucgggcug

SEQ ID NO: 236354 - RNA, 32 nt, Human
uccugcugcacuccuccgccaccgggcuaggu

SEQ ID NO: 236355 - RNA, 32 nt, Human
uccugcugcacuccugucuugccaugcacguc

SEQ ID NO: 236356 - RNA, 19 nt, Human
uccugcugcagggugcugc

SEQ ID NO: 236357 - RNA, 32 nt, Human
uccugcugcccauccaguugggaagccaugau

SEQ ID NO: 236358 - RNA, 32 nt, Human
uccugcugcccuuuaugcugcucucccagggc

SEQ ID NO: 236359 - RNA, 32 nt, Human
uccugcugccgcucugcagccuggaccugugg

SEQ ID NO: 236360 - RNA, 22 nt, Human
uccugcugccggccuccugccu

SEQ ID NO: 236361 - RNA, 32 nt, Human
uccugcugccggccuccugccugggccugccu

SEQ ID NO: 236362 - RNA, 22 nt, Human
uccugcugccucccuccugucu

SEQ ID NO: 236363 - RNA, 24 nt, Human
uccugcugccuggguccuggcccu

SEQ ID NO: 236364 - RNA, 21 nt, Human
uccugcugccuucagcugccu

SEQ ID NO: 236365 - RNA, 20 nt, Human
uccugcugccuucccacccu

SEQ ID NO: 236366 - RNA, 32 nt, Human
uccugcugcgcauuacagaaagcuuuuaacug

SEQ ID NO: 236367 - RNA, 32 nt, Human
uccugcugcggaggaagagggggaagaggccg

SEQ ID NO: 236368 - RNA, 32 nt, Human
uccugcugcucuggagugcaagcccucuucug

SEQ ID NO: 236369 - RNA, 32 nt, Human
uccugcugcugcauuuuaaagcacuuuuauag

SEQ ID NO: 236370 - RNA, 32 nt, Human
uccugcugcugccucuaccgcugcggcuaccg

SEQ ID NO: 236371 - RNA, 32 nt, Human
uccugcugcuucaccccuccccuagccugccg

SEQ ID NO: 236372 - RNA, 32 nt, Human
uccugcugcuucccagcucagaacauauacug

SEQ ID NO: 236373 - RNA, 32 nt, Human
uccugcuggacccgcaagccaccagcuauuuc

SEQ ID NO: 236374 - RNA, 32 nt, Human
uccugcuggcccucauugccuccgggggcuac

SEQ ID NO: 236375 - RNA, 29 nt, Human
uccugcuggcugcagcuggcccucgggga

SEQ ID NO: 236376 - RNA, 32 nt, Human
uccugcugggagagguaaguugaaguagcuga

SEQ ID NO: 236377 - RNA, 32 nt, Human
uccugcugggcagaggagcagcugggauuccc

SEQ ID NO: 236378 - RNA, 21 nt, Human
uccugcugggccgcuuccugc

SEQ ID NO: 236379 - RNA, 32 nt, Human
uccugcugguggggcucucagcauaaccgccc

SEQ ID NO: 236380 - RNA, 32 nt, Human
uccugcuguagugccuucugcgccaggcccgg

SEQ ID NO: 236381 - RNA, 32 nt, Human
uccugcuguccccuccccuucaggcccccgga

SEQ ID NO: 236382 - RNA, 20 nt, Human
uccugcugucccuccaccuc

SEQ ID NO: 236383 - RNA, 22 nt, Human
uccugcugucucuguccugucc

SEQ ID NO: 236384 - RNA, 21 nt, Human
uccugcugucuucucccuccu

SEQ ID NO: 236385 - RNA, 20 nt, Human
uccugcugucuucuccuucc

SEQ ID NO: 236386 - RNA, 32 nt, Human
uccugcugugccaggcccaugggcagugcagg

SEQ ID NO: 236387 - RNA, 32 nt, Human
uccugcuguggaccagcuacuccugccugagg

SEQ ID NO: 236388 - RNA, 32 nt, Human
uccugcugugugagcccuucagcugcagagcg

SEQ ID NO: 236389 - RNA, 32 nt, Human
uccugcuguuccugcugauguaccuguucacg

SEQ ID NO: 236390 - RNA, 32 nt, Human
uccugcuguugguaccuggccuagcuggaagg

SEQ ID NO: 236391 - RNA, 32 nt, Human
uccugcuuaaagauucuaguucucaaccucuc

SEQ ID NO: 236392 - RNA, 32 nt, Human
uccugcuucagccucaugaguagcugggacua

SEQ ID NO: 236393 - RNA, 32 nt, Human
uccugcuuccagcugcugcagcgcgccuucgc

SEQ ID NO: 236394 - RNA, 32 nt, Human
uccugcuucccacccccugccugcccagccug

SEQ ID NO: 236395 - RNA, 24 nt, Human
uccugcuuccuuucucuccugccu

SEQ ID NO: 236396 - RNA, 32 nt, Human
uccugcuucgcgccugcugcucugccccaacg

SEQ ID NO: 236397 - RNA, 32 nt, Human
uccugcuucucucugcacgucucccucauucu

SEQ ID NO: 236398 - RNA, 32 nt, Human
uccugcuucuggccuuguaucuugcauucaca

SEQ ID NO: 236399 - RNA, 32 nt, Human
uccugcuucuuuccuuucccuuccagagguaa

SEQ ID NO: 236400 - RNA, 22 nt, Human
uccugcuucuuuucuccucccu

SEQ ID NO: 236401 - RNA, 32 nt, Human
uccugcuugcuacuguuuugugguguugaaaa

SEQ ID NO: 236402 - RNA, 32 nt, Human
uccugcuuggcagaagagaaacugagucacca

SEQ ID NO: 236403 - RNA, 24 nt, Human
uccugcuugggcgacagagugaga

SEQ ID NO: 236404 - RNA, 32 nt, Human
uccugcuuuaucugcaucauccacccacagag

SEQ ID NO: 236405 - RNA, 32 nt, Human
uccugcuuuccuacucccuugaucccaaacuc

SEQ ID NO: 236406 - RNA, 21 nt, Human
uccugcuuuuaucuucugccu

SEQ ID NO: 236407 - RNA, 32 nt, Human
uccugcuuuucuacccuacccugccggugagg

SEQ ID NO: 236408 - RNA, 17 nt, Human
uccugcuuuucuuuccu

SEQ ID NO: 236409 - RNA, 32 nt, Human
uccuggaaauaacaugugagaaguacuuagaa

SEQ ID NO: 236410 - RNA, 32 nt, Human
uccuggaaaugagaccugguggaauauuauuu

SEQ ID NO: 236411 - RNA, 23 nt, Human
uccuggaaccaggaauucauucu

SEQ ID NO: 236412 - RNA, 24 nt, Human
uccuggaaccauaacuguaaguuc

SEQ ID NO: 236413 - RNA, 21 nt, Human
uccuggaacucugccaccuca

SEQ ID NO: 236414 - RNA, 32 nt, Human
uccuggaagaagcaggagggagaguggcgcug

SEQ ID NO: 236415 - RNA, 32 nt, Human
uccuggaagagaggugcugauuggccccaagu

SEQ ID NO: 236416 - RNA, 22 nt, Human
uccuggaagccaucugcugcuu

SEQ ID NO: 236417 - RNA, 32 nt, Human
uccuggaaggagaaccagccacccugaggacc

SEQ ID NO: 236418 - RNA, 32 nt, Human
uccuggaaggagaagggaggaacugggccugg

SEQ ID NO: 236419 - RNA, 32 nt, Human
uccuggaaguugaagguggagauggcccuugu

SEQ ID NO: 236420 - RNA, 22 nt, Human
uccuggaauaaaauguggcucu

SEQ ID NO: 236421 - RNA, 23 nt, Human
uccuggaauccagagccaagugg

SEQ ID NO: 236422 - RNA, 18 nt, Human
uccuggaaucccaaggcc

SEQ ID NO: 236423 - RNA, 32 nt, Human
uccuggacaaaccuuuccuuccugguggugga

SEQ ID NO: 236424 - RNA, 19 nt, Human
uccuggacacccccucuca

SEQ ID NO: 236425 - RNA, 32 nt, Human
uccuggacacuguacugugccucccaguuuac

SEQ ID NO: 236426 - RNA, 22 nt, Human
uccuggacauccucuucugcuu

SEQ ID NO: 236427 - RNA, 32 nt, Human
uccuggaccagcugugcuuuugccuggucauc

SEQ ID NO: 236428 - RNA, 32 nt, Human
uccuggaccucuuggcccccagccccuucccc

SEQ ID NO: 236429 - RNA, 23 nt, Human
uccuggaccuuucuucccuuccc

SEQ ID NO: 236430 - RNA, 32 nt, Human
uccuggacuaugaagcuggagaugucuccuuc

SEQ ID NO: 236431 - RNA, 32 nt, Human
uccuggacucaagcgauucuccugccucaggc

SEQ ID NO: 236432 - RNA, 32 nt, Human
uccuggacucaagugaucacccuccucagccu

SEQ ID NO: 236433 - RNA, 32 nt, Human
uccuggacucaagugauccgcccaccucggcc

SEQ ID NO: 236434 - RNA, 32 nt, Human
uccuggacucaagugauccucacaccucagcc

SEQ ID NO: 236435 - RNA, 32 nt, Human
uccuggacucaagugauccucccaccucagcc

SEQ ID NO: 236436 - RNA, 32 nt, Human
uccuggacucaagugaucggcccaccuuguca

SEQ ID NO: 236437 - RNA, 32 nt, Human
uccuggacucacaugauccucccaccuuggcc

SEQ ID NO: 236438 - RNA, 32 nt, Human
uccuggacugcgucacagcccaggucaaggag

SEQ ID NO: 236439 - RNA, 32 nt, Human
uccuggacuggcccaccugccugccacaugcc

SEQ ID NO: 236440 - RNA, 32 nt, Human
uccuggacuuccgggccucgauuucuuccgca

SEQ ID NO: 236441 - RNA, 32 nt, Human
uccuggacuuccucuugcugcaggacccggcu

SEQ ID NO: 236442 - RNA, 21 nt, Human
uccuggagaaaggggacucag

SEQ ID NO: 236443 - RNA, 32 nt, Human
uccuggagaaugcugcaugugagacccaagga

SEQ ID NO: 236444 - RNA, 22 nt, Human
uccuggagacaaaaggaguguu

SEQ ID NO: 236445 - RNA, 25 nt, Human
uccuggagacaagagcuggagacug

SEQ ID NO: 236446 - RNA, 22 nt, Human
uccuggagacagcaagaagcug

SEQ ID NO: 236447 - RNA, 21 nt, Human
uccuggagacagggggcggug

SEQ ID NO: 236448 - RNA, 23 nt, Human
uccuggagaccagccuuuugcuu

SEQ ID NO: 236449 - RNA, 32 nt, Human
uccuggagacccggaagcagauuacguggagu

SEQ ID NO: 236450 - RNA, 32 nt, Human
uccuggagacuggugcccugagcuccaaccag

SEQ ID NO: 236451 - RNA, 22 nt, Human
uccuggagacuguggcaggggc

SEQ ID NO: 236452 - RNA, 32 nt, Human
uccuggagagagaaggggagaagaauacuuuu

SEQ ID NO: 236453 - RNA, 22 nt, Human
uccuggagagccaggguggcug

SEQ ID NO: 236454 - RNA, 23 nt, Human
uccuggagaggcagauguguccu

SEQ ID NO: 236455 - RNA, 32 nt, Human
uccuggagaggcagauguguccugaggaacag

SEQ ID NO: 236456 - RNA, 21 nt, Human
uccuggagaggggagggccug

SEQ ID NO: 236457 - RNA, 32 nt, Human
uccuggagaguuucccaggguugugauaugug

SEQ ID NO: 236458 - RNA, 32 nt, Human
uccuggagauaccuuccccuccuggguacauc

SEQ ID NO: 236459 - RNA, 32 nt, Human
uccuggagauggcugaaaagccaguccagucu

SEQ ID NO: 236460 - RNA, 32 nt, Human
uccuggagauuucaguuacuuaccugcaugug

SEQ ID NO: 236461 - RNA, 32 nt, Human
uccuggagcagcagagcaacaggccugaccca

SEQ ID NO: 236462 - RNA, 24 nt, Human
uccuggagcagcuggaagaugcug

SEQ ID NO: 236463 - RNA, 20 nt, Human
uccuggagcaggccgggugc

SEQ ID NO: 236464 - RNA, 24 nt, Human
uccuggagccacguccagcacaga

SEQ ID NO: 236465 - RNA, 32 nt, Human
uccuggagccacguccagcacagaguggacgg

SEQ ID NO: 236466 - RNA, 21 nt, Human
uccuggagcccccaggagcug

SEQ ID NO: 236467 - RNA, 22 nt, Human
uccuggagcccccaggccgcug

SEQ ID NO: 236468 - RNA, 19 nt, Human
uccuggagcccugcagguc

SEQ ID NO: 236469 - RNA, 22 nt, Human
uccuggagccuccagagggcug

SEQ ID NO: 236470 - RNA, 32 nt, Human
uccuggagccugggcucuaggcugaggguccu

SEQ ID NO: 236471 - RNA, 32 nt, Human
uccuggagccuuugaauaaaaaugcacguagc

SEQ ID NO: 236472 - RNA, 32 nt, Human
uccuggagcguugucuggagguuccagggaca

SEQ ID NO: 236473 - RNA, 32 nt, Human
uccuggagcugcagccugccuggguggcugug

SEQ ID NO: 236474 - RNA, 32 nt, Human
uccuggagcugccaagugagggguuaaagaag

SEQ ID NO: 236475 - RNA, 20 nt, Human
uccuggagcuggccaggugc

SEQ ID NO: 236476 - RNA, 22 nt, Human
uccuggagcuuccuggguacug

SEQ ID NO: 236477 - RNA, 32 nt, Human
uccuggagcuucuuccuuguaguucucaggac

SEQ ID NO: 236478 - RNA, 32 nt, Human
uccuggaggaagcagacaaugaagggagcaga

SEQ ID NO: 236479 - RNA, 32 nt, Human
uccuggaggacaaggcgggugggcaggcuccg

SEQ ID NO: 236480 - RNA, 32 nt, Human
uccuggaggagaaagccaggggccgcuuuggu

SEQ ID NO: 236481 - RNA, 24 nt, Human
uccuggaggagaggcccauggcca

SEQ ID NO: 236482 - RNA, 32 nt, Human
uccuggaggagcaggagguagcaggagaggac

SEQ ID NO: 236483 - RNA, 32 nt, Human
uccuggaggagguggagcugcagcugggacug

SEQ ID NO: 236484 - RNA, 32 nt, Human
uccuggaggagguggcaucaguaaugagccug

SEQ ID NO: 236485 - RNA, 32 nt, Human
uccuggaggcagagguugcagugagcugagau

SEQ ID NO: 236486 - RNA, 32 nt, Human
uccuggaggcagcaggucggguagagugaguu

SEQ ID NO: 236487 - RNA, 32 nt, Human
uccuggaggcaguccucaccucugccucccuc

SEQ ID NO: 236488 - RNA, 24 nt, Human
uccuggagggcaguaaagacgcug

SEQ ID NO: 236489 - RNA, 32 nt, Human
uccuggagggccuggggcugggcagccuggua

SEQ ID NO: 236490 - RNA, 32 nt, Human
uccuggagggccugggucgcguggcccaggag

SEQ ID NO: 236491 - RNA, 32 nt, Human
uccuggagggcuucguggaggaagggagaauu

SEQ ID NO: 236492 - RNA, 32 nt, Human
uccuggaggggcaacuggaggaaaggggcaga

SEQ ID NO: 236493 - RNA, 32 nt, Human
uccuggagguaggagagagggccugaccaggc

SEQ ID NO: 236494 - RNA, 32 nt, Human
uccuggaggugaagguugcagugagccaagau

SEQ ID NO: 236495 - RNA, 32 nt, Human
uccuggagucaagcgauucuccugccucagcc

SEQ ID NO: 236496 - RNA, 32 nt, Human
uccuggagugauaugauccagagcagaguuua

SEQ ID NO: 236497 - RNA, 32 nt, Human
uccuggaguguagagcuugagguguacagaug

SEQ ID NO: 236498 - RNA, 32 nt, Human
uccuggaguucuagucaauucaucucauuaua

SEQ ID NO: 236499 - RNA, 32 nt, Human
uccuggauaaaaugacacccauuuuucuuagg

SEQ ID NO: 236500 - RNA, 32 nt, Human
uccuggaucccuccccauuugccuucuuuauu

SEQ ID NO: 236501 - RNA, 32 nt, Human
uccuggauccugcccugcucucagccauagug

SEQ ID NO: 236502 - RNA, 32 nt, Human
uccuggauccuuacugcucugccuugguggca

SEQ ID NO: 236503 - RNA, 23 nt, Human
uccuggauccuuccccccuucuc

SEQ ID NO: 236504 - RNA, 32 nt, Human
uccuggaugacugccuguguuauuuuguggau

SEQ ID NO: 236505 - RNA, 32 nt, Human
uccuggaugucagggaagcuggaccaccugga

SEQ ID NO: 236506 - RNA, 32 nt, Human
uccuggauuaaacggugcuuguuuucuauaau

SEQ ID NO: 236507 - RNA, 32 nt, Human
uccuggauucaagcgauucuccugccucagcc

SEQ ID NO: 236508 - RNA, 32 nt, Human
uccuggauucaagugaucccccugccucagcc

SEQ ID NO: 236509 - RNA, 32 nt, Human
uccuggauucaagugauccucccaccucagcc

SEQ ID NO: 236510 - RNA, 32 nt, Human
uccuggauucaagugauucuccugccucaacc

SEQ ID NO: 236511 - RNA, 32 nt, Human
uccuggauucaagugauucuccugccugagcc

SEQ ID NO: 236512 - RNA, 32 nt, Human
uccuggauucaaguucagccucccggguggcu

SEQ ID NO: 236513 - RNA, 32 nt, Human
uccuggauucacaccauucuccugccucagcc

SEQ ID NO: 236514 - RNA, 32 nt, Human
uccuggauugaggcuuuccagcaaaggggcug

SEQ ID NO: 236515 - RNA, 32 nt, Human
uccuggauuuugcccucuccuuagcucuuagu

SEQ ID NO: 236516 - RNA, 32 nt, Human
uccuggcaaggcaggcucucacaugccuggac

SEQ ID NO: 236517 - RNA, 32 nt, Human
uccuggcacagacugcaucccauguucccaug

SEQ ID NO: 236518 - RNA, 20 nt, Human
uccuggcaccacuuccugcc

SEQ ID NO: 236519 - RNA, 32 nt, Human
uccuggcacuccuccagggugucaguaacauc

SEQ ID NO: 236520 - RNA, 32 nt, Human
uccuggcacugcaggccaggccaggaugccca

SEQ ID NO: 236521 - RNA, 32 nt, Human
uccuggcagagggagaggacaggaggaggagc

SEQ ID NO: 236522 - RNA, 32 nt, Human
uccuggcagcagcuccagucaagaaugucacu

SEQ ID NO: 236523 - RNA, 32 nt, Human
uccuggcagccccucaaacacacaccacccca

SEQ ID NO: 236524 - RNA, 22 nt, Human
uccuggcagccgccucuucccu

SEQ ID NO: 236525 - RNA, 32 nt, Human
uccuggcagcugggccugucuccuggggccau

SEQ ID NO: 236526 - RNA, 32 nt, Human
uccuggcagcuuuuggaaugacagcaguggua

SEQ ID NO: 236527 - RNA, 32 nt, Human
uccuggcaggagaaaggagggugguuuccgug

SEQ ID NO: 236528 - RNA, 32 nt, Human
uccuggcaggagcugagccucaggugucuggc

SEQ ID NO: 236529 - RNA, 32 nt, Human
uccuggcagggacuccggggucagugagugua

SEQ ID NO: 236530 - RNA, 32 nt, Human
uccuggcaggugugggagggaagcccauggcc

SEQ ID NO: 236531 - RNA, 32 nt, Human
uccuggcauccugggaggucucuggcuuugug

SEQ ID NO: 236532 - RNA, 32 nt, Human
uccuggcauuuguggccacucacuuuguagga

SEQ ID NO: 236533 - RNA, 32 nt, Human
uccuggccacaagugaucugcccgccuuagcc

SEQ ID NO: 236534 - RNA, 20 nt, Human
uccuggccaccugugaccug

SEQ ID NO: 236535 - RNA, 22 nt, Human
uccuggccacuggccgccgccg

SEQ ID NO: 236536 - RNA, 32 nt, Human
uccuggccagaacuugagccagcugugggaug

SEQ ID NO: 236537 - RNA, 32 nt, Human
uccuggccaguuucacaaucuagcucgacaga

SEQ ID NO: 236538 - RNA, 32 nt, Human
uccuggccaucuuugcuacuuuccuagagaac

SEQ ID NO: 236539 - RNA, 20 nt, Human
uccuggcccagccacggcca

SEQ ID NO: 236540 - RNA, 32 nt, Human
uccuggcccagccugugaaugacucugcccca

SEQ ID NO: 236541 - RNA, 32 nt, Human
uccuggcccagccuuuguuccccacuggagca

SEQ ID NO: 236542 - RNA, 32 nt, Human
uccuggcccaggccucugcccucugcccaccc

SEQ ID NO: 236543 - RNA, 21 nt, Human
uccuggcccauggauccauuc

SEQ ID NO: 236544 - RNA, 23 nt, Human
uccuggcccccaggcagggucug

SEQ ID NO: 236545 - RNA, 32 nt, Human
uccuggcccccgcccuugccccggcccggacu

SEQ ID NO: 236546 - RNA, 32 nt, Human
uccuggcccccuccuuggucaggcugaauggu

SEQ ID NO: 236547 - RNA, 32 nt, Human
uccuggcccuccacuccucauccccacaaucu

SEQ ID NO: 236548 - RNA, 32 nt, Human
uccuggcccucguuccuggaacacaggagaug

SEQ ID NO: 236549 - RNA, 32 nt, Human
uccuggcccugagccagcccugugcuccuccc

SEQ ID NO: 236550 - RNA, 32 nt, Human
uccuggcccugagccucagccucugccauggg

SEQ ID NO: 236551 - RNA, 32 nt, Human
uccuggcccuggaaggugccacuccagugccc

SEQ ID NO: 236552 - RNA, 19 nt, Human
uccuggccgagacugugaa

SEQ ID NO: 236553 - RNA, 32 nt, Human
uccuggccggcagagggcgcaggagcccagga

SEQ ID NO: 236554 - RNA, 32 nt, Human
uccuggccgggcccuccuccugccuguucugg

SEQ ID NO: 236555 - RNA, 22 nt, Human
uccuggccuaaugaucugccca

SEQ ID NO: 236556 - RNA, 32 nt, Human
uccuggccucaaaugauccuccugccuuggcc

SEQ ID NO: 236557 - RNA, 24 nt, Human
uccuggccucaagagauccacccg

SEQ ID NO: 236558 - RNA, 32 nt, Human
uccuggccucaagcaauccucucuccucagcc

SEQ ID NO: 236559 - RNA, 32 nt, Human
uccuggccucaagcaauccucuugccucggcc

SEQ ID NO: 236560 - RNA, 32 nt, Human
uccuggccucaagcaauccuucugccuuggcc

SEQ ID NO: 236561 - RNA, 32 nt, Human
uccuggccucaagcaguccucucaccuugccu

SEQ ID NO: 236562 - RNA, 24 nt, Human
uccuggccucaagcgauccaccca

SEQ ID NO: 236563 - RNA, 24 nt, Human
uccuggccucaagcgauccucuca

SEQ ID NO: 236564 - RNA, 32 nt, Human
uccuggccucaagcgauccucucaucucagcc

SEQ ID NO: 236565 - RNA, 32 nt, Human
uccuggccucaagugacccuccugucucagcc

SEQ ID NO: 236566 - RNA, 21 nt, Human
uccuggccucaagugauccac

SEQ ID NO: 236567 - RNA, 24 nt, Human
uccuggccucaagugauccaccca

SEQ ID NO: 236568 - RNA, 32 nt, Human
uccuggccucaagugauccacccaccucagcc

SEQ ID NO: 236569 - RNA, 32 nt, Human
uccuggccucaagugauccacuggccucagcc

SEQ ID NO: 236570 - RNA, 32 nt, Human
uccuggccucaagugauccucccaccuaggcc

SEQ ID NO: 236571 - RNA, 32 nt, Human
uccuggccucaagugauccucccaccucagcg

SEQ ID NO: 236572 - RNA, 32 nt, Human
uccuggccucaagugauccucccaccuuggcc

SEQ ID NO: 236573 - RNA, 32 nt, Human
uccuggccucaagugauccucccuccucggcc

SEQ ID NO: 236574 - RNA, 32 nt, Human
uccuggccucaagugauccuccugccucagcc

SEQ ID NO: 236575 - RNA, 32 nt, Human
uccuggccucaagugauccuccugcuuggacc

SEQ ID NO: 236576 - RNA, 23 nt, Human
uccuggccucaagugauccucuu

SEQ ID NO: 236577 - RNA, 32 nt, Human
uccuggccucaagugauccucuugccucagcc

SEQ ID NO: 236578 - RNA, 32 nt, Human
uccuggccucaagugauccuuccaucucagcc

SEQ ID NO: 236579 - RNA, 32 nt, Human
uccuggccucaagugauccuucugccucaguc

SEQ ID NO: 236580 - RNA, 32 nt, Human
uccuggccucaagugaucugcccaccuuggcc

SEQ ID NO: 236581 - RNA, 32 nt, Human
uccuggccucaagugaucugcccgccucggcc

SEQ ID NO: 236582 - RNA, 32 nt, Human
uccuggccucaagugaucugccgccucagcuu

SEQ ID NO: 236583 - RNA, 24 nt, Human
uccuggccucaagugauucacccg

SEQ ID NO: 236584 - RNA, 32 nt, Human
uccuggccucaagugauucuaucgccucugcc

SEQ ID NO: 236585 - RNA, 32 nt, Human
uccuggccucaagugauucuccugccucagcc

SEQ ID NO: 236586 - RNA, 32 nt, Human
uccuggccucaagugguccuccugccucagcc

SEQ ID NO: 236587 - RNA, 32 nt, Human
uccuggccucaagugguccuccugccuuggcc

SEQ ID NO: 236588 - RNA, 21 nt, Human
uccuggccucaccuccaccca

SEQ ID NO: 236589 - RNA, 24 nt, Human
uccuggccucacgugaucugucca

SEQ ID NO: 236590 - RNA, 22 nt, Human
uccuggccucagacugcaccca

SEQ ID NO: 236591 - RNA, 32 nt, Human
uccuggccucagccagugccuccccggcccau

SEQ ID NO: 236592 - RNA, 20 nt, Human
uccuggccucagggccauuc

SEQ ID NO: 236593 - RNA, 24 nt, Human
uccuggccucaggugacccgcccg

SEQ ID NO: 236594 - RNA, 24 nt, Human
uccuggccucaggugauccaccca

SEQ ID NO: 236595 - RNA, 24 nt, Human
uccuggccucaggugauccacccg

SEQ ID NO: 236596 - RNA, 32 nt, Human
uccuggccucaggugauccucuugucucagcc

SEQ ID NO: 236597 - RNA, 24 nt, Human
uccuggccucaggugaucugccca

SEQ ID NO: 236598 - RNA, 26 nt, Human
uccuggccucaggugugauccgcccg

SEQ ID NO: 236599 - RNA, 21 nt, Human
uccuggccucauaugauucac

SEQ ID NO: 236600 - RNA, 24 nt, Human
uccuggccucaugugaucugccca

SEQ ID NO: 236601 - RNA, 21 nt, Human
uccuggccuccccuccugucu

SEQ ID NO: 236602 - RNA, 32 nt, Human
uccuggccucgaagcccugggcugcacagccc

SEQ ID NO: 236603 - RNA, 32 nt, Human
uccuggccucugcuuuugugucucacaaaaac

SEQ ID NO: 236604 - RNA, 32 nt, Human
uccuggccucuggaaccagccugugugccagc

SEQ ID NO: 236605 - RNA, 32 nt, Human
uccuggccugaagugauccacccgccucggcc

SEQ ID NO: 236606 - RNA, 32 nt, Human
uccuggccugaagugauccucccgccucggcc

SEQ ID NO: 236607 - RNA, 32 nt, Human
uccuggccugcccucuagacuccaguccccaa

SEQ ID NO: 236608 - RNA, 32 nt, Human
uccuggccugcucucagccugugugaugauaa

SEQ ID NO: 236609 - RNA, 32 nt, Human
uccuggccugcucucagccugugugugaugau

SEQ ID NO: 236610 - RNA, 20 nt, Human
uccuggccuggaaugcacuu

SEQ ID NO: 236611 - RNA, 25 nt, Human
uccuggccuggcaggcagggcucug

SEQ ID NO: 236612 - RNA, 32 nt, Human
uccuggccugugcagcucggguuuccgagcuu

SEQ ID NO: 236613 - RNA, 32 nt, Human
uccuggccuuaagugauccucccaccucagcc

SEQ ID NO: 236614 - RNA, 32 nt, Human
uccuggccuuaagugaucugcccaucucagcg

SEQ ID NO: 236615 - RNA, 24 nt, Human
uccuggccuuaugugauccgccca

SEQ ID NO: 236616 - RNA, 20 nt, Human
uccuggccuuauuuccauuc

SEQ ID NO: 236617 - RNA, 32 nt, Human
uccuggccuucucuuugcaaggggagcugaga

SEQ ID NO: 236618 - RNA, 32 nt, Human
uccuggccuuucuccacucucccucaagccug

SEQ ID NO: 236619 - RNA, 24 nt, Human
uccuggcgaccacugcuucugucu

SEQ ID NO: 236620 - RNA, 27 nt, Human
uccuggcgccagcuggagauccauuca

SEQ ID NO: 236621 - RNA, 18 nt, Human
uccuggcgcgagacggug

SEQ ID NO: 236622 - RNA, 32 nt, Human
uccuggcgcgagcggccgcgggccaguuucua

SEQ ID NO: 236623 - RNA, 32 nt, Human
uccuggcgcugcagguccgggaggcgcaggcg

SEQ ID NO: 236624 - RNA, 32 nt, Human
uccuggcggccuggcccaggcugccgcuguac

SEQ ID NO: 236625 - RNA, 32 nt, Human
uccuggcggccuuggucgguccacagcuuccu

SEQ ID NO: 236626 - RNA, 32 nt, Human
uccuggcguuaucaaagcaaaucaaagccuuu

SEQ ID NO: 236627 - RNA, 32 nt, Human
uccuggcuaacagugaaacccugucucuacug

SEQ ID NO: 236628 - RNA, 32 nt, Human
uccuggcuacaagugauccgccugucucagcc

SEQ ID NO: 236629 - RNA, 30 nt, Human
uccuggcuauggugaaaccccgucucuacu

SEQ ID NO: 236630 - RNA, 32 nt, Human
uccuggcucaagugaucucccacuucagccuc

SEQ ID NO: 236631 - RNA, 32 nt, Human
uccuggcucaccgcagccuccaccuccagggu

SEQ ID NO: 236632 - RNA, 32 nt, Human
uccuggcucacugcaaacucugccucccaggu

SEQ ID NO: 236633 - RNA, 32 nt, Human
uccuggcucacugcaaccuccaccucccgggu

SEQ ID NO: 236634 - RNA, 32 nt, Human
uccuggcucacugcaacugcagccucccgggu

SEQ ID NO: 236635 - RNA, 32 nt, Human
uccuggcucacugcaaucuccaucucccgggu

SEQ ID NO: 236636 - RNA, 32 nt, Human
uccuggcucacugcaaucuccgccuccccagu

SEQ ID NO: 236637 - RNA, 32 nt, Human
uccuggcucacuggcuucccccuaccaaguua

SEQ ID NO: 236638 - RNA, 32 nt, Human
uccuggcucacuguaaccucuggguucaagca

SEQ ID NO: 236639 - RNA, 18 nt, Human
uccuggcuccacacuaua

SEQ ID NO: 236640 - RNA, 32 nt, Human
uccuggcuccacccuccagcauguucucaccc

SEQ ID NO: 236641 - RNA, 32 nt, Human
uccuggcucccaacagcuucucaguucccacu

SEQ ID NO: 236642 - RNA, 32 nt, Human
uccuggcucccaggaccccaccauaggcagag

SEQ ID NO: 236643 - RNA, 32 nt, Human
uccuggcucccaggguccugggggcugcugca

SEQ ID NO: 236644 - RNA, 21 nt, Human
uccuggcuccuaucucugccu

SEQ ID NO: 236645 - RNA, 32 nt, Human
uccuggcuccuaucucugccuuccaggcaucu

SEQ ID NO: 236646 - RNA, 32 nt, Human
uccuggcuccuccucggccucagcccucuccu

SEQ ID NO: 236647 - RNA, 32 nt, Human
uccuggcuccuuccuacauccugggcuccuga

SEQ ID NO: 236648 - RNA, 31 nt, Human
uccuggcucucuauauaccugugaauaugug

SEQ ID NO: 236649 - RNA, 32 nt, Human
uccuggcucugcagagagaacagcccagaaaa

SEQ ID NO: 236650 - RNA, 32 nt, Human
uccuggcucugccugucccccaccguuguucu

SEQ ID NO: 236651 - RNA, 32 nt, Human
uccuggcucuuauuccagggccuuuucccacu

SEQ ID NO: 236652 - RNA, 32 nt, Human
uccuggcugagcgggcucugaguucuguacug

SEQ ID NO: 236653 - RNA, 19 nt, Human
uccuggcugcacagggugc

SEQ ID NO: 236654 - RNA, 32 nt, Human
uccuggcugcacucuugaacugggcgaauguc

SEQ ID NO: 236655 - RNA, 32 nt, Human
uccuggcugcagcuggacaacagaagccccau

SEQ ID NO: 236656 - RNA, 32 nt, Human
uccuggcugcuggcccauccugccugggcauc

SEQ ID NO: 236657 - RNA, 24 nt, Human
uccuggcugcuuucuccccuuccc

SEQ ID NO: 236658 - RNA, 32 nt, Human
uccuggcuggcuguguuacaagugacucuucc

SEQ ID NO: 236659 - RNA, 32 nt, Human
uccuggcugugccucccauuuccccucaccug

SEQ ID NO: 236660 - RNA, 32 nt, Human
uccuggcugugucacagcacugagcucagccc

SEQ ID NO: 236661 - RNA, 32 nt, Human
uccuggcuucaagccauucuccugccuuagcc

SEQ ID NO: 236662 - RNA, 32 nt, Human
uccuggcuucaagugauccucacaccuuagcc

SEQ ID NO: 236663 - RNA, 23 nt, Human
uccuggcuucaagugauccucuu

SEQ ID NO: 236664 - RNA, 32 nt, Human
uccuggcuucaagugauccucuugcuuuggcc

SEQ ID NO: 236665 - RNA, 32 nt, Human
uccuggcuucagcaggaagugaacaggcucag

SEQ ID NO: 236666 - RNA, 32 nt, Human
uccuggcuucccgucuggucauggcgagauuc

SEQ ID NO: 236667 - RNA, 32 nt, Human
uccuggcuucuccuggugcugcccucacuguc

SEQ ID NO: 236668 - RNA, 32 nt, Human
uccuggcuugggccugaguagggcagagaggg

SEQ ID NO: 236669 - RNA, 32 nt, Human
uccuggcuuucaaacacaagucuuccaaauua

SEQ ID NO: 236670 - RNA, 32 nt, Human
uccuggcuuuuuccuuucccuucccuucucca

SEQ ID NO: 236671 - RNA, 32 nt, Human
uccugggaaagagcauccucuggcaggugcuc

SEQ ID NO: 236672 - RNA, 32 nt, Human
uccugggaauaacaucaggcugacucacaaca

SEQ ID NO: 236673 - RNA, 32 nt, Human
uccugggaauacagagaaaagagacaacuuua

SEQ ID NO: 236674 - RNA, 32 nt, Human
uccugggaaucaggagccuggacacugccauc

SEQ ID NO: 236675 - RNA, 26 nt, Human
uccugggacaagcaaggaaaguacug

SEQ ID NO: 236676 - RNA, 32 nt, Human
uccugggacagaaaauaaacaugaacuuuagu

SEQ ID NO: 236677 - RNA, 32 nt, Human
uccugggacagaaaccuuauccuacaccauug

SEQ ID NO: 236678 - RNA, 32 nt, Human
uccugggacagugggagccaagggcaagugcu

SEQ ID NO: 236679 - RNA, 32 nt, Human
uccugggaccaagauggagaagguguuccuaa

SEQ ID NO: 236680 - RNA, 22 nt, Human
uccugggacccgccuguugcuu

SEQ ID NO: 236681 - RNA, 32 nt, Human
uccugggacucccugaggaaaagugcugccuc

SEQ ID NO: 236682 - RNA, 32 nt, Human
uccugggacugcaccagacugcuccaaacuca

SEQ ID NO: 236683 - RNA, 22 nt, Human
uccugggagacagaauguguuu

SEQ ID NO: 236684 - RNA, 32 nt, Human
uccugggagaggaggaagaugaagacgaggag

SEQ ID NO: 236685 - RNA, 21 nt, Human
uccugggagaggcgcgagcca

SEQ ID NO: 236686 - RNA, 32 nt, Human
uccugggagagggcugggcaggacagagcuga

SEQ ID NO: 236687 - RNA, 21 nt, Human
uccugggagcaaggcccugca

SEQ ID NO: 236688 - RNA, 32 nt, Human
uccugggagcauucgucgugcccagccugagc

SEQ ID NO: 236689 - RNA, 32 nt, Human
uccugggagccuagaucucacuccagggucug

SEQ ID NO: 236690 - RNA, 32 nt, Human
uccugggaggaagaggaggagacgcgggaaug

SEQ ID NO: 236691 - RNA, 32 nt, Human
uccugggaggaugaagaucugccagcucugag

SEQ ID NO: 236692 - RNA, 32 nt, Human
uccugggaggcagagguuguagugagccgaga

SEQ ID NO: 236693 - RNA, 32 nt, Human
uccugggaggcugaggcaagagaaucgcuuga

SEQ ID NO: 236694 - RNA, 32 nt, Human
uccugggauagaaauguccccagaguggagaa

SEQ ID NO: 236695 - RNA, 32 nt, Human
uccugggaucaagugauccuccugccucagcc

SEQ ID NO: 236696 - RNA, 32 nt, Human
uccugggaucaagugauucuccugccuuagcc

SEQ ID NO: 236697 - RNA, 32 nt, Human
uccugggaugccucuccagccacugggcuccc

SEQ ID NO: 236698 - RNA, 21 nt, Human
uccugggaugcuucucugucu

SEQ ID NO: 236699 - RNA, 32 nt, Human
uccugggauggcugucgggagcuguaucaccu

SEQ ID NO: 236700 - RNA, 23 nt, Human
uccugggauuacaggcaugagcu

SEQ ID NO: 236701 - RNA, 24 nt, Human
uccugggauuacaggcgcgagcca

SEQ ID NO: 236702 - RNA, 23 nt, Human
uccugggauuacaggcugagcca

SEQ ID NO: 236703 - RNA, 24 nt, Human
uccugggauuacaggugugagcca

SEQ ID NO: 236704 - RNA, 32 nt, Human
uccugggauucagacggugaagacugacuucu

SEQ ID NO: 236705 - RNA, 23 nt, Human
uccugggauucugcacauagcca

SEQ ID NO: 236706 - RNA, 32 nt, Human
uccugggcaacagagugagacuuugucucaaa

SEQ ID NO: 236707 - RNA, 32 nt, Human
uccugggcaaggaagguaggaguucugugcac

SEQ ID NO: 236708 - RNA, 32 nt, Human
uccugggcacaagugauccucccaucucugcc

SEQ ID NO: 236709 - RNA, 32 nt, Human
uccugggcacaagugauccuccugccuuagcc

SEQ ID NO: 236710 - RNA, 32 nt, Human
uccugggcacauucuuuucuucugcuucccuu

SEQ ID NO: 236711 - RNA, 21 nt, Human
uccugggcaccaccacuucca

SEQ ID NO: 236712 - RNA, 32 nt, Human
uccugggcagaagcugaaggccagcuucacau

SEQ ID NO: 236713 - RNA, 32 nt, Human
uccugggcagccacaccacagagcggggaggg

SEQ ID NO: 236714 - RNA, 32 nt, Human
uccugggcagccagggcagccaggacggcacc

SEQ ID NO: 236715 - RNA, 32 nt, Human
uccugggcaggcaggugccucucagaggccac

SEQ ID NO: 236716 - RNA, 32 nt, Human
uccugggcagugagcugcggucugaggccccu

SEQ ID NO: 236717 - RNA, 20 nt, Human
uccugggcauccccacucca

SEQ ID NO: 236718 - RNA, 32 nt, Human
uccugggcaucuucuguaaugaugccucuuuc

SEQ ID NO: 236719 - RNA, 27 nt, Human
uccugggccaaggccugccuuuugccu

SEQ ID NO: 236720 - RNA, 32 nt, Human
uccugggccacaucugcccauggggaguguuu

SEQ ID NO: 236721 - RNA, 26 nt, Human
uccugggccacccucaccgucugccu

SEQ ID NO: 236722 - RNA, 32 nt, Human
uccugggccagaggggacagcuggacaguguc

SEQ ID NO: 236723 - RNA, 31 nt, Human
uccugggccagcuagaagccaggagcugauu

SEQ ID NO: 236724 - RNA, 21 nt, Human
uccugggccagcuuccugcuu

SEQ ID NO: 236725 - RNA, 32 nt, Human
uccugggccaguguccaucagccaggugcuca

SEQ ID NO: 236726 - RNA, 32 nt, Human
uccugggcccaagugauccuuccaccucaguc

SEQ ID NO: 236727 - RNA, 32 nt, Human
uccugggcccacuguucuuucucuauacuuug

SEQ ID NO: 236728 - RNA, 19 nt, Human
uccugggcccccacugcca

SEQ ID NO: 236729 - RNA, 20 nt, Human
uccugggccccgucgugcag

SEQ ID NO: 236730 - RNA, 32 nt, Human
uccugggcccggcacuccgcagccucuccauc

SEQ ID NO: 236731 - RNA, 22 nt, Human
uccugggccgccgccuccuccu

SEQ ID NO: 236732 - RNA, 32 nt, Human
uccugggccuccagguaaagagagagagccag

SEQ ID NO: 236733 - RNA, 32 nt, Human
uccugggccugcccuggcuggccaggacccca

SEQ ID NO: 236734 - RNA, 32 nt, Human
uccugggccuggaauaugaugaagagcaucag

SEQ ID NO: 236735 - RNA, 32 nt, Human
uccugggccuuccgaggccucugacaaauaaa

SEQ ID NO: 236736 - RNA, 26 nt, Human
uccugggcgccacaugcucauggcca

SEQ ID NO: 236737 - RNA, 32 nt, Human
uccugggcggcccggcuagcucugccuacgcg

SEQ ID NO: 236738 - RNA, 32 nt, Human
uccugggcgggguguuccagggugcauguuuc

SEQ ID NO: 236739 - RNA, 32 nt, Human
uccugggcuagagacaagcaccagccugcagu

SEQ ID NO: 236740 - RNA, 32 nt, Human
uccugggcucaaaugauccucccaccucagcc

SEQ ID NO: 236741 - RNA, 32 nt, Human
uccugggcucaagagauccucccacuucagcc

SEQ ID NO: 236742 - RNA, 32 nt, Human
uccugggcucaagagauccuccugccuuggcc

SEQ ID NO: 236743 - RNA, 32 nt, Human
uccugggcucaagagauugucccaccucagcc

SEQ ID NO: 236744 - RNA, 32 nt, Human
uccugggcucaagcaacccucccaccucccau

SEQ ID NO: 236745 - RNA, 32 nt, Human
uccugggcucaagcaacccucccaccuuagcc

SEQ ID NO: 236746 - RNA, 32 nt, Human
uccugggcucaagcaacccugccaccucagcc

SEQ ID NO: 236747 - RNA, 32 nt, Human
uccugggcucaagcaaucagcccaccucugcc

SEQ ID NO: 236748 - RNA, 32 nt, Human
uccugggcucaagcaauccacccaccucugcc

SEQ ID NO: 236749 - RNA, 32 nt, Human
uccugggcucaagcaauccucacaccucagcc

SEQ ID NO: 236750 - RNA, 32 nt, Human
uccugggcucaagcaauccucccaccucagcc

SEQ ID NO: 236751 - RNA, 32 nt, Human
uccugggcucaagcaauccucccaccucccag

SEQ ID NO: 236752 - RNA, 32 nt, Human
uccugggcucaagcaauccucccaccuuggcc

SEQ ID NO: 236753 - RNA, 32 nt, Human
uccugggcucaagcaauccucccaccuuggcu

SEQ ID NO: 236754 - RNA, 32 nt, Human
uccugggcucaagcaauccucccaccuugguc

SEQ ID NO: 236755 - RNA, 32 nt, Human
uccugggcucaagcaauccucccacuucagcc

SEQ ID NO: 236756 - RNA, 32 nt, Human
uccugggcucaagcaauccucccuccucagcc

SEQ ID NO: 236757 - RNA, 32 nt, Human
uccugggcucaagcaauccuccugccucagcc

SEQ ID NO: 236758 - RNA, 32 nt, Human
uccugggcucaagcaauccuccugccucagcu

SEQ ID NO: 236759 - RNA, 32 nt, Human
uccugggcucaagcaauccuccugccucggcc

SEQ ID NO: 236760 - RNA, 32 nt, Human
uccugggcucaagcaauccuccugccucggcu

SEQ ID NO: 236761 - RNA, 32 nt, Human
uccugggcucaagcaauccuccugucuuggcc

SEQ ID NO: 236762 - RNA, 32 nt, Human
uccugggcucaagcaauccucucaccgcagcc

SEQ ID NO: 236763 - RNA, 32 nt, Human
uccugggcucaagcaauccucucaucuccacc

SEQ ID NO: 236764 - RNA, 32 nt, Human
uccugggcucaagcaaucugcccgccucugcc

SEQ ID NO: 236765 - RNA, 32 nt, Human
uccugggcucaagcaaucugcuugccuugggc

SEQ ID NO: 236766 - RNA, 32 nt, Human
uccugggcucaagcaaucuucccaccucagcc

SEQ ID NO: 236767 - RNA, 32 nt, Human
uccugggcucaagcaauucucccaccucagcc

SEQ ID NO: 236768 - RNA, 32 nt, Human
uccugggcucaagcaauucuuccaccucagcc

SEQ ID NO: 236769 - RNA, 32 nt, Human
uccugggcucaagcaauucuucugccucagcc

SEQ ID NO: 236770 - RNA, 32 nt, Human
uccugggcucaagcacucugcccaccucagcc

SEQ ID NO: 236771 - RNA, 32 nt, Human
uccugggcucaagcagucaucccaccucagcc

SEQ ID NO: 236772 - RNA, 32 nt, Human
uccugggcucaagcaguccucccaccccagcc

SEQ ID NO: 236773 - RNA, 32 nt, Human
uccugggcucaagcaguccucccacccuacca

SEQ ID NO: 236774 - RNA, 32 nt, Human
uccugggcucaagcaguccucccaccucaguc

SEQ ID NO: 236775 - RNA, 32 nt, Human
uccugggcucaagcaguccucccaccuuggcc

SEQ ID NO: 236776 - RNA, 32 nt, Human
uccugggcucaagcaguccuccugccuuggcc

SEQ ID NO: 236777 - RNA, 32 nt, Human
uccugggcucaagcaguccuccugcuucagcc

SEQ ID NO: 236778 - RNA, 32 nt, Human
uccugggcucaagcaguccuucugccuuagcc

SEQ ID NO: 236779 - RNA, 32 nt, Human
uccugggcucaagcagucuacccaccucagcc

SEQ ID NO: 236780 - RNA, 32 nt, Human
uccugggcucaagcaguucucccaccucagcc

SEQ ID NO: 236781 - RNA, 32 nt, Human
uccugggcucaagccaucccccaaccuuggcc

SEQ ID NO: 236782 - RNA, 32 nt, Human
uccugggcucaagccauccucccaccaugccu

SEQ ID NO: 236783 - RNA, 32 nt, Human
uccugggcucaagccauccucccacccuggcc

SEQ ID NO: 236784 - RNA, 32 nt, Human
uccugggcucaagccauccucccgccacagcc

SEQ ID NO: 236785 - RNA, 32 nt, Human
uccugggcucaagccauccucccuccucagcc

SEQ ID NO: 236786 - RNA, 32 nt, Human
uccugggcucaagccauccuccugccucagcc

SEQ ID NO: 236787 - RNA, 24 nt, Human
uccugggcucaagccauccuucca

SEQ ID NO: 236788 - RNA, 32 nt, Human
uccugggcucaagccauccuuccgccucagcu

SEQ ID NO: 236789 - RNA, 32 nt, Human
uccugggcucaagccaucugcccgccucaucc

SEQ ID NO: 236790 - RNA, 32 nt, Human
uccugggcucaagccaucugccugccuccacc

SEQ ID NO: 236791 - RNA, 32 nt, Human
uccugggcucaagccaucuuccuuagccuccc

SEQ ID NO: 236792 - RNA, 32 nt, Human
uccugggcucaagccguucucccgccucccac

SEQ ID NO: 236793 - RNA, 32 nt, Human
uccugggcucaagccuuccucccaccugaacc

SEQ ID NO: 236794 - RNA, 32 nt, Human
uccugggcucaagcgaacugucagccucagcc

SEQ ID NO: 236795 - RNA, 32 nt, Human
uccugggcucaagcgagccucccaccucgguc

SEQ ID NO: 236796 - RNA, 32 nt, Human
uccugggcucaagcgauccacccaccuugggc

SEQ ID NO: 236797 - RNA, 32 nt, Human
uccugggcucaagcgauccuacugcccugguc

SEQ ID NO: 236798 - RNA, 32 nt, Human
uccugggcucaagcgauccucacaccucagcg

SEQ ID NO: 236799 - RNA, 32 nt, Human
uccugggcucaagcgauccuccacccucagcc

SEQ ID NO: 236800 - RNA, 32 nt, Human
uccugggcucaagcgauccucccaccucagcc

SEQ ID NO: 236801 - RNA, 32 nt, Human
uccugggcucaagcgauccucccaccucagcu

SEQ ID NO: 236802 - RNA, 32 nt, Human
uccugggcucaagcgauccucccaucucagcc

SEQ ID NO: 236803 - RNA, 32 nt, Human
uccugggcucaagcgauccuccccgcucagcc

SEQ ID NO: 236804 - RNA, 32 nt, Human
uccugggcucaagcgauccucccuccucggcc

SEQ ID NO: 236805 - RNA, 32 nt, Human
uccugggcucaagcgauccuccugccucaguc

SEQ ID NO: 236806 - RNA, 32 nt, Human
uccugggcucaagcgauccuccugcuuuggcc

SEQ ID NO: 236807 - RNA, 32 nt, Human
uccugggcucaagcgauccuucugccucagcc

SEQ ID NO: 236808 - RNA, 32 nt, Human
uccugggcucaagcgauccuucugccuuggcc

SEQ ID NO: 236809 - RNA, 32 nt, Human
uccugggcucaagcgauccuuuggccucggcc

SEQ ID NO: 236810 - RNA, 32 nt, Human
uccugggcucaagcgaucugcccaccuaggcc

SEQ ID NO: 236811 - RNA, 32 nt, Human
uccugggcucaagcgaucugcccaccucaguc

SEQ ID NO: 236812 - RNA, 32 nt, Human
uccugggcucaagcgaucuucccccuucgacc

SEQ ID NO: 236813 - RNA, 32 nt, Human
uccugggcucaagcgaugcuccugcuucagcc

SEQ ID NO: 236814 - RNA, 32 nt, Human
uccugggcucaagcgauucucaugccucagcc

SEQ ID NO: 236815 - RNA, 32 nt, Human
uccugggcucaagcgauucuccugccucagcc

SEQ ID NO: 236816 - RNA, 32 nt, Human
uccugggcucaagcgauucuccugccucagcu

SEQ ID NO: 236817 - RNA, 32 nt, Human
uccugggcucaagcgguccaccugccuccgcc

SEQ ID NO: 236818 - RNA, 27 nt, Human
uccugggcucaagcuauccuccugccu

SEQ ID NO: 236819 - RNA, 32 nt, Human
uccugggcucaagcuauccuccugccucagcc

SEQ ID NO: 236820 - RNA, 32 nt, Human
uccugggcucaagcuucccaaguagcugcaac

SEQ ID NO: 236821 - RNA, 32 nt, Human
uccugggcucaagggauccccucuucucagcu

SEQ ID NO: 236822 - RNA, 32 nt, Human
uccugggcucaagggauccucccaucucagcc

SEQ ID NO: 236823 - RNA, 32 nt, Human
uccugggcucaagggauccuccugcuuuagcc

SEQ ID NO: 236824 - RNA, 32 nt, Human
uccugggcucaagggauccugccaccucagcu

SEQ ID NO: 236825 - RNA, 32 nt, Human
uccugggcucaagggaucuuguagccuuagcc

SEQ ID NO: 236826 - RNA, 32 nt, Human
uccugggcucaaguaauccucccaccccagcc

SEQ ID NO: 236827 - RNA, 32 nt, Human
uccugggcucaaguaauccuccucccucugcc

SEQ ID NO: 236828 - RNA, 32 nt, Human
uccugggcucaaguaauccuccugccugagcc

SEQ ID NO: 236829 - RNA, 32 nt, Human
uccugggcucaaguauccaccugccucagccu

SEQ ID NO: 236830 - RNA, 32 nt, Human
uccugggcucaagugaaccucccgccucggcc

SEQ ID NO: 236831 - RNA, 32 nt, Human
uccugggcucaagugacccuccugcaucagcu

SEQ ID NO: 236832 - RNA, 32 nt, Human
uccugggcucaagugaguauccugccuaagcu

SEQ ID NO: 236833 - RNA, 32 nt, Human
uccugggcucaagugaucaucccaccucagcc

SEQ ID NO: 236834 - RNA, 32 nt, Human
uccugggcucaagugauccacccaucuccacc

SEQ ID NO: 236835 - RNA, 32 nt, Human
uccugggcucaagugauccacccgccuugccu

SEQ ID NO: 236836 - RNA, 32 nt, Human
uccugggcucaagugauccacuugccuuggcc

SEQ ID NO: 236837 - RNA, 32 nt, Human
uccugggcucaagugauccagcagccuuagcc

SEQ ID NO: 236838 - RNA, 32 nt, Human
uccugggcucaagugaucccccagccucagcc

SEQ ID NO: 236839 - RNA, 32 nt, Human
uccugggcucaagugaucccccugccuuggcc

SEQ ID NO: 236840 - RNA, 32 nt, Human
uccugggcucaagugauccgcccgccucaguc

SEQ ID NO: 236841 - RNA, 32 nt, Human
uccugggcucaagugauccucccaccucagcc

SEQ ID NO: 236842 - RNA, 32 nt, Human
uccugggcucaagugauccucccaccucagcu

SEQ ID NO: 236843 - RNA, 32 nt, Human
uccugggcucaagugauccucccaccucugcc

SEQ ID NO: 236844 - RNA, 32 nt, Human
uccugggcucaagugauccucccacuucaccu

SEQ ID NO: 236845 - RNA, 32 nt, Human
uccugggcucaagugauccucccaucuuggcc

SEQ ID NO: 236846 - RNA, 32 nt, Human
uccugggcucaagugauccucccgccuugccc

SEQ ID NO: 236847 - RNA, 32 nt, Human
uccugggcucaagugauccucccgcuucagcc

SEQ ID NO: 236848 - RNA, 32 nt, Human
uccugggcucaagugauccucccuccucagcc

SEQ ID NO: 236849 - RNA, 32 nt, Human
uccugggcucaagugauccuccggccuuggcc

SEQ ID NO: 236850 - RNA, 32 nt, Human
uccugggcucaagugauccuccugccacagcc

SEQ ID NO: 236851 - RNA, 32 nt, Human
uccugggcucaagugauccuccugccccagcc

SEQ ID NO: 236852 - RNA, 32 nt, Human
uccugggcucaagugauccuccugccucagca

SEQ ID NO: 236853 - RNA, 32 nt, Human
uccugggcucaagugauccuccugccucagcc

SEQ ID NO: 236854 - RNA, 32 nt, Human
uccugggcucaagugauccuccugccucaguc

SEQ ID NO: 236855 - RNA, 32 nt, Human
uccugggcucaagugauccuccugccucggcc

SEQ ID NO: 236856 - RNA, 32 nt, Human
uccugggcucaagugauccuccugccugggcc

SEQ ID NO: 236857 - RNA, 32 nt, Human
uccugggcucaagugauccuccugccuuagcc

SEQ ID NO: 236858 - RNA, 32 nt, Human
uccugggcucaagugauccuccugcuuuggcc

SEQ ID NO: 236859 - RNA, 32 nt, Human
uccugggcucaagugauccuccugucucggcc

SEQ ID NO: 236860 - RNA, 32 nt, Human
uccugggcucaagugauccucucacuucagcu

SEQ ID NO: 236861 - RNA, 32 nt, Human
uccugggcucaagugauccuuccaccucagcc

SEQ ID NO: 236862 - RNA, 32 nt, Human
uccugggcucaagugauccuuccacuucagcc

SEQ ID NO: 236863 - RNA, 32 nt, Human
uccugggcucaagugauccuuccaucucacuu

SEQ ID NO: 236864 - RNA, 32 nt, Human
uccugggcucaagugauccuuccaucucagcc

SEQ ID NO: 236865 - RNA, 32 nt, Human
uccugggcucaagugauccuucuacuucagau

SEQ ID NO: 236866 - RNA, 32 nt, Human
uccugggcucaagugaucugccugccuuggug

SEQ ID NO: 236867 - RNA, 32 nt, Human
uccugggcucaagugaucuucccacgugggcc

SEQ ID NO: 236868 - RNA, 32 nt, Human
uccugggcucaagugaucuuccccuucagccu

SEQ ID NO: 236869 - RNA, 32 nt, Human
uccugggcucaagugaugcuccugcaucagcc

SEQ ID NO: 236870 - RNA, 18 nt, Human
uccugggcucaagugauu

SEQ ID NO: 236871 - RNA, 32 nt, Human
uccugggcucaagugauucucccaccuugacc

SEQ ID NO: 236872 - RNA, 32 nt, Human
uccugggcucaagugauucuccugccucagcc

SEQ ID NO: 236873 - RNA, 32 nt, Human
uccugggcucaagugauucuuccaccuaaauu

SEQ ID NO: 236874 - RNA, 32 nt, Human
uccugggcucaagugcuccuccugccuuggcc

SEQ ID NO: 236875 - RNA, 32 nt, Human
uccugggcucaagugguccuccugccucagcu

SEQ ID NO: 236876 - RNA, 32 nt, Human
uccugggcucaaguguccucccacuugagugc

SEQ ID NO: 236877 - RNA, 32 nt, Human
uccugggcucaaguguccuccuacuucagcuc

SEQ ID NO: 236878 - RNA, 32 nt, Human
uccugggcucaagugucuuccugccucagccu

SEQ ID NO: 236879 - RNA, 32 nt, Human
uccugggcucaaguguuccucucaccuuaucc

SEQ ID NO: 236880 - RNA, 23 nt, Human
uccugggcucaauacucuugccu

SEQ ID NO: 236881 - RNA, 32 nt, Human
uccugggcucacaccauucuccugccucagcc

SEQ ID NO: 236882 - RNA, 32 nt, Human
uccugggcucacgugauccucucaccucaguc

SEQ ID NO: 236883 - RNA, 32 nt, Human
uccugggcucagaaguggguaaaagaagggag

SEQ ID NO: 236884 - RNA, 21 nt, Human
uccugggcucagaugauccac

SEQ ID NO: 236885 - RNA, 27 nt, Human
uccugggcucaggccauccuccugccu

SEQ ID NO: 236886 - RNA, 32 nt, Human
uccugggcucaggccauccuccugccucggcc

SEQ ID NO: 236887 - RNA, 32 nt, Human
uccugggcucaggugauccucccgccugagcc

SEQ ID NO: 236888 - RNA, 23 nt, Human
uccugggcucaggugauccucuu

SEQ ID NO: 236889 - RNA, 18 nt, Human
uccugggcucaggugauu

SEQ ID NO: 236890 - RNA, 24 nt, Human
uccugggcucaugugauccuccca

SEQ ID NO: 236891 - RNA, 32 nt, Human
uccugggcucaugugauccucccaccucagcc

SEQ ID NO: 236892 - RNA, 32 nt, Human
uccugggcuccagugauccucccccuucagcc

SEQ ID NO: 236893 - RNA, 32 nt, Human
uccugggcuccagugauccucucaccucagcc

SEQ ID NO: 236894 - RNA, 23 nt, Human
uccugggcuccccaucuccuucu

SEQ ID NO: 236895 - RNA, 32 nt, Human
uccugggcucgaaugauccucccaccuuggcc

SEQ ID NO: 236896 - RNA, 32 nt, Human
uccugggcucgaaugguccucucacugcagcc

SEQ ID NO: 236897 - RNA, 20 nt, Human
uccugggcucgccuccugcc

SEQ ID NO: 236898 - RNA, 32 nt, Human
uccugggcucgggugauccucccaccucggcc

SEQ ID NO: 236899 - RNA, 32 nt, Human
uccugggcugaagugauccuccugcuucagcc

SEQ ID NO: 236900 - RNA, 32 nt, Human
uccugggcugaagugauucucucaccucagcc

SEQ ID NO: 236901 - RNA, 32 nt, Human
uccugggcugccaggauuuagcagggaggugg

SEQ ID NO: 236902 - RNA, 32 nt, Human
uccugggcugcccuccccuccuccgggacugc

SEQ ID NO: 236903 - RNA, 32 nt, Human
uccugggcuguugccaacaguaggccugaaga

SEQ ID NO: 236904 - RNA, 32 nt, Human
uccugggcuuaaaugacucuucugccucagcc

SEQ ID NO: 236905 - RNA, 32 nt, Human
uccugggcuuaagugauccucccaccucaguc

SEQ ID NO: 236906 - RNA, 32 nt, Human
uccugggcuuaagugaucugcccgccuuggcc

SEQ ID NO: 236907 - RNA, 18 nt, Human
uccugggcuuaagugauu

SEQ ID NO: 236908 - RNA, 32 nt, Human
uccugggcuuacuccuagcugcauaggagagu

SEQ ID NO: 236909 - RNA, 32 nt, Human
uccugggcuucauggcugcagagcagggcaug

SEQ ID NO: 236910 - RNA, 32 nt, Human
uccugggcuugugccauccacccuacugguua

SEQ ID NO: 236911 - RNA, 32 nt, Human
uccuggggaagcuccuggaagccugagcaggc

SEQ ID NO: 236912 - RNA, 26 nt, Human
uccuggggaaggcucucuuccugcuu

SEQ ID NO: 236913 - RNA, 32 nt, Human
uccuggggacaguggcccaggacuugggaugu

SEQ ID NO: 236914 - RNA, 32 nt, Human
uccuggggaccucuggagccucagccagaagu

SEQ ID NO: 236915 - RNA, 32 nt, Human
uccuggggagaugcugccagcacacaggggcc

SEQ ID NO: 236916 - RNA, 23 nt, Human
uccuggggagccugccucuguuu

SEQ ID NO: 236917 - RNA, 32 nt, Human
uccuggggaggaugagaugguccaugccgggu

SEQ ID NO: 236918 - RNA, 32 nt, Human
uccuggggaggcaggaggcacaugugaggguc

SEQ ID NO: 236919 - RNA, 21 nt, Human
uccuggggagucugccugccu

SEQ ID NO: 236920 - RNA, 32 nt, Human
uccuggggagucuguggggaagaugccaucca

SEQ ID NO: 236921 - RNA, 32 nt, Human
uccuggggaguuacuuacauguucaucugcug

SEQ ID NO: 236922 - RNA, 20 nt, Human
uccuggggaguuuccugucu

SEQ ID NO: 236923 - RNA, 32 nt, Human
uccuggggauuuaccugggaugguggcugccu

SEQ ID NO: 236924 - RNA, 32 nt, Human
uccuggggcaaugcagagucucaggccugagc

SEQ ID NO: 236925 - RNA, 32 nt, Human
uccuggggcacccuacccucucuuauuuggag

SEQ ID NO: 236926 - RNA, 22 nt, Human
uccuggggcagcaggcucagca

SEQ ID NO: 236927 - RNA, 32 nt, Human
uccuggggcagccugcaccaccccauagaguu

SEQ ID NO: 236928 - RNA, 32 nt, Human
uccuggggcaggcaggaggcagugggcuucau

SEQ ID NO: 236929 - RNA, 32 nt, Human
uccuggggccaagugauccucccaccucagcc

SEQ ID NO: 236930 - RNA, 24 nt, Human
uccuggggccucagucuccugucu

SEQ ID NO: 236931 - RNA, 32 nt, Human
uccuggggccuccagccccucacacugcuguu

SEQ ID NO: 236932 - RNA, 32 nt, Human
uccuggggccuggcuuuggcuggaggggcuag

SEQ ID NO: 236933 - RNA, 32 nt, Human
uccuggggcgugcacucgccugggcagugggg

SEQ ID NO: 236934 - RNA, 32 nt, Human
uccuggggcuggugucucaggagcaggggucu

SEQ ID NO: 236935 - RNA, 32 nt, Human
uccugggggaaugggacugauggagacagaca

SEQ ID NO: 236936 - RNA, 32 nt, Human
uccugggggagccucuucuucacuggaaaccu

SEQ ID NO: 236937 - RNA, 23 nt, Human
uccugggggcaggguuccugccu

SEQ ID NO: 236938 - RNA, 21 nt, Human
uccugggggccccgcuugucu

SEQ ID NO: 236939 - RNA, 32 nt, Human
uccugggggcucuccagaccccucucuaggac

SEQ ID NO: 236940 - RNA, 21 nt, Human
uccugggguagcuccugaccu

SEQ ID NO: 236941 - RNA, 27 nt, Human
uccuggggucaggcuguucuccugccu

SEQ ID NO: 236942 - RNA, 32 nt, Human
uccuggggugagggggaaugaguguucuugac

SEQ ID NO: 236943 - RNA, 31 nt, Human
uccugggguggacucagaugggugggacaca

SEQ ID NO: 236944 - RNA, 32 nt, Human
uccugggguggaggagaccagggcaggauaga

SEQ ID NO: 236945 - RNA, 32 nt, Human
uccuggggugggaggcacaggggcaaagcaau

SEQ ID NO: 236946 - RNA, 32 nt, Human
uccuggggugugagucggaugggaccacggcc

SEQ ID NO: 236947 - RNA, 25 nt, Human
uccugggguguucugcccuuugcuu

SEQ ID NO: 236948 - RNA, 25 nt, Human
uccugggguuugucuaucuuuguuu

SEQ ID NO: 236949 - RNA, 22 nt, Human
uccugggguuuuuuguuuguuu

SEQ ID NO: 236950 - RNA, 32 nt, Human
uccuggguaaggcuucauuugaaugaaggguu

SEQ ID NO: 236951 - RNA, 23 nt, Human
uccuggguagcugggauuacagg

SEQ ID NO: 236952 - RNA, 32 nt, Human
uccuggguagggaggucacucccucuacucac

SEQ ID NO: 236953 - RNA, 21 nt, Human
uccugggucacauuuccuucu

SEQ ID NO: 236954 - RNA, 32 nt, Human
uccugggucaggagcccagcuggcugggccca

SEQ ID NO: 236955 - RNA, 32 nt, Human
uccuggguccaagugauucuccugcuucagcc

SEQ ID NO: 236956 - RNA, 32 nt, Human
uccugggucuguucccauggaguuuuuggugc

SEQ ID NO: 236957 - RNA, 32 nt, Human
uccugggucuucccucucccugccucagccuc

SEQ ID NO: 236958 - RNA, 32 nt, Human
uccugggugaucaccacaucuuuuaggggaag

SEQ ID NO: 236959 - RNA, 22 nt, Human
uccugggugcaacugugcagcc

SEQ ID NO: 236960 - RNA, 32 nt, Human
uccugggugcacacuccucccuucccucgcug

SEQ ID NO: 236961 - RNA, 18 nt, Human
uccugggugcagccgggu

SEQ ID NO: 236962 - RNA, 19 nt, Human
uccugggugcauaggacca

SEQ ID NO: 236963 - RNA, 32 nt, Human
uccugggugcauucagucucucugccucugcc

SEQ ID NO: 236964 - RNA, 19 nt, Human
uccugggugcgugggggcc

SEQ ID NO: 236965 - RNA, 32 nt, Human
uccugggugcugcagauacugcagugaaguaa

SEQ ID NO: 236966 - RNA, 21 nt, Human
uccugggugcugggauuacag

SEQ ID NO: 236967 - RNA, 21 nt, Human
uccuggguggcacuucugccu

SEQ ID NO: 236968 - RNA, 32 nt, Human
uccuggguggcgccuucaucugcagcaugauc

SEQ ID NO: 236969 - RNA, 32 nt, Human
uccugggugggacagagcaggacaaugcaaga

SEQ ID NO: 236970 - RNA, 32 nt, Human
uccugggugggagcuuauggggugguggggca

SEQ ID NO: 236971 - RNA, 32 nt, Human
uccuggguggguggagcuggggagggcauggg

SEQ ID NO: 236972 - RNA, 32 nt, Human
uccugggugucagccagaacaugucuuucaac

SEQ ID NO: 236973 - RNA, 27 nt, Human
uccuggguucaaaccauucuccugccu

SEQ ID NO: 236974 - RNA, 32 nt, Human
uccuggguucaaaccauucuccugccucagcc

SEQ ID NO: 236975 - RNA, 32 nt, Human
uccuggguucaaacgauucuccugccucagcc

SEQ ID NO: 236976 - RNA, 32 nt, Human
uccuggguucaaacgauuguccugccucagcc

SEQ ID NO: 236977 - RNA, 32 nt, Human
uccuggguucaaaugauucuccugccucagcc

SEQ ID NO: 236978 - RNA, 32 nt, Human
uccuggguucaagcaauuuucuugccucagcc

SEQ ID NO: 236979 - RNA, 32 nt, Human
uccuggguucaagcaguucucuugccucagcc

SEQ ID NO: 236980 - RNA, 32 nt, Human
uccuggguucaagcgauucuccugccucagca

SEQ ID NO: 236981 - RNA, 32 nt, Human
uccuggguucaagcgauucuccugccucagcc

SEQ ID NO: 236982 - RNA, 32 nt, Human
uccuggguucaagcgauucuccugccucagcu

SEQ ID NO: 236983 - RNA, 32 nt, Human
uccuggguucaagcgauucuccugccucaggc

SEQ ID NO: 236984 - RNA, 32 nt, Human
uccuggguucaagcgauucuccugccucaguc

SEQ ID NO: 236985 - RNA, 32 nt, Human
uccuggguucaagcgauucuccugccucugcc

SEQ ID NO: 236986 - RNA, 32 nt, Human
uccuggguucaagcgauucucuugccucaacc

SEQ ID NO: 236987 - RNA, 32 nt, Human
uccuggguucaagcgauucucuugccucagcc

SEQ ID NO: 236988 - RNA, 32 nt, Human
uccuggguucaagcgauuguccugccucagcc

SEQ ID NO: 236989 - RNA, 32 nt, Human
uccuggguucaagcgauuuucuugccucugcc

SEQ ID NO: 236990 - RNA, 32 nt, Human
uccuggguucaagugacccucccaccucagcc

SEQ ID NO: 236991 - RNA, 32 nt, Human
uccuggguucaagugacucuugugccucagcc

SEQ ID NO: 236992 - RNA, 32 nt, Human
uccuggguucaagugaucauuccaccuuggcc

SEQ ID NO: 236993 - RNA, 32 nt, Human
uccuggguucaagugauccuuccucccaagua

SEQ ID NO: 236994 - RNA, 18 nt, Human
uccuggguucaagugauu

SEQ ID NO: 236995 - RNA, 32 nt, Human
uccuggguucaagugauucuacugccucagcc

SEQ ID NO: 236996 - RNA, 32 nt, Human
uccuggguucaagugauucucaugccucagcc

SEQ ID NO: 236997 - RNA, 32 nt, Human
uccuggguucaagugauucuccaccucagccu

SEQ ID NO: 236998 - RNA, 32 nt, Human
uccuggguucaagugauucuccagccucagcc

SEQ ID NO: 236999 - RNA, 32 nt, Human
uccuggguucaagugauucucccaccucaacc

SEQ ID NO: 237000 - RNA, 32 nt, Human
uccuggguucaagugauucuccugccucagcc

SEQ ID NO: 237001 - RNA, 32 nt, Human
uccuggguucaagugauucuccugccuuagcc

SEQ ID NO: 237002 - RNA, 32 nt, Human
uccuggguucaagugauucuccugcuucagcc

SEQ ID NO: 237003 - RNA, 32 nt, Human
uccuggguucaagugauucuccugucucagcc

SEQ ID NO: 237004 - RNA, 32 nt, Human
uccuggguucaagugauucucgugccucagcc

SEQ ID NO: 237005 - RNA, 32 nt, Human
uccuggguucaagugauucucgugcuucagcc

SEQ ID NO: 237006 - RNA, 32 nt, Human
uccuggguucaagugauucucuugccucagcc

SEQ ID NO: 237007 - RNA, 32 nt, Human
uccuggguucaagugauucucuugccucaguc

SEQ ID NO: 237008 - RNA, 32 nt, Human
uccuggguucaagugauucuucugccucaacc

SEQ ID NO: 237009 - RNA, 32 nt, Human
uccuggguucaagugauucuucugccucagcc

SEQ ID NO: 237010 - RNA, 32 nt, Human
uccuggguucaagugauucuucugcuucagcc

SEQ ID NO: 237011 - RNA, 32 nt, Human
uccuggguucaagugauucuugugccucagcc

SEQ ID NO: 237012 - RNA, 32 nt, Human
uccuggguucaagugauugucccgccucagcc

SEQ ID NO: 237013 - RNA, 32 nt, Human
uccuggguucaagugauuuuccugccucagcc

SEQ ID NO: 237014 - RNA, 27 nt, Human
uccuggguucacaccauucuccugccu

SEQ ID NO: 237015 - RNA, 32 nt, Human
uccuggguucacaccauucuccugccucagcc

SEQ ID NO: 237016 - RNA, 27 nt, Human
uccuggguucacaccauucucuugccu

SEQ ID NO: 237017 - RNA, 32 nt, Human
uccuggguucacaccauucucuugccucagcc

SEQ ID NO: 237018 - RNA, 32 nt, Human
uccuggguucacaucauucuccugccucagcc

SEQ ID NO: 237019 - RNA, 32 nt, Human
uccuggguucacaugauucuccugccucagcc

SEQ ID NO: 237020 - RNA, 32 nt, Human
uccuggguucacaugauucuccugccucagcu

SEQ ID NO: 237021 - RNA, 27 nt, Human
uccuggguucaccccauucuccuguuu

SEQ ID NO: 237022 - RNA, 32 nt, Human
uccuggguucacgcaauucuccugccucagcc

SEQ ID NO: 237023 - RNA, 27 nt, Human
uccuggguucacgccauccuccugccu

SEQ ID NO: 237024 - RNA, 32 nt, Human
uccuggguucacgccauccuccugccucggcc

SEQ ID NO: 237025 - RNA, 27 nt, Human
uccuggguucacgccauucuccugccu

SEQ ID NO: 237026 - RNA, 32 nt, Human
uccuggguucacgccauucuccugccucagcc

SEQ ID NO: 237027 - RNA, 32 nt, Human
uccuggguucacgccauucuccugccucagcu

SEQ ID NO: 237028 - RNA, 32 nt, Human
uccuggguucaggcgauucuccugccucagcc

SEQ ID NO: 237029 - RNA, 32 nt, Human
uccuggguucaggcgauucuccugccucccaa

SEQ ID NO: 237030 - RNA, 32 nt, Human
uccuggguucaggugauccuccugccucagcc

SEQ ID NO: 237031 - RNA, 27 nt, Human
uccuggguucaugccauucuccugccu

SEQ ID NO: 237032 - RNA, 32 nt, Human
uccuggguucaugccauucuccugccucagcc

SEQ ID NO: 237033 - RNA, 32 nt, Human
uccuggguucaugccauucuccugccucaguc

SEQ ID NO: 237034 - RNA, 32 nt, Human
uccuggguucaugccauucuccugccucggcc

SEQ ID NO: 237035 - RNA, 27 nt, Human
uccuggguucaugccauucuccugcuu

SEQ ID NO: 237036 - RNA, 27 nt, Human
uccuggguucaugccauuuuccugccu

SEQ ID NO: 237037 - RNA, 32 nt, Human
uccuggguucaugccauuuuccugccucagcc

SEQ ID NO: 237038 - RNA, 32 nt, Human
uccuggguucgaacgauucuccugccucagcc

SEQ ID NO: 237039 - RNA, 22 nt, Human
uccuggguucugucugcugcuu

SEQ ID NO: 237040 - RNA, 32 nt, Human
uccuggguugacaccauuuuccugccucagcc

SEQ ID NO: 237041 - RNA, 27 nt, Human
uccuggguugacgccauucuccugccu

SEQ ID NO: 237042 - RNA, 32 nt, Human
uccuggguugacgccauucuccugccucagcc

SEQ ID NO: 237043 - RNA, 32 nt, Human
uccuggguugacugagaagcggcggggaaagg

SEQ ID NO: 237044 - RNA, 27 nt, Human
uccuggguuuaagccauucuucugccu

SEQ ID NO: 237045 - RNA, 32 nt, Human
uccuggguuucugccugugugacucuggauaa

SEQ ID NO: 237046 - RNA, 32 nt, Human
uccuggguuucugucccucugaggcucaccag

SEQ ID NO: 237047 - RNA, 32 nt, Human
uccugguagcugggacuacaagugugagccac

SEQ ID NO: 237048 - RNA, 32 nt, Human
uccugguagggagugcguagcaggguggaguc

SEQ ID NO: 237049 - RNA, 32 nt, Human
uccugguaucaagccauucuccugccucagcc

SEQ ID NO: 237050 - RNA, 32 nt, Human
uccuggucacaucuuuggaucuguaaaauaua

SEQ ID NO: 237051 - RNA, 32 nt, Human
uccuggucacauucucugucuccuggaaugcu

SEQ ID NO: 237052 - RNA, 19 nt, Human
uccuggucaccacauagua

SEQ ID NO: 237053 - RNA, 32 nt, Human
uccugguccagucaccaccugcagccucggca

SEQ ID NO: 237054 - RNA, 32 nt, Human
uccugguccccggucucugggcucggacugac

SEQ ID NO: 237055 - RNA, 24 nt, Human
uccuggucucaagugauccgcccg

SEQ ID NO: 237056 - RNA, 32 nt, Human
uccuggucucaagugauccgcccgccucggcc

SEQ ID NO: 237057 - RNA, 32 nt, Human
uccuggucucaagugauccuccugccuuggcc

SEQ ID NO: 237058 - RNA, 32 nt, Human
uccuggucucaagugauccuccuuccucugcu

SEQ ID NO: 237059 - RNA, 32 nt, Human
uccuggucucaagugauucaccugccuccacc

SEQ ID NO: 237060 - RNA, 32 nt, Human
uccuggucucagaccuaugaugacuugucccu

SEQ ID NO: 237061 - RNA, 32 nt, Human
uccuggucuccagugauccuccuauuucagcc

SEQ ID NO: 237062 - RNA, 32 nt, Human
uccuggucucucucccugucaucaaucagggu

SEQ ID NO: 237063 - RNA, 32 nt, Human
uccuggucuguaacuugaauuguuucuuccac

SEQ ID NO: 237064 - RNA, 22 nt, Human
uccuggugaagcccaagguuga

SEQ ID NO: 237065 - RNA, 24 nt, Human
uccuggugagacauccucuuuaua

SEQ ID NO: 237066 - RNA, 32 nt, Human
uccuggugaggguucucuuccuggcuugcaga

SEQ ID NO: 237067 - RNA, 32 nt, Human
uccuggugagugcagcugaggggcuagggccc

SEQ ID NO: 237068 - RNA, 32 nt, Human
uccuggugcacugcugccuggugcccagcaca

SEQ ID NO: 237069 - RNA, 32 nt, Human
uccuggugcagccugguaauggggccucuuca

SEQ ID NO: 237070 - RNA, 32 nt, Human
uccuggugccaccucagaccccggggugaggg

SEQ ID NO: 237071 - RNA, 32 nt, Human
uccuggugcccugaucuccugcacugagcugu

SEQ ID NO: 237072 - RNA, 32 nt, Human
uccugguggccucugugugugucccuguggcc

SEQ ID NO: 237073 - RNA, 32 nt, Human
uccuggugggaggagagagggcacaucuccag

SEQ ID NO: 237074 - RNA, 31 nt, Human
uccugguggguggugggagucugggggaccc

SEQ ID NO: 237075 - RNA, 32 nt, Human
uccugguggguguggagagggaggcccaacag

SEQ ID NO: 237076 - RNA, 32 nt, Human
uccugguggucggcgggggaucugguggccug

SEQ ID NO: 237077 - RNA, 32 nt, Human
uccuggugucaccugggccugaccaccacuua

SEQ ID NO: 237078 - RNA, 32 nt, Human
uccuggugucaucacagccaagguuuuuaggu

SEQ ID NO: 237079 - RNA, 21 nt, Human
uccuggugucucuucuuggua

SEQ ID NO: 237080 - RNA, 32 nt, Human
uccuggugucugcccaccacuguccccuugcu

SEQ ID NO: 237081 - RNA, 31 nt, Human
uccuggugugagagaaggacauugacacuga

SEQ ID NO: 237082 - RNA, 32 nt, Human
uccugguguuacugaaaaacaggugugauccu

SEQ ID NO: 237083 - RNA, 32 nt, Human
uccugguguucgagguggagguuaggcgggug

SEQ ID NO: 237084 - RNA, 32 nt, Human
uccugguuaagcccgcucccaccagcuccugu

SEQ ID NO: 237085 - RNA, 32 nt, Human
uccugguucacugcacccucugccucccaggu

SEQ ID NO: 237086 - RNA, 32 nt, Human
uccugguuccaucucugcuauaugggaaugaa

SEQ ID NO: 237087 - RNA, 32 nt, Human
uccugguucccaagucuuguuguucaucacaa

SEQ ID NO: 237088 - RNA, 32 nt, Human
uccugguucccugaggguccucaggguggagg

SEQ ID NO: 237089 - RNA, 32 nt, Human
uccugguucuagcugcucacauguacaaauca

SEQ ID NO: 237090 - RNA, 32 nt, Human
uccugguucugaccugcacuugagugucggug

SEQ ID NO: 237091 - RNA, 32 nt, Human
uccugguucuguagcaaggcuuuugcugcaau

SEQ ID NO: 237092 - RNA, 32 nt, Human
uccugguugcaaccucucuuccucugggacuu

SEQ ID NO: 237093 - RNA, 32 nt, Human
uccugguugcagccaucguccugggcggcacg

SEQ ID NO: 237094 - RNA, 32 nt, Human
uccugguugggaauauucugugaugcucugac

SEQ ID NO: 237095 - RNA, 32 nt, Human
uccugguuggugcuggucaggcugacuagagg

SEQ ID NO: 237096 - RNA, 32 nt, Human
uccugguuucaagugaucugccugccucaguc

SEQ ID NO: 237097 - RNA, 32 nt, Human
uccugguuuccugaaggagguggguggaaacg

SEQ ID NO: 237098 - RNA, 32 nt, Human
uccugguuuguuccucucuccacugaagcuga

SEQ ID NO: 237099 - RNA, 32 nt, Human
uccugguuuucugccuuugguaucaucuuccu

SEQ ID NO: 237100 - RNA, 32 nt, Human
uccugguuuuuaauucugugcuaugucaaugg

SEQ ID NO: 237101 - RNA, 32 nt, Human
uccuguaaaccagcguuccagcauuugccaaa

SEQ ID NO: 237102 - RNA, 32 nt, Human
uccuguaaagacuucagugaaauagcuguuuu

SEQ ID NO: 237103 - RNA, 32 nt, Human
uccuguaaagccugcagaacugugagucaauu

SEQ ID NO: 237104 - RNA, 32 nt, Human
uccuguaacguuggauccuccuuuucuguccc

SEQ ID NO: 237105 - RNA, 32 nt, Human
uccuguaagccccugaauuaagcagaaagucu

SEQ ID NO: 237106 - RNA, 32 nt, Human
uccuguaagcugugcagaaccugcugcuaaca

SEQ ID NO: 237107 - RNA, 32 nt, Human
uccuguacacagugggaagauuuuaguucaca

SEQ ID NO: 237108 - RNA, 32 nt, Human
uccuguacaccucccuccuuuuucuccuuugu

SEQ ID NO: 237109 - RNA, 32 nt, Human
uccuguacagaaacccucccuggccucauccu

SEQ ID NO: 237110 - RNA, 32 nt, Human
uccuguacagccugcaaaacugugagucaauu

SEQ ID NO: 237111 - RNA, 32 nt, Human
uccuguacagccugcagaacuguggaccaauc

SEQ ID NO: 237112 - RNA, 32 nt, Human
uccuguacauuuccucaggaacccaaccugca

SEQ ID NO: 237113 - RNA, 32 nt, Human
uccuguaccaacacugaaauccagcugucaca

SEQ ID NO: 237114 - RNA, 24 nt, Human
uccuguaccuuggagguccauuca

SEQ ID NO: 237115 - RNA, 32 nt, Human
uccuguacgucaacucaucuggcuccaaggaa

SEQ ID NO: 237116 - RNA, 32 nt, Human
uccuguacuaccucacuccugaggggagaugc

SEQ ID NO: 237117 - RNA, 32 nt, Human
uccuguacuaccucacuccugaggggagaugu

SEQ ID NO: 237118 - RNA, 32 nt, Human
uccuguacucucucuucuccgugcacucaguc

SEQ ID NO: 237119 - RNA, 32 nt, Human
uccuguagaagucacuaauaaaggaguauuuu

SEQ ID NO: 237120 - RNA, 32 nt, Human
uccuguagaccuugacauucagaaagauguga

SEQ ID NO: 237121 - RNA, 32 nt, Human
uccuguagcauauggggagacuaaggccugga

SEQ ID NO: 237122 - RNA, 32 nt, Human
uccuguagcaucuuugcugggcuacgcagaag

SEQ ID NO: 237123 - RNA, 32 nt, Human
uccuguaggagaaaagucagcccugccccugg

SEQ ID NO: 237124 - RNA, 32 nt, Human
uccuguagggaucccagcuggggaaggugcag

SEQ ID NO: 237125 - RNA, 32 nt, Human
uccuguauaccuccuccagccaugaaguagag

SEQ ID NO: 237126 - RNA, 32 nt, Human
uccuguauagccugcgggacugugagucaauu

SEQ ID NO: 237127 - RNA, 32 nt, Human
uccuguauguagcacucaacugugcauugaga

SEQ ID NO: 237128 - RNA, 32 nt, Human
uccuguauuucccuuaauuccuccucccgacc

SEQ ID NO: 237129 - RNA, 32 nt, Human
uccugucaacagcaaucgcccauuuccaaagc

SEQ ID NO: 237130 - RNA, 32 nt, Human
uccugucaaccaggccaccucuccuucagugu

SEQ ID NO: 237131 - RNA, 32 nt, Human
uccugucaagagaccuaggucuacugauggca

SEQ ID NO: 237132 - RNA, 32 nt, Human
uccugucaaggccaucucaaaaggagaagcaa

SEQ ID NO: 237133 - RNA, 32 nt, Human
uccugucacccaggcuggaguacaguggcgug

SEQ ID NO: 237134 - RNA, 32 nt, Human
uccugucacugcaaucugugacauuccagaug

SEQ ID NO: 237135 - RNA, 32 nt, Human
uccugucacugcauuccaauggcagcuguacu

SEQ ID NO: 237136 - RNA, 32 nt, Human
uccugucagaaauaaaccaaggcucuaaaaga

SEQ ID NO: 237137 - RNA, 32 nt, Human
uccugucagagauaugcgaggucuccacugag

SEQ ID NO: 237138 - RNA, 32 nt, Human
uccugucagcccccucaccugcagccuguugc

SEQ ID NO: 237139 - RNA, 32 nt, Human
uccugucaggaggcagauaaugcuggugccuc

SEQ ID NO: 237140 - RNA, 19 nt, Human
uccugucagggaccagaug

SEQ ID NO: 237141 - RNA, 32 nt, Human
uccuguccaaguuugggcgcagaugguggagu

SEQ ID NO: 237142 - RNA, 32 nt, Human
uccuguccaaucucccugccauuucucuauuc

SEQ ID NO: 237143 - RNA, 22 nt, Human
uccuguccacagcuucccuuua

SEQ ID NO: 237144 - RNA, 32 nt, Human
uccuguccagcagguagugggugaauguguga

SEQ ID NO: 237145 - RNA, 32 nt, Human
uccugucccacugaggucagaguccuacagug

SEQ ID NO: 237146 - RNA, 19 nt, Human
uccuguccccagagcugua

SEQ ID NO: 237147 - RNA, 32 nt, Human
uccugucccccaggaaccucacagggguauca

SEQ ID NO: 237148 - RNA, 32 nt, Human
uccuguccccggcggggugccugcuguccguc

SEQ ID NO: 237149 - RNA, 32 nt, Human
uccuguccccuccugagauccauacuuagucc

SEQ ID NO: 237150 - RNA, 32 nt, Human
uccuguccccucuguuucccauggcccaagcc

SEQ ID NO: 237151 - RNA, 32 nt, Human
uccuguccccuuauccuuucucccucuguaaa

SEQ ID NO: 237152 - RNA, 32 nt, Human
uccugucccucaccuccuucaccaguguccgu

SEQ ID NO: 237153 - RNA, 31 nt, Human
uccugucccuccaaggaggcagggauggggg

SEQ ID NO: 237154 - RNA, 32 nt, Human
uccugucccugccugcucugggugcucaugga

SEQ ID NO: 237155 - RNA, 32 nt, Human
uccugucccugccuuuucaccccugcugccug

SEQ ID NO: 237156 - RNA, 23 nt, Human
uccugucccuuccccuucugcuu

SEQ ID NO: 237157 - RNA, 32 nt, Human
uccuguccgcccuucuccucugccauccagaa

SEQ ID NO: 237158 - RNA, 32 nt, Human
uccuguccuaucuccacugugccugccuaaau

SEQ ID NO: 237159 - RNA, 32 nt, Human
uccuguccuaugaggcccuccccauggcuuua

SEQ ID NO: 237160 - RNA, 32 nt, Human
uccuguccucaagugauccucccaccucagcc

SEQ ID NO: 237161 - RNA, 32 nt, Human
uccuguccucaccccacccugccaccaucagc

SEQ ID NO: 237162 - RNA, 32 nt, Human
uccuguccucugccagacuuuuuaaucucuuc

SEQ ID NO: 237163 - RNA, 32 nt, Human
uccuguccugaacaaggcagcggcuccuuggu

SEQ ID NO: 237164 - RNA, 32 nt, Human
uccuguccugacccucucugaauuauguuuca

SEQ ID NO: 237165 - RNA, 32 nt, Human
uccuguccuucacuguccuugccaucaccagc

SEQ ID NO: 237166 - RNA, 32 nt, Human
uccugucgcccaggcuggagugcaauggcacg

SEQ ID NO: 237167 - RNA, 32 nt, Human
uccugucggagaggaggguggacuucggagaa

SEQ ID NO: 237168 - RNA, 21 nt, Human
uccugucguccucugcggccu

SEQ ID NO: 237169 - RNA, 32 nt, Human
uccugucuacagcagcuuccucaguuuccuac

SEQ ID NO: 237170 - RNA, 32 nt, Human
uccugucuccaccucucagucccccuagaaug

SEQ ID NO: 237171 - RNA, 32 nt, Human
uccugucucccagggacauguaugcuuccagg

SEQ ID NO: 237172 - RNA, 32 nt, Human
uccugucucccgcuuuccucaccacauacagc

SEQ ID NO: 237173 - RNA, 32 nt, Human
uccugucuccucugaacgcccagcacacucag

SEQ ID NO: 237174 - RNA, 32 nt, Human
uccugucuccuggaggacaaggaugagggcuu

SEQ ID NO: 237175 - RNA, 32 nt, Human
uccugucuccuuggaccucuuugauucugugg

SEQ ID NO: 237176 - RNA, 32 nt, Human
uccugucucggccucccagagugcuggaauua

SEQ ID NO: 237177 - RNA, 32 nt, Human
uccugucucggcuguuguggguugcagguugg

SEQ ID NO: 237178 - RNA, 32 nt, Human
uccugucucucauccucuacaucuucaccaag

SEQ ID NO: 237179 - RNA, 32 nt, Human
uccugucucugccaccuccacaguucgauuga

SEQ ID NO: 237180 - RNA, 32 nt, Human
uccugucucuuuccuuucacccuagccugacu

SEQ ID NO: 237181 - RNA, 32 nt, Human
uccugucugaccacugcagaccagucucggag

SEQ ID NO: 237182 - RNA, 32 nt, Human
uccugucugacuguccugaaaaccagaaaagc

SEQ ID NO: 237183 - RNA, 32 nt, Human
uccugucugagcuugaggcccugggacuuggg

SEQ ID NO: 237184 - RNA, 32 nt, Human
uccugucugcagcugugaauagucauuugacu

SEQ ID NO: 237185 - RNA, 32 nt, Human
uccugucugccuggcuucuugucuguccugcu

SEQ ID NO: 237186 - RNA, 32 nt, Human
uccugucugcuggccucuccugcuacuuauca

SEQ ID NO: 237187 - RNA, 32 nt, Human
uccugucuggggagaucuggcagccaccaccu

SEQ ID NO: 237188 - RNA, 22 nt, Human
uccugucuguccaccuccuccu

SEQ ID NO: 237189 - RNA, 32 nt, Human
uccugucuguccuggaggugggagacaaggaa

SEQ ID NO: 237190 - RNA, 32 nt, Human
uccugucugucucggacagaaaacacgaggcu

SEQ ID NO: 237191 - RNA, 32 nt, Human
uccugucuuagcacugcccugcuagcucuucc

SEQ ID NO: 237192 - RNA, 32 nt, Human
uccugucuuauuccacugcuucucccagcauu

SEQ ID NO: 237193 - RNA, 32 nt, Human
uccugucuuccuccuugucccaugaaggccac

SEQ ID NO: 237194 - RNA, 32 nt, Human
uccugucuuucuggcccuuucuggaccagauc

SEQ ID NO: 237195 - RNA, 32 nt, Human
uccugugaacacagaggagcaccuguuugcug

SEQ ID NO: 237196 - RNA, 32 nt, Human
uccugugaacaguauugaaaaaccccaacggc

SEQ ID NO: 237197 - RNA, 32 nt, Human
uccugugaacaucuuagugaaauguuagguuc

SEQ ID NO: 237198 - RNA, 32 nt, Human
uccugugaagauuuuuaucuuuggacuacuag

SEQ ID NO: 237199 - RNA, 32 nt, Human
uccugugacugcacuguccgccugugggaugu

SEQ ID NO: 237200 - RNA, 32 nt, Human
uccugugagccccacucccggccccacucacu

SEQ ID NO: 237201 - RNA, 32 nt, Human
uccugugagccccacuccuggccccacucaca

SEQ ID NO: 237202 - RNA, 32 nt, Human
uccugugagccggggaccaugcagcccgaaac

SEQ ID NO: 237203 - RNA, 32 nt, Human
uccugugagcugggcguugcagucugcucgaa

SEQ ID NO: 237204 - RNA, 32 nt, Human
uccugugaggcagacaggacagugagguuguc

SEQ ID NO: 237205 - RNA, 32 nt, Human
uccugugaggggaauggucaguaccagcccuu

SEQ ID NO: 237206 - RNA, 32 nt, Human
uccugugaguagcuacggcacugcagcauucc

SEQ ID NO: 237207 - RNA, 32 nt, Human
uccugugagugccugcccucccuucaucuacg

SEQ ID NO: 237208 - RNA, 32 nt, Human
uccugugaguuucugggcucuggccuccugaa

SEQ ID NO: 237209 - RNA, 32 nt, Human
uccugugauaacuuaaaaggcucuuuuauguu

SEQ ID NO: 237210 - RNA, 32 nt, Human
uccugugauggaggauacuggcauccagcgag

SEQ ID NO: 237211 - RNA, 20 nt, Human
uccugugcaaacauauguua

SEQ ID NO: 237212 - RNA, 32 nt, Human
uccugugcaagggggagcuuugcuccaggaca

SEQ ID NO: 237213 - RNA, 32 nt, Human
uccugugcauuccaaguguugccugcaugccu

SEQ ID NO: 237214 - RNA, 32 nt, Human
uccugugcauugguggcaucacagaccccagc

SEQ ID NO: 237215 - RNA, 32 nt, Human
uccugugccagccuucaugcccagcccgcucu

SEQ ID NO: 237216 - RNA, 32 nt, Human
uccugugcccacuccggcuuguccucaucucu

SEQ ID NO: 237217 - RNA, 32 nt, Human
uccugugccccagcugccaaaggagagugggg

SEQ ID NO: 237218 - RNA, 19 nt, Human
uccugugccggccgagagg

SEQ ID NO: 237219 - RNA, 32 nt, Human
uccugugccucaccacagcuugcuuagagcaa

SEQ ID NO: 237220 - RNA, 30 nt, Human
uccugugccucaucacugcuccugucacca

SEQ ID NO: 237221 - RNA, 32 nt, Human
uccugugccugauucauugggucccacaccca

SEQ ID NO: 237222 - RNA, 32 nt, Human
uccugugccugugacucuccccaaauugcccu

SEQ ID NO: 237223 - RNA, 32 nt, Human
uccugugcuaucuucucuucuauccaaguaga

SEQ ID NO: 237224 - RNA, 32 nt, Human
uccugugcucaagugacccucccaccucauuc

SEQ ID NO: 237225 - RNA, 24 nt, Human
uccugugcucaagugauccgcuca

SEQ ID NO: 237226 - RNA, 32 nt, Human
uccugugcucccuccuagcgcaguggccaagc

SEQ ID NO: 237227 - RNA, 32 nt, Human
uccugugcucugaugcuacuucugccuagccc

SEQ ID NO: 237228 - RNA, 32 nt, Human
uccuguggaaggcagaggcagugagggaggug

SEQ ID NO: 237229 - RNA, 32 nt, Human
uccuguggacagcucaccuagcggcaauggcu

SEQ ID NO: 237230 - RNA, 32 nt, Human
uccuguggacagcucaccuagcugcaauggcu

SEQ ID NO: 237231 - RNA, 32 nt, Human
uccuguggacaggccaggcaggugggccucag

SEQ ID NO: 237232 - RNA, 32 nt, Human
uccuguggagcuuuuccuccugcuugggccua

SEQ ID NO: 237233 - RNA, 32 nt, Human
uccuguggagggcugggcacccguacccgcag

SEQ ID NO: 237234 - RNA, 32 nt, Human
uccuguggccaggcacagagccaggugcuuua

SEQ ID NO: 237235 - RNA, 21 nt, Human
uccuguggcccuggccucagg

SEQ ID NO: 237236 - RNA, 32 nt, Human
uccuguggcucugccaucagcuccaauaucaa

SEQ ID NO: 237237 - RNA, 32 nt, Human
uccuguggcucuggagugagggccagguucag

SEQ ID NO: 237238 - RNA, 32 nt, Human
uccuguggcuucccuuggcaggcugcauucag

SEQ ID NO: 237239 - RNA, 32 nt, Human
uccugugggcagaagagacaggaguggaccag

SEQ ID NO: 237240 - RNA, 32 nt, Human
uccugugggccacugcacaucugccucucuca

SEQ ID NO: 237241 - RNA, 32 nt, Human
uccugugggcccucuuucaaaguccagccuag

SEQ ID NO: 237242 - RNA, 32 nt, Human
uccugugggccuugcggcaucuucaucacuga

SEQ ID NO: 237243 - RNA, 32 nt, Human
uccuguggucuccgcaccucuccagcuccugc

SEQ ID NO: 237244 - RNA, 32 nt, Human
uccugugguucacagcuguaguauggagauua

SEQ ID NO: 237245 - RNA, 32 nt, Human
uccuguguaggggaucaggaccagccucgcaa

SEQ ID NO: 237246 - RNA, 23 nt, Human
uccugugucauccucggggccua

SEQ ID NO: 237247 - RNA, 32 nt, Human
uccugugucauccucggggccuaugagcuccg

SEQ ID NO: 237248 - RNA, 32 nt, Human
uccugugucccaccccucaccccuuuaccccc

SEQ ID NO: 237249 - RNA, 23 nt, Human
uccuguguccuccuccacuuccc

SEQ ID NO: 237250 - RNA, 32 nt, Human
uccugugugcaacguggagcagacagccucga

SEQ ID NO: 237251 - RNA, 32 nt, Human
uccuguguggcagaaaguaaaagaaaauuccc

SEQ ID NO: 237252 - RNA, 32 nt, Human
uccuguguuacuuuacugaucaggugacuuug

SEQ ID NO: 237253 - RNA, 32 nt, Human
uccuguguucaagugauucuugugccucagcc

SEQ ID NO: 237254 - RNA, 32 nt, Human
uccuguguucucugcaggaggcuuaucuaguu

SEQ ID NO: 237255 - RNA, 32 nt, Human
uccuguguucucuggcuucagaguuucaccug

SEQ ID NO: 237256 - RNA, 32 nt, Human
uccuguguugcccaggcugguauucaaacucc

SEQ ID NO: 237257 - RNA, 24 nt, Human
uccuguguuuagauuauccacuca

SEQ ID NO: 237258 - RNA, 32 nt, Human
uccuguguuucccauggccaguggccaugccc

SEQ ID NO: 237259 - RNA, 20 nt, Human
uccuguuaacccuccaccuc

SEQ ID NO: 237260 - RNA, 32 nt, Human
uccuguuaagccuguggaacugugaguccaau

SEQ ID NO: 237261 - RNA, 32 nt, Human
uccuguuaaugaaugagguugaucagaucaaa

SEQ ID NO: 237262 - RNA, 32 nt, Human
uccuguuacccaggcuggaggacagugaugug

SEQ ID NO: 237263 - RNA, 32 nt, Human
uccuguuacuaaacaccauccccagccuguaa

SEQ ID NO: 237264 - RNA, 32 nt, Human
uccuguuaggagagcugaggccagcugcccac

SEQ ID NO: 237265 - RNA, 32 nt, Human
uccuguuaggugcuucgucugaaagugaacuc

SEQ ID NO: 237266 - RNA, 32 nt, Human
uccuguuauuuggaggcuuuuuggcauaguug

SEQ ID NO: 237267 - RNA, 32 nt, Human
uccuguucaaagaagcuuucaccaugggcuuc

SEQ ID NO: 237268 - RNA, 32 nt, Human
uccuguucacccaggaggucaacaauggaagg

SEQ ID NO: 237269 - RNA, 32 nt, Human
uccuguucaccuaggugaggugugugcagcag

SEQ ID NO: 237270 - RNA, 32 nt, Human
uccuguucaucauagcauuggaaguucuggcc

SEQ ID NO: 237271 - RNA, 32 nt, Human
uccuguucccaaaucacaagggccugaaggug

SEQ ID NO: 237272 - RNA, 32 nt, Human
uccuguuccccucacagcuccagacaugucca

SEQ ID NO: 237273 - RNA, 32 nt, Human
uccuguucccuccugguccuggacaccuccca

SEQ ID NO: 237274 - RNA, 32 nt, Human
uccuguuccugggugcgccuccaccucccuuc

SEQ ID NO: 237275 - RNA, 32 nt, Human
uccuguucucccagcuccucaccugggcuacu

SEQ ID NO: 237276 - RNA, 32 nt, Human
uccuguucuccucauugccugccuuccauuca

SEQ ID NO: 237277 - RNA, 32 nt, Human
uccuguucuccucugcuucauucucguccagc

SEQ ID NO: 237278 - RNA, 32 nt, Human
uccuguucucuuuccuugacugugccauugga

SEQ ID NO: 237279 - RNA, 32 nt, Human
uccuguucugcaccccucuccccaugggaccu

SEQ ID NO: 237280 - RNA, 24 nt, Human
uccuguucuuccacuuuccugccu

SEQ ID NO: 237281 - RNA, 22 nt, Human
uccuguucuuucugaacgggug

SEQ ID NO: 237282 - RNA, 21 nt, Human
uccuguugcaaugacacauag

SEQ ID NO: 237283 - RNA, 32 nt, Human
uccuguugcccacugcacugccccagcccagc

SEQ ID NO: 237284 - RNA, 32 nt, Human
uccuguugcccuuuuaagcugcggcuugacag

SEQ ID NO: 237285 - RNA, 19 nt, Human
uccuguugccucuccugcc

SEQ ID NO: 237286 - RNA, 32 nt, Human
uccuguugcgcccagcccuggucucagcagcg

SEQ ID NO: 237287 - RNA, 32 nt, Human
uccuguugcugauuuucugucuugagggaaaa

SEQ ID NO: 237288 - RNA, 32 nt, Human
uccuguuggaauuuggacuugccaugaggugu

SEQ ID NO: 237289 - RNA, 32 nt, Human
uccuguugguuuucuuaucugccuauuucccg

SEQ ID NO: 237290 - RNA, 32 nt, Human
uccuguugugcaggcuggagugcaguggcaca

SEQ ID NO: 237291 - RNA, 32 nt, Human
uccuguugugcaggcuguagugcaguggcacg

SEQ ID NO: 237292 - RNA, 32 nt, Human
uccuguuguuucuguuccugaccuugggcagg

SEQ ID NO: 237293 - RNA, 32 nt, Human
uccuguuucacagcuggaggaagccuggguau

SEQ ID NO: 237294 - RNA, 32 nt, Human
uccuguuucccuucccuuccacugccucugcc

SEQ ID NO: 237295 - RNA, 32 nt, Human
uccuguuuccucugcugacccagcugggaggg

SEQ ID NO: 237296 - RNA, 28 nt, Human
uccuguuucgcucucagagguuuauuua

SEQ ID NO: 237297 - RNA, 32 nt, Human
uccuguuucucacccagcaccuggggagaucg

SEQ ID NO: 237298 - RNA, 32 nt, Human
uccuguuucucaucuguggcuucugaaacacu

SEQ ID NO: 237299 - RNA, 32 nt, Human
uccuguuucucuacauccucuucagcaucugu

SEQ ID NO: 237300 - RNA, 32 nt, Human
uccuguuucugccuuuguccucaauagaacca

SEQ ID NO: 237301 - RNA, 32 nt, Human
uccuguuucugcucuuuuccuccacggacucc

SEQ ID NO: 237302 - RNA, 27 nt, Human
uccuguuucuucccauuuccuggcaca

SEQ ID NO: 237303 - RNA, 32 nt, Human
uccuguuugaccucgucaaucaucgcagacug

SEQ ID NO: 237304 - RNA, 32 nt, Human
uccuguuuguaaggcugugccugcucagagcu

SEQ ID NO: 237305 - RNA, 32 nt, Human
uccuguuuguacaaagucuugcuuuuauaagg

SEQ ID NO: 237306 - RNA, 32 nt, Human
uccuguuugucuugugucuugagagcuuggcc

SEQ ID NO: 237307 - RNA, 32 nt, Human
uccuguuugugccuccccuuagucccuucccu

SEQ ID NO: 237308 - RNA, 32 nt, Human
uccuguuuguugcaacagaaaacucggauagu

SEQ ID NO: 237309 - RNA, 21 nt, Human
uccuguuuuagccuucugucu

SEQ ID NO: 237310 - RNA, 32 nt, Human
uccuguuuucugagcugccacaggggaggagu

SEQ ID NO: 237311 - RNA, 32 nt, Human
uccuguuuuucuucccuuugucagucuucgca

SEQ ID NO: 237312 - RNA, 32 nt, Human
uccuguuuuuguuuuguuugguguuuuguucc

SEQ ID NO: 237313 - RNA, 32 nt, Human
uccuuaaaaguggaggaggggccagcgugggg

SEQ ID NO: 237314 - RNA, 32 nt, Human
uccuuaaaccacaaaagaaaacagugaaagua

SEQ ID NO: 237315 - RNA, 32 nt, Human
uccuuaacaaauucuggcugacgaagguccag

SEQ ID NO: 237316 - RNA, 32 nt, Human
uccuuaacauauuugcacaauuuuauagcaca

SEQ ID NO: 237317 - RNA, 22 nt, Human
uccuuaacauuucuuggcaaca

SEQ ID NO: 237318 - RNA, 32 nt, Human
uccuuaagaaaugcuauauuuugugagugcaa

SEQ ID NO: 237319 - RNA, 32 nt, Human
uccuuaagaccaucuguucagggguucacaaa

SEQ ID NO: 237320 - RNA, 32 nt, Human
uccuuaaggcccagagguagcuuggacaagcc

SEQ ID NO: 237321 - RNA, 32 nt, Human
uccuuaagggaggagagcaagcagguguggcc

SEQ ID NO: 237322 - RNA, 25 nt, Human
uccuuaauccuagaugauuugcuca

SEQ ID NO: 237323 - RNA, 32 nt, Human
uccuuaaugccuccuucacugggccuuccuag

SEQ ID NO: 237324 - RNA, 32 nt, Human
uccuuacauuuguagguguucucuccauuaug

SEQ ID NO: 237325 - RNA, 32 nt, Human
uccuuacccaggagugcuggcuuauagaguua

SEQ ID NO: 237326 - RNA, 23 nt, Human
uccuuacccaugcccacggcaca

SEQ ID NO: 237327 - RNA, 32 nt, Human
uccuuacccccuuucuagcugugugauguaga

SEQ ID NO: 237328 - RNA, 32 nt, Human
uccuuaccccuuccuuuccuuaccuuguuucu

SEQ ID NO: 237329 - RNA, 32 nt, Human
uccuuacccugccuuugcccuuucaggaaggg

SEQ ID NO: 237330 - RNA, 32 nt, Human
uccuuaccuacugggaucacgugaccugaccu

SEQ ID NO: 237331 - RNA, 24 nt, Human
uccuuaccucaggugauccaccca

SEQ ID NO: 237332 - RNA, 23 nt, Human
uccuuaccucaggugaucugcuu

SEQ ID NO: 237333 - RNA, 32 nt, Human
uccuuaccugguguguuuucuauaaaucuuca

SEQ ID NO: 237334 - RNA, 32 nt, Human
uccuuaccuuaaaucucuuggcuuuuacuggg

SEQ ID NO: 237335 - RNA, 32 nt, Human
uccuuaccuugauguugaacugcgaauccucc

SEQ ID NO: 237336 - RNA, 32 nt, Human
uccuuaccuuggaaggugaaugauccugccag

SEQ ID NO: 237337 - RNA, 32 nt, Human
uccuuaccuuggaaggugaaugauccuggcag

SEQ ID NO: 237338 - RNA, 32 nt, Human
uccuuacgcagaggaauuggugugccuuaaag

SEQ ID NO: 237339 - RNA, 32 nt, Human
uccuuacuccugcauuguucuuugccagagac

SEQ ID NO: 237340 - RNA, 26 nt, Human
uccuuacuccuggguggggaguggga

SEQ ID NO: 237341 - RNA, 32 nt, Human
uccuuacucuggcuccccuccuggaugucucc

SEQ ID NO: 237342 - RNA, 21 nt, Human
uccuuacugcugaacauccug

SEQ ID NO: 237343 - RNA, 32 nt, Human
uccuuacuuccaggcugggugccguaacucac

SEQ ID NO: 237344 - RNA, 32 nt, Human
uccuuagaaagagggggaagccaauggccugu

SEQ ID NO: 237345 - RNA, 32 nt, Human
uccuuagacugaugcuuugacugaaucaucac

SEQ ID NO: 237346 - RNA, 32 nt, Human
uccuuagaguagagaagaaaaguaggggugca

SEQ ID NO: 237347 - RNA, 32 nt, Human
uccuuagcaaggggcucagaacaccccgcucu

SEQ ID NO: 237348 - RNA, 32 nt, Human
uccuuagcccgccggcucccagccuuugaugc

SEQ ID NO: 237349 - RNA, 32 nt, Human
uccuuagcccuagggcaguuucccucagacag

SEQ ID NO: 237350 - RNA, 32 nt, Human
uccuuagcccugugucaguuuacccucgaugc

SEQ ID NO: 237351 - RNA, 32 nt, Human
uccuuagccgggaagcuggcagaggagagccg

SEQ ID NO: 237352 - RNA, 32 nt, Human
ucggaccugcacacgacuccccaacucccgcc

SEQ ID NO: 237353 - RNA, 22 nt, Human
ucggaccugggcuuuucuccca

SEQ ID NO: 237354 - RNA, 32 nt, Human
ucggacgaccaggaugggaagaucguagauga

SEQ ID NO: 237355 - RNA, 32 nt, Human
ucggacgccccaggcauauacaagcugaguuu

SEQ ID NO: 237356 - RNA, 32 nt, Human
ucggacggcuacucgggagcuuauugcacaag

SEQ ID NO: 237357 - RNA, 32 nt, Human
ucggacgggaccugggcucucuccacgauucu

SEQ ID NO: 237358 - RNA, 32 nt, Human
ucggacuccauggcuaagaccacagacgggca

SEQ ID NO: 237359 - RNA, 32 nt, Human
ucggacucccaaagugcugggauuacaggcgu

SEQ ID NO: 237360 - RNA, 19 nt, Human
ucggacuccugggcucaag

SEQ ID NO: 237361 - RNA, 32 nt, Human
ucggacugcaaguggagaauggggacuguagu

SEQ ID NO: 237362 - RNA, 32 nt, Human
ucggacugccaagaaggaagaauuugaacauc

SEQ ID NO: 237363 - RNA, 32 nt, Human
ucggacugugugcagguugcagaggaagagua

SEQ ID NO: 237364 - RNA, 32 nt, Human
ucggacuuucccucagcccuuccaggccucgc

SEQ ID NO: 237365 - RNA, 28 nt, Human
ucggagaaggcucuacagggaagggguc

SEQ ID NO: 237366 - RNA, 32 nt, Human
ucggagaccacuccagcucggacggacccacu

SEQ ID NO: 237367 - RNA, 32 nt, Human
ucggagaccagccugggcaacacagggagacg

SEQ ID NO: 237368 - RNA, 32 nt, Human
ucggagaccagccugggcaacauggcgagauc

SEQ ID NO: 237369 - RNA, 32 nt, Human
ucggagacccugucuccaccucuagguuuggc

SEQ ID NO: 237370 - RNA, 32 nt, Human
ucggagagagaagacguggagggagggacaga

SEQ ID NO: 237371 - RNA, 32 nt, Human
ucggagagagaagggaaggggaguguccccag

SEQ ID NO: 237372 - RNA, 32 nt, Human
ucggagaggggacguggccuggggaagagcac

SEQ ID NO: 237373 - RNA, 32 nt, Human
ucggagaguccugguggguggugggagucugg

SEQ ID NO: 237374 - RNA, 32 nt, Human
ucggagaugaugcagcacacacacaauucccc

SEQ ID NO: 237375 - RNA, 32 nt, Human
ucggagcacggugacggcgccaugucccuaau

SEQ ID NO: 237376 - RNA, 32 nt, Human
ucggagcacuuuacagaagcugacuguacauu

SEQ ID NO: 237377 - RNA, 32 nt, Human
ucggagcaucgccgaggagaucaagaaccugg

SEQ ID NO: 237378 - RNA, 32 nt, Human
ucggagccacugcacugcuggcugcagacaca

SEQ ID NO: 237379 - RNA, 32 nt, Human
ucggagcccacguccuccucggugacacagga

SEQ ID NO: 237380 - RNA, 32 nt, Human
ucggagcccagcacuccugggucucggggucg

SEQ ID NO: 237381 - RNA, 20 nt, Human
ucggagcccuuauccaggua

SEQ ID NO: 237382 - RNA, 32 nt, Human
ucggagccuggcgauggcuuccagaaaccccu

SEQ ID NO: 237383 - RNA, 32 nt, Human
ucggagcgagagagcgcugcgccugccgccgc

SEQ ID NO: 237384 - RNA, 32 nt, Human
ucggagcgcgcaggaugcgcugggcggccgcc

SEQ ID NO: 237385 - RNA, 32 nt, Human
ucggagcuccaaccacaucugccugcaugccu

SEQ ID NO: 237386 - RNA, 32 nt, Human
ucggagcucccaguuuacuucacugcaagccg

SEQ ID NO: 237387 - RNA, 21 nt, Human
ucggagcugcgcucugagcua

SEQ ID NO: 237388 - RNA, 32 nt, Human
ucggagcugcuacccgcagacuucucccgcac

SEQ ID NO: 237389 - RNA, 32 nt, Human
ucggagcuggcuggaaucucucagccucaccu

SEQ ID NO: 237390 - RNA, 32 nt, Human
ucggaggaaagagccuugaacaguugugcgug

SEQ ID NO: 237391 - RNA, 32 nt, Human
ucggaggaaccuuccuugggggcagcagcccu

SEQ ID NO: 237392 - RNA, 23 nt, Human
ucggaggaccugcugacacugga

SEQ ID NO: 237393 - RNA, 32 nt, Human
ucggaggacgcacccucacuccccugcugccu

SEQ ID NO: 237394 - RNA, 32 nt, Human
ucggaggagccuguguccaccuccagucucgg

SEQ ID NO: 237395 - RNA, 21 nt, Human
ucggaggcacagaagcugcaa

SEQ ID NO: 237396 - RNA, 22 nt, Human
ucggaggcacuggacgccgcca

SEQ ID NO: 237397 - RNA, 32 nt, Human
ucggaggccccggagcaucggaaagggcggcu

SEQ ID NO: 237398 - RNA, 32 nt, Human
ucggaggccgggaggccggagcugcgggcgua

SEQ ID NO: 237399 - RNA, 32 nt, Human
ucggaggcgaggcgaggaagggagcuggaaua

SEQ ID NO: 237400 - RNA, 32 nt, Human
ucggaggcgugcuuccuccacccgccggcuag

SEQ ID NO: 237401 - RNA, 32 nt, Human
ucggaggcguucagcugcuucaagaugaagcu

SEQ ID NO: 237402 - RNA, 32 nt, Human
ucggaggcuacccgcuguggccggugccagcu

SEQ ID NO: 237403 - RNA, 32 nt, Human
ucggaggcucaggcccccugagcugggccucu

SEQ ID NO: 237404 - RNA, 32 nt, Human
ucggaggcugcaggaggcggccuagcuguggg

SEQ ID NO: 237405 - RNA, 32 nt, Human
ucggaggcugcugccccuuccaccucuggaaa

SEQ ID NO: 237406 - RNA, 32 nt, Human
ucggagggagauaaugaaucagaggaauuucu

SEQ ID NO: 237407 - RNA, 32 nt, Human
ucggagggagccucugugcagaugugcuuucu

SEQ ID NO: 237408 - RNA, 32 nt, Human
ucggagggaggaagugaggaagggucaaggau

SEQ ID NO: 237409 - RNA, 22 nt, Human
ucggagggaugacugcuggagg

SEQ ID NO: 237410 - RNA, 32 nt, Human
ucggaggggaaagggagaucccacgugcaagu

SEQ ID NO: 237411 - RNA, 32 nt, Human
ucggagggggccagagacugagcucuggucac

SEQ ID NO: 237412 - RNA, 23 nt, Human
ucggaggucccgggauuacggug

SEQ ID NO: 237413 - RNA, 32 nt, Human
ucggaggucuuucugccugccuguccucaugc

SEQ ID NO: 237414 - RNA, 32 nt, Human
ucggaggugggcgggguugcagugacuggugg

SEQ ID NO: 237415 - RNA, 32 nt, Human
ucggaggugguggaggaggaggaggaggagga

SEQ ID NO: 237416 - RNA, 24 nt, Human
ucggaguagcugggaucacagcug

SEQ ID NO: 237417 - RNA, 32 nt, Human
ucggagucugcacaggagagaggccuuccuuu

SEQ ID NO: 237418 - RNA, 32 nt, Human
ucggagucugggaggagagcagcugcgggcgc

SEQ ID NO: 237419 - RNA, 32 nt, Human
ucggagugcaaccuggcuggggcggggaggag

SEQ ID NO: 237420 - RNA, 32 nt, Human
ucggagugcucugggagcgggcuccacagccu

SEQ ID NO: 237421 - RNA, 32 nt, Human
ucggaguggaguuuccuagcuggugccugucc

SEQ ID NO: 237422 - RNA, 24 nt, Human
ucggaguggcugggauuacaggug

SEQ ID NO: 237423 - RNA, 32 nt, Human
ucggaguugagacuggcuuguugcuggcccca

SEQ ID NO: 237424 - RNA, 32 nt, Human
ucggauaucccuucauucuugcugaguucauc

SEQ ID NO: 237425 - RNA, 32 nt, Human
ucggaucacugcaaccuccaccuccuagguuc

SEQ ID NO: 237426 - RNA, 32 nt, Human
ucggauccuuuuucucuuuucgaguuguuagg

SEQ ID NO: 237427 - RNA, 32 nt, Human
ucggaucucagggccguggacacacacccccu

SEQ ID NO: 237428 - RNA, 32 nt, Human
ucggaucucaguccuucauggagaccuggucc

SEQ ID NO: 237429 - RNA, 32 nt, Human
ucggaucuuuucaaccugcuccuccggguugu

SEQ ID NO: 237430 - RNA, 32 nt, Human
ucggaugaagaaauggagaguaaaugggggag

SEQ ID NO: 237431 - RNA, 32 nt, Human
ucggaugcaucucuccaaaagccaccaagguc

SEQ ID NO: 237432 - RNA, 32 nt, Human
ucggaugccagcugcaccccgccuggcucgca

SEQ ID NO: 237433 - RNA, 32 nt, Human
ucggaugcgguggcucacaccuguaaucccag

SEQ ID NO: 237434 - RNA, 32 nt, Human
ucggaugcuagcacuugacacugugagcgcac

SEQ ID NO: 237435 - RNA, 32 nt, Human
ucggaugggcgcugcauaaacagccugcaggg

SEQ ID NO: 237436 - RNA, 32 nt, Human
ucggauucaaccgauucuugugccucagccuc

SEQ ID NO: 237437 - RNA, 32 nt, Human
ucggauugccuucuuucaauuuccuugugaaa

SEQ ID NO: 237438 - RNA, 32 nt, Human
ucggcaaauugcuuaucucuagguaguuuaaa

SEQ ID NO: 237439 - RNA, 32 nt, Human
ucggcaacaugccaagaccccgucucuauuuu

SEQ ID NO: 237440 - RNA, 32 nt, Human
ucggcaauuugaggaaggucuugcugucucag

SEQ ID NO: 237441 - RNA, 32 nt, Human
ucggcacacugcaaccuucgccucccagauuc

SEQ ID NO: 237442 - RNA, 32 nt, Human
ucggcacauaugcauguaugcccagguccuga

SEQ ID NO: 237443 - RNA, 32 nt, Human
ucggcaccguccuuuccuuucucccucgcguu

SEQ ID NO: 237444 - RNA, 32 nt, Human
ucggcaccuccaccauugcccccggccuaaga

SEQ ID NO: 237445 - RNA, 32 nt, Human
ucggcaccuccccuccccaacgccucugcgcc

SEQ ID NO: 237446 - RNA, 32 nt, Human
ucggcaccuggcccuggcagcacagcucucag

SEQ ID NO: 237447 - RNA, 32 nt, Human
ucggcaccuuucacccagcccaagcagcggcg

SEQ ID NO: 237448 - RNA, 32 nt, Human
ucggcacugaggcagaggaggcaagggcuggu

SEQ ID NO: 237449 - RNA, 32 nt, Human
ucggcagaaggaacuugccuugucucagauga

SEQ ID NO: 237450 - RNA, 32 nt, Human
ucggcagagucacccacccugcccuuccccag

SEQ ID NO: 237451 - RNA, 18 nt, Human
ucggcagagucuggggua

SEQ ID NO: 237452 - RNA, 32 nt, Human
ucggcagaugugggagaggauggacgagggau

SEQ ID NO: 237453 - RNA, 32 nt, Human
ucggcagcagagggaacagggaagaaaccuaa

SEQ ID NO: 237454 - RNA, 32 nt, Human
ucggcagcaucuuuaauuuaucuugcuuucca

SEQ ID NO: 237455 - RNA, 32 nt, Human
ucggcagcggccucagcacagagcaggggagc

SEQ ID NO: 237456 - RNA, 32 nt, Human
ucggcaggagccucucaauggaguccacuucc

SEQ ID NO: 237457 - RNA, 32 nt, Human
ucggcaggauguuagggcagcagcagcagcaa

SEQ ID NO: 237458 - RNA, 32 nt, Human
ucggcaggcugaagacacuagaauccugaccu

SEQ ID NO: 237459 - RNA, 32 nt, Human
ucggcaggcugcagcuguccccggguggccug

SEQ ID NO: 237460 - RNA, 32 nt, Human
ucggcagggcaggcagcuccaggagggcuucg

SEQ ID NO: 237461 - RNA, 23 nt, Human
ucggcaggggagcaggauucccg

SEQ ID NO: 237462 - RNA, 32 nt, Human
ucggcagguccuugagcaacuggugugugaaa

SEQ ID NO: 237463 - RNA, 32 nt, Human
ucggcaucagcgugccucccacccccauccug

SEQ ID NO: 237464 - RNA, 32 nt, Human
ucggcauccacccaguccaucccaccaucacc

SEQ ID NO: 237465 - RNA, 32 nt, Human
ucggcaugaccucucccuccccuggccacgug

SEQ ID NO: 237466 - RNA, 19 nt, Human
ucggccaaccaggcucuga

SEQ ID NO: 237467 - RNA, 32 nt, Human
ucggccaccagaaacgcuuagcacgucaccaa

SEQ ID NO: 237468 - RNA, 32 nt, Human
ucggccacccaaagugcugggauuacaggcgu

SEQ ID NO: 237469 - RNA, 32 nt, Human
ucggccacccaccucaacaucuccuucaacaa

SEQ ID NO: 237470 - RNA, 17 nt, Human
ucggccaccucccacca

SEQ ID NO: 237471 - RNA, 32 nt, Human
ucggccaccucgccagcucaggcacccgcugc

SEQ ID NO: 237472 - RNA, 32 nt, Human
ucggccacugcacuccgggcugggcgacagag

SEQ ID NO: 237473 - RNA, 32 nt, Human
ucggccagaacagcagcagcagcgaggagagc

SEQ ID NO: 237474 - RNA, 32 nt, Human
ucggccagagcggcgcuggcagaggagugucc

SEQ ID NO: 237475 - RNA, 32 nt, Human
ucggccagagcuggggcaggagaggggccucu

SEQ ID NO: 237476 - RNA, 32 nt, Human
ucggccagcaccucugcccuccagaaccugca

SEQ ID NO: 237477 - RNA, 32 nt, Human
ucggccagccuggcugucaguuggggauucca

SEQ ID NO: 237478 - RNA, 32 nt, Human
ucggccaggcuagagugcaguggcgcugucuc

SEQ ID NO: 237479 - RNA, 32 nt, Human
ucggccaggcuggaaugcaauggugccaacuu

SEQ ID NO: 237480 - RNA, 21 nt, Human
ucggccaggcuggagugcagu

SEQ ID NO: 237481 - RNA, 22 nt, Human
ucggccaggcuggagugcagug

SEQ ID NO: 237482 - RNA, 23 nt, Human
ucggccaggcuggagugcagugg

SEQ ID NO: 237483 - RNA, 32 nt, Human
ucggccaggcuggagugcaguggugcaaucac

SEQ ID NO: 237484 - RNA, 32 nt, Human
ucggccagguuggagugcaguggugcaaucuc

SEQ ID NO: 237485 - RNA, 32 nt, Human
ucggccaguccucgguccucaggcuuguggcu

SEQ ID NO: 237486 - RNA, 32 nt, Human
ucggccaguggcgacagcaggagcugagccua

SEQ ID NO: 237487 - RNA, 32 nt, Human
ucggccaugugggagguaugacccuggugccu

SEQ ID NO: 237488 - RNA, 27 nt, Human
ucggcccacguguauuguccgggcuca

SEQ ID NO: 237489 - RNA, 32 nt, Human
ucggcccacugaaaccuccaccucccggguuc

SEQ ID NO: 237490 - RNA, 32 nt, Human
ucggcccacugcaaccucugccuccuggguuc

SEQ ID NO: 237491 - RNA, 32 nt, Human
ucggcccacuugcuuaguucuugggcuggacc

SEQ ID NO: 237492 - RNA, 32 nt, Human
ucggcccaggagggcggggucccgugguggag

SEQ ID NO: 237493 - RNA, 32 nt, Human
ucggccccaccagaucuccauucuuugccaug

SEQ ID NO: 237494 - RNA, 32 nt, Human
ucggccccaccaugucgagccucggcgguggc

SEQ ID NO: 237495 - RNA, 32 nt, Human
ucggccccaccuaccucccacccggucuuccu

SEQ ID NO: 237496 - RNA, 21 nt, Human
ucggcccccguccgcccucuc

SEQ ID NO: 237497 - RNA, 20 nt, Human
ucggcccccuccaucgggcu

SEQ ID NO: 237498 - RNA, 32 nt, Human
ucggccccuccagccccgggccggaccuccug

SEQ ID NO: 237499 - RNA, 32 nt, Human
ucggccccucccccaagucucuucugugcaag

SEQ ID NO: 237500 - RNA, 32 nt, Human
ucggccccucuuucccugucgccugcagccac

SEQ ID NO: 237501 - RNA, 23 nt, Human
ucggccccucuuugcggccgcuc

SEQ ID NO: 237502 - RNA, 32 nt, Human
ucggccccugucccccuccacaauucagaggc

SEQ ID NO: 237503 - RNA, 32 nt, Human
ucggcccgccugccuccacuccugccuccacc

SEQ ID NO: 237504 - RNA, 32 nt, Human
ucggcccucacccagggcccugccucgggucc

SEQ ID NO: 237505 - RNA, 32 nt, Human
ucggcccuccacugcggaccucuccugagugg

SEQ ID NO: 237506 - RNA, 22 nt, Human
ucggcccucggccccggcgcuc

SEQ ID NO: 237507 - RNA, 32 nt, Human
ucggcccugcauuccuacaucuugugucugua

SEQ ID NO: 237508 - RNA, 32 nt, Human
ucggcccugcccccaguauacugaccauuccc

SEQ ID NO: 237509 - RNA, 32 nt, Human
ucggccgccugucagugcaaugcugccccaug

SEQ ID NO: 237510 - RNA, 32 nt, Human
ucggccggaagaagauaaagaaaacaacacgc

SEQ ID NO: 237511 - RNA, 32 nt, Human
ucggccgggcugcugcugcugcugcuccaggu

SEQ ID NO: 237512 - RNA, 32 nt, Human
ucggccucacaaagugcugggauuacaggcgu

SEQ ID NO: 237513 - RNA, 32 nt, Human
ucggccucacaaagugcugggauuacaggugu

SEQ ID NO: 237514 - RNA, 32 nt, Human
ucggccucaguuaagccuuuguggacuccagg

SEQ ID NO: 237515 - RNA, 32 nt, Human
ucggccuccaaaagugcugggauuacaggugu

SEQ ID NO: 237516 - RNA, 32 nt, Human
ucggccuccaaaagugcugggauuacuagcac

SEQ ID NO: 237517 - RNA, 32 nt, Human
ucggccucccaaaaugcugggauuacaagcgu

SEQ ID NO: 237518 - RNA, 32 nt, Human
ucggccucccaaaaugcugggauuacagaugu

SEQ ID NO: 237519 - RNA, 32 nt, Human
ucggccucccaaaaugcugggauuacaggccu

SEQ ID NO: 237520 - RNA, 32 nt, Human
ucggccucccaaaaugcugggauuacaggcgu

SEQ ID NO: 237521 - RNA, 32 nt, Human
ucggccucccaaaaugcugggauuacaggggu

SEQ ID NO: 237522 - RNA, 32 nt, Human
ucggccucccaaaaugcugggauuacaggugu

SEQ ID NO: 237523 - RNA, 32 nt, Human
ucggccucccaaaaugcugggauuacaugcau

SEQ ID NO: 237524 - RNA, 32 nt, Human
ucggccucccaaaaugcugggauuaccggugu

SEQ ID NO: 237525 - RNA, 32 nt, Human
ucggccucccaaaaugcugggauuagaggugu

SEQ ID NO: 237526 - RNA, 32 nt, Human
ucggccucccaaaaugcugggauugcagacau

SEQ ID NO: 237527 - RNA, 32 nt, Human
ucggccucccaaaauguugggauuacaggcau

SEQ ID NO: 237528 - RNA, 32 nt, Human
ucggccucccaaaauugcugggauuacaggug

SEQ ID NO: 237529 - RNA, 32 nt, Human
ucggccucccaaacugcugggauuacaggcgu

SEQ ID NO: 237530 - RNA, 32 nt, Human
ucggccucccaaagaacugggauuacaggcau

SEQ ID NO: 237531 - RNA, 32 nt, Human
ucggccucccaaagagcugagauuacaggcgu

SEQ ID NO: 237532 - RNA, 32 nt, Human
ucggccucccaaagagcuggaauuacaggaga

SEQ ID NO: 237533 - RNA, 32 nt, Human
ucggccucccaaagcacugggauuacaggcau

SEQ ID NO: 237534 - RNA, 32 nt, Human
ucggccucccaaagcacugggauuacaggcgu

SEQ ID NO: 237535 - RNA, 32 nt, Human
ucggccucccaaagcgcuaggauuacaggugu

SEQ ID NO: 237536 - RNA, 32 nt, Human
ucggccucccaaagcgcugggauuacaggcgu

SEQ ID NO: 237537 - RNA, 32 nt, Human
ucggccucccaaaguacugggauuacaggccu

SEQ ID NO: 237538 - RNA, 32 nt, Human
ucggccucccaaaguacugggauuacaggcgu

SEQ ID NO: 237539 - RNA, 32 nt, Human
ucggccucccaaaguacugggauuauaggcgu

SEQ ID NO: 237540 - RNA, 32 nt, Human
ucggccucccaaaguacugggauuauaggugu

SEQ ID NO: 237541 - RNA, 32 nt, Human
ucggccucccaaaguauugggauuacccgcgu

SEQ ID NO: 237542 - RNA, 32 nt, Human
ucggccucccaaagugaugggauuacaggcau

SEQ ID NO: 237543 - RNA, 32 nt, Human
ucggccucccaaagugccgggauuacaggcau

SEQ ID NO: 237544 - RNA, 32 nt, Human
ucggccucccaaagugccgggauuacaggcgu

SEQ ID NO: 237545 - RNA, 32 nt, Human
ucggccucccaaagugcuaagauuacaggcgu

SEQ ID NO: 237546 - RNA, 32 nt, Human
ucggccucccaaagugcuaggauuacagaagg

SEQ ID NO: 237547 - RNA, 32 nt, Human
ucggccucccaaagugcuaggauuacaggagu

SEQ ID NO: 237548 - RNA, 32 nt, Human
ucggccucccaaagugcuaggauuacaggcau

SEQ ID NO: 237549 - RNA, 32 nt, Human
ucggccucccaaagugcuaggauuacaggccc

SEQ ID NO: 237550 - RNA, 32 nt, Human
ucggccucccaaagugcuaggauuacaggcgu

SEQ ID NO: 237551 - RNA, 32 nt, Human
ucggccucccaaagugcuaggauuacaggugu

SEQ ID NO: 237552 - RNA, 32 nt, Human
ucggccucccaaagugcuaggauuauaggcau

SEQ ID NO: 237553 - RNA, 32 nt, Human
ucggccucccaaagugcugagauuacagaagu

SEQ ID NO: 237554 - RNA, 32 nt, Human
ucggccucccaaagugcugagauuacagacgu

SEQ ID NO: 237555 - RNA, 32 nt, Human
ucggccucccaaagugcugagauuacaggcau

SEQ ID NO: 237556 - RNA, 32 nt, Human
ucggccucccaaagugcugagauuacaggccu

SEQ ID NO: 237557 - RNA, 32 nt, Human
ucggccucccaaagugcugagauuacaggcuu

SEQ ID NO: 237558 - RNA, 32 nt, Human
ucggccucccaaagugcugagauuacaggggu

SEQ ID NO: 237559 - RNA, 32 nt, Human
ucggccucccaaagugcugagauuacaggugu

SEQ ID NO: 237560 - RNA, 32 nt, Human
ucggccucccaaagugcugagauuacgggcau

SEQ ID NO: 237561 - RNA, 32 nt, Human
ucggccucccaaagugcugcgauuacaggcau

SEQ ID NO: 237562 - RNA, 32 nt, Human
ucggccucccaaagugcuggaauuacaggcga

SEQ ID NO: 237563 - RNA, 32 nt, Human
ucggccucccaaagugcuggaauuacaggcgu

SEQ ID NO: 237564 - RNA, 32 nt, Human
ucggccucccaaagugcuggauuacaggcgug

SEQ ID NO: 237565 - RNA, 32 nt, Human
ucggccucccaaagugcuggauuacaggugug

SEQ ID NO: 237566 - RNA, 32 nt, Human
ucggccucccaaagugcuggcauuacaggugg

SEQ ID NO: 237567 - RNA, 32 nt, Human
ucggccucccaaagugcugggacuacaggcag

SEQ ID NO: 237568 - RNA, 32 nt, Human
ucggccucccaaagugcugggacuacaggcau

SEQ ID NO: 237569 - RNA, 32 nt, Human
ucggccucccaaagugcugggacuauaagugu

SEQ ID NO: 237570 - RNA, 32 nt, Human
ucggccucccaaagugcugggacugcaggcgu

SEQ ID NO: 237571 - RNA, 32 nt, Human
ucggccucccaaagugcugggaucacagacgu

SEQ ID NO: 237572 - RNA, 32 nt, Human
ucggccucccaaagugcugggaugacaggcau

SEQ ID NO: 237573 - RNA, 32 nt, Human
ucggccucccaaagugcugggaugacaggcgu

SEQ ID NO: 237574 - RNA, 32 nt, Human
ucggccucccaaagugcugggaugaccagcau

SEQ ID NO: 237575 - RNA, 32 nt, Human
ucggccucccaaagugcugggauuaaagcugu

SEQ ID NO: 237576 - RNA, 32 nt, Human
ucggccucccaaagugcugggauuaaaggcgu

SEQ ID NO: 237577 - RNA, 32 nt, Human
ucggccucccaaagugcugggauuaaggcgug

SEQ ID NO: 237578 - RNA, 32 nt, Human
ucggccucccaaagugcugggauuacaagcau

SEQ ID NO: 237579 - RNA, 32 nt, Human
ucggccucccaaagugcugggauuacaagggu

SEQ ID NO: 237580 - RNA, 32 nt, Human
ucggccucccaaagugcugggauuacacgcgu

SEQ ID NO: 237581 - RNA, 32 nt, Human
ucggccucccaaagugcugggauuacagacgu

SEQ ID NO: 237582 - RNA, 32 nt, Human
ucggccucccaaagugcugggauuacagagug

SEQ ID NO: 237583 - RNA, 32 nt, Human
ucggccucccaaagugcugggauuacagaugu

SEQ ID NO: 237584 - RNA, 32 nt, Human
ucggccucccaaagugcugggauuacagcugu

SEQ ID NO: 237585 - RNA, 32 nt, Human
ucggccucccaaagugcugggauuacaggcac

SEQ ID NO: 237586 - RNA, 32 nt, Human
ucggccucccaaagugcugggauuacaggcag

SEQ ID NO: 237587 - RNA, 32 nt, Human
ucggccucccaaagugcugggauuacaggcau

SEQ ID NO: 237588 - RNA, 32 nt, Human
ucggccucccaaagugcugggauuacaggccu

SEQ ID NO: 237589 - RNA, 32 nt, Human
ucggccucccaaagugcugggauuacaggcgc

SEQ ID NO: 237590 - RNA, 32 nt, Human
ucggccucccaaagugcugggauuacaggcgu

SEQ ID NO: 237591 - RNA, 32 nt, Human
ucggccucccaaagugcugggauuacaggcug

SEQ ID NO: 237592 - RNA, 32 nt, Human
ucggccucccaaagugcugggauuacaggcuu

SEQ ID NO: 237593 - RNA, 32 nt, Human
ucggccucccaaagugcugggauuacagggau

SEQ ID NO: 237594 - RNA, 32 nt, Human
ucggccucccaaagugcugggauuacaggugc

SEQ ID NO: 237595 - RNA, 32 nt, Human
ucggccucccaaagugcugggauuacaggugg

SEQ ID NO: 237596 - RNA, 32 nt, Human
ucggccucccaaagugcugggauuacaggugu

SEQ ID NO: 237597 - RNA, 32 nt, Human
ucggccucccaaagugcugggauuacagguuu

SEQ ID NO: 237598 - RNA, 32 nt, Human
ucggccucccaaagugcugggauuacagucau

SEQ ID NO: 237599 - RNA, 32 nt, Human
ucggccucccaaagugcugggauuacaugcgu

SEQ ID NO: 237600 - RNA, 32 nt, Human
ucggccucccaaagugcugggauuaccggcau

SEQ ID NO: 237601 - RNA, 32 nt, Human
ucggccucccaaagugcugggauuacgggcau

SEQ ID NO: 237602 - RNA, 32 nt, Human
ucggccucccaaagugcugggauuacgggugu

SEQ ID NO: 237603 - RNA, 32 nt, Human
ucggccucccaaagugcugggauuacuuuaca

SEQ ID NO: 237604 - RNA, 32 nt, Human
ucggccucccaaagugcugggauuagaggcuu

SEQ ID NO: 237605 - RNA, 32 nt, Human
ucggccucccaaagugcugggauuauacaugu

SEQ ID NO: 237606 - RNA, 32 nt, Human
ucggccucccaaagugcugggauuauagaugu

SEQ ID NO: 237607 - RNA, 32 nt, Human
ucggccucccaaagugcugggauuauaggcau

SEQ ID NO: 237608 - RNA, 32 nt, Human
ucggccucccaaagugcugggauuauaggcgu

SEQ ID NO: 237609 - RNA, 32 nt, Human
ucggccucccaaagugcugggauuauaggugu

SEQ ID NO: 237610 - RNA, 32 nt, Human
ucggccucccaaagugcugggauuccaggcgu

SEQ ID NO: 237611 - RNA, 32 nt, Human
ucggccucccaaagugcugggauuccuuucuu

SEQ ID NO: 237612 - RNA, 32 nt, Human
ucggccucccaaagugcugggauugcaggcau

SEQ ID NO: 237613 - RNA, 32 nt, Human
ucggccucccaaagugcugggauugcaggcgu

SEQ ID NO: 237614 - RNA, 32 nt, Human
ucggccucccaaagugcugggauugugggugu

SEQ ID NO: 237615 - RNA, 32 nt, Human
ucggccucccaaagugcuguaauuacaggcau

SEQ ID NO: 237616 - RNA, 32 nt, Human
ucggccucccaaagugcuuggauuacaggcau

SEQ ID NO: 237617 - RNA, 32 nt, Human
ucggccucccaaagugcuuggauuacaggugu

SEQ ID NO: 237618 - RNA, 32 nt, Human
ucggccucccaaagugcuuggauuauaggcgu

SEQ ID NO: 237619 - RNA, 32 nt, Human
ucggccucccaaaguggugggauuacagacgu

SEQ ID NO: 237620 - RNA, 32 nt, Human
ucggccucccaaaguguagggauuacaggcgu

SEQ ID NO: 237621 - RNA, 32 nt, Human
ucggccucccaaaguguggggauuacgggugu

SEQ ID NO: 237622 - RNA, 32 nt, Human
ucggccucccaaaguguugggaucacaggcgu

SEQ ID NO: 237623 - RNA, 32 nt, Human
ucggccucccaaaguguugggauuacaggcau

SEQ ID NO: 237624 - RNA, 32 nt, Human
ucggccucccaaaguguugggauuacaggcgu

SEQ ID NO: 237625 - RNA, 32 nt, Human
ucggccucccaaaguguugggauuacaggugu

SEQ ID NO: 237626 - RNA, 32 nt, Human
ucggccucccaaaguucugggauuacaaguaa

SEQ ID NO: 237627 - RNA, 32 nt, Human
ucggccucccaaaguucugggauuacaggcau

SEQ ID NO: 237628 - RNA, 32 nt, Human
ucggccucccaaaguucugggauuacaggcgu

SEQ ID NO: 237629 - RNA, 32 nt, Human
ucggccucccaaaguucugggauuacaggcuu

SEQ ID NO: 237630 - RNA, 32 nt, Human
ucggccucccaaaguucugggauuacaggggu

SEQ ID NO: 237631 - RNA, 32 nt, Human
ucggccucccaaaguucugggauuacaggugu

SEQ ID NO: 237632 - RNA, 32 nt, Human
ucggccucccaaaguucugggauuacgggcgu

SEQ ID NO: 237633 - RNA, 32 nt, Human
ucggccucccaaaguucugggauuaugggugu

SEQ ID NO: 237634 - RNA, 32 nt, Human
ucggccucccaacgugcugggauuacaggugu

SEQ ID NO: 237635 - RNA, 32 nt, Human
ucggccucccaacgugcugggauuauaggcgu

SEQ ID NO: 237636 - RNA, 32 nt, Human
ucggccucccaaggugcugggauugcaggcgu

SEQ ID NO: 237637 - RNA, 32 nt, Human
ucggccucccaaguagcugggauugcaggugc

SEQ ID NO: 237638 - RNA, 32 nt, Human
ucggccucccaauguguugggauuacaggcgu

SEQ ID NO: 237639 - RNA, 32 nt, Human
ucggccucccacagugcugggauuacaggccu

SEQ ID NO: 237640 - RNA, 32 nt, Human
ucggccucccacagugcugggauuaccggcgu

SEQ ID NO: 237641 - RNA, 32 nt, Human
ucggccucccagaaugcugggauuacaggcgu

SEQ ID NO: 237642 - RNA, 32 nt, Human
ucggccucccagagugcugggacuacaggcau

SEQ ID NO: 237643 - RNA, 32 nt, Human
ucggccucccagagugcugggauuacaggcau

SEQ ID NO: 237644 - RNA, 32 nt, Human
ucggccucccagagugcugggauuacaggcgu

SEQ ID NO: 237645 - RNA, 32 nt, Human
ucggccucccagagugcugggauuacaggugu

SEQ ID NO: 237646 - RNA, 32 nt, Human
ucggccucccagagugcugggauuauaggcgu

SEQ ID NO: 237647 - RNA, 32 nt, Human
ucggccucccagagugcugggauuuacaggca

SEQ ID NO: 237648 - RNA, 32 nt, Human
ucggccucccagguagcugggauuauaggcgu

SEQ ID NO: 237649 - RNA, 32 nt, Human
ucggccucccauaaugcugggauuacaggcgu

SEQ ID NO: 237650 - RNA, 32 nt, Human
ucggccucccauagugcugggauuacaggugu

SEQ ID NO: 237651 - RNA, 32 nt, Human
ucggccuccccaagugcugggauuauaggcau

SEQ ID NO: 237652 - RNA, 32 nt, Human
ucggccuccccaaguguugggauuacaggcgu

SEQ ID NO: 237653 - RNA, 24 nt, Human
ucggccuccccgccccaggcguca

SEQ ID NO: 237654 - RNA, 32 nt, Human
ucggccucccgaaaugcugggauuacaggcau

SEQ ID NO: 237655 - RNA, 32 nt, Human
ucggccucccgaagugcugggauuacaggcgg

SEQ ID NO: 237656 - RNA, 32 nt, Human
ucggccucccgaagugcugggauuauaggugu

SEQ ID NO: 237657 - RNA, 32 nt, Human
ucggccucccgaagugcugggauugcaggcgu

SEQ ID NO: 237658 - RNA, 32 nt, Human
ucggccucccgaguagcugggauuacaggugu

SEQ ID NO: 237659 - RNA, 32 nt, Human
ucggccucccggggugcugggauuauaggcgu

SEQ ID NO: 237660 - RNA, 32 nt, Human
ucggccucccggguggcugggauugcaggcac

SEQ ID NO: 237661 - RNA, 32 nt, Human
ucggccucccuaguagcugggauuacaggcgc

SEQ ID NO: 237662 - RNA, 18 nt, Human
ucggccucccuggcccca

SEQ ID NO: 237663 - RNA, 32 nt, Human
ucggccuccgaaaaugcugggauuacaggcgu

SEQ ID NO: 237664 - RNA, 32 nt, Human
ucggccuccgaaaaugcugggauuacaggugu

SEQ ID NO: 237665 - RNA, 32 nt, Human
ucggccuccgaaagugcugggauuacaggcgu

SEQ ID NO: 237666 - RNA, 32 nt, Human
ucggccuccuaaagugcugggauuacaggcac

SEQ ID NO: 237667 - RNA, 32 nt, Human
ucggccuccuaaagugcugggauuacaggcau

SEQ ID NO: 237668 - RNA, 32 nt, Human
ucggccuccuaaagugcugggauuacaggcgu

SEQ ID NO: 237669 - RNA, 32 nt, Human
ucggccuccuaaagugcugggauuacaggugu

SEQ ID NO: 237670 - RNA, 32 nt, Human
ucggccuccuaaaguucugggauuacaggagu

SEQ ID NO: 237671 - RNA, 32 nt, Human
ucggccuccugaagugcugggauuacaggcgu

SEQ ID NO: 237672 - RNA, 32 nt, Human
ucggccucucaaaaugcugggauuacaggugu

SEQ ID NO: 237673 - RNA, 32 nt, Human
ucggccucucaaacugcugggauuacaggcac

SEQ ID NO: 237674 - RNA, 32 nt, Human
ucggccucucaaagcacugggauuacaggugu

SEQ ID NO: 237675 - RNA, 32 nt, Human
ucggccucucaaagugcugggauuaaaggcgu

SEQ ID NO: 237676 - RNA, 32 nt, Human
ucggccucucaaagugcugggauuacaggcau

SEQ ID NO: 237677 - RNA, 32 nt, Human
ucggccucucaaagugcugggauuacaggcgu

SEQ ID NO: 237678 - RNA, 32 nt, Human
ucggccucucaaagugcugggauuacaggcuu

SEQ ID NO: 237679 - RNA, 32 nt, Human
ucggccucucaaagugcugggauuagaggcuu

SEQ ID NO: 237680 - RNA, 32 nt, Human
ucggccucucaaagugcugggauuauaggcgu

SEQ ID NO: 237681 - RNA, 32 nt, Human
ucggccucucaaaguguugggauuacaggcgu

SEQ ID NO: 237682 - RNA, 32 nt, Human
ucggccucuccccacagaauacaguucgccau

SEQ ID NO: 237683 - RNA, 32 nt, Human
ucggccucuccuggcccugccucccagcaagu

SEQ ID NO: 237684 - RNA, 32 nt, Human
ucggccucugaaagugcugggauuacaggcgu

SEQ ID NO: 237685 - RNA, 32 nt, Human
ucggccucugcagucccaacgucugccucaca

SEQ ID NO: 237686 - RNA, 32 nt, Human
ucggccucugggccgggccccucugcccugug

SEQ ID NO: 237687 - RNA, 32 nt, Human
ucggccucuuaaagugcugggauuacaggcgu

SEQ ID NO: 237688 - RNA, 32 nt, Human
ucggccugacccucgggccucuccgagucuuu

SEQ ID NO: 237689 - RNA, 32 nt, Human
ucggccugccaaacugcugggauuauaggcgu

SEQ ID NO: 237690 - RNA, 32 nt, Human
ucggccugccaaagugcugggauuacaggcuu

SEQ ID NO: 237691 - RNA, 22 nt, Human
ucggccugcggugggggcgcuu

SEQ ID NO: 237692 - RNA, 32 nt, Human
ucggccuggcugcuuagcuacuuuucacugag

SEQ ID NO: 237693 - RNA, 32 nt, Human
ucggccugggcugcgugcuggagagcggggac

SEQ ID NO: 237694 - RNA, 32 nt, Human
ucggccuuagaaccccaguaucagcagaagga

SEQ ID NO: 237695 - RNA, 32 nt, Human
ucggccuuccaaagugccgggauuacagacgu

SEQ ID NO: 237696 - RNA, 32 nt, Human
ucggccuuccaaagugcugggauuacaaguuu

SEQ ID NO: 237697 - RNA, 32 nt, Human
ucggccuuccaaagugcugggauuacaggcau

SEQ ID NO: 237698 - RNA, 32 nt, Human
ucggccuuccaaagugcugggauuacaggccu

SEQ ID NO: 237699 - RNA, 32 nt, Human
ucggccuuccaaaguguugggauuaccggcgu

SEQ ID NO: 237700 - RNA, 32 nt, Human
ucggccuuccaaaguucugggauuacaggcgu

SEQ ID NO: 237701 - RNA, 32 nt, Human
ucggccuuccgaguagcugggauugcaggcgu

SEQ ID NO: 237702 - RNA, 32 nt, Human
ucggccuugcaaaaugcugggauuacaggcau

SEQ ID NO: 237703 - RNA, 32 nt, Human
ucggccuuucaaagugcugggauuacagacau

SEQ ID NO: 237704 - RNA, 26 nt, Human
ucggccuuuguccagcgaccaggcuc

SEQ ID NO: 237705 - RNA, 32 nt, Human
ucggcgccacagagaagacccccgggaguucg

SEQ ID NO: 237706 - RNA, 32 nt, Human
ucggcgcccagggucugaggcugcagccccag

SEQ ID NO: 237707 - RNA, 32 nt, Human
ucggcgcggcucaugguccgguucgggcucgc

SEQ ID NO: 237708 - RNA, 32 nt, Human
ucggcgcucacugcucuccacgccggggacau

SEQ ID NO: 237709 - RNA, 32 nt, Human
ucggcgcucugacuucuaggagcacaagagag

SEQ ID NO: 237710 - RNA, 17 nt, Human
ucggcgcugccccgguc

SEQ ID NO: 237711 - RNA, 32 nt, Human
ucggcgcugccugggcuccugcagccucuccc

SEQ ID NO: 237712 - RNA, 32 nt, Human
ucggcgcuucccugucgucgcacuuugugguu

SEQ ID NO: 237713 - RNA, 32 nt, Human
ucggcggagacaggcagcccuagguugaccau

SEQ ID NO: 237714 - RNA, 32 nt, Human
ucggcggagcucccaccuccgcuuacagcucg

SEQ ID NO: 237715 - RNA, 32 nt, Human
ucggcggauuugaccaaauuguuuucaaguuc

SEQ ID NO: 237716 - RNA, 19 nt, Human
ucggcggcggagccucugg

SEQ ID NO: 237717 - RNA, 32 nt, Human
ucggcggcggcgggcaguugcaguggugcaga

SEQ ID NO: 237718 - RNA, 32 nt, Human
ucggcggcucacaccuguaaccccagcacuuu

SEQ ID NO: 237719 - RNA, 32 nt, Human
ucggcggcucacuacaaccucugccucaagcg

SEQ ID NO: 237720 - RNA, 32 nt, Human
ucggcggcuccuuccagcaggggcuugcgcuu

SEQ ID NO: 237721 - RNA, 32 nt, Human
ucggcgggaagcggcgauccugccaccgggag

SEQ ID NO: 237722 - RNA, 32 nt, Human
ucggcgggagcacccaguccuguacgccaagg

SEQ ID NO: 237723 - RNA, 32 nt, Human
ucggcgggcagaggagagggaggccgcggaau

SEQ ID NO: 237724 - RNA, 32 nt, Human
ucggcgguguccaggagggaaggaacgggaaa

SEQ ID NO: 237725 - RNA, 32 nt, Human
ucggcgucucaaagugcugggauuacaagcgu

SEQ ID NO: 237726 - RNA, 20 nt, Human
ucggcguggcccaaggccgg

SEQ ID NO: 237727 - RNA, 19 nt, Human
ucggcgugggagagcgaga

SEQ ID NO: 237728 - RNA, 32 nt, Human
ucggcguugagcccggguagggccagguggcu

SEQ ID NO: 237729 - RNA, 32 nt, Human
ucggcuagcagcggcucucagggaaggccugg

SEQ ID NO: 237730 - RNA, 32 nt, Human
ucggcucaacgcaaccuccgccucccagguuc

SEQ ID NO: 237731 - RNA, 32 nt, Human
ucggcucaaugcagcuuugccuccccagcuca

SEQ ID NO: 237732 - RNA, 32 nt, Human
ucggcucacagcaaccucucugccuccagaaa

SEQ ID NO: 237733 - RNA, 32 nt, Human
ucggcucacagcaaccucugccucccggauuu

SEQ ID NO: 237734 - RNA, 32 nt, Human
ucggcucacagugcaaccucugcuucccaggu

SEQ ID NO: 237735 - RNA, 32 nt, Human
ucggcucaccacaaccuccaccucccagguuc

SEQ ID NO: 237736 - RNA, 32 nt, Human
ucggcucaccacaaccuccuccucuuggguuc

SEQ ID NO: 237737 - RNA, 32 nt, Human
ucggcucaccgcaaccuccgcccccuggguuc

SEQ ID NO: 237738 - RNA, 32 nt, Human
ucggcucaccgcaaccuccgccucccagguuc

SEQ ID NO: 237739 - RNA, 32 nt, Human
ucggcucaccgcaaccuccgccucccggauuc

SEQ ID NO: 237740 - RNA, 32 nt, Human
ucggcucaccgcaaccuccgccucccggguuc

SEQ ID NO: 237741 - RNA, 32 nt, Human
ucggcucaccgcaaccuccucuucuggguuaa

SEQ ID NO: 237742 - RNA, 32 nt, Human
ucggcucaccgcaaccucugccucccaggugc

SEQ ID NO: 237743 - RNA, 32 nt, Human
ucggcucaccgcaaccucugccucccggguuc

SEQ ID NO: 237744 - RNA, 32 nt, Human
ucggcucacggcaaccuccaccucccggguuc

SEQ ID NO: 237745 - RNA, 32 nt, Human
ucggcucacuacaaccuccgccucccagguuc

SEQ ID NO: 237746 - RNA, 32 nt, Human
ucggcucacuauaaccuccaccucccagguuc

SEQ ID NO: 237747 - RNA, 32 nt, Human
ucggcucacuccaaccuccaccuacuagguuc

SEQ ID NO: 237748 - RNA, 32 nt, Human
ucggcucacuccaaucuccaccucccggauuc

SEQ ID NO: 237749 - RNA, 32 nt, Human
ucggcucacuccaccuccaccucccagguuca

SEQ ID NO: 237750 - RNA, 32 nt, Human
ucggcucacugaaccuccgccucccagguuca

SEQ ID NO: 237751 - RNA, 32 nt, Human
ucggcucacugcaaaccgccucccggguucac

SEQ ID NO: 237752 - RNA, 32 nt, Human
ucggcucacugcaaacuccgccucccagguuc

SEQ ID NO: 237753 - RNA, 32 nt, Human
ucggcucacugcaaacuccgccucccggguuc

SEQ ID NO: 237754 - RNA, 32 nt, Human
ucggcucacugcaaacuccgccuuccagguuc

SEQ ID NO: 237755 - RNA, 32 nt, Human
ucggcucacugcaaacucugccucccagguuc

SEQ ID NO: 237756 - RNA, 32 nt, Human
ucggcucacugcaaacucugccucccggguuc

SEQ ID NO: 237757 - RNA, 32 nt, Human
ucggcucacugcaaaucuccgccucccagguu

SEQ ID NO: 237758 - RNA, 32 nt, Human
ucggcucacugcaacauccaccuccuggguuc

SEQ ID NO: 237759 - RNA, 32 nt, Human
ucggcucacugcaaccaccaucucccaggaga

SEQ ID NO: 237760 - RNA, 32 nt, Human
ucggcucacugcaaccacugccucccagguuc

SEQ ID NO: 237761 - RNA, 32 nt, Human
ucggcucacugcaacccccacaucccggguuc

SEQ ID NO: 237762 - RNA, 32 nt, Human
ucggcucacugcaacccccaucucccagguuc

SEQ ID NO: 237763 - RNA, 32 nt, Human
ucggcucacugcaacccccgucucccggguuc

SEQ ID NO: 237764 - RNA, 32 nt, Human
ucggcucacugcaaccucaccucccggguuca

SEQ ID NO: 237765 - RNA, 32 nt, Human
ucggcucacugcaaccuccaacucccagguuc

SEQ ID NO: 237766 - RNA, 32 nt, Human
ucggcucacugcaaccuccacaucccauguug

SEQ ID NO: 237767 - RNA, 32 nt, Human
ucggcucacugcaaccuccaccucacagguuc

SEQ ID NO: 237768 - RNA, 32 nt, Human
ucggcucacugcaaccuccaccucccagauuc

SEQ ID NO: 237769 - RNA, 32 nt, Human
ucggcucacugcaaccuccaccucccagguca

SEQ ID NO: 237770 - RNA, 32 nt, Human
ucggcucacugcaaccuccaccucccagguuc

SEQ ID NO: 237771 - RNA, 32 nt, Human
ucggcucacugcaaccuccaccuccccaguuc

SEQ ID NO: 237772 - RNA, 32 nt, Human
ucggcucacugcaaccuccaccuccccggguu

SEQ ID NO: 237773 - RNA, 32 nt, Human
ucggcucacugcaaccuccaccucccgaguuc

SEQ ID NO: 237774 - RNA, 32 nt, Human
ucggcucacugcaaccuccaccucccggauuc

SEQ ID NO: 237775 - RNA, 32 nt, Human
ucggcucacugcaaccuccaccucccggguuc

SEQ ID NO: 237776 - RNA, 32 nt, Human
ucggcucacugcaaccuccaccuccuagguuc

SEQ ID NO: 237777 - RNA, 32 nt, Human
ucggcucacugcaaccuccaccuccuggauuc

SEQ ID NO: 237778 - RNA, 32 nt, Human
ucggcucacugcaaccuccaccuccuggcuuc

SEQ ID NO: 237779 - RNA, 32 nt, Human
ucggcucacugcaaccuccaccuccugggcuc

SEQ ID NO: 237780 - RNA, 32 nt, Human
ucggcucacugcaaccuccaccuccuggguuc

SEQ ID NO: 237781 - RNA, 32 nt, Human
ucggcucacugcaaccuccaccuccuggguuu

SEQ ID NO: 237782 - RNA, 32 nt, Human
ucggcucacugcaaccuccaccuccugguuca

SEQ ID NO: 237783 - RNA, 32 nt, Human
ucggcucacugcaaccuccaccucucggcuuc

SEQ ID NO: 237784 - RNA, 32 nt, Human
ucggcucacugcaaccuccaccuucagggugu

SEQ ID NO: 237785 - RNA, 32 nt, Human
ucggcucacugcaaccuccacuucuuggguuc

SEQ ID NO: 237786 - RNA, 32 nt, Human
ucggcucacugcaaccuccagcucccagguug

SEQ ID NO: 237787 - RNA, 32 nt, Human
ucggcucacugcaaccucccugccugauucuc

SEQ ID NO: 237788 - RNA, 32 nt, Human
ucggcucacugcaaccuccgcaucccggguuc

SEQ ID NO: 237789 - RNA, 32 nt, Human
ucggcucacugcaaccuccgcccccuggguuu

SEQ ID NO: 237790 - RNA, 32 nt, Human
ucggcucacugcaaccuccgccuaccggguuc

SEQ ID NO: 237791 - RNA, 32 nt, Human
ucggcucacugcaaccuccgccucccaaguuc

SEQ ID NO: 237792 - RNA, 32 nt, Human
ucggcucacugcaaccuccgccucccagguuc

SEQ ID NO: 237793 - RNA, 32 nt, Human
ucggcucacugcaaccuccgccucccagguug

SEQ ID NO: 237794 - RNA, 32 nt, Human
ucggcucacugcaaccuccgccucccagguuu

SEQ ID NO: 237795 - RNA, 32 nt, Human
ucggcucacugcaaccuccgccucccaguuuc

SEQ ID NO: 237796 - RNA, 32 nt, Human
ucggcucacugcaaccuccgccucccggcuuc

SEQ ID NO: 237797 - RNA, 32 nt, Human
ucggcucacugcaaccuccgccucccgggcug

SEQ ID NO: 237798 - RNA, 32 nt, Human
ucggcucacugcaaccuccgccucccggguua

SEQ ID NO: 237799 - RNA, 32 nt, Human
ucggcucacugcaaccuccgccucccggguuc

SEQ ID NO: 237800 - RNA, 32 nt, Human
ucggcucacugcaaccuccgccucccgguuca

SEQ ID NO: 237801 - RNA, 32 nt, Human
ucggcucacugcaaccuccgccuccugaguuc

SEQ ID NO: 237802 - RNA, 32 nt, Human
ucggcucacugcaaccuccgccuccugggcuc

SEQ ID NO: 237803 - RNA, 32 nt, Human
ucggcucacugcaaccuccgccuccuggguuc

SEQ ID NO: 237804 - RNA, 32 nt, Human
ucggcucacugcaaccuccgccuccuugguuc

SEQ ID NO: 237805 - RNA, 32 nt, Human
ucggcucacugcaaccuccgccuuccugaguu

SEQ ID NO: 237806 - RNA, 32 nt, Human
ucggcucacugcaaccuccgccuugcugguug

SEQ ID NO: 237807 - RNA, 32 nt, Human
ucggcucacugcaaccuccgccuuuccaccuu

SEQ ID NO: 237808 - RNA, 32 nt, Human
ucggcucacugcaaccuccgcucccuggguuc

SEQ ID NO: 237809 - RNA, 32 nt, Human
ucggcucacugcaaccuccgucucccagguuc

SEQ ID NO: 237810 - RNA, 32 nt, Human
ucggcucacugcaaccuccuccucccagaggu

SEQ ID NO: 237811 - RNA, 32 nt, Human
ucggcucacugcaaccuccuccucccggguuc

SEQ ID NO: 237812 - RNA, 32 nt, Human
ucggcucacugcaaccucuaccucccagguuc

SEQ ID NO: 237813 - RNA, 32 nt, Human
ucggcucacugcaaccucuaccuccuggauuc

SEQ ID NO: 237814 - RNA, 32 nt, Human
ucggcucacugcaaccucuaccuccuggguuc

SEQ ID NO: 237815 - RNA, 32 nt, Human
ucggcucacugcaaccucugccaucaggauua

SEQ ID NO: 237816 - RNA, 32 nt, Human
ucggcucacugcaaccucugccucccaaguuc

SEQ ID NO: 237817 - RNA, 32 nt, Human
ucggcucacugcaaccucugccucccagguuc

SEQ ID NO: 237818 - RNA, 32 nt, Human
ucggcucacugcaaccucugccucccgaguuc

SEQ ID NO: 237819 - RNA, 32 nt, Human
ucggcucacugcaaccucugccucccgcauuc

SEQ ID NO: 237820 - RNA, 32 nt, Human
ucggcucacugcaaccucugccucccggauuc

SEQ ID NO: 237821 - RNA, 32 nt, Human
ucggcucacugcaaccucugccucccggguuc

SEQ ID NO: 237822 - RNA, 32 nt, Human
ucggcucacugcaaccucugccucccguguuc

SEQ ID NO: 237823 - RNA, 32 nt, Human
ucggcucacugcaaccucugccucuuggguuc

SEQ ID NO: 237824 - RNA, 32 nt, Human
ucggcucacugcaaccucugcuucccggguuc

SEQ ID NO: 237825 - RNA, 32 nt, Human
ucggcucacugcaaccucuugccucccagguu

SEQ ID NO: 237826 - RNA, 32 nt, Human
ucggcucacugcaaccugucucucagguugaa

SEQ ID NO: 237827 - RNA, 32 nt, Human
ucggcucacugcaaccuucgccucuggguuca

SEQ ID NO: 237828 - RNA, 32 nt, Human
ucggcucacugcaacguccgccucccggguug

SEQ ID NO: 237829 - RNA, 32 nt, Human
ucggcucacugcaacuccaccucccggguuca

SEQ ID NO: 237830 - RNA, 32 nt, Human
ucggcucacugcaacucugccucccggguuca

SEQ ID NO: 237831 - RNA, 32 nt, Human
ucggcucacugcaacuuccaccucccggguuc

SEQ ID NO: 237832 - RNA, 32 nt, Human
ucggcucacugcaacuuccgccucccgguuuc

SEQ ID NO: 237833 - RNA, 32 nt, Human
ucggcucacugcaacuuccgccuccugggauc

SEQ ID NO: 237834 - RNA, 32 nt, Human
ucggcucacugcaacuucugccucccggguuc

SEQ ID NO: 237835 - RNA, 32 nt, Human
ucggcucacugcaagauccgccucccggguuc

SEQ ID NO: 237836 - RNA, 32 nt, Human
ucggcucacugcaagccccaccucccaaguuc

SEQ ID NO: 237837 - RNA, 32 nt, Human
ucggcucacugcaagccccaccuucugaguuc

SEQ ID NO: 237838 - RNA, 32 nt, Human
ucggcucacugcaagcccugccuccuggguuc

SEQ ID NO: 237839 - RNA, 32 nt, Human
ucggcucacugcaagcuccaccucccagguuc

SEQ ID NO: 237840 - RNA, 32 nt, Human
ucggcucacugcaagcuccaccucccggguuc

SEQ ID NO: 237841 - RNA, 32 nt, Human
ucggcucacugcaagcuccaccuccuggguuc

SEQ ID NO: 237842 - RNA, 32 nt, Human
ucggcucacugcaagcuccaucucccagguuc

SEQ ID NO: 237843 - RNA, 32 nt, Human
ucggcucacugcaagcuccgccucccagauuc

SEQ ID NO: 237844 - RNA, 32 nt, Human
ucggcucacugcaagcuccgccucccaggauc

SEQ ID NO: 237845 - RNA, 32 nt, Human
ucggcucacugcaagcuccgccucccagguuc

SEQ ID NO: 237846 - RNA, 32 nt, Human
ucggcucacugcaagcuccgccucccggauuc

SEQ ID NO: 237847 - RNA, 32 nt, Human
ucggcucacugcaagcuccgccucccggguuc

SEQ ID NO: 237848 - RNA, 32 nt, Human
ucggcucacugcaagcuccgccucucggguuc

SEQ ID NO: 237849 - RNA, 32 nt, Human
ucggcucacugcaagcuccggcucccagguuc

SEQ ID NO: 237850 - RNA, 32 nt, Human
ucggcucacugcaagcucugccucccagguuc

SEQ ID NO: 237851 - RNA, 32 nt, Human
ucggcucacugcaagcucugccucccgggcuc

SEQ ID NO: 237852 - RNA, 32 nt, Human
ucggcucacugcaagcucugccucccggguuc

SEQ ID NO: 237853 - RNA, 32 nt, Human
ucggcucacugcaagcucugccucccgguugc

SEQ ID NO: 237854 - RNA, 32 nt, Human
ucggcucacugcaagcucugccucucggguuc

SEQ ID NO: 237855 - RNA, 32 nt, Human
ucggcucacugcaagcucugcuucccagguuc

SEQ ID NO: 237856 - RNA, 32 nt, Human
ucggcucacugcaagcuucgccucccggguuc

SEQ ID NO: 237857 - RNA, 32 nt, Human
ucggcucacugcaaguuccgccucccggguuc

SEQ ID NO: 237858 - RNA, 32 nt, Human
ucggcucacugcaaucuccgccucccagguuc

SEQ ID NO: 237859 - RNA, 32 nt, Human
ucggcucacugcaaucucugccucccaagcaa

SEQ ID NO: 237860 - RNA, 32 nt, Human
ucggcucacugcaaucucugccucccagguuc

SEQ ID NO: 237861 - RNA, 32 nt, Human
ucggcucacugcaaucucugccucccggauuc

SEQ ID NO: 237862 - RNA, 32 nt, Human
ucggcucacugcaaucucugccucccggguuc

SEQ ID NO: 237863 - RNA, 32 nt, Human
ucggcucacugcaauuugcgucucccaaguuc

SEQ ID NO: 237864 - RNA, 32 nt, Human
ucggcucacugcacccucugccucuuggguuc

SEQ ID NO: 237865 - RNA, 32 nt, Human
ucggcucacugcaccuccgccucccagguuca

SEQ ID NO: 237866 - RNA, 32 nt, Human
ucggcucacugcaccucugccuccuggauuca

SEQ ID NO: 237867 - RNA, 32 nt, Human
ucggcucacugcaccuucugccuaccgaguuc

SEQ ID NO: 237868 - RNA, 32 nt, Human
ucggcucacugcagccccugccucccaggcuc

SEQ ID NO: 237869 - RNA, 32 nt, Human
ucggcucacugcagccuccgccucccagguuc

SEQ ID NO: 237870 - RNA, 32 nt, Human
ucggcucacugcagccuccgccucccguauuc

SEQ ID NO: 237871 - RNA, 32 nt, Human
ucggcucacugcagccuccgccucccugguuc

SEQ ID NO: 237872 - RNA, 32 nt, Human
ucggcucacugcagccucugccucccggguuc

SEQ ID NO: 237873 - RNA, 32 nt, Human
ucggcucacugcagccuucaccucccggguuc

SEQ ID NO: 237874 - RNA, 32 nt, Human
ucggcucacugcagccuugacuucccaggcuc

SEQ ID NO: 237875 - RNA, 32 nt, Human
ucggcucacugcagccuuugccucccggguuc

SEQ ID NO: 237876 - RNA, 32 nt, Human
ucggcucacugcagcgucgacauuucggguca

SEQ ID NO: 237877 - RNA, 32 nt, Human
ucggcucacugcagucaccuccucucagguuc

SEQ ID NO: 237878 - RNA, 32 nt, Human
ucggcucacugcauccuccaccuccuggguuc

SEQ ID NO: 237879 - RNA, 32 nt, Human
ucggcucacugcauccuccgccucccggguuc

SEQ ID NO: 237880 - RNA, 32 nt, Human
ucggcucacugcauccucugccucccggguuc

SEQ ID NO: 237881 - RNA, 32 nt, Human
ucggcucacugcaucuuccgccucccggguuc

SEQ ID NO: 237882 - RNA, 32 nt, Human
ucggcucacugcgagcuccaccucucggguuc

SEQ ID NO: 237883 - RNA, 32 nt, Human
ucggcucacuguaaccuccaccuccuggguuc

SEQ ID NO: 237884 - RNA, 32 nt, Human
ucggcucacuguagccuccaccucccccaauc

SEQ ID NO: 237885 - RNA, 32 nt, Human
ucggcucagugcaaccucugccucccagguug

SEQ ID NO: 237886 - RNA, 32 nt, Human
ucggcucauuacaaccuccaccucccggguuc

SEQ ID NO: 237887 - RNA, 32 nt, Human
ucggcucauugcaaccuccaccuuccagauuc

SEQ ID NO: 237888 - RNA, 32 nt, Human
ucggcucauugcaaccuccgccucccggguuc

SEQ ID NO: 237889 - RNA, 32 nt, Human
ucggcucauugcaaccuccgccuccuggguuc

SEQ ID NO: 237890 - RNA, 32 nt, Human
ucggcucauugcaaccuccgccuuccggguuc

SEQ ID NO: 237891 - RNA, 32 nt, Human
ucggcuccagacuccggcauuuccuccccgcu

SEQ ID NO: 237892 - RNA, 31 nt, Human
ucggcuccaggaggucacacagcagguuucu

SEQ ID NO: 237893 - RNA, 32 nt, Human
ucggcuccaggaggucacacagcagguuucug

SEQ ID NO: 237894 - RNA, 32 nt, Human
ucggcuccaucuucauugcguucaucauccug

SEQ ID NO: 237895 - RNA, 32 nt, Human
ucggcucccccaggaggagcaggcugggccca

SEQ ID NO: 237896 - RNA, 32 nt, Human
ucggcucccucuuccccuucuaaaccaaggua

SEQ ID NO: 237897 - RNA, 32 nt, Human
ucggcucccugcaaccuccaccucccggguuc

SEQ ID NO: 237898 - RNA, 32 nt, Human
ucggcucccugcaaccuucgccucccggguuc

SEQ ID NO: 237899 - RNA, 32 nt, Human
ucggcucccugcaaucuccaccucccagguuc

SEQ ID NO: 237900 - RNA, 32 nt, Human
ucggcuccucaagguggugguugaggagacag

SEQ ID NO: 237901 - RNA, 32 nt, Human
ucggcuccucaccacuuucuaugccagucucc

SEQ ID NO: 237902 - RNA, 32 nt, Human
ucggcuccuccuccuccucccggcggugggug

SEQ ID NO: 237903 - RNA, 32 nt, Human
ucggcuccuggaaaccucaccccaaauuggag

SEQ ID NO: 237904 - RNA, 32 nt, Human
ucggcucgcuacaaccuccaccucccagcaac

SEQ ID NO: 237905 - RNA, 32 nt, Human
ucggcucgcugcaaccuccgccucccggguuc

SEQ ID NO: 237906 - RNA, 32 nt, Human
ucggcucggcccgcgggggagccccgggagcc

SEQ ID NO: 237907 - RNA, 32 nt, Human
ucggcucuaccaaucagcagguuguggauggg

SEQ ID NO: 237908 - RNA, 32 nt, Human
ucggcucucaccgcaaccuccgucuccugggu

SEQ ID NO: 237909 - RNA, 32 nt, Human
ucggcucucugcaaccuccgccucccagguuc

SEQ ID NO: 237910 - RNA, 32 nt, Human
ucggcucucugcaaccucugccucccggguuc

SEQ ID NO: 237911 - RNA, 32 nt, Human
ucggcucucugcaaccucugucucccggguuc

SEQ ID NO: 237912 - RNA, 21 nt, Human
ucggcucugaagcggacgccu

SEQ ID NO: 237913 - RNA, 32 nt, Human
ucggcucuucacugcuccuccuggccugccua

SEQ ID NO: 237914 - RNA, 32 nt, Human
ucggcucuugggucccccuccgccgccccgcc

SEQ ID NO: 237915 - RNA, 32 nt, Human
ucggcugaaccaggacuccucacugucuaccu

SEQ ID NO: 237916 - RNA, 32 nt, Human
ucggcugaagaaagaaggugggagcggagagc

SEQ ID NO: 237917 - RNA, 32 nt, Human
ucggcugacaggcuccacagagcuccacucac

SEQ ID NO: 237918 - RNA, 32 nt, Human
ucggcugacugcaaccacugccuccaggguuc

SEQ ID NO: 237919 - RNA, 32 nt, Human
ucggcugacugcaaccuccaccucccgggugc

SEQ ID NO: 237920 - RNA, 32 nt, Human
ucggcugagauuugagcuucauggugaacaca

SEQ ID NO: 237921 - RNA, 32 nt, Human
ucggcugcagcgcugggcuggugugcaguggu

SEQ ID NO: 237922 - RNA, 31 nt, Human
ucggcugccagcuagaauaaaccaggcagga

SEQ ID NO: 237923 - RNA, 32 nt, Human
ucggcugccuggggacauugccaccacgucgc

SEQ ID NO: 237924 - RNA, 32 nt, Human
ucggcugccuggggacauugucaccacgucgc

SEQ ID NO: 237925 - RNA, 23 nt, Human
ucggcugcggcgggugugggagg

SEQ ID NO: 237926 - RNA, 32 nt, Human
ucggcugcuggaauuggaaucaggcuguacuc

SEQ ID NO: 237927 - RNA, 32 nt, Human
ucggcuggcccauaacuccugagcuacacaga

SEQ ID NO: 237928 - RNA, 32 nt, Human
ucggcugucuaggacuaguuuaucucugcuuc

SEQ ID NO: 237929 - RNA, 32 nt, Human
ucggcuuacacauaaucauucuuucugaacuu

SEQ ID NO: 237930 - RNA, 32 nt, Human
ucggcuuacugcaaccuccaccucccaggugc

SEQ ID NO: 237931 - RNA, 32 nt, Human
ucggcuuacugcaaccuccaccucccggguuc

SEQ ID NO: 237932 - RNA, 32 nt, Human
ucggcuuacugcaaccuccgccuacuggguuc

SEQ ID NO: 237933 - RNA, 32 nt, Human
ucggcuuacugcaaccuccgccuucccagauu

SEQ ID NO: 237934 - RNA, 32 nt, Human
ucggcuuacugcaaccuuugccucccagguuu

SEQ ID NO: 237935 - RNA, 32 nt, Human
ucggcuuauggcaaccuccgccucccggguuc

SEQ ID NO: 237936 - RNA, 32 nt, Human
ucggcuucaagcaauucuccugccucagccuc

SEQ ID NO: 237937 - RNA, 32 nt, Human
ucggcuucccaaagugcugggauuacaggaau

SEQ ID NO: 237938 - RNA, 32 nt, Human
ucggcuucccaaagugcugggauuacaggcgu

SEQ ID NO: 237939 - RNA, 32 nt, Human
ucggcuucccaaagugcugggauuacaggcuu

SEQ ID NO: 237940 - RNA, 32 nt, Human
ucggcuucccaaagugcugggauuacgggcgu

SEQ ID NO: 237941 - RNA, 32 nt, Human
ucggcuucccaaagugcugggauugcaggcgu

SEQ ID NO: 237942 - RNA, 32 nt, Human
ucggcuucccaaaguucugggauuacaggcau

SEQ ID NO: 237943 - RNA, 32 nt, Human
ucggcuucccaaguagcugggauuacaggcac

SEQ ID NO: 237944 - RNA, 32 nt, Human
ucggcuucccgaagugcugggauuauaggcgu

SEQ ID NO: 237945 - RNA, 32 nt, Human
ucggcuuccuaaagugcugggauugcaggcgu

SEQ ID NO: 237946 - RNA, 32 nt, Human
ucggcuuccuaaaguguugggauuacaggcuu

SEQ ID NO: 237947 - RNA, 32 nt, Human
ucggcuucgucacugagaccucaggccucugc

SEQ ID NO: 237948 - RNA, 32 nt, Human
ucggcuucugcaggaggccauuagcucugcac

SEQ ID NO: 237949 - RNA, 32 nt, Human
ucggcuuuccaaagugcugggauuacagaugu

SEQ ID NO: 237950 - RNA, 32 nt, Human
ucggcuuucugacuucauagauguccagaggc

SEQ ID NO: 237951 - RNA, 32 nt, Human
ucgggaaaacagugggcagugaaguuagagaa

SEQ ID NO: 237952 - RNA, 32 nt, Human
ucgggaaaauaaccaguuaaaccagcuacuca

SEQ ID NO: 237953 - RNA, 32 nt, Human
ucgggaaaccucccccgacgcucucucucgga

SEQ ID NO: 237954 - RNA, 24 nt, Human
ucgggaaagcagagguugcaguga

SEQ ID NO: 237955 - RNA, 24 nt, Human
ucgggaaaguggcaguugcaguga

SEQ ID NO: 237956 - RNA, 32 nt, Human
ucgggaaccugaggcaggagaauggcuugaac

SEQ ID NO: 237957 - RNA, 32 nt, Human
ucgggaagcugaggcaagagaaucacuugaac

SEQ ID NO: 237958 - RNA, 32 nt, Human
ucgggaagcugaggcaggagaaucacuugaac

SEQ ID NO: 237959 - RNA, 32 nt, Human
ucgggaagcugaggcaggagaauugcuugaac

SEQ ID NO: 237960 - RNA, 32 nt, Human
ucgggaagcugaggcaggugaauuguuugaac

SEQ ID NO: 237961 - RNA, 32 nt, Human
ucgggaagcugagguaggagaaucucucuuuu

SEQ ID NO: 237962 - RNA, 32 nt, Human
ucgggaaggcaucuccacagccccggguccuc

SEQ ID NO: 237963 - RNA, 32 nt, Human
ucgggaagggcaagacugcggcgacgagaugc

SEQ ID NO: 237964 - RNA, 32 nt, Human
ucgggaaguuccaugaacacacaaggcaacau

SEQ ID NO: 237965 - RNA, 32 nt, Human
ucgggaaugaaugaucccuuuacagguguaau

SEQ ID NO: 237966 - RNA, 31 nt, Human
ucgggacaguucaaggaggaggagaccccua

SEQ ID NO: 237967 - RNA, 32 nt, Human
ucgggaccaaucuggccaacauggcgaaaccc

SEQ ID NO: 237968 - RNA, 32 nt, Human
ucgggaccagccuagccuacauggugaaaccc

SEQ ID NO: 237969 - RNA, 32 nt, Human
ucgggaccagccuggccaacaugaugaaaccc

SEQ ID NO: 237970 - RNA, 32 nt, Human
ucgggaccagccugggaaauauagugaaacuc

SEQ ID NO: 237971 - RNA, 32 nt, Human
ucgggaccagccugggcaacauggugaaaccc

SEQ ID NO: 237972 - RNA, 32 nt, Human
ucgggaccauccuggccaacauggugaaaccc

SEQ ID NO: 237973 - RNA, 32 nt, Human
ucgggacccaggagguaugggucagaaggaaa

SEQ ID NO: 237974 - RNA, 32 nt, Human
ucgggacccucuucauucucugaucucauccu

SEQ ID NO: 237975 - RNA, 32 nt, Human
ucgggacuaugaccuuuuucuccaguaugcua

SEQ ID NO: 237976 - RNA, 32 nt, Human
ucgggacucccagcacugcagagggugugagg

SEQ ID NO: 237977 - RNA, 32 nt, Human
ucgggacuccgaccucagccucccggugaagg

SEQ ID NO: 237978 - RNA, 32 nt, Human
ucgggacugugagcuuccuggcuccugggcag

SEQ ID NO: 237979 - RNA, 28 nt, Human
ucgggagacgucucccaagccugcuagg

SEQ ID NO: 237980 - RNA, 32 nt, Human
ucgggagacugaggcaggagaauggggagaac

SEQ ID NO: 237981 - RNA, 32 nt, Human
ucgggagccccuggccauguuaguugcacauu

SEQ ID NO: 237982 - RNA, 27 nt, Human
ucgggagcccuagcccugcuccaacuc

SEQ ID NO: 237983 - RNA, 32 nt, Human
ucgggagccguggggcagaggcugcagagccc

SEQ ID NO: 237984 - RNA, 32 nt, Human
ucgggagccguggggcagaggcugcggagccc

SEQ ID NO: 237985 - RNA, 29 nt, Human
ucgggagccugaggcaggagaaucacuug

SEQ ID NO: 237986 - RNA, 32 nt, Human
ucgggagcugugcacggcuucucaagugauuc

SEQ ID NO: 237987 - RNA, 32 nt, Human
ucgggaggaggcggagggcgcaaagcgagccg

SEQ ID NO: 237988 - RNA, 32 nt, Human
ucgggaggaugaggcaggagaauugcuugaaa

SEQ ID NO: 237989 - RNA, 32 nt, Human
ucgggaggaugagucaggagaauugcuugaac

SEQ ID NO: 237990 - RNA, 32 nt, Human
ucgggaggccaaggcaggagaauugcucgaac

SEQ ID NO: 237991 - RNA, 32 nt, Human
ucgggaggccccugccuucuguccuccauggu

SEQ ID NO: 237992 - RNA, 32 nt, Human
ucgggaggccgaggcaggaaaauuuauugaac

SEQ ID NO: 237993 - RNA, 32 nt, Human
ucgggaggccgaggcaggagaauugcuugaac

SEQ ID NO: 237994 - RNA, 32 nt, Human
ucgggaggccgaggcagguggaacacuugaga

SEQ ID NO: 237995 - RNA, 32 nt, Human
ucgggaggccgaggcggguggaucacgagguc

SEQ ID NO: 237996 - RNA, 32 nt, Human
ucgggaggccgagguaggcggaucaccugagg

SEQ ID NO: 237997 - RNA, 32 nt, Human
ucgggaggcggaggcaggagaaucacuugaac

SEQ ID NO: 237998 - RNA, 32 nt, Human
ucgggaggcuaaagcaggagaauugcuugaac

SEQ ID NO: 237999 - RNA, 32 nt, Human
ucgggaggcuaaggcaggagaaucacuugaac

SEQ ID NO: 238000 - RNA, 32 nt, Human
ucgggaggcuaaggcaggagaaucgcuugaac

SEQ ID NO: 238001 - RNA, 32 nt, Human
ucgggaggcuaaggcaggagaaucgcuugacg

SEQ ID NO: 238002 - RNA, 32 nt, Human
ucgggaggcuaaggcaggagaauugcuugagc

SEQ ID NO: 238003 - RNA, 32 nt, Human
ucgggaggcucaggcaggagaaucacuugaac

SEQ ID NO: 238004 - RNA, 32 nt, Human
ucgggaggcugaaacaggagaaucacuugaac

SEQ ID NO: 238005 - RNA, 32 nt, Human
ucgggaggcugaaccaggagaauugcuugaac

SEQ ID NO: 238006 - RNA, 32 nt, Human
ucgggaggcugaagcaagcagaucacuugagg

SEQ ID NO: 238007 - RNA, 32 nt, Human
ucgggaggcugaagcagaagaaucgcuugaac

SEQ ID NO: 238008 - RNA, 32 nt, Human
ucgggaggcugaagcaggagaaucacuugaac

SEQ ID NO: 238009 - RNA, 32 nt, Human
ucgggaggcugaagcaggagaaucgcuugagc

SEQ ID NO: 238010 - RNA, 32 nt, Human
ucgggaggcugaagcaggagaauggcgugaac

SEQ ID NO: 238011 - RNA, 32 nt, Human
ucgggaggcugaagcaggagaauugcuugaac

SEQ ID NO: 238012 - RNA, 32 nt, Human
ucgggaggcugaagcaggagauuugcuugaac

SEQ ID NO: 238013 - RNA, 32 nt, Human
ucgggaggcugaagcaggaggacugcuugagc

SEQ ID NO: 238014 - RNA, 32 nt, Human
ucgggaggcugacgcaggagaaucacuugaac

SEQ ID NO: 238015 - RNA, 32 nt, Human
ucgggaggcugagacaggagaaucacuugaac

SEQ ID NO: 238016 - RNA, 32 nt, Human
ucgggaggcugagacaggagaaucacuugagc

SEQ ID NO: 238017 - RNA, 32 nt, Human
ucgggaggcugagacaggagaaucgcuuaaac

SEQ ID NO: 238018 - RNA, 32 nt, Human
ucgggaggcugagacaggagaaucgcuugaac

SEQ ID NO: 238019 - RNA, 32 nt, Human
ucgggaggcugagacaggagaaucgcuugaau

SEQ ID NO: 238020 - RNA, 32 nt, Human
ucgggaggcugagacaggagaaucucuugaau

SEQ ID NO: 238021 - RNA, 32 nt, Human
ucgggaggcugagacaggagaauugcuugaac

SEQ ID NO: 238022 - RNA, 32 nt, Human
ucgggaggcugaggaaggagaaucgcuugaac

SEQ ID NO: 238023 - RNA, 32 nt, Human
ucgggaggcugaggcaagagaaucacuugaac

SEQ ID NO: 238024 - RNA, 32 nt, Human
ucgggaggcugaggcacaagaaucacuugaac

SEQ ID NO: 238025 - RNA, 32 nt, Human
ucgggaggcugaggcacgagaaucacuugaac

SEQ ID NO: 238026 - RNA, 32 nt, Human
ucgggaggcugaggcacgagaaucacuugaag

SEQ ID NO: 238027 - RNA, 32 nt, Human
ucgggaggcugaggcagcagaaucacuugaaa

SEQ ID NO: 238028 - RNA, 32 nt, Human
ucgggaggcugaggcaggagaaaggcaugaau

SEQ ID NO: 238029 - RNA, 32 nt, Human
ucgggaggcugaggcaggagaaccgcuugaac

SEQ ID NO: 238030 - RNA, 32 nt, Human
ucgggaggcugaggcaggagaacggcgugaac

SEQ ID NO: 238031 - RNA, 32 nt, Human
ucgggaggcugaggcaggagaauagcauggac

SEQ ID NO: 238032 - RNA, 32 nt, Human
ucgggaggcugaggcaggagaauagccugaac

SEQ ID NO: 238033 - RNA, 32 nt, Human
ucgggaggcugaggcaggagaauagcgugaac

SEQ ID NO: 238034 - RNA, 32 nt, Human
ucgggaggcugaggcaggagaaucaaucacuu

SEQ ID NO: 238035 - RNA, 32 nt, Human
ucgggaggcugaggcaggagaaucacaugaau

SEQ ID NO: 238036 - RNA, 32 nt, Human
ucgggaggcugaggcaggagaaucaccugaac

SEQ ID NO: 238037 - RNA, 32 nt, Human
ucgggaggcugaggcaggagaaucacuagaag

SEQ ID NO: 238038 - RNA, 32 nt, Human
ucgggaggcugaggcaggagaaucacuuaaac

SEQ ID NO: 238039 - RNA, 32 nt, Human
ucgggaggcugaggcaggagaaucacuucagc

SEQ ID NO: 238040 - RNA, 32 nt, Human
ucgggaggcugaggcaggagaaucacuugaaa

SEQ ID NO: 238041 - RNA, 32 nt, Human
ucgggaggcugaggcaggagaaucacuugaac

SEQ ID NO: 238042 - RNA, 32 nt, Human
ucgggaggcugaggcaggagaaucacuugaau

SEQ ID NO: 238043 - RNA, 32 nt, Human
ucgggaggcugaggcaggagaaucacuugagc

SEQ ID NO: 238044 - RNA, 32 nt, Human
ucgggaggcugaggcaggagaaucauuucaac

SEQ ID NO: 238045 - RNA, 32 nt, Human
ucgggaggcugaggcaggagaaucccuugaac

SEQ ID NO: 238046 - RNA, 32 nt, Human
ucgggaggcugaggcaggagaaucgccugaac

SEQ ID NO: 238047 - RNA, 32 nt, Human
ucgggaggcugaggcaggagaaucgcgugaac

SEQ ID NO: 238048 - RNA, 32 nt, Human
ucgggaggcugaggcaggagaaucgcuggaac

SEQ ID NO: 238049 - RNA, 32 nt, Human
ucgggaggcugaggcaggagaaucgcuuaaac

SEQ ID NO: 238050 - RNA, 32 nt, Human
ucgggaggcugaggcaggagaaucgcuugaac

SEQ ID NO: 238051 - RNA, 32 nt, Human
ucgggaggcugaggcaggagaaucgcuugaau

SEQ ID NO: 238052 - RNA, 32 nt, Human
ucgggaggcugaggcaggagaaucgcuugagc

SEQ ID NO: 238053 - RNA, 32 nt, Human
ucgggaggcugaggcaggagaaucgucuaagc

SEQ ID NO: 238054 - RNA, 32 nt, Human
ucgggaggcugaggcaggagaaucguuugaac

SEQ ID NO: 238055 - RNA, 32 nt, Human
ucgggaggcugaggcaggagaaucucuugaac

SEQ ID NO: 238056 - RNA, 32 nt, Human
ucgggaggcugaggcaggagaaucucuuucuu

SEQ ID NO: 238057 - RNA, 32 nt, Human
ucgggaggcugaggcaggagaaugaugugaac

SEQ ID NO: 238058 - RNA, 32 nt, Human
ucgggaggcugaggcaggagaauggcaugaac

SEQ ID NO: 238059 - RNA, 32 nt, Human
ucgggaggcugaggcaggagaauggccugaac

SEQ ID NO: 238060 - RNA, 32 nt, Human
ucgggaggcugaggcaggagaauggcgugaac

SEQ ID NO: 238061 - RNA, 32 nt, Human
  misc_feature (27)..(27): n is a, c, g, or u
ucgggaggcugaggcaggagaauggcnugaac

SEQ ID NO: 238062 - RNA, 32 nt, Human
ucgggaggcugaggcaggagaauggcuggaac

SEQ ID NO: 238063 - RNA, 32 nt, Human
ucgggaggcugaggcaggagaauggcuugaac

SEQ ID NO: 238064 - RNA, 32 nt, Human
ucgggaggcugaggcaggagaauggcuugaau

SEQ ID NO: 238065 - RNA, 32 nt, Human
ucgggaggcugaggcaggagaauugcuugaac

SEQ ID NO: 238066 - RNA, 32 nt, Human
ucgggaggcugaggcaggagaauugcuugaau

SEQ ID NO: 238067 - RNA, 32 nt, Human
ucgggaggcugaggcaggagaauugcuugagc

SEQ ID NO: 238068 - RNA, 32 nt, Human
ucgggaggcugaggcaggagaauuguugaacc

SEQ ID NO: 238069 - RNA, 32 nt, Human
ucgggaggcugaggcaggagaauuguuugaac

SEQ ID NO: 238070 - RNA, 32 nt, Human
ucgggaggcugaggcaggagacucgcuugaac

SEQ ID NO: 238071 - RNA, 32 nt, Human
ucgggaggcugaggcaggagacuggcgugaac

SEQ ID NO: 238072 - RNA, 32 nt, Human
ucgggaggcugaggcaggagagaaucgcuuga

SEQ ID NO: 238073 - RNA, 32 nt, Human
ucgggaggcugaggcaggagagugacgugaac

SEQ ID NO: 238074 - RNA, 32 nt, Human
ucgggaggcugaggcaggagaucgcuggaacu

SEQ ID NO: 238075 - RNA, 32 nt, Human
ucgggaggcugaggcaggagauucgccugaac

SEQ ID NO: 238076 - RNA, 32 nt, Human
ucgggaggcugaggcaggaggaucacuugaac

SEQ ID NO: 238077 - RNA, 32 nt, Human
ucgggaggcugaggcaggaggaucacuugagc

SEQ ID NO: 238078 - RNA, 32 nt, Human
ucgggaggcugaggcaggaggaucauuugagg

SEQ ID NO: 238079 - RNA, 32 nt, Human
ucgggaggcugaggcaggaggaucgcuugaac

SEQ ID NO: 238080 - RNA, 32 nt, Human
ucgggaggcugaggcaggauugccugagcccu

SEQ ID NO: 238081 - RNA, 32 nt, Human
ucgggaggcugaggcaggggaaucacuugaac

SEQ ID NO: 238082 - RNA, 32 nt, Human
ucgggaggcugaggcaggggaaucgcuugaac

SEQ ID NO: 238083 - RNA, 32 nt, Human
ucgggaggcugaggcagguggaucacuugagg

SEQ ID NO: 238084 - RNA, 32 nt, Human
ucgggaggcugaggcauaagaaucacuugaac

SEQ ID NO: 238085 - RNA, 32 nt, Human
ucgggaggcugaggcggaagaaucacuugaac

SEQ ID NO: 238086 - RNA, 32 nt, Human
ucgggaggcugaggcgggagaaucacuugaac

SEQ ID NO: 238087 - RNA, 32 nt, Human
ucgggaggcugagggaggagaaucucuugaag

SEQ ID NO: 238088 - RNA, 32 nt, Human
ucgggaggcugagguaggagaaucacuugaac

SEQ ID NO: 238089 - RNA, 32 nt, Human
ucgggaggcugagguaggagaaucguuugaac

SEQ ID NO: 238090 - RNA, 32 nt, Human
ucgggaggcugagguagguggaucaccucugc

SEQ ID NO: 238091 - RNA, 32 nt, Human
ucgggaggcugaggugggagaaucacuugaac

SEQ ID NO: 238092 - RNA, 32 nt, Human
ucgggaggcugaggugggagaaucccuugaac

SEQ ID NO: 238093 - RNA, 32 nt, Human
ucgggaggcugagucaggagaaucacuugaac

SEQ ID NO: 238094 - RNA, 32 nt, Human
ucgggaggcugcagcaggagaauggcaugaac

SEQ ID NO: 238095 - RNA, 32 nt, Human
ucgggaggcugcggcgggagaaucgcuugaac

SEQ ID NO: 238096 - RNA, 32 nt, Human
ucgggaggcuggggcaggagaaucacuugagc

SEQ ID NO: 238097 - RNA, 32 nt, Human
ucgggaggcuguggcaggagaaucgcuugaac

SEQ ID NO: 238098 - RNA, 32 nt, Human
ucgggaggcuguggcaggagaauugcuugaac

SEQ ID NO: 238099 - RNA, 32 nt, Human
ucgggaggcuuagacaugagaaucacuugaac

SEQ ID NO: 238100 - RNA, 32 nt, Human
ucgggaggcuuagacaugagaaucacuugggc

SEQ ID NO: 238101 - RNA, 32 nt, Human
ucgggagggcagcagaggcagagaacgaggac

SEQ ID NO: 238102 - RNA, 32 nt, Human
ucgggagggucugagcagcccugguggcugcc

SEQ ID NO: 238103 - RNA, 32 nt, Human
ucgggagggugaaaggagggaggagaagggcg

SEQ ID NO: 238104 - RNA, 32 nt, Human
ucgggagggugaggcaggagaaucacuucaac

SEQ ID NO: 238105 - RNA, 32 nt, Human
ucgggaggucgaggcaggaggaucacuugagu

SEQ ID NO: 238106 - RNA, 32 nt, Human
ucgggagguggagccaaucagguccaaccaag

SEQ ID NO: 238107 - RNA, 19 nt, Human
ucgggaggugguggaguga

SEQ ID NO: 238108 - RNA, 32 nt, Human
ucgggagguugaggcaggagaaucacuugaac

SEQ ID NO: 238109 - RNA, 32 nt, Human
ucgggagguugaggcaggagaaucgcuuaaac

SEQ ID NO: 238110 - RNA, 32 nt, Human
ucgggagguugaggcaggagaaucgcuugaac

SEQ ID NO: 238111 - RNA, 32 nt, Human
ucgggagguugaggcaggagaauugcaugaac

SEQ ID NO: 238112 - RNA, 32 nt, Human
ucgggagguugaggcaggagaauugcuuaaac

SEQ ID NO: 238113 - RNA, 32 nt, Human
ucgggagguugaggcaggagaauugcuugaac

SEQ ID NO: 238114 - RNA, 32 nt, Human
ucgggagguugagggagaagaaucacuuaaac

SEQ ID NO: 238115 - RNA, 32 nt, Human
ucgggagguugagggaggagaaucacuugacc

SEQ ID NO: 238116 - RNA, 32 nt, Human
ucgggagguugaugcaggagaaucacuugaaa

SEQ ID NO: 238117 - RNA, 32 nt, Human
ucgggagguuuaggcaggagaaucgcuugaac

SEQ ID NO: 238118 - RNA, 32 nt, Human
ucgggagucucaggcaggagaauugcuugaau

SEQ ID NO: 238119 - RNA, 32 nt, Human
ucgggagucugaaacaggagaauagcuugaac

SEQ ID NO: 238120 - RNA, 32 nt, Human
ucgggagugaggaccaggcugagaacucgggg

SEQ ID NO: 238121 - RNA, 32 nt, Human
ucgggaucucagaggaaauugcagugauucca

SEQ ID NO: 238122 - RNA, 32 nt, Human
ucgggaucugucauccuggaccaggauacuug

SEQ ID NO: 238123 - RNA, 32 nt, Human
ucgggauucugcugcuuuagauuggcacagcu

SEQ ID NO: 238124 - RNA, 32 nt, Human
ucgggcaaagggcagaggucaccguccagguu

SEQ ID NO: 238125 - RNA, 32 nt, Human
ucgggcaacacccuucucgcagccugggccuc

SEQ ID NO: 238126 - RNA, 32 nt, Human
ucgggcaagaaagucugggcagcuggagaagg

SEQ ID NO: 238127 - RNA, 32 nt, Human
ucgggcaccacccauauagcagucccagaggg

SEQ ID NO: 238128 - RNA, 32 nt, Human
ucgggcaccagccugcauauguguucacuuuu

SEQ ID NO: 238129 - RNA, 32 nt, Human
ucgggcagaguccuugggacaccagccucucu

SEQ ID NO: 238130 - RNA, 32 nt, Human
ucgggcagcaggugggaagugggagccggagc

SEQ ID NO: 238131 - RNA, 32 nt, Human
ucgggcagccauagaggagagcuuucuuaacg

SEQ ID NO: 238132 - RNA, 32 nt, Human
ucgggcagccuauugauacugucaggggaaaa

SEQ ID NO: 238133 - RNA, 32 nt, Human
ucgggcagcugagacaggagaaucacuugggc

SEQ ID NO: 238134 - RNA, 21 nt, Human
ucgggcagcuggaauuacagg

SEQ ID NO: 238135 - RNA, 24 nt, Human
ucgggcagcuggaauuacaggcau

SEQ ID NO: 238136 - RNA, 32 nt, Human
ucgggcaggcccagagagccagaguggaagga

SEQ ID NO: 238137 - RNA, 32 nt, Human
ucgggcaguagugugccacaccccagagccuu

SEQ ID NO: 238138 - RNA, 32 nt, Human
ucgggcaugaugacaggcaccuguaaucccag

SEQ ID NO: 238139 - RNA, 32 nt, Human
ucgggcaugguggcacaagccuguaaucucug

SEQ ID NO: 238140 - RNA, 32 nt, Human
ucgggcaugguggcacaugccuguaaucccag

SEQ ID NO: 238141 - RNA, 32 nt, Human
ucgggcaugguggcucaugccuguaaucucag

SEQ ID NO: 238142 - RNA, 32 nt, Human
ucgggccacggcacuccagccugggugacaga

SEQ ID NO: 238143 - RNA, 32 nt, Human
ucgggccacugcacuccagcuugggugacaga

SEQ ID NO: 238144 - RNA, 32 nt, Human
ucgggccacuuacacaccacugccugauaacc

SEQ ID NO: 238145 - RNA, 32 nt, Human
ucgggccagaagcagagaacaggaaguugaug

SEQ ID NO: 238146 - RNA, 32 nt, Human
ucgggccagccugucuguugugcagacgccuc

SEQ ID NO: 238147 - RNA, 24 nt, Human
ucgggccagcugguccuuuuccca

SEQ ID NO: 238148 - RNA, 32 nt, Human
ucgggccagggagguugaggcugcagugagcu

SEQ ID NO: 238149 - RNA, 23 nt, Human
ucgggcccagcccuuccacccca

SEQ ID NO: 238150 - RNA, 19 nt, Human
ucgggcccaucuuccuccc

SEQ ID NO: 238151 - RNA, 32 nt, Human
ucgggccccauccucaucccugacuggccaaa

SEQ ID NO: 238152 - RNA, 22 nt, Human
ucgggcccccacuuucuuccca

SEQ ID NO: 238153 - RNA, 21 nt, Human
ucgggccccgcgcccaggccc

SEQ ID NO: 238154 - RNA, 24 nt, Human
ucgggccccugcuccuguccccca

SEQ ID NO: 238155 - RNA, 22 nt, Human
ucgggcccgagcgggggccuga

SEQ ID NO: 238156 - RNA, 32 nt, Human
ucgggcccuccaaacccaaccuugccagcugg

SEQ ID NO: 238157 - RNA, 32 nt, Human
ucgggcccugcuccuccugcagccccuccuca

SEQ ID NO: 238158 - RNA, 32 nt, Human
ucgggcccuuuuuagucccuuuccaaagcugc

SEQ ID NO: 238159 - RNA, 32 nt, Human
ucgggccgcugcacuccagccugggggacaga

SEQ ID NO: 238160 - RNA, 32 nt, Human
ucgggccguucuguuccaagagauaaccauug

SEQ ID NO: 238161 - RNA, 23 nt, Human
ucgggccuccuccccaccuccca

SEQ ID NO: 238162 - RNA, 23 nt, Human
ucgggccuccugccuuccuccca

SEQ ID NO: 238163 - RNA, 32 nt, Human
ucgggccucuuccccaggcagcuugugagccc

SEQ ID NO: 238164 - RNA, 32 nt, Human
ucgggccugacccguccacacagggccguguc

SEQ ID NO: 238165 - RNA, 32 nt, Human
ucgggccugcagccaccaugcuccacucccug

SEQ ID NO: 238166 - RNA, 24 nt, Human
ucgggccuguaaucccagcacuuu

SEQ ID NO: 238167 - RNA, 32 nt, Human
ucgggccuguaaucccagcacuuucggaggcc

SEQ ID NO: 238168 - RNA, 32 nt, Human
ucgggcgagaggaggcgagaggcgcaaaggag

SEQ ID NO: 238169 - RNA, 32 nt, Human
ucgggcgaggagaagaggugacccgcgccaga

SEQ ID NO: 238170 - RNA, 32 nt, Human
ucgggcgagucacugccucucccuggcccuca

SEQ ID NO: 238171 - RNA, 32 nt, Human
ucgggcgauucuccugccccagccucuugagu

SEQ ID NO: 238172 - RNA, 32 nt, Human
ucgggcgauuggguucucccugccuuuucaau

SEQ ID NO: 238173 - RNA, 32 nt, Human
ucgggcgcaguggcucacaccuguaauccugc

SEQ ID NO: 238174 - RNA, 32 nt, Human
ucgggcgcaguggcucaugccuguaaucccag

SEQ ID NO: 238175 - RNA, 32 nt, Human
ucgggcgcaguggcuuaugccuguaaucccag

SEQ ID NO: 238176 - RNA, 32 nt, Human
ucgggcgccaggcaugacuaagagauaucgug

SEQ ID NO: 238177 - RNA, 32 nt, Human
ucgggcgcgguggcucacgccuguaaucccag

SEQ ID NO: 238178 - RNA, 32 nt, Human
ucgggcgcgguggcucaugcuuguaaucccag

SEQ ID NO: 238179 - RNA, 32 nt, Human
ucgggcggcgccgagcugagguggugagggac

SEQ ID NO: 238180 - RNA, 32 nt, Human
ucgggcgggaggcgggaggcgggaggccgggc

SEQ ID NO: 238181 - RNA, 32 nt, Human
ucgggcgggcggacgaggcgggcgauggcccu

SEQ ID NO: 238182 - RNA, 32 nt, Human
ucgggcguaguggugcaugccuguaaucccag

SEQ ID NO: 238183 - RNA, 32 nt, Human
ucgggcgugcuggugcaugccuguaauccuag

SEQ ID NO: 238184 - RNA, 32 nt, Human
ucgggcgugguggcucaugccuguaaucccag

SEQ ID NO: 238185 - RNA, 32 nt, Human
ucgggcuacuccacccuguccaccauggaccg

SEQ ID NO: 238186 - RNA, 32 nt, Human
ucgggcucccaaaguacugggauuacaggcau

SEQ ID NO: 238187 - RNA, 32 nt, Human
ucgggcucccaaagugcugggauuacagacgu

SEQ ID NO: 238188 - RNA, 32 nt, Human
ucgggcucccaaagugcugggauuacaggcgu

SEQ ID NO: 238189 - RNA, 32 nt, Human
ucgggcucccaaaguguugggauuacaggcau

SEQ ID NO: 238190 - RNA, 32 nt, Human
ucgggcuccuaaagugcugggauuacaggcgu

SEQ ID NO: 238191 - RNA, 18 nt, Human
ucgggcuccugcaggccg

SEQ ID NO: 238192 - RNA, 32 nt, Human
ucgggcucucccggcccugccucccagcaagu

SEQ ID NO: 238193 - RNA, 20 nt, Human
ucgggcucugcagagugaga

SEQ ID NO: 238194 - RNA, 32 nt, Human
ucgggcugcggacucugccuccugggucugag

SEQ ID NO: 238195 - RNA, 32 nt, Human
ucgggcugcugcagcucaggaggccgaaugau

SEQ ID NO: 238196 - RNA, 32 nt, Human
ucgggcuggagacgcaggaugggguaggccuu

SEQ ID NO: 238197 - RNA, 32 nt, Human
ucgggcugggcugagaggggagggggcggcgg

SEQ ID NO: 238198 - RNA, 32 nt, Human
ucgggcugggcuuccaaagccggccgcagccc

SEQ ID NO: 238199 - RNA, 32 nt, Human
ucgggcuuccggggaaagcaaucauuggugug

SEQ ID NO: 238200 - RNA, 23 nt, Human
ucgggcuuguguucucccucuca

SEQ ID NO: 238201 - RNA, 32 nt, Human
ucgggcuuuuggugagacagacuuucccaacc

SEQ ID NO: 238202 - RNA, 32 nt, Human
ucggggaaagaauggagcucagagugggaggu

SEQ ID NO: 238203 - RNA, 32 nt, Human
ucggggaacacauuccgggagagaugccuggc

SEQ ID NO: 238204 - RNA, 32 nt, Human
ucggggaagaugacacaucugaaccgagguac

SEQ ID NO: 238205 - RNA, 32 nt, Human
ucggggaccguucucugaucaucaggauuuuc

SEQ ID NO: 238206 - RNA, 32 nt, Human
ucggggaccguucugugaucaucaggauuuuc

SEQ ID NO: 238207 - RNA, 32 nt, Human
ucggggacgccagagcuccugagaagauguca

SEQ ID NO: 238208 - RNA, 32 nt, Human
ucggggagagaaggggccuguguucucagccu

SEQ ID NO: 238209 - RNA, 32 nt, Human
ucggggaggaagagauggcugcugagcaaggg

SEQ ID NO: 238210 - RNA, 32 nt, Human
ucggggaggcagagcuugcagucagccgagau

SEQ ID NO: 238211 - RNA, 32 nt, Human
ucggggaggggagggaaaagcagcacccacag

SEQ ID NO: 238212 - RNA, 32 nt, Human
ucggggaggggcuggcagagaugguuggucca

SEQ ID NO: 238213 - RNA, 32 nt, Human
ucggggaugggugccauuugagcccagcuugg

SEQ ID NO: 238214 - RNA, 23 nt, Human
ucggggcacugcaggggccgagc

SEQ ID NO: 238215 - RNA, 32 nt, Human
ucggggcagcggaacccagagaagcugagggg

SEQ ID NO: 238216 - RNA, 32 nt, Human
ucggggcaggaggcuggggaugggggugggau

SEQ ID NO: 238217 - RNA, 32 nt, Human
ucggggcagggugggcgcgagagagccuagaa

SEQ ID NO: 238218 - RNA, 32 nt, Human
ucggggcaucgcacgacauccaccuccugaag

SEQ ID NO: 238219 - RNA, 32 nt, Human
ucggggcauuuucacugucaaagaaaguucua

SEQ ID NO: 238220 - RNA, 32 nt, Human
ucggggcccaggccugggccagaagcuguuga

SEQ ID NO: 238221 - RNA, 32 nt, Human
ucggggcccgggaggcgggccgcgcagcgccg

SEQ ID NO: 238222 - RNA, 32 nt, Human
ucggggcccuuucugcagaucuaccucuggcu

SEQ ID NO: 238223 - RNA, 32 nt, Human
ucggggccgcagccuggugagcucagcccccu

SEQ ID NO: 238224 - RNA, 32 nt, Human
ucggggccggccucugccuugccgcuccccuc

SEQ ID NO: 238225 - RNA, 32 nt, Human
ucggggccucagaagcaggcuuuuaucuggcc

SEQ ID NO: 238226 - RNA, 32 nt, Human
ucggggccugcugggagcccuuaacuccccca

SEQ ID NO: 238227 - RNA, 32 nt, Human
ucggggccugggacacuucccugggccucaac

SEQ ID NO: 238228 - RNA, 24 nt, Human
ucggggccuugccucuugcagcua

SEQ ID NO: 238229 - RNA, 32 nt, Human
ucggggccuugccucuugcagcuacucugugg

SEQ ID NO: 238230 - RNA, 32 nt, Human
ucggggcgagggcagaggugaucaccugcgug

SEQ ID NO: 238231 - RNA, 32 nt, Human
ucggggcgcugaggcaggagaaucgcucgaac

SEQ ID NO: 238232 - RNA, 32 nt, Human
ucggggcucacugccuccugcccuucucuccu

SEQ ID NO: 238233 - RNA, 32 nt, Human
ucggggcucguccacucuccucccucucuccu

SEQ ID NO: 238234 - RNA, 32 nt, Human
ucggggcucucucccucugucucccuccuggc

SEQ ID NO: 238235 - RNA, 32 nt, Human
ucggggcugaccaggcuggggguccagugaaa

SEQ ID NO: 238236 - RNA, 32 nt, Human
ucggggcugcagauggcccaggcgcugaccca

SEQ ID NO: 238237 - RNA, 32 nt, Human
ucggggcugcaggcuggagugcagugggacag

SEQ ID NO: 238238 - RNA, 21 nt, Human
ucggggcugccccugcacccu

SEQ ID NO: 238239 - RNA, 32 nt, Human
ucggggcugcgggguggggaccccaaggcuuu

SEQ ID NO: 238240 - RNA, 28 nt, Human
ucggggcugggcgcugccucucggucga

SEQ ID NO: 238241 - RNA, 24 nt, Human
ucggggcugggggacggggcgggg

SEQ ID NO: 238242 - RNA, 19 nt, Human
ucggggcuugcccugagcc

SEQ ID NO: 238243 - RNA, 32 nt, Human
ucgggggagagggcgccggagaggaggcggcg

SEQ ID NO: 238244 - RNA, 24 nt, Human
ucgggggagcgugaguugcaguua

SEQ ID NO: 238245 - RNA, 32 nt, Human
ucgggggcagcggcagauuugaggcuuaagca

SEQ ID NO: 238246 - RNA, 32 nt, Human
ucgggggccucccacagcacagcacugccucu

SEQ ID NO: 238247 - RNA, 32 nt, Human
ucgggggccucuggguggagggggauucagac

SEQ ID NO: 238248 - RNA, 30 nt, Human
ucgggggcgcugugguuccagaacauuuca

SEQ ID NO: 238249 - RNA, 32 nt, Human
ucgggggcggagugcggggcagaggggugggg

SEQ ID NO: 238250 - RNA, 32 nt, Human
ucgggggcggggcgaucgggucucagccccug

SEQ ID NO: 238251 - RNA, 32 nt, Human
ucgggggcgggggagauucugacucuuaaucu

SEQ ID NO: 238252 - RNA, 32 nt, Human
ucgggggcggugccugccuugcagccuccccu

SEQ ID NO: 238253 - RNA, 32 nt, Human
ucgggggcuugacuccagccccggggaucgag

SEQ ID NO: 238254 - RNA, 24 nt, Human
ucggggggcuuucugucuggcuca

SEQ ID NO: 238255 - RNA, 32 nt, Human
ucggggguagcgccucucauuccugaugucuc

SEQ ID NO: 238256 - RNA, 32 nt, Human
ucgggggugccugggagccuggagucccgggg

SEQ ID NO: 238257 - RNA, 23 nt, Human
ucggggguuucagcucacugcuc

SEQ ID NO: 238258 - RNA, 32 nt, Human
ucggggguuugcgaccagccuggucaacauag

SEQ ID NO: 238259 - RNA, 32 nt, Human
ucgggguacagauggggcaggggcacuuguga

SEQ ID NO: 238260 - RNA, 32 nt, Human
ucggggucgggaggcguccccacgccgcccgg

SEQ ID NO: 238261 - RNA, 32 nt, Human
ucggggucuaaggugaucagaugcagaagcau

SEQ ID NO: 238262 - RNA, 23 nt, Human
ucggggucuggugucggcacagc

SEQ ID NO: 238263 - RNA, 32 nt, Human
ucggggugugagcuggcaugaggaccuguugg

SEQ ID NO: 238264 - RNA, 32 nt, Human
ucgggguuagaugaccacaggauaaagaggaa

SEQ ID NO: 238265 - RNA, 24 nt, Human
ucgggguuugggauugacacugga

SEQ ID NO: 238266 - RNA, 32 nt, Human
ucggguacccacccgcuguucuccaugcaaac

SEQ ID NO: 238267 - RNA, 32 nt, Human
ucggguaugguggcacaugccuguaauuccag

SEQ ID NO: 238268 - RNA, 32 nt, Human
ucgggucaaggcagaggcaggaaacuaacugg

SEQ ID NO: 238269 - RNA, 32 nt, Human
ucgggucaccacaaccuccgccucccggauuc

SEQ ID NO: 238270 - RNA, 32 nt, Human
ucgggucacugcaaccuccgccucccggguuc

SEQ ID NO: 238271 - RNA, 32 nt, Human
ucgggucacugcaaccucuaccuccaggguuc

SEQ ID NO: 238272 - RNA, 32 nt, Human
ucgggucacugcaagcucugccucccaaguuc

SEQ ID NO: 238273 - RNA, 32 nt, Human
ucgggucacugcagccucugucccuggguuca

SEQ ID NO: 238274 - RNA, 32 nt, Human
ucgggucagcccuaguggcugccugcacacug

SEQ ID NO: 238275 - RNA, 32 nt, Human
ucgggucaguuccagccuuccucuccaacucu

SEQ ID NO: 238276 - RNA, 32 nt, Human
ucggguccacagcugagguugccucugacaag

SEQ ID NO: 238277 - RNA, 32 nt, Human
ucggguccggcucugggcgugguucccuuccc

SEQ ID NO: 238278 - RNA, 32 nt, Human
ucgggucgcgggugcacuccggcccggcuccc

SEQ ID NO: 238279 - RNA, 32 nt, Human
ucgggugacugcaaccacugccucccagguuc

SEQ ID NO: 238280 - RNA, 32 nt, Human
ucgggugagcccagaagugagagcaguuggcu

SEQ ID NO: 238281 - RNA, 21 nt, Human
ucgggugauccacccaccuca

SEQ ID NO: 238282 - RNA, 32 nt, Human
ucgggugcaguggcucacaccuguaauuccag

SEQ ID NO: 238283 - RNA, 32 nt, Human
ucgggugcccucagagccaccucugccuguga

SEQ ID NO: 238284 - RNA, 32 nt, Human
ucgggugcgguggcucacaccuguaauccuag

SEQ ID NO: 238285 - RNA, 32 nt, Human
ucgggugcgguggcucaugccuauaauccuag

SEQ ID NO: 238286 - RNA, 32 nt, Human
ucggguggcugaggcaggagaaucacuugaac

SEQ ID NO: 238287 - RNA, 32 nt, Human
ucgggugggaaggaagcagggaagagaaagca

SEQ ID NO: 238288 - RNA, 32 nt, Human
ucgggugggagacuucagaugggcucaguacc

SEQ ID NO: 238289 - RNA, 32 nt, Human
ucgggugguggucucgguuggccaaggcugag

SEQ ID NO: 238290 - RNA, 32 nt, Human
ucggguguaguggcucaugcuuguaaucccag

SEQ ID NO: 238291 - RNA, 32 nt, Human
ucggguguccgcccucagccuccuggggacuc

SEQ ID NO: 238292 - RNA, 32 nt, Human
ucgggugugauggcucacgccuguaauccuag

SEQ ID NO: 238293 - RNA, 32 nt, Human
ucggguucaagcaauucuccugcaucagccuc

SEQ ID NO: 238294 - RNA, 32 nt, Human
ucggguucaagcaauugucugccucagccucc

SEQ ID NO: 238295 - RNA, 32 nt, Human
ucggguucacaccauucuccugccucagccuc

SEQ ID NO: 238296 - RNA, 32 nt, Human
ucggguucacgcuauccucccgccucagccuc

SEQ ID NO: 238297 - RNA, 32 nt, Human
ucggguuccagcaauucuccugccucagccuc

SEQ ID NO: 238298 - RNA, 19 nt, Human
ucggguuccgccugagcca

SEQ ID NO: 238299 - RNA, 32 nt, Human
ucggguuggggucuucccgaagccagguccaa

SEQ ID NO: 238300 - RNA, 32 nt, Human
ucggguuugcaccauucuccugccucagccuc

SEQ ID NO: 238301 - RNA, 20 nt, Human
ucgguaaacaguaguaacca

SEQ ID NO: 238302 - RNA, 32 nt, Human
ucgguaaagagagagagggcugggaggaaaag

SEQ ID NO: 238303 - RNA, 31 nt, Human
ucgguaaagcagugccuccucacuuaaguga

SEQ ID NO: 238304 - RNA, 32 nt, Human
ucgguaagaucucuccacagcugccaccaacc

SEQ ID NO: 238305 - RNA, 32 nt, Human
ucgguacagaagagguuucuuucugcaccagg

SEQ ID NO: 238306 - RNA, 32 nt, Human
ucgguaccugaaaacaacgauggcauggaaaa

SEQ ID NO: 238307 - RNA, 32 nt, Human
ucgguacuaagucauuuucaggggauugaaag

SEQ ID NO: 238308 - RNA, 17 nt, Human
ucgguagacaccaguca

SEQ ID NO: 238309 - RNA, 32 nt, Human
ucgguagcugaagucagccacggugggagugu

SEQ ID NO: 238310 - RNA, 32 nt, Human
ucgguaggcugaggcaggagaaucacuugaau

SEQ ID NO: 238311 - RNA, 32 nt, Human
ucgguauauggaaacacauugcucuacccugc

SEQ ID NO: 238312 - RNA, 18 nt, Human
ucgguaucccuacucuca

SEQ ID NO: 238313 - RNA, 32 nt, Human
ucggucaccauacuugaguuagcucuagggaa

SEQ ID NO: 238314 - RNA, 32 nt, Human
ucggucacccaccaacgccgcucccucgaucc

SEQ ID NO: 238315 - RNA, 32 nt, Human
ucggucaccuaggcuggaguguaguggcgcaa

SEQ ID NO: 238316 - RNA, 32 nt, Human
ucggucauucuccccauuuccauccauuaccc

SEQ ID NO: 238317 - RNA, 32 nt, Human
ucggucauugucuccccuccagcucuacucac

SEQ ID NO: 238318 - RNA, 22 nt, Human
ucggucccccagggugcgcuca

SEQ ID NO: 238319 - RNA, 22 nt, Human
ucgguccccuuccuuuagcuca

SEQ ID NO: 238320 - RNA, 20 nt, Human
ucggucccucacuggcacuu

SEQ ID NO: 238321 - RNA, 32 nt, Human
ucggucccucacuggcacuucucccuccggcc

SEQ ID NO: 238322 - RNA, 32 nt, Human
ucggucccuccaggcagccaaggcuuggcagc

SEQ ID NO: 238323 - RNA, 32 nt, Human
ucggucccuuagugaagccaugcuuacuccag

SEQ ID NO: 238324 - RNA, 21 nt, Human
ucgguccgguugagguuguca

SEQ ID NO: 238325 - RNA, 32 nt, Human
ucgguccugcuguagugccuucugcgccaggc

SEQ ID NO: 238326 - RNA, 32 nt, Human
ucggucuagggaggggagggucagcguggcaa

SEQ ID NO: 238327 - RNA, 32 nt, Human
ucggucuauacuacucggccauggcccacauc

SEQ ID NO: 238328 - RNA, 32 nt, Human
ucggucucaaaaacaaaacaaaacaaaacaaa

SEQ ID NO: 238329 - RNA, 21 nt, Human
ucggucuccaccccaggguca

SEQ ID NO: 238330 - RNA, 32 nt, Human
ucggucuccagugcggcaucccuuccuugccu

SEQ ID NO: 238331 - RNA, 32 nt, Human
ucggucucccaaaaugcugggauuacaggggu

SEQ ID NO: 238332 - RNA, 32 nt, Human
ucggucucccaaagcgcugggauuacaggcgu

SEQ ID NO: 238333 - RNA, 32 nt, Human
ucggucucccaaagugcugggauuacagaugu

SEQ ID NO: 238334 - RNA, 32 nt, Human
ucggucucccaaagugcugggauuacaggagu

SEQ ID NO: 238335 - RNA, 32 nt, Human
ucggucucccaaagugcugggauuacaggcau

SEQ ID NO: 238336 - RNA, 32 nt, Human
ucggucucccaaagugcugggauuacaggcgu

SEQ ID NO: 238337 - RNA, 32 nt, Human
ucggucucccaaagugcugggauuacaggcuu

SEQ ID NO: 238338 - RNA, 32 nt, Human
ucggucucccaaagugcugggauuacagggau

SEQ ID NO: 238339 - RNA, 32 nt, Human
ucggucucccaaagugcugggauuacaggugu

SEQ ID NO: 238340 - RNA, 32 nt, Human
ucggucucccaaaguguugggauuacaggcau

SEQ ID NO: 238341 - RNA, 32 nt, Human
ucggucucccgaagugcugggauuacaggugu

SEQ ID NO: 238342 - RNA, 22 nt, Human
ucggucuccguccgucgguccg

SEQ ID NO: 238343 - RNA, 32 nt, Human
ucggucucuggaaagucaggcugagaaauccu

SEQ ID NO: 238344 - RNA, 32 nt, Human
ucggugaacucugcaacccucucccgaacacu

SEQ ID NO: 238345 - RNA, 31 nt, Human
ucggugaacugccccuggccuguguccccca

SEQ ID NO: 238346 - RNA, 32 nt, Human
ucggugacagugagccacuugacuccagggac

SEQ ID NO: 238347 - RNA, 32 nt, Human
ucggugagaggcagugggcaagugaucuugga

SEQ ID NO: 238348 - RNA, 32 nt, Human
ucggugaggaucuccuuuagaagaggagaagc

SEQ ID NO: 238349 - RNA, 32 nt, Human
ucggugagggccagcuacauaccuggcuaagc

SEQ ID NO: 238350 - RNA, 32 nt, Human
ucggugaggggcugggcuggacaccagggccc

SEQ ID NO: 238351 - RNA, 32 nt, Human
ucggugagugcccagcugauuggggguauggc

SEQ ID NO: 238352 - RNA, 32 nt, Human
ucggugcagagugacgagagccucgaccucag

SEQ ID NO: 238353 - RNA, 32 nt, Human
ucggugcagcagcccugcaaaggaguggagcc

SEQ ID NO: 238354 - RNA, 32 nt, Human
ucggugcaggagcugaaggugaguggagugcu

SEQ ID NO: 238355 - RNA, 32 nt, Human
ucggugcccagaagucagcccagaccuuccug

SEQ ID NO: 238356 - RNA, 32 nt, Human
ucggugcggagcugccgggcugagggacgccu

SEQ ID NO: 238357 - RNA, 32 nt, Human
ucggugcuauuuugguuuugcauuuccauggu

SEQ ID NO: 238358 - RNA, 32 nt, Human
ucggugcucccagaucccgcagccucuggaga

SEQ ID NO: 238359 - RNA, 32 nt, Human
ucggugcugccugguccuggccuggggcagag

SEQ ID NO: 238360 - RNA, 32 nt, Human
ucggugcugcugcugcugcuccuggggcugcu

SEQ ID NO: 238361 - RNA, 32 nt, Human
ucggugcuggaugccagccuacagcagggucc

SEQ ID NO: 238362 - RNA, 32 nt, Human
ucgguggacccagggaugacaugucccuacac

SEQ ID NO: 238363 - RNA, 32 nt, Human
ucgguggagguggaggagcaaacugaggggca

SEQ ID NO: 238364 - RNA, 32 nt, Human
ucgguggagguuugugaccauugcucuucaaa

SEQ ID NO: 238365 - RNA, 32 nt, Human
ucgguggggaccccgacaucccagcgcugugc

SEQ ID NO: 238366 - RNA, 32 nt, Human
ucgguggggaggcaagagggcggcgaggaggu

SEQ ID NO: 238367 - RNA, 32 nt, Human
ucgguggggcugcagaaggucggggcugcacu

SEQ ID NO: 238368 - RNA, 32 nt, Human
ucggugggugaauggggagaccagaaagaaag

SEQ ID NO: 238369 - RNA, 32 nt, Human
ucgguggguuccccgcaaaaucaggcuugagu

SEQ ID NO: 238370 - RNA, 32 nt, Human
ucgguggucuccaccugucauucuagaaacag

SEQ ID NO: 238371 - RNA, 32 nt, Human
ucgguggugaugacagacccccuuuuggacuc

SEQ ID NO: 238372 - RNA, 32 nt, Human
ucggugguucucaucuucuguuucuugaacac

SEQ ID NO: 238373 - RNA, 32 nt, Human
ucggugucccuuucauccugggccugugugaa

SEQ ID NO: 238374 - RNA, 32 nt, Human
ucggugucugcagcacccuccgcuuccucucc

SEQ ID NO: 238375 - RNA, 29 nt, Human
ucggugugucugugugauggggaugaggc

SEQ ID NO: 238376 - RNA, 32 nt, Human
ucgguuaacuauauacugugcgcaguauggau

SEQ ID NO: 238377 - RNA, 32 nt, Human
ucgguuacauaaaacacagcugggcugggaag

SEQ ID NO: 238378 - RNA, 32 nt, Human
ucgguucaccgcaaccuccacaucccagguuc

SEQ ID NO: 238379 - RNA, 32 nt, Human
ucgguucacugcaacauucaccucccagguuc

SEQ ID NO: 238380 - RNA, 32 nt, Human
ucgguucacugcaaccuccaccucccgaguuc

SEQ ID NO: 238381 - RNA, 32 nt, Human
ucgguucacugcaaccuccaccucucagauuc

SEQ ID NO: 238382 - RNA, 32 nt, Human
ucgguucacugcaaccuccgccuccagguuca

SEQ ID NO: 238383 - RNA, 32 nt, Human
ucgguucacugcaaccuccgccucccgguuca

SEQ ID NO: 238384 - RNA, 32 nt, Human
ucgguucacugcaaccucugccucccaggauc

SEQ ID NO: 238385 - RNA, 32 nt, Human
ucgguucacugcaaccucugccucccagguuc

SEQ ID NO: 238386 - RNA, 32 nt, Human
ucgguucacugcaaccucugccucucagguuc

SEQ ID NO: 238387 - RNA, 32 nt, Human
ucgguucacugcagccuccaccucccgagcac

SEQ ID NO: 238388 - RNA, 32 nt, Human
ucgguucacugcagccucugccuucugggcuc

SEQ ID NO: 238389 - RNA, 32 nt, Human
ucgguucauugcaaccuccgccucccgaguuc

SEQ ID NO: 238390 - RNA, 32 nt, Human
ucgguucauugcaaccuccgccuccugcguuc

SEQ ID NO: 238391 - RNA, 32 nt, Human
ucgguuccaguucuacuuccagcagaaggggc

SEQ ID NO: 238392 - RNA, 32 nt, Human
ucgguucucagccucagauauccgcaccggcg

SEQ ID NO: 238393 - RNA, 32 nt, Human
ucgguucuccuccaccuggacaggaugagcca

SEQ ID NO: 238394 - RNA, 32 nt, Human
ucgguucucuuuugucugaccucucuccuccc

SEQ ID NO: 238395 - RNA, 32 nt, Human
ucgguucuguuucuccccuuggcugccuguac

SEQ ID NO: 238396 - RNA, 32 nt, Human
ucgguucuuccagacaagcugcaagacgcuga

SEQ ID NO: 238397 - RNA, 32 nt, Human
ucgguugaauccaggagguaaagaugcuguga

SEQ ID NO: 238398 - RNA, 32 nt, Human
ucgguugagcccaggagguuguggcugcagug

SEQ ID NO: 238399 - RNA, 32 nt, Human
ucgguugauggggaggucaggucugggaaacu

SEQ ID NO: 238400 - RNA, 32 nt, Human
ucgguugcaccugacauucucuccccaguaag

SEQ ID NO: 238401 - RNA, 32 nt, Human
ucgguuggugagugcagggaaggaggauguaa

SEQ ID NO: 238402 - RNA, 32 nt, Human
ucgguugucaucugugccaucuguccaugguu

SEQ ID NO: 238403 - RNA, 32 nt, Human
ucgguuguucucuggagccccaggacccaggc

SEQ ID NO: 238404 - RNA, 32 nt, Human
ucgguuuaaaacaugcuauauguacuguaugu

SEQ ID NO: 238405 - RNA, 32 nt, Human
ucgguuuccccaagugcugggauuacaggugu

SEQ ID NO: 238406 - RNA, 27 nt, Human
ucgguuuccccgcccccgccgggcuua

SEQ ID NO: 238407 - RNA, 32 nt, Human
ucgguuucucucuuaaagacacucacuguaca

SEQ ID NO: 238408 - RNA, 32 nt, Human
ucgguuucugcaucuucuggaucaauucacgg

SEQ ID NO: 238409 - RNA, 32 nt, Human
ucgguuugaaggcuuauugaggcccuacauug

SEQ ID NO: 238410 - RNA, 32 nt, Human
ucgguuugugguggcuucgcugaggcaguggu

SEQ ID NO: 238411 - RNA, 32 nt, Human
ucgguuuuccaaagagcugggauuacaggcau

SEQ ID NO: 238412 - RNA, 32 nt, Human
ucgguuuuuauguuuaacuuccacccagagcu

SEQ ID NO: 238413 - RNA, 32 nt, Human
ucgguuuuucuaguucuugcaaaggaacggug

SEQ ID NO: 238414 - RNA, 32 nt, Human
ucguaaaugucaucauaagaugccauucaaaa

SEQ ID NO: 238415 - RNA, 32 nt, Human
ucguaacauggcccuggcugggcuuggugguu

SEQ ID NO: 238416 - RNA, 32 nt, Human
ucguaacuuugacauucugccuuacagucuau

SEQ ID NO: 238417 - RNA, 22 nt, Human
ucguaagaacagccacuucuga

SEQ ID NO: 238418 - RNA, 32 nt, Human
ucguaauaggcagagaugacuugcaucccagc

SEQ ID NO: 238419 - RNA, 32 nt, Human
ucguacagcagcagaaaaugaccauguuacag

SEQ ID NO: 238420 - RNA, 32 nt, Human
ucguacaguccccuagaagcagaaggacaagg

SEQ ID NO: 238421 - RNA, 32 nt, Human
ucguaccacuacacuccagccugggcaacgga

SEQ ID NO: 238422 - RNA, 32 nt, Human
ucguaccacugcacuccagccuaggugacagg

SEQ ID NO: 238423 - RNA, 32 nt, Human
ucguaccacugcacuccagccuggaugacaga

SEQ ID NO: 238424 - RNA, 32 nt, Human
ucguaccacugcacuccagccugggcgacaga

SEQ ID NO: 238425 - RNA, 32 nt, Human
ucguaccacugcacuccagccugggcuacaga

SEQ ID NO: 238426 - RNA, 32 nt, Human
ucguaccacugcacuccagccugggugacaga

SEQ ID NO: 238427 - RNA, 32 nt, Human
ucguaccacugcacuccagucugggcgacaga

SEQ ID NO: 238428 - RNA, 32 nt, Human
ucguaccacugcacucuggccugggcaacaag

SEQ ID NO: 238429 - RNA, 32 nt, Human
ucguaccauugcacuccagccugggcaacaag

SEQ ID NO: 238430 - RNA, 32 nt, Human
ucguacccucuuuauaacuuccuccccaccgg

SEQ ID NO: 238431 - RNA, 32 nt, Human
ucguaccgcugcacuccagccugggugauaga

SEQ ID NO: 238432 - RNA, 32 nt, Human
ucguaccuauugcacuccauccuggaugaaag

SEQ ID NO: 238433 - RNA, 32 nt, Human
ucguacgcuaguguccucccuuuucaguccgc

SEQ ID NO: 238434 - RNA, 32 nt, Human
ucguacuacugcacuccagcauggaagacagc

SEQ ID NO: 238435 - RNA, 32 nt, Human
ucguacucaaagcucgugcauccagggagggg

SEQ ID NO: 238436 - RNA, 32 nt, Human
ucguacucuuucucccgucuucuucuucccca

SEQ ID NO: 238437 - RNA, 32 nt, Human
ucguacuggggaggcagcuggagcagcaagau

SEQ ID NO: 238438 - RNA, 32 nt, Human
ucguacuuugcucuccuugcgggugguugccg

SEQ ID NO: 238439 - RNA, 32 nt, Human
ucguagaacuagggcugcaggaauugcgccgc

SEQ ID NO: 238440 - RNA, 32 nt, Human
ucguagagaugggguuucaccauguuggcugg

SEQ ID NO: 238441 - RNA, 32 nt, Human
ucguagaggagagaaaacaagaguggacuggg

SEQ ID NO: 238442 - RNA, 32 nt, Human
ucguagaggcaucggaagaagauuagcaguuu

SEQ ID NO: 238443 - RNA, 32 nt, Human
ucguagaucauccucagaaaagccuugcccug

SEQ ID NO: 238444 - RNA, 32 nt, Human
ucguagcaaagucacuuuuauaacaguuuacc

SEQ ID NO: 238445 - RNA, 21 nt, Human
ucguagcaagcugccgaugga

SEQ ID NO: 238446 - RNA, 32 nt, Human
ucguagcaccaggguuuggaggcugcgaccgc

SEQ ID NO: 238447 - RNA, 32 nt, Human
ucguagcacugcaguccagccugggcgacaga

SEQ ID NO: 238448 - RNA, 32 nt, Human
ucguagcagccaucuuuuccuggcuuugguga

SEQ ID NO: 238449 - RNA, 32 nt, Human
ucguagcagggaaaggauaugacaauggggag

SEQ ID NO: 238450 - RNA, 32 nt, Human
ucguagcaucuaaaucaucuuaggguggcuca

SEQ ID NO: 238451 - RNA, 32 nt, Human
ucguagccauaccucgagucccugcauuggac

SEQ ID NO: 238452 - RNA, 32 nt, Human
ucguagcccuggagggucgugaucuccuacaa

SEQ ID NO: 238453 - RNA, 32 nt, Human
ucguagccugccacuccgugcauugcuugaug

SEQ ID NO: 238454 - RNA, 32 nt, Human
ucguagcuccccauugaacacaggugucauca

SEQ ID NO: 238455 - RNA, 19 nt, Human
ucguagcugccgccgagcc

SEQ ID NO: 238456 - RNA, 32 nt, Human
ucguaggggauggagugacagccucagccccc

SEQ ID NO: 238457 - RNA, 32 nt, Human
ucguagguagcccuguccucacuugagaagcc

SEQ ID NO: 238458 - RNA, 32 nt, Human
ucguaguagaagcagggagcggaagaagucuc

SEQ ID NO: 238459 - RNA, 32 nt, Human
ucguagucuccucuagauauuuugccauaaua

SEQ ID NO: 238460 - RNA, 32 nt, Human
ucguauacccauggaguguuguaggggccccu

SEQ ID NO: 238461 - RNA, 32 nt, Human
ucguauaugaaauguuccuuggcagcuggacu

SEQ ID NO: 238462 - RNA, 32 nt, Human
ucguaucaauggaaucaaacaguaaguggucc

SEQ ID NO: 238463 - RNA, 32 nt, Human
ucguauccaaguuagucccccuuauuccacug

SEQ ID NO: 238464 - RNA, 32 nt, Human
ucguaucucagguuuuucucuguuuuugagaa

SEQ ID NO: 238465 - RNA, 32 nt, Human
ucguaucuguaaucccagcacuuugagaggcc

SEQ ID NO: 238466 - RNA, 32 nt, Human
ucguaucuuuccaaagugcagacucuugugaa

SEQ ID NO: 238467 - RNA, 24 nt, Human
ucguaugaucaguacugacuuucu

SEQ ID NO: 238468 - RNA, 32 nt, Human
ucguaugcuugggaugggggccgugccacccg

SEQ ID NO: 238469 - RNA, 32 nt, Human
ucguauggggacucgggugaggguggcgagua

SEQ ID NO: 238470 - RNA, 32 nt, Human
ucguauuaguccauuuucacgcugcugauaaa

SEQ ID NO: 238471 - RNA, 32 nt, Human
ucguauucucuucaucccagucugauugcaua

SEQ ID NO: 238472 - RNA, 32 nt, Human
ucguauugugcacucaggcuuggccuguaaca

SEQ ID NO: 238473 - RNA, 32 nt, Human
ucguauuugcugcaucguaaugacaugaguac

SEQ ID NO: 238474 - RNA, 32 nt, Human
ucgucaagccuguaaucccaacacuuugggag

SEQ ID NO: 238475 - RNA, 32 nt, Human
ucgucaaggcgccaucgggggugcaggugcug

SEQ ID NO: 238476 - RNA, 32 nt, Human
ucgucaaggcucagagguaacaagacagaaaa

SEQ ID NO: 238477 - RNA, 32 nt, Human
ucgucacagcuggcaugggcuggacaguugcu

SEQ ID NO: 238478 - RNA, 32 nt, Human
ucgucaccaugauagcaccaucagccuuugac

SEQ ID NO: 238479 - RNA, 32 nt, Human
ucgucacccacauuggagugcagugguacgau

SEQ ID NO: 238480 - RNA, 32 nt, Human
ucgucacccagccugugaggguccugacugga

SEQ ID NO: 238481 - RNA, 32 nt, Human
ucgucacccaggcuggagugcaauugugcaau

SEQ ID NO: 238482 - RNA, 32 nt, Human
ucgucaccccagcuggagugcaguggugcgau

SEQ ID NO: 238483 - RNA, 32 nt, Human
ucgucacccugagcuuguuggcugcuaucuaa

SEQ ID NO: 238484 - RNA, 32 nt, Human
ucgucaccucgcguagaugaucagccccugau

SEQ ID NO: 238485 - RNA, 21 nt, Human
ucgucaccugacugcaaugag

SEQ ID NO: 238486 - RNA, 32 nt, Human
ucgucacgccuguaaucccagcacuuuagauc

SEQ ID NO: 238487 - RNA, 32 nt, Human
ucgucacgccuguaaucccagcacuuuggcag

SEQ ID NO: 238488 - RNA, 32 nt, Human
ucgucacgccuguaaucccagcacuuugggag

SEQ ID NO: 238489 - RNA, 32 nt, Human
ucgucacugagaccucaggccucugccagcca

SEQ ID NO: 238490 - RNA, 32 nt, Human
ucgucacuggguucaucagagcagugugugaa

SEQ ID NO: 238491 - RNA, 32 nt, Human
ucgucacuguggcuggggcucccuggacccgc

SEQ ID NO: 238492 - RNA, 32 nt, Human
ucgucacuuccagcuaccuguagggcagggcu

SEQ ID NO: 238493 - RNA, 32 nt, Human
ucgucagacuccugugcucuuccaggggcugc

SEQ ID NO: 238494 - RNA, 32 nt, Human
ucgucagccuaggccaucaugaugaagcccug

SEQ ID NO: 238495 - RNA, 32 nt, Human
ucgucagccuggguggcugggcccggcuuagg

SEQ ID NO: 238496 - RNA, 18 nt, Human
ucgucagcugcccugggc

SEQ ID NO: 238497 - RNA, 32 nt, Human
ucgucaggagguggagguugcagugagccaag

SEQ ID NO: 238498 - RNA, 32 nt, Human
ucgucaggaucuccggaggcugugucaugggc

SEQ ID NO: 238499 - RNA, 32 nt, Human
ucgucagugcuguggucucugcucuggcugug

SEQ ID NO: 238500 - RNA, 32 nt, Human
ucgucagugugaaaaugcccuugcugauaauu

SEQ ID NO: 238501 - RNA, 32 nt, Human
ucgucaguguugugcaggagaauccacuuaga

SEQ ID NO: 238502 - RNA, 32 nt, Human
ucgucauggaaaucccagcuaugcagcacuag

SEQ ID NO: 238503 - RNA, 32 nt, Human
ucgucauggauggcgggguccuggaggagcug

SEQ ID NO: 238504 - RNA, 32 nt, Human
ucgucauugcagcucucagcaaacugggucau

SEQ ID NO: 238505 - RNA, 32 nt, Human
ucguccaccucuccaaccucacauccuacuag

SEQ ID NO: 238506 - RNA, 32 nt, Human
ucguccagccacucuucagcacauuccuuuac

SEQ ID NO: 238507 - RNA, 32 nt, Human
ucguccagccagacugccucuugaaagauggc

SEQ ID NO: 238508 - RNA, 19 nt, Human
ucguccagccgccgggcca

SEQ ID NO: 238509 - RNA, 31 nt, Human
ucguccagccucucucugaacugugaucuuu

SEQ ID NO: 238510 - RNA, 20 nt, Human
ucguccaggcuggagugcag

SEQ ID NO: 238511 - RNA, 21 nt, Human
ucguccaggcuggagugcagu

SEQ ID NO: 238512 - RNA, 32 nt, Human
ucguccaggcuggagugcaguacgcaaucuug

SEQ ID NO: 238513 - RNA, 32 nt, Human
ucguccaggcuggagugcaguagcgcaaucuu

SEQ ID NO: 238514 - RNA, 22 nt, Human
ucguccaggcuggagugcagug

SEQ ID NO: 238515 - RNA, 32 nt, Human
ucguccaggcuggagugcagugcugcaaucuu

SEQ ID NO: 238516 - RNA, 32 nt, Human
ucguccaggcuggagugcaguggcgcaaucuc

SEQ ID NO: 238517 - RNA, 32 nt, Human
ucguccaggcuggagugcaguggcgccaucuc

SEQ ID NO: 238518 - RNA, 32 nt, Human
ucguccaggcuggagugcaguggcgcgaucuc

SEQ ID NO: 238519 - RNA, 32 nt, Human
ucguccaggcuggagugcagugguguggucuc

SEQ ID NO: 238520 - RNA, 32 nt, Human
ucguccaggcuggagugccguggcguaaucuc

SEQ ID NO: 238521 - RNA, 32 nt, Human
ucguccaggcuggagugcgguggcgugaucuc

SEQ ID NO: 238522 - RNA, 22 nt, Human
ucguccagguuagagugcaaug

SEQ ID NO: 238523 - RNA, 32 nt, Human
ucguccagguuagagugcaauggcuugaucuc

SEQ ID NO: 238524 - RNA, 32 nt, Human
ucguccaguagaaaugcaucuaugaggucagc

SEQ ID NO: 238525 - RNA, 32 nt, Human
ucguccagugccugaacccuuaccggaaaccu

SEQ ID NO: 238526 - RNA, 32 nt, Human
ucgucccaccuugcugucugucucauugucuu

SEQ ID NO: 238527 - RNA, 32 nt, Human
ucgucccacugcaccgccuggcugagggcguu

SEQ ID NO: 238528 - RNA, 32 nt, Human
ucgucccacugcacuccagcccgggcaacaga

SEQ ID NO: 238529 - RNA, 32 nt, Human
ucgucccacugcacuccagccugggcaacaga

SEQ ID NO: 238530 - RNA, 32 nt, Human
ucgucccacuggccucuguacauuucccugug

SEQ ID NO: 238531 - RNA, 32 nt, Human
ucgucccagcaacccaggaggcugagguagga

SEQ ID NO: 238532 - RNA, 32 nt, Human
ucgucccagcuacuagggaggcugaggcagga

SEQ ID NO: 238533 - RNA, 32 nt, Human
ucgucccagcuacucaggaggcugaggcagga

SEQ ID NO: 238534 - RNA, 32 nt, Human
ucgucccagguaaggagaguccuggucuuugu

SEQ ID NO: 238535 - RNA, 32 nt, Human
ucguccccaaguguuuccugacacgcaucuuu

SEQ ID NO: 238536 - RNA, 22 nt, Human
ucgucccggagcgccccgagcu

SEQ ID NO: 238537 - RNA, 21 nt, Human
ucgucccggcugaagugcagu

SEQ ID NO: 238538 - RNA, 32 nt, Human
ucgucccucguucuccccugaagugagucaua

SEQ ID NO: 238539 - RNA, 32 nt, Human
ucgucccuggcuagggaggugagacucuccgg

SEQ ID NO: 238540 - RNA, 32 nt, Human
ucgucccugggaggggagggaggcgcgccugg

SEQ ID NO: 238541 - RNA, 21 nt, Human
ucguccgcggggcccugggcu

SEQ ID NO: 238542 - RNA, 16 nt, Human
ucguccggccccggcc

SEQ ID NO: 238543 - RNA, 32 nt, Human
ucguccgugaggaaaaagaggcgaggcuuuuc

SEQ ID NO: 238544 - RNA, 32 nt, Human
ucguccguuuuccuccucagcucucgcugguu

SEQ ID NO: 238545 - RNA, 32 nt, Human
ucguccucaguucugcggagacagagucccca

SEQ ID NO: 238546 - RNA, 32 nt, Human
ucguccuccaaaagagcugggauuacaagugu

SEQ ID NO: 238547 - RNA, 32 nt, Human
ucguccucccaaaguacugggauuacaggcgu

SEQ ID NO: 238548 - RNA, 32 nt, Human
ucguccucccaaagugcugggauuacaggugu

SEQ ID NO: 238549 - RNA, 32 nt, Human
ucguccucccaaagugcugggauugaaggcgu

SEQ ID NO: 238550 - RNA, 32 nt, Human
ucguccuccccaugugcugggauuacaggcgu

SEQ ID NO: 238551 - RNA, 21 nt, Human
ucguccucugccccugagcca

SEQ ID NO: 238552 - RNA, 19 nt, Human
ucguccucuuccugggcua

SEQ ID NO: 238553 - RNA, 32 nt, Human
ucgucgaggcuggaguguaguggugcgauuuc

SEQ ID NO: 238554 - RNA, 32 nt, Human
ucgucgauuuacagaaaacagaaucaaaggcc

SEQ ID NO: 238555 - RNA, 32 nt, Human
ucgucgcccaggcuggaaugcaguggugcgau

SEQ ID NO: 238556 - RNA, 32 nt, Human
ucgucgcccccuucaccuuggaucauguucaa

SEQ ID NO: 238557 - RNA, 32 nt, Human
ucgucgccgcacgggcugguuggggcuguguc

SEQ ID NO: 238558 - RNA, 32 nt, Human
ucgucgccgccgccgccgcccagauccccgca

SEQ ID NO: 238559 - RNA, 21 nt, Human
ucgucgcgaccggcccgggcc

SEQ ID NO: 238560 - RNA, 32 nt, Human
ucgucgcugcuggcacuucaggcucugccucu

SEQ ID NO: 238561 - RNA, 32 nt, Human
ucgucgggaaucaggauuauugagaggugaag

SEQ ID NO: 238562 - RNA, 32 nt, Human
ucgucgguggcagaggugggcgugggugcugg

SEQ ID NO: 238563 - RNA, 20 nt, Human
ucgucguuggcucugagaca

SEQ ID NO: 238564 - RNA, 32 nt, Human
ucgucuaaaaauacaaaaauuagccgggcgug

SEQ ID NO: 238565 - RNA, 32 nt, Human
ucgucuaugaugacgucuucuuggucugggag

SEQ ID NO: 238566 - RNA, 32 nt, Human
ucgucucacccacucccagccuggggaagaag

SEQ ID NO: 238567 - RNA, 32 nt, Human
ucgucucacugcaaccuccgccucccagauuc

SEQ ID NO: 238568 - RNA, 23 nt, Human
ucgucucagaagccccuuuccca

SEQ ID NO: 238569 - RNA, 32 nt, Human
ucgucucagaucugguugugcucgagcuaugc

SEQ ID NO: 238570 - RNA, 32 nt, Human
ucgucucagccuguugguuucuccucauugcc

SEQ ID NO: 238571 - RNA, 32 nt, Human
ucgucuccccgcucugccccaccagggauacu

SEQ ID NO: 238572 - RNA, 32 nt, Human
ucgucuccccguuccaccuuguacugguuucc

SEQ ID NO: 238573 - RNA, 32 nt, Human
ucgucuccccuccugagaacaucaccgucaac

SEQ ID NO: 238574 - RNA, 32 nt, Human
ucgucucccuccccuucucuugcuguacagca

SEQ ID NO: 238575 - RNA, 32 nt, Human
ucgucucccuuucugggcagcuuccuugagga

SEQ ID NO: 238576 - RNA, 32 nt, Human
ucgucuccuccccuccuucuugucacuggcuu

SEQ ID NO: 238577 - RNA, 32 nt, Human
ucgucuccuccuccuucccacaggccggcuuc

SEQ ID NO: 238578 - RNA, 32 nt, Human
ucgucuccugucucucuggcugaugucaccug

SEQ ID NO: 238579 - RNA, 32 nt, Human
ucgucucuacuaaaaauacaaaauuagccggg

SEQ ID NO: 238580 - RNA, 32 nt, Human
ucgucucuacuaaaaaugcaaaauuagccggg

SEQ ID NO: 238581 - RNA, 32 nt, Human
ucgucucuacugaaaauucaaaauuagccugg

SEQ ID NO: 238582 - RNA, 28 nt, Human
ucgucucucaucccugccucaucuuccg

SEQ ID NO: 238583 - RNA, 32 nt, Human
ucgucucucccacccccuccccaaagccacug

SEQ ID NO: 238584 - RNA, 32 nt, Human
ucgucucuccugugcuguccucaggccuccgc

SEQ ID NO: 238585 - RNA, 32 nt, Human
ucgucucucugugugugucuguguccucaucu

SEQ ID NO: 238586 - RNA, 32 nt, Human
ucgucucugcaagcaugguuguccugggaugg

SEQ ID NO: 238587 - RNA, 32 nt, Human
ucgucucugcaagcuuggucgcccugggaugg

SEQ ID NO: 238588 - RNA, 32 nt, Human
ucgucucugcagcugccuaccccugccccaug

SEQ ID NO: 238589 - RNA, 32 nt, Human
ucgucugcccucaagcuggaaaacaaggggcu

SEQ ID NO: 238590 - RNA, 32 nt, Human
ucgucugcuacccuuauuaacucccauacugu

SEQ ID NO: 238591 - RNA, 32 nt, Human
ucgucuggcccaucuucugccucacaguggcc

SEQ ID NO: 238592 - RNA, 32 nt, Human
ucgucugggacucggcuggagcuggccuaggg

SEQ ID NO: 238593 - RNA, 32 nt, Human
ucgucugguagugcuggggugugucaggaccg

SEQ ID NO: 238594 - RNA, 32 nt, Human
ucgucuuagcuacuugggaggcugagguggga

SEQ ID NO: 238595 - RNA, 32 nt, Human
ucgucuucccuccagucuucugagggauaggg

SEQ ID NO: 238596 - RNA, 32 nt, Human
ucgucuugaugcucucugggcuuuguugaggc

SEQ ID NO: 238597 - RNA, 32 nt, Human
ucgucuuggugcuucuggccuccgugcucugc

SEQ ID NO: 238598 - RNA, 19 nt, Human
ucgucuuucgucgccccgu

SEQ ID NO: 238599 - RNA, 32 nt, Human
ucgugaaagacgccaucguaguagaagcaggg

SEQ ID NO: 238600 - RNA, 32 nt, Human
ucgugaaaggcagagggugacugugugugaug

SEQ ID NO: 238601 - RNA, 32 nt, Human
ucgugaacuucaaagggcagaggggaaacugu

SEQ ID NO: 238602 - RNA, 32 nt, Human
ucgugaagaaaaucuguucuuaauauauuuca

SEQ ID NO: 238603 - RNA, 32 nt, Human
ucgugaagaaaucuugagucuuccugcuccau

SEQ ID NO: 238604 - RNA, 32 nt, Human
ucgugaaggacuacaugaucaccaucacccgg

SEQ ID NO: 238605 - RNA, 32 nt, Human
ucgugaaggcauuacauugccucacauucacu

SEQ ID NO: 238606 - RNA, 32 nt, Human
ucgugaaguaauacagugaacuugcaggugca

SEQ ID NO: 238607 - RNA, 32 nt, Human
ucgugaaucuggagaagagcuggagaauggau

SEQ ID NO: 238608 - RNA, 32 nt, Human
ucgugaaucuggagccuguuuuccugaaaagu

SEQ ID NO: 238609 - RNA, 32 nt, Human
ucgugacacugcacuccagccugggcgacaga

SEQ ID NO: 238610 - RNA, 32 nt, Human
ucgugacacugcacuucagccuggcugacaga

SEQ ID NO: 238611 - RNA, 32 nt, Human
ucgugacaucuccggcgcggagggacucgaug

SEQ ID NO: 238612 - RNA, 32 nt, Human
ucgugacauggccuccagccugggugaccgag

SEQ ID NO: 238613 - RNA, 32 nt, Human
ucgugaccagccuggccaauauggugaaaccc

SEQ ID NO: 238614 - RNA, 32 nt, Human
ucgugaccagccuggucaacauggugaaaccu

SEQ ID NO: 238615 - RNA, 32 nt, Human
ucgugacuucaugauccugggccugagaacac

SEQ ID NO: 238616 - RNA, 32 nt, Human
ucgugacuucuggucuaagaugugagagcacc

SEQ ID NO: 238617 - RNA, 32 nt, Human
ucgugagagaucuggucguuuaaguguguagc

SEQ ID NO: 238618 - RNA, 32 nt, Human
ucgugaggccaaggcaggagaauugcuugagc

SEQ ID NO: 238619 - RNA, 22 nt, Human
ucgugaggugagcgugauccua

SEQ ID NO: 238620 - RNA, 23 nt, Human
ucgugaguagcugagauuacagg

SEQ ID NO: 238621 - RNA, 32 nt, Human
ucgugagugcagcccauguuccugcgugcagc

SEQ ID NO: 238622 - RNA, 32 nt, Human
ucgugaguggucagggaguggaagagaagacg

SEQ ID NO: 238623 - RNA, 21 nt, Human
ucgugauaaugcagacuuccu

SEQ ID NO: 238624 - RNA, 32 nt, Human
ucgugaucagccuggccaacguggagaaaccc

SEQ ID NO: 238625 - RNA, 32 nt, Human
ucgugauccacccuccuccaccucccaaagua

SEQ ID NO: 238626 - RNA, 32 nt, Human
ucgugaucucuccuucuccaucaucucaucuc

SEQ ID NO: 238627 - RNA, 32 nt, Human
ucgugaugaaggacggaagcagcagcgggccg

SEQ ID NO: 238628 - RNA, 32 nt, Human
ucgugaugaaggcagagagcagagacaucccg

SEQ ID NO: 238629 - RNA, 32 nt, Human
ucgugaugaucaggacacaagcucuuccccgc

SEQ ID NO: 238630 - RNA, 32 nt, Human
ucgugaugcuuugccaaacccgcacacugcca

SEQ ID NO: 238631 - RNA, 32 nt, Human
ucgugauggcgccacuucacugcagccugggu

SEQ ID NO: 238632 - RNA, 32 nt, Human
ucgugauguccugcccgccgggagucuuuccc

SEQ ID NO: 238633 - RNA, 32 nt, Human
ucgugauucaggagacugaagggaccuggugg

SEQ ID NO: 238634 - RNA, 32 nt, Human
ucgugauuucggccuauuuccuugccaggccu

SEQ ID NO: 238635 - RNA, 32 nt, Human
ucgugcaacugcacuccaaccugggcaacaga

SEQ ID NO: 238636 - RNA, 32 nt, Human
ucgugcaacugcacuccagccugggcaaaaga

SEQ ID NO: 238637 - RNA, 32 nt, Human
ucgugcagguagggaaaaaguuggucuaauug

SEQ ID NO: 238638 - RNA, 32 nt, Human
ucgugcaguaggccagugggcccagcggggag

SEQ ID NO: 238639 - RNA, 19 nt, Human
ucgugcaugcccugagcca

SEQ ID NO: 238640 - RNA, 32 nt, Human
ucgugcaugccugugauauucaucaucaaaau

SEQ ID NO: 238641 - RNA, 32 nt, Human
ucgugcauguaauccuagcacuuugggaggcu

SEQ ID NO: 238642 - RNA, 32 nt, Human
ucgugccaaugcacuccauccugggcaaaaag

SEQ ID NO: 238643 - RNA, 32 nt, Human
ucgugccaccgcagcgagacccugucuccaaa

SEQ ID NO: 238644 - RNA, 32 nt, Human
ucgugccaccuacacuccagccugggugacag

SEQ ID NO: 238645 - RNA, 32 nt, Human
ucgugccacgcacugcaaccugggugacagag

SEQ ID NO: 238646 - RNA, 32 nt, Human
ucgugccacuacacuccagccugggcaaaaga

SEQ ID NO: 238647 - RNA, 32 nt, Human
ucgugccacuacacuccagccugggggacaga

SEQ ID NO: 238648 - RNA, 32 nt, Human
ucgugccacuacacuccagccugggugacaga

SEQ ID NO: 238649 - RNA, 32 nt, Human
ucgugccacuccacuccagccugggcaacagu

SEQ ID NO: 238650 - RNA, 32 nt, Human
ucgugccacugaccuccagccugggggacaga

SEQ ID NO: 238651 - RNA, 32 nt, Human
ucgugccacugcacaccauccuggaugacaga

SEQ ID NO: 238652 - RNA, 32 nt, Human
ucgugccacugcaccacuccagccugggcaac

SEQ ID NO: 238653 - RNA, 32 nt, Human
ucgugccacugcaccccagccugggcaacaga

SEQ ID NO: 238654 - RNA, 32 nt, Human
ucgugccacugcaccguagccugggugauaag

SEQ ID NO: 238655 - RNA, 32 nt, Human
ucgugccacugcacgccagccugggcaacaga

SEQ ID NO: 238656 - RNA, 32 nt, Human
ucgugccacugcacuacaaccugggugauaga

SEQ ID NO: 238657 - RNA, 32 nt, Human
ucgugccacugcacucaagccugggugacaga

SEQ ID NO: 238658 - RNA, 32 nt, Human
ucgugccacugcacucaagccuggugacagag

SEQ ID NO: 238659 - RNA, 32 nt, Human
ucgugccacugcacuccaaccugagugacagc

SEQ ID NO: 238660 - RNA, 32 nt, Human
ucgugccacugcacuccaaccugggugagaga

SEQ ID NO: 238661 - RNA, 32 nt, Human
ucgugccacugcacuccagacugggggagaga

SEQ ID NO: 238662 - RNA, 32 nt, Human
ucgugccacugcacuccagacuuggugacaga

SEQ ID NO: 238663 - RNA, 32 nt, Human
ucgugccacugcacuccagagccugggcgaca

SEQ ID NO: 238664 - RNA, 32 nt, Human
ucgugccacugcacuccagcccaggcaacaga

SEQ ID NO: 238665 - RNA, 32 nt, Human
ucgugccacugcacuccagccugaagacagag

SEQ ID NO: 238666 - RNA, 32 nt, Human
ucgugccacugcacuccagccugagcaacaga

SEQ ID NO: 238667 - RNA, 32 nt, Human
ucgugccacugcacuccagccugcgggacaga

SEQ ID NO: 238668 - RNA, 32 nt, Human
ucgugccacugcacuccagccuggacaacgga

SEQ ID NO: 238669 - RNA, 32 nt, Human
ucgugccacugcacuccagccuggaggacaga

SEQ ID NO: 238670 - RNA, 32 nt, Human
ucgugccacugcacuccagccuggauuacaga

SEQ ID NO: 238671 - RNA, 32 nt, Human
ucgugccacugcacuccagccuggcgacacag

SEQ ID NO: 238672 - RNA, 32 nt, Human
ucgugccacugcacuccagccugggagacaga

SEQ ID NO: 238673 - RNA, 32 nt, Human
ucgugccacugcacuccagccugggcaacaag

SEQ ID NO: 238674 - RNA, 32 nt, Human
ucgugccacugcacuccagccugggcaacaga

SEQ ID NO: 238675 - RNA, 32 nt, Human
ucgugccacugcacuccagccugggcaccaca

SEQ ID NO: 238676 - RNA, 32 nt, Human
ucgugccacugcacuccagccugggcaccaga

SEQ ID NO: 238677 - RNA, 32 nt, Human
ucgugccacugcacuccagccugggcagcaga

SEQ ID NO: 238678 - RNA, 32 nt, Human
ucgugccacugcacuccagccugggccacaga

SEQ ID NO: 238679 - RNA, 32 nt, Human
ucgugccacugcacuccagccugggcgacaag

SEQ ID NO: 238680 - RNA, 32 nt, Human
ucgugccacugcacuccagccugggcgacaga

SEQ ID NO: 238681 - RNA, 32 nt, Human
ucgugccacugcacuccagccugggcgacgag

SEQ ID NO: 238682 - RNA, 32 nt, Human
ucgugccacugcacuccagccugggcuacaag

SEQ ID NO: 238683 - RNA, 32 nt, Human
ucgugccacugcacuccagccuggggaacaga

SEQ ID NO: 238684 - RNA, 32 nt, Human
ucgugccacugcacuccagccugggggacaga

SEQ ID NO: 238685 - RNA, 32 nt, Human
ucgugccacugcacuccagccugggugacaaa

SEQ ID NO: 238686 - RNA, 32 nt, Human
ucgugccacugcacuccagccugggugacaca

SEQ ID NO: 238687 - RNA, 32 nt, Human
ucgugccacugcacuccagccugggugacaga

SEQ ID NO: 238688 - RNA, 32 nt, Human
ucgugccacugcacuccagccugggugauaga

SEQ ID NO: 238689 - RNA, 32 nt, Human
ucgugccacugcacuccagccuggguggacag

SEQ ID NO: 238690 - RNA, 32 nt, Human
ucgugccacugcacuccagccuggucaacaga

SEQ ID NO: 238691 - RNA, 32 nt, Human
ucgugccacugcacuccagccuggugacagag

SEQ ID NO: 238692 - RNA, 32 nt, Human
ucgugccacugcacuccagccuggugagagca

SEQ ID NO: 238693 - RNA, 32 nt, Human
ucgugccacugcacuccagccugguugacaga

SEQ ID NO: 238694 - RNA, 32 nt, Human
ucgugccacugcacuccagccuugagacagag

SEQ ID NO: 238695 - RNA, 32 nt, Human
ucgugccacugcacuccagccuuggugacaga

SEQ ID NO: 238696 - RNA, 32 nt, Human
ucgugccacugcacuccagcuugggcaacaaa

SEQ ID NO: 238697 - RNA, 32 nt, Human
ucgugccacugcacuccaggcugggcgacaga

SEQ ID NO: 238698 - RNA, 32 nt, Human
ucgugccacugcacuccaggcugggugacaga

SEQ ID NO: 238699 - RNA, 32 nt, Human
ucgugccacugcacuccagucugggcaacaga

SEQ ID NO: 238700 - RNA, 32 nt, Human
ucgugccacugcacuccagucugggugacaga

SEQ ID NO: 238701 - RNA, 32 nt, Human
ucgugccacugcacuccauccuggacgacaga

SEQ ID NO: 238702 - RNA, 32 nt, Human
ucgugccacugcacucccagccugggcaacgg

SEQ ID NO: 238703 - RNA, 32 nt, Human
ucgugccacugcacuccggccugggugaugga

SEQ ID NO: 238704 - RNA, 32 nt, Human
ucgugccacugcacucuagccggggcgacaga

SEQ ID NO: 238705 - RNA, 32 nt, Human
ucgugccacugcacucuagccugggcgacaga

SEQ ID NO: 238706 - RNA, 32 nt, Human
ucgugccacugcacucuagccugggugacaga

SEQ ID NO: 238707 - RNA, 32 nt, Human
ucgugccacugcacucuauccuggguaacagc

SEQ ID NO: 238708 - RNA, 32 nt, Human
ucgugccacugcacuucagccugggugacaga

SEQ ID NO: 238709 - RNA, 32 nt, Human
ucgugccacugcaguccagccuaggcaacaga

SEQ ID NO: 238710 - RNA, 32 nt, Human
ucgugccacugcaugccagccugggcaacaag

SEQ ID NO: 238711 - RNA, 32 nt, Human
ucgugccacugcauuccagccugagcgacaga

SEQ ID NO: 238712 - RNA, 32 nt, Human
ucgugccacugcauuccagccugggagagaga

SEQ ID NO: 238713 - RNA, 32 nt, Human
ucgugccacugcauuccagccugggcgacaga

SEQ ID NO: 238714 - RNA, 32 nt, Human
ucgugccacugcauuccagccugggugacaga

SEQ ID NO: 238715 - RNA, 32 nt, Human
ucgugccacugcauuccagccugguugacaga

SEQ ID NO: 238716 - RNA, 32 nt, Human
ucgugccacugcgcuccagccugggugacaga

SEQ ID NO: 238717 - RNA, 32 nt, Human
ucgugccacugcgcuccagccuggguggcaga

SEQ ID NO: 238718 - RNA, 32 nt, Human
ucgugccacugcucuccagccugggugacaga

SEQ ID NO: 238719 - RNA, 32 nt, Human
ucgugccacuguacaucaccagccugggcgac

SEQ ID NO: 238720 - RNA, 32 nt, Human
ucgugccacuucacuccagccugggcaaaaga

SEQ ID NO: 238721 - RNA, 32 nt, Human
ucgugccagagcgguggccacagggcugaaug

SEQ ID NO: 238722 - RNA, 32 nt, Human
ucgugccagcaaggagccuacugucuggugug

SEQ ID NO: 238723 - RNA, 32 nt, Human
ucgugccagugcacuccagccugggugacagc

SEQ ID NO: 238724 - RNA, 32 nt, Human
ucgugccaucggacuccagccugggugaagga

SEQ ID NO: 238725 - RNA, 32 nt, Human
ucgugccauuacacuccagccugggcgaaagg

SEQ ID NO: 238726 - RNA, 32 nt, Human
ucgugccauuacacuccagccugggugacaga

SEQ ID NO: 238727 - RNA, 32 nt, Human
ucgugccauuccacuccagccugagcaacaca

SEQ ID NO: 238728 - RNA, 32 nt, Human
ucgugccauuccacuccagccugggcaacgag

SEQ ID NO: 238729 - RNA, 32 nt, Human
ucgugccauugcacuacagccugggcaacaag

SEQ ID NO: 238730 - RNA, 32 nt, Human
ucgugccauugcacuccagcccaggcgacaga

SEQ ID NO: 238731 - RNA, 32 nt, Human
ucgugccauugcacuccagcccggaugacaga

SEQ ID NO: 238732 - RNA, 32 nt, Human
ucgugccauugcacuccagccuaggcaacaag

SEQ ID NO: 238733 - RNA, 32 nt, Human
ucgugccauugcacuccagccuaggcaagaag

SEQ ID NO: 238734 - RNA, 32 nt, Human
ucgugccauugcacuccagccuaggcaauaag

SEQ ID NO: 238735 - RNA, 32 nt, Human
ucgugccauugcacuccagccuggaugacaag

SEQ ID NO: 238736 - RNA, 32 nt, Human
ucgugccauugcacuccagccuggccacagag

SEQ ID NO: 238737 - RNA, 32 nt, Human
ucgugccauugcacuccagccuggcgacaaga

SEQ ID NO: 238738 - RNA, 32 nt, Human
ucgugccauugcacuccagccuggcgacagag

SEQ ID NO: 238739 - RNA, 32 nt, Human
ucgugccauugcacuccagccugggcaacaag

SEQ ID NO: 238740 - RNA, 32 nt, Human
ucgugccauugcacuccagccugggcaacagg

SEQ ID NO: 238741 - RNA, 32 nt, Human
ucgugccauugcacuccagccugggcaauaga

SEQ ID NO: 238742 - RNA, 32 nt, Human
ucgugccauugcacuccagccugggcgacaag

SEQ ID NO: 238743 - RNA, 32 nt, Human
ucgugccauugcacuccagccugggugacaga

SEQ ID NO: 238744 - RNA, 32 nt, Human
ucgugccauugcacuccagccugggugacagu

SEQ ID NO: 238745 - RNA, 32 nt, Human
ucgugccauugcacuccagucugggagacaag

SEQ ID NO: 238746 - RNA, 32 nt, Human
ucgugccauugcacuccagucuggguaagaag

SEQ ID NO: 238747 - RNA, 32 nt, Human
ucgugccauugcacuccggccugggcaacaac

SEQ ID NO: 238748 - RNA, 32 nt, Human
ucgugccauugcacucuagccugggcaacaag

SEQ ID NO: 238749 - RNA, 32 nt, Human
ucgugccauugcauuccagccugggagacgga

SEQ ID NO: 238750 - RNA, 32 nt, Human
ucgugccauugcgcuccagccuaggugacaga

SEQ ID NO: 238751 - RNA, 32 nt, Human
ucgugccauugcgcuccagccugggcaacaag

SEQ ID NO: 238752 - RNA, 32 nt, Human
ucgugccauuguauuccagccucggcaacaca

SEQ ID NO: 238753 - RNA, 32 nt, Human
ucgugccauugugcuccagccugggcaacaag

SEQ ID NO: 238754 - RNA, 32 nt, Human
ucgugccauugugcuccagccugggcaacaga

SEQ ID NO: 238755 - RNA, 32 nt, Human
ucgugcccagccuguacccacaguggcagccc

SEQ ID NO: 238756 - RNA, 32 nt, Human
ucgugccccucagacuggggaagaguccaagg

SEQ ID NO: 238757 - RNA, 32 nt, Human
ucgugcccuccugguacaugggguuuuaagac

SEQ ID NO: 238758 - RNA, 32 nt, Human
ucgugcccucggucucuugccucggcaccugg

SEQ ID NO: 238759 - RNA, 32 nt, Human
ucgugcccugcaggccuggcccagccuggccc

SEQ ID NO: 238760 - RNA, 32 nt, Human
ucgugcccugcagggcuccagggcuauuugga

SEQ ID NO: 238761 - RNA, 32 nt, Human
ucgugccgcuaaauucuagccugggcaacaga

SEQ ID NO: 238762 - RNA, 32 nt, Human
ucgugccgcugcauccagccugagcaacagag

SEQ ID NO: 238763 - RNA, 32 nt, Human
ucgugccguuacucuccaaccuggacaacaag

SEQ ID NO: 238764 - RNA, 32 nt, Human
ucgugccguugcacuccagccugggcaacaag

SEQ ID NO: 238765 - RNA, 32 nt, Human
ucgugccguugcacuccagccugggcgacaag

SEQ ID NO: 238766 - RNA, 32 nt, Human
ucgugccuacaaucccagcacuuugggaggcc

SEQ ID NO: 238767 - RNA, 32 nt, Human
ucgugccucugcacuccaaccugggugaugga

SEQ ID NO: 238768 - RNA, 32 nt, Human
ucgugccugaaccccucucacagucuggcggg

SEQ ID NO: 238769 - RNA, 32 nt, Human
ucgugccugggguuccuuccucugugggcauc

SEQ ID NO: 238770 - RNA, 24 nt, Human
ucgugccuguaaucccagcacuuu

SEQ ID NO: 238771 - RNA, 32 nt, Human
ucgugccuguaaucccagcacuuugggaggcu

SEQ ID NO: 238772 - RNA, 32 nt, Human
ucgugccuguaaucccagcacuuugggagguc

SEQ ID NO: 238773 - RNA, 32 nt, Human
ucgugccuguaaucccagcucuuugggaggcc

SEQ ID NO: 238774 - RNA, 32 nt, Human
ucgugccuguacuguacuccagccugggaaac

SEQ ID NO: 238775 - RNA, 32 nt, Human
ucgugccugucaucccagcacuuugggaggcc

SEQ ID NO: 238776 - RNA, 32 nt, Human
ucgugccugucucucagucaaguuuucuuucc

SEQ ID NO: 238777 - RNA, 32 nt, Human
ucgugccugugaucccagcacuuugggaggcc

SEQ ID NO: 238778 - RNA, 32 nt, Human
ucgugccuuugcacuccagcguggaagacagu

SEQ ID NO: 238779 - RNA, 32 nt, Human
ucgugcgggcugacugucgcucugccuuugac

SEQ ID NO: 238780 - RNA, 32 nt, Human
ucgugcgggcugcgcuccuccugggugcuauu

SEQ ID NO: 238781 - RNA, 32 nt, Human
ucgugcuacugcacuccagccccagcugggug

SEQ ID NO: 238782 - RNA, 32 nt, Human
ucgugcuacugcacuccagccugggcaacaca

SEQ ID NO: 238783 - RNA, 32 nt, Human
ucgugcuacugcacuccagccugggggacaga

SEQ ID NO: 238784 - RNA, 32 nt, Human
ucgugcuacugcacuccagucugggugacaga

SEQ ID NO: 238785 - RNA, 32 nt, Human
ucgugcuacugcacucccgccugggugacaga

SEQ ID NO: 238786 - RNA, 32 nt, Human
ucgugcuacugcaguccagccugggcuacaga

SEQ ID NO: 238787 - RNA, 32 nt, Human
ucgugcuauugcacuccagccugggcgacaga

SEQ ID NO: 238788 - RNA, 32 nt, Human
ucgugcucagccguaucucagcaggaggacag

SEQ ID NO: 238789 - RNA, 32 nt, Human
ucgugcuccacuccagcauccaugaagcuggc

SEQ ID NO: 238790 - RNA, 32 nt, Human
ucgugcucuccaggaguccggagcaugguccu

SEQ ID NO: 238791 - RNA, 32 nt, Human
ucgugcucugcaacuucuucaauuccagaguu

SEQ ID NO: 238792 - RNA, 32 nt, Human
ucgugcugcugcaccccagccuagcgacagag

SEQ ID NO: 238793 - RNA, 32 nt, Human
ucgugcugcugcacuccagccugggcaauaga

SEQ ID NO: 238794 - RNA, 32 nt, Human
ucgugcuuguaaucccagcacuuugggaggcg

SEQ ID NO: 238795 - RNA, 32 nt, Human
ucgugcuuguugcccaggcuggagugcagugg

SEQ ID NO: 238796 - RNA, 32 nt, Human
ucguggaaauacugugguuggaggagauuucu

SEQ ID NO: 238797 - RNA, 32 nt, Human
ucguggaagucaccccauuuccccagccagac

SEQ ID NO: 238798 - RNA, 32 nt, Human
ucguggacagaagccagaguucagagaggauc

SEQ ID NO: 238799 - RNA, 32 nt, Human
ucguggacugugguugggggaggugggagcug

SEQ ID NO: 238800 - RNA, 32 nt, Human
ucguggacuucuaagaaagcgccauggccugu

SEQ ID NO: 238801 - RNA, 32 nt, Human
ucguggagaauuccgccugcaggaugacacga

SEQ ID NO: 238802 - RNA, 32 nt, Human
ucguggagacuggcuggaugcccugugcucua

SEQ ID NO: 238803 - RNA, 32 nt, Human
ucguggagagugaggcugugagaaggcagcuc

SEQ ID NO: 238804 - RNA, 32 nt, Human
ucguggagcugcggcggcugcacccaggccac

SEQ ID NO: 238805 - RNA, 32 nt, Human
ucguggaggagaaaguaccaacaccucugcag

SEQ ID NO: 238806 - RNA, 32 nt, Human
ucguggaggaggacaaggcaagaagauggguc

SEQ ID NO: 238807 - RNA, 32 nt, Human
ucguggaggccacguggucacugaccucauuu

SEQ ID NO: 238808 - RNA, 32 nt, Human
ucguggaguacaagccggacugugcugagguu

SEQ ID NO: 238809 - RNA, 32 nt, Human
ucguggauuccuuuccccuccaaagggcaaga

SEQ ID NO: 238810 - RNA, 32 nt, Human
ucguggcagcagcugcagcuguuucacaggcu

SEQ ID NO: 238811 - RNA, 32 nt, Human
ucguggcagcuuugacuguuggcauagccauu

SEQ ID NO: 238812 - RNA, 32 nt, Human
ucguggcauugcacucuagccugggcaaccaa

SEQ ID NO: 238813 - RNA, 32 nt, Human
ucguggcauuuccagaaccauggauucugccu

SEQ ID NO: 238814 - RNA, 24 nt, Human
ucguggccacaccucugccugccu

SEQ ID NO: 238815 - RNA, 32 nt, Human
ucguggccacugcaauccagccugggcgauag

SEQ ID NO: 238816 - RNA, 32 nt, Human
ucguggccagaacuugcugaggugaaggcaca

SEQ ID NO: 238817 - RNA, 32 nt, Human
ucguggccauccaccucugcucucccagaccc

SEQ ID NO: 238818 - RNA, 32 nt, Human
ucguggccccuccacggggcaggacgacccug

SEQ ID NO: 238819 - RNA, 32 nt, Human
ucguggccgucuggggccagagcuguggaccg

SEQ ID NO: 238820 - RNA, 32 nt, Human
ucguggccuccugguucacucugcugucugau

SEQ ID NO: 238821 - RNA, 32 nt, Human
ucguggccugcucucaggaagugggucaagcc

SEQ ID NO: 238822 - RNA, 32 nt, Human
ucguggcucacugaagccuccgcuuccugggu

SEQ ID NO: 238823 - RNA, 32 nt, Human
ucguggcucacugcagccuccaccuccugggc

SEQ ID NO: 238824 - RNA, 32 nt, Human
ucguggcucacugcagccuccaucucccgggg

SEQ ID NO: 238825 - RNA, 32 nt, Human
ucguggcugaggcuccacagggcugcaagugc

SEQ ID NO: 238826 - RNA, 32 nt, Human
ucguggcugccuggggugcucucugcgugaac

SEQ ID NO: 238827 - RNA, 32 nt, Human
ucguggcugggaacugcagggaggcucugaca

SEQ ID NO: 238828 - RNA, 32 nt, Human
ucgugggaccugagccucacggaggccaugcu

SEQ ID NO: 238829 - RNA, 32 nt, Human
ucgugggacgugucaaguugacuuuaaagccu

SEQ ID NO: 238830 - RNA, 32 nt, Human
ucgugggagaugaggucccaggguaaacagcg

SEQ ID NO: 238831 - RNA, 21 nt, Human
ucgugggccgcgcauggcccu

SEQ ID NO: 238832 - RNA, 24 nt, Human
ucguggggagagggaugcuauuua

SEQ ID NO: 238833 - RNA, 32 nt, Human
ucgugggggccgagccaagaccagucugcaaa

SEQ ID NO: 238834 - RNA, 32 nt, Human
ucgugggucucugagacccaaaaauggagagc

SEQ ID NO: 238835 - RNA, 23 nt, Human
ucgugggugcacccuggacccca

SEQ ID NO: 238836 - RNA, 32 nt, Human
ucgugguagcugggcuugcagggaacggagca

SEQ ID NO: 238837 - RNA, 32 nt, Human
ucguggucacugcacuccagccuggcuacaga

SEQ ID NO: 238838 - RNA, 32 nt, Human
ucguggucacugcuccagccucagccagggca

SEQ ID NO: 238839 - RNA, 32 nt, Human
ucguggucagcuccgaggaauguggcguccag

SEQ ID NO: 238840 - RNA, 32 nt, Human
ucguggucauuuccacagccucaaccacuguc

SEQ ID NO: 238841 - RNA, 32 nt, Human
ucgugguccucugcccacaccuccacgcacac

SEQ ID NO: 238842 - RNA, 32 nt, Human
ucguggugaauauuucagaccuaaagauccag

SEQ ID NO: 238843 - RNA, 32 nt, Human
ucgugguggcccauccucucucuccccuugga

SEQ ID NO: 238844 - RNA, 32 nt, Human
ucgugguggcccugucuugccugcuguccauc

SEQ ID NO: 238845 - RNA, 32 nt, Human
ucguggugggugcucaagacuggcauggacau

SEQ ID NO: 238846 - RNA, 32 nt, Human
ucguggugugccagagccugugugguccccug

SEQ ID NO: 238847 - RNA, 32 nt, Human
ucgugguuccugccuuucucauagauccccug

SEQ ID NO: 238848 - RNA, 32 nt, Human
ucguguacacagcagucuucagcccccuggaa

SEQ ID NO: 238849 - RNA, 32 nt, Human
ucguguagauugauucauucuucuucuagcau

SEQ ID NO: 238850 - RNA, 32 nt, Human
ucguguaugugguggagggacagccugccagc

SEQ ID NO: 238851 - RNA, 32 nt, Human
ucgugucacuacacuccaggcugggugacaga

SEQ ID NO: 238852 - RNA, 32 nt, Human
ucgugucacugcacuccagccggggcaacaga

SEQ ID NO: 238853 - RNA, 32 nt, Human
ucgugucacugcacuccagccuggcgacagag

SEQ ID NO: 238854 - RNA, 32 nt, Human
ucgugucacugcacuccagccugggcgacaga

SEQ ID NO: 238855 - RNA, 32 nt, Human
ucgugucacugcacuccagccugggugacaag

SEQ ID NO: 238856 - RNA, 32 nt, Human
ucgugucacugcacuccagccuggugacagag

SEQ ID NO: 238857 - RNA, 32 nt, Human
ucguguccagcgacagcuaggugguggaaucg

SEQ ID NO: 238858 - RNA, 32 nt, Human
ucguguccucauaugaaucaggaaaaggcagu

SEQ ID NO: 238859 - RNA, 32 nt, Human
ucguguccuggaucgccuucuucaccacggcc

SEQ ID NO: 238860 - RNA, 32 nt, Human
ucgugucucauuuugaacccagaucugaacag

SEQ ID NO: 238861 - RNA, 32 nt, Human
ucgugucucccaggagccauggaggcugugga

SEQ ID NO: 238862 - RNA, 32 nt, Human
ucgugucuggcccaaucucugugucaucauug

SEQ ID NO: 238863 - RNA, 32 nt, Human
ucgugugagccaaccccacccgcuccacccuu

SEQ ID NO: 238864 - RNA, 32 nt, Human
ucgugugaucccccugcuucagccucucaaac

SEQ ID NO: 238865 - RNA, 32 nt, Human
ucgugugccauggaucugaucuguaccaugac

SEQ ID NO: 238866 - RNA, 21 nt, Human
ucguguggcccuccccuccca

SEQ ID NO: 238867 - RNA, 24 nt, Human
ucguguggccgccaccuccgggaa

SEQ ID NO: 238868 - RNA, 32 nt, Human
ucgugugugguggcgcgugccuguaauccuag

SEQ ID NO: 238869 - RNA, 32 nt, Human
ucguguguguuuuaaacugguaggaaacuagg

SEQ ID NO: 238870 - RNA, 32 nt, Human
ucguguuaacaguuugaaauccuggccucccu

SEQ ID NO: 238871 - RNA, 32 nt, Human
ucguguuagucacucaaccucuuuggccuugu

SEQ ID NO: 238872 - RNA, 32 nt, Human
ucguguuaguccauuuucacgcugcugauaaa

SEQ ID NO: 238873 - RNA, 32 nt, Human
ucguguucaagcagcucccaugacaacuucca

SEQ ID NO: 238874 - RNA, 32 nt, Human
ucguguucugggaaggccugggugugugcaca

SEQ ID NO: 238875 - RNA, 32 nt, Human
ucguguucuugcugcaggaccugggcaagaaa

SEQ ID NO: 238876 - RNA, 32 nt, Human
ucguguugccccggcuggagugcaguggcgcu

SEQ ID NO: 238877 - RNA, 32 nt, Human
ucguguuguuacugucucaaguggaagcgccc

SEQ ID NO: 238878 - RNA, 32 nt, Human
ucguguuuccuaaaacaaagacuccaucauaa

SEQ ID NO: 238879 - RNA, 32 nt, Human
ucguguuugcuaugccaacuaguagaaccuuc

SEQ ID NO: 238880 - RNA, 32 nt, Human
ucguguuuugucaucagcaucuuuucuauuaa

SEQ ID NO: 238881 - RNA, 32 nt, Human
ucguuaacuuccaagaggagaagggcucgggg

SEQ ID NO: 238882 - RNA, 32 nt, Human
ucguuaagcccauggggagacuggggcugugg

SEQ ID NO: 238883 - RNA, 32 nt, Human
ucguuaauuuuccuuugucauuuccuuuguug

SEQ ID NO: 238884 - RNA, 32 nt, Human
ucguuacauguuuaguucauagaaucauuuaa

SEQ ID NO: 238885 - RNA, 32 nt, Human
ucguuacccaggguggagugcagugguagcga

SEQ ID NO: 238886 - RNA, 32 nt, Human
ucguuaccuugggaucugccaggcuggggugu

SEQ ID NO: 238887 - RNA, 32 nt, Human
ucguuacuaagcuuccugggagaaucaaauaa

SEQ ID NO: 238888 - RNA, 32 nt, Human
ucguuagagacagggauucaccauguuggccu

SEQ ID NO: 238889 - RNA, 32 nt, Human
ucguuagccugggaaaaucauucuuuuaaaca

SEQ ID NO: 238890 - RNA, 32 nt, Human
ucguuagggagagaggcccaggguggggacug

SEQ ID NO: 238891 - RNA, 32 nt, Human
ucguuaucucucaaguggccuccaauacccca

SEQ ID NO: 238892 - RNA, 32 nt, Human
ucguuauuaauagcacagcagaugugugcugc

SEQ ID NO: 238893 - RNA, 32 nt, Human
ucguucacauuccaggaguccaaaaagaagau

SEQ ID NO: 238894 - RNA, 32 nt, Human
ucguucaccuuggcucauggucuuccaggguu

SEQ ID NO: 238895 - RNA, 32 nt, Human
ucguucacugacugaguagcccccagggagug

SEQ ID NO: 238896 - RNA, 32 nt, Human
ucguucagagaccauuucugugccucaagaaa

SEQ ID NO: 238897 - RNA, 32 nt, Human
ucguucagccacacuuugaggauucucuucag

SEQ ID NO: 238898 - RNA, 32 nt, Human
ucguucaggugcaauucuucuuggucucagcu

SEQ ID NO: 238899 - RNA, 32 nt, Human
ucguuccaaggaggcucuucagucucacagau

SEQ ID NO: 238900 - RNA, 32 nt, Human
ucguuccaucacuuuauuccagcacuucucug

SEQ ID NO: 238901 - RNA, 32 nt, Human
ucguucccacagccuucaagcugcaguguuuu

SEQ ID NO: 238902 - RNA, 32 nt, Human
ucguuccccuccaucugauccccacacaggcu

SEQ ID NO: 238903 - RNA, 31 nt, Human
ucguucccuccccuggugccugugucugcag

SEQ ID NO: 238904 - RNA, 32 nt, Human
ucguucccugcucucugcuccccaaagacacu

SEQ ID NO: 238905 - RNA, 32 nt, Human
ucguuccuccaggauucccgcaguguugagga

SEQ ID NO: 238906 - RNA, 32 nt, Human
ucguucucaggaacaaaaccugaggcagcccu

SEQ ID NO: 238907 - RNA, 32 nt, Human
ucguucucccaaagugcugggauuacaggugu

SEQ ID NO: 238908 - RNA, 32 nt, Human
ucguucucccuuucccccucucuccagccccu

SEQ ID NO: 238909 - RNA, 32 nt, Human
ucguucugucgcuuagcuggagugcgguggcg

SEQ ID NO: 238910 - RNA, 32 nt, Human
ucguucuguggcccuggcuggaguucaguggu

SEQ ID NO: 238911 - RNA, 32 nt, Human
ucguucuugucccccaggcuugagugcaauga

SEQ ID NO: 238912 - RNA, 32 nt, Human
ucguugaggaaacccuugcauaggacuuccua

SEQ ID NO: 238913 - RNA, 32 nt, Human
ucguugaggagaaggaguaguaagcagaacua

SEQ ID NO: 238914 - RNA, 32 nt, Human
ucguugaugagaaaguucguaggagggaggaa

SEQ ID NO: 238915 - RNA, 32 nt, Human
ucguugccaaggcuggagugcaauggcacgau

SEQ ID NO: 238916 - RNA, 32 nt, Human
ucguugcccaggcuggagugcaauggcgcgau

SEQ ID NO: 238917 - RNA, 32 nt, Human
ucguugcccaggcuggagugcaguggcgcaau

SEQ ID NO: 238918 - RNA, 32 nt, Human
ucguugcccaggcuggaguguagaggcgagau

SEQ ID NO: 238919 - RNA, 32 nt, Human
ucguugccgaggcuggaguguaguagugugau

SEQ ID NO: 238920 - RNA, 18 nt, Human
ucguugcucagucaguca

SEQ ID NO: 238921 - RNA, 19 nt, Human
ucguugcucgucaccucca

SEQ ID NO: 238922 - RNA, 32 nt, Human
ucguugcuguuagagccucacguggaggaguc

SEQ ID NO: 238923 - RNA, 32 nt, Human
ucguuggcaacagcagaugugguuaagcuaau

SEQ ID NO: 238924 - RNA, 32 nt, Human
ucguuggucuggcccaaguuccugcccaugug

SEQ ID NO: 238925 - RNA, 32 nt, Human
ucguuggugagaagaacaguaucgcugacuuc

SEQ ID NO: 238926 - RNA, 32 nt, Human
ucguuguaaucagcaacauauucccaacagga

SEQ ID NO: 238927 - RNA, 18 nt, Human
ucguuguucucacggcca

SEQ ID NO: 238928 - RNA, 32 nt, Human
ucguuuauaaaaagcagaaggccagcaggaaa

SEQ ID NO: 238929 - RNA, 32 nt, Human
ucguuuccucauuuagcaccuaccuccuagag

SEQ ID NO: 238930 - RNA, 32 nt, Human
ucguuucuaaaccuaggggagaugcuaucuuu

SEQ ID NO: 238931 - RNA, 32 nt, Human
ucguuucuacuaaaaauacaaaauuagcuggg

SEQ ID NO: 238932 - RNA, 32 nt, Human
ucguuucugugccucugcacucacagguuccu

SEQ ID NO: 238933 - RNA, 32 nt, Human
ucguuugaacccaggaggcggagguugcagug

SEQ ID NO: 238934 - RNA, 32 nt, Human
ucguuugaacccaggaggcugagguugcagug

SEQ ID NO: 238935 - RNA, 32 nt, Human
ucguuugaauggaggagguguugagugagcaa

SEQ ID NO: 238936 - RNA, 32 nt, Human
ucguuugacuccaauaccugaaauucugacuu

SEQ ID NO: 238937 - RNA, 32 nt, Human
ucguuugagcccaggaggucaaggcugcagug

SEQ ID NO: 238938 - RNA, 32 nt, Human
ucguuugagcccaggaguugaagaccagccug

SEQ ID NO: 238939 - RNA, 32 nt, Human
ucguuugagcucaggagguugggucugcagug

SEQ ID NO: 238940 - RNA, 32 nt, Human
ucguuugcagccugucacuguaaggcacaaac

SEQ ID NO: 238941 - RNA, 32 nt, Human
ucguuuggcaggacacagagagguaggugaac

SEQ ID NO: 238942 - RNA, 32 nt, Human
ucguuuggcaggcacacacaguggcauaaauu

SEQ ID NO: 238943 - RNA, 32 nt, Human
ucguuugggaggaggaccugaagcuagacagg

SEQ ID NO: 238944 - RNA, 32 nt, Human
ucguuuuaaauggaaucggaagccgggcauag

SEQ ID NO: 238945 - RNA, 32 nt, Human
ucguuuugacccuuccaauaaggaaaggggag

SEQ ID NO: 238946 - RNA, 32 nt, Human
ucguuuuggaggaaacaaucucugccaccacc

SEQ ID NO: 238947 - RNA, 32 nt, Human
ucguuuuucuuagugugacaagaguucgaugu

SEQ ID NO: 238948 - RNA, 24 nt, Human
ucuaaaaaccaaaaccucuuugaa

SEQ ID NO: 238949 - RNA, 32 nt, Human
ucuaaaaagagcaaacccucccuaguccuggg

SEQ ID NO: 238950 - RNA, 32 nt, Human
ucuaaaacaaagucuaugcaaaccacuuaaaa

SEQ ID NO: 238951 - RNA, 32 nt, Human
ucuaaaacacaggcgcccuccuggugacagug

SEQ ID NO: 238952 - RNA, 32 nt, Human
ucuaaaacagcuucuacugggagauuaauuau

SEQ ID NO: 238953 - RNA, 32 nt, Human
ucuaaaacaugcuucucuauaggugcaaaguu

SEQ ID NO: 238954 - RNA, 32 nt, Human
ucuaaaacccacaggccaucagcagcuagagg

SEQ ID NO: 238955 - RNA, 32 nt, Human
ucuaaaacccuucauccaauggugcuaacccc

SEQ ID NO: 238956 - RNA, 32 nt, Human
ucuaaaacccuuggucuguguucucaacacac

SEQ ID NO: 238957 - RNA, 32 nt, Human
ucuaaaacuucuguugcuuuugccauuccaaa

SEQ ID NO: 238958 - RNA, 32 nt, Human
ucuaaaagagacaaaugaagccacagggaaag

SEQ ID NO: 238959 - RNA, 21 nt, Human
ucuaaaagagcaugaacaagu

SEQ ID NO: 238960 - RNA, 32 nt, Human
ucuaaaagcugagaaguccaagaugguggggc

SEQ ID NO: 238961 - RNA, 32 nt, Human
ucuaaaaggaggacagggagggaacagaccuc

SEQ ID NO: 238962 - RNA, 32 nt, Human
ucuaaaaggccucugugcccugacugauccuc

SEQ ID NO: 238963 - RNA, 32 nt, Human
ucuaaaagguaucgaaaguuaccaccuugcaa

SEQ ID NO: 238964 - RNA, 32 nt, Human
ucuaaaauagggggaggaaggaaggggaguaa

SEQ ID NO: 238965 - RNA, 32 nt, Human
ucuaaaauagugcuugcuuuaugauaggugcu

SEQ ID NO: 238966 - RNA, 32 nt, Human
ucuaaaauguauugugaauuucucagacaaac

SEQ ID NO: 238967 - RNA, 32 nt, Human
ucuaaacaacccagaauggucauuucaggcac

SEQ ID NO: 238968 - RNA, 32 nt, Human
ucuaaacagaaugagucuaaagucaguauaaa

SEQ ID NO: 238969 - RNA, 32 nt, Human
ucuaaacagauuccuccucuucucagagaccu

SEQ ID NO: 238970 - RNA, 32 nt, Human
ucuaaacagcaacaguguaacuagucuuuugu

SEQ ID NO: 238971 - RNA, 32 nt, Human
ucuaaacauagacacacacauauacagcucuc

SEQ ID NO: 238972 - RNA, 32 nt, Human
ucuaaacccgaagaugccucagaaggaagaaa

SEQ ID NO: 238973 - RNA, 32 nt, Human
ucuaaaccuaguuugaaaucaacagucuugag

SEQ ID NO: 238974 - RNA, 32 nt, Human
ucuaaaccucaaccuccuccuaccuggcaguc

SEQ ID NO: 238975 - RNA, 32 nt, Human
ucuaaaccucaguuuucacauuuguccaaugg

SEQ ID NO: 238976 - RNA, 32 nt, Human
ucuaaaccugcacuugucccucuccagcaaga

SEQ ID NO: 238977 - RNA, 32 nt, Human
ucuaaaccugcccagggaccuuaccagauucg

SEQ ID NO: 238978 - RNA, 32 nt, Human
ucuaaacugcccccucugcccugcgggucaca

SEQ ID NO: 238979 - RNA, 32 nt, Human
ucuaaacuuuaaaaucaguacauuuaauuuga

SEQ ID NO: 238980 - RNA, 32 nt, Human
ucuaaagaaaugcaguucuuggaguugaugag

SEQ ID NO: 238981 - RNA, 32 nt, Human
ucuaaagaaauguaagauguuacuagcacuag

SEQ ID NO: 238982 - RNA, 32 nt, Human
ucuaaagaagaaaaagaaaaacugaagagaga

SEQ ID NO: 238983 - RNA, 32 nt, Human
ucuaaagaaguuaaggauacauaguagggaau

SEQ ID NO: 238984 - RNA, 32 nt, Human
ucuaaagagaauugguuauggggaaaauaaca

SEQ ID NO: 238985 - RNA, 32 nt, Human
ucuaaagagagaagaauccagggaacagguag

SEQ ID NO: 238986 - RNA, 32 nt, Human
ucuaaagagagcaaucacuacacuuauggcug

SEQ ID NO: 238987 - RNA, 31 nt, Human
ucuaaagagcccucugggccuguguugcugu

SEQ ID NO: 238988 - RNA, 32 nt, Human
ucuaaagauagaguaaaaagaaaacaaaacca

SEQ ID NO: 238989 - RNA, 20 nt, Human
ucuaaagaugccucugggau

SEQ ID NO: 238990 - RNA, 32 nt, Human
ucuaaagauguagcucuggcccagugggaaaa

SEQ ID NO: 238991 - RNA, 32 nt, Human
ucuaaagaugucuuuauguuuccuucauuccc

SEQ ID NO: 238992 - RNA, 32 nt, Human
ucuaaagauucugccaaucugauucugcugcc

SEQ ID NO: 238993 - RNA, 32 nt, Human
ucuaaagauugaauccacauuuugucacuaau

SEQ ID NO: 238994 - RNA, 32 nt, Human
ucuaaagcacaagccaaaaacugugugaacgg

SEQ ID NO: 238995 - RNA, 31 nt, Human
ucuaaagcacuuuucauugaacauguuagcc

SEQ ID NO: 238996 - RNA, 32 nt, Human
ucuaaagcagcagcaauaguguucuuuuagau

SEQ ID NO: 238997 - RNA, 32 nt, Human
ucuaaagcagugguccagacuugccacauacu

SEQ ID NO: 238998 - RNA, 32 nt, Human
ucuaaagccccaggcuggguuagguggucuag

SEQ ID NO: 238999 - RNA, 32 nt, Human
ucuaaagccccuuccuccccagccccugcuuu

SEQ ID NO: 239000 - RNA, 32 nt, Human
ucuaaagccuggcuaauuguucuagguuuaug

SEQ ID NO: 239001 - RNA, 32 nt, Human
ucuaaagccuuuucgcauuuuaaucaguuuac

SEQ ID NO: 239002 - RNA, 32 nt, Human
ucuaaagcuacaacaaauacuacaggcccuua

SEQ ID NO: 239003 - RNA, 32 nt, Human
ucuaaagcuucuucacgucucucuccauccug

SEQ ID NO: 239004 - RNA, 32 nt, Human
ucuaaaggaauaaaccugauuuacagauuuug

SEQ ID NO: 239005 - RNA, 32 nt, Human
ucuaaaggcccagcuacagccaaucagccgau

SEQ ID NO: 239006 - RNA, 32 nt, Human
ucuaaaggggaggcauuaaaauucacugugcc

SEQ ID NO: 239007 - RNA, 32 nt, Human
ucuaaagguagaaugugaauauugccacagag

SEQ ID NO: 239008 - RNA, 32 nt, Human
ucuaaaggugccugucaucucagagagugacg

SEQ ID NO: 239009 - RNA, 32 nt, Human
ucuaaagucuuagaauuuucagugugcuuuac

SEQ ID NO: 239010 - RNA, 32 nt, Human
ucuaaaguucucuccuuccugccuccccuaaa

SEQ ID NO: 239011 - RNA, 24 nt, Human
ucuaaauaaguaccuuuuauugga

SEQ ID NO: 239012 - RNA, 32 nt, Human
ucuaaauagaugcagaaaaauggaauuuucuc

SEQ ID NO: 239013 - RNA, 32 nt, Human
ucuaaauggaaaggaaaguaacaugaagagcu

SEQ ID NO: 239014 - RNA, 32 nt, Human
ucuaaauggcuucccagccacugugaccaaau

SEQ ID NO: 239015 - RNA, 32 nt, Human
ucuaaaugucacugcugacauaacucccuugg

SEQ ID NO: 239016 - RNA, 32 nt, Human
ucuaaaugugaguucguguccucugccagacc

SEQ ID NO: 239017 - RNA, 22 nt, Human
ucuaaauguuacauucuugcca

SEQ ID NO: 239018 - RNA, 32 nt, Human
ucuaaauuaaugguuuaaauauacaaauugaa

SEQ ID NO: 239019 - RNA, 32 nt, Human
ucuaaauuuggcuaguaaagugcaauaaaggc

SEQ ID NO: 239020 - RNA, 32 nt, Human
ucuaaauuuguuuuagcucuaaccucaucaaa

SEQ ID NO: 239021 - RNA, 19 nt, Human
ucuaacaaaaagcacaaga

SEQ ID NO: 239022 - RNA, 18 nt, Human
ucuaacaaagccacauga

SEQ ID NO: 239023 - RNA, 18 nt, Human
ucuaacaaaucuguagua

SEQ ID NO: 239024 - RNA, 32 nt, Human
ucuaacaaaugaugugaaaggaaaguaguuuu

SEQ ID NO: 239025 - RNA, 18 nt, Human
ucuaacaaauggcauuga

SEQ ID NO: 239026 - RNA, 18 nt, Human
ucuaacaaauucagcaug

SEQ ID NO: 239027 - RNA, 32 nt, Human
ucuaacaaccuagacuggaauaaggcccuguc

SEQ ID NO: 239028 - RNA, 18 nt, Human
ucuaacaacugagcaaga

SEQ ID NO: 239029 - RNA, 32 nt, Human
ucuaacaacuguggagauuugagggaaugugu

SEQ ID NO: 239030 - RNA, 19 nt, Human
ucuaacaagaaagacaugg

SEQ ID NO: 239031 - RNA, 19 nt, Human
ucuaacaagagaaagcaga

SEQ ID NO: 239032 - RNA, 17 nt, Human
ucuaacaagccacauga

SEQ ID NO: 239033 - RNA, 32 nt, Human
ucuaacaaguugagcacagccuucuuccccuu

SEQ ID NO: 239034 - RNA, 32 nt, Human
ucuaacacauacgagucuucuggcucccccau

SEQ ID NO: 239035 - RNA, 32 nt, Human
ucuaacaccacacuccagcuacuguguagugg

SEQ ID NO: 239036 - RNA, 32 nt, Human
ucuaacaccaucacaaauagguucauggucag

SEQ ID NO: 239037 - RNA, 32 nt, Human
ucuaacaccucuuuucccuugugugagggcaa

SEQ ID NO: 239038 - RNA, 32 nt, Human
ucuaacacuccugggagcucaggaggcuucug

SEQ ID NO: 239039 - RNA, 32 nt, Human
ucuaacacugcaaagagugagccaugccuguu

SEQ ID NO: 239040 - RNA, 32 nt, Human
ucuaacacugccuuauacuguguuucucuuuu

SEQ ID NO: 239041 - RNA, 32 nt, Human
ucuaacacuggcauguucaaagccacauuauu

SEQ ID NO: 239042 - RNA, 17 nt, Human
ucuaacagaaagcauga

SEQ ID NO: 239043 - RNA, 32 nt, Human
ucuaacagagagagacauagucuugcucuguu

SEQ ID NO: 239044 - RNA, 32 nt, Human
ucuaacagaggacccuggcugucuacgggguu

SEQ ID NO: 239045 - RNA, 20 nt, Human
ucuaacagaucagaacauga

SEQ ID NO: 239046 - RNA, 19 nt, Human
ucuaacagaugccagcuga

SEQ ID NO: 239047 - RNA, 32 nt, Human
ucuaacaggagauaggagagagucacucauaa

SEQ ID NO: 239048 - RNA, 18 nt, Human
ucuaacagggccagcuga

SEQ ID NO: 239049 - RNA, 32 nt, Human
ucuaacauauguauuaagccaaacaugaguga

SEQ ID NO: 239050 - RNA, 32 nt, Human
ucuaacauccuggagaaaaauggcaguuugac

SEQ ID NO: 239051 - RNA, 32 nt, Human
ucuaacaugaaucacagcuucugccucauugg

SEQ ID NO: 239052 - RNA, 32 nt, Human
ucuaacaugcugaagaaaucaucugaggggga

SEQ ID NO: 239053 - RNA, 32 nt, Human
ucuaacauuuccugcucuaugccugcaucuuu

SEQ ID NO: 239054 - RNA, 32 nt, Human
ucuaaccaaagacaugccccacccuccuggag

SEQ ID NO: 239055 - RNA, 32 nt, Human
ucuaaccaaaguugacagacugugcgucuguc

SEQ ID NO: 239056 - RNA, 32 nt, Human
ucuaaccaagauaugcaaaagaugcauucagu

SEQ ID NO: 239057 - RNA, 32 nt, Human
ucuaaccaauugccuuuucuuguuaucugagc

SEQ ID NO: 239058 - RNA, 32 nt, Human
ucuaaccaauuugagccucugaagggagugcc

SEQ ID NO: 239059 - RNA, 32 nt, Human
ucuaaccaggcuggagccgaccccagacagac

SEQ ID NO: 239060 - RNA, 32 nt, Human
ucuaaccagugaucaggguaaagaggaugcgu

SEQ ID NO: 239061 - RNA, 32 nt, Human
ucuaaccauuuugcuuguuccuugauuuuuau

SEQ ID NO: 239062 - RNA, 32 nt, Human
ucuaacccggcucucccgaugugaaccgagcc

SEQ ID NO: 239063 - RNA, 32 nt, Human
ucuaacccucauugcugucuugccccaguuug

SEQ ID NO: 239064 - RNA, 32 nt, Human
ucuaacccuccccucccccuucccuucugguc

SEQ ID NO: 239065 - RNA, 32 nt, Human
ucuaacccuccuccagcccugcagccuccccu

SEQ ID NO: 239066 - RNA, 32 nt, Human
ucuaaccguaacacaaacacagcaaguuuuaa

SEQ ID NO: 239067 - RNA, 32 nt, Human
ucuaaccuaaccuuucccucugggguagagaa

SEQ ID NO: 239068 - RNA, 32 nt, Human
ucuaaccucagccaaacacagagcgggaguga

SEQ ID NO: 239069 - RNA, 32 nt, Human
ucuaaccugaaccagccuggcuuuucaaacac

SEQ ID NO: 239070 - RNA, 32 nt, Human
ucuaaccugacuggcacaucucagccuaacca

SEQ ID NO: 239071 - RNA, 24 nt, Human
ucuaaccugggcgacagagugaga

SEQ ID NO: 239072 - RNA, 32 nt, Human
ucuaaccuuccagaaucgcaaucccuucuccc

SEQ ID NO: 239073 - RNA, 32 nt, Human
ucuaaccuugauagaagaaccuuggguuacau

SEQ ID NO: 239074 - RNA, 32 nt, Human
ucuaacgaccagaguauugcccugccaccacu

SEQ ID NO: 239075 - RNA, 32 nt, Human
ucuaacgagccaagccaaaaagacugcaaugg

SEQ ID NO: 239076 - RNA, 32 nt, Human
ucuaacuaaccugguggggauguggagaaccu

SEQ ID NO: 239077 - RNA, 32 nt, Human
ucuaacuaguuuaaaaguacaggaaggaugau

SEQ ID NO: 239078 - RNA, 17 nt, Human
ucuaacuaugggacaag

SEQ ID NO: 239079 - RNA, 32 nt, Human
ucuaacucauauaauuuuucucagccaaucca

SEQ ID NO: 239080 - RNA, 19 nt, Human
ucuaacucaugccugucca

SEQ ID NO: 239081 - RNA, 32 nt, Human
ucuaacuccaugucugugguuucuuugaaccc

SEQ ID NO: 239082 - RNA, 23 nt, Human
ucuaacuccuggccucaagugau

SEQ ID NO: 239083 - RNA, 19 nt, Human
ucuaacuccugggcucaag

SEQ ID NO: 239084 - RNA, 32 nt, Human
ucuaacucugucucuucucucuuucccccaga

SEQ ID NO: 239085 - RNA, 31 nt, Human
ucuaacugacuucugcuuuccacggcgugug

SEQ ID NO: 239086 - RNA, 32 nt, Human
ucuaacugcucaacaggaaaugaaccuagaaa

SEQ ID NO: 239087 - RNA, 32 nt, Human
ucuaacugcucuggacugaaagugaugcauca

SEQ ID NO: 239088 - RNA, 32 nt, Human
ucuaacugcuuccccggacacccuccaccucu

SEQ ID NO: 239089 - RNA, 32 nt, Human
ucuaacuggacugcacguuggugacagcgucc

SEQ ID NO: 239090 - RNA, 32 nt, Human
ucuaacuggcagcugcuccaggggcugccagg

SEQ ID NO: 239091 - RNA, 32 nt, Human
ucuaacuguucuagugggaaugugggaaugga

SEQ ID NO: 239092 - RNA, 32 nt, Human
ucuaacuuaacauguugagucucugagagugc

SEQ ID NO: 239093 - RNA, 32 nt, Human
ucuaacuucucugaaaucaucuccuauuaagg

SEQ ID NO: 239094 - RNA, 32 nt, Human
ucuaacuugcugucugacucucucucagcucc

SEQ ID NO: 239095 - RNA, 32 nt, Human
ucuaacuuugcacaaauaaaccuguguagaaa

SEQ ID NO: 239096 - RNA, 32 nt, Human
ucuaagaaaugcugaaguaucggcauuacaug

SEQ ID NO: 239097 - RNA, 32 nt, Human
ucuaagaacaucugccaacagcuggguucaga

SEQ ID NO: 239098 - RNA, 32 nt, Human
ucuaagaagagaagacagggacacacaggaga

SEQ ID NO: 239099 - RNA, 22 nt, Human
ucuaagaagaggcugggugcag

SEQ ID NO: 239100 - RNA, 32 nt, Human
ucuaagacaaaucucucgggccuuuuauuuuu

SEQ ID NO: 239101 - RNA, 32 nt, Human
ucuaagacaggcuggaggaacagugcagacac

SEQ ID NO: 239102 - RNA, 32 nt, Human
ucuaagacccuccaccagcgucagagagacag

SEQ ID NO: 239103 - RNA, 32 nt, Human
ucuaagacccucccccaacagucugaccuugg

SEQ ID NO: 239104 - RNA, 32 nt, Human
ucuaagacucagcgagaggagcccgggaggag

SEQ ID NO: 239105 - RNA, 31 nt, Human
ucuaagaucauaaauacuaguggaaacucca

SEQ ID NO: 239106 - RNA, 32 nt, Human
ucuaagaucuuagauucucugugucuaagauu

SEQ ID NO: 239107 - RNA, 32 nt, Human
ucuaagauucaaggagcuuuucaguguuccac

SEQ ID NO: 239108 - RNA, 32 nt, Human
ucuaagcaaacaguccaaucagugagucauaa

SEQ ID NO: 239109 - RNA, 32 nt, Human
ucuaagcaagugaacucaucccuuguuuauaa

SEQ ID NO: 239110 - RNA, 32 nt, Human
ucuaagcaauccagcucaucagucuacuaguu

SEQ ID NO: 239111 - RNA, 32 nt, Human
ucuaagcaccaaucucccucugccaucagauu

SEQ ID NO: 239112 - RNA, 32 nt, Human
ucuaagcagcagcugagagagagcggagccua

SEQ ID NO: 239113 - RNA, 32 nt, Human
ucuaagcagucuggucaggaaccuugguuucu

SEQ ID NO: 239114 - RNA, 31 nt, Human
ucuaagcaguuucaucagcauuacuugggaa

SEQ ID NO: 239115 - RNA, 32 nt, Human
ucuaagcaucugcugguacaagucaauguggc

SEQ ID NO: 239116 - RNA, 32 nt, Human
ucuaagcauguggguucccccuuucugccagc

SEQ ID NO: 239117 - RNA, 32 nt, Human
ucuaagccaaggaaggcagagaauugcuggca

SEQ ID NO: 239118 - RNA, 32 nt, Human
ucuaagccacaaccccugucucaggucguuug

SEQ ID NO: 239119 - RNA, 32 nt, Human
ucuaagcccagccuaggaucugacacugaguc

SEQ ID NO: 239120 - RNA, 23 nt, Human
ucuaagccccuuucuccagggca

SEQ ID NO: 239121 - RNA, 32 nt, Human
ucuaagcccgggagguggagguugcagugagc

SEQ ID NO: 239122 - RNA, 32 nt, Human
ucuaagccuuucuaaucagcauuuaccuccca

SEQ ID NO: 239123 - RNA, 32 nt, Human
ucuaagcuacagccccucagccaaccacagac

SEQ ID NO: 239124 - RNA, 32 nt, Human
ucuaagcucuaugccagcauaucuucccugag

SEQ ID NO: 239125 - RNA, 32 nt, Human
ucuaagcucuucuucuuccuucauuggccucu

SEQ ID NO: 239126 - RNA, 32 nt, Human
ucuaagcuggacuuaccucuguggauucugaa

SEQ ID NO: 239127 - RNA, 32 nt, Human
ucuaagcuuucucuuccucccuuagggaauau

SEQ ID NO: 239128 - RNA, 32 nt, Human
ucuaaggacuccugagaauuccuguuacagua

SEQ ID NO: 239129 - RNA, 32 nt, Human
ucuaaggagauaauuuugccuuaaacagaaag

SEQ ID NO: 239130 - RNA, 32 nt, Human
ucuaaggagggcgcuggagcugauggaggugc

SEQ ID NO: 239131 - RNA, 32 nt, Human
ucuaaggaguagcaagucagugggaggacuuu

SEQ ID NO: 239132 - RNA, 18 nt, Human
ucuaaggagucucaggga

SEQ ID NO: 239133 - RNA, 23 nt, Human
ucuaaggauuuaaacagcuccac

SEQ ID NO: 239134 - RNA, 21 nt, Human
ucuaagggagcccucugcacu

SEQ ID NO: 239135 - RNA, 32 nt, Human
ucuaagggcugccuccccgccacuccuugucc

SEQ ID NO: 239136 - RNA, 32 nt, Human
ucuaaggguacaccucccuccaaacuacugca

SEQ ID NO: 239137 - RNA, 32 nt, Human
ucuaaggguagccauuauaagacuucaaaaga

SEQ ID NO: 239138 - RNA, 32 nt, Human
ucuaagguaauggcaagagcaaagguguggaa

SEQ ID NO: 239139 - RNA, 32 nt, Human
ucuaagguauuuuuagcccuugauccccuuug

SEQ ID NO: 239140 - RNA, 20 nt, Human
ucuaaggugacagagugaga

SEQ ID NO: 239141 - RNA, 32 nt, Human
ucuaaggugucauuucucccuccuggggugac

SEQ ID NO: 239142 - RNA, 32 nt, Human
ucuaaggugugucucuuuuccaaugagaaguc

SEQ ID NO: 239143 - RNA, 32 nt, Human
ucuaagguucuccuguuuucaccaucuauaau

SEQ ID NO: 239144 - RNA, 32 nt, Human
ucuaaguaagcaacagcaaggcuggucacagg

SEQ ID NO: 239145 - RNA, 22 nt, Human
ucuaaguacgucuguagcauga

SEQ ID NO: 239146 - RNA, 32 nt, Human
ucuaaguaucucagccuucauccauuaacucu

SEQ ID NO: 239147 - RNA, 32 nt, Human
ucuaaguccaggcagccugcaggcuggggacc

SEQ ID NO: 239148 - RNA, 32 nt, Human
ucuaagucuuugucccaccagggguugcagug

SEQ ID NO: 239149 - RNA, 32 nt, Human
ucuaaguggaaguucuuauagagaugcauuuc

SEQ ID NO: 239150 - RNA, 32 nt, Human
ucuaaguggacaaccaggcuccaggcugaugu

SEQ ID NO: 239151 - RNA, 32 nt, Human
ucuaaguguguauucuaugucugguuaaaugu

SEQ ID NO: 239152 - RNA, 32 nt, Human
ucuaaguuccucaagagaguccuuggcuuaaa

SEQ ID NO: 239153 - RNA, 32 nt, Human
ucuaaguuucaucacaaacuguguccaguuuc

SEQ ID NO: 239154 - RNA, 32 nt, Human
ucuaauaaaaauacaaaaauuagccaggcaug

SEQ ID NO: 239155 - RNA, 32 nt, Human
ucuaauaaaaauacaaaaauuagccaggcgug

SEQ ID NO: 239156 - RNA, 32 nt, Human
ucuaauaaaaauacaaaaauuagccgggcgug

SEQ ID NO: 239157 - RNA, 32 nt, Human
ucuaauaaaaauacgaaaaauuagcugggcau

SEQ ID NO: 239158 - RNA, 32 nt, Human
ucuaauaaguugaaauggucuuucucccuucc

SEQ ID NO: 239159 - RNA, 32 nt, Human
ucuaauaaucggguugggacuuaacuuuaagg

SEQ ID NO: 239160 - RNA, 32 nt, Human
ucuaauacaaauucacuugcggugucauucug

SEQ ID NO: 239161 - RNA, 32 nt, Human
ucuaauacaguauuuguugcauuuaaacaaac

SEQ ID NO: 239162 - RNA, 32 nt, Human
ucuaauaccaaagaggagguuuggcuuucugu

SEQ ID NO: 239163 - RNA, 32 nt, Human
ucuaauacuggcaucugggcucaaauugccau

SEQ ID NO: 239164 - RNA, 32 nt, Human
ucuaauagaguaagaauugaagaaaaguuaag

SEQ ID NO: 239165 - RNA, 32 nt, Human
ucuaauauuuugugaauuuaugacuuugccuu

SEQ ID NO: 239166 - RNA, 32 nt, Human
ucuaaucacaccacugcacuccagccugggca

SEQ ID NO: 239167 - RNA, 32 nt, Human
ucuaaucacaugcacuccuuuaccacagaggc

SEQ ID NO: 239168 - RNA, 32 nt, Human
ucuaaucagugagggugucaucagggaggacc

SEQ ID NO: 239169 - RNA, 32 nt, Human
ucuaauccaauacaaugcuaauaaaaugaaac

SEQ ID NO: 239170 - RNA, 32 nt, Human
ucuaaucccuuucugaguacucuggggcccug

SEQ ID NO: 239171 - RNA, 32 nt, Human
ucuaauccugcuucuacucucagcuuuaggac

SEQ ID NO: 239172 - RNA, 32 nt, Human
ucuaaucucaagucauuaggcugcaguagcau

SEQ ID NO: 239173 - RNA, 32 nt, Human
ucuaaucuccucuccaauucccacuccucaug

SEQ ID NO: 239174 - RNA, 32 nt, Human
ucuaaucucuucuguguuuuccuugccuuaac

SEQ ID NO: 239175 - RNA, 32 nt, Human
ucuaaucugcuucaguucauccuucuugcuac

SEQ ID NO: 239176 - RNA, 32 nt, Human
ucuaaucuuaaaggaauaaagcacugaauugg

SEQ ID NO: 239177 - RNA, 31 nt, Human
ucuaaugacaaaggaaguggugaucagucug

SEQ ID NO: 239178 - RNA, 32 nt, Human
ucuaaugaccagcucagccauuuaaaauauuu

SEQ ID NO: 239179 - RNA, 32 nt, Human
ucuaaugcacagaaauaauguuaaauagaaua

SEQ ID NO: 239180 - RNA, 32 nt, Human
ucuaaugccugaugaucugucacugucuccca

SEQ ID NO: 239181 - RNA, 32 nt, Human
ucuaaugcgagcagacagacccuguuaaccaa

SEQ ID NO: 239182 - RNA, 32 nt, Human
ucuaaugcucuucuucccacccuugaggcagc

SEQ ID NO: 239183 - RNA, 32 nt, Human
ucuaaugcugaagugacuuuugccagugccau

SEQ ID NO: 239184 - RNA, 32 nt, Human
ucuaauggaaaugaguagaauugcugaaaguc

SEQ ID NO: 239185 - RNA, 32 nt, Human
ucuaauggaauaugcguaguucccuggggccu

SEQ ID NO: 239186 - RNA, 32 nt, Human
ucuaauggccugguuaggcucaucucaucccu

SEQ ID NO: 239187 - RNA, 32 nt, Human
ucuaauggcucuuaauauauccuugaaaucgg

SEQ ID NO: 239188 - RNA, 32 nt, Human
ucuaaugggaccuuaaagaccaucugguauca

SEQ ID NO: 239189 - RNA, 32 nt, Human
ucuaaugggaguuggcuucugauucucauuca

SEQ ID NO: 239190 - RNA, 18 nt, Human
ucuaauguagcagcaugg

SEQ ID NO: 239191 - RNA, 32 nt, Human
ucuaauguuagcugugguuggaauugaccaag

SEQ ID NO: 239192 - RNA, 21 nt, Human
ucuaauguuauugcagcaugg

SEQ ID NO: 239193 - RNA, 32 nt, Human
ucuaauuaaaggcaccuucuuuacagcagggc

SEQ ID NO: 239194 - RNA, 32 nt, Human
ucuaauucaaagcucucucccaauauauuuac

SEQ ID NO: 239195 - RNA, 32 nt, Human
ucuaauucucagaacaacccugagagaaagau

SEQ ID NO: 239196 - RNA, 32 nt, Human
ucuaauucuuaauaaaacaaaugaguaucaua

SEQ ID NO: 239197 - RNA, 32 nt, Human
ucuaauugacauccuucucuucccaacuuuug

SEQ ID NO: 239198 - RNA, 32 nt, Human
ucuaauugcgccacugcacuccagccugagcg

SEQ ID NO: 239199 - RNA, 32 nt, Human
ucuaauuggcauguguaggcugcucugugacu

SEQ ID NO: 239200 - RNA, 32 nt, Human
ucuaauuguaacucaacacacauugagguaug

SEQ ID NO: 239201 - RNA, 32 nt, Human
ucuaauuuauacaaucauucuauacuuaaagg

SEQ ID NO: 239202 - RNA, 32 nt, Human
ucuaauuuauuuuucauuucagggggcaaaua

SEQ ID NO: 239203 - RNA, 32 nt, Human
ucuacaaaaacuacaaaaauuagccgggugug

SEQ ID NO: 239204 - RNA, 32 nt, Human
ucuacaaaaaguacaaaaauuagccgggcaug

SEQ ID NO: 239205 - RNA, 32 nt, Human
ucuacaaaaauaagaaaauuagccagguguag

SEQ ID NO: 239206 - RNA, 32 nt, Human
ucuacaaaaauacaaaaaucagccaggcgugg

SEQ ID NO: 239207 - RNA, 32 nt, Human
ucuacaaaaauacaaaaauuagccaggcguga

SEQ ID NO: 239208 - RNA, 32 nt, Human
ucuacaaaaauacaaaaauuagccaggcgugg

SEQ ID NO: 239209 - RNA, 32 nt, Human
ucuacaaaaauacaaaaauuagccaggugugg

SEQ ID NO: 239210 - RNA, 32 nt, Human
ucuacaaaaauacaaaaauuagccagguuugg

SEQ ID NO: 239211 - RNA, 32 nt, Human
ucuacaaaaauacaaaaauuagcugggcgugg

SEQ ID NO: 239212 - RNA, 32 nt, Human
ucuacaaaaauacaaaaauuaggccgggugcc

SEQ ID NO: 239213 - RNA, 32 nt, Human
ucuacaaaaauacaaaaauuaggugggugugg

SEQ ID NO: 239214 - RNA, 32 nt, Human
ucuacaaaaauacaaaacuuagcugggugugg

SEQ ID NO: 239215 - RNA, 32 nt, Human
ucuacaaaaauacaaaauuagccagguauggu

SEQ ID NO: 239216 - RNA, 32 nt, Human
ucuacaaaagagauuucuuucccuuuuauauu

SEQ ID NO: 239217 - RNA, 32 nt, Human
ucuacaaaaguacaaaaauuagccaggcgugg

SEQ ID NO: 239218 - RNA, 32 nt, Human
ucuacaaaauauacaaaaauuagccaggcaug

SEQ ID NO: 239219 - RNA, 32 nt, Human
ucuacaaacaauacaaaaauuagccaggcaug

SEQ ID NO: 239220 - RNA, 32 nt, Human
ucuacaaacauggucuagcuucugucucuccg

SEQ ID NO: 239221 - RNA, 32 nt, Human
ucuacaaauaaauaaaaauuagcugggcaauu

SEQ ID NO: 239222 - RNA, 32 nt, Human
ucuacaaaucuauaaaguuucuagggcauuga

SEQ ID NO: 239223 - RNA, 32 nt, Human
ucuacaacaacaaaaacguuccccuaagccac

SEQ ID NO: 239224 - RNA, 32 nt, Human
ucuacaacacagaguacugacucugccugguu

SEQ ID NO: 239225 - RNA, 32 nt, Human
ucuacaacugauugcaacagacuguugaguua

SEQ ID NO: 239226 - RNA, 32 nt, Human
ucuacaagaguaugcaccuggacucuccagug

SEQ ID NO: 239227 - RNA, 32 nt, Human
ucuacaagaguugugguuuuccaucugauccu

SEQ ID NO: 239228 - RNA, 32 nt, Human
ucuacaagccaagaagagaggccucaccagac
